United States Patent Application Publication US 2006/0003322 A1 - sequence listing, part 30

SEQ ID NO: 1283472 - RNA, 25 nt, Human
uauaaaaguaaacauacaagguacc

SEQ ID NO: 1283473 - RNA, 29 nt, Human
uaugugcauggcacugcauuauguguaua

SEQ ID NO: 1283474 - RNA, 22 nt, Human
uauguguauacccgugcaugca

SEQ ID NO: 1283475 - RNA, 19 nt, Human
uauuuuagaauacugccug

SEQ ID NO: 1283476 - RNA, 23 nt, Human
ucaaagaaugcuuuaaaaugcaa

SEQ ID NO: 1283477 - RNA, 27 nt, Human
ucagaguggcucccgccggcucuuucc

SEQ ID NO: 1283478 - RNA, 25 nt, Human
uccauauuagccaucuagucaguuc

SEQ ID NO: 1283479 - RNA, 22 nt, Human
uccccggcccgagggcaagccc

SEQ ID NO: 1283480 - RNA, 24 nt, Human
ucuccagcuggggccgcagggggc

SEQ ID NO: 1283481 - RNA, 23 nt, Human
ucucccuagcaauggacaaacuc

SEQ ID NO: 1283482 - RNA, 23 nt, Human
ucuucuguaaacagagcuugagu

SEQ ID NO: 1283483 - RNA, 23 nt, Human
ugacaguacgagggaacucuagu

SEQ ID NO: 1283484 - RNA, 21 nt, Human
ugaguagucaaaaucagacac

SEQ ID NO: 1283485 - RNA, 26 nt, Human
ugcacaggccgcacaggguccaggcc

SEQ ID NO: 1283486 - RNA, 20 nt, Human
ugcauagaaaaaaaagaagc

SEQ ID NO: 1283487 - RNA, 24 nt, Human
ugcaugcagaaaaccagcccugaa

SEQ ID NO: 1283488 - RNA, 21 nt, Human
ugccacuagcauccugggagg

SEQ ID NO: 1283489 - RNA, 25 nt, Human
ugccauaaaauucuuaagucuggaa

SEQ ID NO: 1283490 - RNA, 20 nt, Human
ugcugccacugccugcugcc

SEQ ID NO: 1283491 - RNA, 22 nt, Human
ugcuuccugucccuucgguggc

SEQ ID NO: 1283492 - RNA, 21 nt, Human
uggaugaguguccugaaagca

SEQ ID NO: 1283493 - RNA, 19 nt, Human
uggcaguggugccacuagc

SEQ ID NO: 1283494 - RNA, 22 nt, Human
ugggagcaaugccaacccuggu

SEQ ID NO: 1283495 - RNA, 25 nt, Human
uguaaacagagcuugaguagucaaa

SEQ ID NO: 1283496 - RNA, 20 nt, Human
ugucccuucgguggccucug

SEQ ID NO: 1283497 - RNA, 23 nt, Human
ugugccaggcacuugcuuugugc

SEQ ID NO: 1283498 - RNA, 22 nt, Human
cuauauggugagagaaacaagg

SEQ ID NO: 1283499 - RNA, 18 nt, Human
ggugagagaaacaaggaa

SEQ ID NO: 1283500 - RNA, 22 nt, Human
aaaaagaagcacaguacuguaa

SEQ ID NO: 1283501 - RNA, 23 nt, Human
aaaauauacaucugaaguacaag

SEQ ID NO: 1283502 - RNA, 20 nt, Human
aaauugccagggaagcauaa

SEQ ID NO: 1283503 - RNA, 19 nt, Human
aacauaaaagcaagcagga

SEQ ID NO: 1283504 - RNA, 24 nt, Human
aacuggaaggggucgagaaggguc

SEQ ID NO: 1283505 - RNA, 23 nt, Human
aagaagaagauaaguacauugaa

SEQ ID NO: 1283506 - RNA, 18 nt, Human
aagaagauaaguacauug

SEQ ID NO: 1283507 - RNA, 22 nt, Human
acaccaacauaaaagcaagcag

SEQ ID NO: 1283508 - RNA, 20 nt, Human
accaccuuuagcuccaagcc

SEQ ID NO: 1283509 - RNA, 20 nt, Human
acucgccuggcagccucaac

SEQ ID NO: 1283510 - RNA, 24 nt, Human
agcauaaaagcaacauuggaaaga

SEQ ID NO: 1283511 - RNA, 18 nt, Human
agcuuaauaaggcugaca

SEQ ID NO: 1283512 - RNA, 20 nt, Human
aggaaaaacuuucauggaga

SEQ ID NO: 1283513 - RNA, 25 nt, Human
aggugagagaaaugacgaucauuuu

SEQ ID NO: 1283514 - RNA, 23 nt, Human
auaaaagcaagcaggaucuccca

SEQ ID NO: 1283515 - RNA, 24 nt, Human
auaguguaauggguaguuuccuuc

SEQ ID NO: 1283516 - RNA, 20 nt, Human
aucauuaguccauuuaaaau

SEQ ID NO: 1283517 - RNA, 20 nt, Human
auggagaggugguguccaca

SEQ ID NO: 1283518 - RNA, 19 nt, Human
auggcgaugcugagagugg

SEQ ID NO: 1283519 - RNA, 18 nt, Human
auguaucccacaacauac

SEQ ID NO: 1283520 - RNA, 26 nt, Human
caacauaaaagcaagcaggaucuccc

SEQ ID NO: 1283521 - RNA, 23 nt, Human
caccaacauaaaagcaagcagga

SEQ ID NO: 1283522 - RNA, 23 nt, Human
caccuccagcucccgggcggggg

SEQ ID NO: 1283523 - RNA, 24 nt, Human
cagaaaggccugacucgccuggca

SEQ ID NO: 1283524 - RNA, 18 nt, Human
cagcucccgggcggggga

SEQ ID NO: 1283525 - RNA, 21 nt, Human
caggcgagguccagaaaggcc

SEQ ID NO: 1283526 - RNA, 18 nt, Human
caguacuguaauaagacc

SEQ ID NO: 1283527 - RNA, 20 nt, Human
caguuucccgccgccuaggg

SEQ ID NO: 1283528 - RNA, 22 nt, Human
ccaacauaaaagcaagcaggau

SEQ ID NO: 1283529 - RNA, 22 nt, Human
ccacaaagauggcgaugcugag

SEQ ID NO: 1283530 - RNA, 21 nt, Human
ccaccaccuuuagcuccaagc

SEQ ID NO: 1283531 - RNA, 20 nt, Human
ccagaaaggccugacucgcc

SEQ ID NO: 1283532 - RNA, 24 nt, Human
cccccuggcaguuucccgccgccu

SEQ ID NO: 1283533 - RNA, 21 nt, Human
ccccggggaggaccuccuggc

SEQ ID NO: 1283534 - RNA, 21 nt, Human
ccccguacggccgcuuagacg

SEQ ID NO: 1283535 - RNA, 20 nt, Human
cccggagcugcgccagggaa

SEQ ID NO: 1283536 - RNA, 19 nt, Human
cccguacggccgcuuagac

SEQ ID NO: 1283537 - RNA, 18 nt, Human
ccgcagccguugacuagc

SEQ ID NO: 1283538 - RNA, 22 nt, Human
ccgcgccugcaguucgugcacc

SEQ ID NO: 1283539 - RNA, 18 nt, Human
ccuccuggcgcccccugg

SEQ ID NO: 1283540 - RNA, 21 nt, Human
ccucuggauaaagauggaagc

SEQ ID NO: 1283541 - RNA, 24 nt, Human
ccugacucgccuggcagccucaac

SEQ ID NO: 1283542 - RNA, 18 nt, Human
ccugcaguucgugcaccu

SEQ ID NO: 1283543 - RNA, 19 nt, Human
ccugcaguucgugcaccuc

SEQ ID NO: 1283544 - RNA, 27 nt, Human
cgugcaccucuucccggagcugcgcca

SEQ ID NO: 1283545 - RNA, 19 nt, Human
cugaaguacaaggaaagga

SEQ ID NO: 1283546 - RNA, 22 nt, Human
cuggcaguuucccgccgccuag

SEQ ID NO: 1283547 - RNA, 18 nt, Human
gacagagugcaaugaagg

SEQ ID NO: 1283548 - RNA, 18 nt, Human
gaugaagaauaagaagaa

SEQ ID NO: 1283549 - RNA, 22 nt, Human
gcaaugaagggccuucuaucau

SEQ ID NO: 1283550 - RNA, 20 nt, Human
gccaccaccuuuagcuccaa

SEQ ID NO: 1283551 - RNA, 21 nt, Human
gccugucauucauaaucaucc

SEQ ID NO: 1283552 - RNA, 18 nt, Human
gcuuagacgggcuggggc

SEQ ID NO: 1283553 - RNA, 19 nt, Human
gcuuagacgggcuggggcg

SEQ ID NO: 1283554 - RNA, 22 nt, Human
ggaaagacagagugcaaugaag

SEQ ID NO: 1283555 - RNA, 21 nt, Human
ggcagccucaacggacuuguc

SEQ ID NO: 1283556 - RNA, 20 nt, Human
ggcuggggcgggaagauugc

SEQ ID NO: 1283557 - RNA, 20 nt, Human
gggauccuccccggggagga

SEQ ID NO: 1283558 - RNA, 21 nt, Human
gggucaauuucaggcacagcc

SEQ ID NO: 1283559 - RNA, 22 nt, Human
ggucgagaagggucuuggccac

SEQ ID NO: 1283560 - RNA, 19 nt, Human
gucauuaacaaagaugaag

SEQ ID NO: 1283561 - RNA, 24 nt, Human
guuaaaauauacaucugaaguaca

SEQ ID NO: 1283562 - RNA, 20 nt, Human
guuuuugaauuucauuucuc

SEQ ID NO: 1283563 - RNA, 23 nt, Human
uaaauaagccaaagggugauugu

SEQ ID NO: 1283564 - RNA, 21 nt, Human
uaccaggcagcuaugauuacc

SEQ ID NO: 1283565 - RNA, 24 nt, Human
uagccaaaaguugaguuuagauac

SEQ ID NO: 1283566 - RNA, 21 nt, Human
uaggaaaaacuuucauggaga

SEQ ID NO: 1283567 - RNA, 21 nt, Human
uagugcgaaaagucaucuccc

SEQ ID NO: 1283568 - RNA, 21 nt, Human
uaucuuauuuuuaagugucug

SEQ ID NO: 1283569 - RNA, 22 nt, Human
ucaaaaugaaacuaaggguaac

SEQ ID NO: 1283570 - RNA, 23 nt, Human
ucaggcgaauguggucugaaacg

SEQ ID NO: 1283571 - RNA, 20 nt, Human
uccaaacaucaaaaugaaac

SEQ ID NO: 1283572 - RNA, 22 nt, Human
uccacaccaccaggcacuaccu

SEQ ID NO: 1283573 - RNA, 19 nt, Human
uccaugguugaaaaagaag

SEQ ID NO: 1283574 - RNA, 21 nt, Human
uccaugguugaaaaagaagca

SEQ ID NO: 1283575 - RNA, 19 nt, Human
uccauuuaaaauaaagauu

SEQ ID NO: 1283576 - RNA, 21 nt, Human
ucugaaguacaaggaaaggau

SEQ ID NO: 1283577 - RNA, 22 nt, Human
ucuucugaaauuugcuugguuc

SEQ ID NO: 1283578 - RNA, 20 nt, Human
ugaaacgccuaagauuuuag

SEQ ID NO: 1283579 - RNA, 26 nt, Human
ugaagaacaaucccaucauuagucca

SEQ ID NO: 1283580 - RNA, 22 nt, Human
ugaaguaggaauaauaaagucc

SEQ ID NO: 1283581 - RNA, 19 nt, Human
ugacacaccacauugugcc

SEQ ID NO: 1283582 - RNA, 23 nt, Human
ugacacaccacauugugccauag

SEQ ID NO: 1283583 - RNA, 19 nt, Human
ugacucgccuggcagccuc

SEQ ID NO: 1283584 - RNA, 23 nt, Human
ugccagggaagcauaaaagcaac

SEQ ID NO: 1283585 - RNA, 19 nt, Human
ugcuauaagaucacucagg

SEQ ID NO: 1283586 - RNA, 23 nt, Human
ugcuggggaaccaccgcgccugc

SEQ ID NO: 1283587 - RNA, 23 nt, Human
uggguuuacuccuuguuucuuca

SEQ ID NO: 1283588 - RNA, 22 nt, Human
uuaacaaagaugaagaauaaga

SEQ ID NO: 1283589 - RNA, 19 nt, Human
uucccggagcugcgccagg

SEQ ID NO: 1283590 - RNA, 19 nt, Human
uucgugcaccucuucccgg

SEQ ID NO: 1283591 - RNA, 18 nt, Human
uucuggugacauuccagc

SEQ ID NO: 1283592 - RNA, 21 nt, Human
uuggaaagacagagugcaaug

SEQ ID NO: 1283593 - RNA, 23 nt, Human
uuucaggcacagcccauccgagu

SEQ ID NO: 1283594 - RNA, 18 nt, Human
uuugaauuucauuucucu

SEQ ID NO: 1283595 - RNA, 26 nt, Human
aaaaacuagugaagguucuugagcaa

SEQ ID NO: 1283596 - RNA, 24 nt, Human
aaaacuagugaagguucuugagca

SEQ ID NO: 1283597 - RNA, 18 nt, Human
aacauugugcaaguagau

SEQ ID NO: 1283598 - RNA, 22 nt, Human
agaaauaaaaaacuagugaagg

SEQ ID NO: 1283599 - RNA, 21 nt, Human
agaugacagcaagaaugugga

SEQ ID NO: 1283600 - RNA, 23 nt, Human
ggccuuaaagaaggguaaauguu

SEQ ID NO: 1283601 - RNA, 21 nt, Human
guggauggcugagaugacagc

SEQ ID NO: 1283602 - RNA, 20 nt, Human
ugaauaaauaagugaaucaa

SEQ ID NO: 1283603 - RNA, 23 nt, Human
ugacgugggugguguggauggcu

SEQ ID NO: 1283604 - RNA, 23 nt, Human
ugacugacagaacucuaauacag

SEQ ID NO: 1283605 - RNA, 19 nt, Human
ugagaugacagcaagaaug

SEQ ID NO: 1283606 - RNA, 21 nt, Human
ugagcaaaacacuaauggauu

SEQ ID NO: 1283607 - RNA, 20 nt, Human
uguuaugagggaguaaauuu

SEQ ID NO: 1283608 - RNA, 22 nt, Human
uuagggccuuaaagaaggguaa

SEQ ID NO: 1283609 - RNA, 20 nt, Human
uucacuguacauuucuaaac

SEQ ID NO: 1283610 - RNA, 20 nt, Human
uuugaggaacauugugcaag

SEQ ID NO: 1283611 - RNA, 20 nt, Human
accugcuggcuguaaguugc

SEQ ID NO: 1283612 - RNA, 19 nt, Human
agagcuccugccagccccg

SEQ ID NO: 1283613 - RNA, 23 nt, Human
agcuggaucccgcuucaccuggc

SEQ ID NO: 1283614 - RNA, 21 nt, Human
agggaggccagggccccaggg

SEQ ID NO: 1283615 - RNA, 22 nt, Human
caccuggcccucaacucugcgu

SEQ ID NO: 1283616 - RNA, 19 nt, Human
cagcugccgcagcucacag

SEQ ID NO: 1283617 - RNA, 23 nt, Human
cagcuuccaguuccccagccccu

SEQ ID NO: 1283618 - RNA, 19 nt, Human
ccagccccgccggcucucg

SEQ ID NO: 1283619 - RNA, 20 nt, Human
ccagccccgccggcucucgg

SEQ ID NO: 1283620 - RNA, 18 nt, Human
ccagggccccagggcgcg

SEQ ID NO: 1283621 - RNA, 25 nt, Human
ccagggcgcggaccagagccgagaa

SEQ ID NO: 1283622 - RNA, 19 nt, Human
cccgcgccgccgccucugc

SEQ ID NO: 1283623 - RNA, 20 nt, Human
cccgcugggggcgcccgggc

SEQ ID NO: 1283624 - RNA, 21 nt, Human
cccucccggagcgcgcucgcu

SEQ ID NO: 1283625 - RNA, 18 nt, Human
ccgcgccgccgccucugc

SEQ ID NO: 1283626 - RNA, 20 nt, Human
ccgcgccgccgccucugcuc

SEQ ID NO: 1283627 - RNA, 21 nt, Human
cgccucugcucagcugccgca

SEQ ID NO: 1283628 - RNA, 18 nt, Human
cgggaacucucucggccc

SEQ ID NO: 1283629 - RNA, 19 nt, Human
cucgcuccgccgcaacaga

SEQ ID NO: 1283630 - RNA, 19 nt, Human
cuuccaguuccccagcccc

SEQ ID NO: 1283631 - RNA, 18 nt, Human
gaccagagccgagaaggc

SEQ ID NO: 1283632 - RNA, 19 nt, Human
gcaacagacgugggcucac

SEQ ID NO: 1283633 - RNA, 20 nt, Human
gcccagcuuccaguucccca

SEQ ID NO: 1283634 - RNA, 20 nt, Human
gcccgagagcuccugccagc

SEQ ID NO: 1283635 - RNA, 20 nt, Human
gcucgcuccgccgcaacaga

SEQ ID NO: 1283636 - RNA, 19 nt, Human
ggaggccagggccccaggg

SEQ ID NO: 1283637 - RNA, 18 nt, Human
gggagaccguccgcgaag

SEQ ID NO: 1283638 - RNA, 20 nt, Human
ucaccgggcgccucccggaa

SEQ ID NO: 1283639 - RNA, 19 nt, Human
uccccagccccuccaggga

SEQ ID NO: 1283640 - RNA, 18 nt, Human
ucgaaaagggcucucagc

SEQ ID NO: 1283641 - RNA, 22 nt, Human
ucgaagggguuggggugaagug

SEQ ID NO: 1283642 - RNA, 19 nt, Human
ugaaguggggagcuggauc

SEQ ID NO: 1283643 - RNA, 18 nt, Human
ugcaggucccgcgccgcc

SEQ ID NO: 1283644 - RNA, 23 nt, Human
uggcccucaacucugcguuguuu

SEQ ID NO: 1283645 - RNA, 21 nt, Human
uuggggugaaguggggagcug

SEQ ID NO: 1283646 - RNA, 18 nt, Human
aaacaaagacucaugaac

SEQ ID NO: 1283647 - RNA, 22 nt, Human
aaagagcugaaugacaacaaac

SEQ ID NO: 1283648 - RNA, 20 nt, Human
aaaugggguucaagaagccc

SEQ ID NO: 1283649 - RNA, 21 nt, Human
aaauuagagcagcuggcaggu

SEQ ID NO: 1283650 - RNA, 19 nt, Human
aacaagcacuuaaugagca

SEQ ID NO: 1283651 - RNA, 21 nt, Human
aagaagcccucacaucagaac

SEQ ID NO: 1283652 - RNA, 18 nt, Human
aagaaguuauuuaccagu

SEQ ID NO: 1283653 - RNA, 18 nt, Human
acagugcccccacccucc

SEQ ID NO: 1283654 - RNA, 18 nt, Human
acaugggcuuggugauuu

SEQ ID NO: 1283655 - RNA, 22 nt, Human
accaagugaggagacacagccc

SEQ ID NO: 1283656 - RNA, 22 nt, Human
accaguagaacaugguuggcug

SEQ ID NO: 1283657 - RNA, 22 nt, Human
accaugugaccgguccugggaa

SEQ ID NO: 1283658 - RNA, 21 nt, Human
acccaggaugaccauuuugac

SEQ ID NO: 1283659 - RNA, 18 nt, Human
acuuucccaggcacaugg

SEQ ID NO: 1283660 - RNA, 20 nt, Human
agaacaacaagagguugaag

SEQ ID NO: 1283661 - RNA, 25 nt, Human
agagaacaacaagagguugaaggug

SEQ ID NO: 1283662 - RNA, 19 nt, Human
agagcagcuggcagguuac

SEQ ID NO: 1283663 - RNA, 22 nt, Human
agaggagggaagaggagacagu

SEQ ID NO: 1283664 - RNA, 23 nt, Human
agcccaaaauggugggagaaaga

SEQ ID NO: 1283665 - RNA, 20 nt, Human
aggaggaaaaagcccagaua

SEQ ID NO: 1283666 - RNA, 21 nt, Human
aggcacaccugugucugggau

SEQ ID NO: 1283667 - RNA, 18 nt, Human
aggcacauggaccugggc

SEQ ID NO: 1283668 - RNA, 22 nt, Human
aggcuuuggaaagaaaugagcu

SEQ ID NO: 1283669 - RNA, 18 nt, Human
caaacaaagacucaugaa

SEQ ID NO: 1283670 - RNA, 18 nt, Human
caagagguugaagguguc

SEQ ID NO: 1283671 - RNA, 23 nt, Human
caagugaggagacacagccccug

SEQ ID NO: 1283672 - RNA, 20 nt, Human
caauagagauaaucugugcc

SEQ ID NO: 1283673 - RNA, 22 nt, Human
cacaaacaaagacucaugaaca

SEQ ID NO: 1283674 - RNA, 19 nt, Human
caccucaguuccuaaaugg

SEQ ID NO: 1283675 - RNA, 18 nt, Human
cagaucccagagaaccag

SEQ ID NO: 1283676 - RNA, 21 nt, Human
cagcuucuuuuagagaacaac

SEQ ID NO: 1283677 - RNA, 19 nt, Human
cagggaguugacacccaag

SEQ ID NO: 1283678 - RNA, 21 nt, Human
ccaaaauggugggagaaagaa

SEQ ID NO: 1283679 - RNA, 24 nt, Human
ccagcuucuuuuagagaacaacaa

SEQ ID NO: 1283680 - RNA, 22 nt, Human
cccacaaacaaagacucaugaa

SEQ ID NO: 1283681 - RNA, 24 nt, Human
cccauuccuccccuccccuuuccc

SEQ ID NO: 1283682 - RNA, 26 nt, Human
ccccauuccuccccuccccuuuccca

SEQ ID NO: 1283683 - RNA, 20 nt, Human
ccucaguuucccccaucugc

SEQ ID NO: 1283684 - RNA, 19 nt, Human
ccuccccuccccuuuccca

SEQ ID NO: 1283685 - RNA, 24 nt, Human
ccuggaugagcuacacagaaagua

SEQ ID NO: 1283686 - RNA, 21 nt, Human
cuacaggguccgggcuuuucu

SEQ ID NO: 1283687 - RNA, 19 nt, Human
cuccaaagagcugcucuuc

SEQ ID NO: 1283688 - RNA, 22 nt, Human
cugugaccacccaggaugacca

SEQ ID NO: 1283689 - RNA, 22 nt, Human
cuuccucccuccagcuucuuuu

SEQ ID NO: 1283690 - RNA, 22 nt, Human
cuugauugagggguuggaugac

SEQ ID NO: 1283691 - RNA, 22 nt, Human
gaaaaggcuggccagaaacuug

SEQ ID NO: 1283692 - RNA, 20 nt, Human
gacucaugaacauuucacuu

SEQ ID NO: 1283693 - RNA, 19 nt, Human
gcuuccucccuccagcuuc

SEQ ID NO: 1283694 - RNA, 19 nt, Human
guagaacaugguuggcugc

SEQ ID NO: 1283695 - RNA, 26 nt, Human
uaaauggaaucuuuggggguguauaa

SEQ ID NO: 1283696 - RNA, 18 nt, Human
uaaguaaagcugauugug

SEQ ID NO: 1283697 - RNA, 22 nt, Human
ucagacaggaggaaaaagccca

SEQ ID NO: 1283698 - RNA, 20 nt, Human
uccaaauuagagcagcuggc

SEQ ID NO: 1283699 - RNA, 24 nt, Human
ucccacaaacaaagacucaugaac

SEQ ID NO: 1283700 - RNA, 25 nt, Human
uccccuccccuuucccacaaacaaa

SEQ ID NO: 1283701 - RNA, 21 nt, Human
uccgggcuuuucuccaacccu

SEQ ID NO: 1283702 - RNA, 18 nt, Human
uccucaguuucccccauc

SEQ ID NO: 1283703 - RNA, 22 nt, Human
ucucaggcaaagccaaagagcu

SEQ ID NO: 1283704 - RNA, 23 nt, Human
ugaaaccaagugaggagacacag

SEQ ID NO: 1283705 - RNA, 22 nt, Human
ugaaggugucaucuuuuuucuu

SEQ ID NO: 1283706 - RNA, 25 nt, Human
ugaaugggcuuccucccuccagcuu

SEQ ID NO: 1283707 - RNA, 19 nt, Human
ugacaaauacuucccaaga

SEQ ID NO: 1283708 - RNA, 19 nt, Human
ugagugaaaacguucauuu

SEQ ID NO: 1283709 - RNA, 23 nt, Human
ugcauggccuggaugagcuacac

SEQ ID NO: 1283710 - RNA, 30 nt, Human
ugccuucacccauacaauagagauaaucuu

SEQ ID NO: 1283711 - RNA, 23 nt, Human
uggaagaaguuauuuaccaguga

SEQ ID NO: 1283712 - RNA, 21 nt, Human
uggccagaaacuugaaugggc

SEQ ID NO: 1283713 - RNA, 23 nt, Human
uggccagaaacuugaaugggcuu

SEQ ID NO: 1283714 - RNA, 25 nt, Human
ugggaaaaggcuggccagaaacuug

SEQ ID NO: 1283715 - RNA, 21 nt, Human
ugggagaaagaauaggcuuug

SEQ ID NO: 1283716 - RNA, 19 nt, Human
ugggagugaaguagaggaa

SEQ ID NO: 1283717 - RNA, 22 nt, Human
ugggcuuccucccuccagcuuc

SEQ ID NO: 1283718 - RNA, 23 nt, Human
ugggucagacaggaggaaaaagc

SEQ ID NO: 1283719 - RNA, 19 nt, Human
uggugaugucagcccaaaa

SEQ ID NO: 1283720 - RNA, 19 nt, Human
uucaaaugggguucaagaa

SEQ ID NO: 1283721 - RNA, 21 nt, Human
uucccaggcacauggaccugg

SEQ ID NO: 1283722 - RNA, 23 nt, Human
uugaaauaaaaaugaacgugugc

SEQ ID NO: 1283723 - RNA, 19 nt, Human
uugaaggugucaucuuuuu

SEQ ID NO: 1283724 - RNA, 21 nt, Human
uuucccacaaacaaagacuca

SEQ ID NO: 1283725 - RNA, 24 nt, Human
aaaucagcugcuguccagagcuag

SEQ ID NO: 1283726 - RNA, 19 nt, Human
aaggcgggugggagcucac

SEQ ID NO: 1283727 - RNA, 19 nt, Human
agacacucccucuccuggg

SEQ ID NO: 1283728 - RNA, 22 nt, Human
caaaggaaucguaaacucaugu

SEQ ID NO: 1283729 - RNA, 25 nt, Human
caacagagaagacuccagccugaug

SEQ ID NO: 1283730 - RNA, 19 nt, Human
caccuggaaggagacacuc

SEQ ID NO: 1283731 - RNA, 25 nt, Human
caucuucacugcaaggcggguggga

SEQ ID NO: 1283732 - RNA, 19 nt, Human
cggcgucucuauccugcug

SEQ ID NO: 1283733 - RNA, 22 nt, Human
cuauccugcugcuuucucugac

SEQ ID NO: 1283734 - RNA, 20 nt, Human
gaggacaacgaugaagaaac

SEQ ID NO: 1283735 - RNA, 18 nt, Human
gagggccuggaagacacg

SEQ ID NO: 1283736 - RNA, 21 nt, Human
gccuaaaaucagcugcugucc

SEQ ID NO: 1283737 - RNA, 23 nt, Human
gccucagagauucucccaguccu

SEQ ID NO: 1283738 - RNA, 18 nt, Human
guccagagcuagcaccug

SEQ ID NO: 1283739 - RNA, 21 nt, Human
uaaacucaugugaccagcagg

SEQ ID NO: 1283740 - RNA, 21 nt, Human
ucagcugcuguccagagcuag

SEQ ID NO: 1283741 - RNA, 19 nt, Human
ucuauccugcugcuuucuc

SEQ ID NO: 1283742 - RNA, 19 nt, Human
ucuaugggaccugagucca

SEQ ID NO: 1283743 - RNA, 18 nt, Human
ucucccaguccugccacc

SEQ ID NO: 1283744 - RNA, 18 nt, Human
ucugacugcaucuuccuc

SEQ ID NO: 1283745 - RNA, 18 nt, Human
ucuuccucuguuccuugg

SEQ ID NO: 1283746 - RNA, 18 nt, Human
ugcugugacccacauaua

SEQ ID NO: 1283747 - RNA, 19 nt, Human
uggagggcacaagcugugg

SEQ ID NO: 1283748 - RNA, 20 nt, Human
uguccagagcuagcaccugg

SEQ ID NO: 1283749 - RNA, 27 nt, Human
aaaaagacauaagccaccuucuucagc

SEQ ID NO: 1283750 - RNA, 23 nt, Human
aaacacuuuaaaagaagugauuc

SEQ ID NO: 1283751 - RNA, 20 nt, Human
aagggcccaagauugggcug

SEQ ID NO: 1283752 - RNA, 19 nt, Human
acucucauuccuacuccug

SEQ ID NO: 1283753 - RNA, 18 nt, Human
agcuggacuggugguauu

SEQ ID NO: 1283754 - RNA, 20 nt, Human
aggaaaaagacauaagccaa

SEQ ID NO: 1283755 - RNA, 21 nt, Human
aggaaggagaugugagcccca

SEQ ID NO: 1283756 - RNA, 22 nt, Human
aggauugguagucuguuuggau

SEQ ID NO: 1283757 - RNA, 24 nt, Human
aggauugguagucuguuuggauga

SEQ ID NO: 1283758 - RNA, 23 nt, Human
agguuuucuaaaugaugcagcuu

SEQ ID NO: 1283759 - RNA, 22 nt, Human
aguaggaacuggucccacacgg

SEQ ID NO: 1283760 - RNA, 19 nt, Human
auccuuggacaagcauugg

SEQ ID NO: 1283761 - RNA, 18 nt, Human
augauacuuuugggcaau

SEQ ID NO: 1283762 - RNA, 24 nt, Human
augaugauggagauaaacaaagcc

SEQ ID NO: 1283763 - RNA, 22 nt, Human
augugaggguuuaaucuguaug

SEQ ID NO: 1283764 - RNA, 21 nt, Human
caaagccaccacugccaaaga

SEQ ID NO: 1283765 - RNA, 23 nt, Human
caauccauuuggaagaaagcaau

SEQ ID NO: 1283766 - RNA, 21 nt, Human
caccacugccaaagacucuau

SEQ ID NO: 1283767 - RNA, 23 nt, Human
cagggcgggaccaaaauuuuggc

SEQ ID NO: 1283768 - RNA, 19 nt, Human
cauuaauuaccagaggggu

SEQ ID NO: 1283769 - RNA, 20 nt, Human
ccaaagcuggacugguggua

SEQ ID NO: 1283770 - RNA, 23 nt, Human
ccaaggcaaguauaauaauuaau

SEQ ID NO: 1283771 - RNA, 22 nt, Human
ccaguccccuucuauuuuacaa

SEQ ID NO: 1283772 - RNA, 19 nt, Human
cccacacgggaaaaagagu

SEQ ID NO: 1283773 - RNA, 22 nt, Human
ccccuucuauuuuacaaagcca

SEQ ID NO: 1283774 - RNA, 21 nt, Human
ccuaccuuaacgguauuuaga

SEQ ID NO: 1283775 - RNA, 24 nt, Human
cuuuccauaaaauccuuggacaag

SEQ ID NO: 1283776 - RNA, 19 nt, Human
gaacauguggguuagcuug

SEQ ID NO: 1283777 - RNA, 18 nt, Human
gaggguuuaaucuguaug

SEQ ID NO: 1283778 - RNA, 19 nt, Human
gaugauacuuuugggcaau

SEQ ID NO: 1283779 - RNA, 23 nt, Human
ggaaacugcaaggcugcuaacuc

SEQ ID NO: 1283780 - RNA, 21 nt, Human
gggaaacugcaaggcugcuaa

SEQ ID NO: 1283781 - RNA, 21 nt, Human
gggcaaugucaccuaagcuuu

SEQ ID NO: 1283782 - RNA, 21 nt, Human
guggacuggccagaggaagga

SEQ ID NO: 1283783 - RNA, 19 nt, Human
uaaaaacagcauucuuccc

SEQ ID NO: 1283784 - RNA, 24 nt, Human
uaaaaacuguacagguuuucuaaa

SEQ ID NO: 1283785 - RNA, 18 nt, Human
uaaaugaugcagcuuggg

SEQ ID NO: 1283786 - RNA, 21 nt, Human
uaaguaggaacuggucccaca

SEQ ID NO: 1283787 - RNA, 18 nt, Human
uaagucagccagguucau

SEQ ID NO: 1283788 - RNA, 22 nt, Human
uagggaugguuuccauaaaaac

SEQ ID NO: 1283789 - RNA, 18 nt, Human
uccauaaaaacuguacag

SEQ ID NO: 1283790 - RNA, 19 nt, Human
ucccacacgggaaaaagag

SEQ ID NO: 1283791 - RNA, 24 nt, Human
ucggcuaguuuuuggguggcaucc

SEQ ID NO: 1283792 - RNA, 20 nt, Human
ugacuaggcgccccaugacu

SEQ ID NO: 1283793 - RNA, 20 nt, Human
ugaugauacuuuugggcaau

SEQ ID NO: 1283794 - RNA, 21 nt, Human
ugaugcagcuuggguaacugc

SEQ ID NO: 1283795 - RNA, 21 nt, Human
ugccaaagcuggacugguggu

SEQ ID NO: 1283796 - RNA, 24 nt, Human
uggccagaggaaggagaugugagc

SEQ ID NO: 1283797 - RNA, 20 nt, Human
ugggcugggaucaggauugg

SEQ ID NO: 1283798 - RNA, 21 nt, Human
ugggcugggaucaggauuggu

SEQ ID NO: 1283799 - RNA, 24 nt, Human
uggguuucugaggggaugcaaccc

SEQ ID NO: 1283800 - RNA, 22 nt, Human
uguccuugacuagggaugguuu

SEQ ID NO: 1283801 - RNA, 19 nt, Human
ugugucuggugguugcagu

SEQ ID NO: 1283802 - RNA, 21 nt, Human
uugagauugggccccaaaugg

SEQ ID NO: 1283803 - RNA, 19 nt, Human
uuuaaaguguccuugacua

SEQ ID NO: 1283804 - RNA, 22 nt, Human
uuuggcuucucucaauacaaag

SEQ ID NO: 1283805 - RNA, 19 nt, Human
aaaaaguaaaaagacaacc

SEQ ID NO: 1283806 - RNA, 28 nt, Human
aaaagaacaggcaauagucauaagcaag

SEQ ID NO: 1283807 - RNA, 23 nt, Human
aaaaugagaauuugugcugcaaa

SEQ ID NO: 1283808 - RNA, 23 nt, Human
aaagacaacccacacaaucaaaa

SEQ ID NO: 1283809 - RNA, 22 nt, Human
aaagaugggguggccacaggcg

SEQ ID NO: 1283810 - RNA, 22 nt, Human
aaagaugguaaaagggugacaa

SEQ ID NO: 1283811 - RNA, 24 nt, Human
aaaguacugagauuacaggcauga

SEQ ID NO: 1283812 - RNA, 21 nt, Human
aaagugcugggauuacaggca

SEQ ID NO: 1283813 - RNA, 22 nt, Human
aaagugcugggauuacaggcau

SEQ ID NO: 1283814 - RNA, 24 nt, Human
aaagugcugggauuacaggcauca

SEQ ID NO: 1283815 - RNA, 21 nt, Human
aaauacacauggccaggacac

SEQ ID NO: 1283816 - RNA, 25 nt, Human
aacuacccagccucagguauuccuu

SEQ ID NO: 1283817 - RNA, 22 nt, Human
aacugcuucauuaauagucuua

SEQ ID NO: 1283818 - RNA, 24 nt, Human
aagaaagagccagccaaaugaaga

SEQ ID NO: 1283819 - RNA, 20 nt, Human
aagauaaacaaggaaacaaa

SEQ ID NO: 1283820 - RNA, 19 nt, Human
aagcaaguaauucacuagg

SEQ ID NO: 1283821 - RNA, 27 nt, Human
aagcgauucuccugccucugccuccca

SEQ ID NO: 1283822 - RNA, 19 nt, Human
aaggaaacaaacaugauga

SEQ ID NO: 1283823 - RNA, 26 nt, Human
aaguacugagauuacaggcaugagcc

SEQ ID NO: 1283824 - RNA, 25 nt, Human
aaguagcuggaacuacaggcacgug

SEQ ID NO: 1283825 - RNA, 25 nt, Human
aagugauccucccaucucagccucc

SEQ ID NO: 1283826 - RNA, 21 nt, Human
aagugauccuccuaccuccca

SEQ ID NO: 1283827 - RNA, 19 nt, Human
aagugcugggauuacaggc

SEQ ID NO: 1283828 - RNA, 21 nt, Human
aagugcugggauuacaggcau

SEQ ID NO: 1283829 - RNA, 19 nt, Human
aaucaugacucacugcagc

SEQ ID NO: 1283830 - RNA, 24 nt, Human
aaugaacaagacagaaaaaaaucu

SEQ ID NO: 1283831 - RNA, 21 nt, Human
acaaagaaagagccagccaaa

SEQ ID NO: 1283832 - RNA, 18 nt, Human
acacaaaucucucaaaca

SEQ ID NO: 1283833 - RNA, 24 nt, Human
acacacacccucuccuugcuuccu

SEQ ID NO: 1283834 - RNA, 19 nt, Human
acacugaaagcauaagcag

SEQ ID NO: 1283835 - RNA, 22 nt, Human
acagaaaaaaaucucgcuuuca

SEQ ID NO: 1283836 - RNA, 22 nt, Human
acagcagauguaucagagaccu

SEQ ID NO: 1283837 - RNA, 21 nt, Human
acaggcaauagucauaagccg

SEQ ID NO: 1283838 - RNA, 18 nt, Human
acaggguuucaccguguu

SEQ ID NO: 1283839 - RNA, 19 nt, Human
acaggguuucaccguguua

SEQ ID NO: 1283840 - RNA, 20 nt, Human
acaggguuucaccguguuag

SEQ ID NO: 1283841 - RNA, 24 nt, Human
acaggguuucaccguguuagccag

SEQ ID NO: 1283842 - RNA, 23 nt, Human
accagcaaaaaucaacacgguuu

SEQ ID NO: 1283843 - RNA, 21 nt, Human
acccacacaaucaaaauauuu

SEQ ID NO: 1283844 - RNA, 19 nt, Human
acgggguuuugccaugcug

SEQ ID NO: 1283845 - RNA, 20 nt, Human
acgggguuuugccaugcugg

SEQ ID NO: 1283846 - RNA, 24 nt, Human
acgggguuuugccaugcuggccag

SEQ ID NO: 1283847 - RNA, 24 nt, Human
acuauguugcucaggcugcuuuug

SEQ ID NO: 1283848 - RNA, 23 nt, Human
acugacuaagacauauacaaaua

SEQ ID NO: 1283849 - RNA, 19 nt, Human
acugcagccucaaccuccu

SEQ ID NO: 1283850 - RNA, 22 nt, Human
agaaagguuuuucaaacagcua

SEQ ID NO: 1283851 - RNA, 19 nt, Human
agacacaaaucucucaaac

SEQ ID NO: 1283852 - RNA, 18 nt, Human
agacaggguuucaccgug

SEQ ID NO: 1283853 - RNA, 21 nt, Human
agaccuaaauaagagccaaug

SEQ ID NO: 1283854 - RNA, 19 nt, Human
agagacaggguuucaccgu

SEQ ID NO: 1283855 - RNA, 23 nt, Human
agagaccuaaauaagagccaaug

SEQ ID NO: 1283856 - RNA, 19 nt, Human
agaggcuauuuuauaaaga

SEQ ID NO: 1283857 - RNA, 18 nt, Human
agaguauaaacuagaaac

SEQ ID NO: 1283858 - RNA, 18 nt, Human
agauguaucagagaccua

SEQ ID NO: 1283859 - RNA, 22 nt, Human
agauuacaggcaugagccacug

SEQ ID NO: 1283860 - RNA, 23 nt, Human
agauuacaggcaugagccacugc

SEQ ID NO: 1283861 - RNA, 23 nt, Human
agcacauucaucaaauauuaaca

SEQ ID NO: 1283862 - RNA, 24 nt, Human
agcccaagaacacuuuccaaucuc

SEQ ID NO: 1283863 - RNA, 18 nt, Human
agccuccagaauagcugg

SEQ ID NO: 1283864 - RNA, 23 nt, Human
agcgauucugcugccccagccuc

SEQ ID NO: 1283865 - RNA, 19 nt, Human
agcuacuggcuugacuguc

SEQ ID NO: 1283866 - RNA, 18 nt, Human
agcucaauggaauaaaau

SEQ ID NO: 1283867 - RNA, 18 nt, Human
aggcuggagugcaguggc

SEQ ID NO: 1283868 - RNA, 25 nt, Human
aggcuggagugcaguggcgcgaucu

SEQ ID NO: 1283869 - RNA, 21 nt, Human
agggugacaaaacucuguuuu

SEQ ID NO: 1283870 - RNA, 20 nt, Human
aggugcaaauccuaaugacc

SEQ ID NO: 1283871 - RNA, 22 nt, Human
aguagagacgggguuuugccau

SEQ ID NO: 1283872 - RNA, 18 nt, Human
aguagcugggauuacagg

SEQ ID NO: 1283873 - RNA, 21 nt, Human
aguagcugggauuacaggugu

SEQ ID NO: 1283874 - RNA, 20 nt, Human
agugcaguggcgcaaucaug

SEQ ID NO: 1283875 - RNA, 20 nt, Human
agugcaguggcgcgaucucg

SEQ ID NO: 1283876 - RNA, 23 nt, Human
agugcaguggcgcgaucucggcu

SEQ ID NO: 1283877 - RNA, 24 nt, Human
agugcaguggcgcgaucucggcuc

SEQ ID NO: 1283878 - RNA, 18 nt, Human
agugcugggauuacaggc

SEQ ID NO: 1283879 - RNA, 19 nt, Human
auagaucaauaccuuccuu

SEQ ID NO: 1283880 - RNA, 19 nt, Human
aucaaaaggcugaugugaa

SEQ ID NO: 1283881 - RNA, 24 nt, Human
aucaucuccgcucacugcaaacuc

SEQ ID NO: 1283882 - RNA, 18 nt, Human
augcagucaucaagacug

SEQ ID NO: 1283883 - RNA, 18 nt, Human
auggggucucacuauguu

SEQ ID NO: 1283884 - RNA, 24 nt, Human
auuuuuguauuuuuaguagagacg

SEQ ID NO: 1283885 - RNA, 24 nt, Human
caaaguacugagauuacaggcaug

SEQ ID NO: 1283886 - RNA, 22 nt, Human
caaagugagagccaucacuauu

SEQ ID NO: 1283887 - RNA, 25 nt, Human
caaagugcugggauuacaggcauca

SEQ ID NO: 1283888 - RNA, 23 nt, Human
caacaacagaggcaagacgacag

SEQ ID NO: 1283889 - RNA, 23 nt, Human
caaccuccaccuccuggguucaa

SEQ ID NO: 1283890 - RNA, 22 nt, Human
caaccuccuggguucaagugau

SEQ ID NO: 1283891 - RNA, 25 nt, Human
caaccuccuggguucaagugauccu

SEQ ID NO: 1283892 - RNA, 20 nt, Human
caagcgauucugcugcccca

SEQ ID NO: 1283893 - RNA, 19 nt, Human
caaggaaacaaacaugaug

SEQ ID NO: 1283894 - RNA, 21 nt, Human
caaugaacaagacagaaaaaa

SEQ ID NO: 1283895 - RNA, 23 nt, Human
cacaacacuucaaaagaaguuaa

SEQ ID NO: 1283896 - RNA, 25 nt, Human
cacacaacacuucaaaagaaguuaa

SEQ ID NO: 1283897 - RNA, 22 nt, Human
cacacccggcuaaguuuaugua

SEQ ID NO: 1283898 - RNA, 19 nt, Human
cacaguauaguuaaugaaa

SEQ ID NO: 1283899 - RNA, 24 nt, Human
caccacacccagcuaauuuuugua

SEQ ID NO: 1283900 - RNA, 18 nt, Human
caccguguuagccaggau

SEQ ID NO: 1283901 - RNA, 24 nt, Human
caccguguuagccaggauggucuc

SEQ ID NO: 1283902 - RNA, 23 nt, Human
cacuccugggcucaagugauccu

SEQ ID NO: 1283903 - RNA, 21 nt, Human
cacugcaaacucugccuccca

SEQ ID NO: 1283904 - RNA, 21 nt, Human
cacugcaaccuccaccuccug

SEQ ID NO: 1283905 - RNA, 23 nt, Human
cacugcaaccuccaccuccuggg

SEQ ID NO: 1283906 - RNA, 19 nt, Human
cacugcagccucaaccucc

SEQ ID NO: 1283907 - RNA, 20 nt, Human
cagaggucugaacaaagaaa

SEQ ID NO: 1283908 - RNA, 23 nt, Human
cagccucaaccuccuggguucaa

SEQ ID NO: 1283909 - RNA, 20 nt, Human
cagccuccugaguagcuggg

SEQ ID NO: 1283910 - RNA, 23 nt, Human
cagccuguagaaacaugagccaa

SEQ ID NO: 1283911 - RNA, 18 nt, Human
caggcaauagucauaagc

SEQ ID NO: 1283912 - RNA, 19 nt, Human
cagggaacaggaugcagaa

SEQ ID NO: 1283913 - RNA, 19 nt, Human
caggggugaguucuuccug

SEQ ID NO: 1283914 - RNA, 24 nt, Human
caggguuucaccguguuagccagg

SEQ ID NO: 1283915 - RNA, 22 nt, Human
cauauacaaauacuuaugaacu

SEQ ID NO: 1283916 - RNA, 24 nt, Human
caugcuggccaggcuggucucgaa

SEQ ID NO: 1283917 - RNA, 24 nt, Human
ccaaaguacugagauuacaggcau

SEQ ID NO: 1283918 - RNA, 23 nt, Human
ccaaagugcugggauuacaggca

SEQ ID NO: 1283919 - RNA, 24 nt, Human
ccaaagugcugggauuacaggcau

SEQ ID NO: 1283920 - RNA, 24 nt, Human
ccacacaaucaaaauauuugcaaa

SEQ ID NO: 1283921 - RNA, 24 nt, Human
ccaccuccuggguucaagcgauuc

SEQ ID NO: 1283922 - RNA, 18 nt, Human
ccacugcgcccagccuau

SEQ ID NO: 1283923 - RNA, 19 nt, Human
ccacugcgcccagccuauu

SEQ ID NO: 1283924 - RNA, 23 nt, Human
ccacugcgcccagccuauugccu

SEQ ID NO: 1283925 - RNA, 24 nt, Human
ccagaauagcugggacuacaggca

SEQ ID NO: 1283926 - RNA, 19 nt, Human
ccaugcuggccaggcuggu

SEQ ID NO: 1283927 - RNA, 23 nt, Human
ccaugcuggccaggcuggucucg

SEQ ID NO: 1283928 - RNA, 24 nt, Human
cccaaagugcugggauuacaggca

SEQ ID NO: 1283929 - RNA, 22 nt, Human
cccaggcuggagugcaguggcg

SEQ ID NO: 1283930 - RNA, 23 nt, Human
ccgucccacuucguaccauacau

SEQ ID NO: 1283931 - RNA, 22 nt, Human
ccucaaccuccuggguucaagu

SEQ ID NO: 1283932 - RNA, 19 nt, Human
ccuccaccuccuggguuca

SEQ ID NO: 1283933 - RNA, 22 nt, Human
ccucccagguucaagcgauucu

SEQ ID NO: 1283934 - RNA, 26 nt, Human
ccucccaucucagccuccagaauagc

SEQ ID NO: 1283935 - RNA, 24 nt, Human
ccuccuggguucaagcgauucucc

SEQ ID NO: 1283936 - RNA, 24 nt, Human
ccuccuggguucaagugauccucc

SEQ ID NO: 1283937 - RNA, 19 nt, Human
ccucugcugcccaggcugg

SEQ ID NO: 1283938 - RNA, 25 nt, Human
ccucugcugcccaggcuggagugca

SEQ ID NO: 1283939 - RNA, 18 nt, Human
ccugacacacacccucuc

SEQ ID NO: 1283940 - RNA, 22 nt, Human
ccugaguagcugggauuacagg

SEQ ID NO: 1283941 - RNA, 22 nt, Human
ccugaguagcugggauuacagg

SEQ ID NO: 1283942 - RNA, 23 nt, Human
ccugaguagcugggauuacaggu

SEQ ID NO: 1283943 - RNA, 24 nt, Human
ccugaguagcugggauuacaggug

SEQ ID NO: 1283944 - RNA, 22 nt, Human
ccugggcucaagugauccuccu

SEQ ID NO: 1283945 - RNA, 23 nt, Human
ccuggguucaagcgauucuccug

SEQ ID NO: 1283946 - RNA, 22 nt, Human
ccuggguucaagugauccuccc

SEQ ID NO: 1283947 - RNA, 24 nt, Human
ccuugcuuccucucucacccugug

SEQ ID NO: 1283948 - RNA, 22 nt, Human
cgagacaagaucuuccucugcu

SEQ ID NO: 1283949 - RNA, 24 nt, Human
cgggguuuugccaugcuggccagg

SEQ ID NO: 1283950 - RNA, 23 nt, Human
cuaauuuuuguauuuuuaguaga

SEQ ID NO: 1283951 - RNA, 22 nt, Human
cuacugccuuuuuuucgagaca

SEQ ID NO: 1283952 - RNA, 27 nt, Human
cucaagugauccuccuaccucccaaag

SEQ ID NO: 1283953 - RNA, 23 nt, Human
cucacugcaaacucugccuccca

SEQ ID NO: 1283954 - RNA, 24 nt, Human
cucacugcaaccuccaccuccugg

SEQ ID NO: 1283955 - RNA, 26 nt, Human
cucacugcaaccuccaccuccugggu

SEQ ID NO: 1283956 - RNA, 21 nt, Human
cucacugcagccucaaccucc

SEQ ID NO: 1283957 - RNA, 24 nt, Human
cucacugcagccucaaccuccugg

SEQ ID NO: 1283958 - RNA, 21 nt, Human
cucagccuccagaauagcugg

SEQ ID NO: 1283959 - RNA, 24 nt, Human
cuccagaauagcugggacuacagg

SEQ ID NO: 1283960 - RNA, 21 nt, Human
cucccaaaguacugagauuac

SEQ ID NO: 1283961 - RNA, 22 nt, Human
cuccugaccucgugauccgccc

SEQ ID NO: 1283962 - RNA, 23 nt, Human
cuccugggcucaagugauccucc

SEQ ID NO: 1283963 - RNA, 21 nt, Human
cuccuggguucaagcgauucu

SEQ ID NO: 1283964 - RNA, 21 nt, Human
cucuccuugcuuccucucuca

SEQ ID NO: 1283965 - RNA, 20 nt, Human
cucugucgcccaggcuggag

SEQ ID NO: 1283966 - RNA, 21 nt, Human
cugaguagcugggauuacagg

SEQ ID NO: 1283967 - RNA, 24 nt, Human
cugaguagcugggauuacaggugu

SEQ ID NO: 1283968 - RNA, 18 nt, Human
cugcaaccuccaccuccu

SEQ ID NO: 1283969 - RNA, 23 nt, Human
cugcaaccuccaccuccuggguu

SEQ ID NO: 1283970 - RNA, 24 nt, Human
cugcaaccuccaccuccuggguuc

SEQ ID NO: 1283971 - RNA, 24 nt, Human
cugcccaggcuggagugcaguggc

SEQ ID NO: 1283972 - RNA, 18 nt, Human
cuuuuuuuuuuuuuuuug

SEQ ID NO: 1283973 - RNA, 19 nt, Human
gaaaaaauaccacaauaau

SEQ ID NO: 1283974 - RNA, 20 nt, Human
gaaauacacauggccaggac

SEQ ID NO: 1283975 - RNA, 24 nt, Human
gaauagcugggacuacaggcaugc

SEQ ID NO: 1283976 - RNA, 22 nt, Human
gaccucgugauccgcccaucuc

SEQ ID NO: 1283977 - RNA, 22 nt, Human
gaccucgugauccgcccaucuc

SEQ ID NO: 1283978 - RNA, 24 nt, Human
gagacgggguuuugccaugcuggc

SEQ ID NO: 1283979 - RNA, 25 nt, Human
gaggucugaacaaagaaagagccag

SEQ ID NO: 1283980 - RNA, 19 nt, Human
gaguagcugggauuacagg

SEQ ID NO: 1283981 - RNA, 24 nt, Human
gaguagcugggauuacaggugugc

SEQ ID NO: 1283982 - RNA, 25 nt, Human
gaugcagaacaauggggguggucuu

SEQ ID NO: 1283983 - RNA, 18 nt, Human
gauuacaggcaucagcca

SEQ ID NO: 1283984 - RNA, 22 nt, Human
gauuacaggcaucagccaccgc

SEQ ID NO: 1283985 - RNA, 18 nt, Human
gauuacaggcaugagcca

SEQ ID NO: 1283986 - RNA, 22 nt, Human
gauuacaggcaugagccacugc

SEQ ID NO: 1283987 - RNA, 22 nt, Human
gcaaacucugccucccagguuc

SEQ ID NO: 1283988 - RNA, 19 nt, Human
gcccaggcuggagugcagu

SEQ ID NO: 1283989 - RNA, 19 nt, Human
gcccaggcuggagugcagu

SEQ ID NO: 1283990 - RNA, 20 nt, Human
gcccaggcuggagugcagug

SEQ ID NO: 1283991 - RNA, 23 nt, Human
gcucucuuucucccccuucuuuu

SEQ ID NO: 1283992 - RNA, 25 nt, Human
gcucugucgcccaggcuggagugca

SEQ ID NO: 1283993 - RNA, 24 nt, Human
gcugccccagccuccugaguagcu

SEQ ID NO: 1283994 - RNA, 19 nt, Human
gcuggagugcaguggcgca

SEQ ID NO: 1283995 - RNA, 19 nt, Human
gcuggagugcaguggcgcg

SEQ ID NO: 1283996 - RNA, 23 nt, Human
gcuggucucgaacuccugaccuc

SEQ ID NO: 1283997 - RNA, 23 nt, Human
ggagucuugcucugucgcccagg

SEQ ID NO: 1283998 - RNA, 24 nt, Human
ggauggucucgaucuccugaccuc

SEQ ID NO: 1283999 - RNA, 22 nt, Human
ggauuacaggcaucagccaccg

SEQ ID NO: 1284000 - RNA, 24 nt, Human
ggcuggucucgaacuccugaccuc

SEQ ID NO: 1284001 - RNA, 21 nt, Human
gggcucaagugauccuccuac

SEQ ID NO: 1284002 - RNA, 22 nt, Human
gggcucaagugauccuccuacc

SEQ ID NO: 1284003 - RNA, 22 nt, Human
ggggucucacuauguugcucag

SEQ ID NO: 1284004 - RNA, 23 nt, Human
gggguuuugccaugcuggccagg

SEQ ID NO: 1284005 - RNA, 22 nt, Human
gggucucacuauguugcucagg

SEQ ID NO: 1284006 - RNA, 19 nt, Human
ggucucgaacuccugaccu

SEQ ID NO: 1284007 - RNA, 21 nt, Human
guagagacgggguuuugccau

SEQ ID NO: 1284008 - RNA, 18 nt, Human
guagcugggauuacaggu

SEQ ID NO: 1284009 - RNA, 19 nt, Human
gugggacaccccucccccg

SEQ ID NO: 1284010 - RNA, 20 nt, Human
guucaagugauccucccauc

SEQ ID NO: 1284011 - RNA, 24 nt, Human
guuuauguauuuuuaguagagaca

SEQ ID NO: 1284012 - RNA, 19 nt, Human
uaaaaagacaacccacaca

SEQ ID NO: 1284013 - RNA, 23 nt, Human
uaaaaagacaacccacacaauca

SEQ ID NO: 1284014 - RNA, 24 nt, Human
uaaaaauauaaagcugcauugcua

SEQ ID NO: 1284015 - RNA, 22 nt, Human
uaaacuacccagccucagguau

SEQ ID NO: 1284016 - RNA, 25 nt, Human
uaaagugggacaccccucccccguc

SEQ ID NO: 1284017 - RNA, 24 nt, Human
uaacagugguuauccauauacagu

SEQ ID NO: 1284018 - RNA, 20 nt, Human
uaagacacaaaucucucaaa

SEQ ID NO: 1284019 - RNA, 23 nt, Human
uaagugcuccaaagugagagcca

SEQ ID NO: 1284020 - RNA, 24 nt, Human
uaaguuuauguauuuuuaguagag

SEQ ID NO: 1284021 - RNA, 24 nt, Human
uaaugaaguagacccacauuuaau

SEQ ID NO: 1284022 - RNA, 24 nt, Human
uaauuuuuguauuuuuaguagaga

SEQ ID NO: 1284023 - RNA, 20 nt, Human
uacaaaaaacuguaucucac

SEQ ID NO: 1284024 - RNA, 24 nt, Human
uacaggcaugagccacugcgccca

SEQ ID NO: 1284025 - RNA, 24 nt, Human
uacaggugugcaccaccacaccca

SEQ ID NO: 1284026 - RNA, 19 nt, Human
uacccagccucagguauuc

SEQ ID NO: 1284027 - RNA, 18 nt, Human
uaccugcacacauaggcu

SEQ ID NO: 1284028 - RNA, 22 nt, Human
uagagacaggguuucaccgugu

SEQ ID NO: 1284029 - RNA, 20 nt, Human
uagagacgggguuuugccau

SEQ ID NO: 1284030 - RNA, 21 nt, Human
uagcauaauagauauagcuca

SEQ ID NO: 1284031 - RNA, 22 nt, Human
uagggauggggucucacuaugu

SEQ ID NO: 1284032 - RNA, 21 nt, Human
uaggugggggccuaaugggag

SEQ ID NO: 1284033 - RNA, 21 nt, Human
uaguagagacaggguuucacc

SEQ ID NO: 1284034 - RNA, 24 nt, Human
uaguagagacaggguuucaccgug

SEQ ID NO: 1284035 - RNA, 26 nt, Human
uaguagagacaggguuucaccguguu

SEQ ID NO: 1284036 - RNA, 24 nt, Human
uaguagagacgggguuuugccaug

SEQ ID NO: 1284037 - RNA, 24 nt, Human
uaguauagcaaagaugguaaaagg

SEQ ID NO: 1284038 - RNA, 23 nt, Human
uauagggauggggucucacuaug

SEQ ID NO: 1284039 - RNA, 24 nt, Human
uaugaggaaacuuuaauucacguu

SEQ ID NO: 1284040 - RNA, 22 nt, Human
uauguugcucaggcugcuuuug

SEQ ID NO: 1284041 - RNA, 19 nt, Human
uauugggcagaauaaaaag

SEQ ID NO: 1284042 - RNA, 21 nt, Human
uauuugcaaaucacauauaug

SEQ ID NO: 1284043 - RNA, 24 nt, Human
ucaaaacauauuacaaagaugcag

SEQ ID NO: 1284044 - RNA, 18 nt, Human
ucaaacagcuacuggcuu

SEQ ID NO: 1284045 - RNA, 19 nt, Human
ucaagcgauucuccugccu

SEQ ID NO: 1284046 - RNA, 24 nt, Human
ucaccguguuagccaggauggucu

SEQ ID NO: 1284047 - RNA, 18 nt, Human
ucacugcaaacucugccu

SEQ ID NO: 1284048 - RNA, 19 nt, Human
ucacugcaaacucugccuc

SEQ ID NO: 1284049 - RNA, 24 nt, Human
ucacugcaaacucugccucccagg

SEQ ID NO: 1284050 - RNA, 23 nt, Human
ucacugcaaccuccaccuccugg

SEQ ID NO: 1284051 - RNA, 24 nt, Human
ucacugcaaccuccaccuccuggg

SEQ ID NO: 1284052 - RNA, 25 nt, Human
ucacugcaaccuccaccuccugggu

SEQ ID NO: 1284053 - RNA, 27 nt, Human
ucacugcaaccuccaccuccuggguuc

SEQ ID NO: 1284054 - RNA, 23 nt, Human
ucacugcagccucaaccuccugg

SEQ ID NO: 1284055 - RNA, 24 nt, Human
ucacugcagccucaaccuccuggg

SEQ ID NO: 1284056 - RNA, 24 nt, Human
uccagaauagcugggacuacaggc

SEQ ID NO: 1284057 - RNA, 24 nt, Human
ucccaaaguacugagauuacaggc

SEQ ID NO: 1284058 - RNA, 24 nt, Human
ucccaaagugcugggauuacaggc

SEQ ID NO: 1284059 - RNA, 24 nt, Human
ucccaaguagcuggaacuacaggc

SEQ ID NO: 1284060 - RNA, 19 nt, Human
ucccagguucaagcgauuc

SEQ ID NO: 1284061 - RNA, 24 nt, Human
ucccagguucaagcgauucugcug

SEQ ID NO: 1284062 - RNA, 23 nt, Human
uccucugcugcccaggcuggagu

SEQ ID NO: 1284063 - RNA, 24 nt, Human
uccucugcugcccaggcuggagug

SEQ ID NO: 1284064 - RNA, 24 nt, Human
uccugaguagcugggauuacaggu

SEQ ID NO: 1284065 - RNA, 21 nt, Human
uccugggcucaagugauccuc

SEQ ID NO: 1284066 - RNA, 22 nt, Human
uccugggcucaagugauccucc

SEQ ID NO: 1284067 - RNA, 21 nt, Human
uccuggguucaagcgauucuc

SEQ ID NO: 1284068 - RNA, 24 nt, Human
uccuggguucaagcgauucuccug

SEQ ID NO: 1284069 - RNA, 21 nt, Human
uccuggguucaagugauccuc

SEQ ID NO: 1284070 - RNA, 24 nt, Human
uccuggguucaagugauccuccca

SEQ ID NO: 1284071 - RNA, 22 nt, Human
ucgcccaggcuggagugcagug

SEQ ID NO: 1284072 - RNA, 20 nt, Human
ucucggccucccaaagugcu

SEQ ID NO: 1284073 - RNA, 28 nt, Human
ucucuuucucccccuucuuuuuuuuuuu

SEQ ID NO: 1284074 - RNA, 24 nt, Human
ucugcugcccaggcuggagugcag

SEQ ID NO: 1284075 - RNA, 24 nt, Human
ucugucgcccaggcuggagugcag

SEQ ID NO: 1284076 - RNA, 23 nt, Human
ucuuccucugcugcccaggcugg

SEQ ID NO: 1284077 - RNA, 24 nt, Human
ucuuccucugcugcccaggcugga

SEQ ID NO: 1284078 - RNA, 22 nt, Human
ucuugcucugucgcccaggcug

SEQ ID NO: 1284079 - RNA, 23 nt, Human
ucuugcucugucgcccaggcugg

SEQ ID NO: 1284080 - RNA, 24 nt, Human
ucuugcucugucgcccaggcugga

SEQ ID NO: 1284081 - RNA, 26 nt, Human
ucuuucucccccuucuuuuuuuuuuu

SEQ ID NO: 1284082 - RNA, 24 nt, Human
ugaaagacagcacguaugguauga

SEQ ID NO: 1284083 - RNA, 22 nt, Human
ugaaagacauucaacuacaguc

SEQ ID NO: 1284084 - RNA, 22 nt, Human
ugaaagcauaagcagccaaaug

SEQ ID NO: 1284085 - RNA, 19 nt, Human
ugaaagcauaagcagccag

SEQ ID NO: 1284086 - RNA, 22 nt, Human
ugaacaaagaaagagccagcca

SEQ ID NO: 1284087 - RNA, 20 nt, Human
ugaacaagacagaaaaaaau

SEQ ID NO: 1284088 - RNA, 19 nt, Human
ugaacugcuucauuaauag

SEQ ID NO: 1284089 - RNA, 24 nt, Human
ugacacugaaagcauaagcagcca

SEQ ID NO: 1284090 - RNA, 19 nt, Human
ugacucacugcagccucaa

SEQ ID NO: 1284091 - RNA, 19 nt, Human
ugagaauuugugcugcaaa

SEQ ID NO: 1284092 - RNA, 22 nt, Human
ugagauggagucuugcucuguc

SEQ ID NO: 1284093 - RNA, 21 nt, Human
ugagauuacaggcaugagcca

SEQ ID NO: 1284094 - RNA, 22 nt, Human
ugagauuacaggcaugagccac

SEQ ID NO: 1284095 - RNA, 22 nt, Human
ugagauuacaggcaugagccac

SEQ ID NO: 1284096 - RNA, 24 nt, Human
ugagauuacaggcaugagccacug

SEQ ID NO: 1284097 - RNA, 26 nt, Human
ugagauuacaggcaugagccacugcg

SEQ ID NO: 1284098 - RNA, 22 nt, Human
ugagggcgcagguugaaagaca

SEQ ID NO: 1284099 - RNA, 22 nt, Human
ugaggugugagauuuaugcaga

SEQ ID NO: 1284100 - RNA, 24 nt, Human
ugauccgcccaucucggccuccca

SEQ ID NO: 1284101 - RNA, 22 nt, Human
ugcaguggcgcgaucucggcuc

SEQ ID NO: 1284102 - RNA, 24 nt, Human
ugccaugcuggccaggcuggucuc

SEQ ID NO: 1284103 - RNA, 27 nt, Human
ugccaugcuggccaggcuggucucgaa

SEQ ID NO: 1284104 - RNA, 19 nt, Human
ugcccaacugaggucuuuc

SEQ ID NO: 1284105 - RNA, 18 nt, Human
ugcccaggcuggagugca

SEQ ID NO: 1284106 - RNA, 21 nt, Human
ugcccaggcuggagugcagug

SEQ ID NO: 1284107 - RNA, 22 nt, Human
ugcccaggcuggagugcagugg

SEQ ID NO: 1284108 - RNA, 24 nt, Human
ugcccaggcuggagugcaguggcg

SEQ ID NO: 1284109 - RNA, 21 nt, Human
ugccccaccaaugccuggcua

SEQ ID NO: 1284110 - RNA, 24 nt, Human
ugccccagccuccugaguagcugg

SEQ ID NO: 1284111 - RNA, 24 nt, Human
ugccucugccucccaaguagcugg

SEQ ID NO: 1284112 - RNA, 19 nt, Human
ugcuaagacacaaaucucu

SEQ ID NO: 1284113 - RNA, 25 nt, Human
ugcuaagacacaaaucucucaaaca

SEQ ID NO: 1284114 - RNA, 23 nt, Human
ugcucaggcugcuuuugcacucc

SEQ ID NO: 1284115 - RNA, 18 nt, Human
ugcuggccaggcuggucu

SEQ ID NO: 1284116 - RNA, 20 nt, Human
ugcugggauuacaggcauca

SEQ ID NO: 1284117 - RNA, 22 nt, Human
ugcuuuugcacuccugggcuca

SEQ ID NO: 1284118 - RNA, 21 nt, Human
uggaacuacaggcacgugcca

SEQ ID NO: 1284119 - RNA, 26 nt, Human
uggaacuacaggcacgugccagcaca

SEQ ID NO: 1284120 - RNA, 30 nt, Human
uggaacuacaggcacgugccagcacacccg

SEQ ID NO: 1284121 - RNA, 23 nt, Human
uggagucuugcucugucgcccag

SEQ ID NO: 1284122 - RNA, 24 nt, Human
uggagucuugcucugucgcccagg

SEQ ID NO: 1284123 - RNA, 18 nt, Human
uggagugcaguggcgcaa

SEQ ID NO: 1284124 - RNA, 19 nt, Human
uggagugcaguggcgcaau

SEQ ID NO: 1284125 - RNA, 21 nt, Human
uggagugcaguggcgcaauca

SEQ ID NO: 1284126 - RNA, 23 nt, Human
uggagugcaguggcgcgaucucg

SEQ ID NO: 1284127 - RNA, 24 nt, Human
uggagugcaguggcgcgaucucgg

SEQ ID NO: 1284128 - RNA, 24 nt, Human
uggaugucuuucacacaacacuuc

SEQ ID NO: 1284129 - RNA, 24 nt, Human
uggccaggcuggucucgaacuccu

SEQ ID NO: 1284130 - RNA, 24 nt, Human
ugggacuacaggcaugccccacca

SEQ ID NO: 1284131 - RNA, 18 nt, Human
ugggauuacaggcaucag

SEQ ID NO: 1284132 - RNA, 21 nt, Human
ugggauuacaggcaucagcca

SEQ ID NO: 1284133 - RNA, 22 nt, Human
ugggauuacaggcaucagccac

SEQ ID NO: 1284134 - RNA, 23 nt, Human
ugggauuacaggcaucagccacc

SEQ ID NO: 1284135 - RNA, 24 nt, Human
ugggauuacaggcaucagccaccg

SEQ ID NO: 1284136 - RNA, 21 nt, Human
ugggauuacaggugugcacca

SEQ ID NO: 1284137 - RNA, 22 nt, Human
ugggauuacaggugugcaccac

SEQ ID NO: 1284138 - RNA, 24 nt, Human
ugggauuacaggugugcaccacca

SEQ ID NO: 1284139 - RNA, 28 nt, Human
ugggcagaauaaaaaguucuucuugcgg

SEQ ID NO: 1284140 - RNA, 20 nt, Human
ugggcucaagugauccuccu

SEQ ID NO: 1284141 - RNA, 24 nt, Human
uggggucucacuauguugcucagg

SEQ ID NO: 1284142 - RNA, 23 nt, Human
uggguucaagcgauucuccugcc

SEQ ID NO: 1284143 - RNA, 24 nt, Human
uggguucaagcgauucuccugccu

SEQ ID NO: 1284144 - RNA, 20 nt, Human
uggguucaagugauccuccc

SEQ ID NO: 1284145 - RNA, 23 nt, Human
uggguucaagugauccucccauc

SEQ ID NO: 1284146 - RNA, 24 nt, Human
uggguucaagugauccucccaucu

SEQ ID NO: 1284147 - RNA, 21 nt, Human
uguauuuuuaguagagacggg

SEQ ID NO: 1284148 - RNA, 19 nt, Human
ugucagaaucuuuucuggg

SEQ ID NO: 1284149 - RNA, 22 nt, Human
ugucccuggcauuagaugacuc

SEQ ID NO: 1284150 - RNA, 18 nt, Human
ugugcaccaccacaccca

SEQ ID NO: 1284151 - RNA, 24 nt, Human
uguugcucaggcugcuuuugcacu

SEQ ID NO: 1284152 - RNA, 22 nt, Human
uuaguagagacaggguuucacc

SEQ ID NO: 1284153 - RNA, 24 nt, Human
uuaguagagacaggguuucaccgu

SEQ ID NO: 1284154 - RNA, 18 nt, Human
uuaguagagacgggguuu

SEQ ID NO: 1284155 - RNA, 22 nt, Human
uuaguagagacgggguuuugcc

SEQ ID NO: 1284156 - RNA, 24 nt, Human
uuaguagagacgggguuuugccau

SEQ ID NO: 1284157 - RNA, 22 nt, Human
uuauaaagaugggguggccaca

SEQ ID NO: 1284158 - RNA, 23 nt, Human
uuauagggauggggucucacuau

SEQ ID NO: 1284159 - RNA, 19 nt, Human
uucaaauacuuaccagcaa

SEQ ID NO: 1284160 - RNA, 21 nt, Human
uucaagcgauucuccugccuc

SEQ ID NO: 1284161 - RNA, 23 nt, Human
uucaagcgauucuccugccucug

SEQ ID NO: 1284162 - RNA, 24 nt, Human
uucaagcgauucuccugccucugc

SEQ ID NO: 1284163 - RNA, 18 nt, Human
uucaagcgauucugcugc

SEQ ID NO: 1284164 - RNA, 23 nt, Human
uucaagugauccucccaucucag

SEQ ID NO: 1284165 - RNA, 24 nt, Human
uucaagugauccucccaucucagc

SEQ ID NO: 1284166 - RNA, 18 nt, Human
uuccuuuauugcaauaca

SEQ ID NO: 1284167 - RNA, 25 nt, Human
uugaaagacagcacguaugguauga

SEQ ID NO: 1284168 - RNA, 21 nt, Human
uugagauggagucuugcucug

SEQ ID NO: 1284169 - RNA, 21 nt, Human
uugcaauacaaaacugacuaa

SEQ ID NO: 1284170 - RNA, 26 nt, Human
uugcucucuuucucccccuucuuuuu

SEQ ID NO: 1284171 - RNA, 24 nt, Human
uugcucugucgcccaggcuggagu

SEQ ID NO: 1284172 - RNA, 21 nt, Human
uuuauguauuuuuaguagaga

SEQ ID NO: 1284173 - RNA, 19 nt, Human
uuucaccguguuagccagg

SEQ ID NO: 1284174 - RNA, 22 nt, Human
uuucucccccuucuuuuuuuuu

SEQ ID NO: 1284175 - RNA, 20 nt, Human
uuugcacuccugggcucaag

SEQ ID NO: 1284176 - RNA, 22 nt, Human
uuuguagguacuuauauuuuug

SEQ ID NO: 1284177 - RNA, 22 nt, Human
uuuucuggguucugggauacug

SEQ ID NO: 1284178 - RNA, 24 nt, Human
uuuuuaguagagacaggguuucac

SEQ ID NO: 1284179 - RNA, 21 nt, Human
uuuuuaguagagacgggguuu

SEQ ID NO: 1284180 - RNA, 21 nt, Human
uuuuuaguagagacgggguuu

SEQ ID NO: 1284181 - RNA, 18 nt, Human
uuuuuauagggauggggu

SEQ ID NO: 1284182 - RNA, 20 nt, Human
uuuuuguauuuuuaguagag

SEQ ID NO: 1284183 - RNA, 21 nt, Human
uuuuuuauagggauggggucu

SEQ ID NO: 1284184 - RNA, 24 nt, Human
uuuuuuuuuuuugagauggagucu

SEQ ID NO: 1284185 - RNA, 23 nt, Human
aaacaacaguaucaccagauucc

SEQ ID NO: 1284186 - RNA, 24 nt, Human
aaauaucuaaaaauaaaccaagcc

SEQ ID NO: 1284187 - RNA, 23 nt, Human
aaaucagcugcaaaugcaccugg

SEQ ID NO: 1284188 - RNA, 26 nt, Human
aaaugcaccuggaguucagaacuguu

SEQ ID NO: 1284189 - RNA, 21 nt, Human
aagaaacacaauguugguuca

SEQ ID NO: 1284190 - RNA, 20 nt, Human
aagguguuacaaaaagaguu

SEQ ID NO: 1284191 - RNA, 23 nt, Human
aaucuuaaauucaauuuuguggg

SEQ ID NO: 1284192 - RNA, 21 nt, Human
acgcuggcaucugcuucccuc

SEQ ID NO: 1284193 - RNA, 21 nt, Human
acuacuucccugacacaggag

SEQ ID NO: 1284194 - RNA, 20 nt, Human
acuucacuguucccuccagc

SEQ ID NO: 1284195 - RNA, 19 nt, Human
agaaagaaaauguaauagg

SEQ ID NO: 1284196 - RNA, 23 nt, Human
agaacgcuggcaucugcuucccu

SEQ ID NO: 1284197 - RNA, 20 nt, Human
agcaagaucauuugggaguu

SEQ ID NO: 1284198 - RNA, 27 nt, Human
agucagaaaaggaaggcaugagaauuu

SEQ ID NO: 1284199 - RNA, 19 nt, Human
auacaaaaauaaagaagcc

SEQ ID NO: 1284200 - RNA, 20 nt, Human
auagaagggagaauaugaca

SEQ ID NO: 1284201 - RNA, 22 nt, Human
aucagcugcaaaugcaccugga

SEQ ID NO: 1284202 - RNA, 19 nt, Human
augcccuucacuucagccu

SEQ ID NO: 1284203 - RNA, 19 nt, Human
auugcaguugacccuggag

SEQ ID NO: 1284204 - RNA, 19 nt, Human
auuucauccaugaagauga

SEQ ID NO: 1284205 - RNA, 25 nt, Human
caaacauaaaucauuaguaccuacc

SEQ ID NO: 1284206 - RNA, 22 nt, Human
caacaguaucaccagauuccaa

SEQ ID NO: 1284207 - RNA, 20 nt, Human
caacuucuagauagaaggga

SEQ ID NO: 1284208 - RNA, 20 nt, Human
caagaucauuugggaguuuu

SEQ ID NO: 1284209 - RNA, 20 nt, Human
caaugugcccugggcaaagc

SEQ ID NO: 1284210 - RNA, 22 nt, Human
cacaugcccuucacuucagccu

SEQ ID NO: 1284211 - RNA, 26 nt, Human
caccugccgccuccagagguuuuggg

SEQ ID NO: 1284212 - RNA, 22 nt, Human
caccuggaguucagaacuguuc

SEQ ID NO: 1284213 - RNA, 23 nt, Human
cacuucagccugaugcuccuggc

SEQ ID NO: 1284214 - RNA, 20 nt, Human
cagcaauuuuucucagguug

SEQ ID NO: 1284215 - RNA, 22 nt, Human
cagcagcuguagcuccuccugu

SEQ ID NO: 1284216 - RNA, 21 nt, Human
cagcucugaggagccaaaaga

SEQ ID NO: 1284217 - RNA, 18 nt, Human
cauaaaugagcaaccaaa

SEQ ID NO: 1284218 - RNA, 22 nt, Human
caucaucugcugcacuucacug

SEQ ID NO: 1284219 - RNA, 22 nt, Human
caucugcugcacuucacuguuc

SEQ ID NO: 1284220 - RNA, 19 nt, Human
cauuacuaauacaagcauu

SEQ ID NO: 1284221 - RNA, 19 nt, Human
ccacagagaaucaggugac

SEQ ID NO: 1284222 - RNA, 20 nt, Human
ccccaaugaauuucuguacc

SEQ ID NO: 1284223 - RNA, 23 nt, Human
ccccugggucagguucauuucug

SEQ ID NO: 1284224 - RNA, 21 nt, Human
cccgugcaccugccgccucca

SEQ ID NO: 1284225 - RNA, 18 nt, Human
ccuccagcaucccccucc

SEQ ID NO: 1284226 - RNA, 21 nt, Human
ccugccuuuuccuccuccagc

SEQ ID NO: 1284227 - RNA, 21 nt, Human
ccugccuuuuccuccuccccc

SEQ ID NO: 1284228 - RNA, 21 nt, Human
cuccagcaucccccuccagcu

SEQ ID NO: 1284229 - RNA, 20 nt, Human
cuccagcuccaucugcugug

SEQ ID NO: 1284230 - RNA, 18 nt, Human
cuccuggcauaagcucag

SEQ ID NO: 1284231 - RNA, 19 nt, Human
cucuccauaaaugagcaac

SEQ ID NO: 1284232 - RNA, 19 nt, Human
cucugaggagccaaaagag

SEQ ID NO: 1284233 - RNA, 22 nt, Human
cugcagcagcuguagcuccucc

SEQ ID NO: 1284234 - RNA, 19 nt, Human
cuguuccuuguggcuuucc

SEQ ID NO: 1284235 - RNA, 24 nt, Human
cuuuuccuccuccagcuccaucug

SEQ ID NO: 1284236 - RNA, 18 nt, Human
gaguucuucaaucuugga

SEQ ID NO: 1284237 - RNA, 18 nt, Human
gaugagcauuuucucugc

SEQ ID NO: 1284238 - RNA, 23 nt, Human
gcccugggcaaagcagugccgag

SEQ ID NO: 1284239 - RNA, 19 nt, Human
guaacaaagaaagacuucu

SEQ ID NO: 1284240 - RNA, 27 nt, Human
gucagaaaaggaaggcaugagaauuua

SEQ ID NO: 1284241 - RNA, 21 nt, Human
guccacugccugccuuuuccu

SEQ ID NO: 1284242 - RNA, 23 nt, Human
guuacuaccuagaaagauuuacc

SEQ ID NO: 1284243 - RNA, 20 nt, Human
uaaagaaagaaaauguaaua

SEQ ID NO: 1284244 - RNA, 22 nt, Human
uaacaggaaaauaccuaagaga

SEQ ID NO: 1284245 - RNA, 22 nt, Human
uaagaaacacaauguugguuca

SEQ ID NO: 1284246 - RNA, 23 nt, Human
uaaguacaguaauguugcacuuu

SEQ ID NO: 1284247 - RNA, 23 nt, Human
uacaggucagagcuaagaaacac

SEQ ID NO: 1284248 - RNA, 22 nt, Human
uacaguaauguugcacuuucaa

SEQ ID NO: 1284249 - RNA, 23 nt, Human
uacaucagaaaugucaaaguaca

SEQ ID NO: 1284250 - RNA, 19 nt, Human
uagcaagaucauuugggag

SEQ ID NO: 1284251 - RNA, 21 nt, Human
uaguaauaggagaacuuuguc

SEQ ID NO: 1284252 - RNA, 20 nt, Human
uagugggauaauuuagcaag

SEQ ID NO: 1284253 - RNA, 28 nt, Human
uauacaaaaauaaagaagccauaacauu

SEQ ID NO: 1284254 - RNA, 22 nt, Human
uaucauucaaaaucagcugcaa

SEQ ID NO: 1284255 - RNA, 24 nt, Human
ucaaaguacaucuuuuacuaacgg

SEQ ID NO: 1284256 - RNA, 23 nt, Human
ucaaagugaccagccaggccuac

SEQ ID NO: 1284257 - RNA, 20 nt, Human
ucaaccaaaacuaaguauua

SEQ ID NO: 1284258 - RNA, 21 nt, Human
ucacagaaauuccccaaugaa

SEQ ID NO: 1284259 - RNA, 24 nt, Human
ucacuucagccugaugcuccuggc

SEQ ID NO: 1284260 - RNA, 26 nt, Human
ucagcagaacuuaaguuuaucaaaca

SEQ ID NO: 1284261 - RNA, 19 nt, Human
uccagcaucccccuccagc

SEQ ID NO: 1284262 - RNA, 19 nt, Human
uccagugccaagacuaggg

SEQ ID NO: 1284263 - RNA, 18 nt, Human
uccauaguuucuugaugg

SEQ ID NO: 1284264 - RNA, 21 nt, Human
uccauaguuucuugauggaca

SEQ ID NO: 1284265 - RNA, 18 nt, Human
ucccgugcaccugccgcc

SEQ ID NO: 1284266 - RNA, 23 nt, Human
uccgucaagcgccaucuugucuu

SEQ ID NO: 1284267 - RNA, 19 nt, Human
ucuacuaagucagaaaagg

SEQ ID NO: 1284268 - RNA, 21 nt, Human
ucucagguugauccccugggu

SEQ ID NO: 1284269 - RNA, 22 nt, Human
ucucuuuugacucuguaagggu

SEQ ID NO: 1284270 - RNA, 18 nt, Human
ucugaggagccaaaagag

SEQ ID NO: 1284271 - RNA, 20 nt, Human
ucugcuucccuccccaaaac

SEQ ID NO: 1284272 - RNA, 18 nt, Human
ugaaagcacucuucucuu

SEQ ID NO: 1284273 - RNA, 20 nt, Human
ugacacaggaguccuauucc

SEQ ID NO: 1284274 - RNA, 22 nt, Human
ugacacaggaguccuauuccug

SEQ ID NO: 1284275 - RNA, 23 nt, Human
ugagcaaccaaaaaucucucuua

SEQ ID NO: 1284276 - RNA, 19 nt, Human
ugaggagccaaaagaguca

SEQ ID NO: 1284277 - RNA, 19 nt, Human
ugcccucaauuccauaguu

SEQ ID NO: 1284278 - RNA, 21 nt, Human
ugccugccuuuuccuccucca

SEQ ID NO: 1284279 - RNA, 22 nt, Human
uggcagaguccacugccugccu

SEQ ID NO: 1284280 - RNA, 21 nt, Human
uggcauaagcucagcaauuuu

SEQ ID NO: 1284281 - RNA, 22 nt, Human
uggcaugagauaggacuuugga

SEQ ID NO: 1284282 - RNA, 24 nt, Human
uguucccuccagcaucccccucca

SEQ ID NO: 1284283 - RNA, 21 nt, Human
uuaguucauucccgugcaccu

SEQ ID NO: 1284284 - RNA, 19 nt, Human
uuccagugccaagacuagg

SEQ ID NO: 1284285 - RNA, 22 nt, Human
uucccgugcaccugccgccucc

SEQ ID NO: 1284286 - RNA, 19 nt, Human
uucugugcacaugcccuuc

SEQ ID NO: 1284287 - RNA, 24 nt, Human
uucuuaguuuuauugcaauucauu

SEQ ID NO: 1284288 - RNA, 24 nt, Human
uuuaaaaagaauauucaguuuccc

SEQ ID NO: 1284289 - RNA, 26 nt, Human
aaaaaaaaaaaaaacaacaaccaaaa

SEQ ID NO: 1284290 - RNA, 23 nt, Human
aaaaaaacaacaaccaaaaaaca

SEQ ID NO: 1284291 - RNA, 21 nt, Human
aaaacaaaaacccaacaacua

SEQ ID NO: 1284292 - RNA, 21 nt, Human
aaaacagaaaaacagggaaag

SEQ ID NO: 1284293 - RNA, 22 nt, Human
aaacaaaaacccaacaacuauu

SEQ ID NO: 1284294 - RNA, 23 nt, Human
aaacauacaccacuuccaaagcc

SEQ ID NO: 1284295 - RNA, 20 nt, Human
aaagcacacauacccuaccg

SEQ ID NO: 1284296 - RNA, 22 nt, Human
aacaaccaaaaaacaaaaaccc

SEQ ID NO: 1284297 - RNA, 19 nt, Human
aacagaaaccacaggcugc

SEQ ID NO: 1284298 - RNA, 21 nt, Human
aacagaaaccacaggcugcca

SEQ ID NO: 1284299 - RNA, 19 nt, Human
aacauacagacauguucuc

SEQ ID NO: 1284300 - RNA, 21 nt, Human
aaccaaaaaacaaaaacccaa

SEQ ID NO: 1284301 - RNA, 22 nt, Human
aaccaaaaaacaaaaacccaac

SEQ ID NO: 1284302 - RNA, 19 nt, Human
aacuccauagaaaccccac

SEQ ID NO: 1284303 - RNA, 18 nt, Human
aacucucccauucucccu

SEQ ID NO: 1284304 - RNA, 19 nt, Human
aagaugacagcaacuauaa

SEQ ID NO: 1284305 - RNA, 18 nt, Human
aagcaaguaacauuuaca

SEQ ID NO: 1284306 - RNA, 19 nt, Human
aagccccagucugccacag

SEQ ID NO: 1284307 - RNA, 19 nt, Human
aaguggagguuacgaaacc

SEQ ID NO: 1284308 - RNA, 18 nt, Human
aaugacacuugggaccac

SEQ ID NO: 1284309 - RNA, 22 nt, Human
aaugacacuugggaccacagcu

SEQ ID NO: 1284310 - RNA, 21 nt, Human
acaaaacagaaaaacagggaa

SEQ ID NO: 1284311 - RNA, 26 nt, Human
acaaagaaaagccaugucuccacagg

SEQ ID NO: 1284312 - RNA, 20 nt, Human
acaagcaaguaacauuuaca

SEQ ID NO: 1284313 - RNA, 25 nt, Human
acacacacacauaaggcaggcacaa

SEQ ID NO: 1284314 - RNA, 19 nt, Human
acacggggccucaccuccc

SEQ ID NO: 1284315 - RNA, 18 nt, Human
acaggcagagcauguaca

SEQ ID NO: 1284316 - RNA, 25 nt, Human
accaaaaaacaaaaacccaacaacu

SEQ ID NO: 1284317 - RNA, 22 nt, Human
accaggacacaaggaggauccc

SEQ ID NO: 1284318 - RNA, 22 nt, Human
accccaucuauauuuuccacua

SEQ ID NO: 1284319 - RNA, 21 nt, Human
accugagugcaggugaaucca

SEQ ID NO: 1284320 - RNA, 19 nt, Human
acgaaaccugggcgacacc

SEQ ID NO: 1284321 - RNA, 27 nt, Human
acucuaaauucaaaauggcaaaggcua

SEQ ID NO: 1284322 - RNA, 24 nt, Human
acugaagcacagauggaaaucacu

SEQ ID NO: 1284323 - RNA, 20 nt, Human
agcccagaauucucaucagc

SEQ ID NO: 1284324 - RNA, 19 nt, Human
agcuggaagggcaaaugcc

SEQ ID NO: 1284325 - RNA, 20 nt, Human
aggagcggccggcacccccg

SEQ ID NO: 1284326 - RNA, 18 nt, Human
aggggagggaggagggag

SEQ ID NO: 1284327 - RNA, 19 nt, Human
aggguuccuguuggucucc

SEQ ID NO: 1284328 - RNA, 21 nt, Human
aggguuccuguuggucuccuu

SEQ ID NO: 1284329 - RNA, 21 nt, Human
agucgaacaagcaaguaacau

SEQ ID NO: 1284330 - RNA, 18 nt, Human
auacaccacuuccaaagc

SEQ ID NO: 1284331 - RNA, 21 nt, Human
auucacucaaacccaggauca

SEQ ID NO: 1284332 - RNA, 24 nt, Human
auuccgcauccuagguuaacuaaa

SEQ ID NO: 1284333 - RNA, 24 nt, Human
auugugcucuuucuacaaccuuga

SEQ ID NO: 1284334 - RNA, 20 nt, Human
auuuccauaacagaaaccac

SEQ ID NO: 1284335 - RNA, 26 nt, Human
caaaacaaaacagaaaaacagggaaa

SEQ ID NO: 1284336 - RNA, 19 nt, Human
caaagccaugccaacacaa

SEQ ID NO: 1284337 - RNA, 19 nt, Human
caaagccccagucugccac

SEQ ID NO: 1284338 - RNA, 28 nt, Human
caacaaccaaaaaacaaaaacccaacaa

SEQ ID NO: 1284339 - RNA, 21 nt, Human
caacacaaggcauugccucuc

SEQ ID NO: 1284340 - RNA, 26 nt, Human
caaccaaaaaacaaaaacccaacaac

SEQ ID NO: 1284341 - RNA, 28 nt, Human
caagacaacuccauagaaaccccacuga

SEQ ID NO: 1284342 - RNA, 24 nt, Human
cacaaagaaaagccaugucuccac

SEQ ID NO: 1284343 - RNA, 21 nt, Human
cacacucuuucucucucacgu

SEQ ID NO: 1284344 - RNA, 21 nt, Human
cacugacugcagcuuugcacc

SEQ ID NO: 1284345 - RNA, 20 nt, Human
cagcaccuuggcaagauccc

SEQ ID NO: 1284346 - RNA, 21 nt, Human
cagccgaacuccucacagcac

SEQ ID NO: 1284347 - RNA, 21 nt, Human
cagcuggaagggcaaaugccc

SEQ ID NO: 1284348 - RNA, 21 nt, Human
caggaggggcagugaccccac

SEQ ID NO: 1284349 - RNA, 18 nt, Human
cagguuucagaauuacuc

SEQ ID NO: 1284350 - RNA, 23 nt, Human
cagugaacaacaagcaaucaagc

SEQ ID NO: 1284351 - RNA, 19 nt, Human
cauaaaaagugcagacugc

SEQ ID NO: 1284352 - RNA, 22 nt, Human
cauacaccacuuccaaagcccc

SEQ ID NO: 1284353 - RNA, 20 nt, Human
cauagaaaccccacugaagc

SEQ ID NO: 1284354 - RNA, 18 nt, Human
ccaaaaguacuggcacuc

SEQ ID NO: 1284355 - RNA, 24 nt, Human
ccacaccgcugccaccuccuggug

SEQ ID NO: 1284356 - RNA, 19 nt, Human
ccagucgcuacauacccag

SEQ ID NO: 1284357 - RNA, 25 nt, Human
cccacaccgcugccaccuccuggug

SEQ ID NO: 1284358 - RNA, 18 nt, Human
cccagugaacaacaagca

SEQ ID NO: 1284359 - RNA, 21 nt, Human
cccagugaacaacaagcaauc

SEQ ID NO: 1284360 - RNA, 20 nt, Human
ccccaacucucccauucucc

SEQ ID NO: 1284361 - RNA, 20 nt, Human
ccccagucugccacagcaca

SEQ ID NO: 1284362 - RNA, 18 nt, Human
ccccgccuccccccgccc

SEQ ID NO: 1284363 - RNA, 19 nt, Human
ccccgcgcccgccucccgc

SEQ ID NO: 1284364 - RNA, 19 nt, Human
ccccgcugccaaggacacc

SEQ ID NO: 1284365 - RNA, 24 nt, Human
ccccuugcgggccgccgugggggu

SEQ ID NO: 1284366 - RNA, 24 nt, Human
cccgcggcuccuccuccgccccgc

SEQ ID NO: 1284367 - RNA, 18 nt, Human
cccuuuacaaauacacca

SEQ ID NO: 1284368 - RNA, 23 nt, Human
ccgccccgccuccccccgccccc

SEQ ID NO: 1284369 - RNA, 24 nt, Human
ccgcccgcccucccgcuccuaggc

SEQ ID NO: 1284370 - RNA, 22 nt, Human
ccgccgcccgcccucccgcucc

SEQ ID NO: 1284371 - RNA, 23 nt, Human
ccgccgcccgcccucccgcuccu

SEQ ID NO: 1284372 - RNA, 22 nt, Human
ccgccucccgccgccgcccgcc

SEQ ID NO: 1284373 - RNA, 21 nt, Human
ccgcgcccgccucccgccgcc

SEQ ID NO: 1284374 - RNA, 19 nt, Human
ccgcgcccgcggcuccucc

SEQ ID NO: 1284375 - RNA, 19 nt, Human
ccucaccuuucccuuuccu

SEQ ID NO: 1284376 - RNA, 21 nt, Human
ccucccaccccaaguuaaguc

SEQ ID NO: 1284377 - RNA, 18 nt, Human
ccucccgccgccgcccgc

SEQ ID NO: 1284378 - RNA, 23 nt, Human
ccucccgccgccgcccgcccucc

SEQ ID NO: 1284379 - RNA, 18 nt, Human
ccuccgccccgccucccc

SEQ ID NO: 1284380 - RNA, 21 nt, Human
ccuccggggccgggcugggcc

SEQ ID NO: 1284381 - RNA, 18 nt, Human
ccuccucccgggcgggca

SEQ ID NO: 1284382 - RNA, 21 nt, Human
ccucucuuacccucuuagucc

SEQ ID NO: 1284383 - RNA, 21 nt, Human
ccucugcugcuacugcuuguu

SEQ ID NO: 1284384 - RNA, 24 nt, Human
cgcgcccgccucccgccgccgccc

SEQ ID NO: 1284385 - RNA, 22 nt, Human
cgcggccccgcgcccgccuccc

SEQ ID NO: 1284386 - RNA, 21 nt, Human
cgcucggcucggccugcgcgg

SEQ ID NO: 1284387 - RNA, 23 nt, Human
cgggccgggacgcggggcggcgg

SEQ ID NO: 1284388 - RNA, 27 nt, Human
cuaaaaaaaaaaaaaaacaacaaccaa

SEQ ID NO: 1284389 - RNA, 28 nt, Human
cuaaaaaaaaaaaaaaacaacaaccaaa

SEQ ID NO: 1284390 - RNA, 20 nt, Human
cuaaacugggagaagugacu

SEQ ID NO: 1284391 - RNA, 22 nt, Human
cuacaaccuugaagcacaguga

SEQ ID NO: 1284392 - RNA, 19 nt, Human
cuacuggauaacaggccaa

SEQ ID NO: 1284393 - RNA, 21 nt, Human
cuagauauuaaaauucaugcu

SEQ ID NO: 1284394 - RNA, 18 nt, Human
cuccacaggcagagcaug

SEQ ID NO: 1284395 - RNA, 23 nt, Human
cucccgccgccgcccgcccuccc

SEQ ID NO: 1284396 - RNA, 21 nt, Human
cuccggggccgggcugggccg

SEQ ID NO: 1284397 - RNA, 18 nt, Human
cuccuaggcgcccuccuc

SEQ ID NO: 1284398 - RNA, 20 nt, Human
cuccuaggcgcccuccuccc

SEQ ID NO: 1284399 - RNA, 20 nt, Human
cuuucaccccaucuauauuu

SEQ ID NO: 1284400 - RNA, 21 nt, Human
gaaauauauugugcuagagac

SEQ ID NO: 1284401 - RNA, 20 nt, Human
gagaaacaaaacaaaacaga

SEQ ID NO: 1284402 - RNA, 19 nt, Human
gagccaaucagaacacagg

SEQ ID NO: 1284403 - RNA, 24 nt, Human
gagcggccggcacccccgcgggcg

SEQ ID NO: 1284404 - RNA, 23 nt, Human
gcacacauacccuaccggcaaca

SEQ ID NO: 1284405 - RNA, 20 nt, Human
gcaucuacuuuuaaucgcuu

SEQ ID NO: 1284406 - RNA, 19 nt, Human
gccugggagacaggagugg

SEQ ID NO: 1284407 - RNA, 25 nt, Human
gcgcggccgggccgggacgcggggc

SEQ ID NO: 1284408 - RNA, 18 nt, Human
gcggcggccggggacagc

SEQ ID NO: 1284409 - RNA, 18 nt, Human
gcggcuccuccuccgccc

SEQ ID NO: 1284410 - RNA, 18 nt, Human
gcucacugacugcagcuu

SEQ ID NO: 1284411 - RNA, 18 nt, Human
gcuccuaggcgcccuccu

SEQ ID NO: 1284412 - RNA, 20 nt, Human
gcucuuaugaaacagaaaca

SEQ ID NO: 1284413 - RNA, 19 nt, Human
gcugccaggcucacugacu

SEQ ID NO: 1284414 - RNA, 20 nt, Human
ggaagauauacaagacuccc

SEQ ID NO: 1284415 - RNA, 20 nt, Human
ggagggaggagggagcagag

SEQ ID NO: 1284416 - RNA, 21 nt, Human
ggcccagugaacaacaagcaa

SEQ ID NO: 1284417 - RNA, 25 nt, Human
gggauguguuucaccauggaaccau

SEQ ID NO: 1284418 - RNA, 27 nt, Human
gggccgggacgcggggcggcgggagga

SEQ ID NO: 1284419 - RNA, 18 nt, Human
gggcugggccggcuggga

SEQ ID NO: 1284420 - RNA, 20 nt, Human
ggguacugaagcacagaugg

SEQ ID NO: 1284421 - RNA, 19 nt, Human
guagaugacuaaauuuugc

SEQ ID NO: 1284422 - RNA, 23 nt, Human
guccucacucucaggggagggag

SEQ ID NO: 1284423 - RNA, 22 nt, Human
uaaaaaguacauaaaaagugca

SEQ ID NO: 1284424 - RNA, 23 nt, Human
uaaaagacaacauauuauguuaa

SEQ ID NO: 1284425 - RNA, 23 nt, Human
uaaaauacauuuuauguuaaugu

SEQ ID NO: 1284426 - RNA, 22 nt, Human
uaacaggccaaaaguacuggca

SEQ ID NO: 1284427 - RNA, 19 nt, Human
uaacauuuacaccuaacca

SEQ ID NO: 1284428 - RNA, 24 nt, Human
uaaccaagcuaacccacgauuaaa

SEQ ID NO: 1284429 - RNA, 18 nt, Human
uaaggcaggcacagaagg

SEQ ID NO: 1284430 - RNA, 24 nt, Human
uaaguaacauacagacauguucuc

SEQ ID NO: 1284431 - RNA, 25 nt, Human
uacaccacuuccaaagccccagucu

SEQ ID NO: 1284432 - RNA, 18 nt, Human
uacagaaguuguuucugu

SEQ ID NO: 1284433 - RNA, 18 nt, Human
uacauggucggaugaggu

SEQ ID NO: 1284434 - RNA, 18 nt, Human
uaccagcauucuggcagg

SEQ ID NO: 1284435 - RNA, 19 nt, Human
uaccuguuaucacuaaacu

SEQ ID NO: 1284436 - RNA, 25 nt, Human
uauaucuuucaccccaucuauauuu

SEQ ID NO: 1284437 - RNA, 20 nt, Human
uauuuuaccauggacaccca

SEQ ID NO: 1284438 - RNA, 19 nt, Human
ucacagaccaguuagacuu

SEQ ID NO: 1284439 - RNA, 21 nt, Human
ucacucaaacccaggaucacg

SEQ ID NO: 1284440 - RNA, 18 nt, Human
ucagcccacagaauggcc

SEQ ID NO: 1284441 - RNA, 22 nt, Human
ucauggguacuauauuuucgua

SEQ ID NO: 1284442 - RNA, 22 nt, Human
uccacuauagacuucaaaagug

SEQ ID NO: 1284443 - RNA, 22 nt, Human
ucccgccgccgcccgcccuccc

SEQ ID NO: 1284444 - RNA, 28 nt, Human
ucgaacaagcaaguaacauuguaaugac

SEQ ID NO: 1284445 - RNA, 20 nt, Human
ucggaugagguccucacucu

SEQ ID NO: 1284446 - RNA, 18 nt, Human
ucggcucggccugcgcgg

SEQ ID NO: 1284447 - RNA, 21 nt, Human
ucugccacagcacaaagaaaa

SEQ ID NO: 1284448 - RNA, 21 nt, Human
ucuuucaccccaucuauauuu

SEQ ID NO: 1284449 - RNA, 20 nt, Human
ucuuucucucucacguuacu

SEQ ID NO: 1284450 - RNA, 19 nt, Human
ucuuucuuucucucucucc

SEQ ID NO: 1284451 - RNA, 22 nt, Human
ugaaaacaguuuuccuggggcu

SEQ ID NO: 1284452 - RNA, 21 nt, Human
ugaagggucagggauguguuu

SEQ ID NO: 1284453 - RNA, 20 nt, Human
ugacaggcacuacacggggc

SEQ ID NO: 1284454 - RNA, 24 nt, Human
ugacuaaauuuugcucucaugcuc

SEQ ID NO: 1284455 - RNA, 22 nt, Human
ugagaaacaaaacaaaacagaa

SEQ ID NO: 1284456 - RNA, 19 nt, Human
ugagguccucacucucagg

SEQ ID NO: 1284457 - RNA, 18 nt, Human
ugccaugcuuucccucag

SEQ ID NO: 1284458 - RNA, 24 nt, Human
ugcccagugagcagaagcuauaga

SEQ ID NO: 1284459 - RNA, 23 nt, Human
ugccgggugccuggagccccucu

SEQ ID NO: 1284460 - RNA, 21 nt, Human
ugccuaaaaaaaaaaaaaaac

SEQ ID NO: 1284461 - RNA, 20 nt, Human
ugcggaguggggcgggcggc

SEQ ID NO: 1284462 - RNA, 19 nt, Human
ugcuuuugcuucuugugua

SEQ ID NO: 1284463 - RNA, 22 nt, Human
ugcuuuugcuucuuguguagau

SEQ ID NO: 1284464 - RNA, 19 nt, Human
uggacaccacaggcuacca

SEQ ID NO: 1284465 - RNA, 19 nt, Human
uggaguacgcuguuuuacc

SEQ ID NO: 1284466 - RNA, 20 nt, Human
uggcaaaacacuuaaaggcu

SEQ ID NO: 1284467 - RNA, 18 nt, Human
uggcccagugaacaacaa

SEQ ID NO: 1284468 - RNA, 19 nt, Human
uggccucugcugcuacugc

SEQ ID NO: 1284469 - RNA, 20 nt, Human
uggcuaaacgauaacagcag

SEQ ID NO: 1284470 - RNA, 21 nt, Human
uggggcucacucuccuucuca

SEQ ID NO: 1284471 - RNA, 18 nt, Human
ugugaagggucagggaug

SEQ ID NO: 1284472 - RNA, 21 nt, Human
uguguuuuacuaauaggcuac

SEQ ID NO: 1284473 - RNA, 19 nt, Human
uuaaaacuggaguacgcug

SEQ ID NO: 1284474 - RNA, 21 nt, Human
uuaaauaaaaauauaaaagac

SEQ ID NO: 1284475 - RNA, 19 nt, Human
uuaaccaagcuaacccacg

SEQ ID NO: 1284476 - RNA, 19 nt, Human
uuacugcauuaaaguggag

SEQ ID NO: 1284477 - RNA, 22 nt, Human
uuacuuucacugucacuuucuc

SEQ ID NO: 1284478 - RNA, 24 nt, Human
uuagaaagagagaagguaaaaugu

SEQ ID NO: 1284479 - RNA, 19 nt, Human
uucacuuucuuccagcuau

SEQ ID NO: 1284480 - RNA, 19 nt, Human
uuccuggggcucagguggu

SEQ ID NO: 1284481 - RNA, 23 nt, Human
uugaaauuaaccuuuaguaugac

SEQ ID NO: 1284482 - RNA, 23 nt, Human
uugcaccaugugcugcuuugggc

SEQ ID NO: 1284483 - RNA, 22 nt, Human
uuggagcuaacacccacugcag

SEQ ID NO: 1284484 - RNA, 23 nt, Human
uuggauuucagagcuggcccagu

SEQ ID NO: 1284485 - RNA, 20 nt, Human
uuggccgacuugaacuagaa

SEQ ID NO: 1284486 - RNA, 20 nt, Human
uuuaguaugacuuuucaaga

SEQ ID NO: 1284487 - RNA, 27 nt, Human
uuuccaguuauuacagaaguuguuucu

SEQ ID NO: 1284488 - RNA, 21 nt, Human
uuuccuggggcucagguggua

SEQ ID NO: 1284489 - RNA, 22 nt, Human
uuugaaaggcucuuuaauagca

SEQ ID NO: 1284490 - RNA, 23 nt, Human
aaccgaaaccagcggcagucgca

SEQ ID NO: 1284491 - RNA, 18 nt, Human
aagcuaccccaaaaaaca

SEQ ID NO: 1284492 - RNA, 25 nt, Human
aaucaacaacaguauuuuacaauaa

SEQ ID NO: 1284493 - RNA, 22 nt, Human
aaugacagcauuuuuggaagaa

SEQ ID NO: 1284494 - RNA, 23 nt, Human
agcgcgccgggcgccgacugccc

SEQ ID NO: 1284495 - RNA, 18 nt, Human
agggcggacaugagcgcc

SEQ ID NO: 1284496 - RNA, 22 nt, Human
auagaagacuaacuuauaguca

SEQ ID NO: 1284497 - RNA, 22 nt, Human
caagcagagcggccuggccgcu

SEQ ID NO: 1284498 - RNA, 23 nt, Human
ccccgagaagagcgcgccgggcg

SEQ ID NO: 1284499 - RNA, 21 nt, Human
cccuggacgugcgggggccuc

SEQ ID NO: 1284500 - RNA, 22 nt, Human
ccgcagcgccucggcccugccc

SEQ ID NO: 1284501 - RNA, 23 nt, Human
ccgcagcgccucggcccugcccu

SEQ ID NO: 1284502 - RNA, 22 nt, Human
ccgccagccuugcccaccgccc

SEQ ID NO: 1284503 - RNA, 19 nt, Human
ccgccccgagaagagcgcg

SEQ ID NO: 1284504 - RNA, 19 nt, Human
ccgcgucaggccgccagcc

SEQ ID NO: 1284505 - RNA, 20 nt, Human
ccggccgcagcgccucggcc

SEQ ID NO: 1284506 - RNA, 19 nt, Human
ccucggggcgccgggcggc

SEQ ID NO: 1284507 - RNA, 20 nt, Human
ccugcagccgggacaccuuc

SEQ ID NO: 1284508 - RNA, 20 nt, Human
cgagaagagcgcgccgggcg

SEQ ID NO: 1284509 - RNA, 19 nt, Human
cgccagccuugcccaccgc

SEQ ID NO: 1284510 - RNA, 23 nt, Human
cgccccgagaagagcgcgccggg

SEQ ID NO: 1284511 - RNA, 19 nt, Human
cgccgggcgccgacugccc

SEQ ID NO: 1284512 - RNA, 24 nt, Human
cgccucggcccugcccucuagcuc

SEQ ID NO: 1284513 - RNA, 20 nt, Human
cgcgccgggcgccgacugcc

SEQ ID NO: 1284514 - RNA, 20 nt, Human
cucggcccugcccucuagcc

SEQ ID NO: 1284515 - RNA, 21 nt, Human
cuucuuggcucucggggcaca

SEQ ID NO: 1284516 - RNA, 23 nt, Human
gaaccgaaaccagcggcagucgc

SEQ ID NO: 1284517 - RNA, 23 nt, Human
gacaccuucuucuccgcgucucc

SEQ ID NO: 1284518 - RNA, 19 nt, Human
gagcagggcggacaugagc

SEQ ID NO: 1284519 - RNA, 20 nt, Human
gccaguucuaauuuuuuuuu

SEQ ID NO: 1284520 - RNA, 24 nt, Human
gccuucucagaaaacuacuuuaaa

SEQ ID NO: 1284521 - RNA, 18 nt, Human
gcgcggcccgguccggag

SEQ ID NO: 1284522 - RNA, 18 nt, Human
gcgcggcccgguccggag

SEQ ID NO: 1284523 - RNA, 24 nt, Human
ggcgcaccagaaccgaaaccagcg

SEQ ID NO: 1284524 - RNA, 20 nt, Human
gggcacagcgcgcggcccgg

SEQ ID NO: 1284525 - RNA, 22 nt, Human
gucucccgcgcccgcgucaggc

SEQ ID NO: 1284526 - RNA, 20 nt, Human
uagcucccgcguucgcuccu

SEQ ID NO: 1284527 - RNA, 23 nt, Human
ucaacaacaguauuuuacaauaa

SEQ ID NO: 1284528 - RNA, 21 nt, Human
ucccgcgcccgcgucaggccg

SEQ ID NO: 1284529 - RNA, 19 nt, Human
ucucugggccggccgcagc

SEQ ID NO: 1284530 - RNA, 18 nt, Human
ugaggugagccaguucua

SEQ ID NO: 1284531 - RNA, 18 nt, Human
uggaagaaacaugccuuc

SEQ ID NO: 1284532 - RNA, 20 nt, Human
uggaagaaacaugccuucac

SEQ ID NO: 1284533 - RNA, 18 nt, Human
uucuggugacauuccagc

SEQ ID NO: 1284534 - RNA, 22 nt, Human
uuuuacaauaauucuuuaaagu

SEQ ID NO: 1284535 - RNA, 19 nt, Human
aagggggcgggccugaagu

SEQ ID NO: 1284536 - RNA, 20 nt, Human
acaagcuuaugauauuuguu

SEQ ID NO: 1284537 - RNA, 18 nt, Human
acccagauggaagggcca

SEQ ID NO: 1284538 - RNA, 24 nt, Human
agaaugcuucuuccucccccacuc

SEQ ID NO: 1284539 - RNA, 22 nt, Human
agagaaggacaagcuuaugaua

SEQ ID NO: 1284540 - RNA, 27 nt, Human
aggcauuaaaaacagcacugugauuug

SEQ ID NO: 1284541 - RNA, 23 nt, Human
agucacgaaauuucccuccaaga

SEQ ID NO: 1284542 - RNA, 19 nt, Human
auaacagccaccuucuuca

SEQ ID NO: 1284543 - RNA, 24 nt, Human
cacagaguccuaaauaacagccac

SEQ ID NO: 1284544 - RNA, 27 nt, Human
cagucacgaaauuucccuccaagauuu

SEQ ID NO: 1284545 - RNA, 20 nt, Human
ccacacgugggcugcggggu

SEQ ID NO: 1284546 - RNA, 21 nt, Human
ccacacuaaaauaggcuguac

SEQ ID NO: 1284547 - RNA, 19 nt, Human
ccacagaguccuaaauaac

SEQ ID NO: 1284548 - RNA, 21 nt, Human
ccagaaaaauaaaaucaugaa

SEQ ID NO: 1284549 - RNA, 20 nt, Human
ccgcggcagguaucuucucu

SEQ ID NO: 1284550 - RNA, 26 nt, Human
ccguucacuccaccccuuccccggcc

SEQ ID NO: 1284551 - RNA, 18 nt, Human
ccuaaagugcauuucuca

SEQ ID NO: 1284552 - RNA, 18 nt, Human
ccugugcugggaggaggg

SEQ ID NO: 1284553 - RNA, 23 nt, Human
cgcggcagguaucuucucuuacc

SEQ ID NO: 1284554 - RNA, 18 nt, Human
cggcacccagauggaagg

SEQ ID NO: 1284555 - RNA, 23 nt, Human
cggcacccagauggaagggccaa

SEQ ID NO: 1284556 - RNA, 20 nt, Human
cggccguucacuccaccccu

SEQ ID NO: 1284557 - RNA, 18 nt, Human
cuccaagauuugccccca

SEQ ID NO: 1284558 - RNA, 19 nt, Human
cugcgggguggaugcugag

SEQ ID NO: 1284559 - RNA, 22 nt, Human
gaggcuacagaguucaagcuga

SEQ ID NO: 1284560 - RNA, 22 nt, Human
gcggcagguaucuucucuuacc

SEQ ID NO: 1284561 - RNA, 20 nt, Human
ggaggagggcgcugggaacc

SEQ ID NO: 1284562 - RNA, 19 nt, Human
ggccggagggccuaggggc

SEQ ID NO: 1284563 - RNA, 18 nt, Human
gggaggagggcgcuggga

SEQ ID NO: 1284564 - RNA, 21 nt, Human
gggcgggccugaagucucggg

SEQ ID NO: 1284565 - RNA, 20 nt, Human
gggggcgggccugaagucuc

SEQ ID NO: 1284566 - RNA, 22 nt, Human
gucaugaaauauugagaaccca

SEQ ID NO: 1284567 - RNA, 19 nt, Human
guccuggagcgcgcaggcu

SEQ ID NO: 1284568 - RNA, 23 nt, Human
guuugggguagugcuggguaggc

SEQ ID NO: 1284569 - RNA, 19 nt, Human
uaagaaugcuucuuccucc

SEQ ID NO: 1284570 - RNA, 19 nt, Human
uaaugcauccuuggaguca

SEQ ID NO: 1284571 - RNA, 19 nt, Human
uagacuuaacuucccuuga

SEQ ID NO: 1284572 - RNA, 23 nt, Human
uagcuuuuugaaaaaaaaauaau

SEQ ID NO: 1284573 - RNA, 23 nt, Human
uauuuguuuugguucuuuuaaau

SEQ ID NO: 1284574 - RNA, 21 nt, Human
ucaggcauuaaaaacagcacu

SEQ ID NO: 1284575 - RNA, 24 nt, Human
uccaagauuugcccccaucgacuu

SEQ ID NO: 1284576 - RNA, 26 nt, Human
ucccccacuccuucacuuaagguaua

SEQ ID NO: 1284577 - RNA, 19 nt, Human
ugaagucucggguuuggaa

SEQ ID NO: 1284578 - RNA, 21 nt, Human
ugaagucucggguuuggaacu

SEQ ID NO: 1284579 - RNA, 20 nt, Human
ugacaggagccagggggcca

SEQ ID NO: 1284580 - RNA, 23 nt, Human
ugagaggcuacagaguucaagcu

SEQ ID NO: 1284581 - RNA, 22 nt, Human
ugagauacuuaggagaauuuau

SEQ ID NO: 1284582 - RNA, 18 nt, Human
ugagcugugacaggagcc

SEQ ID NO: 1284583 - RNA, 20 nt, Human
ugauuugcuuuccacagagu

SEQ ID NO: 1284584 - RNA, 24 nt, Human
uggaacuggggguuugggguagug

SEQ ID NO: 1284585 - RNA, 19 nt, Human
uggaagggccaaagcggcc

SEQ ID NO: 1284586 - RNA, 22 nt, Human
ugggcugcgggguggaugcuga

SEQ ID NO: 1284587 - RNA, 19 nt, Human
uuaaugcauccuuggaguc

SEQ ID NO: 1284588 - RNA, 23 nt, Human
uuccacagaguccuaaauaacag

SEQ ID NO: 1284589 - RNA, 27 nt, Human
uugaaaaccgccauccuaauucuuccu

SEQ ID NO: 1284590 - RNA, 21 nt, Human
aaaaagcacuaagggagcuga

SEQ ID NO: 1284591 - RNA, 24 nt, Human
aaaaagcuuaacacaaaauuaaac

SEQ ID NO: 1284592 - RNA, 18 nt, Human
aaaagcacuaagggagcu

SEQ ID NO: 1284593 - RNA, 24 nt, Human
aaacaaacacaaaugcuuugcugu

SEQ ID NO: 1284594 - RNA, 21 nt, Human
aaacuccacaagaaauaguaa

SEQ ID NO: 1284595 - RNA, 20 nt, Human
aacuuagaagggaaaaaggu

SEQ ID NO: 1284596 - RNA, 19 nt, Human
aagagaaauacaaagggau

SEQ ID NO: 1284597 - RNA, 19 nt, Human
aagcagaaaagagauucua

SEQ ID NO: 1284598 - RNA, 23 nt, Human
aagggacaaaaagcacuaaggga

SEQ ID NO: 1284599 - RNA, 22 nt, Human
aaguccagaacuuaaagugaca

SEQ ID NO: 1284600 - RNA, 21 nt, Human
aauaagagaaauacaaaggga

SEQ ID NO: 1284601 - RNA, 21 nt, Human
aauacaaagaaccccaagucc

SEQ ID NO: 1284602 - RNA, 25 nt, Human
aauacaaagggaucaaaaagcuaaa

SEQ ID NO: 1284603 - RNA, 23 nt, Human
acaaaaagcacuaagggagcuga

SEQ ID NO: 1284604 - RNA, 21 nt, Human
acaaagaaccccaaguccaga

SEQ ID NO: 1284605 - RNA, 18 nt, Human
accuaggcugaugugaga

SEQ ID NO: 1284606 - RNA, 24 nt, Human
agaaccccaaguccagaacuuaaa

SEQ ID NO: 1284607 - RNA, 19 nt, Human
agacaaacaaacacaaaug

SEQ ID NO: 1284608 - RNA, 28 nt, Human
agacaaacaaacacaaaugccggacccc

SEQ ID NO: 1284609 - RNA, 21 nt, Human
agagccuuggaggaggggugg

SEQ ID NO: 1284610 - RNA, 18 nt, Human
agauguaaaaaucugacc

SEQ ID NO: 1284611 - RNA, 20 nt, Human
agcaccuuuuugggacuucc

SEQ ID NO: 1284612 - RNA, 19 nt, Human
agcagaacuuagaagggaa

SEQ ID NO: 1284613 - RNA, 18 nt, Human
aggaaaaaaauauauaaa

SEQ ID NO: 1284614 - RNA, 20 nt, Human
aggaaaaaaauauauaaaca

SEQ ID NO: 1284615 - RNA, 22 nt, Human
aggacagagaagagguuagaaa

SEQ ID NO: 1284616 - RNA, 23 nt, Human
aggagagcaaaggcaaguuugag

SEQ ID NO: 1284617 - RNA, 20 nt, Human
agguuagaaagagaauaaga

SEQ ID NO: 1284618 - RNA, 22 nt, Human
auggagcuugaauggcuuaaag

SEQ ID NO: 1284619 - RNA, 26 nt, Human
caaacaaacacaaaugcuuugcuguu

SEQ ID NO: 1284620 - RNA, 20 nt, Human
caaagaaccccaaguccaga

SEQ ID NO: 1284621 - RNA, 26 nt, Human
caacaaaaagcuuaacacaaaauuaa

SEQ ID NO: 1284622 - RNA, 19 nt, Human
caagacaguucucaaaggc

SEQ ID NO: 1284623 - RNA, 18 nt, Human
caaguuggaaagguauca

SEQ ID NO: 1284624 - RNA, 19 nt, Human
cacaacaugaugagcuagg

SEQ ID NO: 1284625 - RNA, 19 nt, Human
cacgaugcaacaaaaagcu

SEQ ID NO: 1284626 - RNA, 24 nt, Human
cacgaugcaacaaaaagcuuaaca

SEQ ID NO: 1284627 - RNA, 25 nt, Human
cacuucagcugugguuaaauagcuu

SEQ ID NO: 1284628 - RNA, 22 nt, Human
cagcuuccacauucucaguccu

SEQ ID NO: 1284629 - RNA, 22 nt, Human
cauuacaucacugaaaaacucc

SEQ ID NO: 1284630 - RNA, 21 nt, Human
cccuccacucaacacaacuga

SEQ ID NO: 1284631 - RNA, 19 nt, Human
cgggaagggacaaaaagca

SEQ ID NO: 1284632 - RNA, 21 nt, Human
cuuaucuguucuccaagacag

SEQ ID NO: 1284633 - RNA, 20 nt, Human
cuucucagauauacugcaua

SEQ ID NO: 1284634 - RNA, 22 nt, Human
gaacuuagaagggaaaaaggug

SEQ ID NO: 1284635 - RNA, 18 nt, Human
gaagcucaauguaagaau

SEQ ID NO: 1284636 - RNA, 19 nt, Human
gaauaagagaaauacaaag

SEQ ID NO: 1284637 - RNA, 23 nt, Human
gagcuauuuuucugggccuuuuc

SEQ ID NO: 1284638 - RNA, 19 nt, Human
gagcuugaauggcuuaaag

SEQ ID NO: 1284639 - RNA, 22 nt, Human
gcaacaaaaagcuuaacacaaa

SEQ ID NO: 1284640 - RNA, 20 nt, Human
gccuuaccccccacuucagc

SEQ ID NO: 1284641 - RNA, 18 nt, Human
ggaagggacaaaaagcac

SEQ ID NO: 1284642 - RNA, 19 nt, Human
ggaucaaaaagcuaaagug

SEQ ID NO: 1284643 - RNA, 20 nt, Human
gguuguuuccuuucccuucu

SEQ ID NO: 1284644 - RNA, 24 nt, Human
guaaaaaucugaccuaguugaaca

SEQ ID NO: 1284645 - RNA, 20 nt, Human
guuugaggacagagaagagg

SEQ ID NO: 1284646 - RNA, 24 nt, Human
uaaaaaauagacaauuuauaagga

SEQ ID NO: 1284647 - RNA, 22 nt, Human
uaaaauauccaauccuauaaag

SEQ ID NO: 1284648 - RNA, 23 nt, Human
uaaaauauccaauccuauaaagu

SEQ ID NO: 1284649 - RNA, 23 nt, Human
uaaacucccuccacucaacacaa

SEQ ID NO: 1284650 - RNA, 21 nt, Human
uaaaugaugccgcucagagcc

SEQ ID NO: 1284651 - RNA, 21 nt, Human
uacaaagggaucaaaaagcua

SEQ ID NO: 1284652 - RNA, 21 nt, Human
uacaaauagacaaacaaacac

SEQ ID NO: 1284653 - RNA, 26 nt, Human
uacaaauagacaaacaaacacaaaug

SEQ ID NO: 1284654 - RNA, 18 nt, Human
uacuuuacacagugcuaa

SEQ ID NO: 1284655 - RNA, 23 nt, Human
uagaaagagauguaaaaaucuga

SEQ ID NO: 1284656 - RNA, 20 nt, Human
uagcagaacuuagaagggaa

SEQ ID NO: 1284657 - RNA, 24 nt, Human
uagcuuuuuuaaaaaauagacaau

SEQ ID NO: 1284658 - RNA, 26 nt, Human
uauaaggaaaaaaauauauaaacacu

SEQ ID NO: 1284659 - RNA, 20 nt, Human
uauuauauuggaauugcagu

SEQ ID NO: 1284660 - RNA, 22 nt, Human
ucaagcuuaucuguucuccaag

SEQ ID NO: 1284661 - RNA, 23 nt, Human
ucccaaacccuauguccucucua

SEQ ID NO: 1284662 - RNA, 21 nt, Human
ucucaaaggcaacauuccuuu

SEQ ID NO: 1284663 - RNA, 19 nt, Human
ugacaaguuggaaagguau

SEQ ID NO: 1284664 - RNA, 20 nt, Human
ugacagcaccuuuuugggac

SEQ ID NO: 1284665 - RNA, 19 nt, Human
ugcacaaaaucuugucucu

SEQ ID NO: 1284666 - RNA, 26 nt, Human
ugcagcaaguauuuacauguauguac

SEQ ID NO: 1284667 - RNA, 27 nt, Human
ugcagcaaguauuuacauguauguacc

SEQ ID NO: 1284668 - RNA, 21 nt, Human
uggcauugguauucuaaagga

SEQ ID NO: 1284669 - RNA, 18 nt, Human
uggcugcugguugggaag

SEQ ID NO: 1284670 - RNA, 18 nt, Human
uggcugcugguugggaag

SEQ ID NO: 1284671 - RNA, 23 nt, Human
uggcugcugguugggaagggucc

SEQ ID NO: 1284672 - RNA, 22 nt, Human
uggcuuaaagcuacugcauauu

SEQ ID NO: 1284673 - RNA, 21 nt, Human
uucuaggaaauuggggugggg

SEQ ID NO: 1284674 - RNA, 20 nt, Human
uuggcuacaagcauuacauc

SEQ ID NO: 1284675 - RNA, 21 nt, Human
aaacagaugacuccaggucua

SEQ ID NO: 1284676 - RNA, 23 nt, Human
aaagugucagaacuaagaccaaa

SEQ ID NO: 1284677 - RNA, 19 nt, Human
aagugggaagugcagcugg

SEQ ID NO: 1284678 - RNA, 19 nt, Human
aauccuugccucacagagg

SEQ ID NO: 1284679 - RNA, 22 nt, Human
acagaggagaacuuuugcucca

SEQ ID NO: 1284680 - RNA, 20 nt, Human
acuggcuuuucuucuuccca

SEQ ID NO: 1284681 - RNA, 20 nt, Human
agcccauuaaagugucagaa

SEQ ID NO: 1284682 - RNA, 21 nt, Human
aggcacagagucagaaguggg

SEQ ID NO: 1284683 - RNA, 19 nt, Human
agggaacagcaggcacaga

SEQ ID NO: 1284684 - RNA, 18 nt, Human
augccagccgcuuggcau

SEQ ID NO: 1284685 - RNA, 21 nt, Human
caaaggcaaagaucuucccca

SEQ ID NO: 1284686 - RNA, 19 nt, Human
cacagcuucacaggcugcc

SEQ ID NO: 1284687 - RNA, 23 nt, Human
cacagcuucacaggcugccucag

SEQ ID NO: 1284688 - RNA, 22 nt, Human
cagcagcguggccauggaugcc

SEQ ID NO: 1284689 - RNA, 21 nt, Human
cagcaggcacagagucagaag

SEQ ID NO: 1284690 - RNA, 19 nt, Human
cagcagggaacagcaggca

SEQ ID NO: 1284691 - RNA, 27 nt, Human
caggaaggauccagcaggacauagugg

SEQ ID NO: 1284692 - RNA, 24 nt, Human
caggaaguccuccucagccagcuc

SEQ ID NO: 1284693 - RNA, 23 nt, Human
ccaagcccauuaaagugucagaa

SEQ ID NO: 1284694 - RNA, 20 nt, Human
ccacuacagccucaagccag

SEQ ID NO: 1284695 - RNA, 19 nt, Human
ccgagucccucagccacgc

SEQ ID NO: 1284696 - RNA, 18 nt, Human
ccucccacuacagccuca

SEQ ID NO: 1284697 - RNA, 21 nt, Human
cgaagaagccaccgcuaagcg

SEQ ID NO: 1284698 - RNA, 21 nt, Human
cgccuucucaccaucucaccc

SEQ ID NO: 1284699 - RNA, 22 nt, Human
cuacagccucaagccagcaucu

SEQ ID NO: 1284700 - RNA, 23 nt, Human
cucaccaucucacccgagccacu

SEQ ID NO: 1284701 - RNA, 19 nt, Human
cuccagggucccaagccca

SEQ ID NO: 1284702 - RNA, 20 nt, Human
cuccagggucccaagcccau

SEQ ID NO: 1284703 - RNA, 19 nt, Human
cucgcuccugaaauccuug

SEQ ID NO: 1284704 - RNA, 22 nt, Human
gaaauccuugccucacagagga

SEQ ID NO: 1284705 - RNA, 19 nt, Human
gaagaagccaccgcuaagg

SEQ ID NO: 1284706 - RNA, 21 nt, Human
gacgccaacccaggccagcag

SEQ ID NO: 1284707 - RNA, 22 nt, Human
gcaacgaagaagccaccgcuaa

SEQ ID NO: 1284708 - RNA, 19 nt, Human
gcuaagcguggucuugggg

SEQ ID NO: 1284709 - RNA, 19 nt, Human
ggaagugcagcuggacgcc

SEQ ID NO: 1284710 - RNA, 21 nt, Human
ggaccuccgagucccucagcc

SEQ ID NO: 1284711 - RNA, 19 nt, Human
ggagacgccaacccaggcc

SEQ ID NO: 1284712 - RNA, 18 nt, Human
ggcgcccggguucugcug

SEQ ID NO: 1284713 - RNA, 20 nt, Human
gggcaggcagggcgggagcu

SEQ ID NO: 1284714 - RNA, 19 nt, Human
uaagaccaaaacagaugac

SEQ ID NO: 1284715 - RNA, 26 nt, Human
uaagaccaaaacagaugacuccaggu

SEQ ID NO: 1284716 - RNA, 22 nt, Human
ucacagaggagaacuuuugcuu

SEQ ID NO: 1284717 - RNA, 19 nt, Human
ucacuggcuuuucuucuuc

SEQ ID NO: 1284718 - RNA, 21 nt, Human
uccgcugggccucccacuaca

SEQ ID NO: 1284719 - RNA, 19 nt, Human
ucuaagcugcuguggaccu

SEQ ID NO: 1284720 - RNA, 19 nt, Human
ugccucacagaggagaacu

SEQ ID NO: 1284721 - RNA, 20 nt, Human
uggaccuccgagucccucag

SEQ ID NO: 1284722 - RNA, 19 nt, Human
uggcagagggagcacaugg

SEQ ID NO: 1284723 - RNA, 18 nt, Human
ugggccucccacuacagc

SEQ ID NO: 1284724 - RNA, 19 nt, Human
aaagugcuggaauuacagg

SEQ ID NO: 1284725 - RNA, 22 nt, Human
aaagugcuggaauuacaggcau

SEQ ID NO: 1284726 - RNA, 24 nt, Human
aaagugcuggaauuacaggcauga

SEQ ID NO: 1284727 - RNA, 20 nt, Human
aaccuccaccugccagguuc

SEQ ID NO: 1284728 - RNA, 24 nt, Human
aagauggcagaggaugggaggaag

SEQ ID NO: 1284729 - RNA, 24 nt, Human
aagcgauccaccugccuuggccuc

SEQ ID NO: 1284730 - RNA, 26 nt, Human
aagugcuggaauuacaggcaugagcc

SEQ ID NO: 1284731 - RNA, 20 nt, Human
aauuacaggcaugagccacc

SEQ ID NO: 1284732 - RNA, 18 nt, Human
accaaguaccaagauggc

SEQ ID NO: 1284733 - RNA, 24 nt, Human
accauguuggccaggcuggucucg

SEQ ID NO: 1284734 - RNA, 20 nt, Human
accccgccuggccugagcca

SEQ ID NO: 1284735 - RNA, 21 nt, Human
accucucauguccuucuccac

SEQ ID NO: 1284736 - RNA, 18 nt, Human
acgggguuucaccauguu

SEQ ID NO: 1284737 - RNA, 23 nt, Human
acgggguuucaccauguuggcca

SEQ ID NO: 1284738 - RNA, 24 nt, Human
acgggguuucaccauguuggccag

SEQ ID NO: 1284739 - RNA, 20 nt, Human
acucaugguccuuucacagg

SEQ ID NO: 1284740 - RNA, 27 nt, Human
acucuauugcccaggcuggagugcaau

SEQ ID NO: 1284741 - RNA, 19 nt, Human
agccuccugaguagcuaag

SEQ ID NO: 1284742 - RNA, 18 nt, Human
agcuaagggauuacaggc

SEQ ID NO: 1284743 - RNA, 20 nt, Human
agcuaagggauuacaggcgu

SEQ ID NO: 1284744 - RNA, 22 nt, Human
agcuaagggauuacaggcguga

SEQ ID NO: 1284745 - RNA, 18 nt, Human
aggagcaaaaagggucua

SEQ ID NO: 1284746 - RNA, 19 nt, Human
aggcagucaccugacggug

SEQ ID NO: 1284747 - RNA, 18 nt, Human
agggauuacaggcgugag

SEQ ID NO: 1284748 - RNA, 22 nt, Human
agggauuacaggcgugagccac

SEQ ID NO: 1284749 - RNA, 23 nt, Human
agggauuacaggcgugagccacc

SEQ ID NO: 1284750 - RNA, 24 nt, Human
agggauuacaggcgugagccacca

SEQ ID NO: 1284751 - RNA, 21 nt, Human
agguucaagugauucuccugc

SEQ ID NO: 1284752 - RNA, 22 nt, Human
agguucaagugauucuccugcc

SEQ ID NO: 1284753 - RNA, 23 nt, Human
agguucaagugauucuccugccu

SEQ ID NO: 1284754 - RNA, 19 nt, Human
aguaccaagauggcagagg

SEQ ID NO: 1284755 - RNA, 18 nt, Human
agucuuugcugggucagc

SEQ ID NO: 1284756 - RNA, 24 nt, Human
agugauucuccugccucagccucc

SEQ ID NO: 1284757 - RNA, 24 nt, Human
agugcaauggcacgaucuuggcuc

SEQ ID NO: 1284758 - RNA, 23 nt, Human
augguccuuucacagggucagag

SEQ ID NO: 1284759 - RNA, 18 nt, Human
auucuccugccucagccu

SEQ ID NO: 1284760 - RNA, 20 nt, Human
caaagaaaggagccaacagu

SEQ ID NO: 1284761 - RNA, 22 nt, Human
caagcccccaaguccaaucccc

SEQ ID NO: 1284762 - RNA, 22 nt, Human
caagcccccaaguccaaucccc

SEQ ID NO: 1284763 - RNA, 23 nt, Human
caagcccccaaguccaaucccuu

SEQ ID NO: 1284764 - RNA, 20 nt, Human
caagcgauccaccugccuug

SEQ ID NO: 1284765 - RNA, 20 nt, Human
caagugauucuccugccuca

SEQ ID NO: 1284766 - RNA, 22 nt, Human
caagugauucuccugccucagc

SEQ ID NO: 1284767 - RNA, 21 nt, Human
caccauguuggccaggcuggu

SEQ ID NO: 1284768 - RNA, 24 nt, Human
caccauguuggccaggcuggucuc

SEQ ID NO: 1284769 - RNA, 23 nt, Human
cacccaucccucuggaaguccuc

SEQ ID NO: 1284770 - RNA, 19 nt, Human
caccccgccuggccugagc

SEQ ID NO: 1284771 - RNA, 24 nt, Human
caccugccuuggccuccuaaagug

SEQ ID NO: 1284772 - RNA, 24 nt, Human
cacucuauugcccaggcuggagug

SEQ ID NO: 1284773 - RNA, 18 nt, Human
cagagcagugcaggaagg

SEQ ID NO: 1284774 - RNA, 22 nt, Human
cagccuccugaguagcuaaggg

SEQ ID NO: 1284775 - RNA, 22 nt, Human
caggaaggacugggggacccua

SEQ ID NO: 1284776 - RNA, 18 nt, Human
caggagccccuccucucc

SEQ ID NO: 1284777 - RNA, 19 nt, Human
caggagccccuccucuccu

SEQ ID NO: 1284778 - RNA, 21 nt, Human
caucaagguccaagcccccaa

SEQ ID NO: 1284779 - RNA, 22 nt, Human
caucaagguccaagcccccaag

SEQ ID NO: 1284780 - RNA, 24 nt, Human
caucaagguccaagcccccaaguc

SEQ ID NO: 1284781 - RNA, 18 nt, Human
cauggcccaagaugauag

SEQ ID NO: 1284782 - RNA, 24 nt, Human
cauguuggccaggcuggucucgaa

SEQ ID NO: 1284783 - RNA, 21 nt, Human
ccaaguccaauccccugugcu

SEQ ID NO: 1284784 - RNA, 18 nt, Human
ccagguucaagugauucu

SEQ ID NO: 1284785 - RNA, 19 nt, Human
ccagguucaagugauucuc

SEQ ID NO: 1284786 - RNA, 20 nt, Human
cccaggagccccuccucucc

SEQ ID NO: 1284787 - RNA, 18 nt, Human
ccccacuuccuucucauc

SEQ ID NO: 1284788 - RNA, 26 nt, Human
ccccacuuccuucucaucuccuccaa

SEQ ID NO: 1284789 - RNA, 18 nt, Human
cccuccugacuucccacu

SEQ ID NO: 1284790 - RNA, 21 nt, Human
cccucuggaaguccucaggaa

SEQ ID NO: 1284791 - RNA, 23 nt, Human
cccugugcugauccagauccuuc

SEQ ID NO: 1284792 - RNA, 21 nt, Human
ccucaagcgauccaccugccu

SEQ ID NO: 1284793 - RNA, 18 nt, Human
ccuccugacuucccacua

SEQ ID NO: 1284794 - RNA, 22 nt, Human
ccucucaucaugcucagugguc

SEQ ID NO: 1284795 - RNA, 21 nt, Human
ccucugagcccuguucccagg

SEQ ID NO: 1284796 - RNA, 25 nt, Human
ccugaguagcuaagggauuacaggc

SEQ ID NO: 1284797 - RNA, 24 nt, Human
ccugccagguucaagugauucucc

SEQ ID NO: 1284798 - RNA, 23 nt, Human
ccugccucagccuccugaguagc

SEQ ID NO: 1284799 - RNA, 21 nt, Human
ccuggccucaagcgauccacc

SEQ ID NO: 1284800 - RNA, 23 nt, Human
ccuggccucaagcgauccaccug

SEQ ID NO: 1284801 - RNA, 23 nt, Human
ccuggccucaagcgauccaccug

SEQ ID NO: 1284802 - RNA, 20 nt, Human
cggagucuuugcugggucag

SEQ ID NO: 1284803 - RNA, 21 nt, Human
cgugauggguccuucccacag

SEQ ID NO: 1284804 - RNA, 19 nt, Human
cuaaagugcuggaauuaca

SEQ ID NO: 1284805 - RNA, 24 nt, Human
cuaaagugcuggaauuacaggcau

SEQ ID NO: 1284806 - RNA, 24 nt, Human
cucaagcgauccaccugccuuggc

SEQ ID NO: 1284807 - RNA, 20 nt, Human
cucacucuauugcccaggcc

SEQ ID NO: 1284808 - RNA, 19 nt, Human
cucacuguaaccuccaccu

SEQ ID NO: 1284809 - RNA, 24 nt, Human
cucacuguaaccuccaccugccag

SEQ ID NO: 1284810 - RNA, 18 nt, Human
cuccaagucacgggccug

SEQ ID NO: 1284811 - RNA, 26 nt, Human
cuccugaguagcuaagggauuacagg

SEQ ID NO: 1284812 - RNA, 18 nt, Human
cugccagguucaagugau

SEQ ID NO: 1284813 - RNA, 25 nt, Human
cugccagguucaagugauucuccug

SEQ ID NO: 1284814 - RNA, 23 nt, Human
cugccucagccuccugaguagcu

SEQ ID NO: 1284815 - RNA, 21 nt, Human
cugccucugagcccuguuccc

SEQ ID NO: 1284816 - RNA, 18 nt, Human
cugggucagccuauauug

SEQ ID NO: 1284817 - RNA, 24 nt, Human
cuguaaccuccaccugccagguuc

SEQ ID NO: 1284818 - RNA, 18 nt, Human
gaacacccuggaaucggc

SEQ ID NO: 1284819 - RNA, 19 nt, Human
gaauuacaggcaugagcca

SEQ ID NO: 1284820 - RNA, 24 nt, Human
gagacgggguuucaccauguuggc

SEQ ID NO: 1284821 - RNA, 21 nt, Human
gagccaacaguaggcgaggaa

SEQ ID NO: 1284822 - RNA, 20 nt, Human
gagccucaguuuccccauug

SEQ ID NO: 1284823 - RNA, 18 nt, Human
gaggaugggaggaaggca

SEQ ID NO: 1284824 - RNA, 23 nt, Human
gaggugcugggcacaugucugcu

SEQ ID NO: 1284825 - RNA, 21 nt, Human
gauggcagaggaugggaggaa

SEQ ID NO: 1284826 - RNA, 18 nt, Human
gauuacaggcgugagcca

SEQ ID NO: 1284827 - RNA, 21 nt, Human
gauuacaggcgugagccacca

SEQ ID NO: 1284828 - RNA, 24 nt, Human
gauuacaggcgugagccaccaugu

SEQ ID NO: 1284829 - RNA, 19 nt, Human
gcagucaccugacgguggg

SEQ ID NO: 1284830 - RNA, 21 nt, Human
gccaggccgugcuagccaggg

SEQ ID NO: 1284831 - RNA, 19 nt, Human
gcccaggcuggagugcaau

SEQ ID NO: 1284832 - RNA, 22 nt, Human
gccuuggccuccuaaagugcug

SEQ ID NO: 1284833 - RNA, 23 nt, Human
gcgauccaccugccuuggccucc

SEQ ID NO: 1284834 - RNA, 20 nt, Human
gcucaguggucuucguccgu

SEQ ID NO: 1284835 - RNA, 19 nt, Human
gcuggagugcaauggcacg

SEQ ID NO: 1284836 - RNA, 22 nt, Human
ggaaggcaccucucauguccuu

SEQ ID NO: 1284837 - RNA, 22 nt, Human
ggacucugccaggccgugcuag

SEQ ID NO: 1284838 - RNA, 24 nt, Human
ggauuacaggcgugagccaccaug

SEQ ID NO: 1284839 - RNA, 23 nt, Human
gggauuacaggcgugagccacca

SEQ ID NO: 1284840 - RNA, 24 nt, Human
gggauuacaggcgugagccaccau

SEQ ID NO: 1284841 - RNA, 18 nt, Human
gggccuggcacaaaggag

SEQ ID NO: 1284842 - RNA, 23 nt, Human
gggguuucaccauguuggccagg

SEQ ID NO: 1284843 - RNA, 22 nt, Human
ggguuucaccauguuggccagg

SEQ ID NO: 1284844 - RNA, 23 nt, Human
guagagacgggguuucaccaugu

SEQ ID NO: 1284845 - RNA, 21 nt, Human
guagcuaagggauuacaggcg

SEQ ID NO: 1284846 - RNA, 24 nt, Human
guagcuaagggauuacaggcguga

SEQ ID NO: 1284847 - RNA, 19 nt, Human
guccuucuccacccauccc

SEQ ID NO: 1284848 - RNA, 24 nt, Human
gugauucuccugccucagccuccu

SEQ ID NO: 1284849 - RNA, 19 nt, Human
gugcuggaauuacaggcau

SEQ ID NO: 1284850 - RNA, 21 nt, Human
guucccaggagccccuccucu

SEQ ID NO: 1284851 - RNA, 24 nt, Human
uaaagugcuggaauuacaggcaug

SEQ ID NO: 1284852 - RNA, 26 nt, Human
uaauuuuuuuguauuuuuaguagaga

SEQ ID NO: 1284853 - RNA, 18 nt, Human
uacaggcgugagccacca

SEQ ID NO: 1284854 - RNA, 22 nt, Human
uaccaucaagguccaagccccc

SEQ ID NO: 1284855 - RNA, 22 nt, Human
uagagacgggguuucaccaugu

SEQ ID NO: 1284856 - RNA, 24 nt, Human
uaguagagacgggguuucaccaug

SEQ ID NO: 1284857 - RNA, 26 nt, Human
uaguagagacgggguuucaccauguu

SEQ ID NO: 1284858 - RNA, 19 nt, Human
uauugcccaggcuggagug

SEQ ID NO: 1284859 - RNA, 20 nt, Human
uauugcccaggcuggagugc

SEQ ID NO: 1284860 - RNA, 25 nt, Human
ucaaagaaaggagccaacaguaggc

SEQ ID NO: 1284861 - RNA, 19 nt, Human
ucaagugauucuccugccu

SEQ ID NO: 1284862 - RNA, 24 nt, Human
ucacucuauugcccaggcuggagu

SEQ ID NO: 1284863 - RNA, 18 nt, Human
ucacuguaaccuccaccu

SEQ ID NO: 1284864 - RNA, 19 nt, Human
ucacuguaaccuccaccug

SEQ ID NO: 1284865 - RNA, 20 nt, Human
ucacuguaaccuccaccugc

SEQ ID NO: 1284866 - RNA, 24 nt, Human
ucacuguaaccuccaccugccagg

SEQ ID NO: 1284867 - RNA, 20 nt, Human
ucaguggucuucguccgucc

SEQ ID NO: 1284868 - RNA, 23 nt, Human
ucaguggucuucguccguccucc

SEQ ID NO: 1284869 - RNA, 25 nt, Human
ucccacagauacugcagaacccucc

SEQ ID NO: 1284870 - RNA, 20 nt, Human
ucccaggagccccuccucuc

SEQ ID NO: 1284871 - RNA, 24 nt, Human
uccuaaagugcuggaauuacaggc

SEQ ID NO: 1284872 - RNA, 26 nt, Human
uccugaguagcuaagggauuacaggc

SEQ ID NO: 1284873 - RNA, 24 nt, Human
uccugggaggcccaggucugccug

SEQ ID NO: 1284874 - RNA, 18 nt, Human
uccuucucaucuccucca

SEQ ID NO: 1284875 - RNA, 24 nt, Human
ucuauugcccaggcuggagugcaa

SEQ ID NO: 1284876 - RNA, 23 nt, Human
ucucacucuauugcccaggcugg

SEQ ID NO: 1284877 - RNA, 24 nt, Human
ucucacucuauugcccaggcugga

SEQ ID NO: 1284878 - RNA, 26 nt, Human
ucucacucuauugcccaggcuggagu

SEQ ID NO: 1284879 - RNA, 24 nt, Human
ucuccugccucagccuccugagua

SEQ ID NO: 1284880 - RNA, 21 nt, Human
ucuccuggcauggacauccag

SEQ ID NO: 1284881 - RNA, 21 nt, Human
ucugagcccuguucccaggag

SEQ ID NO: 1284882 - RNA, 23 nt, Human
ucugagcccuguucccaggagga

SEQ ID NO: 1284883 - RNA, 26 nt, Human
ugacucaaagaaaggagccaacaggg

SEQ ID NO: 1284884 - RNA, 18 nt, Human
ugagacagagucucacuc

SEQ ID NO: 1284885 - RNA, 22 nt, Human
ugagacagagucucacucuauu

SEQ ID NO: 1284886 - RNA, 18 nt, Human
ugagccaccccgccuggc

SEQ ID NO: 1284887 - RNA, 23 nt, Human
ugccaggccgugcuagccagggg

SEQ ID NO: 1284888 - RNA, 24 nt, Human
ugccagguucaagugauucuccug

SEQ ID NO: 1284889 - RNA, 18 nt, Human
ugcccaggcuggagugca

SEQ ID NO: 1284890 - RNA, 21 nt, Human
ugcccaggcuggagugcaaug

SEQ ID NO: 1284891 - RNA, 24 nt, Human
ugcccaggcuggagugcaauggca

SEQ ID NO: 1284892 - RNA, 24 nt, Human
ugccguggugagcaggagcuuccc

SEQ ID NO: 1284893 - RNA, 23 nt, Human
ugccucagccuccugaguagcua

SEQ ID NO: 1284894 - RNA, 24 nt, Human
ugccucagccuccugaguagcuaa

SEQ ID NO: 1284895 - RNA, 22 nt, Human
ugccugccucucuccuggcaug

SEQ ID NO: 1284896 - RNA, 19 nt, Human
ugcuagccagggggcugcc

SEQ ID NO: 1284897 - RNA, 22 nt, Human
ugcuagccagggggcugccgug

SEQ ID NO: 1284898 - RNA, 22 nt, Human
ugcugauccagauccuuccugc

SEQ ID NO: 1284899 - RNA, 20 nt, Human
uggaacacccuggaaucggc

SEQ ID NO: 1284900 - RNA, 18 nt, Human
uggaauuacaggcaugag

SEQ ID NO: 1284901 - RNA, 21 nt, Human
uggaauuacaggcaugagcca

SEQ ID NO: 1284902 - RNA, 22 nt, Human
uggaauuacaggcaugagccac

SEQ ID NO: 1284903 - RNA, 23 nt, Human
uggaauuacaggcaugagccacc

SEQ ID NO: 1284904 - RNA, 24 nt, Human
uggaauuacaggcaugagccaccc

SEQ ID NO: 1284905 - RNA, 18 nt, Human
uggacucugccaggccgu

SEQ ID NO: 1284906 - RNA, 23 nt, Human
uggagugcaauggcacgaucuug

SEQ ID NO: 1284907 - RNA, 24 nt, Human
uggagugcaauggcacgaucuugg

SEQ ID NO: 1284908 - RNA, 24 nt, Human
uggcacgaucuuggcucacuguaa

SEQ ID NO: 1284909 - RNA, 24 nt, Human
uggccaggcuggucucgaauuccu

SEQ ID NO: 1284910 - RNA, 24 nt, Human
uggcucacuguaaccuccaccugc

SEQ ID NO: 1284911 - RNA, 24 nt, Human
ugggaguguuaggagcaaaaaggg

SEQ ID NO: 1284912 - RNA, 21 nt, Human
uggggccuggcacaaaggagg

SEQ ID NO: 1284913 - RNA, 19 nt, Human
ugggggacccuaugcggug

SEQ ID NO: 1284914 - RNA, 18 nt, Human
uuaguagagacgggguuu

SEQ ID NO: 1284915 - RNA, 22 nt, Human
uuaguagagacgggguuucacc

SEQ ID NO: 1284916 - RNA, 24 nt, Human
uuaguagagacgggguuucaccau

SEQ ID NO: 1284917 - RNA, 21 nt, Human
uucaagugauucuccugccuc

SEQ ID NO: 1284918 - RNA, 23 nt, Human
uucaagugauucuccugccucag

SEQ ID NO: 1284919 - RNA, 24 nt, Human
uucaagugauucuccugccucagc

SEQ ID NO: 1284920 - RNA, 23 nt, Human
uuccccauugguaaaaugaggau

SEQ ID NO: 1284921 - RNA, 23 nt, Human
uuccuggccucaagcgauccacc

SEQ ID NO: 1284922 - RNA, 18 nt, Human
uugcccaggcuggagugc

SEQ ID NO: 1284923 - RNA, 18 nt, Human
uuggccuccuaaagugcu

SEQ ID NO: 1284924 - RNA, 18 nt, Human
uugggguugggagacuuu

SEQ ID NO: 1284925 - RNA, 23 nt, Human
uuguauuuuuaguagagacgggg

SEQ ID NO: 1284926 - RNA, 24 nt, Human
uuucaccauguuggccaggcuggu

SEQ ID NO: 1284927 - RNA, 26 nt, Human
uuugaagaccaaguucuuccccacuu

SEQ ID NO: 1284928 - RNA, 24 nt, Human
uuuuuaguagagacgggguuucac

SEQ ID NO: 1284929 - RNA, 21 nt, Human
uuuuuguauuuuuaguagaga

SEQ ID NO: 1284930 - RNA, 21 nt, Human
uuuuuuguauuuuuaguagag

SEQ ID NO: 1284931 - RNA, 24 nt, Human
uuuuuuguauuuuuaguagagacg

SEQ ID NO: 1284932 - RNA, 21 nt, Human
acacgcugcccuccucuuggg

SEQ ID NO: 1284933 - RNA, 19 nt, Human
agaaagagggaggggggac

SEQ ID NO: 1284934 - RNA, 21 nt, Human
agagaaagcggggaacccgga

SEQ ID NO: 1284935 - RNA, 24 nt, Human
agagaggaguggagggagcugugu

SEQ ID NO: 1284936 - RNA, 22 nt, Human
agaggacugggggccaccgcuu

SEQ ID NO: 1284937 - RNA, 21 nt, Human
agagggaggggggacauagag

SEQ ID NO: 1284938 - RNA, 21 nt, Human
agcagcagaagaggacugggg

SEQ ID NO: 1284939 - RNA, 22 nt, Human
agccaggguccuccugcagcca

SEQ ID NO: 1284940 - RNA, 28 nt, Human
agcccggggcaucugccugguugggcca

SEQ ID NO: 1284941 - RNA, 19 nt, Human
agcucccguggcuguggcc

SEQ ID NO: 1284942 - RNA, 21 nt, Human
agcuggaggaggaagaggggc

SEQ ID NO: 1284943 - RNA, 24 nt, Human
aggacgcuugcggcgcuggugaug

SEQ ID NO: 1284944 - RNA, 18 nt, Human
aggaggaagaggggcugg

SEQ ID NO: 1284945 - RNA, 20 nt, Human
aggaggaagaggggcugggc

SEQ ID NO: 1284946 - RNA, 27 nt, Human
agggaggggggacauagagaaagcggg

SEQ ID NO: 1284947 - RNA, 24 nt, Human
aggugucccuggcugcacugagcu

SEQ ID NO: 1284948 - RNA, 24 nt, Human
agugauaagagaggaguggaggga

SEQ ID NO: 1284949 - RNA, 18 nt, Human
agugccuugcgcggcccu

SEQ ID NO: 1284950 - RNA, 21 nt, Human
aucuaccccuuuccucuccca

SEQ ID NO: 1284951 - RNA, 23 nt, Human
cacgucccagaccacaggcacac

SEQ ID NO: 1284952 - RNA, 20 nt, Human
cagaccccuccccccacugg

SEQ ID NO: 1284953 - RNA, 19 nt, Human
cagcccacgucccagacca

SEQ ID NO: 1284954 - RNA, 18 nt, Human
cagcucaaaaggaugcag

SEQ ID NO: 1284955 - RNA, 24 nt, Human
cagcugcucccuccccagggaccc

SEQ ID NO: 1284956 - RNA, 24 nt, Human
cauccagcccacgucccagaccuu

SEQ ID NO: 1284957 - RNA, 21 nt, Human
caugugcuguaccaccuccuc

SEQ ID NO: 1284958 - RNA, 18 nt, Human
ccaaacccaugugcugua

SEQ ID NO: 1284959 - RNA, 19 nt, Human
ccaccagcccucagccagg

SEQ ID NO: 1284960 - RNA, 18 nt, Human
ccagaccccagaccccuc

SEQ ID NO: 1284961 - RNA, 22 nt, Human
cccacgucccagaccacaggca

SEQ ID NO: 1284962 - RNA, 19 nt, Human
cccagaccacaggcacacg

SEQ ID NO: 1284963 - RNA, 22 nt, Human
cccaggcugggauuuugggggc

SEQ ID NO: 1284964 - RNA, 18 nt, Human
ccccaagguacucccuug

SEQ ID NO: 1284965 - RNA, 19 nt, Human
ccccagaccccucccccca

SEQ ID NO: 1284966 - RNA, 19 nt, Human
ccccagaccccucccccca

SEQ ID NO: 1284967 - RNA, 18 nt, Human
ccccagggacccgucucc

SEQ ID NO: 1284968 - RNA, 23 nt, Human
ccccagggacccgucuccacuuu

SEQ ID NO: 1284969 - RNA, 21 nt, Human
ccccuccccccacuggagccc

SEQ ID NO: 1284970 - RNA, 22 nt, Human
cccggaccagaccccagacccc

SEQ ID NO: 1284971 - RNA, 24 nt, Human
cccggggcaucugccugguugggg

SEQ ID NO: 1284972 - RNA, 18 nt, Human
cccucagucucuuuccuc

SEQ ID NO: 1284973 - RNA, 18 nt, Human
ccgcgcgcgcgggggccg

SEQ ID NO: 1284974 - RNA, 18 nt, Human
ccggggcuggggcugcgg

SEQ ID NO: 1284975 - RNA, 23 nt, Human
ccuacagauuccaccucccaucu

SEQ ID NO: 1284976 - RNA, 25 nt, Human
ccuccugcagccagcucaaaaggau

SEQ ID NO: 1284977 - RNA, 18 nt, Human
cggaagaggggcucccag

SEQ ID NO: 1284978 - RNA, 24 nt, Human
cggaagaggggcucccagggcugg

SEQ ID NO: 1284979 - RNA, 19 nt, Human
cggaccagaccccagaccc

SEQ ID NO: 1284980 - RNA, 22 nt, Human
cggcagcagucccaagccuggu

SEQ ID NO: 1284981 - RNA, 22 nt, Human
cgggagcggcgccgggcgcggg

SEQ ID NO: 1284982 - RNA, 21 nt, Human
cgucugggcacuccugggucg

SEQ ID NO: 1284983 - RNA, 22 nt, Human
cucccaccucuugaccugaacc

SEQ ID NO: 1284984 - RNA, 22 nt, Human
cucccuucugagggcuguagcc

SEQ ID NO: 1284985 - RNA, 21 nt, Human
cuccugcagccagcucaaaag

SEQ ID NO: 1284986 - RNA, 23 nt, Human
cucugguaccauccaccggcagc

SEQ ID NO: 1284987 - RNA, 18 nt, Human
cucuuuccuccccucccu

SEQ ID NO: 1284988 - RNA, 21 nt, Human
cuggugaugcgccgcggcucc

SEQ ID NO: 1284989 - RNA, 22 nt, Human
cuugaccugaaccccuuuuaac

SEQ ID NO: 1284990 - RNA, 21 nt, Human
gaacccggaccagaccccaga

SEQ ID NO: 1284991 - RNA, 23 nt, Human
gaagaggggcugggccgguagua

SEQ ID NO: 1284992 - RNA, 21 nt, Human
gacccgucuccacucccuggg

SEQ ID NO: 1284993 - RNA, 20 nt, Human
gagcagcagaagaggacugg

SEQ ID NO: 1284994 - RNA, 20 nt, Human
gagcggcuggagcuccagga

SEQ ID NO: 1284995 - RNA, 23 nt, Human
gagcuguguagugcggaagaggg

SEQ ID NO: 1284996 - RNA, 18 nt, Human
gagcuugggggaggcugu

SEQ ID NO: 1284997 - RNA, 21 nt, Human
gaggacugggggccaccgcuu

SEQ ID NO: 1284998 - RNA, 21 nt, Human
gaggagcuugggggaggcugu

SEQ ID NO: 1284999 - RNA, 22 nt, Human
gagggccccaggaggagggggc

SEQ ID NO: 1285000 - RNA, 20 nt, Human
gccccaggccagggcccuca

SEQ ID NO: 1285001 - RNA, 21 nt, Human
gccggggcuggggcugcggcu

SEQ ID NO: 1285002 - RNA, 21 nt, Human
gcgagauuuggagggcgagcg

SEQ ID NO: 1285003 - RNA, 21 nt, Human
gcgagcggcuggggcuguggg

SEQ ID NO: 1285004 - RNA, 24 nt, Human
gcugaggggcuucuugggcgacgg

SEQ ID NO: 1285005 - RNA, 24 nt, Human
gcuguggggccagccaccagcccu

SEQ ID NO: 1285006 - RNA, 21 nt, Human
ggaagaggggcugggccggua

SEQ ID NO: 1285007 - RNA, 18 nt, Human
ggacccgucuccacuccc

SEQ ID NO: 1285008 - RNA, 18 nt, Human
ggagcccggggcaucugc

SEQ ID NO: 1285009 - RNA, 21 nt, Human
ggaggaggaagaggggcuggg

SEQ ID NO: 1285010 - RNA, 21 nt, Human
ggaggagggggcugggagcag

SEQ ID NO: 1285011 - RNA, 22 nt, Human
ggccaaggaagacuucaugaga

SEQ ID NO: 1285012 - RNA, 25 nt, Human
ggcccuggaggagggagacggcgcg

SEQ ID NO: 1285013 - RNA, 22 nt, Human
ggccggggcugcgcgacgagcu

SEQ ID NO: 1285014 - RNA, 18 nt, Human
ggccggggcuggggcugc

SEQ ID NO: 1285015 - RNA, 20 nt, Human
ggccggggcuggggcugcgg

SEQ ID NO: 1285016 - RNA, 20 nt, Human
ggcugcggcuguggcuccgg

SEQ ID NO: 1285017 - RNA, 21 nt, Human
ggcuggggcuguggggccgcu

SEQ ID NO: 1285018 - RNA, 21 nt, Human
ggcugggggcacugcugaccu

SEQ ID NO: 1285019 - RNA, 22 nt, Human
gggcugcggcuguggcuccggg

SEQ ID NO: 1285020 - RNA, 18 nt, Human
gggcuguggggccgcuuc

SEQ ID NO: 1285021 - RNA, 21 nt, Human
ggggcugggagcagcagaaga

SEQ ID NO: 1285022 - RNA, 24 nt, Human
gggggcugggagcagcagaagagg

SEQ ID NO: 1285023 - RNA, 19 nt, Human
ggugaggagagccuggccu

SEQ ID NO: 1285024 - RNA, 19 nt, Human
ggugcaccaaggguuaggc

SEQ ID NO: 1285025 - RNA, 20 nt, Human
ggugcaccaaggguuaggcu

SEQ ID NO: 1285026 - RNA, 19 nt, Human
guagugcggaagaggggcu

SEQ ID NO: 1285027 - RNA, 23 nt, Human
uagcucccguggcuguggccucc

SEQ ID NO: 1285028 - RNA, 23 nt, Human
ucagccaggguccuccugcagcc

SEQ ID NO: 1285029 - RNA, 18 nt, Human
ucagguccaaagcacaug

SEQ ID NO: 1285030 - RNA, 19 nt, Human
uccaccggcagcaguccca

SEQ ID NO: 1285031 - RNA, 20 nt, Human
uccaccggcagcagucccaa

SEQ ID NO: 1285032 - RNA, 25 nt, Human
ucccaucuaccccuuuccucuccca

SEQ ID NO: 1285033 - RNA, 19 nt, Human
uccccagcuuggauggggg

SEQ ID NO: 1285034 - RNA, 20 nt, Human
uccccagggacccgucucca

SEQ ID NO: 1285035 - RNA, 23 nt, Human
ucccggcugaggggcuucuuggg

SEQ ID NO: 1285036 - RNA, 21 nt, Human
ucccguggcuguggccggggc

SEQ ID NO: 1285037 - RNA, 18 nt, Human
ucccugggggcuacucag

SEQ ID NO: 1285038 - RNA, 19 nt, Human
uccuugucccggcugaggg

SEQ ID NO: 1285039 - RNA, 20 nt, Human
ucuccacucccugggggcua

SEQ ID NO: 1285040 - RNA, 18 nt, Human
ucucccaccucuugaccu

SEQ ID NO: 1285041 - RNA, 22 nt, Human
ucucccaccucuugaccugaac

SEQ ID NO: 1285042 - RNA, 23 nt, Human
ucugucuagcuccaaacccaugu

SEQ ID NO: 1285043 - RNA, 23 nt, Human
ucuuggguggggcugggggcacu

SEQ ID NO: 1285044 - RNA, 20 nt, Human
ugaagugacagagcagauca

SEQ ID NO: 1285045 - RNA, 24 nt, Human
ugaccugucagcugcucccucccc

SEQ ID NO: 1285046 - RNA, 23 nt, Human
ugagggccccaggaggagggggc

SEQ ID NO: 1285047 - RNA, 22 nt, Human
ugcaaggugucccuggcugcac

SEQ ID NO: 1285048 - RNA, 23 nt, Human
ugcccagugauaagagaggagug

SEQ ID NO: 1285049 - RNA, 19 nt, Human
ugccuagcuccccaggcug

SEQ ID NO: 1285050 - RNA, 24 nt, Human
ugccugugacccugggcugccauc

SEQ ID NO: 1285051 - RNA, 21 nt, Human
ugcggaagaggggcucccagg

SEQ ID NO: 1285052 - RNA, 20 nt, Human
ugcggaugggcgaguagcug

SEQ ID NO: 1285053 - RNA, 22 nt, Human
ugcucccuccccagggacccgu

SEQ ID NO: 1285054 - RNA, 19 nt, Human
uggaggaggaagaggggcu

SEQ ID NO: 1285055 - RNA, 21 nt, Human
uggaggaggaagaggggcugg

SEQ ID NO: 1285056 - RNA, 18 nt, Human
uggaggagggagacggcg

SEQ ID NO: 1285057 - RNA, 19 nt, Human
uggaggagggagacggcgc

SEQ ID NO: 1285058 - RNA, 19 nt, Human
uggagggagcuguguagug

SEQ ID NO: 1285059 - RNA, 19 nt, Human
uggcccagggcauggggug

SEQ ID NO: 1285060 - RNA, 22 nt, Human
uggccucggccucagagugccu

SEQ ID NO: 1285061 - RNA, 19 nt, Human
uggcgggccgcgcgcgcgg

SEQ ID NO: 1285062 - RNA, 21 nt, Human
uggcgggccgcgcgcgcgggg

SEQ ID NO: 1285063 - RNA, 20 nt, Human
uggcuguggccggggcuggg

SEQ ID NO: 1285064 - RNA, 19 nt, Human
uggggccagccaccagccc

SEQ ID NO: 1285065 - RNA, 19 nt, Human
uggggccagccaccagccc

SEQ ID NO: 1285066 - RNA, 23 nt, Human
uggggccgcuucuccgcagagcg

SEQ ID NO: 1285067 - RNA, 20 nt, Human
uggggugaggagagccuggc

SEQ ID NO: 1285068 - RNA, 18 nt, Human
uggguggggcugggggca

SEQ ID NO: 1285069 - RNA, 20 nt, Human
uggguggggcugggggcacu

SEQ ID NO: 1285070 - RNA, 22 nt, Human
ugguaccauccaccggcagcag

SEQ ID NO: 1285071 - RNA, 21 nt, Human
ugguaggaccuuggcccaggg

SEQ ID NO: 1285072 - RNA, 18 nt, Human
ugucagguccaaagcaca

SEQ ID NO: 1285073 - RNA, 20 nt, Human
ugucccggcugaggggcuuc

SEQ ID NO: 1285074 - RNA, 24 nt, Human
uguucuuccuucugucuagcucca

SEQ ID NO: 1285075 - RNA, 19 nt, Human
uuaggcuguucuuccuucu

SEQ ID NO: 1285076 - RNA, 18 nt, Human
uugcaaggugucccuggc

SEQ ID NO: 1285077 - RNA, 24 nt, Human
uuggcccuggaggagggagacggc

SEQ ID NO: 1285078 - RNA, 22 nt, Human
uugucccggcugaggggcuucu

SEQ ID NO: 1285079 - RNA, 18 nt, Human
aagacccacccaaagucc

SEQ ID NO: 1285080 - RNA, 21 nt, Human
aauggcagacaucaggaagga

SEQ ID NO: 1285081 - RNA, 23 nt, Human
acucccugggaagacccacccaa

SEQ ID NO: 1285082 - RNA, 18 nt, Human
agacuguuuucuacuauc

SEQ ID NO: 1285083 - RNA, 27 nt, Human
augaagcagaucacuggggcugaccuu

SEQ ID NO: 1285084 - RNA, 21 nt, Human
caccggauccgccucggggac

SEQ ID NO: 1285085 - RNA, 23 nt, Human
caggguauagaaugaaaggcagg

SEQ ID NO: 1285086 - RNA, 23 nt, Human
caucaggaaggaggagaggaacc

SEQ ID NO: 1285087 - RNA, 23 nt, Human
ccuacucccugggaagacccacc

SEQ ID NO: 1285088 - RNA, 24 nt, Human
cugggaagacccacccaaaguccu

SEQ ID NO: 1285089 - RNA, 18 nt, Human
cuguacuccagcucucag

SEQ ID NO: 1285090 - RNA, 18 nt, Human
cuguacuccagcucucag

SEQ ID NO: 1285091 - RNA, 19 nt, Human
cuguacuccagcucucagc

SEQ ID NO: 1285092 - RNA, 24 nt, Human
cuucucaauugcucugaacucuag

SEQ ID NO: 1285093 - RNA, 23 nt, Human
gaagcagaucacuggggcugacc

SEQ ID NO: 1285094 - RNA, 23 nt, Human
gcaccagcauccagacuguuuuc

SEQ ID NO: 1285095 - RNA, 23 nt, Human
gcaggagauaaaauugcacuucu

SEQ ID NO: 1285096 - RNA, 18 nt, Human
ggagaggaaccauuugug

SEQ ID NO: 1285097 - RNA, 22 nt, Human
gucagggucaccaaagugugag

SEQ ID NO: 1285098 - RNA, 21 nt, Human
uagaaugaaaggcaggagaua

SEQ ID NO: 1285099 - RNA, 25 nt, Human
uaguggcaccagcauccagacuguu

SEQ ID NO: 1285100 - RNA, 24 nt, Human
ucacaguugaacacgaugguucag

SEQ ID NO: 1285101 - RNA, 23 nt, Human
ucacuggggcugaccuugggugu

SEQ ID NO: 1285102 - RNA, 25 nt, Human
ucacuggggcugaccuuggguguau

SEQ ID NO: 1285103 - RNA, 22 nt, Human
ucaguaccaccugcccagagca

SEQ ID NO: 1285104 - RNA, 19 nt, Human
ucucucacuuccagaacac

SEQ ID NO: 1285105 - RNA, 22 nt, Human
ucucucacuuccagaacaccgg

SEQ ID NO: 1285106 - RNA, 19 nt, Human
ucucugagggugcccuacu

SEQ ID NO: 1285107 - RNA, 20 nt, Human
ucuucaccgcagugcuuaga

SEQ ID NO: 1285108 - RNA, 18 nt, Human
ugcccagagcaaaucuga

SEQ ID NO: 1285109 - RNA, 22 nt, Human
ugcccagagcaaaucugaugga

SEQ ID NO: 1285110 - RNA, 19 nt, Human
uucacaguugaacacgaug

SEQ ID NO: 1285111 - RNA, 21 nt, Human
uucuguacuccagcucucagc

SEQ ID NO: 1285112 - RNA, 19 nt, Human
aacugaacucccaggugcc

SEQ ID NO: 1285113 - RNA, 20 nt, Human
aucaggaaggucggaaucuc

SEQ ID NO: 1285114 - RNA, 18 nt, Human
guccaacugaacucccag

SEQ ID NO: 1285115 - RNA, 21 nt, Human
ucccaggugccgacagagucc

SEQ ID NO: 1285116 - RNA, 18 nt, Human
uccuuggucuucuucugg

SEQ ID NO: 1285117 - RNA, 19 nt, Human
ugggagaagucaggagugg

SEQ ID NO: 1285118 - RNA, 21 nt, Human
aaccuuuugagguuauucuga

SEQ ID NO: 1285119 - RNA, 21 nt, Human
accuucuuggcggacagagaa

SEQ ID NO: 1285120 - RNA, 18 nt, Human
agacgguggcgguggggg

SEQ ID NO: 1285121 - RNA, 18 nt, Human
aggagacaggugggagag

SEQ ID NO: 1285122 - RNA, 19 nt, Human
agggucccgggaggagagu

SEQ ID NO: 1285123 - RNA, 21 nt, Human
cagcugccugcuguucccgcc

SEQ ID NO: 1285124 - RNA, 23 nt, Human
cccacaaacucuucugcaaaccu

SEQ ID NO: 1285125 - RNA, 25 nt, Human
cccgggaggagaguugcagcuugcc

SEQ ID NO: 1285126 - RNA, 21 nt, Human
ccgccgcugcccccuucuccg

SEQ ID NO: 1285127 - RNA, 24 nt, Human
ccgccgcugcccccuucuccguuc

SEQ ID NO: 1285128 - RNA, 19 nt, Human
ccgcggcagcgacacagug

SEQ ID NO: 1285129 - RNA, 20 nt, Human
ccuccauuaggcuggugcuc

SEQ ID NO: 1285130 - RNA, 23 nt, Human
ccuuuaaugagacaaauggaaac

SEQ ID NO: 1285131 - RNA, 18 nt, Human
cgcggugccuucuucucc

SEQ ID NO: 1285132 - RNA, 20 nt, Human
cguucacucuccgcggugcc

SEQ ID NO: 1285133 - RNA, 18 nt, Human
cuuuuucuucuuuaccuu

SEQ ID NO: 1285134 - RNA, 22 nt, Human
gaccuucuuggcggacagagaa

SEQ ID NO: 1285135 - RNA, 20 nt, Human
gagggucccgggaggagagu

SEQ ID NO: 1285136 - RNA, 25 nt, Human
gaucuucaacaucaguuagcaaucc

SEQ ID NO: 1285137 - RNA, 18 nt, Human
gcagcugccugcuguucc

SEQ ID NO: 1285138 - RNA, 23 nt, Human
gccugcuguucccgccgcugccc

SEQ ID NO: 1285139 - RNA, 20 nt, Human
ggagacaggugggagaguuc

SEQ ID NO: 1285140 - RNA, 22 nt, Human
ggccgcggcagcgacacagugc

SEQ ID NO: 1285141 - RNA, 21 nt, Human
gggccgcggcagcgacacagu

SEQ ID NO: 1285142 - RNA, 24 nt, Human
guggcggugggggccgcggcagcg

SEQ ID NO: 1285143 - RNA, 20 nt, Human
guucacucuccgcggugccu

SEQ ID NO: 1285144 - RNA, 23 nt, Human
guuucuuuuucuuuuucuucuuu

SEQ ID NO: 1285145 - RNA, 19 nt, Human
uauccaaauucuucccaac

SEQ ID NO: 1285146 - RNA, 23 nt, Human
ucauuuaggaugccuuuggcugc

SEQ ID NO: 1285147 - RNA, 24 nt, Human
ucucucuuuaauuuugucuuugau

SEQ ID NO: 1285148 - RNA, 27 nt, Human
ucuucugcaaaccucuccaucuccaua

SEQ ID NO: 1285149 - RNA, 20 nt, Human
ucuuucuuuuucuuugucuc

SEQ ID NO: 1285150 - RNA, 19 nt, Human
ucuuuguguuucuuuuucu

SEQ ID NO: 1285151 - RNA, 23 nt, Human
ucuuuuauguuaucauuuaggau

SEQ ID NO: 1285152 - RNA, 20 nt, Human
ugagacaaauggaaacucac

SEQ ID NO: 1285153 - RNA, 28 nt, Human
ugagacaaauggaaacucacuguucucu

SEQ ID NO: 1285154 - RNA, 23 nt, Human
ugcuguucccgccgcugcccccu

SEQ ID NO: 1285155 - RNA, 18 nt, Human
uguucccgccgcugcccc

SEQ ID NO: 1285156 - RNA, 25 nt, Human
uguuuuugguuucuccuucccacuu

SEQ ID NO: 1285157 - RNA, 24 nt, Human
uucagcaaaaucuuuacuucucca

SEQ ID NO: 1285158 - RNA, 18 nt, Human
uucucuggaauuuuggaa

SEQ ID NO: 1285159 - RNA, 23 nt, Human
uuggcugcuugaucuucaacauc

SEQ ID NO: 1285160 - RNA, 25 nt, Human
uugucucucucuuuaauuuugucuu

SEQ ID NO: 1285161 - RNA, 21 nt, Human
uuuguaagucuucuauauuug

SEQ ID NO: 1285162 - RNA, 22 nt, Human
uuuguaagucuucuauauuugu

SEQ ID NO: 1285163 - RNA, 27 nt, Human
uuuguaagucuucuauauuuguuuuug

SEQ ID NO: 1285164 - RNA, 26 nt, Human
aauacaaaaacaggaucauuauuaga

SEQ ID NO: 1285165 - RNA, 20 nt, Human
accauaaauauggagauaca

SEQ ID NO: 1285166 - RNA, 19 nt, Human
agugugagguccaagaaca

SEQ ID NO: 1285167 - RNA, 22 nt, Human
agugugagguccaagaacagau

SEQ ID NO: 1285168 - RNA, 22 nt, Human
caaagaauugagggggguggga

SEQ ID NO: 1285169 - RNA, 23 nt, Human
cagcaccaaugugaagaaaauac

SEQ ID NO: 1285170 - RNA, 26 nt, Human
cagcaccaaugugaagaaaauacaaa

SEQ ID NO: 1285171 - RNA, 26 nt, Human
cauuauuagagccaaagaauugaggg

SEQ ID NO: 1285172 - RNA, 19 nt, Human
gggggugggagcagaagcu

SEQ ID NO: 1285173 - RNA, 19 nt, Human
uaucagcaccaaugugaag

SEQ ID NO: 1285174 - RNA, 20 nt, Human
ugauguggaaucugaugaug

SEQ ID NO: 1285175 - RNA, 19 nt, Human
acagugcccacaaauaugc

SEQ ID NO: 1285176 - RNA, 21 nt, Human
caugugcaucuucauacgagu

SEQ ID NO: 1285177 - RNA, 21 nt, Human
acccaaaucauuugcuuuccu

SEQ ID NO: 1285178 - RNA, 23 nt, Human
agaaaaaacauaaauuggaucau

SEQ ID NO: 1285179 - RNA, 24 nt, Human
aguggugguguccaucuccuggca

SEQ ID NO: 1285180 - RNA, 18 nt, Human
auaaggcaaucaaauguu

SEQ ID NO: 1285181 - RNA, 18 nt, Human
cacaugugccuuccaaau

SEQ ID NO: 1285182 - RNA, 23 nt, Human
caccgugcagucaucacgauuag

SEQ ID NO: 1285183 - RNA, 25 nt, Human
cagaaugagagccccauucuccauu

SEQ ID NO: 1285184 - RNA, 19 nt, Human
cagcggcauggcccuccuc

SEQ ID NO: 1285185 - RNA, 20 nt, Human
cagcggcauggcccuccucu

SEQ ID NO: 1285186 - RNA, 20 nt, Human
cagcggcauggcccuccucu

SEQ ID NO: 1285187 - RNA, 21 nt, Human
cagcggcauggcccuccucug

SEQ ID NO: 1285188 - RNA, 24 nt, Human
cauaaugcauaugcucacaugugg

SEQ ID NO: 1285189 - RNA, 19 nt, Human
ccuguaaaacuagagcagg

SEQ ID NO: 1285190 - RNA, 20 nt, Human
cuguuuuaaggucaggaaaa

SEQ ID NO: 1285191 - RNA, 18 nt, Human
cuuccugaguugagcuuc

SEQ ID NO: 1285192 - RNA, 18 nt, Human
gaaaagaacucaaagaag

SEQ ID NO: 1285193 - RNA, 22 nt, Human
gguaugaggacagacccuaaaa

SEQ ID NO: 1285194 - RNA, 19 nt, Human
gucagaaugagagccccau

SEQ ID NO: 1285195 - RNA, 24 nt, Human
gugcacagcauagaucaaagacac

SEQ ID NO: 1285196 - RNA, 23 nt, Human
guggugguguccaucuccuggca

SEQ ID NO: 1285197 - RNA, 18 nt, Human
uaaauaaugggaaaaaua

SEQ ID NO: 1285198 - RNA, 22 nt, Human
uaaauaaugggaaaaauauacc

SEQ ID NO: 1285199 - RNA, 22 nt, Human
uaaggugcacagcauagaucaa

SEQ ID NO: 1285200 - RNA, 19 nt, Human
uagacaucauaaagaauaa

SEQ ID NO: 1285201 - RNA, 21 nt, Human
ucagcagugcauuggugggcu

SEQ ID NO: 1285202 - RNA, 23 nt, Human
uccccaaaauauaaacaaagaaa

SEQ ID NO: 1285203 - RNA, 24 nt, Human
uccccaaaauauaaacaaagaaaa

SEQ ID NO: 1285204 - RNA, 19 nt, Human
ugaaaagaacucaaagaag

SEQ ID NO: 1285205 - RNA, 22 nt, Human
ugaaaagaacucaaagaagaug

SEQ ID NO: 1285206 - RNA, 23 nt, Human
ugcacagcauagaucaaagacac

SEQ ID NO: 1285207 - RNA, 21 nt, Human
ugcucacaugugccuuccaaa

SEQ ID NO: 1285208 - RNA, 18 nt, Human
uggcaagguacuugacca

SEQ ID NO: 1285209 - RNA, 21 nt, Human
ugugagaucaccaaugugaca

SEQ ID NO: 1285210 - RNA, 22 nt, Human
uguuucaaucuccuucccuuuu

SEQ ID NO: 1285211 - RNA, 23 nt, Human
uucaaucuccuucccuuuucagc

SEQ ID NO: 1285212 - RNA, 19 nt, Human
uuccccaaaauauaaacaa

SEQ ID NO: 1285213 - RNA, 18 nt, Human
uugaccaugugauaaggc

SEQ ID NO: 1285214 - RNA, 25 nt, Human
uugucaguggugguguccaucuccu

SEQ ID NO: 1285215 - RNA, 18 nt, Human
uuuggcaagguacuugac

SEQ ID NO: 1285216 - RNA, 20 nt, Human
aaaaccaccauaauccagca

SEQ ID NO: 1285217 - RNA, 18 nt, Human
aaaggcacaccaaauucu

SEQ ID NO: 1285218 - RNA, 20 nt, Human
aacauggugaaacccugucu

SEQ ID NO: 1285219 - RNA, 21 nt, Human
aacauggugaaacccugucuc

SEQ ID NO: 1285220 - RNA, 20 nt, Human
aagaaaaagaauugaauucc

SEQ ID NO: 1285221 - RNA, 25 nt, Human
aagucaauuucaguuaaaagacuua

SEQ ID NO: 1285222 - RNA, 23 nt, Human
aaguuucuugaaggauuaguucu

SEQ ID NO: 1285223 - RNA, 20 nt, Human
aauugcuugagcccaggagg

SEQ ID NO: 1285224 - RNA, 23 nt, Human
acaaauugaaaggcacaccaaau

SEQ ID NO: 1285225 - RNA, 19 nt, Human
acacaacugacugucccuu

SEQ ID NO: 1285226 - RNA, 24 nt, Human
acccugucucuacaaaaaauacga

SEQ ID NO: 1285227 - RNA, 19 nt, Human
agauaucagaacauaaaac

SEQ ID NO: 1285228 - RNA, 22 nt, Human
agccuggccaacauggugaaac

SEQ ID NO: 1285229 - RNA, 24 nt, Human
agccuggccaacauggugaaaccc

SEQ ID NO: 1285230 - RNA, 25 nt, Human
agcuggaagaaaaauauacucacaa

SEQ ID NO: 1285231 - RNA, 19 nt, Human
agcuuuuugggaggcugag

SEQ ID NO: 1285232 - RNA, 22 nt, Human
aggaaagaugaaaauuuaagau

SEQ ID NO: 1285233 - RNA, 24 nt, Human
aggcaugguggcucaugcuaguaa

SEQ ID NO: 1285234 - RNA, 22 nt, Human
aggccaggcaugguggcucaug

SEQ ID NO: 1285235 - RNA, 24 nt, Human
aggcugagguugcagugagccuag

SEQ ID NO: 1285236 - RNA, 25 nt, Human
aggcugagguugcagugagccuagg

SEQ ID NO: 1285237 - RNA, 22 nt, Human
auaaaaaucaaggugugaacaa

SEQ ID NO: 1285238 - RNA, 22 nt, Human
auaggccaggcaugguggcuca

SEQ ID NO: 1285239 - RNA, 23 nt, Human
aucuguuccaaucugcugugauc

SEQ ID NO: 1285240 - RNA, 19 nt, Human
augcuuaugccugggaguu

SEQ ID NO: 1285241 - RNA, 23 nt, Human
augcuuaugccugggaguucaag

SEQ ID NO: 1285242 - RNA, 21 nt, Human
auguaaacauaaaauacugga

SEQ ID NO: 1285243 - RNA, 23 nt, Human
caaauaguccauccacaacagga

SEQ ID NO: 1285244 - RNA, 24 nt, Human
caacauggugaaacccugucucua

SEQ ID NO: 1285245 - RNA, 25 nt, Human
caagaaaaauacauguaucuagaag

SEQ ID NO: 1285246 - RNA, 24 nt, Human
caagaccagccuggccaacauggu

SEQ ID NO: 1285247 - RNA, 21 nt, Human
cacaacaggaaagaugaaaau

SEQ ID NO: 1285248 - RNA, 19 nt, Human
cacaccuauaaucccagcc

SEQ ID NO: 1285249 - RNA, 26 nt, Human
caccauaauccagcauguggaacugg

SEQ ID NO: 1285250 - RNA, 21 nt, Human
cagcacuuccaagauaggcau

SEQ ID NO: 1285251 - RNA, 20 nt, Human
cagcuuuuugggaggcugag

SEQ ID NO: 1285252 - RNA, 23 nt, Human
cagcuuuuugggaggcugagaca

SEQ ID NO: 1285253 - RNA, 18 nt, Human
caggcagaaugcuuaugc

SEQ ID NO: 1285254 - RNA, 21 nt, Human
cauaaaaccaccauaauccag

SEQ ID NO: 1285255 - RNA, 21 nt, Human
caucccucuugggcaguuuua

SEQ ID NO: 1285256 - RNA, 24 nt, Human
caugcuaguaaucccagcuuuuug

SEQ ID NO: 1285257 - RNA, 22 nt, Human
cauuauuauuucaauuuaggga

SEQ ID NO: 1285258 - RNA, 21 nt, Human
cccaaagagaauauucagcac

SEQ ID NO: 1285259 - RNA, 23 nt, Human
ccuauaaucccagccacucagga

SEQ ID NO: 1285260 - RNA, 22 nt, Human
ccuggccaacauggugaaaccc

SEQ ID NO: 1285261 - RNA, 24 nt, Human
ccuggccaacauggugaaacccug

SEQ ID NO: 1285262 - RNA, 22 nt, Human
cucaugcuaguaaucccagcuu

SEQ ID NO: 1285263 - RNA, 24 nt, Human
cuggccaacauggugaaacccugu

SEQ ID NO: 1285264 - RNA, 24 nt, Human
cugucuaaaaaaaaaagcuaauua

SEQ ID NO: 1285265 - RNA, 19 nt, Human
cuuaugccugggaguucaa

SEQ ID NO: 1285266 - RNA, 23 nt, Human
cuuaugccugggaguucaagacc

SEQ ID NO: 1285267 - RNA, 19 nt, Human
gaaaggcacaccaaauucu

SEQ ID NO: 1285268 - RNA, 22 nt, Human
gaacaaaacuauaacauuuuca

SEQ ID NO: 1285269 - RNA, 22 nt, Human
gagaaaguagagauuuguugac

SEQ ID NO: 1285270 - RNA, 23 nt, Human
gagaauugcuugagcccaggagg

SEQ ID NO: 1285271 - RNA, 24 nt, Human
gagacaugagaauugcuugagccc

SEQ ID NO: 1285272 - RNA, 19 nt, Human
gagguugcagugagccuag

SEQ ID NO: 1285273 - RNA, 19 nt, Human
gagguugcagugagccuag

SEQ ID NO: 1285274 - RNA, 22 nt, Human
gcaguuuuacuccaaguuucuu

SEQ ID NO: 1285275 - RNA, 20 nt, Human
gcaugguggcacacaccuau

SEQ ID NO: 1285276 - RNA, 24 nt, Human
gccaacauggugaaacccugucuc

SEQ ID NO: 1285277 - RNA, 21 nt, Human
gccaggcaugguggcucaugc

SEQ ID NO: 1285278 - RNA, 24 nt, Human
gcccaggaggcugagguugcagug

SEQ ID NO: 1285279 - RNA, 24 nt, Human
gcuugagcccaggaggcugagguu

SEQ ID NO: 1285280 - RNA, 22 nt, Human
ggaggcugagguugcagugagc

SEQ ID NO: 1285281 - RNA, 19 nt, Human
ggauuucucagauaucaga

SEQ ID NO: 1285282 - RNA, 20 nt, Human
ggcaggguuuguuauaguuu

SEQ ID NO: 1285283 - RNA, 24 nt, Human
gguggcacacaccuauaaucccag

SEQ ID NO: 1285284 - RNA, 24 nt, Human
gguggcucaugcuaguaaucccag

SEQ ID NO: 1285285 - RNA, 22 nt, Human
guagacaaauaguccauccaca

SEQ ID NO: 1285286 - RNA, 21 nt, Human
guuauuauaugguaaauguuu

SEQ ID NO: 1285287 - RNA, 20 nt, Human
uaaaaaaaaaagcuaauuau

SEQ ID NO: 1285288 - RNA, 23 nt, Human
uaaaauacuggaacucuucagua

SEQ ID NO: 1285289 - RNA, 24 nt, Human
uaaugaggaggauuucucagauau

SEQ ID NO: 1285290 - RNA, 20 nt, Human
uaauugguguugacacaacu

SEQ ID NO: 1285291 - RNA, 23 nt, Human
uagaagcagaauaaugaggagga

SEQ ID NO: 1285292 - RNA, 21 nt, Human
uauaagaaaaagaauugaauu

SEQ ID NO: 1285293 - RNA, 24 nt, Human
uaugaaaaagcuaauuauaggcca

SEQ ID NO: 1285294 - RNA, 19 nt, Human
uauuucaauuuagggaaaa

SEQ ID NO: 1285295 - RNA, 18 nt, Human
ucaauauaaaaaucaagg

SEQ ID NO: 1285296 - RNA, 25 nt, Human
ucaauauaaaaaucaaggugugaac

SEQ ID NO: 1285297 - RNA, 22 nt, Human
uccacaacaggaaagaugaaaa

SEQ ID NO: 1285298 - RNA, 23 nt, Human
uccauccacaacaggaaagauga

SEQ ID NO: 1285299 - RNA, 22 nt, Human
ugaacaaaacuauaacauuuuc

SEQ ID NO: 1285300 - RNA, 18 nt, Human
ugacacaacugacugucc

SEQ ID NO: 1285301 - RNA, 24 nt, Human
ugagacaggcagaaugcuuaugcc

SEQ ID NO: 1285302 - RNA, 22 nt, Human
ugagcccaggaggcugagguug

SEQ ID NO: 1285303 - RNA, 19 nt, Human
ugagguugcagugagccua

SEQ ID NO: 1285304 - RNA, 24 nt, Human
ugcuaguaaucccagcuuuuuggg

SEQ ID NO: 1285305 - RNA, 20 nt, Human
uggaagaaaaauauacucac

SEQ ID NO: 1285306 - RNA, 21 nt, Human
uggagcaauugcuuaucgugc

SEQ ID NO: 1285307 - RNA, 22 nt, Human
uggcacacaccuauaaucccag

SEQ ID NO: 1285308 - RNA, 24 nt, Human
uggccaacauggugaaacccuguc

SEQ ID NO: 1285309 - RNA, 21 nt, Human
uggcucaugcuaguaauccca

SEQ ID NO: 1285310 - RNA, 22 nt, Human
uggcucaugcuaguaaucccag

SEQ ID NO: 1285311 - RNA, 19 nt, Human
ugggaggcugagacaggca

SEQ ID NO: 1285312 - RNA, 23 nt, Human
ugguggcacacaccuauaauccc

SEQ ID NO: 1285313 - RNA, 24 nt, Human
ugguggcucaugcuaguaauccca

SEQ ID NO: 1285314 - RNA, 18 nt, Human
uguaaacauaaaauacug

SEQ ID NO: 1285315 - RNA, 21 nt, Human
ugucccuuuauaagaaaaaga

SEQ ID NO: 1285316 - RNA, 27 nt, Human
ugucuaaaaaaaaaagcuaauuaucuc

SEQ ID NO: 1285317 - RNA, 18 nt, Human
uguggaacuggcauagga

SEQ ID NO: 1285318 - RNA, 22 nt, Human
uguguugauguuagcaucugau

SEQ ID NO: 1285319 - RNA, 21 nt, Human
uuaaaagacuuaaauauaaua

SEQ ID NO: 1285320 - RNA, 21 nt, Human
uuacuguuguugaagaauaaa

SEQ ID NO: 1285321 - RNA, 18 nt, Human
uuagcugugcaugguggc

SEQ ID NO: 1285322 - RNA, 20 nt, Human
uugacacaacugacuguccc

SEQ ID NO: 1285323 - RNA, 24 nt, Human
uugcuugagcccaggaggcugagg

SEQ ID NO: 1285324 - RNA, 21 nt, Human
uugggaggcugagacaggcag

SEQ ID NO: 1285325 - RNA, 23 nt, Human
agagaggucccuuuggagccccc

SEQ ID NO: 1285326 - RNA, 18 nt, Human
aggaaggcuggggagaag

SEQ ID NO: 1285327 - RNA, 22 nt, Human
aggaaggcuggggagaagcucu

SEQ ID NO: 1285328 - RNA, 23 nt, Human
caagagagaggucccuuuggagc

SEQ ID NO: 1285329 - RNA, 23 nt, Human
cagccuccagaggaaggcugggg

SEQ ID NO: 1285330 - RNA, 22 nt, Human
cagggccgagaugccgcaaagc

SEQ ID NO: 1285331 - RNA, 23 nt, Human
ccugcacuuuggucccaaagcag

SEQ ID NO: 1285332 - RNA, 21 nt, Human
ccuuuggagcccccaagaguc

SEQ ID NO: 1285333 - RNA, 22 nt, Human
cgcccugcacuuuggucccaaa

SEQ ID NO: 1285334 - RNA, 23 nt, Human
cggagcccgacucuaacgucggu

SEQ ID NO: 1285335 - RNA, 19 nt, Human
cuccagaggaaggcugggg

SEQ ID NO: 1285336 - RNA, 24 nt, Human
gagccagggccgagaugccgcaaa

SEQ ID NO: 1285337 - RNA, 18 nt, Human
gccaagagagaggucccu

SEQ ID NO: 1285338 - RNA, 19 nt, Human
gucccaaagcaggcucuau

SEQ ID NO: 1285339 - RNA, 22 nt, Human
uccagaggaaggcuggggagaa

SEQ ID NO: 1285340 - RNA, 25 nt, Human
ucucauccuccucuuccuaagaucc

SEQ ID NO: 1285341 - RNA, 18 nt, Human
ugccaagagagagguccc

SEQ ID NO: 1285342 - RNA, 19 nt, Human
ugccaagagagaggucccu

SEQ ID NO: 1285343 - RNA, 22 nt, Human
uggagcccccaagagucaaagg

SEQ ID NO: 1285344 - RNA, 19 nt, Human
aaacaaaccaauaaaaugc

SEQ ID NO: 1285345 - RNA, 24 nt, Human
aaacaagguaaaaaauuacaucug

SEQ ID NO: 1285346 - RNA, 21 nt, Human
aaacacacagcucauguccuc

SEQ ID NO: 1285347 - RNA, 23 nt, Human
aaaguaauauacaaacaugccaa

SEQ ID NO: 1285348 - RNA, 26 nt, Human
aaaguaauauacaaacaugccaaaac

SEQ ID NO: 1285349 - RNA, 26 nt, Human
aaauccaugcucccuucagcagcacg

SEQ ID NO: 1285350 - RNA, 18 nt, Human
aaguaauauacaaacaug

SEQ ID NO: 1285351 - RNA, 22 nt, Human
aauauacaaacaugccaaaaca

SEQ ID NO: 1285352 - RNA, 22 nt, Human
accccaccccccuccccccacc

SEQ ID NO: 1285353 - RNA, 25 nt, Human
accccaccccccuccccccaccccu

SEQ ID NO: 1285354 - RNA, 24 nt, Human
aggaccccaccccccuccccccac

SEQ ID NO: 1285355 - RNA, 19 nt, Human
aggaugaaaagaauccucu

SEQ ID NO: 1285356 - RNA, 18 nt, Human
auaacaacuauaacucuc

SEQ ID NO: 1285357 - RNA, 21 nt, Human
aucacuguauucagcuccauc

SEQ ID NO: 1285358 - RNA, 23 nt, Human
auccacaucuccccuggguccag

SEQ ID NO: 1285359 - RNA, 18 nt, Human
augaaaagaauccucucu

SEQ ID NO: 1285360 - RNA, 23 nt, Human
augcagagugugcaugaagcuau

SEQ ID NO: 1285361 - RNA, 19 nt, Human
augcucccuucagcagcac

SEQ ID NO: 1285362 - RNA, 23 nt, Human
augguccagguucuucuagauga

SEQ ID NO: 1285363 - RNA, 20 nt, Human
caaaccuaaacagcaaauaa

SEQ ID NO: 1285364 - RNA, 26 nt, Human
cacaaaccuaaacagcaaauaaaaau

SEQ ID NO: 1285365 - RNA, 21 nt, Human
caccagaauuauguauuuuuc

SEQ ID NO: 1285366 - RNA, 19 nt, Human
caccccccuccccccaccc

SEQ ID NO: 1285367 - RNA, 20 nt, Human
caccccccuccccccacccc

SEQ ID NO: 1285368 - RNA, 23 nt, Human
caccccccuccccccaccccugc

SEQ ID NO: 1285369 - RNA, 24 nt, Human
caccccccuccccccaccccugcu

SEQ ID NO: 1285370 - RNA, 18 nt, Human
caccccugcuccuaggag

SEQ ID NO: 1285371 - RNA, 19 nt, Human
cacucccucuuccuuuucc

SEQ ID NO: 1285372 - RNA, 19 nt, Human
cagcuccaucaagaauggu

SEQ ID NO: 1285373 - RNA, 23 nt, Human
caucacacagcuuuguagaaaca

SEQ ID NO: 1285374 - RNA, 23 nt, Human
cauugugccuucaaauccuccug

SEQ ID NO: 1285375 - RNA, 23 nt, Human
ccaaaacaagguaaaaaauuaca

SEQ ID NO: 1285376 - RNA, 18 nt, Human
ccaccccccuccccccac

SEQ ID NO: 1285377 - RNA, 21 nt, Human
ccaccccccuccccccacccc

SEQ ID NO: 1285378 - RNA, 19 nt, Human
ccacucccucuuccuuuuc

SEQ ID NO: 1285379 - RNA, 18 nt, Human
ccccaccccccucccccc

SEQ ID NO: 1285380 - RNA, 19 nt, Human
ccccaccccccucccccca

SEQ ID NO: 1285381 - RNA, 18 nt, Human
cccccuccccccaccccu

SEQ ID NO: 1285382 - RNA, 23 nt, Human
cccccuccccccaccccugcucc

SEQ ID NO: 1285383 - RNA, 19 nt, Human
ccccuggguccaguguucu

SEQ ID NO: 1285384 - RNA, 23 nt, Human
ccccuggguccaguguucuucuc

SEQ ID NO: 1285385 - RNA, 23 nt, Human
cccuucagcagcacguguaauaa

SEQ ID NO: 1285386 - RNA, 19 nt, Human
ccucaggcucaggggcgag

SEQ ID NO: 1285387 - RNA, 22 nt, Human
ccuucagcagcacguguaauaa

SEQ ID NO: 1285388 - RNA, 19 nt, Human
cguaagaaacaggaccucc

SEQ ID NO: 1285389 - RNA, 28 nt, Human
cuaaguaucauagauaaaauccaugcuu

SEQ ID NO: 1285390 - RNA, 21 nt, Human
cuccccccaccccugcuccua

SEQ ID NO: 1285391 - RNA, 21 nt, Human
cuccuagaaggaccccacccc

SEQ ID NO: 1285392 - RNA, 18 nt, Human
cuccucagauucaucuga

SEQ ID NO: 1285393 - RNA, 18 nt, Human
cuccucaggcucaggggc

SEQ ID NO: 1285394 - RNA, 22 nt, Human
cuccuucuccggcuccuccuca

SEQ ID NO: 1285395 - RNA, 24 nt, Human
gaaaacacacagcucauguccucc

SEQ ID NO: 1285396 - RNA, 28 nt, Human
gaaggaccccaccccccuccccccaccc

SEQ ID NO: 1285397 - RNA, 21 nt, Human
gaccccaccccccucccccca

SEQ ID NO: 1285398 - RNA, 22 nt, Human
gaccccaccccccuccccccac

SEQ ID NO: 1285399 - RNA, 24 nt, Human
gacuccuagaaggaccccaccccc

SEQ ID NO: 1285400 - RNA, 21 nt, Human
gagugcucgcuucaggagcac

SEQ ID NO: 1285401 - RNA, 20 nt, Human
ggaaaggguggaacuggaaa

SEQ ID NO: 1285402 - RNA, 23 nt, Human
ggaaaggguggaacuggaaacgc

SEQ ID NO: 1285403 - RNA, 20 nt, Human
ggaccuccagguuccgcccc

SEQ ID NO: 1285404 - RNA, 25 nt, Human
uaaaauagauaguauauauuagacg

SEQ ID NO: 1285405 - RNA, 26 nt, Human
uaccaguauuuccaaaauauuuaaaa

SEQ ID NO: 1285406 - RNA, 18 nt, Human
uagaaggaccccaccccc

SEQ ID NO: 1285407 - RNA, 28 nt, Human
uagaaggaccccaccccccuccccccaa

SEQ ID NO: 1285408 - RNA, 23 nt, Human
uagauaaaauccaugcucccuuc

SEQ ID NO: 1285409 - RNA, 22 nt, Human
uaggauaaaagaauugucucuu

SEQ ID NO: 1285410 - RNA, 24 nt, Human
uauaaaaagggugguggugccgca

SEQ ID NO: 1285411 - RNA, 22 nt, Human
uauauaacaacuauaacucuca

SEQ ID NO: 1285412 - RNA, 18 nt, Human
uauauguauguguauaua

SEQ ID NO: 1285413 - RNA, 19 nt, Human
uauauguauguguauauaa

SEQ ID NO: 1285414 - RNA, 22 nt, Human
ucaaaaguacaacaauuuccaa

SEQ ID NO: 1285415 - RNA, 24 nt, Human
ucaggagcacauauaauaauacag

SEQ ID NO: 1285416 - RNA, 20 nt, Human
uccaugcucccuucagcagc

SEQ ID NO: 1285417 - RNA, 20 nt, Human
uccccaagagacccacucua

SEQ ID NO: 1285418 - RNA, 18 nt, Human
uccccccaccccugcucc

SEQ ID NO: 1285419 - RNA, 25 nt, Human
ucucaggccgaugaccucaggccuc

SEQ ID NO: 1285420 - RNA, 24 nt, Human
ucuccggcuccuccucagauucau

SEQ ID NO: 1285421 - RNA, 25 nt, Human
ucuccggcuccuccucagauucauc

SEQ ID NO: 1285422 - RNA, 21 nt, Human
ugaaaagaauccucucuuaaa

SEQ ID NO: 1285423 - RNA, 18 nt, Human
ugaccucaggccuccccg

SEQ ID NO: 1285424 - RNA, 18 nt, Human
ugagccccugcauugugc

SEQ ID NO: 1285425 - RNA, 22 nt, Human
ugaucugcacaaaugguuccuc

SEQ ID NO: 1285426 - RNA, 18 nt, Human
ugccaaaacaagguaaaa

SEQ ID NO: 1285427 - RNA, 23 nt, Human
uggaauaaaguuccugcugaaaa

SEQ ID NO: 1285428 - RNA, 21 nt, Human
uggacugcaaguccguaagaa

SEQ ID NO: 1285429 - RNA, 19 nt, Human
uuacaagaauuuaggggaa

SEQ ID NO: 1285430 - RNA, 19 nt, Human
uucaauggccgacauuuuc

SEQ ID NO: 1285431 - RNA, 23 nt, Human
uucauuuuuauuauguuucccca

SEQ ID NO: 1285432 - RNA, 20 nt, Human
uuuaaaauaauauuuaaugu

SEQ ID NO: 1285433 - RNA, 26 nt, Human
aaaaagaauugucucuuaaaaaugaa

SEQ ID NO: 1285434 - RNA, 24 nt, Human
aaacaagguaaaaaauuacaucug

SEQ ID NO: 1285435 - RNA, 21 nt, Human
aaacacacagcucauguccuc

SEQ ID NO: 1285436 - RNA, 23 nt, Human
aaaguaacauacaaacaugccaa

SEQ ID NO: 1285437 - RNA, 26 nt, Human
aaaguaacauacaaacaugccaaaac

SEQ ID NO: 1285438 - RNA, 21 nt, Human
aaccaugcucccuucagcagc

SEQ ID NO: 1285439 - RNA, 21 nt, Human
aaucaggaaggucggaaucuc

SEQ ID NO: 1285440 - RNA, 19 nt, Human
aauggccgacauuuuccau

SEQ ID NO: 1285441 - RNA, 20 nt, Human
accccaccccccucccccca

SEQ ID NO: 1285442 - RNA, 22 nt, Human
accccaccccccuccccccacc

SEQ ID NO: 1285443 - RNA, 25 nt, Human
accccaccccccuccccccaccccu

SEQ ID NO: 1285444 - RNA, 21 nt, Human
aggaaaggguggaacuggaaa

SEQ ID NO: 1285445 - RNA, 24 nt, Human
aggaccccaccccccuccccccac

SEQ ID NO: 1285446 - RNA, 19 nt, Human
aggaugaaaagaauccucu

SEQ ID NO: 1285447 - RNA, 18 nt, Human
auaacaacuauaacucuc

SEQ ID NO: 1285448 - RNA, 19 nt, Human
auacaaaccaauaaaaugc

SEQ ID NO: 1285449 - RNA, 21 nt, Human
aucacuguauucagcuccauc

SEQ ID NO: 1285450 - RNA, 24 nt, Human
aucuggggucugucucugcugagg

SEQ ID NO: 1285451 - RNA, 18 nt, Human
augaaaagaauccucucu

SEQ ID NO: 1285452 - RNA, 23 nt, Human
augcagagugugcaugaagcuau

SEQ ID NO: 1285453 - RNA, 19 nt, Human
augcucccuucagcagcac

SEQ ID NO: 1285454 - RNA, 23 nt, Human
augguccagguucuucuagauga

SEQ ID NO: 1285455 - RNA, 20 nt, Human
caaaccuaaacagcaaauaa

SEQ ID NO: 1285456 - RNA, 21 nt, Human
caaagccugaagcauguuggg

SEQ ID NO: 1285457 - RNA, 26 nt, Human
cacaaaccuaaacagcaaauaaaaau

SEQ ID NO: 1285458 - RNA, 19 nt, Human
caccccccuccccccaccc

SEQ ID NO: 1285459 - RNA, 20 nt, Human
caccccccuccccccacccc

SEQ ID NO: 1285460 - RNA, 23 nt, Human
caccccccuccccccaccccugc

SEQ ID NO: 1285461 - RNA, 24 nt, Human
caccccccuccccccaccccugcu

SEQ ID NO: 1285462 - RNA, 18 nt, Human
caccccugcuccuaggag

SEQ ID NO: 1285463 - RNA, 18 nt, Human
cagcuccaucaagaaugg

SEQ ID NO: 1285464 - RNA, 23 nt, Human
caucacacagcuuuauagaaaca

SEQ ID NO: 1285465 - RNA, 23 nt, Human
cauugugccuucaaauccuccug

SEQ ID NO: 1285466 - RNA, 23 nt, Human
ccaaaacaagguaaaaaauuaca

SEQ ID NO: 1285467 - RNA, 18 nt, Human
ccaacugaucuccaggca

SEQ ID NO: 1285468 - RNA, 18 nt, Human
ccaccccccuccccccac

SEQ ID NO: 1285469 - RNA, 21 nt, Human
ccaccccccuccccccacccc

SEQ ID NO: 1285470 - RNA, 22 nt, Human
ccaccccccuccccccaccccu

SEQ ID NO: 1285471 - RNA, 23 nt, Human
ccagcagaggcuguguccucucc

SEQ ID NO: 1285472 - RNA, 20 nt, Human
cccaaccucagaccauuguc

SEQ ID NO: 1285473 - RNA, 18 nt, Human
ccccaccccccucccccc

SEQ ID NO: 1285474 - RNA, 19 nt, Human
ccccaccccccucccccca

SEQ ID NO: 1285475 - RNA, 18 nt, Human
ccccccuccccccacccc

SEQ ID NO: 1285476 - RNA, 23 nt, Human
cccccuccccccaccccugcucc

SEQ ID NO: 1285477 - RNA, 19 nt, Human
ccccuggguccgguguucu

SEQ ID NO: 1285478 - RNA, 23 nt, Human
cccuucagcagcacguguaauaa

SEQ ID NO: 1285479 - RNA, 22 nt, Human
ccuggagauccugggugaaugg

SEQ ID NO: 1285480 - RNA, 22 nt, Human
ccuucagcagcacguguaauaa

SEQ ID NO: 1285481 - RNA, 19 nt, Human
cguaagaaacaggaccucc

SEQ ID NO: 1285482 - RNA, 21 nt, Human
cuccccccaccccugcuccua

SEQ ID NO: 1285483 - RNA, 21 nt, Human
cuccuagaaggaccccacccc

SEQ ID NO: 1285484 - RNA, 24 nt, Human
cuccugccacugucccaaccucag

SEQ ID NO: 1285485 - RNA, 20 nt, Human
cugccaggcugaucucuugu

SEQ ID NO: 1285486 - RNA, 19 nt, Human
cugggugaaugguaucucc

SEQ ID NO: 1285487 - RNA, 23 nt, Human
cuucagggacuccacaucccucu

SEQ ID NO: 1285488 - RNA, 24 nt, Human
gaaaacacacagcucauguccucc

SEQ ID NO: 1285489 - RNA, 21 nt, Human
gaagcauguuggggucucuuc

SEQ ID NO: 1285490 - RNA, 28 nt, Human
gaaggaccccaccccccuccccccaccc

SEQ ID NO: 1285491 - RNA, 22 nt, Human
gaccccaccccccuccccccac

SEQ ID NO: 1285492 - RNA, 21 nt, Human
gagugcucgcuucaggagcac

SEQ ID NO: 1285493 - RNA, 24 nt, Human
gccugaagcauguuggggucucuu

SEQ ID NO: 1285494 - RNA, 23 nt, Human
ggaaaggguggaacuggaaacgc

SEQ ID NO: 1285495 - RNA, 20 nt, Human
ggaccuccagguuccgcccc

SEQ ID NO: 1285496 - RNA, 25 nt, Human
ggacuccuagaaggaccccaccccc

SEQ ID NO: 1285497 - RNA, 25 nt, Human
uaaaauagauaguauauauuagacg

SEQ ID NO: 1285498 - RNA, 23 nt, Human
uaacauacaaacaugccaaaaca

SEQ ID NO: 1285499 - RNA, 23 nt, Human
uaacugccaggcugaucucuugu

SEQ ID NO: 1285500 - RNA, 26 nt, Human
uaccaguauuuccaaaauauuuaaaa

SEQ ID NO: 1285501 - RNA, 18 nt, Human
uagaaggaccccaccccc

SEQ ID NO: 1285502 - RNA, 28 nt, Human
uagaaggaccccaccccccuccccccaa

SEQ ID NO: 1285503 - RNA, 21 nt, Human
uagagaacagcucugagaaga

SEQ ID NO: 1285504 - RNA, 23 nt, Human
uagauaaaaaccaugcucccuuc

SEQ ID NO: 1285505 - RNA, 22 nt, Human
uagaugaucugcacaaaugguu

SEQ ID NO: 1285506 - RNA, 24 nt, Human
uaggagaagucaggaguagagaac

SEQ ID NO: 1285507 - RNA, 24 nt, Human
uauaaaaagggugguggugccgca

SEQ ID NO: 1285508 - RNA, 18 nt, Human
uauauguauguguauaua

SEQ ID NO: 1285509 - RNA, 19 nt, Human
uauauguauguguauauaa

SEQ ID NO: 1285510 - RNA, 22 nt, Human
ucaaaaguacaacaauuuccaa

SEQ ID NO: 1285511 - RNA, 18 nt, Human
ucaauggccgacauuuuc

SEQ ID NO: 1285512 - RNA, 18 nt, Human
uccccccaccccugcucc

SEQ ID NO: 1285513 - RNA, 26 nt, Human
uccccuggguccgguguucuucucuc

SEQ ID NO: 1285514 - RNA, 18 nt, Human
ucccucuauucccugucc

SEQ ID NO: 1285515 - RNA, 21 nt, Human
uccugggugaaugguaucucc

SEQ ID NO: 1285516 - RNA, 25 nt, Human
ucucaggccgaugaccucaggccuc

SEQ ID NO: 1285517 - RNA, 26 nt, Human
ucuccaggcaccacggaguccggucc

SEQ ID NO: 1285518 - RNA, 21 nt, Human
ugaaaagaauccucucuuaaa

SEQ ID NO: 1285519 - RNA, 18 nt, Human
ugaccucaggccuccccg

SEQ ID NO: 1285520 - RNA, 18 nt, Human
ugagccccugcauugugc

SEQ ID NO: 1285521 - RNA, 22 nt, Human
ugaucugcacaaaugguuccuc

SEQ ID NO: 1285522 - RNA, 18 nt, Human
ugccaaaacaagguaaaa

SEQ ID NO: 1285523 - RNA, 23 nt, Human
uggaauaaaguuccugcugaaaa

SEQ ID NO: 1285524 - RNA, 21 nt, Human
uggacugcaaguccguaagaa

SEQ ID NO: 1285525 - RNA, 21 nt, Human
uguccaaaagcaucuucaggg

SEQ ID NO: 1285526 - RNA, 22 nt, Human
ugucccagcagaggcugugucc

SEQ ID NO: 1285527 - RNA, 19 nt, Human
uguccuggagauccugggu

SEQ ID NO: 1285528 - RNA, 19 nt, Human
ugucucugcugaggguggg

SEQ ID NO: 1285529 - RNA, 19 nt, Human
uguuggggucucuucgucu

SEQ ID NO: 1285530 - RNA, 19 nt, Human
uuacaagaauuuaggggaa

SEQ ID NO: 1285531 - RNA, 18 nt, Human
uucaaauauauaugaaau

SEQ ID NO: 1285532 - RNA, 23 nt, Human
uucauuuuuauuauguuucccca

SEQ ID NO: 1285533 - RNA, 19 nt, Human
aaacaucagccgcgcaauc

SEQ ID NO: 1285534 - RNA, 19 nt, Human
aaacuuacagugccuuuug

SEQ ID NO: 1285535 - RNA, 23 nt, Human
aaagccucccaaaacaguucacu

SEQ ID NO: 1285536 - RNA, 18 nt, Human
aaaguauauauucuucca

SEQ ID NO: 1285537 - RNA, 21 nt, Human
aaaucaguuuuaguccugcag

SEQ ID NO: 1285538 - RNA, 24 nt, Human
aacaucaucuuuacgaacuucagc

SEQ ID NO: 1285539 - RNA, 23 nt, Human
aagcacaaauuuugaaaaagccu

SEQ ID NO: 1285540 - RNA, 25 nt, Human
acagccagcaagaaaauggagaccu

SEQ ID NO: 1285541 - RNA, 22 nt, Human
agacgaaucuacugugauguua

SEQ ID NO: 1285542 - RNA, 24 nt, Human
agcagaagacagaaaugagggacc

SEQ ID NO: 1285543 - RNA, 21 nt, Human
agggacugaaaccaacuuugc

SEQ ID NO: 1285544 - RNA, 20 nt, Human
agugaaaacugaaugugaug

SEQ ID NO: 1285545 - RNA, 23 nt, Human
auagaaccuuuaugggauuucaa

SEQ ID NO: 1285546 - RNA, 22 nt, Human
augggauuucaauuccacuuuc

SEQ ID NO: 1285547 - RNA, 20 nt, Human
caagauacuagucccaugcu

SEQ ID NO: 1285548 - RNA, 18 nt, Human
cacugugccgccucaagu

SEQ ID NO: 1285549 - RNA, 20 nt, Human
cacuucagccacagggaggg

SEQ ID NO: 1285550 - RNA, 21 nt, Human
cacuuugccuccuuuuguuuc

SEQ ID NO: 1285551 - RNA, 22 nt, Human
cagcaagaaaauggagacccca

SEQ ID NO: 1285552 - RNA, 19 nt, Human
cagcagcagaagacagaaa

SEQ ID NO: 1285553 - RNA, 22 nt, Human
caucagccgcgcaauccccagg

SEQ ID NO: 1285554 - RNA, 18 nt, Human
ccacggccaaucgacuug

SEQ ID NO: 1285555 - RNA, 19 nt, Human
ccagacccugaugacuuga

SEQ ID NO: 1285556 - RNA, 22 nt, Human
ccaguuggcugacauaaacauc

SEQ ID NO: 1285557 - RNA, 18 nt, Human
ccauaaacuguucccaga

SEQ ID NO: 1285558 - RNA, 18 nt, Human
ccccaggggcaaguuggg

SEQ ID NO: 1285559 - RNA, 19 nt, Human
ccgccucaagucaaauagg

SEQ ID NO: 1285560 - RNA, 27 nt, Human
ccugcaguuuaucuauggucgguacuc

SEQ ID NO: 1285561 - RNA, 19 nt, Human
cuccagaugagaacucagc

SEQ ID NO: 1285562 - RNA, 21 nt, Human
cuccagaugagaacucagccu

SEQ ID NO: 1285563 - RNA, 19 nt, Human
cugugccgccucaagucaa

SEQ ID NO: 1285564 - RNA, 18 nt, Human
cuucugaguucacaucaa

SEQ ID NO: 1285565 - RNA, 18 nt, Human
cuugacaauaauagaacc

SEQ ID NO: 1285566 - RNA, 19 nt, Human
cuuuuacacagccagaccc

SEQ ID NO: 1285567 - RNA, 21 nt, Human
gacauaaacaucuauggcacc

SEQ ID NO: 1285568 - RNA, 21 nt, Human
gaccuugacaauaauagaacc

SEQ ID NO: 1285569 - RNA, 21 nt, Human
uaaaugagcuugaagugaaga

SEQ ID NO: 1285570 - RNA, 20 nt, Human
uaaguagaaaaccugucaug

SEQ ID NO: 1285571 - RNA, 21 nt, Human
uaaguagaaaaccugucaugu

SEQ ID NO: 1285572 - RNA, 23 nt, Human
uaauuuguuacagagcaguagaa

SEQ ID NO: 1285573 - RNA, 18 nt, Human
uacuagucccaugcucug

SEQ ID NO: 1285574 - RNA, 22 nt, Human
uagaaaaccugucaugugagag

SEQ ID NO: 1285575 - RNA, 21 nt, Human
uagaaaaugaauacaauagca

SEQ ID NO: 1285576 - RNA, 23 nt, Human
uagcaaagcacaaauuuugaaaa

SEQ ID NO: 1285577 - RNA, 24 nt, Human
uauuuguuuuuuauuuacagcuua

SEQ ID NO: 1285578 - RNA, 19 nt, Human
ucagaacacuucagccaca

SEQ ID NO: 1285579 - RNA, 21 nt, Human
ucccagagacuccagaugaga

SEQ ID NO: 1285580 - RNA, 27 nt, Human
ucccagagacuccagaugagaacucag

SEQ ID NO: 1285581 - RNA, 24 nt, Human
uccccagcagcagaagacagaaau

SEQ ID NO: 1285582 - RNA, 18 nt, Human
uccccaggggcaaguugg

SEQ ID NO: 1285583 - RNA, 21 nt, Human
ucccugauaacuguaaaugag

SEQ ID NO: 1285584 - RNA, 19 nt, Human
uccugggugggccugaccu

SEQ ID NO: 1285585 - RNA, 23 nt, Human
ucuauggucacagcacuuuuauc

SEQ ID NO: 1285586 - RNA, 22 nt, Human
ucuccuuuccuugagugggagu

SEQ ID NO: 1285587 - RNA, 19 nt, Human
ugaaaaagccucccaaaac

SEQ ID NO: 1285588 - RNA, 23 nt, Human
ugaaaccaacuuugccuucuaaa

SEQ ID NO: 1285589 - RNA, 23 nt, Human
ugaauacaauagcaaagcacaaa

SEQ ID NO: 1285590 - RNA, 23 nt, Human
ugacauaaacaucuauggcaccc

SEQ ID NO: 1285591 - RNA, 21 nt, Human
ugagaacucagccuggccaaa

SEQ ID NO: 1285592 - RNA, 18 nt, Human
ugagaagaacucagcgca

SEQ ID NO: 1285593 - RNA, 18 nt, Human
ugagaagaacucagcgca

SEQ ID NO: 1285594 - RNA, 20 nt, Human
ugagaaggcauguggguggc

SEQ ID NO: 1285595 - RNA, 21 nt, Human
ugagaaggcauguggguggcc

SEQ ID NO: 1285596 - RNA, 20 nt, Human
ugcaguuucagggacugaaa

SEQ ID NO: 1285597 - RNA, 24 nt, Human
ugccauaaaagguacuaaguagaa

SEQ ID NO: 1285598 - RNA, 21 nt, Human
ugcucuguuucaauuuugcaa

SEQ ID NO: 1285599 - RNA, 19 nt, Human
ugcuugauucaugagucca

SEQ ID NO: 1285600 - RNA, 20 nt, Human
uggaaguagauuucuuccca

SEQ ID NO: 1285601 - RNA, 26 nt, Human
uggaaguagauuucuucccagagaag

SEQ ID NO: 1285602 - RNA, 18 nt, Human
uggacuucugaguucaca

SEQ ID NO: 1285603 - RNA, 25 nt, Human
uggcugacauaaacaucuauggcac

SEQ ID NO: 1285604 - RNA, 22 nt, Human
uggcugcagaagaagucagaua

SEQ ID NO: 1285605 - RNA, 23 nt, Human
uggcugcagaagaagucagauau

SEQ ID NO: 1285606 - RNA, 20 nt, Human
ugggagugaaaacugaaugu

SEQ ID NO: 1285607 - RNA, 23 nt, Human
ugggagugaaaacugaaugugau

SEQ ID NO: 1285608 - RNA, 19 nt, Human
uguuacagagcaguagaaa

SEQ ID NO: 1285609 - RNA, 19 nt, Human
uuacagagcaguagaaaaa

SEQ ID NO: 1285610 - RNA, 20 nt, Human
uuccugaacauggacuucug

SEQ ID NO: 1285611 - RNA, 22 nt, Human
uuguuugaacaugcaauuuuug

SEQ ID NO: 1285612 - RNA, 23 nt, Human
aaaaagaaaaaugaaucuucaau

SEQ ID NO: 1285613 - RNA, 22 nt, Human
aacuccuggguucaagugaccc

SEQ ID NO: 1285614 - RNA, 19 nt, Human
accauguugcccagguuga

SEQ ID NO: 1285615 - RNA, 22 nt, Human
agaguccuuuuacaccagugcu

SEQ ID NO: 1285616 - RNA, 19 nt, Human
agugacccacccaccuugg

SEQ ID NO: 1285617 - RNA, 23 nt, Human
caagugacccacccaccuuggcc

SEQ ID NO: 1285618 - RNA, 18 nt, Human
caccauguugcccagguu

SEQ ID NO: 1285619 - RNA, 24 nt, Human
caccauguugcccagguugauguc

SEQ ID NO: 1285620 - RNA, 22 nt, Human
cacccaccuuggccucccaaag

SEQ ID NO: 1285621 - RNA, 23 nt, Human
cacccaccuuggccucccaaagu

SEQ ID NO: 1285622 - RNA, 23 nt, Human
cauguugcccagguugaugucaa

SEQ ID NO: 1285623 - RNA, 24 nt, Human
cauguugcccagguugaugucaaa

SEQ ID NO: 1285624 - RNA, 18 nt, Human
ccuggguucaagugaccc

SEQ ID NO: 1285625 - RNA, 24 nt, Human
ccuggguucaagugacccacccac

SEQ ID NO: 1285626 - RNA, 18 nt, Human
guccugaagaauggaaaa

SEQ ID NO: 1285627 - RNA, 24 nt, Human
gugacccacccaccuuggccuccc

SEQ ID NO: 1285628 - RNA, 24 nt, Human
ugacccacccaccuuggccuccca

SEQ ID NO: 1285629 - RNA, 24 nt, Human
uucaagugacccacccaccuuggc

SEQ ID NO: 1285630 - RNA, 20 nt, Human
aaaggucaucugaagcuccc

SEQ ID NO: 1285631 - RNA, 24 nt, Human
aaaguguggguauuauaggcauga

SEQ ID NO: 1285632 - RNA, 20 nt, Human
aaaucccagacagcuacucu

SEQ ID NO: 1285633 - RNA, 21 nt, Human
aacaaaaauucuauacccaaa

SEQ ID NO: 1285634 - RNA, 21 nt, Human
aaccugguaauuugcagggaa

SEQ ID NO: 1285635 - RNA, 19 nt, Human
aagaaggccaaguagaauc

SEQ ID NO: 1285636 - RNA, 24 nt, Human
aagcaauccaccugccucagccuc

SEQ ID NO: 1285637 - RNA, 18 nt, Human
aaggaaaggagacacagu

SEQ ID NO: 1285638 - RNA, 22 nt, Human
aauuccaaaccaccccaggcuc

SEQ ID NO: 1285639 - RNA, 26 nt, Human
acagagcacagcaggcgggagaaaac

SEQ ID NO: 1285640 - RNA, 27 nt, Human
acagucauaguacuuacuucauucacc

SEQ ID NO: 1285641 - RNA, 19 nt, Human
accauagaagacacaaggg

SEQ ID NO: 1285642 - RNA, 24 nt, Human
accuucaugaccuuguucaugcca

SEQ ID NO: 1285643 - RNA, 23 nt, Human
acuucauucaccaaugaaaaaua

SEQ ID NO: 1285644 - RNA, 18 nt, Human
agaaagucaagcagauga

SEQ ID NO: 1285645 - RNA, 21 nt, Human
agaaagucaagcagaugaaag

SEQ ID NO: 1285646 - RNA, 19 nt, Human
agaagaaggccaaguagaa

SEQ ID NO: 1285647 - RNA, 24 nt, Human
agaauaaaaacauauagggaagga

SEQ ID NO: 1285648 - RNA, 21 nt, Human
agcaauccaccugccucagcc

SEQ ID NO: 1285649 - RNA, 22 nt, Human
agcacagcaggcgggagaaaac

SEQ ID NO: 1285650 - RNA, 21 nt, Human
aggcagcuucagagaugcagg

SEQ ID NO: 1285651 - RNA, 19 nt, Human
aggcaugagcuacugcacc

SEQ ID NO: 1285652 - RNA, 19 nt, Human
aggccauaggaggcaggga

SEQ ID NO: 1285653 - RNA, 20 nt, Human
aggguuaaaagccaagcacu

SEQ ID NO: 1285654 - RNA, 19 nt, Human
aucaucuuaaguaaaacua

SEQ ID NO: 1285655 - RNA, 23 nt, Human
auccacuuuaucuccucagaccu

SEQ ID NO: 1285656 - RNA, 20 nt, Human
auguugccccggcuggucuc

SEQ ID NO: 1285657 - RNA, 18 nt, Human
auuauaggcaugagcuac

SEQ ID NO: 1285658 - RNA, 22 nt, Human
auuauaggcaugagcuacugca

SEQ ID NO: 1285659 - RNA, 25 nt, Human
caaaauagaacuacuauaacuaaua

SEQ ID NO: 1285660 - RNA, 20 nt, Human
cacagcaggcgggagaaaac

SEQ ID NO: 1285661 - RNA, 22 nt, Human
cacagcuuugguagccuuaucc

SEQ ID NO: 1285662 - RNA, 23 nt, Human
caccugccucagccucccaaagu

SEQ ID NO: 1285663 - RNA, 19 nt, Human
cacuagaaauaaaguuaug

SEQ ID NO: 1285664 - RNA, 21 nt, Human
cacuccaggccaugccuucac

SEQ ID NO: 1285665 - RNA, 22 nt, Human
cagaauagaagaaggccaagua

SEQ ID NO: 1285666 - RNA, 23 nt, Human
cagagaugcaggcuccgcaacuc

SEQ ID NO: 1285667 - RNA, 26 nt, Human
cagcaggcgggagaaaaccgccuccc

SEQ ID NO: 1285668 - RNA, 22 nt, Human
cagcuacucucccaaagagaaa

SEQ ID NO: 1285669 - RNA, 21 nt, Human
cagcugaaauauucaccuccu

SEQ ID NO: 1285670 - RNA, 22 nt, Human
cagggaagauaggaucucaaau

SEQ ID NO: 1285671 - RNA, 19 nt, Human
caucuccagcucuuccugu

SEQ ID NO: 1285672 - RNA, 24 nt, Human
ccaaaguguggguauuauaggcau

SEQ ID NO: 1285673 - RNA, 21 nt, Human
ccaagcacuccaggccaugcc

SEQ ID NO: 1285674 - RNA, 19 nt, Human
ccaccugccucagccuccc

SEQ ID NO: 1285675 - RNA, 21 nt, Human
ccacugcugaacgaccaccug

SEQ ID NO: 1285676 - RNA, 19 nt, Human
ccagagcagguaauacacu

SEQ ID NO: 1285677 - RNA, 25 nt, Human
cccaccacacacagagcacaaugaa

SEQ ID NO: 1285678 - RNA, 23 nt, Human
cccagacagcuacucucccaaag

SEQ ID NO: 1285679 - RNA, 23 nt, Human
ccccaggcucagcaguguggauu

SEQ ID NO: 1285680 - RNA, 25 nt, Human
ccgcccagagaccguggaggaggca

SEQ ID NO: 1285681 - RNA, 24 nt, Human
ccucccgcgagguccaacagaaac

SEQ ID NO: 1285682 - RNA, 20 nt, Human
ccuguaccucuaaagcacuc

SEQ ID NO: 1285683 - RNA, 22 nt, Human
cuaaagucaacuuuucaagguc

SEQ ID NO: 1285684 - RNA, 18 nt, Human
cuacugcaccuagccaug

SEQ ID NO: 1285685 - RNA, 21 nt, Human
cuccaggccaugccuucaccg

SEQ ID NO: 1285686 - RNA, 21 nt, Human
cuccgagaugagggagggcuc

SEQ ID NO: 1285687 - RNA, 20 nt, Human
cuccucagcucaagcaaucc

SEQ ID NO: 1285688 - RNA, 23 nt, Human
cucugugaagccaucuccagcuc

SEQ ID NO: 1285689 - RNA, 22 nt, Human
cugaaaauaugcuccaccaaaa

SEQ ID NO: 1285690 - RNA, 24 nt, Human
cugaagcucccuuucacagcuuug

SEQ ID NO: 1285691 - RNA, 22 nt, Human
cuggugccaaagagaggauucu

SEQ ID NO: 1285692 - RNA, 18 nt, Human
cuuuccauguacccuuuc

SEQ ID NO: 1285693 - RNA, 21 nt, Human
gaaaucaacuuaacccaaaac

SEQ ID NO: 1285694 - RNA, 23 nt, Human
gaacuccucagcucaagcaaucc

SEQ ID NO: 1285695 - RNA, 19 nt, Human
gaagaaauguauuccuauc

SEQ ID NO: 1285696 - RNA, 21 nt, Human
gaagacacaagggagcccagg

SEQ ID NO: 1285697 - RNA, 22 nt, Human
gaaucaucuuaaguaaaacuag

SEQ ID NO: 1285698 - RNA, 20 nt, Human
gacauuucagacaagcaaga

SEQ ID NO: 1285699 - RNA, 25 nt, Human
gagaaaacaaagggccuguucaaag

SEQ ID NO: 1285700 - RNA, 25 nt, Human
gagagaaaacuguuucuaaacaaaa

SEQ ID NO: 1285701 - RNA, 18 nt, Human
gcaauccaccugccucag

SEQ ID NO: 1285702 - RNA, 24 nt, Human
gcaauccaccugccucagccuccc

SEQ ID NO: 1285703 - RNA, 21 nt, Human
gcagaaaacaagggugaccau

SEQ ID NO: 1285704 - RNA, 18 nt, Human
gcagcagagaggucacag

SEQ ID NO: 1285705 - RNA, 24 nt, Human
gccaugccuucacccucaugaucc

SEQ ID NO: 1285706 - RNA, 21 nt, Human
gccuucacccucaugauccau

SEQ ID NO: 1285707 - RNA, 20 nt, Human
gcuauguugccccggcuggu

SEQ ID NO: 1285708 - RNA, 24 nt, Human
gcuauguugccccggcuggucucg

SEQ ID NO: 1285709 - RNA, 24 nt, Human
gcucaagcaauccaccugccucag

SEQ ID NO: 1285710 - RNA, 22 nt, Human
ggaaggcaucagcucagacuac

SEQ ID NO: 1285711 - RNA, 19 nt, Human
ggaggaggcagcagagagg

SEQ ID NO: 1285712 - RNA, 24 nt, Human
ggguauuauaggcaugagcuacug

SEQ ID NO: 1285713 - RNA, 23 nt, Human
gguagagauggcauuuugcuaug

SEQ ID NO: 1285714 - RNA, 20 nt, Human
uaaaccaugaaaucaacuua

SEQ ID NO: 1285715 - RNA, 21 nt, Human
uaaauuacagagaauugaucc

SEQ ID NO: 1285716 - RNA, 24 nt, Human
uacacacguaccaggcuacuaccu

SEQ ID NO: 1285717 - RNA, 19 nt, Human
uacacagaaagucaagcag

SEQ ID NO: 1285718 - RNA, 23 nt, Human
uaccuggaaaaucacugucaaaa

SEQ ID NO: 1285719 - RNA, 22 nt, Human
uagaagacacaagggagcccag

SEQ ID NO: 1285720 - RNA, 22 nt, Human
uagagauggcauuuugcuaugu

SEQ ID NO: 1285721 - RNA, 18 nt, Human
uaggaaccuaaagucaac

SEQ ID NO: 1285722 - RNA, 22 nt, Human
uauaacuaauagucauuuuaga

SEQ ID NO: 1285723 - RNA, 21 nt, Human
uauguugccccggcuggucuc

SEQ ID NO: 1285724 - RNA, 24 nt, Human
uauguugccccggcuggucucgaa

SEQ ID NO: 1285725 - RNA, 18 nt, Human
uauucuacacacguacca

SEQ ID NO: 1285726 - RNA, 22 nt, Human
ucagacuacagcccacugcuga

SEQ ID NO: 1285727 - RNA, 22 nt, Human
uccaaaauagaacuacuauaac

SEQ ID NO: 1285728 - RNA, 24 nt, Human
ucccaaaguguggguauuauaggc

SEQ ID NO: 1285729 - RNA, 19 nt, Human
ucccagacagcuacucucc

SEQ ID NO: 1285730 - RNA, 21 nt, Human
uccuagaacugaaggaaaugg

SEQ ID NO: 1285731 - RNA, 20 nt, Human
uccucagcucaagcaaucca

SEQ ID NO: 1285732 - RNA, 23 nt, Human
ucguggcaauuuucagaacacug

SEQ ID NO: 1285733 - RNA, 24 nt, Human
ucuaaagcacucuguuccuaccuc

SEQ ID NO: 1285734 - RNA, 21 nt, Human
ucucaaaucccagacagcuac

SEQ ID NO: 1285735 - RNA, 23 nt, Human
ucucgaacuccucagcucaagca

SEQ ID NO: 1285736 - RNA, 21 nt, Human
ugaaaauaugcuccaccaaaa

SEQ ID NO: 1285737 - RNA, 18 nt, Human
ugaaauauucaccuccuc

SEQ ID NO: 1285738 - RNA, 24 nt, Human
ugaaaucaacuuaacccaaaacug

SEQ ID NO: 1285739 - RNA, 19 nt, Human
ugaagccaucuccagcucu

SEQ ID NO: 1285740 - RNA, 23 nt, Human
ugaagccaucuccagcucuuccu

SEQ ID NO: 1285741 - RNA, 20 nt, Human
ugacacagaaagaggaacaa

SEQ ID NO: 1285742 - RNA, 24 nt, Human
ugccccggcuggucucgaacuccu

SEQ ID NO: 1285743 - RNA, 23 nt, Human
ugccucagccucccaaagugugg

SEQ ID NO: 1285744 - RNA, 19 nt, Human
ugccuucacccucaugauc

SEQ ID NO: 1285745 - RNA, 25 nt, Human
ugcuccaccaaaaugagaaaaugac

SEQ ID NO: 1285746 - RNA, 20 nt, Human
ugcugaacgaccaccugaga

SEQ ID NO: 1285747 - RNA, 21 nt, Human
uggaggaggcagcagagaggu

SEQ ID NO: 1285748 - RNA, 23 nt, Human
uggauuuucagacugaaagggcc

SEQ ID NO: 1285749 - RNA, 18 nt, Human
uggcauuuugcuauguug

SEQ ID NO: 1285750 - RNA, 26 nt, Human
uuacaccuauccacuuuaucuccuca

SEQ ID NO: 1285751 - RNA, 18 nt, Human
uucacagcuuugguagcc

SEQ ID NO: 1285752 - RNA, 19 nt, Human
uuccuagaacugaaggaaa

SEQ ID NO: 1285753 - RNA, 21 nt, Human
uuucaaggucuggaaagguca

SEQ ID NO: 1285754 - RNA, 21 nt, Human
uuucaaggucuggaaagguca

SEQ ID NO: 1285755 - RNA, 20 nt, Human
uuuccuagaacugaaggaaa

SEQ ID NO: 1285756 - RNA, 19 nt, Human
uuuugcuauguugccccgg

SEQ ID NO: 1285757 - RNA, 23 nt, Human
uuuugcuauguugccccggcugg

SEQ ID NO: 1285758 - RNA, 22 nt, Human
auucacuguacauuucuaaacu

SEQ ID NO: 1285759 - RNA, 23 nt, Human
ugacugacagaacucuaauacag

SEQ ID NO: 1285760 - RNA, 20 nt, Human
acucgccuggcagccucaac

SEQ ID NO: 1285761 - RNA, 24 nt, Human
cagaaaggccugacucgccuggca

SEQ ID NO: 1285762 - RNA, 21 nt, Human
caggcgagguccagaaaggcc

SEQ ID NO: 1285763 - RNA, 20 nt, Human
ccagaaaggccugacucgcc

SEQ ID NO: 1285764 - RNA, 24 nt, Human
ccugacucgccuggcagccucaac

SEQ ID NO: 1285765 - RNA, 23 nt, Human
cugggucaauuucaggcacagcc

SEQ ID NO: 1285766 - RNA, 20 nt, Human
gcaucuauuuuguaaaugcu

SEQ ID NO: 1285767 - RNA, 19 nt, Human
ugacucgccuggcagccuc

SEQ ID NO: 1285768 - RNA, 22 nt, Human
uggcagccucaacggacuuguc

SEQ ID NO: 1285769 - RNA, 23 nt, Human
aaagaucagaugguuguagacaa

SEQ ID NO: 1285770 - RNA, 23 nt, Human
aaagguaccugauuggaccaaaa

SEQ ID NO: 1285771 - RNA, 24 nt, Human
accaaaacaaugacauggugacuc

SEQ ID NO: 1285772 - RNA, 24 nt, Human
auaggauggguauucauccucuuu

SEQ ID NO: 1285773 - RNA, 24 nt, Human
augacauggugacucuuccuugga

SEQ ID NO: 1285774 - RNA, 21 nt, Human
auggcugcauaguauuccaug

SEQ ID NO: 1285775 - RNA, 21 nt, Human
augguauuucuaguucuagau

SEQ ID NO: 1285776 - RNA, 21 nt, Human
augguuguagacaaguggcau

SEQ ID NO: 1285777 - RNA, 22 nt, Human
cacaacaguccccggaguguga

SEQ ID NO: 1285778 - RNA, 19 nt, Human
cacugugugaccacauuca

SEQ ID NO: 1285779 - RNA, 21 nt, Human
cagcuuuguucuuuuggcuua

SEQ ID NO: 1285780 - RNA, 19 nt, Human
caugucccuacaaaggaca

SEQ ID NO: 1285781 - RNA, 18 nt, Human
ccacauuuucuuaaucca

SEQ ID NO: 1285782 - RNA, 21 nt, Human
cccaguaaugggauggcuggg

SEQ ID NO: 1285783 - RNA, 18 nt, Human
cccccaucccccuacccc

SEQ ID NO: 1285784 - RNA, 19 nt, Human
ccccuaccccacaacaguc

SEQ ID NO: 1285785 - RNA, 18 nt, Human
ccuuuuaaaagggauugc

SEQ ID NO: 1285786 - RNA, 24 nt, Human
cuaugagugagaacaugugguguu

SEQ ID NO: 1285787 - RNA, 19 nt, Human
cucccccaucccccuaccc

SEQ ID NO: 1285788 - RNA, 23 nt, Human
cuccuaaugcuaucccuccccca

SEQ ID NO: 1285789 - RNA, 24 nt, Human
cugcacccauuaacuugucauuua

SEQ ID NO: 1285790 - RNA, 21 nt, Human
gacauggugacucuuccuugg

SEQ ID NO: 1285791 - RNA, 20 nt, Human
gcauaauaugauacugaaau

SEQ ID NO: 1285792 - RNA, 19 nt, Human
gcgugugucuucauagcag

SEQ ID NO: 1285793 - RNA, 21 nt, Human
ggaauccucuccccauugcuu

SEQ ID NO: 1285794 - RNA, 21 nt, Human
ggacaugaacucaucauuuuu

SEQ ID NO: 1285795 - RNA, 18 nt, Human
gguuacuguagccuugua

SEQ ID NO: 1285796 - RNA, 20 nt, Human
guaguauaguuugaagucag

SEQ ID NO: 1285797 - RNA, 21 nt, Human
uaccccacaacaguccccgga

SEQ ID NO: 1285798 - RNA, 19 nt, Human
uacuuacauauguauacau

SEQ ID NO: 1285799 - RNA, 19 nt, Human
uagaaagaauaaaaaauua

SEQ ID NO: 1285800 - RNA, 19 nt, Human
uagcagcaugauuuauaau

SEQ ID NO: 1285801 - RNA, 24 nt, Human
uagggaauccucuccccauugcuu

SEQ ID NO: 1285802 - RNA, 20 nt, Human
uauaugugccacauuuucuu

SEQ ID NO: 1285803 - RNA, 21 nt, Human
uaucaugguuggacauuuggg

SEQ ID NO: 1285804 - RNA, 24 nt, Human
uauugugaauagugccacgauaaa

SEQ ID NO: 1285805 - RNA, 21 nt, Human
ucccccaucccccuaccccac

SEQ ID NO: 1285806 - RNA, 23 nt, Human
ucccccaucccccuaccccacaa

SEQ ID NO: 1285807 - RNA, 20 nt, Human
ucccuacaaaggacaugaac

SEQ ID NO: 1285808 - RNA, 25 nt, Human
uccuaaugcuaucccucccccaucc

SEQ ID NO: 1285809 - RNA, 22 nt, Human
uccuuggaaaaggacuagaaag

SEQ ID NO: 1285810 - RNA, 23 nt, Human
ucuccuaaugcuaucccuccccc

SEQ ID NO: 1285811 - RNA, 23 nt, Human
ucuuugcuauugugaauagugcc

SEQ ID NO: 1285812 - RNA, 22 nt, Human
ugaagucaggcagcgugaugcc

SEQ ID NO: 1285813 - RNA, 20 nt, Human
ugacauggugacucuuccuu

SEQ ID NO: 1285814 - RNA, 23 nt, Human
ugacauggugacucuuccuugga

SEQ ID NO: 1285815 - RNA, 20 nt, Human
ugagaacaugugguguuugg

SEQ ID NO: 1285816 - RNA, 19 nt, Human
ugagugagaacauguggug

SEQ ID NO: 1285817 - RNA, 24 nt, Human
ugagugagaacaugugguguuugg

SEQ ID NO: 1285818 - RNA, 19 nt, Human
ugccauguuggugugcugc

SEQ ID NO: 1285819 - RNA, 26 nt, Human
ugccuccagcuuuguucuuuuggcuu

SEQ ID NO: 1285820 - RNA, 21 nt, Human
ugccugggacaguccuggucg

SEQ ID NO: 1285821 - RNA, 19 nt, Human
uggcuagccaguuuuccca

SEQ ID NO: 1285822 - RNA, 25 nt, Human
ugguaccaguaccaugcuguuuugg

SEQ ID NO: 1285823 - RNA, 19 nt, Human
uguaaggaagggauccagu

SEQ ID NO: 1285824 - RNA, 22 nt, Human
uguaaggaagggauccaguuuc

SEQ ID NO: 1285825 - RNA, 21 nt, Human
ugucaaagaucagaugguugu

SEQ ID NO: 1285826 - RNA, 25 nt, Human
ugugcaaauuacuuacauauguaua

SEQ ID NO: 1285827 - RNA, 20 nt, Human
uguucuguuccauuaaucua

SEQ ID NO: 1285828 - RNA, 23 nt, Human
uuaaauagggaauccucucccca

SEQ ID NO: 1285829 - RNA, 20 nt, Human
uuccaugguguauaugugcc

SEQ ID NO: 1285830 - RNA, 26 nt, Human
uuccaugguguauaugugccacauuu

SEQ ID NO: 1285831 - RNA, 22 nt, Human
uuggaaaaggacuagaaagaau

SEQ ID NO: 1285832 - RNA, 20 nt, Human
uuggaccaaaacaaugacau

SEQ ID NO: 1285833 - RNA, 19 nt, Human
uuuccaguuucauccaugu

SEQ ID NO: 1285834 - RNA, 22 nt, Human
uuuccaguuucauccauguccc

SEQ ID NO: 1285835 - RNA, 18 nt, Human
uuucuaguucuagauccc

SEQ ID NO: 1285836 - RNA, 19 nt, Human
uuucuaguucuagaucccu

SEQ ID NO: 1285837 - RNA, 20 nt, Human
uuugguaccaguaccaugcu

SEQ ID NO: 1285838 - RNA, 22 nt, Human
uuuuauggcugcauaguauucc

SEQ ID NO: 1285839 - RNA, 22 nt, Human
aaaacucaaaaguuagggcccc

SEQ ID NO: 1285840 - RNA, 21 nt, Human
auugaguguucuggaggacuu

SEQ ID NO: 1285841 - RNA, 24 nt, Human
caaaacucaaaaguuagggccccc

SEQ ID NO: 1285842 - RNA, 23 nt, Human
cagaggccaucgcuaggcugggc

SEQ ID NO: 1285843 - RNA, 25 nt, Human
cagcucuccccuccccuggucaccc

SEQ ID NO: 1285844 - RNA, 26 nt, Human
cagugggccacacacugggcugugcu

SEQ ID NO: 1285845 - RNA, 19 nt, Human
ccagugggccacacacugg

SEQ ID NO: 1285846 - RNA, 22 nt, Human
ccagugggccacacacugggcu

SEQ ID NO: 1285847 - RNA, 18 nt, Human
ccccagugggccacacac

SEQ ID NO: 1285848 - RNA, 20 nt, Human
ccccggacccccggguuccc

SEQ ID NO: 1285849 - RNA, 19 nt, Human
ccggacccccggguucccc

SEQ ID NO: 1285850 - RNA, 19 nt, Human
ccugcagaggccaucgcua

SEQ ID NO: 1285851 - RNA, 22 nt, Human
ccuuggggcagcaccccagugg

SEQ ID NO: 1285852 - RNA, 19 nt, Human
cgaccgagacaaguugcag

SEQ ID NO: 1285853 - RNA, 22 nt, Human
cgacuccuuaagcagcucuccc

SEQ ID NO: 1285854 - RNA, 25 nt, Human
cucaaaaguuagggcccccggaccc

SEQ ID NO: 1285855 - RNA, 19 nt, Human
gacccucuuucagggggag

SEQ ID NO: 1285856 - RNA, 21 nt, Human
gcaaaacucaaaaguuagggc

SEQ ID NO: 1285857 - RNA, 19 nt, Human
gcagaggccaucgcuaggc

SEQ ID NO: 1285858 - RNA, 20 nt, Human
gccacacacugggcugugcu

SEQ ID NO: 1285859 - RNA, 19 nt, Human
gcuaggcugggcagauggc

SEQ ID NO: 1285860 - RNA, 21 nt, Human
ggagacucucuccugacccuc

SEQ ID NO: 1285861 - RNA, 25 nt, Human
ggggagaaaaugucuggcugcagga

SEQ ID NO: 1285862 - RNA, 20 nt, Human
ggggcgugcaaaacucaaaa

SEQ ID NO: 1285863 - RNA, 20 nt, Human
ucuggaggacuuuggaccau

SEQ ID NO: 1285864 - RNA, 18 nt, Human
uguaagucucggggagac

SEQ ID NO: 1285865 - RNA, 21 nt, Human
uucuggaggacuuuggaccau

SEQ ID NO: 1285866 - RNA, 23 nt, Human
aaacaaaagaaggugccuacuga

SEQ ID NO: 1285867 - RNA, 19 nt, Human
aaacacaacaauuccacac

SEQ ID NO: 1285868 - RNA, 21 nt, Human
aaacaucccauguuugacccu

SEQ ID NO: 1285869 - RNA, 19 nt, Human
aaagugcuggcauuacagg

SEQ ID NO: 1285870 - RNA, 24 nt, Human
aaagugcuggcauuacaggcauga

SEQ ID NO: 1285871 - RNA, 19 nt, Human
aaccuccaccucucagguu

SEQ ID NO: 1285872 - RNA, 19 nt, Human
aacuaugugaucaaacccc

SEQ ID NO: 1285873 - RNA, 22 nt, Human
aagaaaaaacaaaagaaggugc

SEQ ID NO: 1285874 - RNA, 24 nt, Human
aagaaggugccuacugaguuuucu

SEQ ID NO: 1285875 - RNA, 23 nt, Human
aagcacagguaguucugaaaucu

SEQ ID NO: 1285876 - RNA, 22 nt, Human
aaguagcugggauuacaugugc

SEQ ID NO: 1285877 - RNA, 21 nt, Human
acaacaauuccacaccccaaa

SEQ ID NO: 1285878 - RNA, 22 nt, Human
acaagaaaaaacaaaagaaggu

SEQ ID NO: 1285879 - RNA, 21 nt, Human
acaccaagcuaauuuuuguau

SEQ ID NO: 1285880 - RNA, 23 nt, Human
acaccaugcccacaccaucccca

SEQ ID NO: 1285881 - RNA, 27 nt, Human
acaccaugcccacaccauccccauaga

SEQ ID NO: 1285882 - RNA, 19 nt, Human
acaggguuuugccaucuag

SEQ ID NO: 1285883 - RNA, 24 nt, Human
acaggguuuugccaucuaggccag

SEQ ID NO: 1285884 - RNA, 19 nt, Human
acagucuugcuuaucagaa

SEQ ID NO: 1285885 - RNA, 18 nt, Human
accacaagaaaaaacaaa

SEQ ID NO: 1285886 - RNA, 18 nt, Human
accuuggcaaagugcugg

SEQ ID NO: 1285887 - RNA, 20 nt, Human
acucagcucaucuucuuccc

SEQ ID NO: 1285888 - RNA, 24 nt, Human
agaccagcauccucagcccacgcu

SEQ ID NO: 1285889 - RNA, 25 nt, Human
aggaaaauaagguggaaaccagagg

SEQ ID NO: 1285890 - RNA, 22 nt, Human
aggcagcaucucagugauugac

SEQ ID NO: 1285891 - RNA, 22 nt, Human
aguagagacaggguuuugccau

SEQ ID NO: 1285892 - RNA, 19 nt, Human
agugcaguggcacaaucuc

SEQ ID NO: 1285893 - RNA, 21 nt, Human
augaaaccagacauaaccaug

SEQ ID NO: 1285894 - RNA, 24 nt, Human
auggcauauuuauaacugaagaaa

SEQ ID NO: 1285895 - RNA, 21 nt, Human
augucugaauccccucagccc

SEQ ID NO: 1285896 - RNA, 25 nt, Human
auuuuuguauuuuuuaguagagaca

SEQ ID NO: 1285897 - RNA, 24 nt, Human
caaagugcuggcauuacaggcaug

SEQ ID NO: 1285898 - RNA, 19 nt, Human
caacuaugugaucaaaccc

SEQ ID NO: 1285899 - RNA, 18 nt, Human
cacaagaaaaaacaaaag

SEQ ID NO: 1285900 - RNA, 24 nt, Human
cacaagaaaaaacaaaagaaggug

SEQ ID NO: 1285901 - RNA, 24 nt, Human
cacaagaaaaaacaaaagaaggug

SEQ ID NO: 1285902 - RNA, 24 nt, Human
caccacaccaagcuaauuuuugua

SEQ ID NO: 1285903 - RNA, 20 nt, Human
cacgaugguuccuggacuca

SEQ ID NO: 1285904 - RNA, 21 nt, Human
cagaagcacagguaguucuga

SEQ ID NO: 1285905 - RNA, 24 nt, Human
caggguuuugccaucuaggccagg

SEQ ID NO: 1285906 - RNA, 21 nt, Human
caguucucccuaccucagccu

SEQ ID NO: 1285907 - RNA, 24 nt, Human
cauuacaggcaugagccaucaugc

SEQ ID NO: 1285908 - RNA, 18 nt, Human
ccacaccaagcuaauuuu

SEQ ID NO: 1285909 - RNA, 24 nt, Human
ccacauuuuccccccuacaccaug

SEQ ID NO: 1285910 - RNA, 21 nt, Human
ccacucagcucaucuucuucc

SEQ ID NO: 1285911 - RNA, 21 nt, Human
ccagaccagcauccucagccc

SEQ ID NO: 1285912 - RNA, 24 nt, Human
ccagaccagcauccucagcccacg

SEQ ID NO: 1285913 - RNA, 20 nt, Human
ccauagaauuuagggugagg

SEQ ID NO: 1285914 - RNA, 21 nt, Human
cccaaguagcugggauuacau

SEQ ID NO: 1285915 - RNA, 24 nt, Human
cccagaccagcauccucagcccac

SEQ ID NO: 1285916 - RNA, 23 nt, Human
cccauagaauuuagggugaggca

SEQ ID NO: 1285917 - RNA, 21 nt, Human
ccccaaaguuaacagucuugc

SEQ ID NO: 1285918 - RNA, 25 nt, Human
ccccagcagugacucugcguggggc

SEQ ID NO: 1285919 - RNA, 18 nt, Human
ccccccuacaccaugccc

SEQ ID NO: 1285920 - RNA, 21 nt, Human
ccccuacaccaugcccacacc

SEQ ID NO: 1285921 - RNA, 24 nt, Human
cccuaccucagccucccaaguagc

SEQ ID NO: 1285922 - RNA, 20 nt, Human
cccuccuuagaccccguuua

SEQ ID NO: 1285923 - RNA, 19 nt, Human
ccuacaccaugcccacacc

SEQ ID NO: 1285924 - RNA, 20 nt, Human
ccuacugaguuuucuucuuu

SEQ ID NO: 1285925 - RNA, 24 nt, Human
ccugaccuuaggugaucugcccac

SEQ ID NO: 1285926 - RNA, 22 nt, Human
cggacaccacaagaaaaaacaa

SEQ ID NO: 1285927 - RNA, 30 nt, Human
cggacaccacaagaaaaaacaaaagaaggg

SEQ ID NO: 1285928 - RNA, 22 nt, Human
cguggaugaaucucacaugcag

SEQ ID NO: 1285929 - RNA, 19 nt, Human
cucacuguaaccuccaccu

SEQ ID NO: 1285930 - RNA, 24 nt, Human
cucacuguaaccuccaccucucag

SEQ ID NO: 1285931 - RNA, 23 nt, Human
cucagccucccaaguagcuggga

SEQ ID NO: 1285932 - RNA, 19 nt, Human
cucagugaccccaucccuu

SEQ ID NO: 1285933 - RNA, 26 nt, Human
cucccuaccucagccucccaaguagc

SEQ ID NO: 1285934 - RNA, 21 nt, Human
cugcccaccuuggcaaagugc

SEQ ID NO: 1285935 - RNA, 24 nt, Human
cuuaggugaucugcccaccuuggc

SEQ ID NO: 1285936 - RNA, 19 nt, Human
cuucucagugaccccaucc

SEQ ID NO: 1285937 - RNA, 24 nt, Human
gaaacacaacaauuccacacccca

SEQ ID NO: 1285938 - RNA, 22 nt, Human
gaagaaacacaacaauuccaca

SEQ ID NO: 1285939 - RNA, 19 nt, Human
gacaccacaagaaaaaaca

SEQ ID NO: 1285940 - RNA, 23 nt, Human
gaccuuaggugaucugcccaccu

SEQ ID NO: 1285941 - RNA, 18 nt, Human
gagucuugcuuugucacc

SEQ ID NO: 1285942 - RNA, 24 nt, Human
gcaaagugcuggcauuacaggcau

SEQ ID NO: 1285943 - RNA, 23 nt, Human
gcauccucagcccacgcuuugcc

SEQ ID NO: 1285944 - RNA, 24 nt, Human
gcauuacaggcaugagccaucaug

SEQ ID NO: 1285945 - RNA, 19 nt, Human
gcuagagugcaguggcaca

SEQ ID NO: 1285946 - RNA, 21 nt, Human
ggaacccagaccagcauccuc

SEQ ID NO: 1285947 - RNA, 22 nt, Human
ggaauuccuacaaacuuucuau

SEQ ID NO: 1285948 - RNA, 24 nt, Human
ggacaccacaagaaaaaacaaaag

SEQ ID NO: 1285949 - RNA, 19 nt, Human
ggacucaguuccuccagga

SEQ ID NO: 1285950 - RNA, 23 nt, Human
ggcauuacaggcaugagccauca

SEQ ID NO: 1285951 - RNA, 23 nt, Human
ggccaggcugaucuugaacuccu

SEQ ID NO: 1285952 - RNA, 23 nt, Human
ggcugaucuugaacuccugaccu

SEQ ID NO: 1285953 - RNA, 19 nt, Human
ggguuuugccaucuaggcc

SEQ ID NO: 1285954 - RNA, 25 nt, Human
uaauuuuuguauuuuuuaguagaga

SEQ ID NO: 1285955 - RNA, 25 nt, Human
uacaaacuuucuauggugaacagaa

SEQ ID NO: 1285956 - RNA, 20 nt, Human
uacaggcaugagccaucaug

SEQ ID NO: 1285957 - RNA, 23 nt, Human
uacaggcaugagccaucaugccc

SEQ ID NO: 1285958 - RNA, 24 nt, Human
uaccucagccucccaaguagcugg

SEQ ID NO: 1285959 - RNA, 19 nt, Human
uagaccccguuuacuuucc

SEQ ID NO: 1285960 - RNA, 20 nt, Human
uagagacaggguuuugccau

SEQ ID NO: 1285961 - RNA, 19 nt, Human
uagagugcaguggcacaau

SEQ ID NO: 1285962 - RNA, 23 nt, Human
uagagugcaguggcacaaucuca

SEQ ID NO: 1285963 - RNA, 19 nt, Human
uaguagagacaggguuuug

SEQ ID NO: 1285964 - RNA, 19 nt, Human
uaugucaggaauuccuaca

SEQ ID NO: 1285965 - RNA, 24 nt, Human
ucacaugcaggaugcugauccgga

SEQ ID NO: 1285966 - RNA, 24 nt, Human
ucacuguaaccuccaccucucagg

SEQ ID NO: 1285967 - RNA, 25 nt, Human
ucacuguaaccuccaccucucaggu

SEQ ID NO: 1285968 - RNA, 19 nt, Human
ucacuguucugcuucuuuu

SEQ ID NO: 1285969 - RNA, 22 nt, Human
ucagaacacgcaacuaugugau

SEQ ID NO: 1285970 - RNA, 19 nt, Human
ucagcccacgcuuugccac

SEQ ID NO: 1285971 - RNA, 18 nt, Human
ucagccucccaaguagcu

SEQ ID NO: 1285972 - RNA, 20 nt, Human
ucagccucccaaguagcugg

SEQ ID NO: 1285973 - RNA, 20 nt, Human
ucagcucaucuucuucccuc

SEQ ID NO: 1285974 - RNA, 20 nt, Human
ucagugaccccaucccuucc

SEQ ID NO: 1285975 - RNA, 23 nt, Human
uccagaugaccaacucuuaacuu

SEQ ID NO: 1285976 - RNA, 19 nt, Human
uccucagcccacgcuuugc

SEQ ID NO: 1285977 - RNA, 22 nt, Human
ucuauggugaacagaauagagc

SEQ ID NO: 1285978 - RNA, 19 nt, Human
ucuggaacccagaccagca

SEQ ID NO: 1285979 - RNA, 23 nt, Human
ucuugaacuccugaccuuaggug

SEQ ID NO: 1285980 - RNA, 19 nt, Human
ucuugcuuugucacccagg

SEQ ID NO: 1285981 - RNA, 23 nt, Human
ucuugcuuugucacccaggcuag

SEQ ID NO: 1285982 - RNA, 24 nt, Human
ucuugcuuugucacccaggcuaga

SEQ ID NO: 1285983 - RNA, 19 nt, Human
ucuuuggguugcccagcuu

SEQ ID NO: 1285984 - RNA, 19 nt, Human
ugaagcagcugccacccaa

SEQ ID NO: 1285985 - RNA, 20 nt, Human
ugaccuuaggugaucugccc

SEQ ID NO: 1285986 - RNA, 24 nt, Human
ugaccuuaggugaucugcccaccu

SEQ ID NO: 1285987 - RNA, 21 nt, Human
ugaguuuucuucuuuccagau

SEQ ID NO: 1285988 - RNA, 18 nt, Human
ugauugacaggccccucc

SEQ ID NO: 1285989 - RNA, 25 nt, Human
ugauugacaggccccuccuuagacc

SEQ ID NO: 1285990 - RNA, 22 nt, Human
ugcaaagaagaaacacaacaau

SEQ ID NO: 1285991 - RNA, 24 nt, Human
ugcaaagaagaaacacaacaauuc

SEQ ID NO: 1285992 - RNA, 18 nt, Human
ugccacccaaguguagaa

SEQ ID NO: 1285993 - RNA, 23 nt, Human
ugccacccucauuucuggaaccc

SEQ ID NO: 1285994 - RNA, 24 nt, Human
ugcuuugucacccaggcuagagug

SEQ ID NO: 1285995 - RNA, 19 nt, Human
uggagucuugcuuugucac

SEQ ID NO: 1285996 - RNA, 20 nt, Human
uggcacaaucucaacucacu

SEQ ID NO: 1285997 - RNA, 18 nt, Human
uggcauuacaggcaugag

SEQ ID NO: 1285998 - RNA, 22 nt, Human
uggcauuacaggcaugagccau

SEQ ID NO: 1285999 - RNA, 24 nt, Human
uggcauuacaggcaugagccauca

SEQ ID NO: 1286000 - RNA, 19 nt, Human
uggcuggacucuuuccauu

SEQ ID NO: 1286001 - RNA, 22 nt, Human
uggcuggacucuuuccauuuug

SEQ ID NO: 1286002 - RNA, 21 nt, Human
ugggaaaaccuucaucaucag

SEQ ID NO: 1286003 - RNA, 19 nt, Human
ugggauuacaugugcccac

SEQ ID NO: 1286004 - RNA, 21 nt, Human
ugggauuacaugugcccacca

SEQ ID NO: 1286005 - RNA, 24 nt, Human
ugggauuacaugugcccaccacca

SEQ ID NO: 1286006 - RNA, 21 nt, Human
ugguuccuggacucaguuccu

SEQ ID NO: 1286007 - RNA, 22 nt, Human
ugucacccaggcuagagugcag

SEQ ID NO: 1286008 - RNA, 24 nt, Human
uuacucaucuguuuuuuucacugu

SEQ ID NO: 1286009 - RNA, 22 nt, Human
uuagggugaggcagcaucucag

SEQ ID NO: 1286010 - RNA, 24 nt, Human
uuaguagagacaggguuuugccau

SEQ ID NO: 1286011 - RNA, 20 nt, Human
uuccccccuacaccaugccc

SEQ ID NO: 1286012 - RNA, 20 nt, Human
uugccacucagcucaucuuc

SEQ ID NO: 1286013 - RNA, 24 nt, Human
uugcuuugucacccaggcuagagu

SEQ ID NO: 1286014 - RNA, 18 nt, Human
uuggccacgaugguuccu

SEQ ID NO: 1286015 - RNA, 23 nt, Human
uuuagggugaggcagcaucucag

SEQ ID NO: 1286016 - RNA, 20 nt, Human
uuuccugggugugguuuggg

SEQ ID NO: 1286017 - RNA, 24 nt, Human
uuugucacccaggcuagagugcag

SEQ ID NO: 1286018 - RNA, 21 nt, Human
uuuuuaguagagacaggguuu

SEQ ID NO: 1286019 - RNA, 21 nt, Human
uuuuuguauuuuuuaguagag

SEQ ID NO: 1286020 - RNA, 22 nt, Human
uuuuuuaguagagacaggguuu

SEQ ID NO: 1286021 - RNA, 23 nt, Human
uuuuuuuuucugagauggagucu

SEQ ID NO: 1286022 - RNA, 24 nt, Human
uuuuuuuuuucugagauggagucu

SEQ ID NO: 1286023 - RNA, 18 nt, Human
accauccagccaagccag

SEQ ID NO: 1286024 - RNA, 22 nt, Human
accuucguugcucuuccugcca

SEQ ID NO: 1286025 - RNA, 27 nt, Human
agccaggcaugguuuugcaaauacucc

SEQ ID NO: 1286026 - RNA, 19 nt, Human
caccuucaccuucguugcu

SEQ ID NO: 1286027 - RNA, 18 nt, Human
cauccagccaagccaggc

SEQ ID NO: 1286028 - RNA, 26 nt, Human
ccaagccaggcaugguuuugcaaaua

SEQ ID NO: 1286029 - RNA, 22 nt, Human
ccucaaaaggauguaagguagg

SEQ ID NO: 1286030 - RNA, 24 nt, Human
ccuucaccuucguugcucuuccug

SEQ ID NO: 1286031 - RNA, 21 nt, Human
ucuguaaguccaacuugguuu

SEQ ID NO: 1286032 - RNA, 18 nt, Human
uuucuuggaauaaucugu

SEQ ID NO: 1286033 - RNA, 22 nt, Human
aggcagcgucugcucagaguug

SEQ ID NO: 1286034 - RNA, 23 nt, Human
guggguggaggcugucuuggaag

SEQ ID NO: 1286035 - RNA, 20 nt, Human
uuggcgauggcgggaaagcc

SEQ ID NO: 1286036 - RNA, 18 nt, Human
uggucuaccagaacacag

SEQ ID NO: 1286037 - RNA, 24 nt, Human
aaaaugcuuugguccugauaccag

SEQ ID NO: 1286038 - RNA, 23 nt, Human
acccagagugcuaaggauggugu

SEQ ID NO: 1286039 - RNA, 27 nt, Human
auaagaacaucuucucucucuucuucc

SEQ ID NO: 1286040 - RNA, 23 nt, Human
ccagacacccagagugcuaagga

SEQ ID NO: 1286041 - RNA, 23 nt, Human
cuguucauacaucuccugugucc

SEQ ID NO: 1286042 - RNA, 24 nt, Human
cuucuuccuuuuugccauaaagua

SEQ ID NO: 1286043 - RNA, 20 nt, Human
ggugugcugugaaggcuguu

SEQ ID NO: 1286044 - RNA, 18 nt, Human
uagaagcugcaaauucac

SEQ ID NO: 1286045 - RNA, 19 nt, Human
uccagguccaauuccauuu

SEQ ID NO: 1286046 - RNA, 18 nt, Human
ucucucucuucuuccuuu

SEQ ID NO: 1286047 - RNA, 20 nt, Human
ugacuuccagguccaauucc

SEQ ID NO: 1286048 - RNA, 18 nt, Human
ugugcugugaaggcuguu

SEQ ID NO: 1286049 - RNA, 18 nt, Human
uuccuuuuugccauaaag

SEQ ID NO: 1286050 - RNA, 19 nt, Human
aggaagugcugaccacuac

SEQ ID NO: 1286051 - RNA, 22 nt, Human
caacggauccuuccuuggagcc

SEQ ID NO: 1286052 - RNA, 19 nt, Human
ugaguugacguacaggaag

SEQ ID NO: 1286053 - RNA, 20 nt, Human
ugggaaggauuuggaaguag

SEQ ID NO: 1286054 - RNA, 22 nt, Human
ugggaaggauuuggaaguagua

SEQ ID NO: 1286055 - RNA, 21 nt, Human
cuccaugauguagaucuugcu

SEQ ID NO: 1286056 - RNA, 22 nt, Human
gcuuaucaaacacugcaaccag

SEQ ID NO: 1286057 - RNA, 23 nt, Human
uggcacugaugucaucaccucca

SEQ ID NO: 1286058 - RNA, 18 nt, Human
aagguuugcucauuguuu

SEQ ID NO: 1286059 - RNA, 24 nt, Human
caagguuugcucauuguuuucagu

SEQ ID NO: 1286060 - RNA, 23 nt, Human
uugcucauuguuuucaguguagg

SEQ ID NO: 1286061 - RNA, 18 nt, Human
uauuauuguaacugucac

SEQ ID NO: 1286062 - RNA, 22 nt, Human
acaaaaacagcugcaggaagag

SEQ ID NO: 1286063 - RNA, 21 nt, Human
aggaagagguggaggggggcc

SEQ ID NO: 1286064 - RNA, 23 nt, Human
aggcacuugggcauggagucuuc

SEQ ID NO: 1286065 - RNA, 19 nt, Human
agguggaggggggccuguc

SEQ ID NO: 1286066 - RNA, 22 nt, Human
caaauaaaggagcagucauccc

SEQ ID NO: 1286067 - RNA, 20 nt, Human
cagcugcaggaagaggugga

SEQ ID NO: 1286068 - RNA, 19 nt, Human
cauuauguuucccccccac

SEQ ID NO: 1286069 - RNA, 27 nt, Human
ccccccaacgaaaggaaaaccgguuuc

SEQ ID NO: 1286070 - RNA, 20 nt, Human
ccuugaggggggggauuaca

SEQ ID NO: 1286071 - RNA, 23 nt, Human
ccuugaggggggggauuacaggc

SEQ ID NO: 1286072 - RNA, 18 nt, Human
gcuuagccuucacuccuu

SEQ ID NO: 1286073 - RNA, 21 nt, Human
ggagcagucaucccuagggca

SEQ ID NO: 1286074 - RNA, 22 nt, Human
gguacaaaaacagcugcaggaa

SEQ ID NO: 1286075 - RNA, 21 nt, Human
guggaggggggccugucauua

SEQ ID NO: 1286076 - RNA, 23 nt, Human
uaacaguaccucuaaguuucagu

SEQ ID NO: 1286077 - RNA, 18 nt, Human
uaagacucccaacauaaa

SEQ ID NO: 1286078 - RNA, 19 nt, Human
uaccucuaaguuucagucc

SEQ ID NO: 1286079 - RNA, 24 nt, Human
uauguuucccccccaccccccaac

SEQ ID NO: 1286080 - RNA, 24 nt, Human
uccuccuaucuaguuguacuuuaa

SEQ ID NO: 1286081 - RNA, 18 nt, Human
ugaggggggggauuacag

SEQ ID NO: 1286082 - RNA, 19 nt, Human
ugcaggaagagguggaggg

SEQ ID NO: 1286083 - RNA, 21 nt, Human
ugucauuauguuuccccccca

SEQ ID NO: 1286084 - RNA, 20 nt, Human
uuagccuucacuccuuccuc

SEQ ID NO: 1286085 - RNA, 20 nt, Human
aaaaaucccuagggauucag

SEQ ID NO: 1286086 - RNA, 18 nt, Human
aaagcagauguggcugcc

SEQ ID NO: 1286087 - RNA, 23 nt, Human
aagcagauguggcugccuuggau

SEQ ID NO: 1286088 - RNA, 18 nt, Human
agcacaaccaguccuccc

SEQ ID NO: 1286089 - RNA, 23 nt, Human
caaagcggcagcaugcuaucgcc

SEQ ID NO: 1286090 - RNA, 24 nt, Human
cacucccggccugcccgcuggagg

SEQ ID NO: 1286091 - RNA, 26 nt, Human
ccagcugguccucugaggaccagcca

SEQ ID NO: 1286092 - RNA, 21 nt, Human
ccgaccauccugggcuucucu

SEQ ID NO: 1286093 - RNA, 19 nt, Human
ccucucaaaggacaaaagc

SEQ ID NO: 1286094 - RNA, 24 nt, Human
cgcuggaggcgcggcucccaccau

SEQ ID NO: 1286095 - RNA, 27 nt, Human
cggcagcaugcuaucgccuucuccagc

SEQ ID NO: 1286096 - RNA, 18 nt, Human
cuagggacugucaaagcg

SEQ ID NO: 1286097 - RNA, 21 nt, Human
cuggcuuuaaaaaaaucccua

SEQ ID NO: 1286098 - RNA, 20 nt, Human
cuuggaucagcugcacgcag

SEQ ID NO: 1286099 - RNA, 20 nt, Human
ggaaggagaggcggccccag

SEQ ID NO: 1286100 - RNA, 21 nt, Human
ggcagcaugcuaucgccuucu

SEQ ID NO: 1286101 - RNA, 21 nt, Human
ggcuuuaaaaaaaucccuagg

SEQ ID NO: 1286102 - RNA, 24 nt, Human
uaucgccuucuccagcccuucucc

SEQ ID NO: 1286103 - RNA, 21 nt, Human
uccugggcuucucuuugggca

SEQ ID NO: 1286104 - RNA, 21 nt, Human
ucgccuucuccagcccuucuc

SEQ ID NO: 1286105 - RNA, 18 nt, Human
ucuccagcccuucuccag

SEQ ID NO: 1286106 - RNA, 21 nt, Human
ucucuuugggcagaccugggc

SEQ ID NO: 1286107 - RNA, 22 nt, Human
ucuggaccgcgacugcuaggga

SEQ ID NO: 1286108 - RNA, 24 nt, Human
ucuuugggcagaccugggccaggg

SEQ ID NO: 1286109 - RNA, 21 nt, Human
ugccccugcggaaggagaggc

SEQ ID NO: 1286110 - RNA, 20 nt, Human
aacaaucuggaccucaagug

SEQ ID NO: 1286111 - RNA, 21 nt, Human
aagaggaggaggucuguucca

SEQ ID NO: 1286112 - RNA, 22 nt, Human
aauaauuugucuaggaguuuau

SEQ ID NO: 1286113 - RNA, 25 nt, Human
aaugguuuucucuuguccagugcug

SEQ ID NO: 1286114 - RNA, 18 nt, Human
aauguguuuuucuuggca

SEQ ID NO: 1286115 - RNA, 20 nt, Human
acacugaagaaaauggacau

SEQ ID NO: 1286116 - RNA, 18 nt, Human
accacucuuacuuccccu

SEQ ID NO: 1286117 - RNA, 18 nt, Human
agauaagguaccugcagg

SEQ ID NO: 1286118 - RNA, 23 nt, Human
aggaggucuguuccacagacacc

SEQ ID NO: 1286119 - RNA, 19 nt, Human
aggcagccaugggguggca

SEQ ID NO: 1286120 - RNA, 21 nt, Human
aggcagccaugggguggcaca

SEQ ID NO: 1286121 - RNA, 22 nt, Human
aggcaggguugucaaggccagg

SEQ ID NO: 1286122 - RNA, 22 nt, Human
aggggguuuagagaagaggagg

SEQ ID NO: 1286123 - RNA, 22 nt, Human
aguagagugggcccauuuucau

SEQ ID NO: 1286124 - RNA, 22 nt, Human
aucaaugccguugauauuuagc

SEQ ID NO: 1286125 - RNA, 22 nt, Human
aucaccucucuuuauucugcca

SEQ ID NO: 1286126 - RNA, 21 nt, Human
augaagugugcugggaagccc

SEQ ID NO: 1286127 - RNA, 19 nt, Human
caacgauacuaaagcccca

SEQ ID NO: 1286128 - RNA, 21 nt, Human
caacuucccaaguaacuucuu

SEQ ID NO: 1286129 - RNA, 21 nt, Human
cacacugaagaaaauggacau

SEQ ID NO: 1286130 - RNA, 18 nt, Human
cacagggugugucuagug

SEQ ID NO: 1286131 - RNA, 18 nt, Human
caccaacgauacuaaagc

SEQ ID NO: 1286132 - RNA, 18 nt, Human
cacccacaaugcugauuc

SEQ ID NO: 1286133 - RNA, 20 nt, Human
cagcacucggucauugcugc

SEQ ID NO: 1286134 - RNA, 20 nt, Human
caggcacugcgccugucccc

SEQ ID NO: 1286135 - RNA, 18 nt, Human
caggggguuuagagaaga

SEQ ID NO: 1286136 - RNA, 18 nt, Human
cauauccaccaacgauac

SEQ ID NO: 1286137 - RNA, 19 nt, Human
ccaacgauacuaaagcccc

SEQ ID NO: 1286138 - RNA, 24 nt, Human
ccacaggcacugcgccugucccca

SEQ ID NO: 1286139 - RNA, 21 nt, Human
ccacagggugugucuaguggc

SEQ ID NO: 1286140 - RNA, 22 nt, Human
ccaccaacgauacuaaagcccc

SEQ ID NO: 1286141 - RNA, 19 nt, Human
ccccagcaacggucaugcc

SEQ ID NO: 1286142 - RNA, 21 nt, Human
ccucaaaggcaggguugucaa

SEQ ID NO: 1286143 - RNA, 23 nt, Human
ccucacuccauguggaaagagac

SEQ ID NO: 1286144 - RNA, 18 nt, Human
cuaaagccccaacuuccc

SEQ ID NO: 1286145 - RNA, 23 nt, Human
cuccgcguucugagucgccuccu

SEQ ID NO: 1286146 - RNA, 21 nt, Human
cucuccgaugagaagcuccag

SEQ ID NO: 1286147 - RNA, 25 nt, Human
cugcagcagagguugaaggcaaaua

SEQ ID NO: 1286148 - RNA, 26 nt, Human
gaaggcaaauauggcagacuagguca

SEQ ID NO: 1286149 - RNA, 19 nt, Human
gagaagaggaggaggucug

SEQ ID NO: 1286150 - RNA, 20 nt, Human
gcaacucuccgaugagaagc

SEQ ID NO: 1286151 - RNA, 19 nt, Human
gcugcagcagagguugaag

SEQ ID NO: 1286152 - RNA, 21 nt, Human
ggcaacagcaggggacgcggc

SEQ ID NO: 1286153 - RNA, 22 nt, Human
ggcaacagcaggggacgcggca

SEQ ID NO: 1286154 - RNA, 23 nt, Human
gggaagcccaagccacaugaccc

SEQ ID NO: 1286155 - RNA, 23 nt, Human
gggcaacagcaggggacgcggca

SEQ ID NO: 1286156 - RNA, 22 nt, Human
gguaaacuaaguggcuguugug

SEQ ID NO: 1286157 - RNA, 18 nt, Human
guggugcuggcugcugcu

SEQ ID NO: 1286158 - RNA, 21 nt, Human
guggugcuggcugcugcugcu

SEQ ID NO: 1286159 - RNA, 18 nt, Human
gugguguguggugcuggc

SEQ ID NO: 1286160 - RNA, 19 nt, Human
guguggugucagcuccagc

SEQ ID NO: 1286161 - RNA, 20 nt, Human
uaaagccccaacuucccaag

SEQ ID NO: 1286162 - RNA, 20 nt, Human
uacaucuuugcacacugaag

SEQ ID NO: 1286163 - RNA, 23 nt, Human
uacuaaagccccaacuucccaag

SEQ ID NO: 1286164 - RNA, 24 nt, Human
uagcaauuguuaaauucacucucu

SEQ ID NO: 1286165 - RNA, 21 nt, Human
ucagcuccagcgcucuccuca

SEQ ID NO: 1286166 - RNA, 18 nt, Human
uccacagacaccaucuca

SEQ ID NO: 1286167 - RNA, 21 nt, Human
uccaccaacgauacuaaagcc

SEQ ID NO: 1286168 - RNA, 22 nt, Human
uccaccaacgauacuaaagccc

SEQ ID NO: 1286169 - RNA, 23 nt, Human
uccaggacaucuguuuuugagau

SEQ ID NO: 1286170 - RNA, 21 nt, Human
uccccaaacagucugcuucug

SEQ ID NO: 1286171 - RNA, 18 nt, Human
uccuaacugaauguaagg

SEQ ID NO: 1286172 - RNA, 21 nt, Human
ucgcugaaaguacucggcugc

SEQ ID NO: 1286173 - RNA, 19 nt, Human
ucguugccacccacaaugc

SEQ ID NO: 1286174 - RNA, 23 nt, Human
ucuacuaguuuuccuucucucca

SEQ ID NO: 1286175 - RNA, 24 nt, Human
ucucuuguaaaaaguuucugaggc

SEQ ID NO: 1286176 - RNA, 19 nt, Human
ucuguuccacagacaccau

SEQ ID NO: 1286177 - RNA, 24 nt, Human
ugaagaaaauggacauaaaacuaa

SEQ ID NO: 1286178 - RNA, 21 nt, Human
ugaaggcaaauauggcagacu

SEQ ID NO: 1286179 - RNA, 20 nt, Human
ugcaaggcagccauggggug

SEQ ID NO: 1286180 - RNA, 24 nt, Human
ugcugcugcuaugauuuccugcuu

SEQ ID NO: 1286181 - RNA, 20 nt, Human
ugcugggaagcccaagccac

SEQ ID NO: 1286182 - RNA, 19 nt, Human
uggaaagagacgcugaugu

SEQ ID NO: 1286183 - RNA, 21 nt, Human
uggccagcacucggucauugc

SEQ ID NO: 1286184 - RNA, 19 nt, Human
uggccugaauaaucugggc

SEQ ID NO: 1286185 - RNA, 21 nt, Human
uggugguguguggugcuggcu

SEQ ID NO: 1286186 - RNA, 22 nt, Human
uuaccaggcugggguuucccug

SEQ ID NO: 1286187 - RNA, 22 nt, Human
uuagagaagaggaggaggucug

SEQ ID NO: 1286188 - RNA, 22 nt, Human
uucaugugguuccuucuuuaca

SEQ ID NO: 1286189 - RNA, 20 nt, Human
uucguugccacccacaaugc

SEQ ID NO: 1286190 - RNA, 19 nt, Human
uugcauuacaucuuugcac

SEQ ID NO: 1286191 - RNA, 20 nt, Human
accgcaaccggcggauuugc

SEQ ID NO: 1286192 - RNA, 21 nt, Human
agaaaaugcuaauugugaaag

SEQ ID NO: 1286193 - RNA, 21 nt, Human
agccuauggugcggcggccgg

SEQ ID NO: 1286194 - RNA, 19 nt, Human
aggcagcagaaaaugcuaa

SEQ ID NO: 1286195 - RNA, 19 nt, Human
auccccuccuccuccccca

SEQ ID NO: 1286196 - RNA, 22 nt, Human
auccccuccuccucccccacag

SEQ ID NO: 1286197 - RNA, 20 nt, Human
caagaacaagguaaccugug

SEQ ID NO: 1286198 - RNA, 19 nt, Human
caaucacggcccccggcug

SEQ ID NO: 1286199 - RNA, 20 nt, Human
caggcagcagaaaaugcuaa

SEQ ID NO: 1286200 - RNA, 20 nt, Human
ccaggccaaucacggccccc

SEQ ID NO: 1286201 - RNA, 23 nt, Human
ccccacagccgcggguacccggg

SEQ ID NO: 1286202 - RNA, 21 nt, Human
cccccacagccgcggguaccc

SEQ ID NO: 1286203 - RNA, 21 nt, Human
ccggcgauccccuccuccucc

SEQ ID NO: 1286204 - RNA, 20 nt, Human
ccuccuccucccccacagcc

SEQ ID NO: 1286205 - RNA, 23 nt, Human
cggccggcccgccgguccgcgcu

SEQ ID NO: 1286206 - RNA, 21 nt, Human
cuccuccucccccacagccgc

SEQ ID NO: 1286207 - RNA, 24 nt, Human
cugggucccuucuauaggucgcag

SEQ ID NO: 1286208 - RNA, 25 nt, Human
cugggucccuucuauaggucgcagg

SEQ ID NO: 1286209 - RNA, 23 nt, Human
gagccucuuuucuuucugggccu

SEQ ID NO: 1286210 - RNA, 22 nt, Human
gccggcccgccgguccgcgcug

SEQ ID NO: 1286211 - RNA, 21 nt, Human
gccucuuuucuuucugggccu

SEQ ID NO: 1286212 - RNA, 19 nt, Human
gcggcggccggcccgccgg

SEQ ID NO: 1286213 - RNA, 23 nt, Human
ggccggcccgccgguccgcgcug

SEQ ID NO: 1286214 - RNA, 20 nt, Human
uaaaagcaaugcaagaacaa

SEQ ID NO: 1286215 - RNA, 26 nt, Human
uccauggaauacccccggcgaucccc

SEQ ID NO: 1286216 - RNA, 22 nt, Human
ucccccacagccgcggguaccc

SEQ ID NO: 1286217 - RNA, 23 nt, Human
ucgcaggcagcagaaaaugcuaa

SEQ ID NO: 1286218 - RNA, 20 nt, Human
ugagagccucuuuucuuucu

SEQ ID NO: 1286219 - RNA, 22 nt, Human
uggaauacccccggcgaucccc

SEQ ID NO: 1286220 - RNA, 23 nt, Human
uuucugcugagagccucuuuucu

SEQ ID NO: 1286221 - RNA, 19 nt, Human
aacuggccucaucauuuuc

SEQ ID NO: 1286222 - RNA, 19 nt, Human
accacccaacgccauccca

SEQ ID NO: 1286223 - RNA, 20 nt, Human
acccaacgccaucccagcug

SEQ ID NO: 1286224 - RNA, 18 nt, Human
agacaaacugggcacagc

SEQ ID NO: 1286225 - RNA, 24 nt, Human
agcguacugaagucaaagcaguuc

SEQ ID NO: 1286226 - RNA, 22 nt, Human
agcugggguccccagcagugcc

SEQ ID NO: 1286227 - RNA, 19 nt, Human
aggaagucggagacaaacu

SEQ ID NO: 1286228 - RNA, 18 nt, Human
agggggugcaggaagagg

SEQ ID NO: 1286229 - RNA, 19 nt, Human
auuuucuccauccucgccc

SEQ ID NO: 1286230 - RNA, 21 nt, Human
cacaccacccaacgccauccc

SEQ ID NO: 1286231 - RNA, 19 nt, Human
cacccaacgccaucccagc

SEQ ID NO: 1286232 - RNA, 21 nt, Human
caccucaacuggccucaucau

SEQ ID NO: 1286233 - RNA, 20 nt, Human
cacuaucugcagccucccag

SEQ ID NO: 1286234 - RNA, 20 nt, Human
caggcaggggcaccauggug

SEQ ID NO: 1286235 - RNA, 19 nt, Human
caggggcaccauggugagg

SEQ ID NO: 1286236 - RNA, 23 nt, Human
caguaagcaucauagccagagcc

SEQ ID NO: 1286237 - RNA, 21 nt, Human
cagugagugggcacaccuccc

SEQ ID NO: 1286238 - RNA, 18 nt, Human
cagugugggccggagggu

SEQ ID NO: 1286239 - RNA, 24 nt, Human
caucccagcugaugcacuaucugc

SEQ ID NO: 1286240 - RNA, 21 nt, Human
ccacaccacccaacgccaucc

SEQ ID NO: 1286241 - RNA, 20 nt, Human
ccacucggccgccuccuccc

SEQ ID NO: 1286242 - RNA, 20 nt, Human
ccauucagcccacucggccg

SEQ ID NO: 1286243 - RNA, 19 nt, Human
cccagcuggggucuuucca

SEQ ID NO: 1286244 - RNA, 18 nt, Human
ccgcucggccuccuccuc

SEQ ID NO: 1286245 - RNA, 21 nt, Human
ccuccuccuccuccaccuucu

SEQ ID NO: 1286246 - RNA, 19 nt, Human
ccugcagcagguguuccuc

SEQ ID NO: 1286247 - RNA, 22 nt, Human
ccuugguaaaggccgggagcuc

SEQ ID NO: 1286248 - RNA, 19 nt, Human
cgagagaugggggagcugg

SEQ ID NO: 1286249 - RNA, 18 nt, Human
cgccuccucccgcucggc

SEQ ID NO: 1286250 - RNA, 18 nt, Human
cggccgccuccucccgcu

SEQ ID NO: 1286251 - RNA, 26 nt, Human
cgggcacagauggcuguacuggcggg

SEQ ID NO: 1286252 - RNA, 19 nt, Human
cuaucugcagccucccagc

SEQ ID NO: 1286253 - RNA, 20 nt, Human
cugaagucaaagcaguuccc

SEQ ID NO: 1286254 - RNA, 19 nt, Human
cugcagcagguguuccucc

SEQ ID NO: 1286255 - RNA, 26 nt, Human
cugcagccucccagcuggggucuuuc

SEQ ID NO: 1286256 - RNA, 18 nt, Human
gaagucggagacaaacug

SEQ ID NO: 1286257 - RNA, 21 nt, Human
gaguacaggugcgagggcggc

SEQ ID NO: 1286258 - RNA, 19 nt, Human
gcccacucggccgccuccu

SEQ ID NO: 1286259 - RNA, 19 nt, Human
gccuccuccuccuccucca

SEQ ID NO: 1286260 - RNA, 24 nt, Human
gccuggagugccaccucuagccuu

SEQ ID NO: 1286261 - RNA, 24 nt, Human
gcucggccuccuccuccuccucca

SEQ ID NO: 1286262 - RNA, 19 nt, Human
gcuucuaugggggucccug

SEQ ID NO: 1286263 - RNA, 19 nt, Human
ggggagcugggguccccag

SEQ ID NO: 1286264 - RNA, 23 nt, Human
uaagcaucauagccagagccgau

SEQ ID NO: 1286265 - RNA, 22 nt, Human
ucaacuggccucaucauuuucu

SEQ ID NO: 1286266 - RNA, 20 nt, Human
ucaggcaggggcaccauggu

SEQ ID NO: 1286267 - RNA, 21 nt, Human
uccccagcagugccacagagg

SEQ ID NO: 1286268 - RNA, 24 nt, Human
uccccagcagugccacagaggcug

SEQ ID NO: 1286269 - RNA, 22 nt, Human
uccucccgcucggccuccuccu

SEQ ID NO: 1286270 - RNA, 26 nt, Human
uccuccuccuccuccaccuucucccc

SEQ ID NO: 1286271 - RNA, 21 nt, Human
uccuuggguguguugguuuug

SEQ ID NO: 1286272 - RNA, 22 nt, Human
ugauuuccuccuuccgcaccuc

SEQ ID NO: 1286273 - RNA, 22 nt, Human
ugcacuaucugcagccucccag

SEQ ID NO: 1286274 - RNA, 23 nt, Human
ugcagccucccagcuggggucuu

SEQ ID NO: 1286275 - RNA, 23 nt, Human
uggagugccaccucuagccuuuc

SEQ ID NO: 1286276 - RNA, 22 nt, Human
uggcgggagaaguugucugcca

SEQ ID NO: 1286277 - RNA, 23 nt, Human
uggcuguacuggcgggagaaguu

SEQ ID NO: 1286278 - RNA, 21 nt, Human
ugugcucacgaacuugggcac

SEQ ID NO: 1286279 - RNA, 24 nt, Human
uuccacaccacccaacgccauccc

SEQ ID NO: 1286280 - RNA, 19 nt, Human
uucuccaggucucugagcg

SEQ ID NO: 1286281 - RNA, 21 nt, Human
uugagagggucaggcaggggc

SEQ ID NO: 1286282 - RNA, 22 nt, Human
uuuguaggaaaugggcagcuug

SEQ ID NO: 1286283 - RNA, 21 nt, Human
acagaggcccagccagccucc

SEQ ID NO: 1286284 - RNA, 19 nt, Human
agccuaucucuucgcccug

SEQ ID NO: 1286285 - RNA, 22 nt, Human
aggggacaaggaaaugcuaggg

SEQ ID NO: 1286286 - RNA, 18 nt, Human
agggugggagguggggag

SEQ ID NO: 1286287 - RNA, 18 nt, Human
agguggucaaaacgggaa

SEQ ID NO: 1286288 - RNA, 20 nt, Human
aguggggaguagggugggag

SEQ ID NO: 1286289 - RNA, 18 nt, Human
caaaacgggaauauagug

SEQ ID NO: 1286290 - RNA, 18 nt, Human
cagcacagugggucuggc

SEQ ID NO: 1286291 - RNA, 25 nt, Human
ccacagacugacagaaaacagcaca

SEQ ID NO: 1286292 - RNA, 19 nt, Human
ccacuguccccaauuaugu

SEQ ID NO: 1286293 - RNA, 21 nt, Human
ccccgggggcagagaagauca

SEQ ID NO: 1286294 - RNA, 20 nt, Human
cccugaguggcgggcggcuc

SEQ ID NO: 1286295 - RNA, 18 nt, Human
ccuagcccugucagggac

SEQ ID NO: 1286296 - RNA, 20 nt, Human
ccugaccuucacuugagugu

SEQ ID NO: 1286297 - RNA, 18 nt, Human
cgggaauauaguggggag

SEQ ID NO: 1286298 - RNA, 23 nt, Human
cugcagcccugcugaccaggcug

SEQ ID NO: 1286299 - RNA, 21 nt, Human
cuuggugcugugccacagacu

SEQ ID NO: 1286300 - RNA, 24 nt, Human
gaguggcgggcggcucggcagggg

SEQ ID NO: 1286301 - RNA, 22 nt, Human
gaguguggaucccuugaccccc

SEQ ID NO: 1286302 - RNA, 23 nt, Human
gcugugccacagacugacagaaa

SEQ ID NO: 1286303 - RNA, 22 nt, Human
ggaagaggggacaaggaaaugc

SEQ ID NO: 1286304 - RNA, 23 nt, Human
gggcagcugaggggcugaggugg

SEQ ID NO: 1286305 - RNA, 21 nt, Human
ggggaagaggggacaaggaaa

SEQ ID NO: 1286306 - RNA, 20 nt, Human
ggugggagguggggagauag

SEQ ID NO: 1286307 - RNA, 21 nt, Human
uagaucggacugcccugagug

SEQ ID NO: 1286308 - RNA, 20 nt, Human
uagcccugucagggacuggu

SEQ ID NO: 1286309 - RNA, 19 nt, Human
uagggugggagguggggag

SEQ ID NO: 1286310 - RNA, 19 nt, Human
uaguggggaguaggguggg

SEQ ID NO: 1286311 - RNA, 23 nt, Human
uaguggggaguagggugggaggu

SEQ ID NO: 1286312 - RNA, 21 nt, Human
uaugugcgugggagagacuga

SEQ ID NO: 1286313 - RNA, 18 nt, Human
uccagguggaggaggaag

SEQ ID NO: 1286314 - RNA, 26 nt, Human
ucugaaguauuucuuccuugcagggu

SEQ ID NO: 1286315 - RNA, 22 nt, Human
ucuggccccgggggcagagaag

SEQ ID NO: 1286316 - RNA, 21 nt, Human
ugagaaaaggcaguuuaucca

SEQ ID NO: 1286317 - RNA, 20 nt, Human
ugagagggggcagcugaggg

SEQ ID NO: 1286318 - RNA, 22 nt, Human
ugagagggggcagcugaggggc

SEQ ID NO: 1286319 - RNA, 20 nt, Human
ugaguguggaucccuugacc

SEQ ID NO: 1286320 - RNA, 18 nt, Human
ugcuaggggcuccaggug

SEQ ID NO: 1286321 - RNA, 19 nt, Human
ugcuaggggcuccaggugg

SEQ ID NO: 1286322 - RNA, 18 nt, Human
uggcagagcuuggugcug

SEQ ID NO: 1286323 - RNA, 25 nt, Human
uggccaaagugagagggggcagcug

SEQ ID NO: 1286324 - RNA, 27 nt, Human
ugggauuggccaaagugagagggggca

SEQ ID NO: 1286325 - RNA, 18 nt, Human
uggggaguagggugggag

SEQ ID NO: 1286326 - RNA, 24 nt, Human
ugggggacugcagcccugcugacc

SEQ ID NO: 1286327 - RNA, 24 nt, Human
ugguaagagagcccccacuguccc

SEQ ID NO: 1286328 - RNA, 23 nt, Human
uggucaaaacgggaauauagugg

SEQ ID NO: 1286329 - RNA, 24 nt, Human
uguggcuggccacugaggccaggc

SEQ ID NO: 1286330 - RNA, 24 nt, Human
uuggugccugggauuggccaaagu

SEQ ID NO: 1286331 - RNA, 18 nt, Human
acagaaaagcaguacagg

SEQ ID NO: 1286332 - RNA, 21 nt, Human
cacacagaaaagcaguacagg

SEQ ID NO: 1286333 - RNA, 25 nt, Human
cacacagaaaagcaguacaggcucc

SEQ ID NO: 1286334 - RNA, 21 nt, Human
cacccuuguaagggccagaag

SEQ ID NO: 1286335 - RNA, 22 nt, Human
cacccuuguaagggccagaagc

SEQ ID NO: 1286336 - RNA, 23 nt, Human
cagauaucucgccaccuuguuuc

SEQ ID NO: 1286337 - RNA, 20 nt, Human
cgaagcacacagaaaagcag

SEQ ID NO: 1286338 - RNA, 23 nt, Human
ggauguucaggauguccaaggaa

SEQ ID NO: 1286339 - RNA, 26 nt, Human
gggccagaagcgaagcacacagaaaa

SEQ ID NO: 1286340 - RNA, 18 nt, Human
ucccucuccuccacuucu

SEQ ID NO: 1286341 - RNA, 21 nt, Human
ugauaggcacccuuguaaggg

SEQ ID NO: 1286342 - RNA, 21 nt, Human
aagcguuucccagaccugucc

SEQ ID NO: 1286343 - RNA, 24 nt, Human
aagcguuucccagaccuguccccc

SEQ ID NO: 1286344 - RNA, 18 nt, Human
agcaggugaccgcacgcg

SEQ ID NO: 1286345 - RNA, 21 nt, Human
ccacagacggcggcgacccgc

SEQ ID NO: 1286346 - RNA, 20 nt, Human
ccugcagacacccacagacc

SEQ ID NO: 1286347 - RNA, 22 nt, Human
ccugcagacacccacagaccuc

SEQ ID NO: 1286348 - RNA, 21 nt, Human
ccuucugccuuccuucucaaa

SEQ ID NO: 1286349 - RNA, 22 nt, Human
cuccaaaacgauuugaaguaga

SEQ ID NO: 1286350 - RNA, 24 nt, Human
cugucccccaguagaugcccuuca

SEQ ID NO: 1286351 - RNA, 19 nt, Human
gaaguagaaagcguuuccc

SEQ ID NO: 1286352 - RNA, 20 nt, Human
gacccagggcuggcuugagc

SEQ ID NO: 1286353 - RNA, 20 nt, Human
gccccgccggcuugggggcc

SEQ ID NO: 1286354 - RNA, 21 nt, Human
gcggcgaccacagacggcggc

SEQ ID NO: 1286355 - RNA, 23 nt, Human
gcuggcuugagcgcacuggccuc

SEQ ID NO: 1286356 - RNA, 24 nt, Human
ggccccgcgggggacccagggcug

SEQ ID NO: 1286357 - RNA, 21 nt, Human
ggcggcgacccgccgcgggaa

SEQ ID NO: 1286358 - RNA, 26 nt, Human
gggggacccagggcuggcuugagcgc

SEQ ID NO: 1286359 - RNA, 21 nt, Human
uagaaagcguuucccagaccu

SEQ ID NO: 1286360 - RNA, 19 nt, Human
ugaaguagaaagcguuucc

SEQ ID NO: 1286361 - RNA, 23 nt, Human
ugcaaggaggacuccaaaacgau

SEQ ID NO: 1286362 - RNA, 19 nt, Human
uguggcaucuccuaaggcu

SEQ ID NO: 1286363 - RNA, 21 nt, Human
uucuggaauguggcaucuccu

SEQ ID NO: 1286364 - RNA, 22 nt, Human
aacuaagccuaagaggcccaac

SEQ ID NO: 1286365 - RNA, 19 nt, Human
aagcaacucauacucuccc

SEQ ID NO: 1286366 - RNA, 18 nt, Human
aagcagaugugcacauau

SEQ ID NO: 1286367 - RNA, 21 nt, Human
aagccagcacgauauugaucc

SEQ ID NO: 1286368 - RNA, 19 nt, Human
acucucccaagugacaaaa

SEQ ID NO: 1286369 - RNA, 20 nt, Human
augagcacccaccugauaga

SEQ ID NO: 1286370 - RNA, 21 nt, Human
caacacaggcugcuggaaauc

SEQ ID NO: 1286371 - RNA, 20 nt, Human
cagcacgauauugaucccuc

SEQ ID NO: 1286372 - RNA, 21 nt, Human
caguaggagcugccagugaug

SEQ ID NO: 1286373 - RNA, 27 nt, Human
ccauccccaugagccagagcacagcua

SEQ ID NO: 1286374 - RNA, 19 nt, Human
cccaugagccagagcacag

SEQ ID NO: 1286375 - RNA, 18 nt, Human
gaagcagaugugcacaua

SEQ ID NO: 1286376 - RNA, 20 nt, Human
gcugcuggaaaucaucucca

SEQ ID NO: 1286377 - RNA, 19 nt, Human
uaaagacaucauggaacug

SEQ ID NO: 1286378 - RNA, 19 nt, Human
uaaagcaacucauacucuc

SEQ ID NO: 1286379 - RNA, 25 nt, Human
uacauucagcucugguuggagguuc

SEQ ID NO: 1286380 - RNA, 19 nt, Human
uaucaaacuuaucaucuag

SEQ ID NO: 1286381 - RNA, 22 nt, Human
ugagcacccaccugauagauaa

SEQ ID NO: 1286382 - RNA, 21 nt, Human
uggauagggccgaagcagaug

SEQ ID NO: 1286383 - RNA, 21 nt, Human
uggcaaaggugguccugucug

SEQ ID NO: 1286384 - RNA, 21 nt, Human
ugugcacauauauagcugccu

SEQ ID NO: 1286385 - RNA, 22 nt, Human
uucagcucugguuggagguucu

SEQ ID NO: 1286386 - RNA, 20 nt, Human
uuccaauaaagacaucaugg

SEQ ID NO: 1286387 - RNA, 24 nt, Human
uuuaagccagcacgauauugaucc

SEQ ID NO: 1286388 - RNA, 19 nt, Human
agugugaggauugggagga

SEQ ID NO: 1286389 - RNA, 24 nt, Human
gaccuacuccgcuaacccaguggg

SEQ ID NO: 1286390 - RNA, 20 nt, Human
uagugugaggauugggagga

SEQ ID NO: 1286391 - RNA, 22 nt, Human
uagugugaggauugggaggaac

SEQ ID NO: 1286392 - RNA, 22 nt, Human
ugugaggauugggaggaacucg

SEQ ID NO: 1286393 - RNA, 23 nt, Human
cucuuaccccuuugugcugacua

SEQ ID NO: 1286394 - RNA, 22 nt, Human
cuuugugcugacuauuuucucc

SEQ ID NO: 1286395 - RNA, 27 nt, Human
uauuccauuccuguagcaauguguguu

SEQ ID NO: 1286396 - RNA, 23 nt, Human
uguuuuuuccuccuauagcucuu

SEQ ID NO: 1286397 - RNA, 21 nt, Human
ccaauucuucugcagauucua

SEQ ID NO: 1286398 - RNA, 18 nt, Human
uguccaauucuucugcag

SEQ ID NO: 1286399 - RNA, 24 nt, Human
uguccaauucuucugcagauucua

SEQ ID NO: 1286400 - RNA, 21 nt, Human
aaacggccagggacagagcaa

SEQ ID NO: 1286401 - RNA, 22 nt, Human
agccuauccaauuucucucuca

SEQ ID NO: 1286402 - RNA, 23 nt, Human
agucugugggguugaccacacag

SEQ ID NO: 1286403 - RNA, 21 nt, Human
caaaaucccgagccaagugca

SEQ ID NO: 1286404 - RNA, 21 nt, Human
caaaaugccucccaagaguga

SEQ ID NO: 1286405 - RNA, 21 nt, Human
cacaaguguagccaaaauccc

SEQ ID NO: 1286406 - RNA, 25 nt, Human
caggugccaccucuucuuaucacuc

SEQ ID NO: 1286407 - RNA, 22 nt, Human
cauuuuuguuuuuuuauggagg

SEQ ID NO: 1286408 - RNA, 18 nt, Human
cggccagggacagagcaa

SEQ ID NO: 1286409 - RNA, 27 nt, Human
cucaaaaugccucccaagagugaagca

SEQ ID NO: 1286410 - RNA, 20 nt, Human
cucuucucaaaaugccuccc

SEQ ID NO: 1286411 - RNA, 19 nt, Human
cuucaaccaaggaaguaag

SEQ ID NO: 1286412 - RNA, 28 nt, Human
gccuauccaauuucucucucaggcagcc

SEQ ID NO: 1286413 - RNA, 21 nt, Human
gucaccuuguauuuggaaguc

SEQ ID NO: 1286414 - RNA, 19 nt, Human
guccuuuuuuguuucauuu

SEQ ID NO: 1286415 - RNA, 21 nt, Human
guuuuguccuuuuuuguuuca

SEQ ID NO: 1286416 - RNA, 18 nt, Human
uauccaauuucucucuca

SEQ ID NO: 1286417 - RNA, 21 nt, Human
ucaaccaaggaaguaaggagg

SEQ ID NO: 1286418 - RNA, 21 nt, Human
ucauuuuucauuuccauuuuu

SEQ ID NO: 1286419 - RNA, 19 nt, Human
ucccgagccaagugcaaag

SEQ ID NO: 1286420 - RNA, 21 nt, Human
ucuccuacugcuuuggcugga

SEQ ID NO: 1286421 - RNA, 23 nt, Human
ucugugggguugaccacacaggu

SEQ ID NO: 1286422 - RNA, 20 nt, Human
ucuuugauuuugcucuucuc

SEQ ID NO: 1286423 - RNA, 22 nt, Human
ugaggcacucagguggggagag

SEQ ID NO: 1286424 - RNA, 20 nt, Human
ugcuuuggcuggaaacucug

SEQ ID NO: 1286425 - RNA, 21 nt, Human
uggaaguagaacuaagaaggg

SEQ ID NO: 1286426 - RNA, 20 nt, Human
uggcaagauguucuccuacu

SEQ ID NO: 1286427 - RNA, 28 nt, Human
uggcaagauguucuccuacugcuuuggc

SEQ ID NO: 1286428 - RNA, 19 nt, Human
uguuuuuuuauggaggguu

SEQ ID NO: 1286429 - RNA, 21 nt, Human
uucuuaucacuccaccuuggc

SEQ ID NO: 1286430 - RNA, 22 nt, Human
uuggaaguagaacuaagaaggg

SEQ ID NO: 1286431 - RNA, 20 nt, Human
uugucuggcaagauguucuc

SEQ ID NO: 1286432 - RNA, 25 nt, Human
uuuguuuuuuuauggaggguugggg

SEQ ID NO: 1286433 - RNA, 19 nt, Human
acacugauacuuggcuagg

SEQ ID NO: 1286434 - RNA, 18 nt, Human
acccaggucagugucuga

SEQ ID NO: 1286435 - RNA, 18 nt, Human
aggaagaggacccagguc

SEQ ID NO: 1286436 - RNA, 18 nt, Human
aggauucuuuguggccuc

SEQ ID NO: 1286437 - RNA, 24 nt, Human
auccuauccaccaaagacugguua

SEQ ID NO: 1286438 - RNA, 24 nt, Human
cagguccaauccuauccaccaaag

SEQ ID NO: 1286439 - RNA, 24 nt, Human
ccaggauucuuuguggccucuucc

SEQ ID NO: 1286440 - RNA, 21 nt, Human
gaaaguaaaggagcuagaggc

SEQ ID NO: 1286441 - RNA, 22 nt, Human
gaacugaaguuauucacagcaa

SEQ ID NO: 1286442 - RNA, 23 nt, Human
gagaaaguaaaggagcuagaggc

SEQ ID NO: 1286443 - RNA, 18 nt, Human
gcccuacccugagagucu

SEQ ID NO: 1286444 - RNA, 23 nt, Human
gggaacaggaagaggacccaggu

SEQ ID NO: 1286445 - RNA, 23 nt, Human
uccaauccuauccaccaaagacu

SEQ ID NO: 1286446 - RNA, 22 nt, Human
uccacaggagaaaguaaaggag

SEQ ID NO: 1286447 - RNA, 27 nt, Human
ugaagggaacaggaagaggacccaggu

SEQ ID NO: 1286448 - RNA, 18 nt, Human
ugacuugcugaagggaac

SEQ ID NO: 1286449 - RNA, 20 nt, Human
uggcuaggguguaugacuug

SEQ ID NO: 1286450 - RNA, 24 nt, Human
agcuguguucuggaaggagauggg

SEQ ID NO: 1286451 - RNA, 24 nt, Human
aggcgggaccaucucuccaggaga

SEQ ID NO: 1286452 - RNA, 20 nt, Human
caggcuggcaugcagggaga

SEQ ID NO: 1286453 - RNA, 18 nt, Human
ccaucucuccaggagacc

SEQ ID NO: 1286454 - RNA, 24 nt, Human
cccacagcuggagcugacugcgac

SEQ ID NO: 1286455 - RNA, 20 nt, Human
cuccgcaggggccuugugcc

SEQ ID NO: 1286456 - RNA, 22 nt, Human
cuccugaugcuuccagcugugu

SEQ ID NO: 1286457 - RNA, 23 nt, Human
cugacugcgaccaggucuucucc

SEQ ID NO: 1286458 - RNA, 20 nt, Human
cuugugccccacagcuggag

SEQ ID NO: 1286459 - RNA, 19 nt, Human
uaagcaggcuggcaugcag

SEQ ID NO: 1286460 - RNA, 21 nt, Human
ucuccugaugcuuccagcugu

SEQ ID NO: 1286461 - RNA, 19 nt, Human
ugagcuccgcaggggccuu

SEQ ID NO: 1286462 - RNA, 18 nt, Human
uggaaggagaugggucug

SEQ ID NO: 1286463 - RNA, 19 nt, Human
uguucuggaaggagauggg

SEQ ID NO: 1286464 - RNA, 23 nt, Human
cucuggguucucugaagaugucu

SEQ ID NO: 1286465 - RNA, 21 nt, Human
ucugaagaugucuccccuguc

SEQ ID NO: 1286466 - RNA, 18 nt, Human
aaacaacuggaaaccaga

SEQ ID NO: 1286467 - RNA, 23 nt, Human
aaacaacuggaaaccagagaccc

SEQ ID NO: 1286468 - RNA, 22 nt, Human
aacaacuggaaaccagagaccc

SEQ ID NO: 1286469 - RNA, 21 nt, Human
aaacuuggaagaacaaguucu

SEQ ID NO: 1286470 - RNA, 19 nt, Human
aacaaggaaacuuggaaga

SEQ ID NO: 1286471 - RNA, 19 nt, Human
aagaaaacaaaauaugaga

SEQ ID NO: 1286472 - RNA, 27 nt, Human
aauaagaaaacaaaauaugagaaggga

SEQ ID NO: 1286473 - RNA, 23 nt, Human
acaaaauaugagaagggagaagc

SEQ ID NO: 1286474 - RNA, 19 nt, Human
acaggaggaugugcauagg

SEQ ID NO: 1286475 - RNA, 20 nt, Human
acccauuuagcccucucgcu

SEQ ID NO: 1286476 - RNA, 22 nt, Human
acccuaaaaaugacccagcaca

SEQ ID NO: 1286477 - RNA, 18 nt, Human
accugggagggaaggccc

SEQ ID NO: 1286478 - RNA, 20 nt, Human
agagauggacccauuuagcc

SEQ ID NO: 1286479 - RNA, 23 nt, Human
agagauggacccauuuagcccuc

SEQ ID NO: 1286480 - RNA, 21 nt, Human
agauccuaucacccacucuuc

SEQ ID NO: 1286481 - RNA, 19 nt, Human
aggacaaggacaaccuuga

SEQ ID NO: 1286482 - RNA, 24 nt, Human
agugugggcaccauaaggaaaugu

SEQ ID NO: 1286483 - RNA, 18 nt, Human
auaggacaaggacaaccu

SEQ ID NO: 1286484 - RNA, 29 nt, Human
auauguguguguguauguaugugugugug

SEQ ID NO: 1286485 - RNA, 19 nt, Human
augccaaauccaaaguuuu

SEQ ID NO: 1286486 - RNA, 20 nt, Human
augugcauagguuauaugca

SEQ ID NO: 1286487 - RNA, 20 nt, Human
auguguguguguauguaugu

SEQ ID NO: 1286488 - RNA, 22 nt, Human
augugugugugugugugugugu

SEQ ID NO: 1286489 - RNA, 23 nt, Human
auguguguguguguguguguguu

SEQ ID NO: 1286490 - RNA, 20 nt, Human
caaaagacccccuacaccuc

SEQ ID NO: 1286491 - RNA, 22 nt, Human
caaaagacccccuacaccucac

SEQ ID NO: 1286492 - RNA, 18 nt, Human
caccgcggccagcgcccc

SEQ ID NO: 1286493 - RNA, 25 nt, Human
caccgcucagccucugaauaucuuu

SEQ ID NO: 1286494 - RNA, 19 nt, Human
cagcaacugagcacucccu

SEQ ID NO: 1286495 - RNA, 21 nt, Human
cagcacauguccagccaccuc

SEQ ID NO: 1286496 - RNA, 20 nt, Human
cagcaccgcggccagcgccc

SEQ ID NO: 1286497 - RNA, 21 nt, Human
caggcccugggcugggguccc

SEQ ID NO: 1286498 - RNA, 19 nt, Human
caggcuucaggccuauagu

SEQ ID NO: 1286499 - RNA, 21 nt, Human
cagggcaccaggugagguccc

SEQ ID NO: 1286500 - RNA, 21 nt, Human
cagggccugcuggcgccgccc

SEQ ID NO: 1286501 - RNA, 22 nt, Human
cagggccugcuggcgccgcccu

SEQ ID NO: 1286502 - RNA, 25 nt, Human
cauguccagccaccucuucagugcc

SEQ ID NO: 1286503 - RNA, 23 nt, Human
ccaagcccaccagggccugcugg

SEQ ID NO: 1286504 - RNA, 24 nt, Human
ccagccaccucuucagugcccucu

SEQ ID NO: 1286505 - RNA, 18 nt, Human
cccccuacaccucacccu

SEQ ID NO: 1286506 - RNA, 21 nt, Human
cccccuacaccucacccuaaa

SEQ ID NO: 1286507 - RNA, 21 nt, Human
ccccgcccccuccuccguccg

SEQ ID NO: 1286508 - RNA, 22 nt, Human
ccccuccauuccuuaccccccu

SEQ ID NO: 1286509 - RNA, 19 nt, Human
cccgcccccuccuccgucc

SEQ ID NO: 1286510 - RNA, 19 nt, Human
cccuaaaaaugacccagca

SEQ ID NO: 1286511 - RNA, 23 nt, Human
cccuagagauggacccauuuagc

SEQ ID NO: 1286512 - RNA, 20 nt, Human
ccguuucagcaccgcggcca

SEQ ID NO: 1286513 - RNA, 23 nt, Human
ccucugaauaucuuugaaguggg

SEQ ID NO: 1286514 - RNA, 19 nt, Human
cgagagccccgcccccucc

SEQ ID NO: 1286515 - RNA, 18 nt, Human
cgcccccuccuccguccg

SEQ ID NO: 1286516 - RNA, 21 nt, Human
cgucucccucuucccggcuca

SEQ ID NO: 1286517 - RNA, 21 nt, Human
cuagagauggacccauuuagc

SEQ ID NO: 1286518 - RNA, 18 nt, Human
cuccagucuccugccucc

SEQ ID NO: 1286519 - RNA, 19 nt, Human
cucccaagcccaccagggc

SEQ ID NO: 1286520 - RNA, 19 nt, Human
cuccugccuccucccaagc

SEQ ID NO: 1286521 - RNA, 24 nt, Human
cugaagaauuugauucccuaguuu

SEQ ID NO: 1286522 - RNA, 18 nt, Human
cugaagcugguagccagu

SEQ ID NO: 1286523 - RNA, 23 nt, Human
cugaagcugguagccaguucugg

SEQ ID NO: 1286524 - RNA, 22 nt, Human
cugauggccccuccauuccuua

SEQ ID NO: 1286525 - RNA, 21 nt, Human
cugcaccgcucagccucugaa

SEQ ID NO: 1286526 - RNA, 21 nt, Human
gaaccaaucccccuauagaug

SEQ ID NO: 1286527 - RNA, 27 nt, Human
gagagagugugugugugugugugugug

SEQ ID NO: 1286528 - RNA, 18 nt, Human
gaggccuagaagcagguc

SEQ ID NO: 1286529 - RNA, 20 nt, Human
gcaccaggugaggucccuuc

SEQ ID NO: 1286530 - RNA, 18 nt, Human
gcccugcccgucucccuc

SEQ ID NO: 1286531 - RNA, 25 nt, Human
gcccugcccgucucccucuucccgg

SEQ ID NO: 1286532 - RNA, 22 nt, Human
ggaggaaaaaagucugcagaga

SEQ ID NO: 1286533 - RNA, 20 nt, Human
ggaggaggcugaggucaggg

SEQ ID NO: 1286534 - RNA, 22 nt, Human
ggggauccuggaaccaaucccc

SEQ ID NO: 1286535 - RNA, 24 nt, Human
guguguguauauauaugugugugu

SEQ ID NO: 1286536 - RNA, 24 nt, Human
guguguguauauauaugugugugu

SEQ ID NO: 1286537 - RNA, 20 nt, Human
gugugugugugugugugugu

SEQ ID NO: 1286538 - RNA, 21 nt, Human
gugugugugugugugugugug

SEQ ID NO: 1286539 - RNA, 21 nt, Human
gugugugugugugugugugug

SEQ ID NO: 1286540 - RNA, 21 nt, Human
gugugugugugugugugugug

SEQ ID NO: 1286541 - RNA, 20 nt, Human
guuuggggaggaggcugagg

SEQ ID NO: 1286542 - RNA, 24 nt, Human
uacaccucacccuaaaaaugaccc

SEQ ID NO: 1286543 - RNA, 24 nt, Human
uacauagcauuuacauuguauuag

SEQ ID NO: 1286544 - RNA, 25 nt, Human
uagagauggacccauuuagcccucu

SEQ ID NO: 1286545 - RNA, 20 nt, Human
uauaacaaauuacuugaaca

SEQ ID NO: 1286546 - RNA, 20 nt, Human
uauaacaaauuacuugaaca

SEQ ID NO: 1286547 - RNA, 24 nt, Human
uauagaugacuauaugccaaaucc

SEQ ID NO: 1286548 - RNA, 21 nt, Human
uauauauauguguguguguau

SEQ ID NO: 1286549 - RNA, 21 nt, Human
uauauauauguguguguguau

SEQ ID NO: 1286550 - RNA, 20 nt, Human
uauauguguguguguaugua

SEQ ID NO: 1286551 - RNA, 21 nt, Human
uauauguguguguguauguau

SEQ ID NO: 1286552 - RNA, 24 nt, Human
uauguaugugugugugugugugag

SEQ ID NO: 1286553 - RNA, 23 nt, Human
uauguaugugugugugugugugu

SEQ ID NO: 1286554 - RNA, 23 nt, Human
uauguaugugugugugugugugu

SEQ ID NO: 1286555 - RNA, 21 nt, Human
uauguguguguguauguaugu

SEQ ID NO: 1286556 - RNA, 18 nt, Human
uaugugugugugugugug

SEQ ID NO: 1286557 - RNA, 23 nt, Human
uaugugugugugugugugugugu

SEQ ID NO: 1286558 - RNA, 24 nt, Human
uaugugugugugugugugugugug

SEQ ID NO: 1286559 - RNA, 24 nt, Human
uauuauaaguaaucuagagaugau

SEQ ID NO: 1286560 - RNA, 18 nt, Human
ucacugcaguucugcuuc

SEQ ID NO: 1286561 - RNA, 19 nt, Human
ucaggccuauaguagccag

SEQ ID NO: 1286562 - RNA, 22 nt, Human
ucccaagcccaccagggccugc

SEQ ID NO: 1286563 - RNA, 19 nt, Human
uccccagcaacugagcacu

SEQ ID NO: 1286564 - RNA, 25 nt, Human
ucccucuucccggcucacggcuccc

SEQ ID NO: 1286565 - RNA, 18 nt, Human
ucccugcaccgcucagcc

SEQ ID NO: 1286566 - RNA, 18 nt, Human
uccguagcuuuguggaug

SEQ ID NO: 1286567 - RNA, 19 nt, Human
uccuccguccgcggagggc

SEQ ID NO: 1286568 - RNA, 24 nt, Human
ucuccagucuccugccuccuccca

SEQ ID NO: 1286569 - RNA, 19 nt, Human
ucuccugccuccucccaag

SEQ ID NO: 1286570 - RNA, 22 nt, Human
ucucugaagaauuugauucccu

SEQ ID NO: 1286571 - RNA, 18 nt, Human
ugaagcugguagccaguu

SEQ ID NO: 1286572 - RNA, 22 nt, Human
ugaagcugguagccaguucugg

SEQ ID NO: 1286573 - RNA, 24 nt, Human
ugacuauaugccaaauccaaaguu

SEQ ID NO: 1286574 - RNA, 20 nt, Human
ugagagagagagagagugug

SEQ ID NO: 1286575 - RNA, 22 nt, Human
ugagcacucccugcaccgcuca

SEQ ID NO: 1286576 - RNA, 20 nt, Human
ugaggacuugggcauccaug

SEQ ID NO: 1286577 - RNA, 21 nt, Human
ugagggcagcaggcccugggc

SEQ ID NO: 1286578 - RNA, 19 nt, Human
ugauggccccuccauuccu

SEQ ID NO: 1286579 - RNA, 23 nt, Human
ugccaggugccuguguccgcucu

SEQ ID NO: 1286580 - RNA, 18 nt, Human
uggcgccgcccugcccgu

SEQ ID NO: 1286581 - RNA, 20 nt, Human
uggggaggaggcugagguca

SEQ ID NO: 1286582 - RNA, 22 nt, Human
uguauauauaugugugugugua

SEQ ID NO: 1286583 - RNA, 22 nt, Human
uguauauauaugugugugugua

SEQ ID NO: 1286584 - RNA, 19 nt, Human
uguauguaugugugugugu

SEQ ID NO: 1286585 - RNA, 21 nt, Human
uguauguaugugugugugugu

SEQ ID NO: 1286586 - RNA, 25 nt, Human
uguauguaugugugugugugugugg

SEQ ID NO: 1286587 - RNA, 25 nt, Human
uguaugugugugugugugugugugg

SEQ ID NO: 1286588 - RNA, 19 nt, Human
ugugauauuuggcucccgg

SEQ ID NO: 1286589 - RNA, 23 nt, Human
ugugauauuuggcucccgggagg

SEQ ID NO: 1286590 - RNA, 19 nt, Human
uguguauauauaugugugu

SEQ ID NO: 1286591 - RNA, 19 nt, Human
uguguauauauaugugugu

SEQ ID NO: 1286592 - RNA, 19 nt, Human
uguguauauauaugugugu

SEQ ID NO: 1286593 - RNA, 19 nt, Human
uguguauauauaugugugu

SEQ ID NO: 1286594 - RNA, 21 nt, Human
uguguauauauaugugugugu

SEQ ID NO: 1286595 - RNA, 21 nt, Human
uguguauauauaugugugugu

SEQ ID NO: 1286596 - RNA, 22 nt, Human
uguguauauauaugugugugug

SEQ ID NO: 1286597 - RNA, 22 nt, Human
uguguauauauaugugugugug

SEQ ID NO: 1286598 - RNA, 24 nt, Human
uguguauauauaugugugugugua

SEQ ID NO: 1286599 - RNA, 24 nt, Human
uguguauauauaugugugugugua

SEQ ID NO: 1286600 - RNA, 19 nt, Human
uguguauguaugugugugu

SEQ ID NO: 1286601 - RNA, 19 nt, Human
uguguauguaugugugugu

SEQ ID NO: 1286602 - RNA, 21 nt, Human
uguguauguaugugugugugu

SEQ ID NO: 1286603 - RNA, 22 nt, Human
uguguauguaugugugugugug

SEQ ID NO: 1286604 - RNA, 19 nt, Human
uguguguauauauaugugu

SEQ ID NO: 1286605 - RNA, 19 nt, Human
uguguguauauauaugugu

SEQ ID NO: 1286606 - RNA, 21 nt, Human
uguguguauauauaugugugu

SEQ ID NO: 1286607 - RNA, 21 nt, Human
uguguguauauauaugugugu

SEQ ID NO: 1286608 - RNA, 23 nt, Human
uguguguauauauauguguguug

SEQ ID NO: 1286609 - RNA, 23 nt, Human
uguguguauauauauguguguug

SEQ ID NO: 1286610 - RNA, 19 nt, Human
uguguguauguaugugugu

SEQ ID NO: 1286611 - RNA, 23 nt, Human
uguguguauguaugugugugugu

SEQ ID NO: 1286612 - RNA, 24 nt, Human
uguguguauguaugugugugugug

SEQ ID NO: 1286613 - RNA, 31 nt, Human
uguguguauguaugugugugugugugugugg

SEQ ID NO: 1286614 - RNA, 21 nt, Human
uguguguguauauauaugugu

SEQ ID NO: 1286615 - RNA, 21 nt, Human
uguguguguauauauaugugu

SEQ ID NO: 1286616 - RNA, 23 nt, Human
uguguguguauauauaugugugu

SEQ ID NO: 1286617 - RNA, 23 nt, Human
uguguguguauauauaugugugu

SEQ ID NO: 1286618 - RNA, 21 nt, Human
uguguguguguauauauaugu

SEQ ID NO: 1286619 - RNA, 21 nt, Human
uguguguguguauauauaugu

SEQ ID NO: 1286620 - RNA, 25 nt, Human
uguguguguguauauauauguguca

SEQ ID NO: 1286621 - RNA, 25 nt, Human
uguguguguguauauauauguguca

SEQ ID NO: 1286622 - RNA, 24 nt, Human
uguguguguguauauauaugugug

SEQ ID NO: 1286623 - RNA, 24 nt, Human
uguguguguguauauauaugugug

SEQ ID NO: 1286624 - RNA, 20 nt, Human
uguguguguguauguaugug

SEQ ID NO: 1286625 - RNA, 23 nt, Human
uguguguguguauguaugugugu

SEQ ID NO: 1286626 - RNA, 18 nt, Human
uguguguguguguguaua

SEQ ID NO: 1286627 - RNA, 18 nt, Human
uguguguguguguguaua

SEQ ID NO: 1286628 - RNA, 20 nt, Human
uguguguguguguguauaua

SEQ ID NO: 1286629 - RNA, 20 nt, Human
uguguguguguguguauaua

SEQ ID NO: 1286630 - RNA, 18 nt, Human
ugugugugugugugugug

SEQ ID NO: 1286631 - RNA, 18 nt, Human
ugugugugugugugugug

SEQ ID NO: 1286632 - RNA, 18 nt, Human
ugugugugugugugugug

SEQ ID NO: 1286633 - RNA, 18 nt, Human
ugugugugugugugugug

SEQ ID NO: 1286634 - RNA, 18 nt, Human
ugugugugugugugugug

SEQ ID NO: 1286635 - RNA, 18 nt, Human
ugugugugugugugugug

SEQ ID NO: 1286636 - RNA, 18 nt, Human
ugugugugugugugugug

SEQ ID NO: 1286637 - RNA, 18 nt, Human
ugugugugugugugugug

SEQ ID NO: 1286638 - RNA, 18 nt, Human
ugugugugugugugugug

SEQ ID NO: 1286639 - RNA, 18 nt, Human
ugugugugugugugugug

SEQ ID NO: 1286640 - RNA, 18 nt, Human
ugugugugugugugugug

SEQ ID NO: 1286641 - RNA, 18 nt, Human
ugugugugugugugugug

SEQ ID NO: 1286642 - RNA, 18 nt, Human
ugugugugugugugugug

SEQ ID NO: 1286643 - RNA, 18 nt, Human
ugugugugugugugugug

SEQ ID NO: 1286644 - RNA, 18 nt, Human
ugugugugugugugugug

SEQ ID NO: 1286645 - RNA, 18 nt, Human
ugugugugugugugugug

SEQ ID NO: 1286646 - RNA, 24 nt, Human
uguguguguguguguguguauaua

SEQ ID NO: 1286647 - RNA, 24 nt, Human
uguguguguguguguguguauaua

SEQ ID NO: 1286648 - RNA, 21 nt, Human
ugugugugugugugugugugu

SEQ ID NO: 1286649 - RNA, 21 nt, Human
ugugugugugugugugugugu

SEQ ID NO: 1286650 - RNA, 21 nt, Human
ugugugugugugugugugugu

SEQ ID NO: 1286651 - RNA, 21 nt, Human
ugugugugugugugugugugu

SEQ ID NO: 1286652 - RNA, 21 nt, Human
ugugugugugugugugugugu

SEQ ID NO: 1286653 - RNA, 21 nt, Human
ugugugugugugugugugugu

SEQ ID NO: 1286654 - RNA, 21 nt, Human
ugugugugugugugugugugu

SEQ ID NO: 1286655 - RNA, 21 nt, Human
ugugugugugugugugugugu

SEQ ID NO: 1286656 - RNA, 21 nt, Human
ugugugugugugugugugugu

SEQ ID NO: 1286657 - RNA, 21 nt, Human
ugugugugugugugugugugu

SEQ ID NO: 1286658 - RNA, 21 nt, Human
ugugugugugugugugugugu

SEQ ID NO: 1286659 - RNA, 21 nt, Human
ugugugugugugugugugugu

SEQ ID NO: 1286660 - RNA, 21 nt, Human
ugugugugugugugugugugu

SEQ ID NO: 1286661 - RNA, 21 nt, Human
ugugugugugugugugugugu

SEQ ID NO: 1286662 - RNA, 21 nt, Human
ugugugugugugugugugugu

SEQ ID NO: 1286663 - RNA, 21 nt, Human
ugugugugugugugugugugu

SEQ ID NO: 1286664 - RNA, 21 nt, Human
ugugugugugugugugugugu

SEQ ID NO: 1286665 - RNA, 21 nt, Human
ugugugugugugugugugugu

SEQ ID NO: 1286666 - RNA, 21 nt, Human
ugugugugugugugugugugu

SEQ ID NO: 1286667 - RNA, 21 nt, Human
ugugugugugugugugugugu

SEQ ID NO: 1286668 - RNA, 21 nt, Human
ugugugugugugugugugugu

SEQ ID NO: 1286669 - RNA, 21 nt, Human
ugugugugugugugugugugu

SEQ ID NO: 1286670 - RNA, 21 nt, Human
ugugugugugugugugugugu

SEQ ID NO: 1286671 - RNA, 22 nt, Human
ugugugugugugugugugugua

SEQ ID NO: 1286672 - RNA, 22 nt, Human
ugugugugugugugugugugua

SEQ ID NO: 1286673 - RNA, 22 nt, Human
ugugugugugugugugugugug

SEQ ID NO: 1286674 - RNA, 22 nt, Human
ugugugugugugugugugugug

SEQ ID NO: 1286675 - RNA, 22 nt, Human
ugugugugugugugugugugug

SEQ ID NO: 1286676 - RNA, 22 nt, Human
ugugugugugugugugugugug

SEQ ID NO: 1286677 - RNA, 22 nt, Human
ugugugugugugugugugugug

SEQ ID NO: 1286678 - RNA, 22 nt, Human
ugugugugugugugugugugug

SEQ ID NO: 1286679 - RNA, 22 nt, Human
ugugugugugugugugugugug

SEQ ID NO: 1286680 - RNA, 22 nt, Human
ugugugugugugugugugugug

SEQ ID NO: 1286681 - RNA, 18 nt, Human
uucaaggcaaggggaaga

SEQ ID NO: 1286682 - RNA, 20 nt, Human
uugccaggugccuguguccg

SEQ ID NO: 1286683 - RNA, 23 nt, Human
uuggcaucugcaggggauccugg

SEQ ID NO: 1286684 - RNA, 27 nt, Human
uuguggauggaggccuagaagcagguc

SEQ ID NO: 1286685 - RNA, 24 nt, Human
uuuaguguuauaauaaaaggcuuc

SEQ ID NO: 1286686 - RNA, 25 nt, Human
uuugaagugggucacugcaguucug

SEQ ID NO: 1286687 - RNA, 19 nt, Human
uuugcugcuguguggaacu

SEQ ID NO: 1286688 - RNA, 19 nt, Human
aagcaccgggugaaaagag

SEQ ID NO: 1286689 - RNA, 18 nt, Human
agaagcaccgggugaaaa

SEQ ID NO: 1286690 - RNA, 22 nt, Human
agcugcuuugggacgccugggu

SEQ ID NO: 1286691 - RNA, 25 nt, Human
auggcggcccccagcugcuuuggga

SEQ ID NO: 1286692 - RNA, 18 nt, Human
caaaauggcggcccccag

SEQ ID NO: 1286693 - RNA, 19 nt, Human
caccgggugaaaagagcuc

SEQ ID NO: 1286694 - RNA, 20 nt, Human
cagaagugggcugcccugcg

SEQ ID NO: 1286695 - RNA, 20 nt, Human
cggcaaaauggcggccccca

SEQ ID NO: 1286696 - RNA, 24 nt, Human
cgguugggccccaggcaggaaguu

SEQ ID NO: 1286697 - RNA, 21 nt, Human
gacgaugagggaaggcgaaga

SEQ ID NO: 1286698 - RNA, 21 nt, Human
gccccaggcaggaaguuucug

SEQ ID NO: 1286699 - RNA, 21 nt, Human
gcugagggagcuuuuuggugg

SEQ ID NO: 1286700 - RNA, 23 nt, Human
ucuugccuuuuugcuccacaugg

SEQ ID NO: 1286701 - RNA, 21 nt, Human
ugccguacggcaaaauggcgg

SEQ ID NO: 1286702 - RNA, 19 nt, Human
ugcuuugggacgccugggu

SEQ ID NO: 1286703 - RNA, 22 nt, Human
ugcuuugggacgccuggguucg

SEQ ID NO: 1286704 - RNA, 24 nt, Human
uggcggagucguagaagcaccggg

SEQ ID NO: 1286705 - RNA, 24 nt, Human
uuccagcgccaaacaccaggguac

SEQ ID NO: 1286706 - RNA, 20 nt, Human
uuuuugcuccacaugguggu

SEQ ID NO: 1286707 - RNA, 24 nt, Human
ucuugcuuccagcaucagccugga

SEQ ID NO: 1286708 - RNA, 18 nt, Human
aagaaccuuuagccaacg

SEQ ID NO: 1286709 - RNA, 20 nt, Human
aaguaauacugcuguugcuu

SEQ ID NO: 1286710 - RNA, 21 nt, Human
aauacaaucuccaaagaaccu

SEQ ID NO: 1286711 - RNA, 22 nt, Human
caaagaaccuuuagccaacgug

SEQ ID NO: 1286712 - RNA, 22 nt, Human
caaucuccaaagaaccuuuagc

SEQ ID NO: 1286713 - RNA, 20 nt, Human
caccauugcucuuuuggguu

SEQ ID NO: 1286714 - RNA, 18 nt, Human
cacugugcuucccccugc

SEQ ID NO: 1286715 - RNA, 19 nt, Human
caguggcuuuuuugauguu

SEQ ID NO: 1286716 - RNA, 20 nt, Human
cccugcuuguccuuuuccuc

SEQ ID NO: 1286717 - RNA, 23 nt, Human
cucuuuggucucacauuuuucau

SEQ ID NO: 1286718 - RNA, 18 nt, Human
cuguuuccugccuuuuuu

SEQ ID NO: 1286719 - RNA, 21 nt, Human
cuuuggucucacauuuuucau

SEQ ID NO: 1286720 - RNA, 23 nt, Human
cuuuucaccauugcucuuuuggg

SEQ ID NO: 1286721 - RNA, 21 nt, Human
gagagucguucaguuucucca

SEQ ID NO: 1286722 - RNA, 19 nt, Human
uccaaguauugaauggaag

SEQ ID NO: 1286723 - RNA, 19 nt, Human
uccaaguauugaauggaag

SEQ ID NO: 1286724 - RNA, 19 nt, Human
uccaauacaaucuccaaag

SEQ ID NO: 1286725 - RNA, 21 nt, Human
uccuuugcugugauugcuccu

SEQ ID NO: 1286726 - RNA, 23 nt, Human
ucuuuggucucacauuuuucauu

SEQ ID NO: 1286727 - RNA, 20 nt, Human
ugauguuugcagguccaagu

SEQ ID NO: 1286728 - RNA, 22 nt, Human
ugcuccuuucucuuuggucuca

SEQ ID NO: 1286729 - RNA, 19 nt, Human
ugcugugauugcuccuuuc

SEQ ID NO: 1286730 - RNA, 24 nt, Human
uuccuguuuccugccuuuuuuguu

SEQ ID NO: 1286731 - RNA, 22 nt, Human
uucuuuucaccauugcucuuuu

SEQ ID NO: 1286732 - RNA, 19 nt, Human
uuggguuuugucuuuggaa

SEQ ID NO: 1286733 - RNA, 20 nt, Human
uuuuuuguuguagccacugu

SEQ ID NO: 1286734 - RNA, 21 nt, Human
aaaugggguccuuuguccauu

SEQ ID NO: 1286735 - RNA, 19 nt, Human
acaagaguagcgcuggcug

SEQ ID NO: 1286736 - RNA, 22 nt, Human
acaccccagacucaucucccuc

SEQ ID NO: 1286737 - RNA, 18 nt, Human
acagagccacagccacac

SEQ ID NO: 1286738 - RNA, 19 nt, Human
agaguccuucuggggcuuc

SEQ ID NO: 1286739 - RNA, 20 nt, Human
aggcucugcugggaauggug

SEQ ID NO: 1286740 - RNA, 19 nt, Human
aggcucugcuggggauagu

SEQ ID NO: 1286741 - RNA, 19 nt, Human
aggcucugcuggggauagu

SEQ ID NO: 1286742 - RNA, 19 nt, Human
aggcucugcuggggauagu

SEQ ID NO: 1286743 - RNA, 19 nt, Human
aggcucugcuggggauggu

SEQ ID NO: 1286744 - RNA, 19 nt, Human
aggcucugcuggggauggu

SEQ ID NO: 1286745 - RNA, 19 nt, Human
aggcucugcuggggauggu

SEQ ID NO: 1286746 - RNA, 19 nt, Human
aggcucugcuggggauggu

SEQ ID NO: 1286747 - RNA, 19 nt, Human
aggcuuugcuggggauggu

SEQ ID NO: 1286748 - RNA, 18 nt, Human
agucuuuucuccauguuc

SEQ ID NO: 1286749 - RNA, 21 nt, Human
augauuaucuguagagcuuuu

SEQ ID NO: 1286750 - RNA, 22 nt, Human
caaaugggguccuuuguccauu

SEQ ID NO: 1286751 - RNA, 22 nt, Human
caaaugggguccuuuguccauu

SEQ ID NO: 1286752 - RNA, 22 nt, Human
caaaugggguccuuuuuccauu

SEQ ID NO: 1286753 - RNA, 22 nt, Human
cagcggauucuuuauguguggu

SEQ ID NO: 1286754 - RNA, 25 nt, Human
caguggaguccuuucugcguguucu

SEQ ID NO: 1286755 - RNA, 25 nt, Human
caguggaguccuuucuucguguucu

SEQ ID NO: 1286756 - RNA, 25 nt, Human
cagugggguccuuucuccauguucu

SEQ ID NO: 1286757 - RNA, 25 nt, Human
cagugggguccuuucuccguguucu

SEQ ID NO: 1286758 - RNA, 25 nt, Human
cagugggguccuuucuccguguucu

SEQ ID NO: 1286759 - RNA, 25 nt, Human
ccaaaggucuuccaguuuuaucuga

SEQ ID NO: 1286760 - RNA, 18 nt, Human
ccaaggccugcaggccca

SEQ ID NO: 1286761 - RNA, 22 nt, Human
ccacaccccagacucaucuccc

SEQ ID NO: 1286762 - RNA, 23 nt, Human
ccacagccacaccccagacucau

SEQ ID NO: 1286763 - RNA, 24 nt, Human
ccacagccacaccccagacucauc

SEQ ID NO: 1286764 - RNA, 22 nt, Human
cccuugguugcuggaguuuucu

SEQ ID NO: 1286765 - RNA, 23 nt, Human
ccugcaggcccaggagcagcacc

SEQ ID NO: 1286766 - RNA, 18 nt, Human
ccugccccccaagaagcu

SEQ ID NO: 1286767 - RNA, 19 nt, Human
ccuggagugaggggaaaua

SEQ ID NO: 1286768 - RNA, 20 nt, Human
ccuggagugaggggaaauau

SEQ ID NO: 1286769 - RNA, 20 nt, Human
ccuuucucuauuuucuguag

SEQ ID NO: 1286770 - RNA, 20 nt, Human
ccuuucucuauuuucuguag

SEQ ID NO: 1286771 - RNA, 20 nt, Human
ccuuucucuauuuucuguag

SEQ ID NO: 1286772 - RNA, 20 nt, Human
ccuuucucuauuuucuguag

SEQ ID NO: 1286773 - RNA, 20 nt, Human
ccuuucucuauuuucuguag

SEQ ID NO: 1286774 - RNA, 20 nt, Human
ccuuucucuauuuucuguag

SEQ ID NO: 1286775 - RNA, 20 nt, Human
ccuuucucuauuuucuguag

SEQ ID NO: 1286776 - RNA, 20 nt, Human
ccuuucucuauuuucuguag

SEQ ID NO: 1286777 - RNA, 24 nt, Human
cuauguucuguagacucugcugca

SEQ ID NO: 1286778 - RNA, 20 nt, Human
cucauuggccaguggagucc

SEQ ID NO: 1286779 - RNA, 20 nt, Human
cucauuggccaguggagucc

SEQ ID NO: 1286780 - RNA, 20 nt, Human
cucugcugggaauggugugg

SEQ ID NO: 1286781 - RNA, 20 nt, Human
cucugcugggaauggugugg

SEQ ID NO: 1286782 - RNA, 20 nt, Human
cugcaggcccaggagcagca

SEQ ID NO: 1286783 - RNA, 25 nt, Human
cugcuggggauagugugguguucuc

SEQ ID NO: 1286784 - RNA, 25 nt, Human
cugcuggggauagugugguguucuc

SEQ ID NO: 1286785 - RNA, 25 nt, Human
cugcuggggauagugugguguucuc

SEQ ID NO: 1286786 - RNA, 25 nt, Human
cugcuggggaugaugugguguucuc

SEQ ID NO: 1286787 - RNA, 25 nt, Human
cugcuggggauggugugguguucuc

SEQ ID NO: 1286788 - RNA, 25 nt, Human
cugcuggggauggugugguguucuc

SEQ ID NO: 1286789 - RNA, 20 nt, Human
cuggaaaagaugugcuuuuu

SEQ ID NO: 1286790 - RNA, 21 nt, Human
cuggcaggccuucuugauacc

SEQ ID NO: 1286791 - RNA, 19 nt, Human
cuucucauuggccaaugga

SEQ ID NO: 1286792 - RNA, 23 nt, Human
cuucucauuggccaauggagucc

SEQ ID NO: 1286793 - RNA, 20 nt, Human
cuuuaugugugguaguggag

SEQ ID NO: 1286794 - RNA, 21 nt, Human
gacucaucucccuccggaacu

SEQ ID NO: 1286795 - RNA, 21 nt, Human
gacugucguuucuccauguuc

SEQ ID NO: 1286796 - RNA, 18 nt, Human
gagccacagccacacccc

SEQ ID NO: 1286797 - RNA, 21 nt, Human
gccuguaggcuugucaguugg

SEQ ID NO: 1286798 - RNA, 21 nt, Human
gcucugcugggaauagugugg

SEQ ID NO: 1286799 - RNA, 20 nt, Human
gggaauggugcgguguucuc

SEQ ID NO: 1286800 - RNA, 23 nt, Human
gggaauggugcgguguucucauu

SEQ ID NO: 1286801 - RNA, 23 nt, Human
gguguucucauuggccaguggag

SEQ ID NO: 1286802 - RNA, 23 nt, Human
gguguucucauuggccaguggag

SEQ ID NO: 1286803 - RNA, 20 nt, Human
guccuuuuuccauuuucugu

SEQ ID NO: 1286804 - RNA, 25 nt, Human
gugcuggggauggugugguguucuc

SEQ ID NO: 1286805 - RNA, 24 nt, Human
guggagucagcaggaucaacagag

SEQ ID NO: 1286806 - RNA, 22 nt, Human
uaaaugggguccuuucuccauu

SEQ ID NO: 1286807 - RNA, 22 nt, Human
uccauguucuguagacucuguu

SEQ ID NO: 1286808 - RNA, 24 nt, Human
uccauuuucuguaggcucugcuag

SEQ ID NO: 1286809 - RNA, 24 nt, Human
uccauuuucuguaggcucugcuag

SEQ ID NO: 1286810 - RNA, 24 nt, Human
uccauuuucuguaggcucugcuga

SEQ ID NO: 1286811 - RNA, 24 nt, Human
uccauuuucuguaggcucugcugg

SEQ ID NO: 1286812 - RNA, 24 nt, Human
uccauuuucuguaggcucugcugg

SEQ ID NO: 1286813 - RNA, 24 nt, Human
uccauuuucuguaggcucugcugg

SEQ ID NO: 1286814 - RNA, 24 nt, Human
uccauuuucuguaggcucugcugg

SEQ ID NO: 1286815 - RNA, 24 nt, Human
uccauuuucuguaggcugugcugg

SEQ ID NO: 1286816 - RNA, 21 nt, Human
uccccaguuuucugauauucu

SEQ ID NO: 1286817 - RNA, 18 nt, Human
uccggaacuggcaggccu

SEQ ID NO: 1286818 - RNA, 24 nt, Human
ucuauuuucuguaggcccugcugg

SEQ ID NO: 1286819 - RNA, 24 nt, Human
ucuauuuucuguaggcccugcugg

SEQ ID NO: 1286820 - RNA, 22 nt, Human
ucuauuuucuguaggcucugcc

SEQ ID NO: 1286821 - RNA, 24 nt, Human
ucuauuuucuguaggcucugcugg

SEQ ID NO: 1286822 - RNA, 24 nt, Human
ucuauuuucuguaggcucugcugg

SEQ ID NO: 1286823 - RNA, 24 nt, Human
ucuauuuucuguaggcucugcugg

SEQ ID NO: 1286824 - RNA, 24 nt, Human
ucuauuuucuguaggcucugcugg

SEQ ID NO: 1286825 - RNA, 24 nt, Human
ucuauuuucuguaggcucugcugg

SEQ ID NO: 1286826 - RNA, 24 nt, Human
ucuauuuucuguaggcucugcugg

SEQ ID NO: 1286827 - RNA, 24 nt, Human
ucuauuuucuguaggcucugcugg

SEQ ID NO: 1286828 - RNA, 24 nt, Human
ucuauuuucuguaggcucugcugg

SEQ ID NO: 1286829 - RNA, 24 nt, Human
ucuauuuucuguaggcucugcugg

SEQ ID NO: 1286830 - RNA, 24 nt, Human
ucucauuggccaauguagucuuuu

SEQ ID NO: 1286831 - RNA, 22 nt, Human
ucucauuggcugaugguguccu

SEQ ID NO: 1286832 - RNA, 19 nt, Human
ucuguaggcccugcugggg

SEQ ID NO: 1286833 - RNA, 22 nt, Human
ucuucagaagugggaggagccu

SEQ ID NO: 1286834 - RNA, 20 nt, Human
ucuucucauuggccaauggg

SEQ ID NO: 1286835 - RNA, 24 nt, Human
ugagacagaguccuucuggggcuu

SEQ ID NO: 1286836 - RNA, 19 nt, Human
ugaucucauuggccagugg

SEQ ID NO: 1286837 - RNA, 19 nt, Human
ugauguggucuucucauug

SEQ ID NO: 1286838 - RNA, 19 nt, Human
ugauguggucuucucauug

SEQ ID NO: 1286839 - RNA, 19 nt, Human
ugauguggucuucucauug

SEQ ID NO: 1286840 - RNA, 19 nt, Human
ugaugugguuuucucauug

SEQ ID NO: 1286841 - RNA, 19 nt, Human
ugaugugguuuucucauug

SEQ ID NO: 1286842 - RNA, 25 nt, Human
ugcagaacaaugugaucaaaaggga

SEQ ID NO: 1286843 - RNA, 27 nt, Human
ugcugaggaugauguggucgagccccu

SEQ ID NO: 1286844 - RNA, 27 nt, Human
ugcugaggaugauguggucgagccccu

SEQ ID NO: 1286845 - RNA, 27 nt, Human
ugcugaggaugauguggucgagccccu

SEQ ID NO: 1286846 - RNA, 27 nt, Human
ugcuggggaugauguggucgagccccu

SEQ ID NO: 1286847 - RNA, 27 nt, Human
ugcuggggaugauguggucgagccccu

SEQ ID NO: 1286848 - RNA, 27 nt, Human
ugcuggggaugauguggucgagccccu

SEQ ID NO: 1286849 - RNA, 26 nt, Human
ugcuggggaugauguggucgagcccu

SEQ ID NO: 1286850 - RNA, 24 nt, Human
ugcuggggaugauguggucuucuc

SEQ ID NO: 1286851 - RNA, 24 nt, Human
ugcuggggaugaugugguuuucuc

SEQ ID NO: 1286852 - RNA, 20 nt, Human
ugcuggggaugguguggccu

SEQ ID NO: 1286853 - RNA, 24 nt, Human
ugcuggggaugguguggucuucuc

SEQ ID NO: 1286854 - RNA, 24 nt, Human
ugcuggggaugguguggucuucuc

SEQ ID NO: 1286855 - RNA, 24 nt, Human
ugcuggggaugguguggucuucuc

SEQ ID NO: 1286856 - RNA, 23 nt, Human
ugcuuggucugugaauugccuga

SEQ ID NO: 1286857 - RNA, 19 nt, Human
uggaaggaaguuguagucu

SEQ ID NO: 1286858 - RNA, 19 nt, Human
uggaauguaguagcaccug

SEQ ID NO: 1286859 - RNA, 25 nt, Human
uggccaaaggaguccugucuccauu

SEQ ID NO: 1286860 - RNA, 22 nt, Human
uggccaauggggucauuucuuc

SEQ ID NO: 1286861 - RNA, 22 nt, Human
uggccgauggggucauuucuuc

SEQ ID NO: 1286862 - RNA, 22 nt, Human
uggcguuauauguuuuuuucca

SEQ ID NO: 1286863 - RNA, 19 nt, Human
ugguguggccuucucauug

SEQ ID NO: 1286864 - RNA, 19 nt, Human
ugguguggucuucucauug

SEQ ID NO: 1286865 - RNA, 19 nt, Human
ugguguggucuucucauug

SEQ ID NO: 1286866 - RNA, 19 nt, Human
ugguguggucuucucauug

SEQ ID NO: 1286867 - RNA, 19 nt, Human
ugguguggucuucucauug

SEQ ID NO: 1286868 - RNA, 19 nt, Human
ugguguggucuucucauug

SEQ ID NO: 1286869 - RNA, 19 nt, Human
ugguguggucuucucauug

SEQ ID NO: 1286870 - RNA, 19 nt, Human
ugguguggucuucucauug

SEQ ID NO: 1286871 - RNA, 23 nt, Human
uguaguuuuugucaggagcuugu

SEQ ID NO: 1286872 - RNA, 24 nt, Human
uguuggggauguugugguguucuc

SEQ ID NO: 1286873 - RNA, 25 nt, Human
uuacuggggauggugugguguucuc

SEQ ID NO: 1286874 - RNA, 23 nt, Human
uuccccaguuuucugauauucuu

SEQ ID NO: 1286875 - RNA, 24 nt, Human
uucuccauguucuguaggcuuuac

SEQ ID NO: 1286876 - RNA, 24 nt, Human
uucugcguguucuguaggcucugc

SEQ ID NO: 1286877 - RNA, 22 nt, Human
uugcuggagaugguauggucuu

SEQ ID NO: 1286878 - RNA, 22 nt, Human
uuucuuguuaccguugauuugc

SEQ ID NO: 1286879 - RNA, 19 nt, Human
uuuugcucuugggugcugg

SEQ ID NO: 1286880 - RNA, 20 nt, Human
aaacuccaaaagggagcugg

SEQ ID NO: 1286881 - RNA, 23 nt, Human
aaagggagcuggauuuagaccuc

SEQ ID NO: 1286882 - RNA, 25 nt, Human
acaaacuccaaaagggagggaacgc

SEQ ID NO: 1286883 - RNA, 23 nt, Human
agaauggcacaaacuccaaaagg

SEQ ID NO: 1286884 - RNA, 19 nt, Human
agggagcuggauuuagacc

SEQ ID NO: 1286885 - RNA, 19 nt, Human
ccagaagcuccuggaauga

SEQ ID NO: 1286886 - RNA, 22 nt, Human
cuccucugaauuuugcaaccug

SEQ ID NO: 1286887 - RNA, 18 nt, Human
gcugcugcucaaaucgga

SEQ ID NO: 1286888 - RNA, 23 nt, Human
uccaaaagggagcuggauuuaga

SEQ ID NO: 1286889 - RNA, 21 nt, Human
uccccauguagauaacgggau

SEQ ID NO: 1286890 - RNA, 22 nt, Human
uccuggaaugagcaggucuggc

SEQ ID NO: 1286891 - RNA, 19 nt, Human
uggaaugagcaggucuggc

SEQ ID NO: 1286892 - RNA, 21 nt, Human
uggcacaaacuccaaaaggga

SEQ ID NO: 1286893 - RNA, 19 nt, Human
uguuccuucucccagaagc

SEQ ID NO: 1286894 - RNA, 18 nt, Human
agcauggaaaaacuggug

SEQ ID NO: 1286895 - RNA, 19 nt, Human
augaagccuacacuccuga

SEQ ID NO: 1286896 - RNA, 19 nt, Human
auuugcaugaagccuacac

SEQ ID NO: 1286897 - RNA, 24 nt, Human
cagagaugguaaaacaggccugug

SEQ ID NO: 1286898 - RNA, 21 nt, Human
cagcauggaaaaacuggugcu

SEQ ID NO: 1286899 - RNA, 20 nt, Human
cagugugaauuucugaugug

SEQ ID NO: 1286900 - RNA, 19 nt, Human
caugaagccuacacuccug

SEQ ID NO: 1286901 - RNA, 21 nt, Human
ccucaccagugugaauuucug

SEQ ID NO: 1286902 - RNA, 21 nt, Human
cuccagugugaauuaucuuau

SEQ ID NO: 1286903 - RNA, 25 nt, Human
cucucuccaguguguuuuuuuaaaa

SEQ ID NO: 1286904 - RNA, 20 nt, Human
cuuaaagucuuuuuacauuc

SEQ ID NO: 1286905 - RNA, 21 nt, Human
cuuaacacugcaagcucugau

SEQ ID NO: 1286906 - RNA, 22 nt, Human
uaacacugcaagcucugaucca

SEQ ID NO: 1286907 - RNA, 25 nt, Human
ucaccagugugaauuucugaugugu

SEQ ID NO: 1286908 - RNA, 19 nt, Human
uccaguuuguacucagaga

SEQ ID NO: 1286909 - RNA, 26 nt, Human
ucuccagcauggaaaaacuggugcug

SEQ ID NO: 1286910 - RNA, 19 nt, Human
ugaaaaggguuuuccucca

SEQ ID NO: 1286911 - RNA, 18 nt, Human
ugaagaguguauguucug

SEQ ID NO: 1286912 - RNA, 20 nt, Human
ugcaagcucugauccaguac

SEQ ID NO: 1286913 - RNA, 24 nt, Human
ugcuccucuccagcauggaaaaac

SEQ ID NO: 1286914 - RNA, 22 nt, Human
uguacucagagaugguaaaaca

SEQ ID NO: 1286915 - RNA, 22 nt, Human
uguagggccucucuccagugug

SEQ ID NO: 1286916 - RNA, 24 nt, Human
ugugaauuucugauguguuugccu

SEQ ID NO: 1286917 - RNA, 22 nt, Human
uugcaauaacagugcuccucuc

SEQ ID NO: 1286918 - RNA, 19 nt, Human
uuuguagggccucucucca

SEQ ID NO: 1286919 - RNA, 21 nt, Human
cucauuaacagaauccuugga

SEQ ID NO: 1286920 - RNA, 23 nt, Human
uaacagaauccuuggaaccagcg

SEQ ID NO: 1286921 - RNA, 24 nt, Human
ucacaccucuggccuugauucaga

SEQ ID NO: 1286922 - RNA, 18 nt, Human
uccucuaaagaugcaguc

SEQ ID NO: 1286923 - RNA, 19 nt, Human
ucuaaagaugcagucaugc

SEQ ID NO: 1286924 - RNA, 22 nt, Human
uggaaccagcgaaaccaucucc

SEQ ID NO: 1286925 - RNA, 23 nt, Human
uuggaaccagcgaaaccaucucc

SEQ ID NO: 1286926 - RNA, 25 nt, Human
uuggaaccagcgaaaccaucuccuc

SEQ ID NO: 1286927 - RNA, 24 nt, Human
aacuugcuuugcuguucugagacc

SEQ ID NO: 1286928 - RNA, 22 nt, Human
cagaaucggacagagucgaaga

SEQ ID NO: 1286929 - RNA, 23 nt, Human
caggcucaggcggcucagggccc

SEQ ID NO: 1286930 - RNA, 19 nt, Human
cagggccccggcgcagauc

SEQ ID NO: 1286931 - RNA, 18 nt, Human
ccccggagucugaguggg

SEQ ID NO: 1286932 - RNA, 18 nt, Human
ccccggagucugaguggg

SEQ ID NO: 1286933 - RNA, 21 nt, Human
cccggagucugaguggggagc

SEQ ID NO: 1286934 - RNA, 18 nt, Human
cgcgggaacgggggacac

SEQ ID NO: 1286935 - RNA, 21 nt, Human
cgcuaggaaagcgcgagucuc

SEQ ID NO: 1286936 - RNA, 19 nt, Human
cgggcagugaguucaagca

SEQ ID NO: 1286937 - RNA, 20 nt, Human
cuauccgcaccccguagagu

SEQ ID NO: 1286938 - RNA, 18 nt, Human
cucuccaggcccggcacc

SEQ ID NO: 1286939 - RNA, 21 nt, Human
cugucuccgcagcgaguugca

SEQ ID NO: 1286940 - RNA, 23 nt, Human
gaccgguggcugugccgcccgga

SEQ ID NO: 1286941 - RNA, 18 nt, Human
gcacucuccaggcccggc

SEQ ID NO: 1286942 - RNA, 22 nt, Human
ggacuggagaucuggaccggug

SEQ ID NO: 1286943 - RNA, 18 nt, Human
ggcgcagaucugucggcc

SEQ ID NO: 1286944 - RNA, 18 nt, Human
ggcucagggccccggcgc

SEQ ID NO: 1286945 - RNA, 21 nt, Human
gggaacgggggacacgcggga

SEQ ID NO: 1286946 - RNA, 18 nt, Human
uaggaaagcgcgagucuc

SEQ ID NO: 1286947 - RNA, 19 nt, Human
ucugcagaaucggacagag

SEQ ID NO: 1286948 - RNA, 21 nt, Human
aggaaugcggggcuaaggagu

SEQ ID NO: 1286949 - RNA, 28 nt, Human
cagagcccaagguagaaaccgauggagg

SEQ ID NO: 1286950 - RNA, 24 nt, Human
ccaagguagaaaccgauggaggcu

SEQ ID NO: 1286951 - RNA, 20 nt, Human
gagcccaagguagaaaccga

SEQ ID NO: 1286952 - RNA, 20 nt, Human
gcagagcccaagguagaaac

SEQ ID NO: 1286953 - RNA, 19 nt, Human
guagaaaccgauggaggcg

SEQ ID NO: 1286954 - RNA, 23 nt, Human
guggguccuuucccgcgacuacc

SEQ ID NO: 1286955 - RNA, 22 nt, Human
uaccugcuugccucucucagaa

SEQ ID NO: 1286956 - RNA, 24 nt, Human
ucagaaccugcaagugaagugcgg

SEQ ID NO: 1286957 - RNA, 19 nt, Human
ucggcggcgcagagcccaa

SEQ ID NO: 1286958 - RNA, 18 nt, Human
aaacaggauugggggacc

SEQ ID NO: 1286959 - RNA, 20 nt, Human
aaacaggauugggggaccca

SEQ ID NO: 1286960 - RNA, 21 nt, Human
auuuauccaaaaccuucuuuu

SEQ ID NO: 1286961 - RNA, 22 nt, Human
cuugcuuguugauuuuucuuuu

SEQ ID NO: 1286962 - RNA, 24 nt, Human
gacccauuauuuauccaaaaccuu

SEQ ID NO: 1286963 - RNA, 25 nt, Human
ucucagugcucuuugcagaucuuuu

SEQ ID NO: 1286964 - RNA, 25 nt, Human
ucuuuugcaaacaggauugggggac

SEQ ID NO: 1286965 - RNA, 22 nt, Human
ugucaaaucguagguccuuucc

SEQ ID NO: 1286966 - RNA, 25 nt, Human
uugcaaacaggauugggggacccau

SEQ ID NO: 1286967 - RNA, 18 nt, Human
uuuccaguguagacugga

SEQ ID NO: 1286968 - RNA, 21 nt, Human
uuuccaguguagacuggaugu

SEQ ID NO: 1286969 - RNA, 19 nt, Human
aacacucacuuccucauuu

SEQ ID NO: 1286970 - RNA, 18 nt, Human
aagccagcauuaauugag

SEQ ID NO: 1286971 - RNA, 20 nt, Human
aagccagcauuaauugagug

SEQ ID NO: 1286972 - RNA, 20 nt, Human
aaggauggaaagaccacuuu

SEQ ID NO: 1286973 - RNA, 22 nt, Human
acagaacgacagaaugacaccg

SEQ ID NO: 1286974 - RNA, 24 nt, Human
acgauuuccacagugauccuccuu

SEQ ID NO: 1286975 - RNA, 22 nt, Human
aguggugauuuuaaauccaaag

SEQ ID NO: 1286976 - RNA, 21 nt, Human
cacagugauccuccuuccucc

SEQ ID NO: 1286977 - RNA, 19 nt, Human
cacauucaccuuccacacc

SEQ ID NO: 1286978 - RNA, 19 nt, Human
cagugauccuccuuccucc

SEQ ID NO: 1286979 - RNA, 18 nt, Human
ccuccuuccuccuccacg

SEQ ID NO: 1286980 - RNA, 22 nt, Human
cugugcuaaggauggaaagacc

SEQ ID NO: 1286981 - RNA, 19 nt, Human
gaguggugauuuuaaaucc

SEQ ID NO: 1286982 - RNA, 25 nt, Human
gaguggugauuuuaaauccaaagga

SEQ ID NO: 1286983 - RNA, 22 nt, Human
uaacagaacgacagaaugacac

SEQ ID NO: 1286984 - RNA, 24 nt, Human
uccaagaacacucacuuccucauu

SEQ ID NO: 1286985 - RNA, 27 nt, Human
uccacagugauccuccuuccuccucca

SEQ ID NO: 1286986 - RNA, 21 nt, Human
uggaguggugauuuuaaaucc

SEQ ID NO: 1286987 - RNA, 25 nt, Human
uucacuggcagcacauucaccuucc

SEQ ID NO: 1286988 - RNA, 26 nt, Human
uucacuggcagcacauucaccuucca

SEQ ID NO: 1286989 - RNA, 19 nt, Human
uuccacagugauccuccuu

SEQ ID NO: 1286990 - RNA, 20 nt, Human
uuuccacagugauccuccuu

SEQ ID NO: 1286991 - RNA, 23 nt, Human
aaaauccucugagcuccccuacu

SEQ ID NO: 1286992 - RNA, 19 nt, Human
agaacuaccagaauaugau

SEQ ID NO: 1286993 - RNA, 23 nt, Human
cagaugaaguaaauagaaaaucc

SEQ ID NO: 1286994 - RNA, 25 nt, Human
ccaaccccacauggaugaggguauc

SEQ ID NO: 1286995 - RNA, 18 nt, Human
ccccacauggaugagggu

SEQ ID NO: 1286996 - RNA, 20 nt, Human
gaucguuaaggauuggggga

SEQ ID NO: 1286997 - RNA, 18 nt, Human
gccgggauaacaggccag

SEQ ID NO: 1286998 - RNA, 19 nt, Human
ugccgggauaacaggccag

SEQ ID NO: 1286999 - RNA, 23 nt, Human
ugcucauccuccaaccccacaug

SEQ ID NO: 1287000 - RNA, 22 nt, Human
uggcugcucauccuccaacccc

SEQ ID NO: 1287001 - RNA, 20 nt, Human
aaccagcuuuuccaaacuag

SEQ ID NO: 1287002 - RNA, 24 nt, Human
aaccgcaguauguauuucacaacc

SEQ ID NO: 1287003 - RNA, 20 nt, Human
auauguaauuaucauaugau

SEQ ID NO: 1287004 - RNA, 25 nt, Human
caaccagcuuuuccaaacuaggucc

SEQ ID NO: 1287005 - RNA, 22 nt, Human
caauuugaugagggcucacacc

SEQ ID NO: 1287006 - RNA, 23 nt, Human
cacaccgugcuguucuccucugg

SEQ ID NO: 1287007 - RNA, 21 nt, Human
cagcuuuuccaaacuaggucc

SEQ ID NO: 1287008 - RNA, 23 nt, Human
cgggaggaggcugaaccgcagua

SEQ ID NO: 1287009 - RNA, 21 nt, Human
cuaggucccaggaagcacugg

SEQ ID NO: 1287010 - RNA, 22 nt, Human
ggacaauuugaugagggcucac

SEQ ID NO: 1287011 - RNA, 26 nt, Human
uaggcgggaggaggcugaaccgcagu

SEQ ID NO: 1287012 - RNA, 23 nt, Human
uagguuucuggcuuggacaauuu

SEQ ID NO: 1287013 - RNA, 22 nt, Human
uccaaacuaggucccaggaagc

SEQ ID NO: 1287014 - RNA, 22 nt, Human
uccaggaaaaggccuagguuuc

SEQ ID NO: 1287015 - RNA, 22 nt, Human
ucccaggaagcacugguuucgg

SEQ ID NO: 1287016 - RNA, 24 nt, Human
ucuggcuuggacaauuugaugagg

SEQ ID NO: 1287017 - RNA, 19 nt, Human
agcagcagcucgggugcgg

SEQ ID NO: 1287018 - RNA, 21 nt, Human
cagccaggcaaaauccuucaa

SEQ ID NO: 1287019 - RNA, 18 nt, Human
ccaaagaucagaaugaag

SEQ ID NO: 1287020 - RNA, 18 nt, Human
ccagccaggcaaaauccu

SEQ ID NO: 1287021 - RNA, 20 nt, Human
ccaggcaaaauccuucaaag

SEQ ID NO: 1287022 - RNA, 19 nt, Human
ccccgggcggcagggagcc

SEQ ID NO: 1287023 - RNA, 18 nt, Human
cccgcgcgucccccgagg

SEQ ID NO: 1287024 - RNA, 19 nt, Human
ccgaggccgccgcgucccc

SEQ ID NO: 1287025 - RNA, 18 nt, Human
ccgcgccgccgccggggc

SEQ ID NO: 1287026 - RNA, 19 nt, Human
cgacccagucagcaaugca

SEQ ID NO: 1287027 - RNA, 24 nt, Human
cgacccagucagcaaugcauccag

SEQ ID NO: 1287028 - RNA, 18 nt, Human
cgccggggcccgcgcguc

SEQ ID NO: 1287029 - RNA, 23 nt, Human
cgccggggcccgcgcgucccccg

SEQ ID NO: 1287030 - RNA, 25 nt, Human
cggcagggagccguucuccucggcc

SEQ ID NO: 1287031 - RNA, 22 nt, Human
cggccgacccagucagcaaugc

SEQ ID NO: 1287032 - RNA, 22 nt, Human
cgggccgccuccaggaugcagu

SEQ ID NO: 1287033 - RNA, 21 nt, Human
cggggccgcagccgcggagca

SEQ ID NO: 1287034 - RNA, 21 nt, Human
gagcagcagcucgggugcggg

SEQ ID NO: 1287035 - RNA, 23 nt, Human
ucaaagaaccugagugugcugaa

SEQ ID NO: 1287036 - RNA, 20 nt, Human
uccgcgccgccgccggggcc

SEQ ID NO: 1287037 - RNA, 24 nt, Human
uccgcgccgccgccggggcccgcg

SEQ ID NO: 1287038 - RNA, 20 nt, Human
ugagaaugauuccagccagg

SEQ ID NO: 1287039 - RNA, 19 nt, Human
aaagcacaaagggagggcc

SEQ ID NO: 1287040 - RNA, 23 nt, Human
aaagguagggggucaagggggug

SEQ ID NO: 1287041 - RNA, 24 nt, Human
aaagugcugggauuacaggcguga

SEQ ID NO: 1287042 - RNA, 19 nt, Human
aacagccccacgcaaauga

SEQ ID NO: 1287043 - RNA, 21 nt, Human
aacagccccacgcaaaugaac

SEQ ID NO: 1287044 - RNA, 21 nt, Human
aagcacaaagggagggcccgg

SEQ ID NO: 1287045 - RNA, 20 nt, Human
aagcacucugcaaucacuca

SEQ ID NO: 1287046 - RNA, 25 nt, Human
aagcaucaaaguccugcacgaagcc

SEQ ID NO: 1287047 - RNA, 22 nt, Human
aagggggugguaaccgaguggg

SEQ ID NO: 1287048 - RNA, 19 nt, Human
aagugcugggauuacaggc

SEQ ID NO: 1287049 - RNA, 19 nt, Human
aagugcugggauuacaggc

SEQ ID NO: 1287050 - RNA, 26 nt, Human
aagugcugggauuacaggcgugagcc

SEQ ID NO: 1287051 - RNA, 18 nt, Human
acacagggaacccaaguc

SEQ ID NO: 1287052 - RNA, 23 nt, Human
acaggcacccaccaccacgcccg

SEQ ID NO: 1287053 - RNA, 22 nt, Human
accacccugcuggaaacuccaa

SEQ ID NO: 1287054 - RNA, 24 nt, Human
accagauacagagcugaucaucug

SEQ ID NO: 1287055 - RNA, 25 nt, Human
acccgccucggccucccaaagugcu

SEQ ID NO: 1287056 - RNA, 23 nt, Human
acggaacaccccaagcaucaaag

SEQ ID NO: 1287057 - RNA, 18 nt, Human
acgggguuucaccguguu

SEQ ID NO: 1287058 - RNA, 19 nt, Human
acgggguuucaccguguua

SEQ ID NO: 1287059 - RNA, 20 nt, Human
acgggguuucaccguguuag

SEQ ID NO: 1287060 - RNA, 24 nt, Human
acgggguuucaccguguuagccag

SEQ ID NO: 1287061 - RNA, 18 nt, Human
acugcaagcuccgccucc

SEQ ID NO: 1287062 - RNA, 20 nt, Human
agaugggugaauggcugggg

SEQ ID NO: 1287063 - RNA, 22 nt, Human
agcccaggucgcugggccagaa

SEQ ID NO: 1287064 - RNA, 24 nt, Human
agcgacagagcccagaccccacag

SEQ ID NO: 1287065 - RNA, 19 nt, Human
aggcaagaaugccccccuc

SEQ ID NO: 1287066 - RNA, 25 nt, Human
aggcuggagugcaguggcgccaucu

SEQ ID NO: 1287067 - RNA, 21 nt, Human
agggcccgggcccagaaccug

SEQ ID NO: 1287068 - RNA, 18 nt, Human
aggugcgggcgccgugcu

SEQ ID NO: 1287069 - RNA, 21 nt, Human
aguagagacgggguuucaccg

SEQ ID NO: 1287070 - RNA, 18 nt, Human
aguagcugggacuacagg

SEQ ID NO: 1287071 - RNA, 19 nt, Human
agugcaguggcgccaucug

SEQ ID NO: 1287072 - RNA, 18 nt, Human
agugcugggauuacaggc

SEQ ID NO: 1287073 - RNA, 27 nt, Human
auauuucuguguguguguguguguggu

SEQ ID NO: 1287074 - RNA, 19 nt, Human
augaaccccuccuggucag

SEQ ID NO: 1287075 - RNA, 20 nt, Human
augugacgcauguguuuaua

SEQ ID NO: 1287076 - RNA, 21 nt, Human
auucuccugccucagccuccc

SEQ ID NO: 1287077 - RNA, 24 nt, Human
caaagugcugggauuacaggcgug

SEQ ID NO: 1287078 - RNA, 20 nt, Human
caacacggaacaccccaagc

SEQ ID NO: 1287079 - RNA, 20 nt, Human
caaccgacuuaaccagauac

SEQ ID NO: 1287080 - RNA, 23 nt, Human
caaccucuucuuuuuuuuuuuuu

SEQ ID NO: 1287081 - RNA, 21 nt, Human
cacaguccuccccugcccuuc

SEQ ID NO: 1287082 - RNA, 27 nt, Human
caccacccugcuggaaacuccaagucc

SEQ ID NO: 1287083 - RNA, 18 nt, Human
cacccaccaccacgcccg

SEQ ID NO: 1287084 - RNA, 23 nt, Human
cacccgccucggccucccaaagu

SEQ ID NO: 1287085 - RNA, 18 nt, Human
caccguguuagccagggu

SEQ ID NO: 1287086 - RNA, 24 nt, Human
caccguguuagccaggguggucuc

SEQ ID NO: 1287087 - RNA, 21 nt, Human
caccucgggagcagcuggcag

SEQ ID NO: 1287088 - RNA, 21 nt, Human
caccugggagucaacacggaa

SEQ ID NO: 1287089 - RNA, 24 nt, Human
cacucaggcuggagugcaguggcg

SEQ ID NO: 1287090 - RNA, 21 nt, Human
cagagcccagaccccacaguc

SEQ ID NO: 1287091 - RNA, 26 nt, Human
cagcuggagcucgagaacugcggcgg

SEQ ID NO: 1287092 - RNA, 21 nt, Human
caggcacccaccaccacgccc

SEQ ID NO: 1287093 - RNA, 21 nt, Human
cagggcugcuuggaggucaaa

SEQ ID NO: 1287094 - RNA, 19 nt, Human
cauccugcuucuuccuucu

SEQ ID NO: 1287095 - RNA, 20 nt, Human
ccaaagugcugggauuacag

SEQ ID NO: 1287096 - RNA, 22 nt, Human
ccaaagugcugggauuacaggc

SEQ ID NO: 1287097 - RNA, 22 nt, Human
ccaaagugcugggauuacaggc

SEQ ID NO: 1287098 - RNA, 24 nt, Human
ccaaagugcugggauuacaggcgu

SEQ ID NO: 1287099 - RNA, 22 nt, Human
ccacaguccuccccugcccuuc

SEQ ID NO: 1287100 - RNA, 21 nt, Human
ccagcaaccgacuuaaccaga

SEQ ID NO: 1287101 - RNA, 18 nt, Human
ccaggccaacagccccac

SEQ ID NO: 1287102 - RNA, 18 nt, Human
ccauucuccugccucagc

SEQ ID NO: 1287103 - RNA, 19 nt, Human
cccacaguccuccccugcc

SEQ ID NO: 1287104 - RNA, 24 nt, Human
cccacaguccuccccugcccuucc

SEQ ID NO: 1287105 - RNA, 21 nt, Human
ccccacgcaaaugaaccccuc

SEQ ID NO: 1287106 - RNA, 24 nt, Human
ccccacgcaaaugaaccccuccug

SEQ ID NO: 1287107 - RNA, 24 nt, Human
ccccccauccagcccccugccagc

SEQ ID NO: 1287108 - RNA, 20 nt, Human
cccccugccagccagcaggg

SEQ ID NO: 1287109 - RNA, 25 nt, Human
ccccucacacacagggaacccaagu

SEQ ID NO: 1287110 - RNA, 23 nt, Human
cccgaguagcugggacuacaggc

SEQ ID NO: 1287111 - RNA, 24 nt, Human
cccgaguagcugggacuacaggca

SEQ ID NO: 1287112 - RNA, 23 nt, Human
cccggccuugacucaaccucuuc

SEQ ID NO: 1287113 - RNA, 18 nt, Human
ccuccgggcgcgcagcgc

SEQ ID NO: 1287114 - RNA, 19 nt, Human
ccugacaggcucuggcuac

SEQ ID NO: 1287115 - RNA, 20 nt, Human
ccugaucucgugauccaccc

SEQ ID NO: 1287116 - RNA, 23 nt, Human
ccugccucagccucccgaguagc

SEQ ID NO: 1287117 - RNA, 24 nt, Human
ccugccucagccucccgaguagcu

SEQ ID NO: 1287118 - RNA, 20 nt, Human
cgacagagcccagaccccac

SEQ ID NO: 1287119 - RNA, 18 nt, Human
cgcaaaugaaccccuccu

SEQ ID NO: 1287120 - RNA, 24 nt, Human
cgcaaaugaaccccuccuggucag

SEQ ID NO: 1287121 - RNA, 19 nt, Human
cgccucccggguucgcacc

SEQ ID NO: 1287122 - RNA, 18 nt, Human
cgggagaagcguggggcg

SEQ ID NO: 1287123 - RNA, 19 nt, Human
cgggagaagcguggggcgg

SEQ ID NO: 1287124 - RNA, 21 nt, Human
cgggagcagcuggcaggcaag

SEQ ID NO: 1287125 - RNA, 20 nt, Human
cgggcgcgcagcgcgggcgg

SEQ ID NO: 1287126 - RNA, 24 nt, Human
cgggguuucaccguguuagccagg

SEQ ID NO: 1287127 - RNA, 24 nt, Human
cucagccucccgaguagcugggac

SEQ ID NO: 1287128 - RNA, 21 nt, Human
cucccggguucgcaccauucu

SEQ ID NO: 1287129 - RNA, 24 nt, Human
cuccugaucucgugauccacccgc

SEQ ID NO: 1287130 - RNA, 24 nt, Human
cucgcucugucacucaggcuggag

SEQ ID NO: 1287131 - RNA, 19 nt, Human
cucgugauccacccgccuc

SEQ ID NO: 1287132 - RNA, 20 nt, Human
cucugucacucaggcuggag

SEQ ID NO: 1287133 - RNA, 18 nt, Human
cugcccuuccugacaggc

SEQ ID NO: 1287134 - RNA, 18 nt, Human
cugcccuuccugacaggc

SEQ ID NO: 1287135 - RNA, 20 nt, Human
cugcccuuccugacaggcuc

SEQ ID NO: 1287136 - RNA, 18 nt, Human
cuuccugacaggcucugg

SEQ ID NO: 1287137 - RNA, 26 nt, Human
gacucaaccucuucuuuuuuuuuuuu

SEQ ID NO: 1287138 - RNA, 24 nt, Human
gagacgggguuucaccguguuagc

SEQ ID NO: 1287139 - RNA, 20 nt, Human
gaguagcugggacuacaggc

SEQ ID NO: 1287140 - RNA, 25 nt, Human
gaguagcugggacuacaggcaccca

SEQ ID NO: 1287141 - RNA, 22 nt, Human
gaucucgugauccacccgccuc

SEQ ID NO: 1287142 - RNA, 24 nt, Human
gaucucgugauccacccgccucgg

SEQ ID NO: 1287143 - RNA, 18 nt, Human
gauuacaggcgugagcca

SEQ ID NO: 1287144 - RNA, 20 nt, Human
gauuacaggcgugagccacc

SEQ ID NO: 1287145 - RNA, 22 nt, Human
gauuacaggcgugagccaccgc

SEQ ID NO: 1287146 - RNA, 18 nt, Human
gcaaggccuuuuccucag

SEQ ID NO: 1287147 - RNA, 24 nt, Human
gccgugcucgcucguccucgccgg

SEQ ID NO: 1287148 - RNA, 25 nt, Human
gccucccggguucgcaccauucucc

SEQ ID NO: 1287149 - RNA, 23 nt, Human
gccucggccucccaaagugcugg

SEQ ID NO: 1287150 - RNA, 20 nt, Human
gcgcagcgcgggcggugcgg

SEQ ID NO: 1287151 - RNA, 24 nt, Human
gcggcggucgcuccuccgggcgcg

SEQ ID NO: 1287152 - RNA, 19 nt, Human
gcguggggcggacgcggag

SEQ ID NO: 1287153 - RNA, 24 nt, Human
gcuggagugcaguggcgccaucug

SEQ ID NO: 1287154 - RNA, 22 nt, Human
ggagacagagucucgcucuguc

SEQ ID NO: 1287155 - RNA, 24 nt, Human
ggagggcccgggcccagaaccugu

SEQ ID NO: 1287156 - RNA, 19 nt, Human
ggcccagaaccugucaggg

SEQ ID NO: 1287157 - RNA, 21 nt, Human
ggcgcaagaacugcagagaca

SEQ ID NO: 1287158 - RNA, 20 nt, Human
gggcgccgugcucgcucguc

SEQ ID NO: 1287159 - RNA, 24 nt, Human
ggggucaggggugacagagaggga

SEQ ID NO: 1287160 - RNA, 23 nt, Human
gggguuucaccguguuagccagg

SEQ ID NO: 1287161 - RNA, 20 nt, Human
gguagggggucaagggggug

SEQ ID NO: 1287162 - RNA, 20 nt, Human
ggugacagagagggaggggc

SEQ ID NO: 1287163 - RNA, 21 nt, Human
ggugacagagagggaggggcu

SEQ ID NO: 1287164 - RNA, 23 nt, Human
guagagacgggguuucaccgugu

SEQ ID NO: 1287165 - RNA, 18 nt, Human
gucaagggggugguaacc

SEQ ID NO: 1287166 - RNA, 24 nt, Human
gugauccacccgccucggccuccc

SEQ ID NO: 1287167 - RNA, 19 nt, Human
gugcaggcugguuccgcug

SEQ ID NO: 1287168 - RNA, 21 nt, Human
gugcccaucuauguguacaac

SEQ ID NO: 1287169 - RNA, 22 nt, Human
guguguguguguguggugugug

SEQ ID NO: 1287170 - RNA, 21 nt, Human
gugugugugugugugugugug

SEQ ID NO: 1287171 - RNA, 21 nt, Human
uaaccgaguggggcuuauguc

SEQ ID NO: 1287172 - RNA, 26 nt, Human
uaacuuuuuguauuuuuuuaguagag

SEQ ID NO: 1287173 - RNA, 27 nt, Human
uaacuuuuuguauuuuuuuaguagaga

SEQ ID NO: 1287174 - RNA, 26 nt, Human
uacagauggauggaugauccaggcca

SEQ ID NO: 1287175 - RNA, 26 nt, Human
uacagaugggugaauggcugggguca

SEQ ID NO: 1287176 - RNA, 23 nt, Human
uacaggcgugagccaccgcgccc

SEQ ID NO: 1287177 - RNA, 21 nt, Human
uaguagagacgggguuucacc

SEQ ID NO: 1287178 - RNA, 24 nt, Human
uaguagagacgggguuucaccgug

SEQ ID NO: 1287179 - RNA, 26 nt, Human
uaguagagacgggguuucaccguguu

SEQ ID NO: 1287180 - RNA, 19 nt, Human
uauauuucugugugugugu

SEQ ID NO: 1287181 - RNA, 19 nt, Human
uauauuucugugugugugu

SEQ ID NO: 1287182 - RNA, 19 nt, Human
uauauuucugugugugugu

SEQ ID NO: 1287183 - RNA, 22 nt, Human
ucaacacggaacaccccaagca

SEQ ID NO: 1287184 - RNA, 24 nt, Human
ucaccguguuagccaggguggucu

SEQ ID NO: 1287185 - RNA, 24 nt, Human
ucacucaggcuggagugcaguggc

SEQ ID NO: 1287186 - RNA, 18 nt, Human
ucacugcaagcuccgccu

SEQ ID NO: 1287187 - RNA, 19 nt, Human
ucacugcaagcuccgccuc

SEQ ID NO: 1287188 - RNA, 24 nt, Human
ucacugcaagcuccgccucccggg

SEQ ID NO: 1287189 - RNA, 23 nt, Human
ucagccucccgaguagcugggac

SEQ ID NO: 1287190 - RNA, 24 nt, Human
ucccaaagugcugggauuacaggc

SEQ ID NO: 1287191 - RNA, 24 nt, Human
ucccgaguagcugggacuacaggc

SEQ ID NO: 1287192 - RNA, 21 nt, Human
ucccggguucgcaccauucuc

SEQ ID NO: 1287193 - RNA, 24 nt, Human
ucccggguucgcaccauucuccug

SEQ ID NO: 1287194 - RNA, 22 nt, Human
uccugcacgaagccucuucaaa

SEQ ID NO: 1287195 - RNA, 21 nt, Human
ucgcaccauucuccugccuca

SEQ ID NO: 1287196 - RNA, 22 nt, Human
ucgcucguccucgccgggggac

SEQ ID NO: 1287197 - RNA, 24 nt, Human
ucgcucugucacucaggcuggagu

SEQ ID NO: 1287198 - RNA, 24 nt, Human
ucuccugccucagccucccgagua

SEQ ID NO: 1287199 - RNA, 19 nt, Human
ucucgcucugucacucagg

SEQ ID NO: 1287200 - RNA, 22 nt, Human
ucucgcucugucacucaggcug

SEQ ID NO: 1287201 - RNA, 23 nt, Human
ucucgcucugucacucaggcugg

SEQ ID NO: 1287202 - RNA, 24 nt, Human
ucucgcucugucacucaggcugga

SEQ ID NO: 1287203 - RNA, 18 nt, Human
ucucgugauccacccgcc

SEQ ID NO: 1287204 - RNA, 20 nt, Human
ucucuggcacagguagggcu

SEQ ID NO: 1287205 - RNA, 22 nt, Human
ucugaaaugcccaugugacgca

SEQ ID NO: 1287206 - RNA, 22 nt, Human
ucuggcacagguagggcugucu

SEQ ID NO: 1287207 - RNA, 24 nt, Human
ucuggcacagguagggcugucugg

SEQ ID NO: 1287208 - RNA, 24 nt, Human
ucugucacucaggcuggagugcag

SEQ ID NO: 1287209 - RNA, 24 nt, Human
ucugugugugugugugugugugug

SEQ ID NO: 1287210 - RNA, 20 nt, Human
ugacagagagggaggggcuu

SEQ ID NO: 1287211 - RNA, 18 nt, Human
ugagaggaaugggcagug

SEQ ID NO: 1287212 - RNA, 23 nt, Human
ugagaggaaugggcagugggcag

SEQ ID NO: 1287213 - RNA, 21 nt, Human
ugcaaggccuuuuccucagug

SEQ ID NO: 1287214 - RNA, 24 nt, Human
ugcacaccacccugcuggaaacuc

SEQ ID NO: 1287215 - RNA, 23 nt, Human
ugcacacuucucucugugagugu

SEQ ID NO: 1287216 - RNA, 23 nt, Human
ugcagagacaaagcacaaaggga

SEQ ID NO: 1287217 - RNA, 24 nt, Human
ugccucagccucccgaguagcugg

SEQ ID NO: 1287218 - RNA, 21 nt, Human
ugcgggcgccgugcucgcucg

SEQ ID NO: 1287219 - RNA, 24 nt, Human
ugcggggcccggagcgggagaagc

SEQ ID NO: 1287220 - RNA, 23 nt, Human
ugcucgcucguccucgccggggg

SEQ ID NO: 1287221 - RNA, 24 nt, Human
ugcugggauuacaggcgugagcca

SEQ ID NO: 1287222 - RNA, 22 nt, Human
uggagacagagucucgcucugu

SEQ ID NO: 1287223 - RNA, 28 nt, Human
uggagugcaguggcgccauccuagcacg

SEQ ID NO: 1287224 - RNA, 23 nt, Human
uggagugcaguggcgccaucugg

SEQ ID NO: 1287225 - RNA, 18 nt, Human
uggcaggcaagaaugccc

SEQ ID NO: 1287226 - RNA, 21 nt, Human
uggcaggcaagaaugcccccc

SEQ ID NO: 1287227 - RNA, 19 nt, Human
uggcuggggucagggguga

SEQ ID NO: 1287228 - RNA, 19 nt, Human
ugggacuacaggcacccac

SEQ ID NO: 1287229 - RNA, 21 nt, Human
ugggacuacaggcacccacca

SEQ ID NO: 1287230 - RNA, 24 nt, Human
ugggacuacaggcacccaccacca

SEQ ID NO: 1287231 - RNA, 18 nt, Human
ugggauuacaggcgugag

SEQ ID NO: 1287232 - RNA, 19 nt, Human
ugggauuacaggcgugagc

SEQ ID NO: 1287233 - RNA, 21 nt, Human
ugggauuacaggcgugagcca

SEQ ID NO: 1287234 - RNA, 22 nt, Human
ugggauuacaggcgugagccac

SEQ ID NO: 1287235 - RNA, 23 nt, Human
ugggauuacaggcgugagccacc

SEQ ID NO: 1287236 - RNA, 24 nt, Human
ugggauuacaggcgugagccaccg

SEQ ID NO: 1287237 - RNA, 20 nt, Human
ugggguggggagggggagug

SEQ ID NO: 1287238 - RNA, 19 nt, Human
uggugcacaccacccugcu

SEQ ID NO: 1287239 - RNA, 27 nt, Human
uguacagaugggugaauggcugggguc

SEQ ID NO: 1287240 - RNA, 22 nt, Human
ugucugggggaggaaacugaga

SEQ ID NO: 1287241 - RNA, 19 nt, Human
uguggcaguggcugaacug

SEQ ID NO: 1287242 - RNA, 24 nt, Human
ugugguguguguacaugcacacuu

SEQ ID NO: 1287243 - RNA, 26 nt, Human
uguguacaugcacacuucucucugug

SEQ ID NO: 1287244 - RNA, 20 nt, Human
ugugugguguguguacaugc

SEQ ID NO: 1287245 - RNA, 19 nt, Human
uguguguacaugcacacuu

SEQ ID NO: 1287246 - RNA, 20 nt, Human
ugugugugguguguguacau

SEQ ID NO: 1287247 - RNA, 19 nt, Human
uguguguguguggugugug

SEQ ID NO: 1287248 - RNA, 20 nt, Human
uguguguguguggugugugu

SEQ ID NO: 1287249 - RNA, 23 nt, Human
uguguguguguguggugugugua

SEQ ID NO: 1287250 - RNA, 22 nt, Human
uguguguguguguguggugugu

SEQ ID NO: 1287251 - RNA, 18 nt, Human
ugugugugugugugugug

SEQ ID NO: 1287252 - RNA, 18 nt, Human
ugugugugugugugugug

SEQ ID NO: 1287253 - RNA, 18 nt, Human
ugugugugugugugugug

SEQ ID NO: 1287254 - RNA, 18 nt, Human
ugugugugugugugugug

SEQ ID NO: 1287255 - RNA, 18 nt, Human
ugugugugugugugugug

SEQ ID NO: 1287256 - RNA, 18 nt, Human
ugugugugugugugugug

SEQ ID NO: 1287257 - RNA, 18 nt, Human
ugugugugugugugugug

SEQ ID NO: 1287258 - RNA, 24 nt, Human
uguguguguguguguguggugugu

SEQ ID NO: 1287259 - RNA, 19 nt, Human
ugugugugugugugugugu

SEQ ID NO: 1287260 - RNA, 20 nt, Human
ugugugugugugugugugug

SEQ ID NO: 1287261 - RNA, 20 nt, Human
ugugugugugugugugugug

SEQ ID NO: 1287262 - RNA, 21 nt, Human
ugugugugugugugugugugu

SEQ ID NO: 1287263 - RNA, 21 nt, Human
ugugugugugugugugugugu

SEQ ID NO: 1287264 - RNA, 21 nt, Human
ugugugugugugugugugugu

SEQ ID NO: 1287265 - RNA, 21 nt, Human
ugugugugugugugugugugu

SEQ ID NO: 1287266 - RNA, 21 nt, Human
ugugugugugugugugugugu

SEQ ID NO: 1287267 - RNA, 21 nt, Human
ugugugugugugugugugugu

SEQ ID NO: 1287268 - RNA, 21 nt, Human
ugugugugugugugugugugu

SEQ ID NO: 1287269 - RNA, 21 nt, Human
ugugugugugugugugugugu

SEQ ID NO: 1287270 - RNA, 21 nt, Human
ugugugugugugugugugugu

SEQ ID NO: 1287271 - RNA, 21 nt, Human
ugugugugugugugugugugu

SEQ ID NO: 1287272 - RNA, 21 nt, Human
ugugugugugugugugugugu

SEQ ID NO: 1287273 - RNA, 22 nt, Human
ugugugugugugugugugugug

SEQ ID NO: 1287274 - RNA, 22 nt, Human
ugugugugugugugugugugug

SEQ ID NO: 1287275 - RNA, 22 nt, Human
ugugugugugugugugugugug

SEQ ID NO: 1287276 - RNA, 22 nt, Human
ugugugugugugugugugugug

SEQ ID NO: 1287277 - RNA, 23 nt, Human
ugugugugugugugugugugugu

SEQ ID NO: 1287278 - RNA, 21 nt, Human
uguguuuauauuucugugugu

SEQ ID NO: 1287279 - RNA, 21 nt, Human
uuaacacugagaugggguggg

SEQ ID NO: 1287280 - RNA, 18 nt, Human
uuaguagagacgggguuu

SEQ ID NO: 1287281 - RNA, 22 nt, Human
uuaguagagacgggguuucacc

SEQ ID NO: 1287282 - RNA, 24 nt, Human
uuaguagagacgggguuucaccgu

SEQ ID NO: 1287283 - RNA, 18 nt, Human
uucaccguguuagccagg

SEQ ID NO: 1287284 - RNA, 19 nt, Human
uuccucagugaaaguuuca

SEQ ID NO: 1287285 - RNA, 25 nt, Human
uuuaugaccuucuuucuagcucucu

SEQ ID NO: 1287286 - RNA, 19 nt, Human
uuucaccguguuagccagg

SEQ ID NO: 1287287 - RNA, 24 nt, Human
uuuuuaguagagacgggguuucac

SEQ ID NO: 1287288 - RNA, 23 nt, Human
uuuuuguauuuuuuuaguagaga

SEQ ID NO: 1287289 - RNA, 25 nt, Human
uuuuuguauuuuuuuaguagagacg

SEQ ID NO: 1287290 - RNA, 23 nt, Human
uuuuuuaguagagacgggguuuc

SEQ ID NO: 1287291 - RNA, 26 nt, Human
uuuuuuuuuuuuggagacagagucuc

SEQ ID NO: 1287292 - RNA, 19 nt, Human
aaguggccaugaaccagaa

SEQ ID NO: 1287293 - RNA, 20 nt, Human
agaaacccuacuagccuaac

SEQ ID NO: 1287294 - RNA, 24 nt, Human
agccuaacugaagaucgaaauuuu

SEQ ID NO: 1287295 - RNA, 19 nt, Human
caaguggccaugaaccaga

SEQ ID NO: 1287296 - RNA, 24 nt, Human
cagaaacccuacuagccuaacuga

SEQ ID NO: 1287297 - RNA, 20 nt, Human
cagcaaguggccaugaacca

SEQ ID NO: 1287298 - RNA, 25 nt, Human
ccagaaacccuacuagccuaacuga

SEQ ID NO: 1287299 - RNA, 19 nt, Human
gaaccagaaacccuacuag

SEQ ID NO: 1287300 - RNA, 18 nt, Human
ugaaccagaaacccuacu

SEQ ID NO: 1287301 - RNA, 20 nt, Human
ugugagucuuacuucugcag

SEQ ID NO: 1287302 - RNA, 18 nt, Human
agaacagcaaggcugaga

SEQ ID NO: 1287303 - RNA, 19 nt, Human
agcaaggcugagaguccac

SEQ ID NO: 1287304 - RNA, 23 nt, Human
agcaggauguuuuaagggaauga

SEQ ID NO: 1287305 - RNA, 20 nt, Human
ccaguguacaaccaggaaaa

SEQ ID NO: 1287306 - RNA, 22 nt, Human
gcaaggcugagaguccacagug

SEQ ID NO: 1287307 - RNA, 21 nt, Human
gcagaacagcaaggcugagag

SEQ ID NO: 1287308 - RNA, 21 nt, Human
ggcagaacagcaaggcugaga

SEQ ID NO: 1287309 - RNA, 22 nt, Human
uccacaguggagauggagaaag

SEQ ID NO: 1287310 - RNA, 22 nt, Human
uccacaguggagauggagaagc

SEQ ID NO: 1287311 - RNA, 23 nt, Human
uugaugcaaugguaaucuuccag

SEQ ID NO: 1287312 - RNA, 22 nt, Human
cacaggcaaaucucugcaacuc

SEQ ID NO: 1287313 - RNA, 27 nt, Human
cagcacaggcaaaucucugcaacucuc

SEQ ID NO: 1287314 - RNA, 23 nt, Human
ggcaaaucucugcaacucuccuc

SEQ ID NO: 1287315 - RNA, 23 nt, Human
ugcaaaugacagcacaggcaaau

SEQ ID NO: 1287316 - RNA, 20 nt, Human
ugcaacucuccuccugaaag

SEQ ID NO: 1287317 - RNA, 21 nt, Human
aagcucuggagacuuucagcu

SEQ ID NO: 1287318 - RNA, 20 nt, Human
cacugggauuucuacacucu

SEQ ID NO: 1287319 - RNA, 19 nt, Human
cccuuccuuucuuuucagu

SEQ ID NO: 1287320 - RNA, 22 nt, Human
cccuuccuuucuuuucagugcu

SEQ ID NO: 1287321 - RNA, 29 nt, Human
cccuuccuuucuuuucagugcucugagaa

SEQ ID NO: 1287322 - RNA, 19 nt, Human
cucucuguaagcucuggag

SEQ ID NO: 1287323 - RNA, 22 nt, Human
cucugagaaguauauagaaaag

SEQ ID NO: 1287324 - RNA, 19 nt, Human
cucuguugguacaugcuac

SEQ ID NO: 1287325 - RNA, 18 nt, Human
gauuucuacacucuccuc

SEQ ID NO: 1287326 - RNA, 21 nt, Human
gguacaacucugucuccaacu

SEQ ID NO: 1287327 - RNA, 23 nt, Human
guacaacucugucuccaacugaa

SEQ ID NO: 1287328 - RNA, 23 nt, Human
uacaugcuaccacugggauuucu

SEQ ID NO: 1287329 - RNA, 19 nt, Human
uccucugcaaacccuuccu

SEQ ID NO: 1287330 - RNA, 28 nt, Human
ucuccucugcaaacccuuccuuucuuuu

SEQ ID NO: 1287331 - RNA, 18 nt, Human
ucucuguaagcucuggag

SEQ ID NO: 1287332 - RNA, 18 nt, Human
ucuguaagcucuggagac

SEQ ID NO: 1287333 - RNA, 18 nt, Human
ugaaggaaaagaguccuu

SEQ ID NO: 1287334 - RNA, 23 nt, Human
ugucuccaacugaaggaaaagag

SEQ ID NO: 1287335 - RNA, 18 nt, Human
uuuucagugcucugagaa

SEQ ID NO: 1287336 - RNA, 18 nt, Human
aaccaaggagccuuccuc

SEQ ID NO: 1287337 - RNA, 21 nt, Human
aagugcagacccaguuugacc

SEQ ID NO: 1287338 - RNA, 23 nt, Human
agccuccguuuucccuccugucg

SEQ ID NO: 1287339 - RNA, 22 nt, Human
agcuguguagaccuggagccuc

SEQ ID NO: 1287340 - RNA, 23 nt, Human
aggagccuuccucccugcugucc

SEQ ID NO: 1287341 - RNA, 25 nt, Human
aguuugaccagaaaacucaggucuc

SEQ ID NO: 1287342 - RNA, 23 nt, Human
caaaauuuaccaggauuuggcac

SEQ ID NO: 1287343 - RNA, 18 nt, Human
caagaugaucccaaccaa

SEQ ID NO: 1287344 - RNA, 23 nt, Human
caagcaaucucugcccaauaugg

SEQ ID NO: 1287345 - RNA, 23 nt, Human
cacccucaagugcagacccaguu

SEQ ID NO: 1287346 - RNA, 22 nt, Human
cagagagacagcaauuucccuu

SEQ ID NO: 1287347 - RNA, 24 nt, Human
cagcaauuucccuuuccagugcuu

SEQ ID NO: 1287348 - RNA, 26 nt, Human
caggagcuuuuggcaagaugauccca

SEQ ID NO: 1287349 - RNA, 21 nt, Human
ccucaagugcagacccaguuu

SEQ ID NO: 1287350 - RNA, 18 nt, Human
ccuuccucccugcugucc

SEQ ID NO: 1287351 - RNA, 22 nt, Human
cuccacccucaagugcagaccc

SEQ ID NO: 1287352 - RNA, 23 nt, Human
gaccuggagccuccguuuucccu

SEQ ID NO: 1287353 - RNA, 24 nt, Human
gccuuccucccugcuguccuccac

SEQ ID NO: 1287354 - RNA, 22 nt, Human
gcuuuuggcaagaugaucccaa

SEQ ID NO: 1287355 - RNA, 19 nt, Human
uacacagcauuuuguucag

SEQ ID NO: 1287356 - RNA, 23 nt, Human
ucagagagacagcaauuucccuu

SEQ ID NO: 1287357 - RNA, 18 nt, Human
ucaggagcuuuuggcaag

SEQ ID NO: 1287358 - RNA, 21 nt, Human
ucccaaccaaggagccuuccu

SEQ ID NO: 1287359 - RNA, 24 nt, Human
ucuacugccacugccccacucacc

SEQ ID NO: 1287360 - RNA, 20 nt, Human
ugaccagaaaacucaggucu

SEQ ID NO: 1287361 - RNA, 24 nt, Human
ugaccagaaaacucaggucucugc

SEQ ID NO: 1287362 - RNA, 18 nt, Human
ugccccacucaccuuccc

SEQ ID NO: 1287363 - RNA, 22 nt, Human
ugccccacucaccuucccuuug

SEQ ID NO: 1287364 - RNA, 21 nt, Human
uggcaagaugaucccaaccaa

SEQ ID NO: 1287365 - RNA, 22 nt, Human
uggcaagaugaucccaaccaag

SEQ ID NO: 1287366 - RNA, 23 nt, Human
uuggcacucaggagcuuuuggca

SEQ ID NO: 1287367 - RNA, 20 nt, Human
aaucaaugcuuuugaaagac

SEQ ID NO: 1287368 - RNA, 18 nt, Human
aggggcguggguggguca

SEQ ID NO: 1287369 - RNA, 22 nt, Human
augcuuuugaaagacugccccc

SEQ ID NO: 1287370 - RNA, 20 nt, Human
cugcccccuugcccgccagg

SEQ ID NO: 1287371 - RNA, 18 nt, Human
gcccccuugcccgccagg

SEQ ID NO: 1287372 - RNA, 21 nt, Human
ggagaugguugaggggcgugg

SEQ ID NO: 1287373 - RNA, 20 nt, Human
ugggagaugguugaggggcg

SEQ ID NO: 1287374 - RNA, 21 nt, Human
uugaggggcguggguggguca

SEQ ID NO: 1287375 - RNA, 25 nt, Human
aaacaccgucucuggaaggacaccc

SEQ ID NO: 1287376 - RNA, 23 nt, Human
acgcagguaugagaccaaacgca

SEQ ID NO: 1287377 - RNA, 18 nt, Human
acugacccccagccccuc

SEQ ID NO: 1287378 - RNA, 20 nt, Human
agaaacguguuccgguccuc

SEQ ID NO: 1287379 - RNA, 22 nt, Human
agcccccagacuuaccuccccu

SEQ ID NO: 1287380 - RNA, 18 nt, Human
agccucucggcccggccc

SEQ ID NO: 1287381 - RNA, 19 nt, Human
aggggucccugguggaggc

SEQ ID NO: 1287382 - RNA, 21 nt, Human
caagguggggggcugccccuc

SEQ ID NO: 1287383 - RNA, 18 nt, Human
cacugcugugguuuccca

SEQ ID NO: 1287384 - RNA, 18 nt, Human
caggcacugaggugggga

SEQ ID NO: 1287385 - RNA, 20 nt, Human
caggcacugagguggggaca

SEQ ID NO: 1287386 - RNA, 25 nt, Human
cagggcuccagaguucaugaggagg

SEQ ID NO: 1287387 - RNA, 23 nt, Human
ccacacgggccugguguucuggg

SEQ ID NO: 1287388 - RNA, 19 nt, Human
ccacgccgccccgcucccc

SEQ ID NO: 1287389 - RNA, 23 nt, Human
ccagccucgggccgggcgcgccc

SEQ ID NO: 1287390 - RNA, 21 nt, Human
cccagccccucccuacguucc

SEQ ID NO: 1287391 - RNA, 21 nt, Human
cccccagacuuaccuccccuc

SEQ ID NO: 1287392 - RNA, 21 nt, Human
cccccagccucgggccgggcg

SEQ ID NO: 1287393 - RNA, 19 nt, Human
ccccgaguccgcccggccc

SEQ ID NO: 1287394 - RNA, 22 nt, Human
ccccgggucgcagaaacguguu

SEQ ID NO: 1287395 - RNA, 21 nt, Human
ccccuggaaacaccgucucug

SEQ ID NO: 1287396 - RNA, 25 nt, Human
ccccuggaaacaccgucucuggaag

SEQ ID NO: 1287397 - RNA, 25 nt, Human
cccggcccggccugggguccucggc

SEQ ID NO: 1287398 - RNA, 22 nt, Human
cccucaggccucggggccccug

SEQ ID NO: 1287399 - RNA, 19 nt, Human
ccgccccgcucccccagcc

SEQ ID NO: 1287400 - RNA, 20 nt, Human
ccgccccgcucccccagccu

SEQ ID NO: 1287401 - RNA, 22 nt, Human
ccuccccucuucuaucccgggc

SEQ ID NO: 1287402 - RNA, 21 nt, Human
ccucucggcccggcccggccu

SEQ ID NO: 1287403 - RNA, 23 nt, Human
ccugaccucagggugccacccac

SEQ ID NO: 1287404 - RNA, 26 nt, Human
ccugguguucugggaggcccgggcug

SEQ ID NO: 1287405 - RNA, 18 nt, Human
cgccacgccgccccgcuc

SEQ ID NO: 1287406 - RNA, 20 nt, Human
cggcccggcccggccugggg

SEQ ID NO: 1287407 - RNA, 22 nt, Human
cggcgcgcccgccacgccgccc

SEQ ID NO: 1287408 - RNA, 18 nt, Human
cgggcuggacugaccccc

SEQ ID NO: 1287409 - RNA, 18 nt, Human
cggggccccuggucaggc

SEQ ID NO: 1287410 - RNA, 21 nt, Human
cgggugucugcuguccugggu

SEQ ID NO: 1287411 - RNA, 24 nt, Human
cgguccccgaguccgcccggcccc

SEQ ID NO: 1287412 - RNA, 23 nt, Human
cucuucuaucccgggccaggaag

SEQ ID NO: 1287413 - RNA, 19 nt, Human
cuggcacagggggaggcuc

SEQ ID NO: 1287414 - RNA, 28 nt, Human
cuggcgggugucugcuguccuggguggg

SEQ ID NO: 1287415 - RNA, 18 nt, Human
cuggcugggcuggagccg

SEQ ID NO: 1287416 - RNA, 19 nt, Human
cugguguucugggaggccc

SEQ ID NO: 1287417 - RNA, 19 nt, Human
cuuaggauccccugaccuc

SEQ ID NO: 1287418 - RNA, 20 nt, Human
gaaacagggcagucacagcc

SEQ ID NO: 1287419 - RNA, 20 nt, Human
gaacuucaguccaggguggg

SEQ ID NO: 1287420 - RNA, 21 nt, Human
gagccccgggucgcagaaacg

SEQ ID NO: 1287421 - RNA, 22 nt, Human
gagcgcggcgacgagcacagcc

SEQ ID NO: 1287422 - RNA, 20 nt, Human
gagguggggacaggggaggg

SEQ ID NO: 1287423 - RNA, 22 nt, Human
gagugcuggcugggcuggagcc

SEQ ID NO: 1287424 - RNA, 18 nt, Human
gccucgggccgggcgcgc

SEQ ID NO: 1287425 - RNA, 19 nt, Human
gcgggggcgguccuccccc

SEQ ID NO: 1287426 - RNA, 21 nt, Human
gcgggugucugcuguccuggg

SEQ ID NO: 1287427 - RNA, 21 nt, Human
gcuggacugacccccagcccc

SEQ ID NO: 1287428 - RNA, 22 nt, Human
gcuggcacagggggaggcucag

SEQ ID NO: 1287429 - RNA, 22 nt, Human
gcuggcugggcuggagccgggg

SEQ ID NO: 1287430 - RNA, 21 nt, Human
ggccaggaaggcaaugggagg

SEQ ID NO: 1287431 - RNA, 23 nt, Human
ggcucagggccccgcaggcacug

SEQ ID NO: 1287432 - RNA, 18 nt, Human
ggcuggacccugagggag

SEQ ID NO: 1287433 - RNA, 18 nt, Human
ggcuggacccugagggag

SEQ ID NO: 1287434 - RNA, 21 nt, Human
ggcugggcuggagccggggcc

SEQ ID NO: 1287435 - RNA, 23 nt, Human
ggcugggcuggagccggggccgc

SEQ ID NO: 1287436 - RNA, 19 nt, Human
gggaggcccgggcuggacu

SEQ ID NO: 1287437 - RNA, 18 nt, Human
gggcagucacagccgggg

SEQ ID NO: 1287438 - RNA, 20 nt, Human
gggccccuggucaggacccu

SEQ ID NO: 1287439 - RNA, 19 nt, Human
ggggaucuggaagcggggg

SEQ ID NO: 1287440 - RNA, 22 nt, Human
ggggcauggcuggacccugagg

SEQ ID NO: 1287441 - RNA, 18 nt, Human
ggucugucgagucccuug

SEQ ID NO: 1287442 - RNA, 22 nt, Human
ggugggugaugagggccggggu

SEQ ID NO: 1287443 - RNA, 23 nt, Human
guagcccccagacuuaccucccc

SEQ ID NO: 1287444 - RNA, 20 nt, Human
guccaggguggggcauggcu

SEQ ID NO: 1287445 - RNA, 21 nt, Human
gugaugagggccggggugcag

SEQ ID NO: 1287446 - RNA, 22 nt, Human
guggggcauggcuggacccuga

SEQ ID NO: 1287447 - RNA, 21 nt, Human
uagcccccagacuuaccuccc

SEQ ID NO: 1287448 - RNA, 23 nt, Human
ucaguccaggguggggcauggcu

SEQ ID NO: 1287449 - RNA, 23 nt, Human
ucagugccggugggugaugaggg

SEQ ID NO: 1287450 - RNA, 23 nt, Human
ucaugaggaggggucccuggugg

SEQ ID NO: 1287451 - RNA, 19 nt, Human
ucccagaggcugaugcaga

SEQ ID NO: 1287452 - RNA, 21 nt, Human
ucccagaggcugaugcagacc

SEQ ID NO: 1287453 - RNA, 22 nt, Human
ucccugguggaggcugggccag

SEQ ID NO: 1287454 - RNA, 18 nt, Human
ucccuugcuggaugaggg

SEQ ID NO: 1287455 - RNA, 23 nt, Human
ucggcgcgcccgccacgccgccc

SEQ ID NO: 1287456 - RNA, 19 nt, Human
ucggggccccuggucaggc

SEQ ID NO: 1287457 - RNA, 21 nt, Human
ucguguggguguguggggagg

SEQ ID NO: 1287458 - RNA, 19 nt, Human
ucucagggcuccagaguuc

SEQ ID NO: 1287459 - RNA, 20 nt, Human
ucucuaagaaugaggacaga

SEQ ID NO: 1287460 - RNA, 18 nt, Human
ugacccccagccccuccc

SEQ ID NO: 1287461 - RNA, 20 nt, Human
ugagaccaaacgcagaacac

SEQ ID NO: 1287462 - RNA, 22 nt, Human
ugagaccaaacgcagaacacag

SEQ ID NO: 1287463 - RNA, 23 nt, Human
ugaggaggggucccugguggagg

SEQ ID NO: 1287464 - RNA, 19 nt, Human
ugagggaguggggcugcug

SEQ ID NO: 1287465 - RNA, 20 nt, Human
ugagggaguggggcugcugg

SEQ ID NO: 1287466 - RNA, 24 nt, Human
ugccccucuccucucagggcucca

SEQ ID NO: 1287467 - RNA, 21 nt, Human
ugcuggcugggcuggagccgg

SEQ ID NO: 1287468 - RNA, 22 nt, Human
uggcaucguguggguguguggg

SEQ ID NO: 1287469 - RNA, 19 nt, Human
ugggugaugagggccgggg

SEQ ID NO: 1287470 - RNA, 23 nt, Human
uggguggggacacggugcgugug

SEQ ID NO: 1287471 - RNA, 20 nt, Human
uguccuggguggggacacgg

SEQ ID NO: 1287472 - RNA, 18 nt, Human
uucguagcccccagacuu

SEQ ID NO: 1287473 - RNA, 25 nt, Human
uucguagcccccagacuuaccuccc

SEQ ID NO: 1287474 - RNA, 21 nt, Human
accaucaguccucccugccac

SEQ ID NO: 1287475 - RNA, 18 nt, Human
ccgcucgagcccaacucc

SEQ ID NO: 1287476 - RNA, 23 nt, Human
ccucccugccacucgguaagggc

SEQ ID NO: 1287477 - RNA, 18 nt, Human
ccugccacccuuguacug

SEQ ID NO: 1287478 - RNA, 21 nt, Human
cuccggugccaccugccaccc

SEQ ID NO: 1287479 - RNA, 21 nt, Human
gcguuauaaccaucaguccuc

SEQ ID NO: 1287480 - RNA, 21 nt, Human
ucgguaagggcugucuccuuc

SEQ ID NO: 1287481 - RNA, 19 nt, Human
ugccaccugccacccuugu

SEQ ID NO: 1287482 - RNA, 20 nt, Human
aaaggggccgcgcgccagcg

SEQ ID NO: 1287483 - RNA, 22 nt, Human
caagcaggugucccgcccuugc

SEQ ID NO: 1287484 - RNA, 18 nt, Human
cgcgcgccagcgccaagc

SEQ ID NO: 1287485 - RNA, 20 nt, Human
gggcucucggcgucccagac

SEQ ID NO: 1287486 - RNA, 18 nt, Human
uccaggcaaccgcggacg

SEQ ID NO: 1287487 - RNA, 24 nt, Human
uguuuggaaaagucucgcuccagg

SEQ ID NO: 1287488 - RNA, 20 nt, Human
caccuggccaccagagggcc

SEQ ID NO: 1287489 - RNA, 23 nt, Human
caccuggccaccagagggcccag

SEQ ID NO: 1287490 - RNA, 18 nt, Human
ccuggccaccagagggcc

SEQ ID NO: 1287491 - RNA, 21 nt, Human
cgcagugacagcuggaguuuc

SEQ ID NO: 1287492 - RNA, 19 nt, Human
cucagggccuuggcaucag

SEQ ID NO: 1287493 - RNA, 21 nt, Human
cucugcugcucagggccuugg

SEQ ID NO: 1287494 - RNA, 24 nt, Human
cuggaguuucuacggcaaagugau

SEQ ID NO: 1287495 - RNA, 18 nt, Human
gaugacugcaaugaccac

SEQ ID NO: 1287496 - RNA, 25 nt, Human
gccaccagagggcccagugagagaa

SEQ ID NO: 1287497 - RNA, 19 nt, Human
ugacagcuggaguuucuac

SEQ ID NO: 1287498 - RNA, 19 nt, Human
ugacugcaaugaccacgga

SEQ ID NO: 1287499 - RNA, 21 nt, Human
uguggccggcccucugcugcu

SEQ ID NO: 1287500 - RNA, 19 nt, Human
aagagcacugagcuacacc

SEQ ID NO: 1287501 - RNA, 18 nt, Human
agagcacugagcuacacc

SEQ ID NO: 1287502 - RNA, 23 nt, Human
caagagcacugagcuacaccagu

SEQ ID NO: 1287503 - RNA, 21 nt, Human
caguaaccaagagcacugagc

SEQ ID NO: 1287504 - RNA, 23 nt, Human
cucuuuguuuugucaucagagau

SEQ ID NO: 1287505 - RNA, 24 nt, Human
guuuugucaucagagaucacuugu

SEQ ID NO: 1287506 - RNA, 20 nt, Human
ucagagaucacuuguugcuu

SEQ ID NO: 1287507 - RNA, 21 nt, Human
ucuuuguuuugucaucagaga

SEQ ID NO: 1287508 - RNA, 21 nt, Human
ugacagugcuuuggaaugucu

SEQ ID NO: 1287509 - RNA, 22 nt, Human
uuguugcuucaguaaccaagag

SEQ ID NO: 1287510 - RNA, 18 nt, Human
ccauugcugacgagguga

SEQ ID NO: 1287511 - RNA, 18 nt, Human
gagagacagagauuugga

SEQ ID NO: 1287512 - RNA, 19 nt, Human
gcagggugcugacugccgg

SEQ ID NO: 1287513 - RNA, 19 nt, Human
ggagagacagagauuugga

SEQ ID NO: 1287514 - RNA, 18 nt, Human
ggugcugacugccggaga

SEQ ID NO: 1287515 - RNA, 23 nt, Human
uaauccauugcugacgaggugac

SEQ ID NO: 1287516 - RNA, 20 nt, Human
ugcagggugcugacugccgg

SEQ ID NO: 1287517 - RNA, 21 nt, Human
aauggcuuucccaugcucuuu

SEQ ID NO: 1287518 - RNA, 26 nt, Human
agaaggcugccuggaaaugggcacca

SEQ ID NO: 1287519 - RNA, 22 nt, Human
agccgacacuggaacuggaaca

SEQ ID NO: 1287520 - RNA, 18 nt, Human
augggcaccaugcaacug

SEQ ID NO: 1287521 - RNA, 20 nt, Human
cagccgacacuggaacugga

SEQ ID NO: 1287522 - RNA, 21 nt, Human
ccaugcaacuguccaucgugu

SEQ ID NO: 1287523 - RNA, 25 nt, Human
gagaaggcugccuggaaaugggcac

SEQ ID NO: 1287524 - RNA, 22 nt, Human
gggucagaacgagggaagaagg

SEQ ID NO: 1287525 - RNA, 20 nt, Human
ucagccgacacuggaacugg

SEQ ID NO: 1287526 - RNA, 18 nt, Human
ugaaauggcuuucccaug

SEQ ID NO: 1287527 - RNA, 23 nt, Human
ugaaauggcuuucccaugcucuu

SEQ ID NO: 1287528 - RNA, 23 nt, Human
uggaacauucaccagcuuugaaa

SEQ ID NO: 1287529 - RNA, 26 nt, Human
uggcuuucccaugcucuuuuccuuga

SEQ ID NO: 1287530 - RNA, 19 nt, Human
agggugcuucugcaacugg

SEQ ID NO: 1287531 - RNA, 20 nt, Human
ccucugggcagcaacuucca

SEQ ID NO: 1287532 - RNA, 19 nt, Human
cugggcagcaacuuccaug

SEQ ID NO: 1287533 - RNA, 23 nt, Human
gggcuuugggauggcaaaagaag

SEQ ID NO: 1287534 - RNA, 22 nt, Human
uagcuucgacugcccugcauga

SEQ ID NO: 1287535 - RNA, 18 nt, Human
uccaugagcacccugggc

SEQ ID NO: 1287536 - RNA, 24 nt, Human
uccaugagcacccugggcuuuggg

SEQ ID NO: 1287537 - RNA, 18 nt, Human
ugaccucugggcagcaac

SEQ ID NO: 1287538 - RNA, 20 nt, Human
ugagaaugcugaccucuggg

SEQ ID NO: 1287539 - RNA, 20 nt, Human
ugagcacccugggcuuuggg

SEQ ID NO: 1287540 - RNA, 18 nt, Human
ugggauggcaaaagaagg

SEQ ID NO: 1287541 - RNA, 20 nt, Human
uugagaaugcugaccucugg

SEQ ID NO: 1287542 - RNA, 22 nt, Human
uugggauggcaaaagaaggagc

SEQ ID NO: 1287543 - RNA, 24 nt, Human
aagaagcaugagcugggccuggug

SEQ ID NO: 1287544 - RNA, 18 nt, Human
acaggaggcagaggcugg

SEQ ID NO: 1287545 - RNA, 23 nt, Human
agacaggcaggaaucuggccagg

SEQ ID NO: 1287546 - RNA, 22 nt, Human
aggaggcagaggcugggccugg

SEQ ID NO: 1287547 - RNA, 23 nt, Human
aggcugggccuggagaggcugcc

SEQ ID NO: 1287548 - RNA, 21 nt, Human
caccaggaggcagcaguuggg

SEQ ID NO: 1287549 - RNA, 22 nt, Human
cacuggguggcaggagcugggu

SEQ ID NO: 1287550 - RNA, 25 nt, Human
cacuggguggcaggagcugggugug

SEQ ID NO: 1287551 - RNA, 22 nt, Human
cagcaguugggacuagagaggc

SEQ ID NO: 1287552 - RNA, 19 nt, Human
caggcaggaaucuggccag

SEQ ID NO: 1287553 - RNA, 19 nt, Human
cccuugugaggcaugagcu

SEQ ID NO: 1287554 - RNA, 20 nt, Human
ccugggacaggagcugggcc

SEQ ID NO: 1287555 - RNA, 23 nt, Human
cguccugggacaggagcugggcc

SEQ ID NO: 1287556 - RNA, 22 nt, Human
cuaaagaggccacuggguggca

SEQ ID NO: 1287557 - RNA, 19 nt, Human
cugggccuggagaggccac

SEQ ID NO: 1287558 - RNA, 19 nt, Human
cugggccuggagaggcugc

SEQ ID NO: 1287559 - RNA, 26 nt, Human
gagcugggccuggagaggccaccgug

SEQ ID NO: 1287560 - RNA, 24 nt, Human
gccaagaugcaggagcugggccug

SEQ ID NO: 1287561 - RNA, 18 nt, Human
gccuggugaggucgacuu

SEQ ID NO: 1287562 - RNA, 19 nt, Human
ggaaguuuugggccuggag

SEQ ID NO: 1287563 - RNA, 18 nt, Human
ggacuguagaggcugaca

SEQ ID NO: 1287564 - RNA, 18 nt, Human
ggaggcagaggcugggcc

SEQ ID NO: 1287565 - RNA, 18 nt, Human
ggccuggagaggccaccg

SEQ ID NO: 1287566 - RNA, 19 nt, Human
gggccuggagaugacgucc

SEQ ID NO: 1287567 - RNA, 20 nt, Human
gggccuggagaugacguccu

SEQ ID NO: 1287568 - RNA, 18 nt, Human
gugaggcagaugcugggc

SEQ ID NO: 1287569 - RNA, 21 nt, Human
gugaggucgacuugaggaagu

SEQ ID NO: 1287570 - RNA, 18 nt, Human
guggcaggagcugggugu

SEQ ID NO: 1287571 - RNA, 24 nt, Human
uccacagugaggcagaugcugggc

SEQ ID NO: 1287572 - RNA, 20 nt, Human
ugaaagguugggagcuuggc

SEQ ID NO: 1287573 - RNA, 22 nt, Human
ugaaagguugggagcuuggcuu

SEQ ID NO: 1287574 - RNA, 20 nt, Human
ugacaggaggcagaggcugg

SEQ ID NO: 1287575 - RNA, 22 nt, Human
ugacaggaggcagaggcugggc

SEQ ID NO: 1287576 - RNA, 19 nt, Human
ugagcugggccuggugagg

SEQ ID NO: 1287577 - RNA, 20 nt, Human
ugaggcaagagcugggccug

SEQ ID NO: 1287578 - RNA, 22 nt, Human
ugaggcaagagcugggccuguc

SEQ ID NO: 1287579 - RNA, 18 nt, Human
ugaggcagaugcugggcc

SEQ ID NO: 1287580 - RNA, 19 nt, Human
ugcugggagacaggcagga

SEQ ID NO: 1287581 - RNA, 19 nt, Human
ugcugggccugaagaaucu

SEQ ID NO: 1287582 - RNA, 18 nt, Human
uggagaggccaccgugag

SEQ ID NO: 1287583 - RNA, 21 nt, Human
uggcaggagcuggguguguag

SEQ ID NO: 1287584 - RNA, 22 nt, Human
ugggagacaggcaggaaucugg

SEQ ID NO: 1287585 - RNA, 24 nt, Human
ugggccuggaaaggcccuugugac

SEQ ID NO: 1287586 - RNA, 18 nt, Human
ugggccuggagaggcugc

SEQ ID NO: 1287587 - RNA, 18 nt, Human
uggguggcaggagcuggg

SEQ ID NO: 1287588 - RNA, 25 nt, Human
agaagagacagaagagaagacagaa

SEQ ID NO: 1287589 - RNA, 26 nt, Human
agacagaagagaagacagaagggacc

SEQ ID NO: 1287590 - RNA, 21 nt, Human
caaguuagaaguggcagacca

SEQ ID NO: 1287591 - RNA, 22 nt, Human
cucagaugaaagagaagagaca

SEQ ID NO: 1287592 - RNA, 18 nt, Human
cugcuacaucaacagagg

SEQ ID NO: 1287593 - RNA, 20 nt, Human
cuguguucaucuugugacuc

SEQ ID NO: 1287594 - RNA, 19 nt, Human
gacucugcuacaucaacag

SEQ ID NO: 1287595 - RNA, 25 nt, Human
gaugaaagagaagagacagaagaga

SEQ ID NO: 1287596 - RNA, 19 nt, Human
uagaaguggcagaccauug

SEQ ID NO: 1287597 - RNA, 22 nt, Human
ucuaaccuaacuucaagaaagu

SEQ ID NO: 1287598 - RNA, 19 nt, Human
ucuaugaucucagaugaaa

SEQ ID NO: 1287599 - RNA, 21 nt, Human
ucugcuacaucaacagaggcu

SEQ ID NO: 1287600 - RNA, 22 nt, Human
ugagaacaugaucuaaccuaac

SEQ ID NO: 1287601 - RNA, 24 nt, Human
uguucaucuugugacucugcuaca

SEQ ID NO: 1287602 - RNA, 18 nt, Human
uucaucuugugacucugc

SEQ ID NO: 1287603 - RNA, 22 nt, Human
ccuucuuguggcucugagaguc

SEQ ID NO: 1287604 - RNA, 22 nt, Human
cuucuuguggcucugagagucc

SEQ ID NO: 1287605 - RNA, 19 nt, Human
gcaaaggagagaugaccuu

SEQ ID NO: 1287606 - RNA, 19 nt, Human
cagggggcgcugcugcugc

SEQ ID NO: 1287607 - RNA, 21 nt, Human
ccaggcagggcgagcgccaag

SEQ ID NO: 1287608 - RNA, 20 nt, Human
ugcugcugcugcugggaagc

SEQ ID NO: 1287609 - RNA, 19 nt, Human
uuguccaggcagggcgagc

SEQ ID NO: 1287610 - RNA, 18 nt, Human
aaaugccacugaugggau

SEQ ID NO: 1287611 - RNA, 20 nt, Human
accgcuggacucuuccuuag

SEQ ID NO: 1287612 - RNA, 21 nt, Human
agaaauaaugauagagcuugg

SEQ ID NO: 1287613 - RNA, 22 nt, Human
agaaauaaugauagagcuuggg

SEQ ID NO: 1287614 - RNA, 20 nt, Human
aggcaagugcugaauggacc

SEQ ID NO: 1287615 - RNA, 21 nt, Human
auagagcuugggacucagauu

SEQ ID NO: 1287616 - RNA, 18 nt, Human
cacacuguuuuucccucu

SEQ ID NO: 1287617 - RNA, 19 nt, Human
cacacuguuuuucccucug

SEQ ID NO: 1287618 - RNA, 19 nt, Human
caccagcaacaccuguggu

SEQ ID NO: 1287619 - RNA, 23 nt, Human
cagcaacaccuguggucucacca

SEQ ID NO: 1287620 - RNA, 18 nt, Human
ccacugaugggaugucug

SEQ ID NO: 1287621 - RNA, 20 nt, Human
cugaauggaccgcuggacuc

SEQ ID NO: 1287622 - RNA, 24 nt, Human
cugaggcuguuugcuuaucuguuc

SEQ ID NO: 1287623 - RNA, 22 nt, Human
gccagccaagcauccucaucac

SEQ ID NO: 1287624 - RNA, 23 nt, Human
gcuagaaugcauggggccagcca

SEQ ID NO: 1287625 - RNA, 20 nt, Human
uaaugauagagcuugggacu

SEQ ID NO: 1287626 - RNA, 23 nt, Human
ucaccagcaacaccuguggucuc

SEQ ID NO: 1287627 - RNA, 23 nt, Human
ucuccugugagcaagucaccagc

SEQ ID NO: 1287628 - RNA, 24 nt, Human
ucucugcugugaccacaguggugc

SEQ ID NO: 1287629 - RNA, 20 nt, Human
ugagcaagucaccagcaaca

SEQ ID NO: 1287630 - RNA, 23 nt, Human
ugcugcuucucuuucacagcagu

SEQ ID NO: 1287631 - RNA, 19 nt, Human
uggccuugaguuacuaccu

SEQ ID NO: 1287632 - RNA, 19 nt, Human
ugguugcuuucccaagauu

SEQ ID NO: 1287633 - RNA, 25 nt, Human
uucaaccuucucucccuuuugggua

SEQ ID NO: 1287634 - RNA, 24 nt, Human
agccuuugaagauggagcugguug

SEQ ID NO: 1287635 - RNA, 21 nt, Human
caaacagcagagccuuugaag

SEQ ID NO: 1287636 - RNA, 26 nt, Human
cacacaaacagcagagccuuugaaga

SEQ ID NO: 1287637 - RNA, 20 nt, Human
cagagcucacaccuuucugu

SEQ ID NO: 1287638 - RNA, 26 nt, Human
ccagagcucacaccuuucugugucuu

SEQ ID NO: 1287639 - RNA, 22 nt, Human
cugcauggagaauggaugaacu

SEQ ID NO: 1287640 - RNA, 23 nt, Human
uacaggauuucuuucaucucuug

SEQ ID NO: 1287641 - RNA, 21 nt, Human
uauacacacaaacagcagagc

SEQ ID NO: 1287642 - RNA, 22 nt, Human
ucuauagaagguggcuccuuuc

SEQ ID NO: 1287643 - RNA, 18 nt, Human
ucucuuguggggaguaaa

SEQ ID NO: 1287644 - RNA, 23 nt, Human
ucugugucuugcuguaguuuugu

SEQ ID NO: 1287645 - RNA, 19 nt, Human
uucaucucuuguggggagu

SEQ ID NO: 1287646 - RNA, 23 nt, Human
aaaaaauccaaaauuaguaaaga

SEQ ID NO: 1287647 - RNA, 23 nt, Human
aaaauuaguaaagaaaaauauaa

SEQ ID NO: 1287648 - RNA, 18 nt, Human
aagcugugggacugcggc

SEQ ID NO: 1287649 - RNA, 31 nt, Human
agaaaaaaaauccaaaauuaguaaagaaaaa

SEQ ID NO: 1287650 - RNA, 23 nt, Human
aguaucuucccugcccaauaauu

SEQ ID NO: 1287651 - RNA, 18 nt, Human
caaagcaccccagcucuc

SEQ ID NO: 1287652 - RNA, 27 nt, Human
gccucacacgaauaacuuuuauuucac

SEQ ID NO: 1287653 - RNA, 18 nt, Human
gcggcccgguuccaggcc

SEQ ID NO: 1287654 - RNA, 30 nt, Human; identical to SEQ ID NO: 553021

SEQ ID NO: 1287655 - RNA, 19 nt, Human
guaaagaaaaauauaagaa

SEQ ID NO: 1287656 - RNA, 20 nt, Human
gugguugucgaagcuguggg

SEQ ID NO: 1287657 - RNA, 24 nt, Human
uaacuuuuauuucacucaaauuag

SEQ ID NO: 1287658 - RNA, 25 nt, Human
ugaaugaauacccuaaaggcaaacc

SEQ ID NO: 1287659 - RNA, 21 nt, Human
ugaucuagguugcuuuuccuu

SEQ ID NO: 1287660 - RNA, 18 nt, Human
uucaaagaaaaaaaaucc

SEQ ID NO: 1287661 - RNA, 20 nt, Human
uugcuuuuccuucagcaagg

SEQ ID NO: 1287662 - RNA, 18 nt, Human
uuuaaaaaguauuuagag

SEQ ID NO: 1287663 - RNA, 24 nt, Human
aaaaauucguuauuauucagauaa

SEQ ID NO: 1287664 - RNA, 20 nt, Human
aacggcgugacugcggcggg

SEQ ID NO: 1287665 - RNA, 22 nt, Human
aagcugaggucccggaucucac

SEQ ID NO: 1287666 - RNA, 19 nt, Human
aggcugcgcaggcggcgcc

SEQ ID NO: 1287667 - RNA, 24 nt, Human
aggugagcgccgccagccuggagc

SEQ ID NO: 1287668 - RNA, 19 nt, Human
caacaugauuuuguaguac

SEQ ID NO: 1287669 - RNA, 22 nt, Human
cagcuacuagugauuaagaacg

SEQ ID NO: 1287670 - RNA, 20 nt, Human
cccacgacaacuuccugaga

SEQ ID NO: 1287671 - RNA, 20 nt, Human
ccgccgccggagacccgcuc

SEQ ID NO: 1287672 - RNA, 18 nt, Human
ccggccccgcccccugcc

SEQ ID NO: 1287673 - RNA, 18 nt, Human
ccuccgggcggccggccc

SEQ ID NO: 1287674 - RNA, 21 nt, Human
ccugggucacccggcuaggag

SEQ ID NO: 1287675 - RNA, 20 nt, Human
cgcugcagcgccggcacgcc

SEQ ID NO: 1287676 - RNA, 18 nt, Human
cggcgccaggcccgggcc

SEQ ID NO: 1287677 - RNA, 20 nt, Human
cugaggucccggaucucacc

SEQ ID NO: 1287678 - RNA, 19 nt, Human
gagccugcuugcaaagcug

SEQ ID NO: 1287679 - RNA, 24 nt, Human
gcccccgucgccgccgccggagac

SEQ ID NO: 1287680 - RNA, 25 nt, Human
gugaagaaacugcaguccugugcgg

SEQ ID NO: 1287681 - RNA, 22 nt, Human
uaaaaagccucugccccacgac

SEQ ID NO: 1287682 - RNA, 20 nt, Human
ucacgcgcggcccggccccu

SEQ ID NO: 1287683 - RNA, 19 nt, Human
ucgccgccuugcagcgccg

SEQ ID NO: 1287684 - RNA, 24 nt, Human
ugaagaaacugcaguccugugcgg

SEQ ID NO: 1287685 - RNA, 20 nt, Human
ugagaaccugacccggcagg

SEQ ID NO: 1287686 - RNA, 22 nt, Human
ugagcgccgccagccuggagca

SEQ ID NO: 1287687 - RNA, 20 nt, Human
ugcagcgccgcgagcccagc

SEQ ID NO: 1287688 - RNA, 25 nt, Human
ugccccacgacaacuuccugagauu

SEQ ID NO: 1287689 - RNA, 21 nt, Human
ugcggcgggucacgcgcggcc

SEQ ID NO: 1287690 - RNA, 19 nt, Human
uuaaaaagccucugcccca

SEQ ID NO: 1287691 - RNA, 20 nt, Human
uuccugagaucugugaagaa

SEQ ID NO: 1287692 - RNA, 25 nt, Human
uugcagcgccgcgagcccagcgccc

SEQ ID NO: 1287693 - RNA, 21 nt, Human
uuuguaguacucuaucucagg

SEQ ID NO: 1287694 - RNA, 21 nt, Human
aaaaaugccaccauggccucc

SEQ ID NO: 1287695 - RNA, 19 nt, Human
aacaccugccccgcagcuc

SEQ ID NO: 1287696 - RNA, 23 nt, Human
aaccuucuucccuguuugcccac

SEQ ID NO: 1287697 - RNA, 18 nt, Human
aacuccuagcccaguccc

SEQ ID NO: 1287698 - RNA, 24 nt, Human
aagcggcggcaaccgaggcgagca

SEQ ID NO: 1287699 - RNA, 18 nt, Human
aaggagcacuggcugcag

SEQ ID NO: 1287700 - RNA, 24 nt, Human
aaguccccucccagaucugugacc

SEQ ID NO: 1287701 - RNA, 25 nt, Human
acagguaccagagacugccccccac

SEQ ID NO: 1287702 - RNA, 20 nt, Human
acagucccagaagggcccag

SEQ ID NO: 1287703 - RNA, 19 nt, Human
accaugcccaugcccccgc

SEQ ID NO: 1287704 - RNA, 18 nt, Human
acccgcuccuucaggucc

SEQ ID NO: 1287705 - RNA, 21 nt, Human
acccgcuccuucagguccacc

SEQ ID NO: 1287706 - RNA, 19 nt, Human
acccugauguccccacuuc

SEQ ID NO: 1287707 - RNA, 21 nt, Human
acugcccccuggcugauguac

SEQ ID NO: 1287708 - RNA, 19 nt, Human
agaaagacaauaggcugcc

SEQ ID NO: 1287709 - RNA, 22 nt, Human
agacugccccccacggccccaa

SEQ ID NO: 1287710 - RNA, 22 nt, Human
agcaaggcagccagggcggcac

SEQ ID NO: 1287711 - RNA, 19 nt, Human
aggagcagaggcgagucug

SEQ ID NO: 1287712 - RNA, 18 nt, Human
aggaugcccaggcccugc

SEQ ID NO: 1287713 - RNA, 21 nt, Human
agggcccagcuccugggcggc

SEQ ID NO: 1287714 - RNA, 25 nt, Human
agguaccagagacugccccccacgg

SEQ ID NO: 1287715 - RNA, 19 nt, Human
aguccagcgccaggaugcc

SEQ ID NO: 1287716 - RNA, 25 nt, Human
agugacggggggagcuugacaagga

SEQ ID NO: 1287717 - RNA, 26 nt, Human
aucucuccccucccugugccucccag

SEQ ID NO: 1287718 - RNA, 25 nt, Human
augcccagaggagugcccugggggc

SEQ ID NO: 1287719 - RNA, 21 nt, Human
augugggaaccagaacacacu

SEQ ID NO: 1287720 - RNA, 22 nt, Human
augugggaaccagaacacacug

SEQ ID NO: 1287721 - RNA, 20 nt, Human
auuugccaugccccuccuug

SEQ ID NO: 1287722 - RNA, 20 nt, Human
caaaauuugccaugccccuc

SEQ ID NO: 1287723 - RNA, 25 nt, Human
caaccgaggcgagcaaugggcacgg

SEQ ID NO: 1287724 - RNA, 19 nt, Human
caacuccuagcccaguccc

SEQ ID NO: 1287725 - RNA, 21 nt, Human
caagcugcaacaccugccccg

SEQ ID NO: 1287726 - RNA, 23 nt, Human
caaguccagcgccaggaugccca

SEQ ID NO: 1287727 - RNA, 21 nt, Human
cacacagguaccagagacugc

SEQ ID NO: 1287728 - RNA, 19 nt, Human
cacacccaagcuccugggc

SEQ ID NO: 1287729 - RNA, 22 nt, Human
cacacugauggaggaguuggca

SEQ ID NO: 1287730 - RNA, 22 nt, Human
cacagacucacccccacucucu

SEQ ID NO: 1287731 - RNA, 19 nt, Human
caccaugcccaugcccccg

SEQ ID NO: 1287732 - RNA, 21 nt, Human
caccccgcgcaccggcuacaa

SEQ ID NO: 1287733 - RNA, 22 nt, Human
caccuggagugacggggggagc

SEQ ID NO: 1287734 - RNA, 22 nt, Human
caccuucaucuccuccuggucc

SEQ ID NO: 1287735 - RNA, 20 nt, Human
cacucucuggggcuggggcc

SEQ ID NO: 1287736 - RNA, 19 nt, Human
cacugcgcuggggcggggc

SEQ ID NO: 1287737 - RNA, 19 nt, Human
cacuggcugcagggggggg

SEQ ID NO: 1287738 - RNA, 20 nt, Human
cagauguccuccuccaucuc

SEQ ID NO: 1287739 - RNA, 20 nt, Human
cagcaauccaguggugauca

SEQ ID NO: 1287740 - RNA, 22 nt, Human
cagcacacccaagcuccugggc

SEQ ID NO: 1287741 - RNA, 22 nt, Human
cagcagcggcugcggcuaaagc

SEQ ID NO: 1287742 - RNA, 19 nt, Human
cagccagggcggcacaggc

SEQ ID NO: 1287743 - RNA, 20 nt, Human
cagcuccugggcuuccuccu

SEQ ID NO: 1287744 - RNA, 24 nt, Human
cagggcggcacaggcaccaggucc

SEQ ID NO: 1287745 - RNA, 18 nt, Human
cagggggggggggggggg

SEQ ID NO: 1287746 - RNA, 22 nt, Human
caggugcagagcaucccugacg

SEQ ID NO: 1287747 - RNA, 22 nt, Human
caucuccuccugguccugggcc

SEQ ID NO: 1287748 - RNA, 24 nt, Human
caucucuccccucccugugccucc

SEQ ID NO: 1287749 - RNA, 24 nt, Human
caugcaccacgcgcugaaggaggc

SEQ ID NO: 1287750 - RNA, 25 nt, Human
caugucccuagcccggccugggugg

SEQ ID NO: 1287751 - RNA, 24 nt, Human
ccaaaaucccccacccgggaugcc

SEQ ID NO: 1287752 - RNA, 23 nt, Human
ccaaacacagacucacccccacu

SEQ ID NO: 1287753 - RNA, 20 nt, Human
ccaacuccuagcccaguccc

SEQ ID NO: 1287754 - RNA, 24 nt, Human
ccacggccccaaaaucccccaccc

SEQ ID NO: 1287755 - RNA, 24 nt, Human
ccacuggaccacaggagcagaggc

SEQ ID NO: 1287756 - RNA, 19 nt, Human
ccacuuccaaguccugacu

SEQ ID NO: 1287757 - RNA, 22 nt, Human
ccacuuccaaguccugacuccu

SEQ ID NO: 1287758 - RNA, 20 nt, Human
ccagagacugccccccacgg

SEQ ID NO: 1287759 - RNA, 20 nt, Human
ccagcucccagccugggagu

SEQ ID NO: 1287760 - RNA, 20 nt, Human
ccaguggugaucacccugcu

SEQ ID NO: 1287761 - RNA, 19 nt, Human
ccaugcccccgcccgugga

SEQ ID NO: 1287762 - RNA, 19 nt, Human
ccauggccucccggcucuc

SEQ ID NO: 1287763 - RNA, 24 nt, Human
cccaaaaucccccacccgggaugc

SEQ ID NO: 1287764 - RNA, 22 nt, Human
cccacccgggaugcccagagga

SEQ ID NO: 1287765 - RNA, 24 nt, Human
cccacggccccaaaaucccccacc

SEQ ID NO: 1287766 - RNA, 21 nt, Human
ccccaaacacagacucacccc

SEQ ID NO: 1287767 - RNA, 23 nt, Human
cccccacccgggaugcccagagg

SEQ ID NO: 1287768 - RNA, 21 nt, Human
ccccccacggccccaaaaucc

SEQ ID NO: 1287769 - RNA, 18 nt, Human
ccccucccugugccuccc

SEQ ID NO: 1287770 - RNA, 22 nt, Human
cccgcgcaccggcuacaagccg

SEQ ID NO: 1287771 - RNA, 21 nt, Human
cccggcucuccagguccccug

SEQ ID NO: 1287772 - RNA, 19 nt, Human
cccuagcccggccugggug

SEQ ID NO: 1287773 - RNA, 21 nt, Human
cccuagcccggccuggguggc

SEQ ID NO: 1287774 - RNA, 19 nt, Human
ccuagcccggccugggugg

SEQ ID NO: 1287775 - RNA, 19 nt, Human
ccucuggcuuuuucuggga

SEQ ID NO: 1287776 - RNA, 18 nt, Human
ccugacgauguccuccuc

SEQ ID NO: 1287777 - RNA, 23 nt, Human
ccugcucacuguccagauguccu

SEQ ID NO: 1287778 - RNA, 20 nt, Human
ccugggcggcaggacccagc

SEQ ID NO: 1287779 - RNA, 22 nt, Human
ccuggguggcagggcccagcuc

SEQ ID NO: 1287780 - RNA, 23 nt, Human
ccuuccauaaagucgcugcagcu

SEQ ID NO: 1287781 - RNA, 22 nt, Human
cgagaugcugcacaugcaccac

SEQ ID NO: 1287782 - RNA, 19 nt, Human
cgaggcgagcaaugggcac

SEQ ID NO: 1287783 - RNA, 22 nt, Human
cgcggagaaagacaauaggcug

SEQ ID NO: 1287784 - RNA, 20 nt, Human
cgcucagcaucaucggugac

SEQ ID NO: 1287785 - RNA, 21 nt, Human
cgcugcagcuucuccauggcc

SEQ ID NO: 1287786 - RNA, 22 nt, Human
cgcugcagcuucuccauggccc

SEQ ID NO: 1287787 - RNA, 20 nt, Human
cggccacuggaccacaggag

SEQ ID NO: 1287788 - RNA, 21 nt, Human
cggccccaaaaucccccaccc

SEQ ID NO: 1287789 - RNA, 24 nt, Human
cggcucuccagguccccugggaug

SEQ ID NO: 1287790 - RNA, 22 nt, Human
cgucucugacacugcccccugg

SEQ ID NO: 1287791 - RNA, 27 nt, Human
cucacuguccagauguccuccuccauc

SEQ ID NO: 1287792 - RNA, 22 nt, Human
cuccuagcccagucccgggggc

SEQ ID NO: 1287793 - RNA, 20 nt, Human
cuccuccaucuccgugcggc

SEQ ID NO: 1287794 - RNA, 23 nt, Human
cuccugggcuacuggggcuccua

SEQ ID NO: 1287795 - RNA, 23 nt, Human
cugcacguagccccagccacccc

SEQ ID NO: 1287796 - RNA, 22 nt, Human
cugcagcuucuccauggccccc

SEQ ID NO: 1287797 - RNA, 23 nt, Human
cuggaccucgguguccccaucug

SEQ ID NO: 1287798 - RNA, 20 nt, Human
cugggcuuccuccugcuggg

SEQ ID NO: 1287799 - RNA, 24 nt, Human
cuggggcuggggccgcuaccucug

SEQ ID NO: 1287800 - RNA, 21 nt, Human
cuuaaguccccucccagaucu

SEQ ID NO: 1287801 - RNA, 18 nt, Human
gaagugugccccauaccc

SEQ ID NO: 1287802 - RNA, 21 nt, Human
gacaauaggcugccucucccc

SEQ ID NO: 1287803 - RNA, 19 nt, Human
gacccagcuccugggcuuc

SEQ ID NO: 1287804 - RNA, 20 nt, Human
gacgaggccacugggugagc

SEQ ID NO: 1287805 - RNA, 18 nt, Human
gagcuucggugcaugggu

SEQ ID NO: 1287806 - RNA, 18 nt, Human
gagugcccugggggcaag

SEQ ID NO: 1287807 - RNA, 19 nt, Human
gcagcacacccuuuguucc

SEQ ID NO: 1287808 - RNA, 21 nt, Human
gcccccuggcugauguacuuu

SEQ ID NO: 1287809 - RNA, 23 nt, Human
gcgacagcucugcacguagcccc

SEQ ID NO: 1287810 - RNA, 19 nt, Human
gcggcagcagcggcugcgg

SEQ ID NO: 1287811 - RNA, 21 nt, Human
gcggcaggacccagcuccugg

SEQ ID NO: 1287812 - RNA, 22 nt, Human
gcggcucccggggcucccccgc

SEQ ID NO: 1287813 - RNA, 20 nt, Human
gcuaccucuggcuuuuucuu

SEQ ID NO: 1287814 - RNA, 20 nt, Human
gcuccgcgacagcucugcac

SEQ ID NO: 1287815 - RNA, 23 nt, Human
gcugcagcuucuccauggccccc

SEQ ID NO: 1287816 - RNA, 19 nt, Human
gcugcaggggggggggggg

SEQ ID NO: 1287817 - RNA, 18 nt, Human
ggcaaguggcacaccccc

SEQ ID NO: 1287818 - RNA, 18 nt, Human
ggcacuggcuccagcgga

SEQ ID NO: 1287819 - RNA, 19 nt, Human
ggcagggcccagcuccugg

SEQ ID NO: 1287820 - RNA, 22 nt, Human
ggccacugggugagccaggggc

SEQ ID NO: 1287821 - RNA, 20 nt, Human
ggcccggugggucuccccaa

SEQ ID NO: 1287822 - RNA, 22 nt, Human
ggccuggguggcagggcccagc

SEQ ID NO: 1287823 - RNA, 18 nt, Human
ggcggcggcagcagcggc

SEQ ID NO: 1287824 - RNA, 18 nt, Human
ggcucccggggcuccccc

SEQ ID NO: 1287825 - RNA, 25 nt, Human
ggcugcagggggggggggggggggu

SEQ ID NO: 1287826 - RNA, 19 nt, Human
gggcaaguggcacaccccc

SEQ ID NO: 1287827 - RNA, 22 nt, Human
gggcaaguggcacacccccuuc

SEQ ID NO: 1287828 - RNA, 19 nt, Human
gggcacuggcuccagcgga

SEQ ID NO: 1287829 - RNA, 23 nt, Human
gggcuacuggggcuccuagaguc

SEQ ID NO: 1287830 - RNA, 22 nt, Human
ggggagguggaucuuccagucg

SEQ ID NO: 1287831 - RNA, 19 nt, Human
ggggccgcuaccucuggcu

SEQ ID NO: 1287832 - RNA, 21 nt, Human
ggggcuccuagagugggcuca

SEQ ID NO: 1287833 - RNA, 20 nt, Human
ggggcuggggccgcuaccuc

SEQ ID NO: 1287834 - RNA, 18 nt, Human
gggggggggggggggggu

SEQ ID NO: 1287835 - RNA, 25 nt, Human
ggucccaaccuucuucccuguuugc

SEQ ID NO: 1287836 - RNA, 21 nt, Human
guagccccagccaccccgcgc

SEQ ID NO: 1287837 - RNA, 19 nt, Human
guccgcccuuggggaagug

SEQ ID NO: 1287838 - RNA, 23 nt, Human
gucuuuuccucuggaccucggug

SEQ ID NO: 1287839 - RNA, 20 nt, Human
guggcagggaggagcuucgg

SEQ ID NO: 1287840 - RNA, 19 nt, Human
uaagcuccggcaaccgccu

SEQ ID NO: 1287841 - RNA, 25 nt, Human
uaggcugccucucccccggcggcgg

SEQ ID NO: 1287842 - RNA, 22 nt, Human
uaggucuuaaguccccucccag

SEQ ID NO: 1287843 - RNA, 19 nt, Human
ucaaaauuugccaugcccc

SEQ ID NO: 1287844 - RNA, 22 nt, Human
ucagcaggguucugggcaaugg

SEQ ID NO: 1287845 - RNA, 22 nt, Human
ucagguccaccuucuccuucca

SEQ ID NO: 1287846 - RNA, 27 nt, Human
uccagcgcacagucccagaagggcccc

SEQ ID NO: 1287847 - RNA, 22 nt, Human
ucccaggucgcccaaguccagc

SEQ ID NO: 1287848 - RNA, 24 nt, Human
ucccaggucgcccaaguccagcgc

SEQ ID NO: 1287849 - RNA, 22 nt, Human
uccccaaacacagacucacccc

SEQ ID NO: 1287850 - RNA, 23 nt, Human
ucccccgcgggccgagccgagac

SEQ ID NO: 1287851 - RNA, 20 nt, Human
ucccggggcucccccgcggg

SEQ ID NO: 1287852 - RNA, 21 nt, Human
ucccuagcccggccugggugg

SEQ ID NO: 1287853 - RNA, 19 nt, Human
uccggccacuggaccacag

SEQ ID NO: 1287854 - RNA, 21 nt, Human
uccggccacuggaccacagga

SEQ ID NO: 1287855 - RNA, 19 nt, Human
uccgugcggcucccggggc

SEQ ID NO: 1287856 - RNA, 22 nt, Human
uccuagagugggcucaucagca

SEQ ID NO: 1287857 - RNA, 21 nt, Human
uccuccugcuggguccgcccc

SEQ ID NO: 1287858 - RNA, 18 nt, Human
uccugggcggcaggaccc

SEQ ID NO: 1287859 - RNA, 23 nt, Human
uccugggcggcaggacccagcuc

SEQ ID NO: 1287860 - RNA, 21 nt, Human
uccuuguggucgcccacaagc

SEQ ID NO: 1287861 - RNA, 21 nt, Human
ucgcugcagcuucuccauggc

SEQ ID NO: 1287862 - RNA, 23 nt, Human
ucuccccaaacacagacucaccc

SEQ ID NO: 1287863 - RNA, 21 nt, Human
ucucgcugcugggggcggggc

SEQ ID NO: 1287864 - RNA, 21 nt, Human
ugacacugcccccuggcugau

SEQ ID NO: 1287865 - RNA, 23 nt, Human
ugacacugcccccuggcugaugu

SEQ ID NO: 1287866 - RNA, 18 nt, Human
ugacggggggagcuugac

SEQ ID NO: 1287867 - RNA, 20 nt, Human
ugacuccuuugagccauccc

SEQ ID NO: 1287868 - RNA, 18 nt, Human
ugagaaaaggcagugggg

SEQ ID NO: 1287869 - RNA, 20 nt, Human
ugagaaaaggcaguggggag

SEQ ID NO: 1287870 - RNA, 21 nt, Human
ugagaaaaggcaguggggagg

SEQ ID NO: 1287871 - RNA, 23 nt, Human
ugagaaaaggcaguggggaggug

SEQ ID NO: 1287872 - RNA, 23 nt, Human
ugauagucagggucccaccuccu

SEQ ID NO: 1287873 - RNA, 21 nt, Human
ugcaggggggggggggggggg

SEQ ID NO: 1287874 - RNA, 22 nt, Human
ugccagggcagguauccagcuc

SEQ ID NO: 1287875 - RNA, 22 nt, Human
ugcccagaggagugcccugggg

SEQ ID NO: 1287876 - RNA, 25 nt, Human
ugccccgcagcuccugcagguucac

SEQ ID NO: 1287877 - RNA, 21 nt, Human
ugcccugggggcaaguggcac

SEQ ID NO: 1287878 - RNA, 23 nt, Human
ugcccugggggcaaguggcacac

SEQ ID NO: 1287879 - RNA, 20 nt, Human
ugcgucucugacacugcccu

SEQ ID NO: 1287880 - RNA, 21 nt, Human
ugcugggggcggggcuuaagc

SEQ ID NO: 1287881 - RNA, 26 nt, Human
uggauuuccuucagcuacccugaugu

SEQ ID NO: 1287882 - RNA, 24 nt, Human
uggcagggaggagcuucggugcau

SEQ ID NO: 1287883 - RNA, 20 nt, Human
uggcagggcccagcuccugg

SEQ ID NO: 1287884 - RNA, 24 nt, Human
uggccucccggcucuccagguccc

SEQ ID NO: 1287885 - RNA, 23 nt, Human
ugggauguucucgcugcuggggg

SEQ ID NO: 1287886 - RNA, 24 nt, Human
ugggcggcaggacccagcuccugg

SEQ ID NO: 1287887 - RNA, 21 nt, Human
uggggccgcuaccucuggcuu

SEQ ID NO: 1287888 - RNA, 24 nt, Human
uggggcuggggccgcuaccucugg

SEQ ID NO: 1287889 - RNA, 21 nt, Human
ugggugagccaggggcuggca

SEQ ID NO: 1287890 - RNA, 24 nt, Human
uggguggcagggcccagcuccugg

SEQ ID NO: 1287891 - RNA, 24 nt, Human
uucggugcauggguguggccggca

SEQ ID NO: 1287892 - RNA, 24 nt, Human
uucucgcugcugggggcggggcuu

SEQ ID NO: 1287893 - RNA, 18 nt, Human
uucucuacccgcuccuuc

SEQ ID NO: 1287894 - RNA, 24 nt, Human
uugccaugccccuccuuguggucg

SEQ ID NO: 1287895 - RNA, 21 nt, Human
uuugcccacucucagaccccg

SEQ ID NO: 1287896 - RNA, 22 nt, Human
aaagcuuucacaacccccacac

SEQ ID NO: 1287897 - RNA, 21 nt, Human
auccaucacacguaaccccag

SEQ ID NO: 1287898 - RNA, 23 nt, Human
cacaaaaaucaaagucaucacag

SEQ ID NO: 1287899 - RNA, 18 nt, Human
cacacguaaccccaggau

SEQ ID NO: 1287900 - RNA, 24 nt, Human
cacugaaagcuuucacaaccccca

SEQ ID NO: 1287901 - RNA, 26 nt, Human
ccaggaugaauacugggcaccaacuc

SEQ ID NO: 1287902 - RNA, 18 nt, Human
gaagaacuucuuggugga

SEQ ID NO: 1287903 - RNA, 25 nt, Human
gcacugaaagcuuucacaaccggag

SEQ ID NO: 1287904 - RNA, 22 nt, Human
ggcacugaaagcuuucacaacc

SEQ ID NO: 1287905 - RNA, 19 nt, Human
guaaccccaggaugaauac

SEQ ID NO: 1287906 - RNA, 20 nt, Human
guuuuuuggucuugaaacac

SEQ ID NO: 1287907 - RNA, 21 nt, Human
uaggaaacaucugacauccau

SEQ ID NO: 1287908 - RNA, 19 nt, Human
uauuguguuuuuuggucuu

SEQ ID NO: 1287909 - RNA, 19 nt, Human
ucacacguaaccccaggau

SEQ ID NO: 1287910 - RNA, 22 nt, Human
ucugacauccaucacacguaac

SEQ ID NO: 1287911 - RNA, 23 nt, Human
ugaaacacguuucacaaaaauca

SEQ ID NO: 1287912 - RNA, 23 nt, Human
ugacagaggcuuugacccgcacu

SEQ ID NO: 1287913 - RNA, 19 nt, Human
ugagaagaacuucuuggug

SEQ ID NO: 1287914 - RNA, 22 nt, Human
ugagaagaacuucuugguggag

SEQ ID NO: 1287915 - RNA, 23 nt, Human
ugagaagaacuucuugguggagg

SEQ ID NO: 1287916 - RNA, 19 nt, Human
ugagacugcuggggaaagu

SEQ ID NO: 1287917 - RNA, 25 nt, Human
uucacaacccccacacucugaugag

SEQ ID NO: 1287918 - RNA, 20 nt, Human
uucauuuauucugccaaaug

SEQ ID NO: 1287919 - RNA, 21 nt, Human
uuggcacugaaagcuuucaca

SEQ ID NO: 1287920 - RNA, 22 nt, Human
uugguguagugacagaggcuuu

SEQ ID NO: 1287921 - RNA, 23 nt, Human
uuuugguguagugacagaggcuu

SEQ ID NO: 1287922 - RNA, 21 nt, Human
uuuuuggucuugaaacacguu

SEQ ID NO: 1287923 - RNA, 23 nt, Human
accccgggacccgcgccccaggg

SEQ ID NO: 1287924 - RNA, 19 nt, Human
caaccucuccccacccccc

SEQ ID NO: 1287925 - RNA, 22 nt, Human
caaccucuccccaccccccacc

SEQ ID NO: 1287926 - RNA, 21 nt, Human
caccccccaccaccucccgcu

SEQ ID NO: 1287927 - RNA, 22 nt, Human
caccucccgcuccuauuucacc

SEQ ID NO: 1287928 - RNA, 21 nt, Human
caccuggacuccuggccaauc

SEQ ID NO: 1287929 - RNA, 21 nt, Human
caggacccagcccugcccugu

SEQ ID NO: 1287930 - RNA, 20 nt, Human
ccaccccccaccaccucccg

SEQ ID NO: 1287931 - RNA, 21 nt, Human
ccaccccgggacccgcgcccc

SEQ ID NO: 1287932 - RNA, 23 nt, Human
ccauccgcccccaccccgggacc

SEQ ID NO: 1287933 - RNA, 26 nt, Human
ccaugcaucgccccucccccguuccc

SEQ ID NO: 1287934 - RNA, 21 nt, Human
cccaccccccaccacccgagg

SEQ ID NO: 1287935 - RNA, 25 nt, Human
cccaccccccaccaccucccgcucc

SEQ ID NO: 1287936 - RNA, 21 nt, Human
cccagcccugcccuguccccc

SEQ ID NO: 1287937 - RNA, 21 nt, Human
cccaugucugcccaggaccca

SEQ ID NO: 1287938 - RNA, 19 nt, Human
ccccaccaccucccgcucc

SEQ ID NO: 1287939 - RNA, 19 nt, Human
ccccaccaccucccgcucc

SEQ ID NO: 1287940 - RNA, 21 nt, Human
ccccaccccccaccaccuccc

SEQ ID NO: 1287941 - RNA, 22 nt, Human
ccccauugucccugggggcggg

SEQ ID NO: 1287942 - RNA, 23 nt, Human
cccccauugucccugggggcggg

SEQ ID NO: 1287943 - RNA, 19 nt, Human
ccccgggccucucugcggg

SEQ ID NO: 1287944 - RNA, 19 nt, Human
cccgggacccgcgccccag

SEQ ID NO: 1287945 - RNA, 19 nt, Human
cccugcgcgcugcccccuc

SEQ ID NO: 1287946 - RNA, 22 nt, Human
cccugcgcgcugcccccuccuc

SEQ ID NO: 1287947 - RNA, 18 nt, Human
cccugggggcggguccca

SEQ ID NO: 1287948 - RNA, 23 nt, Human
ccucccgcuccuauuucaccguc

SEQ ID NO: 1287949 - RNA, 22 nt, Human
ccuccuguccccaccccauguc

SEQ ID NO: 1287950 - RNA, 25 nt, Human
ccuccuguccccaccccaugucugc

SEQ ID NO: 1287951 - RNA, 22 nt, Human
ccuguccccaccccaugucugc

SEQ ID NO: 1287952 - RNA, 22 nt, Human
ccugucccccauugucccuggg

SEQ ID NO: 1287953 - RNA, 21 nt, Human
cggccccugcgcgcugccccc

SEQ ID NO: 1287954 - RNA, 23 nt, Human
cgggcaccuggacuccuggccaa

SEQ ID NO: 1287955 - RNA, 22 nt, Human
cucaaccucuccccacccccca

SEQ ID NO: 1287956 - RNA, 22 nt, Human
cuccuggccaaucaaggcuugc

SEQ ID NO: 1287957 - RNA, 22 nt, Human
cucuccccaccccccaccaccu

SEQ ID NO: 1287958 - RNA, 18 nt, Human
cugcgcgcugcccccucc

SEQ ID NO: 1287959 - RNA, 21 nt, Human
cuuccggagcugaacucggcc

SEQ ID NO: 1287960 - RNA, 22 nt, Human
gaacucggccccugcgcgcugc

SEQ ID NO: 1287961 - RNA, 23 nt, Human
gaucccauccgcccccaccccgg

SEQ ID NO: 1287962 - RNA, 20 nt, Human
gcagccccgggccucucugc

SEQ ID NO: 1287963 - RNA, 21 nt, Human
gcccaggacccagcccugccc

SEQ ID NO: 1287964 - RNA, 23 nt, Human
gccccgggccucucugcgggccu

SEQ ID NO: 1287965 - RNA, 21 nt, Human
gcgggccuaggcuucugccca

SEQ ID NO: 1287966 - RNA, 19 nt, Human
ggagcugaacucggccccu

SEQ ID NO: 1287967 - RNA, 20 nt, Human
gucccccauugucccugggg

SEQ ID NO: 1287968 - RNA, 21 nt, Human
uccccaccccccaccaccucc

SEQ ID NO: 1287969 - RNA, 19 nt, Human
ucccugggggcggguccca

SEQ ID NO: 1287970 - RNA, 23 nt, Human
ucccugggggcgggucccagccu

SEQ ID NO: 1287971 - RNA, 21 nt, Human
uccggagcugaacucggcccc

SEQ ID NO: 1287972 - RNA, 21 nt, Human
uccucaaccucuccccacccc

SEQ ID NO: 1287973 - RNA, 22 nt, Human
ucgccccucccccguucccucc

SEQ ID NO: 1287974 - RNA, 19 nt, Human
ucuccucaaccucucccca

SEQ ID NO: 1287975 - RNA, 19 nt, Human
ugaacucggccccugcgcg

SEQ ID NO: 1287976 - RNA, 23 nt, Human
ugcucagggcgaggggcugaggu

SEQ ID NO: 1287977 - RNA, 20 nt, Human
uucaccgucccgaucccauc

SEQ ID NO: 1287978 - RNA, 18 nt, Human
aagaugccucugugagag

SEQ ID NO: 1287979 - RNA, 24 nt, Human
acccugaaauuccuccuuggucac

SEQ ID NO: 1287980 - RNA, 21 nt, Human
agcgcagaggagaaucugugu

SEQ ID NO: 1287981 - RNA, 27 nt, Human
auccagaacaacgccauauggaccccu

SEQ ID NO: 1287982 - RNA, 26 nt, Human
cagagggcaccuguauaccuucaaac

SEQ ID NO: 1287983 - RNA, 22 nt, Human
cagcagcagccugcucuucuuu

SEQ ID NO: 1287984 - RNA, 23 nt, Human
cagcagcagccugcucuucuuuu

SEQ ID NO: 1287985 - RNA, 24 nt, Human
cauucagugguugcuccuacccau

SEQ ID NO: 1287986 - RNA, 24 nt, Human
ccacaucaaacccacucagugagc

SEQ ID NO: 1287987 - RNA, 24 nt, Human
ccagcauccaccacaucaaaccca

SEQ ID NO: 1287988 - RNA, 18 nt, Human
ccuccuuggucacugccu

SEQ ID NO: 1287989 - RNA, 24 nt, Human
gaaauuccuccuuggucacugccu

SEQ ID NO: 1287990 - RNA, 20 nt, Human
gaacucaggagcuggagcag

SEQ ID NO: 1287991 - RNA, 18 nt, Human
gaagcagagaucaggcau

SEQ ID NO: 1287992 - RNA, 19 nt, Human
uaagagcccaugcaagaac

SEQ ID NO: 1287993 - RNA, 22 nt, Human
uaagaugccucugugagaggcu

SEQ ID NO: 1287994 - RNA, 23 nt, Human
uagcgcagaggagaaucuguguu

SEQ ID NO: 1287995 - RNA, 25 nt, Human
uauaccuucaaaccagucugcaacc

SEQ ID NO: 1287996 - RNA, 23 nt, Human
uccauuguucaguaggaacugcu

SEQ ID NO: 1287997 - RNA, 20 nt, Human
ucccgagccagcauccacca

SEQ ID NO: 1287998 - RNA, 26 nt, Human
ucccuuguuguugcacgggauggcaa

SEQ ID NO: 1287999 - RNA, 24 nt, Human
ucccuuugaguuaacgacgggaau

SEQ ID NO: 1288000 - RNA, 19 nt, Human
ucucuguagaagcagagau

SEQ ID NO: 1288001 - RNA, 24 nt, Human
ucucuucaggaucucuguagaagc

SEQ ID NO: 1288002 - RNA, 25 nt, Human
ucugcaaccucaggcugaguagcag

SEQ ID NO: 1288003 - RNA, 24 nt, Human
ugaauaggcacagagggcaccugu

SEQ ID NO: 1288004 - RNA, 25 nt, Human
ugaauaggcacagagggcaccugua

SEQ ID NO: 1288005 - RNA, 20 nt, Human
ugagcagugggagcugcaga

SEQ ID NO: 1288006 - RNA, 24 nt, Human
ugagcagugggagcugcagaccag

SEQ ID NO: 1288007 - RNA, 22 nt, Human
ugcacaguacuucccgagccag

SEQ ID NO: 1288008 - RNA, 20 nt, Human
ugcuuaagagcccaugcaag

SEQ ID NO: 1288009 - RNA, 23 nt, Human
uggagcagaccauucacccugaa

SEQ ID NO: 1288010 - RNA, 23 nt, Human
uggcaggcugagugcuccauugu

SEQ ID NO: 1288011 - RNA, 21 nt, Human
uguccacauagcgcagaggag

SEQ ID NO: 1288012 - RNA, 24 nt, Human
uuccuccuuggucacugccuuuuc

SEQ ID NO: 1288013 - RNA, 21 nt, Human
aaagaggcacucagggguggg

SEQ ID NO: 1288014 - RNA, 19 nt, Human
aacaugaugaaaccccauc

SEQ ID NO: 1288015 - RNA, 20 nt, Human
aacaugaugaaaccccaucu

SEQ ID NO: 1288016 - RNA, 21 nt, Human
aacaugaugaaaccccaucuc

SEQ ID NO: 1288017 - RNA, 21 nt, Human
aacaugaugaaaccccaucuc

SEQ ID NO: 1288018 - RNA, 22 nt, Human
aaccacaagcauggaucagccc

SEQ ID NO: 1288019 - RNA, 25 nt, Human
aacucagcucucccuaccucuccua

SEQ ID NO: 1288020 - RNA, 20 nt, Human
aagcagggcccgggacugcg

SEQ ID NO: 1288021 - RNA, 18 nt, Human
aagcaggguauucacgca

SEQ ID NO: 1288022 - RNA, 24 nt, Human
aagggccaggugcgguggcucaug

SEQ ID NO: 1288023 - RNA, 18 nt, Human
aaggggcuuagagacaaa

SEQ ID NO: 1288024 - RNA, 24 nt, Human
aaggucucagcuccaggucaucgg

SEQ ID NO: 1288025 - RNA, 18 nt, Human
aaguauuuagcacuaaac

SEQ ID NO: 1288026 - RNA, 23 nt, Human
aaucauaucacagggguauugag

SEQ ID NO: 1288027 - RNA, 21 nt, Human
acaaaaaacagacuuuauuga

SEQ ID NO: 1288028 - RNA, 24 nt, Human
acagagcgagacuccaucucaaaa

SEQ ID NO: 1288029 - RNA, 21 nt, Human
accagcucucugcugccggcu

SEQ ID NO: 1288030 - RNA, 18 nt, Human
acccagagaccugggaaa

SEQ ID NO: 1288031 - RNA, 18 nt, Human
accccaucucuacuaaaa

SEQ ID NO: 1288032 - RNA, 18 nt, Human
acugcauuccagccuggg

SEQ ID NO: 1288033 - RNA, 18 nt, Human
acugcauuccagccuggg

SEQ ID NO: 1288034 - RNA, 19 nt, Human
acugcauuccagccugggc

SEQ ID NO: 1288035 - RNA, 19 nt, Human
acugcauuccagccugggc

SEQ ID NO: 1288036 - RNA, 21 nt, Human
acugcauuccagccugggcga

SEQ ID NO: 1288037 - RNA, 22 nt, Human
acugcauuccagccugggcgac

SEQ ID NO: 1288038 - RNA, 23 nt, Human
acugcauuccagccugggcgaca

SEQ ID NO: 1288039 - RNA, 24 nt, Human
acugcauuccagccugggcgacag

SEQ ID NO: 1288040 - RNA, 26 nt, Human
acugcauuccagccugggcgacagag

SEQ ID NO: 1288041 - RNA, 24 nt, Human
acuugaggucaggaguucgagacc

SEQ ID NO: 1288042 - RNA, 21 nt, Human
agaacucccaagguggcccac

SEQ ID NO: 1288043 - RNA, 23 nt, Human
agacaggcaaggccuuaagucca

SEQ ID NO: 1288044 - RNA, 22 nt, Human
agacggggguugcagugagccg

SEQ ID NO: 1288045 - RNA, 20 nt, Human
agagaccugggaaauggggg

SEQ ID NO: 1288046 - RNA, 24 nt, Human
agaguaggcccaaaaguugggggu

SEQ ID NO: 1288047 - RNA, 18 nt, Human
agcaggcaugguggugcu

SEQ ID NO: 1288048 - RNA, 19 nt, Human
agcaguagcuugggguggu

SEQ ID NO: 1288049 - RNA, 25 nt, Human
agcccaggcugggguacccagagac

SEQ ID NO: 1288050 - RNA, 24 nt, Human
agccuggccaacaugaugaaaccc

SEQ ID NO: 1288051 - RNA, 24 nt, Human
agccugggcgacagagcgagacuc

SEQ ID NO: 1288052 - RNA, 21 nt, Human
agcucccacucgccaggcggc

SEQ ID NO: 1288053 - RNA, 23 nt, Human
aggcacucagggguggggggguc

SEQ ID NO: 1288054 - RNA, 18 nt, Human
aggcaggagauucgcuug

SEQ ID NO: 1288055 - RNA, 24 nt, Human
aggcaggagauucgcuugaacccg

SEQ ID NO: 1288056 - RNA, 18 nt, Human
aggcagguggaucacuug

SEQ ID NO: 1288057 - RNA, 22 nt, Human
aggcagguggaucacuugaggu

SEQ ID NO: 1288058 - RNA, 26 nt, Human
aggcagguggaucacuugaggucagg

SEQ ID NO: 1288059 - RNA, 24 nt, Human
aggcaugguggugcuugccuguaa

SEQ ID NO: 1288060 - RNA, 27 nt, Human
aggcccaaaaguuggggguugcuucga

SEQ ID NO: 1288061 - RNA, 25 nt, Human
aggcggcagcaguagcuuggggugg

SEQ ID NO: 1288062 - RNA, 24 nt, Human
aggcugaggcaggagauucgcuug

SEQ ID NO: 1288063 - RNA, 18 nt, Human
aggggagugcccuccucc

SEQ ID NO: 1288064 - RNA, 28 nt, Human
aggggcaggcuccugaccccccaagggg

SEQ ID NO: 1288065 - RNA, 22 nt, Human
aggggucugggagcccacaggg

SEQ ID NO: 1288066 - RNA, 24 nt, Human
aggugcgguggcucaugccuguaa

SEQ ID NO: 1288067 - RNA, 22 nt, Human
agguggaucacuugaggucagg

SEQ ID NO: 1288068 - RNA, 19 nt, Human
agucagaacucagcucucc

SEQ ID NO: 1288069 - RNA, 21 nt, Human
agucaugugcaugaguaugua

SEQ ID NO: 1288070 - RNA, 24 nt, Human
aucuugcuacugcauuccagccug

SEQ ID NO: 1288071 - RNA, 19 nt, Human
augccuguaaucccagcac

SEQ ID NO: 1288072 - RNA, 22 nt, Human
augggggcagagaguucugcac

SEQ ID NO: 1288073 - RNA, 24 nt, Human
caaaccggaaaagcacagcaucca

SEQ ID NO: 1288074 - RNA, 24 nt, Human
caaaccggaaaagcacagcaucca

SEQ ID NO: 1288075 - RNA, 24 nt, Human
caaggcagguggaucacuugaggu

SEQ ID NO: 1288076 - RNA, 26 nt, Human
caaggcagguggaucacuugagguca

SEQ ID NO: 1288077 - RNA, 22 nt, Human
caaggggcaggcuccugacccg

SEQ ID NO: 1288078 - RNA, 21 nt, Human
cacacacugugggcaccugug

SEQ ID NO: 1288079 - RNA, 19 nt, Human
cacagcauccaagcagggu

SEQ ID NO: 1288080 - RNA, 19 nt, Human
cacagggcauagacagggu

SEQ ID NO: 1288081 - RNA, 19 nt, Human
caccacguaccgccccgcc

SEQ ID NO: 1288082 - RNA, 21 nt, Human
caccacguaccgccccgccgg

SEQ ID NO: 1288083 - RNA, 19 nt, Human
cacgaugcggcugcgagag

SEQ ID NO: 1288084 - RNA, 23 nt, Human
cacuugaggucaggaguucgaga

SEQ ID NO: 1288085 - RNA, 19 nt, Human
cagaguaggcccaaaaguu

SEQ ID NO: 1288086 - RNA, 18 nt, Human
cagcacacacacuguggg

SEQ ID NO: 1288087 - RNA, 24 nt, Human
cagcacuuugaaaggccaaggcag

SEQ ID NO: 1288088 - RNA, 24 nt, Human
cagccaccaccacguaccgccccg

SEQ ID NO: 1288089 - RNA, 20 nt, Human
cagcccccagccggaccccc

SEQ ID NO: 1288090 - RNA, 24 nt, Human
cagcuacucggaaggcugaggcag

SEQ ID NO: 1288091 - RNA, 19 nt, Human
caggggucugggagcccac

SEQ ID NO: 1288092 - RNA, 24 nt, Human
cagguggaucacuugaggucagga

SEQ ID NO: 1288093 - RNA, 24 nt, Human
caucccuucagccuccugcauccu

SEQ ID NO: 1288094 - RNA, 20 nt, Human
caucucaaaaacaaacaaac

SEQ ID NO: 1288095 - RNA, 23 nt, Human
cauuccagccugggcgacagagc

SEQ ID NO: 1288096 - RNA, 19 nt, Human
ccaggcggcagcaguagcu

SEQ ID NO: 1288097 - RNA, 23 nt, Human
ccaguccagguaacaugggggca

SEQ ID NO: 1288098 - RNA, 22 nt, Human
cccaggcugggguacccagaga

SEQ ID NO: 1288099 - RNA, 23 nt, Human
ccccagggaauuucuuagaaccc

SEQ ID NO: 1288100 - RNA, 23 nt, Human
cccccagccggacccccugaggc

SEQ ID NO: 1288101 - RNA, 23 nt, Human
cccccagguuccuuugaugggcc

SEQ ID NO: 1288102 - RNA, 21 nt, Human
cccgggagacggggguugcag

SEQ ID NO: 1288103 - RNA, 18 nt, Human
ccgcagcacacacacugu

SEQ ID NO: 1288104 - RNA, 22 nt, Human
ccggaggcgugcacgcucgugc

SEQ ID NO: 1288105 - RNA, 23 nt, Human
ccuaccucuccuagccucaauuc

SEQ ID NO: 1288106 - RNA, 25 nt, Human
ccuccucguaagcagggcccgggac

SEQ ID NO: 1288107 - RNA, 19 nt, Human
ccuccugcauccuccccca

SEQ ID NO: 1288108 - RNA, 23 nt, Human
ccugacccggaaagcuccuuggc

SEQ ID NO: 1288109 - RNA, 18 nt, Human
ccugcauccucccccagg

SEQ ID NO: 1288110 - RNA, 18 nt, Human
ccugcgauggggaugggg

SEQ ID NO: 1288111 - RNA, 21 nt, Human
ccugcgauggggauggggaag

SEQ ID NO: 1288112 - RNA, 24 nt, Human
ccuggccaacaugaugaaacccca

SEQ ID NO: 1288113 - RNA, 22 nt, Human
ccugggcgacagagcgagacuc

SEQ ID NO: 1288114 - RNA, 20 nt, Human
ccuguaaucccagcacuuug

SEQ ID NO: 1288115 - RNA, 19 nt, Human
ccuguaaucccagcuacuc

SEQ ID NO: 1288116 - RNA, 21 nt, Human
ccuguaaucccagcuacucgg

SEQ ID NO: 1288117 - RNA, 22 nt, Human
ccugugcccggggucccagggc

SEQ ID NO: 1288118 - RNA, 21 nt, Human
ccuucugcuauauucacaguc

SEQ ID NO: 1288119 - RNA, 18 nt, Human
cgaagcccucucucccaa

SEQ ID NO: 1288120 - RNA, 18 nt, Human
cgaccagcucucugcugc

SEQ ID NO: 1288121 - RNA, 21 nt, Human
cgagaccagccuggccaacau

SEQ ID NO: 1288122 - RNA, 23 nt, Human
cgagagggcaccagacgcuggua

SEQ ID NO: 1288123 - RNA, 23 nt, Human
cgcaggggagugcccuccuccuc

SEQ ID NO: 1288124 - RNA, 22 nt, Human
cgccccgccgggaaauagccag

SEQ ID NO: 1288125 - RNA, 24 nt, Human
cgcccgaagcccucucucccaagg

SEQ ID NO: 1288126 - RNA, 20 nt, Human
cggaaggcugaggcaggaga

SEQ ID NO: 1288127 - RNA, 19 nt, Human
cggccugccgggcuguccu

SEQ ID NO: 1288128 - RNA, 24 nt, Human
cgggagacggggguugcagugagc

SEQ ID NO: 1288129 - RNA, 20 nt, Human
cuacugcauuccagccuggg

SEQ ID NO: 1288130 - RNA, 21 nt, Human
cuacugcauuccagccugggc

SEQ ID NO: 1288131 - RNA, 24 nt, Human
cuacugcauuccagccugggcgac

SEQ ID NO: 1288132 - RNA, 21 nt, Human
cucagccaccaccacguaccg

SEQ ID NO: 1288133 - RNA, 24 nt, Human
cucaugccuguaaucccagcacuu

SEQ ID NO: 1288134 - RNA, 19 nt, Human
cuccagcaauagugggaca

SEQ ID NO: 1288135 - RNA, 18 nt, Human
cuccaggucaucggccug

SEQ ID NO: 1288136 - RNA, 26 nt, Human
cucccccagcccaggcugggguaccc

SEQ ID NO: 1288137 - RNA, 23 nt, Human
cugcuguccacuaaccacaagca

SEQ ID NO: 1288138 - RNA, 18 nt, Human
cugugcccggggucccag

SEQ ID NO: 1288139 - RNA, 21 nt, Human
cuuaaguccaguaggccaaac

SEQ ID NO: 1288140 - RNA, 20 nt, Human
cuuagagacaaaccggaaaa

SEQ ID NO: 1288141 - RNA, 19 nt, Human
gaaagaggcacucaggggu

SEQ ID NO: 1288142 - RNA, 26 nt, Human
gaaccagagcacagaguguuggagaa

SEQ ID NO: 1288143 - RNA, 20 nt, Human
gaagcugaaagaggcacuca

SEQ ID NO: 1288144 - RNA, 21 nt, Human
gacccggaaagcuccuuggcg

SEQ ID NO: 1288145 - RNA, 28 nt, Human
gagcacagugagagaaaugccgguaccc

SEQ ID NO: 1288146 - RNA, 24 nt, Human
gaucacuugaggucaggaguucga

SEQ ID NO: 1288147 - RNA, 24 nt, Human
gcauuccagccugggcgacagagc

SEQ ID NO: 1288148 - RNA, 24 nt, Human
gccaacaugaugaaaccccaucuc

SEQ ID NO: 1288149 - RNA, 19 nt, Human
gcccgaagcccucucuccc

SEQ ID NO: 1288150 - RNA, 20 nt, Human
gcggcagcaguagcuugggg

SEQ ID NO: 1288151 - RNA, 20 nt, Human
gcggcagcaguagcuugggg

SEQ ID NO: 1288152 - RNA, 22 nt, Human
gcuacugcauuccagccugggc

SEQ ID NO: 1288153 - RNA, 24 nt, Human
gcuacugcauuccagccugggcga

SEQ ID NO: 1288154 - RNA, 18 nt, Human
gcucucagccaccaccac

SEQ ID NO: 1288155 - RNA, 22 nt, Human
ggaaaagcacagcauccaagca

SEQ ID NO: 1288156 - RNA, 22 nt, Human
ggaucacuugaggucaggaguu

SEQ ID NO: 1288157 - RNA, 18 nt, Human
ggccaggugcgguggcuc

SEQ ID NO: 1288158 - RNA, 19 nt, Human
ggccugccgggcuguccuu

SEQ ID NO: 1288159 - RNA, 25 nt, Human
gggccaggggcaguuccccagggaa

SEQ ID NO: 1288160 - RNA, 18 nt, Human
gggcccgggacugcgcgg

SEQ ID NO: 1288161 - RNA, 19 nt, Human
gggguggugggcgaccagc

SEQ ID NO: 1288162 - RNA, 22 nt, Human
gggguugcagugagccgaaauc

SEQ ID NO: 1288163 - RNA, 21 nt, Human
ggguggugggcgaccagcucu

SEQ ID NO: 1288164 - RNA, 23 nt, Human
gguggcucaugccuguaauccca

SEQ ID NO: 1288165 - RNA, 24 nt, Human
gguggcucaugccuguaaucccag

SEQ ID NO: 1288166 - RNA, 24 nt, Human
gguggugcuugccuguaaucccag

SEQ ID NO: 1288167 - RNA, 19 nt, Human
gugcaucccuucagccucc

SEQ ID NO: 1288168 - RNA, 24 nt, Human
guugcagugagccgaaaucuugcu

SEQ ID NO: 1288169 - RNA, 21 nt, Human
uaaaaaaaaaauaauaaaagg

SEQ ID NO: 1288170 - RNA, 18 nt, Human
uaagagcacagugagaga

SEQ ID NO: 1288171 - RNA, 23 nt, Human
uaagagcacagugagagaaaugc

SEQ ID NO: 1288172 - RNA, 19 nt, Human
uaccauguccagccuccag

SEQ ID NO: 1288173 - RNA, 22 nt, Human
uacugcauuccagccugggcga

SEQ ID NO: 1288174 - RNA, 23 nt, Human
uacugcauuccagccugggcgac

SEQ ID NO: 1288175 - RNA, 24 nt, Human
uacugcauuccagccugggcgaca

SEQ ID NO: 1288176 - RNA, 22 nt, Human
uagcaagacaauacaccaccgg

SEQ ID NO: 1288177 - RNA, 24 nt, Human
uagcaagacaauacaccaccggga

SEQ ID NO: 1288178 - RNA, 19 nt, Human
uagccaggcggcagcagua

SEQ ID NO: 1288179 - RNA, 21 nt, Human
uagcgcaggggagugcccucc

SEQ ID NO: 1288180 - RNA, 20 nt, Human
uagcugaggacacagccacu

SEQ ID NO: 1288181 - RNA, 18 nt, Human
uaggcccaaaaguugggg

SEQ ID NO: 1288182 - RNA, 23 nt, Human
uagggggucaggaaaauagcagg

SEQ ID NO: 1288183 - RNA, 20 nt, Human
ucacuugaggucaggaguuc

SEQ ID NO: 1288184 - RNA, 21 nt, Human
ucagaacucagcucucccuac

SEQ ID NO: 1288185 - RNA, 19 nt, Human
ucagccuccugcauccucc

SEQ ID NO: 1288186 - RNA, 18 nt, Human
ucagcucucccuaccucu

SEQ ID NO: 1288187 - RNA, 22 nt, Human
ucagcucucccuaccucuccua

SEQ ID NO: 1288188 - RNA, 22 nt, Human
ucaugccuguaaucccagcacu

SEQ ID NO: 1288189 - RNA, 23 nt, Human
uccacauauauaaauccuuaggu

SEQ ID NO: 1288190 - RNA, 22 nt, Human
uccagccuccagcaauaguggg

SEQ ID NO: 1288191 - RNA, 21 nt, Human
uccagccugggcgacagagcg

SEQ ID NO: 1288192 - RNA, 23 nt, Human
uccagccugggcgacagagcgag

SEQ ID NO: 1288193 - RNA, 24 nt, Human
uccagccugggcgacagagcgaga

SEQ ID NO: 1288194 - RNA, 20 nt, Human
ucccaaggggcaggcuccug

SEQ ID NO: 1288195 - RNA, 18 nt, Human
ucccagggcucgcccgaa

SEQ ID NO: 1288196 - RNA, 21 nt, Human
ucccuucagccuccugcaucc

SEQ ID NO: 1288197 - RNA, 20 nt, Human
uccuuaggucagggcuucug

SEQ ID NO: 1288198 - RNA, 23 nt, Human
ucgcuugaacccgggagacgggg

SEQ ID NO: 1288199 - RNA, 20 nt, Human
ucucccccagcccaggcugg

SEQ ID NO: 1288200 - RNA, 23 nt, Human
ucucccccagcccaggcuggggu

SEQ ID NO: 1288201 - RNA, 19 nt, Human
ucuccuagccucaauucag

SEQ ID NO: 1288202 - RNA, 20 nt, Human
ucucuacuaaaaauaaaaaa

SEQ ID NO: 1288203 - RNA, 24 nt, Human
ucucugcugccggcugggacccag

SEQ ID NO: 1288204 - RNA, 24 nt, Human
ucugcugccggcugggaccggggc

SEQ ID NO: 1288205 - RNA, 20 nt, Human
ucuguagcugaggacacagc

SEQ ID NO: 1288206 - RNA, 19 nt, Human
ugaaaccccaucucuacua

SEQ ID NO: 1288207 - RNA, 24 nt, Human
ugaaaggccaaggcagguggauca

SEQ ID NO: 1288208 - RNA, 23 nt, Human
ugacccggaaagcuccuuggcgg

SEQ ID NO: 1288209 - RNA, 21 nt, Human
ugacucaaagcucaggggucu

SEQ ID NO: 1288210 - RNA, 18 nt, Human
ugagaggccagggaaacc

SEQ ID NO: 1288211 - RNA, 18 nt, Human
ugagaugcccagagguag

SEQ ID NO: 1288212 - RNA, 24 nt, Human
ugaggcaggagauucgcuugaacc

SEQ ID NO: 1288213 - RNA, 25 nt, Human
ugaggcaggagauucgcuugaaccc

SEQ ID NO: 1288214 - RNA, 18 nt, Human
ugaggcuacaaaccguga

SEQ ID NO: 1288215 - RNA, 19 nt, Human
ugaugccacugacucaaag

SEQ ID NO: 1288216 - RNA, 20 nt, Human
ugaugccacugacucaaagc

SEQ ID NO: 1288217 - RNA, 18 nt, Human
ugcacaggugaagucaga

SEQ ID NO: 1288218 - RNA, 21 nt, Human
ugcacgcucgugccaccacuu

SEQ ID NO: 1288219 - RNA, 23 nt, Human
ugcaucccuucagccuccugcau

SEQ ID NO: 1288220 - RNA, 23 nt, Human
ugcccuggagaaaggggcuuaga

SEQ ID NO: 1288221 - RNA, 18 nt, Human
ugccgggcuguccuucag

SEQ ID NO: 1288222 - RNA, 23 nt, Human
ugccuguaaucccagcacuuuga

SEQ ID NO: 1288223 - RNA, 23 nt, Human
ugccuguaaucccagcuacucgg

SEQ ID NO: 1288224 - RNA, 20 nt, Human
ugcucagccgucuccuggcu

SEQ ID NO: 1288225 - RNA, 24 nt, Human
uggaucacuugaggucaggaguuc

SEQ ID NO: 1288226 - RNA, 27 nt, Human
uggaucacuugaggucaggaguucgag

SEQ ID NO: 1288227 - RNA, 21 nt, Human
uggcucaguacaaggcacucu

SEQ ID NO: 1288228 - RNA, 22 nt, Human
uggcucaugccuguaaucccag

SEQ ID NO: 1288229 - RNA, 24 nt, Human
uggcucaugccuguaaucccagca

SEQ ID NO: 1288230 - RNA, 19 nt, Human
ugggaaaugggggagaguc

SEQ ID NO: 1288231 - RNA, 22 nt, Human
ugggaaaugggggagagucaug

SEQ ID NO: 1288232 - RNA, 20 nt, Human
uggggaagcugaaagaggca

SEQ ID NO: 1288233 - RNA, 22 nt, Human
uggugggcgaccagcucucugc

SEQ ID NO: 1288234 - RNA, 24 nt, Human
ugguggugcuugccuguaauccca

SEQ ID NO: 1288235 - RNA, 28 nt, Human
ugguuuuugggacuaugaucaguacacu

SEQ ID NO: 1288236 - RNA, 24 nt, Human
ugucuuauauaaggagauagaggc

SEQ ID NO: 1288237 - RNA, 25 nt, Human
ugugccucuucuaggucagacacca

SEQ ID NO: 1288238 - RNA, 21 nt, Human
uguuggagaacucccaaggug

SEQ ID NO: 1288239 - RNA, 21 nt, Human
uuagaagggccaggugcggug

SEQ ID NO: 1288240 - RNA, 18 nt, Human
uugcagugagccgaaauc

SEQ ID NO: 1288241 - RNA, 19 nt, Human
uugcagugagccgaaaucu

SEQ ID NO: 1288242 - RNA, 18 nt, Human
uugcugagcccccggccu

SEQ ID NO: 1288243 - RNA, 21 nt, Human
uugggguggugggcgaccagc

SEQ ID NO: 1288244 - RNA, 18 nt, Human
aaaaggccccagcuguga

SEQ ID NO: 1288245 - RNA, 26 nt, Human
aaaaggccccagcugugaugaagucc

SEQ ID NO: 1288246 - RNA, 21 nt, Human
aagugacacaaaaggccccag

SEQ ID NO: 1288247 - RNA, 21 nt, Human
aauggcagacaucaggaagga

SEQ ID NO: 1288248 - RNA, 23 nt, Human
acucccugggaagacccacccaa

SEQ ID NO: 1288249 - RNA, 18 nt, Human
agacuguuuccuacuauc

SEQ ID NO: 1288250 - RNA, 20 nt, Human
aucugaagugacacaaaagg

SEQ ID NO: 1288251 - RNA, 27 nt, Human
augaagcagaucacuggggcugaccuu

SEQ ID NO: 1288252 - RNA, 18 nt, Human
auggauuaggcuucugga

SEQ ID NO: 1288253 - RNA, 23 nt, Human
cacaaaaggccccagcugugaug

SEQ ID NO: 1288254 - RNA, 20 nt, Human
cacguuagaaacagaucuaa

SEQ ID NO: 1288255 - RNA, 23 nt, Human
caggguauagaaugaaaggcagg

SEQ ID NO: 1288256 - RNA, 20 nt, Human
caguaccaccggcccagagc

SEQ ID NO: 1288257 - RNA, 23 nt, Human
caucaggaaggaggagaggaacc

SEQ ID NO: 1288258 - RNA, 20 nt, Human
ccacccaaaguccuggcuau

SEQ ID NO: 1288259 - RNA, 23 nt, Human
ccuacucccugggaagacccacc

SEQ ID NO: 1288260 - RNA, 24 nt, Human
cugggaagacccacccaaaguccu

SEQ ID NO: 1288261 - RNA, 23 nt, Human
gaagcagaucacuggggcugacc

SEQ ID NO: 1288262 - RNA, 23 nt, Human
gcaggagauaaaauugcacuucu

SEQ ID NO: 1288263 - RNA, 18 nt, Human
ggagaggaaccauuggug

SEQ ID NO: 1288264 - RNA, 18 nt, Human
guaccaccggcccagagc

SEQ ID NO: 1288265 - RNA, 22 nt, Human
gucagggucaccaaagugugag

SEQ ID NO: 1288266 - RNA, 21 nt, Human
uagaaugaaaggcaggagaua

SEQ ID NO: 1288267 - RNA, 25 nt, Human
uaguggcaccagcauccagacuguu

SEQ ID NO: 1288268 - RNA, 24 nt, Human
ucacaguugaacacgaugguucag

SEQ ID NO: 1288269 - RNA, 23 nt, Human
ucacuggggcugaccuugggugu

SEQ ID NO: 1288270 - RNA, 25 nt, Human
ucacuggggcugaccuuggguguau

SEQ ID NO: 1288271 - RNA, 22 nt, Human
ucaguaccaccggcccagagca

SEQ ID NO: 1288272 - RNA, 19 nt, Human
ucucucacuuccagaacac

SEQ ID NO: 1288273 - RNA, 22 nt, Human
ucucucacuuccagaacaccgg

SEQ ID NO: 1288274 - RNA, 19 nt, Human
ucucugagggugcccuacu

SEQ ID NO: 1288275 - RNA, 20 nt, Human
ucuucaccgcagugcuuaga

SEQ ID NO: 1288276 - RNA, 18 nt, Human
ugaugaaguccaaagcca

SEQ ID NO: 1288277 - RNA, 20 nt, Human
ugccugaaacuucaaugaga

SEQ ID NO: 1288278 - RNA, 19 nt, Human
uucaaugagauccauucca

SEQ ID NO: 1288279 - RNA, 19 nt, Human
uucacaguugaacacgaug

SEQ ID NO: 1288280 - RNA, 23 nt, Human
uucucaauugcucugaacucuag

SEQ ID NO: 1288281 - RNA, 21 nt, Human
aggucuguugcugggccuggg

SEQ ID NO: 1288282 - RNA, 19 nt, Human
aguggaggaucggggucug

SEQ ID NO: 1288283 - RNA, 22 nt, Human
gucuguugcugggccugggcaa

SEQ ID NO: 1288284 - RNA, 18 nt, Human
guggaggaucggggucug

SEQ ID NO: 1288285 - RNA, 21 nt, Human
ucuguugcugggccugggcaa

SEQ ID NO: 1288286 - RNA, 22 nt, Human
ugaguggaggaucggggucugg

SEQ ID NO: 1288287 - RNA, 18 nt, Human
ugcacuggaagcugcaga

SEQ ID NO: 1288288 - RNA, 24 nt, Human
uguggagcucugcacuggaagcug

SEQ ID NO: 1288289 - RNA, 21 nt, Human
uguugcugggccugggcaaug

SEQ ID NO: 1288290 - RNA, 18 nt, Human
uugcugggccugggcaau

SEQ ID NO: 1288291 - RNA, 21 nt, Human
aaaagucauuaaacauaacuc

SEQ ID NO: 1288292 - RNA, 21 nt, Human
aaaucacaaccagugagacug

SEQ ID NO: 1288293 - RNA, 20 nt, Human
aacucagucuuuggauuugc

SEQ ID NO: 1288294 - RNA, 18 nt, Human
aaggggaaacccuggguc

SEQ ID NO: 1288295 - RNA, 30 nt, Human
aauaugauauauaugcauacauauauauag

SEQ ID NO: 1288296 - RNA, 23 nt, Human
accuugggugauguauuucuggc

SEQ ID NO: 1288297 - RNA, 21 nt, Human
acucagcaaucucaccacaga

SEQ ID NO: 1288298 - RNA, 18 nt, Human
acugccaccuugggugau

SEQ ID NO: 1288299 - RNA, 19 nt, Human
agaggcacagaugcugagc

SEQ ID NO: 1288300 - RNA, 21 nt, Human
aggggugcugcaugggcggcg

SEQ ID NO: 1288301 - RNA, 18 nt, Human
aucacaucaccugacuca

SEQ ID NO: 1288302 - RNA, 20 nt, Human
caacacuaaagugaccaaau

SEQ ID NO: 1288303 - RNA, 19 nt, Human
cacagaugcugagccucca

SEQ ID NO: 1288304 - RNA, 22 nt, Human
caccaaaaaguuucauuuucuu

SEQ ID NO: 1288305 - RNA, 18 nt, Human
cagauaagccacuugcca

SEQ ID NO: 1288306 - RNA, 19 nt, Human
cagaugcugagccuccaag

SEQ ID NO: 1288307 - RNA, 18 nt, Human
cagcaggacuuauuuuua

SEQ ID NO: 1288308 - RNA, 22 nt, Human
cagggacagaauucgugggaga

SEQ ID NO: 1288309 - RNA, 23 nt, Human
cauacauauauauauauaauaua

SEQ ID NO: 1288310 - RNA, 20 nt, Human
ccaacacuaaagugaccaaa

SEQ ID NO: 1288311 - RNA, 19 nt, Human
ccgcggcucggaauccagc

SEQ ID NO: 1288312 - RNA, 24 nt, Human
ccucaucaccuucagcuuugccca

SEQ ID NO: 1288313 - RNA, 20 nt, Human
ccuuuccccugucccaacac

SEQ ID NO: 1288314 - RNA, 23 nt, Human
cggcgcuuggacccgcgcucugg

SEQ ID NO: 1288315 - RNA, 19 nt, Human
cgugggagagaaggcagag

SEQ ID NO: 1288316 - RNA, 19 nt, Human
gagacugagaaaaaaauuc

SEQ ID NO: 1288317 - RNA, 18 nt, Human
gagaggcacagaugcuga

SEQ ID NO: 1288318 - RNA, 21 nt, Human
gcaaagccagcgcgcuccgcg

SEQ ID NO: 1288319 - RNA, 19 nt, Human
gcaaucucaccacagauau

SEQ ID NO: 1288320 - RNA, 19 nt, Human
gcagagaaggguuucuucu

SEQ ID NO: 1288321 - RNA, 18 nt, Human
gcuauaaucacacuaccu

SEQ ID NO: 1288322 - RNA, 21 nt, Human
ggcaggaagggaucuggaggc

SEQ ID NO: 1288323 - RNA, 18 nt, Human
gucuuuggauuugcucuu

SEQ ID NO: 1288324 - RNA, 21 nt, Human
gugagacugagaaaaaaauuc

SEQ ID NO: 1288325 - RNA, 22 nt, Human
uaaaaaauauucacaccaaaaa

SEQ ID NO: 1288326 - RNA, 24 nt, Human
uaaaaucugacaguaguagugcua

SEQ ID NO: 1288327 - RNA, 22 nt, Human
uaaagugaccaaaucacaacca

SEQ ID NO: 1288328 - RNA, 24 nt, Human
uaagccacuugccacucacauuca

SEQ ID NO: 1288329 - RNA, 22 nt, Human
uaaucacacuaccuaacaaaau

SEQ ID NO: 1288330 - RNA, 19 nt, Human
uacagggacagaauucgug

SEQ ID NO: 1288331 - RNA, 21 nt, Human
uacucccgaccgcgcuccagg

SEQ ID NO: 1288332 - RNA, 18 nt, Human
uauauaugcauacauaua

SEQ ID NO: 1288333 - RNA, 22 nt, Human
uauauaugcauacauauauaua

SEQ ID NO: 1288334 - RNA, 19 nt, Human
uauaugcauacauauauau

SEQ ID NO: 1288335 - RNA, 20 nt, Human
uauaugcauacauauauaua

SEQ ID NO: 1288336 - RNA, 24 nt, Human
uauaugcauacauauauauauaua

SEQ ID NO: 1288337 - RNA, 22 nt, Human
uauuucuggaguuuucaacagu

SEQ ID NO: 1288338 - RNA, 26 nt, Human
ucagcaaucucaccacagauauuucc

SEQ ID NO: 1288339 - RNA, 20 nt, Human
uccaaaggaaaaaaguguau

SEQ ID NO: 1288340 - RNA, 23 nt, Human
uccuugcuuuuuacauccagagg

SEQ ID NO: 1288341 - RNA, 19 nt, Human
ucgcuacccucccacuccu

SEQ ID NO: 1288342 - RNA, 21 nt, Human
ucugaagucucugccuucccc

SEQ ID NO: 1288343 - RNA, 24 nt, Human
ucuucuuccucaucaccuucagcu

SEQ ID NO: 1288344 - RNA, 22 nt, Human
ucuuucaucauaaaauguuccu

SEQ ID NO: 1288345 - RNA, 22 nt, Human
ucuuuggauuugcucuuucagc

SEQ ID NO: 1288346 - RNA, 27 nt, Human
ugagaaaaaaauucgagguaauggaga

SEQ ID NO: 1288347 - RNA, 23 nt, Human
ugcgauuuuacucccgaccgcgc

SEQ ID NO: 1288348 - RNA, 19 nt, Human
uggcucgcuacccucccac

SEQ ID NO: 1288349 - RNA, 21 nt, Human
uuccuaguucuucuccaugga

SEQ ID NO: 1288350 - RNA, 21 nt, Human
aaggucccaaaauuccgccag

SEQ ID NO: 1288351 - RNA, 24 nt, Human
aaggucccaaaauuccgccagggg

SEQ ID NO: 1288352 - RNA, 23 nt, Human
agagcucaagacuacaaaaaagu

SEQ ID NO: 1288353 - RNA, 21 nt, Human
aguccgcuuagcgccgcugcc

SEQ ID NO: 1288354 - RNA, 25 nt, Human
ccaaagagcucaagacuacaaaaaa

SEQ ID NO: 1288355 - RNA, 22 nt, Human
ccaccgagaagggaaggcagcc

SEQ ID NO: 1288356 - RNA, 23 nt, Human
cccccaguugacccagaccucug

SEQ ID NO: 1288357 - RNA, 23 nt, Human
cccgcagccgcugggcccaaaga

SEQ ID NO: 1288358 - RNA, 18 nt, Human
ccgcagccgcugggcccc

SEQ ID NO: 1288359 - RNA, 18 nt, Human
ccgcugccgccccccagu

SEQ ID NO: 1288360 - RNA, 23 nt, Human
ccgguggcggcgggguggagagu

SEQ ID NO: 1288361 - RNA, 23 nt, Human
ccuguccuacagugcgcccgcag

SEQ ID NO: 1288362 - RNA, 21 nt, Human
cgccauacaguccgcuuagcg

SEQ ID NO: 1288363 - RNA, 20 nt, Human
cugccgccccccaguugacc

SEQ ID NO: 1288364 - RNA, 23 nt, Human
cugccgccccccaguugacccag

SEQ ID NO: 1288365 - RNA, 22 nt, Human
cuuagcgccgcugccgcccccc

SEQ ID NO: 1288366 - RNA, 25 nt, Human
gaaaggucccaaaauuccgccaggg

SEQ ID NO: 1288367 - RNA, 21 nt, Human
gcgaaaggucccaaaauuccg

SEQ ID NO: 1288368 - RNA, 21 nt, Human
guggcggcgggguggagagug

SEQ ID NO: 1288369 - RNA, 24 nt, Human
guggggggaucuuccuguccuaca

SEQ ID NO: 1288370 - RNA, 19 nt, Human
guuuucuuuuuaauguguu

SEQ ID NO: 1288371 - RNA, 24 nt, Human
uccuacagugcgcccgcagccgcu

SEQ ID NO: 1288372 - RNA, 25 nt, Human
ucgcgaaaggucccaaaauuccgcc

SEQ ID NO: 1288373 - RNA, 21 nt, Human
uggcggcgggguggagagugg

SEQ ID NO: 1288374 - RNA, 22 nt, Human
aagcuuucaguacugucagcac

SEQ ID NO: 1288375 - RNA, 18 nt, Human
aaggagcuaagugacuuc

SEQ ID NO: 1288376 - RNA, 19 nt, Human
acccccacccuccacccca

SEQ ID NO: 1288377 - RNA, 18 nt, Human
acccugaaagcuguggag

SEQ ID NO: 1288378 - RNA, 22 nt, Human
acccugaaagcuguggagcagg

SEQ ID NO: 1288379 - RNA, 28 nt, Human
acccugaaagcuguggagcagggagagu

SEQ ID NO: 1288380 - RNA, 20 nt, Human
auagaguucaucucuaggag

SEQ ID NO: 1288381 - RNA, 19 nt, Human
caccccagaagccauguca

SEQ ID NO: 1288382 - RNA, 22 nt, Human
cacccccacccuccaccccaga

SEQ ID NO: 1288383 - RNA, 19 nt, Human
caccuaaauuaucagcaac

SEQ ID NO: 1288384 - RNA, 24 nt, Human
caugaucccuuccccuccuggggg

SEQ ID NO: 1288385 - RNA, 22 nt, Human
ccaaagcccacagcuccagugc

SEQ ID NO: 1288386 - RNA, 26 nt, Human
ccacagcuccagugccacugcugacc

SEQ ID NO: 1288387 - RNA, 18 nt, Human
cccacagcuccagugcca

SEQ ID NO: 1288388 - RNA, 19 nt, Human
ccccacccuccaccccaga

SEQ ID NO: 1288389 - RNA, 21 nt, Human
ccccagaagccaugucaugcu

SEQ ID NO: 1288390 - RNA, 21 nt, Human
cccugaaagcuguggagcagg

SEQ ID NO: 1288391 - RNA, 23 nt, Human
ccuccacccccacccuccacccc

SEQ ID NO: 1288392 - RNA, 19 nt, Human
cuaaauuaucagcaacucc

SEQ ID NO: 1288393 - RNA, 24 nt, Human
cuaagugacuuccccaaagcccac

SEQ ID NO: 1288394 - RNA, 20 nt, Human
cugacuuuugggugggggug

SEQ ID NO: 1288395 - RNA, 21 nt, Human
gaccuccacccccacccucca

SEQ ID NO: 1288396 - RNA, 22 nt, Human
gaccuccacccccacccuccac

SEQ ID NO: 1288397 - RNA, 20 nt, Human
gacuuccccaaagcccacag

SEQ ID NO: 1288398 - RNA, 19 nt, Human
gccaugacccaguguccca

SEQ ID NO: 1288399 - RNA, 21 nt, Human
gcccacagcuccagugccacu

SEQ ID NO: 1288400 - RNA, 19 nt, Human
ggccaugacccaguguccc

SEQ ID NO: 1288401 - RNA, 30 nt, Human
uaaggagcuaagugacuuccccaaagcccu

SEQ ID NO: 1288402 - RNA, 19 nt, Human
uaaggggcuggauagaguu

SEQ ID NO: 1288403 - RNA, 22 nt, Human
uaagugacuuccccaaagccca

SEQ ID NO: 1288404 - RNA, 22 nt, Human
uagaccaaguaucuaucccacc

SEQ ID NO: 1288405 - RNA, 20 nt, Human
uagagggcucuccaugaucc

SEQ ID NO: 1288406 - RNA, 25 nt, Human
ucacucauaaacacacccugaaagc

SEQ ID NO: 1288407 - RNA, 22 nt, Human
uccacccccacccuccacccca

SEQ ID NO: 1288408 - RNA, 23 nt, Human
uccaugaucccuuccccuccugg

SEQ ID NO: 1288409 - RNA, 22 nt, Human
uccccaaagcccacagcuccag

SEQ ID NO: 1288410 - RNA, 24 nt, Human
uccguucuggccucuuccuuggaa

SEQ ID NO: 1288411 - RNA, 25 nt, Human
uccguucuggccucuuccuuggaag

SEQ ID NO: 1288412 - RNA, 21 nt, Human
ucucuaggagcaggaccucca

SEQ ID NO: 1288413 - RNA, 18 nt, Human
ugaucccuuccccuccug

SEQ ID NO: 1288414 - RNA, 21 nt, Human
ugccuucaacuucgggaaggu

SEQ ID NO: 1288415 - RNA, 24 nt, Human
ugcugacuuuuggguggggguggg

SEQ ID NO: 1288416 - RNA, 18 nt, Human
uggagcagggagagugca

SEQ ID NO: 1288417 - RNA, 23 nt, Human
ugggggugggaucaguuaaagag

SEQ ID NO: 1288418 - RNA, 18 nt, Human
uguggagcagggagagug

SEQ ID NO: 1288419 - RNA, 24 nt, Human
uuccuuggaagggucuaaaaacag

SEQ ID NO: 1288420 - RNA, 19 nt, Human
uugggugggggugggauca

SEQ ID NO: 1288421 - RNA, 28 nt, Human
aagaaucacaaggaagaagccgguaccc

SEQ ID NO: 1288422 - RNA, 24 nt, Human
agaaauucuucuuuuccaacuauc

SEQ ID NO: 1288423 - RNA, 19 nt, Human
aggaagaagcugugaaucu

SEQ ID NO: 1288424 - RNA, 23 nt, Human
aggaagaagcugugaaucuaaua

SEQ ID NO: 1288425 - RNA, 24 nt, Human
cagcuguauaaaugaagaucuuga

SEQ ID NO: 1288426 - RNA, 21 nt, Human
caucucuuucacacuugagcc

SEQ ID NO: 1288427 - RNA, 23 nt, Human
ccuggcuucaaacgaccaucuuu

SEQ ID NO: 1288428 - RNA, 22 nt, Human
cuccuggcuucaaacgaccauc

SEQ ID NO: 1288429 - RNA, 19 nt, Human
cuucaaacgaccaucuuuu

SEQ ID NO: 1288430 - RNA, 20 nt, Human
cuuuccauuucaucugcuuc

SEQ ID NO: 1288431 - RNA, 18 nt, Human
gaagaaaacauaaggaaa

SEQ ID NO: 1288432 - RNA, 20 nt, Human
gcaucaucucuuucacacuu

SEQ ID NO: 1288433 - RNA, 19 nt, Human
uaaggaaacuaaauuagag

SEQ ID NO: 1288434 - RNA, 20 nt, Human
uaaggaaacuaaauuagagg

SEQ ID NO: 1288435 - RNA, 19 nt, Human
uaaguguauuuacuucuuu

SEQ ID NO: 1288436 - RNA, 23 nt, Human
ugaagaaaacauaaggaaacuaa

SEQ ID NO: 1288437 - RNA, 20 nt, Human
ugagacaaguugaucuccug

SEQ ID NO: 1288438 - RNA, 21 nt, Human
uggauuuaacagcuguauaaa

SEQ ID NO: 1288439 - RNA, 18 nt, Human
ugugaaucuaauauauug

SEQ ID NO: 1288440 - RNA, 21 nt, Human
uuggaaauuucaugugcacca

SEQ ID NO: 1288441 - RNA, 19 nt, Human
uuucaaggcaucaucucuu

SEQ ID NO: 1288442 - RNA, 23 nt, Human
aaaaggagaggauccaaaaucaa

SEQ ID NO: 1288443 - RNA, 20 nt, Human
aggcagcagccaagucuggc

SEQ ID NO: 1288444 - RNA, 23 nt, Human
aggcagcagccaagucuggccgg

SEQ ID NO: 1288445 - RNA, 20 nt, Human
caguccccgagcugaccccc

SEQ ID NO: 1288446 - RNA, 18 nt, Human
ccccgagcugacccccuc

SEQ ID NO: 1288447 - RNA, 19 nt, Human
ccccgagcugacccccucu

SEQ ID NO: 1288448 - RNA, 22 nt, Human
cugacccccucugcaguccagg

SEQ ID NO: 1288449 - RNA, 22 nt, Human
gccaagucuggcucugcccagc

SEQ ID NO: 1288450 - RNA, 18 nt, Human
uccccgagcugacccccu

SEQ ID NO: 1288451 - RNA, 20 nt, Human
uccccgagcugacccccucu

SEQ ID NO: 1288452 - RNA, 22 nt, Human
uccccgagcugacccccucugc

SEQ ID NO: 1288453 - RNA, 18 nt, Human
aaacagaagguguccucc

SEQ ID NO: 1288454 - RNA, 22 nt, Human
aacagcacgagcccaccaucca

SEQ ID NO: 1288455 - RNA, 21 nt, Human
aagguuggggggcuugggccu

SEQ ID NO: 1288456 - RNA, 18 nt, Human
aaugguguacaccagguc

SEQ ID NO: 1288457 - RNA, 21 nt, Human
accauccaugcuccucagagc

SEQ ID NO: 1288458 - RNA, 23 nt, Human
accgcccaccgcacuacccaccc

SEQ ID NO: 1288459 - RNA, 23 nt, Human
accggcuccccaggcuggucucg

SEQ ID NO: 1288460 - RNA, 19 nt, Human
accucagugcccggcaccg

SEQ ID NO: 1288461 - RNA, 19 nt, Human
acucagcauccuccacccc

SEQ ID NO: 1288462 - RNA, 26 nt, Human
agaggccaaaguggauggugggcacc

SEQ ID NO: 1288463 - RNA, 21 nt, Human
agcaccagcuggucagaggug

SEQ ID NO: 1288464 - RNA, 20 nt, Human
agcaccugcaggccaaggcc

SEQ ID NO: 1288465 - RNA, 18 nt, Human
agcagaaggugcugaggg

SEQ ID NO: 1288466 - RNA, 20 nt, Human
agcccugggccagaugcagc

SEQ ID NO: 1288467 - RNA, 21 nt, Human
agcccugggccagaugcagcc

SEQ ID NO: 1288468 - RNA, 18 nt, Human
agcucaccugcaccugca

SEQ ID NO: 1288469 - RNA, 20 nt, Human
agcugcgcaccucagugccc

SEQ ID NO: 1288470 - RNA, 22 nt, Human
agcugggccucagcaaagcccg

SEQ ID NO: 1288471 - RNA, 21 nt, Human
aggaaggacagauugcucagg

SEQ ID NO: 1288472 - RNA, 21 nt, Human
aggacaggcaugucuggguca

SEQ ID NO: 1288473 - RNA, 23 nt, Human
aggagguccuggugggucagcac

SEQ ID NO: 1288474 - RNA, 19 nt, Human
aggcaggauggugacagug

SEQ ID NO: 1288475 - RNA, 23 nt, Human
aggcauggcuccgggccucaggg

SEQ ID NO: 1288476 - RNA, 25 nt, Human
aggccgaggccacauccagcgagaa

SEQ ID NO: 1288477 - RNA, 21 nt, Human
aggugggcuguggugagggcc

SEQ ID NO: 1288478 - RNA, 19 nt, Human
aguccaggucauaggccug

SEQ ID NO: 1288479 - RNA, 21 nt, Human
agugcugugggucagugcuca

SEQ ID NO: 1288480 - RNA, 18 nt, Human
auaggccuggagaaccuc

SEQ ID NO: 1288481 - RNA, 20 nt, Human
auggcucuggcgguccaucu

SEQ ID NO: 1288482 - RNA, 20 nt, Human
augguagagcaggagcuggg

SEQ ID NO: 1288483 - RNA, 19 nt, Human
caaagcccgaaucagcauu

SEQ ID NO: 1288484 - RNA, 22 nt, Human
caagaugggcauggcagagccc

SEQ ID NO: 1288485 - RNA, 19 nt, Human
caaggcccgggagaguggg

SEQ ID NO: 1288486 - RNA, 24 nt, Human
cacacucaccacccucgggcacca

SEQ ID NO: 1288487 - RNA, 20 nt, Human
caccacccucgggcaccaug

SEQ ID NO: 1288488 - RNA, 18 nt, Human
caccacucagcauccucc

SEQ ID NO: 1288489 - RNA, 27 nt, Human
caccagguagccggcacucggugggcu

SEQ ID NO: 1288490 - RNA, 25 nt, Human
cacccaggccgaggccacauccagc

SEQ ID NO: 1288491 - RNA, 26 nt, Human
caccccaccagcccccugcuucugca

SEQ ID NO: 1288492 - RNA, 20 nt, Human
caccccagcagcacccuuca

SEQ ID NO: 1288493 - RNA, 22 nt, Human
caccgcacuacccacccauugc

SEQ ID NO: 1288494 - RNA, 19 nt, Human
caccgcaguggacauagac

SEQ ID NO: 1288495 - RNA, 23 nt, Human
caccggcuccccaggcuggucuc

SEQ ID NO: 1288496 - RNA, 19 nt, Human
caccugcaccugcagaucc

SEQ ID NO: 1288497 - RNA, 21 nt, Human
caccuucagcauggccggggg

SEQ ID NO: 1288498 - RNA, 24 nt, Human
cacgcagcaccaucaccagguagc

SEQ ID NO: 1288499 - RNA, 21 nt, Human
cagagccucugcaggccugag

SEQ ID NO: 1288500 - RNA, 18 nt, Human
cagcagaaggugcugagg

SEQ ID NO: 1288501 - RNA, 22 nt, Human
cagcagaaggugcugagggucc

SEQ ID NO: 1288502 - RNA, 21 nt, Human
cagcagccgccaccuggcacu

SEQ ID NO: 1288503 - RNA, 18 nt, Human
cagcaggagaacucaguc

SEQ ID NO: 1288504 - RNA, 20 nt, Human
cagcaggagaacucagucac

SEQ ID NO: 1288505 - RNA, 20 nt, Human
cagcccccugcuucugcagc

SEQ ID NO: 1288506 - RNA, 21 nt, Human
cagcugggccucagcaaagcc

SEQ ID NO: 1288507 - RNA, 21 nt, Human
cagcugggucugcaugaagcu

SEQ ID NO: 1288508 - RNA, 20 nt, Human
cagcuggucccuucugaucu

SEQ ID NO: 1288509 - RNA, 22 nt, Human
caggaucaccauaaggcugcca

SEQ ID NO: 1288510 - RNA, 19 nt, Human
caggccccagaggcuugug

SEQ ID NO: 1288511 - RNA, 21 nt, Human
cagggccaucguggaugaagc

SEQ ID NO: 1288512 - RNA, 21 nt, Human
cagguucuccacgguguccuc

SEQ ID NO: 1288513 - RNA, 27 nt, Human
cauccuccaccccaccagcccccugcu

SEQ ID NO: 1288514 - RNA, 19 nt, Human
cauccugggugaagcccug

SEQ ID NO: 1288515 - RNA, 22 nt, Human
caugaagcugcgcaccucaguc

SEQ ID NO: 1288516 - RNA, 23 nt, Human
ccaccccagcagcacccuucaug

SEQ ID NO: 1288517 - RNA, 18 nt, Human
ccaccgcacuacccaccc

SEQ ID NO: 1288518 - RNA, 20 nt, Human
ccagaguaaccauccaugcu

SEQ ID NO: 1288519 - RNA, 19 nt, Human
ccagaugcagcccugugcu

SEQ ID NO: 1288520 - RNA, 20 nt, Human
ccagcgagaaggcauggcuc

SEQ ID NO: 1288521 - RNA, 22 nt, Human
ccaucucagaggcauuagccau

SEQ ID NO: 1288522 - RNA, 21 nt, Human
ccaugaggacaggcaugucug

SEQ ID NO: 1288523 - RNA, 24 nt, Human
cccaccacucagcauccuccaccc

SEQ ID NO: 1288524 - RNA, 20 nt, Human
cccaccgcacuacccaccca

SEQ ID NO: 1288525 - RNA, 20 nt, Human
ccccaugccgggguggcucc

SEQ ID NO: 1288526 - RNA, 20 nt, Human
cccccugcuucugcagcucc

SEQ ID NO: 1288527 - RNA, 26 nt, Human
cccccugcuucugcagcucccugaac

SEQ ID NO: 1288528 - RNA, 21 nt, Human
ccccuccgcaggcaugagggc

SEQ ID NO: 1288529 - RNA, 25 nt, Human
cccgcaccacaugguagagcaggag

SEQ ID NO: 1288530 - RNA, 21 nt, Human
cccuccgcaggcaugagggca

SEQ ID NO: 1288531 - RNA, 18 nt, Human
ccgaggccacauccagcg

SEQ ID NO: 1288532 - RNA, 18 nt, Human
ccggccuccaacucccag

SEQ ID NO: 1288533 - RNA, 23 nt, Human
ccggcuccccaggcuggucucgg

SEQ ID NO: 1288534 - RNA, 18 nt, Human
ccucagagccucugcagg

SEQ ID NO: 1288535 - RNA, 19 nt, Human
ccucuguccagggccccuc

SEQ ID NO: 1288536 - RNA, 23 nt, Human
ccugaaccaccucacaguggaag

SEQ ID NO: 1288537 - RNA, 18 nt, Human
ccuguaguugaagguugc

SEQ ID NO: 1288538 - RNA, 25 nt, Human
ccugugcugcgguggauuuguaugg

SEQ ID NO: 1288539 - RNA, 24 nt, Human
cggacucugggcagucagugucug

SEQ ID NO: 1288540 - RNA, 20 nt, Human
cggggggcuggccugcaguc

SEQ ID NO: 1288541 - RNA, 23 nt, Human
cuacugggcccucuagggcaaug

SEQ ID NO: 1288542 - RNA, 18 nt, Human
cucagcauccuccacccc

SEQ ID NO: 1288543 - RNA, 26 nt, Human
cucagggcgggagugcagguagagga

SEQ ID NO: 1288544 - RNA, 18 nt, Human
cuccaccccaccagcccc

SEQ ID NO: 1288545 - RNA, 22 nt, Human
cucccugaacggcaggccuccg

SEQ ID NO: 1288546 - RNA, 19 nt, Human
cuccgcaggcaugagggca

SEQ ID NO: 1288547 - RNA, 19 nt, Human
cuccugggcuaccuccagc

SEQ ID NO: 1288548 - RNA, 22 nt, Human
cugagugugcaguggcuccagc

SEQ ID NO: 1288549 - RNA, 22 nt, Human
cugcaccugcagauccagguuc

SEQ ID NO: 1288550 - RNA, 24 nt, Human
cugcgguggauuuguauggccagc

SEQ ID NO: 1288551 - RNA, 24 nt, Human
cugcuggcggcacugccuccuggg

SEQ ID NO: 1288552 - RNA, 24 nt, Human
cugcuggcucugaggcucuggcug

SEQ ID NO: 1288553 - RNA, 19 nt, Human
cuggaggccccgcaccaca

SEQ ID NO: 1288554 - RNA, 22 nt, Human
cuggaggccccgcaccacaugg

SEQ ID NO: 1288555 - RNA, 21 nt, Human
cugggugaagcccugaccguc

SEQ ID NO: 1288556 - RNA, 19 nt, Human
gaacagcacgagcccacca

SEQ ID NO: 1288557 - RNA, 23 nt, Human
gaacucagucaccggcuccccag

SEQ ID NO: 1288558 - RNA, 21 nt, Human
gaagagccggccuagcuggag

SEQ ID NO: 1288559 - RNA, 24 nt, Human
gaaggugcugaggguccuggcuug

SEQ ID NO: 1288560 - RNA, 20 nt, Human
gagacucuugaugaagagcu

SEQ ID NO: 1288561 - RNA, 22 nt, Human
gagggccuccugcuggguguuc

SEQ ID NO: 1288562 - RNA, 19 nt, Human
gaggguccuggcuugaggc

SEQ ID NO: 1288563 - RNA, 27 nt, Human
gauggcucuggcgguccaucucagaaa

SEQ ID NO: 1288564 - RNA, 24 nt, Human
gcaccgcccaccgcacuacccacc

SEQ ID NO: 1288565 - RNA, 18 nt, Human
gcacugccuccugggcua

SEQ ID NO: 1288566 - RNA, 23 nt, Human
gccagaugcagcccugugcugcg

SEQ ID NO: 1288567 - RNA, 18 nt, Human
gcccugcuccacauccug

SEQ ID NO: 1288568 - RNA, 18 nt, Human
gccucucuccagcagaag

SEQ ID NO: 1288569 - RNA, 26 nt, Human
gcuccagcaccugcaggccaaggccc

SEQ ID NO: 1288570 - RNA, 22 nt, Human
gcugggccagcuucaguggggc

SEQ ID NO: 1288571 - RNA, 24 nt, Human
ggaagagccggccuagcuggaggc

SEQ ID NO: 1288572 - RNA, 18 nt, Human
ggagaguggggaaguagg

SEQ ID NO: 1288573 - RNA, 23 nt, Human
ggaugccucuguccagggccccu

SEQ ID NO: 1288574 - RNA, 21 nt, Human
ggcauggcuccgggccucagg

SEQ ID NO: 1288575 - RNA, 25 nt, Human
ggccugaguuuguaugaggucgggg

SEQ ID NO: 1288576 - RNA, 23 nt, Human
gggcuugggccugccuccuccag

SEQ ID NO: 1288577 - RNA, 20 nt, Human
ggggagaaauaugguggagc

SEQ ID NO: 1288578 - RNA, 19 nt, Human
ggggugccaaggagcugga

SEQ ID NO: 1288579 - RNA, 24 nt, Human
ggguugaccuggaugggcaggagg

SEQ ID NO: 1288580 - RNA, 18 nt, Human
gguagagcaggagcuggg

SEQ ID NO: 1288581 - RNA, 21 nt, Human
ggucagagguguccucagggc

SEQ ID NO: 1288582 - RNA, 20 nt, Human
gucugcaugaagcugcgcac

SEQ ID NO: 1288583 - RNA, 20 nt, Human
gugaagcacuugcuucuggg

SEQ ID NO: 1288584 - RNA, 18 nt, Human
gugcugggccagcuucag

SEQ ID NO: 1288585 - RNA, 20 nt, Human
guggaacgccugugugaccc

SEQ ID NO: 1288586 - RNA, 24 nt, Human
guggaacgccugugugacccacca

SEQ ID NO: 1288587 - RNA, 18 nt, Human
guugaagguugccuuucc

SEQ ID NO: 1288588 - RNA, 22 nt, Human
ucaccugcaccugcagauccag

SEQ ID NO: 1288589 - RNA, 23 nt, Human
ucacgucagagaggccaaagugg

SEQ ID NO: 1288590 - RNA, 21 nt, Human
ucagcaaagcccgaaucagca

SEQ ID NO: 1288591 - RNA, 19 nt, Human
ucagcaccagcugggccuc

SEQ ID NO: 1288592 - RNA, 20 nt, Human
ucagcauccuccaccccacc

SEQ ID NO: 1288593 - RNA, 24 nt, Human
ucagcauccuccaccccaccagcc

SEQ ID NO: 1288594 - RNA, 26 nt, Human
ucagcauccuccaccccaccagcccc

SEQ ID NO: 1288595 - RNA, 24 nt, Human
ucaguggggcuacugggcccucua

SEQ ID NO: 1288596 - RNA, 19 nt, Human
ucagugucuggcugcccuc

SEQ ID NO: 1288597 - RNA, 23 nt, Human
ucccuucugaucucagcugccuc

SEQ ID NO: 1288598 - RNA, 18 nt, Human
uccucagggccaucgugg

SEQ ID NO: 1288599 - RNA, 19 nt, Human
uccucgguguagugcugug

SEQ ID NO: 1288600 - RNA, 19 nt, Human
uccuugggcccagaguaac

SEQ ID NO: 1288601 - RNA, 21 nt, Human
ucugcacgggguccaggcugg

SEQ ID NO: 1288602 - RNA, 18 nt, Human
ugacaggguugaccugga

SEQ ID NO: 1288603 - RNA, 24 nt, Human
ugaccuggaugggcaggaggucug

SEQ ID NO: 1288604 - RNA, 21 nt, Human
ugagaaaacgaugucugcugg

SEQ ID NO: 1288605 - RNA, 23 nt, Human
ugagaacagcacgagcccaccau

SEQ ID NO: 1288606 - RNA, 21 nt, Human
ugagugaaguucaccaggucc

SEQ ID NO: 1288607 - RNA, 22 nt, Human
ugauguggggugggucauugaa

SEQ ID NO: 1288608 - RNA, 25 nt, Human
ugauguggggugggucauugacagg

SEQ ID NO: 1288609 - RNA, 26 nt, Human
ugcaccugcagauccagguucuccac

SEQ ID NO: 1288610 - RNA, 22 nt, Human
ugcacgggguccaggcugggug

SEQ ID NO: 1288611 - RNA, 24 nt, Human
ugcagguacuggaucagaugcucu

SEQ ID NO: 1288612 - RNA, 18 nt, Human
ugccaaggagcuggaagg

SEQ ID NO: 1288613 - RNA, 23 nt, Human
ugccucuguccagggccccucug

SEQ ID NO: 1288614 - RNA, 20 nt, Human
ugcucuuccaccccagcagc

SEQ ID NO: 1288615 - RNA, 21 nt, Human
ugcucuuccaccccagcagca

SEQ ID NO: 1288616 - RNA, 18 nt, Human
uggaacagcacggucaca

SEQ ID NO: 1288617 - RNA, 21 nt, Human
uggaucagaugcucuuccacc

SEQ ID NO: 1288618 - RNA, 20 nt, Human
uggaugaagcgggccuugca

SEQ ID NO: 1288619 - RNA, 19 nt, Human
uggaugccucuguccaggg

SEQ ID NO: 1288620 - RNA, 18 nt, Human
uggauggagaagguacag

SEQ ID NO: 1288621 - RNA, 19 nt, Human
ugggucagcaccagcuggg

SEQ ID NO: 1288622 - RNA, 18 nt, Human
ugguagagcaggagcugg

SEQ ID NO: 1288623 - RNA, 18 nt, Human
uggucagagguguccuca

SEQ ID NO: 1288624 - RNA, 25 nt, Human
ugugagaacagcacgagcccaccau

SEQ ID NO: 1288625 - RNA, 20 nt, Human
ugugggaagaugaugugggg

SEQ ID NO: 1288626 - RNA, 18 nt, Human
uguggggugggucauuga

SEQ ID NO: 1288627 - RNA, 18 nt, Human
uguucugccucucuccac

SEQ ID NO: 1288628 - RNA, 22 nt, Human
uuagccaucaggacaaaaccgu

SEQ ID NO: 1288629 - RNA, 22 nt, Human
uucaguggggcuacugggcccu

SEQ ID NO: 1288630 - RNA, 22 nt, Human
uugcugggcugcuuaauggugu

SEQ ID NO: 1288631 - RNA, 24 nt, Human
aaauaauccagugacucccaaaac

SEQ ID NO: 1288632 - RNA, 19 nt, Human
aaguuguagccucaacacc

SEQ ID NO: 1288633 - RNA, 25 nt, Human
acaggcacccgccaccacgcccgac

SEQ ID NO: 1288634 - RNA, 20 nt, Human
accucaggacaucuugacau

SEQ ID NO: 1288635 - RNA, 25 nt, Human
accucccggguucacgccauucucc

SEQ ID NO: 1288636 - RNA, 27 nt, Human
acuacaggcacccgccaccacgcccga

SEQ ID NO: 1288637 - RNA, 24 nt, Human
aguagaguggugugaucucggcuc

SEQ ID NO: 1288638 - RNA, 18 nt, Human
aguagcugggacuacagg

SEQ ID NO: 1288639 - RNA, 19 nt, Human
caaaacagaaauacccaaa

SEQ ID NO: 1288640 - RNA, 24 nt, Human
caccucaggacaucuugacaucac

SEQ ID NO: 1288641 - RNA, 19 nt, Human
caccucccggguucacgcc

SEQ ID NO: 1288642 - RNA, 22 nt, Human
cacgccauucuccugccucagc

SEQ ID NO: 1288643 - RNA, 24 nt, Human
cagaaauacccaaacaaaauucaa

SEQ ID NO: 1288644 - RNA, 20 nt, Human
cagccuccugaguagcuggg

SEQ ID NO: 1288645 - RNA, 21 nt, Human
caggcacccgccaccacgccc

SEQ ID NO: 1288646 - RNA, 22 nt, Human
cagggaauguguagaaaacaag

SEQ ID NO: 1288647 - RNA, 24 nt, Human
ccacgcccgacuaauuucuuuuuu

SEQ ID NO: 1288648 - RNA, 18 nt, Human
cccagacuggaguagagu

SEQ ID NO: 1288649 - RNA, 23 nt, Human
ccugaguagcugggacuacaggc

SEQ ID NO: 1288650 - RNA, 24 nt, Human
ccugaguagcugggacuacaggca

SEQ ID NO: 1288651 - RNA, 19 nt, Human
cgcucugucgcccagacug

SEQ ID NO: 1288652 - RNA, 21 nt, Human
cgcucugucgcccagacugga

SEQ ID NO: 1288653 - RNA, 22 nt, Human
cuaauuucuuuuuuuuuuuuuu

SEQ ID NO: 1288654 - RNA, 24 nt, Human
cucacugcaagcuccaccucccgg

SEQ ID NO: 1288655 - RNA, 24 nt, Human
cucagccuccugaguagcugggac

SEQ ID NO: 1288656 - RNA, 22 nt, Human
cucccaaaacagaaauacccaa

SEQ ID NO: 1288657 - RNA, 21 nt, Human
cucccggguucacgccauucu

SEQ ID NO: 1288658 - RNA, 23 nt, Human
cucugucgcccagacuggaguag

SEQ ID NO: 1288659 - RNA, 23 nt, Human
cugccucagccuccugaguagcu

SEQ ID NO: 1288660 - RNA, 24 nt, Human
cuggcacauaauaugugcucccuu

SEQ ID NO: 1288661 - RNA, 24 nt, Human
cuguacaaguugcuguuccgucgc

SEQ ID NO: 1288662 - RNA, 20 nt, Human
gaguagcugggacuacaggc

SEQ ID NO: 1288663 - RNA, 25 nt, Human
gaguagcugggacuacaggcacccg

SEQ ID NO: 1288664 - RNA, 22 nt, Human
gcaagcuccaccucccggguuc

SEQ ID NO: 1288665 - RNA, 20 nt, Human
gcccagacuggaguagagug

SEQ ID NO: 1288666 - RNA, 20 nt, Human
gccucagccuccugaguagc

SEQ ID NO: 1288667 - RNA, 18 nt, Human
ggacaucuugacaucacu

SEQ ID NO: 1288668 - RNA, 21 nt, Human
gugaucucggcucacugcaag

SEQ ID NO: 1288669 - RNA, 20 nt, Human
gugcucccuuaaaaagcagg

SEQ ID NO: 1288670 - RNA, 21 nt, Human
guuacagucacacugacagcu

SEQ ID NO: 1288671 - RNA, 19 nt, Human
uaaaaaaaucaaaacuaua

SEQ ID NO: 1288672 - RNA, 21 nt, Human
uaaaagauccacccugccucu

SEQ ID NO: 1288673 - RNA, 19 nt, Human
uaauaugugcucccuuaaa

SEQ ID NO: 1288674 - RNA, 23 nt, Human
uacaggcacccgccaccacgccc

SEQ ID NO: 1288675 - RNA, 22 nt, Human
uacccaaacaaaauucaaacaa

SEQ ID NO: 1288676 - RNA, 21 nt, Human
uaguuuauucugucuuuccca

SEQ ID NO: 1288677 - RNA, 24 nt, Human
ucacugcaagcuccaccucccggg

SEQ ID NO: 1288678 - RNA, 23 nt, Human
ucagccuccugaguagcugggac

SEQ ID NO: 1288679 - RNA, 21 nt, Human
ucccggguucacgccauucuc

SEQ ID NO: 1288680 - RNA, 24 nt, Human
ucccggguucacgccauucuccug

SEQ ID NO: 1288681 - RNA, 24 nt, Human
uccugaguagcugggacuacaggc

SEQ ID NO: 1288682 - RNA, 24 nt, Human
ucuccugccucagccuccugagua

SEQ ID NO: 1288683 - RNA, 18 nt, Human
ucuuuuuuuuuuuuuuuu

SEQ ID NO: 1288684 - RNA, 21 nt, Human
ugcagcauuuaaaaauaaucc

SEQ ID NO: 1288685 - RNA, 24 nt, Human
ugccucagccuccugaguagcugg

SEQ ID NO: 1288686 - RNA, 24 nt, Human
uggaguagaguggugugaucucgg

SEQ ID NO: 1288687 - RNA, 21 nt, Human
ugggacuacaggcacccgcca

SEQ ID NO: 1288688 - RNA, 22 nt, Human
ugggacuacaggcacccgccac

SEQ ID NO: 1288689 - RNA, 24 nt, Human
ugggacuacaggcacccgccacca

SEQ ID NO: 1288690 - RNA, 18 nt, Human
uguagaaaacaaguggcc

SEQ ID NO: 1288691 - RNA, 20 nt, Human
uguagaaaacaaguggccua

SEQ ID NO: 1288692 - RNA, 19 nt, Human
uuaaguuguagccucaaca

SEQ ID NO: 1288693 - RNA, 22 nt, Human
uuuaaaaauaauccagugacuc

SEQ ID NO: 1288694 - RNA, 18 nt, Human
uuucccagcagugccugg

SEQ ID NO: 1288695 - RNA, 21 nt, Human
uuugguauuaaaagauccacc

SEQ ID NO: 1288696 - RNA, 18 nt, Human
uuuuuuuuuuuuuuuuug

SEQ ID NO: 1288697 - RNA, 24 nt, Human
uuuuuuuuuuuuuuuuugguuugg

SEQ ID NO: 1288698 - RNA, 23 nt, Human
uuuuuuuuuuuuuuuuuugguuu

SEQ ID NO: 1288699 - RNA, 22 nt, Human
aaaagaagcggaucucugggaa

SEQ ID NO: 1288700 - RNA, 19 nt, Human
aaagaagaaagcagagaag

SEQ ID NO: 1288701 - RNA, 24 nt, Human
aagaaagcagagaagaaaagaagc

SEQ ID NO: 1288702 - RNA, 21 nt, Human
aagaagaaagcagagaagaaa

SEQ ID NO: 1288703 - RNA, 24 nt, Human
aagaagaaagcagagaagaaaaga

SEQ ID NO: 1288704 - RNA, 19 nt, Human
aagaagaacaggagaacag

SEQ ID NO: 1288705 - RNA, 21 nt, Human
aagaagaacaggagaacaggc

SEQ ID NO: 1288706 - RNA, 26 nt, Human
aagaagcggaucucugggaagcagag

SEQ ID NO: 1288707 - RNA, 22 nt, Human
aagaguauuucaacuuguuuga

SEQ ID NO: 1288708 - RNA, 22 nt, Human
aagcaaucugcaaaagaagaac

SEQ ID NO: 1288709 - RNA, 19 nt, Human
aagcagagcaaguaaagca

SEQ ID NO: 1288710 - RNA, 21 nt, Human
aagcagccugccauccgguga

SEQ ID NO: 1288711 - RNA, 19 nt, Human
aagcggaucucugggaagc

SEQ ID NO: 1288712 - RNA, 18 nt, Human
agaaagaagaaagcagag

SEQ ID NO: 1288713 - RNA, 25 nt, Human
agaaagaagaaagcagagaagaaaa

SEQ ID NO: 1288714 - RNA, 23 nt, Human
agaaagcagagaagaaaagaagc

SEQ ID NO: 1288715 - RNA, 21 nt, Human
agaagaaaagaagcggaucuc

SEQ ID NO: 1288716 - RNA, 24 nt, Human
agaagaaaagaagcggaucucugg

SEQ ID NO: 1288717 - RNA, 18 nt, Human
agaagaacaggagaacag

SEQ ID NO: 1288718 - RNA, 18 nt, Human
agcagagaagaaaagaag

SEQ ID NO: 1288719 - RNA, 22 nt, Human
cagaaauaaggaaacugaaacc

SEQ ID NO: 1288720 - RNA, 19 nt, Human
caggagaacaggcauucac

SEQ ID NO: 1288721 - RNA, 20 nt, Human
ccauggagaagacauagcca

SEQ ID NO: 1288722 - RNA, 21 nt, Human
cucagaaauaaggaaacugaa

SEQ ID NO: 1288723 - RNA, 24 nt, Human
cucagaaauaaggaaacugaaacc

SEQ ID NO: 1288724 - RNA, 22 nt, Human
cugcaaaagaagaacaggagaa

SEQ ID NO: 1288725 - RNA, 18 nt, Human
gagaagaaaagaagcgga

SEQ ID NO: 1288726 - RNA, 20 nt, Human
gcccugugcacuggcaccug

SEQ ID NO: 1288727 - RNA, 30 nt, Human
uaaaaaccccauggagaagacauagccaag

SEQ ID NO: 1288728 - RNA, 24 nt, Human
uaaagcaaucugcaaaagaagaac

SEQ ID NO: 1288729 - RNA, 22 nt, Human
uaaggaaacugaaaccuagagg

SEQ ID NO: 1288730 - RNA, 27 nt, Human
uaaggaaacugaaaccuagaggggcug

SEQ ID NO: 1288731 - RNA, 26 nt, Human
uauuucaacuuguuugauacucauug

SEQ ID NO: 1288732 - RNA, 19 nt, Human
ucacugcagccgcuggaaa

SEQ ID NO: 1288733 - RNA, 18 nt, Human
ugaaaccuagaggggcug

SEQ ID NO: 1288734 - RNA, 18 nt, Human
ugaaaccuagaggggcug

SEQ ID NO: 1288735 - RNA, 20 nt, Human
ugaaaccuagaggggcuggg

SEQ ID NO: 1288736 - RNA, 23 nt, Human
aaacaccagaaacaucuggaaaa

SEQ ID NO: 1288737 - RNA, 25 nt, Human
aaacagaauaauuuauuugaaucca

SEQ ID NO: 1288738 - RNA, 24 nt, Human
acaccagaaacaucuggaaaagca

SEQ ID NO: 1288739 - RNA, 22 nt, Human
agagcaucuucauggccugaaa

SEQ ID NO: 1288740 - RNA, 20 nt, Human
agguguuggucuugguuucu

SEQ ID NO: 1288741 - RNA, 29 nt, Human
cacuuucguucuccccgucagcaugagaa

SEQ ID NO: 1288742 - RNA, 18 nt, Human
cauccagagcaucuucau

SEQ ID NO: 1288743 - RNA, 19 nt, Human
ccccaacauguuuuucugu

SEQ ID NO: 1288744 - RNA, 18 nt, Human
ccuugaaaaaaauaaaaa

SEQ ID NO: 1288745 - RNA, 23 nt, Human
cgauacacaaucagaggcuggaa

SEQ ID NO: 1288746 - RNA, 18 nt, Human
cuccccgucagcaugaga

SEQ ID NO: 1288747 - RNA, 27 nt, Human
gaaacaccagaaacaucuggaaaagca

SEQ ID NO: 1288748 - RNA, 23 nt, Human
gaccugcuugggauccuggaaac

SEQ ID NO: 1288749 - RNA, 18 nt, Human
gcugggcagggaugugcu

SEQ ID NO: 1288750 - RNA, 21 nt, Human
uagcccaugaaaguucacucu

SEQ ID NO: 1288751 - RNA, 22 nt, Human
ucauccagagcaucuucauggc

SEQ ID NO: 1288752 - RNA, 21 nt, Human
ugaaaaaccugcaguucaauu

SEQ ID NO: 1288753 - RNA, 19 nt, Human
ugagaacgacucuccacug

SEQ ID NO: 1288754 - RNA, 21 nt, Human
ugaguaagagguguuggucuu

SEQ ID NO: 1288755 - RNA, 23 nt, Human
uguugcacaagacauuguguaua

SEQ ID NO: 1288756 - RNA, 19 nt, Human
uugaauccaucuuuccuug

SEQ ID NO: 1288757 - RNA, 23 nt, Human
aaacacagaucacaucuucccca

SEQ ID NO: 1288758 - RNA, 18 nt, Human
aaaggcucuggggggaug

SEQ ID NO: 1288759 - RNA, 20 nt, Human
aaaggcucuggggggauguu

SEQ ID NO: 1288760 - RNA, 22 nt, Human
aaggcugacacggggaggccag

SEQ ID NO: 1288761 - RNA, 20 nt, Human
aaguccccuucuagguggcc

SEQ ID NO: 1288762 - RNA, 21 nt, Human
acacagaucacaucuucccca

SEQ ID NO: 1288763 - RNA, 24 nt, Human
acccugaguugggucagagaaagg

SEQ ID NO: 1288764 - RNA, 18 nt, Human
agagagaaacacagauca

SEQ ID NO: 1288765 - RNA, 22 nt, Human
agagagaaacacagaucacauc

SEQ ID NO: 1288766 - RNA, 24 nt, Human
aggccagacagcuucacggcacca

SEQ ID NO: 1288767 - RNA, 19 nt, Human
aggcgaggggcggccuggc

SEQ ID NO: 1288768 - RNA, 22 nt, Human
aggcugacacggggaggccaga

SEQ ID NO: 1288769 - RNA, 19 nt, Human
agggagcgaggucccgcuc

SEQ ID NO: 1288770 - RNA, 19 nt, Human
cacaucuuccccacgccua

SEQ ID NO: 1288771 - RNA, 19 nt, Human
caccacccccagccgagcc

SEQ ID NO: 1288772 - RNA, 18 nt, Human
cacugucagcggcagaac

SEQ ID NO: 1288773 - RNA, 23 nt, Human
cacugucagcggcagaaccgucc

SEQ ID NO: 1288774 - RNA, 24 nt, Human
cacuucugcucacggcuuuggaga

SEQ ID NO: 1288775 - RNA, 21 nt, Human
cagcggcagaaccguccccag

SEQ ID NO: 1288776 - RNA, 20 nt, Human
cccccagccgagcccugugu

SEQ ID NO: 1288777 - RNA, 22 nt, Human
ccggagcaagcccggccgggac

SEQ ID NO: 1288778 - RNA, 20 nt, Human
cgggaaggcgaggggcggcc

SEQ ID NO: 1288779 - RNA, 26 nt, Human
cuguccaaacuucaagaaaaacaaag

SEQ ID NO: 1288780 - RNA, 25 nt, Human
gagcaagcccggccgggacccuucg

SEQ ID NO: 1288781 - RNA, 23 nt, Human
gcaggagugcggcgggaaggccg

SEQ ID NO: 1288782 - RNA, 21 nt, Human
ggagaugggaggggggagaag

SEQ ID NO: 1288783 - RNA, 18 nt, Human
gggcuuuggggagacagc

SEQ ID NO: 1288784 - RNA, 21 nt, Human
uagguggccggcaccgcuuga

SEQ ID NO: 1288785 - RNA, 22 nt, Human
uccccgagugcuagggagcgag

SEQ ID NO: 1288786 - RNA, 18 nt, Human
uggaauaaguccccuucu

SEQ ID NO: 1288787 - RNA, 23 nt, Human
ugggaggggggagaagagagaaa

SEQ ID NO: 1288788 - RNA, 18 nt, Human
ugggcuuuggggagacag

SEQ ID NO: 1288789 - RNA, 21 nt, Human
ugggcuuuggggagacagcuc

SEQ ID NO: 1288790 - RNA, 20 nt, Human
uguccaaacuucaagaaaaa

SEQ ID NO: 1288791 - RNA, 21 nt, Human
uucacggcaccaguucucucc

SEQ ID NO: 1288792 - RNA, 22 nt, Human
uugcacuucacacacuucugcc

SEQ ID NO: 1288793 - RNA, 18 nt, Human
uuuggggagacagcuccu

SEQ ID NO: 1288794 - RNA, 19 nt, Human
aaaugucuguucagaucgc

SEQ ID NO: 1288795 - RNA, 23 nt, Human
ccucuucacauuccccuuuacua

SEQ ID NO: 1288796 - RNA, 22 nt, Human
ccuuugggaaaugucuguucag

SEQ ID NO: 1288797 - RNA, 24 nt, Human
gagcauuuuaaaaauauacuuauu

SEQ ID NO: 1288798 - RNA, 18 nt, Human
guaacacugcagaguaca

SEQ ID NO: 1288799 - RNA, 19 nt, Human
gucauuuucauaccauguc

SEQ ID NO: 1288800 - RNA, 22 nt, Human
guugcuguuuucuauaggagau

SEQ ID NO: 1288801 - RNA, 25 nt, Human
uaaugauugaaauaguacuacaugc

SEQ ID NO: 1288802 - RNA, 20 nt, Human
uauauaaauuauuuuuacau

SEQ ID NO: 1288803 - RNA, 19 nt, Human
uaucaaagaagauacauuu

SEQ ID NO: 1288804 - RNA, 23 nt, Human
ucccaugcaaauacauucagagc

SEQ ID NO: 1288805 - RNA, 26 nt, Human
uccccuuuacuaucaaagaagauacc

SEQ ID NO: 1288806 - RNA, 21 nt, Human
ugaauuuauauguugcuguuu

SEQ ID NO: 1288807 - RNA, 24 nt, Human
ugagaugauaucucauugugguuu

SEQ ID NO: 1288808 - RNA, 21 nt, Human
ugcagaguacauaaggauaau

SEQ ID NO: 1288809 - RNA, 22 nt, Human
uuaacauuugcccaccucuuca

SEQ ID NO: 1288810 - RNA, 19 nt, Human
uucagagcuguucuuaguu

SEQ ID NO: 1288811 - RNA, 23 nt, Human
uuuuuuugcugugguauuuuguc

SEQ ID NO: 1288812 - RNA, 19 nt, Human
aaccucaccgagagcccaa

SEQ ID NO: 1288813 - RNA, 21 nt, Human
agaagaggagagagagaggcc

SEQ ID NO: 1288814 - RNA, 25 nt, Human
agccaggugcucugcauggcaaggu

SEQ ID NO: 1288815 - RNA, 21 nt, Human
agcccaaacucucaccuacag

SEQ ID NO: 1288816 - RNA, 22 nt, Human
aucugucuuuaucgccuccccc

SEQ ID NO: 1288817 - RNA, 19 nt, Human
cacccccuggcccauaagc

SEQ ID NO: 1288818 - RNA, 20 nt, Human
cagggaccacaagccagcac

SEQ ID NO: 1288819 - RNA, 18 nt, Human
ccagcacagaggcgaccu

SEQ ID NO: 1288820 - RNA, 23 nt, Human
ccagcacagaggcgaccuccucc

SEQ ID NO: 1288821 - RNA, 20 nt, Human
cccaacccuuccacucugcu

SEQ ID NO: 1288822 - RNA, 20 nt, Human
ccccaacccuuccacucugc

SEQ ID NO: 1288823 - RNA, 18 nt, Human
cccccaacccuuccacuc

SEQ ID NO: 1288824 - RNA, 21 nt, Human
cccccaacccuuccacucugc

SEQ ID NO: 1288825 - RNA, 19 nt, Human
cccucccacccccuggccc

SEQ ID NO: 1288826 - RNA, 23 nt, Human
ccugcagccgggucagagugagc

SEQ ID NO: 1288827 - RNA, 23 nt, Human
ccuggcccauaagccuuuuccuu

SEQ ID NO: 1288828 - RNA, 23 nt, Human
cucccaaccucaccgagagccca

SEQ ID NO: 1288829 - RNA, 21 nt, Human
cucccucccacccccuggccc

SEQ ID NO: 1288830 - RNA, 20 nt, Human
cuggcccauaagccuuuucc

SEQ ID NO: 1288831 - RNA, 21 nt, Human
cuguuccugcuucucuuuuca

SEQ ID NO: 1288832 - RNA, 23 nt, Human
gaaagaaaaaugguaauacggaa

SEQ ID NO: 1288833 - RNA, 19 nt, Human
gagagagagaggccagagc

SEQ ID NO: 1288834 - RNA, 22 nt, Human
gagaggccagagccuggggaug

SEQ ID NO: 1288835 - RNA, 22 nt, Human
gccuuuuccuucucccaaccuc

SEQ ID NO: 1288836 - RNA, 25 nt, Human
gcugugcccauucucccucccaccc

SEQ ID NO: 1288837 - RNA, 21 nt, Human
ggcuugggggaagggcagcuc

SEQ ID NO: 1288838 - RNA, 20 nt, Human
gggcuugggggaagggcagc

SEQ ID NO: 1288839 - RNA, 23 nt, Human
gguugcccucaggguccuccuug

SEQ ID NO: 1288840 - RNA, 20 nt, Human
guggaguauuuuacuguucc

SEQ ID NO: 1288841 - RNA, 19 nt, Human
gugguugcccucagggucc

SEQ ID NO: 1288842 - RNA, 20 nt, Human
guuccugcuucucuuuucac

SEQ ID NO: 1288843 - RNA, 21 nt, Human
guucugguccccuugagucuu

SEQ ID NO: 1288844 - RNA, 21 nt, Human
ucccaaccucaccgagagccc

SEQ ID NO: 1288845 - RNA, 21 nt, Human
ucccaaccucaccgagagccc

SEQ ID NO: 1288846 - RNA, 22 nt, Human
ucccaaccucaccgagagccca

SEQ ID NO: 1288847 - RNA, 18 nt, Human
uccgggguuggcuccuuc

SEQ ID NO: 1288848 - RNA, 23 nt, Human
ucucccaaccucaccgagagccc

SEQ ID NO: 1288849 - RNA, 21 nt, Human
ucugucuuuaucgccuccccc

SEQ ID NO: 1288850 - RNA, 27 nt, Human
ugaaagaaaaaugguaauacggaaaca

SEQ ID NO: 1288851 - RNA, 19 nt, Human
uggcagaugagaagccagg

SEQ ID NO: 1288852 - RNA, 19 nt, Human
uggcccauaagccuuuucc

SEQ ID NO: 1288853 - RNA, 24 nt, Human
uggcugugcccauucucccuccca

SEQ ID NO: 1288854 - RNA, 18 nt, Human
ugggcuugggggaagggc

SEQ ID NO: 1288855 - RNA, 18 nt, Human
ugggggaagggcagcucc

SEQ ID NO: 1288856 - RNA, 24 nt, Human
ugguugcccucaggguccuccuug

SEQ ID NO: 1288857 - RNA, 20 nt, Human
ugucagggaccacaagccag

SEQ ID NO: 1288858 - RNA, 19 nt, Human
ugucuuuaucgccuccccc

SEQ ID NO: 1288859 - RNA, 22 nt, Human
uuccugcagccgggucagagug

SEQ ID NO: 1288860 - RNA, 19 nt, Human
uugcccucaggguccuccu

SEQ ID NO: 1288861 - RNA, 19 nt, Human
uuuacuguuccugcuucuc

SEQ ID NO: 1288862 - RNA, 28 nt, Human
aaaaaagaauuccucuaaucaugucacc

SEQ ID NO: 1288863 - RNA, 24 nt, Human
aaaaaagccaaaacugacaaacac

SEQ ID NO: 1288864 - RNA, 25 nt, Human
aaaaagacauacaauuuaacacaga

SEQ ID NO: 1288865 - RNA, 24 nt, Human
aaaaauuaaccaaauuuugucccu

SEQ ID NO: 1288866 - RNA, 21 nt, Human
aaacaagccacugcuuccuca

SEQ ID NO: 1288867 - RNA, 21 nt, Human
aaacaauggcaucaaauggac

SEQ ID NO: 1288868 - RNA, 23 nt, Human
aaacccaauucagaaaugaagaa

SEQ ID NO: 1288869 - RNA, 24 nt, Human
aaauauuggcagcuugaauaagcu

SEQ ID NO: 1288870 - RNA, 22 nt, Human
aacaaaggagaaaaaagccaaa

SEQ ID NO: 1288871 - RNA, 21 nt, Human
aacacgaaacauugacuaaua

SEQ ID NO: 1288872 - RNA, 23 nt, Human
aacagagcagcagaagcaucaag

SEQ ID NO: 1288873 - RNA, 24 nt, Human
aacagagcagcagaagcaucaaga

SEQ ID NO: 1288874 - RNA, 21 nt, Human
aagaauuccucuaaucauguc

SEQ ID NO: 1288875 - RNA, 21 nt, Human
aagagaaaacccaauucagaa

SEQ ID NO: 1288876 - RNA, 24 nt, Human
aauaaagaauauauacaaaaggga

SEQ ID NO: 1288877 - RNA, 26 nt, Human
aauucagagguauacuucugauuugg

SEQ ID NO: 1288878 - RNA, 18 nt, Human
acaaaacaaaaaaaagag

SEQ ID NO: 1288879 - RNA, 20 nt, Human
acaacaaaggagaaaaaagc

SEQ ID NO: 1288880 - RNA, 23 nt, Human
acaacaaaggagaaaaaagccaa

SEQ ID NO: 1288881 - RNA, 25 nt, Human
acaucaagaagagaaaacccaauuc

SEQ ID NO: 1288882 - RNA, 22 nt, Human
acccaauucagaaaugaagaaa

SEQ ID NO: 1288883 - RNA, 21 nt, Human
acccccagagcaucucaauau

SEQ ID NO: 1288884 - RNA, 23 nt, Human
acccuuucacuugaucucccccu

SEQ ID NO: 1288885 - RNA, 19 nt, Human
acugcuuccucaaagcaag

SEQ ID NO: 1288886 - RNA, 24 nt, Human
agaaaauccguggugaaaccugaa

SEQ ID NO: 1288887 - RNA, 20 nt, Human
agaaaugaagaaaacuggca

SEQ ID NO: 1288888 - RNA, 25 nt, Human
agaauacaacaaaggagaaaaaagc

SEQ ID NO: 1288889 - RNA, 20 nt, Human
agacuggagacagcaagggu

SEQ ID NO: 1288890 - RNA, 24 nt, Human
agauggauugguagaggugugucg

SEQ ID NO: 1288891 - RNA, 18 nt, Human
agcaaggaggcaaguacu

SEQ ID NO: 1288892 - RNA, 27 nt, Human
agcaaggaggcaaguacugaagaagaa

SEQ ID NO: 1288893 - RNA, 25 nt, Human
agcagaagcaucaagaucaggucca

SEQ ID NO: 1288894 - RNA, 19 nt, Human
agcucauuuuuucccucag

SEQ ID NO: 1288895 - RNA, 19 nt, Human
aguacugaagaagaaaagg

SEQ ID NO: 1288896 - RNA, 19 nt, Human
auaaugcggaacacgaaac

SEQ ID NO: 1288897 - RNA, 28 nt, Human
auacacccccagagcaucucccguaccg

SEQ ID NO: 1288898 - RNA, 20 nt, Human
auccagggaaucccagaaau

SEQ ID NO: 1288899 - RNA, 22 nt, Human
caaagcaaggaccaggcuccaa

SEQ ID NO: 1288900 - RNA, 21 nt, Human
caaaggagaaaaaagccaaaa

SEQ ID NO: 1288901 - RNA, 23 nt, Human
caaauaaugcggaacacgaaaca

SEQ ID NO: 1288902 - RNA, 20 nt, Human
caaaugacaacuugaucaca

SEQ ID NO: 1288903 - RNA, 21 nt, Human
caagaucagguccaaagaguu

SEQ ID NO: 1288904 - RNA, 23 nt, Human
caccacauaaauacugggcaaca

SEQ ID NO: 1288905 - RNA, 19 nt, Human
cacccuuucacuugaucuc

SEQ ID NO: 1288906 - RNA, 22 nt, Human
caccuucagcuaucaaucauuu

SEQ ID NO: 1288907 - RNA, 23 nt, Human
cagagcaucucaauaucccuggc

SEQ ID NO: 1288908 - RNA, 21 nt, Human
cagcaguuccuuaggagccaa

SEQ ID NO: 1288909 - RNA, 22 nt, Human
cagcaguuccuuaggagccaac

SEQ ID NO: 1288910 - RNA, 25 nt, Human
cagucucuuuuuuguggagagaagg

SEQ ID NO: 1288911 - RNA, 20 nt, Human
cauacaauuuaacacagacu

SEQ ID NO: 1288912 - RNA, 23 nt, Human
cauugccaagaaaaccucucagc

SEQ ID NO: 1288913 - RNA, 20 nt, Human
ccaacagagcagcagaagca

SEQ ID NO: 1288914 - RNA, 21 nt, Human
ccaauucagaaaugaagaaaa

SEQ ID NO: 1288915 - RNA, 22 nt, Human
ccagagcaucucaauaucccug

SEQ ID NO: 1288916 - RNA, 20 nt, Human
cccucaggugguuaaaggcc

SEQ ID NO: 1288917 - RNA, 21 nt, Human
cccucagucucuuuuuugugg

SEQ ID NO: 1288918 - RNA, 22 nt, Human
ccucaaaaacaaaacaaaaaaa

SEQ ID NO: 1288919 - RNA, 21 nt, Human
ccucacauugccaagaaaacc

SEQ ID NO: 1288920 - RNA, 23 nt, Human
ccucagucucuuuuuuguggaga

SEQ ID NO: 1288921 - RNA, 19 nt, Human
ccugaguugcucagcccuc

SEQ ID NO: 1288922 - RNA, 19 nt, Human
ccugccuuccucuuccucc

SEQ ID NO: 1288923 - RNA, 21 nt, Human
ccuguaggucgaaccaacacu

SEQ ID NO: 1288924 - RNA, 23 nt, Human
ccuuucacuugaucucccccuca

SEQ ID NO: 1288925 - RNA, 21 nt, Human
cgaaccaacacucaauccaug

SEQ ID NO: 1288926 - RNA, 19 nt, Human
cucaaaagaugauaaacaa

SEQ ID NO: 1288927 - RNA, 20 nt, Human
cucaaaagaugauaaacaau

SEQ ID NO: 1288928 - RNA, 21 nt, Human
cucaaaagaugauaaacaaug

SEQ ID NO: 1288929 - RNA, 22 nt, Human
cucacuaccaccuucagcuauc

SEQ ID NO: 1288930 - RNA, 19 nt, Human
cucauauaaugaauccagg

SEQ ID NO: 1288931 - RNA, 22 nt, Human
cuggccaccuacagcaaaauau

SEQ ID NO: 1288932 - RNA, 21 nt, Human
cuguaagcugauuccaaaagc

SEQ ID NO: 1288933 - RNA, 23 nt, Human
cuuccucaaagcaaggaccaggc

SEQ ID NO: 1288934 - RNA, 20 nt, Human
cuucuugaaacaagccacug

SEQ ID NO: 1288935 - RNA, 19 nt, Human
gaacauucuaccccugcuu

SEQ ID NO: 1288936 - RNA, 18 nt, Human
gaagaagaaaaggaacaa

SEQ ID NO: 1288937 - RNA, 21 nt, Human
gaaggaaaccaacaucaagaa

SEQ ID NO: 1288938 - RNA, 22 nt, Human
ggagaagggcuaucauacaaca

SEQ ID NO: 1288939 - RNA, 22 nt, Human
ggcagguauacaauacaccccc

SEQ ID NO: 1288940 - RNA, 24 nt, Human
ggggcaaauucuagacuaaagaaa

SEQ ID NO: 1288941 - RNA, 24 nt, Human
gucaccaucucauauaaugaaucc

SEQ ID NO: 1288942 - RNA, 24 nt, Human
gucucuuuuuuguggagagaaggg

SEQ ID NO: 1288943 - RNA, 25 nt, Human
uaaaaaagcaaaagaauaaagaaua

SEQ ID NO: 1288944 - RNA, 22 nt, Human
uaaaaaucugaccccaaggaau

SEQ ID NO: 1288945 - RNA, 23 nt, Human
uaaagcuuaguugaaucucuaaa

SEQ ID NO: 1288946 - RNA, 20 nt, Human
uaaaguaacuuuaaaaaucu

SEQ ID NO: 1288947 - RNA, 22 nt, Human
uaaaguguccucacuaccaccu

SEQ ID NO: 1288948 - RNA, 18 nt, Human
uaagggcaaaugguucaa

SEQ ID NO: 1288949 - RNA, 23 nt, Human
uaccccugcuuuggagaagggcu

SEQ ID NO: 1288950 - RNA, 20 nt, Human
uacugggagauuaaguccau

SEQ ID NO: 1288951 - RNA, 19 nt, Human
uagaaaauuaguuucaggg

SEQ ID NO: 1288952 - RNA, 18 nt, Human
uauacaauacacccccag

SEQ ID NO: 1288953 - RNA, 18 nt, Human
uaugaaggaaaccaacau

SEQ ID NO: 1288954 - RNA, 23 nt, Human
uaugagaaacaaaacuggccacc

SEQ ID NO: 1288955 - RNA, 19 nt, Human
ucagaaaugaagaaaacug

SEQ ID NO: 1288956 - RNA, 22 nt, Human
ucagaaguggcuucuugaaaca

SEQ ID NO: 1288957 - RNA, 21 nt, Human
ucagagguauacuucugauuu

SEQ ID NO: 1288958 - RNA, 24 nt, Human
ucauacaacauucagucagcugaa

SEQ ID NO: 1288959 - RNA, 23 nt, Human
ucccaacuacugggagauuaagu

SEQ ID NO: 1288960 - RNA, 18 nt, Human
uccguggugaaaccugaa

SEQ ID NO: 1288961 - RNA, 25 nt, Human
uccuuaggagccaacaugacaggug

SEQ ID NO: 1288962 - RNA, 18 nt, Human
ucgaaccaacacucaauc

SEQ ID NO: 1288963 - RNA, 20 nt, Human
ucuagacuaaagaaaugauc

SEQ ID NO: 1288964 - RNA, 24 nt, Human
ucuuccaaaugacaacuugaucac

SEQ ID NO: 1288965 - RNA, 25 nt, Human
ugaaacaagccacugcuuccucaaa

SEQ ID NO: 1288966 - RNA, 22 nt, Human
ugaaaccugaacauucuacccc

SEQ ID NO: 1288967 - RNA, 18 nt, Human
ugaagaagaaaaggaaca

SEQ ID NO: 1288968 - RNA, 21 nt, Human
ugacaggugggucagauuucc

SEQ ID NO: 1288969 - RNA, 23 nt, Human
ugaccccaaggaauccaggacac

SEQ ID NO: 1288970 - RNA, 23 nt, Human
ugagccgcuuacaacagcaguuc

SEQ ID NO: 1288971 - RNA, 23 nt, Human
ugaguaaguccugccuuccucuu

SEQ ID NO: 1288972 - RNA, 19 nt, Human
ugaucucccccucagucuc

SEQ ID NO: 1288973 - RNA, 22 nt, Human
uggguagauucuuagaucagaa

SEQ ID NO: 1288974 - RNA, 21 nt, Human
ugguagcauaaaauuuggccc

SEQ ID NO: 1288975 - RNA, 21 nt, Human
uguccucacuaccaccuucag

SEQ ID NO: 1288976 - RNA, 19 nt, Human
uuaacacagacugaguggg

SEQ ID NO: 1288977 - RNA, 23 nt, Human
uuauaaaguaacuuuaaaaaucu

SEQ ID NO: 1288978 - RNA, 22 nt, Human
uuaucuccucaaaaacaaaaca

SEQ ID NO: 1288979 - RNA, 24 nt, Human
uucagaggccaacagagcagcaga

SEQ ID NO: 1288980 - RNA, 19 nt, Human
uuccaaucuauuaugccug

SEQ ID NO: 1288981 - RNA, 20 nt, Human
uuuaaaacaucucccaacua

SEQ ID NO: 1288982 - RNA, 21 nt, Human
uuuaaaguguccucacuacca

SEQ ID NO: 1288983 - RNA, 24 nt, Human
uuuuaaaacaucucccaacuacug

SEQ ID NO: 1288984 - RNA, 25 nt, Human
aagcaagagugagccaccggcugga

SEQ ID NO: 1288985 - RNA, 21 nt, Human
accucagcaaagcaagaguga

SEQ ID NO: 1288986 - RNA, 20 nt, Human
cacgaugaccucagcaaagc

SEQ ID NO: 1288987 - RNA, 21 nt, Human
ccuucuguaacgcaugaguca

SEQ ID NO: 1288988 - RNA, 23 nt, Human
gcaaagcaagagugagccaccgg

SEQ ID NO: 1288989 - RNA, 20 nt, Human
guucuuuuuuucuggcacga

SEQ ID NO: 1288990 - RNA, 20 nt, Human
acaaagaaggaguccacaac

SEQ ID NO: 1288991 - RNA, 24 nt, Human
cugcuaaaaaugauagcuuuucuu

SEQ ID NO: 1288992 - RNA, 21 nt, Human
uagcuuuucuuucucuucaaa

SEQ ID NO: 1288993 - RNA, 24 nt, Human
uccaagagauguugaccagagaag

SEQ ID NO: 1288994 - RNA, 20 nt, Human
uccacaacuuuuccuuccaa

SEQ ID NO: 1288995 - RNA, 19 nt, Human
agagcuggggagcagaggg

SEQ ID NO: 1288996 - RNA, 23 nt, Human
agagugcaggugugcccgggccc

SEQ ID NO: 1288997 - RNA, 21 nt, Human
aggccaccaucagugccacga

SEQ ID NO: 1288998 - RNA, 22 nt, Human
agguggugcagagcuggggagc

SEQ ID NO: 1288999 - RNA, 21 nt, Human
aggugugcccgggcccagagc

SEQ ID NO: 1289000 - RNA, 23 nt, Human
cagagcuggggagcagagggagg

SEQ ID NO: 1289001 - RNA, 22 nt, Human
caggaugacucccgcauccaga

SEQ ID NO: 1289002 - RNA, 23 nt, Human
caggaugacucccgcauccagau

SEQ ID NO: 1289003 - RNA, 21 nt, Human
caggcaagauaggucacaggu

SEQ ID NO: 1289004 - RNA, 19 nt, Human
caggcccaguuugaggaug

SEQ ID NO: 1289005 - RNA, 23 nt, Human
caggcccaguuugaggaugccau

SEQ ID NO: 1289006 - RNA, 24 nt, Human
caggggcucaagguggggucuucu

SEQ ID NO: 1289007 - RNA, 18 nt, Human
caggugugcccgggccca

SEQ ID NO: 1289008 - RNA, 22 nt, Human
ccacgacugaggagcugaaggc

SEQ ID NO: 1289009 - RNA, 23 nt, Human
ccagcaggcaagauaggucacag

SEQ ID NO: 1289010 - RNA, 21 nt, Human
ccaggagguggugcagagcug

SEQ ID NO: 1289011 - RNA, 22 nt, Human
cccgcauccagauggcgacccu

SEQ ID NO: 1289012 - RNA, 23 nt, Human
cccucacagcagguggcagaggu

SEQ ID NO: 1289013 - RNA, 20 nt, Human
ccugcagccuccgcagcacc

SEQ ID NO: 1289014 - RNA, 22 nt, Human
cgaggcagagugcaggugugcc

SEQ ID NO: 1289015 - RNA, 28 nt, Human
cgcgagagccuccaggaccuagcggcag

SEQ ID NO: 1289016 - RNA, 18 nt, Human
cuagaaaggccccugugg

SEQ ID NO: 1289017 - RNA, 23 nt, Human
cuagcggcaguggucagcguccu

SEQ ID NO: 1289018 - RNA, 18 nt, Human
cuaggcucaguccuucug

SEQ ID NO: 1289019 - RNA, 20 nt, Human
cugaaggcccuccaggccca

SEQ ID NO: 1289020 - RNA, 18 nt, Human
gauaggucacagguggcc

SEQ ID NO: 1289021 - RNA, 18 nt, Human
gcacagcccucacagcag

SEQ ID NO: 1289022 - RNA, 21 nt, Human
gcccugcagccuccgcagcac

SEQ ID NO: 1289023 - RNA, 21 nt, Human
gcucuagaaaggccccugugg

SEQ ID NO: 1289024 - RNA, 21 nt, Human
ggauugguggcuccauggggu

SEQ ID NO: 1289025 - RNA, 19 nt, Human
ggcccaggggcucaaggug

SEQ ID NO: 1289026 - RNA, 18 nt, Human
gggagcagagggaggcca

SEQ ID NO: 1289027 - RNA, 21 nt, Human
gggcagggcaccugugccugc

SEQ ID NO: 1289028 - RNA, 22 nt, Human
ggggcagcugcagaaagcccug

SEQ ID NO: 1289029 - RNA, 21 nt, Human
ggggccgggcccaggggcuca

SEQ ID NO: 1289030 - RNA, 21 nt, Human
ggugugcccgggcccagagcc

SEQ ID NO: 1289031 - RNA, 23 nt, Human
gugcagagcuggggagcagaggg

SEQ ID NO: 1289032 - RNA, 19 nt, Human
ucagcccguggaagccgcc

SEQ ID NO: 1289033 - RNA, 19 nt, Human
ucagugccacgacugagga

SEQ ID NO: 1289034 - RNA, 21 nt, Human
uccaggcccaguuugaggaug

SEQ ID NO: 1289035 - RNA, 25 nt, Human
ucugcccaggaugacucccgcaucc

SEQ ID NO: 1289036 - RNA, 21 nt, Human
ugaaggcccuccaggcccagu

SEQ ID NO: 1289037 - RNA, 21 nt, Human
ugagcgaggcagagugcaggu

SEQ ID NO: 1289038 - RNA, 22 nt, Human
ugaggaugccaucacagcccau

SEQ ID NO: 1289039 - RNA, 24 nt, Human
ugaggaugccaucacagccgggac

SEQ ID NO: 1289040 - RNA, 18 nt, Human
uggcacagcccucacagc

SEQ ID NO: 1289041 - RNA, 22 nt, Human
uggcuccauggggugagcaaag

SEQ ID NO: 1289042 - RNA, 19 nt, Human
ugggcagggcaccugugcc

SEQ ID NO: 1289043 - RNA, 18 nt, Human
uggggagcagagggaggc

SEQ ID NO: 1289044 - RNA, 22 nt, Human
uggggcagcugggcaggauggc

SEQ ID NO: 1289045 - RNA, 19 nt, Human
uggggguccagagaggccg

SEQ ID NO: 1289046 - RNA, 20 nt, Human
uugggcagggcaccugugcc

SEQ ID NO: 1289047 - RNA, 21 nt, Human
uugggcagggcaccugugccu

SEQ ID NO: 1289048 - RNA, 21 nt, Human
aagauucucuuuagccugaaa

SEQ ID NO: 1289049 - RNA, 22 nt, Human
aggggaaaauauuaaaugaccc

SEQ ID NO: 1289050 - RNA, 19 nt, Human
cagaauucccaacaggccc

SEQ ID NO: 1289051 - RNA, 19 nt, Human
gcagaauucccaacaggcc

SEQ ID NO: 1289052 - RNA, 24 nt, Human
uagccugaaauuaugguccguacc

SEQ ID NO: 1289053 - RNA, 23 nt, Human
ucacccugagcagaauucccaac

SEQ ID NO: 1289054 - RNA, 24 nt, Human
ugaccccuuaagauucucuuuagc

SEQ ID NO: 1289055 - RNA, 19 nt, Human
uggcucagguccuuauggu

SEQ ID NO: 1289056 - RNA, 20 nt, Human
uggcucagguccuuaugguu

SEQ ID NO: 1289057 - RNA, 19 nt, Human
ugggauggagcacuggcuc

SEQ ID NO: 1289058 - RNA, 24 nt, Human
uuaaaugaccccuuaagauucucu

SEQ ID NO: 1289059 - RNA, 22 nt, Human
aaaacagcagcgauuuuuaaag

SEQ ID NO: 1289060 - RNA, 23 nt, Human
aaaacagcagcgauuuuuaaagu

SEQ ID NO: 1289061 - RNA, 23 nt, Human
aacugggucuccaccuucacgau

SEQ ID NO: 1289062 - RNA, 18 nt, Human
aagaaaacaggaaggcgu

SEQ ID NO: 1289063 - RNA, 22 nt, Human
acaguaucaacauuagaaugaa

SEQ ID NO: 1289064 - RNA, 21 nt, Human
accgcucacugaagccucgac

SEQ ID NO: 1289065 - RNA, 19 nt, Human
acuacaggugcgugccacc

SEQ ID NO: 1289066 - RNA, 21 nt, Human
agaggggaaagcagggucuug

SEQ ID NO: 1289067 - RNA, 22 nt, Human
agccucgaccuccuagacuuag

SEQ ID NO: 1289068 - RNA, 18 nt, Human
aggacaagaggggaaagc

SEQ ID NO: 1289069 - RNA, 19 nt, Human
aggcuggagugcaguggca

SEQ ID NO: 1289070 - RNA, 18 nt, Human
aguagcugggacuacagg

SEQ ID NO: 1289071 - RNA, 23 nt, Human
aguccuuugcuuuauuuugaagg

SEQ ID NO: 1289072 - RNA, 24 nt, Human
aucauucacacauccucccacagu

SEQ ID NO: 1289073 - RNA, 23 nt, Human
auuacaggggaauacacagcagc

SEQ ID NO: 1289074 - RNA, 18 nt, Human
auuuggguuguccucccc

SEQ ID NO: 1289075 - RNA, 20 nt, Human
cacaguaucaacauuagaau

SEQ ID NO: 1289076 - RNA, 24 nt, Human
cacaguaucaacauuagaaugaag

SEQ ID NO: 1289077 - RNA, 27 nt, Human
cacccucgccgcuccgcuggccgggaa

SEQ ID NO: 1289078 - RNA, 21 nt, Human
caccgcacuaauuuuuuuccu

SEQ ID NO: 1289079 - RNA, 22 nt, Human
cacuaauuuuuuuccuuuuuuu

SEQ ID NO: 1289080 - RNA, 23 nt, Human
cacugccacaaaaaaaugaggga

SEQ ID NO: 1289081 - RNA, 22 nt, Human
cagcaaaguggucaaacauaug

SEQ ID NO: 1289082 - RNA, 19 nt, Human
caggauuuaaggguccuuc

SEQ ID NO: 1289083 - RNA, 24 nt, Human
cagggucuugcucugucgcccagg

SEQ ID NO: 1289084 - RNA, 21 nt, Human
caucauucacacauccuccca

SEQ ID NO: 1289085 - RNA, 18 nt, Human
cauucaauuuccucugca

SEQ ID NO: 1289086 - RNA, 23 nt, Human
ccaaagcaucggcaauauuguac

SEQ ID NO: 1289087 - RNA, 19 nt, Human
ccacaaaaaaaugagggaa

SEQ ID NO: 1289088 - RNA, 21 nt, Human
cccacaguuuccagcaagcuu

SEQ ID NO: 1289089 - RNA, 24 nt, Human
ccccaaaaguaggaaggcaugcac

SEQ ID NO: 1289090 - RNA, 23 nt, Human
cccgaguagcugggacuacaggu

SEQ ID NO: 1289091 - RNA, 24 nt, Human
cccgaguagcugggacuacaggug

SEQ ID NO: 1289092 - RNA, 23 nt, Human
ccgcuucagccucccgaguagcu

SEQ ID NO: 1289093 - RNA, 24 nt, Human
ccucccgcuucagccucccgagua

SEQ ID NO: 1289094 - RNA, 23 nt, Human
ccugacccaagggcugaagaaag

SEQ ID NO: 1289095 - RNA, 21 nt, Human
ccugguugcagagggccuucc

SEQ ID NO: 1289096 - RNA, 20 nt, Human
ccuucucuuucuucaagucc

SEQ ID NO: 1289097 - RNA, 22 nt, Human
cgccuagagccugguuuuggag

SEQ ID NO: 1289098 - RNA, 24 nt, Human
cgcuucagccucccgaguagcugg

SEQ ID NO: 1289099 - RNA, 19 nt, Human
cuccaguugcuuggaauac

SEQ ID NO: 1289100 - RNA, 20 nt, Human
cugaagccucgaccuccuag

SEQ ID NO: 1289101 - RNA, 21 nt, Human
cugaggcacugccacaaaaaa

SEQ ID NO: 1289102 - RNA, 23 nt, Human
cugcagucguccccgccuagagc

SEQ ID NO: 1289103 - RNA, 22 nt, Human
cugguuuuggagccucgaggac

SEQ ID NO: 1289104 - RNA, 25 nt, Human
cuucagccucccgaguagcugggac

SEQ ID NO: 1289105 - RNA, 24 nt, Human
cuuccuucucuuucuucaaguccu

SEQ ID NO: 1289106 - RNA, 21 nt, Human
cuugcucugucgcccaggcug

SEQ ID NO: 1289107 - RNA, 18 nt, Human
cuuuuugguagagacggg

SEQ ID NO: 1289108 - RNA, 21 nt, Human
cuuuuuuuuuuuuuuucuuuu

SEQ ID NO: 1289109 - RNA, 22 nt, Human
gaaagcagggucuugcucuguc

SEQ ID NO: 1289110 - RNA, 22 nt, Human
gacccucccgcuucagccuccc

SEQ ID NO: 1289111 - RNA, 21 nt, Human
gaugggcgaccaacucuccac

SEQ ID NO: 1289112 - RNA, 19 nt, Human
gcccaggcuggagugcagu

SEQ ID NO: 1289113 - RNA, 23 nt, Human
gcccaggcuggagugcaguggca

SEQ ID NO: 1289114 - RNA, 25 nt, Human
gcucugucgcccaggcuggagugca

SEQ ID NO: 1289115 - RNA, 19 nt, Human
gcuggagugcaguggcaca

SEQ ID NO: 1289116 - RNA, 28 nt, Human
ggaaauaugcaucauucacacauccucc

SEQ ID NO: 1289117 - RNA, 21 nt, Human
ggacaagaggggaaagcaggg

SEQ ID NO: 1289118 - RNA, 19 nt, Human
ggagaaacacaguaucaac

SEQ ID NO: 1289119 - RNA, 23 nt, Human
gggaauuuggcaaggcuuugccc

SEQ ID NO: 1289120 - RNA, 26 nt, Human
guaaacacguaagccuacuggccucc

SEQ ID NO: 1289121 - RNA, 19 nt, Human
uaaaguucucaaaccaucc

SEQ ID NO: 1289122 - RNA, 19 nt, Human
uacacagcagcuuagagca

SEQ ID NO: 1289123 - RNA, 20 nt, Human
uacaggggaauacacagcag

SEQ ID NO: 1289124 - RNA, 24 nt, Human
uaucacccaucaccucuuuuauca

SEQ ID NO: 1289125 - RNA, 25 nt, Human
uauguucaaaugcuucaguuauacc

SEQ ID NO: 1289126 - RNA, 27 nt, Human
ucaccuaaaugacauccucuucuucau

SEQ ID NO: 1289127 - RNA, 23 nt, Human
ucagccucccgaguagcugggac

SEQ ID NO: 1289128 - RNA, 23 nt, Human
ucccgaguagcugggacuacagg

SEQ ID NO: 1289129 - RNA, 23 nt, Human
uccuccccagauguuucccauug

SEQ ID NO: 1289130 - RNA, 19 nt, Human
uccucuaagcuuuccagau

SEQ ID NO: 1289131 - RNA, 22 nt, Human
ucgcccaggcuggagugcagug

SEQ ID NO: 1289132 - RNA, 21 nt, Human
ucuguccacaguuagcaacau

SEQ ID NO: 1289133 - RNA, 24 nt, Human
ucugucgcccaggcuggagugcag

SEQ ID NO: 1289134 - RNA, 20 nt, Human
ucuuccuucucuuucuuccc

SEQ ID NO: 1289135 - RNA, 22 nt, Human
ucuugcucugucgcccaggcug

SEQ ID NO: 1289136 - RNA, 23 nt, Human
ucuugcucugucgcccaggcugg

SEQ ID NO: 1289137 - RNA, 24 nt, Human
ucuugcucugucgcccaggcugga

SEQ ID NO: 1289138 - RNA, 18 nt, Human
ucuuuuuuugucucucug

SEQ ID NO: 1289139 - RNA, 18 nt, Human
ugagggaaauccuguccu

SEQ ID NO: 1289140 - RNA, 22 nt, Human
ugagggaaauccuguccuuagc

SEQ ID NO: 1289141 - RNA, 19 nt, Human
ugaguccccacccucgccg

SEQ ID NO: 1289142 - RNA, 22 nt, Human
ugauucugggugugauuacaag

SEQ ID NO: 1289143 - RNA, 18 nt, Human
ugcaaagacuucuuccug

SEQ ID NO: 1289144 - RNA, 20 nt, Human
ugcaaagacuucuuccuguu

SEQ ID NO: 1289145 - RNA, 23 nt, Human
ugcaucauucacacauccuccca

SEQ ID NO: 1289146 - RNA, 22 nt, Human
ugcgugccaccacaccgcacua

SEQ ID NO: 1289147 - RNA, 23 nt, Human
ugcgugccaccacaccgcacuaa

SEQ ID NO: 1289148 - RNA, 24 nt, Human
ugcucugucgcccaggcuggagug

SEQ ID NO: 1289149 - RNA, 22 nt, Human
uggagccucgaggacgccgacg

SEQ ID NO: 1289150 - RNA, 18 nt, Human
uggagugcaguggcacaa

SEQ ID NO: 1289151 - RNA, 19 nt, Human
uggagugcaguggcacaau

SEQ ID NO: 1289152 - RNA, 21 nt, Human
uggagugcaguggcacaauca

SEQ ID NO: 1289153 - RNA, 21 nt, Human
uggcaaggcuuugcccuacgc

SEQ ID NO: 1289154 - RNA, 21 nt, Human
ugggacuacaggugcgugcca

SEQ ID NO: 1289155 - RNA, 22 nt, Human
ugggacuacaggugcgugccac

SEQ ID NO: 1289156 - RNA, 24 nt, Human
ugggacuacaggugcgugccacca

SEQ ID NO: 1289157 - RNA, 18 nt, Human
ugguagagacggguuucu

SEQ ID NO: 1289158 - RNA, 23 nt, Human
uguccuuagcuuccucuaagcuu

SEQ ID NO: 1289159 - RNA, 23 nt, Human
uguuagagucuuuguaaagcagc

SEQ ID NO: 1289160 - RNA, 22 nt, Human
uuaucauuuugucaccugaggc

SEQ ID NO: 1289161 - RNA, 21 nt, Human
uuccugagggagaaacacagu

SEQ ID NO: 1289162 - RNA, 18 nt, Human
uuccugaggguaguggag

SEQ ID NO: 1289163 - RNA, 24 nt, Human
uugcaaaacagcagcgauuuuuaa

SEQ ID NO: 1289164 - RNA, 24 nt, Human
uugccccaaaaguaggaaggcaug

SEQ ID NO: 1289165 - RNA, 24 nt, Human
uugcucugucgcccaggcuggagu

SEQ ID NO: 1289166 - RNA, 24 nt, Human
uugguucccuguagauguauuugg

SEQ ID NO: 1289167 - RNA, 22 nt, Human
uuuaaaguucucaaaccauccc

SEQ ID NO: 1289168 - RNA, 20 nt, Human
uuuggccugguugcagaggg

SEQ ID NO: 1289169 - RNA, 24 nt, Human
uuuuuuuucuuuuugguagagacg

SEQ ID NO: 1289170 - RNA, 18 nt, Human
uuuuuuuuuuucuuuuug

SEQ ID NO: 1289171 - RNA, 18 nt, Human
uuuuuuuuuuucuuuuug

SEQ ID NO: 1289172 - RNA, 23 nt, Human
uuuuuuuuuuuucuuuuugguag

SEQ ID NO: 1289173 - RNA, 19 nt, Human
acagugcugggacagccac

SEQ ID NO: 1289174 - RNA, 21 nt, Human
acucagucuccucaucuguaa

SEQ ID NO: 1289175 - RNA, 20 nt, Human
agagagggaggaaagaagga

SEQ ID NO: 1289176 - RNA, 18 nt, Human
aggaaagaaggaggcaag

SEQ ID NO: 1289177 - RNA, 19 nt, Human
aggacaaagcccagagaga

SEQ ID NO: 1289178 - RNA, 25 nt, Human
auaccaaaguccuccccacuuacca

SEQ ID NO: 1289179 - RNA, 18 nt, Human
cacagguucaccgcaugu

SEQ ID NO: 1289180 - RNA, 21 nt, Human
caccugauaccaaaguccucc

SEQ ID NO: 1289181 - RNA, 20 nt, Human
ccagagagagggaggaaaga

SEQ ID NO: 1289182 - RNA, 21 nt, Human
ccagcuggccucagccuauca

SEQ ID NO: 1289183 - RNA, 22 nt, Human
ccccacuuaccacccucucccu

SEQ ID NO: 1289184 - RNA, 20 nt, Human
ccccagcuauccacaccugg

SEQ ID NO: 1289185 - RNA, 20 nt, Human
cccuuuccuuuccggauguc

SEQ ID NO: 1289186 - RNA, 20 nt, Human
ccucaucuguaaaauggggu

SEQ ID NO: 1289187 - RNA, 21 nt, Human
ccugauaccaaaguccucccc

SEQ ID NO: 1289188 - RNA, 20 nt, Human
cgcagguuuguccagcugcu

SEQ ID NO: 1289189 - RNA, 23 nt, Human
cuauccacaccugauaccaaagu

SEQ ID NO: 1289190 - RNA, 22 nt, Human
cuccccacuuaccacccucucc

SEQ ID NO: 1289191 - RNA, 21 nt, Human
cugacugcccuuuccuuuccg

SEQ ID NO: 1289192 - RNA, 25 nt, Human
cugcccuuuccuuuccggaugucuc

SEQ ID NO: 1289193 - RNA, 21 nt, Human
gagccucaguuuuccccucug

SEQ ID NO: 1289194 - RNA, 23 nt, Human
ggaugucucaggacaaagcccag

SEQ ID NO: 1289195 - RNA, 25 nt, Human
gugacuugccuucuuugagccucag

SEQ ID NO: 1289196 - RNA, 20 nt, Human
ucucccuguggcugcugucu

SEQ ID NO: 1289197 - RNA, 22 nt, Human
ucuugggacucagucuccucau

SEQ ID NO: 1289198 - RNA, 21 nt, Human
ugacauccucugucgcagguu

SEQ ID NO: 1289199 - RNA, 20 nt, Human
ugagccucaguuuuccccuc

SEQ ID NO: 1289200 - RNA, 25 nt, Human
ugcccuuuccuuuccggaugucuca

SEQ ID NO: 1289201 - RNA, 21 nt, Human
uggcugcugucugacugcccu

SEQ ID NO: 1289202 - RNA, 20 nt, Human
uguaaaaugggguuaaugaa

SEQ ID NO: 1289203 - RNA, 21 nt, Human
cugggcccucuuccccucaga

SEQ ID NO: 1289204 - RNA, 23 nt, Human
agcccaguucccagggugugccu

SEQ ID NO: 1289205 - RNA, 21 nt, Human
cacggaagucaccugcugcac

SEQ ID NO: 1289206 - RNA, 24 nt, Human
cuccagcaacagcccaguucccag

SEQ ID NO: 1289207 - RNA, 23 nt, Human
cugcugcacugguuugccaacug

SEQ ID NO: 1289208 - RNA, 23 nt, Human
gcacagcagugucggcuccagca

SEQ ID NO: 1289209 - RNA, 22 nt, Human
gcuucacggaagucaccugcug

SEQ ID NO: 1289210 - RNA, 23 nt, Human
ucccagggugugccucuggcuuc

SEQ ID NO: 1289211 - RNA, 24 nt, Human
uggcuucacggaagucaccugcug

SEQ ID NO: 1289212 - RNA, 23 nt, Human
uucccagggugugccucuggcuu

SEQ ID NO: 1289213 - RNA, 22 nt, Human
aaagagccacugccucugcccc

SEQ ID NO: 1289214 - RNA, 20 nt, Human
acauagcaccuuuuccuucu

SEQ ID NO: 1289215 - RNA, 21 nt, Human
acucagugguguccagggcuc

SEQ ID NO: 1289216 - RNA, 18 nt, Human
agagccacugccucugcc

SEQ ID NO: 1289217 - RNA, 18 nt, Human
aucacagcuccuguggca

SEQ ID NO: 1289218 - RNA, 19 nt, Human
cacagccacaccugaguga

SEQ ID NO: 1289219 - RNA, 23 nt, Human
caccugagugaagccuucagaac

SEQ ID NO: 1289220 - RNA, 21 nt, Human
cagaacacaaagaucacagcc

SEQ ID NO: 1289221 - RNA, 21 nt, Human
ccagggcucccugcacuuccu

SEQ ID NO: 1289222 - RNA, 19 nt, Human
cccuggggaggucuggccu

SEQ ID NO: 1289223 - RNA, 24 nt, Human
ccucugcccccucagucacagcca

SEQ ID NO: 1289224 - RNA, 21 nt, Human
ccuucagaacacaaagaucac

SEQ ID NO: 1289225 - RNA, 29 nt, Human
cugaggcagaggccuagaagggauuucau

SEQ ID NO: 1289226 - RNA, 20 nt, Human
cugcccccucagucacagcc

SEQ ID NO: 1289227 - RNA, 18 nt, Human
gccacaccugagugaagc

SEQ ID NO: 1289228 - RNA, 25 nt, Human
guccagggcucccugcacuuccuuc

SEQ ID NO: 1289229 - RNA, 25 nt, Human
uaaagagccacugccucugcccccu

SEQ ID NO: 1289230 - RNA, 19 nt, Human
ucagaacacaaagaucaca

SEQ ID NO: 1289231 - RNA, 22 nt, Human
ucagugguguccagggcucccu

SEQ ID NO: 1289232 - RNA, 21 nt, Human
ucccuggggaggucuggccuu

SEQ ID NO: 1289233 - RNA, 20 nt, Human
ugaggcagaggccuagaagg

SEQ ID NO: 1289234 - RNA, 23 nt, Human
ugaggcagaggccuagaagggau

SEQ ID NO: 1289235 - RNA, 20 nt, Human
uguccagggcucccugcacu

SEQ ID NO: 1289236 - RNA, 21 nt, Human
aaaggauaccgagaagccagu

SEQ ID NO: 1289237 - RNA, 26 nt, Human
aacacacacacacacaugcacaccca

SEQ ID NO: 1289238 - RNA, 18 nt, Human
aagcgcgcuccaaagaca

SEQ ID NO: 1289239 - RNA, 25 nt, Human
acacacacacaugcacacccacacc

SEQ ID NO: 1289240 - RNA, 26 nt, Human
acccaccucucccauaaacacacaca

SEQ ID NO: 1289241 - RNA, 21 nt, Human
accccacgauaaacaaaaucg

SEQ ID NO: 1289242 - RNA, 24 nt, Human
accuaaagucucccagccucucca

SEQ ID NO: 1289243 - RNA, 21 nt, Human
acugcagguuuccagggucag

SEQ ID NO: 1289244 - RNA, 21 nt, Human
aggcacggauacgcuucugag

SEQ ID NO: 1289245 - RNA, 20 nt, Human
aguaaauaccaacccaugcu

SEQ ID NO: 1289246 - RNA, 19 nt, Human
agucgucgggcagcgucac

SEQ ID NO: 1289247 - RNA, 18 nt, Human
aguucauuggccguaccc

SEQ ID NO: 1289248 - RNA, 22 nt, Human
caaaaucgauuaguaaauacca

SEQ ID NO: 1289249 - RNA, 22 nt, Human
caaagacaccgugcccggcgca

SEQ ID NO: 1289250 - RNA, 23 nt, Human
caagcacugcgcgcgggggccgg

SEQ ID NO: 1289251 - RNA, 23 nt, Human
cacacacacacacaugcacaccc

SEQ ID NO: 1289252 - RNA, 23 nt, Human
cacacacaugcacacccacaccc

SEQ ID NO: 1289253 - RNA, 25 nt, Human
cacacacaugcacacccacacccac

SEQ ID NO: 1289254 - RNA, 31 nt, Human
cacacacaugcacacccacacccacgcgcgg

SEQ ID NO: 1289255 - RNA, 21 nt, Human
cacacacgcacgcacacaccc

SEQ ID NO: 1289256 - RNA, 18 nt, Human
cacacgcacgcacacacc

SEQ ID NO: 1289257 - RNA, 18 nt, Human
cacacuccugcccacgcc

SEQ ID NO: 1289258 - RNA, 19 nt, Human
cacagccuugcaagcaaaa

SEQ ID NO: 1289259 - RNA, 23 nt, Human
cacagccuugcaagcaaaaguuu

SEQ ID NO: 1289260 - RNA, 22 nt, Human
cacccacacccacgcgcgcccg

SEQ ID NO: 1289261 - RNA, 23 nt, Human
caccucucccauaaacacacaca

SEQ ID NO: 1289262 - RNA, 19 nt, Human
cacgcacacacccaccucu

SEQ ID NO: 1289263 - RNA, 22 nt, Human
cacgcacgcacacacccaccuc

SEQ ID NO: 1289264 - RNA, 19 nt, Human
cacgcccacgcagcgcucc

SEQ ID NO: 1289265 - RNA, 19 nt, Human
cagccucuccaccaccccg

SEQ ID NO: 1289266 - RNA, 22 nt, Human
ccacacccacgcgcgcccgcac

SEQ ID NO: 1289267 - RNA, 21 nt, Human
ccacgcccacgcagcgcuccg

SEQ ID NO: 1289268 - RNA, 22 nt, Human
ccacgcgcacacacuccugccc

SEQ ID NO: 1289269 - RNA, 23 nt, Human
cccacgcgcacacacuccugccc

SEQ ID NO: 1289270 - RNA, 25 nt, Human
cccacgcgcacacacuccugcccac

SEQ ID NO: 1289271 - RNA, 21 nt, Human
cccacgcgcgcccgcaccgcc

SEQ ID NO: 1289272 - RNA, 22 nt, Human
ccccacgcgcacacacuccugc

SEQ ID NO: 1289273 - RNA, 22 nt, Human
ccccagcuccuucgcugggcac

SEQ ID NO: 1289274 - RNA, 19 nt, Human
ccccggagaggauacucgg

SEQ ID NO: 1289275 - RNA, 21 nt, Human
cccggcgcugcugccucggcc

SEQ ID NO: 1289276 - RNA, 21 nt, Human
ccgccgaaggagaggggugga

SEQ ID NO: 1289277 - RNA, 22 nt, Human
ccucccgcacagccuugcaagc

SEQ ID NO: 1289278 - RNA, 21 nt, Human
ccucccguaggcuccgcugua

SEQ ID NO: 1289279 - RNA, 24 nt, Human
ccucucccauaaacacacacacaa

SEQ ID NO: 1289280 - RNA, 24 nt, Human
ccucuugagccuuggaacaggagu

SEQ ID NO: 1289281 - RNA, 18 nt, Human
ccugggugggauguaagg

SEQ ID NO: 1289282 - RNA, 23 nt, Human
cgaaggagagggguggaguucau

SEQ ID NO: 1289283 - RNA, 22 nt, Human
cgagaagccacccgcggagagc

SEQ ID NO: 1289284 - RNA, 22 nt, Human
cgagagcaccacgagggggagc

SEQ ID NO: 1289285 - RNA, 18 nt, Human
cgcaccgccccacgcgca

SEQ ID NO: 1289286 - RNA, 19 nt, Human
cgcagcgcuccgggaaguc

SEQ ID NO: 1289287 - RNA, 26 nt, Human
cgcccgcaccgccccacgcgcacaca

SEQ ID NO: 1289288 - RNA, 22 nt, Human
cgcgcacacacuccugcccacg

SEQ ID NO: 1289289 - RNA, 29 nt, Human
cgcgcgcccgcaccgccccacgcgcacag

SEQ ID NO: 1289290 - RNA, 21 nt, Human
cggcgcccugggacgcggcgc

SEQ ID NO: 1289291 - RNA, 20 nt, Human
cggcgcucucccggcgcugc

SEQ ID NO: 1289292 - RNA, 23 nt, Human
cguucucccucgcccucucucuc

SEQ ID NO: 1289293 - RNA, 21 nt, Human
cuagcgccuuccgagcccucc

SEQ ID NO: 1289294 - RNA, 24 nt, Human
cucacacacgcacgcacacaccca

SEQ ID NO: 1289295 - RNA, 19 nt, Human
cuccaaagacaccgugccc

SEQ ID NO: 1289296 - RNA, 22 nt, Human
cucccagccucuccaccacccc

SEQ ID NO: 1289297 - RNA, 33 nt, Human
cucccauaaacacacacacacacaugcacagug

SEQ ID NO: 1289298 - RNA, 19 nt, Human
cucuaaacaggguaggcag

SEQ ID NO: 1289299 - RNA, 20 nt, Human
cucuugagccuuggaacagg

SEQ ID NO: 1289300 - RNA, 22 nt, Human
gagaagcucugccgugguaucc

SEQ ID NO: 1289301 - RNA, 19 nt, Human
gagagagcugauggugggg

SEQ ID NO: 1289302 - RNA, 18 nt, Human
gaucccgcucccucccgc

SEQ ID NO: 1289303 - RNA, 19 nt, Human
gcacggauacgcuucugag

SEQ ID NO: 1289304 - RNA, 23 nt, Human
gccuuggaacaggagugggcugg

SEQ ID NO: 1289305 - RNA, 20 nt, Human
gcgccaccuccuuuucucca

SEQ ID NO: 1289306 - RNA, 24 nt, Human
ggaaagcgcgcuccaaagacaccg

SEQ ID NO: 1289307 - RNA, 22 nt, Human
ggacaggagguguuaggggugg

SEQ ID NO: 1289308 - RNA, 20 nt, Human
ggagaagcucugccguggua

SEQ ID NO: 1289309 - RNA, 21 nt, Human
ggcacgaggccuccccagcuc

SEQ ID NO: 1289310 - RNA, 18 nt, Human
ggucucggccugcgggcc

SEQ ID NO: 1289311 - RNA, 21 nt, Human
gguguuagggguggggagaga

SEQ ID NO: 1289312 - RNA, 20 nt, Human
gugguccgggcgccugcggg

SEQ ID NO: 1289313 - RNA, 25 nt, Human
guucucccucgcccucucucucuca

SEQ ID NO: 1289314 - RNA, 23 nt, Human
uaaagcggauccaguccugggug

SEQ ID NO: 1289315 - RNA, 21 nt, Human
uaagggcacgaggccucccca

SEQ ID NO: 1289316 - RNA, 19 nt, Human
uagcgccuuccgagcccuc

SEQ ID NO: 1289317 - RNA, 20 nt, Human
uagggguggggagagagcug

SEQ ID NO: 1289318 - RNA, 21 nt, Human
ucccagccucuccaccacccc

SEQ ID NO: 1289319 - RNA, 19 nt, Human
uccccagcuccuucgcugg

SEQ ID NO: 1289320 - RNA, 21 nt, Human
ucccucgcccucucucucuca

SEQ ID NO: 1289321 - RNA, 18 nt, Human
uccgagagcaccacgagg

SEQ ID NO: 1289322 - RNA, 20 nt, Human
uccuagcgccuuccgagccc

SEQ ID NO: 1289323 - RNA, 20 nt, Human
uccugcccacgcccacgcag

SEQ ID NO: 1289324 - RNA, 22 nt, Human
uccuugauuggacaggaggugu

SEQ ID NO: 1289325 - RNA, 23 nt, Human
ucucacacacgcacgcacacacc

SEQ ID NO: 1289326 - RNA, 18 nt, Human
ucucccagccucuccacc

SEQ ID NO: 1289327 - RNA, 18 nt, Human
ucucccagccucuccacc

SEQ ID NO: 1289328 - RNA, 19 nt, Human
ucucccagccucuccacca

SEQ ID NO: 1289329 - RNA, 20 nt, Human
ucucccagccucuccaccaa

SEQ ID NO: 1289330 - RNA, 20 nt, Human
ucucccaggcucguucuccc

SEQ ID NO: 1289331 - RNA, 23 nt, Human
ucucccggcgcugcugccucggc

SEQ ID NO: 1289332 - RNA, 19 nt, Human
ucucggccugcgggccguc

SEQ ID NO: 1289333 - RNA, 23 nt, Human
ucuggaggagaggcacgggugcg

SEQ ID NO: 1289334 - RNA, 24 nt, Human
ugauggugggggaucccgcucccu

SEQ ID NO: 1289335 - RNA, 21 nt, Human
uggaacaggagugggcugggg

SEQ ID NO: 1289336 - RNA, 23 nt, Human
ugggaaagcgcgcuccaaagaca

SEQ ID NO: 1289337 - RNA, 19 nt, Human
uggucgguccuaccuaaag

SEQ ID NO: 1289338 - RNA, 23 nt, Human
uucauuggccguacccuugggga

SEQ ID NO: 1289339 - RNA, 22 nt, Human
uugcucuaaacaggguaggcag

SEQ ID NO: 1289340 - RNA, 19 nt, Human
aaaaaagccauaaauacua

SEQ ID NO: 1289341 - RNA, 24 nt, Human
aaagccauaaauacuacuuaaaau

SEQ ID NO: 1289342 - RNA, 21 nt, Human
accccacugaccacugaauug

SEQ ID NO: 1289343 - RNA, 28 nt, Human
auauucuucaggaaauuacuuuccauug

SEQ ID NO: 1289344 - RNA, 20 nt, Human
cagggguaggcaugggcauc

SEQ ID NO: 1289345 - RNA, 18 nt, Human
cauuuuuaucaccuugua

SEQ ID NO: 1289346 - RNA, 22 nt, Human
ccuugcuuuugaccccuccucu

SEQ ID NO: 1289347 - RNA, 21 nt, Human
cuuuacucuccuuuucacagu

SEQ ID NO: 1289348 - RNA, 21 nt, Human
gaccccuccucuuuacucucc

SEQ ID NO: 1289349 - RNA, 19 nt, Human
gcuuuugaccccuccucuu

SEQ ID NO: 1289350 - RNA, 22 nt, Human
ucccaccccacugaccacugaa

SEQ ID NO: 1289351 - RNA, 21 nt, Human
ucgaucccagggguaggcaug

SEQ ID NO: 1289352 - RNA, 18 nt, Human
ugggcaucuuucccuccu

SEQ ID NO: 1289353 - RNA, 24 nt, Human
uguguuuccauuuuuaucaccuug

SEQ ID NO: 1289354 - RNA, 18 nt, Human
uugccggggucuuguguu

SEQ ID NO: 1289355 - RNA, 24 nt, Human
uuguucccaccccacugaccacug

SEQ ID NO: 1289356 - RNA, 23 nt, Human
cuaaguguguauaaaauaccagc

SEQ ID NO: 1289357 - RNA, 23 nt, Human
agcugcagagaggugcagagaca

SEQ ID NO: 1289358 - RNA, 18 nt, Human
aggcagaggcgcagcugg

SEQ ID NO: 1289359 - RNA, 22 nt, Human
caguggagaugaggcccugaug

SEQ ID NO: 1289360 - RNA, 22 nt, Human
ggaugaugaaauagaugaugag

SEQ ID NO: 1289361 - RNA, 21 nt, Human
ggggagguggagauggagaca

SEQ ID NO: 1289362 - RNA, 19 nt, Human
ggugcagagacaguggaga

SEQ ID NO: 1289363 - RNA, 20 nt, Human
guggagaugaggcccugaug

SEQ ID NO: 1289364 - RNA, 21 nt, Human
ucagggccgcauccaaagagg

SEQ ID NO: 1289365 - RNA, 18 nt, Human
agaaggcaccuccuaggc

SEQ ID NO: 1289366 - RNA, 19 nt, Human
agaaggugcacccaguccc

SEQ ID NO: 1289367 - RNA, 19 nt, Human
cagcagagaaggcaccucc

SEQ ID NO: 1289368 - RNA, 21 nt, Human
ccuguccugcaggacugggaa

SEQ ID NO: 1289369 - RNA, 22 nt, Human
gagcagagaaugcagcagagaa

SEQ ID NO: 1289370 - RNA, 19 nt, Human
ggcucaggcgcggugggga

SEQ ID NO: 1289371 - RNA, 22 nt, Human
ucagccccgggaucuuccagga

SEQ ID NO: 1289372 - RNA, 18 nt, Human
ucccugguggaggguggc

SEQ ID NO: 1289373 - RNA, 21 nt, Human
uccgguuccuguccugcagga

SEQ ID NO: 1289374 - RNA, 26 nt, Human
ugagcagagaaugcagcagagaaggc

SEQ ID NO: 1289375 - RNA, 21 nt, Human
uggccagaagcccccgggggc

SEQ ID NO: 1289376 - RNA, 19 nt, Human
uguccugcaggacugggaa

SEQ ID NO: 1289377 - RNA, 23 nt, Human
cccacccgcaguggccuugcggg

SEQ ID NO: 1289378 - RNA, 23 nt, Human
ccugcccacccgcaguggccuug

SEQ ID NO: 1289379 - RNA, 20 nt, Human
gcaguggccuugcggggugu

SEQ ID NO: 1289380 - RNA, 19 nt, Human
ggcagaaacgucaggucca

SEQ ID NO: 1289381 - RNA, 21 nt, Human
ucagguccaggaacugaggag

SEQ ID NO: 1289382 - RNA, 27 nt, Human
uccugcccacccgcaguggccuugcgg

SEQ ID NO: 1289383 - RNA, 22 nt, Human
aacacaagcucaaucagaccua

SEQ ID NO: 1289384 - RNA, 25 nt, Human
acaacacaagcucaaucagaccuac

SEQ ID NO: 1289385 - RNA, 22 nt, Human
accccacacccagcuccuccag

SEQ ID NO: 1289386 - RNA, 23 nt, Human
auaaaaaucugacccaggccccc

SEQ ID NO: 1289387 - RNA, 21 nt, Human
caccacaccaucccggaacaa

SEQ ID NO: 1289388 - RNA, 19 nt, Human
caccccacacccagcuccu

SEQ ID NO: 1289389 - RNA, 21 nt, Human
cagcccaacgcaccccacacc

SEQ ID NO: 1289390 - RNA, 24 nt, Human
cagcccaacgcaccccacacccag

SEQ ID NO: 1289391 - RNA, 20 nt, Human
caggccccccauuucuuucc

SEQ ID NO: 1289392 - RNA, 23 nt, Human
cagggacucucuccccuagaccc

SEQ ID NO: 1289393 - RNA, 21 nt, Human
cauccccucuuccaccacacc

SEQ ID NO: 1289394 - RNA, 23 nt, Human
ccaccacaccaucccggaacaag

SEQ ID NO: 1289395 - RNA, 21 nt, Human
ccaggccccccauuucuuucc

SEQ ID NO: 1289396 - RNA, 21 nt, Human
cccaaacuaggccuccccacc

SEQ ID NO: 1289397 - RNA, 22 nt, Human
cccaacgcaccccacacccagc

SEQ ID NO: 1289398 - RNA, 22 nt, Human
cccaccccacaauaaaaaucug

SEQ ID NO: 1289399 - RNA, 22 nt, Human
ccccacacccagcuccuccagc

SEQ ID NO: 1289400 - RNA, 19 nt, Human
cccccauuucuuucccuca

SEQ ID NO: 1289401 - RNA, 22 nt, Human
ccccucuuccaccacaccaucc

SEQ ID NO: 1289402 - RNA, 23 nt, Human
cucaucccaccccacaauaaaaa

SEQ ID NO: 1289403 - RNA, 23 nt, Human
cucccgggcuggaucagagagcc

SEQ ID NO: 1289404 - RNA, 19 nt, Human
cuccuccagcucgguccuc

SEQ ID NO: 1289405 - RNA, 22 nt, Human
gaacaagugcuccaggauuccc

SEQ ID NO: 1289406 - RNA, 19 nt, Human
ggaaguggccgucccuggg

SEQ ID NO: 1289407 - RNA, 28 nt, Human
ggaggggguugagggagucccaggaggg

SEQ ID NO: 1289408 - RNA, 19 nt, Human
gggcuggaucagagagccg

SEQ ID NO: 1289409 - RNA, 18 nt, Human
ggggcugggaccggggaa

SEQ ID NO: 1289410 - RNA, 23 nt, Human
ucaaucagaccuacuugcaccca

SEQ ID NO: 1289411 - RNA, 24 nt, Human
ucaaucagaccuacuugcacccaa

SEQ ID NO: 1289412 - RNA, 23 nt, Human
uccagcucgguccucucccgggc

SEQ ID NO: 1289413 - RNA, 26 nt, Human
uccccaccagcccaacgcaccccacc

SEQ ID NO: 1289414 - RNA, 24 nt, Human
uccccucuuccaccacaccauccc

SEQ ID NO: 1289415 - RNA, 22 nt, Human
ucccgggcuggaucagagagcc

SEQ ID NO: 1289416 - RNA, 21 nt, Human
ucuccccuagacccagggcug

SEQ ID NO: 1289417 - RNA, 24 nt, Human
ucuccccuagacccagggcugucc

SEQ ID NO: 1289418 - RNA, 18 nt, Human
ugcuccaggauucccugc

SEQ ID NO: 1289419 - RNA, 22 nt, Human
ugcuccaggauucccugcccac

SEQ ID NO: 1289420 - RNA, 21 nt, Human
ugcuccaggauucccugcccc

SEQ ID NO: 1289421 - RNA, 24 nt, Human
uggagaaaauggaggggguugagg

SEQ ID NO: 1289422 - RNA, 20 nt, Human
ugggggaacugggaggggcu

SEQ ID NO: 1289423 - RNA, 23 nt, Human
uguccauuggguagcaaugugga

SEQ ID NO: 1289424 - RNA, 23 nt, Human
uguccuacucaucccaccccaca

SEQ ID NO: 1289425 - RNA, 20 nt, Human
uucccugcccacuggccauu

SEQ ID NO: 1289426 - RNA, 23 nt, Human
gcaguggccucagcuaugguauu

SEQ ID NO: 1289427 - RNA, 20 nt, Human
gcugcaguggccucagcuau

SEQ ID NO: 1289428 - RNA, 21 nt, Human
ucacaacuuuaauugcugcug

SEQ ID NO: 1289429 - RNA, 22 nt, Human
uuucacaacuuuaauugcugcu

SEQ ID NO: 1289430 - RNA, 23 nt, Human
aaacacgaccagcggcuucauga

SEQ ID NO: 1289431 - RNA, 23 nt, Human
acaaacacgaccagcggcuucau

SEQ ID NO: 1289432 - RNA, 18 nt, Human
cgccguggacaaacacga

SEQ ID NO: 1289433 - RNA, 19 nt, Human
cggcaggucugcagcggga

SEQ ID NO: 1289434 - RNA, 18 nt, Human
gaccagcggcuucaugag

SEQ ID NO: 1289435 - RNA, 20 nt, Human
uuaauguaauuuucagugag

SEQ ID NO: 1289436 - RNA, 23 nt, Human
accucaaaaaauucauggaggaa

SEQ ID NO: 1289437 - RNA, 21 nt, Human
auagcaucaacaaguaugaag

SEQ ID NO: 1289438 - RNA, 24 nt, Human
auuuuugauuugcaaacaaggauu

SEQ ID NO: 1289439 - RNA, 26 nt, Human
caacaaguaugaaauuacuuugaaaa

SEQ ID NO: 1289440 - RNA, 19 nt, Human
cagggccaacugcgggagg

SEQ ID NO: 1289441 - RNA, 19 nt, Human
cccucaggccguacguaac

SEQ ID NO: 1289442 - RNA, 26 nt, Human
cggaacaccacagggccaacugcggg

SEQ ID NO: 1289443 - RNA, 18 nt, Human
cucuccacaaaaccaaca

SEQ ID NO: 1289444 - RNA, 19 nt, Human
uagcaucaacaaguaugaa

SEQ ID NO: 1289445 - RNA, 21 nt, Human
uaugaaauuacuuugaaaaca

SEQ ID NO: 1289446 - RNA, 21 nt, Human
ucucuccacaaaaccaacaug

SEQ ID NO: 1289447 - RNA, 20 nt, Human
uguaaaauuuuauugugaaa

SEQ ID NO: 1289448 - RNA, 19 nt, Human
aagcuuauuuauggaaaag

SEQ ID NO: 1289449 - RNA, 19 nt, Human
accaacuuucaacauggcu

SEQ ID NO: 1289450 - RNA, 23 nt, Human
accuacuggccucccccaacccu

SEQ ID NO: 1289451 - RNA, 20 nt, Human
acuuucaacauggcuucugg

SEQ ID NO: 1289452 - RNA, 28 nt, Human
agauaauuuuuuagugggccagagagcu

SEQ ID NO: 1289453 - RNA, 22 nt, Human
agcaaggcuggcaggggcccca

SEQ ID NO: 1289454 - RNA, 22 nt, Human
agcuagacgcgccugagggcug

SEQ ID NO: 1289455 - RNA, 18 nt, Human
aggcagggccgugagccg

SEQ ID NO: 1289456 - RNA, 22 nt, Human
aggcagggccgugagccgggcg

SEQ ID NO: 1289457 - RNA, 23 nt, Human
aggcugaugguggcagcaguggg

SEQ ID NO: 1289458 - RNA, 24 nt, Human
agggugauguggauuuuagaguag

SEQ ID NO: 1289459 - RNA, 21 nt, Human
auagacacaagccucaaacau

SEQ ID NO: 1289460 - RNA, 19 nt, Human
aucaucuguaucuaaucug

SEQ ID NO: 1289461 - RNA, 19 nt, Human
auuuauuugccaaccucau

SEQ ID NO: 1289462 - RNA, 30 nt, Human
caaauggccuuccuaaugacugcucuucuu

SEQ ID NO: 1289463 - RNA, 23 nt, Human
cauaauauccaacacauggcucu

SEQ ID NO: 1289464 - RNA, 20 nt, Human
ccaagaaaggaaggaguaau

SEQ ID NO: 1289465 - RNA, 25 nt, Human
ccauaccuacuggccucccccaacc

SEQ ID NO: 1289466 - RNA, 22 nt, Human
cccaagaaaggaaggaguaaua

SEQ ID NO: 1289467 - RNA, 19 nt, Human
cccccaacccucuugucug

SEQ ID NO: 1289468 - RNA, 22 nt, Human
ccucaucucuuuuuccuuagca

SEQ ID NO: 1289469 - RNA, 24 nt, Human
ccuuccuaaugacugcucuucucg

SEQ ID NO: 1289470 - RNA, 22 nt, Human
cgagggagaguccugggcugcc

SEQ ID NO: 1289471 - RNA, 25 nt, Human
cgccgagcuagacgcgccugagggc

SEQ ID NO: 1289472 - RNA, 24 nt, Human
cgccuggggcgcgucuucaggguc

SEQ ID NO: 1289473 - RNA, 23 nt, Human
cuacuggccucccccaacccucu

SEQ ID NO: 1289474 - RNA, 24 nt, Human
cuccaaaucccaggaagcuugcga

SEQ ID NO: 1289475 - RNA, 20 nt, Human
cucccaaaaguagauuagaa

SEQ ID NO: 1289476 - RNA, 24 nt, Human
cuggcaagcugacucuaucuauau

SEQ ID NO: 1289477 - RNA, 19 nt, Human
cugucuagcaaggcuggca

SEQ ID NO: 1289478 - RNA, 22 nt, Human
gaaauacauauuuauuugccaa

SEQ ID NO: 1289479 - RNA, 18 nt, Human
gaggcgccccccaggcag

SEQ ID NO: 1289480 - RNA, 21 nt, Human
gagggagaguccugggcugcc

SEQ ID NO: 1289481 - RNA, 18 nt, Human
gccugagggcugagcccc

SEQ ID NO: 1289482 - RNA, 27 nt, Human
gccuugggaggaggcucugaguagggg

SEQ ID NO: 1289483 - RNA, 23 nt, Human
gcgcgucuucaggguccucccgg

SEQ ID NO: 1289484 - RNA, 23 nt, Human
ggugaugagauccccuagaagga

SEQ ID NO: 1289485 - RNA, 21 nt, Human
guccugggcugccccugagcc

SEQ ID NO: 1289486 - RNA, 23 nt, Human
guccugggcugccccugagcccc

SEQ ID NO: 1289487 - RNA, 18 nt, Human
uaacccaagaaaggaagg

SEQ ID NO: 1289488 - RNA, 24 nt, Human
uaacccaagaaaggaaggaguaau

SEQ ID NO: 1289489 - RNA, 20 nt, Human
uaauauaaacaaauccauac

SEQ ID NO: 1289490 - RNA, 21 nt, Human
uaauuuaucuaacuucucuca

SEQ ID NO: 1289491 - RNA, 24 nt, Human
ucaaacauuuucuugcucugugcc

SEQ ID NO: 1289492 - RNA, 19 nt, Human
ucaggguccucccggcacu

SEQ ID NO: 1289493 - RNA, 21 nt, Human
ucaggguccucccggcacugg

SEQ ID NO: 1289494 - RNA, 21 nt, Human
uccaaauauucaggaaacagg

SEQ ID NO: 1289495 - RNA, 25 nt, Human
uccaaauggccuuccuaaugacugc

SEQ ID NO: 1289496 - RNA, 21 nt, Human
uccccuagaaggacuguucac

SEQ ID NO: 1289497 - RNA, 19 nt, Human
uccugggccuugggaggag

SEQ ID NO: 1289498 - RNA, 20 nt, Human
uccugggccuugggaggagg

SEQ ID NO: 1289499 - RNA, 22 nt, Human
uccugggccuugggaggaggcu

SEQ ID NO: 1289500 - RNA, 23 nt, Human
uccugggccuugggaggaggcuc

SEQ ID NO: 1289501 - RNA, 21 nt, Human
ucucacgugaacagagaggau

SEQ ID NO: 1289502 - RNA, 23 nt, Human
ucuucaggguccucccggcacug

SEQ ID NO: 1289503 - RNA, 19 nt, Human
ucuugcucugugccugucu

SEQ ID NO: 1289504 - RNA, 21 nt, Human
ucuugcucugugccugucuua

SEQ ID NO: 1289505 - RNA, 21 nt, Human
ucuugcucugugccugucuua

SEQ ID NO: 1289506 - RNA, 23 nt, Human
ucuuucaagcuauuucacaaggc

SEQ ID NO: 1289507 - RNA, 22 nt, Human
ugacacuccaaaucccaggaag

SEQ ID NO: 1289508 - RNA, 21 nt, Human
ugagccccagggcucgugauc

SEQ ID NO: 1289509 - RNA, 18 nt, Human
ugagccgggcgagggaga

SEQ ID NO: 1289510 - RNA, 21 nt, Human
ugaguagggccgccuggggcg

SEQ ID NO: 1289511 - RNA, 18 nt, Human
ugaucugcucccggaggc

SEQ ID NO: 1289512 - RNA, 21 nt, Human
ugcucccuaauggcucacaua

SEQ ID NO: 1289513 - RNA, 19 nt, Human
uggcagcaguggggcgucc

SEQ ID NO: 1289514 - RNA, 21 nt, Human
uggcagcaguggggcguccag

SEQ ID NO: 1289515 - RNA, 23 nt, Human
uggcagcaguggggcguccagag

SEQ ID NO: 1289516 - RNA, 20 nt, Human
ugggaggaggcucugaguag

SEQ ID NO: 1289517 - RNA, 21 nt, Human
uggggauuccagccaagucuu

SEQ ID NO: 1289518 - RNA, 22 nt, Human
uggggauuccagccaagucuug

SEQ ID NO: 1289519 - RNA, 19 nt, Human
ugucuugcagaagagugaa

SEQ ID NO: 1289520 - RNA, 20 nt, Human
uguuuauagacacaagccuc

SEQ ID NO: 1289521 - RNA, 22 nt, Human
uuaauauaaacaaauccauacc

SEQ ID NO: 1289522 - RNA, 25 nt, Human
uucaagcuauuucacaaggcugaug

SEQ ID NO: 1289523 - RNA, 23 nt, Human
uuccuuagcaucagucuucaucc

SEQ ID NO: 1289524 - RNA, 23 nt, Human
uugccuggugaugagauccccua

SEQ ID NO: 1289525 - RNA, 19 nt, Human
uuguugugcacuucugucc

SEQ ID NO: 1289526 - RNA, 18 nt, Human
uuuaaaaagucguggguc

SEQ ID NO: 1289527 - RNA, 19 nt, Human
ccccggggcggagggcacg

SEQ ID NO: 1289528 - RNA, 20 nt, Human
ggggaugggaaggcugggaa

SEQ ID NO: 1289529 - RNA, 21 nt, Human
ggggggaugggaaggcuggga

SEQ ID NO: 1289530 - RNA, 18 nt, Human
ugaaugauuugcuuucgg

SEQ ID NO: 1289531 - RNA, 19 nt, Human
ugggcaccccggggcggag

SEQ ID NO: 1289532 - RNA, 21 nt, Human
uggggggaugggaaggcuggg

SEQ ID NO: 1289533 - RNA, 25 nt, Human
uuuuuaaaaauuaucuuggaggggu

SEQ ID NO: 1289534 - RNA, 19 nt, Human
cugcagcaaugucauuccc

SEQ ID NO: 1289535 - RNA, 21 nt, Human
ugcagcaaugucauuccacau

SEQ ID NO: 1289536 - RNA, 22 nt, Human
ugcagcaaugucauuccacauc

SEQ ID NO: 1289537 - RNA, 22 nt, Human
aaacugaaugccgugaccacaa

SEQ ID NO: 1289538 - RNA, 22 nt, Human
aagagaccguuucccugccggc

SEQ ID NO: 1289539 - RNA, 21 nt, Human
agaacaaagcaaggcacccac

SEQ ID NO: 1289540 - RNA, 27 nt, Human
agagggaacaauuauuaauuucagagg

SEQ ID NO: 1289541 - RNA, 18 nt, Human
agcuaugacacagagaca

SEQ ID NO: 1289542 - RNA, 19 nt, Human
agugguuaaccacaaaggc

SEQ ID NO: 1289543 - RNA, 20 nt, Human
caagaaaacugaaugccgug

SEQ ID NO: 1289544 - RNA, 22 nt, Human
cagcucagggcacaaucuacag

SEQ ID NO: 1289545 - RNA, 26 nt, Human
caguucaaaccagaagagggaacaau

SEQ ID NO: 1289546 - RNA, 22 nt, Human
ccugaccuaaugcagccucaac

SEQ ID NO: 1289547 - RNA, 19 nt, Human
ccugcucagcauuugggag

SEQ ID NO: 1289548 - RNA, 24 nt, Human
ccuguccugcucagcauuugggag

SEQ ID NO: 1289549 - RNA, 20 nt, Human
ccuuugagguuaggauucuu

SEQ ID NO: 1289550 - RNA, 27 nt, Human
cgugaccacaaacccaugaguacccac

SEQ ID NO: 1289551 - RNA, 22 nt, Human
cugaaugccgugaccacaaacc

SEQ ID NO: 1289552 - RNA, 19 nt, Human
cugcucagcauuugggaga

SEQ ID NO: 1289553 - RNA, 20 nt, Human
cugcugccucucgccacagc

SEQ ID NO: 1289554 - RNA, 21 nt, Human
cugugugcuaagcacauccuc

SEQ ID NO: 1289555 - RNA, 18 nt, Human
cuugggaagaacaaagca

SEQ ID NO: 1289556 - RNA, 18 nt, Human
gaccguuucccugccggc

SEQ ID NO: 1289557 - RNA, 19 nt, Human
ggaagaacaaagcaagggg

SEQ ID NO: 1289558 - RNA, 22 nt, Human
gugaccacaaacccaugaguac

SEQ ID NO: 1289559 - RNA, 26 nt, Human
gugaccacaaacccaugaguacccac

SEQ ID NO: 1289560 - RNA, 21 nt, Human
uaaccacaaaggcuguggggu

SEQ ID NO: 1289561 - RNA, 21 nt, Human
uauucuggggcauccuagcaa

SEQ ID NO: 1289562 - RNA, 24 nt, Human
uauucuggggcauccuagcaagug

SEQ ID NO: 1289563 - RNA, 20 nt, Human
ucugcaggcaagaaaacuga

SEQ ID NO: 1289564 - RNA, 22 nt, Human
ugaccacaaacccaugaguacc

SEQ ID NO: 1289565 - RNA, 18 nt, Human
ugcaccccccuugccagg

SEQ ID NO: 1289566 - RNA, 19 nt, Human
ugccgugaccacaaaccca

SEQ ID NO: 1289567 - RNA, 22 nt, Human
uggcaauuaugaacaaauuuag

SEQ ID NO: 1289568 - RNA, 20 nt, Human
ugggagacugggguugacgc

SEQ ID NO: 1289569 - RNA, 24 nt, Human
ugggguugacgcuacugucugcug

SEQ ID NO: 1289570 - RNA, 26 nt, Human
ugugucguuccuuuggcaauuaugaa

SEQ ID NO: 1289571 - RNA, 19 nt, Human
uucaaaaggccaguucaaa

SEQ ID NO: 1289572 - RNA, 19 nt, Human
uucaaauauucuggggcau

SEQ ID NO: 1289573 - RNA, 18 nt, Human
uucccaguuuccauaaga

SEQ ID NO: 1289574 - RNA, 19 nt, Human
uugugucguuccuuuggca

SEQ ID NO: 1289575 - RNA, 20 nt, Human
aacucagaggcugaaagcag

SEQ ID NO: 1289576 - RNA, 19 nt, Human
aagaaagaaaagguccacu

SEQ ID NO: 1289577 - RNA, 20 nt, Human
aagaaagaaaagguccacuu

SEQ ID NO: 1289578 - RNA, 22 nt, Human
aagaagaaagaaaagguccacu

SEQ ID NO: 1289579 - RNA, 24 nt, Human
aagaagaaagaaaagguccacuug

SEQ ID NO: 1289580 - RNA, 21 nt, Human
aagcaagacuuugguaccaag

SEQ ID NO: 1289581 - RNA, 21 nt, Human
aagcaggagcuugcugacagc

SEQ ID NO: 1289582 - RNA, 22 nt, Human
aaggacagagcagucugcucug

SEQ ID NO: 1289583 - RNA, 24 nt, Human
aagugcuagaagugugugaaggcc

SEQ ID NO: 1289584 - RNA, 24 nt, Human
acgaaccuggaacucagaggcuga

SEQ ID NO: 1289585 - RNA, 23 nt, Human
acgggcacuggagggccucuccu

SEQ ID NO: 1289586 - RNA, 19 nt, Human
agaggcugaaagcaggagc

SEQ ID NO: 1289587 - RNA, 24 nt, Human
agcaagacuuugguaccaaggcag

SEQ ID NO: 1289588 - RNA, 21 nt, Human
aggagcuggaggcuggggagg

SEQ ID NO: 1289589 - RNA, 25 nt, Human
aggagcuggaggcuggggaggagcc

SEQ ID NO: 1289590 - RNA, 19 nt, Human
caaagugcuagaagugugu

SEQ ID NO: 1289591 - RNA, 20 nt, Human
cagaaccaaacagcagggac

SEQ ID NO: 1289592 - RNA, 21 nt, Human
caggagcuugcugacagcuga

SEQ ID NO: 1289593 - RNA, 25 nt, Human
caugcugcuuucacaccauccagcu

SEQ ID NO: 1289594 - RNA, 23 nt, Human
ccaagcaagacuuugguaccaag

SEQ ID NO: 1289595 - RNA, 18 nt, Human
ccaauccacgaaccugga

SEQ ID NO: 1289596 - RNA, 21 nt, Human
cucaggaaaaguccuugagga

SEQ ID NO: 1289597 - RNA, 25 nt, Human
cucaggaaaaguccuugaggacuuc

SEQ ID NO: 1289598 - RNA, 21 nt, Human
gaggcuggggaggagccugag

SEQ ID NO: 1289599 - RNA, 21 nt, Human
gcugaaagcaggagcuugcug

SEQ ID NO: 1289600 - RNA, 25 nt, Human
ggcuggggaggagccugaguguggg

SEQ ID NO: 1289601 - RNA, 19 nt, Human
gggaauggaggcuccagcc

SEQ ID NO: 1289602 - RNA, 24 nt, Human
ggggggcugcucugugggcagggg

SEQ ID NO: 1289603 - RNA, 22 nt, Human
gggucugacuauggacgccagu

SEQ ID NO: 1289604 - RNA, 23 nt, Human
uccuugaggacucagucgugcaa

SEQ ID NO: 1289605 - RNA, 19 nt, Human
ugaaagcaggagcuugcug

SEQ ID NO: 1289606 - RNA, 20 nt, Human
ugacuauggacgccaguguc

SEQ ID NO: 1289607 - RNA, 27 nt, Human
ugacuauggacgccagugucuucccuu

SEQ ID NO: 1289608 - RNA, 22 nt, Human
ugccggagcacagugcucagga

SEQ ID NO: 1289609 - RNA, 25 nt, Human
ugcuaccaagcaagacuuugguacc

SEQ ID NO: 1289610 - RNA, 18 nt, Human
ugcuagaagugugugaag

SEQ ID NO: 1289611 - RNA, 24 nt, Human
uggagaggagcuggaggcugggga

SEQ ID NO: 1289612 - RNA, 26 nt, Human
uggagaggagcuggaggcuggggagg

SEQ ID NO: 1289613 - RNA, 19 nt, Human
uggaggcuggggaggagcc

SEQ ID NO: 1289614 - RNA, 19 nt, Human
ugggaagauuucagaacca

SEQ ID NO: 1289615 - RNA, 24 nt, Human
uuggagaggagcuggaggcugguc

SEQ ID NO: 1289616 - RNA, 21 nt, Human
uugguaccaaggcagggaaug

SEQ ID NO: 1289617 - RNA, 18 nt, Human
acuccaccagccugugga

SEQ ID NO: 1289618 - RNA, 22 nt, Human
agaaugaaccaggugccggaug

SEQ ID NO: 1289619 - RNA, 21 nt, Human
agagugggacuuggcaaagag

SEQ ID NO: 1289620 - RNA, 19 nt, Human
agcagccggccuggauggc

SEQ ID NO: 1289621 - RNA, 18 nt, Human
agcgaggaggggcaggca

SEQ ID NO: 1289622 - RNA, 22 nt, Human
aggcaaggcagcggccuuccga

SEQ ID NO: 1289623 - RNA, 21 nt, Human
aggugugggggccuccagagc

SEQ ID NO: 1289624 - RNA, 19 nt, Human
augcggggcggggccuggc

SEQ ID NO: 1289625 - RNA, 23 nt, Human
augcggggcggggccuggcuucc

SEQ ID NO: 1289626 - RNA, 25 nt, Human
caaggcagcggccuuccgacccgcc

SEQ ID NO: 1289627 - RNA, 18 nt, Human
cacagaaugaaccaggug

SEQ ID NO: 1289628 - RNA, 22 nt, Human
caccagccuguggacuuggccu

SEQ ID NO: 1289629 - RNA, 19 nt, Human
cacugcggggcucuggggc

SEQ ID NO: 1289630 - RNA, 24 nt, Human
cagagcccgggccgggguagcugu

SEQ ID NO: 1289631 - RNA, 18 nt, Human
caggcuccccagggggcc

SEQ ID NO: 1289632 - RNA, 22 nt, Human
caggcuccccagggggccuccc

SEQ ID NO: 1289633 - RNA, 18 nt, Human
caucaugguaugccaggc

SEQ ID NO: 1289634 - RNA, 19 nt, Human
caugcggaaacagccgggc

SEQ ID NO: 1289635 - RNA, 18 nt, Human
ccaggugccggaugcggc

SEQ ID NO: 1289636 - RNA, 22 nt, Human
cccggcgggauggggggcgggg

SEQ ID NO: 1289637 - RNA, 19 nt, Human
ccgggccgggguagcuguc

SEQ ID NO: 1289638 - RNA, 19 nt, Human
ccgggguagcugucuccuc

SEQ ID NO: 1289639 - RNA, 19 nt, Human
ccuccaggcagaagggacc

SEQ ID NO: 1289640 - RNA, 21 nt, Human
ccucccacccgccaggaagcc

SEQ ID NO: 1289641 - RNA, 24 nt, Human
ccucccugagacagcggcaggggu

SEQ ID NO: 1289642 - RNA, 19 nt, Human
ccuugcucuugcuccucuu

SEQ ID NO: 1289643 - RNA, 20 nt, Human
ccuugcucuugcuccucuug

SEQ ID NO: 1289644 - RNA, 23 nt, Human
cgcccgagcgccccuugaagcuc

SEQ ID NO: 1289645 - RNA, 21 nt, Human
cgggccgggguagcugucucc

SEQ ID NO: 1289646 - RNA, 23 nt, Human
cucacugcggggcucuggggcag

SEQ ID NO: 1289647 - RNA, 20 nt, Human
cuccagagccaccucuuccc

SEQ ID NO: 1289648 - RNA, 20 nt, Human
cucccugagacagcggcagg

SEQ ID NO: 1289649 - RNA, 18 nt, Human
cuugccgugccgggacug

SEQ ID NO: 1289650 - RNA, 19 nt, Human
cuuucugaaguugaaggag

SEQ ID NO: 1289651 - RNA, 24 nt, Human
gccgugaagcucucgugcgcggag

SEQ ID NO: 1289652 - RNA, 19 nt, Human
gcuccccaaacaccgaccc

SEQ ID NO: 1289653 - RNA, 24 nt, Human
ggacugguggugguggugauggug

SEQ ID NO: 1289654 - RNA, 20 nt, Human
ggcagggguagcgaggaggg

SEQ ID NO: 1289655 - RNA, 23 nt, Human
ggccuggauggcccggagguagc

SEQ ID NO: 1289656 - RNA, 18 nt, Human
gggccuccagagcccggg

SEQ ID NO: 1289657 - RNA, 21 nt, Human
gggcggggccuuucugaaguu

SEQ ID NO: 1289658 - RNA, 22 nt, Human
gguagcgaggaggggcaggcag

SEQ ID NO: 1289659 - RNA, 20 nt, Human
ggugaugggagguguggggg

SEQ ID NO: 1289660 - RNA, 24 nt, Human
gguggugaugggaggugugggggc

SEQ ID NO: 1289661 - RNA, 22 nt, Human
gugauggugguggugaugguuu

SEQ ID NO: 1289662 - RNA, 20 nt, Human
guggugauggugguggugau

SEQ ID NO: 1289663 - RNA, 20 nt, Human
gugguggugaugguggugau

SEQ ID NO: 1289664 - RNA, 20 nt, Human
gugguggugauggugguggu

SEQ ID NO: 1289665 - RNA, 20 nt, Human
guggugguggugaugguggu

SEQ ID NO: 1289666 - RNA, 19 nt, Human
ucccccuugcgguccuugc

SEQ ID NO: 1289667 - RNA, 19 nt, Human
uccccggcgccuccagaga

SEQ ID NO: 1289668 - RNA, 18 nt, Human
ucccgcuuccccggcgcc

SEQ ID NO: 1289669 - RNA, 26 nt, Human
ucccggcgggauggggggcggggccu

SEQ ID NO: 1289670 - RNA, 18 nt, Human
ucccugagacagcggcag

SEQ ID NO: 1289671 - RNA, 22 nt, Human
uccgcaugcggaaacagccggg

SEQ ID NO: 1289672 - RNA, 22 nt, Human
ucucacugcggggcucuggggc

SEQ ID NO: 1289673 - RNA, 24 nt, Human
ucucacugcggggcucuggggcag

SEQ ID NO: 1289674 - RNA, 19 nt, Human
ucugaaguugaaggaggag

SEQ ID NO: 1289675 - RNA, 23 nt, Human
ucuucccucagccuugggcccau

SEQ ID NO: 1289676 - RNA, 22 nt, Human
ucuugccgugccgggacuggug

SEQ ID NO: 1289677 - RNA, 21 nt, Human
ugaaguugaaggaggagccgg

SEQ ID NO: 1289678 - RNA, 25 nt, Human
ugaccgacuguccauccagugacau

SEQ ID NO: 1289679 - RNA, 21 nt, Human
ugagacagcggcagggguagc

SEQ ID NO: 1289680 - RNA, 20 nt, Human
ugcacagaaugaaccaggug

SEQ ID NO: 1289681 - RNA, 19 nt, Human
ugccgggacuggugguggu

SEQ ID NO: 1289682 - RNA, 20 nt, Human
uggagaugcggggcggggcc

SEQ ID NO: 1289683 - RNA, 21 nt, Human
uggcaaagagcuucugcacag

SEQ ID NO: 1289684 - RNA, 23 nt, Human
uggcaaagagcuucugcacagaa

SEQ ID NO: 1289685 - RNA, 23 nt, Human
uggugaugggaggugugggggcc

SEQ ID NO: 1289686 - RNA, 20 nt, Human
ugguggugguggugaugguc

SEQ ID NO: 1289687 - RNA, 25 nt, Human
aaaacaacaacaacgcauuacccaa

SEQ ID NO: 1289688 - RNA, 20 nt, Human
aaacaacaacaacgcauuac

SEQ ID NO: 1289689 - RNA, 19 nt, Human
aagaagaacuaacuuagug

SEQ ID NO: 1289690 - RNA, 22 nt, Human
aagaccagcaggaaccccagga

SEQ ID NO: 1289691 - RNA, 22 nt, Human
aagagcuaucaaagagcaaucc

SEQ ID NO: 1289692 - RNA, 20 nt, Human
aagagcuuucuccacccugg

SEQ ID NO: 1289693 - RNA, 20 nt, Human
aagaguaggagaccggcauu

SEQ ID NO: 1289694 - RNA, 23 nt, Human
aagugagggugaagaagaacuaa

SEQ ID NO: 1289695 - RNA, 20 nt, Human
accggcauuuucccgggccu

SEQ ID NO: 1289696 - RNA, 18 nt, Human
accuagggcgccagcagc

SEQ ID NO: 1289697 - RNA, 25 nt, Human
agaaaacaacaacaacgcauuaccc

SEQ ID NO: 1289698 - RNA, 23 nt, Human
agaaagaaaacaacaacaacgca

SEQ ID NO: 1289699 - RNA, 19 nt, Human
agacaggaggggaggccag

SEQ ID NO: 1289700 - RNA, 21 nt, Human
agacaggaggggaggccagga

SEQ ID NO: 1289701 - RNA, 18 nt, Human
agaccagcaggaacccca

SEQ ID NO: 1289702 - RNA, 24 nt, Human
agagagaaagaaaacaacaacaac

SEQ ID NO: 1289703 - RNA, 22 nt, Human
agagaucauuccuggccaaguc

SEQ ID NO: 1289704 - RNA, 21 nt, Human
agcaggaaccccaggaccaug

SEQ ID NO: 1289705 - RNA, 19 nt, Human
aggaacagagaucauuccu

SEQ ID NO: 1289706 - RNA, 21 nt, Human
aggaagugagggugaagaaga

SEQ ID NO: 1289707 - RNA, 24 nt, Human
aggaugucgagcguggaggcggcg

SEQ ID NO: 1289708 - RNA, 22 nt, Human
augugugugugugugugugugu

SEQ ID NO: 1289709 - RNA, 22 nt, Human
augugugugugugugugugugu

SEQ ID NO: 1289710 - RNA, 19 nt, Human
caaagagcaauccgaucug

SEQ ID NO: 1289711 - RNA, 21 nt, Human
cagcucagugcccagcagcag

SEQ ID NO: 1289712 - RNA, 19 nt, Human
cagggagacgcaggggugg

SEQ ID NO: 1289713 - RNA, 25 nt, Human
cagugcccagcagcaguccuggugg

SEQ ID NO: 1289714 - RNA, 24 nt, Human
cauccuguuuccuccccccucacu

SEQ ID NO: 1289715 - RNA, 21 nt, Human
cauggucuuggccgcgcgccg

SEQ ID NO: 1289716 - RNA, 23 nt, Human
ccaagucagguacaaaggccaug

SEQ ID NO: 1289717 - RNA, 19 nt, Human
cccaugcgcccugggcgcc

SEQ ID NO: 1289718 - RNA, 21 nt, Human
ccuguuuccuccccccucacu

SEQ ID NO: 1289719 - RNA, 26 nt, Human
cgcccccuucaccaggcggcagcuca

SEQ ID NO: 1289720 - RNA, 21 nt, Human
cgguugcagggcccgggcccg

SEQ ID NO: 1289721 - RNA, 21 nt, Human
cguguguguaugugugugugu

SEQ ID NO: 1289722 - RNA, 19 nt, Human
cuccguugucuuccccccc

SEQ ID NO: 1289723 - RNA, 19 nt, Human
cugcagggagacgcagggg

SEQ ID NO: 1289724 - RNA, 21 nt, Human
cuucaccaggcggcagcucag

SEQ ID NO: 1289725 - RNA, 25 nt, Human
cuuuuugaccacaaagagguccugg

SEQ ID NO: 1289726 - RNA, 20 nt, Human
gaaaggcuucccuauaagga

SEQ ID NO: 1289727 - RNA, 21 nt, Human
gaacauucggguuacaaagaa

SEQ ID NO: 1289728 - RNA, 20 nt, Human
gaagaccagcaggaacccca

SEQ ID NO: 1289729 - RNA, 23 nt, Human
gagaaagaaaacaacaacaacgc

SEQ ID NO: 1289730 - RNA, 20 nt, Human
gccagacugagggcgaagac

SEQ ID NO: 1289731 - RNA, 20 nt, Human
gcccugggcgcccccuucac

SEQ ID NO: 1289732 - RNA, 25 nt, Human
gggagacgcaggggugguggguuag

SEQ ID NO: 1289733 - RNA, 22 nt, Human
uacaauuaugaaaagagcuauc

SEQ ID NO: 1289734 - RNA, 18 nt, Human
uacagggguaguaugugg

SEQ ID NO: 1289735 - RNA, 19 nt, Human
uagggagagaaaggggagc

SEQ ID NO: 1289736 - RNA, 21 nt, Human
uagggcgccagcagcaggugg

SEQ ID NO: 1289737 - RNA, 24 nt, Human
uaucaaagagcaauccgaucugau

SEQ ID NO: 1289738 - RNA, 18 nt, Human
uaugaaaagagcuaucaa

SEQ ID NO: 1289739 - RNA, 18 nt, Human
uaugugugugugugugug

SEQ ID NO: 1289740 - RNA, 23 nt, Human
uaugugugugugugugugugugu

SEQ ID NO: 1289741 - RNA, 24 nt, Human
uaugugugugugugugugugugug

SEQ ID NO: 1289742 - RNA, 27 nt, Human
ucccagagaggugccccagcgcuugcc

SEQ ID NO: 1289743 - RNA, 22 nt, Human
uccugggucagacucaaaccuc

SEQ ID NO: 1289744 - RNA, 22 nt, Human
ugaaaagagcuaucaaagagca

SEQ ID NO: 1289745 - RNA, 19 nt, Human
ugagggcgaagaccagcag

SEQ ID NO: 1289746 - RNA, 20 nt, Human
ugagggugugcaggaugucg

SEQ ID NO: 1289747 - RNA, 21 nt, Human
ugcaggaugucgagcguggag

SEQ ID NO: 1289748 - RNA, 22 nt, Human
ugcagggagacgcagggguggu

SEQ ID NO: 1289749 - RNA, 19 nt, Human
ugccagccaagaaaggcuu

SEQ ID NO: 1289750 - RNA, 25 nt, Human
ugccugcagggagacgcaggggugg

SEQ ID NO: 1289751 - RNA, 25 nt, Human
uggagcacccuuggcugggcugaaa

SEQ ID NO: 1289752 - RNA, 19 nt, Human
uggcaagagagaaagaaaa

SEQ ID NO: 1289753 - RNA, 20 nt, Human
ugguacagaugagcccggag

SEQ ID NO: 1289754 - RNA, 24 nt, Human
ugguacagaugagcccggagguuc

SEQ ID NO: 1289755 - RNA, 25 nt, Human
uguaugugugugugugugugugugg

SEQ ID NO: 1289756 - RNA, 20 nt, Human
uguguaugugugugugugug

SEQ ID NO: 1289757 - RNA, 19 nt, Human
uguguguaugugugugugu

SEQ ID NO: 1289758 - RNA, 18 nt, Human
ugugugugugugugugug

SEQ ID NO: 1289759 - RNA, 18 nt, Human
ugugugugugugugugug

SEQ ID NO: 1289760 - RNA, 18 nt, Human
ugugugugugugugugug

SEQ ID NO: 1289761 - RNA, 18 nt, Human
ugugugugugugugugug

SEQ ID NO: 1289762 - RNA, 18 nt, Human
ugugugugugugugugug

SEQ ID NO: 1289763 - RNA, 21 nt, Human
ugugugugugugugugugugu

SEQ ID NO: 1289764 - RNA, 21 nt, Human
ugugugugugugugugugugu

SEQ ID NO: 1289765 - RNA, 21 nt, Human
ugugugugugugugugugugu

SEQ ID NO: 1289766 - RNA, 21 nt, Human
ugugugugugugugugugugu

SEQ ID NO: 1289767 - RNA, 21 nt, Human
ugugugugugugugugugugu

SEQ ID NO: 1289768 - RNA, 22 nt, Human
ugugugugugugugugugugug

SEQ ID NO: 1289769 - RNA, 22 nt, Human
ugugugugugugugugugugug

SEQ ID NO: 1289770 - RNA, 23 nt, Human
uuacaauuaugaaaagagcuauc

SEQ ID NO: 1289771 - RNA, 20 nt, Human
uucagucguguguguaugug

SEQ ID NO: 1289772 - RNA, 22 nt, Human
uuccaaagagcuuucuccaccc

SEQ ID NO: 1289773 - RNA, 26 nt, Human
uuccaauauucaacuuuuggggacuu

SEQ ID NO: 1289774 - RNA, 23 nt, Human
aggcggcggcggggcccacugcc

SEQ ID NO: 1289775 - RNA, 20 nt, Human
cggcggcggggcccacugcc

SEQ ID NO: 1289776 - RNA, 20 nt, Human
gcgccgcagcgcgccaggcc

SEQ ID NO: 1289777 - RNA, 21 nt, Human
gcggcggcggggcccacugcc

SEQ ID NO: 1289778 - RNA, 21 nt, Human
ggcggggcccacugcccuucc

SEQ ID NO: 1289779 - RNA, 25 nt, Human
ggggcccacugcccuuccucgggag

SEQ ID NO: 1289780 - RNA, 20 nt, Human
ugggaggcggcggcggggcc

SEQ ID NO: 1289781 - RNA, 19 nt, Human
aaaugucuuuaaauagaua

SEQ ID NO: 1289782 - RNA, 23 nt, Human
agcuucuaauggugcaacaaucu

SEQ ID NO: 1289783 - RNA, 25 nt, Human
agguccucagagaccgcucaggguu

SEQ ID NO: 1289784 - RNA, 20 nt, Human
cgagaaaaacauuaaguugg

SEQ ID NO: 1289785 - RNA, 21 nt, Human
cuaauggugcaacaaucugcu

SEQ ID NO: 1289786 - RNA, 18 nt, Human
uauuugaauauuauaauu

SEQ ID NO: 1289787 - RNA, 18 nt, Human
ucugcucaccagguccuc

SEQ ID NO: 1289788 - RNA, 20 nt, Human
ucuguggaucaaccuagcuu

SEQ ID NO: 1289789 - RNA, 21 nt, Human
ugagcagugagaggcgccgcc

SEQ ID NO: 1289790 - RNA, 22 nt, Human
ugcaacaaucugcucaccaggu

SEQ ID NO: 1289791 - RNA, 22 nt, Human
ugcucaccagguccucagagac

SEQ ID NO: 1289792 - RNA, 22 nt, Human
uguggaucaaccuagcuucuaa

SEQ ID NO: 1289793 - RNA, 22 nt, Human
uucacauucuucgagaaaaaca

SEQ ID NO: 1289794 - RNA, 18 nt, Human
uucccaaacuuccagaac

SEQ ID NO: 1289795 - RNA, 22 nt, Human
uucuaauggugcaacaaucugc

SEQ ID NO: 1289796 - RNA, 18 nt, Human
aacacguccccacaucuc

SEQ ID NO: 1289797 - RNA, 20 nt, Human
auugugcugguugcuuuguu

SEQ ID NO: 1289798 - RNA, 21 nt, Human
ccgcgcgucacgcccggcccu

SEQ ID NO: 1289799 - RNA, 21 nt, Human
uccccacaucuccuguugccc

SEQ ID NO: 1289800 - RNA, 19 nt, Human
ugaggguggaggccaggcc

SEQ ID NO: 1289801 - RNA, 23 nt, Human
ugugcugguugcuuuguuugggg

SEQ ID NO: 1289802 - RNA, 22 nt, Human
aacauagggugaucaaagccaa

SEQ ID NO: 1289803 - RNA, 23 nt, Human
aagaugaaaacauuaugggagaa

SEQ ID NO: 1289804 - RNA, 23 nt, Human
aagccaaacaaaguuuaaaucag

SEQ ID NO: 1289805 - RNA, 19 nt, Human
acuccacgccuaagccagc

SEQ ID NO: 1289806 - RNA, 18 nt, Human
agggugaucaaagccaaa

SEQ ID NO: 1289807 - RNA, 21 nt, Human
caaaauaagcacaauggguca

SEQ ID NO: 1289808 - RNA, 21 nt, Human
ccaaaauaagcacaauggguc

SEQ ID NO: 1289809 - RNA, 26 nt, Human
cgccuaagccagcuugguuugaaggc

SEQ ID NO: 1289810 - RNA, 19 nt, Human
cuugguuugaaggcuucug

SEQ ID NO: 1289811 - RNA, 20 nt, Human
cuugguuugaaggcuucugg

SEQ ID NO: 1289812 - RNA, 24 nt, Human
gccaaacaaaguuuaaaucagcca

SEQ ID NO: 1289813 - RNA, 31 nt, Human
gucaaugguaacagacccugaauuuuucuuu

SEQ ID NO: 1289814 - RNA, 23 nt, Human
uacacaggaaagaugaaaacauu

SEQ ID NO: 1289815 - RNA, 21 nt, Human
ucaaugguaacagacccugaa

SEQ ID NO: 1289816 - RNA, 24 nt, Human
ugguaacagacccugaauuuuucu

SEQ ID NO: 1289817 - RNA, 22 nt, Human
uuaaggcaaaaucuaaguuuag

SEQ ID NO: 1289818 - RNA, 21 nt, Human
aacuauacaacuaaaaaaaac

SEQ ID NO: 1289819 - RNA, 21 nt, Human
agugaaggagugggaguggaa

SEQ ID NO: 1289820 - RNA, 23 nt, Human
ccuuuuagugaaggagugggagu

SEQ ID NO: 1289821 - RNA, 23 nt, Human
ucuuucacccccaggaagagguc

SEQ ID NO: 1289822 - RNA, 19 nt, Human
ugaagaaaggcagaugaua

SEQ ID NO: 1289823 - RNA, 18 nt, Human
ugcaaagugaagaaaggc

SEQ ID NO: 1289824 - RNA, 19 nt, Human
uuagugaaggagugggagu

SEQ ID NO: 1289825 - RNA, 23 nt, Human
accuccucccagccgggccgccg

SEQ ID NO: 1289826 - RNA, 20 nt, Human
caccuccucccagccgggcc

SEQ ID NO: 1289827 - RNA, 19 nt, Human
cagccgggccgccgccggg

SEQ ID NO: 1289828 - RNA, 19 nt, Human
cccccccggcccguccgcu

SEQ ID NO: 1289829 - RNA, 18 nt, Human
ccccgcccaccccgcgca

SEQ ID NO: 1289830 - RNA, 25 nt, Human
cccgaaagcaccuccucccagccgg

SEQ ID NO: 1289831 - RNA, 21 nt, Human
ccgccgcccaggcccccacag

SEQ ID NO: 1289832 - RNA, 19 nt, Human
ccgccucccgaaagcaccu

SEQ ID NO: 1289833 - RNA, 19 nt, Human
ccgcggccccgccucccga

SEQ ID NO: 1289834 - RNA, 19 nt, Human
ccguuuaggauugcgugag

SEQ ID NO: 1289835 - RNA, 21 nt, Human
cgaaagcaccuccucccagcc

SEQ ID NO: 1289836 - RNA, 21 nt, Human
cgcccaggcccccacaggucc

SEQ ID NO: 1289837 - RNA, 21 nt, Human
cgccucccgaaagcaccuccu

SEQ ID NO: 1289838 - RNA, 25 nt, Human
cgggaccagggccgcagccgagggc

SEQ ID NO: 1289839 - RNA, 23 nt, Human
gaacgcagcgcgcgcagcccuca

SEQ ID NO: 1289840 - RNA, 19 nt, Human
gccgcccaggcccccacag

SEQ ID NO: 1289841 - RNA, 23 nt, Human
gcgaacgcagcgcgcgcagcccu

SEQ ID NO: 1289842 - RNA, 21 nt, Human
ggccgccgccgggcagggggc

SEQ ID NO: 1289843 - RNA, 20 nt, Human
ucccgaaagcaccuccuccc

SEQ ID NO: 1289844 - RNA, 23 nt, Human
ucgggggcgccgccgcccaggcc

SEQ ID NO: 1289845 - RNA, 19 nt, Human
uggcgcgcgcgggccccgg

SEQ ID NO: 1289846 - RNA, 18 nt, Human
uuucccccgcccaccccg

SEQ ID NO: 1289847 - RNA, 19 nt, Human
acccuccccuccacuccca

SEQ ID NO: 1289848 - RNA, 23 nt, Human
acgcagucgaccccucugagcgc

SEQ ID NO: 1289849 - RNA, 19 nt, Human
agacaacauucccaguucu

SEQ ID NO: 1289850 - RNA, 19 nt, Human
agaggcuccuccacggccc

SEQ ID NO: 1289851 - RNA, 18 nt, Human
agccccgggacccggagc

SEQ ID NO: 1289852 - RNA, 24 nt, Human
agcgccucgggagccccgaauagc

SEQ ID NO: 1289853 - RNA, 18 nt, Human
agcugggugggcaggggc

SEQ ID NO: 1289854 - RNA, 28 nt, Human
aucacccuggagcugggugggcaggggc

SEQ ID NO: 1289855 - RNA, 18 nt, Human
cacagcgcuggcguuccu

SEQ ID NO: 1289856 - RNA, 21 nt, Human
cacccuggagcugggugggca

SEQ ID NO: 1289857 - RNA, 21 nt, Human
cacuuccgcuuccggcaagga

SEQ ID NO: 1289858 - RNA, 19 nt, Human
cagaggcuccuccacggcc

SEQ ID NO: 1289859 - RNA, 18 nt, Human
cagcagcccugagaaagg

SEQ ID NO: 1289860 - RNA, 20 nt, Human
cagcccugagaaagggacug

SEQ ID NO: 1289861 - RNA, 18 nt, Human
caggccagucccuccugc

SEQ ID NO: 1289862 - RNA, 22 nt, Human
cagucgaccccucugagcgccu

SEQ ID NO: 1289863 - RNA, 18 nt, Human
cccacggccuggcccgag

SEQ ID NO: 1289864 - RNA, 20 nt, Human
cccacggccuggcccgaggc

SEQ ID NO: 1289865 - RNA, 19 nt, Human
ccuccccuccacucccaga

SEQ ID NO: 1289866 - RNA, 23 nt, Human
ccuccugccccuauuucccuauc

SEQ ID NO: 1289867 - RNA, 22 nt, Human
ccuccuuuuacccuccccucca

SEQ ID NO: 1289868 - RNA, 25 nt, Human
ccuccuuuuacccuccccuccacuc

SEQ ID NO: 1289869 - RNA, 21 nt, Human
ccucugagggguucucagccc

SEQ ID NO: 1289870 - RNA, 20 nt, Human
ccucuggggcuccaucaccc

SEQ ID NO: 1289871 - RNA, 20 nt, Human
cgcugagacaacauucccag

SEQ ID NO: 1289872 - RNA, 22 nt, Human
cgugcuugccggccgucgccgu

SEQ ID NO: 1289873 - RNA, 21 nt, Human
cguggcaggaacgcgugcgcg

SEQ ID NO: 1289874 - RNA, 21 nt, Human
cuccgauaucccaaaccacag

SEQ ID NO: 1289875 - RNA, 21 nt, Human
cuccuuuuacccuccccucca

SEQ ID NO: 1289876 - RNA, 21 nt, Human
cucggaccccagccugcuggc

SEQ ID NO: 1289877 - RNA, 18 nt, Human
cucugagggguucucagc

SEQ ID NO: 1289878 - RNA, 19 nt, Human
cuggcccuggggcgcgggg

SEQ ID NO: 1289879 - RNA, 20 nt, Human
cuuuuacccuccccuccacu

SEQ ID NO: 1289880 - RNA, 20 nt, Human
gacaacauucccaguucucc

SEQ ID NO: 1289881 - RNA, 21 nt, Human
gagguucucggaccccagccu

SEQ ID NO: 1289882 - RNA, 22 nt, Human
gccaccagcacuguccccagaa

SEQ ID NO: 1289883 - RNA, 19 nt, Human
gcccgcugccggccgggcu

SEQ ID NO: 1289884 - RNA, 20 nt, Human
gcuccuccacggcccucccc

SEQ ID NO: 1289885 - RNA, 23 nt, Human
ggacccccagccagaugucccaa

SEQ ID NO: 1289886 - RNA, 19 nt, Human
ggagcugggugggcagggg

SEQ ID NO: 1289887 - RNA, 22 nt, Human
ggcagcucccuccugaucucgg

SEQ ID NO: 1289888 - RNA, 20 nt, Human
gggcaaggaggggccucggc

SEQ ID NO: 1289889 - RNA, 22 nt, Human
gggcagccagagccugguggga

SEQ ID NO: 1289890 - RNA, 22 nt, Human
gggcugcagcugcaggccaguc

SEQ ID NO: 1289891 - RNA, 19 nt, Human
ggggcuccaucacccugga

SEQ ID NO: 1289892 - RNA, 28 nt, Human
gucacgccaccacagcgagucugcgcgg

SEQ ID NO: 1289893 - RNA, 20 nt, Human
uagcagcugggagaaggggc

SEQ ID NO: 1289894 - RNA, 18 nt, Human
uagccuggccccuggguu

SEQ ID NO: 1289895 - RNA, 20 nt, Human
ucccagacugggcagcuccc

SEQ ID NO: 1289896 - RNA, 22 nt, Human
uccccuggcgagccaccuccuu

SEQ ID NO: 1289897 - RNA, 24 nt, Human
uccucuggggcuccaucacccugg

SEQ ID NO: 1289898 - RNA, 24 nt, Human
ucucggaccccagccugcuggccc

SEQ ID NO: 1289899 - RNA, 26 nt, Human
ugccccacggacgcagucgaccccuc

SEQ ID NO: 1289900 - RNA, 18 nt, Human
uggagggcagccagagcc

SEQ ID NO: 1289901 - RNA, 20 nt, Human
uggccccuggguugugcccc

SEQ ID NO: 1289902 - RNA, 21 nt, Human
uggccuccgauaucccaaacc

SEQ ID NO: 1289903 - RNA, 23 nt, Human
ugggacccccagccagauguccc

SEQ ID NO: 1289904 - RNA, 19 nt, Human
ugggagaaggggcgaggac

SEQ ID NO: 1289905 - RNA, 21 nt, Human
ugggagaaggggcgaggacug

SEQ ID NO: 1289906 - RNA, 20 nt, Human
uggguugugccccacggacg

SEQ ID NO: 1289907 - RNA, 20 nt, Human
uuacccuccccuccacuccc

SEQ ID NO: 1289908 - RNA, 19 nt, Human
aagccagcuccaagggcaa

SEQ ID NO: 1289909 - RNA, 23 nt, Human
agagaagccagcuccaagggcag

SEQ ID NO: 1289910 - RNA, 25 nt, Human
gccagcuccaagggcaggggaacgc

SEQ ID NO: 1289911 - RNA, 23 nt, Human
ugacagugugagcaggagucuug

SEQ ID NO: 1289912 - RNA, 23 nt, Human
aaaaagccaagcaggggaccgug

SEQ ID NO: 1289913 - RNA, 18 nt, Human
aaacucacaaaugccuuc

SEQ ID NO: 1289914 - RNA, 21 nt, Human
aaauaaccuuguugauuugaa

SEQ ID NO: 1289915 - RNA, 20 nt, Human
aaccuacucauucagcucug

SEQ ID NO: 1289916 - RNA, 20 nt, Human
aacuguauagcccccacagc

SEQ ID NO: 1289917 - RNA, 19 nt, Human
aagaaacuugauuguggcc

SEQ ID NO: 1289918 - RNA, 20 nt, Human
aagcauuguuaaaaagugag

SEQ ID NO: 1289919 - RNA, 22 nt, Human
agaggauauguggguccagagc

SEQ ID NO: 1289920 - RNA, 22 nt, Human
agagggagggagagagucaggc

SEQ ID NO: 1289921 - RNA, 18 nt, Human
agcugagcuuuggaaagu

SEQ ID NO: 1289922 - RNA, 20 nt, Human
agggaaggggaaaaagccaa

SEQ ID NO: 1289923 - RNA, 19 nt, Human
aggggaaaaagccaagcag

SEQ ID NO: 1289924 - RNA, 23 nt, Human
agguacacagaaaaggcagccuc

SEQ ID NO: 1289925 - RNA, 23 nt, Human
aguaguucccuuccucuucccag

SEQ ID NO: 1289926 - RNA, 20 nt, Human
agugauugguucagaaagaa

SEQ ID NO: 1289927 - RNA, 22 nt, Human
auaagaaucagcaaaugcacaa

SEQ ID NO: 1289928 - RNA, 24 nt, Human
augaugcaagcaaacagacaccac

SEQ ID NO: 1289929 - RNA, 20 nt, Human
augcaagcaaacagacacca

SEQ ID NO: 1289930 - RNA, 23 nt, Human
caagaugccuccugguaaacauc

SEQ ID NO: 1289931 - RNA, 24 nt, Human
caagaugccuccugguaaacauca

SEQ ID NO: 1289932 - RNA, 24 nt, Human
caccaggcucucacugaaugcucu

SEQ ID NO: 1289933 - RNA, 21 nt, Human
cagccuaucacagaguagcac

SEQ ID NO: 1289934 - RNA, 18 nt, Human
cagcuaguuuuaaaaauc

SEQ ID NO: 1289935 - RNA, 21 nt, Human
cagggaaggggaaaaagccaa

SEQ ID NO: 1289936 - RNA, 21 nt, Human
cauagaucacguaaaguccag

SEQ ID NO: 1289937 - RNA, 20 nt, Human
cccacgcccugaaacucaca

SEQ ID NO: 1289938 - RNA, 19 nt, Human
cccugcucucuuggcuguu

SEQ ID NO: 1289939 - RNA, 25 nt, Human
ccucugagagagucacaagggugaa

SEQ ID NO: 1289940 - RNA, 21 nt, Human
ccugauccugcaggaaaacuc

SEQ ID NO: 1289941 - RNA, 18 nt, Human
ccugguaaacaucacugg

SEQ ID NO: 1289942 - RNA, 19 nt, Human
cuggaaucuucugugccug

SEQ ID NO: 1289943 - RNA, 21 nt, Human
cugguggguucaucccuugga

SEQ ID NO: 1289944 - RNA, 19 nt, Human
cuugcagacaauggggcag

SEQ ID NO: 1289945 - RNA, 23 nt, Human
cuuucuggcaagaugccuccugg

SEQ ID NO: 1289946 - RNA, 25 nt, Human
gacaauggggcaguccucugagaga

SEQ ID NO: 1289947 - RNA, 22 nt, Human
gagcaaaucuucauuaaucuua

SEQ ID NO: 1289948 - RNA, 22 nt, Human
gagguaaaauaaugaugaugag

SEQ ID NO: 1289949 - RNA, 20 nt, Human
gaugaugaauaaauggaugg

SEQ ID NO: 1289950 - RNA, 20 nt, Human
gaugaugggcagggaagggg

SEQ ID NO: 1289951 - RNA, 19 nt, Human
gcagggaaggggaaaaagc

SEQ ID NO: 1289952 - RNA, 21 nt, Human
gggaaugaaaggaagaaagga

SEQ ID NO: 1289953 - RNA, 20 nt, Human
gguacugagcagaacaccag

SEQ ID NO: 1289954 - RNA, 21 nt, Human
uaacuaugaauugaugaaccc

SEQ ID NO: 1289955 - RNA, 18 nt, Human
uaagaaacuugauugugg

SEQ ID NO: 1289956 - RNA, 21 nt, Human
uaagaaucagcaaaugcacaa

SEQ ID NO: 1289957 - RNA, 21 nt, Human
uagaaggggacaaaggaggua

SEQ ID NO: 1289958 - RNA, 23 nt, Human
uagaucacguaaaguccagacug

SEQ ID NO: 1289959 - RNA, 22 nt, Human
uagcccccacagcugauuuccu

SEQ ID NO: 1289960 - RNA, 23 nt, Human
uauagcccccacagcugauuucc

SEQ ID NO: 1289961 - RNA, 24 nt, Human
ucaauaagucaaaauucaugagau

SEQ ID NO: 1289962 - RNA, 19 nt, Human
ucacuggguaagcaagagg

SEQ ID NO: 1289963 - RNA, 21 nt, Human
ucaucccuuggacauccuucu

SEQ ID NO: 1289964 - RNA, 21 nt, Human
ucaugucagugauugguucag

SEQ ID NO: 1289965 - RNA, 21 nt, Human
uccaggacugagauuggauuu

SEQ ID NO: 1289966 - RNA, 19 nt, Human
ucccagaaaugcuguuggu

SEQ ID NO: 1289967 - RNA, 22 nt, Human
ucccagaaugauggaugagacu

SEQ ID NO: 1289968 - RNA, 20 nt, Human
uccuuuacuuuuuguucagg

SEQ ID NO: 1289969 - RNA, 19 nt, Human
ucugaaaugaaggagagaa

SEQ ID NO: 1289970 - RNA, 19 nt, Human
ugaaaaaaucaaacagagg

SEQ ID NO: 1289971 - RNA, 24 nt, Human
ugagacuaaugcuaaacacaaugg

SEQ ID NO: 1289972 - RNA, 18 nt, Human
ugagauguaaacuuaccu

SEQ ID NO: 1289973 - RNA, 27 nt, Human
ugauauaccuuuuagugugacauuucu

SEQ ID NO: 1289974 - RNA, 18 nt, Human
ugaugaacccucuucagc

SEQ ID NO: 1289975 - RNA, 20 nt, Human
ugccuccugguaaacaucac

SEQ ID NO: 1289976 - RNA, 19 nt, Human
ugccuggaaaauaauaaga

SEQ ID NO: 1289977 - RNA, 24 nt, Human
uggaaagucuguacaucauaagaa

SEQ ID NO: 1289978 - RNA, 18 nt, Human
uggcaagaugccuccugg

SEQ ID NO: 1289979 - RNA, 25 nt, Human
uggcuccuggaacuguauagccccc

SEQ ID NO: 1289980 - RNA, 19 nt, Human
uggcuguuguuuacagaac

SEQ ID NO: 1289981 - RNA, 21 nt, Human
ugggggguucuaagaagcugu

SEQ ID NO: 1289982 - RNA, 21 nt, Human
uggucauuggucaucauuguc

SEQ ID NO: 1289983 - RNA, 24 nt, Human
uguauccauucacucucuccuuca

SEQ ID NO: 1289984 - RNA, 22 nt, Human
uucagcucuguauccauucacu

SEQ ID NO: 1289985 - RNA, 22 nt, Human
uucauuaauuuaacuaugaauu

SEQ ID NO: 1289986 - RNA, 20 nt, Human
uuccaaugcugcuuccauga

SEQ ID NO: 1289987 - RNA, 22 nt, Human
uucuuaaaggacuagaagggga

SEQ ID NO: 1289988 - RNA, 25 nt, Human
uuuaaaaaucugggcuccaccaacu

SEQ ID NO: 1289989 - RNA, 22 nt, Human
aaucauaaccagucuaaaccaa

SEQ ID NO: 1289990 - RNA, 21 nt, Human
acuugguccacucaucaguga

SEQ ID NO: 1289991 - RNA, 18 nt, Human
agcagccaucuuguggac

SEQ ID NO: 1289992 - RNA, 19 nt, Human
agccacagcagccaucuug

SEQ ID NO: 1289993 - RNA, 21 nt, Human
agggcgcaaggggaaaggccc

SEQ ID NO: 1289994 - RNA, 22 nt, Human
aggggagguuuauacagacagc

SEQ ID NO: 1289995 - RNA, 20 nt, Human
auggggucggggcggacccc

SEQ ID NO: 1289996 - RNA, 20 nt, Human
caccuccaagccuauuccca

SEQ ID NO: 1289997 - RNA, 24 nt, Human
caccuccaagccuauucccaguuc

SEQ ID NO: 1289998 - RNA, 24 nt, Human
cacgcccggcuucggagggcggcu

SEQ ID NO: 1289999 - RNA, 23 nt, Human
ccgccggcccgcuggccucccuc

SEQ ID NO: 1290000 - RNA, 20 nt, Human
ccuauucccaguuccugccu

SEQ ID NO: 1290001 - RNA, 23 nt, Human
ccuggcugauggaaucucaauuu

SEQ ID NO: 1290002 - RNA, 20 nt, Human
cgcaaggggaaaggcccgag

SEQ ID NO: 1290003 - RNA, 24 nt, Human
cggggcggaccccgccggcccgcu

SEQ ID NO: 1290004 - RNA, 20 nt, Human
gagcggggccggggauagga

SEQ ID NO: 1290005 - RNA, 23 nt, Human
gaggggagguuuauacagacagc

SEQ ID NO: 1290006 - RNA, 18 nt, Human
ggacaacaugcacgcucc

SEQ ID NO: 1290007 - RNA, 21 nt, Human
gggucguggauggggucgggg

SEQ ID NO: 1290008 - RNA, 18 nt, Human
ucccaguuccugccucug

SEQ ID NO: 1290009 - RNA, 19 nt, Human
ugcauguggacgugaugcc

SEQ ID NO: 1290010 - RNA, 18 nt, Human
ugccuggagccacagcag

SEQ ID NO: 1290011 - RNA, 22 nt, Human
uggagccacagcagccaucuug

SEQ ID NO: 1290012 - RNA, 23 nt, Human
uggggggugauuuuccuucccaa

SEQ ID NO: 1290013 - RNA, 24 nt, Human
uggggggugauuuuccuucccaag

SEQ ID NO: 1290014 - RNA, 23 nt, Human
uggggucggggcggaccccgcca

SEQ ID NO: 1290015 - RNA, 21 nt, Human
uguccuggccaccuccaagcc

SEQ ID NO: 1290016 - RNA, 19 nt, Human
uuccuucccaaguggaggg

SEQ ID NO: 1290017 - RNA, 24 nt, Human
uugcauguggacgugaugccugga

SEQ ID NO: 1290018 - RNA, 22 nt, Human
gagggcagaacagaauggcugu

SEQ ID NO: 1290019 - RNA, 18 nt, Human
gggcaucugaguuugagg

SEQ ID NO: 1290020 - RNA, 18 nt, Human
ucugaguuugagggcaga

SEQ ID NO: 1290021 - RNA, 19 nt, Human
ggaguaaacauugcuuucu

SEQ ID NO: 1290022 - RNA, 24 nt, Human
ucgcagacauucuguguggccucu

SEQ ID NO: 1290023 - RNA, 19 nt, Human
ucuguguggccuccaagcc

SEQ ID NO: 1290024 - RNA, 19 nt, Human
uggccuccaagcccacugu

SEQ ID NO: 1290025 - RNA, 18 nt, Human
uguagugcagguguagug

SEQ ID NO: 1290026 - RNA, 19 nt, Human
uucuggacuccgacaaucu

SEQ ID NO: 1290027 - RNA, 20 nt, Human
acaaccaacggguccguggg

SEQ ID NO: 1290028 - RNA, 23 nt, Human
acaauggaagggccacaguggcc

SEQ ID NO: 1290029 - RNA, 20 nt, Human
acacagccgggagcucacaa

SEQ ID NO: 1290030 - RNA, 31 nt, Human
acacugccacagucugcaggucccauaagcc

SEQ ID NO: 1290031 - RNA, 21 nt, Human
acagccgggagcucacaaggc

SEQ ID NO: 1290032 - RNA, 18 nt, Human
acaguggccagagguccc

SEQ ID NO: 1290033 - RNA, 19 nt, Human
acaugcugcaugucccaca

SEQ ID NO: 1290034 - RNA, 22 nt, Human
acucaggcugacccuugggucc

SEQ ID NO: 1290035 - RNA, 22 nt, Human
acuugaccagugugugaccacu

SEQ ID NO: 1290036 - RNA, 23 nt, Human
agagaagccacccuaacaguggg

SEQ ID NO: 1290037 - RNA, 24 nt, Human
agcacagcugccacucaccugccc

SEQ ID NO: 1290038 - RNA, 22 nt, Human
agcaguacacacucugccucug

SEQ ID NO: 1290039 - RNA, 18 nt, Human
agccuggcaggagaggcc

SEQ ID NO: 1290040 - RNA, 18 nt, Human
aggaagacauguaccagc

SEQ ID NO: 1290041 - RNA, 21 nt, Human
aggcaguggcugggucucagg

SEQ ID NO: 1290042 - RNA, 22 nt, Human
aggcaguggcugggucucaggg

SEQ ID NO: 1290043 - RNA, 21 nt, Human
aggccccaggccacccuccag

SEQ ID NO: 1290044 - RNA, 23 nt, Human
aggccuuggagcacucccuccag

SEQ ID NO: 1290045 - RNA, 18 nt, Human
aggcgcagugucucacag

SEQ ID NO: 1290046 - RNA, 21 nt, Human
aggcucaggcgugugcccgag

SEQ ID NO: 1290047 - RNA, 24 nt, Human
agggccacagguggcagcggcggg

SEQ ID NO: 1290048 - RNA, 18 nt, Human
agggcugagggacucagg

SEQ ID NO: 1290049 - RNA, 21 nt, Human
aggggcaccucagggcugagg

SEQ ID NO: 1290050 - RNA, 25 nt, Human
agggggaggagcuccccagccugcc

SEQ ID NO: 1290051 - RNA, 19 nt, Human
aguacacacucugccucug

SEQ ID NO: 1290052 - RNA, 23 nt, Human
agugccaggagaacucgggcggc

SEQ ID NO: 1290053 - RNA, 26 nt, Human
auggccucgggagggggagccguggc

SEQ ID NO: 1290054 - RNA, 19 nt, Human
cacacuugaccagugugug

SEQ ID NO: 1290055 - RNA, 19 nt, Human
cacagaacccgaaggacag

SEQ ID NO: 1290056 - RNA, 23 nt, Human
cacagccgggagcucacaaggcc

SEQ ID NO: 1290057 - RNA, 22 nt, Human
cacaggccccaggccacccucc

SEQ ID NO: 1290058 - RNA, 23 nt, Human
cacaguucacuauccacaggccc

SEQ ID NO: 1290059 - RNA, 23 nt, Human
caccacaggggccugagcacugg

SEQ ID NO: 1290060 - RNA, 21 nt, Human
caccaccuggcagggcagggc

SEQ ID NO: 1290061 - RNA, 24 nt, Human
cacccaggccacaggugguggagc

SEQ ID NO: 1290062 - RNA, 23 nt, Human
caccccaggguugcucuccugga

SEQ ID NO: 1290063 - RNA, 21 nt, Human
caccucugccacaggugacug

SEQ ID NO: 1290064 - RNA, 25 nt, Human
caccuggcagggcagggcugcuggc

SEQ ID NO: 1290065 - RNA, 21 nt, Human
cacucugccucugcacaccuc

SEQ ID NO: 1290066 - RNA, 19 nt, Human
cacugggugcggacggugg

SEQ ID NO: 1290067 - RNA, 19 nt, Human
cagagcugacucccaggcu

SEQ ID NO: 1290068 - RNA, 19 nt, Human
cagcccguggugggcacug

SEQ ID NO: 1290069 - RNA, 18 nt, Human
cagccggcguuccugaca

SEQ ID NO: 1290070 - RNA, 20 nt, Human
cagccgggagcucacaaggc

SEQ ID NO: 1290071 - RNA, 21 nt, Human
cagcggcgggcaggcuggggc

SEQ ID NO: 1290072 - RNA, 22 nt, Human
cagcggcgggcaggcuggggcc

SEQ ID NO: 1290073 - RNA, 19 nt, Human
caggagaacucgggcggca

SEQ ID NO: 1290074 - RNA, 18 nt, Human
cagggcagggcugcuggc

SEQ ID NO: 1290075 - RNA, 22 nt, Human
cagucaggguuguggggaggaa

SEQ ID NO: 1290076 - RNA, 19 nt, Human
cagugugugaccacuggau

SEQ ID NO: 1290077 - RNA, 20 nt, Human
ccacaggccccaggccaccc

SEQ ID NO: 1290078 - RNA, 19 nt, Human
ccaccaccacaggggccug

SEQ ID NO: 1290079 - RNA, 23 nt, Human
ccaccaccacaggggccugagca

SEQ ID NO: 1290080 - RNA, 21 nt, Human
ccagccccacgcugcggaugc

SEQ ID NO: 1290081 - RNA, 23 nt, Human
ccaggcugggaggcaguggcugg

SEQ ID NO: 1290082 - RNA, 21 nt, Human
cccacagugccaggagaacuc

SEQ ID NO: 1290083 - RNA, 18 nt, Human
cccaggccacccuccaga

SEQ ID NO: 1290084 - RNA, 22 nt, Human
cccaggguugcucuccuggaac

SEQ ID NO: 1290085 - RNA, 28 nt, Human
cccauguguccacaugcugcauguccca

SEQ ID NO: 1290086 - RNA, 19 nt, Human
ccccagggccccaccaccc

SEQ ID NO: 1290087 - RNA, 18 nt, Human
cccgcucacagcggggag

SEQ ID NO: 1290088 - RNA, 22 nt, Human
cccggcugcaggggacuguccu

SEQ ID NO: 1290089 - RNA, 18 nt, Human
cccuccagagcugacucc

SEQ ID NO: 1290090 - RNA, 21 nt, Human
ccgagcaguacacacucugcc

SEQ ID NO: 1290091 - RNA, 21 nt, Human
ccgcaggagcuggagcacagc

SEQ ID NO: 1290092 - RNA, 20 nt, Human
ccuacguggccggacagggc

SEQ ID NO: 1290093 - RNA, 19 nt, Human
ccuccagagcugacuccca

SEQ ID NO: 1290094 - RNA, 19 nt, Human
ccugagcacuggccccagg

SEQ ID NO: 1290095 - RNA, 19 nt, Human
ccuggcacugucaguggcg

SEQ ID NO: 1290096 - RNA, 18 nt, Human
ccugggguugggaaggag

SEQ ID NO: 1290097 - RNA, 20 nt, Human
cgagggggaggagcucccca

SEQ ID NO: 1290098 - RNA, 19 nt, Human
cgcuccaguuucccacuug

SEQ ID NO: 1290099 - RNA, 18 nt, Human
cggacagggcacauggug

SEQ ID NO: 1290100 - RNA, 19 nt, Human
cggagagcacgagcggcag

SEQ ID NO: 1290101 - RNA, 22 nt, Human
cggcugcaggggacuguccuug

SEQ ID NO: 1290102 - RNA, 20 nt, Human
cgggagggggagccguggcu

SEQ ID NO: 1290103 - RNA, 24 nt, Human
cucacagaacccgaaggacaggcg

SEQ ID NO: 1290104 - RNA, 22 nt, Human
cucgggggcagguggggugcuc

SEQ ID NO: 1290105 - RNA, 18 nt, Human
cucugccacagcuguggg

SEQ ID NO: 1290106 - RNA, 22 nt, Human
cugacucccaggcuacuguccc

SEQ ID NO: 1290107 - RNA, 25 nt, Human
cuggccccagggccccaccacccac

SEQ ID NO: 1290108 - RNA, 23 nt, Human
cuggggccggccagcggggucgc

SEQ ID NO: 1290109 - RNA, 18 nt, Human
gaacccgaaggacaggcg

SEQ ID NO: 1290110 - RNA, 18 nt, Human
gacagcagccuagagcuc

SEQ ID NO: 1290111 - RNA, 24 nt, Human
gagaagccacccuaacagugggcc

SEQ ID NO: 1290112 - RNA, 22 nt, Human
gagagaagccacccuaacagug

SEQ ID NO: 1290113 - RNA, 18 nt, Human
gagcacagccuggcagga

SEQ ID NO: 1290114 - RNA, 23 nt, Human
gagggacucaggcugacccuugg

SEQ ID NO: 1290115 - RNA, 20 nt, Human
gcagggccgggugguguugg

SEQ ID NO: 1290116 - RNA, 24 nt, Human
gcagguggggugcuccgcagcccu

SEQ ID NO: 1290117 - RNA, 19 nt, Human
gccacucaccugcccacca

SEQ ID NO: 1290118 - RNA, 19 nt, Human
gccuagagcucaggggcac

SEQ ID NO: 1290119 - RNA, 24 nt, Human
gccucgggagggggagccguggcu

SEQ ID NO: 1290120 - RNA, 18 nt, Human
gcuacagcacaccggccu

SEQ ID NO: 1290121 - RNA, 19 nt, Human
gcucugcucauccagcccc

SEQ ID NO: 1290122 - RNA, 18 nt, Human
gcugggucucgggggcag

SEQ ID NO: 1290123 - RNA, 20 nt, Human
ggaagggccacaguggccag

SEQ ID NO: 1290124 - RNA, 22 nt, Human
ggacagcagccuagagcucagg

SEQ ID NO: 1290125 - RNA, 21 nt, Human
ggagcucacaaggccaggccu

SEQ ID NO: 1290126 - RNA, 19 nt, Human
ggagcuccgccacagcccu

SEQ ID NO: 1290127 - RNA, 23 nt, Human
ggcagcguggggcugggucucgg

SEQ ID NO: 1290128 - RNA, 23 nt, Human
ggcagggcugcuggcugcacuuc

SEQ ID NO: 1290129 - RNA, 19 nt, Human
ggcuaugggaggaggaggg

SEQ ID NO: 1290130 - RNA, 18 nt, Human
ggcugcaggggacugucc

SEQ ID NO: 1290131 - RNA, 20 nt, Human
ggcugggaggcaguggcugg

SEQ ID NO: 1290132 - RNA, 18 nt, Human
ggcugggccccgcagggc

SEQ ID NO: 1290133 - RNA, 25 nt, Human
gggaggcucgacgggcucacaaucc

SEQ ID NO: 1290134 - RNA, 24 nt, Human
gggcagcguggggcugggucucgg

SEQ ID NO: 1290135 - RNA, 18 nt, Human
gggccccaccacccacug

SEQ ID NO: 1290136 - RNA, 18 nt, Human
gggcguagggggcgggag

SEQ ID NO: 1290137 - RNA, 19 nt, Human
ggguugggaaggagggagu

SEQ ID NO: 1290138 - RNA, 27 nt, Human
gucccacacugaggaaccucugccaca

SEQ ID NO: 1290139 - RNA, 23 nt, Human
gucugcaggucccauaagccugg

SEQ ID NO: 1290140 - RNA, 24 nt, Human
gugcagggguggguguugcagggc

SEQ ID NO: 1290141 - RNA, 21 nt, Human
gugccuccucgcagaggucug

SEQ ID NO: 1290142 - RNA, 24 nt, Human
gugguugcaagggguuucaguagg

SEQ ID NO: 1290143 - RNA, 22 nt, Human
uaccuuuuucgagggggaggag

SEQ ID NO: 1290144 - RNA, 18 nt, Human
ucacagugcuccucgucc

SEQ ID NO: 1290145 - RNA, 18 nt, Human
ucaccaccgccacaggcc

SEQ ID NO: 1290146 - RNA, 20 nt, Human
uccccagccugccgcugggu

SEQ ID NO: 1290147 - RNA, 21 nt, Human
uccuggguucagggcaggcuc

SEQ ID NO: 1290148 - RNA, 19 nt, Human
ucgggggcagguggggugc

SEQ ID NO: 1290149 - RNA, 19 nt, Human
ucguagugcaccccagggu

SEQ ID NO: 1290150 - RNA, 20 nt, Human
ucucaggggcucuguggcuc

SEQ ID NO: 1290151 - RNA, 24 nt, Human
ucucgggggcagguggggugcucc

SEQ ID NO: 1290152 - RNA, 22 nt, Human
ugaccagugugugaccacugga

SEQ ID NO: 1290153 - RNA, 21 nt, Human
ugagugccagguggcacaggg

SEQ ID NO: 1290154 - RNA, 19 nt, Human
ugccacacagccgggagcu

SEQ ID NO: 1290155 - RNA, 18 nt, Human
uggaugccaccaccacag

SEQ ID NO: 1290156 - RNA, 18 nt, Human
uggcagcggcccaguagg

SEQ ID NO: 1290157 - RNA, 20 nt, Human
uggcagggcagggcugcugg

SEQ ID NO: 1290158 - RNA, 25 nt, Human
uggcauggacagcagccuagagcuc

SEQ ID NO: 1290159 - RNA, 22 nt, Human
uggccccagggccccaccaccc

SEQ ID NO: 1290160 - RNA, 18 nt, Human
ugggagcacuuacuccag

SEQ ID NO: 1290161 - RNA, 18 nt, Human
ugggcagcguggggcugg

SEQ ID NO: 1290162 - RNA, 18 nt, Human
ugggcagcuggcagcggc

SEQ ID NO: 1290163 - RNA, 26 nt, Human
ugggccccgcagggccaggacccguc

SEQ ID NO: 1290164 - RNA, 21 nt, Human
ugguccagggcccacagugcc

SEQ ID NO: 1290165 - RNA, 19 nt, Human
ugucagccggcguuccuga

SEQ ID NO: 1290166 - RNA, 24 nt, Human
ugugcagggguggguguugcaggg

SEQ ID NO: 1290167 - RNA, 19 nt, Human
uguugcagggccggguggu

SEQ ID NO: 1290168 - RNA, 19 nt, Human
uuacuccaguugccugagu

SEQ ID NO: 1290169 - RNA, 24 nt, Human
aagcuggcuucacagagaaggugc

SEQ ID NO: 1290170 - RNA, 19 nt, Human
acccugggggaccgagggg

SEQ ID NO: 1290171 - RNA, 19 nt, Human
agaggaggggaguguuuga

SEQ ID NO: 1290172 - RNA, 18 nt, Human
cacugucacccggcagcc

SEQ ID NO: 1290173 - RNA, 18 nt, Human
cacugucacccggcagcc

SEQ ID NO: 1290174 - RNA, 25 nt, Human
cagagucagcuggucacugucaccc

SEQ ID NO: 1290175 - RNA, 25 nt, Human
cagagucagcuggucacugucaccc

SEQ ID NO: 1290176 - RNA, 22 nt, Human
ccagggacagagcccucucggg

SEQ ID NO: 1290177 - RNA, 21 nt, Human
ccaucugcaguggccgcaaag

SEQ ID NO: 1290178 - RNA, 20 nt, Human
ccccagggacagagcccucu

SEQ ID NO: 1290179 - RNA, 22 nt, Human
ccccagggacagagcccucucg

SEQ ID NO: 1290180 - RNA, 18 nt, Human
ccgcacggccuccgaugc

SEQ ID NO: 1290181 - RNA, 24 nt, Human
ccggcagcccggauuccgcgccca

SEQ ID NO: 1290182 - RNA, 24 nt, Human
ccggcagcccggauuccgcgccca

SEQ ID NO: 1290183 - RNA, 26 nt, Human
ccugccagaggcuccccagggacaga

SEQ ID NO: 1290184 - RNA, 19 nt, Human
cgcaaagacuaaagaggag

SEQ ID NO: 1290185 - RNA, 21 nt, Human
cgcgccuccgguaggcuccag

SEQ ID NO: 1290186 - RNA, 21 nt, Human
cgcgccuccgguaggcuccag

SEQ ID NO: 1290187 - RNA, 21 nt, Human
cgcucggacuccucgccgccc

SEQ ID NO: 1290188 - RNA, 21 nt, Human
cgcucggacuccucgccgccc

SEQ ID NO: 1290189 - RNA, 19 nt, Human
cgggggcuguggcggcuuu

SEQ ID NO: 1290190 - RNA, 19 nt, Human
gcagcaacugagcgcaccc

SEQ ID NO: 1290191 - RNA, 18 nt, Human
gggggcggucccggggag

SEQ ID NO: 1290192 - RNA, 19 nt, Human
ucacugucacccggcagcc

SEQ ID NO: 1290193 - RNA, 19 nt, Human
ucacugucacccggcagcc

SEQ ID NO: 1290194 - RNA, 19 nt, Human
ucccggggaggggcgcggc

SEQ ID NO: 1290195 - RNA, 19 nt, Human
ucccugacauuugcuaccu

SEQ ID NO: 1290196 - RNA, 18 nt, Human
ucgccgcccgcccggggc

SEQ ID NO: 1290197 - RNA, 18 nt, Human
ucgccgcccgcccggggc

SEQ ID NO: 1290198 - RNA, 19 nt, Human
ucggacuccucgccgcccg

SEQ ID NO: 1290199 - RNA, 19 nt, Human
ucggacuccucgccgcccg

SEQ ID NO: 1290200 - RNA, 24 nt, Human
ucgggggcuguggcggcuuuuccc

SEQ ID NO: 1290201 - RNA, 19 nt, Human
ucuccagcggcuguucggc

SEQ ID NO: 1290202 - RNA, 19 nt, Human
ucuccagcggcuguucggc

SEQ ID NO: 1290203 - RNA, 21 nt, Human
ucucccugacauuugcuaccu

SEQ ID NO: 1290204 - RNA, 22 nt, Human
ugagcgcacccugggggaccga

SEQ ID NO: 1290205 - RNA, 21 nt, Human
ugccagaggcuccccagggac

SEQ ID NO: 1290206 - RNA, 20 nt, Human
uggcggggcgcacgggcagc

SEQ ID NO: 1290207 - RNA, 21 nt, Human
aaacacggccuuggaaagaaa

SEQ ID NO: 1290208 - RNA, 19 nt, Human
acagagcuucaccccugac

SEQ ID NO: 1290209 - RNA, 19 nt, Human
acagagcuucaccccugac

SEQ ID NO: 1290210 - RNA, 21 nt, Human
agaaaggcuuccagcugcaga

SEQ ID NO: 1290211 - RNA, 19 nt, Human
aggagcugcucagcggcca

SEQ ID NO: 1290212 - RNA, 24 nt, Human
caaaccacauaguccgaggaaucg

SEQ ID NO: 1290213 - RNA, 19 nt, Human
cacacauggucagcaggau

SEQ ID NO: 1290214 - RNA, 23 nt, Human
cacucugucccuguagcaguuca

SEQ ID NO: 1290215 - RNA, 24 nt, Human
cagcaggauggagugcaggggcuc

SEQ ID NO: 1290216 - RNA, 23 nt, Human
ccagcugcagaaagcagggcuga

SEQ ID NO: 1290217 - RNA, 20 nt, Human
cccuguagcaguucaggggc

SEQ ID NO: 1290218 - RNA, 25 nt, Human
ccgacaagcuuccagaaccgacugc

SEQ ID NO: 1290219 - RNA, 21 nt, Human
ccuccucagacagagcuucac

SEQ ID NO: 1290220 - RNA, 23 nt, Human
cuccucagacagagcuucacccc

SEQ ID NO: 1290221 - RNA, 20 nt, Human
cuuccagaaccgacugcaac

SEQ ID NO: 1290222 - RNA, 22 nt, Human
gaaagcagggcugaccaggggc

SEQ ID NO: 1290223 - RNA, 23 nt, Human
gaacaggagggaccagauuuccu

SEQ ID NO: 1290224 - RNA, 18 nt, Human
gaccagauuuccuccuca

SEQ ID NO: 1290225 - RNA, 23 nt, Human
gaggucuuccaggagcugcucag

SEQ ID NO: 1290226 - RNA, 26 nt, Human
gauggagugcaggggcucgcagagcu

SEQ ID NO: 1290227 - RNA, 20 nt, Human
gccuuggaaagaaaggcuuc

SEQ ID NO: 1290228 - RNA, 18 nt, Human
ggaaagaaaggcuuccag

SEQ ID NO: 1290229 - RNA, 19 nt, Human
ggucuuccaggagcugcuc

SEQ ID NO: 1290230 - RNA, 23 nt, Human
ucccuguagcaguucaggggccu

SEQ ID NO: 1290231 - RNA, 23 nt, Human
ucugucccuguagcaguucaggg

SEQ ID NO: 1290232 - RNA, 19 nt, Human
ugaaaggagcagccucuau

SEQ ID NO: 1290233 - RNA, 21 nt, Human
uucacacauggucagcaggau

SEQ ID NO: 1290234 - RNA, 23 nt, Human
aaaaaguuuuaacuacagagacu

SEQ ID NO: 1290235 - RNA, 21 nt, Human
aaucuuuaauacuuaacaaag

SEQ ID NO: 1290236 - RNA, 25 nt, Human
cuugaaagcaaccacagaaaauaaa

SEQ ID NO: 1290237 - RNA, 20 nt, Human
gaaaaaguuuuaacuacaga

SEQ ID NO: 1290238 - RNA, 22 nt, Human
gagcaaugaaaaaaaaaaucuu

SEQ ID NO: 1290239 - RNA, 26 nt, Human
uaaccaagaacuaaguauauaccuca

SEQ ID NO: 1290240 - RNA, 18 nt, Human
uagcuugaaagcaaccac

SEQ ID NO: 1290241 - RNA, 22 nt, Human
ucuacaauuguagcuugaaagc

SEQ ID NO: 1290242 - RNA, 25 nt, Human
ugacauuccauuguucuacgucccu

SEQ ID NO: 1290243 - RNA, 21 nt, Human
ugggagcaaugaaaaaaaaaa

SEQ ID NO: 1290244 - RNA, 20 nt, Human
uguaaauucugguguaacuu

SEQ ID NO: 1290245 - RNA, 22 nt, Human
uuaguauuauuaauacaaugac

SEQ ID NO: 1290246 - RNA, 24 nt, Human
uuaguauuauuaauacaaugacuu

SEQ ID NO: 1290247 - RNA, 21 nt, Human
aaaguggccugcccagacuau

SEQ ID NO: 1290248 - RNA, 19 nt, Human
agacuauuuugguagcaag

SEQ ID NO: 1290249 - RNA, 23 nt, Human
agcaagcguggaaaucagaucug

SEQ ID NO: 1290250 - RNA, 21 nt, Human
aggaagucugcauuaucacga

SEQ ID NO: 1290251 - RNA, 18 nt, Human
cacaccaaagcaucagcc

SEQ ID NO: 1290252 - RNA, 21 nt, Human
cagagugcuggccacaccaaa

SEQ ID NO: 1290253 - RNA, 22 nt, Human
caguaaggaauuacaaauccug

SEQ ID NO: 1290254 - RNA, 20 nt, Human
ccacagagagaagaaaaggg

SEQ ID NO: 1290255 - RNA, 18 nt, Human
ccuguguuuguacuccag

SEQ ID NO: 1290256 - RNA, 26 nt, Human
cgaaaucgaaagcggccgccugcuca

SEQ ID NO: 1290257 - RNA, 20 nt, Human
cgccuacuuccaaaaguggc

SEQ ID NO: 1290258 - RNA, 24 nt, Human
cucaaggcaaauuucaaguaacuc

SEQ ID NO: 1290259 - RNA, 22 nt, Human
cuuccaaaaguggccugcccag

SEQ ID NO: 1290260 - RNA, 22 nt, Human
gcagcugccuacucugcagcug

SEQ ID NO: 1290261 - RNA, 23 nt, Human
ggaagucugcauuaucacgagga

SEQ ID NO: 1290262 - RNA, 24 nt, Human
ggggaaagcgaaaucgaaagcggc

SEQ ID NO: 1290263 - RNA, 20 nt, Human
uaacgccuacuuccaaaagu

SEQ ID NO: 1290264 - RNA, 19 nt, Human
uagcaagcguggaaaucag

SEQ ID NO: 1290265 - RNA, 24 nt, Human
uagcugaucaucuuuccguacauu

SEQ ID NO: 1290266 - RNA, 18 nt, Human
ucugcagcugugguucuc

SEQ ID NO: 1290267 - RNA, 21 nt, Human
ugagaaucucgggagcagccc

SEQ ID NO: 1290268 - RNA, 22 nt, Human
uggaaaggagguaacacacuca

SEQ ID NO: 1290269 - RNA, 22 nt, Human
uuacaguaaggaauuacaaauc

SEQ ID NO: 1290270 - RNA, 23 nt, Human
uuaggggaaagcgaaaucgaaag

SEQ ID NO: 1290271 - RNA, 18 nt, Human
uucagagugcuggccaca

SEQ ID NO: 1290272 - RNA, 21 nt, Human
ccaagagauaaugaugccuag

SEQ ID NO: 1290273 - RNA, 20 nt, Human
ugaaaucacugugcccaggg

SEQ ID NO: 1290274 - RNA, 19 nt, Human
uugcauguggcuucuuacc

SEQ ID NO: 1290275 - RNA, 23 nt, Human
aaaaugauccugccccaagacua

SEQ ID NO: 1290276 - RNA, 21 nt, Human
aaacaaacaacaaguacuuua

SEQ ID NO: 1290277 - RNA, 21 nt, Human
aaacaggaauaauaaaaacaa

SEQ ID NO: 1290278 - RNA, 31 nt, Human; identical to SEQ ID NO: 261317

SEQ ID NO: 1290279 - RNA, 21 nt, Human
aacacuguagaaagaagaaga

SEQ ID NO: 1290280 - RNA, 18 nt, Human
aacccuggggagaagaca

SEQ ID NO: 1290281 - RNA, 24 nt, Human
acuccaaggaaagccuaucuuggg

SEQ ID NO: 1290282 - RNA, 22 nt, Human
agaugacaucacuaauaugaaa

SEQ ID NO: 1290283 - RNA, 20 nt, Human
agcaaggaagacagaaauca

SEQ ID NO: 1290284 - RNA, 22 nt, Human
agcacaguaugaguuaggugag

SEQ ID NO: 1290285 - RNA, 23 nt, Human
agccagggagcauagaagacaaa

SEQ ID NO: 1290286 - RNA, 18 nt, Human
agucacauguucucagca

SEQ ID NO: 1290287 - RNA, 25 nt, Human
auagccucacucucuuucuucuguc

SEQ ID NO: 1290288 - RNA, 24 nt, Human
auccugcucauccugcucauucuc

SEQ ID NO: 1290289 - RNA, 19 nt, Human
aucugggccuucugcugcc

SEQ ID NO: 1290290 - RNA, 18 nt, Human
augagacagagaaggagu

SEQ ID NO: 1290291 - RNA, 18 nt, Human
augcuuuccagguguggg

SEQ ID NO: 1290292 - RNA, 25 nt, Human
caaaaugauccugccccaagacuaa

SEQ ID NO: 1290293 - RNA, 19 nt, Human
caaugggcuugaugacaaa

SEQ ID NO: 1290294 - RNA, 23 nt, Human
caaugggcuugaugacaaaguuc

SEQ ID NO: 1290295 - RNA, 20 nt, Human
cacacgcucauucuucucug

SEQ ID NO: 1290296 - RNA, 18 nt, Human
cauagaagacaaaguccg

SEQ ID NO: 1290297 - RNA, 26 nt, Human
cauccugcucauccugcucauucuca

SEQ ID NO: 1290298 - RNA, 19 nt, Human
cccuagaggcugggugccu

SEQ ID NO: 1290299 - RNA, 18 nt, Human
ccuucugcugccacucca

SEQ ID NO: 1290300 - RNA, 23 nt, Human
ccuucugcugccacuccauagcc

SEQ ID NO: 1290301 - RNA, 22 nt, Human
ccuugagggcugaacccugggg

SEQ ID NO: 1290302 - RNA, 21 nt, Human
cgcucauucuucucugccuca

SEQ ID NO: 1290303 - RNA, 23 nt, Human
cugcacacgcucauucuucucug

SEQ ID NO: 1290304 - RNA, 18 nt, Human
cugcugccacuccauagc

SEQ ID NO: 1290305 - RNA, 19 nt, Human
cugucgggccaguuccagc

SEQ ID NO: 1290306 - RNA, 20 nt, Human
gcucauucuucucugccuca

SEQ ID NO: 1290307 - RNA, 18 nt, Human
gucaaugugcugcuuguu

SEQ ID NO: 1290308 - RNA, 18 nt, Human
gugggacaaggaaaaagg

SEQ ID NO: 1290309 - RNA, 19 nt, Human
gugggacaaggaaaaaggg

SEQ ID NO: 1290310 - RNA, 22 nt, Human
uagccucacucucuuucuucug

SEQ ID NO: 1290311 - RNA, 23 nt, Human
uaggucagcacuagccucugccc

SEQ ID NO: 1290312 - RNA, 25 nt, Human
uaugaccuauagugacagaugacau

SEQ ID NO: 1290313 - RNA, 25 nt, Human
uauggugggacaggggggaaaauuc

SEQ ID NO: 1290314 - RNA, 24 nt, Human
ucacugcgguccuuggccauagcc

SEQ ID NO: 1290315 - RNA, 22 nt, Human
uccaagucuuccuguaccaucu

SEQ ID NO: 1290316 - RNA, 19 nt, Human
uccuguaccaucugggccu

SEQ ID NO: 1290317 - RNA, 24 nt, Human
ucugcagccagggagcauagaaga

SEQ ID NO: 1290318 - RNA, 18 nt, Human
ugacagaugacaucacua

SEQ ID NO: 1290319 - RNA, 23 nt, Human
ugaccuauagugacagaugacau

SEQ ID NO: 1290320 - RNA, 21 nt, Human
ugagggagguucuaagcuaga

SEQ ID NO: 1290321 - RNA, 24 nt, Human
ugagggagguucuaagcuagaggc

SEQ ID NO: 1290322 - RNA, 25 nt, Human
ugcauuagcaaggaagacagaaauc

SEQ ID NO: 1290323 - RNA, 18 nt, Human
ugcuuuccagguguggga

SEQ ID NO: 1290324 - RNA, 19 nt, Human
uggccagcuccgaaguggg

SEQ ID NO: 1290325 - RNA, 20 nt, Human
ugggggccuucaggugcuuc

SEQ ID NO: 1290326 - RNA, 22 nt, Human
ugguaaaggaaugaggccaaaa

SEQ ID NO: 1290327 - RNA, 27 nt, Human
uuuauggugggacaggggggaaaauuc

SEQ ID NO: 1290328 - RNA, 19 nt, Human
aagcgcucccugagggugg

SEQ ID NO: 1290329 - RNA, 22 nt, Human
aaucuaguugaaaugugaucuc

SEQ ID NO: 1290330 - RNA, 24 nt, Human
acgugagcagaagguacuccaguu

SEQ ID NO: 1290331 - RNA, 19 nt, Human
cccugagggugggccaccu

SEQ ID NO: 1290332 - RNA, 19 nt, Human
gggaaaugagaagcccucc

SEQ ID NO: 1290333 - RNA, 19 nt, Human
uaaugugguauuggggaaa

SEQ ID NO: 1290334 - RNA, 25 nt, Human
uagaagacagcucuguggauccucc

SEQ ID NO: 1290335 - RNA, 24 nt, Human
uccgagcacaagcgcucccugagg

SEQ ID NO: 1290336 - RNA, 27 nt, Human
ucuccagauuaccauagaagacagcuc

SEQ ID NO: 1290337 - RNA, 19 nt, Human
ugagaagacauacaaaugu

SEQ ID NO: 1290338 - RNA, 20 nt, Human
ugagacgauuuaauguggua

SEQ ID NO: 1290339 - RNA, 23 nt, Human
ugcuuuccuccuugucucucuca

SEQ ID NO: 1290340 - RNA, 21 nt, Human
uugaaaugugaucucugucuu

SEQ ID NO: 1290341 - RNA, 20 nt, Human
agacacuucucgagggcgcu

SEQ ID NO: 1290342 - RNA, 18 nt, Human
agucagugaauccaaaac

SEQ ID NO: 1290343 - RNA, 19 nt, Human
cagucccacggcugccgug

SEQ ID NO: 1290344 - RNA, 19 nt, Human
cauaaugcugccgaggagc

SEQ ID NO: 1290345 - RNA, 22 nt, Human
cccauaaugcugccgaggagcc

SEQ ID NO: 1290346 - RNA, 25 nt, Human
cucucagaaguggccgcucuaccag

SEQ ID NO: 1290347 - RNA, 21 nt, Human
cuuccgagcugggaaggcagg

SEQ ID NO: 1290348 - RNA, 18 nt, Human
ggagccugugccaguccc

SEQ ID NO: 1290349 - RNA, 19 nt, Human
ugccgaggagccugugcca

SEQ ID NO: 1290350 - RNA, 19 nt, Human
gugagcuccaaaaacaauu

SEQ ID NO: 1290351 - RNA, 23 nt, Human
uagggugagcuccaaaaacaauu

SEQ ID NO: 1290352 - RNA, 21 nt, Human
aaaaagcagaaggaacccaga

SEQ ID NO: 1290353 - RNA, 23 nt, Human
aaacacagccgacgccucacuca

SEQ ID NO: 1290354 - RNA, 21 nt, Human
aaagugaaaaaguucugcaga

SEQ ID NO: 1290355 - RNA, 19 nt, Human
aaguacaaaagcauacagu

SEQ ID NO: 1290356 - RNA, 24 nt, Human
acagccaaaaagcagaaggaaccc

SEQ ID NO: 1290357 - RNA, 24 nt, Human
agaaaguagaauggugguugccag

SEQ ID NO: 1290358 - RNA, 21 nt, Human
agauggcggcgacacugaagc

SEQ ID NO: 1290359 - RNA, 25 nt, Human
agccaaaaagcagaaggaacccaga

SEQ ID NO: 1290360 - RNA, 22 nt, Human
agcgggguccaaccagccaaga

SEQ ID NO: 1290361 - RNA, 19 nt, Human
auauaauaacacuacugaa

SEQ ID NO: 1290362 - RNA, 21 nt, Human
aucccacuuauccaagccuca

SEQ ID NO: 1290363 - RNA, 22 nt, Human
caagaagggccuuggagucuug

SEQ ID NO: 1290364 - RNA, 21 nt, Human
cagaaggaacccagaugucca

SEQ ID NO: 1290365 - RNA, 23 nt, Human
cagaaggaacccagauguccauu

SEQ ID NO: 1290366 - RNA, 21 nt, Human
cagauugguuguccaacagug

SEQ ID NO: 1290367 - RNA, 23 nt, Human
cagcggccguuuccccaaacccc

SEQ ID NO: 1290368 - RNA, 24 nt, Human
cauaaaaaugguuaagaugguaaa

SEQ ID NO: 1290369 - RNA, 19 nt, Human
ccccaaaccccugcggagc

SEQ ID NO: 1290370 - RNA, 18 nt, Human
ccgacgccucacucagcg

SEQ ID NO: 1290371 - RNA, 22 nt, Human
ccgcggugagaaacacagccga

SEQ ID NO: 1290372 - RNA, 21 nt, Human
cgcccuaacaaggcugcugga

SEQ ID NO: 1290373 - RNA, 22 nt, Human
cucuuaguuuugacaauauacu

SEQ ID NO: 1290374 - RNA, 22 nt, Human
cuugcaaacccaaguucacagu

SEQ ID NO: 1290375 - RNA, 22 nt, Human
gaccgcggugagaaacacagcc

SEQ ID NO: 1290376 - RNA, 18 nt, Human
gacuuguuauuuccuuuu

SEQ ID NO: 1290377 - RNA, 19 nt, Human
gccagggacugagggcaag

SEQ ID NO: 1290378 - RNA, 23 nt, Human
gccugugagggaaaaaaaauaac

SEQ ID NO: 1290379 - RNA, 19 nt, Human
ggccuuggagucuugaaga

SEQ ID NO: 1290380 - RNA, 22 nt, Human
gggguaauaucaagaagggccu

SEQ ID NO: 1290381 - RNA, 24 nt, Human
uaaaugaaauaagccagucaugaa

SEQ ID NO: 1290382 - RNA, 22 nt, Human
uaaaugaggacauuaggcuaaa

SEQ ID NO: 1290383 - RNA, 20 nt, Human
uaacaacagccaaaaagcag

SEQ ID NO: 1290384 - RNA, 22 nt, Human
uaacaacagccaaaaagcagaa

SEQ ID NO: 1290385 - RNA, 21 nt, Human
uagcauuauuaacaacagcca

SEQ ID NO: 1290386 - RNA, 20 nt, Human
uauauacauacaaugcaaua

SEQ ID NO: 1290387 - RNA, 18 nt, Human
uaucaagaagggccuugg

SEQ ID NO: 1290388 - RNA, 19 nt, Human
uaucaagaagggccuugga

SEQ ID NO: 1290389 - RNA, 19 nt, Human
uaucaugaaaacagaacuu

SEQ ID NO: 1290390 - RNA, 23 nt, Human
uaugugcaugauucuaaugugca

SEQ ID NO: 1290391 - RNA, 19 nt, Human
ucaaacucagcaacagaaa

SEQ ID NO: 1290392 - RNA, 21 nt, Human
ucaaacucagcaacagaaagu

SEQ ID NO: 1290393 - RNA, 25 nt, Human
ucaaacucagcaacagaaaguagaa

SEQ ID NO: 1290394 - RNA, 20 nt, Human
ucagcaacagaaaguagaau

SEQ ID NO: 1290395 - RNA, 25 nt, Human
ucagcggccguuuccccaaaccccu

SEQ ID NO: 1290396 - RNA, 20 nt, Human
uccccaaaccccugcggagc

SEQ ID NO: 1290397 - RNA, 23 nt, Human
ugaaaacagaacuucacauaucc

SEQ ID NO: 1290398 - RNA, 26 nt, Human
ugaaaacagaacuucacauauccaaa

SEQ ID NO: 1290399 - RNA, 21 nt, Human
ugaaauaagccagucaugaaa

SEQ ID NO: 1290400 - RNA, 20 nt, Human
ugaauaaacaaaauguggua

SEQ ID NO: 1290401 - RNA, 22 nt, Human
ugacaauauacuucuacauucu

SEQ ID NO: 1290402 - RNA, 18 nt, Human
ugagggcaaguggaaaua

SEQ ID NO: 1290403 - RNA, 20 nt, Human
ugaguugucuauaaaaauuu

SEQ ID NO: 1290404 - RNA, 20 nt, Human
ugaucuucguuuuacauccc

SEQ ID NO: 1290405 - RNA, 19 nt, Human
uggaugaauaaacaaaaug

SEQ ID NO: 1290406 - RNA, 21 nt, Human
ugggaggaaaagaccgcggug

SEQ ID NO: 1290407 - RNA, 18 nt, Human
uuauccaagccucaggcc

SEQ ID NO: 1290408 - RNA, 25 nt, Human
uucaaaagugaaaaauuuugaguug

SEQ ID NO: 1290409 - RNA, 23 nt, Human
uucagauuugcaaagugaaaaag

SEQ ID NO: 1290410 - RNA, 19 nt, Human
uugcaaagugaaaaaguuc

SEQ ID NO: 1290411 - RNA, 21 nt, Human
uuuccccaaaccccugcggag

SEQ ID NO: 1290412 - RNA, 19 nt, Human
acacugccaugauuucacc

SEQ ID NO: 1290413 - RNA, 18 nt, Human
acugccaugauuucaccc

SEQ ID NO: 1290414 - RNA, 26 nt, Human
caaggcaaguugguguuugaaaauca

SEQ ID NO: 1290415 - RNA, 21 nt, Human
cacacugccaugauuucaccc

SEQ ID NO: 1290416 - RNA, 21 nt, Human
cagaacaucuuauuuccuggc

SEQ ID NO: 1290417 - RNA, 18 nt, Human
cagaguguaucucugaug

SEQ ID NO: 1290418 - RNA, 23 nt, Human
caucuuauuuccuggcuguauca

SEQ ID NO: 1290419 - RNA, 22 nt, Human
cauucccuuccaaggcaaguug

SEQ ID NO: 1290420 - RNA, 20 nt, Human
cauuucaaaccccaaaguuc

SEQ ID NO: 1290421 - RNA, 21 nt, Human
cugaugcuggcaccacccagc

SEQ ID NO: 1290422 - RNA, 23 nt, Human
cugaugcuggcaccacccagcag

SEQ ID NO: 1290423 - RNA, 24 nt, Human
gcaaucugggccucaguuucccca

SEQ ID NO: 1290424 - RNA, 20 nt, Human
ggagaccuaggugccgggag

SEQ ID NO: 1290425 - RNA, 23 nt, Human
uaugggccugaaaggacaacagg

SEQ ID NO: 1290426 - RNA, 21 nt, Human
uaugugcaaucugggccucag

SEQ ID NO: 1290427 - RNA, 26 nt, Human
ucagcaccacaucuuuagcacauagu

SEQ ID NO: 1290428 - RNA, 24 nt, Human
ucagucggagcugcaguuuuccuu

SEQ ID NO: 1290429 - RNA, 19 nt, Human
ucugaagaaguucuucuca

SEQ ID NO: 1290430 - RNA, 20 nt, Human
ugaaaggacaacagggucac

SEQ ID NO: 1290431 - RNA, 20 nt, Human
ugccgggagucugaaguucu

SEQ ID NO: 1290432 - RNA, 18 nt, Human
uggaauaugggccugaaa

SEQ ID NO: 1290433 - RNA, 21 nt, Human
uucucauaucagaacacaugg

SEQ ID NO: 1290434 - RNA, 19 nt, Human
uuuaaugagaaaaacaugu

SEQ ID NO: 1290435 - RNA, 23 nt, Human
caccgugcuggucacugccugcu

SEQ ID NO: 1290436 - RNA, 21 nt, Human
cccacugugucuccaacugcu

SEQ ID NO: 1290437 - RNA, 19 nt, Human
ccccccucggacacccacu

SEQ ID NO: 1290438 - RNA, 25 nt, Human
cccgaggccaggagcccucuagggc

SEQ ID NO: 1290439 - RNA, 23 nt, Human
cgauagacuucccgaggccagga

SEQ ID NO: 1290440 - RNA, 23 nt, Human
cucuagggcugccgggugccacc

SEQ ID NO: 1290441 - RNA, 20 nt, Human
gaggccaggagcccucuagg

SEQ ID NO: 1290442 - RNA, 23 nt, Human
gcagagcccccccucggacaccc

SEQ ID NO: 1290443 - RNA, 23 nt, Human
gcagggcugggccugugcugugg

SEQ ID NO: 1290444 - RNA, 25 nt, Human
gccugugcugugguccuccggacgc

SEQ ID NO: 1290445 - RNA, 20 nt, Human
ggacgcagagcccccccucg

SEQ ID NO: 1290446 - RNA, 18 nt, Human
ggcacuuggcaccgguga

SEQ ID NO: 1290447 - RNA, 24 nt, Human
uagacuucccgaggccaggagccc

SEQ ID NO: 1290448 - RNA, 20 nt, Human
uccuccggacgcagagcccc

SEQ ID NO: 1290449 - RNA, 24 nt, Human
ucucuggaccugccucuuggucau

SEQ ID NO: 1290450 - RNA, 18 nt, Human
ugcagggcugggccugug

SEQ ID NO: 1290451 - RNA, 22 nt, Human
uuccacaccgugcuggucacug

SEQ ID NO: 1290452 - RNA, 24 nt, Human
aaacacagacacccacgaugagac

SEQ ID NO: 1290453 - RNA, 24 nt, Human
aacacagacacccacgaugagacg

SEQ ID NO: 1290454 - RNA, 19 nt, Human
acaaccuccccagccaugc

SEQ ID NO: 1290455 - RNA, 21 nt, Human
acccuccuuacccugcccccu

SEQ ID NO: 1290456 - RNA, 18 nt, Human
acgcggggcugggcugga

SEQ ID NO: 1290457 - RNA, 22 nt, Human
agaaaaugcugacauaugcugc

SEQ ID NO: 1290458 - RNA, 23 nt, Human
agaggagcgcggcgcugguagca

SEQ ID NO: 1290459 - RNA, 18 nt, Human
agagggaagggcccccug

SEQ ID NO: 1290460 - RNA, 21 nt, Human
cacaccccucucuugcccugc

SEQ ID NO: 1290461 - RNA, 22 nt, Human
cacacgggacggcacagcagcg

SEQ ID NO: 1290462 - RNA, 27 nt, Human
cacuuuaucacuuagaagauucacccu

SEQ ID NO: 1290463 - RNA, 20 nt, Human
cagccccuggccccagcgcc

SEQ ID NO: 1290464 - RNA, 28 nt, Human
cagccccuggccccagcgccgcuggccc

SEQ ID NO: 1290465 - RNA, 19 nt, Human
cauaauaaacacagacacc

SEQ ID NO: 1290466 - RNA, 22 nt, Human
cauaauaaacacagacacccac

SEQ ID NO: 1290467 - RNA, 22 nt, Human
ccaaauccacacgggacggcac

SEQ ID NO: 1290468 - RNA, 21 nt, Human
ccagccaugccagcccgcgcu

SEQ ID NO: 1290469 - RNA, 20 nt, Human
ccagccccuggccccagcgc

SEQ ID NO: 1290470 - RNA, 20 nt, Human
ccagcgccgcuggcccucgg

SEQ ID NO: 1290471 - RNA, 18 nt, Human
ccaggacucuucucccca

SEQ ID NO: 1290472 - RNA, 23 nt, Human
ccccagccaugccagcccgcgcu

SEQ ID NO: 1290473 - RNA, 20 nt, Human
cccccggggcccagcugcuc

SEQ ID NO: 1290474 - RNA, 19 nt, Human
cccccgucuuccccgucuc

SEQ ID NO: 1290475 - RNA, 19 nt, Human
ccccgucuuccccgucucu

SEQ ID NO: 1290476 - RNA, 24 nt, Human
cccuccuuacccugcccccuuguc

SEQ ID NO: 1290477 - RNA, 26 nt, Human
cccuccuuacccugcccccuugucuu

SEQ ID NO: 1290478 - RNA, 20 nt, Human
ccuacagaaaaccacacccc

SEQ ID NO: 1290479 - RNA, 21 nt, Human
ccuggccccagcgccgcuggc

SEQ ID NO: 1290480 - RNA, 26 nt, Human
ccuuauccacuuucaugcuccucccg

SEQ ID NO: 1290481 - RNA, 22 nt, Human
cgaccuggagccaaauccacac

SEQ ID NO: 1290482 - RNA, 21 nt, Human
cggaggccuaacccccucccu

SEQ ID NO: 1290483 - RNA, 21 nt, Human
cggcacagcagcguccugccg

SEQ ID NO: 1290484 - RNA, 24 nt, Human
cgguagaagaaauagugaaagucu

SEQ ID NO: 1290485 - RNA, 22 nt, Human
cuacagaaaaccacaccccucu

SEQ ID NO: 1290486 - RNA, 19 nt, Human
cucccguacuccuggcucc

SEQ ID NO: 1290487 - RNA, 21 nt, Human
cucccguacuccuggcuccuc

SEQ ID NO: 1290488 - RNA, 24 nt, Human
cucuuuguggcauuacuaauacaa

SEQ ID NO: 1290489 - RNA, 21 nt, Human
cuggauauucuccaggccugg

SEQ ID NO: 1290490 - RNA, 31 nt, Human
cugguagcaggcgacgccaggacucuucucu

SEQ ID NO: 1290491 - RNA, 26 nt, Human
cuuggucaagcgguaacgccagugcc

SEQ ID NO: 1290492 - RNA, 20 nt, Human
gaccuagaaggcaagaggug

SEQ ID NO: 1290493 - RNA, 18 nt, Human
gauucacccuccuuaccc

SEQ ID NO: 1290494 - RNA, 23 nt, Human
gcaagaggugagcccucugucac

SEQ ID NO: 1290495 - RNA, 18 nt, Human
gcacacggggaggacacc

SEQ ID NO: 1290496 - RNA, 23 nt, Human
gccucccccgucuuccccgucuc

SEQ ID NO: 1290497 - RNA, 24 nt, Human
gcgugcucucugcucacucuccaa

SEQ ID NO: 1290498 - RNA, 18 nt, Human
gcugcgggacgggcggac

SEQ ID NO: 1290499 - RNA, 23 nt, Human
ggacucuucuccccaggugcucc

SEQ ID NO: 1290500 - RNA, 23 nt, Human
ggccccagcgccgcuggcccucg

SEQ ID NO: 1290501 - RNA, 21 nt, Human
ggcgcugguagcaggcgacgc

SEQ ID NO: 1290502 - RNA, 21 nt, Human
gggaggcuggauauucuccag

SEQ ID NO: 1290503 - RNA, 20 nt, Human
gggcuggacccuacagaaaa

SEQ ID NO: 1290504 - RNA, 21 nt, Human
gugcagagaagaaaaugcuga

SEQ ID NO: 1290505 - RNA, 23 nt, Human
uaaacacagacacccacgaugag

SEQ ID NO: 1290506 - RNA, 24 nt, Human
uaagugcagagaagaaaaugcuga

SEQ ID NO: 1290507 - RNA, 21 nt, Human
uaccuccaccuuuaccuuccc

SEQ ID NO: 1290508 - RNA, 25 nt, Human
uagcaggcgacgccaggacucuucu

SEQ ID NO: 1290509 - RNA, 18 nt, Human
uaguggucccccggggcc

SEQ ID NO: 1290510 - RNA, 19 nt, Human
ucacggagggcuccggcag

SEQ ID NO: 1290511 - RNA, 21 nt, Human
uccccaggugcucccgccgcg

SEQ ID NO: 1290512 - RNA, 19 nt, Human
ucccccggggcccagcugc

SEQ ID NO: 1290513 - RNA, 22 nt, Human
uccuaugaucacgugacuugcu

SEQ ID NO: 1290514 - RNA, 21 nt, Human
uccuuaguuaccuccaccuuu

SEQ ID NO: 1290515 - RNA, 22 nt, Human
ucuccaggccuggcccgcaguc

SEQ ID NO: 1290516 - RNA, 20 nt, Human
ucucuggucucugcacacgg

SEQ ID NO: 1290517 - RNA, 23 nt, Human
ucugcucacucuccaaacuccag

SEQ ID NO: 1290518 - RNA, 18 nt, Human
ucuuaaagucuuugaucg

SEQ ID NO: 1290519 - RNA, 23 nt, Human
ugagaagugaccuagaaggcaag

SEQ ID NO: 1290520 - RNA, 19 nt, Human
ugagggcuccuuggucaag

SEQ ID NO: 1290521 - RNA, 20 nt, Human
ugcagcaaauugaccugaaa

SEQ ID NO: 1290522 - RNA, 22 nt, Human
ugccagcccgcgcucaggccuc

SEQ ID NO: 1290523 - RNA, 23 nt, Human
ugcccugcuccuuaguuaccucc

SEQ ID NO: 1290524 - RNA, 20 nt, Human
ugccuaagagggaagggccc

SEQ ID NO: 1290525 - RNA, 22 nt, Human
ugcucacucuccaaacuccagc

SEQ ID NO: 1290526 - RNA, 19 nt, Human
uggcauuacuaauacaacc

SEQ ID NO: 1290527 - RNA, 23 nt, Human
ugugggaggcuggauauucucca

SEQ ID NO: 1290528 - RNA, 24 nt, Human
ugugggaggcuggauauucuccag

SEQ ID NO: 1290529 - RNA, 23 nt, Human
uucacagccccugcgugcucucu

SEQ ID NO: 1290530 - RNA, 22 nt, Human
uuuaucacuuagaagauucacc

SEQ ID NO: 1290531 - RNA, 24 nt, Human
aaccuuacuugaaucaguaaaaaa

SEQ ID NO: 1290532 - RNA, 20 nt, Human
aagcauuuuuaaaaauaguc

SEQ ID NO: 1290533 - RNA, 22 nt, Human
aagcugacuccaaauacuauau

SEQ ID NO: 1290534 - RNA, 18 nt, Human
aagugcuuccaacuucag

SEQ ID NO: 1290535 - RNA, 19 nt, Human
aguccaaacugaaugaucu

SEQ ID NO: 1290536 - RNA, 18 nt, Human
augcaauacaugcacacg

SEQ ID NO: 1290537 - RNA, 22 nt, Human
augcacacgaagaaacuauaau

SEQ ID NO: 1290538 - RNA, 22 nt, Human
caaugcaauacaugcacacgaa

SEQ ID NO: 1290539 - RNA, 22 nt, Human
cacacaauguacuaaaggccuu

SEQ ID NO: 1290540 - RNA, 26 nt, Human
ccaauuuuaaaauuacaguuuucuua

SEQ ID NO: 1290541 - RNA, 21 nt, Human
cgaagaaacuauaauacagug

SEQ ID NO: 1290542 - RNA, 20 nt, Human
cuuuuauaucacacaugauu

SEQ ID NO: 1290543 - RNA, 18 nt, Human
uaaaauaucaacagugcc

SEQ ID NO: 1290544 - RNA, 18 nt, Human
uaaauaauauacuugaaa

SEQ ID NO: 1290545 - RNA, 19 nt, Human
uaagcugacuccaaauacu

SEQ ID NO: 1290546 - RNA, 23 nt, Human
uagauauaauuaguugcuaacaa

SEQ ID NO: 1290547 - RNA, 25 nt, Human
uagcaggagcuauucacacacaaug

SEQ ID NO: 1290548 - RNA, 23 nt, Human
ucaaaaaaugauuuggaaaaaca

SEQ ID NO: 1290549 - RNA, 19 nt, Human
ucaaaggacaacaaugcaa

SEQ ID NO: 1290550 - RNA, 19 nt, Human
ucuuuuauucaucucucca

SEQ ID NO: 1290551 - RNA, 22 nt, Human
ugcuuccaacuucagauaauuu

SEQ ID NO: 1290552 - RNA, 24 nt, Human
uguggugcugcaucuauaaaauuu

SEQ ID NO: 1290553 - RNA, 18 nt, Human
uguuuucaauucagucca

SEQ ID NO: 1290554 - RNA, 20 nt, Human
uugaugaaauauucuuaaga

SEQ ID NO: 1290555 - RNA, 20 nt, Human
uuuaagagguauuuacaaaa

SEQ ID NO: 1290556 - RNA, 19 nt, Human
aacaagagugagcuuguac

SEQ ID NO: 1290557 - RNA, 19 nt, Human
aagcaacgaaagccagcua

SEQ ID NO: 1290558 - RNA, 24 nt, Human
aagccagcuauuuguguggggaca

SEQ ID NO: 1290559 - RNA, 22 nt, Human
acacaaaccuccccucagcccu

SEQ ID NO: 1290560 - RNA, 18 nt, Human
acacuaggucauucaggc

SEQ ID NO: 1290561 - RNA, 21 nt, Human
acaggcauggggaucagucuu

SEQ ID NO: 1290562 - RNA, 21 nt, Human
acccagcccaguuuuuguuuu

SEQ ID NO: 1290563 - RNA, 22 nt, Human
accccuuccaacugacaaucua

SEQ ID NO: 1290564 - RNA, 22 nt, Human
accggccagcuccaaggggaua

SEQ ID NO: 1290565 - RNA, 18 nt, Human
accuccccucagcccuuc

SEQ ID NO: 1290566 - RNA, 20 nt, Human
aggugcuuuucaauccccag

SEQ ID NO: 1290567 - RNA, 20 nt, Human
auaccacacuaacccaaaga

SEQ ID NO: 1290568 - RNA, 19 nt, Human
auccaccuuuucccuacag

SEQ ID NO: 1290569 - RNA, 22 nt, Human
augaggcacuaauaucuuaccg

SEQ ID NO: 1290570 - RNA, 20 nt, Human
auuccuuccuauucucuucu

SEQ ID NO: 1290571 - RNA, 19 nt, Human
caacaagcaacgaaagcca

SEQ ID NO: 1290572 - RNA, 19 nt, Human
caaggcaaagccgggcugu

SEQ ID NO: 1290573 - RNA, 21 nt, Human
cacccuaaagugggagauaaa

SEQ ID NO: 1290574 - RNA, 18 nt, Human
cagucaaggcaaagccgg

SEQ ID NO: 1290575 - RNA, 22 nt, Human
cagucaaggcaaagccgggcug

SEQ ID NO: 1290576 - RNA, 21 nt, Human
ccaaugcauaaaaccuuuggc

SEQ ID NO: 1290577 - RNA, 19 nt, Human
cccugggggcaggcacagg

SEQ ID NO: 1290578 - RNA, 25 nt, Human
ccuucaaucaaagcaaaguacugac

SEQ ID NO: 1290579 - RNA, 24 nt, Human
ccuuguacauaguuuaaacucucc

SEQ ID NO: 1290580 - RNA, 22 nt, Human
cuggagucaccagaaaaaaaga

SEQ ID NO: 1290581 - RNA, 25 nt, Human
cuuaaaauuccccuaauaagaacuc

SEQ ID NO: 1290582 - RNA, 25 nt, Human
cuuuccuuuuuuucuuuccucccuu

SEQ ID NO: 1290583 - RNA, 22 nt, Human
cuuucugaauuccagaggugag

SEQ ID NO: 1290584 - RNA, 23 nt, Human
gauaacaauagcugcucuugauu

SEQ ID NO: 1290585 - RNA, 22 nt, Human
gccuacuggcugccacccuaaa

SEQ ID NO: 1290586 - RNA, 24 nt, Human
gcuuguacauaccacacuaaccca

SEQ ID NO: 1290587 - RNA, 21 nt, Human
gggcacaggcauggggaucag

SEQ ID NO: 1290588 - RNA, 22 nt, Human
gguuccuuuccuuuuuuucuuu

SEQ ID NO: 1290589 - RNA, 20 nt, Human
gucagucaaggcaaagccgg

SEQ ID NO: 1290590 - RNA, 22 nt, Human
guggguuuuucucagugccuug

SEQ ID NO: 1290591 - RNA, 23 nt, Human
uaaaaugaggcacuaauaucuua

SEQ ID NO: 1290592 - RNA, 24 nt, Human
uaaaauuccccuaauaagaacucc

SEQ ID NO: 1290593 - RNA, 24 nt, Human
uaacccaaagaggggaggcagaaa

SEQ ID NO: 1290594 - RNA, 22 nt, Human
uacacaaaccuccccucagccc

SEQ ID NO: 1290595 - RNA, 18 nt, Human
uacauaccacacuaaccc

SEQ ID NO: 1290596 - RNA, 19 nt, Human
uagagccaacucacucauu

SEQ ID NO: 1290597 - RNA, 19 nt, Human
uaggguagggguggaggug

SEQ ID NO: 1290598 - RNA, 24 nt, Human
uaguaauuagaaagucucgaaaau

SEQ ID NO: 1290599 - RNA, 23 nt, Human
ucaaagcaaaguacugacaauau

SEQ ID NO: 1290600 - RNA, 25 nt, Human
ucaagaguucagacagcugcgauga

SEQ ID NO: 1290601 - RNA, 26 nt, Human
ucacuuuuaaauacauggguguacac

SEQ ID NO: 1290602 - RNA, 18 nt, Human
ucagucaaggcaaagccg

SEQ ID NO: 1290603 - RNA, 21 nt, Human
ucaguuuacggcucacauuua

SEQ ID NO: 1290604 - RNA, 24 nt, Human
ucauucauucaacaagcaacgaaa

SEQ ID NO: 1290605 - RNA, 21 nt, Human
ucgguaugugcucauuucagu

SEQ ID NO: 1290606 - RNA, 19 nt, Human
ucuugauucuuauuucugg

SEQ ID NO: 1290607 - RNA, 20 nt, Human
ugcuacaaacuguguugcag

SEQ ID NO: 1290608 - RNA, 22 nt, Human
uggcaccaauccaccuuuuccc

SEQ ID NO: 1290609 - RNA, 21 nt, Human
uggcagaaacuggucacuguu

SEQ ID NO: 1290610 - RNA, 22 nt, Human
uggcuguucacgagccggcccu

SEQ ID NO: 1290611 - RNA, 20 nt, Human
uguaaaacauuuaaugugau

SEQ ID NO: 1290612 - RNA, 18 nt, Human
uguaaaaugaggcacuaa

SEQ ID NO: 1290613 - RNA, 22 nt, Human
ugucaugggcacaggcaugggg

SEQ ID NO: 1290614 - RNA, 23 nt, Human
ugucaugguguccucuuucaggg

SEQ ID NO: 1290615 - RNA, 19 nt, Human
uuccccuaauaagaacucc

SEQ ID NO: 1290616 - RNA, 21 nt, Human
uuccuaaggcagcccuugugg

SEQ ID NO: 1290617 - RNA, 21 nt, Human
uucugggguagcaguggguca

SEQ ID NO: 1290618 - RNA, 18 nt, Human
uuucucagugccuugcua

SEQ ID NO: 1290619 - RNA, 24 nt, Human
uuuuguuuucaacuauuuucuaau

SEQ ID NO: 1290620 - RNA, 25 nt, Human
aaaaaagaaaugaacacuaucagag

SEQ ID NO: 1290621 - RNA, 22 nt, Human
aaaaacaccaugcucuccucuc

SEQ ID NO: 1290622 - RNA, 24 nt, Human
aacaagcucuuccgggcuucacca

SEQ ID NO: 1290623 - RNA, 19 nt, Human
aagagcugggauuauaacu

SEQ ID NO: 1290624 - RNA, 24 nt, Human
aaggcaggccuccccuccugccuu

SEQ ID NO: 1290625 - RNA, 18 nt, Human
aauucauugacccaaaug

SEQ ID NO: 1290626 - RNA, 21 nt, Human
aauuggcacuucaaugcuugg

SEQ ID NO: 1290627 - RNA, 20 nt, Human
acaacuaagaucuuaauaac

SEQ ID NO: 1290628 - RNA, 19 nt, Human
acaagauuuccucuugaac

SEQ ID NO: 1290629 - RNA, 21 nt, Human
acaucagacccugugcuaagc

SEQ ID NO: 1290630 - RNA, 23 nt, Human
accugagugguguauuugaggag

SEQ ID NO: 1290631 - RNA, 23 nt, Human
agaauuggcacuucaaugcuugg

SEQ ID NO: 1290632 - RNA, 24 nt, Human
agagaugacagaagaaacuaaguc

SEQ ID NO: 1290633 - RNA, 22 nt, Human
agcaaaaacaccaugcucuccu

SEQ ID NO: 1290634 - RNA, 19 nt, Human
agccuaauuugaagauucu

SEQ ID NO: 1290635 - RNA, 23 nt, Human
agccuaauuugaagauucuccau

SEQ ID NO: 1290636 - RNA, 21 nt, Human
aggaagggggggugucugagc

SEQ ID NO: 1290637 - RNA, 23 nt, Human
aggggucagaggaguaaaacauu

SEQ ID NO: 1290638 - RNA, 19 nt, Human
aggucuccccacacccaag

SEQ ID NO: 1290639 - RNA, 19 nt, Human
aguaacaggggucagagga

SEQ ID NO: 1290640 - RNA, 22 nt, Human
agugggccaccacccuccaaga

SEQ ID NO: 1290641 - RNA, 20 nt, Human
augaagcaaaaacaccaugc

SEQ ID NO: 1290642 - RNA, 19 nt, Human
cacaagauuuccucuugaa

SEQ ID NO: 1290643 - RNA, 21 nt, Human
caccacccuccaagaccugca

SEQ ID NO: 1290644 - RNA, 20 nt, Human
caccacuccauggccugcug

SEQ ID NO: 1290645 - RNA, 27 nt, Human
cacccuccaagaccugcauggauccaa

SEQ ID NO: 1290646 - RNA, 24 nt, Human
cacuaucagagaagaauccugaug

SEQ ID NO: 1290647 - RNA, 24 nt, Human
cacuucaaugcuuggcaguacuuu

SEQ ID NO: 1290648 - RNA, 18 nt, Human
caggauuaaccucugcug

SEQ ID NO: 1290649 - RNA, 21 nt, Human
ccaagaccugcauggauccaa

SEQ ID NO: 1290650 - RNA, 23 nt, Human
cccagaaagagugggccaccacc

SEQ ID NO: 1290651 - RNA, 18 nt, Human
ccccuccugccuuuccca

SEQ ID NO: 1290652 - RNA, 25 nt, Human
cccuccaagaccugcauggauccaa

SEQ ID NO: 1290653 - RNA, 19 nt, Human
ccuccaagaccugcaugga

SEQ ID NO: 1290654 - RNA, 21 nt, Human
ccuccccuccugccuuuccca

SEQ ID NO: 1290655 - RNA, 21 nt, Human
ccucccugccugcaaagccca

SEQ ID NO: 1290656 - RNA, 20 nt, Human
ccuccugccuuucccaccaa

SEQ ID NO: 1290657 - RNA, 23 nt, Human
cuucauaaagaaguaacacaaga

SEQ ID NO: 1290658 - RNA, 21 nt, Human
gaaaguaccuuuaugauucua

SEQ ID NO: 1290659 - RNA, 24 nt, Human
gaacucgcucaccacuccauggcc

SEQ ID NO: 1290660 - RNA, 20 nt, Human
gaaugugguuggcacuguac

SEQ ID NO: 1290661 - RNA, 19 nt, Human
gagaagccuggaggaaggg

SEQ ID NO: 1290662 - RNA, 19 nt, Human
gaggaagggggggugucug

SEQ ID NO: 1290663 - RNA, 26 nt, Human
gagugggccaccacccuccaagaccu

SEQ ID NO: 1290664 - RNA, 18 nt, Human
gcuguagggcucgggagg

SEQ ID NO: 1290665 - RNA, 18 nt, Human
ggccaccacccuccaaga

SEQ ID NO: 1290666 - RNA, 19 nt, Human
ggcccagaaagagugggcc

SEQ ID NO: 1290667 - RNA, 23 nt, Human
ggugucugagccacccucuacuu

SEQ ID NO: 1290668 - RNA, 28 nt, Human
uaacuggaccucccugccugcaaagccc

SEQ ID NO: 1290669 - RNA, 21 nt, Human
ucaucuccaccaggcuggagu

SEQ ID NO: 1290670 - RNA, 19 nt, Human
uccaagaccugcauggauc

SEQ ID NO: 1290671 - RNA, 31 nt, Human
uccaccaggcuggaguccuucauaaagaagg

SEQ ID NO: 1290672 - RNA, 21 nt, Human
uccccacacccaagggccugu

SEQ ID NO: 1290673 - RNA, 30 nt, Human
ucugagccacccucuacuuggcccagaaag

SEQ ID NO: 1290674 - RNA, 23 nt, Human
ucuuccgggcuucaccaguuaca

SEQ ID NO: 1290675 - RNA, 18 nt, Human
ugagagaugacagaagaa

SEQ ID NO: 1290676 - RNA, 20 nt, Human
ugagccacccucuacuuggc

SEQ ID NO: 1290677 - RNA, 22 nt, Human
ugaggaguacagguuuccuugu

SEQ ID NO: 1290678 - RNA, 20 nt, Human
uggauuugauuucucugugc

SEQ ID NO: 1290679 - RNA, 23 nt, Human
uggcaguacuuuugaucuucuaa

SEQ ID NO: 1290680 - RNA, 24 nt, Human
uggcuucaggcccugcugucuccu

SEQ ID NO: 1290681 - RNA, 23 nt, Human
ugguguauuugaggaguacaggu

SEQ ID NO: 1290682 - RNA, 26 nt, Human
uuaauaacaguaaauucauugaccca

SEQ ID NO: 1290683 - RNA, 23 nt, Human
uuacaucagacccugugcuaagc

SEQ ID NO: 1290684 - RNA, 18 nt, Human
uuaguaagagcugggauu

SEQ ID NO: 1290685 - RNA, 21 nt, Human
uucaggacucauucaucucca

SEQ ID NO: 1290686 - RNA, 18 nt, Human
uuuaaggcauccauugag

SEQ ID NO: 1290687 - RNA, 22 nt, Human
uuuuuuguguguauuaucccag

SEQ ID NO: 1290688 - RNA, 21 nt, Human
aacaccccauuaagagggaaa

SEQ ID NO: 1290689 - RNA, 20 nt, Human
aggcaggcaggucuaaggcu

SEQ ID NO: 1290690 - RNA, 24 nt, Human
aggcaggcaggucuaaggcuaaca

SEQ ID NO: 1290691 - RNA, 21 nt, Human
augcucacagauguuuuccac

SEQ ID NO: 1290692 - RNA, 22 nt, Human
caugcucacagauguuuuccac

SEQ ID NO: 1290693 - RNA, 27 nt, Human
uccacaacaaacuuaucugacauccaa

SEQ ID NO: 1290694 - RNA, 18 nt, Human
uuuuccacaacaaacuua

SEQ ID NO: 1290695 - RNA, 23 nt, Human
uuuuccacaacaaacuuaucuga

SEQ ID NO: 1290696 - RNA, 24 nt, Human
cacucgagauucucgcccguggga

SEQ ID NO: 1290697 - RNA, 18 nt, Human
ccgccgcgggccgggcuc

SEQ ID NO: 1290698 - RNA, 19 nt, Human
ucgcacucgagauucucgc

SEQ ID NO: 1290699 - RNA, 24 nt, Human
aaauggcugaacaaagaaaacuaa

SEQ ID NO: 1290700 - RNA, 19 nt, Human
aacagcaaagugguagcaa

SEQ ID NO: 1290701 - RNA, 21 nt, Human
aaguaaccuuugcaaauggac

SEQ ID NO: 1290702 - RNA, 20 nt, Human
ccccugagcuuucgcugcuu

SEQ ID NO: 1290703 - RNA, 21 nt, Human
ccugcagaagccuccuuuguu

SEQ ID NO: 1290704 - RNA, 20 nt, Human
cucauaaugugccuagaauc

SEQ ID NO: 1290705 - RNA, 22 nt, Human
cuuuuuuucucuuuccucuaga

SEQ ID NO: 1290706 - RNA, 21 nt, Human
gcgcuccuccucguccuccuc

SEQ ID NO: 1290707 - RNA, 23 nt, Human
uaacugucgguccaaccuuauaa

SEQ ID NO: 1290708 - RNA, 18 nt, Human
uacagucucuaguaacag

SEQ ID NO: 1290709 - RNA, 24 nt, Human
ucuugaacagcaaagugguagcaa

SEQ ID NO: 1290710 - RNA, 18 nt, Human
ugggaagcaaaaucaaug

SEQ ID NO: 1290711 - RNA, 19 nt, Human
uguacugcuauauugcauu

SEQ ID NO: 1290712 - RNA, 19 nt, Human
ugucugauguacugcuaua

SEQ ID NO: 1290713 - RNA, 21 nt, Human
uuucccuccucauaaugugcc

SEQ ID NO: 1290714 - RNA, 20 nt, Human
ccuuacauaauaggcacccc

SEQ ID NO: 1290715 - RNA, 24 nt, Human
ccuugaagcuguacguagcuuggu

SEQ ID NO: 1290716 - RNA, 20 nt, Human
cucacuuucuggcccuggcc

SEQ ID NO: 1290717 - RNA, 21 nt, Human
cuuacauaauaggcaccccuc

SEQ ID NO: 1290718 - RNA, 21 nt, Human
uaauaggcaccccucucacuu

SEQ ID NO: 1290719 - RNA, 18 nt, Human
uagcuugguguccaucag

SEQ ID NO: 1290720 - RNA, 19 nt, Human
uccagugaugcuuccauag

SEQ ID NO: 1290721 - RNA, 21 nt, Human
ucucacuuucuggcccuggcc

SEQ ID NO: 1290722 - RNA, 23 nt, Human
ugaugcuuccauagcaggcuggg

SEQ ID NO: 1290723 - RNA, 20 nt, Human
agccaaguaaccaccaguga

SEQ ID NO: 1290724 - RNA, 23 nt, Human
caaguaaccaccagugaccagca

SEQ ID NO: 1290725 - RNA, 20 nt, Human
caccagugaccagcaggucu

SEQ ID NO: 1290726 - RNA, 23 nt, Human
cagcaggucuuugccccaaaccc

SEQ ID NO: 1290727 - RNA, 25 nt, Human
cagcuggcugccuccaaccccuugg

SEQ ID NO: 1290728 - RNA, 19 nt, Human
ccaaguaaccaccagugac

SEQ ID NO: 1290729 - RNA, 20 nt, Human
ccagguguacugucuguacu

SEQ ID NO: 1290730 - RNA, 19 nt, Human
cuguacuuugggaucagcu

SEQ ID NO: 1290731 - RNA, 18 nt, Human
cuguguuuuuagccuuug

SEQ ID NO: 1290732 - RNA, 18 nt, Human
cuuugccccaaacccucc

SEQ ID NO: 1290733 - RNA, 21 nt, Human
gccccaaacccuccaaggccu

SEQ ID NO: 1290734 - RNA, 18 nt, Human
gcugccaaauccucucgc

SEQ ID NO: 1290735 - RNA, 22 nt, Human
gucuguacuuugggaucagcug

SEQ ID NO: 1290736 - RNA, 18 nt, Human
uaaccaccagugaccagc

SEQ ID NO: 1290737 - RNA, 22 nt, Human
uaaccaccagugaccagcaggu

SEQ ID NO: 1290738 - RNA, 24 nt, Human
ucagugguccugccccagguuucu

SEQ ID NO: 1290739 - RNA, 20 nt, Human
ugccccaaacccuccaaggc

SEQ ID NO: 1290740 - RNA, 18 nt, Human
uggcugccuccaggugua

SEQ ID NO: 1290741 - RNA, 24 nt, Human
uuuuuagccuuugacaccaggauu

SEQ ID NO: 1290742 - RNA, 22 nt, Human
aagcugcagaaacccacuggau

SEQ ID NO: 1290743 - RNA, 25 nt, Human
accuaagcugcagaaaccggggguc

SEQ ID NO: 1290744 - RNA, 26 nt, Human
agaaacccacuggaugguuuccuagg

SEQ ID NO: 1290745 - RNA, 22 nt, Human
agcugcagaaacccacuggaug

SEQ ID NO: 1290746 - RNA, 19 nt, Human
cuaagcugcagaaacccac

SEQ ID NO: 1290747 - RNA, 23 nt, Human
cuggaugguuuccuagguucuga

SEQ ID NO: 1290748 - RNA, 18 nt, Human
gagauacagcagcuguaa

SEQ ID NO: 1290749 - RNA, 20 nt, Human
uaagcugcagaaacccacug

SEQ ID NO: 1290750 - RNA, 18 nt, Human
ucuucugaaggcugguua

SEQ ID NO: 1290751 - RNA, 19 nt, Human
ugaaacaccuaagcugcag

SEQ ID NO: 1290752 - RNA, 20 nt, Human
ugaaacaccuaagcugcaga

SEQ ID NO: 1290753 - RNA, 25 nt, Human
ugaaacaccuaagcugcagaaaccc

SEQ ID NO: 1290754 - RNA, 28 nt, Human
ugaguuggcauuaucuuuccuccccgga

SEQ ID NO: 1290755 - RNA, 21 nt, Human
ugggacgcguuaccuucacac

SEQ ID NO: 1290756 - RNA, 21 nt, Human
uucuucugaaggcugguuaug

SEQ ID NO: 1290757 - RNA, 23 nt, Human
uugaugcacaaacuucuugaaag

SEQ ID NO: 1290758 - RNA, 22 nt, Human
aaagagcuuugccuguccaggc

SEQ ID NO: 1290759 - RNA, 18 nt, Human
aagccgcuucucuucaag

SEQ ID NO: 1290760 - RNA, 19 nt, Human
aaggacccugggcucuccc

SEQ ID NO: 1290761 - RNA, 18 nt, Human
agaaagggggacagcgag

SEQ ID NO: 1290762 - RNA, 25 nt, Human
aggaggccuugggagaaagggggac

SEQ ID NO: 1290763 - RNA, 23 nt, Human
cagcgagcagggccccuccccag

SEQ ID NO: 1290764 - RNA, 19 nt, Human
caggcugcucuuccccuuc

SEQ ID NO: 1290765 - RNA, 24 nt, Human
ccagaagccgcuucucuucaagga

SEQ ID NO: 1290766 - RNA, 23 nt, Human
ccaggcugcucuuccccuucccc

SEQ ID NO: 1290767 - RNA, 19 nt, Human
cccaucuuuggcaggugaa

SEQ ID NO: 1290768 - RNA, 19 nt, Human
ccccuguuccugcuuggcc

SEQ ID NO: 1290769 - RNA, 22 nt, Human
ccccuuccccucuugggauucc

SEQ ID NO: 1290770 - RNA, 23 nt, Human
ccuccccagggcugcaugggggu

SEQ ID NO: 1290771 - RNA, 23 nt, Human
ccugcgcugccacgugcuccuug

SEQ ID NO: 1290772 - RNA, 23 nt, Human
ccuugccccgugaccccuguucc

SEQ ID NO: 1290773 - RNA, 20 nt, Human
cuccccagggcugcaugggg

SEQ ID NO: 1290774 - RNA, 19 nt, Human
cucucccuuugcaggaacc

SEQ ID NO: 1290775 - RNA, 21 nt, Human
cugccacgugcuccuugcccc

SEQ ID NO: 1290776 - RNA, 19 nt, Human
cugcuuccuuccuguuucc

SEQ ID NO: 1290777 - RNA, 18 nt, Human
cuguuuccugcgcugcca

SEQ ID NO: 1290778 - RNA, 21 nt, Human
gacagcgagcagggccccucc

SEQ ID NO: 1290779 - RNA, 21 nt, Human
gggagaaagggggacagcgag

SEQ ID NO: 1290780 - RNA, 20 nt, Human
gguggcugcuuccuuccugu

SEQ ID NO: 1290781 - RNA, 19 nt, Human
ucagacuaggcaggauaca

SEQ ID NO: 1290782 - RNA, 18 nt, Human
uccugcgcugccacgugc

SEQ ID NO: 1290783 - RNA, 18 nt, Human
uccugcgcugccacgugc

SEQ ID NO: 1290784 - RNA, 18 nt, Human
ugcacaugccaggcugcu

SEQ ID NO: 1290785 - RNA, 19 nt, Human
ugccacgugcuccuugccc

SEQ ID NO: 1290786 - RNA, 24 nt, Human
uuccccuuccccucuugggauucc

SEQ ID NO: 1290787 - RNA, 19 nt, Human
aaauaggagccaggaagag

SEQ ID NO: 1290788 - RNA, 21 nt, Human
aagaacagaaaggaugguggc

SEQ ID NO: 1290789 - RNA, 21 nt, Human
aaggagggaccuaccaugaug

SEQ ID NO: 1290790 - RNA, 22 nt, Human
aauucacacucuugagaacagu

SEQ ID NO: 1290791 - RNA, 23 nt, Human
acaggagcugcugucccuggggc

SEQ ID NO: 1290792 - RNA, 28 nt, Human
accaaaaucacaggagcugcugucccug

SEQ ID NO: 1290793 - RNA, 19 nt, Human
agccaggaagagaguguuc

SEQ ID NO: 1290794 - RNA, 23 nt, Human
auaaaauaguagcugccaccuaa

SEQ ID NO: 1290795 - RNA, 19 nt, Human
caaaguggauagcgaggua

SEQ ID NO: 1290796 - RNA, 21 nt, Human
cagggacucagagccaggccu

SEQ ID NO: 1290797 - RNA, 21 nt, Human
ccaagaagagagagagaagga

SEQ ID NO: 1290798 - RNA, 19 nt, Human
ccaggaagagaguguucca

SEQ ID NO: 1290799 - RNA, 19 nt, Human
cucugccuuuauuggcgga

SEQ ID NO: 1290800 - RNA, 18 nt, Human
gagaagcagguuaaagaa

SEQ ID NO: 1290801 - RNA, 21 nt, Human
gccuuauccaaucccaacucu

SEQ ID NO: 1290802 - RNA, 20 nt, Human
ggaaauaggagccaggaaga

SEQ ID NO: 1290803 - RNA, 24 nt, Human
gucuuuggaggcagcgaggaaaua

SEQ ID NO: 1290804 - RNA, 21 nt, Human
ucaggggaugugcucccucug

SEQ ID NO: 1290805 - RNA, 22 nt, Human
ucccaacucucccagucagcca

SEQ ID NO: 1290806 - RNA, 26 nt, Human
ugccuuauccaaucccaacucuccca

SEQ ID NO: 1290807 - RNA, 22 nt, Human
aacagcccugaccuauuacaga

SEQ ID NO: 1290808 - RNA, 29 nt, Human
aagccagcucugucuccaacaacaggggu

SEQ ID NO: 1290809 - RNA, 20 nt, Human
cccauuucccaagcacugau

SEQ ID NO: 1290810 - RNA, 22 nt, Human
cuuuaaauuguuauccugccca

SEQ ID NO: 1290811 - RNA, 18 nt, Human
uaagaaagauuaagcaca

SEQ ID NO: 1290812 - RNA, 21 nt, Human
uaucucuuuaaauuguuaucc

SEQ ID NO: 1290813 - RNA, 19 nt, Human
ucuccaacagcccugaccu

SEQ ID NO: 1290814 - RNA, 21 nt, Human
uucaggacccuggacaucagg

SEQ ID NO: 1290815 - RNA, 20 nt, Human
uuucaggacccuggacauca

SEQ ID NO: 1290816 - RNA, 18 nt, Human
aaagaagcucuuaucucu

SEQ ID NO: 1290817 - RNA, 24 nt, Human
aagaagcucuuaucucuucgcuga

SEQ ID NO: 1290818 - RNA, 21 nt, Human
agguguuaaaaaugugcaucu

SEQ ID NO: 1290819 - RNA, 22 nt, Human
ccgcggaaagggucuuccucuu

SEQ ID NO: 1290820 - RNA, 20 nt, Human
cugauaccauaaauccaggc

SEQ ID NO: 1290821 - RNA, 23 nt, Human
uaaaaaugugcaucugauaccau

SEQ ID NO: 1290822 - RNA, 21 nt, Human
ucuuccagacaccaggcucac

SEQ ID NO: 1290823 - RNA, 23 nt, Human
ucuucuggcaugaaaaauuccag

SEQ ID NO: 1290824 - RNA, 25 nt, Human
ugaagagauauuuuaaagagaaaac

SEQ ID NO: 1290825 - RNA, 21 nt, Human
aaguggagacaaguuuauuga

SEQ ID NO: 1290826 - RNA, 22 nt, Human
acuccgaggggauccguaagag

SEQ ID NO: 1290827 - RNA, 21 nt, Human
agugagacugaggaucuggua

SEQ ID NO: 1290828 - RNA, 22 nt, Human
caaguuuauugaggagcuugac

SEQ ID NO: 1290829 - RNA, 26 nt, Human
caccccucuucugcccuagcuugaga

SEQ ID NO: 1290830 - RNA, 20 nt, Human
caggccccugggugucuccc

SEQ ID NO: 1290831 - RNA, 19 nt, Human
ccuugucgccgcggccucg

SEQ ID NO: 1290832 - RNA, 21 nt, Human
cgcccgggaugcggaggucug

SEQ ID NO: 1290833 - RNA, 18 nt, Human
cgccgcggccucgccgcc

SEQ ID NO: 1290834 - RNA, 18 nt, Human
cgggaccagcgcacccug

SEQ ID NO: 1290835 - RNA, 19 nt, Human
cggucgaggcaugcugcgg

SEQ ID NO: 1290836 - RNA, 22 nt, Human
cucuucugcccuagcuugagag

SEQ ID NO: 1290837 - RNA, 19 nt, Human
cugcagccagugagggccc

SEQ ID NO: 1290838 - RNA, 22 nt, Human
cuugacaccccucuucugcccu

SEQ ID NO: 1290839 - RNA, 21 nt, Human
gcccuagcuugagagaacaac

SEQ ID NO: 1290840 - RNA, 23 nt, Human
gccuuuccuguggccccaggcac

SEQ ID NO: 1290841 - RNA, 20 nt, Human
gcgggccaggccccugggug

SEQ ID NO: 1290842 - RNA, 27 nt, Human
ggcgggccaggccccugggggacucuc

SEQ ID NO: 1290843 - RNA, 24 nt, Human
uaaggaaacagaucagcugcagcc

SEQ ID NO: 1290844 - RNA, 25 nt, Human
uaaggaaacagaucagcugcagcca

SEQ ID NO: 1290845 - RNA, 19 nt, Human
ucgccgcggccucgccgcc

SEQ ID NO: 1290846 - RNA, 25 nt, Human
ucucccauaucgcugucuuuaguga

SEQ ID NO: 1290847 - RNA, 19 nt, Human
ugagcgcgcgaccgggacc

SEQ ID NO: 1290848 - RNA, 24 nt, Human
ugagggccccugcguugggccugg

SEQ ID NO: 1290849 - RNA, 25 nt, Human
ugggugucucccauaucgcugucuu

SEQ ID NO: 1290850 - RNA, 21 nt, Human
aaguggagacaaguuuauuga

SEQ ID NO: 1290851 - RNA, 20 nt, Human
acucucagcucugaagccag

SEQ ID NO: 1290852 - RNA, 21 nt, Human
agugagacugaggaucuggua

SEQ ID NO: 1290853 - RNA, 22 nt, Human
caaguuuauugaggagcuugac

SEQ ID NO: 1290854 - RNA, 26 nt, Human
caccccucuucugcccuagcuugaga

SEQ ID NO: 1290855 - RNA, 19 nt, Human
cacuguguuggggcgaggc

SEQ ID NO: 1290856 - RNA, 23 nt, Human
cagcagggucuggcagccucugg

SEQ ID NO: 1290857 - RNA, 26 nt, Human
ccaggaauuucccauagcagcaccgg

SEQ ID NO: 1290858 - RNA, 22 nt, Human
ccagguuugugguguucugggg

SEQ ID NO: 1290859 - RNA, 23 nt, Human
ccccaggcacucucagcucugaa

SEQ ID NO: 1290860 - RNA, 22 nt, Human
ccugcugugggcagggcucugc

SEQ ID NO: 1290861 - RNA, 19 nt, Human
cgacaccgcaggaugccca

SEQ ID NO: 1290862 - RNA, 19 nt, Human
cugcagccagugagggccc

SEQ ID NO: 1290863 - RNA, 23 nt, Human
cugcccuagcuugagagaacaac

SEQ ID NO: 1290864 - RNA, 18 nt, Human
cuggggguccuggugaag

SEQ ID NO: 1290865 - RNA, 20 nt, Human
cuucugcccuagcuugagag

SEQ ID NO: 1290866 - RNA, 21 nt, Human
cuugacaccccucuucugccc

SEQ ID NO: 1290867 - RNA, 22 nt, Human
gcagcagggucuggcagccucu

SEQ ID NO: 1290868 - RNA, 23 nt, Human
gccuuuccuguggccccaggcac

SEQ ID NO: 1290869 - RNA, 20 nt, Human
gcgggccaggccccugggug

SEQ ID NO: 1290870 - RNA, 18 nt, Human
ggccccugggugucuccc

SEQ ID NO: 1290871 - RNA, 27 nt, Human
ggcgggccaggccccugggggacucuc

SEQ ID NO: 1290872 - RNA, 18 nt, Human
gucuggcagccucugggc

SEQ ID NO: 1290873 - RNA, 21 nt, Human
guggccccaggcacucucagc

SEQ ID NO: 1290874 - RNA, 24 nt, Human
uaaggaaacagaucagcugcagcc

SEQ ID NO: 1290875 - RNA, 25 nt, Human
uaaggaaacagaucagcugcagcca

SEQ ID NO: 1290876 - RNA, 22 nt, Human
uccagguuugugguguucuggg

SEQ ID NO: 1290877 - RNA, 19 nt, Human
ucccauagcagcaccgguc

SEQ ID NO: 1290878 - RNA, 19 nt, Human
ucccuggagauguccuucc

SEQ ID NO: 1290879 - RNA, 19 nt, Human
uccuggugaagaccacacu

SEQ ID NO: 1290880 - RNA, 24 nt, Human
ucgacaccgcaggaugcccaggaa

SEQ ID NO: 1290881 - RNA, 20 nt, Human
ucuccagguuugugguguuc

SEQ ID NO: 1290882 - RNA, 25 nt, Human
ucucccauaucgcugucuuuaguga

SEQ ID NO: 1290883 - RNA, 21 nt, Human
ucugaagccaggcuauugcuc

SEQ ID NO: 1290884 - RNA, 22 nt, Human
ucuggcagccucugggcucucc

SEQ ID NO: 1290885 - RNA, 24 nt, Human
ugagggccccugcguugggccugg

SEQ ID NO: 1290886 - RNA, 19 nt, Human
ugcugugggcagggcucug

SEQ ID NO: 1290887 - RNA, 19 nt, Human
ugggcucuccagguuugug

SEQ ID NO: 1290888 - RNA, 25 nt, Human
ugggugucucccauaucgcugucuu

SEQ ID NO: 1290889 - RNA, 19 nt, Human
uucacagucucaaaauauu

SEQ ID NO: 1290890 - RNA, 21 nt, Human
aaccaauccacaugcaagguc

SEQ ID NO: 1290891 - RNA, 26 nt, Human
acaaggagccagccaccacauccaga

SEQ ID NO: 1290892 - RNA, 23 nt, Human
agcaaaaccaauccacaugcaag

SEQ ID NO: 1290893 - RNA, 19 nt, Human
caaaaccaauccacaugca

SEQ ID NO: 1290894 - RNA, 21 nt, Human
cacgcagacccucgauaggcc

SEQ ID NO: 1290895 - RNA, 24 nt, Human
cagcagcaaaaccaauccacaugc

SEQ ID NO: 1290896 - RNA, 26 nt, Human
cauccagaguauucauucucggucau

SEQ ID NO: 1290897 - RNA, 21 nt, Human
ccacaggaugcugagcugcug

SEQ ID NO: 1290898 - RNA, 18 nt, Human
ccucucacucugcgugug

SEQ ID NO: 1290899 - RNA, 19 nt, Human
gacucacggcuucuucccu

SEQ ID NO: 1290900 - RNA, 24 nt, Human
gacucacggcuucuucccuacuuc

SEQ ID NO: 1290901 - RNA, 22 nt, Human
uccacaugcaaggucuggaggu

SEQ ID NO: 1290902 - RNA, 22 nt, Human
ucccuacuucccacccagguuc

SEQ ID NO: 1290903 - RNA, 18 nt, Human
uccuggccacgcagaccc

SEQ ID NO: 1290904 - RNA, 25 nt, Human
ugcugagcugcuguccuugagcccu

SEQ ID NO: 1290905 - RNA, 19 nt, Human
ugucggacacauacuagga

SEQ ID NO: 1290906 - RNA, 19 nt, Human
ugugcagccacaggaugcu

SEQ ID NO: 1290907 - RNA, 21 nt, Human
uuuccuuacagcagcaaaacc

SEQ ID NO: 1290908 - RNA, 19 nt, Human
cauuccuguucacuugagg

SEQ ID NO: 1290909 - RNA, 24 nt, Human
gaacuaggcugucugauccccagu

SEQ ID NO: 1290910 - RNA, 19 nt, Human
uacucuguccgggcuccug

SEQ ID NO: 1290911 - RNA, 23 nt, Human
ucccgccccaucccccaaaguaa

SEQ ID NO: 1290912 - RNA, 24 nt, Human
ugauccccagucccgccccauccc

SEQ ID NO: 1290913 - RNA, 22 nt, Human
uggaggagagagagcaggagca

SEQ ID NO: 1290914 - RNA, 23 nt, Human
uggaggagagagagcaggagcag

SEQ ID NO: 1290915 - RNA, 21 nt, Human
cggcgggaggauccccgggcc

SEQ ID NO: 1290916 - RNA, 23 nt, Human
uccccgggccgcuuucgccuccg

SEQ ID NO: 1290917 - RNA, 21 nt, Human
aagguguuuggauuguugaga

SEQ ID NO: 1290918 - RNA, 19 nt, Human
acuacagacagagacugug

SEQ ID NO: 1290919 - RNA, 20 nt, Human
agagacugugauuugagaug

SEQ ID NO: 1290920 - RNA, 19 nt, Human
agggaugaagaaaguuacu

SEQ ID NO: 1290921 - RNA, 23 nt, Human
caagaucgaggcacugaccaguc

SEQ ID NO: 1290922 - RNA, 20 nt, Human
caagggaugaagaaaguuac

SEQ ID NO: 1290923 - RNA, 26 nt, Human
ggcagauccacacuaugccaucucuu

SEQ ID NO: 1290924 - RNA, 23 nt, Human
uacuacagacagagacugugauu

SEQ ID NO: 1290925 - RNA, 21 nt, Human
ucaagggaugaagaaaguuac

SEQ ID NO: 1290926 - RNA, 24 nt, Human
ucuacuacagacagagacugugau

SEQ ID NO: 1290927 - RNA, 21 nt, Human
ugccaggggucagauuaagca

SEQ ID NO: 1290928 - RNA, 19 nt, Human
uucaagggaugaagaaagu

SEQ ID NO: 1290929 - RNA, 19 nt, Human
uucaagggaugaagaaagu

SEQ ID NO: 1290930 - RNA, 22 nt, Human
uucaagggaugaagaaaguuac

SEQ ID NO: 1290931 - RNA, 22 nt, Human
uucaagggaugaagaaaguuac

SEQ ID NO: 1290932 - RNA, 23 nt, Human
uucaagggaugaagaaaguuacu

SEQ ID NO: 1290933 - RNA, 26 nt, Human
aaaacagaagauacuaaaaaauggga

SEQ ID NO: 1290934 - RNA, 24 nt, Human
agaagauacuaaaaaaugggacua

SEQ ID NO: 1290935 - RNA, 19 nt, Human
aggaaaagagaucacaacg

SEQ ID NO: 1290936 - RNA, 23 nt, Human
aggccucagagaccacaaacacc

SEQ ID NO: 1290937 - RNA, 23 nt, Human
auacaauaugguuccaaaauggg

SEQ ID NO: 1290938 - RNA, 18 nt, Human
augggaaacuaaaauaga

SEQ ID NO: 1290939 - RNA, 18 nt, Human
caccgacugcucccucaa

SEQ ID NO: 1290940 - RNA, 19 nt, Human
cgugagaaaacagaagaua

SEQ ID NO: 1290941 - RNA, 20 nt, Human
cugcucccucaaagaauucc

SEQ ID NO: 1290942 - RNA, 21 nt, Human
gaugauggaagaagcauggaa

SEQ ID NO: 1290943 - RNA, 23 nt, Human
gccgcgccaacuccggcgucggg

SEQ ID NO: 1290944 - RNA, 19 nt, Human
gugagaaaacagaagauac

SEQ ID NO: 1290945 - RNA, 24 nt, Human
gugagaaaacagaagauacuaaaa

SEQ ID NO: 1290946 - RNA, 28 nt, Human
uaaaaaaugggacuaucuagugccugaa

SEQ ID NO: 1290947 - RNA, 25 nt, Human
uacaaagaaacauauaccaggcugg

SEQ ID NO: 1290948 - RNA, 24 nt, Human
uaccaggcugaacaaaccagaggc

SEQ ID NO: 1290949 - RNA, 18 nt, Human
ugagaaaacagaagauac

SEQ ID NO: 1290950 - RNA, 24 nt, Human
ugagaaaacagaagauacuaaaaa

SEQ ID NO: 1290951 - RNA, 19 nt, Human
ugagagggaacugagucuu

SEQ ID NO: 1290952 - RNA, 23 nt, Human
uggaagaagcauggaaauacaau

SEQ ID NO: 1290953 - RNA, 24 nt, Human
uggaagaagcauggaaauacaaua

SEQ ID NO: 1290954 - RNA, 22 nt, Human
acacgauccgcggugacugcac

SEQ ID NO: 1290955 - RNA, 27 nt, Human
agagcaaaugcagggcacuuggggccc

SEQ ID NO: 1290956 - RNA, 25 nt, Human
agcaaaugcagggcacuuggggccc

SEQ ID NO: 1290957 - RNA, 21 nt, Human
caaugaguguggugaaccauc

SEQ ID NO: 1290958 - RNA, 24 nt, Human
cacacgauccgcggugacugcacc

SEQ ID NO: 1290959 - RNA, 27 nt, Human
ccacagggcugccggacucgcguggcc

SEQ ID NO: 1290960 - RNA, 19 nt, Human
cccaagcuuccuccagaug

SEQ ID NO: 1290961 - RNA, 24 nt, Human
ccccagccggcccuuugcuuucac

SEQ ID NO: 1290962 - RNA, 19 nt, Human
cucgcccaagcuuccucca

SEQ ID NO: 1290963 - RNA, 23 nt, Human
cugccggacucgcguggccgcgu

SEQ ID NO: 1290964 - RNA, 21 nt, Human
cuuggggcccgggagccuugg

SEQ ID NO: 1290965 - RNA, 22 nt, Human
cuuuguuagaagagcaaaugca

SEQ ID NO: 1290966 - RNA, 24 nt, Human
gcccaagcuuccuccagaugccga

SEQ ID NO: 1290967 - RNA, 19 nt, Human
gccuugauccgucucucca

SEQ ID NO: 1290968 - RNA, 20 nt, Human
uagaagagcaaaugcagggc

SEQ ID NO: 1290969 - RNA, 21 nt, Human
ucucuccauuugcuucccauc

SEQ ID NO: 1290970 - RNA, 19 nt, Human
ugcaaugaguguggugaac

SEQ ID NO: 1290971 - RNA, 18 nt, Human
uggggcccgggagccuug

SEQ ID NO: 1290972 - RNA, 18 nt, Human
aagccacagcugaacacc

SEQ ID NO: 1290973 - RNA, 18 nt, Human
acaccaguuccccaugaa

SEQ ID NO: 1290974 - RNA, 20 nt, Human
aggccccaggggaacaccag

SEQ ID NO: 1290975 - RNA, 21 nt, Human
caguugccaggaggacaccag

SEQ ID NO: 1290976 - RNA, 18 nt, Human
ccaguuccccaugaacac

SEQ ID NO: 1290977 - RNA, 21 nt, Human
ccucaggugggcaccuagucc

SEQ ID NO: 1290978 - RNA, 20 nt, Human
ccuuacaccaagugaucucc

SEQ ID NO: 1290979 - RNA, 22 nt, Human
cucuucaggccccaggggaaca

SEQ ID NO: 1290980 - RNA, 26 nt, Human
cugaacaccaguuccccaugaacacc

SEQ ID NO: 1290981 - RNA, 23 nt, Human
uagcccaccuccuuacaccaagu

SEQ ID NO: 1290982 - RNA, 18 nt, Human
ucaagccacagcugaaca

SEQ ID NO: 1290983 - RNA, 18 nt, Human
uccucaggugggcaccua

SEQ ID NO: 1290984 - RNA, 20 nt, Human
ugccaggaggacaccaggac

SEQ ID NO: 1290985 - RNA, 23 nt, Human
ugcccagcuucauuaagcuuaaa

SEQ ID NO: 1290986 - RNA, 23 nt, Human
ugugugcaucaggugccaggcug

SEQ ID NO: 1290987 - RNA, 18 nt, Human
agcaccuuccccgucccg

SEQ ID NO: 1290988 - RNA, 23 nt, Human
cagccgccgcccuccacgcccgg

SEQ ID NO: 1290989 - RNA, 20 nt, Human
ccaagcaccuuccccguccc

SEQ ID NO: 1290990 - RNA, 22 nt, Human
ccacgcccggcgcgggcaggca

SEQ ID NO: 1290991 - RNA, 21 nt, Human
cccacagggaccacagcuucc

SEQ ID NO: 1290992 - RNA, 20 nt, Human
ccccgucccgcccugucugc

SEQ ID NO: 1290993 - RNA, 24 nt, Human
ccccucgcagccgccgcccuccac

SEQ ID NO: 1290994 - RNA, 19 nt, Human
cccgcagucccgcgugcau

SEQ ID NO: 1290995 - RNA, 20 nt, Human
ccgcagucccgcgugcauuc

SEQ ID NO: 1290996 - RNA, 18 nt, Human
ccgccgcccuccacgccc

SEQ ID NO: 1290997 - RNA, 18 nt, Human
ccuccaagcaccuucccc

SEQ ID NO: 1290998 - RNA, 24 nt, Human
cgcgucuggaggccucccccgcag

SEQ ID NO: 1290999 - RNA, 21 nt, Human
cuccagcacccccucgcagcc

SEQ ID NO: 1291000 - RNA, 21 nt, Human
cuccagcacccccucgcagcc

SEQ ID NO: 1291001 - RNA, 18 nt, Human
cuggaggccucccccgca

SEQ ID NO: 1291002 - RNA, 25 nt, Human
cuggcgacccuccuccagcaccccc

SEQ ID NO: 1291003 - RNA, 20 nt, Human
gacccuccuccagcaccccc

SEQ ID NO: 1291004 - RNA, 22 nt, Human
gcgggcaggcaggugcgcgucc

SEQ ID NO: 1291005 - RNA, 24 nt, Human
gcgguugcacuggcgacccuccuc

SEQ ID NO: 1291006 - RNA, 18 nt, Human
ucacugcacccuccaagc

SEQ ID NO: 1291007 - RNA, 23 nt, Human
uccaagcaccuuccccgucccgc

SEQ ID NO: 1291008 - RNA, 21 nt, Human
uccacgcccggcgcgggcagg

SEQ ID NO: 1291009 - RNA, 20 nt, Human
ucccgcgugcauucgccccu

SEQ ID NO: 1291010 - RNA, 23 nt, Human
ucgccccacagggaccacagcuu

SEQ ID NO: 1291011 - RNA, 20 nt, Human
ugcacuggcgacccuccucc

SEQ ID NO: 1291012 - RNA, 21 nt, Human
uugcacuggcgacccuccucc

SEQ ID NO: 1291013 - RNA, 23 nt, Human
agcgaaacugguccucugggggc

SEQ ID NO: 1291014 - RNA, 20 nt, Human
aucuggcuccggcccagagc

SEQ ID NO: 1291015 - RNA, 19 nt, Human
caugaggcgcgaugcgugg

SEQ ID NO: 1291016 - RNA, 21 nt, Human
ccccucgaaacuccccuggca

SEQ ID NO: 1291017 - RNA, 28 nt, Human
ccggcggcgcagcgaaacugguccucuu

SEQ ID NO: 1291018 - RNA, 21 nt, Human
ccucgaaacuccccuggcaga

SEQ ID NO: 1291019 - RNA, 23 nt, Human
cgagggccccugcugggagagug

SEQ ID NO: 1291020 - RNA, 21 nt, Human
cggcccagagcaugaggcgcg

SEQ ID NO: 1291021 - RNA, 22 nt, Human
cggcgcagcgaaacugguccuc

SEQ ID NO: 1291022 - RNA, 20 nt, Human
cgggagggaugaagggagca

SEQ ID NO: 1291023 - RNA, 22 nt, Human
cucuccgcauugcccccucgaa

SEQ ID NO: 1291024 - RNA, 24 nt, Human
cuguguccagcuggccgaguccca

SEQ ID NO: 1291025 - RNA, 26 nt, Human
gaugaagggagcaggggugggaggga

SEQ ID NO: 1291026 - RNA, 25 nt, Human
gcaccggaauuucuagacgcuucca

SEQ ID NO: 1291027 - RNA, 18 nt, Human
ggagcaggggugggaggg

SEQ ID NO: 1291028 - RNA, 20 nt, Human
gggccuccgagggccccugc

SEQ ID NO: 1291029 - RNA, 20 nt, Human
ggucugguggucgggaggga

SEQ ID NO: 1291030 - RNA, 24 nt, Human
guggggucugguggucgggaggga

SEQ ID NO: 1291031 - RNA, 23 nt, Human
ucaucuggcuccggcccagagca

SEQ ID NO: 1291032 - RNA, 19 nt, Human
uccccuggcagagucuguc

SEQ ID NO: 1291033 - RNA, 18 nt, Human
ugcccgugguuuugggga

SEQ ID NO: 1291034 - RNA, 21 nt, Human
ugcgaaguuuggcaaaaccgg

SEQ ID NO: 1291035 - RNA, 18 nt, Human
ugcugggcuggacccgug

SEQ ID NO: 1291036 - RNA, 19 nt, Human
uggccgagucccauuugcu

SEQ ID NO: 1291037 - RNA, 18 nt, Human
ugggagaguggggucugg

SEQ ID NO: 1291038 - RNA, 20 nt, Human
ugggagaguggggucuggug

SEQ ID NO: 1291039 - RNA, 22 nt, Human
uguccagcuggccgagucccau

SEQ ID NO: 1291040 - RNA, 23 nt, Human
ugucggcccgcgguucgcugcgc

SEQ ID NO: 1291041 - RNA, 22 nt, Human
uugcugggcuggacccguggcc

SEQ ID NO: 1291042 - RNA, 20 nt, Human
cccucuugcccuuccaccuu

SEQ ID NO: 1291043 - RNA, 23 nt, Human
ccuugcugucuugugcccucuug

SEQ ID NO: 1291044 - RNA, 20 nt, Human
cuugugcccucuugcccuuc

SEQ ID NO: 1291045 - RNA, 25 nt, Human
ugucuugugcccucuugcccuucca

SEQ ID NO: 1291046 - RNA, 18 nt, Human
aaacugccucagcugugg

SEQ ID NO: 1291047 - RNA, 25 nt, Human
aauacacauacacacacuaaaugug

SEQ ID NO: 1291048 - RNA, 19 nt, Human
acagagaggccacaugauc

SEQ ID NO: 1291049 - RNA, 23 nt, Human
acuuuaagaaguuaugagaaaga

SEQ ID NO: 1291050 - RNA, 22 nt, Human
agaccccugcaacucugcccaa

SEQ ID NO: 1291051 - RNA, 19 nt, Human
agauguuuccaggagagau

SEQ ID NO: 1291052 - RNA, 21 nt, Human
aggaacccaaauaauccggcc

SEQ ID NO: 1291053 - RNA, 22 nt, Human
aguuaugagaaagaaugaauac

SEQ ID NO: 1291054 - RNA, 22 nt, Human
auguggcagauguuuccaggag

SEQ ID NO: 1291055 - RNA, 19 nt, Human
ccagaccaaauauagacac

SEQ ID NO: 1291056 - RNA, 18 nt, Human
cccaaauaauccggccaa

SEQ ID NO: 1291057 - RNA, 18 nt, Human
ccccugcaacucugccca

SEQ ID NO: 1291058 - RNA, 21 nt, Human
ccccugcaacucugcccaacu

SEQ ID NO: 1291059 - RNA, 22 nt, Human
ccccugcaacucugcccaacuc

SEQ ID NO: 1291060 - RNA, 21 nt, Human
gcaacagagaggccacaugau

SEQ ID NO: 1291061 - RNA, 24 nt, Human
gcaacagagaggccacaugaucaa

SEQ ID NO: 1291062 - RNA, 23 nt, Human
gcagagcugucugcuaaugugag

SEQ ID NO: 1291063 - RNA, 20 nt, Human
gccacaugaucaaauaaaau

SEQ ID NO: 1291064 - RNA, 22 nt, Human
ggagaccccugcaacucugccc

SEQ ID NO: 1291065 - RNA, 20 nt, Human
ggccaaacugccucagcugu

SEQ ID NO: 1291066 - RNA, 21 nt, Human
uaaugugagcggggaaggcca

SEQ ID NO: 1291067 - RNA, 29 nt, Human
ucagccagaccaaauauagacacacugga

SEQ ID NO: 1291068 - RNA, 22 nt, Human
uccagccgaucagccagaccaa

SEQ ID NO: 1291069 - RNA, 18 nt, Human
ugaauacacauacacaca

SEQ ID NO: 1291070 - RNA, 20 nt, Human
ugagcggggaaggccagagu

SEQ ID NO: 1291071 - RNA, 19 nt, Human
ugcccaacucuuccucucg

SEQ ID NO: 1291072 - RNA, 19 nt, Human
uguggcagauguuuccagg

SEQ ID NO: 1291073 - RNA, 18 nt, Human
auaagacaaucuuuucau

SEQ ID NO: 1291074 - RNA, 18 nt, Human
auuucaccugggugcagg

SEQ ID NO: 1291075 - RNA, 21 nt, Human
cacccaauacuuuuguuucca

SEQ ID NO: 1291076 - RNA, 23 nt, Human
cauuucauguuucaaaguaagga

SEQ ID NO: 1291077 - RNA, 21 nt, Human
cccaauacuuuuguuuccagc

SEQ ID NO: 1291078 - RNA, 22 nt, Human
ccugaguaaauccaaucccccu

SEQ ID NO: 1291079 - RNA, 19 nt, Human
ccugggugcaggugggcug

SEQ ID NO: 1291080 - RNA, 19 nt, Human
cucacuuguaauuuuuccu

SEQ ID NO: 1291081 - RNA, 18 nt, Human
cuuugugugagcaacaug

SEQ ID NO: 1291082 - RNA, 20 nt, Human
ggagccaauuauaacccuuc

SEQ ID NO: 1291083 - RNA, 18 nt, Human
ggugggccaaauauggca

SEQ ID NO: 1291084 - RNA, 18 nt, Human
ucuccagauuuuggaaga

SEQ ID NO: 1291085 - RNA, 23 nt, Human
ucuuugugccuggugggccaaau

SEQ ID NO: 1291086 - RNA, 23 nt, Human
uguaaugcccacaauaagacaau

SEQ ID NO: 1291087 - RNA, 21 nt, Human
uuaaaggagccaauuauaacc

SEQ ID NO: 1291088 - RNA, 24 nt, Human
uucaccugggugcaggugggcucc

SEQ ID NO: 1291089 - RNA, 22 nt, Human
uugaaacuauaauuugauccuc

SEQ ID NO: 1291090 - RNA, 21 nt, Human
uuugauccucauuucauguuu

SEQ ID NO: 1291091 - RNA, 19 nt, Human
ccuccugcuguaguugaag

SEQ ID NO: 1291092 - RNA, 20 nt, Human
cuccugcuguaguugaagac

SEQ ID NO: 1291093 - RNA, 25 nt, Human
acccccgcccuucccccuccuccac

SEQ ID NO: 1291094 - RNA, 19 nt, Human
agaaaagcccauccugaag

SEQ ID NO: 1291095 - RNA, 20 nt, Human
agaaggucuaaggcagagaa

SEQ ID NO: 1291096 - RNA, 22 nt, Human
agccugcgaccgcgcggcauca

SEQ ID NO: 1291097 - RNA, 23 nt, Human
aggaagguauccccaucaggccu

SEQ ID NO: 1291098 - RNA, 22 nt, Human
aggcaaggccaggguuuaggug

SEQ ID NO: 1291099 - RNA, 21 nt, Human
caggaaagaauguucauggca

SEQ ID NO: 1291100 - RNA, 20 nt, Human
ccccaggaaaugugguuggg

SEQ ID NO: 1291101 - RNA, 23 nt, Human
ccccaggaaaugugguuggguga

SEQ ID NO: 1291102 - RNA, 18 nt, Human
ccccaucaggccuccucu

SEQ ID NO: 1291103 - RNA, 26 nt, Human
cccccgcccuucccccuccuccaccc

SEQ ID NO: 1291104 - RNA, 18 nt, Human
ccccgcccuucccccucc

SEQ ID NO: 1291105 - RNA, 22 nt, Human
ccccgcccuucccccuccucca

SEQ ID NO: 1291106 - RNA, 18 nt, Human
ccccgugccuggccccuc

SEQ ID NO: 1291107 - RNA, 21 nt, Human
cccgcccuucccccuccucca

SEQ ID NO: 1291108 - RNA, 18 nt, Human
ccgcccuucccccuccuc

SEQ ID NO: 1291109 - RNA, 21 nt, Human
cgugccuggccccucagagcc

SEQ ID NO: 1291110 - RNA, 20 nt, Human
cucucuggcacaagaucuug

SEQ ID NO: 1291111 - RNA, 20 nt, Human
gacagcaggaagguaucccc

SEQ ID NO: 1291112 - RNA, 20 nt, Human
gacugcagggcagggcacug

SEQ ID NO: 1291113 - RNA, 19 nt, Human
gaguugcgaguuagcgucg

SEQ ID NO: 1291114 - RNA, 23 nt, Human
gcacccacggcgccccugcuugc

SEQ ID NO: 1291115 - RNA, 23 nt, Human
gggcagggcacugcuggguucuc

SEQ ID NO: 1291116 - RNA, 19 nt, Human
gugguugggugagucaugg

SEQ ID NO: 1291117 - RNA, 20 nt, Human
uagcucagacugcagggcag

SEQ ID NO: 1291118 - RNA, 21 nt, Human
ucuaaggcagagaacacagau

SEQ ID NO: 1291119 - RNA, 18 nt, Human
ucuggcacaagaucuuga

SEQ ID NO: 1291120 - RNA, 20 nt, Human
ugaggccccaggaaaugugg

SEQ ID NO: 1291121 - RNA, 18 nt, Human
ugccucuguccgggucuc

SEQ ID NO: 1291122 - RNA, 19 nt, Human
ugcucaggaaggacagcag

SEQ ID NO: 1291123 - RNA, 20 nt, Human
uggguuuucucagcaagagg

SEQ ID NO: 1291124 - RNA, 22 nt, Human
uucacaaggaaucugguagcuc

SEQ ID NO: 1291125 - RNA, 20 nt, Human
agauggcuggugagaauuag

SEQ ID NO: 1291126 - RNA, 19 nt, Human
agcccugcugaauguggug

SEQ ID NO: 1291127 - RNA, 22 nt, Human
auguggugcaaguucagggcug

SEQ ID NO: 1291128 - RNA, 22 nt, Human
gagauggcuggugagaauucag

SEQ ID NO: 1291129 - RNA, 20 nt, Human
gcccugagauggcuggugag

SEQ ID NO: 1291130 - RNA, 23 nt, Human
ggcuggugccuggccacagggcc

SEQ ID NO: 1291131 - RNA, 21 nt, Human
ucagcccugcugaauguggug

SEQ ID NO: 1291132 - RNA, 18 nt, Human
ugacuggugaaguccugc

SEQ ID NO: 1291133 - RNA, 18 nt, Human
ugcauggaguuccaauga

SEQ ID NO: 1291134 - RNA, 21 nt, Human
uggugccuggccacagggccu

SEQ ID NO: 1291135 - RNA, 22 nt, Human
uucaaaugaggaaucaguagga

SEQ ID NO: 1291136 - RNA, 22 nt, Human
ugcggccacagacuccugccac

SEQ ID NO: 1291137 - RNA, 18 nt, Human
ugggcuucugccacccaa

SEQ ID NO: 1291138 - RNA, 22 nt, Human
agcgcgcaggcgcagcagcccc

SEQ ID NO: 1291139 - RNA, 23 nt, Human
cacacccguucccuugacagcug

SEQ ID NO: 1291140 - RNA, 21 nt, Human
ccgcggcaagccgcgagcgcg

SEQ ID NO: 1291141 - RNA, 21 nt, Human
ccuuccacacccguucccuug

SEQ ID NO: 1291142 - RNA, 23 nt, Human
cgcggaccuuugccccgccuccu

SEQ ID NO: 1291143 - RNA, 25 nt, Human
ugggcugcgcuccgggccgcggcaa

SEQ ID NO: 1291144 - RNA, 21 nt, Human
uugccccgccuccuuccacac

SEQ ID NO: 1291145 - RNA, 24 nt, Human
augggccucggcuuuccugucuuc

SEQ ID NO: 1291146 - RNA, 20 nt, Human
ggccucggcuuuccugucuu

SEQ ID NO: 1291147 - RNA, 21 nt, Human
ugggccucggcuuuccugucu

SEQ ID NO: 1291148 - RNA, 26 nt, Human
aagaggccagggauuuggcgguggga

SEQ ID NO: 1291149 - RNA, 20 nt, Human
acagcggaagaggccaggga

SEQ ID NO: 1291150 - RNA, 20 nt, Human
agcagaagcgguaacggcag

SEQ ID NO: 1291151 - RNA, 18 nt, Human
aggggggcguccaggcag

SEQ ID NO: 1291152 - RNA, 19 nt, Human
caccaggggggcguccagg

SEQ ID NO: 1291153 - RNA, 21 nt, Human
caccaggggggcguccaggca

SEQ ID NO: 1291154 - RNA, 20 nt, Human
cacuuuguccuucccguaca

SEQ ID NO: 1291155 - RNA, 18 nt, Human
cagccguugaggaagcgg

SEQ ID NO: 1291156 - RNA, 23 nt, Human
ccacuuuguccuucccguacaug

SEQ ID NO: 1291157 - RNA, 19 nt, Human
cccaugacgccgccggggc

SEQ ID NO: 1291158 - RNA, 22 nt, Human
cccaugacgccgccggggcgcg

SEQ ID NO: 1291159 - RNA, 24 nt, Human
cccgcggcuggugcccucugaagc

SEQ ID NO: 1291160 - RNA, 20 nt, Human
cccguacaugugcccggcca

SEQ ID NO: 1291161 - RNA, 19 nt, Human
ccgcagccgccggccccgg

SEQ ID NO: 1291162 - RNA, 20 nt, Human
ccgcagccgccggccccggc

SEQ ID NO: 1291163 - RNA, 22 nt, Human
ccguacaugugcccggccaccu

SEQ ID NO: 1291164 - RNA, 20 nt, Human
cgaggaggcccggggguucc

SEQ ID NO: 1291165 - RNA, 26 nt, Human
cgccggagaacccgagggucgcucag

SEQ ID NO: 1291166 - RNA, 23 nt, Human
cggaagaggccagggauuuggcg

SEQ ID NO: 1291167 - RNA, 21 nt, Human
cggcucccggcuccuguuccu

SEQ ID NO: 1291168 - RNA, 18 nt, Human
cugaagcgcggggagggg

SEQ ID NO: 1291169 - RNA, 20 nt, Human
cugcggggugcccucagggg

SEQ ID NO: 1291170 - RNA, 18 nt, Human
gaaaaaaaauagggcgag

SEQ ID NO: 1291171 - RNA, 21 nt, Human
gagcagaagcgguaacggcag

SEQ ID NO: 1291172 - RNA, 20 nt, Human
gagggagggggcgccggaga

SEQ ID NO: 1291173 - RNA, 21 nt, Human
gcguccaggcaggcccgagag

SEQ ID NO: 1291174 - RNA, 23 nt, Human
ggaagcggagucugccgcccgcc

SEQ ID NO: 1291175 - RNA, 20 nt, Human
ggcgcgggcgcuccucugcc

SEQ ID NO: 1291176 - RNA, 18 nt, Human
gggagggggcccaugacg

SEQ ID NO: 1291177 - RNA, 18 nt, Human
gggcgagggagggggcgc

SEQ ID NO: 1291178 - RNA, 22 nt, Human
gggcgcgaggaggcccgggggu

SEQ ID NO: 1291179 - RNA, 18 nt, Human
gggcgcuccucugcccaa

SEQ ID NO: 1291180 - RNA, 19 nt, Human
ggggacagcggaagaggcc

SEQ ID NO: 1291181 - RNA, 23 nt, Human
gugcacaccaggggggcguccag

SEQ ID NO: 1291182 - RNA, 21 nt, Human
guugccauaacggagagcaga

SEQ ID NO: 1291183 - RNA, 21 nt, Human
uaacggcagcgagaguaggaa

SEQ ID NO: 1291184 - RNA, 24 nt, Human
ucaaaacugugccaucuggauguu

SEQ ID NO: 1291185 - RNA, 18 nt, Human
ucaggcucgggcgcgagg

SEQ ID NO: 1291186 - RNA, 19 nt, Human
uccucugccgccgcagccg

SEQ ID NO: 1291187 - RNA, 20 nt, Human
uccucugccgccgcagccgc

SEQ ID NO: 1291188 - RNA, 21 nt, Human
ucgggcgcgaggaggcccggg

SEQ ID NO: 1291189 - RNA, 22 nt, Human
ugcccaacucucggcggaacgc

SEQ ID NO: 1291190 - RNA, 19 nt, Human
ugcccucugaagcgcgggg

SEQ ID NO: 1291191 - RNA, 20 nt, Human
ugcgagaggggcacgcagcc

SEQ ID NO: 1291192 - RNA, 23 nt, Human
auaaugauaaggaguugcuuuac

SEQ ID NO: 1291193 - RNA, 18 nt, Human
cacaaggagaggaauguu

SEQ ID NO: 1291194 - RNA, 19 nt, Human
cagaucacugaaguggucu

SEQ ID NO: 1291195 - RNA, 19 nt, Human
ccugggcaacaaauaaaac

SEQ ID NO: 1291196 - RNA, 24 nt, Human
cgcucuuuccagauacucucuucu

SEQ ID NO: 1291197 - RNA, 21 nt, Human
cucuguuuuucaauccucuga

SEQ ID NO: 1291198 - RNA, 24 nt, Human
cucuucuuccaggcuguaggucuu

SEQ ID NO: 1291199 - RNA, 22 nt, Human
gcucuuuccagauacucucuuc

SEQ ID NO: 1291200 - RNA, 24 nt, Human
uaaaauccugauucauuagcauua

SEQ ID NO: 1291201 - RNA, 19 nt, Human
uaaaugccuccaggggcgc

SEQ ID NO: 1291202 - RNA, 19 nt, Human
ugugucacuagcccucugu

SEQ ID NO: 1291203 - RNA, 19 nt, Human
uuacgcaugcgcucuuucc

SEQ ID NO: 1291204 - RNA, 23 nt, Human
uucauuagcauuaagucaccagg

SEQ ID NO: 1291205 - RNA, 20 nt, Human
uugcuuuacgcaugcgcucu

SEQ ID NO: 1291206 - RNA, 20 nt, Human
ggacucucccaccuucgagg

SEQ ID NO: 1291207 - RNA, 23 nt, Human
ucuuuucuucucuggacucuccc

SEQ ID NO: 1291208 - RNA, 21 nt, Human
aaaaagauuugacaaaaacua

SEQ ID NO: 1291209 - RNA, 19 nt, Human
aaacugcagcucguuccuc

SEQ ID NO: 1291210 - RNA, 21 nt, Human
aaagcauaaaaaaugcucuuc

SEQ ID NO: 1291211 - RNA, 20 nt, Human
aagcuggaccacugaaacca

SEQ ID NO: 1291212 - RNA, 22 nt, Human
aaugacuuccugaggaaacaga

SEQ ID NO: 1291213 - RNA, 25 nt, Human
acacaaccccaauaacaggggaacc

SEQ ID NO: 1291214 - RNA, 26 nt, Human
acaccaacacaaagcauaaaaaaugu

SEQ ID NO: 1291215 - RNA, 21 nt, Human
acgcacaucucaggggaacgc

SEQ ID NO: 1291216 - RNA, 23 nt, Human
acgcugcugguaaaggcugggug

SEQ ID NO: 1291217 - RNA, 26 nt, Human
acugcagcucguuccucagacgcacu

SEQ ID NO: 1291218 - RNA, 23 nt, Human
agaguacaaaaauuacacaccaa

SEQ ID NO: 1291219 - RNA, 23 nt, Human
auaaaaaaugcucuucauccaca

SEQ ID NO: 1291220 - RNA, 22 nt, Human
augacuuccugaggaaacagag

SEQ ID NO: 1291221 - RNA, 22 nt, Human
auuccaucuauguucccuuuca

SEQ ID NO: 1291222 - RNA, 28 nt, Human
caaaaaagauuugacaaaaacuagccac

SEQ ID NO: 1291223 - RNA, 24 nt, Human
caaggcagagaaauacauugauca

SEQ ID NO: 1291224 - RNA, 23 nt, Human
caauaauaacaaugaaaaacgaa

SEQ ID NO: 1291225 - RNA, 25 nt, Human
cacacaaccccaauaacagcauuuu

SEQ ID NO: 1291226 - RNA, 21 nt, Human
cacaccaacacaaagcauaaa

SEQ ID NO: 1291227 - RNA, 22 nt, Human
caccuccacaccucgacugccu

SEQ ID NO: 1291228 - RNA, 22 nt, Human
cacggaggcuacgcacaucuca

SEQ ID NO: 1291229 - RNA, 22 nt, Human
cacguggccauugcccgcaccc

SEQ ID NO: 1291230 - RNA, 18 nt, Human
cagagaaauacauugauc

SEQ ID NO: 1291231 - RNA, 24 nt, Human
ccaauaacagcauucucacaauaa

SEQ ID NO: 1291232 - RNA, 23 nt, Human
ccauugcccgcacccugucccgu

SEQ ID NO: 1291233 - RNA, 25 nt, Human
cccaauaacagcauucucacaauaa

SEQ ID NO: 1291234 - RNA, 20 nt, Human
cggggccuuggccacguggc

SEQ ID NO: 1291235 - RNA, 24 nt, Human
cucaaaguaaaaagaagcuugcaa

SEQ ID NO: 1291236 - RNA, 23 nt, Human
cucacacacaaccccaauaacag

SEQ ID NO: 1291237 - RNA, 21 nt, Human
cugaaaccaaacaauuggaug

SEQ ID NO: 1291238 - RNA, 23 nt, Human
cugcacugucuuccccaacccaa

SEQ ID NO: 1291239 - RNA, 22 nt, Human
gaccacugaaaccaaacaauug

SEQ ID NO: 1291240 - RNA, 18 nt, Human
gcacuguugggugcgaag

SEQ ID NO: 1291241 - RNA, 21 nt, Human
gcugcacugucuuccccaacc

SEQ ID NO: 1291242 - RNA, 20 nt, Human
gcugcugguaaaggcugggu

SEQ ID NO: 1291243 - RNA, 18 nt, Human
ggaugggaaaauaugaua

SEQ ID NO: 1291244 - RNA, 19 nt, Human
ggggaacgcucaaacugca

SEQ ID NO: 1291245 - RNA, 22 nt, Human
guaaaaagaagcuugcaaaaca

SEQ ID NO: 1291246 - RNA, 24 nt, Human
uaaaaaaugcucuucauccacaua

SEQ ID NO: 1291247 - RNA, 26 nt, Human
uaaaaagaagcuugcaaaacaucuca

SEQ ID NO: 1291248 - RNA, 25 nt, Human
uaaacagaugucuaauaaaugcaua

SEQ ID NO: 1291249 - RNA, 23 nt, Human
uaaagcuggaccacugaaaccaa

SEQ ID NO: 1291250 - RNA, 21 nt, Human
uaauaacaaugaaaaacgaaa

SEQ ID NO: 1291251 - RNA, 21 nt, Human
uaucauaaaaucaaaacauuu

SEQ ID NO: 1291252 - RNA, 24 nt, Human
ucaaaacauuuaagcaauauucca

SEQ ID NO: 1291253 - RNA, 27 nt, Human
ucacaauaauaacaaugaaaaacgaaa

SEQ ID NO: 1291254 - RNA, 24 nt, Human
ucaccuccacaccucgacugccuu

SEQ ID NO: 1291255 - RNA, 18 nt, Human
uccccaacccaacauugc

SEQ ID NO: 1291256 - RNA, 22 nt, Human
ugaaaaacgaaaaaccaaacag

SEQ ID NO: 1291257 - RNA, 19 nt, Human
ugauaggcaauuaagccau

SEQ ID NO: 1291258 - RNA, 18 nt, Human
ugaucaccuccacaccuc

SEQ ID NO: 1291259 - RNA, 24 nt, Human
ugcacaaaagcauaaaaaaugcuc

SEQ ID NO: 1291260 - RNA, 18 nt, Human
ugcacuaaacuuauuuuc

SEQ ID NO: 1291261 - RNA, 19 nt, Human
ugcacugucuuccccaacc

SEQ ID NO: 1291262 - RNA, 23 nt, Human
uggaccacugaaaccaaacaauu

SEQ ID NO: 1291263 - RNA, 21 nt, Human
ugggugcgaaggacaccugga

SEQ ID NO: 1291264 - RNA, 18 nt, Human
ugugaugugguggcgcag

SEQ ID NO: 1291265 - RNA, 23 nt, Human
aaaauaaaaugaccauuugucuu

SEQ ID NO: 1291266 - RNA, 26 nt, Human
cccugcucgccacucgcccuccuuuu

SEQ ID NO: 1291267 - RNA, 18 nt, Human
ccgaagccccugcucgcc

SEQ ID NO: 1291268 - RNA, 18 nt, Human
ccgcgccgggccggccgc

SEQ ID NO: 1291269 - RNA, 19 nt, Human
cggaguccgaggccugggc

SEQ ID NO: 1291270 - RNA, 23 nt, Human
cggccgaagccccugcucgccac

SEQ ID NO: 1291271 - RNA, 20 nt, Human
ggagcagccgauggccgagg

SEQ ID NO: 1291272 - RNA, 21 nt, Human
ggccaccggggagcagccgau

SEQ ID NO: 1291273 - RNA, 23 nt, Human
ggcggcggccgagagccccgcgc

SEQ ID NO: 1291274 - RNA, 19 nt, Human
ugaauccaagaagaugugu

SEQ ID NO: 1291275 - RNA, 21 nt, Human
ugcucgccacucgcccuccuu

SEQ ID NO: 1291276 - RNA, 21 nt, Human
aagcugcaugugggcacugag

SEQ ID NO: 1291277 - RNA, 24 nt, Human
aagcugcaugugggcacugagcag

SEQ ID NO: 1291278 - RNA, 24 nt, Human
aaugucuuuggcuuccggcauguu

SEQ ID NO: 1291279 - RNA, 19 nt, Human
acacuaaaggcuccugggu

SEQ ID NO: 1291280 - RNA, 18 nt, Human
aggcuuuggaacagcagc

SEQ ID NO: 1291281 - RNA, 23 nt, Human
agugcugcugucaaaggcuuugg

SEQ ID NO: 1291282 - RNA, 22 nt, Human
auacggauagacacuaggcuuc

SEQ ID NO: 1291283 - RNA, 21 nt, Human
caaaggcuuuggaacagcagc

SEQ ID NO: 1291284 - RNA, 21 nt, Human
caauuguacaccagaggugga

SEQ ID NO: 1291285 - RNA, 20 nt, Human
cagcagcuacaauuguacac

SEQ ID NO: 1291286 - RNA, 18 nt, Human
ccucuccaggcaaaggcu

SEQ ID NO: 1291287 - RNA, 21 nt, Human
ccucuccaggcaaaggcuagc

SEQ ID NO: 1291288 - RNA, 23 nt, Human
ccuucgccgccggcgcguuuccc

SEQ ID NO: 1291289 - RNA, 22 nt, Human
ccuugaggucccuggaaaggga

SEQ ID NO: 1291290 - RNA, 22 nt, Human
cucaugcagaucuguucaugcc

SEQ ID NO: 1291291 - RNA, 22 nt, Human
cugcauagccuuguuccucugg

SEQ ID NO: 1291292 - RNA, 23 nt, Human
cugccuuaagacggacaugccug

SEQ ID NO: 1291293 - RNA, 18 nt, Human
cuggcaaaguacuuccgg

SEQ ID NO: 1291294 - RNA, 22 nt, Human
gaaagggacaugacugucaucu

SEQ ID NO: 1291295 - RNA, 21 nt, Human
gaccugugaaugaaccuccau

SEQ ID NO: 1291296 - RNA, 23 nt, Human
gacguccguccucuccaggcaaa

SEQ ID NO: 1291297 - RNA, 18 nt, Human
gccuggacacagaggggc

SEQ ID NO: 1291298 - RNA, 20 nt, Human
gcguuuccccggggguccau

SEQ ID NO: 1291299 - RNA, 23 nt, Human
ggaaaaauggacaucuccuucau

SEQ ID NO: 1291300 - RNA, 21 nt, Human
ggagaccuuuuugaaacuugc

SEQ ID NO: 1291301 - RNA, 20 nt, Human
ggcacugagcagagugcugc

SEQ ID NO: 1291302 - RNA, 22 nt, Human
gguauguccugacaugcagaug

SEQ ID NO: 1291303 - RNA, 21 nt, Human
gugcauuuucauaggaagaau

SEQ ID NO: 1291304 - RNA, 18 nt, Human
uaaccaugugguccgugu

SEQ ID NO: 1291305 - RNA, 21 nt, Human
uaagacggacaugccuggaca

SEQ ID NO: 1291306 - RNA, 20 nt, Human
uaaguuggauacuggagggg

SEQ ID NO: 1291307 - RNA, 19 nt, Human
uacauuggcagaagugggu

SEQ ID NO: 1291308 - RNA, 21 nt, Human
uaccaggugcagacucauuca

SEQ ID NO: 1291309 - RNA, 25 nt, Human
uagccuuguuccucuggaauuucua

SEQ ID NO: 1291310 - RNA, 21 nt, Human
ucaucuuuguacucccugcac

SEQ ID NO: 1291311 - RNA, 24 nt, Human
ucauucauuugacuguuuucucgu

SEQ ID NO: 1291312 - RNA, 21 nt, Human
uccgguacuggaaaauucacc

SEQ ID NO: 1291313 - RNA, 20 nt, Human
uccucugauguucuuccuga

SEQ ID NO: 1291314 - RNA, 23 nt, Human
uccuggguuggcuugugaagcug

SEQ ID NO: 1291315 - RNA, 19 nt, Human
uccuucgccgccggcgcgu

SEQ ID NO: 1291316 - RNA, 26 nt, Human
uccuugaguacagggacaaucugauu

SEQ ID NO: 1291317 - RNA, 25 nt, Human
ucuaugaucgauggcauggaaagac

SEQ ID NO: 1291318 - RNA, 21 nt, Human
ucugcggcuggcggcccggga

SEQ ID NO: 1291319 - RNA, 22 nt, Human
ucuggaccugugaaugaaccuc

SEQ ID NO: 1291320 - RNA, 22 nt, Human
ugaaagucguccuugagguccc

SEQ ID NO: 1291321 - RNA, 18 nt, Human
ugacaugcagauguuucc

SEQ ID NO: 1291322 - RNA, 19 nt, Human
ugacugucaucuggcaauc

SEQ ID NO: 1291323 - RNA, 20 nt, Human
ugacuguuuucucgugcauu

SEQ ID NO: 1291324 - RNA, 24 nt, Human
ugcaguaauggcaaggauauguuc

SEQ ID NO: 1291325 - RNA, 22 nt, Human
ugcccauuaacaaauuuaacca

SEQ ID NO: 1291326 - RNA, 19 nt, Human
uggaaagggacaugacugu

SEQ ID NO: 1291327 - RNA, 25 nt, Human
uggaacagcagcuacaauuguacaa

SEQ ID NO: 1291328 - RNA, 21 nt, Human
uggcugaauccgaauccugug

SEQ ID NO: 1291329 - RNA, 19 nt, Human
uggcuugaccucaugcaga

SEQ ID NO: 1291330 - RNA, 23 nt, Human
uuacaguaucuuggaaauucagc

SEQ ID NO: 1291331 - RNA, 24 nt, Human
uuaccaggugaacugccaucaugu

SEQ ID NO: 1291332 - RNA, 22 nt, Human
uucaagccuccauuugcuguuu

SEQ ID NO: 1291333 - RNA, 22 nt, Human
uucacauuuauaucuucccuau

SEQ ID NO: 1291334 - RNA, 22 nt, Human
uucagauaauaaagguucugga

SEQ ID NO: 1291335 - RNA, 19 nt, Human
uucagcuacggaagaaaca

SEQ ID NO: 1291336 - RNA, 23 nt, Human
uucucccguaugccaaauuucau

SEQ ID NO: 1291337 - RNA, 23 nt, Human
uugcuguuuuuuuacugauggaa

SEQ ID NO: 1291338 - RNA, 19 nt, Human
uuucgcugcaagggcuuca

SEQ ID NO: 1291339 - RNA, 27 nt, Human
uuucuaguuuuugguuucccaucuuac

SEQ ID NO: 1291340 - RNA, 24 nt, Human
uccccacgguaugguuuacuacuu

SEQ ID NO: 1291341 - RNA, 23 nt, Human
ugguuuacuacuuggaucagaau

SEQ ID NO: 1291342 - RNA, 18 nt, Human
uuaagauaaauguugaga

SEQ ID NO: 1291343 - RNA, 22 nt, Human
agcuaucuaggguuccggccuc

SEQ ID NO: 1291344 - RNA, 19 nt, Human
accucagggacacccaggg

SEQ ID NO: 1291345 - RNA, 18 nt, Human
gguguccuggccugggca

SEQ ID NO: 1291346 - RNA, 21 nt, Human
ugcgaggugaggugcguccgg

SEQ ID NO: 1291347 - RNA, 25 nt, Human
cgcccacgaugacuggaugaauugc

SEQ ID NO: 1291348 - RNA, 22 nt, Human
cuggagccacgcccacgaugac

SEQ ID NO: 1291349 - RNA, 19 nt, Human
uggagccacgcccacgaug

SEQ ID NO: 1291350 - RNA, 19 nt, Human
uggagccacgcccacgaug

SEQ ID NO: 1291351 - RNA, 21 nt, Human
aaccuuauuugucguucccac

SEQ ID NO: 1291352 - RNA, 21 nt, Human
aaguggaggcugcagugauca

SEQ ID NO: 1291353 - RNA, 22 nt, Human
aucuugggugcuuugguccuag

SEQ ID NO: 1291354 - RNA, 19 nt, Human
cagccaguggcugggaagg

SEQ ID NO: 1291355 - RNA, 20 nt, Human
cuugggugcuuugguccuag

SEQ ID NO: 1291356 - RNA, 18 nt, Human
gaaguggaggcugcagug

SEQ ID NO: 1291357 - RNA, 23 nt, Human
gaggcugcagugaucagugauug

SEQ ID NO: 1291358 - RNA, 21 nt, Human
gcuuuuccuuagccuccuuca

SEQ ID NO: 1291359 - RNA, 22 nt, Human
ggaggcugcagugaucagugau

SEQ ID NO: 1291360 - RNA, 24 nt, Human
ggaggcugcagugaucagugauug

SEQ ID NO: 1291361 - RNA, 19 nt, Human
uaacaagacgcugaaucuu

SEQ ID NO: 1291362 - RNA, 21 nt, Human
uaacaagacgcugaaucuugg

SEQ ID NO: 1291363 - RNA, 22 nt, Human
ucagcagcaacuuuuguggccg

SEQ ID NO: 1291364 - RNA, 18 nt, Human
ucccaccacugauucgga

SEQ ID NO: 1291365 - RNA, 20 nt, Human
uccuggcgcuuuuccuuagc

SEQ ID NO: 1291366 - RNA, 23 nt, Human
ugcaccaguacgguccacacuua

SEQ ID NO: 1291367 - RNA, 22 nt, Human
uggcugggaaggagauguucag

SEQ ID NO: 1291368 - RNA, 20 nt, Human
ugggaaguggaggcugcagu

SEQ ID NO: 1291369 - RNA, 22 nt, Human
ugggaaguggaggcugcaguga

SEQ ID NO: 1291370 - RNA, 20 nt, Human
ugguccuagguuucuuaccu

SEQ ID NO: 1291371 - RNA, 27 nt, Human
agacggccggcuagagcccggcgggga

SEQ ID NO: 1291372 - RNA, 21 nt, Human
agcccgccgccaccucgggcc

SEQ ID NO: 1291373 - RNA, 18 nt, Human
agcggccgccucgccccc

SEQ ID NO: 1291374 - RNA, 21 nt, Human
caccagacggccggcuagagc

SEQ ID NO: 1291375 - RNA, 18 nt, Human
cagcccgccgccaccucg

SEQ ID NO: 1291376 - RNA, 19 nt, Human
cagcggccgccucgccccc

SEQ ID NO: 1291377 - RNA, 19 nt, Human
cagcugaagccgcgcacca

SEQ ID NO: 1291378 - RNA, 22 nt, Human
caggcgccgcucaucgcgcccc

SEQ ID NO: 1291379 - RNA, 24 nt, Human
ccaccagacggccggcuagagccc

SEQ ID NO: 1291380 - RNA, 26 nt, Human
ccccgcgcccagcccgccgccaccuc

SEQ ID NO: 1291381 - RNA, 22 nt, Human
cccgccgccaccucgggccacc

SEQ ID NO: 1291382 - RNA, 23 nt, Human
cccgccgccaccucgggccacca

SEQ ID NO: 1291383 - RNA, 19 nt, Human
ccgccucgccccccggccg

SEQ ID NO: 1291384 - RNA, 18 nt, Human
cgccccccggccgcgggc

SEQ ID NO: 1291385 - RNA, 18 nt, Human
cgccucgccccccggccg

SEQ ID NO: 1291386 - RNA, 23 nt, Human
cgccucgccccccggccgcgggc

SEQ ID NO: 1291387 - RNA, 19 nt, Human
cgcgccccgcgcccagccc

SEQ ID NO: 1291388 - RNA, 24 nt, Human
cgcgggcagcugaagccgcgcacc

SEQ ID NO: 1291389 - RNA, 23 nt, Human
cgggcagcugaagccgcgcacca

SEQ ID NO: 1291390 - RNA, 23 nt, Human
cucaucgcgccccgcgcccagcc

SEQ ID NO: 1291391 - RNA, 18 nt, Human
cuccugcucugcgcucac

SEQ ID NO: 1291392 - RNA, 23 nt, Human
cugaagccgcgcaccaccuccug

SEQ ID NO: 1291393 - RNA, 21 nt, Human
gacagcggccgccucgccccc

SEQ ID NO: 1291394 - RNA, 18 nt, Human
gccccgcgcccagcccgc

SEQ ID NO: 1291395 - RNA, 25 nt, Human
gccccgcgcccagcccgccgccacc

SEQ ID NO: 1291396 - RNA, 21 nt, Human
ugcgcucacguagcucgugca

SEQ ID NO: 1291397 - RNA, 25 nt, Human
aacacauaaacacagaagaguucca

SEQ ID NO: 1291398 - RNA, 20 nt, Human
caacucgaggugagggacgg

SEQ ID NO: 1291399 - RNA, 18 nt, Human
cacauaaacacagaagag

SEQ ID NO: 1291400 - RNA, 22 nt, Human
uaaacacagaagaguuccaaga

SEQ ID NO: 1291401 - RNA, 21 nt, Human
uaagucacuuacggaugaugc

SEQ ID NO: 1291402 - RNA, 22 nt, Human
aaaccccaaagcggaaaaccuc

SEQ ID NO: 1291403 - RNA, 19 nt, Human
aagcagagcccccaguccc

SEQ ID NO: 1291404 - RNA, 20 nt, Human
aagccagcaggaucccagga

SEQ ID NO: 1291405 - RNA, 23 nt, Human
acaggguaggugggugugggggc

SEQ ID NO: 1291406 - RNA, 24 nt, Human
accccauggacccaggugcagagg

SEQ ID NO: 1291407 - RNA, 19 nt, Human
accucgguucugcccaccu

SEQ ID NO: 1291408 - RNA, 22 nt, Human
acugccuugcuggcccuccccc

SEQ ID NO: 1291409 - RNA, 21 nt, Human
agaccccgcagaccccaugga

SEQ ID NO: 1291410 - RNA, 21 nt, Human
agaccccgcagaccccgcaga

SEQ ID NO: 1291411 - RNA, 22 nt, Human
agcacaggguaggugggugugg

SEQ ID NO: 1291412 - RNA, 23 nt, Human
agcagagcccccagucccugccc

SEQ ID NO: 1291413 - RNA, 21 nt, Human
agcagggacaggagcugacug

SEQ ID NO: 1291414 - RNA, 20 nt, Human
aggcagaccccgcagacccc

SEQ ID NO: 1291415 - RNA, 21 nt, Human
aggcagggccaggcauggggg

SEQ ID NO: 1291416 - RNA, 19 nt, Human
aggcaguucugguaggccu

SEQ ID NO: 1291417 - RNA, 21 nt, Human
aggccaggcagaccccgcaga

SEQ ID NO: 1291418 - RNA, 19 nt, Human
caaaccccaaagcggaaaa

SEQ ID NO: 1291419 - RNA, 22 nt, Human
caaagcggaaaaccucuuguca

SEQ ID NO: 1291420 - RNA, 20 nt, Human
cacaggguaggugggugugg

SEQ ID NO: 1291421 - RNA, 23 nt, Human
cacaggguaggugggugugggaa

SEQ ID NO: 1291422 - RNA, 23 nt, Human
caccacgcccuggaugccuucac

SEQ ID NO: 1291423 - RNA, 21 nt, Human
caccacgccguccgucaggau

SEQ ID NO: 1291424 - RNA, 25 nt, Human
caccgugaggaccuuggagaacacc

SEQ ID NO: 1291425 - RNA, 23 nt, Human
caccuccucgaaguaguagucca

SEQ ID NO: 1291426 - RNA, 19 nt, Human
caccuggcucaggcagggc

SEQ ID NO: 1291427 - RNA, 23 nt, Human
cacgcacaauggccucccgugug

SEQ ID NO: 1291428 - RNA, 19 nt, Human
cacugcccccacccuacgc

SEQ ID NO: 1291429 - RNA, 20 nt, Human
cacugcccccacccuacgcc

SEQ ID NO: 1291430 - RNA, 21 nt, Human
cacuuuaugacuccugaagcc

SEQ ID NO: 1291431 - RNA, 22 nt, Human
cagaacccacaggccaggcaga

SEQ ID NO: 1291432 - RNA, 24 nt, Human
cagagcccccagucccugccccuu

SEQ ID NO: 1291433 - RNA, 23 nt, Human
cagcaggaucccaggaggacugg

SEQ ID NO: 1291434 - RNA, 19 nt, Human
caggcagggccaggcaugg

SEQ ID NO: 1291435 - RNA, 19 nt, Human
cagggacaggagcugacug

SEQ ID NO: 1291436 - RNA, 23 nt, Human
ccaggcuuucucgggcguggggg

SEQ ID NO: 1291437 - RNA, 24 nt, Human
cccaagccagcaggaucccaggag

SEQ ID NO: 1291438 - RNA, 24 nt, Human
cccacaaagguuagacgcaaagca

SEQ ID NO: 1291439 - RNA, 23 nt, Human
cccacaggccaggcagaccccgc

SEQ ID NO: 1291440 - RNA, 18 nt, Human
cccagcucccuccaaguc

SEQ ID NO: 1291441 - RNA, 23 nt, Human
cccauuccucacugcccccaccc

SEQ ID NO: 1291442 - RNA, 20 nt, Human
ccccaaagcggaaaaccucu

SEQ ID NO: 1291443 - RNA, 23 nt, Human
ccccagagccgggcccaagccag

SEQ ID NO: 1291444 - RNA, 19 nt, Human
ccccccaggaaaucguccu

SEQ ID NO: 1291445 - RNA, 22 nt, Human
ccccccaggaaaucguccuccu

SEQ ID NO: 1291446 - RNA, 19 nt, Human
ccccgcagaccccgcagac

SEQ ID NO: 1291447 - RNA, 18 nt, Human
cccgcagaccccauggac

SEQ ID NO: 1291448 - RNA, 20 nt, Human
cccgcagaccccauggaccc

SEQ ID NO: 1291449 - RNA, 20 nt, Human
cccgcagaccccgcagaccc

SEQ ID NO: 1291450 - RNA, 24 nt, Human
ccgcugggcccaugcgugucguac

SEQ ID NO: 1291451 - RNA, 20 nt, Human
ccggagcgcgggcucacccc

SEQ ID NO: 1291452 - RNA, 24 nt, Human
ccggcagaacccacaggccaggca

SEQ ID NO: 1291453 - RNA, 25 nt, Human
ccucaugaucucccucccuccaccc

SEQ ID NO: 1291454 - RNA, 21 nt, Human
ccucggccagcacgcacuugg

SEQ ID NO: 1291455 - RNA, 22 nt, Human
ccucuguggcuguaguacucca

SEQ ID NO: 1291456 - RNA, 28 nt, Human
ccucuguggcuguaguacuccaccaccu

SEQ ID NO: 1291457 - RNA, 18 nt, Human
ccuggcucaggcagggcc

SEQ ID NO: 1291458 - RNA, 18 nt, Human
ccuucggccuugggggcc

SEQ ID NO: 1291459 - RNA, 20 nt, Human
cgcccuggaugccuucacac

SEQ ID NO: 1291460 - RNA, 24 nt, Human
cggaagggcacgaacuguacgaug

SEQ ID NO: 1291461 - RNA, 22 nt, Human
cucccagcucccuccaaguccc

SEQ ID NO: 1291462 - RNA, 21 nt, Human
cucccuccaagucccucauga

SEQ ID NO: 1291463 - RNA, 19 nt, Human
cucccucccuccacccacc

SEQ ID NO: 1291464 - RNA, 20 nt, Human
cuccggcagggacgcccagg

SEQ ID NO: 1291465 - RNA, 26 nt, Human
cucuguggcuguaguacuccaccacc

SEQ ID NO: 1291466 - RNA, 18 nt, Human
gaacucccagcucccucc

SEQ ID NO: 1291467 - RNA, 18 nt, Human
gaacucccagcucccucc

SEQ ID NO: 1291468 - RNA, 22 nt, Human
gacccauuccucacugccccca

SEQ ID NO: 1291469 - RNA, 24 nt, Human
gaccccgcagaccccgcagacccc

SEQ ID NO: 1291470 - RNA, 23 nt, Human
gagccgggcccaagccagcagga

SEQ ID NO: 1291471 - RNA, 21 nt, Human
gagcgcaggacgccgucuccc

SEQ ID NO: 1291472 - RNA, 21 nt, Human
gaucucccucccuccacccac

SEQ ID NO: 1291473 - RNA, 21 nt, Human
gauggcaaagucaugggacac

SEQ ID NO: 1291474 - RNA, 22 nt, Human
gcaugggggccuguauuuuguc

SEQ ID NO: 1291475 - RNA, 22 nt, Human
gcccccacccuacgcccuccac

SEQ ID NO: 1291476 - RNA, 19 nt, Human
gcccuggaugccuucacac

SEQ ID NO: 1291477 - RNA, 19 nt, Human
gcuggcccucccccacaaa

SEQ ID NO: 1291478 - RNA, 23 nt, Human
ggacaggugucugggucccccag

SEQ ID NO: 1291479 - RNA, 20 nt, Human
ggacugggaguggggccugg

SEQ ID NO: 1291480 - RNA, 21 nt, Human
ggccuugggggccccagagcc

SEQ ID NO: 1291481 - RNA, 22 nt, Human
gggacuggaggcuucugggagg

SEQ ID NO: 1291482 - RNA, 26 nt, Human
gggaggucggagggagcuuaagggac

SEQ ID NO: 1291483 - RNA, 19 nt, Human
gggaguggggccugguggg

SEQ ID NO: 1291484 - RNA, 19 nt, Human
gggggcaccagcagggaca

SEQ ID NO: 1291485 - RNA, 21 nt, Human
ggggggacugccuugcuggcc

SEQ ID NO: 1291486 - RNA, 22 nt, Human
gucccucaugaucucccucccu

SEQ ID NO: 1291487 - RNA, 19 nt, Human
gugucugggucccccaggc

SEQ ID NO: 1291488 - RNA, 23 nt, Human
uaguaguccaccgugaggaccuu

SEQ ID NO: 1291489 - RNA, 24 nt, Human
ucacugcccccacccuacgcccuc

SEQ ID NO: 1291490 - RNA, 21 nt, Human
uccaaaccccaaagcggaaaa

SEQ ID NO: 1291491 - RNA, 23 nt, Human
ucccguggaugaacucccagcuc

SEQ ID NO: 1291492 - RNA, 20 nt, Human
ucccuccacccaccuggcuc

SEQ ID NO: 1291493 - RNA, 21 nt, Human
uccggcagggacgcccaggcu

SEQ ID NO: 1291494 - RNA, 21 nt, Human
ucucccguggaugaacuccca

SEQ ID NO: 1291495 - RNA, 18 nt, Human
ucucccucccuccaccca

SEQ ID NO: 1291496 - RNA, 23 nt, Human
ucuccggcagggacgcccaggcu

SEQ ID NO: 1291497 - RNA, 20 nt, Human
ucugggucccccaggcuuuc

SEQ ID NO: 1291498 - RNA, 19 nt, Human
ugaagccccaccggcagaa

SEQ ID NO: 1291499 - RNA, 22 nt, Human
ugacuccugaagccccaccggc

SEQ ID NO: 1291500 - RNA, 22 nt, Human
ugacuguggggacaggugucug

SEQ ID NO: 1291501 - RNA, 20 nt, Human
ugaucucccucccuccaccc

SEQ ID NO: 1291502 - RNA, 19 nt, Human
ugauggacaugggcuggcg

SEQ ID NO: 1291503 - RNA, 20 nt, Human
ugcccccacccuacgcccuc

SEQ ID NO: 1291504 - RNA, 20 nt, Human
ugccuugcuggcccuccccc

SEQ ID NO: 1291505 - RNA, 21 nt, Human
uggacccugggcaggcaguuc

SEQ ID NO: 1291506 - RNA, 23 nt, Human
uggacccugggcaggcaguucug

SEQ ID NO: 1291507 - RNA, 25 nt, Human
uggaugccuucacacucaucguccu

SEQ ID NO: 1291508 - RNA, 24 nt, Human
uggggacaggaugucugggucccc

SEQ ID NO: 1291509 - RNA, 24 nt, Human
uggggacaggugucuggguccccc

SEQ ID NO: 1291510 - RNA, 22 nt, Human
uggggggacugccuugcuggcc

SEQ ID NO: 1291511 - RNA, 26 nt, Human
ugggucccccaggcuuuccccuaggg

SEQ ID NO: 1291512 - RNA, 21 nt, Human
ugguaggccuccaccacgccc

SEQ ID NO: 1291513 - RNA, 23 nt, Human
ugguggggacuggaggcuucugg

SEQ ID NO: 1291514 - RNA, 19 nt, Human
ugucccggagcgcgggcuc

SEQ ID NO: 1291515 - RNA, 20 nt, Human
uucucgggggcaggccucug

SEQ ID NO: 1291516 - RNA, 18 nt, Human
uucuugagcucccggaag

SEQ ID NO: 1291517 - RNA, 21 nt, Human
uuggagaacacgggaugcagg

SEQ ID NO: 1291518 - RNA, 22 nt, Human
uuggccagcgccgcaggggaug

SEQ ID NO: 1291519 - RNA, 22 nt, Human
gaggccuuucuugcagcagaag

SEQ ID NO: 1291520 - RNA, 21 nt, Human
agacagaauuccacauaucac

SEQ ID NO: 1291521 - RNA, 23 nt, Human
cacauaucacauuuaucgguaga

SEQ ID NO: 1291522 - RNA, 19 nt, Human
cagguggaugaauacgaua

SEQ ID NO: 1291523 - RNA, 21 nt, Human
cauucagaguaccacuauuuc

SEQ ID NO: 1291524 - RNA, 19 nt, Human
uagugguagagauaucauu

SEQ ID NO: 1291525 - RNA, 21 nt, Human
uccgugccaugugggcuccug

SEQ ID NO: 1291526 - RNA, 22 nt, Human
ucuucugggcguucaaugaaua

SEQ ID NO: 1291527 - RNA, 21 nt, Human
ugaggaaaaaauuagauuuaa

SEQ ID NO: 1291528 - RNA, 20 nt, Human
ugguagagauaucauucaga

SEQ ID NO: 1291529 - RNA, 19 nt, Human
ugugggcuccugaacaggu

SEQ ID NO: 1291530 - RNA, 18 nt, Human
uucagaguaccacuauuu

SEQ ID NO: 1291531 - RNA, 27 nt, Human
uuucccaagaugucagguggaugaaua

SEQ ID NO: 1291532 - RNA, 19 nt, Human
caccgcccccuccgacgca

SEQ ID NO: 1291533 - RNA, 19 nt, Human
cacuggagaagggggcugc

SEQ ID NO: 1291534 - RNA, 22 nt, Human
ccccgaaagcacuggagaaggg

SEQ ID NO: 1291535 - RNA, 22 nt, Human
ccccgagagcacuggagaaggg

SEQ ID NO: 1291536 - RNA, 24 nt, Human
cgaaagcacuggagaagggggcug

SEQ ID NO: 1291537 - RNA, 20 nt, Human
cgcagggaguagcgagugcc

SEQ ID NO: 1291538 - RNA, 22 nt, Human
cgcccccuccgacgcaagcccg

SEQ ID NO: 1291539 - RNA, 21 nt, Human
cucacaggguggggugggccu

SEQ ID NO: 1291540 - RNA, 19 nt, Human
gagcccaccgcccccuccg

SEQ ID NO: 1291541 - RNA, 22 nt, Human
ggugcacccuccccgaaagcac

SEQ ID NO: 1291542 - RNA, 20 nt, Human
uccccacaccuccgcggccg

SEQ ID NO: 1291543 - RNA, 24 nt, Human
uccccgaaagcacuggagaagggg

SEQ ID NO: 1291544 - RNA, 24 nt, Human
uccccgagagcacuggagaagggg

SEQ ID NO: 1291545 - RNA, 19 nt, Human
uggugcacccuccccgaaa

SEQ ID NO: 1291546 - RNA, 18 nt, Human
aaaccugcagcuucucug

SEQ ID NO: 1291547 - RNA, 23 nt, Human
aaagcaaacacuuucacuccucc

SEQ ID NO: 1291548 - RNA, 19 nt, Human
aagcaaacacuuucacucc

SEQ ID NO: 1291549 - RNA, 18 nt, Human
acuucguguacucaaugc

SEQ ID NO: 1291550 - RNA, 22 nt, Human
aggcacuaugacuuuccaggau

SEQ ID NO: 1291551 - RNA, 18 nt, Human
ccaggggagggccgcugc

SEQ ID NO: 1291552 - RNA, 20 nt, Human
cuccgaauggccuucggccu

SEQ ID NO: 1291553 - RNA, 22 nt, Human
cuccuccgcuggcugcaaaccu

SEQ ID NO: 1291554 - RNA, 24 nt, Human
gcgaacucucgcuugagcuccagc

SEQ ID NO: 1291555 - RNA, 22 nt, Human
ggagggccgcugccacaagaag

SEQ ID NO: 1291556 - RNA, 18 nt, Human
ggcuuuugcuaguugcuu

SEQ ID NO: 1291557 - RNA, 22 nt, Human
uccgcuggcugcaaaccugcag

SEQ ID NO: 1291558 - RNA, 23 nt, Human
ucggcccgccaggcacuguucug

SEQ ID NO: 1291559 - RNA, 19 nt, Human
ugcccucggcccgccaggc

SEQ ID NO: 1291560 - RNA, 18 nt, Human
uguugcuggcuuuugcua

SEQ ID NO: 1291561 - RNA, 19 nt, Human
uuccaugguucucccaggg

SEQ ID NO: 1291562 - RNA, 25 nt, Human
uuccaugguucucccaggggagggc

SEQ ID NO: 1291563 - RNA, 21 nt, Human
uugcuggcuuuugcuaguugc

SEQ ID NO: 1291564 - RNA, 18 nt, Human
aacuguguaaccuaaggc

SEQ ID NO: 1291565 - RNA, 19 nt, Human
aacuguguaaccuaaggcu

SEQ ID NO: 1291566 - RNA, 23 nt, Human
aagcacaacugaggccagagagc

SEQ ID NO: 1291567 - RNA, 20 nt, Human
aagcaggacagcacagcagc

SEQ ID NO: 1291568 - RNA, 18 nt, Human
aagcuuuuagcauggugc

SEQ ID NO: 1291569 - RNA, 21 nt, Human
aauccugagcccgggaggagg

SEQ ID NO: 1291570 - RNA, 30 nt, Human
acagcagcaggaaaagcacaacugaggccu

SEQ ID NO: 1291571 - RNA, 20 nt, Human
acccuccccaggcccagguc

SEQ ID NO: 1291572 - RNA, 19 nt, Human
acuccgucucaccgccccc

SEQ ID NO: 1291573 - RNA, 19 nt, Human
agagccugggcucuuuguc

SEQ ID NO: 1291574 - RNA, 18 nt, Human
agcaggaaaagcacaacu

SEQ ID NO: 1291575 - RNA, 21 nt, Human
agcccagggcagagcuagaug

SEQ ID NO: 1291576 - RNA, 21 nt, Human
agcugcauguuggaggaagag

SEQ ID NO: 1291577 - RNA, 24 nt, Human
aggcaagcccaugggacccgaagc

SEQ ID NO: 1291578 - RNA, 24 nt, Human
aggcagaggcucaggggagggugc

SEQ ID NO: 1291579 - RNA, 23 nt, Human
aggcccagguccaaaccccggcc

SEQ ID NO: 1291580 - RNA, 23 nt, Human
aggggacaaagagagguuccaga

SEQ ID NO: 1291581 - RNA, 20 nt, Human
aguacagugcccugugccag

SEQ ID NO: 1291582 - RNA, 20 nt, Human
auccugagcccgggaggagg

SEQ ID NO: 1291583 - RNA, 18 nt, Human
caaacagcgacccucccc

SEQ ID NO: 1291584 - RNA, 22 nt, Human
caacuccucccuguggagugau

SEQ ID NO: 1291585 - RNA, 21 nt, Human
caccgcccccugucuccagga

SEQ ID NO: 1291586 - RNA, 20 nt, Human
cacuaagugcucuauucaug

SEQ ID NO: 1291587 - RNA, 23 nt, Human
cagaaagcacacugggcuagaag

SEQ ID NO: 1291588 - RNA, 25 nt, Human
cagaugaccugcagcggcccuuccu

SEQ ID NO: 1291589 - RNA, 19 nt, Human
cagcgacccuccccaggcc

SEQ ID NO: 1291590 - RNA, 21 nt, Human
cagcgacccuccccaggccca

SEQ ID NO: 1291591 - RNA, 23 nt, Human
cagcggcccuuccugcucagucu

SEQ ID NO: 1291592 - RNA, 21 nt, Human
caggaaaagcacaacugaggc

SEQ ID NO: 1291593 - RNA, 27 nt, Human
caggaaaagcacaacugaggccagaga

SEQ ID NO: 1291594 - RNA, 25 nt, Human
caggaggggccugaggucaguggua

SEQ ID NO: 1291595 - RNA, 24 nt, Human
cagggucuguggugaagccagagg

SEQ ID NO: 1291596 - RNA, 18 nt, Human
caguggcuccucagggaa

SEQ ID NO: 1291597 - RNA, 22 nt, Human
caguggcuccucagggaaccca

SEQ ID NO: 1291598 - RNA, 20 nt, Human
ccaggcaccaugcuaacagc

SEQ ID NO: 1291599 - RNA, 22 nt, Human
cccaggaggggccugaggucag

SEQ ID NO: 1291600 - RNA, 24 nt, Human
cccagggcagagcuagauguggcc

SEQ ID NO: 1291601 - RNA, 20 nt, Human
cccagugggaauagcagguu

SEQ ID NO: 1291602 - RNA, 20 nt, Human
cccaugggacccgaagcagg

SEQ ID NO: 1291603 - RNA, 22 nt, Human
ccccaggcccagguccaaaccc

SEQ ID NO: 1291604 - RNA, 23 nt, Human
ccccaggcccagguccaaaccuu

SEQ ID NO: 1291605 - RNA, 20 nt, Human
ccccggccacugguguggcc

SEQ ID NO: 1291606 - RNA, 21 nt, Human
cccugugccaggcaccaugcc

SEQ ID NO: 1291607 - RNA, 21 nt, Human
cccugugccaggcaccaugcu

SEQ ID NO: 1291608 - RNA, 22 nt, Human
cccugugccaggcaccaugcua

SEQ ID NO: 1291609 - RNA, 21 nt, Human
ccuaguacagugcccugugcc

SEQ ID NO: 1291610 - RNA, 24 nt, Human
ccugcagcggcccuuccugcucag

SEQ ID NO: 1291611 - RNA, 22 nt, Human
ccuuacuccagaccugcucuuc

SEQ ID NO: 1291612 - RNA, 24 nt, Human
cgcuugagucccccagccuuacuc

SEQ ID NO: 1291613 - RNA, 21 nt, Human
cucacuccaacauuucaaaga

SEQ ID NO: 1291614 - RNA, 19 nt, Human
cuccuguuuucuggcaaug

SEQ ID NO: 1291615 - RNA, 24 nt, Human
cugaggcagaggcucaggggaggg

SEQ ID NO: 1291616 - RNA, 24 nt, Human
cugcagcggcccuuccugcucagu

SEQ ID NO: 1291617 - RNA, 19 nt, Human
cugcucagucuucugggau

SEQ ID NO: 1291618 - RNA, 18 nt, Human
cugguguggccugggcag

SEQ ID NO: 1291619 - RNA, 20 nt, Human
gaagaggggucuggacagug

SEQ ID NO: 1291620 - RNA, 27 nt, Human
gaagcaggacagcacagcagcaggaaa

SEQ ID NO: 1291621 - RNA, 21 nt, Human
gaccugcucuuccuccuguuu

SEQ ID NO: 1291622 - RNA, 21 nt, Human
gagacugggcugauuuucagc

SEQ ID NO: 1291623 - RNA, 22 nt, Human
gagcugcauguuggaggaagag

SEQ ID NO: 1291624 - RNA, 24 nt, Human
gcaaagcagaaagcacacugggcu

SEQ ID NO: 1291625 - RNA, 22 nt, Human
gcagcaggaaaagcacaacuga

SEQ ID NO: 1291626 - RNA, 27 nt, Human
gcagcggcccuuccugcucagucuucu

SEQ ID NO: 1291627 - RNA, 20 nt, Human
gcagggucuguggugaagcc

SEQ ID NO: 1291628 - RNA, 20 nt, Human
gcccugugccaggcaccaug

SEQ ID NO: 1291629 - RNA, 18 nt, Human
gcucuuccuccuguuuuc

SEQ ID NO: 1291630 - RNA, 24 nt, Human
ggaaaagcgcaucuggagcuuaga

SEQ ID NO: 1291631 - RNA, 19 nt, Human
ggaggaggcugaggcagag

SEQ ID NO: 1291632 - RNA, 20 nt, Human
ggaggaggcugaggcagagg

SEQ ID NO: 1291633 - RNA, 23 nt, Human
ggccacugguguggccugggcag

SEQ ID NO: 1291634 - RNA, 18 nt, Human
gggaauccugagcccggg

SEQ ID NO: 1291635 - RNA, 24 nt, Human
gugccugcacuaagugcucuauuc

SEQ ID NO: 1291636 - RNA, 26 nt, Human
guggcccaggaggggccugaggucag

SEQ ID NO: 1291637 - RNA, 19 nt, Human
guggccugggcagacuccg

SEQ ID NO: 1291638 - RNA, 21 nt, Human
gugguacagcugaggcaagcc

SEQ ID NO: 1291639 - RNA, 23 nt, Human
guguagagaaaaagcaaagaugg

SEQ ID NO: 1291640 - RNA, 25 nt, Human
guuaucuggaaggggacaaagagag

SEQ ID NO: 1291641 - RNA, 19 nt, Human
uaacagcauauaggguccc

SEQ ID NO: 1291642 - RNA, 19 nt, Human
uacagcugaggcaagccca

SEQ ID NO: 1291643 - RNA, 19 nt, Human
uagcccagggcagagcuag

SEQ ID NO: 1291644 - RNA, 22 nt, Human
uagcccagggcagagcuagaug

SEQ ID NO: 1291645 - RNA, 19 nt, Human
uaggucuuucucauuucug

SEQ ID NO: 1291646 - RNA, 20 nt, Human
uaguaggugguuuguguaga

SEQ ID NO: 1291647 - RNA, 18 nt, Human
ucaccccauugcaaguga

SEQ ID NO: 1291648 - RNA, 20 nt, Human
ucagugguacagcugaggca

SEQ ID NO: 1291649 - RNA, 18 nt, Human
uccccaggcccaggucca

SEQ ID NO: 1291650 - RNA, 22 nt, Human
uccccaggcccagguccaaacc

SEQ ID NO: 1291651 - RNA, 18 nt, Human
uccugagcccgggaggag

SEQ ID NO: 1291652 - RNA, 19 nt, Human
uccugagcccgggaggagg

SEQ ID NO: 1291653 - RNA, 21 nt, Human
ucucaaacagcgacccuccca

SEQ ID NO: 1291654 - RNA, 21 nt, Human
ucugggauucaacgaucauuc

SEQ ID NO: 1291655 - RNA, 18 nt, Human
ucuguggugaagccagag

SEQ ID NO: 1291656 - RNA, 18 nt, Human
ugaccugcagcggcccuu

SEQ ID NO: 1291657 - RNA, 19 nt, Human
ugaccugcagcggcccuuc

SEQ ID NO: 1291658 - RNA, 22 nt, Human
ugagcaggcucuucaauagccc

SEQ ID NO: 1291659 - RNA, 21 nt, Human
ugaggcaagcccaugggaccc

SEQ ID NO: 1291660 - RNA, 23 nt, Human
ugaggcagaggcucaggggaggg

SEQ ID NO: 1291661 - RNA, 23 nt, Human
ugaggccagagagccugggcucu

SEQ ID NO: 1291662 - RNA, 19 nt, Human
ugaguguguggcuguggaa

SEQ ID NO: 1291663 - RNA, 21 nt, Human
ugcagacuaagggagaggagg

SEQ ID NO: 1291664 - RNA, 20 nt, Human
ugccaggcaccaugcuaaca

SEQ ID NO: 1291665 - RNA, 18 nt, Human
ugccugcacuaagugcuc

SEQ ID NO: 1291666 - RNA, 18 nt, Human
ugcuaacagcauauaggg

SEQ ID NO: 1291667 - RNA, 20 nt, Human
uggaaaagcgcaucuggagc

SEQ ID NO: 1291668 - RNA, 20 nt, Human
uggccugggcagacuccguc

SEQ ID NO: 1291669 - RNA, 28 nt, Human
uguaguaggugguuuguguuguaaugac

SEQ ID NO: 1291670 - RNA, 21 nt, Human
ugugaggagagggaaauucag

SEQ ID NO: 1291671 - RNA, 19 nt, Human
uguuggaggaagagggguc

SEQ ID NO: 1291672 - RNA, 25 nt, Human
uguuuugcucccugcuguaucccca

SEQ ID NO: 1291673 - RNA, 27 nt, Human
uuaacacagaugaccugcagcggcccu

SEQ ID NO: 1291674 - RNA, 19 nt, Human
uuacuauucagaugugcca

SEQ ID NO: 1291675 - RNA, 19 nt, Human
uucucauuucugggccuca

SEQ ID NO: 1291676 - RNA, 20 nt, Human
uucuuaucugcaaacaagug

SEQ ID NO: 1291677 - RNA, 18 nt, Human
uugcucccugcuguaucc

SEQ ID NO: 1291678 - RNA, 22 nt, Human
uuuauaaagcugcguccuccuc

SEQ ID NO: 1291679 - RNA, 24 nt, Human
uuucuuaucugcaaacaaguggaa

SEQ ID NO: 1291680 - RNA, 18 nt, Human
aaagugcugggauuacaa

SEQ ID NO: 1291681 - RNA, 24 nt, Human
aaagugcugggauuacaaguguga

SEQ ID NO: 1291682 - RNA, 19 nt, Human
aacugaacucccaggugcc

SEQ ID NO: 1291683 - RNA, 20 nt, Human
aagcguguuggggucuccuc

SEQ ID NO: 1291684 - RNA, 19 nt, Human
aaguagcugggauuauagg

SEQ ID NO: 1291685 - RNA, 24 nt, Human
aaguagcugggauuauaggcacac

SEQ ID NO: 1291686 - RNA, 24 nt, Human
aagugauccgccugccuuggcuuc

SEQ ID NO: 1291687 - RNA, 18 nt, Human
aagugcugggauuacaag

SEQ ID NO: 1291688 - RNA, 19 nt, Human
aagugcugggauuacaagu

SEQ ID NO: 1291689 - RNA, 26 nt, Human
aagugcugggauuacaagugugagcc

SEQ ID NO: 1291690 - RNA, 21 nt, Human
aaucaggaaggucggaaucuc

SEQ ID NO: 1291691 - RNA, 18 nt, Human
acaggguuucaccauguu

SEQ ID NO: 1291692 - RNA, 21 nt, Human
acaggguuucaccauguuggc

SEQ ID NO: 1291693 - RNA, 24 nt, Human
acaggguuucaccauguuggccag

SEQ ID NO: 1291694 - RNA, 18 nt, Human
accauguuggccaggcug

SEQ ID NO: 1291695 - RNA, 23 nt, Human
acccaggcuggaguguaguggug

SEQ ID NO: 1291696 - RNA, 20 nt, Human
acccuucuuuuuuuucuucu

SEQ ID NO: 1291697 - RNA, 21 nt, Human
accgccuggcuaauuuuugua

SEQ ID NO: 1291698 - RNA, 25 nt, Human
acgcugucacccagacuggagugca

SEQ ID NO: 1291699 - RNA, 24 nt, Human
aggcacacaccacuaccgccuggc

SEQ ID NO: 1291700 - RNA, 19 nt, Human
aggcucaagugauucuccu

SEQ ID NO: 1291701 - RNA, 24 nt, Human
agugcaguagcacgaucucggcuc

SEQ ID NO: 1291702 - RNA, 21 nt, Human
aguguaguggugcaaucucag

SEQ ID NO: 1291703 - RNA, 20 nt, Human
aguuauucuccugccucagc

SEQ ID NO: 1291704 - RNA, 24 nt, Human
auuuuuguacuuuuaguagagaug

SEQ ID NO: 1291705 - RNA, 24 nt, Human
caaagugcugggauuacaagugug

SEQ ID NO: 1291706 - RNA, 23 nt, Human
caaccucuuccucccaggcucaa

SEQ ID NO: 1291707 - RNA, 22 nt, Human
caagugauccgccugccuuggc

SEQ ID NO: 1291708 - RNA, 22 nt, Human
caagugauucuccugucuuagc

SEQ ID NO: 1291709 - RNA, 21 nt, Human
caccauguuggccaggcuggu

SEQ ID NO: 1291710 - RNA, 24 nt, Human
caccauguuggccaggcuggucuc

SEQ ID NO: 1291711 - RNA, 27 nt, Human
caccauguuggccaggcuggucucaaa

SEQ ID NO: 1291712 - RNA, 21 nt, Human
cacccaggcuggaguguagug

SEQ ID NO: 1291713 - RNA, 23 nt, Human
cacgcugucacccagacuggagu

SEQ ID NO: 1291714 - RNA, 23 nt, Human
cacugcacccagccugaauuucu

SEQ ID NO: 1291715 - RNA, 24 nt, Human
caggguuucaccauguuggccagg

SEQ ID NO: 1291716 - RNA, 20 nt, Human
cagguagcugggauuacagg

SEQ ID NO: 1291717 - RNA, 28 nt, Human
caucucccggauuccaguuauucuccuu

SEQ ID NO: 1291718 - RNA, 24 nt, Human
cauguuggccaggcuggucucaaa

SEQ ID NO: 1291719 - RNA, 24 nt, Human
cauuuuguacuuuuaauagagaca

SEQ ID NO: 1291720 - RNA, 20 nt, Human
ccaaagugcugggauuacaa

SEQ ID NO: 1291721 - RNA, 21 nt, Human
ccaaagugcugggauuacaag

SEQ ID NO: 1291722 - RNA, 24 nt, Human
ccaaagugcugggauuacaagugu

SEQ ID NO: 1291723 - RNA, 19 nt, Human
ccacugcacccagccugaa

SEQ ID NO: 1291724 - RNA, 20 nt, Human
ccacugcacccagccugaau

SEQ ID NO: 1291725 - RNA, 23 nt, Human
ccagcagaggcuguguccucucc

SEQ ID NO: 1291726 - RNA, 24 nt, Human
ccaguuauucuccugccucagccu

SEQ ID NO: 1291727 - RNA, 20 nt, Human
cccaaccucagaccacuguc

SEQ ID NO: 1291728 - RNA, 23 nt, Human
cccaaguagcugggauuauaggc

SEQ ID NO: 1291729 - RNA, 24 nt, Human
cccaaguagcugggauuauaggca

SEQ ID NO: 1291730 - RNA, 21 nt, Human
cccaggcucaagugauucucc

SEQ ID NO: 1291731 - RNA, 23 nt, Human
cccaggcucaagugauucuccuc

SEQ ID NO: 1291732 - RNA, 20 nt, Human
ccgccuggcuaauuuuugua

SEQ ID NO: 1291733 - RNA, 24 nt, Human
ccucccaggcucaagugauucucc

SEQ ID NO: 1291734 - RNA, 24 nt, Human
ccucucagguagcugggauuacag

SEQ ID NO: 1291735 - RNA, 22 nt, Human
ccugccuuggcuucccaaagug

SEQ ID NO: 1291736 - RNA, 22 nt, Human
ccuggagauccugggugaaugg

SEQ ID NO: 1291737 - RNA, 18 nt, Human
ccuggccucaagugaucc

SEQ ID NO: 1291738 - RNA, 18 nt, Human
ccuggccucaagugaucc

SEQ ID NO: 1291739 - RNA, 21 nt, Human
ccuggccucaagugauccgcc

SEQ ID NO: 1291740 - RNA, 23 nt, Human
ccuggccucaagugauccgccug

SEQ ID NO: 1291741 - RNA, 21 nt, Human
cuaccgccuggcuaauuuuug

SEQ ID NO: 1291742 - RNA, 20 nt, Human
cucaagugauccgccugccu

SEQ ID NO: 1291743 - RNA, 23 nt, Human
cucaagugauucuccugucuuag

SEQ ID NO: 1291744 - RNA, 19 nt, Human
cucacgcugucacccagac

SEQ ID NO: 1291745 - RNA, 24 nt, Human
cucacugcaacaugcaucucccgg

SEQ ID NO: 1291746 - RNA, 19 nt, Human
cucacugcaaccucuuccu

SEQ ID NO: 1291747 - RNA, 24 nt, Human
cucacugcaaccucuuccucccag

SEQ ID NO: 1291748 - RNA, 24 nt, Human
cucagccucucagguagcugggau

SEQ ID NO: 1291749 - RNA, 23 nt, Human
cucagguagcugggauuacaggu

SEQ ID NO: 1291750 - RNA, 24 nt, Human
cucagguagcugggauuacaggug

SEQ ID NO: 1291751 - RNA, 20 nt, Human
cucaugccaaccuggcaacc

SEQ ID NO: 1291752 - RNA, 19 nt, Human
cucccaggcucaagugauu

SEQ ID NO: 1291753 - RNA, 20 nt, Human
cucccaggugccgacagagu

SEQ ID NO: 1291754 - RNA, 24 nt, Human
cuccugccacugucccaaccucag

SEQ ID NO: 1291755 - RNA, 23 nt, Human
cugcaaccucuuccucccaggcu

SEQ ID NO: 1291756 - RNA, 24 nt, Human
cugcaaccucuuccucccaggcuc

SEQ ID NO: 1291757 - RNA, 20 nt, Human
cugccaggcugaucucuugu

SEQ ID NO: 1291758 - RNA, 23 nt, Human
cugccucagccucucagguagcu

SEQ ID NO: 1291759 - RNA, 19 nt, Human
cugggugaaugguaucucc

SEQ ID NO: 1291760 - RNA, 23 nt, Human
cugucuuagccucccaaguagcu

SEQ ID NO: 1291761 - RNA, 23 nt, Human
cuuagccucccaaguagcuggga

SEQ ID NO: 1291762 - RNA, 18 nt, Human
cuuccucccaggcucaag

SEQ ID NO: 1291763 - RNA, 24 nt, Human
cuugcuuugucacccaggcuggag

SEQ ID NO: 1291764 - RNA, 19 nt, Human
cuuuuaguagagauggggu

SEQ ID NO: 1291765 - RNA, 22 nt, Human
gacagaaucuugcuuugucacc

SEQ ID NO: 1291766 - RNA, 18 nt, Human
gauuacaagugugagcca

SEQ ID NO: 1291767 - RNA, 19 nt, Human
gauuacaagugugagccac

SEQ ID NO: 1291768 - RNA, 23 nt, Human
gauuacaagugugagccacugca

SEQ ID NO: 1291769 - RNA, 18 nt, Human
gauuacaggugccugcca

SEQ ID NO: 1291770 - RNA, 21 nt, Human
gccauaaugcccagcuccauu

SEQ ID NO: 1291771 - RNA, 22 nt, Human
gccuuggcuucccaaagugcug

SEQ ID NO: 1291772 - RNA, 24 nt, Human
gccuuggcuucccaaagugcuggg

SEQ ID NO: 1291773 - RNA, 21 nt, Human
gcucacugcaaccucuuccuc

SEQ ID NO: 1291774 - RNA, 21 nt, Human
gcugggauuacaagugugagc

SEQ ID NO: 1291775 - RNA, 23 nt, Human
gcuggucucaaacuccuggccuc

SEQ ID NO: 1291776 - RNA, 24 nt, Human
gcuugaagcguguuggggucuccu

SEQ ID NO: 1291777 - RNA, 24 nt, Human
ggccucaagugauccgccugccuu

SEQ ID NO: 1291778 - RNA, 24 nt, Human
ggcuggucucaaacuccuggccuc

SEQ ID NO: 1291779 - RNA, 22 nt, Human
ggguuucaccauguuggccagg

SEQ ID NO: 1291780 - RNA, 18 nt, Human
guagcugggauuacaggu

SEQ ID NO: 1291781 - RNA, 20 nt, Human
guagcugggauuacaggugc

SEQ ID NO: 1291782 - RNA, 18 nt, Human
guagcugggauuauaggc

SEQ ID NO: 1291783 - RNA, 18 nt, Human
guccaacugaacucccag

SEQ ID NO: 1291784 - RNA, 24 nt, Human
gugauucuccugucuuagccuccc

SEQ ID NO: 1291785 - RNA, 23 nt, Human
uaacugccaggcugaucucuugu

SEQ ID NO: 1291786 - RNA, 24 nt, Human
uaauagagacaggguuucaccaug

SEQ ID NO: 1291787 - RNA, 26 nt, Human
uaauagagacaggguuucaccauguu

SEQ ID NO: 1291788 - RNA, 24 nt, Human
uaauuuuuguacuuuuaguagaga

SEQ ID NO: 1291789 - RNA, 24 nt, Human
uacaagugugagccacugcaccca

SEQ ID NO: 1291790 - RNA, 21 nt, Human
uagagacaggguuucaccaug

SEQ ID NO: 1291791 - RNA, 22 nt, Human
uagagacaggguuucaccaugu

SEQ ID NO: 1291792 - RNA, 19 nt, Human
uauucuccugccucagccu

SEQ ID NO: 1291793 - RNA, 22 nt, Human
ucacccaggcuggaguguagug

SEQ ID NO: 1291794 - RNA, 24 nt, Human
ucacgcugucacccagacuggagu

SEQ ID NO: 1291795 - RNA, 24 nt, Human
ucacugcaacaugcaucucccgga

SEQ ID NO: 1291796 - RNA, 22 nt, Human
ucacugcaaccucuuccuccca

SEQ ID NO: 1291797 - RNA, 24 nt, Human
ucacugcaaccucuuccucccagg

SEQ ID NO: 1291798 - RNA, 25 nt, Human
ucaggaugggaaagaaaaguagggu

SEQ ID NO: 1291799 - RNA, 21 nt, Human
ucagguagcugggauuacagg

SEQ ID NO: 1291800 - RNA, 18 nt, Human
ucccaaagugcugggauu

SEQ ID NO: 1291801 - RNA, 23 nt, Human
ucccaaagugcugggauuacaag

SEQ ID NO: 1291802 - RNA, 24 nt, Human
ucccaaguagcugggauuauaggc

SEQ ID NO: 1291803 - RNA, 21 nt, Human
ucccaggcucaagugauucuc

SEQ ID NO: 1291804 - RNA, 24 nt, Human
ucccaggcucaagugauucuccug

SEQ ID NO: 1291805 - RNA, 21 nt, Human
ucccaggugccgacagagucc

SEQ ID NO: 1291806 - RNA, 18 nt, Human
uccccagguucuccuucc

SEQ ID NO: 1291807 - RNA, 21 nt, Human
uccccagguucuccuuccuga

SEQ ID NO: 1291808 - RNA, 21 nt, Human
ucccggauuccaguuauucuc

SEQ ID NO: 1291809 - RNA, 24 nt, Human
ucccggauuccaguuauucuccug

SEQ ID NO: 1291810 - RNA, 18 nt, Human
ucccucuguucccugucc

SEQ ID NO: 1291811 - RNA, 21 nt, Human
uccugggugaaugguaucucc

SEQ ID NO: 1291812 - RNA, 18 nt, Human
uccuuggucuucuucugg

SEQ ID NO: 1291813 - RNA, 24 nt, Human
ucucacgcugucacccagacugga

SEQ ID NO: 1291814 - RNA, 23 nt, Human
ucucagguagcugggauuacagg

SEQ ID NO: 1291815 - RNA, 24 nt, Human
ucucagguagcugggauuacaggu

SEQ ID NO: 1291816 - RNA, 24 nt, Human
ucucccggauuccaguuauucucc

SEQ ID NO: 1291817 - RNA, 24 nt, Human
ucuccugccucagccucucaggua

SEQ ID NO: 1291818 - RNA, 26 nt, Human
ucuccugucuuagccucccaaguagc

SEQ ID NO: 1291819 - RNA, 19 nt, Human
ucuuccucccaggcucaag

SEQ ID NO: 1291820 - RNA, 23 nt, Human
ucuugcuuugucacccaggcugg

SEQ ID NO: 1291821 - RNA, 24 nt, Human
ucuugcuuugucacccaggcugga

SEQ ID NO: 1291822 - RNA, 18 nt, Human
ucuuuuuuuuuuuuuuuu

SEQ ID NO: 1291823 - RNA, 21 nt, Human
ugaauuucuccauucuuccca

SEQ ID NO: 1291824 - RNA, 23 nt, Human
ugacccuucuuuuuuuucuucuu

SEQ ID NO: 1291825 - RNA, 24 nt, Human
ugccucagccucucagguagcugg

SEQ ID NO: 1291826 - RNA, 19 nt, Human
ugccuuggcuucccaaagu

SEQ ID NO: 1291827 - RNA, 27 nt, Human
ugcugggauuacaagugugagccacug

SEQ ID NO: 1291828 - RNA, 24 nt, Human
ugcuuugucacccaggcuggagug

SEQ ID NO: 1291829 - RNA, 23 nt, Human
uggagugcaguagcacgaucucg

SEQ ID NO: 1291830 - RNA, 24 nt, Human
uggagugcaguagcacgaucucgg

SEQ ID NO: 1291831 - RNA, 23 nt, Human
uggaguguaguggugcaaucuca

SEQ ID NO: 1291832 - RNA, 24 nt, Human
uggaguguaguggugcaaucucag

SEQ ID NO: 1291833 - RNA, 24 nt, Human
uggccaggcuggucucaaacuccu

SEQ ID NO: 1291834 - RNA, 18 nt, Human
uggccucaagugauccgc

SEQ ID NO: 1291835 - RNA, 24 nt, Human
uggccucaagugauccgccugccu

SEQ ID NO: 1291836 - RNA, 19 nt, Human
ugggagaagucaggagugg

SEQ ID NO: 1291837 - RNA, 24 nt, Human
ugggagaagucaggaguggagaac

SEQ ID NO: 1291838 - RNA, 19 nt, Human
ugggauuacaagugugagc

SEQ ID NO: 1291839 - RNA, 21 nt, Human
ugggauuacaagugugagcca

SEQ ID NO: 1291840 - RNA, 22 nt, Human
ugggauuacaagugugagccac

SEQ ID NO: 1291841 - RNA, 22 nt, Human
ugggauuacaagugugagccac

SEQ ID NO: 1291842 - RNA, 24 nt, Human
ugggauuacaagugugagccacug

SEQ ID NO: 1291843 - RNA, 19 nt, Human
ugggauuacaggugccugc

SEQ ID NO: 1291844 - RNA, 21 nt, Human
ugggauuacaggugccugcca

SEQ ID NO: 1291845 - RNA, 21 nt, Human
ugggauuacaggugccugcca

SEQ ID NO: 1291846 - RNA, 22 nt, Human
ugggauuacaggugccugccau

SEQ ID NO: 1291847 - RNA, 21 nt, Human
ugggauuauaggcacacacca

SEQ ID NO: 1291848 - RNA, 22 nt, Human
ugggauuauaggcacacaccac

SEQ ID NO: 1291849 - RNA, 24 nt, Human
uggugcaaucucagcucacugcaa

SEQ ID NO: 1291850 - RNA, 20 nt, Human
uguacaugcccguuucagag

SEQ ID NO: 1291851 - RNA, 22 nt, Human
uguaguggugcaaucucagcuc

SEQ ID NO: 1291852 - RNA, 21 nt, Human
uguccaaaagcaucuucaggg

SEQ ID NO: 1291853 - RNA, 22 nt, Human
ugucccagcagaggcugugucc

SEQ ID NO: 1291854 - RNA, 18 nt, Human
uguccuggagauccuggg

SEQ ID NO: 1291855 - RNA, 24 nt, Human
uuaauagagacaggguuucaccau

SEQ ID NO: 1291856 - RNA, 18 nt, Human
uuaguagagaugggguuu

SEQ ID NO: 1291857 - RNA, 21 nt, Human
uuccaguuauucuccugccuc

SEQ ID NO: 1291858 - RNA, 23 nt, Human
uucuucccacacacccuccccag

SEQ ID NO: 1291859 - RNA, 19 nt, Human
uugaagcguguuggggucu

SEQ ID NO: 1291860 - RNA, 24 nt, Human
uugaagcguguuggggucuccucu

SEQ ID NO: 1291861 - RNA, 24 nt, Human
uugcuuugucacccaggcuggagu

SEQ ID NO: 1291862 - RNA, 24 nt, Human
uuucaccauguuggccaggcuggu

SEQ ID NO: 1291863 - RNA, 20 nt, Human
uuucagaguccagucuggug

SEQ ID NO: 1291864 - RNA, 24 nt, Human
uuugucacccaggcuggaguguag

SEQ ID NO: 1291865 - RNA, 20 nt, Human
uuuuuguacuuuuaguagag

SEQ ID NO: 1291866 - RNA, 26 nt, Human
uuuuuuuuuuuugagauagcaucuca

SEQ ID NO: 1291867 - RNA, 18 nt, Human
uuuuuuuuuuuuuuuuug

SEQ ID NO: 1291868 - RNA, 23 nt, Human
uauccacuggcugucccugcccc

SEQ ID NO: 1291869 - RNA, 19 nt, Human
aaaaaucugauuguguucu

SEQ ID NO: 1291870 - RNA, 23 nt, Human
aaaagacaccucauucaccuuca

SEQ ID NO: 1291871 - RNA, 26 nt, Human
aaauggcccuacaguguugagaagau

SEQ ID NO: 1291872 - RNA, 23 nt, Human
aacagaaaggaagcuuaaccugg

SEQ ID NO: 1291873 - RNA, 18 nt, Human
aaccuagcucagcgucag

SEQ ID NO: 1291874 - RNA, 19 nt, Human
aagcucaggucauggacuu

SEQ ID NO: 1291875 - RNA, 25 nt, Human
aaugaugaaaguauaacagaaagga

SEQ ID NO: 1291876 - RNA, 23 nt, Human
acagaaaggaagcuuaaccugga

SEQ ID NO: 1291877 - RNA, 23 nt, Human
acaggcaagacaugaugcuugug

SEQ ID NO: 1291878 - RNA, 24 nt, Human
acagucagguccucaccacguacc

SEQ ID NO: 1291879 - RNA, 24 nt, Human
accaccgggaucuccucauccucc

SEQ ID NO: 1291880 - RNA, 23 nt, Human
accucauucaccuucaggaccag

SEQ ID NO: 1291881 - RNA, 23 nt, Human
acugaacuguuggcugcugguga

SEQ ID NO: 1291882 - RNA, 18 nt, Human
agaaaggaagcuuaaccu

SEQ ID NO: 1291883 - RNA, 25 nt, Human
agguccucaccacguaccucaaucc

SEQ ID NO: 1291884 - RNA, 20 nt, Human
agguggugcuauugcuggug

SEQ ID NO: 1291885 - RNA, 24 nt, Human
aguuguauuauagaggggaaagau

SEQ ID NO: 1291886 - RNA, 24 nt, Human
auggaaucuuugguggcucugugg

SEQ ID NO: 1291887 - RNA, 21 nt, Human
caaccuagcucagcgucagaa

SEQ ID NO: 1291888 - RNA, 24 nt, Human
caaccuagcucagcgucagaaauu

SEQ ID NO: 1291889 - RNA, 22 nt, Human
caagagggcucccuugaacacc

SEQ ID NO: 1291890 - RNA, 20 nt, Human
cacacacagggcaagcccca

SEQ ID NO: 1291891 - RNA, 22 nt, Human
cacacccacacaagugaaguga

SEQ ID NO: 1291892 - RNA, 20 nt, Human
cacagcaucacaaugaugaa

SEQ ID NO: 1291893 - RNA, 25 nt, Human
cacagucagguccucaccacguacc

SEQ ID NO: 1291894 - RNA, 22 nt, Human
cagaagcaagcucccccacuga

SEQ ID NO: 1291895 - RNA, 21 nt, Human
caggaccagaacugagaccgg

SEQ ID NO: 1291896 - RNA, 25 nt, Human
caggcaagacaugaugcuugugcca

SEQ ID NO: 1291897 - RNA, 18 nt, Human
cagucuucaaaguugagg

SEQ ID NO: 1291898 - RNA, 23 nt, Human
caugcaggaacugccagaguccc

SEQ ID NO: 1291899 - RNA, 23 nt, Human
caugccaccaaccuagcucagcg

SEQ ID NO: 1291900 - RNA, 18 nt, Human
cauucaccuucaggacca

SEQ ID NO: 1291901 - RNA, 22 nt, Human
ccaaccuagcucagcgucagaa

SEQ ID NO: 1291902 - RNA, 22 nt, Human
ccucaaagcgaaggcccacagc

SEQ ID NO: 1291903 - RNA, 19 nt, Human
ccuggaaaaaucugauugu

SEQ ID NO: 1291904 - RNA, 19 nt, Human
ccuggccauaauuauucac

SEQ ID NO: 1291905 - RNA, 22 nt, Human
ccuuauucuugugccucuccug

SEQ ID NO: 1291906 - RNA, 21 nt, Human
cuccaggccccaccucaaagc

SEQ ID NO: 1291907 - RNA, 21 nt, Human
cuccuuggcacagauggcuga

SEQ ID NO: 1291908 - RNA, 20 nt, Human
cucugcuugcagggccacag

SEQ ID NO: 1291909 - RNA, 22 nt, Human
cucugcuugcagggccacaguc

SEQ ID NO: 1291910 - RNA, 23 nt, Human
cuguuccacuccacuaccauggc

SEQ ID NO: 1291911 - RNA, 22 nt, Human
gaacaccagcauuaucugagac

SEQ ID NO: 1291912 - RNA, 22 nt, Human
gaacagcuaguggaaagcacac

SEQ ID NO: 1291913 - RNA, 21 nt, Human
gaacugagaccgggugaaaga

SEQ ID NO: 1291914 - RNA, 18 nt, Human
gaacugccagagucccac

SEQ ID NO: 1291915 - RNA, 19 nt, Human
gaagcaagcucccccacug

SEQ ID NO: 1291916 - RNA, 19 nt, Human
gagcagcucgaggucacag

SEQ ID NO: 1291917 - RNA, 21 nt, Human
gagcagcucgaggucacagcc

SEQ ID NO: 1291918 - RNA, 22 nt, Human
gcaagcucccccacugaccccu

SEQ ID NO: 1291919 - RNA, 23 nt, Human
gugaagugagugcuccccagucc

SEQ ID NO: 1291920 - RNA, 18 nt, Human
guggaaagcacacccaca

SEQ ID NO: 1291921 - RNA, 21 nt, Human
uaaauguaggaagccauuuug

SEQ ID NO: 1291922 - RNA, 21 nt, Human
uaacagaaaggaagcuuaacc

SEQ ID NO: 1291923 - RNA, 23 nt, Human
uaacagaaaggaagcuuaaccug

SEQ ID NO: 1291924 - RNA, 19 nt, Human
uacacagaggaccaaaagg

SEQ ID NO: 1291925 - RNA, 21 nt, Human
uaccauggccaaagcucaggu

SEQ ID NO: 1291926 - RNA, 19 nt, Human
uagcucagcgucagaaauu

SEQ ID NO: 1291927 - RNA, 18 nt, Human
uauacaggcaagacauga

SEQ ID NO: 1291928 - RNA, 23 nt, Human
uccaaguaagaacagcuagugga

SEQ ID NO: 1291929 - RNA, 23 nt, Human
uccacuccacuaccauggccaaa

SEQ ID NO: 1291930 - RNA, 25 nt, Human
uccacuccacuaccauggccaaagc

SEQ ID NO: 1291931 - RNA, 18 nt, Human
uccacugggugaaacuga

SEQ ID NO: 1291932 - RNA, 20 nt, Human
uccaggccccaccucaaagc

SEQ ID NO: 1291933 - RNA, 23 nt, Human
ucccaaaagacaccucauucacc

SEQ ID NO: 1291934 - RNA, 19 nt, Human
ucccacggugcccagcugc

SEQ ID NO: 1291935 - RNA, 23 nt, Human
uccccagucccucuggcauccgu

SEQ ID NO: 1291936 - RNA, 23 nt, Human
ucccugccaugaaaccaugagga

SEQ ID NO: 1291937 - RNA, 18 nt, Human
uccuuggcacagauggcu

SEQ ID NO: 1291938 - RNA, 22 nt, Human
ucuccacugggugaaacugaac

SEQ ID NO: 1291939 - RNA, 20 nt, Human
ucuccugcccccuuccccca

SEQ ID NO: 1291940 - RNA, 22 nt, Human
ugaagugagcagcucgagguca

SEQ ID NO: 1291941 - RNA, 28 nt, Human
ugaagugagcagcucgaggucggaaccc

SEQ ID NO: 1291942 - RNA, 22 nt, Human
ugagcagcucgaggucacagcc

SEQ ID NO: 1291943 - RNA, 26 nt, Human
ugccagagucccacggugcccagcug

SEQ ID NO: 1291944 - RNA, 21 nt, Human
ugcccccuucccccacacucc

SEQ ID NO: 1291945 - RNA, 20 nt, Human
ugcuggugaccccuggccau

SEQ ID NO: 1291946 - RNA, 18 nt, Human
uggaaaaaucugauugug

SEQ ID NO: 1291947 - RNA, 19 nt, Human
uggcacagauggcugagcc

SEQ ID NO: 1291948 - RNA, 23 nt, Human
ugugccucuccugcccccuuccc

SEQ ID NO: 1291949 - RNA, 23 nt, Human
uuccucugcuugcagggccacag

SEQ ID NO: 1291950 - RNA, 21 nt, Human
aagguacuccaaaaagcucac

SEQ ID NO: 1291951 - RNA, 21 nt, Human
aaggauaaacuggacuuagag

SEQ ID NO: 1291952 - RNA, 18 nt, Human
agcugaagguuuucgaca

SEQ ID NO: 1291953 - RNA, 22 nt, Human
ccaguccaaagagaacaugguc

SEQ ID NO: 1291954 - RNA, 23 nt, Human
cgacaucagccccaccgaagcaa

SEQ ID NO: 1291955 - RNA, 19 nt, Human
cugaagguuuucgacauca

SEQ ID NO: 1291956 - RNA, 23 nt, Human
gaaaagccaguccaaagagaaca

SEQ ID NO: 1291957 - RNA, 21 nt, Human
gaauggaaggggaaaagccag

SEQ ID NO: 1291958 - RNA, 18 nt, Human
gcacugugacacugagca

SEQ ID NO: 1291959 - RNA, 21 nt, Human
ggaaaagccaguccaaagaga

SEQ ID NO: 1291960 - RNA, 19 nt, Human
uaagaugaauuacuuacug

SEQ ID NO: 1291961 - RNA, 19 nt, Human
uccaaagagaacaugguca

SEQ ID NO: 1291962 - RNA, 19 nt, Human
ugacacugagcaggagaaa

SEQ ID NO: 1291963 - RNA, 18 nt, Human
ugucuugggaagcugaag

SEQ ID NO: 1291964 - RNA, 19 nt, Human
ugucuugggaagcugaagg

SEQ ID NO: 1291965 - RNA, 26 nt, Human
uguuuuauucauucaauaaacguauu

SEQ ID NO: 1291966 - RNA, 19 nt, Human
uugucuugggaagcugaag

SEQ ID NO: 1291967 - RNA, 20 nt, Human
uuuaaacuaugucuuaguuu

SEQ ID NO: 1291968 - RNA, 20 nt, Human
uuuaagaugaauuacuuacc

SEQ ID NO: 1291969 - RNA, 19 nt, Human
uuuucgacaucagccccac

SEQ ID NO: 1291970 - RNA, 20 nt, Human
uguggugcugaccauucugg

SEQ ID NO: 1291971 - RNA, 18 nt, Human
acaagcagggcacgccgc

SEQ ID NO: 1291972 - RNA, 22 nt, Human
acgccgaguggggugcgugggc

SEQ ID NO: 1291973 - RNA, 19 nt, Human
cguaggggucacaaccucc

SEQ ID NO: 1291974 - RNA, 18 nt, Human
cuccgugcggaacccgcc

SEQ ID NO: 1291975 - RNA, 22 nt, Human
gcaagcuggggcuccguagggg

SEQ ID NO: 1291976 - RNA, 24 nt, Human
ggcaagcuggggcuccguaggggu

SEQ ID NO: 1291977 - RNA, 18 nt, Human
uccguaggggucacaacc

SEQ ID NO: 1291978 - RNA, 18 nt, Human
ugacaagcagggcacgcc

SEQ ID NO: 1291979 - RNA, 19 nt, Human
ugcgugggcaagcuggggc

SEQ ID NO: 1291980 - RNA, 22 nt, Human
ugguucgugaauaucacaaaag

SEQ ID NO: 1291981 - RNA, 20 nt, Human
agguggcgcuggcuggagac

SEQ ID NO: 1291982 - RNA, 18 nt, Human
ccauguauuaaacaaggu

SEQ ID NO: 1291983 - RNA, 18 nt, Human
cuggcuggagacaugcug

SEQ ID NO: 1291984 - RNA, 18 nt, Human
cuuccugacccgcucuuc

SEQ ID NO: 1291985 - RNA, 20 nt, Human
gaggauaguguauuuucagg

SEQ ID NO: 1291986 - RNA, 23 nt, Human
gaguucccauguauuaaacaagg

SEQ ID NO: 1291987 - RNA, 18 nt, Human
gccggugcgugcagggaa

SEQ ID NO: 1291988 - RNA, 24 nt, Human
uacagaaugaauuucagugaguuc

SEQ ID NO: 1291989 - RNA, 20 nt, Human
ucagguuugcaagucuggag

SEQ ID NO: 1291990 - RNA, 20 nt, Human
ucccauguauuaaacaaggu

SEQ ID NO: 1291991 - RNA, 23 nt, Human
uccccaucacagugugcgugcuu

SEQ ID NO: 1291992 - RNA, 21 nt, Human
uccuccccaucacagugugcg

SEQ ID NO: 1291993 - RNA, 22 nt, Human
ucugauagcuggaggauagugu

SEQ ID NO: 1291994 - RNA, 19 nt, Human
ugaguagaucucaauauaa

SEQ ID NO: 1291995 - RNA, 23 nt, Human
ugcgugcagggaacuugggccuc

SEQ ID NO: 1291996 - RNA, 20 nt, Human
ugcugugcucaucuuccuga

SEQ ID NO: 1291997 - RNA, 18 nt, Human
uggcgcuggcuggagaca

SEQ ID NO: 1291998 - RNA, 22 nt, Human
ugguacguaaacguccuccccu

SEQ ID NO: 1291999 - RNA, 23 nt, Human
ccacagcuguuaaauguguuugc

SEQ ID NO: 1292000 - RNA, 19 nt, Human
uuugcugaaaagggauaga

SEQ ID NO: 1292001 - RNA, 20 nt, Human
aaauuuaaucaucacucaag

SEQ ID NO: 1292002 - RNA, 19 nt, Human
cgaggguguacauuucuau

SEQ ID NO: 1292003 - RNA, 19 nt, Human
uauaaguauuuuucugugg

SEQ ID NO: 1292004 - RNA, 24 nt, Human
uggauuauauccuuuaggcaaauc

SEQ ID NO: 1292005 - RNA, 21 nt, Human
aagaaugaggaauuuaccugu

SEQ ID NO: 1292006 - RNA, 19 nt, Human
aagcucugaaguuuuuggc

SEQ ID NO: 1292007 - RNA, 19 nt, Human
acagucuguugaagaaugg

SEQ ID NO: 1292008 - RNA, 22 nt, Human
acuguuccagccucucgaagcu

SEQ ID NO: 1292009 - RNA, 19 nt, Human
agcaaaguggccuuuaccg

SEQ ID NO: 1292010 - RNA, 23 nt, Human
agcacgccuggugaugaugagca

SEQ ID NO: 1292011 - RNA, 20 nt, Human
agcuuccauucauucucuuc

SEQ ID NO: 1292012 - RNA, 18 nt, Human
aggaggaagggcuauccg

SEQ ID NO: 1292013 - RNA, 20 nt, Human
aggccuccagaugacagucu

SEQ ID NO: 1292014 - RNA, 19 nt, Human
aggccuccugagcccccag

SEQ ID NO: 1292015 - RNA, 20 nt, Human
aggcuucucugcuuguaaga

SEQ ID NO: 1292016 - RNA, 22 nt, Human
cagccccuucuguugcuuggag

SEQ ID NO: 1292017 - RNA, 24 nt, Human
ccaccuuccacugccauccgacuu

SEQ ID NO: 1292018 - RNA, 19 nt, Human
ccccagaggaggaagggcu

SEQ ID NO: 1292019 - RNA, 20 nt, Human
ccgacuccugauccaauccu

SEQ ID NO: 1292020 - RNA, 21 nt, Human
ccucucgaagcuucuuccucc

SEQ ID NO: 1292021 - RNA, 19 nt, Human
ccugagcccccagcaggau

SEQ ID NO: 1292022 - RNA, 22 nt, Human
ccugauccaauccaggccucca

SEQ ID NO: 1292023 - RNA, 18 nt, Human
ccuuccacugccauccga

SEQ ID NO: 1292024 - RNA, 21 nt, Human
ccuucuguugcuuggccaguc

SEQ ID NO: 1292025 - RNA, 19 nt, Human
cgaagcuucuuccuccuuc

SEQ ID NO: 1292026 - RNA, 18 nt, Human
cgacuccugauccaaucc

SEQ ID NO: 1292027 - RNA, 23 nt, Human
cgacuugcugaugcccaggcccc

SEQ ID NO: 1292028 - RNA, 20 nt, Human
cggcagcacgccuggugauu

SEQ ID NO: 1292029 - RNA, 19 nt, Human
cggcagcaucagggggcag

SEQ ID NO: 1292030 - RNA, 23 nt, Human
cucaacuguuccagccucucgaa

SEQ ID NO: 1292031 - RNA, 19 nt, Human
cucacagcaguaagaauga

SEQ ID NO: 1292032 - RNA, 23 nt, Human
cuccugauccaauccaggccucc

SEQ ID NO: 1292033 - RNA, 21 nt, Human
cuccugugugcucuugugcug

SEQ ID NO: 1292034 - RNA, 21 nt, Human
cucucuuaaaacuuuacccuc

SEQ ID NO: 1292035 - RNA, 23 nt, Human
cucuuaaaacuuuacccuccuug

SEQ ID NO: 1292036 - RNA, 19 nt, Human
cuuccuccuucccuguccc

SEQ ID NO: 1292037 - RNA, 23 nt, Human
cuuuuccauagcaaccgugacaa

SEQ ID NO: 1292038 - RNA, 23 nt, Human
gauccuugacauucugagaacug

SEQ ID NO: 1292039 - RNA, 23 nt, Human
gauuccauuucuccaccuuccac

SEQ ID NO: 1292040 - RNA, 21 nt, Human
ggagguagugcuucuuuugua

SEQ ID NO: 1292041 - RNA, 20 nt, Human
gggcaggccuccugagcccc

SEQ ID NO: 1292042 - RNA, 21 nt, Human
gugagaaaccagugacucaga

SEQ ID NO: 1292043 - RNA, 21 nt, Human
uaagucagguguuuguaaacc

SEQ ID NO: 1292044 - RNA, 19 nt, Human
uaauuuccaucccugguuc

SEQ ID NO: 1292045 - RNA, 18 nt, Human
uacaguucuuugaaagcu

SEQ ID NO: 1292046 - RNA, 21 nt, Human
uacuauucccuggaagucugu

SEQ ID NO: 1292047 - RNA, 18 nt, Human
uagcaaccgugacaaaag

SEQ ID NO: 1292048 - RNA, 24 nt, Human
uagugcaggcucagcuugcaccuc

SEQ ID NO: 1292049 - RNA, 23 nt, Human
uauuuuacuaugugauaaaggag

SEQ ID NO: 1292050 - RNA, 18 nt, Human
ucaaaugugucuccacau

SEQ ID NO: 1292051 - RNA, 26 nt, Human
ucacaccgagcugguuuuggccucuc

SEQ ID NO: 1292052 - RNA, 21 nt, Human
uccacauaguaggaguaaggu

SEQ ID NO: 1292053 - RNA, 23 nt, Human
uccacgguggccacaguaagaag

SEQ ID NO: 1292054 - RNA, 21 nt, Human
uccccagaguuucaucauuua

SEQ ID NO: 1292055 - RNA, 23 nt, Human
ucccuggaagucugugguacuuu

SEQ ID NO: 1292056 - RNA, 21 nt, Human
ucccugguucaagaugugccu

SEQ ID NO: 1292057 - RNA, 21 nt, Human
uccugauccaauccaggccuc

SEQ ID NO: 1292058 - RNA, 22 nt, Human
ucuaaaccuaagcaacagguau

SEQ ID NO: 1292059 - RNA, 23 nt, Human
ucugcagugcacggcagcaucag

SEQ ID NO: 1292060 - RNA, 23 nt, Human
ugaagaaugggcagcacagauug

SEQ ID NO: 1292061 - RNA, 21 nt, Human
ugaagcaaaggugaagcuucu

SEQ ID NO: 1292062 - RNA, 19 nt, Human
ugacaaaagguagugcagg

SEQ ID NO: 1292063 - RNA, 21 nt, Human
ugacaauaacagcaguaugcc

SEQ ID NO: 1292064 - RNA, 19 nt, Human
ugacagucuguugaagaau

SEQ ID NO: 1292065 - RNA, 24 nt, Human
ugacagucuguugaagaaugggca

SEQ ID NO: 1292066 - RNA, 23 nt, Human
ugacucagagaggggaauccgca

SEQ ID NO: 1292067 - RNA, 22 nt, Human
ugccauccgacuugcugaugcc

SEQ ID NO: 1292068 - RNA, 21 nt, Human
ugccauugagaaagacagcuu

SEQ ID NO: 1292069 - RNA, 19 nt, Human
ugccuugugaagcaaaggu

SEQ ID NO: 1292070 - RNA, 25 nt, Human
ugcucauuuacuugauacuuacaug

SEQ ID NO: 1292071 - RNA, 24 nt, Human
ugcucuugugcuggcuuugaagcu

SEQ ID NO: 1292072 - RNA, 20 nt, Human
uggcuccuaacaauuguucu

SEQ ID NO: 1292073 - RNA, 19 nt, Human
ugggaagauguccacggug

SEQ ID NO: 1292074 - RNA, 23 nt, Human
uggguuggaaucucagguuucuc

SEQ ID NO: 1292075 - RNA, 26 nt, Human
uggguuggaaucucagguuucucugg

SEQ ID NO: 1292076 - RNA, 23 nt, Human
uguaaccagccauguccuggagc

SEQ ID NO: 1292077 - RNA, 19 nt, Human
uguccuggagcagacacgg

SEQ ID NO: 1292078 - RNA, 20 nt, Human
uguccuggagcagacacggu

SEQ ID NO: 1292079 - RNA, 18 nt, Human
uuacuugauacuuacaug

SEQ ID NO: 1292080 - RNA, 18 nt, Human
uucccuguccccgcuuuc

SEQ ID NO: 1292081 - RNA, 21 nt, Human
uucccuguccccgcuuucuuu

SEQ ID NO: 1292082 - RNA, 19 nt, Human
uucugaaauaguacaugac

SEQ ID NO: 1292083 - RNA, 21 nt, Human
uucuuccuccuucccuguccc

SEQ ID NO: 1292084 - RNA, 21 nt, Human
uuucuccaccuuccacugcca

SEQ ID NO: 1292085 - RNA, 18 nt, Human
aagaacccaguugacacu

SEQ ID NO: 1292086 - RNA, 21 nt, Human
aagcagcggacccccuaaagc

SEQ ID NO: 1292087 - RNA, 24 nt, Human
aaggaacagcagaaauaaccagag

SEQ ID NO: 1292088 - RNA, 22 nt, Human
aauacacacaaaaucuugugua

SEQ ID NO: 1292089 - RNA, 19 nt, Human
acagcagaaauaaccagag

SEQ ID NO: 1292090 - RNA, 19 nt, Human
agcggacccccuaaagccc

SEQ ID NO: 1292091 - RNA, 18 nt, Human
aggcaacgaagaacccag

SEQ ID NO: 1292092 - RNA, 24 nt, Human
cagaaaaauacacacaaaaucuug

SEQ ID NO: 1292093 - RNA, 20 nt, Human
caggaagcagcggacccccu

SEQ ID NO: 1292094 - RNA, 20 nt, Human
ccccuaaagcccauuuuggg

SEQ ID NO: 1292095 - RNA, 23 nt, Human
cuuuuaggcaacgaagaacccag

SEQ ID NO: 1292096 - RNA, 20 nt, Human
gaacagcagaaauaaccaga

SEQ ID NO: 1292097 - RNA, 24 nt, Human
gaucgaagucaaggacuuugccuc

SEQ ID NO: 1292098 - RNA, 22 nt, Human
ggaacagcagaaauaaccagag

SEQ ID NO: 1292099 - RNA, 19 nt, Human
ucaggaagcagcggacccc

SEQ ID NO: 1292100 - RNA, 19 nt, Human
uccccguggguugugagag

SEQ ID NO: 1292101 - RNA, 21 nt, Human
ucuugucaagcucucuguugg

SEQ ID NO: 1292102 - RNA, 21 nt, Human
ugaaaaggaacagcagaaaua

SEQ ID NO: 1292103 - RNA, 22 nt, Human
uggccuuuuaggcaacgaagaa

SEQ ID NO: 1292104 - RNA, 20 nt, Human
uugggacaguagcuaucccc

SEQ ID NO: 1292105 - RNA, 18 nt, Human
uuucuugucaagcucucu

SEQ ID NO: 1292106 - RNA, 22 nt, Human
ggaggugaugaaagccccacuc

SEQ ID NO: 1292107 - RNA, 21 nt, Human
ggugaugaaagccccacuccu

SEQ ID NO: 1292108 - RNA, 18 nt, Human
ugaugaaagccccacucc

SEQ ID NO: 1292109 - RNA, 21 nt, Human
uaaauuucuagcauacugaac

SEQ ID NO: 1292110 - RNA, 23 nt, Human
aaaaugcuuucauguacuuacac

SEQ ID NO: 1292111 - RNA, 21 nt, Human
aaguccuugcauccaccccug

SEQ ID NO: 1292112 - RNA, 20 nt, Human
agaauguucuuuaaucaccu

SEQ ID NO: 1292113 - RNA, 20 nt, Human
agagggaaaugcaggacccc

SEQ ID NO: 1292114 - RNA, 21 nt, Human
ccaccccugaaagggugauuu

SEQ ID NO: 1292115 - RNA, 21 nt, Human
cgacagggccugcugcgacaa

SEQ ID NO: 1292116 - RNA, 24 nt, Human
cucagaaguccuugcauccacccc

SEQ ID NO: 1292117 - RNA, 18 nt, Human
gaaguccuugcauccacc

SEQ ID NO: 1292118 - RNA, 22 nt, Human
gaaguccuugcauccaccccug

SEQ ID NO: 1292119 - RNA, 18 nt, Human
gaguuguggccaaccucu

SEQ ID NO: 1292120 - RNA, 20 nt, Human
gcagagacgccagagggaaa

SEQ ID NO: 1292121 - RNA, 23 nt, Human
gccauucugcccauuacaguuaa

SEQ ID NO: 1292122 - RNA, 24 nt, Human
guuaacacuauagugguucuucuu

SEQ ID NO: 1292123 - RNA, 20 nt, Human
uacacccccaaauuaccagg

SEQ ID NO: 1292124 - RNA, 23 nt, Human
uaccagguaauuuagaauguucu

SEQ ID NO: 1292125 - RNA, 23 nt, Human
uaggccacaggaagggugacuaa

SEQ ID NO: 1292126 - RNA, 24 nt, Human
uagugguucuucuuccuagcgugu

SEQ ID NO: 1292127 - RNA, 26 nt, Human
uccaucgacagggccugcugcgacaa

SEQ ID NO: 1292128 - RNA, 20 nt, Human
uguggccaaccucuucucgg

SEQ ID NO: 1292129 - RNA, 21 nt, Human
uuaccagguaauuuagaaugu

SEQ ID NO: 1292130 - RNA, 22 nt, Human
uuagaauguucuuuaaucaccu

SEQ ID NO: 1292131 - RNA, 24 nt, Human
aagauagaaagcauugaaauucau

SEQ ID NO: 1292132 - RNA, 21 nt, Human
aagcuucaguuuucccagagg

SEQ ID NO: 1292133 - RNA, 19 nt, Human
caacccuaaaucaaaacaa

SEQ ID NO: 1292134 - RNA, 21 nt, Human
cacaacccuaaaucaaaacaa

SEQ ID NO: 1292135 - RNA, 28 nt, Human
cucauaccuaccucuaccaaucgguugg

SEQ ID NO: 1292136 - RNA, 18 nt, Human
gcaucuauaaauacaaga

SEQ ID NO: 1292137 - RNA, 23 nt, Human
uaccacaacccuaaaucaaaaca

SEQ ID NO: 1292138 - RNA, 28 nt, Human
uaccucuaccacaacccuaaaucaaaac

SEQ ID NO: 1292139 - RNA, 22 nt, Human
uauuacagaauuucacaaagaa

SEQ ID NO: 1292140 - RNA, 19 nt, Human
ugaagcuucaguuuuccca

SEQ ID NO: 1292141 - RNA, 19 nt, Human
ugaagcuucaguuuuccca

SEQ ID NO: 1292142 - RNA, 20 nt, Human
ugaaguagaauuuuauuaca

SEQ ID NO: 1292143 - RNA, 22 nt, Human
ugaaguagaauuuuauuacaga

SEQ ID NO: 1292144 - RNA, 23 nt, Human
ugaaguagaauuuuauuacagaa

SEQ ID NO: 1292145 - RNA, 21 nt, Human
uuauuacagaauuucacaaag

SEQ ID NO: 1292146 - RNA, 22 nt, Human
aaagacacugugugagugacac

SEQ ID NO: 1292147 - RNA, 24 nt, Human
aacacaggaccuggcacaaagaca

SEQ ID NO: 1292148 - RNA, 23 nt, Human
aggaccuggcacaaagacacugu

SEQ ID NO: 1292149 - RNA, 18 nt, Human
cacaggaccuggcacaaa

SEQ ID NO: 1292150 - RNA, 24 nt, Human
ccccaggucccgauaauauugccc

SEQ ID NO: 1292151 - RNA, 25 nt, Human
uaccucuccacgguuagagacacca

SEQ ID NO: 1292152 - RNA, 22 nt, Human
uagccaguaccucuccacgguu

SEQ ID NO: 1292153 - RNA, 28 nt, Human
uccacgguuagagacaccaacacaggac

SEQ ID NO: 1292154 - RNA, 21 nt, Human
ccucguuccauuguggcagag

SEQ ID NO: 1292155 - RNA, 21 nt, Human
cugauugucuguccagccgcu

SEQ ID NO: 1292156 - RNA, 21 nt, Human
uagcuugcacguuggaguggc

SEQ ID NO: 1292157 - RNA, 21 nt, Human
uaucugauuccuucugauugu

SEQ ID NO: 1292158 - RNA, 22 nt, Human
aagcccaccaagcuguacaaga

SEQ ID NO: 1292159 - RNA, 19 nt, Human
acucaucccaggucuccug

SEQ ID NO: 1292160 - RNA, 23 nt, Human
agcaggagagcagugacaggaaa

SEQ ID NO: 1292161 - RNA, 18 nt, Human
aggcuggcacagcggaug

SEQ ID NO: 1292162 - RNA, 24 nt, Human
caagaacauaaucuucuguucuuc

SEQ ID NO: 1292163 - RNA, 22 nt, Human
cagauuggcuacuggccccaca

SEQ ID NO: 1292164 - RNA, 18 nt, Human
cagcaggagagcagugac

SEQ ID NO: 1292165 - RNA, 22 nt, Human
cagcaucuuggguacuaguagg

SEQ ID NO: 1292166 - RNA, 20 nt, Human
cagcccauggcccccaagcc

SEQ ID NO: 1292167 - RNA, 21 nt, Human
cagcccccaggucaggagccu

SEQ ID NO: 1292168 - RNA, 27 nt, Human
cagcuacaggagacuggcagcccccag

SEQ ID NO: 1292169 - RNA, 18 nt, Human
caggaaccagcuacagga

SEQ ID NO: 1292170 - RNA, 18 nt, Human
caggucuccugaaggacc

SEQ ID NO: 1292171 - RNA, 21 nt, Human
cccaagcccaccaagcuguac

SEQ ID NO: 1292172 - RNA, 21 nt, Human
cccagcccauggcccccaagc

SEQ ID NO: 1292173 - RNA, 23 nt, Human
ccccagcccauggcccccaagcc

SEQ ID NO: 1292174 - RNA, 18 nt, Human
cccccaagcccaccaagc

SEQ ID NO: 1292175 - RNA, 23 nt, Human
cccccagcccauggcccccaagc

SEQ ID NO: 1292176 - RNA, 20 nt, Human
cuucuuugcccucuugugcc

SEQ ID NO: 1292177 - RNA, 21 nt, Human
gaaccagcuacaggagacugg

SEQ ID NO: 1292178 - RNA, 21 nt, Human
gagaccuauggccaggagccc

SEQ ID NO: 1292179 - RNA, 19 nt, Human
gagccugccuuccuugccc

SEQ ID NO: 1292180 - RNA, 18 nt, Human
gcccauggcccccaagcc

SEQ ID NO: 1292181 - RNA, 23 nt, Human
gcccccagcaggagagcagugac

SEQ ID NO: 1292182 - RNA, 22 nt, Human
gcccccaggucaggagccucug

SEQ ID NO: 1292183 - RNA, 18 nt, Human
gcugaaagagaccuaugg

SEQ ID NO: 1292184 - RNA, 22 nt, Human
gcuguuuucuucuuugcccucu

SEQ ID NO: 1292185 - RNA, 18 nt, Human
ggaaccagcuacaggaga

SEQ ID NO: 1292186 - RNA, 18 nt, Human
ggagaugcgccaagcugc

SEQ ID NO: 1292187 - RNA, 21 nt, Human
ggagccccccagcgccugccc

SEQ ID NO: 1292188 - RNA, 21 nt, Human
uaaccgggaaggacggugcgg

SEQ ID NO: 1292189 - RNA, 25 nt, Human
uacaagaacauaaucuucuguucuu

SEQ ID NO: 1292190 - RNA, 22 nt, Human
uacaggagacuggcagccccca

SEQ ID NO: 1292191 - RNA, 19 nt, Human
uauggccaggagcccccca

SEQ ID NO: 1292192 - RNA, 24 nt, Human
uauggccaggagccccccagcgcc

SEQ ID NO: 1292193 - RNA, 20 nt, Human
ucccccagcccauggccccc

SEQ ID NO: 1292194 - RNA, 24 nt, Human
ucuucuuugcccucuugugccauu

SEQ ID NO: 1292195 - RNA, 21 nt, Human
uggcccccaagcccaccaagc

SEQ ID NO: 1292196 - RNA, 18 nt, Human
ugguaugaggcuguuuuc

SEQ ID NO: 1292197 - RNA, 19 nt, Human
ugugaggggagguccccca

SEQ ID NO: 1292198 - RNA, 24 nt, Human
uguuuuggggaagcaccacucauc

SEQ ID NO: 1292199 - RNA, 19 nt, Human
uucuucuuugcccucuugu

SEQ ID NO: 1292200 - RNA, 20 nt, Human
uucuuugcccucuugugcca

SEQ ID NO: 1292201 - RNA, 19 nt, Human
cccuuugcucacacacuuc

SEQ ID NO: 1292202 - RNA, 23 nt, Human
ugagcucagguugccucuggcau

SEQ ID NO: 1292203 - RNA, 20 nt, Human
uugguucugaauguggagau

SEQ ID NO: 1292204 - RNA, 27 nt, Human
ggagacuggggggccaugggcagaggc

SEQ ID NO: 1292205 - RNA, 22 nt, Human
gggcagaggcagagaggcuggc

SEQ ID NO: 1292206 - RNA, 21 nt, Human
aaaaaacaaacagauaaaccc

SEQ ID NO: 1292207 - RNA, 22 nt, Human
aaaaacaaacagauaaacccua

SEQ ID NO: 1292208 - RNA, 18 nt, Human
aaaacaaacagauaaacc

SEQ ID NO: 1292209 - RNA, 24 nt, Human
aaacaaacagauaaacccuagaaa

SEQ ID NO: 1292210 - RNA, 18 nt, Human
aaacagauaaacccuaga

SEQ ID NO: 1292211 - RNA, 22 nt, Human
aaacagauaaacccuagaaacc

SEQ ID NO: 1292212 - RNA, 22 nt, Human
aacccucaacucaaaaaacaaa

SEQ ID NO: 1292213 - RNA, 22 nt, Human
acagccuuggagggggcacugg

SEQ ID NO: 1292214 - RNA, 21 nt, Human
acccucaacucaaaaaacaaa

SEQ ID NO: 1292215 - RNA, 21 nt, Human
acucaaaaaacaaacagauaa

SEQ ID NO: 1292216 - RNA, 23 nt, Human
agaaagauaaacuguuuccccau

SEQ ID NO: 1292217 - RNA, 19 nt, Human
agagggaggaggaaggggu

SEQ ID NO: 1292218 - RNA, 19 nt, Human
agggaggcccgggcuccug

SEQ ID NO: 1292219 - RNA, 21 nt, Human
agggaggcccgggcuccuggc

SEQ ID NO: 1292220 - RNA, 21 nt, Human
agggggcacuggagauggggg

SEQ ID NO: 1292221 - RNA, 20 nt, Human
auaaacccuagaaaccggug

SEQ ID NO: 1292222 - RNA, 19 nt, Human
caacucaaaaaacaaacag

SEQ ID NO: 1292223 - RNA, 26 nt, Human
caacucaaaaaacaaacagauaaacc

SEQ ID NO: 1292224 - RNA, 24 nt, Human
cacugcacagccuuggagggggca

SEQ ID NO: 1292225 - RNA, 21 nt, Human
caucacuagcaaugccaaggc

SEQ ID NO: 1292226 - RNA, 22 nt, Human
ccccaagacacugcacagccuu

SEQ ID NO: 1292227 - RNA, 23 nt, Human
ccgucucagaccagcaaaaggag

SEQ ID NO: 1292228 - RNA, 19 nt, Human
ccucaacucaaaaaacaaa

SEQ ID NO: 1292229 - RNA, 18 nt, Human
ccuuggagggggcacugg

SEQ ID NO: 1292230 - RNA, 25 nt, Human
cgggaaaaugccaucacugauagua

SEQ ID NO: 1292231 - RNA, 23 nt, Human
cugagagccccaagacacugcac

SEQ ID NO: 1292232 - RNA, 23 nt, Human
cugcacagccuuggagggggcac

SEQ ID NO: 1292233 - RNA, 22 nt, Human
gagaaggacuggagggcuggug

SEQ ID NO: 1292234 - RNA, 22 nt, Human
gaggcagcugcuuuaggagccc

SEQ ID NO: 1292235 - RNA, 19 nt, Human
gaggcccgggcuccuggcc

SEQ ID NO: 1292236 - RNA, 23 nt, Human
gccaaauacucccacuucauccc

SEQ ID NO: 1292237 - RNA, 19 nt, Human
ggacuggagggcugguggg

SEQ ID NO: 1292238 - RNA, 19 nt, Human
ggaggaggaagggguugag

SEQ ID NO: 1292239 - RNA, 21 nt, Human
ggaggaggaagggguugaggg

SEQ ID NO: 1292240 - RNA, 23 nt, Human
ggaggaggaagggguugaggggg

SEQ ID NO: 1292241 - RNA, 30 nt, Human
uaaaacuaaguccagaaagauaaacuguuu

SEQ ID NO: 1292242 - RNA, 21 nt, Human
uaaaaugaaaaguucagaucc

SEQ ID NO: 1292243 - RNA, 21 nt, Human
uaggagcccgggaaaaugcca

SEQ ID NO: 1292244 - RNA, 21 nt, Human
ucccauuuucccuuuguguuu

SEQ ID NO: 1292245 - RNA, 19 nt, Human
uccccauggacuuggggag

SEQ ID NO: 1292246 - RNA, 23 nt, Human
ugaggaacccucaacucaaaaaa

SEQ ID NO: 1292247 - RNA, 21 nt, Human
ugauaaaacuaaguccagaaa

SEQ ID NO: 1292248 - RNA, 21 nt, Human
ugcacagccuuggagggggca

SEQ ID NO: 1292249 - RNA, 23 nt, Human
uggagggcuggugggcuggagcc

SEQ ID NO: 1292250 - RNA, 22 nt, Human
uggcccugagagccccaagaca

SEQ ID NO: 1292251 - RNA, 24 nt, Human
uggggguaaacauuaaauauagag

SEQ ID NO: 1292252 - RNA, 22 nt, Human
uuggcccugagagccccaagac

SEQ ID NO: 1292253 - RNA, 26 nt, Human
aaaaaaaaaaaaaaauacaguaggag

SEQ ID NO: 1292254 - RNA, 24 nt, Human
aaaaaaaaaaauacaguaggagaa

SEQ ID NO: 1292255 - RNA, 26 nt, Human
aaaccaaagcaaggcagaagguagga

SEQ ID NO: 1292256 - RNA, 20 nt, Human
aacauggcaaaacucugucu

SEQ ID NO: 1292257 - RNA, 21 nt, Human
aacauggcaaaacucugucuc

SEQ ID NO: 1292258 - RNA, 21 nt, Human
aacccgggaggcggagguugc

SEQ ID NO: 1292259 - RNA, 18 nt, Human
aagaaggggugcaacagc

SEQ ID NO: 1292260 - RNA, 24 nt, Human
acagagcgagacuccaucucaaaa

SEQ ID NO: 1292261 - RNA, 20 nt, Human
accauguuggucaggcuggu

SEQ ID NO: 1292262 - RNA, 18 nt, Human
accgcacuccagccuggg

SEQ ID NO: 1292263 - RNA, 24 nt, Human
accgcacuccagccugggagacag

SEQ ID NO: 1292264 - RNA, 18 nt, Human
acgggguuucaccauguu

SEQ ID NO: 1292265 - RNA, 23 nt, Human
acgggguuucaccauguugguca

SEQ ID NO: 1292266 - RNA, 24 nt, Human
acgggguuucaccauguuggucag

SEQ ID NO: 1292267 - RNA, 24 nt, Human
acuccagccugggagacagagcga

SEQ ID NO: 1292268 - RNA, 27 nt, Human
acucuguugccuaggcuggaaugcaau

SEQ ID NO: 1292269 - RNA, 25 nt, Human
agaaaccaaagcaaggcagaaggua

SEQ ID NO: 1292270 - RNA, 19 nt, Human
agcagugaguucuaggaca

SEQ ID NO: 1292271 - RNA, 21 nt, Human
agccgagauugugccaccgca

SEQ ID NO: 1292272 - RNA, 18 nt, Human
agccuccugaguagcuag

SEQ ID NO: 1292273 - RNA, 24 nt, Human
agccugggagacagagcgagacuc

SEQ ID NO: 1292274 - RNA, 21 nt, Human
aggcggagguugcagugagcc

SEQ ID NO: 1292275 - RNA, 24 nt, Human
aggcggagguugcagugagccgag

SEQ ID NO: 1292276 - RNA, 22 nt, Human
aggcugguuuugaacuccuggc

SEQ ID NO: 1292277 - RNA, 23 nt, Human
agggcagaaccaaacggccccua

SEQ ID NO: 1292278 - RNA, 24 nt, Human
agguaagagaaucgcuuuaacccg

SEQ ID NO: 1292279 - RNA, 18 nt, Human
aguagcuaggauuacagg

SEQ ID NO: 1292280 - RNA, 20 nt, Human
agugauucucuugccucagc

SEQ ID NO: 1292281 - RNA, 20 nt, Human
aucgcuuuaacccgggaggc

SEQ ID NO: 1292282 - RNA, 24 nt, Human
auugugccaccgcacuccagccug

SEQ ID NO: 1292283 - RNA, 24 nt, Human
auuuuuauaucuuuaguagagacg

SEQ ID NO: 1292284 - RNA, 18 nt, Human
caaagcaaggcagaaggu

SEQ ID NO: 1292285 - RNA, 19 nt, Human
caaagcaaggcagaaggua

SEQ ID NO: 1292286 - RNA, 24 nt, Human
caacauggcaaaacucugucucua

SEQ ID NO: 1292287 - RNA, 21 nt, Human
caccauguuggucaggcuggu

SEQ ID NO: 1292288 - RNA, 24 nt, Human
caccauguuggucaggcugguuuu

SEQ ID NO: 1292289 - RNA, 24 nt, Human
caccgcacuccagccugggagaca

SEQ ID NO: 1292290 - RNA, 23 nt, Human
cacuccagccugggagacagagc

SEQ ID NO: 1292291 - RNA, 24 nt, Human
cacuccagccugggagacagagcg

SEQ ID NO: 1292292 - RNA, 24 nt, Human
cacucuguugccuaggcuggaaug

SEQ ID NO: 1292293 - RNA, 23 nt, Human
cacugcaaccuccaccuuccggg

SEQ ID NO: 1292294 - RNA, 19 nt, Human
cagccuccugaguagcuag

SEQ ID NO: 1292295 - RNA, 22 nt, Human
cagccuggauugugccaucuaa

SEQ ID NO: 1292296 - RNA, 23 nt, Human
cagccuggauugugccaucuaag

SEQ ID NO: 1292297 - RNA, 22 nt, Human
caguaggccaagguuaggcuuc

SEQ ID NO: 1292298 - RNA, 20 nt, Human
cauagaucaaaacaacgagc

SEQ ID NO: 1292299 - RNA, 24 nt, Human
cauguuggucaggcugguuuugaa

SEQ ID NO: 1292300 - RNA, 24 nt, Human
ccaaacggccccuacauagaucaa

SEQ ID NO: 1292301 - RNA, 20 nt, Human
ccaccgcacuccagccuggg

SEQ ID NO: 1292302 - RNA, 24 nt, Human
ccaccgcacuccagccugggagac

SEQ ID NO: 1292303 - RNA, 27 nt, Human
ccagugauucucuugccucagccuccu

SEQ ID NO: 1292304 - RNA, 25 nt, Human
ccaucucaaaaaaaaaaaaaaaaaa

SEQ ID NO: 1292305 - RNA, 19 nt, Human
ccccuacauagaucaaaac

SEQ ID NO: 1292306 - RNA, 20 nt, Human
ccggguuccagugauucucu

SEQ ID NO: 1292307 - RNA, 20 nt, Human
ccuaggcuggaaugcaaugg

SEQ ID NO: 1292308 - RNA, 23 nt, Human
ccugaguagcuaggauuacaggc

SEQ ID NO: 1292309 - RNA, 24 nt, Human
ccugaguagcuaggauuacaggca

SEQ ID NO: 1292310 - RNA, 19 nt, Human
ccugcaaagaccacaucaa

SEQ ID NO: 1292311 - RNA, 20 nt, Human
ccuggccaacauggcaaaac

SEQ ID NO: 1292312 - RNA, 24 nt, Human
ccuggccaacauggcaaaacucug

SEQ ID NO: 1292313 - RNA, 22 nt, Human
ccugggagacagagcgagacuc

SEQ ID NO: 1292314 - RNA, 21 nt, Human
ccuguaaucccagcuacucag

SEQ ID NO: 1292315 - RNA, 22 nt, Human
ccuguaaucccagcuacucagg

SEQ ID NO: 1292316 - RNA, 24 nt, Human
ccuuccggguuccagugauucucu

SEQ ID NO: 1292317 - RNA, 23 nt, Human
cgagacuccaucucaaaaaaaaa

SEQ ID NO: 1292318 - RNA, 24 nt, Human
cgagauugugccaccgcacuccag

SEQ ID NO: 1292319 - RNA, 24 nt, Human
cgggaggcggagguugcagugagc

SEQ ID NO: 1292320 - RNA, 24 nt, Human
cgggguuucaccauguuggucagg

SEQ ID NO: 1292321 - RNA, 24 nt, Human
cuacauagaucaaaacaacgagcu

SEQ ID NO: 1292322 - RNA, 18 nt, Human
cucaaaaaaaaaaaaaaa

SEQ ID NO: 1292323 - RNA, 23 nt, Human
cucaaaaaaaaaaaaaaaaaaaa

SEQ ID NO: 1292324 - RNA, 18 nt, Human
cucaaagcagagaauaag

SEQ ID NO: 1292325 - RNA, 24 nt, Human
cucaaagcagagaauaaguagcuc

SEQ ID NO: 1292326 - RNA, 24 nt, Human
cucacugcaaccuccaccuuccgg

SEQ ID NO: 1292327 - RNA, 18 nt, Human
cucaggaagcugagguaa

SEQ ID NO: 1292328 - RNA, 19 nt, Human
cuccaucucaaaaaaaaaa

SEQ ID NO: 1292329 - RNA, 24 nt, Human
cuccugaguagcuaggauuacagg

SEQ ID NO: 1292330 - RNA, 24 nt, Human
cugcaaccuccaccuuccggguuc

SEQ ID NO: 1292331 - RNA, 23 nt, Human
cuugccucagccuccugaguagc

SEQ ID NO: 1292332 - RNA, 24 nt, Human
cuugccucagccuccugaguagcu

SEQ ID NO: 1292333 - RNA, 18 nt, Human
cuuucuucuucuucuucu

SEQ ID NO: 1292334 - RNA, 23 nt, Human
cuuucuucuucuucuucuuuuuu

SEQ ID NO: 1292335 - RNA, 18 nt, Human
cuuuuuuuuuuuuuuuug

SEQ ID NO: 1292336 - RNA, 23 nt, Human
gagacgggguuucaccauguugg

SEQ ID NO: 1292337 - RNA, 24 nt, Human
gagacgggguuucaccauguuggu

SEQ ID NO: 1292338 - RNA, 23 nt, Human
gagguugcagugagccgagauug

SEQ ID NO: 1292339 - RNA, 24 nt, Human
gaguagcuaggauuacaggcacgc

SEQ ID NO: 1292340 - RNA, 18 nt, Human
gauuacaggcacgcgcca

SEQ ID NO: 1292341 - RNA, 21 nt, Human
gauucucuugccucagccucc

SEQ ID NO: 1292342 - RNA, 20 nt, Human
gcaagcauugugcuaagaac

SEQ ID NO: 1292343 - RNA, 24 nt, Human
gcacuccagccugggagacagagc

SEQ ID NO: 1292344 - RNA, 22 nt, Human
gcagaaccaaacggccccuaca

SEQ ID NO: 1292345 - RNA, 24 nt, Human
gccaacauggcaaaacucugucuc

SEQ ID NO: 1292346 - RNA, 30 nt, Human
gcuggaaugcaaugguguaaucucggcucc

SEQ ID NO: 1292347 - RNA, 20 nt, Human
gcuguagaugcuguuuccgg

SEQ ID NO: 1292348 - RNA, 25 nt, Human
ggacaaaugcaaauuugaagucccu

SEQ ID NO: 1292349 - RNA, 18 nt, Human
ggaccuguuaagcuaaua

SEQ ID NO: 1292350 - RNA, 22 nt, Human
ggagguugcagugagccgagau

SEQ ID NO: 1292351 - RNA, 24 nt, Human
ggagguugcagugagccgagauug

SEQ ID NO: 1292352 - RNA, 18 nt, Human
ggaugggggaacagggca

SEQ ID NO: 1292353 - RNA, 22 nt, Human
ggauuacaggcacgcgccacca

SEQ ID NO: 1292354 - RNA, 18 nt, Human
ggcugguuuugaacuccu

SEQ ID NO: 1292355 - RNA, 18 nt, Human
ggcuuguaggauggaugg

SEQ ID NO: 1292356 - RNA, 23 nt, Human
gggguuucaccauguuggucagg

SEQ ID NO: 1292357 - RNA, 20 nt, Human
guaaaacagacuauggccuu

SEQ ID NO: 1292358 - RNA, 23 nt, Human
guagagacgggguuucaccaugu

SEQ ID NO: 1292359 - RNA, 23 nt, Human
guaggagaaaccaaagcaaggca

SEQ ID NO: 1292360 - RNA, 19 nt, Human
gucucuacuaaaaacacaa

SEQ ID NO: 1292361 - RNA, 23 nt, Human
gugauucucuugccucagccucc

SEQ ID NO: 1292362 - RNA, 22 nt, Human
guggcaugcuccuguaauccca

SEQ ID NO: 1292363 - RNA, 20 nt, Human
guuaggcuuguaggauggau

SEQ ID NO: 1292364 - RNA, 24 nt, Human
guugcagugagccgagauugugcc

SEQ ID NO: 1292365 - RNA, 21 nt, Human
uaagcuaauagggguaaaaca

SEQ ID NO: 1292366 - RNA, 24 nt, Human
uaauuuuuauaucuuuaguagaga

SEQ ID NO: 1292367 - RNA, 20 nt, Human
uacaguaggagaaaccaaaa

SEQ ID NO: 1292368 - RNA, 24 nt, Human
uacaguaggagaaaccaaagcaag

SEQ ID NO: 1292369 - RNA, 22 nt, Human
uagagacgggguuucaccaugu

SEQ ID NO: 1292370 - RNA, 18 nt, Human
uagcagugaguucuagga

SEQ ID NO: 1292371 - RNA, 21 nt, Human
uaggauuacaggcacgcgcca

SEQ ID NO: 1292372 - RNA, 22 nt, Human
uaggauuacaggcacgcgccac

SEQ ID NO: 1292373 - RNA, 24 nt, Human
uaggauuacaggcacgcgccacca

SEQ ID NO: 1292374 - RNA, 24 nt, Human
uaguagagacgggguuucaccaug

SEQ ID NO: 1292375 - RNA, 26 nt, Human
uaguagagacgggguuucaccauguu

SEQ ID NO: 1292376 - RNA, 23 nt, Human
ucacugcaaccuccaccuuccgg

SEQ ID NO: 1292377 - RNA, 24 nt, Human
ucacugcaaccuccaccuuccggg

SEQ ID NO: 1292378 - RNA, 25 nt, Human
ucacugcaaccuccaccuuccgggu

SEQ ID NO: 1292379 - RNA, 18 nt, Human
ucaggaagcugagguaag

SEQ ID NO: 1292380 - RNA, 23 nt, Human
uccagccugggagacagagcgag

SEQ ID NO: 1292381 - RNA, 24 nt, Human
uccagccugggagacagagcgaga

SEQ ID NO: 1292382 - RNA, 23 nt, Human
uccaucucaaaaaaaaaaaaaaa

SEQ ID NO: 1292383 - RNA, 19 nt, Human
uccugaguagcuaggauua

SEQ ID NO: 1292384 - RNA, 24 nt, Human
uccugaguagcuaggauuacaggc

SEQ ID NO: 1292385 - RNA, 24 nt, Human
ucgcuuuaacccgggaggcggagg

SEQ ID NO: 1292386 - RNA, 23 nt, Human
ucucacucuguugccuaggcugg

SEQ ID NO: 1292387 - RNA, 24 nt, Human
ucucacucuguugccuaggcugga

SEQ ID NO: 1292388 - RNA, 21 nt, Human
ucucuacuaaaaacacaaaaa

SEQ ID NO: 1292389 - RNA, 24 nt, Human
ucuguugccuaggcuggaaugcaa

SEQ ID NO: 1292390 - RNA, 18 nt, Human
ucuucuucuuuuuuuuuu

SEQ ID NO: 1292391 - RNA, 24 nt, Human
ucuuuaguagagacgggguuucac

SEQ ID NO: 1292392 - RNA, 19 nt, Human
ucuuucuucuucuucuucu

SEQ ID NO: 1292393 - RNA, 18 nt, Human
ucuuuuuuuuuuuuuuuu

SEQ ID NO: 1292394 - RNA, 19 nt, Human
ucuuuuuuuuuuuuuuuug

SEQ ID NO: 1292395 - RNA, 22 nt, Human
ugagauggagucucacucuguu

SEQ ID NO: 1292396 - RNA, 22 nt, Human
ugagccgagauugugccaccgc

SEQ ID NO: 1292397 - RNA, 22 nt, Human
ugcaucauuucuuucuucuucu

SEQ ID NO: 1292398 - RNA, 24 nt, Human
ugccuaggcuggaaugcaauggug

SEQ ID NO: 1292399 - RNA, 23 nt, Human
ugccucagccuccugaguagcua

SEQ ID NO: 1292400 - RNA, 24 nt, Human
ugccucagccuccugaguagcuag

SEQ ID NO: 1292401 - RNA, 24 nt, Human
uggaaugcaaugguguaaucucgg

SEQ ID NO: 1292402 - RNA, 22 nt, Human
uggcaugcuccuguaaucccag

SEQ ID NO: 1292403 - RNA, 24 nt, Human
uggccaacauggcaaaacucuguc

SEQ ID NO: 1292404 - RNA, 25 nt, Human
ugggggaacagggcagaaccaaacu

SEQ ID NO: 1292405 - RNA, 24 nt, Human
uggucaggcugguuuugaacuccu

SEQ ID NO: 1292406 - RNA, 24 nt, Human
uguggcaugcuccuguaaucccag

SEQ ID NO: 1292407 - RNA, 22 nt, Human
uuagcugggucuuguggcaugc

SEQ ID NO: 1292408 - RNA, 18 nt, Human
uuaguagagacgggguuu

SEQ ID NO: 1292409 - RNA, 22 nt, Human
uuaguagagacgggguuucacc

SEQ ID NO: 1292410 - RNA, 24 nt, Human
uuaguagagacgggguuucaccau

SEQ ID NO: 1292411 - RNA, 23 nt, Human
uuccagugauucucuugccucag

SEQ ID NO: 1292412 - RNA, 18 nt, Human
uugcagugagccgagauu

SEQ ID NO: 1292413 - RNA, 19 nt, Human
uugcagugagccgagauug

SEQ ID NO: 1292414 - RNA, 22 nt, Human
uugcagugagccgagauugugc

SEQ ID NO: 1292415 - RNA, 18 nt, Human
uugccuaggcuggaaugc

SEQ ID NO: 1292416 - RNA, 23 nt, Human
uuguggcaugcuccuguaauccc

SEQ ID NO: 1292417 - RNA, 24 nt, Human
uuucaccauguuggucaggcuggu

SEQ ID NO: 1292418 - RNA, 21 nt, Human
uuuugaacuccuggccaacau

SEQ ID NO: 1292419 - RNA, 20 nt, Human
uuuuuauaucuuuaguagag

SEQ ID NO: 1292420 - RNA, 26 nt, Human
uuuuuuuuuuuugagauggagucuca

SEQ ID NO: 1292421 - RNA, 22 nt, Human
uuuuuuuuuuuuuugagaugga

SEQ ID NO: 1292422 - RNA, 26 nt, Human
aaaaaaaaaaaauaauaaccgcagaa

SEQ ID NO: 1292423 - RNA, 19 nt, Human
aaaaagaccaggacaugaa

SEQ ID NO: 1292424 - RNA, 22 nt, Human
aaaaagugcuauuuaaaaaugc

SEQ ID NO: 1292425 - RNA, 24 nt, Human
aaaagaccaggacaugaaagggaa

SEQ ID NO: 1292426 - RNA, 21 nt, Human
aaagacucucgaaucuaagca

SEQ ID NO: 1292427 - RNA, 20 nt, Human
aaaugucccucuggggcucc

SEQ ID NO: 1292428 - RNA, 21 nt, Human
aaauuacaacugacauuuuga

SEQ ID NO: 1292429 - RNA, 18 nt, Human
aagaccuuuuuuuuucuu

SEQ ID NO: 1292430 - RNA, 18 nt, Human
aagccugcagcuaucagg

SEQ ID NO: 1292431 - RNA, 21 nt, Human
aaggcaacuggaaagucaagg

SEQ ID NO: 1292432 - RNA, 24 nt, Human
aaggggaaugacaaucucuguuug

SEQ ID NO: 1292433 - RNA, 21 nt, Human
acaacugaacaaagccaacac

SEQ ID NO: 1292434 - RNA, 21 nt, Human
accgcagaaauuccacaccac

SEQ ID NO: 1292435 - RNA, 19 nt, Human
acuggaaggaccugucagu

SEQ ID NO: 1292436 - RNA, 19 nt, Human
agaccaggacaugaaaggg

SEQ ID NO: 1292437 - RNA, 20 nt, Human
aggaagacuggagccugguu

SEQ ID NO: 1292438 - RNA, 18 nt, Human
agguaagaaaggggcagg

SEQ ID NO: 1292439 - RNA, 21 nt, Human
agugugaaaguaagcaaggga

SEQ ID NO: 1292440 - RNA, 26 nt, Human
aguuuuguguuuuguuucuguuuuua

SEQ ID NO: 1292441 - RNA, 22 nt, Human
auucuacugcauguuggaauga

SEQ ID NO: 1292442 - RNA, 20 nt, Human
cacggugcgggaagcagggc

SEQ ID NO: 1292443 - RNA, 18 nt, Human
caggaaagacccacggug

SEQ ID NO: 1292444 - RNA, 23 nt, Human
caguauacaaacugucacagaau

SEQ ID NO: 1292445 - RNA, 21 nt, Human
ccacaccacuaacaaaaagug

SEQ ID NO: 1292446 - RNA, 23 nt, Human
ccacauugauuuccugcugagga

SEQ ID NO: 1292447 - RNA, 22 nt, Human
ccucauucuacugcauguugga

SEQ ID NO: 1292448 - RNA, 24 nt, Human
ccucuauugcuuacgcccucuuua

SEQ ID NO: 1292449 - RNA, 21 nt, Human
ccuguggccagcaugcucucu

SEQ ID NO: 1292450 - RNA, 21 nt, Human
cucuggggcuccacauugauu

SEQ ID NO: 1292451 - RNA, 24 nt, Human
cugcagugugaaaguaagcaaggg

SEQ ID NO: 1292452 - RNA, 23 nt, Human
gaccaagugcacugugaaaacaa

SEQ ID NO: 1292453 - RNA, 18 nt, Human
gcaaaaaaaaaaaaaaau

SEQ ID NO: 1292454 - RNA, 19 nt, Human
gcgggaagcagggcugcac

SEQ ID NO: 1292455 - RNA, 20 nt, Human
ggaagcagggcugcacuggg

SEQ ID NO: 1292456 - RNA, 19 nt, Human
gggcaggguuacugugaga

SEQ ID NO: 1292457 - RNA, 18 nt, Human
gugcgggaagcagggcug

SEQ ID NO: 1292458 - RNA, 19 nt, Human
guguguguagucuggaagg

SEQ ID NO: 1292459 - RNA, 21 nt, Human
guucacaagcagcuccucuca

SEQ ID NO: 1292460 - RNA, 19 nt, Human
uaaccgcagaaauuccaca

SEQ ID NO: 1292461 - RNA, 21 nt, Human
uaaccgcagaaauuccacacc

SEQ ID NO: 1292462 - RNA, 22 nt, Human
uaaccgcagaaauuccacacca

SEQ ID NO: 1292463 - RNA, 23 nt, Human
uagaaacaacugaacaaagccaa

SEQ ID NO: 1292464 - RNA, 23 nt, Human
uagaaacaacugaacaaagccaa

SEQ ID NO: 1292465 - RNA, 27 nt, Human
ucaucuguugcaaaaaaaaaaaaaaaa

SEQ ID NO: 1292466 - RNA, 24 nt, Human
uccacaccacuaacaaaaagugcu

SEQ ID NO: 1292467 - RNA, 26 nt, Human
ucccucuugccccugucaggggggcc

SEQ ID NO: 1292468 - RNA, 21 nt, Human
ucuacgugaaagcuuuucuua

SEQ ID NO: 1292469 - RNA, 18 nt, Human
ucucuaggcagacugauu

SEQ ID NO: 1292470 - RNA, 19 nt, Human
ucugucuuguccuccuucc

SEQ ID NO: 1292471 - RNA, 19 nt, Human
ugaaaauguacaguuacua

SEQ ID NO: 1292472 - RNA, 21 nt, Human
ugaaagggaaugauuuuuuug

SEQ ID NO: 1292473 - RNA, 20 nt, Human
ugaaaguaagcaagggacaa

SEQ ID NO: 1292474 - RNA, 18 nt, Human
ugacauggccaagacagu

SEQ ID NO: 1292475 - RNA, 19 nt, Human
ugacauggccaagacaguc

SEQ ID NO: 1292476 - RNA, 21 nt, Human
ugagauaaaaugucccucugg

SEQ ID NO: 1292477 - RNA, 23 nt, Human
ugagauaaaaugucccucugggg

SEQ ID NO: 1292478 - RNA, 30 nt, Human
ugcaaaaaaaaaaaaaaauaauaaccgcaa

SEQ ID NO: 1292479 - RNA, 21 nt, Human
ugcacugugaaaacaaaaccc

SEQ ID NO: 1292480 - RNA, 19 nt, Human
ugggacuguggagggagac

SEQ ID NO: 1292481 - RNA, 22 nt, Human
ugguuucuaaaguugagcuucu

SEQ ID NO: 1292482 - RNA, 26 nt, Human
uguccuauccugaggcugcaaucuca

SEQ ID NO: 1292483 - RNA, 24 nt, Human
ugucuuguccuccuucccccuuuc

SEQ ID NO: 1292484 - RNA, 23 nt, Human
ugugaaaguaagcaagggacaaa

SEQ ID NO: 1292485 - RNA, 19 nt, Human
uguguuuuguuucuguuuu

SEQ ID NO: 1292486 - RNA, 21 nt, Human
uguugcaaaaaaaaaaaaaaa

SEQ ID NO: 1292487 - RNA, 18 nt, Human
uguuggaaugaacucugg

SEQ ID NO: 1292488 - RNA, 18 nt, Human
uguuuuguuucuguuuuu

SEQ ID NO: 1292489 - RNA, 19 nt, Human
uuuagagucccucuugccc

SEQ ID NO: 1292490 - RNA, 19 nt, Human
uuugaaguuuccacuugua

SEQ ID NO: 1292491 - RNA, 21 nt, Human
uuugcagacuuugacgucuac

SEQ ID NO: 1292492 - RNA, 21 nt, Human
uuuuaugaucgcuuauguaau

SEQ ID NO: 1292493 - RNA, 21 nt, Human
aaacagacacuuccagacaca

SEQ ID NO: 1292494 - RNA, 20 nt, Human
cacccaugaggacuguuuca

SEQ ID NO: 1292495 - RNA, 18 nt, Human
cacucuucuuccuucugg

SEQ ID NO: 1292496 - RNA, 19 nt, Human
cagaaaguuccuaaagcug

SEQ ID NO: 1292497 - RNA, 20 nt, Human
cagaaaguuccuaaagcuga

SEQ ID NO: 1292498 - RNA, 20 nt, Human
cucuucuuccuucuggcuuu

SEQ ID NO: 1292499 - RNA, 24 nt, Human
gcugcuggcccauuggagcaaggg

SEQ ID NO: 1292500 - RNA, 23 nt, Human
guguucccucuucccuccccgcu

SEQ ID NO: 1292501 - RNA, 18 nt, Human
uauuucuucucugcuacu

SEQ ID NO: 1292502 - RNA, 21 nt, Human
ucaguccccuuuuccaguguc

SEQ ID NO: 1292503 - RNA, 18 nt, Human
uccagugauguggagcug

SEQ ID NO: 1292504 - RNA, 21 nt, Human
uccagugucuccuuccacccc

SEQ ID NO: 1292505 - RNA, 22 nt, Human
uccccugugaguggaauuccag

SEQ ID NO: 1292506 - RNA, 21 nt, Human
uggaauuccagaaacagacac

SEQ ID NO: 1292507 - RNA, 25 nt, Human
uuccuucuggcuuucgguuuggauu

SEQ ID NO: 1292508 - RNA, 20 nt, Human
uuggauuggcgcauggaggc

SEQ ID NO: 1292509 - RNA, 24 nt, Human
aggagcguccgcagagcccagagc

SEQ ID NO: 1292510 - RNA, 24 nt, Human
ccagaggucuccugacaugcugua

SEQ ID NO: 1292511 - RNA, 24 nt, Human
gaaggagcguccgcagagcccaga

SEQ ID NO: 1292512 - RNA, 20 nt, Human
ggaaggagcguccgcagagc

SEQ ID NO: 1292513 - RNA, 18 nt, Human
uccgcagagcccagagcc

SEQ ID NO: 1292514 - RNA, 23 nt, Human
uuccagaggucuccugacaugcu

SEQ ID NO: 1292515 - RNA, 18 nt, Human
ucaagacacccugcuuua

SEQ ID NO: 1292516 - RNA, 18 nt, Human
ugacuucaagacacccug

SEQ ID NO: 1292517 - RNA, 20 nt, Human
aaaagguccagagacgaaaa

SEQ ID NO: 1292518 - RNA, 18 nt, Human
ccucccaggcgccaggau

SEQ ID NO: 1292519 - RNA, 23 nt, Human
ccucuugccccgaccucccaggc

SEQ ID NO: 1292520 - RNA, 20 nt, Human
cggaauuucuggguucacac

SEQ ID NO: 1292521 - RNA, 19 nt, Human
cuggguucacacuuuuugc

SEQ ID NO: 1292522 - RNA, 18 nt, Human
cuucacgucuuccugccu

SEQ ID NO: 1292523 - RNA, 19 nt, Human
cuugccccgaccucccagg

SEQ ID NO: 1292524 - RNA, 20 nt, Human
cuuggaagcccccuuccugc

SEQ ID NO: 1292525 - RNA, 19 nt, Human
gaagcuccuucuguuucuu

SEQ ID NO: 1292526 - RNA, 18 nt, Human
uaaguugagcaggcugau

SEQ ID NO: 1292527 - RNA, 23 nt, Human
uauaaaacuaagcuaugcccaga

SEQ ID NO: 1292528 - RNA, 21 nt, Human
ucacgcgcgcguccucaaccu

SEQ ID NO: 1292529 - RNA, 18 nt, Human
uccagagacgaaaacuaa

SEQ ID NO: 1292530 - RNA, 24 nt, Human
uccauaaaauguauaaaacuaagc

SEQ ID NO: 1292531 - RNA, 23 nt, Human
ucccaggcgccaggauuacaggc

SEQ ID NO: 1292532 - RNA, 26 nt, Human
uccugaggcugucacgcgcgcguccu

SEQ ID NO: 1292533 - RNA, 18 nt, Human
ugaggcugucacgcgcgc

SEQ ID NO: 1292534 - RNA, 22 nt, Human
ugccccgaccucccaggcgcca

SEQ ID NO: 1292535 - RNA, 23 nt, Human
ugccccgaccucccaggcgccag

SEQ ID NO: 1292536 - RNA, 24 nt, Human
ugccccgccuuuccaaacagaacu

SEQ ID NO: 1292537 - RNA, 22 nt, Human
ugggcacaugucgugaggacuu

SEQ ID NO: 1292538 - RNA, 19 nt, Human
ugucgugaggacuuccuga

SEQ ID NO: 1292539 - RNA, 22 nt, Human
uuuuugcucucaacauugggaa

SEQ ID NO: 1292540 - RNA, 23 nt, Human
aaaaagcaugaaaauaaagagaa

SEQ ID NO: 1292541 - RNA, 24 nt, Human
aaagagaaaaaaggagaggcacag

SEQ ID NO: 1292542 - RNA, 19 nt, Human
aaagugcugggauuacagg

SEQ ID NO: 1292543 - RNA, 24 nt, Human
aaagugcugggauuacaggcacga

SEQ ID NO: 1292544 - RNA, 21 nt, Human
aagaauaaguagggugggugg

SEQ ID NO: 1292545 - RNA, 18 nt, Human
aagugcugggauuacagg

SEQ ID NO: 1292546 - RNA, 19 nt, Human
aagugcugggauuacaggc

SEQ ID NO: 1292547 - RNA, 26 nt, Human
aagugcugggauuacaggcacgagcc

SEQ ID NO: 1292548 - RNA, 24 nt, Human
accauauugggcgggcuggucucg

SEQ ID NO: 1292549 - RNA, 25 nt, Human
acccgccucagccucccaaagugcu

SEQ ID NO: 1292550 - RNA, 18 nt, Human
acgggguuucaccauauu

SEQ ID NO: 1292551 - RNA, 20 nt, Human
acgggguuucaccauauugg

SEQ ID NO: 1292552 - RNA, 25 nt, Human
acucugucgcccaggcuggagugca

SEQ ID NO: 1292553 - RNA, 25 nt, Human
aggcuggagugcaguggugcgaucu

SEQ ID NO: 1292554 - RNA, 19 nt, Human
aguagcugggauuacaggc

SEQ ID NO: 1292555 - RNA, 21 nt, Human
aguagcugggauuacaggcau

SEQ ID NO: 1292556 - RNA, 24 nt, Human
agugauucuccugccucagccucu

SEQ ID NO: 1292557 - RNA, 21 nt, Human
agugcaguggugcgaucucag

SEQ ID NO: 1292558 - RNA, 23 nt, Human
agugcaguggugcgaucucagcu

SEQ ID NO: 1292559 - RNA, 24 nt, Human
agugcaguggugcgaucucagcuc

SEQ ID NO: 1292560 - RNA, 18 nt, Human
agugcugggauuacaggc

SEQ ID NO: 1292561 - RNA, 24 nt, Human
aguggugcgaucucagcucacugc

SEQ ID NO: 1292562 - RNA, 18 nt, Human
agugucuaaccaggaagg

SEQ ID NO: 1292563 - RNA, 24 nt, Human
augauccacccgccucagccuccc

SEQ ID NO: 1292564 - RNA, 21 nt, Human
caaaggcacagaguacaacug

SEQ ID NO: 1292565 - RNA, 23 nt, Human
caaagugcugggauuacaggcac

SEQ ID NO: 1292566 - RNA, 24 nt, Human
caaagugcugggauuacaggcacg

SEQ ID NO: 1292567 - RNA, 25 nt, Human
caaauggugccuugcaccugacuca

SEQ ID NO: 1292568 - RNA, 20 nt, Human
caagugauucuccugccuca

SEQ ID NO: 1292569 - RNA, 22 nt, Human
caagugauucuccugccucagc

SEQ ID NO: 1292570 - RNA, 24 nt, Human
caccauauugggcgggcuggucuc

SEQ ID NO: 1292571 - RNA, 23 nt, Human
caccaugccuggcuaauuuuugu

SEQ ID NO: 1292572 - RNA, 23 nt, Human
cacccgccucagccucccaaagu

SEQ ID NO: 1292573 - RNA, 22 nt, Human
cacucugucgcccaggcuggag

SEQ ID NO: 1292574 - RNA, 22 nt, Human
cacugcaaccucugccucaggg

SEQ ID NO: 1292575 - RNA, 24 nt, Human
caggagagacgggguuucaccaua

SEQ ID NO: 1292576 - RNA, 19 nt, Human
cagggcccguuuuugaauu

SEQ ID NO: 1292577 - RNA, 24 nt, Human
caugauccacccgccucagccucc

SEQ ID NO: 1292578 - RNA, 20 nt, Human
caugccccuccucucuagga

SEQ ID NO: 1292579 - RNA, 22 nt, Human
cauggacagggcccguuuuuga

SEQ ID NO: 1292580 - RNA, 19 nt, Human
cauguuggggaaacagguu

SEQ ID NO: 1292581 - RNA, 19 nt, Human
ccaaagugcugggauuaca

SEQ ID NO: 1292582 - RNA, 23 nt, Human
ccaaagugcugggauuacaggca

SEQ ID NO: 1292583 - RNA, 26 nt, Human
ccacccgccucagccucccaaagugc

SEQ ID NO: 1292584 - RNA, 19 nt, Human
ccaccgcgccuggccccgc

SEQ ID NO: 1292585 - RNA, 19 nt, Human
ccaccgcgccuggccccgc

SEQ ID NO: 1292586 - RNA, 20 nt, Human
ccaccgcgccuggccccgcu

SEQ ID NO: 1292587 - RNA, 23 nt, Human
ccagcauguccuuuaaaucugga

SEQ ID NO: 1292588 - RNA, 21 nt, Human
ccaggaaggacagcgaggaca

SEQ ID NO: 1292589 - RNA, 24 nt, Human
cccaaagugcugggauuacaggca

SEQ ID NO: 1292590 - RNA, 24 nt, Human
ccgccucagccucccaaagugcug

SEQ ID NO: 1292591 - RNA, 20 nt, Human
ccugaccucaugauccaccc

SEQ ID NO: 1292592 - RNA, 19 nt, Human
cgaggacacugauaaaaag

SEQ ID NO: 1292593 - RNA, 24 nt, Human
cgcccaggcuggagugcaguggug

SEQ ID NO: 1292594 - RNA, 24 nt, Human
cgccucagccucccaaagugcugg

SEQ ID NO: 1292595 - RNA, 20 nt, Human
cgcgccuggccccgcuuuca

SEQ ID NO: 1292596 - RNA, 20 nt, Human
cgggguuucaccauauuggg

SEQ ID NO: 1292597 - RNA, 18 nt, Human
cggucuggaacauggcug

SEQ ID NO: 1292598 - RNA, 22 nt, Human
cuaguagcugggauuacaggca

SEQ ID NO: 1292599 - RNA, 24 nt, Human
cucacucugucgcccaggcuggag

SEQ ID NO: 1292600 - RNA, 23 nt, Human
cucacugcaaccucugccucagg

SEQ ID NO: 1292601 - RNA, 24 nt, Human
cucagccucucuaguagcugggau

SEQ ID NO: 1292602 - RNA, 24 nt, Human
cuccugaccucaugauccacccgc

SEQ ID NO: 1292603 - RNA, 23 nt, Human
cucuaguagcugggauuacaggc

SEQ ID NO: 1292604 - RNA, 24 nt, Human
cucuaguagcugggauuacaggca

SEQ ID NO: 1292605 - RNA, 23 nt, Human
cugcaaccucugccucagggauu

SEQ ID NO: 1292606 - RNA, 23 nt, Human
cugccucagccucucuaguagcu

SEQ ID NO: 1292607 - RNA, 19 nt, Human
cugccucagggauucaagu

SEQ ID NO: 1292608 - RNA, 23 nt, Human
cugcugggcacccagcauguccu

SEQ ID NO: 1292609 - RNA, 22 nt, Human
gaccucaugauccacccgccuc

SEQ ID NO: 1292610 - RNA, 25 nt, Human
gagacgggguuucaccauauugggc

SEQ ID NO: 1292611 - RNA, 18 nt, Human
gauuacaggcacgagcca

SEQ ID NO: 1292612 - RNA, 18 nt, Human
gauuacaggcaugcgcca

SEQ ID NO: 1292613 - RNA, 24 nt, Human
gauuacaggcaugcgccaccaugc

SEQ ID NO: 1292614 - RNA, 19 nt, Human
gcccaggcuggagugcagu

SEQ ID NO: 1292615 - RNA, 20 nt, Human
gcccaggcuggagugcagug

SEQ ID NO: 1292616 - RNA, 23 nt, Human
gcccaggcuggagugcaguggug

SEQ ID NO: 1292617 - RNA, 23 nt, Human
gcuggucucgaacuccugaccuc

SEQ ID NO: 1292618 - RNA, 22 nt, Human
ggaagugcguuuuccaugcccc

SEQ ID NO: 1292619 - RNA, 22 nt, Human
ggauuacaggcacgagccaccg

SEQ ID NO: 1292620 - RNA, 24 nt, Human
ggauuacaggcaugcgccaccaug

SEQ ID NO: 1292621 - RNA, 23 nt, Human
ggauucaagugauucuccugccu

SEQ ID NO: 1292622 - RNA, 24 nt, Human
ggcuggucucgaacuccugaccuc

SEQ ID NO: 1292623 - RNA, 23 nt, Human
gggauucaagugauucuccugcc

SEQ ID NO: 1292624 - RNA, 23 nt, Human
gggcgggcuggucucgaacuccu

SEQ ID NO: 1292625 - RNA, 18 nt, Human
gggguuucaccauauugg

SEQ ID NO: 1292626 - RNA, 19 nt, Human
ggucucgaacuccugaccu

SEQ ID NO: 1292627 - RNA, 20 nt, Human
guagcugggauuacaggcau

SEQ ID NO: 1292628 - RNA, 21 nt, Human
gugaagacaaacugaagaaua

SEQ ID NO: 1292629 - RNA, 24 nt, Human
gugauucuccugccucagccucuc

SEQ ID NO: 1292630 - RNA, 21 nt, Human
uaauucacagcaauuuuccuu

SEQ ID NO: 1292631 - RNA, 22 nt, Human
uacaggcacgagccaccgcgcc

SEQ ID NO: 1292632 - RNA, 22 nt, Human
uacaggcaugcgccaccaugcc

SEQ ID NO: 1292633 - RNA, 27 nt, Human
uaguagcugggauuacaggcaugcgcc

SEQ ID NO: 1292634 - RNA, 22 nt, Human
uauacuuuggaguauagaauug

SEQ ID NO: 1292635 - RNA, 19 nt, Human
ucaagugauucuccugccu

SEQ ID NO: 1292636 - RNA, 24 nt, Human
ucacucugucgcccaggcuggagu

SEQ ID NO: 1292637 - RNA, 22 nt, Human
ucacugcaaccucugccucagg

SEQ ID NO: 1292638 - RNA, 23 nt, Human
ucacugcaaccucugccucaggg

SEQ ID NO: 1292639 - RNA, 24 nt, Human
ucaggagagacgggguuucaccau

SEQ ID NO: 1292640 - RNA, 18 nt, Human
uccaagaugcauuuggcu

SEQ ID NO: 1292641 - RNA, 21 nt, Human
uccacccgccucagccuccca

SEQ ID NO: 1292642 - RNA, 25 nt, Human
uccaugaucauaaaaaauaacuaga

SEQ ID NO: 1292643 - RNA, 24 nt, Human
ucccaaagugcugggauuacaggc

SEQ ID NO: 1292644 - RNA, 22 nt, Human
ucgcccaggcuggagugcagug

SEQ ID NO: 1292645 - RNA, 24 nt, Human
ucuaguagcugggauuacaggcau

SEQ ID NO: 1292646 - RNA, 23 nt, Human
ucucacucugucgcccaggcugg

SEQ ID NO: 1292647 - RNA, 24 nt, Human
ucucacucugucgcccaggcugga

SEQ ID NO: 1292648 - RNA, 26 nt, Human
ucucacucugucgcccaggcuggagu

SEQ ID NO: 1292649 - RNA, 27 nt, Human
ucucacucugucgcccaggcuggagug

SEQ ID NO: 1292650 - RNA, 25 nt, Human
ucuccugccucagccucucuaguag

SEQ ID NO: 1292651 - RNA, 19 nt, Human
ucucgaacuccugaccuca

SEQ ID NO: 1292652 - RNA, 24 nt, Human
ucucuaguagcugggauuacaggc

SEQ ID NO: 1292653 - RNA, 24 nt, Human
ucugucgcccaggcuggagugcag

SEQ ID NO: 1292654 - RNA, 23 nt, Human
ugaccucaugauccacccgccuc

SEQ ID NO: 1292655 - RNA, 18 nt, Human
ugagacaaagucucacuc

SEQ ID NO: 1292656 - RNA, 22 nt, Human
ugagacaaagucucacucuguc

SEQ ID NO: 1292657 - RNA, 21 nt, Human
ugagauaggucucuggaaguu

SEQ ID NO: 1292658 - RNA, 20 nt, Human
ugauucuccugccucagccu

SEQ ID NO: 1292659 - RNA, 24 nt, Human
ugccucagccucucuaguagcugg

SEQ ID NO: 1292660 - RNA, 22 nt, Human
ugccucagggauucaagugauu

SEQ ID NO: 1292661 - RNA, 20 nt, Human
ugccuugcaccugacucaaa

SEQ ID NO: 1292662 - RNA, 24 nt, Human
ugcguuuuccaugccccuccucuc

SEQ ID NO: 1292663 - RNA, 22 nt, Human
ugcugccugcuuugaggucacu

SEQ ID NO: 1292664 - RNA, 19 nt, Human
ugcugggauuacaggcacg

SEQ ID NO: 1292665 - RNA, 24 nt, Human
ugcugggauuacaggcacgagcca

SEQ ID NO: 1292666 - RNA, 19 nt, Human
uggaacauggcuggcgucc

SEQ ID NO: 1292667 - RNA, 23 nt, Human
uggagugcaguggugcgaucuca

SEQ ID NO: 1292668 - RNA, 24 nt, Human
uggagugcaguggugcgaucucag

SEQ ID NO: 1292669 - RNA, 21 nt, Human
ugggauuacaggcacgagcca

SEQ ID NO: 1292670 - RNA, 22 nt, Human
ugggauuacaggcacgagccac

SEQ ID NO: 1292671 - RNA, 23 nt, Human
ugggauuacaggcacgagccacc

SEQ ID NO: 1292672 - RNA, 24 nt, Human
ugggauuacaggcacgagccaccg

SEQ ID NO: 1292673 - RNA, 24 nt, Human
ugggauuacaggcacgagccaccg

SEQ ID NO: 1292674 - RNA, 18 nt, Human
ugggauuacaggcaugcg

SEQ ID NO: 1292675 - RNA, 21 nt, Human
ugggauuacaggcaugcgcca

SEQ ID NO: 1292676 - RNA, 22 nt, Human
ugggauuacaggcaugcgccac

SEQ ID NO: 1292677 - RNA, 24 nt, Human
ugggauuacaggcaugcgccacca

SEQ ID NO: 1292678 - RNA, 24 nt, Human
ugggcgggcuggucucgaacuccu

SEQ ID NO: 1292679 - RNA, 24 nt, Human
uggugcgaucucagcucacugcaa

SEQ ID NO: 1292680 - RNA, 18 nt, Human
uguuuuuuuuuuucagga

SEQ ID NO: 1292681 - RNA, 22 nt, Human
uuacauuuccuuuuauguuucu

SEQ ID NO: 1292682 - RNA, 22 nt, Human
uuaggagacuucugacguacgg

SEQ ID NO: 1292683 - RNA, 21 nt, Human
uucaagugauucuccugccuc

SEQ ID NO: 1292684 - RNA, 23 nt, Human
uucaagugauucuccugccucag

SEQ ID NO: 1292685 - RNA, 24 nt, Human
uucaagugauucuccugccucagc

SEQ ID NO: 1292686 - RNA, 20 nt, Human
uucucaguucuggccucauc

SEQ ID NO: 1292687 - RNA, 22 nt, Human
uuucuuuggacacaugauccuu

SEQ ID NO: 1292688 - RNA, 22 nt, Human
uuugaggucacuugaaacagca

SEQ ID NO: 1292689 - RNA, 18 nt, Human
uuuguuuguuuuuugguc

SEQ ID NO: 1292690 - RNA, 31 nt, Human
uuuuuuuuuuucaggagagacgggguuucaa

SEQ ID NO: 1292691 - RNA, 24 nt, Human
agauggccagcaaguguguuccgc

SEQ ID NO: 1292692 - RNA, 23 nt, Human
agguucuggagauuguuggaacc

SEQ ID NO: 1292693 - RNA, 20 nt, Human
cacuugucgccugcccuuag

SEQ ID NO: 1292694 - RNA, 27 nt, Human
cagaucccugagguagagccuggccaa

SEQ ID NO: 1292695 - RNA, 19 nt, Human
cagcaaguguguuccgccc

SEQ ID NO: 1292696 - RNA, 24 nt, Human
cccucagcucugacugugaacacu

SEQ ID NO: 1292697 - RNA, 26 nt, Human
ccgcccuguucuagagcagaggcugg

SEQ ID NO: 1292698 - RNA, 23 nt, Human
cugacggccaaagcugugccagc

SEQ ID NO: 1292699 - RNA, 23 nt, Human
cugcugaaugugucccugucucu

SEQ ID NO: 1292700 - RNA, 19 nt, Human
ggacaugguucuguuagag

SEQ ID NO: 1292701 - RNA, 19 nt, Human
guagauuaugcugcucuca

SEQ ID NO: 1292702 - RNA, 21 nt, Human
gucgccugcccuuagugauag

SEQ ID NO: 1292703 - RNA, 20 nt, Human
ucccugagguagagccuggc

SEQ ID NO: 1292704 - RNA, 21 nt, Human
ucucuguagauuaugcugcuc

SEQ ID NO: 1292705 - RNA, 18 nt, Human
ugaaguccuggacauggu

SEQ ID NO: 1292706 - RNA, 19 nt, Human
ugacugugaacacugagcc

SEQ ID NO: 1292707 - RNA, 21 nt, Human
ugacugugaacacugagccuc

SEQ ID NO: 1292708 - RNA, 18 nt, Human
ugauagugcugauaggag

SEQ ID NO: 1292709 - RNA, 21 nt, Human
ugcccagaaggcucuccugac

SEQ ID NO: 1292710 - RNA, 22 nt, Human
ugcucucagaucccugagguag

SEQ ID NO: 1292711 - RNA, 18 nt, Human
uggaacagcccauuucuc

SEQ ID NO: 1292712 - RNA, 23 nt, Human
ugucucucuguagauuaugcugc

SEQ ID NO: 1292713 - RNA, 24 nt, Human
uuagugauagugcugauaggaggu

SEQ ID NO: 1292714 - RNA, 18 nt, Human
uucaagaaugucuguuga

SEQ ID NO: 1292715 - RNA, 19 nt, Human
acagacagaagagugcucu

SEQ ID NO: 1292716 - RNA, 23 nt, Human
accaagagacaaccccuaacccc

SEQ ID NO: 1292717 - RNA, 21 nt, Human
agacaggccacaggggucccc

SEQ ID NO: 1292718 - RNA, 20 nt, Human
agagacaaccccuaaccccc

SEQ ID NO: 1292719 - RNA, 21 nt, Human
agagacaaccccuaaccccca

SEQ ID NO: 1292720 - RNA, 21 nt, Human
agagcagcugagacaucuaca

SEQ ID NO: 1292721 - RNA, 19 nt, Human
agcuagggauggugcaagc

SEQ ID NO: 1292722 - RNA, 21 nt, Human
aggcuuccagucuugggcucu

SEQ ID NO: 1292723 - RNA, 19 nt, Human
agugcucugcgucaggaac

SEQ ID NO: 1292724 - RNA, 23 nt, Human
agugggccacccacgcucugaga

SEQ ID NO: 1292725 - RNA, 24 nt, Human
agugggugagugcucugcgucagg

SEQ ID NO: 1292726 - RNA, 18 nt, Human
cagugcccacugccgcuc

SEQ ID NO: 1292727 - RNA, 18 nt, Human
caugcccagccccacacc

SEQ ID NO: 1292728 - RNA, 26 nt, Human
ccacaacacugggugccuguaccccu

SEQ ID NO: 1292729 - RNA, 20 nt, Human
ccccacaccugaaaugggac

SEQ ID NO: 1292730 - RNA, 19 nt, Human
ccccagggaggguuggggg

SEQ ID NO: 1292731 - RNA, 18 nt, Human
cgcugggagggagggcuc

SEQ ID NO: 1292732 - RNA, 19 nt, Human
cuaaaaccaggccuccccu

SEQ ID NO: 1292733 - RNA, 19 nt, Human
cugaaggcuuccagucuug

SEQ ID NO: 1292734 - RNA, 18 nt, Human
gacaguauagcuugcugc

SEQ ID NO: 1292735 - RNA, 19 nt, Human
gagacaaccccuaaccccc

SEQ ID NO: 1292736 - RNA, 21 nt, Human
gagacaaccccuaacccccaa

SEQ ID NO: 1292737 - RNA, 24 nt, Human
gccaggccacaacacugggugccu

SEQ ID NO: 1292738 - RNA, 25 nt, Human
gggcucugugguuccucaaagaggu

SEQ ID NO: 1292739 - RNA, 18 nt, Human
gggcucugugguuccucc

SEQ ID NO: 1292740 - RNA, 22 nt, Human
gggguccccagggaggguuggg

SEQ ID NO: 1292741 - RNA, 19 nt, Human
gguugggggccagaagauu

SEQ ID NO: 1292742 - RNA, 21 nt, Human
uaaaaccaggccuccccuccc

SEQ ID NO: 1292743 - RNA, 28 nt, Human
uccagcaggagugaccaugcccagcccu

SEQ ID NO: 1292744 - RNA, 22 nt, Human
ucccuuguagagcagcugagac

SEQ ID NO: 1292745 - RNA, 22 nt, Human
ucuacagacagaagagugcucu

SEQ ID NO: 1292746 - RNA, 24 nt, Human
ucuagcaacgugaugcuuacaggg

SEQ ID NO: 1292747 - RNA, 23 nt, Human
ucuggcaugagauuuucuucuag

SEQ ID NO: 1292748 - RNA, 24 nt, Human
ucuggugagacaggccacaggggu

SEQ ID NO: 1292749 - RNA, 24 nt, Human
ugaaaugggacucccuuguagagc

SEQ ID NO: 1292750 - RNA, 22 nt, Human
ugagacaggccacagggguccc

SEQ ID NO: 1292751 - RNA, 21 nt, Human
ugagaggccgguggugccagg

SEQ ID NO: 1292752 - RNA, 20 nt, Human
ugagauuuucuucuagcaac

SEQ ID NO: 1292753 - RNA, 22 nt, Human
ugcaagcucuggcaugagauuu

SEQ ID NO: 1292754 - RNA, 28 nt, Human
ugcccagccccacaccugaaaugggacu

SEQ ID NO: 1292755 - RNA, 21 nt, Human
ugggagggagggcucuggaca

SEQ ID NO: 1292756 - RNA, 24 nt, Human
ugggugccuguaccccuggcucug

SEQ ID NO: 1292757 - RNA, 18 nt, Human
uuuauuacuagcaaaacc

SEQ ID NO: 1292758 - RNA, 22 nt, Human
aaacacaggucaugaagcauac

SEQ ID NO: 1292759 - RNA, 19 nt, Human
acagacagaagagugcucu

SEQ ID NO: 1292760 - RNA, 23 nt, Human
accaagagacaaccccuaacccc

SEQ ID NO: 1292761 - RNA, 21 nt, Human
agacaggccacaggggucccc

SEQ ID NO: 1292762 - RNA, 20 nt, Human
agagacaaccccuaaccccc

SEQ ID NO: 1292763 - RNA, 21 nt, Human
agagcagcugagacaucuaca

SEQ ID NO: 1292764 - RNA, 20 nt, Human
agauacaggugcccucugag

SEQ ID NO: 1292765 - RNA, 19 nt, Human
agcuagggauggugcaagc

SEQ ID NO: 1292766 - RNA, 24 nt, Human
aggaagucugugcacaggcagauc

SEQ ID NO: 1292767 - RNA, 23 nt, Human
aggcuggggagaggaaguagcug

SEQ ID NO: 1292768 - RNA, 24 nt, Human
aggcuggggagaggaaguagcugc

SEQ ID NO: 1292769 - RNA, 21 nt, Human
aggcuuccagucuugggcucu

SEQ ID NO: 1292770 - RNA, 19 nt, Human
agugcucugcgucaggaac

SEQ ID NO: 1292771 - RNA, 23 nt, Human
agugggccacccacgcucugaga

SEQ ID NO: 1292772 - RNA, 24 nt, Human
agugggugagugcucugcgucagg

SEQ ID NO: 1292773 - RNA, 23 nt, Human
auggagcuccaagaugguggcaa

SEQ ID NO: 1292774 - RNA, 22 nt, Human
cacaggcagaucugcuggugcc

SEQ ID NO: 1292775 - RNA, 19 nt, Human
cacaggucaugaagcauac

SEQ ID NO: 1292776 - RNA, 21 nt, Human
cacaggucaugaagcauaccc

SEQ ID NO: 1292777 - RNA, 26 nt, Human
caccaagagacaaccccuaaccccca

SEQ ID NO: 1292778 - RNA, 18 nt, Human
cagaagagugcucuggug

SEQ ID NO: 1292779 - RNA, 20 nt, Human
caugaagcauacccagcccc

SEQ ID NO: 1292780 - RNA, 18 nt, Human
caugcccagccccacacc

SEQ ID NO: 1292781 - RNA, 22 nt, Human
cauuacacuaugagggcaugga

SEQ ID NO: 1292782 - RNA, 26 nt, Human
ccacaacacugggugccuguaccccu

SEQ ID NO: 1292783 - RNA, 18 nt, Human
ccagaccagcuggcuggg

SEQ ID NO: 1292784 - RNA, 18 nt, Human
cccacaccugaaauggga

SEQ ID NO: 1292785 - RNA, 19 nt, Human
ccccagggaggguuggggg

SEQ ID NO: 1292786 - RNA, 24 nt, Human
ccccugaaggcacguccagggccc

SEQ ID NO: 1292787 - RNA, 21 nt, Human
cccgcagaagcaucuccccuc

SEQ ID NO: 1292788 - RNA, 24 nt, Human
cgcaggcccgcagaagcaucuccc

SEQ ID NO: 1292789 - RNA, 19 nt, Human
cuaaaaccaggccuccccu

SEQ ID NO: 1292790 - RNA, 22 nt, Human
cucugagcugccuccuggcccc

SEQ ID NO: 1292791 - RNA, 19 nt, Human
cugaaggcuuccagucuug

SEQ ID NO: 1292792 - RNA, 23 nt, Human
cugcauaacacauaugauacccu

SEQ ID NO: 1292793 - RNA, 24 nt, Human
cuggccccacaugggcagccuggc

SEQ ID NO: 1292794 - RNA, 24 nt, Human
gaagcauacccagccccugaaggc

SEQ ID NO: 1292795 - RNA, 19 nt, Human
gagacaaccccuaaccccc

SEQ ID NO: 1292796 - RNA, 21 nt, Human
gagacaaccccuaacccccaa

SEQ ID NO: 1292797 - RNA, 20 nt, Human
gagcuccaagaugguggcaa

SEQ ID NO: 1292798 - RNA, 24 nt, Human
gccaggccacaacacugggugccu

SEQ ID NO: 1292799 - RNA, 20 nt, Human
gcccaaggguuggagcccag

SEQ ID NO: 1292800 - RNA, 25 nt, Human
gggcucugugguuccucaaagaggu

SEQ ID NO: 1292801 - RNA, 22 nt, Human
gggguccccagggaggguuggg

SEQ ID NO: 1292802 - RNA, 22 nt, Human
ggguaaggcuggggagaggaag

SEQ ID NO: 1292803 - RNA, 19 nt, Human
gguugggggccagaagauu

SEQ ID NO: 1292804 - RNA, 18 nt, Human
guggccuuggccuugagg

SEQ ID NO: 1292805 - RNA, 21 nt, Human
uaaaaccaggccuccccuccc

SEQ ID NO: 1292806 - RNA, 19 nt, Human
uacccagccccugaaggca

SEQ ID NO: 1292807 - RNA, 28 nt, Human
uccagcaggagugaccaugcccagcccu

SEQ ID NO: 1292808 - RNA, 21 nt, Human
ucccagccagagucucaggac

SEQ ID NO: 1292809 - RNA, 22 nt, Human
ucccuuguagagcagcugagac

SEQ ID NO: 1292810 - RNA, 22 nt, Human
ucuacagacagaagagugcucu

SEQ ID NO: 1292811 - RNA, 24 nt, Human
ucuagcaacgugaugcuuacaggg

SEQ ID NO: 1292812 - RNA, 18 nt, Human
ucugagcacacuucucuc

SEQ ID NO: 1292813 - RNA, 23 nt, Human
ucuggcaugagauuuucuucuag

SEQ ID NO: 1292814 - RNA, 24 nt, Human
ucuggugagacaggccacaggggu

SEQ ID NO: 1292815 - RNA, 24 nt, Human
ugaaaugggacucccuuguagagc

SEQ ID NO: 1292816 - RNA, 22 nt, Human
ugagacaggccacagggguccc

SEQ ID NO: 1292817 - RNA, 21 nt, Human
ugagaggccgguggugccagg

SEQ ID NO: 1292818 - RNA, 20 nt, Human
ugagauuuucuucuagcaac

SEQ ID NO: 1292819 - RNA, 22 nt, Human
ugagcugccuccuggccccaca

SEQ ID NO: 1292820 - RNA, 18 nt, Human
ugauacccuggaagcacu

SEQ ID NO: 1292821 - RNA, 22 nt, Human
ugcaagcucuggcaugagauuu

SEQ ID NO: 1292822 - RNA, 28 nt, Human
ugcccagccccacaccugaaaugggacu

SEQ ID NO: 1292823 - RNA, 24 nt, Human
ugggugccuguaccccuggcucug

SEQ ID NO: 1292824 - RNA, 23 nt, Human
uuacauccagauacaggugcccu

SEQ ID NO: 1292825 - RNA, 22 nt, Human
acugaacaugagaaagaauccc

SEQ ID NO: 1292826 - RNA, 19 nt, Human
aggaaugggaaguccagga

SEQ ID NO: 1292827 - RNA, 22 nt, Human
cacggugccugcccaaaucccc

SEQ ID NO: 1292828 - RNA, 23 nt, Human
cacuguacugaacaugagaaaga

SEQ ID NO: 1292829 - RNA, 22 nt, Human
ccaaaaauccacuggcacagca

SEQ ID NO: 1292830 - RNA, 18 nt, Human
ccacggugccugcccaaa

SEQ ID NO: 1292831 - RNA, 22 nt, Human
ccugcccaaauccccuggccgc

SEQ ID NO: 1292832 - RNA, 23 nt, Human
cucguccccuucucggggaucca

SEQ ID NO: 1292833 - RNA, 21 nt, Human
guccccuucucggggauccac

SEQ ID NO: 1292834 - RNA, 27 nt, Human
uaccauggaaucuguagaaguacagga

SEQ ID NO: 1292835 - RNA, 21 nt, Human
uccccuggccgccgcccgacc

SEQ ID NO: 1292836 - RNA, 24 nt, Human
uccccuggccgccgcccgaccccc

SEQ ID NO: 1292837 - RNA, 22 nt, Human
ugagaaagaaucccaaaaaucc

SEQ ID NO: 1292838 - RNA, 27 nt, Human
ugagaaagaaucccaaaaauccacuuu

SEQ ID NO: 1292839 - RNA, 20 nt, Human
ugcccuggggccagaagguu

SEQ ID NO: 1292840 - RNA, 24 nt, Human
uguacugaacaugagaaagaaucc

SEQ ID NO: 1292841 - RNA, 25 nt, Human
uuuuuuagcuucacuguacugaaca

SEQ ID NO: 1292842 - RNA, 23 nt, Human
aaaacaaaaaacaguaaagagaa

SEQ ID NO: 1292843 - RNA, 28 nt, Human
aaaacaaaacaaaaaacaguaaagagaa

SEQ ID NO: 1292844 - RNA, 21 nt, Human
aaaacaaaacaacaaaacaaa

SEQ ID NO: 1292845 - RNA, 21 nt, Human
aaaauccacauaaaaagcaaa

SEQ ID NO: 1292846 - RNA, 26 nt, Human
aaacaaaacaacaaaacaaaacaaaa

SEQ ID NO: 1292847 - RNA, 22 nt, Human
aaacaacaaaacaaaacaaaaa

SEQ ID NO: 1292848 - RNA, 24 nt, Human
aaacaguaaagagaauacuauuga

SEQ ID NO: 1292849 - RNA, 20 nt, Human
aaagcgcucucaaggugcgg

SEQ ID NO: 1292850 - RNA, 19 nt, Human
aaagggagcauucaaggga

SEQ ID NO: 1292851 - RNA, 25 nt, Human
aacaaaacaacaaaacaaaacaaaa

SEQ ID NO: 1292852 - RNA, 18 nt, Human
aacacuaaaagggagcau

SEQ ID NO: 1292853 - RNA, 19 nt, Human
aacauggggaaaccccauc

SEQ ID NO: 1292854 - RNA, 20 nt, Human
aacauggggaaaccccaucu

SEQ ID NO: 1292855 - RNA, 21 nt, Human
aacauggggaaaccccaucuc

SEQ ID NO: 1292856 - RNA, 22 nt, Human
aacccuccugcacagccugccg

SEQ ID NO: 1292857 - RNA, 24 nt, Human
aagcgauccacccgccucggccuc

SEQ ID NO: 1292858 - RNA, 21 nt, Human
aagggacagcaggauguggaa

SEQ ID NO: 1292859 - RNA, 23 nt, Human
aaucacuugacguuagaguuuga

SEQ ID NO: 1292860 - RNA, 24 nt, Human
aaucgcuugaacccgggaggcaga

SEQ ID NO: 1292861 - RNA, 21 nt, Human
acaaaacaaaacaaaaaacag

SEQ ID NO: 1292862 - RNA, 25 nt, Human
acaaaacaaaacaaaaaacaguaaa

SEQ ID NO: 1292863 - RNA, 23 nt, Human
acaaaacaacaaaacaaaacaaa

SEQ ID NO: 1292864 - RNA, 25 nt, Human
acaaaacaacaaaacaaaacaaaaa

SEQ ID NO: 1292865 - RNA, 24 nt, Human
acagagcgagacuccguaucaaaa

SEQ ID NO: 1292866 - RNA, 20 nt, Human
accaccuggagguggcgggg

SEQ ID NO: 1292867 - RNA, 22 nt, Human
accacugcacuccagccugggc

SEQ ID NO: 1292868 - RNA, 24 nt, Human
accccaucucuacugaaaauacaa

SEQ ID NO: 1292869 - RNA, 21 nt, Human
acccgccucggccucccaaaa

SEQ ID NO: 1292870 - RNA, 24 nt, Human
acuauguugcccaggcuggucucg

SEQ ID NO: 1292871 - RNA, 25 nt, Human
acuauguugcccaggcuggucucga

SEQ ID NO: 1292872 - RNA, 24 nt, Human
acugcacuccagccugggcaacag

SEQ ID NO: 1292873 - RNA, 24 nt, Human
acugcacuccagccugggcaacag

SEQ ID NO: 1292874 - RNA, 19 nt, Human
acugcagccuugacuuccu

SEQ ID NO: 1292875 - RNA, 22 nt, Human
agaaaaaugaauggcacacagu

SEQ ID NO: 1292876 - RNA, 23 nt, Human
agaaucacuugacguuagaguuu

SEQ ID NO: 1292877 - RNA, 18 nt, Human
agacacggccuagaugug

SEQ ID NO: 1292878 - RNA, 21 nt, Human
agacccucugaauaaaaacuc

SEQ ID NO: 1292879 - RNA, 20 nt, Human
agagguugcaaugagcccag

SEQ ID NO: 1292880 - RNA, 19 nt, Human
agauaucaccgaagggaaa

SEQ ID NO: 1292881 - RNA, 23 nt, Human
agccgggcgugguggugcaugcc

SEQ ID NO: 1292882 - RNA, 24 nt, Human
agccuggccaacauggggaaaccc

SEQ ID NO: 1292883 - RNA, 24 nt, Human
agccugggcaacagagcgagacuc

SEQ ID NO: 1292884 - RNA, 18 nt, Human
aggaucggggacccgcug

SEQ ID NO: 1292885 - RNA, 19 nt, Human
aggcagagguugcaaugag

SEQ ID NO: 1292886 - RNA, 24 nt, Human
aggcaggagaaucgcuugaacccg

SEQ ID NO: 1292887 - RNA, 20 nt, Human
aggcugaggcaggagaaucg

SEQ ID NO: 1292888 - RNA, 24 nt, Human
aggcugaggcaggagaaucgcuug

SEQ ID NO: 1292889 - RNA, 24 nt, Human
aucucaccacugcacuccagccug

SEQ ID NO: 1292890 - RNA, 28 nt, Human
caaaaaacaaaacaacaaaacaaaacaa

SEQ ID NO: 1292891 - RNA, 22 nt, Human
caaaauucugggauuacaggca

SEQ ID NO: 1292892 - RNA, 21 nt, Human
caaagcugggcucuuggcugc

SEQ ID NO: 1292893 - RNA, 18 nt, Human
caaauuccugagguucac

SEQ ID NO: 1292894 - RNA, 22 nt, Human
caagggacucucuuagccaaua

SEQ ID NO: 1292895 - RNA, 23 nt, Human
cacccgccucggccucccaaaau

SEQ ID NO: 1292896 - RNA, 19 nt, Human
cacuauguugcccaggcug

SEQ ID NO: 1292897 - RNA, 24 nt, Human
cacuauguugcccaggcuggucuc

SEQ ID NO: 1292898 - RNA, 23 nt, Human
cacuccagccugggcaacagagc

SEQ ID NO: 1292899 - RNA, 24 nt, Human
cacuccagccugggcaacagagcg

SEQ ID NO: 1292900 - RNA, 19 nt, Human
cacugcacuccagccuggg

SEQ ID NO: 1292901 - RNA, 21 nt, Human
cacugcacuccagccugggca

SEQ ID NO: 1292902 - RNA, 22 nt, Human
cacugcacuccagccugggcaa

SEQ ID NO: 1292903 - RNA, 23 nt, Human
cacugcacuccagccugggcaac

SEQ ID NO: 1292904 - RNA, 24 nt, Human
cacugcacuccagccugggcaaca

SEQ ID NO: 1292905 - RNA, 24 nt, Human
cagacccucugaauaaaaacucug

SEQ ID NO: 1292906 - RNA, 24 nt, Human
cagagucucacuauguugcccagg

SEQ ID NO: 1292907 - RNA, 23 nt, Human
cagccugccgguaacuggaacca

SEQ ID NO: 1292908 - RNA, 24 nt, Human
cagccuggccaacauggggaaacc

SEQ ID NO: 1292909 - RNA, 21 nt, Human
cagccuugacuuccugggcuc

SEQ ID NO: 1292910 - RNA, 24 nt, Human
cagcucacugcagccuugacuucc

SEQ ID NO: 1292911 - RNA, 20 nt, Human
ccacugcacuccagccuggg

SEQ ID NO: 1292912 - RNA, 21 nt, Human
ccacugcacuccagccugggc

SEQ ID NO: 1292913 - RNA, 22 nt, Human
ccacugcacuccagccugggca

SEQ ID NO: 1292914 - RNA, 23 nt, Human
ccacugcacuccagccugggcaa

SEQ ID NO: 1292915 - RNA, 24 nt, Human
ccacugcacuccagccugggcaac

SEQ ID NO: 1292916 - RNA, 18 nt, Human
ccagacagugugcuaagc

SEQ ID NO: 1292917 - RNA, 24 nt, Human
cccaaaauucugggauuacaggca

SEQ ID NO: 1292918 - RNA, 22 nt, Human
ccccauuccccauggugcguuc

SEQ ID NO: 1292919 - RNA, 21 nt, Human
ccuccugcacagccugccggu

SEQ ID NO: 1292920 - RNA, 19 nt, Human
ccugcgguuaaggagugag

SEQ ID NO: 1292921 - RNA, 24 nt, Human
ccuggccaacauggggaaacccca

SEQ ID NO: 1292922 - RNA, 25 nt, Human
ccuggcuaaucuuuuuguuuuuugu

SEQ ID NO: 1292923 - RNA, 22 nt, Human
ccugggcaacagagcgagacuc

SEQ ID NO: 1292924 - RNA, 20 nt, Human
ccugggcucaaguaacccuc

SEQ ID NO: 1292925 - RNA, 23 nt, Human
ccugggcucaaguaacccuccug

SEQ ID NO: 1292926 - RNA, 22 nt, Human
ccuguaaucucagcuacuagag

SEQ ID NO: 1292927 - RNA, 22 nt, Human
ccugugcucaagcgauccaccc

SEQ ID NO: 1292928 - RNA, 20 nt, Human
ccuugacuuccugggcucaa

SEQ ID NO: 1292929 - RNA, 22 nt, Human
ccuugacuuccugggcucaagu

SEQ ID NO: 1292930 - RNA, 18 nt, Human
cgaagguccaaggucucu

SEQ ID NO: 1292931 - RNA, 24 nt, Human
cgccucggccucccaaaauucugg

SEQ ID NO: 1292932 - RNA, 25 nt, Human
cgguaacuggaaccacagaugugua

SEQ ID NO: 1292933 - RNA, 27 nt, Human
cguaucaaaaaacaaaacaacaaaaca

SEQ ID NO: 1292934 - RNA, 18 nt, Human
cguuagaguuugagacca

SEQ ID NO: 1292935 - RNA, 21 nt, Human
cguucuuacugaggccagggg

SEQ ID NO: 1292936 - RNA, 26 nt, Human
cuacuagugucucucacuagcuaugu

SEQ ID NO: 1292937 - RNA, 27 nt, Human
cucaaguaacccuccugcacagccugc

SEQ ID NO: 1292938 - RNA, 24 nt, Human
cucacugcagccuugacuuccugg

SEQ ID NO: 1292939 - RNA, 23 nt, Human
cuccguaucaaaaaacaaaacaa

SEQ ID NO: 1292940 - RNA, 22 nt, Human
cucucugccaucuagcugcccu

SEQ ID NO: 1292941 - RNA, 24 nt, Human
cuuccugggcucaaguaacccucc

SEQ ID NO: 1292942 - RNA, 21 nt, Human
gaccucaguugggaccaucuc

SEQ ID NO: 1292943 - RNA, 23 nt, Human
gagaaucgcuugaacccgggagg

SEQ ID NO: 1292944 - RNA, 20 nt, Human
gaggagaaaaaagaggcgca

SEQ ID NO: 1292945 - RNA, 24 nt, Human
gcacuccagccugggcaacagagc

SEQ ID NO: 1292946 - RNA, 24 nt, Human
gccaacauggggaaaccccaucuc

SEQ ID NO: 1292947 - RNA, 24 nt, Human
gcgauccacccgccucggccuccc

SEQ ID NO: 1292948 - RNA, 21 nt, Human
gcucaaguaacccuccugcac

SEQ ID NO: 1292949 - RNA, 28 nt, Human
ggaagaacaagacacggccuagauguga

SEQ ID NO: 1292950 - RNA, 23 nt, Human
ggcgugguggugcaugccuguaa

SEQ ID NO: 1292951 - RNA, 21 nt, Human
gggaaaccccaucucuacuga

SEQ ID NO: 1292952 - RNA, 18 nt, Human
gggaagaaccaccuggag

SEQ ID NO: 1292953 - RNA, 26 nt, Human
gggguugauuucuaucaccccuaggg

SEQ ID NO: 1292954 - RNA, 20 nt, Human
ggguucugugguguuguuuc

SEQ ID NO: 1292955 - RNA, 20 nt, Human
gguagaggagaaaaaagagg

SEQ ID NO: 1292956 - RNA, 22 nt, Human
guaucaaaaaacaaaacaacaa

SEQ ID NO: 1292957 - RNA, 24 nt, Human
guaucaaaaaacaaaacaacaaaa

SEQ ID NO: 1292958 - RNA, 23 nt, Human
guggugcaugccuguaaucucag

SEQ ID NO: 1292959 - RNA, 23 nt, Human
uaaaaagcaaauuccugagguuc

SEQ ID NO: 1292960 - RNA, 24 nt, Human
uaaaaagcaaauuccugagguuca

SEQ ID NO: 1292961 - RNA, 22 nt, Human
uaaauacuucuuguauacccca

SEQ ID NO: 1292962 - RNA, 18 nt, Human
uaacccuccugcacagcc

SEQ ID NO: 1292963 - RNA, 21 nt, Human
uaagccaggguccagacuacc

SEQ ID NO: 1292964 - RNA, 19 nt, Human
uacuagagaggcugaggca

SEQ ID NO: 1292965 - RNA, 24 nt, Human
uagugcaguggcacgaucacagcu

SEQ ID NO: 1292966 - RNA, 23 nt, Human
uaucaaaaaacaaaacaacaaaa

SEQ ID NO: 1292967 - RNA, 25 nt, Human
uaucaaaaaacaaaacaacaaaaca

SEQ ID NO: 1292968 - RNA, 20 nt, Human
uaugcuaauaagaccccgcc

SEQ ID NO: 1292969 - RNA, 23 nt, Human
uauguugcccaggcuggucucga

SEQ ID NO: 1292970 - RNA, 24 nt, Human
uauguugcccaggcuggucucgaa

SEQ ID NO: 1292971 - RNA, 25 nt, Human
ucaaaaaacaaaacaacaaaacaaa

SEQ ID NO: 1292972 - RNA, 24 nt, Human
ucacugcagccuugacuuccuggg

SEQ ID NO: 1292973 - RNA, 20 nt, Human
ucaggcaauaguuuaggauu

SEQ ID NO: 1292974 - RNA, 18 nt, Human
uccacauaaaaagcaaau

SEQ ID NO: 1292975 - RNA, 25 nt, Human
uccagacuaccccauagacugggag

SEQ ID NO: 1292976 - RNA, 23 nt, Human
uccagccugggcaacagagcgag

SEQ ID NO: 1292977 - RNA, 24 nt, Human
uccagccugggcaacagagcgaga

SEQ ID NO: 1292978 - RNA, 24 nt, Human
ucccaaaauucugggauuacaggc

SEQ ID NO: 1292979 - RNA, 21 nt, Human
uccugggcucaaguaacccuc

SEQ ID NO: 1292980 - RNA, 22 nt, Human
uccugggcucaaguaacccucc

SEQ ID NO: 1292981 - RNA, 24 nt, Human
uccugggcucaaguaacccuccug

SEQ ID NO: 1292982 - RNA, 21 nt, Human
uccugucucccucuuuuucuc

SEQ ID NO: 1292983 - RNA, 21 nt, Human
uccuuaggcaacugauuucca

SEQ ID NO: 1292984 - RNA, 18 nt, Human
ucgcuugaacccgggagg

SEQ ID NO: 1292985 - RNA, 21 nt, Human
ucuaaagccaugagaguaacu

SEQ ID NO: 1292986 - RNA, 18 nt, Human
ucuaggcacggcaugggg

SEQ ID NO: 1292987 - RNA, 18 nt, Human
ucucacuauguugcccag

SEQ ID NO: 1292988 - RNA, 19 nt, Human
ucucacuauguugcccagg

SEQ ID NO: 1292989 - RNA, 23 nt, Human
ucucacuauguugcccaggcugg

SEQ ID NO: 1292990 - RNA, 24 nt, Human
ucucacuauguugcccaggcuggu

SEQ ID NO: 1292991 - RNA, 26 nt, Human
ucucacuauguugcccaggcuggucu

SEQ ID NO: 1292992 - RNA, 27 nt, Human
ucucacuauguugcccaggcuggucuc

SEQ ID NO: 1292993 - RNA, 20 nt, Human
ucucccucuuuuucucaggc

SEQ ID NO: 1292994 - RNA, 23 nt, Human
ucucuacugaaaauacaaaaauu

SEQ ID NO: 1292995 - RNA, 18 nt, Human
ucugaaguuucuucuugu

SEQ ID NO: 1292996 - RNA, 19 nt, Human
ucugcagacugaauaagcg

SEQ ID NO: 1292997 - RNA, 23 nt, Human
ucugcggcgggaagaaccggggc

SEQ ID NO: 1292998 - RNA, 19 nt, Human
ucuuccagcuccccucacc

SEQ ID NO: 1292999 - RNA, 22 nt, Human
ugacacucacuuccuuuccaga

SEQ ID NO: 1293000 - RNA, 25 nt, Human
ugacuuccugggcucaaguaacccu

SEQ ID NO: 1293001 - RNA, 21 nt, Human
ugagaccagccuggccaacau

SEQ ID NO: 1293002 - RNA, 23 nt, Human
ugagaccagccuggccaacaugg

SEQ ID NO: 1293003 - RNA, 24 nt, Human
ugaggcaggagaaucgcuugaacc

SEQ ID NO: 1293004 - RNA, 25 nt, Human
ugaggcaggagaaucgcuugaaccc

SEQ ID NO: 1293005 - RNA, 24 nt, Human
ugcccaggcuggucucgaacgccu

SEQ ID NO: 1293006 - RNA, 21 nt, Human
ugccuggcuaaucuuuuuguu

SEQ ID NO: 1293007 - RNA, 22 nt, Human
ugccuguaaucucagcuacuag

SEQ ID NO: 1293008 - RNA, 23 nt, Human
ugccuguaaucucagcuacuaga

SEQ ID NO: 1293009 - RNA, 24 nt, Human
uggaaccacagauguguacugcca

SEQ ID NO: 1293010 - RNA, 23 nt, Human
uggcacgaucacagcucacugca

SEQ ID NO: 1293011 - RNA, 18 nt, Human
ugggauuacaggcagaau

SEQ ID NO: 1293012 - RNA, 20 nt, Human
ugggauuacaggcagaauca

SEQ ID NO: 1293013 - RNA, 21 nt, Human
ugggauuacaggcagaaucac

SEQ ID NO: 1293014 - RNA, 23 nt, Human
ugggauuacaggcagaaucacuu

SEQ ID NO: 1293015 - RNA, 24 nt, Human
uggguaaccaguguugaauaaugu

SEQ ID NO: 1293016 - RNA, 18 nt, Human
uggguaguuggagcuggg

SEQ ID NO: 1293017 - RNA, 21 nt, Human
uggugcaugccuguaaucuca

SEQ ID NO: 1293018 - RNA, 22 nt, Human
uggugcaugccuguaaucucag

SEQ ID NO: 1293019 - RNA, 23 nt, Human
uggugcguucucuuuuggguucu

SEQ ID NO: 1293020 - RNA, 24 nt, Human
ugguggugcaugccuguaaucuca

SEQ ID NO: 1293021 - RNA, 19 nt, Human
uguagugcaguggcacgau

SEQ ID NO: 1293022 - RNA, 21 nt, Human
uguccugucucccucuuuuuc

SEQ ID NO: 1293023 - RNA, 24 nt, Human
ugugaaguuguuuacaaagcaguu

SEQ ID NO: 1293024 - RNA, 19 nt, Human
ugugaaucuccuuuuggcu

SEQ ID NO: 1293025 - RNA, 22 nt, Human
ugugcucaagcgauccacccgc

SEQ ID NO: 1293026 - RNA, 20 nt, Human
uguuguuguuuuguuuuuuu

SEQ ID NO: 1293027 - RNA, 21 nt, Human
uguuuagaaaaaugaauggca

SEQ ID NO: 1293028 - RNA, 23 nt, Human
uguuucgucuuugcuuaguccca

SEQ ID NO: 1293029 - RNA, 23 nt, Human
uuacagaguuuaaccaaucauau

SEQ ID NO: 1293030 - RNA, 19 nt, Human
uuagccgggcgugguggug

SEQ ID NO: 1293031 - RNA, 24 nt, Human
uuagccgggcgugguggugcaugc

SEQ ID NO: 1293032 - RNA, 22 nt, Human
uucaucagcaaggauguaauga

SEQ ID NO: 1293033 - RNA, 21 nt, Human
uuccaugucuguguugccaga

SEQ ID NO: 1293034 - RNA, 27 nt, Human
uucucaaugucugaaaugacacucacu

SEQ ID NO: 1293035 - RNA, 20 nt, Human
uucuuacugaggccaggggu

SEQ ID NO: 1293036 - RNA, 21 nt, Human
uuguuguuguuuuguuuuuuu

SEQ ID NO: 1293037 - RNA, 22 nt, Human
uuguuuagaaaaaugaauggca

SEQ ID NO: 1293038 - RNA, 24 nt, Human
uuuguacagagucucacuauguug

SEQ ID NO: 1293039 - RNA, 23 nt, Human
uuuuaugcugcucccacucugcg

SEQ ID NO: 1293040 - RNA, 22 nt, Human
uuuuguuuuuuguacagagucu

SEQ ID NO: 1293041 - RNA, 21 nt, Human
uuuuuguuuuuuguacagagu

SEQ ID NO: 1293042 - RNA, 21 nt, Human
aaacauaaaaaacaaaugaug

SEQ ID NO: 1293043 - RNA, 19 nt, Human
aacauggugaaaccccguc

SEQ ID NO: 1293044 - RNA, 20 nt, Human
aacauggugaaaccccgucu

SEQ ID NO: 1293045 - RNA, 21 nt, Human
aacauggugaaaccccgucuc

SEQ ID NO: 1293046 - RNA, 23 nt, Human
aacauggugaaaccccgucucua

SEQ ID NO: 1293047 - RNA, 25 nt, Human
aaugauggcaggauggcaggaagaa

SEQ ID NO: 1293048 - RNA, 18 nt, Human
acaaaacauaaaaaacaa

SEQ ID NO: 1293049 - RNA, 19 nt, Human
acaaaacauaaaaaacaaa

SEQ ID NO: 1293050 - RNA, 24 nt, Human
accucauacccaagcagagugcca

SEQ ID NO: 1293051 - RNA, 21 nt, Human
accuguaaucccagcuacucg

SEQ ID NO: 1293052 - RNA, 24 nt, Human
acgagaucauaccuguaaucccag

SEQ ID NO: 1293053 - RNA, 20 nt, Human
acuugaaccugggaggcgga

SEQ ID NO: 1293054 - RNA, 22 nt, Human
acuugaaccugggaggcggagg

SEQ ID NO: 1293055 - RNA, 21 nt, Human
agccauucauauccuaagcaa

SEQ ID NO: 1293056 - RNA, 19 nt, Human
aggcagaucacgaggucaa

SEQ ID NO: 1293057 - RNA, 22 nt, Human
aggcaggagaagcacuugaacc

SEQ ID NO: 1293058 - RNA, 24 nt, Human
aggcaggagaagcacuugaaccug

SEQ ID NO: 1293059 - RNA, 25 nt, Human
aggcaggagaagcacuugaaccugg

SEQ ID NO: 1293060 - RNA, 20 nt, Human
aggcggagguugcagugagc

SEQ ID NO: 1293061 - RNA, 24 nt, Human
aggcggagguugcagugagcugag

SEQ ID NO: 1293062 - RNA, 24 nt, Human
aggcugaggcaggagaagcacuug

SEQ ID NO: 1293063 - RNA, 18 nt, Human
caagagauggagacuauc

SEQ ID NO: 1293064 - RNA, 25 nt, Human
cacgagaucauaccuguaaucccag

SEQ ID NO: 1293065 - RNA, 21 nt, Human
cacuugaaccugggaggcgga

SEQ ID NO: 1293066 - RNA, 21 nt, Human
caggcagaucacgaggucaag

SEQ ID NO: 1293067 - RNA, 22 nt, Human
caggcagaucacgaggucaaga

SEQ ID NO: 1293068 - RNA, 19 nt, Human
cauaccuguaaucccagcu

SEQ ID NO: 1293069 - RNA, 19 nt, Human
cauucauauccuaagcaac

SEQ ID NO: 1293070 - RNA, 22 nt, Human
ccuggcgaacauggugaaaccc

SEQ ID NO: 1293071 - RNA, 23 nt, Human
ccuggcgaacauggugaaacccc

SEQ ID NO: 1293072 - RNA, 24 nt, Human
ccuggcgaacauggugaaaccccg

SEQ ID NO: 1293073 - RNA, 19 nt, Human
ccugggaggcggagguugc

SEQ ID NO: 1293074 - RNA, 20 nt, Human
ccuguaaucccagcuacucg

SEQ ID NO: 1293075 - RNA, 20 nt, Human
ccuuccuuccugagcuccca

SEQ ID NO: 1293076 - RNA, 21 nt, Human
cgacaaaacauaaaaaacaaa

SEQ ID NO: 1293077 - RNA, 18 nt, Human
cugcuucugggugcuccu

SEQ ID NO: 1293078 - RNA, 24 nt, Human
cuuccugagcucccaggguuccuc

SEQ ID NO: 1293079 - RNA, 20 nt, Human
cuuccuuccugagcucccag

SEQ ID NO: 1293080 - RNA, 24 nt, Human
gaacauggugaaaccccgucucua

SEQ ID NO: 1293081 - RNA, 23 nt, Human
gagguugcagugagcugagaucg

SEQ ID NO: 1293082 - RNA, 22 nt, Human
gauggcaggaagaaccucauac

SEQ ID NO: 1293083 - RNA, 24 nt, Human
gcacuugaaccugggaggcggagg

SEQ ID NO: 1293084 - RNA, 24 nt, Human
gcgaacauggugaaaccccgucuc

SEQ ID NO: 1293085 - RNA, 21 nt, Human
ggagaagcacuugaaccuggg

SEQ ID NO: 1293086 - RNA, 24 nt, Human
ggagacuauccuggcgaacauggu

SEQ ID NO: 1293087 - RNA, 22 nt, Human
ggagguugcagugagcugagau

SEQ ID NO: 1293088 - RNA, 23 nt, Human
ggagguugcagugagcugagauc

SEQ ID NO: 1293089 - RNA, 24 nt, Human
ggagguugcagugagcugagaucg

SEQ ID NO: 1293090 - RNA, 21 nt, Human
gugaaaccccgucucuacuga

SEQ ID NO: 1293091 - RNA, 26 nt, Human
gugccagguuuuacagccuccgcuca

SEQ ID NO: 1293092 - RNA, 21 nt, Human
gugcuccuuccuuccugagcu

SEQ ID NO: 1293093 - RNA, 19 nt, Human
guugcagugagcugagauc

SEQ ID NO: 1293094 - RNA, 22 nt, Human
uaaaaaacaaaugauggcagga

SEQ ID NO: 1293095 - RNA, 22 nt, Human
uaaaaaacaaaugauggcagga

SEQ ID NO: 1293096 - RNA, 25 nt, Human
uaccuguaaucccagcuacucguga

SEQ ID NO: 1293097 - RNA, 24 nt, Human
ucacgaggucaagagauggagacu

SEQ ID NO: 1293098 - RNA, 19 nt, Human
ucccaggguuccucaaggu

SEQ ID NO: 1293099 - RNA, 22 nt, Human
uccugagcucccaggguuccuc

SEQ ID NO: 1293100 - RNA, 18 nt, Human
uccuuccugagcucccag

SEQ ID NO: 1293101 - RNA, 19 nt, Human
ucgcaccauugcacuucag

SEQ ID NO: 1293102 - RNA, 21 nt, Human
ucuacugauuucugguccucc

SEQ ID NO: 1293103 - RNA, 23 nt, Human
ucuucugugugaaacaggaacug

SEQ ID NO: 1293104 - RNA, 24 nt, Human
ugaaccugggaggcggagguugca

SEQ ID NO: 1293105 - RNA, 22 nt, Human
ugagcugagaucgcaccauugc

SEQ ID NO: 1293106 - RNA, 20 nt, Human
ugaggcaggagaagcacuug

SEQ ID NO: 1293107 - RNA, 24 nt, Human
ugaggcaggagaagcacuugaacc

SEQ ID NO: 1293108 - RNA, 25 nt, Human
ugaggcaggagaagcacuugaaccu

SEQ ID NO: 1293109 - RNA, 18 nt, Human
ugauuucugguccucccc

SEQ ID NO: 1293110 - RNA, 21 nt, Human
ugcuccuuccuuccugagcuc

SEQ ID NO: 1293111 - RNA, 23 nt, Human
ugcuccuuccuuccugagcuccc

SEQ ID NO: 1293112 - RNA, 24 nt, Human
uggcaggauggcaggaagaaccuc

SEQ ID NO: 1293113 - RNA, 21 nt, Human
uggcgacaaaacauaaaaaac

SEQ ID NO: 1293114 - RNA, 29 nt, Human
ugggaggcggagguugcagugacaacggu

SEQ ID NO: 1293115 - RNA, 24 nt, Human
ugggaggcggagguugcagugagc

SEQ ID NO: 1293116 - RNA, 24 nt, Human
uugaaccugggaggcggagguugc

SEQ ID NO: 1293117 - RNA, 18 nt, Human
uugcagugagcugagauc

SEQ ID NO: 1293118 - RNA, 20 nt, Human
uugcagugagcugagaucgc

SEQ ID NO: 1293119 - RNA, 22 nt, Human
uugcagugagcugagaucgcac

SEQ ID NO: 1293120 - RNA, 24 nt, Human
accugguuucuucaaagauagccc

SEQ ID NO: 1293121 - RNA, 21 nt, Human
cugaaccuugauuucuaaaca

SEQ ID NO: 1293122 - RNA, 23 nt, Human
cugaaccuugauuucuaaacaug

SEQ ID NO: 1293123 - RNA, 22 nt, Human
gcaaaaauccuuuucuccucuu

SEQ ID NO: 1293124 - RNA, 22 nt, Human
ucacugucaagauucuccugaa

SEQ ID NO: 1293125 - RNA, 19 nt, Human
uccuuuucuccucuucaaa

SEQ ID NO: 1293126 - RNA, 21 nt, Human
ucuccugaaccuugauuucua

SEQ ID NO: 1293127 - RNA, 24 nt, Human
ugcaaaaauccuuuucuccucuuc

SEQ ID NO: 1293128 - RNA, 23 nt, Human
ugucaagauucuccugaaccuuu

SEQ ID NO: 1293129 - RNA, 22 nt, Human
uucaaacuccuucuuagaaauc

SEQ ID NO: 1293130 - RNA, 25 nt, Human
aaccauuuaaaucauugcuuucuga

SEQ ID NO: 1293131 - RNA, 23 nt, Human
aacccauaauggaaucaaccaag

SEQ ID NO: 1293132 - RNA, 23 nt, Human
aagaauguucaccacaguucccc

SEQ ID NO: 1293133 - RNA, 22 nt, Human
aagcagaaaaauucaaaucaaa

SEQ ID NO: 1293134 - RNA, 23 nt, Human
aagcagaaaaauucaaaucaaac

SEQ ID NO: 1293135 - RNA, 21 nt, Human
aagcucccagccugggccauc

SEQ ID NO: 1293136 - RNA, 19 nt, Human
acaagccugcacaugugca

SEQ ID NO: 1293137 - RNA, 23 nt, Human
acauagcauuuccuccacgcucc

SEQ ID NO: 1293138 - RNA, 19 nt, Human
agaaaggaaaccugagccu

SEQ ID NO: 1293139 - RNA, 18 nt, Human
agaggauagguauuccag

SEQ ID NO: 1293140 - RNA, 18 nt, Human
aggaaaccugagccugag

SEQ ID NO: 1293141 - RNA, 24 nt, Human
aggagaaaggaaaccugagccuga

SEQ ID NO: 1293142 - RNA, 22 nt, Human
aggauagguauuccaggagaaa

SEQ ID NO: 1293143 - RNA, 24 nt, Human
aggcaagaaccaaagugacaucca

SEQ ID NO: 1293144 - RNA, 20 nt, Human
augaacacagggacccugcc

SEQ ID NO: 1293145 - RNA, 20 nt, Human
caagccaauccuuguugagu

SEQ ID NO: 1293146 - RNA, 19 nt, Human
caagcucccagccugggcc

SEQ ID NO: 1293147 - RNA, 21 nt, Human
caagcucccagccugggccau

SEQ ID NO: 1293148 - RNA, 20 nt, Human
caauaaacaugacugcagaa

SEQ ID NO: 1293149 - RNA, 22 nt, Human
cauccugaaucacaaggucagg

SEQ ID NO: 1293150 - RNA, 22 nt, Human
ccacgcuccacauaaaaagaag

SEQ ID NO: 1293151 - RNA, 21 nt, Human
ccagaagaauguucaccacag

SEQ ID NO: 1293152 - RNA, 24 nt, Human
cccuuuugcuucuucggucaagag

SEQ ID NO: 1293153 - RNA, 21 nt, Human
ccucaucaugaacacagggac

SEQ ID NO: 1293154 - RNA, 22 nt, Human
ccuuuauaauuucuguaggcau

SEQ ID NO: 1293155 - RNA, 18 nt, Human
cucaagggacggcaggcc

SEQ ID NO: 1293156 - RNA, 25 nt, Human
cuccaccaauaaacaugagguaccc

SEQ ID NO: 1293157 - RNA, 20 nt, Human
cucugggucccgaucaaccc

SEQ ID NO: 1293158 - RNA, 19 nt, Human
gaacacagggacccugcca

SEQ ID NO: 1293159 - RNA, 20 nt, Human
gaaggcagcagggcucugag

SEQ ID NO: 1293160 - RNA, 21 nt, Human
gaagggcagguuuuccaauga

SEQ ID NO: 1293161 - RNA, 24 nt, Human
gaauguucaccacaguuccccaga

SEQ ID NO: 1293162 - RNA, 23 nt, Human
gagaacagaaaggaauugcaagc

SEQ ID NO: 1293163 - RNA, 19 nt, Human
gagcaguuucagagccagc

SEQ ID NO: 1293164 - RNA, 23 nt, Human
gagcauggccagaagauuaaaua

SEQ ID NO: 1293165 - RNA, 22 nt, Human
gcuccacauaaaaagaaguaau

SEQ ID NO: 1293166 - RNA, 20 nt, Human
ggcagacaagccugcacaug

SEQ ID NO: 1293167 - RNA, 20 nt, Human
gggagugugauggcaccagc

SEQ ID NO: 1293168 - RNA, 20 nt, Human
gggcagguuuuccaaugagc

SEQ ID NO: 1293169 - RNA, 25 nt, Human
ggugaugaaggcagcagggcucuga

SEQ ID NO: 1293170 - RNA, 18 nt, Human
guccuagguaacaaugcu

SEQ ID NO: 1293171 - RNA, 24 nt, Human
guucagcuggaggugaugaaggcc

SEQ ID NO: 1293172 - RNA, 26 nt, Human
guucauaaaaauggcagugauauaaa

SEQ ID NO: 1293173 - RNA, 18 nt, Human
uaaaagagccugaagggc

SEQ ID NO: 1293174 - RNA, 19 nt, Human
uaaaagagccugaagggca

SEQ ID NO: 1293175 - RNA, 21 nt, Human
uaacaaugcuuuaccaucuga

SEQ ID NO: 1293176 - RNA, 23 nt, Human
uaauggaaucaaccaagccaauc

SEQ ID NO: 1293177 - RNA, 24 nt, Human
uacaucacuaaguuguucuagaga

SEQ ID NO: 1293178 - RNA, 20 nt, Human
uacccaaaggcaagaaccaa

SEQ ID NO: 1293179 - RNA, 22 nt, Human
uauacagggcaggacacguggc

SEQ ID NO: 1293180 - RNA, 20 nt, Human
uaucuagaggcuuugugaga

SEQ ID NO: 1293181 - RNA, 22 nt, Human
ucaacccauaauggaaucaacc

SEQ ID NO: 1293182 - RNA, 24 nt, Human
ucaccucugggucccgaucaaccc

SEQ ID NO: 1293183 - RNA, 21 nt, Human
ucacuaaguuguucuagagau

SEQ ID NO: 1293184 - RNA, 19 nt, Human
ucaggagcauggccagaag

SEQ ID NO: 1293185 - RNA, 21 nt, Human
ucauccugaaucacaagguca

SEQ ID NO: 1293186 - RNA, 21 nt, Human
uccaggagaaaggaaaccuga

SEQ ID NO: 1293187 - RNA, 23 nt, Human
uccugaaucacaaggucaggcuc

SEQ ID NO: 1293188 - RNA, 24 nt, Human
ucgaaaagccuuugcagugucucu

SEQ ID NO: 1293189 - RNA, 19 nt, Human
ucggucaagagaacagaaa

SEQ ID NO: 1293190 - RNA, 25 nt, Human
ugacaaguacuucacacagauaucu

SEQ ID NO: 1293191 - RNA, 24 nt, Human
ugacuacccaaaggcaagaaccaa

SEQ ID NO: 1293192 - RNA, 19 nt, Human
ugaguuccuggacacaugu

SEQ ID NO: 1293193 - RNA, 19 nt, Human
ugcucuuuguaacaccuuu

SEQ ID NO: 1293194 - RNA, 20 nt, Human
uggagcaguuucagagccag

SEQ ID NO: 1293195 - RNA, 21 nt, Human
uggagcaguuucagagccagc

SEQ ID NO: 1293196 - RNA, 18 nt, Human
uggaggugaugaaggcag

SEQ ID NO: 1293197 - RNA, 25 nt, Human
uguucuagagauuucugauuuuccu

SEQ ID NO: 1293198 - RNA, 18 nt, Human
uucaaggguggucagugc

SEQ ID NO: 1293199 - RNA, 23 nt, Human
uucacaagcucauccugaaucac

SEQ ID NO: 1293200 - RNA, 24 nt, Human
uucagagccagcugcguuugaaaa

SEQ ID NO: 1293201 - RNA, 19 nt, Human
uuccccagagcccaccgga

SEQ ID NO: 1293202 - RNA, 19 nt, Human
uugugagaggagaguguga

SEQ ID NO: 1293203 - RNA, 21 nt, Human
aaaggccaggacccacagaua

SEQ ID NO: 1293204 - RNA, 23 nt, Human
aaccccaaacaggccuggacaug

SEQ ID NO: 1293205 - RNA, 23 nt, Human
aaccccaacaggccccuccuggc

SEQ ID NO: 1293206 - RNA, 21 nt, Human
aacuacuaauugucaaccacc

SEQ ID NO: 1293207 - RNA, 18 nt, Human
aaggagagacuggaggug

SEQ ID NO: 1293208 - RNA, 19 nt, Human
aaggaggggggcgaagagg

SEQ ID NO: 1293209 - RNA, 20 nt, Human
aaggaggggggcgaagaggg

SEQ ID NO: 1293210 - RNA, 23 nt, Human
acacacacacacacacacacaca

SEQ ID NO: 1293211 - RNA, 31 nt, Human; identical to SEQ ID NO: 1101801

SEQ ID NO: 1293212 - RNA, 20 nt, Human
acaccgaaagaaaagaaaag

SEQ ID NO: 1293213 - RNA, 23 nt, Human
acccagcuucaggaguagaagcc

SEQ ID NO: 1293214 - RNA, 22 nt, Human
accccauucucucuccucccca

SEQ ID NO: 1293215 - RNA, 28 nt, Human
accccauucucucuccuccccacaguca

SEQ ID NO: 1293216 - RNA, 19 nt, Human
acccugugauuaaacuacu

SEQ ID NO: 1293217 - RNA, 24 nt, Human
acucaaaccccaacaggccccucc

SEQ ID NO: 1293218 - RNA, 18 nt, Human
agaaaagaaaaggcagaa

SEQ ID NO: 1293219 - RNA, 21 nt, Human
agaaaggccaggacccacaga

SEQ ID NO: 1293220 - RNA, 18 nt, Human
agaaauaaugugugcccc

SEQ ID NO: 1293221 - RNA, 18 nt, Human
agaaccuucccuaccccu

SEQ ID NO: 1293222 - RNA, 24 nt, Human
agagaagagaugaaaagagcagag

SEQ ID NO: 1293223 - RNA, 24 nt, Human
agagaggggaagggagcuugaggu

SEQ ID NO: 1293224 - RNA, 21 nt, Human
agagaugaaaagagcagaggg

SEQ ID NO: 1293225 - RNA, 21 nt, Human
agaggggaagggagcuugagg

SEQ ID NO: 1293226 - RNA, 19 nt, Human
agauaugaaccaggaugcc

SEQ ID NO: 1293227 - RNA, 18 nt, Human
agcaacacagauaugaac

SEQ ID NO: 1293228 - RNA, 19 nt, Human
agccgcugagguccucucc

SEQ ID NO: 1293229 - RNA, 21 nt, Human
aggccaggccacccagcuuca

SEQ ID NO: 1293230 - RNA, 18 nt, Human
aggcccagcuaagcccag

SEQ ID NO: 1293231 - RNA, 18 nt, Human
aggcccagcuaagcccag

SEQ ID NO: 1293232 - RNA, 24 nt, Human
aggccucagaggcccagcuaagcc

SEQ ID NO: 1293233 - RNA, 22 nt, Human
aggccuggccuggcugccggcc

SEQ ID NO: 1293234 - RNA, 23 nt, Human
aguacaggagacaccgaaagaaa

SEQ ID NO: 1293235 - RNA, 19 nt, Human
auaaugugugccccacccc

SEQ ID NO: 1293236 - RNA, 19 nt, Human
auaccacagacacacccug

SEQ ID NO: 1293237 - RNA, 21 nt, Human
aucccaucccuucccaucucc

SEQ ID NO: 1293238 - RNA, 23 nt, Human
aucccuucccaucuccuccccca

SEQ ID NO: 1293239 - RNA, 23 nt, Human
augaagaaaggccaggacccaca

SEQ ID NO: 1293240 - RNA, 31 nt, Human; identical to SEQ ID NO: 1101832

SEQ ID NO: 1293241 - RNA, 18 nt, Human
caacacagauaugaacca

SEQ ID NO: 1293242 - RNA, 22 nt, Human
caaccccaaacaggccuggaca

SEQ ID NO: 1293243 - RNA, 20 nt, Human
cacacacacacacacacaca

SEQ ID NO: 1293244 - RNA, 20 nt, Human
cacacacacacacacacaca

SEQ ID NO: 1293245 - RNA, 20 nt, Human
cacacacacacacacacaca

SEQ ID NO: 1293246 - RNA, 20 nt, Human
cacacacacacacacacaca

SEQ ID NO: 1293247 - RNA, 22 nt, Human
cacacacacacacacacacaca

SEQ ID NO: 1293248 - RNA, 22 nt, Human
cacacacacacacacacacaca

SEQ ID NO: 1293249 - RNA, 26 nt, Human
cacacacacacacacacacacacaca

SEQ ID NO: 1293250 - RNA, 30 nt, Human; identical to SEQ ID NO: 326474

SEQ ID NO: 1293251 - RNA, 29 nt, Human
cacacacacacacacacacacacacccug

SEQ ID NO: 1293252 - RNA, 22 nt, Human
cacacacacacccugugauuaa

SEQ ID NO: 1293253 - RNA, 22 nt, Human
cacagacacacccugugccaga

SEQ ID NO: 1293254 - RNA, 29 nt, Human
cacgggcugauaugcacgcacacagugug

SEQ ID NO: 1293255 - RNA, 20 nt, Human
cagacacuguagucagcaac

SEQ ID NO: 1293256 - RNA, 30 nt, Human; identical to SEQ ID NO: 1101847

SEQ ID NO: 1293257 - RNA, 18 nt, Human
cagccagggcucuggggc

SEQ ID NO: 1293258 - RNA, 22 nt, Human
cagcgacaccccucuguggucu

SEQ ID NO: 1293259 - RNA, 28 nt, Human
cagcgacaccccucuguggucuucagac

SEQ ID NO: 1293260 - RNA, 24 nt, Human
caggaagaucccagugacucaaac

SEQ ID NO: 1293261 - RNA, 24 nt, Human
caggacccacagauacuacccucu

SEQ ID NO: 1293262 - RNA, 23 nt, Human
caggaguagaagccaugguccaa

SEQ ID NO: 1293263 - RNA, 19 nt, Human
caggaguuucgggacccgg

SEQ ID NO: 1293264 - RNA, 20 nt, Human
caggccaggccaggccaccc

SEQ ID NO: 1293265 - RNA, 18 nt, Human
caguggguuuccggaauc

SEQ ID NO: 1293266 - RNA, 31 nt, Human; identical to SEQ ID NO: 1101857

SEQ ID NO: 1293267 - RNA, 27 nt, Human
cauauacaugcgugcacauaaacacac

SEQ ID NO: 1293268 - RNA, 21 nt, Human
caucacagacacuguagucag

SEQ ID NO: 1293269 - RNA, 27 nt, Human
caugaccagugagaaauaaugugugcc

SEQ ID NO: 1293270 - RNA, 23 nt, Human
caugcggacaucacagacacugu

SEQ ID NO: 1293271 - RNA, 20 nt, Human
ccaaaggaggggggcgaaga

SEQ ID NO: 1293272 - RNA, 22 nt, Human
ccaaagugguggaauauagugu

SEQ ID NO: 1293273 - RNA, 21 nt, Human
ccacccagcuucaggaguaga

SEQ ID NO: 1293274 - RNA, 24 nt, Human
ccacccagcuucaggaguagaagc

SEQ ID NO: 1293275 - RNA, 24 nt, Human
ccaggaagaucccagugacucaaa

SEQ ID NO: 1293276 - RNA, 20 nt, Human
ccauugccauggggacuguc

SEQ ID NO: 1293277 - RNA, 26 nt, Human
cccaaaagguugagagaagagaugaa

SEQ ID NO: 1293278 - RNA, 24 nt, Human
cccacugucccaaacucuucgucu

SEQ ID NO: 1293279 - RNA, 26 nt, Human
cccagaaaucccaucccuucccaucu

SEQ ID NO: 1293280 - RNA, 18 nt, Human
cccagcuucaggaguaga

SEQ ID NO: 1293281 - RNA, 21 nt, Human
cccagugacucaaaccccaac

SEQ ID NO: 1293282 - RNA, 25 nt, Human
cccaucuccucccccacugucccaa

SEQ ID NO: 1293283 - RNA, 22 nt, Human
ccccaaaagguugagagaagag

SEQ ID NO: 1293284 - RNA, 19 nt, Human
ccccaccccccaccaguga

SEQ ID NO: 1293285 - RNA, 18 nt, Human
cccgcucugggacccaga

SEQ ID NO: 1293286 - RNA, 22 nt, Human
cccggccgcgccgccuucccug

SEQ ID NO: 1293287 - RNA, 27 nt, Human
cccuggccagcccugccaucaguaugg

SEQ ID NO: 1293288 - RNA, 20 nt, Human
cccugggcggccuugggccu

SEQ ID NO: 1293289 - RNA, 21 nt, Human
cccugggcggccuugggccuu

SEQ ID NO: 1293290 - RNA, 22 nt, Human
cccuuaaacacugagcuccaaa

SEQ ID NO: 1293291 - RNA, 19 nt, Human
ccucccccacugucccaaa

SEQ ID NO: 1293292 - RNA, 19 nt, Human
ccuccgagaccccgggcag

SEQ ID NO: 1293293 - RNA, 18 nt, Human
ccucucucugcccugggc

SEQ ID NO: 1293294 - RNA, 18 nt, Human
ccugccaucaguauggga

SEQ ID NO: 1293295 - RNA, 23 nt, Human
ccuuggugggcucagguuuggga

SEQ ID NO: 1293296 - RNA, 19 nt, Human
cgcacacaugaagaaaggc

SEQ ID NO: 1293297 - RNA, 20 nt, Human
cgcugagguccucuccgccc

SEQ ID NO: 1293298 - RNA, 20 nt, Human
cguggugaugcauauacaug

SEQ ID NO: 1293299 - RNA, 20 nt, Human
cucagcccgggcugggagug

SEQ ID NO: 1293300 - RNA, 21 nt, Human
cuccugaagcagagcuggaaa

SEQ ID NO: 1293301 - RNA, 19 nt, Human
cuucagacaguggguuucc

SEQ ID NO: 1293302 - RNA, 21 nt, Human
cuucaggggugcuaguacccc

SEQ ID NO: 1293303 - RNA, 27 nt, Human
gaaaagagcagagggcagccgguaccc

SEQ ID NO: 1293304 - RNA, 21 nt, Human
gaaagaaaagaaaaggcagaa

SEQ ID NO: 1293305 - RNA, 21 nt, Human
gaaguacaggagacaccgaaa

SEQ ID NO: 1293306 - RNA, 24 nt, Human
gacacacccugugccagaagaguc

SEQ ID NO: 1293307 - RNA, 19 nt, Human
gaggagaaauuuugggaag

SEQ ID NO: 1293308 - RNA, 20 nt, Human
gaggagaaauuuugggaagu

SEQ ID NO: 1293309 - RNA, 19 nt, Human
gauucuuccagaugaggga

SEQ ID NO: 1293310 - RNA, 25 nt, Human
gcaaccccaaacaggccuggacaug

SEQ ID NO: 1293311 - RNA, 33 nt, Human; identical to SEQ ID NO: 1101896

SEQ ID NO: 1293312 - RNA, 23 nt, Human
gccaggccacccagcuucaggag

SEQ ID NO: 1293313 - RNA, 20 nt, Human
gcccccaaaggaggggggcc

SEQ ID NO: 1293314 - RNA, 22 nt, Human
gcccccaaaggaggggggcgaa

SEQ ID NO: 1293315 - RNA, 20 nt, Human
gcccugggcggccuugggcc

SEQ ID NO: 1293316 - RNA, 19 nt, Human
gcccuuaaacacugagcuc

SEQ ID NO: 1293317 - RNA, 20 nt, Human
gccgcgccgccuucccuggg

SEQ ID NO: 1293318 - RNA, 31 nt, Human
gcgugcacauaaacacacacacacacacaca

SEQ ID NO: 1293319 - RNA, 24 nt, Human
gcgugcucagcccgggcugggagu

SEQ ID NO: 1293320 - RNA, 19 nt, Human
gcuggguuggaggcacagg

SEQ ID NO: 1293321 - RNA, 21 nt, Human
ggagguggugucaggacacag

SEQ ID NO: 1293322 - RNA, 19 nt, Human
gguggauggggagguggug

SEQ ID NO: 1293323 - RNA, 21 nt, Human
gguuggaggcacagguggagc

SEQ ID NO: 1293324 - RNA, 21 nt, Human
guagauggcuuggaacauagc

SEQ ID NO: 1293325 - RNA, 21 nt, Human
gucacggggcccccaaaggag

SEQ ID NO: 1293326 - RNA, 21 nt, Human
guccagccagggcucuggggc

SEQ ID NO: 1293327 - RNA, 27 nt, Human
gugaugcauauacaugcgugcacauag

SEQ ID NO: 1293328 - RNA, 29 nt, Human
gugcacauaaacacacacacacacacaca

SEQ ID NO: 1293329 - RNA, 19 nt, Human
guggaauauagugugcccc

SEQ ID NO: 1293330 - RNA, 21 nt, Human
gugguggauggggagguggug

SEQ ID NO: 1293331 - RNA, 25 nt, Human
uacaggagacaccgaaagaaaagaa

SEQ ID NO: 1293332 - RNA, 33 nt, Human
uacaugcgugcacauaaacacacacacacagug

SEQ ID NO: 1293333 - RNA, 21 nt, Human
uaccccauucucucuccuccc

SEQ ID NO: 1293334 - RNA, 21 nt, Human
uagauggcuuggaacauagca

SEQ ID NO: 1293335 - RNA, 27 nt, Human
uaggcaaccccaaacaggccuggacau

SEQ ID NO: 1293336 - RNA, 23 nt, Human
uagucagcaacacagauaugaac

SEQ ID NO: 1293337 - RNA, 22 nt, Human
uagugugccccccacauucagg

SEQ ID NO: 1293338 - RNA, 20 nt, Human
ucaaccaccucacagguaua

SEQ ID NO: 1293339 - RNA, 21 nt, Human
ucacagacacuguagucagca

SEQ ID NO: 1293340 - RNA, 23 nt, Human
ucacagguauaccacagacacac

SEQ ID NO: 1293341 - RNA, 20 nt, Human
ucagcaacacagauaugaac

SEQ ID NO: 1293342 - RNA, 21 nt, Human
ucaggggugcuaguaccccau

SEQ ID NO: 1293343 - RNA, 21 nt, Human
uccaaagugguggaauauagu

SEQ ID NO: 1293344 - RNA, 23 nt, Human
uccagaguguucuggccucucau

SEQ ID NO: 1293345 - RNA, 22 nt, Human
uccagccagggcucuggggcca

SEQ ID NO: 1293346 - RNA, 22 nt, Human
uccagccccauugccaugggga

SEQ ID NO: 1293347 - RNA, 26 nt, Human
ucccaucuccucccccacugucccaa

SEQ ID NO: 1293348 - RNA, 24 nt, Human
uccccagaccucaauauccuucca

SEQ ID NO: 1293349 - RNA, 22 nt, Human
ucccugggugucgccgcagccg

SEQ ID NO: 1293350 - RNA, 19 nt, Human
ucccuucccaucuccuccc

SEQ ID NO: 1293351 - RNA, 23 nt, Human
uccugcccacaucugagcuccag

SEQ ID NO: 1293352 - RNA, 18 nt, Human
ucucauagcuccugaagc

SEQ ID NO: 1293353 - RNA, 23 nt, Human
ucucucuccuccccacagucaaa

SEQ ID NO: 1293354 - RNA, 24 nt, Human
ucugggaagcgggucagggucucc

SEQ ID NO: 1293355 - RNA, 19 nt, Human
ucuggggccacucagaggc

SEQ ID NO: 1293356 - RNA, 24 nt, Human
ucuguggucuucagacaguggguu

SEQ ID NO: 1293357 - RNA, 19 nt, Human
ugaaaagagcagagggcag

SEQ ID NO: 1293358 - RNA, 22 nt, Human
ugaaaagagcagagggcagcca

SEQ ID NO: 1293359 - RNA, 21 nt, Human
ugaagaagcugugcgugagua

SEQ ID NO: 1293360 - RNA, 21 nt, Human
ugacgguggcgagcacagggc

SEQ ID NO: 1293361 - RNA, 18 nt, Human
ugacucaaaccccaacag

SEQ ID NO: 1293362 - RNA, 21 nt, Human
ugacuucucuuaccucucacc

SEQ ID NO: 1293363 - RNA, 19 nt, Human
ugagagaaccuucccuacc

SEQ ID NO: 1293364 - RNA, 20 nt, Human
ugauaugcacgcacacauga

SEQ ID NO: 1293365 - RNA, 23 nt, Human
ugcaaaguccucccuuuucccca

SEQ ID NO: 1293366 - RNA, 19 nt, Human
ugcacauaaacacacacac

SEQ ID NO: 1293367 - RNA, 21 nt, Human
ugcacauaaacacacacacac

SEQ ID NO: 1293368 - RNA, 19 nt, Human
uggaauauagugugccccc

SEQ ID NO: 1293369 - RNA, 21 nt, Human
uggaauauagugugcccccca

SEQ ID NO: 1293370 - RNA, 18 nt, Human
ugggacccagaaauccca

SEQ ID NO: 1293371 - RNA, 20 nt, Human
ugggaguguccgagggcucu

SEQ ID NO: 1293372 - RNA, 24 nt, Human
uggggccacucagaggccuggccu

SEQ ID NO: 1293373 - RNA, 18 nt, Human
ugguggauggggaggugg

SEQ ID NO: 1293374 - RNA, 23 nt, Human
ugugugccccaccccccaccagu

SEQ ID NO: 1293375 - RNA, 25 nt, Human
uguuccccccuuuuccaagcccuua

SEQ ID NO: 1293376 - RNA, 19 nt, Human
uuccagaugagggaugcuc

SEQ ID NO: 1293377 - RNA, 21 nt, Human
uucucucuccuccccacaguc

SEQ ID NO: 1293378 - RNA, 19 nt, Human
uuggugggcucagguuugg

SEQ ID NO: 1293379 - RNA, 21 nt, Human
uuuccaagcccuuaaacacug

SEQ ID NO: 1293380 - RNA, 18 nt, Human
aaaacaaguucugcauau

SEQ ID NO: 1293381 - RNA, 18 nt, Human
ccucugugcgcccagcuc

SEQ ID NO: 1293382 - RNA, 21 nt, Human
cgcugggugggguggcagcgc

SEQ ID NO: 1293383 - RNA, 19 nt, Human
cugugcgcccagcucaagc

SEQ ID NO: 1293384 - RNA, 19 nt, Human
ggccuggcuguuccggcug

SEQ ID NO: 1293385 - RNA, 20 nt, Human
gugggguggcagcgcuggcu

SEQ ID NO: 1293386 - RNA, 24 nt, Human
ucauggccuggcuguuccggcugu

SEQ ID NO: 1293387 - RNA, 18 nt, Human
uccccugggucauggccu

SEQ ID NO: 1293388 - RNA, 22 nt, Human
ucgagggaauguuacagggcca

SEQ ID NO: 1293389 - RNA, 23 nt, Human
uggcaggggaacggaaaacaagu

SEQ ID NO: 1293390 - RNA, 21 nt, Human
uggccuggcuguuccggcugu

SEQ ID NO: 1293391 - RNA, 21 nt, Human
uggcuguuccggcuguggccu

SEQ ID NO: 1293392 - RNA, 25 nt, Human
uguuacagggccacagauccuggcg

SEQ ID NO: 1293393 - RNA, 21 nt, Human
aaaguagacauccaaaaaugu

SEQ ID NO: 1293394 - RNA, 18 nt, Human
aauaaaguagacauccaa

SEQ ID NO: 1293395 - RNA, 19 nt, Human
aaucuucuuuucuucaggc

SEQ ID NO: 1293396 - RNA, 18 nt, Human
caucagaguuugcugggg

SEQ ID NO: 1293397 - RNA, 18 nt, Human
cgguuggcaaucucuucc

SEQ ID NO: 1293398 - RNA, 19 nt, Human
uaaaaacaaagcuuuaauc

SEQ ID NO: 1293399 - RNA, 28 nt, Human
uaaaguagacauccaaaaauguggaugu

SEQ ID NO: 1293400 - RNA, 19 nt, Human
ucugcuuuccaaaaguaaa

SEQ ID NO: 1293401 - RNA, 20 nt, Human
ucuucaggcaaagccuccgg

SEQ ID NO: 1293402 - RNA, 26 nt, Human
uggaugucauuuaaaaacaaagcuuu

SEQ ID NO: 1293403 - RNA, 20 nt, Human
agaagccaccuaacauggua

SEQ ID NO: 1293404 - RNA, 23 nt, Human
cagccagccuuccaugcuggccu

SEQ ID NO: 1293405 - RNA, 21 nt, Human
cuaacaugguaaugagcuccu

SEQ ID NO: 1293406 - RNA, 18 nt, Human
cugcccgacuggggcugu

SEQ ID NO: 1293407 - RNA, 18 nt, Human
cuugaaaggaggagagaa

SEQ ID NO: 1293408 - RNA, 18 nt, Human
cuugaaaggaggagagaa

SEQ ID NO: 1293409 - RNA, 19 nt, Human
gaggcugaacaacuugaaa

SEQ ID NO: 1293410 - RNA, 21 nt, Human
gugcagagagcucagcacggg

SEQ ID NO: 1293411 - RNA, 22 nt, Human
ugaaaggaggagagaaaauucc

SEQ ID NO: 1293412 - RNA, 19 nt, Human
uggggcugugugcagagag

SEQ ID NO: 1293413 - RNA, 21 nt, Human
uucaagcagaggcugaacaac

SEQ ID NO: 1293414 - RNA, 20 nt, Human
aagagaagacagugcuuaga

SEQ ID NO: 1293415 - RNA, 25 nt, Human
acagagcacuccucugaccacccua

SEQ ID NO: 1293416 - RNA, 21 nt, Human
accacccuaacaauccgagag

SEQ ID NO: 1293417 - RNA, 21 nt, Human
acccuaacaauccgagaggaa

SEQ ID NO: 1293418 - RNA, 18 nt, Human
agagagucggugaaaguc

SEQ ID NO: 1293419 - RNA, 24 nt, Human
aggaaguggcuggcaacccaaucu

SEQ ID NO: 1293420 - RNA, 18 nt, Human
aggcagaucaucuaaugg

SEQ ID NO: 1293421 - RNA, 23 nt, Human
aucucacccuuccucuccugcag

SEQ ID NO: 1293422 - RNA, 20 nt, Human
augacauuuucagcuccucu

SEQ ID NO: 1293423 - RNA, 18 nt, Human
caaaaugggcaacaaguc

SEQ ID NO: 1293424 - RNA, 24 nt, Human
caaauucuuagcugugaucuaaua

SEQ ID NO: 1293425 - RNA, 23 nt, Human
cuccucgguuccaccgggugcca

SEQ ID NO: 1293426 - RNA, 24 nt, Human
cuccucugaccacccuaacaaucc

SEQ ID NO: 1293427 - RNA, 21 nt, Human
cucgucaugccucaaacagcu

SEQ ID NO: 1293428 - RNA, 24 nt, Human
cucuuacauuuacuagaaaugaca

SEQ ID NO: 1293429 - RNA, 19 nt, Human
gaaacacuucacugugcaa

SEQ ID NO: 1293430 - RNA, 20 nt, Human
gagaagacagugcuuagaga

SEQ ID NO: 1293431 - RNA, 25 nt, Human
gcugaaaacagaggcagaucaucua

SEQ ID NO: 1293432 - RNA, 23 nt, Human
uaagaggauguucccaaaucuug

SEQ ID NO: 1293433 - RNA, 22 nt, Human
uacuagaaaugacauuuucagc

SEQ ID NO: 1293434 - RNA, 21 nt, Human
ucaaaggggcugcacagagca

SEQ ID NO: 1293435 - RNA, 22 nt, Human
ucaaaggggcugcacagagcac

SEQ ID NO: 1293436 - RNA, 20 nt, Human
ucacccuuccucuccugcag

SEQ ID NO: 1293437 - RNA, 27 nt, Human
ucacccuuccucuccugcagaauaaga

SEQ ID NO: 1293438 - RNA, 23 nt, Human
ucacugugcaaauucuuagcugu

SEQ ID NO: 1293439 - RNA, 21 nt, Human
ucaguguaccccucucccuuc

SEQ ID NO: 1293440 - RNA, 24 nt, Human
ucccuccagagagucggugaaagu

SEQ ID NO: 1293441 - RNA, 25 nt, Human
ucucccuucgcuguuggcaauuaau

SEQ ID NO: 1293442 - RNA, 21 nt, Human
ucuccugcagaauaagaggau

SEQ ID NO: 1293443 - RNA, 23 nt, Human
ucuugaggcugaaaacagaggca

SEQ ID NO: 1293444 - RNA, 18 nt, Human
ugagggaagagaagacag

SEQ ID NO: 1293445 - RNA, 20 nt, Human
ugagggaagagaagacagug

SEQ ID NO: 1293446 - RNA, 25 nt, Human
ugcacagagcacuccucugaccacc

SEQ ID NO: 1293447 - RNA, 24 nt, Human
ugcagaauaagaggauguucccaa

SEQ ID NO: 1293448 - RNA, 20 nt, Human
ugugagggaagagaagacag

SEQ ID NO: 1293449 - RNA, 18 nt, Human
caaaggauagagggagcc

SEQ ID NO: 1293450 - RNA, 18 nt, Human
cucugcagggggugaagg

SEQ ID NO: 1293451 - RNA, 20 nt, Human
ugcaaaggauagagggagcc

SEQ ID NO: 1293452 - RNA, 18 nt, Human
acauagccucccaaccuc

SEQ ID NO: 1293453 - RNA, 21 nt, Human
auggcuuccagguccugcucc

SEQ ID NO: 1293454 - RNA, 22 nt, Human
cacccuggaggccaccagggcc

SEQ ID NO: 1293455 - RNA, 26 nt, Human
cacugaguccggguagaucaccuggu

SEQ ID NO: 1293456 - RNA, 22 nt, Human
cauccuuccagucacacauagc

SEQ ID NO: 1293457 - RNA, 28 nt, Human
ccacccggcaggacauccuuccagucac

SEQ ID NO: 1293458 - RNA, 20 nt, Human
ccggguagaucaccugguca

SEQ ID NO: 1293459 - RNA, 21 nt, Human
ccugugguagaacaugcaggc

SEQ ID NO: 1293460 - RNA, 19 nt, Human
cucccgcugcagggugugg

SEQ ID NO: 1293461 - RNA, 23 nt, Human
gccgauucucugcuucuugccac

SEQ ID NO: 1293462 - RNA, 20 nt, Human
gguguggugcgggugcacga

SEQ ID NO: 1293463 - RNA, 20 nt, Human
uacuugggccugugguagaa

SEQ ID NO: 1293464 - RNA, 21 nt, Human
uagccucccaaccucccuccc

SEQ ID NO: 1293465 - RNA, 23 nt, Human
ucacacauagccucccaaccucc

SEQ ID NO: 1293466 - RNA, 19 nt, Human
uggcuuccagguccugcuc

SEQ ID NO: 1293467 - RNA, 24 nt, Human
aacauaacuauuauuguaaaaaua

SEQ ID NO: 1293468 - RNA, 18 nt, Human
aggcagggaggcaggaag

SEQ ID NO: 1293469 - RNA, 20 nt, Human
cagcaguaaacaaucuauga

SEQ ID NO: 1293470 - RNA, 23 nt, Human
cuuaauacucacacacagaaaac

SEQ ID NO: 1293471 - RNA, 18 nt, Human
gaugaaguaucugcuuaa

SEQ ID NO: 1293472 - RNA, 18 nt, Human
gcagggaggcaggaaguc

SEQ ID NO: 1293473 - RNA, 24 nt, Human
gcaguaaacaaucuaugauccgga

SEQ ID NO: 1293474 - RNA, 24 nt, Human
uaaaaggaaaaaaaauccuagaaa

SEQ ID NO: 1293475 - RNA, 18 nt, Human
uaaaauuucaucaaggua

SEQ ID NO: 1293476 - RNA, 22 nt, Human
uauaaaaggaaaaaaaauccua

SEQ ID NO: 1293477 - RNA, 22 nt, Human
uauggaugaaguaucugcuuaa

SEQ ID NO: 1293478 - RNA, 23 nt, Human
ugaaaaaguaucauuuuaaaaca

SEQ ID NO: 1293479 - RNA, 24 nt, Human
uguaaaaauaaaaaauaaacauga

SEQ ID NO: 1293480 - RNA, 18 nt, Human
uuaaaaguaggaauuaga

SEQ ID NO: 1293481 - RNA, 25 nt, Human
aaagagugacaaggcaccaggacaa

SEQ ID NO: 1293482 - RNA, 20 nt, Human
aagaaccugucaggcagcac

SEQ ID NO: 1293483 - RNA, 22 nt, Human
aagagauggaucaaugaccaga

SEQ ID NO: 1293484 - RNA, 23 nt, Human
aaugaccagagacagggagagaa

SEQ ID NO: 1293485 - RNA, 22 nt, Human
agagaagaaccugucaggcagc

SEQ ID NO: 1293486 - RNA, 25 nt, Human
agagacagggagagaagaaccuguc

SEQ ID NO: 1293487 - RNA, 18 nt, Human
agaggagaauggagagga

SEQ ID NO: 1293488 - RNA, 19 nt, Human
agaugauaaagaaagaaug

SEQ ID NO: 1293489 - RNA, 19 nt, Human
aggagaagugaagacaucu

SEQ ID NO: 1293490 - RNA, 27 nt, Human
aggcuuuggagggagaugauccgacgg

SEQ ID NO: 1293491 - RNA, 18 nt, Human
agggcugaauacuauagu

SEQ ID NO: 1293492 - RNA, 22 nt, Human
caaagagauggaucaaugacca

SEQ ID NO: 1293493 - RNA, 23 nt, Human
caagaccuguuaggagucaggaa

SEQ ID NO: 1293494 - RNA, 21 nt, Human
caagauuacagaaagucaaag

SEQ ID NO: 1293495 - RNA, 28 nt, Human
cacaggaucacaagacugggaagguagg

SEQ ID NO: 1293496 - RNA, 21 nt, Human
caccaggacaagcagcucuga

SEQ ID NO: 1293497 - RNA, 23 nt, Human
cagaaagucaaagcagugucuca

SEQ ID NO: 1293498 - RNA, 23 nt, Human
cagagaaaggaaggggcuaaacc

SEQ ID NO: 1293499 - RNA, 19 nt, Human
cagagacagggagagaaga

SEQ ID NO: 1293500 - RNA, 18 nt, Human
caggaaccagccaaggag

SEQ ID NO: 1293501 - RNA, 18 nt, Human
ccacuccauuugcuggca

SEQ ID NO: 1293502 - RNA, 19 nt, Human
ccagccaaggagaagagga

SEQ ID NO: 1293503 - RNA, 20 nt, Human
ccagccaaggagaagaggag

SEQ ID NO: 1293504 - RNA, 23 nt, Human
cccagaccugggccagguuucca

SEQ ID NO: 1293505 - RNA, 21 nt, Human
ccucaucucaaaaaaugaggg

SEQ ID NO: 1293506 - RNA, 20 nt, Human
cuacagcaugaggggugcuc

SEQ ID NO: 1293507 - RNA, 22 nt, Human
cucugagaguggugagguccag

SEQ ID NO: 1293508 - RNA, 22 nt, Human
cuggucuuggcucugccucugg

SEQ ID NO: 1293509 - RNA, 19 nt, Human
gagaggaugguuggauacu

SEQ ID NO: 1293510 - RNA, 24 nt, Human
gagcccagagaaaggaaggggcua

SEQ ID NO: 1293511 - RNA, 20 nt, Human
gaggcaggaggacaagaggc

SEQ ID NO: 1293512 - RNA, 21 nt, Human
gcccagagaaaggaaggggcu

SEQ ID NO: 1293513 - RNA, 23 nt, Human
gcccagagaaaggaaggggcuaa

SEQ ID NO: 1293514 - RNA, 18 nt, Human
ggacaagaggcuuuggag

SEQ ID NO: 1293515 - RNA, 21 nt, Human
ggacaagaggcuuuggaggga

SEQ ID NO: 1293516 - RNA, 21 nt, Human
gggaagcagacugagcccaga

SEQ ID NO: 1293517 - RNA, 19 nt, Human
ggggugcucuagggaccac

SEQ ID NO: 1293518 - RNA, 24 nt, Human
uaaagagugacaaggcaccaggac

SEQ ID NO: 1293519 - RNA, 22 nt, Human
ucccucuucuugggaaugguuu

SEQ ID NO: 1293520 - RNA, 23 nt, Human
ugacaaggcaccaggacaagcag

SEQ ID NO: 1293521 - RNA, 26 nt, Human
ugagcccagagaaaggaaggggcuaa

SEQ ID NO: 1293522 - RNA, 18 nt, Human
ugaggucccucuucuugg

SEQ ID NO: 1293523 - RNA, 20 nt, Human
ugaguggugggaagcagacu

SEQ ID NO: 1293524 - RNA, 22 nt, Human
ugccucugguuugcgaugugac

SEQ ID NO: 1293525 - RNA, 20 nt, Human
ugggaagcagacugagccca

SEQ ID NO: 1293526 - RNA, 24 nt, Human
ugggaggacugagggcugaauagu

SEQ ID NO: 1293527 - RNA, 21 nt, Human
ugggccugauuccucaucuca

SEQ ID NO: 1293528 - RNA, 21 nt, Human
uugccagcugaggucccucuu

SEQ ID NO: 1293529 - RNA, 18 nt, Human
aaggagagagaagcagca

SEQ ID NO: 1293530 - RNA, 24 nt, Human
caaaaaugacugcuucagccaaag

SEQ ID NO: 1293531 - RNA, 22 nt, Human
caccuccugggaaaaugugcuc

SEQ ID NO: 1293532 - RNA, 18 nt, Human
cacgugcaggucacaggg

SEQ ID NO: 1293533 - RNA, 26 nt, Human
caggguagacucauuuucaauccauu

SEQ ID NO: 1293534 - RNA, 19 nt, Human
caucagaaaaggcaggaac

SEQ ID NO: 1293535 - RNA, 21 nt, Human
caucagaaaaggcaggaaccg

SEQ ID NO: 1293536 - RNA, 26 nt, Human
cucucaaaaaugacugcuucagccaa

SEQ ID NO: 1293537 - RNA, 19 nt, Human
cuucagccaaaggagagag

SEQ ID NO: 1293538 - RNA, 21 nt, Human
gaacaggccauuuucacuuca

SEQ ID NO: 1293539 - RNA, 23 nt, Human
gccaaaggagagagaagcagcaa

SEQ ID NO: 1293540 - RNA, 22 nt, Human
uauguucacacauacacucaug

SEQ ID NO: 1293541 - RNA, 20 nt, Human
ucaacugcaucaaaagagca

SEQ ID NO: 1293542 - RNA, 22 nt, Human
ugggaaaaugugcucucaaaaa

SEQ ID NO: 1293543 - RNA, 21 nt, Human
cacccagcaucgggucagugu

SEQ ID NO: 1293544 - RNA, 22 nt, Human
ucacccagcaucgggucagugu

SEQ ID NO: 1293545 - RNA, 21 nt, Human
ucaguguuguuugagggucug

SEQ ID NO: 1293546 - RNA, 22 nt, Human
uccuugguccucacccagcauc

SEQ ID NO: 1293547 - RNA, 25 nt, Human
accaagugcucccauaaugagaagc

SEQ ID NO: 1293548 - RNA, 19 nt, Human
agaagccauuccuagaacc

SEQ ID NO: 1293549 - RNA, 27 nt, Human
cccauaaugagaagccauuccuagaac

SEQ ID NO: 1293550 - RNA, 18 nt, Human
cuccggauccacucaauu

SEQ ID NO: 1293551 - RNA, 26 nt, Human
uaccuugaggccaauaucuccggcuc

SEQ ID NO: 1293552 - RNA, 21 nt, Human
uaguuuaauuuaaccaagugc

SEQ ID NO: 1293553 - RNA, 26 nt, Human
uaucuccggcuccggauccacucaau

SEQ ID NO: 1293554 - RNA, 18 nt, Human
ucuccggcuccggaucca

SEQ ID NO: 1293555 - RNA, 19 nt, Human
ucuccggcuccggauccac

SEQ ID NO: 1293556 - RNA, 19 nt, Human
aaacaaaccaaccacugug

SEQ ID NO: 1293557 - RNA, 19 nt, Human
aagcaugauuaaaccagug

SEQ ID NO: 1293558 - RNA, 20 nt, Human
aaucucucaucuucuuucuc

SEQ ID NO: 1293559 - RNA, 19 nt, Human
acccugaagcauauuaugg

SEQ ID NO: 1293560 - RNA, 25 nt, Human
agaauucagugaaaaccugcuccca

SEQ ID NO: 1293561 - RNA, 19 nt, Human
auguggauacccugugugc

SEQ ID NO: 1293562 - RNA, 22 nt, Human
cacaggccgaggaccgcagagc

SEQ ID NO: 1293563 - RNA, 23 nt, Human
cagugggggggccacaguuugcc

SEQ ID NO: 1293564 - RNA, 24 nt, Human
ccagcaaggcuaacuaaaucaaac

SEQ ID NO: 1293565 - RNA, 21 nt, Human
ccagugcagaaaaauacuaag

SEQ ID NO: 1293566 - RNA, 22 nt, Human
ccccagccaagcugcccggggc

SEQ ID NO: 1293567 - RNA, 22 nt, Human
ccccggaagccuagccccagcc

SEQ ID NO: 1293568 - RNA, 19 nt, Human
cccuaaguuaggguuccca

SEQ ID NO: 1293569 - RNA, 23 nt, Human
cccucagaauucagugaaaaccu

SEQ ID NO: 1293570 - RNA, 23 nt, Human
cuaacucaacaauguagcugcag

SEQ ID NO: 1293571 - RNA, 19 nt, Human
cuuucucuuuccccugccc

SEQ ID NO: 1293572 - RNA, 19 nt, Human
gcccaugaaagccacaaag

SEQ ID NO: 1293573 - RNA, 23 nt, Human
uaaaaacaaaacaaaccaaccac

SEQ ID NO: 1293574 - RNA, 20 nt, Human
uaacaaagacuucuggucag

SEQ ID NO: 1293575 - RNA, 25 nt, Human
uaacuaaaucaaacugugguuuaaa

SEQ ID NO: 1293576 - RNA, 19 nt, Human
uacaauaucaucacuaacu

SEQ ID NO: 1293577 - RNA, 22 nt, Human
ucccugcccaugaaagccacaa

SEQ ID NO: 1293578 - RNA, 19 nt, Human
ucucucaucuucuuucucu

SEQ ID NO: 1293579 - RNA, 23 nt, Human
ugaaagccacaaagagauuucuu

SEQ ID NO: 1293580 - RNA, 21 nt, Human
ugacagugggggggccacagu

SEQ ID NO: 1293581 - RNA, 24 nt, Human
ugcaggguaacauguggauacccu

SEQ ID NO: 1293582 - RNA, 20 nt, Human
ugccuuggaggacaugcaga

SEQ ID NO: 1293583 - RNA, 21 nt, Human
ugccuuggaggacaugcagag

SEQ ID NO: 1293584 - RNA, 27 nt, Human
uguagcugcaggguaacauguggauac

SEQ ID NO: 1293585 - RNA, 19 nt, Human
uuaaaccagugcagaaaaa

SEQ ID NO: 1293586 - RNA, 19 nt, Human
uuugccaaacuuugccuug

SEQ ID NO: 1293587 - RNA, 21 nt, Human
uuuguaauccaguuaagacca

SEQ ID NO: 1293588 - RNA, 18 nt, Human
uuuuacacacccugaagc

SEQ ID NO: 1293589 - RNA, 20 nt, Human
cacugcugcgaauccgggcc

SEQ ID NO: 1293590 - RNA, 25 nt, Human
ccugugaucaaaggcagccaccgac

SEQ ID NO: 1293591 - RNA, 18 nt, Human
cugcugcgaauccgggcc

SEQ ID NO: 1293592 - RNA, 21 nt, Human
cugugaucaaaggcagccacc

SEQ ID NO: 1293593 - RNA, 19 nt, Human
gccaccgacaggugcggga

SEQ ID NO: 1293594 - RNA, 22 nt, Human
ucaaaggcagccaccgacaggu

SEQ ID NO: 1293595 - RNA, 19 nt, Human
acaggaaugaggaaagaau

SEQ ID NO: 1293596 - RNA, 22 nt, Human
acaggaaugaggaaagaaugac

SEQ ID NO: 1293597 - RNA, 21 nt, Human
aggagggagacacaguucuga

SEQ ID NO: 1293598 - RNA, 18 nt, Human
cagcagaaccuuaacuga

SEQ ID NO: 1293599 - RNA, 22 nt, Human
cuucuugccgugucaucucucu

SEQ ID NO: 1293600 - RNA, 22 nt, Human
cuugccgugucaucucucuucu

SEQ ID NO: 1293601 - RNA, 23 nt, Human
gcagaaccuuaacugagugugac

SEQ ID NO: 1293602 - RNA, 21 nt, Human
gcaggagggagacacaguucu

SEQ ID NO: 1293603 - RNA, 21 nt, Human
ggucacaggaaugaggaaaga

SEQ ID NO: 1293604 - RNA, 24 nt, Human
ucacaggaaugaggaaagaaugac

SEQ ID NO: 1293605 - RNA, 18 nt, Human
ucaucucucuucucaggg

SEQ ID NO: 1293606 - RNA, 18 nt, Human
ugaggaaagaaugacucu

SEQ ID NO: 1293607 - RNA, 19 nt, Human
ugcaagcuucucuguucuc

SEQ ID NO: 1293608 - RNA, 22 nt, Human
ugcaagcuucucuguucucucc

SEQ ID NO: 1293609 - RNA, 22 nt, Human
uggcuccuagcagcagaaccuu

SEQ ID NO: 1293610 - RNA, 24 nt, Human
uuucucgcagauggucacaggaau

SEQ ID NO: 1293611 - RNA, 21 nt, Human
aaaagggaauccagagugagg

SEQ ID NO: 1293612 - RNA, 18 nt, Human
aggaaaagggaauccaga

SEQ ID NO: 1293613 - RNA, 20 nt, Human
aggaaaagggaauccagagu

SEQ ID NO: 1293614 - RNA, 22 nt, Human
augaagccaaggaccacugacc

SEQ ID NO: 1293615 - RNA, 26 nt, Human
augaagccaaggaccacugaccugac

SEQ ID NO: 1293616 - RNA, 22 nt, Human
caaggaccacugaccugaccga

SEQ ID NO: 1293617 - RNA, 23 nt, Human
caucccugagaugaagccaagga

SEQ ID NO: 1293618 - RNA, 20 nt, Human
ccugcaguguugcccaccac

SEQ ID NO: 1293619 - RNA, 20 nt, Human
cugagaugaagccaaggacc

SEQ ID NO: 1293620 - RNA, 18 nt, Human
gacuccacgucugcacag

SEQ ID NO: 1293621 - RNA, 20 nt, Human
uccagagugagguugccgac

SEQ ID NO: 1293622 - RNA, 18 nt, Human
ugaccugaccgauaaugg

SEQ ID NO: 1293623 - RNA, 24 nt, Human
ugaccugaccgauaauggaauucc

SEQ ID NO: 1293624 - RNA, 22 nt, Human
ugagaugaagccaaggaccacu

SEQ ID NO: 1293625 - RNA, 22 nt, Human
ugcacuguggcucgacaucugg

SEQ ID NO: 1293626 - RNA, 20 nt, Human
uugguucuauaaacguggag

SEQ ID NO: 1293627 - RNA, 23 nt, Human
aagaagacagcaugggcccacgc

SEQ ID NO: 1293628 - RNA, 23 nt, Human
accagugcccucccgugguccag

SEQ ID NO: 1293629 - RNA, 28 nt, Human
acccugagggacagugggugaagaggaa

SEQ ID NO: 1293630 - RNA, 19 nt, Human
agcaccagugcccucccgu

SEQ ID NO: 1293631 - RNA, 24 nt, Human
agggaugugaggaacuggacgcca

SEQ ID NO: 1293632 - RNA, 20 nt, Human
caccagugcccucccguggu

SEQ ID NO: 1293633 - RNA, 18 nt, Human
cagcggcuggacccugag

SEQ ID NO: 1293634 - RNA, 24 nt, Human
cagugggugaagaggaaggacccu

SEQ ID NO: 1293635 - RNA, 18 nt, Human
cccucccgugguccaggc

SEQ ID NO: 1293636 - RNA, 20 nt, Human
cuuuagcaccagugcccucc

SEQ ID NO: 1293637 - RNA, 20 nt, Human
gucacgugcuugaccagcug

SEQ ID NO: 1293638 - RNA, 25 nt, Human
ugacacauguacuaagaagacagca

SEQ ID NO: 1293639 - RNA, 22 nt, Human
ugugaggaacuggacgccagcg

SEQ ID NO: 1293640 - RNA, 22 nt, Human
uuaucagcuucgccucuccacu

SEQ ID NO: 1293641 - RNA, 24 nt, Human
acccuccacccccaggugagcauc

SEQ ID NO: 1293642 - RNA, 24 nt, Human
agcacccuccacccccaggugagc

SEQ ID NO: 1293643 - RNA, 19 nt, Human
cagaugcucaucugguggu

SEQ ID NO: 1293644 - RNA, 20 nt, Human
cagcacccuccacccccagg

SEQ ID NO: 1293645 - RNA, 25 nt, Human
cccccaggugagcaucugacagccu

SEQ ID NO: 1293646 - RNA, 18 nt, Human
ccuggcuggcaaaugauc

SEQ ID NO: 1293647 - RNA, 19 nt, Human
gcagguucugguugucaga

SEQ ID NO: 1293648 - RNA, 21 nt, Human
ggaggucagcacccuccaccc

SEQ ID NO: 1293649 - RNA, 18 nt, Human
ugccaucggaugcccacc

SEQ ID NO: 1293650 - RNA, 21 nt, Human
uguguggugcagguucugguu

SEQ ID NO: 1293651 - RNA, 23 nt, Human
uugucagaugcucaucugguggu

SEQ ID NO: 1293652 - RNA, 22 nt, Human
agccagccggugaggaaucagc

SEQ ID NO: 1293653 - RNA, 18 nt, Human
cagcugccgccagcucca

SEQ ID NO: 1293654 - RNA, 18 nt, Human
cagggaugccucuuccug

SEQ ID NO: 1293655 - RNA, 18 nt, Human
ccccagggaugccucuuc

SEQ ID NO: 1293656 - RNA, 19 nt, Human
ccuuggagagccccaggga

SEQ ID NO: 1293657 - RNA, 19 nt, Human
cuuggagagccccagggau

SEQ ID NO: 1293658 - RNA, 21 nt, Human
gcuggggaccagggcugggag

SEQ ID NO: 1293659 - RNA, 18 nt, Human
ggaggaugcacagagcca

SEQ ID NO: 1293660 - RNA, 20 nt, Human
ggaggaugcacagagccagc

SEQ ID NO: 1293661 - RNA, 23 nt, Human
ggcugggaggaugcacagagcca

SEQ ID NO: 1293662 - RNA, 22 nt, Human
ggcuggggaccagggcugggag

SEQ ID NO: 1293663 - RNA, 20 nt, Human
gggagggcuggggaccaggg

SEQ ID NO: 1293664 - RNA, 22 nt, Human
gggagggcuggggaccagggcu

SEQ ID NO: 1293665 - RNA, 19 nt, Human
uaccaauggcuguuucuag

SEQ ID NO: 1293666 - RNA, 23 nt, Human
uaggucaacaugagcuccuguaa

SEQ ID NO: 1293667 - RNA, 21 nt, Human
ucaguaccaauggcuguuucu

SEQ ID NO: 1293668 - RNA, 24 nt, Human
uccuguaaagggucucagggagug

SEQ ID NO: 1293669 - RNA, 20 nt, Human
ucgcugcagcugccgccagc

SEQ ID NO: 1293670 - RNA, 21 nt, Human
ucgcugcagcugccgccagcu

SEQ ID NO: 1293671 - RNA, 19 nt, Human
ucuguguuaaaauagccag

SEQ ID NO: 1293672 - RNA, 18 nt, Human
ugaguuugucccucugug

SEQ ID NO: 1293673 - RNA, 21 nt, Human
aaucagaaggcaaaaaucaaa

SEQ ID NO: 1293674 - RNA, 22 nt, Human
aggcaaaaaucaaaauuauuuc

SEQ ID NO: 1293675 - RNA, 23 nt, Human
aggcaaaaaucaaaauuauuuca

SEQ ID NO: 1293676 - RNA, 21 nt, Human
cagcagauauucucugggaac

SEQ ID NO: 1293677 - RNA, 23 nt, Human
gaaaauguuaaaagggcugagug

SEQ ID NO: 1293678 - RNA, 19 nt, Human
gaagaagacggugccuucg

SEQ ID NO: 1293679 - RNA, 24 nt, Human
guucuaccugaguuggaagaaggc

SEQ ID NO: 1293680 - RNA, 20 nt, Human
uaucagcagauauucucugg

SEQ ID NO: 1293681 - RNA, 18 nt, Human
ugaaaacagcaagacaaa

SEQ ID NO: 1293682 - RNA, 20 nt, Human
ugaaaacagcaagacaaaga

SEQ ID NO: 1293683 - RNA, 22 nt, Human
ugaaaacagcaagacaaagaca

SEQ ID NO: 1293684 - RNA, 21 nt, Human
uggcuuccggauaaacuucuu

SEQ ID NO: 1293685 - RNA, 24 nt, Human
uguauuagguuacaauuuugcaaa

SEQ ID NO: 1293686 - RNA, 21 nt, Human
uuaaaagggcugagugaaaac

SEQ ID NO: 1293687 - RNA, 21 nt, Human
uuacuuugaguuagagugagg

SEQ ID NO: 1293688 - RNA, 23 nt, Human
aaaccaaaagccggaguugggaa

SEQ ID NO: 1293689 - RNA, 19 nt, Human
aaagcccucuccggagccc

SEQ ID NO: 1293690 - RNA, 18 nt, Human
aagcccucuccggagccc

SEQ ID NO: 1293691 - RNA, 19 nt, Human
aagguggacacacaaaacc

SEQ ID NO: 1293692 - RNA, 18 nt, Human
acaaagcccucuccggag

SEQ ID NO: 1293693 - RNA, 20 nt, Human
acacaaaaccaaaagccgga

SEQ ID NO: 1293694 - RNA, 18 nt, Human
agcagccggggaggggcc

SEQ ID NO: 1293695 - RNA, 19 nt, Human
aggcucucuaagcccugcu

SEQ ID NO: 1293696 - RNA, 24 nt, Human
auaccuuuggaggugagacggccu

SEQ ID NO: 1293697 - RNA, 19 nt, Human
caaaagccggaguugggaa

SEQ ID NO: 1293698 - RNA, 22 nt, Human
caaaagccggaguugggaaaag

SEQ ID NO: 1293699 - RNA, 24 nt, Human
caagguggacacacaaaaccaaaa

SEQ ID NO: 1293700 - RNA, 19 nt, Human
cacacaaaaccaaaagccg

SEQ ID NO: 1293701 - RNA, 24 nt, Human
cagcaccagcagcucggcuuaagc

SEQ ID NO: 1293702 - RNA, 20 nt, Human
caggcucucuaagcccugcu

SEQ ID NO: 1293703 - RNA, 22 nt, Human
cagugugggacugcggcuggga

SEQ ID NO: 1293704 - RNA, 25 nt, Human
cccaccaccuucucaauuauucaca

SEQ ID NO: 1293705 - RNA, 22 nt, Human
cccccaacgccccccucauccc

SEQ ID NO: 1293706 - RNA, 19 nt, Human
ccccucaucccacggcucc

SEQ ID NO: 1293707 - RNA, 21 nt, Human
ccccucaucccacggcuccac

SEQ ID NO: 1293708 - RNA, 21 nt, Human
cccugucccccaacgcccccc

SEQ ID NO: 1293709 - RNA, 21 nt, Human
ccgccuuucaugccgcggccg

SEQ ID NO: 1293710 - RNA, 21 nt, Human
ccucaucccacggcuccacgg

SEQ ID NO: 1293711 - RNA, 18 nt, Human
ccucgccgccuuucaugc

SEQ ID NO: 1293712 - RNA, 23 nt, Human
ccugucccccaacgccccccuca

SEQ ID NO: 1293713 - RNA, 23 nt, Human
cggacucggcgcucagggucagc

SEQ ID NO: 1293714 - RNA, 21 nt, Human
cugcggcugggagcccgggcc

SEQ ID NO: 1293715 - RNA, 24 nt, Human
cugcucagaagucaagagcagcag

SEQ ID NO: 1293716 - RNA, 24 nt, Human
gaaaauucuuucucugaccaugcc

SEQ ID NO: 1293717 - RNA, 26 nt, Human
gagcagcagugcugccucuccucgcc

SEQ ID NO: 1293718 - RNA, 22 nt, Human
gcaagguggacacacaaaacca

SEQ ID NO: 1293719 - RNA, 24 nt, Human
gcagccggggaggggccgcgaggg

SEQ ID NO: 1293720 - RNA, 23 nt, Human
gccccccucaucccacggcucca

SEQ ID NO: 1293721 - RNA, 22 nt, Human
gcccgggcccuccgggagugaa

SEQ ID NO: 1293722 - RNA, 20 nt, Human
gcgaacaaagcccucuccgg

SEQ ID NO: 1293723 - RNA, 19 nt, Human
gggacuguugcaaacagcu

SEQ ID NO: 1293724 - RNA, 22 nt, Human
gggagcccgggcccuccgggag

SEQ ID NO: 1293725 - RNA, 20 nt, Human
gugaagauaccuuuggaggu

SEQ ID NO: 1293726 - RNA, 24 nt, Human
uaagcccugcucagaagucaagag

SEQ ID NO: 1293727 - RNA, 21 nt, Human
ucaggcucgcagcuccgcgcu

SEQ ID NO: 1293728 - RNA, 19 nt, Human
ucugaccaugccagacgcc

SEQ ID NO: 1293729 - RNA, 23 nt, Human
ucugccagcagccggggaggggc

SEQ ID NO: 1293730 - RNA, 18 nt, Human
ugagaauccauguggggu

SEQ ID NO: 1293731 - RNA, 23 nt, Human
ugcccugucccccaacgcccccc

SEQ ID NO: 1293732 - RNA, 26 nt, Human
ugcccugucccccaacgccccccuca

SEQ ID NO: 1293733 - RNA, 18 nt, Human
uggcgagagcgcgaacaa

SEQ ID NO: 1293734 - RNA, 19 nt, Human
uggcugaggaggcggcggg

SEQ ID NO: 1293735 - RNA, 24 nt, Human
uggggucggcuggcuccggaguug

SEQ ID NO: 1293736 - RNA, 25 nt, Human
uuugcccugucccccaacgcccccc

SEQ ID NO: 1293737 - RNA, 21 nt, Human
uuuggaggugagacggccucu

SEQ ID NO: 1293738 - RNA, 18 nt, Human
agacuuuggauggugggg

SEQ ID NO: 1293739 - RNA, 23 nt, Human
cugguacagacucauccaaaaag

SEQ ID NO: 1293740 - RNA, 21 nt, Human
ggugggggcaaaccccucuuu

SEQ ID NO: 1293741 - RNA, 23 nt, Human
guacagacucauccaaaaagcca

SEQ ID NO: 1293742 - RNA, 20 nt, Human
uagaauugccucugcuucuc

SEQ ID NO: 1293743 - RNA, 18 nt, Human
ugcagguacuuuucaucc

SEQ ID NO: 1293744 - RNA, 19 nt, Human
ugccucugcuucucagguc

SEQ ID NO: 1293745 - RNA, 20 nt, Human
uguagcguggccagcagggc

SEQ ID NO: 1293746 - RNA, 26 nt, Human
uuggauggugggggcaaaccccucuu

SEQ ID NO: 1293747 - RNA, 21 nt, Human
uugugguaaaauccagcugca

SEQ ID NO: 1293748 - RNA, 18 nt, Human
agacccggggggcaacaa

SEQ ID NO: 1293749 - RNA, 22 nt, Human
agagaggggggcagugugucca

SEQ ID NO: 1293750 - RNA, 21 nt, Human
agcagcgaguggucucagggc

SEQ ID NO: 1293751 - RNA, 20 nt, Human
agcugcagaguccgcagagg

SEQ ID NO: 1293752 - RNA, 21 nt, Human
aggcaagagaggggggcagug

SEQ ID NO: 1293753 - RNA, 18 nt, Human
caacaaucccaaaagaag

SEQ ID NO: 1293754 - RNA, 19 nt, Human
cccggggcaggggacuggc

SEQ ID NO: 1293755 - RNA, 22 nt, Human
cccgugcccucccucucccugc

SEQ ID NO: 1293756 - RNA, 19 nt, Human
ccgagcggguggggcgucu

SEQ ID NO: 1293757 - RNA, 21 nt, Human
ccugcgccggggccgcggagc

SEQ ID NO: 1293758 - RNA, 22 nt, Human
cgaguggucucagggcgcccaa

SEQ ID NO: 1293759 - RNA, 22 nt, Human
cgccuggacaccccccccguuc

SEQ ID NO: 1293760 - RNA, 21 nt, Human
cggcuggggugggaggauccg

SEQ ID NO: 1293761 - RNA, 20 nt, Human
cggggcaggggacuggcagc

SEQ ID NO: 1293762 - RNA, 24 nt, Human
gggcaggggacuggcagcagagga

SEQ ID NO: 1293763 - RNA, 20 nt, Human
ucccaacucgguaaagaccc

SEQ ID NO: 1293764 - RNA, 23 nt, Human
ucucagggcgcccaggacugguc

SEQ ID NO: 1293765 - RNA, 20 nt, Human
ucugcagagggugagagcag

SEQ ID NO: 1293766 - RNA, 23 nt, Human
uggaggcaagagaggggggcagu

SEQ ID NO: 1293767 - RNA, 21 nt, Human
ugggcuuugcccggggcaggg

SEQ ID NO: 1293768 - RNA, 24 nt, Human
uggggugggaggauccgccacucc

SEQ ID NO: 1293769 - RNA, 19 nt, Human
aagcaacucuggacagcca

SEQ ID NO: 1293770 - RNA, 22 nt, Human
agccagagaccaggugaggaca

SEQ ID NO: 1293771 - RNA, 23 nt, Human
agccagagaccaggugaggacaa

SEQ ID NO: 1293772 - RNA, 20 nt, Human
cacgauccggccagcaggau

SEQ ID NO: 1293773 - RNA, 19 nt, Human
cagaaucaaagacucuuac

SEQ ID NO: 1293774 - RNA, 21 nt, Human
ccgauccacacacaucgggug

SEQ ID NO: 1293775 - RNA, 19 nt, Human
cugggugggugcauguggc

SEQ ID NO: 1293776 - RNA, 24 nt, Human
gagagaucacagggugcaagucuc

SEQ ID NO: 1293777 - RNA, 18 nt, Human
gagggugcugggcgggug

SEQ ID NO: 1293778 - RNA, 23 nt, Human
gagggugcugggcgggugcaggu

SEQ ID NO: 1293779 - RNA, 20 nt, Human
gaucuccaacacggcaaucu

SEQ ID NO: 1293780 - RNA, 20 nt, Human
gcaggagaccaggugaguac

SEQ ID NO: 1293781 - RNA, 18 nt, Human
ggacaagguugcugggug

SEQ ID NO: 1293782 - RNA, 24 nt, Human
ggacagccagagaccaggugagga

SEQ ID NO: 1293783 - RNA, 24 nt, Human
uagaaaaauguuuacagugggcag

SEQ ID NO: 1293784 - RNA, 18 nt, Human
ucagaagaaagacaucca

SEQ ID NO: 1293785 - RNA, 21 nt, Human
uccacaugcagaauuugggau

SEQ ID NO: 1293786 - RNA, 18 nt, Human
uccgcagugcgguuccuc

SEQ ID NO: 1293787 - RNA, 18 nt, Human
ucugaggagagcugucgu

SEQ ID NO: 1293788 - RNA, 22 nt, Human
ucuggacagccagagaccaggu

SEQ ID NO: 1293789 - RNA, 21 nt, Human
ugauccgcagugcgguuccuc

SEQ ID NO: 1293790 - RNA, 18 nt, Human
ugcagguggcaucuguga

SEQ ID NO: 1293791 - RNA, 19 nt, Human
ugcugggugggugcaugug

SEQ ID NO: 1293792 - RNA, 18 nt, Human
ugggaugagugagagauc

SEQ ID NO: 1293793 - RNA, 24 nt, Human
ugggugcauguggcaucugcaaug

SEQ ID NO: 1293794 - RNA, 19 nt, Human
ugggugggugcauguggca

SEQ ID NO: 1293795 - RNA, 21 nt, Human
uguuuacagugggcagaauca

SEQ ID NO: 1293796 - RNA, 19 nt, Human
aaaaggacaguacacagag

SEQ ID NO: 1293797 - RNA, 22 nt, Human
aaaaggucaaagcaucauaaaa

SEQ ID NO: 1293798 - RNA, 18 nt, Human
aaggccccaaaaggucaa

SEQ ID NO: 1293799 - RNA, 23 nt, Human
acaaaaaaaggacaguacacaga

SEQ ID NO: 1293800 - RNA, 24 nt, Human
acuaagacaggaggauagugacuc

SEQ ID NO: 1293801 - RNA, 21 nt, Human
agacaaggcaguucaagggaa

SEQ ID NO: 1293802 - RNA, 18 nt, Human
agaggaaagggccuggcu

SEQ ID NO: 1293803 - RNA, 20 nt, Human
agccaggggaaagcacaggu

SEQ ID NO: 1293804 - RNA, 20 nt, Human
agcuagcccugggaagggaa

SEQ ID NO: 1293805 - RNA, 23 nt, Human
aggaggcagaagcagccagggga

SEQ ID NO: 1293806 - RNA, 21 nt, Human
agggggugaaggcaggcccag

SEQ ID NO: 1293807 - RNA, 20 nt, Human
agguagggcauggugggggg

SEQ ID NO: 1293808 - RNA, 19 nt, Human
aucagucaguguccagccu

SEQ ID NO: 1293809 - RNA, 24 nt, Human
auuuggcuugaaucagcauagucu

SEQ ID NO: 1293810 - RNA, 21 nt, Human
caaaaaaaggacaguacacag

SEQ ID NO: 1293811 - RNA, 21 nt, Human
caaagcaucauaaaauauagg

SEQ ID NO: 1293812 - RNA, 19 nt, Human
caagaaaagaggggacgau

SEQ ID NO: 1293813 - RNA, 21 nt, Human
caaggccccaaaaggucaaag

SEQ ID NO: 1293814 - RNA, 22 nt, Human
caaggccccaaaaggucaaagg

SEQ ID NO: 1293815 - RNA, 26 nt, Human
caauucccaagaaaagaggggacgau

SEQ ID NO: 1293816 - RNA, 18 nt, Human
cacuggggaaaugagggg

SEQ ID NO: 1293817 - RNA, 20 nt, Human
caguguccagccugagaagu

SEQ ID NO: 1293818 - RNA, 21 nt, Human
caucccccuagugcagucuca

SEQ ID NO: 1293819 - RNA, 21 nt, Human
ccaagaaaagaggggacgaug

SEQ ID NO: 1293820 - RNA, 21 nt, Human
ccagaacaaaaaaaggacaac

SEQ ID NO: 1293821 - RNA, 24 nt, Human
cccaaaaggucaaagcaucauaaa

SEQ ID NO: 1293822 - RNA, 19 nt, Human
cccagaacaaaaaaaggac

SEQ ID NO: 1293823 - RNA, 25 nt, Human
ccccugguugccuagugccuggucc

SEQ ID NO: 1293824 - RNA, 18 nt, Human
cuagcccugggaagggaa

SEQ ID NO: 1293825 - RNA, 18 nt, Human
gaaagcacagguacagga

SEQ ID NO: 1293826 - RNA, 22 nt, Human
gcccagaacaaaaaaaggacag

SEQ ID NO: 1293827 - RNA, 18 nt, Human
ggcaugguggggggugac

SEQ ID NO: 1293828 - RNA, 20 nt, Human
guuugucugugucccuacca

SEQ ID NO: 1293829 - RNA, 24 nt, Human
uacacagaggaaagggccuggcuu

SEQ ID NO: 1293830 - RNA, 24 nt, Human
uacaggacuauguuguggcuuccc

SEQ ID NO: 1293831 - RNA, 22 nt, Human
uacauagugauaugguuugucu

SEQ ID NO: 1293832 - RNA, 20 nt, Human
uacuuuauaaauuauccagu

SEQ ID NO: 1293833 - RNA, 23 nt, Human
uagaaccagugaaagauagauac

SEQ ID NO: 1293834 - RNA, 22 nt, Human
uagacagacagaugaauggaug

SEQ ID NO: 1293835 - RNA, 19 nt, Human
uagagugcaagaauggacu

SEQ ID NO: 1293836 - RNA, 23 nt, Human
uagagugcaagaauggacuaaua

SEQ ID NO: 1293837 - RNA, 22 nt, Human
uagauagacagacagaugaaug

SEQ ID NO: 1293838 - RNA, 23 nt, Human
uaggaauuagcuagcccugggaa

SEQ ID NO: 1293839 - RNA, 23 nt, Human
uaugacaggugugcucagauggc

SEQ ID NO: 1293840 - RNA, 24 nt, Human
ucagaauaacuccuauaucaguca

SEQ ID NO: 1293841 - RNA, 24 nt, Human
ucagagcuguagguacuaccccug

SEQ ID NO: 1293842 - RNA, 18 nt, Human
ucaguaggcucagagcug

SEQ ID NO: 1293843 - RNA, 20 nt, Human
uccagccugagaaguagaac

SEQ ID NO: 1293844 - RNA, 22 nt, Human
ucccaagaaaagaggggacgau

SEQ ID NO: 1293845 - RNA, 19 nt, Human
ucccuaccaaaaucucaug

SEQ ID NO: 1293846 - RNA, 21 nt, Human
uccucauccaucaaggcccca

SEQ ID NO: 1293847 - RNA, 19 nt, Human
uccugaggcuuccccagcc

SEQ ID NO: 1293848 - RNA, 22 nt, Human
ucuccuguuggccuugugaaga

SEQ ID NO: 1293849 - RNA, 21 nt, Human
ucucuaggaauuagcuagccc

SEQ ID NO: 1293850 - RNA, 20 nt, Human
ugaaagauagauacauagug

SEQ ID NO: 1293851 - RNA, 20 nt, Human
ugaagacaugucuugcuucu

SEQ ID NO: 1293852 - RNA, 19 nt, Human
ugaaggcaggcccagaaca

SEQ ID NO: 1293853 - RNA, 20 nt, Human
ugacugaaucauggggcugg

SEQ ID NO: 1293854 - RNA, 21 nt, Human
ugagaaguagaaccagugaaa

SEQ ID NO: 1293855 - RNA, 20 nt, Human
uggggaaaugagggggugaa

SEQ ID NO: 1293856 - RNA, 18 nt, Human
uggucacuggggaaauga

SEQ ID NO: 1293857 - RNA, 24 nt, Human
uggugguggugcuggaggggggau

SEQ ID NO: 1293858 - RNA, 24 nt, Human
ugucuugcuucuucuucaccuuca

SEQ ID NO: 1293859 - RNA, 24 nt, Human
uuccugaggcuuccccagccaugc

SEQ ID NO: 1293860 - RNA, 25 nt, Human
uuccugaggcuuccccagccaugcc

SEQ ID NO: 1293861 - RNA, 18 nt, Human
uucuccuuucacucacug

SEQ ID NO: 1293862 - RNA, 23 nt, Human
uuggccuugugaagacaugucuu

SEQ ID NO: 1293863 - RNA, 25 nt, Human
uuuaauacaccuacuggcuaugguc

SEQ ID NO: 1293864 - RNA, 19 nt, Human
aaaauuauaaauguaggcu

SEQ ID NO: 1293865 - RNA, 18 nt, Human
aaguagcugggauuacag

SEQ ID NO: 1293866 - RNA, 26 nt, Human
aaguagcugggauuacagccacaugc

SEQ ID NO: 1293867 - RNA, 21 nt, Human
aaugcaguggugcgaucucag

SEQ ID NO: 1293868 - RNA, 24 nt, Human
aaugcaguggugcgaucucagcuc

SEQ ID NO: 1293869 - RNA, 24 nt, Human
aauuuaguagagaugggguuucac

SEQ ID NO: 1293870 - RNA, 24 nt, Human
aauuuuuguaauuuaguagagaug

SEQ ID NO: 1293871 - RNA, 18 nt, Human
accauguuggccaggcug

SEQ ID NO: 1293872 - RNA, 24 nt, Human
acucugucgcccaggcuggaaugc

SEQ ID NO: 1293873 - RNA, 20 nt, Human
agcacucugggaggcugagg

SEQ ID NO: 1293874 - RNA, 21 nt, Human
aggcaccacgucuggccccaa

SEQ ID NO: 1293875 - RNA, 22 nt, Human
aggcugggcgcgguggcucacg

SEQ ID NO: 1293876 - RNA, 22 nt, Human
agguacaauuuucccaaaauuu

SEQ ID NO: 1293877 - RNA, 22 nt, Human
aguagagaugggguuucaccau

SEQ ID NO: 1293878 - RNA, 24 nt, Human
aguggugcgaucucagcucacugc

SEQ ID NO: 1293879 - RNA, 20 nt, Human
aguucaagugacucuccugc

SEQ ID NO: 1293880 - RNA, 22 nt, Human
augggguuucaccauguuggcc

SEQ ID NO: 1293881 - RNA, 23 nt, Human
augggguuucaccauguuggcca

SEQ ID NO: 1293882 - RNA, 24 nt, Human
augggguuucaccauguuggccag

SEQ ID NO: 1293883 - RNA, 22 nt, Human
caagugacucuccugccucagc

SEQ ID NO: 1293884 - RNA, 27 nt, Human
caagugacucuccugccucagccuccc

SEQ ID NO: 1293885 - RNA, 19 nt, Human
caagugauccacccccacc

SEQ ID NO: 1293886 - RNA, 24 nt, Human
caccaugcccagcuaauuuuugua

SEQ ID NO: 1293887 - RNA, 21 nt, Human
caccauguuggccaggcuggu

SEQ ID NO: 1293888 - RNA, 24 nt, Human
caccauguuggccaggcuggucuc

SEQ ID NO: 1293889 - RNA, 27 nt, Human
caccauguuggccaggcuggucucaaa

SEQ ID NO: 1293890 - RNA, 24 nt, Human
cacgccuguaaucccagcacucug

SEQ ID NO: 1293891 - RNA, 22 nt, Human
cacgucuggccccaauuugcuu

SEQ ID NO: 1293892 - RNA, 22 nt, Human
cacucugucgcccaggcuggaa

SEQ ID NO: 1293893 - RNA, 19 nt, Human
cacugcagucucuggcucc

SEQ ID NO: 1293894 - RNA, 24 nt, Human
cagcacucugggaggcugaggcgg

SEQ ID NO: 1293895 - RNA, 24 nt, Human
cauguuggccaggcuggucucaaa

SEQ ID NO: 1293896 - RNA, 19 nt, Human
cccaaguagcugggauuac

SEQ ID NO: 1293897 - RNA, 21 nt, Human
cccccaccuaggucucccaaa

SEQ ID NO: 1293898 - RNA, 24 nt, Human
ccugaccucaagugauccaccccc

SEQ ID NO: 1293899 - RNA, 24 nt, Human
ccugaccucaagugauccaccccc

SEQ ID NO: 1293900 - RNA, 23 nt, Human
ccugaguucaagugacucuccug

SEQ ID NO: 1293901 - RNA, 23 nt, Human
ccugccucagccucccaaguagc

SEQ ID NO: 1293902 - RNA, 18 nt, Human
ccuguaaucccagcacuc

SEQ ID NO: 1293903 - RNA, 24 nt, Human
cgccuguaaucccagcacucuggg

SEQ ID NO: 1293904 - RNA, 18 nt, Human
cucaagugauccaccccc

SEQ ID NO: 1293905 - RNA, 19 nt, Human
cucaagugauccacccccc

SEQ ID NO: 1293906 - RNA, 23 nt, Human
cucacgccuguaaucccagcacu

SEQ ID NO: 1293907 - RNA, 24 nt, Human
cucacgccuguaaucccagcacuc

SEQ ID NO: 1293908 - RNA, 21 nt, Human
cucacugcagucucuggcucc

SEQ ID NO: 1293909 - RNA, 23 nt, Human
cucagccucccaaguagcuggga

SEQ ID NO: 1293910 - RNA, 19 nt, Human
cuccugaguucaagugacu

SEQ ID NO: 1293911 - RNA, 27 nt, Human
cucuccugccucagccucccaaguagc

SEQ ID NO: 1293912 - RNA, 23 nt, Human
cugccucagccucccaaguagcu

SEQ ID NO: 1293913 - RNA, 23 nt, Human
cuguuuuguuuuuaaacaucaua

SEQ ID NO: 1293914 - RNA, 18 nt, Human
gaccucaagugauccacc

SEQ ID NO: 1293915 - RNA, 20 nt, Human
gagaugggguuucaccaugu

SEQ ID NO: 1293916 - RNA, 24 nt, Human
gagaugggguuucaccauguuggc

SEQ ID NO: 1293917 - RNA, 24 nt, Human
gauuacagccacaugccaccaugc

SEQ ID NO: 1293918 - RNA, 20 nt, Human
gcccaggcuggaaugcagug

SEQ ID NO: 1293919 - RNA, 23 nt, Human
gcuggucucaaacuccugaccuc

SEQ ID NO: 1293920 - RNA, 23 nt, Human
ggcgcgguggcucacgccuguaa

SEQ ID NO: 1293921 - RNA, 21 nt, Human
ggcucacgccuguaaucccag

SEQ ID NO: 1293922 - RNA, 24 nt, Human
ggcuggucucaaacuccugaccuc

SEQ ID NO: 1293923 - RNA, 22 nt, Human
gggguuucaccauguuggccag

SEQ ID NO: 1293924 - RNA, 22 nt, Human
ggguuucaccauguuggccagg

SEQ ID NO: 1293925 - RNA, 18 nt, Human
gguaaaagagaaugaaaa

SEQ ID NO: 1293926 - RNA, 23 nt, Human
gguggcucacgccuguaauccca

SEQ ID NO: 1293927 - RNA, 24 nt, Human
gguggcucacgccuguaaucccag

SEQ ID NO: 1293928 - RNA, 23 nt, Human
guagagaugggguuucaccaugu

SEQ ID NO: 1293929 - RNA, 24 nt, Human
gugacucuccugccucagccuccc

SEQ ID NO: 1293930 - RNA, 26 nt, Human
gugauccacccccaccuaggucuccc

SEQ ID NO: 1293931 - RNA, 23 nt, Human
guggcucacgccuguaaucccag

SEQ ID NO: 1293932 - RNA, 23 nt, Human
uaauuuuuguaauuuaguagaga

SEQ ID NO: 1293933 - RNA, 22 nt, Human
uacagccacaugccaccaugcc

SEQ ID NO: 1293934 - RNA, 22 nt, Human
uaccaagguuagugcucauauu

SEQ ID NO: 1293935 - RNA, 22 nt, Human
uagagaugggguuucaccaugu

SEQ ID NO: 1293936 - RNA, 24 nt, Human
uaguagagaugggguuucaccaug

SEQ ID NO: 1293937 - RNA, 26 nt, Human
uaguagagaugggguuucaccauguu

SEQ ID NO: 1293938 - RNA, 24 nt, Human
uauguaaugaaacuaauacacuga

SEQ ID NO: 1293939 - RNA, 19 nt, Human
ucacugcagucucuggcuc

SEQ ID NO: 1293940 - RNA, 20 nt, Human
ucacugcagucucuggcucc

SEQ ID NO: 1293941 - RNA, 22 nt, Human
ucacugcagucucuggcuccug

SEQ ID NO: 1293942 - RNA, 18 nt, Human
ucagccucccaaguagcu

SEQ ID NO: 1293943 - RNA, 20 nt, Human
ucagccucccaaguagcugg

SEQ ID NO: 1293944 - RNA, 23 nt, Human
uccacccccaccuaggucuccca

SEQ ID NO: 1293945 - RNA, 23 nt, Human
ucccaaguagcugggauuacagc

SEQ ID NO: 1293946 - RNA, 21 nt, Human
uccugaguucaagugacucuc

SEQ ID NO: 1293947 - RNA, 24 nt, Human
uccugaguucaagugacucuccug

SEQ ID NO: 1293948 - RNA, 22 nt, Human
ucgcccaggcuggaaugcagug

SEQ ID NO: 1293949 - RNA, 22 nt, Human
ucucacucugucgcccaggcug

SEQ ID NO: 1293950 - RNA, 23 nt, Human
ucucacucugucgcccaggcugg

SEQ ID NO: 1293951 - RNA, 24 nt, Human
ucucacucugucgcccaggcugga

SEQ ID NO: 1293952 - RNA, 26 nt, Human
ucucacucugucgcccaggcuggaau

SEQ ID NO: 1293953 - RNA, 27 nt, Human
ucucacucugucgcccaggcuggaaug

SEQ ID NO: 1293954 - RNA, 23 nt, Human
ucucuggcuccugaguucaagug

SEQ ID NO: 1293955 - RNA, 24 nt, Human
ucugucgcccaggcuggaaugcag

SEQ ID NO: 1293956 - RNA, 22 nt, Human
ugaccucaagugauccaccccc

SEQ ID NO: 1293957 - RNA, 18 nt, Human
ugagacagagucucacuc

SEQ ID NO: 1293958 - RNA, 22 nt, Human
ugagacagagucucacucuguc

SEQ ID NO: 1293959 - RNA, 18 nt, Human
ugagauugcaggcgugag

SEQ ID NO: 1293960 - RNA, 23 nt, Human
ugagauugcaggcgugaggcacc

SEQ ID NO: 1293961 - RNA, 24 nt, Human
ugagauugcaggcgugaggcacca

SEQ ID NO: 1293962 - RNA, 24 nt, Human
ugccucagccucccaaguagcugg

SEQ ID NO: 1293963 - RNA, 24 nt, Human
uggaaugcaguggugcgaucucag

SEQ ID NO: 1293964 - RNA, 24 nt, Human
uggccaggcuggucucaaacuccu

SEQ ID NO: 1293965 - RNA, 24 nt, Human
uggcucacgccuguaaucccagca

SEQ ID NO: 1293966 - RNA, 28 nt, Human
uggcuccugaguucaagugacucuccuu

SEQ ID NO: 1293967 - RNA, 19 nt, Human
ugggaggcugaggcgggug

SEQ ID NO: 1293968 - RNA, 20 nt, Human
ugggaggcugaggcgggugg

SEQ ID NO: 1293969 - RNA, 24 nt, Human
ugggauuacagccacaugccacca

SEQ ID NO: 1293970 - RNA, 25 nt, Human
ugggauuacagccacaugccaccau

SEQ ID NO: 1293971 - RNA, 24 nt, Human
ugggguuucaccauguuggccagg

SEQ ID NO: 1293972 - RNA, 24 nt, Human
uggugcgaucucagcucacugcag

SEQ ID NO: 1293973 - RNA, 18 nt, Human
uuaguagagaugggguuu

SEQ ID NO: 1293974 - RNA, 22 nt, Human
uuaguagagaugggguuucacc

SEQ ID NO: 1293975 - RNA, 24 nt, Human
uuaguagagaugggguuucaccau

SEQ ID NO: 1293976 - RNA, 23 nt, Human
uucaagugacucuccugccucag

SEQ ID NO: 1293977 - RNA, 24 nt, Human
uucaagugacucuccugccucagc

SEQ ID NO: 1293978 - RNA, 20 nt, Human
uucuccuauguaaugaaacu

SEQ ID NO: 1293979 - RNA, 21 nt, Human
uucugcagguacaauuuuccc

SEQ ID NO: 1293980 - RNA, 24 nt, Human
uuucaccauguuggccaggcuggu

SEQ ID NO: 1293981 - RNA, 19 nt, Human
uuuuuguaauuuaguagag

SEQ ID NO: 1293982 - RNA, 23 nt, Human
aaacauacaacuucucaagaugc

SEQ ID NO: 1293983 - RNA, 26 nt, Human
aaagaagaaaaagaaaauguagaaaa

SEQ ID NO: 1293984 - RNA, 24 nt, Human
aaccugggugacagagcaagacuc

SEQ ID NO: 1293985 - RNA, 22 nt, Human
aagaaaaagaaaauguagaaaa

SEQ ID NO: 1293986 - RNA, 18 nt, Human
aagaagaaaaagaaaaug

SEQ ID NO: 1293987 - RNA, 19 nt, Human
aagaagaaaaagaaaaugu

SEQ ID NO: 1293988 - RNA, 22 nt, Human
aagaagaaaaagaaaauguaga

SEQ ID NO: 1293989 - RNA, 24 nt, Human
acagagcaagacuccaucucaaaa

SEQ ID NO: 1293990 - RNA, 20 nt, Human
accgagaucacaccacugca

SEQ ID NO: 1293991 - RNA, 23 nt, Human
accugggugacagagcaagacuc

SEQ ID NO: 1293992 - RNA, 18 nt, Human
acugcacuccaaccuggg

SEQ ID NO: 1293993 - RNA, 24 nt, Human
acugcacuccaaccugggugacag

SEQ ID NO: 1293994 - RNA, 21 nt, Human
aggcggagguugcagugaacc

SEQ ID NO: 1293995 - RNA, 24 nt, Human
aggcggagguugcagugaaccgag

SEQ ID NO: 1293996 - RNA, 24 nt, Human
aucacaccacugcacuccaaccug

SEQ ID NO: 1293997 - RNA, 19 nt, Human
caacucucaguuccaauuu

SEQ ID NO: 1293998 - RNA, 23 nt, Human
caagacuccaucucaaaagaaga

SEQ ID NO: 1293999 - RNA, 26 nt, Human
caccacugcacuccaaccugggugac

SEQ ID NO: 1294000 - RNA, 23 nt, Human
cacuccaaccugggugacagagc

SEQ ID NO: 1294001 - RNA, 23 nt, Human
cacugcacuccaaccugggugac

SEQ ID NO: 1294002 - RNA, 24 nt, Human
cacugcacuccaaccugggugaca

SEQ ID NO: 1294003 - RNA, 20 nt, Human
ccacugcacuccaaccuggg

SEQ ID NO: 1294004 - RNA, 24 nt, Human
ccacugcacuccaaccugggugac

SEQ ID NO: 1294005 - RNA, 25 nt, Human
ccacugcacuccaaccugggugaca

SEQ ID NO: 1294006 - RNA, 18 nt, Human
cguaagcuucuucuuuac

SEQ ID NO: 1294007 - RNA, 22 nt, Human
gagguugcagugaaccgagauc

SEQ ID NO: 1294008 - RNA, 18 nt, Human
ggagguugcagugaaccg

SEQ ID NO: 1294009 - RNA, 24 nt, Human
ggagguugcagugaaccgagauca

SEQ ID NO: 1294010 - RNA, 23 nt, Human
ucacaccacugcacuccaaccug

SEQ ID NO: 1294011 - RNA, 24 nt, Human
uccaucucaaaagaagaaaaagaa

SEQ ID NO: 1294012 - RNA, 18 nt, Human
ucucaaaagaagaaaaag

SEQ ID NO: 1294013 - RNA, 23 nt, Human
ugcaaaauuuccaacugauuuug

SEQ ID NO: 1294014 - RNA, 18 nt, Human
ugcagcaaaauuuacaaa

SEQ ID NO: 1294015 - RNA, 20 nt, Human
uugcagugaaccgagaucac

SEQ ID NO: 1294016 - RNA, 22 nt, Human
aaaauacacuucaaagcuaugg

SEQ ID NO: 1294017 - RNA, 23 nt, Human
aaaauacugagaguugcuucccu

SEQ ID NO: 1294018 - RNA, 20 nt, Human
aaacaaacaaacaaauacag

SEQ ID NO: 1294019 - RNA, 22 nt, Human
aaacucaaccauccacaaauua

SEQ ID NO: 1294020 - RNA, 25 nt, Human
aaagaacugugcccuaaaauguaaa

SEQ ID NO: 1294021 - RNA, 18 nt, Human
aaauaacaaggcucuaaa

SEQ ID NO: 1294022 - RNA, 24 nt, Human
aacacaggacaaauucccauucuu

SEQ ID NO: 1294023 - RNA, 23 nt, Human
aaccauuuugaucaaaggugauc

SEQ ID NO: 1294024 - RNA, 18 nt, Human
aauauggguagggaugag

SEQ ID NO: 1294025 - RNA, 22 nt, Human
acagacaggacacauggcagug

SEQ ID NO: 1294026 - RNA, 19 nt, Human
acagagaaaaacaaacaaa

SEQ ID NO: 1294027 - RNA, 21 nt, Human
accauucaaaaaaguucucca

SEQ ID NO: 1294028 - RNA, 22 nt, Human
accuggugaguggguuuuauga

SEQ ID NO: 1294029 - RNA, 23 nt, Human
agaaaaacaaacaaacaaacaaa

SEQ ID NO: 1294030 - RNA, 24 nt, Human
agaccccaaguguucccaguucuc

SEQ ID NO: 1294031 - RNA, 24 nt, Human
agagaaaaacaaacaaacaaacaa

SEQ ID NO: 1294032 - RNA, 23 nt, Human
aggauacgcacucucugguguuu

SEQ ID NO: 1294033 - RNA, 21 nt, Human
agggggagaagcagauggagc

SEQ ID NO: 1294034 - RNA, 22 nt, Human
auacacuucaaagcuauggccc

SEQ ID NO: 1294035 - RNA, 19 nt, Human
aucaaguacuagauagggc

SEQ ID NO: 1294036 - RNA, 19 nt, Human
aucacuuuuuggagaaaca

SEQ ID NO: 1294037 - RNA, 23 nt, Human
aucacuuuuuggagaaacauaca

SEQ ID NO: 1294038 - RNA, 20 nt, Human
auggagcaucuccuucacug

SEQ ID NO: 1294039 - RNA, 21 nt, Human
caaaauaaaaacaucaacauc

SEQ ID NO: 1294040 - RNA, 27 nt, Human
caaaauacugagaguugcuucccuaug

SEQ ID NO: 1294041 - RNA, 23 nt, Human
caaacuccaccaaauacucugaa

SEQ ID NO: 1294042 - RNA, 22 nt, Human
caaauaguucacuuugcuuggg

SEQ ID NO: 1294043 - RNA, 23 nt, Human
caagaaagggacaaaaacaacua

SEQ ID NO: 1294044 - RNA, 25 nt, Human
cacagagaaaaacaaacaaacaaac

SEQ ID NO: 1294045 - RNA, 25 nt, Human
cacauggcagugcacuauucaaaau

SEQ ID NO: 1294046 - RNA, 20 nt, Human
cacuguaacuaaaagaaagc

SEQ ID NO: 1294047 - RNA, 26 nt, Human
cagcaaugccucguauuccacaacca

SEQ ID NO: 1294048 - RNA, 20 nt, Human
caguucuccuucuaaguaac

SEQ ID NO: 1294049 - RNA, 18 nt, Human
cauacauauauauacaua

SEQ ID NO: 1294050 - RNA, 19 nt, Human
caucacagagaaaaacaaa

SEQ ID NO: 1294051 - RNA, 23 nt, Human
ccagaacacaggacaaauuccca

SEQ ID NO: 1294052 - RNA, 20 nt, Human
cccaaauauaguuaacuucu

SEQ ID NO: 1294053 - RNA, 21 nt, Human
ccccagacacuaaagcaagcu

SEQ ID NO: 1294054 - RNA, 21 nt, Human
ccuaugcucaacauccauagg

SEQ ID NO: 1294055 - RNA, 19 nt, Human
ccugaggccaaauucuacu

SEQ ID NO: 1294056 - RNA, 22 nt, Human
cgaaaaacagcauucugacuaa

SEQ ID NO: 1294057 - RNA, 20 nt, Human
cuacaagguuaacccucaac

SEQ ID NO: 1294058 - RNA, 18 nt, Human
cucaucacagagaaaaac

SEQ ID NO: 1294059 - RNA, 20 nt, Human
cuggcuucuuuaccuugacu

SEQ ID NO: 1294060 - RNA, 21 nt, Human
cugugcuuagccauauuuagc

SEQ ID NO: 1294061 - RNA, 21 nt, Human
gaaaaacagcauucugacuaa

SEQ ID NO: 1294062 - RNA, 20 nt, Human
gaaaagauucuaccaccuuc

SEQ ID NO: 1294063 - RNA, 24 nt, Human
gagaaaaacaaacaaacaaacaaa

SEQ ID NO: 1294064 - RNA, 18 nt, Human
gagaaugguaauucuucu

SEQ ID NO: 1294065 - RNA, 24 nt, Human
gagcacugaccucaucacagagaa

SEQ ID NO: 1294066 - RNA, 23 nt, Human
gcaaucaucugcauuuuuaccac

SEQ ID NO: 1294067 - RNA, 25 nt, Human
gcagugcacuauucaaaaugcuuug

SEQ ID NO: 1294068 - RNA, 22 nt, Human
gcgaacucagguaaauggaaau

SEQ ID NO: 1294069 - RNA, 21 nt, Human
gcucuaaaagcagaauuauuu

SEQ ID NO: 1294070 - RNA, 20 nt, Human
ggaauccuuucuacauaccc

SEQ ID NO: 1294071 - RNA, 21 nt, Human
guaaaauagucuuucucccau

SEQ ID NO: 1294072 - RNA, 20 nt, Human
guaagaauuuuuugguuggg

SEQ ID NO: 1294073 - RNA, 20 nt, Human
guacucugggaagguuugaa

SEQ ID NO: 1294074 - RNA, 23 nt, Human
gugaaaauuaaacaccuaguucg

SEQ ID NO: 1294075 - RNA, 21 nt, Human
gugcucuuaugaccugugcuu

SEQ ID NO: 1294076 - RNA, 22 nt, Human
guugugaguggcugauaggggu

SEQ ID NO: 1294077 - RNA, 21 nt, Human
uaaaaagccugcaaaccccau

SEQ ID NO: 1294078 - RNA, 23 nt, Human
uaaaauaacaaggcucuaaaagc

SEQ ID NO: 1294079 - RNA, 19 nt, Human
uaaaaucuuuggcugacau

SEQ ID NO: 1294080 - RNA, 21 nt, Human
uaaaauggaagauucaggccc

SEQ ID NO: 1294081 - RNA, 21 nt, Human
uaacauagacgacugugugaa

SEQ ID NO: 1294082 - RNA, 20 nt, Human
uaacuaaaagaaagcaaacc

SEQ ID NO: 1294083 - RNA, 20 nt, Human
uaagaggcugaaaagauucu

SEQ ID NO: 1294084 - RNA, 21 nt, Human
uaaggagaaaagcaaagggua

SEQ ID NO: 1294085 - RNA, 23 nt, Human
uaaggagaaaagcaaaggguaaa

SEQ ID NO: 1294086 - RNA, 22 nt, Human
uaaguagggcaagauauaauau

SEQ ID NO: 1294087 - RNA, 22 nt, Human
uacaaacucaaccauccacaaa

SEQ ID NO: 1294088 - RNA, 24 nt, Human
uacagcaagagaaagggggagaag

SEQ ID NO: 1294089 - RNA, 25 nt, Human
uacagcaagagaaagggggagaagc

SEQ ID NO: 1294090 - RNA, 23 nt, Human
uagauagggcuuuuucuugaaag

SEQ ID NO: 1294091 - RNA, 21 nt, Human
uaggaccaaauuuggaaaggu

SEQ ID NO: 1294092 - RNA, 19 nt, Human
uaggaugcuaauaaacccu

SEQ ID NO: 1294093 - RNA, 21 nt, Human
ucaaauucaaacuccaccaaa

SEQ ID NO: 1294094 - RNA, 18 nt, Human
ucagagcacugaccucau

SEQ ID NO: 1294095 - RNA, 20 nt, Human
ucauaugaucuaaaccugaa

SEQ ID NO: 1294096 - RNA, 24 nt, Human
ucccuuuuuccucuuacuaaaagu

SEQ ID NO: 1294097 - RNA, 21 nt, Human
ucuaaaccugaacacauggau

SEQ ID NO: 1294098 - RNA, 23 nt, Human
ucuccaauaaccaucuucuuuaa

SEQ ID NO: 1294099 - RNA, 22 nt, Human
ucucugguguuucugcacgcuu

SEQ ID NO: 1294100 - RNA, 22 nt, Human
ucugcaaccuacaagguuaacc

SEQ ID NO: 1294101 - RNA, 19 nt, Human
ucuggggggaaaaaugauu

SEQ ID NO: 1294102 - RNA, 24 nt, Human
ucuuaugaccugugcuuagccaua

SEQ ID NO: 1294103 - RNA, 18 nt, Human
ucuucaccauaaaaagcc

SEQ ID NO: 1294104 - RNA, 19 nt, Human
ucuucaguaauuuuccuca

SEQ ID NO: 1294105 - RNA, 28 nt, Human
ugaaaaaaauuccuggaaaccaaagaag

SEQ ID NO: 1294106 - RNA, 20 nt, Human
ugaaauauuuuuuugucccc

SEQ ID NO: 1294107 - RNA, 20 nt, Human
ugaaaucugacuuuuuacuu

SEQ ID NO: 1294108 - RNA, 24 nt, Human
ugaacaggaggcugacaaacaagg

SEQ ID NO: 1294109 - RNA, 23 nt, Human
ugaccugaggccaaauucuacuc

SEQ ID NO: 1294110 - RNA, 19 nt, Human
ugaguaaaaggagugagga

SEQ ID NO: 1294111 - RNA, 25 nt, Human
ugccauuguccaauagaauuuuuca

SEQ ID NO: 1294112 - RNA, 22 nt, Human
ugccuguggcauuauauaauga

SEQ ID NO: 1294113 - RNA, 23 nt, Human
ugcucaacauccauaggaccaaa

SEQ ID NO: 1294114 - RNA, 19 nt, Human
ugcucagcaaaauaaaaac

SEQ ID NO: 1294115 - RNA, 21 nt, Human
ugcucugcacugcacagguaa

SEQ ID NO: 1294116 - RNA, 18 nt, Human
uggaaaguuuggcaacag

SEQ ID NO: 1294117 - RNA, 24 nt, Human
uggcagugcacuauucaaaaugcu

SEQ ID NO: 1294118 - RNA, 18 nt, Human
uggccugguacaggggga

SEQ ID NO: 1294119 - RNA, 18 nt, Human
uggcugaaaucaguugcu

SEQ ID NO: 1294120 - RNA, 23 nt, Human
ugguuuuaucacuuuuuggagaa

SEQ ID NO: 1294121 - RNA, 18 nt, Human
uguaauaguagugaaggu

SEQ ID NO: 1294122 - RNA, 20 nt, Human
uguaauaugcuauuaccuua

SEQ ID NO: 1294123 - RNA, 21 nt, Human
uguacucugggaagguuugaa

SEQ ID NO: 1294124 - RNA, 18 nt, Human
ugugcacaagaaaugaaa

SEQ ID NO: 1294125 - RNA, 19 nt, Human
ugugcacaagaaaugaaau

SEQ ID NO: 1294126 - RNA, 25 nt, Human
ugugcacaagaaaugaaaucuauuu

SEQ ID NO: 1294127 - RNA, 26 nt, Human
ugugcacaagaaaugaaaucuauuuc

SEQ ID NO: 1294128 - RNA, 25 nt, Human
uguucuuacaaacucaaccauccac

SEQ ID NO: 1294129 - RNA, 27 nt, Human
uuagccccaaagaacugugcccuaaaa

SEQ ID NO: 1294130 - RNA, 21 nt, Human
uuauucccagaacacaggaca

SEQ ID NO: 1294131 - RNA, 21 nt, Human
uucaaaaucagagcacugacc

SEQ ID NO: 1294132 - RNA, 21 nt, Human
uucacagacaggacacauggc

SEQ ID NO: 1294133 - RNA, 21 nt, Human
uucccagaacacaggacaaaa

SEQ ID NO: 1294134 - RNA, 19 nt, Human
uugaauuaaaugugaaugg

SEQ ID NO: 1294135 - RNA, 18 nt, Human
uugauuuaugaaggguuu

SEQ ID NO: 1294136 - RNA, 22 nt, Human
uuuaucacuuuuuggagaaaca

SEQ ID NO: 1294137 - RNA, 23 nt, Human
uuucuaagccucuucaauuauua

SEQ ID NO: 1294138 - RNA, 19 nt, Human
uuugaaaaaaauuccugga

SEQ ID NO: 1294139 - RNA, 20 nt, Human
uuugcuaaugacagacccca

SEQ ID NO: 1294140 - RNA, 18 nt, Human
aaacaaaaaacucuggac

SEQ ID NO: 1294141 - RNA, 19 nt, Human
aacaaaaaacucuggacac

SEQ ID NO: 1294142 - RNA, 24 nt, Human
acagagccagacccugucucaaga

SEQ ID NO: 1294143 - RNA, 23 nt, Human
accacuguacucuagucugccaa

SEQ ID NO: 1294144 - RNA, 21 nt, Human
acucuagucugccaacagagc

SEQ ID NO: 1294145 - RNA, 18 nt, Human
agaagucaaggcugcaau

SEQ ID NO: 1294146 - RNA, 28 nt, Human
agauauuuuauuaguuaaucagagagcu

SEQ ID NO: 1294147 - RNA, 24 nt, Human
agcuacucaggaggcugagguggg

SEQ ID NO: 1294148 - RNA, 24 nt, Human
aggcugaggugggaggaugacuug

SEQ ID NO: 1294149 - RNA, 24 nt, Human
aucucaccacuguacucuagucug

SEQ ID NO: 1294150 - RNA, 19 nt, Human
augcaugugaggguuaaag

SEQ ID NO: 1294151 - RNA, 21 nt, Human
cagacccugucucaagacaaa

SEQ ID NO: 1294152 - RNA, 20 nt, Human
cagggcucauuagcuuccuc

SEQ ID NO: 1294153 - RNA, 21 nt, Human
cagggcucauuagcuuccuca

SEQ ID NO: 1294154 - RNA, 18 nt, Human
ccacuguacucuagucug

SEQ ID NO: 1294155 - RNA, 21 nt, Human
cucaagacaaacaaaaaacuc

SEQ ID NO: 1294156 - RNA, 25 nt, Human
cucaagacaaacaaaaaacucugga

SEQ ID NO: 1294157 - RNA, 18 nt, Human
cucaccucauccccagac

SEQ ID NO: 1294158 - RNA, 18 nt, Human
cucaggaggcugaggugg

SEQ ID NO: 1294159 - RNA, 20 nt, Human
cucuagucugccaacagagc

SEQ ID NO: 1294160 - RNA, 19 nt, Human
cugccaacagagccagacc

SEQ ID NO: 1294161 - RNA, 19 nt, Human
cugucucaagacaaacaaa

SEQ ID NO: 1294162 - RNA, 24 nt, Human
gccaacagagccagacccugucuc

SEQ ID NO: 1294163 - RNA, 20 nt, Human
ggaggcugaggugggaggau

SEQ ID NO: 1294164 - RNA, 23 nt, Human
guacucuagucugccaacagagc

SEQ ID NO: 1294165 - RNA, 28 nt, Human
ucaagacaaacaaaaaacucuggacaca

SEQ ID NO: 1294166 - RNA, 22 nt, Human
ucucuggggauugguacacagu

SEQ ID NO: 1294167 - RNA, 23 nt, Human
ugagaggaccaaaugaaauggug

SEQ ID NO: 1294168 - RNA, 20 nt, Human
ugaggugggaggaugacuug

SEQ ID NO: 1294169 - RNA, 22 nt, Human
ugaggugggaggaugacuuggc

SEQ ID NO: 1294170 - RNA, 22 nt, Human
ugcaaugaacugugaucucacc

SEQ ID NO: 1294171 - RNA, 19 nt, Human
ugucucaagacaaacaaaa

SEQ ID NO: 1294172 - RNA, 23 nt, Human
ugugucaagugaauaaaugagag

SEQ ID NO: 1294173 - RNA, 23 nt, Human
aaacagcacaacgaggacuugaa

SEQ ID NO: 1294174 - RNA, 24 nt, Human
aaagugcugggacuacaggcguga

SEQ ID NO: 1294175 - RNA, 22 nt, Human
aaaugauccgguauggugaagc

SEQ ID NO: 1294176 - RNA, 19 nt, Human
aaggaacacuacugauacc

SEQ ID NO: 1294177 - RNA, 19 nt, Human
aagugcugggacuacaggc

SEQ ID NO: 1294178 - RNA, 26 nt, Human
aagugcugggacuacaggcgugagcc

SEQ ID NO: 1294179 - RNA, 25 nt, Human
aauauucaccuauaaguagggugac

SEQ ID NO: 1294180 - RNA, 24 nt, Human
aaucauguugaccaggcuggucuc

SEQ ID NO: 1294181 - RNA, 20 nt, Human
acucagucucccaaagugcu

SEQ ID NO: 1294182 - RNA, 18 nt, Human
agaaaacaaauagugccu

SEQ ID NO: 1294183 - RNA, 21 nt, Human
agcugucaaaagcaaggaacc

SEQ ID NO: 1294184 - RNA, 21 nt, Human
aggaggaucuaccuuguaaug

SEQ ID NO: 1294185 - RNA, 18 nt, Human
aguagcugggauuacagg

SEQ ID NO: 1294186 - RNA, 20 nt, Human
agugcaguggugccauccug

SEQ ID NO: 1294187 - RNA, 24 nt, Human
agugcaguggugccauccuggcuc

SEQ ID NO: 1294188 - RNA, 21 nt, Human
aucacagaaaugccccugauu

SEQ ID NO: 1294189 - RNA, 18 nt, Human
auggugaagcccagaucu

SEQ ID NO: 1294190 - RNA, 19 nt, Human
caaagcgccaucacagaaa

SEQ ID NO: 1294191 - RNA, 24 nt, Human
caaagugcugggacuacaggcgug

SEQ ID NO: 1294192 - RNA, 20 nt, Human
caaauagugccugugaccaa

SEQ ID NO: 1294193 - RNA, 23 nt, Human
caaccucagccuccuggguucaa

SEQ ID NO: 1294194 - RNA, 20 nt, Human
caagcgauucuccugccuca

SEQ ID NO: 1294195 - RNA, 22 nt, Human
caagcgauucuccugccucagc

SEQ ID NO: 1294196 - RNA, 18 nt, Human
cacauuauuuacacuacc

SEQ ID NO: 1294197 - RNA, 20 nt, Human
caccaugccuggccacucag

SEQ ID NO: 1294198 - RNA, 21 nt, Human
cacccccucuaacaaaaacag

SEQ ID NO: 1294199 - RNA, 28 nt, Human
cacucugccacuuaaggcccugcacccc

SEQ ID NO: 1294200 - RNA, 19 nt, Human
cacugcaaccucagccucc

SEQ ID NO: 1294201 - RNA, 21 nt, Human
cacugcaaccucagccuccug

SEQ ID NO: 1294202 - RNA, 23 nt, Human
cacugcaaccucagccuccuggg

SEQ ID NO: 1294203 - RNA, 24 nt, Human
cagagucuugcucuauugcccagg

SEQ ID NO: 1294204 - RNA, 22 nt, Human
cagccuccuggguucaagcgau

SEQ ID NO: 1294205 - RNA, 25 nt, Human
cagggcuugugguuagcccaaacau

SEQ ID NO: 1294206 - RNA, 24 nt, Human
cauguugaccaggcuggucucaaa

SEQ ID NO: 1294207 - RNA, 22 nt, Human
ccaaagugcugggacuacaggc

SEQ ID NO: 1294208 - RNA, 24 nt, Human
ccaaagugcugggacuacaggcgu

SEQ ID NO: 1294209 - RNA, 23 nt, Human
ccaacucagucucccaaagugcu

SEQ ID NO: 1294210 - RNA, 18 nt, Human
ccaauaucugcaagauaa

SEQ ID NO: 1294211 - RNA, 22 nt, Human
ccacccaacucagucucccaaa

SEQ ID NO: 1294212 - RNA, 18 nt, Human
ccacugaaguccucugca

SEQ ID NO: 1294213 - RNA, 24 nt, Human
cccaaagugcugggacuacaggcg

SEQ ID NO: 1294214 - RNA, 20 nt, Human
ccccacaagcacaguaaggu

SEQ ID NO: 1294215 - RNA, 21 nt, Human
ccccaguuaggaaaguuuuau

SEQ ID NO: 1294216 - RNA, 23 nt, Human
cccgaguagcugggauuacaggc

SEQ ID NO: 1294217 - RNA, 24 nt, Human
cccgaguagcugggauuacaggcg

SEQ ID NO: 1294218 - RNA, 22 nt, Human
ccgaguagcugggauuacaggc

SEQ ID NO: 1294219 - RNA, 23 nt, Human
ccgguauggugaagcccagaucu

SEQ ID NO: 1294220 - RNA, 23 nt, Human
ccuacaccaaaaaucaccacuau

SEQ ID NO: 1294221 - RNA, 19 nt, Human
ccuagcacccccucuaaca

SEQ ID NO: 1294222 - RNA, 18 nt, Human
ccucagccuccuggguuc

SEQ ID NO: 1294223 - RNA, 24 nt, Human
ccuccuggguucaagcgauucucc

SEQ ID NO: 1294224 - RNA, 22 nt, Human
ccuggcucacugcaaccucagc

SEQ ID NO: 1294225 - RNA, 23 nt, Human
ccuggguucaagcgauucuccug

SEQ ID NO: 1294226 - RNA, 24 nt, Human
ccugucccaaaucugauuuuuagu

SEQ ID NO: 1294227 - RNA, 25 nt, Human
cgguauggugaagcccagaucuuug

SEQ ID NO: 1294228 - RNA, 21 nt, Human
cuaaauccuuucagccccaca

SEQ ID NO: 1294229 - RNA, 18 nt, Human
cuaccacaccuggcuaau

SEQ ID NO: 1294230 - RNA, 23 nt, Human
cuagcacccccucuaacaaaaac

SEQ ID NO: 1294231 - RNA, 24 nt, Human
cucacugcaaccucagccuccugg

SEQ ID NO: 1294232 - RNA, 24 nt, Human
cucagccucccgaguagcugggau

SEQ ID NO: 1294233 - RNA, 26 nt, Human
cuccgaaucaggacaccuaugagagu

SEQ ID NO: 1294234 - RNA, 21 nt, Human
cuccuggguucaagcgauucu

SEQ ID NO: 1294235 - RNA, 20 nt, Human
cucuauugcccaggcuggag

SEQ ID NO: 1294236 - RNA, 23 nt, Human
cugccucagccucccgaguagcu

SEQ ID NO: 1294237 - RNA, 18 nt, Human
cugugugccagaugcccc

SEQ ID NO: 1294238 - RNA, 19 nt, Human
gacaaagcgccaucacaga

SEQ ID NO: 1294239 - RNA, 24 nt, Human
gaccucacgugauccacccaacuc

SEQ ID NO: 1294240 - RNA, 18 nt, Human
gacuacaggcgugagcca

SEQ ID NO: 1294241 - RNA, 21 nt, Human
gacuacaggcgugagccacca

SEQ ID NO: 1294242 - RNA, 24 nt, Human
gacuacaggcgugagccaccaugc

SEQ ID NO: 1294243 - RNA, 25 nt, Human
gagaaugguagagagcaggggccgg

SEQ ID NO: 1294244 - RNA, 25 nt, Human
gaguagcugggauuacaggcgccca

SEQ ID NO: 1294245 - RNA, 18 nt, Human
gaucacagggcuuguggu

SEQ ID NO: 1294246 - RNA, 21 nt, Human
gauucuccugccucagccucc

SEQ ID NO: 1294247 - RNA, 22 nt, Human
gcaaccucagccuccuggguuc

SEQ ID NO: 1294248 - RNA, 22 nt, Human
gcaggucaaagcauccuccuuu

SEQ ID NO: 1294249 - RNA, 19 nt, Human
gcccaggcuggagugcagu

SEQ ID NO: 1294250 - RNA, 20 nt, Human
gcccaggcuggagugcagug

SEQ ID NO: 1294251 - RNA, 20 nt, Human
gccucagccucccgaguagc

SEQ ID NO: 1294252 - RNA, 24 nt, Human
gcgauucuccugccucagccuccc

SEQ ID NO: 1294253 - RNA, 19 nt, Human
gcucauuugcaaaaguuaa

SEQ ID NO: 1294254 - RNA, 20 nt, Human
gcucauuugcaaaaguuaag

SEQ ID NO: 1294255 - RNA, 25 nt, Human
gcucuauugcccaggcuggagugca

SEQ ID NO: 1294256 - RNA, 21 nt, Human
gcuggagugcaguggugccag

SEQ ID NO: 1294257 - RNA, 23 nt, Human
gcuggucucaaacuccugaccuc

SEQ ID NO: 1294258 - RNA, 19 nt, Human
ggacacauguacagacugc

SEQ ID NO: 1294259 - RNA, 22 nt, Human
ggacacauguacagacugcauu

SEQ ID NO: 1294260 - RNA, 24 nt, Human
ggacuacaggcgugagccaccaug

SEQ ID NO: 1294261 - RNA, 22 nt, Human
ggagacagagucuugcucuauu

SEQ ID NO: 1294262 - RNA, 24 nt, Human
ggcuggucucaaacuccugaccuc

SEQ ID NO: 1294263 - RNA, 24 nt, Human
gggcagggagcugucaaaagcaag

SEQ ID NO: 1294264 - RNA, 23 nt, Human
gguagagagcaggggcagggagc

SEQ ID NO: 1294265 - RNA, 24 nt, Human
gguucaauagggaagacaaacacc

SEQ ID NO: 1294266 - RNA, 18 nt, Human
guagcugggauuacaggc

SEQ ID NO: 1294267 - RNA, 24 nt, Human
gugauccacccaacucagucuccc

SEQ ID NO: 1294268 - RNA, 21 nt, Human
uaaaucauguugaccaggcug

SEQ ID NO: 1294269 - RNA, 23 nt, Human
uaaguagggugaccauauaacgu

SEQ ID NO: 1294270 - RNA, 21 nt, Human
uaauggaucuaaaacuauugc

SEQ ID NO: 1294271 - RNA, 22 nt, Human
uacaggcgugagccaccaugcc

SEQ ID NO: 1294272 - RNA, 23 nt, Human
uacaggcgugagccaccaugccu

SEQ ID NO: 1294273 - RNA, 24 nt, Human
uaguagagacgagguuaaaucaug

SEQ ID NO: 1294274 - RNA, 22 nt, Human
uauccuccgaaucaggacaccu

SEQ ID NO: 1294275 - RNA, 21 nt, Human
uaugagaguaaaaaggaacac

SEQ ID NO: 1294276 - RNA, 19 nt, Human
uauugcccaggcuggagug

SEQ ID NO: 1294277 - RNA, 23 nt, Human
ucaaacuccugaccucacgugau

SEQ ID NO: 1294278 - RNA, 19 nt, Human
ucaagcgauucuccugccu

SEQ ID NO: 1294279 - RNA, 18 nt, Human
ucacugcaaccucagccu

SEQ ID NO: 1294280 - RNA, 23 nt, Human
ucacugcaaccucagccuccugg

SEQ ID NO: 1294281 - RNA, 24 nt, Human
ucacugcaaccucagccuccuggg

SEQ ID NO: 1294282 - RNA, 27 nt, Human
ucacugcaaccucagccuccuggguuc

SEQ ID NO: 1294283 - RNA, 18 nt, Human
ucagcagacauuucuuga

SEQ ID NO: 1294284 - RNA, 20 nt, Human
ucagccucccgaguagcugg

SEQ ID NO: 1294285 - RNA, 23 nt, Human
uccaaagccuugaauauagucac

SEQ ID NO: 1294286 - RNA, 24 nt, Human
ucccaaagugcugggacuacaggc

SEQ ID NO: 1294287 - RNA, 24 nt, Human
ucccgaguagcugggauuacaggc

SEQ ID NO: 1294288 - RNA, 21 nt, Human
uccuggguucaagcgauucuc

SEQ ID NO: 1294289 - RNA, 24 nt, Human
uccuggguucaagcgauucuccug

SEQ ID NO: 1294290 - RNA, 27 nt, Human
ucuaaaacuauugccuaaaaacuucua

SEQ ID NO: 1294291 - RNA, 24 nt, Human
ucuauugcccaggcuggagugcag

SEQ ID NO: 1294292 - RNA, 18 nt, Human
ucucacucugccacuuaa

SEQ ID NO: 1294293 - RNA, 24 nt, Human
ucuccugccucagccucccgagua

SEQ ID NO: 1294294 - RNA, 19 nt, Human
ucuugcucuauugcccagg

SEQ ID NO: 1294295 - RNA, 23 nt, Human
ucuugcucuauugcccaggcugg

SEQ ID NO: 1294296 - RNA, 24 nt, Human
ucuugcucuauugcccaggcugga

SEQ ID NO: 1294297 - RNA, 24 nt, Human
ugaccaggcuggucucaaacuccu

SEQ ID NO: 1294298 - RNA, 20 nt, Human
ugaccauauaacguauccuc

SEQ ID NO: 1294299 - RNA, 24 nt, Human
ugagauacauugugaugggcaggu

SEQ ID NO: 1294300 - RNA, 19 nt, Human
ugcauuaccacugacaaag

SEQ ID NO: 1294301 - RNA, 24 nt, Human
ugccagaugccccgcugggcaccc

SEQ ID NO: 1294302 - RNA, 18 nt, Human
ugcccaggcuggagugca

SEQ ID NO: 1294303 - RNA, 21 nt, Human
ugcccaggcuggagugcagug

SEQ ID NO: 1294304 - RNA, 24 nt, Human
ugcccaggcuggagugcaguggug

SEQ ID NO: 1294305 - RNA, 24 nt, Human
ugccucagccucccgaguagcugg

SEQ ID NO: 1294306 - RNA, 24 nt, Human
ugcugggacuacaggcgugagcca

SEQ ID NO: 1294307 - RNA, 20 nt, Human
uggagagggggguuugauuc

SEQ ID NO: 1294308 - RNA, 28 nt, Human
uggagugcaguggugccauccuagcacg

SEQ ID NO: 1294309 - RNA, 24 nt, Human
uggagugcaguggugccauccugg

SEQ ID NO: 1294310 - RNA, 21 nt, Human
uggcuaauuuuuuuuuuuuuu

SEQ ID NO: 1294311 - RNA, 20 nt, Human
uggcucacugcaaccucagc

SEQ ID NO: 1294312 - RNA, 18 nt, Human
ugggaacaaaguaauaca

SEQ ID NO: 1294313 - RNA, 18 nt, Human
ugggacuacaggcgugag

SEQ ID NO: 1294314 - RNA, 22 nt, Human
ugggacuacaggcgugagccac

SEQ ID NO: 1294315 - RNA, 24 nt, Human
ugggacuacaggcgugagccacca

SEQ ID NO: 1294316 - RNA, 25 nt, Human
ugggacuacaggcgugagccaccau

SEQ ID NO: 1294317 - RNA, 19 nt, Human
ugggauuacaggcgcccac

SEQ ID NO: 1294318 - RNA, 20 nt, Human
ugggauuacaggcgcccacu

SEQ ID NO: 1294319 - RNA, 24 nt, Human
ugggauuacaggcgcccacuacca

SEQ ID NO: 1294320 - RNA, 23 nt, Human
uggguucaagcgauucuccugcc

SEQ ID NO: 1294321 - RNA, 24 nt, Human
uggguucaagcgauucuccugccu

SEQ ID NO: 1294322 - RNA, 25 nt, Human
ugugccagaugccccgcugggcacc

SEQ ID NO: 1294323 - RNA, 20 nt, Human
uguguaaagggcuugcaggg

SEQ ID NO: 1294324 - RNA, 24 nt, Human
uuaguagagacgagguuaaaucau

SEQ ID NO: 1294325 - RNA, 21 nt, Human
uucaagcgauucuccugccuc

SEQ ID NO: 1294326 - RNA, 23 nt, Human
uucaagcgauucuccugccucag

SEQ ID NO: 1294327 - RNA, 24 nt, Human
uucaagcgauucuccugccucagc

SEQ ID NO: 1294328 - RNA, 22 nt, Human
uugcaaaaguuaaggaacaaga

SEQ ID NO: 1294329 - RNA, 24 nt, Human
uugcucuauugcccaggcuggagu

SEQ ID NO: 1294330 - RNA, 24 nt, Human
uuuuuuguauauuuaguagagacg

SEQ ID NO: 1294331 - RNA, 23 nt, Human
aagcuucucccugaaaccacucc

SEQ ID NO: 1294332 - RNA, 20 nt, Human
acacuggugaccuccgcgug

SEQ ID NO: 1294333 - RNA, 22 nt, Human
acagcuuaaagcacuuccacac

SEQ ID NO: 1294334 - RNA, 18 nt, Human
accacuucugcugucucu

SEQ ID NO: 1294335 - RNA, 21 nt, Human
accccgugauguacccugagg

SEQ ID NO: 1294336 - RNA, 25 nt, Human
cagaggacuucucccccgcguggac

SEQ ID NO: 1294337 - RNA, 24 nt, Human
cagcacaaggcuuucccacacuuc

SEQ ID NO: 1294338 - RNA, 18 nt, Human
cccccgugugggagcgaa

SEQ ID NO: 1294339 - RNA, 22 nt, Human
ccugaaaccacucccccguuca

SEQ ID NO: 1294340 - RNA, 20 nt, Human
cucccugaaaccacuccccc

SEQ ID NO: 1294341 - RNA, 19 nt, Human
cuccgcguggauucgcucc

SEQ ID NO: 1294342 - RNA, 19 nt, Human
cugagcugcaggaacuccc

SEQ ID NO: 1294343 - RNA, 18 nt, Human
gaacugugcccgggacac

SEQ ID NO: 1294344 - RNA, 22 nt, Human
gcagcacaaggcuuucccacac

SEQ ID NO: 1294345 - RNA, 19 nt, Human
gcauguucuucauaaagug

SEQ ID NO: 1294346 - RNA, 19 nt, Human
ggcucuuugugggucggcc

SEQ ID NO: 1294347 - RNA, 18 nt, Human
gggucggcccuggugggc

SEQ ID NO: 1294348 - RNA, 20 nt, Human
gguuucuccuuugugugagu

SEQ ID NO: 1294349 - RNA, 22 nt, Human
uaacugaggucaaauuuuuuca

SEQ ID NO: 1294350 - RNA, 23 nt, Human
uacccugagguccgaucugcagc

SEQ ID NO: 1294351 - RNA, 27 nt, Human
uagcggguuucuccuuugugugaguuc

SEQ ID NO: 1294352 - RNA, 23 nt, Human
ucaccaaccucauuaucuaacau

SEQ ID NO: 1294353 - RNA, 24 nt, Human
ucagggcaaagcuucucccugaaa

SEQ ID NO: 1294354 - RNA, 22 nt, Human
ucccccgugugggagcgaaggu

SEQ ID NO: 1294355 - RNA, 18 nt, Human
ucccugaaaccacucccc

SEQ ID NO: 1294356 - RNA, 18 nt, Human
ucugcagcacaaggcuuc

SEQ ID NO: 1294357 - RNA, 21 nt, Human
ugaggcgcgacuugugggagg

SEQ ID NO: 1294358 - RNA, 22 nt, Human
ugcagcacaaggcuuucccaca

SEQ ID NO: 1294359 - RNA, 18 nt, Human
ugcccgggacacacaggc

SEQ ID NO: 1294360 - RNA, 24 nt, Human
uggaguggaguucaggagcauguu

SEQ ID NO: 1294361 - RNA, 27 nt, Human
uggcucccugagcugcaggaacucccu

SEQ ID NO: 1294362 - RNA, 19 nt, Human
uguggaguggaguucagga

SEQ ID NO: 1294363 - RNA, 18 nt, Human
ugugggucggcccuggug

SEQ ID NO: 1294364 - RNA, 21 nt, Human
uucaaaagcugguuguggagu

SEQ ID NO: 1294365 - RNA, 18 nt, Human
uucucacacucccaacac

SEQ ID NO: 1294366 - RNA, 21 nt, Human
uuugugggucggcccuggugg

SEQ ID NO: 1294367 - RNA, 23 nt, Human
aaaaucucuuuguagacgaaugu

SEQ ID NO: 1294368 - RNA, 20 nt, Human
cuuaccuucaaguucugaua

SEQ ID NO: 1294369 - RNA, 22 nt, Human
ucaauuggugagaauuucucuu

SEQ ID NO: 1294370 - RNA, 19 nt, Human
ucuggagaacuuaauuucc

SEQ ID NO: 1294371 - RNA, 18 nt, Human
ugcuaaaaguuuucaaag

SEQ ID NO: 1294372 - RNA, 21 nt, Human
uggcuaauccuguaguaaugc

SEQ ID NO: 1294373 - RNA, 22 nt, Human
ugugauaccauaaaacacuggu

SEQ ID NO: 1294374 - RNA, 20 nt, Human
uucaaguucugauaugucuu

SEQ ID NO: 1294375 - RNA, 20 nt, Human
uucccuucuucaaccugcuu

SEQ ID NO: 1294376 - RNA, 18 nt, Human
uugauuugagcuaaacgu

SEQ ID NO: 1294377 - RNA, 22 nt, Human
aaaaacaaaacaaaacaaaaac

SEQ ID NO: 1294378 - RNA, 24 nt, Human
aaaaacaaacaacaaacaacaacc

SEQ ID NO: 1294379 - RNA, 21 nt, Human
aaaaauauugcaggacccaag

SEQ ID NO: 1294380 - RNA, 20 nt, Human
aaaacaaaacaaaacaaaaa

SEQ ID NO: 1294381 - RNA, 26 nt, Human
aaacaaaaacaaacaacaaacaacaa

SEQ ID NO: 1294382 - RNA, 26 nt, Human
aaacaaaacaaaaacaaacaacaaac

SEQ ID NO: 1294383 - RNA, 23 nt, Human
aaacaaaacaaaacaaaaacaaa

SEQ ID NO: 1294384 - RNA, 21 nt, Human
aaacaaacaacaaacaacaac

SEQ ID NO: 1294385 - RNA, 25 nt, Human
aaacaaacaacaaacaacaacuucg

SEQ ID NO: 1294386 - RNA, 22 nt, Human
aaacaacaaacaacaacuucgc

SEQ ID NO: 1294387 - RNA, 20 nt, Human
aacaaacaacaaacaacaac

SEQ ID NO: 1294388 - RNA, 26 nt, Human
aacaacaaacaacaacuucgcaggga

SEQ ID NO: 1294389 - RNA, 19 nt, Human
aacacaacuucaccggccu

SEQ ID NO: 1294390 - RNA, 20 nt, Human
aacagagugagucuccaucu

SEQ ID NO: 1294391 - RNA, 19 nt, Human
aacauugugaaacccuauc

SEQ ID NO: 1294392 - RNA, 20 nt, Human
aacauugugaaacccuaucu

SEQ ID NO: 1294393 - RNA, 21 nt, Human
aacauugugaaacccuaucuc

SEQ ID NO: 1294394 - RNA, 22 nt, Human
aacugguuguagaguugguuuc

SEQ ID NO: 1294395 - RNA, 20 nt, Human
aagaagcuucaagacacuaa

SEQ ID NO: 1294396 - RNA, 23 nt, Human
aagaggcaacaagaagcuucaag

SEQ ID NO: 1294397 - RNA, 21 nt, Human
aagcgugcgcagcagcaggag

SEQ ID NO: 1294398 - RNA, 22 nt, Human
aagggccagugaaagaggcaac

SEQ ID NO: 1294399 - RNA, 18 nt, Human
aaucaucugaggucagga

SEQ ID NO: 1294400 - RNA, 24 nt, Human
aaucaucugaggucaggaguucga

SEQ ID NO: 1294401 - RNA, 25 nt, Human
acaaaaacaaacaacaaacaacaac

SEQ ID NO: 1294402 - RNA, 23 nt, Human
acaaaacaaaaacaaacaacaaa

SEQ ID NO: 1294403 - RNA, 21 nt, Human
acaaaacaaaacaaaaacaaa

SEQ ID NO: 1294404 - RNA, 22 nt, Human
acacuaacuucauccaccuggc

SEQ ID NO: 1294405 - RNA, 24 nt, Human
acagagugagucuccaucucaaaa

SEQ ID NO: 1294406 - RNA, 20 nt, Human
acaucacugcacuccagccu

SEQ ID NO: 1294407 - RNA, 24 nt, Human
acaucacugcacuccagccugggc

SEQ ID NO: 1294408 - RNA, 20 nt, Human
accaguuuucauggcuuauu

SEQ ID NO: 1294409 - RNA, 24 nt, Human
accucagccuucccuucccuccag

SEQ ID NO: 1294410 - RNA, 19 nt, Human
accuggccacuuugcccag

SEQ ID NO: 1294411 - RNA, 27 nt, Human
acgggcaauaucguguaaccgaggucc

SEQ ID NO: 1294412 - RNA, 20 nt, Human
acucacugcagaucuccgag

SEQ ID NO: 1294413 - RNA, 24 nt, Human
acuccagccugggcaacagaguga

SEQ ID NO: 1294414 - RNA, 24 nt, Human
acugcacuccagccugggcaacag

SEQ ID NO: 1294415 - RNA, 24 nt, Human
acugcacuccagccugggcaacag

SEQ ID NO: 1294416 - RNA, 18 nt, Human
agagaagaaaauagcaau

SEQ ID NO: 1294417 - RNA, 20 nt, Human
agagccagguguguccacug

SEQ ID NO: 1294418 - RNA, 20 nt, Human
agcacaugccaggcuuccag

SEQ ID NO: 1294419 - RNA, 18 nt, Human
agcacugccuugagguug

SEQ ID NO: 1294420 - RNA, 22 nt, Human
agccgggagaggagggagcuuc

SEQ ID NO: 1294421 - RNA, 20 nt, Human
agccugggcaacagagugag

SEQ ID NO: 1294422 - RNA, 23 nt, Human
aggaguucgagaccagcauggcc

SEQ ID NO: 1294423 - RNA, 19 nt, Human
aggcagaggcgggcagggu

SEQ ID NO: 1294424 - RNA, 21 nt, Human
aggcagaggcgggcagggugc

SEQ ID NO: 1294425 - RNA, 18 nt, Human
aggcaggagaaugguuug

SEQ ID NO: 1294426 - RNA, 24 nt, Human
aggcaggagaaugguuugaaccca

SEQ ID NO: 1294427 - RNA, 27 nt, Human
aggcaggagaaugguuugaacccagga

SEQ ID NO: 1294428 - RNA, 26 nt, Human
aggcgggugaaucaucugaggucagg

SEQ ID NO: 1294429 - RNA, 24 nt, Human
aggcugaggcaggagaaugguuug

SEQ ID NO: 1294430 - RNA, 20 nt, Human
aggcugaggcgggugaauca

SEQ ID NO: 1294431 - RNA, 23 nt, Human
agggaaagagucagaacucaggg

SEQ ID NO: 1294432 - RNA, 23 nt, Human
aggggaguggccauuggcaggag

SEQ ID NO: 1294433 - RNA, 23 nt, Human
agguguggacaggcaggauggag

SEQ ID NO: 1294434 - RNA, 22 nt, Human
agucagaacucagggauuccuu

SEQ ID NO: 1294435 - RNA, 20 nt, Human
agugaaagaggcaacaagaa

SEQ ID NO: 1294436 - RNA, 19 nt, Human
agugcagcucuaaaguucc

SEQ ID NO: 1294437 - RNA, 20 nt, Human
auaaagccuucuuagguuua

SEQ ID NO: 1294438 - RNA, 24 nt, Human
aucacaucacugcacuccagccug

SEQ ID NO: 1294439 - RNA, 21 nt, Human
aucaucugaggucaggaguuc

SEQ ID NO: 1294440 - RNA, 24 nt, Human
aucaucugaggucaggaguucgag

SEQ ID NO: 1294441 - RNA, 24 nt, Human
aucugaggucaggaguucgagacc

SEQ ID NO: 1294442 - RNA, 18 nt, Human
auguugcgggcaccaagg

SEQ ID NO: 1294443 - RNA, 20 nt, Human
auguugcgggcaccaagguu

SEQ ID NO: 1294444 - RNA, 23 nt, Human
auucagaaguuccucauuucaac

SEQ ID NO: 1294445 - RNA, 26 nt, Human
caaaaaacaaaacaaaacaaaaacaa

SEQ ID NO: 1294446 - RNA, 25 nt, Human
caaaacaaaaacaaacaacaaacaa

SEQ ID NO: 1294447 - RNA, 23 nt, Human
caaaacaaaacaaaaacaaacaa

SEQ ID NO: 1294448 - RNA, 22 nt, Human
caaagauaaccauccuucagac

SEQ ID NO: 1294449 - RNA, 24 nt, Human
caacaccuugggaggcugaggcgg

SEQ ID NO: 1294450 - RNA, 20 nt, Human
caagccagggucccacuccc

SEQ ID NO: 1294451 - RNA, 26 nt, Human
cacacgggcaauaucguguaacaacg

SEQ ID NO: 1294452 - RNA, 21 nt, Human
cacaucacugcacuccagccu

SEQ ID NO: 1294453 - RNA, 24 nt, Human
cacaucuguaaucccaacaccuug

SEQ ID NO: 1294454 - RNA, 23 nt, Human
caccaggacauagaaugacuuag

SEQ ID NO: 1294455 - RNA, 25 nt, Human
caccaggcaccuugucagggacacc

SEQ ID NO: 1294456 - RNA, 26 nt, Human
cacccaggccauggucccuccuuggc

SEQ ID NO: 1294457 - RNA, 19 nt, Human
caccgugcuuuccuccggg

SEQ ID NO: 1294458 - RNA, 21 nt, Human
cacucaccccacccuggcccc

SEQ ID NO: 1294459 - RNA, 22 nt, Human
cacucaccccacccuggccccu

SEQ ID NO: 1294460 - RNA, 22 nt, Human
cacuccagccugggcaacagag

SEQ ID NO: 1294461 - RNA, 22 nt, Human
cacuccagccugggcaacagag

SEQ ID NO: 1294462 - RNA, 24 nt, Human
cacuccagccugggcaacagagug

SEQ ID NO: 1294463 - RNA, 18 nt, Human
cacugcacuccagccugg

SEQ ID NO: 1294464 - RNA, 19 nt, Human
cacugcacuccagccuggg

SEQ ID NO: 1294465 - RNA, 20 nt, Human
cacugcacuccagccugggc

SEQ ID NO: 1294466 - RNA, 21 nt, Human
cacugcacuccagccugggca

SEQ ID NO: 1294467 - RNA, 22 nt, Human
cacugcacuccagccugggcaa

SEQ ID NO: 1294468 - RNA, 23 nt, Human
cacugcacuccagccugggcaac

SEQ ID NO: 1294469 - RNA, 24 nt, Human
cacugcacuccagccugggcaaca

SEQ ID NO: 1294470 - RNA, 19 nt, Human
cagaacacgagguggcagc

SEQ ID NO: 1294471 - RNA, 19 nt, Human
cagaacacgagguggcagc

SEQ ID NO: 1294472 - RNA, 22 nt, Human
cagcagcaggagccucgggugc

SEQ ID NO: 1294473 - RNA, 19 nt, Human
cagccuucccuucccucca

SEQ ID NO: 1294474 - RNA, 21 nt, Human
caggaguucgagaccagcaug

SEQ ID NO: 1294475 - RNA, 18 nt, Human
caggcccacagaggaugg

SEQ ID NO: 1294476 - RNA, 21 nt, Human
cagggacaccguuucuuccac

SEQ ID NO: 1294477 - RNA, 24 nt, Human
caguuacuugagaggcugaggcag

SEQ ID NO: 1294478 - RNA, 24 nt, Human
caucacugcacuccagccugggca

SEQ ID NO: 1294479 - RNA, 23 nt, Human
caucucaaaaaacaaaacaaaac

SEQ ID NO: 1294480 - RNA, 26 nt, Human
caucucaaaaaacaaaacaaaacaaa

SEQ ID NO: 1294481 - RNA, 23 nt, Human
caucugaggucaggaguucgaga

SEQ ID NO: 1294482 - RNA, 23 nt, Human
caucuguaaucccaacaccuugg

SEQ ID NO: 1294483 - RNA, 24 nt, Human
caucuguaaucccaacaccuuggg

SEQ ID NO: 1294484 - RNA, 24 nt, Human
caugccuguaaucccaguuacuug

SEQ ID NO: 1294485 - RNA, 19 nt, Human
cauggccaacauugugaaa

SEQ ID NO: 1294486 - RNA, 20 nt, Human
ccccaaagauaaccauccuu

SEQ ID NO: 1294487 - RNA, 20 nt, Human
ccccacccuggccccugacc

SEQ ID NO: 1294488 - RNA, 24 nt, Human
ccccagaggagucccacagagcga

SEQ ID NO: 1294489 - RNA, 21 nt, Human
ccccgcgccgggccguguggc

SEQ ID NO: 1294490 - RNA, 24 nt, Human
cccuccuuguuuuauuuuucuccu

SEQ ID NO: 1294491 - RNA, 22 nt, Human
ccgcgccgggccguguggcugc

SEQ ID NO: 1294492 - RNA, 23 nt, Human
ccgcgugugcccgcuagagccag

SEQ ID NO: 1294493 - RNA, 21 nt, Human
ccgggagggaggagagucaca

SEQ ID NO: 1294494 - RNA, 22 nt, Human
ccuaugguuuguuccccuugaa

SEQ ID NO: 1294495 - RNA, 24 nt, Human
ccuauucaaauccaagccacaccc

SEQ ID NO: 1294496 - RNA, 23 nt, Human
ccuccuuggcaggcagaggcggg

SEQ ID NO: 1294497 - RNA, 20 nt, Human
ccuguaaucccaguuacuug

SEQ ID NO: 1294498 - RNA, 22 nt, Human
ccuguaaucccaguuacuugag

SEQ ID NO: 1294499 - RNA, 22 nt, Human
ccuugaacuaacaaggaaccuc

SEQ ID NO: 1294500 - RNA, 23 nt, Human
ccuuguuuuauuuuucuccucuu

SEQ ID NO: 1294501 - RNA, 24 nt, Human
cgagaucacaucacugcacuccag

SEQ ID NO: 1294502 - RNA, 21 nt, Human
cgggcaauaucguguaacaac

SEQ ID NO: 1294503 - RNA, 24 nt, Human
cgggugaaucaucugaggucagga

SEQ ID NO: 1294504 - RNA, 22 nt, Human
cguuuccaggaaaugaauaaag

SEQ ID NO: 1294505 - RNA, 23 nt, Human
cuagagccagguguguccacugu

SEQ ID NO: 1294506 - RNA, 21 nt, Human
cuagugcagcucuaaaguucc

SEQ ID NO: 1294507 - RNA, 24 nt, Human
cucacaucuguaaucccaacaccu

SEQ ID NO: 1294508 - RNA, 24 nt, Human
cuccuuggcaggcagaggcgggca

SEQ ID NO: 1294509 - RNA, 23 nt, Human
cucguccagguccggcucucucg

SEQ ID NO: 1294510 - RNA, 20 nt, Human
cucugcaccgugcuuuccuc

SEQ ID NO: 1294511 - RNA, 24 nt, Human
cugaaccguuuccucugcaccgug

SEQ ID NO: 1294512 - RNA, 23 nt, Human
cugcaaacuuaagcacguuaugc

SEQ ID NO: 1294513 - RNA, 24 nt, Human
cugcaccgugcuuuccuccgggug

SEQ ID NO: 1294514 - RNA, 21 nt, Human
cuggauuuggaagacccuauu

SEQ ID NO: 1294515 - RNA, 22 nt, Human
cuuucauauugaagagugauug

SEQ ID NO: 1294516 - RNA, 21 nt, Human
cuuugcccagguggacuuugg

SEQ ID NO: 1294517 - RNA, 20 nt, Human
gagccgggagaggagggagc

SEQ ID NO: 1294518 - RNA, 21 nt, Human
gagccucaguuucuucaucug

SEQ ID NO: 1294519 - RNA, 19 nt, Human
gaggagagggcgcagugag

SEQ ID NO: 1294520 - RNA, 18 nt, Human
gcaccaguuuucauggcu

SEQ ID NO: 1294521 - RNA, 24 nt, Human
gcacuccagccugggcaacagagu

SEQ ID NO: 1294522 - RNA, 20 nt, Human
gcagcagcaggagccucggg

SEQ ID NO: 1294523 - RNA, 22 nt, Human
gcaggagaaugguuugaaccca

SEQ ID NO: 1294524 - RNA, 24 nt, Human
gccaacauugugaaacccuaucuc

SEQ ID NO: 1294525 - RNA, 19 nt, Human
gccgggccguguggcugcg

SEQ ID NO: 1294526 - RNA, 21 nt, Human
gccgggccguguggcugcgga

SEQ ID NO: 1294527 - RNA, 20 nt, Human
gccuguaaucccaguuacuu

SEQ ID NO: 1294528 - RNA, 20 nt, Human
gcgcagcagcaggagccucg

SEQ ID NO: 1294529 - RNA, 25 nt, Human
gcgcagcagcaggagccucggguga

SEQ ID NO: 1294530 - RNA, 18 nt, Human
ggaaaugaauaaagccuu

SEQ ID NO: 1294531 - RNA, 19 nt, Human
ggcagggugcugcuggccu

SEQ ID NO: 1294532 - RNA, 23 nt, Human
ggcagggugcugcuggccugagg

SEQ ID NO: 1294533 - RNA, 20 nt, Human
ggccccugacaggucgccuc

SEQ ID NO: 1294534 - RNA, 21 nt, Human
ggccuggugugguggcucaca

SEQ ID NO: 1294535 - RNA, 24 nt, Human
ggccuggugugguggcucacaucu

SEQ ID NO: 1294536 - RNA, 21 nt, Human
gggaaagagucagaacucagg

SEQ ID NO: 1294537 - RNA, 20 nt, Human
ggggagguuggaggagaggg

SEQ ID NO: 1294538 - RNA, 23 nt, Human
gguaugguggcgcaugccuguaa

SEQ ID NO: 1294539 - RNA, 22 nt, Human
gguccuggggcuucaagcacca

SEQ ID NO: 1294540 - RNA, 24 nt, Human
gguggcgcaugccuguaaucccag

SEQ ID NO: 1294541 - RNA, 23 nt, Human
ggugugguggcucacaucuguaa

SEQ ID NO: 1294542 - RNA, 21 nt, Human
guaagcuccgugucagggacc

SEQ ID NO: 1294543 - RNA, 18 nt, Human
gugagucuccaucucaaa

SEQ ID NO: 1294544 - RNA, 23 nt, Human
guggcgcaugccuguaaucccag

SEQ ID NO: 1294545 - RNA, 19 nt, Human
uaaggagaucagauguugc

SEQ ID NO: 1294546 - RNA, 24 nt, Human
uagugugauggguggagccgggag

SEQ ID NO: 1294547 - RNA, 22 nt, Human
uaucccagggcaaggcugacag

SEQ ID NO: 1294548 - RNA, 26 nt, Human
ucaaaaaacaaaacaaaacaaaaaca

SEQ ID NO: 1294549 - RNA, 19 nt, Human
ucaagcaccagacugaacc

SEQ ID NO: 1294550 - RNA, 23 nt, Human
ucacaucacugcacuccagccug

SEQ ID NO: 1294551 - RNA, 21 nt, Human
ucacugcacuccagccugggc

SEQ ID NO: 1294552 - RNA, 24 nt, Human
ucacugcacuccagccugggcaac

SEQ ID NO: 1294553 - RNA, 22 nt, Human
ucagaacugggaauuggauuuc

SEQ ID NO: 1294554 - RNA, 23 nt, Human
ucagaacugggaauuggauuucg

SEQ ID NO: 1294555 - RNA, 21 nt, Human
ucaguagugugauggguggag

SEQ ID NO: 1294556 - RNA, 23 nt, Human
uccagccugggcaacagagugag

SEQ ID NO: 1294557 - RNA, 22 nt, Human
uccauaacugcgcccccaaaga

SEQ ID NO: 1294558 - RNA, 20 nt, Human
ucccuagauaccauggggcu

SEQ ID NO: 1294559 - RNA, 25 nt, Human
ucucaaaaaacaaaacaaaacaaaa

SEQ ID NO: 1294560 - RNA, 18 nt, Human
ucucaaggauucagccag

SEQ ID NO: 1294561 - RNA, 24 nt, Human
ucuccaucucaaaaaacaaaacaa

SEQ ID NO: 1294562 - RNA, 22 nt, Human
ucugaggucaggaguucgagac

SEQ ID NO: 1294563 - RNA, 23 nt, Human
ucugaggucaggaguucgagacc

SEQ ID NO: 1294564 - RNA, 20 nt, Human
ucugcaauuggggaaguggc

SEQ ID NO: 1294565 - RNA, 18 nt, Human
ucuggauuuggaagaccc

SEQ ID NO: 1294566 - RNA, 18 nt, Human
ucugguggguaugguggc

SEQ ID NO: 1294567 - RNA, 22 nt, Human
ugaaacccuaucuccacuaaaa

SEQ ID NO: 1294568 - RNA, 19 nt, Human
ugaaagggagguuggacag

SEQ ID NO: 1294569 - RNA, 20 nt, Human
ugaaaggggagguuggagga

SEQ ID NO: 1294570 - RNA, 24 nt, Human
ugaaucaucugaggucaggaguuc

SEQ ID NO: 1294571 - RNA, 24 nt, Human
ugagaggcugaggcaggagaaugg

SEQ ID NO: 1294572 - RNA, 26 nt, Human
ugagaggcugaggcaggagaaugguu

SEQ ID NO: 1294573 - RNA, 24 nt, Human
ugaggcaggagaaugguuugaacc

SEQ ID NO: 1294574 - RNA, 25 nt, Human
ugaggcaggagaaugguuugaaccc

SEQ ID NO: 1294575 - RNA, 24 nt, Human
ugaggcgggugaaucaucugaggu

SEQ ID NO: 1294576 - RNA, 26 nt, Human
ugaggcgggugaaucaucugagguca

SEQ ID NO: 1294577 - RNA, 20 nt, Human
ugauccauaacugcgccccc

SEQ ID NO: 1294578 - RNA, 28 nt, Human
ugcccugaguccucucaaggauucagcc

SEQ ID NO: 1294579 - RNA, 20 nt, Human
ugccuguaaucccaguuacu

SEQ ID NO: 1294580 - RNA, 23 nt, Human
ugccuguaaucccaguuacuuga

SEQ ID NO: 1294581 - RNA, 20 nt, Human
ugcucugcaaacuuaagcac

SEQ ID NO: 1294582 - RNA, 23 nt, Human
ugcugcuggccugaggguccugg

SEQ ID NO: 1294583 - RNA, 20 nt, Human
ugcugguccauuacucugag

SEQ ID NO: 1294584 - RNA, 18 nt, Human
uggaacagugugcugaga

SEQ ID NO: 1294585 - RNA, 21 nt, Human
uggaagugcucugcaaacuua

SEQ ID NO: 1294586 - RNA, 20 nt, Human
uggcaggcagaggcgggcag

SEQ ID NO: 1294587 - RNA, 21 nt, Human
uggcaggcagaggcgggcagg

SEQ ID NO: 1294588 - RNA, 24 nt, Human
uggcaggcagaggcgggcagggug

SEQ ID NO: 1294589 - RNA, 19 nt, Human
uggcagugggaggagccug

SEQ ID NO: 1294590 - RNA, 22 nt, Human
uggcagugggaggagccuggag

SEQ ID NO: 1294591 - RNA, 20 nt, Human
uggcauuucucaugucagga

SEQ ID NO: 1294592 - RNA, 20 nt, Human
uggccaacauugugaaaccc

SEQ ID NO: 1294593 - RNA, 21 nt, Human
uggcgcaugccuguaauccca

SEQ ID NO: 1294594 - RNA, 22 nt, Human
uggcgcaugccuguaaucccag

SEQ ID NO: 1294595 - RNA, 21 nt, Human
uggcucacaucuguaauccca

SEQ ID NO: 1294596 - RNA, 19 nt, Human
ugggaggcugaggcgggug

SEQ ID NO: 1294597 - RNA, 24 nt, Human
ugggaggcugaggcgggugaauca

SEQ ID NO: 1294598 - RNA, 19 nt, Human
uggggcugccuugcuaaaa

SEQ ID NO: 1294599 - RNA, 19 nt, Human
uggguggagccgggagagg

SEQ ID NO: 1294600 - RNA, 18 nt, Human
ugguaaaauaagaaagcc

SEQ ID NO: 1294601 - RNA, 24 nt, Human
ugguggcgcaugccuguaauccca

SEQ ID NO: 1294602 - RNA, 24 nt, Human
ugguggcucacaucuguaauccca

SEQ ID NO: 1294603 - RNA, 22 nt, Human
ugugauggguggagccgggaga

SEQ ID NO: 1294604 - RNA, 24 nt, Human
uguguggcugaguauggaagugcu

SEQ ID NO: 1294605 - RNA, 26 nt, Human
uguucugcuugcccugaguccucuca

SEQ ID NO: 1294606 - RNA, 22 nt, Human
uguuuuauuuuucuccucuucu

SEQ ID NO: 1294607 - RNA, 25 nt, Human
uuagguuuacugccggcccgccccg

SEQ ID NO: 1294608 - RNA, 19 nt, Human
uucagccaggguugagcau

SEQ ID NO: 1294609 - RNA, 23 nt, Human
uucuucaucuggaaaauggcacu

SEQ ID NO: 1294610 - RNA, 21 nt, Human
uuggaacagugugcugagaag

SEQ ID NO: 1294611 - RNA, 23 nt, Human
uuggaacagugugcugagaagag

SEQ ID NO: 1294612 - RNA, 20 nt, Human
uuggcagugggaggagccug

SEQ ID NO: 1294613 - RNA, 25 nt, Human
uugggaggcugaggcgggugaauca

SEQ ID NO: 1294614 - RNA, 21 nt, Human
uuuacugccggcccgccccgc

SEQ ID NO: 1294615 - RNA, 22 nt, Human
uuucucaugucaggaggggaug

SEQ ID NO: 1294616 - RNA, 24 nt, Human
uuuguuccccuugaaggaggaguu

SEQ ID NO: 1294617 - RNA, 25 nt, Human
agacacuggggaucccgggggagcc

SEQ ID NO: 1294618 - RNA, 21 nt, Human
agcagaccuccguuaaggcuu

SEQ ID NO: 1294619 - RNA, 19 nt, Human
caagcccaggaggguucug

SEQ ID NO: 1294620 - RNA, 24 nt, Human
cagacgguggcugcugucuuccuu

SEQ ID NO: 1294621 - RNA, 21 nt, Human
cagccccuucaucugccccug

SEQ ID NO: 1294622 - RNA, 25 nt, Human
ccaccagggaagcucugagguucug

SEQ ID NO: 1294623 - RNA, 23 nt, Human
ccacccgucagagcagaccuccg

SEQ ID NO: 1294624 - RNA, 18 nt, Human
cccccaggacugcccccg

SEQ ID NO: 1294625 - RNA, 19 nt, Human
cccccaggacugcccccgu

SEQ ID NO: 1294626 - RNA, 22 nt, Human
ccgcagcacccccaggacugcc

SEQ ID NO: 1294627 - RNA, 23 nt, Human
ccucuaggaccuacaggacggcc

SEQ ID NO: 1294628 - RNA, 18 nt, Human
ccugggaggucuaggcug

SEQ ID NO: 1294629 - RNA, 22 nt, Human
cgcagcacccccaggacugccc

SEQ ID NO: 1294630 - RNA, 20 nt, Human
cgguggcugcugucuuccuu

SEQ ID NO: 1294631 - RNA, 22 nt, Human
cugccccugggcuguggcuccu

SEQ ID NO: 1294632 - RNA, 20 nt, Human
cugcugucuuccuuucuggg

SEQ ID NO: 1294633 - RNA, 26 nt, Human
cuuucugggcucacccgggcucuggc

SEQ ID NO: 1294634 - RNA, 25 nt, Human
gacgauggagucguugauaaaggaa

SEQ ID NO: 1294635 - RNA, 26 nt, Human
gccuuauuggaguugccguucucaau

SEQ ID NO: 1294636 - RNA, 19 nt, Human
ggaaaagauccucagcuug

SEQ ID NO: 1294637 - RNA, 22 nt, Human
ggcgaccuuccugucagccugc

SEQ ID NO: 1294638 - RNA, 19 nt, Human
uaaaggaaaagauccucag

SEQ ID NO: 1294639 - RNA, 24 nt, Human
uccgcagccccuucaucugccccu

SEQ ID NO: 1294640 - RNA, 18 nt, Human
ucugagggcuggugugga

SEQ ID NO: 1294641 - RNA, 25 nt, Human
ucugagguucuggaggcagcuugac

SEQ ID NO: 1294642 - RNA, 21 nt, Human
ucuggcagagcccacccguca

SEQ ID NO: 1294643 - RNA, 21 nt, Human
ugcccccgucuuccgcagccc

SEQ ID NO: 1294644 - RNA, 19 nt, Human
uggggaucccgggggagcc

SEQ ID NO: 1294645 - RNA, 20 nt, Human
uggguggaggugcagagaga

SEQ ID NO: 1294646 - RNA, 22 nt, Human
ugguguggagggucacaggccu

SEQ ID NO: 1294647 - RNA, 24 nt, Human
uguagccgcagcacccccaggacu

SEQ ID NO: 1294648 - RNA, 20 nt, Human
uuucugggcucacccgggcu

SEQ ID NO: 1294649 - RNA, 25 nt, Human
aacacacacauccaggauccccuca

SEQ ID NO: 1294650 - RNA, 26 nt, Human
aagcauuuauuuuauuaccaaaaaca

SEQ ID NO: 1294651 - RNA, 23 nt, Human
auaacagccucuuuaacaagaac

SEQ ID NO: 1294652 - RNA, 22 nt, Human
cacauccaggauccccucaaag

SEQ ID NO: 1294653 - RNA, 18 nt, Human
cagaguccucaggcuccc

SEQ ID NO: 1294654 - RNA, 19 nt, Human
ccaggccagaguggaccac

SEQ ID NO: 1294655 - RNA, 21 nt, Human
cccacaaaauguagucuggca

SEQ ID NO: 1294656 - RNA, 21 nt, Human
ccucaaagaauccagaguccu

SEQ ID NO: 1294657 - RNA, 24 nt, Human
ccucaaagaauccagaguccucag

SEQ ID NO: 1294658 - RNA, 18 nt, Human
cucaaugccuccaauccu

SEQ ID NO: 1294659 - RNA, 18 nt, Human
gaaauggucuggcucugc

SEQ ID NO: 1294660 - RNA, 25 nt, Human
gaacacacacauccaggauccccuc

SEQ ID NO: 1294661 - RNA, 24 nt, Human
gcaaacccaggccagaguggacca

SEQ ID NO: 1294662 - RNA, 20 nt, Human
uaaucaugaaaguccuuggg

SEQ ID NO: 1294663 - RNA, 24 nt, Human
ucaaacuucaggaccuggggaaga

SEQ ID NO: 1294664 - RNA, 19 nt, Human
uccagaguccucaggcucc

SEQ ID NO: 1294665 - RNA, 18 nt, Human
uggcagaaaagggaaguc

SEQ ID NO: 1294666 - RNA, 24 nt, Human
uggcagaaaagggaagucuuuaga

SEQ ID NO: 1294667 - RNA, 22 nt, Human
uggggaagaaauggucuggcuc

SEQ ID NO: 1294668 - RNA, 25 nt, Human
uuaauaaacacgcucaaugccucca

SEQ ID NO: 1294669 - RNA, 23 nt, Human
aagcugguguccaugguuacagg

SEQ ID NO: 1294670 - RNA, 20 nt, Human
acugcacguucaucgacauc

SEQ ID NO: 1294671 - RNA, 23 nt, Human
agcuucuggccagcuugacauuu

SEQ ID NO: 1294672 - RNA, 25 nt, Human
aggaacaacggggagcaccaauuuc

SEQ ID NO: 1294673 - RNA, 24 nt, Human
ccuccauucaccacugcacguuca

SEQ ID NO: 1294674 - RNA, 21 nt, Human
gccaucuuccuccagcuucug

SEQ ID NO: 1294675 - RNA, 18 nt, Human
gcugcuggcagccuccau

SEQ ID NO: 1294676 - RNA, 20 nt, Human
gguuacaggaacaacgggga

SEQ ID NO: 1294677 - RNA, 19 nt, Human
guucuuuucacagcuauug

SEQ ID NO: 1294678 - RNA, 18 nt, Human
ucacauccuuugccaucu

SEQ ID NO: 1294679 - RNA, 22 nt, Human
ucacauccuuugccaucuuccu

SEQ ID NO: 1294680 - RNA, 22 nt, Human
uccauucaccacugcacguucc

SEQ ID NO: 1294681 - RNA, 18 nt, Human
uccuuugccaucuuccuc

SEQ ID NO: 1294682 - RNA, 24 nt, Human
uccuuugccaucuuccuccagcuu

SEQ ID NO: 1294683 - RNA, 25 nt, Human
ugacagccaccauugucaaugguac

SEQ ID NO: 1294684 - RNA, 20 nt, Human
ugcuggcagccuccauucac

SEQ ID NO: 1294685 - RNA, 18 nt, Human
uggcagccuccauucacc

SEQ ID NO: 1294686 - RNA, 23 nt, Human
uuccuccagcuucuggccagcuu

SEQ ID NO: 1294687 - RNA, 26 nt, Human
uuucacagcuauugacaauuuccaau

SEQ ID NO: 1294688 - RNA, 23 nt, Human
uuugccaucuuccuccagcuucu

SEQ ID NO: 1294689 - RNA, 27 nt, Human
uuuuaugcaggugcguucaucagcaac

SEQ ID NO: 1294690 - RNA, 19 nt, Human
gcucuguggcgggagcgag

SEQ ID NO: 1294691 - RNA, 20 nt, Human
gcugcgggcucuguggcggg

SEQ ID NO: 1294692 - RNA, 23 nt, Human
ggagcgaggccgacgggcggggc

SEQ ID NO: 1294693 - RNA, 22 nt, Human
gguccuucuuccucaaaagccu

SEQ ID NO: 1294694 - RNA, 21 nt, Human
ucuuccucaaaagccuuccag

SEQ ID NO: 1294695 - RNA, 18 nt, Human
uuccagauuuguuugugu

SEQ ID NO: 1294696 - RNA, 24 nt, Human
aaaaacugcaaaagaagccaugug

SEQ ID NO: 1294697 - RNA, 26 nt, Human
aaaagaagaaaaaauaucaauagcac

SEQ ID NO: 1294698 - RNA, 21 nt, Human
aaagaaaagaaugccaaaggg

SEQ ID NO: 1294699 - RNA, 19 nt, Human
aaagaagccaugugcucaa

SEQ ID NO: 1294700 - RNA, 21 nt, Human
aaauaucaauagcacaaaacu

SEQ ID NO: 1294701 - RNA, 19 nt, Human
aacaguucuugaucuaguc

SEQ ID NO: 1294702 - RNA, 22 nt, Human
aagaagaaaaaauaucaauaga

SEQ ID NO: 1294703 - RNA, 23 nt, Human
aagaagaaaaaauaucaauagca

SEQ ID NO: 1294704 - RNA, 19 nt, Human
aagaagccaugugcucaaa

SEQ ID NO: 1294705 - RNA, 23 nt, Human
aagcaaaagaagaaaaaagggac

SEQ ID NO: 1294706 - RNA, 25 nt, Human
acaaagcugucuccauuugcuaaag

SEQ ID NO: 1294707 - RNA, 26 nt, Human
acaaagcugucuccauuugcuaaagc

SEQ ID NO: 1294708 - RNA, 23 nt, Human
auuuuuuuaauaagcugugcauu

SEQ ID NO: 1294709 - RNA, 21 nt, Human
caaaagaagaaaaaauaucaa

SEQ ID NO: 1294710 - RNA, 21 nt, Human
caaagaaaagaaugccaaagg

SEQ ID NO: 1294711 - RNA, 24 nt, Human
caaagcugucuccauuugcuaaag

SEQ ID NO: 1294712 - RNA, 21 nt, Human
ccucugcuucugaaucaaagg

SEQ ID NO: 1294713 - RNA, 19 nt, Human
cuacacugcagaggagauc

SEQ ID NO: 1294714 - RNA, 18 nt, Human
cucaaagaaaagaaugcc

SEQ ID NO: 1294715 - RNA, 21 nt, Human
cucuacacugcagaggagauc

SEQ ID NO: 1294716 - RNA, 21 nt, Human
cugcaaaagaagccaugugcu

SEQ ID NO: 1294717 - RNA, 22 nt, Human
cuugcaggucuccaugcccugc

SEQ ID NO: 1294718 - RNA, 22 nt, Human
gaaaaacugcaaaagaagccau

SEQ ID NO: 1294719 - RNA, 21 nt, Human
gauaacaauuuugauuuuuuu

SEQ ID NO: 1294720 - RNA, 20 nt, Human
gcuaaagcuauaaacaguuc

SEQ ID NO: 1294721 - RNA, 21 nt, Human
uagcacaaaacugcccuuaua

SEQ ID NO: 1294722 - RNA, 22 nt, Human
ucaaggccaugugucuugcagg

SEQ ID NO: 1294723 - RNA, 21 nt, Human
ucuccaugcccugcacugccc

SEQ ID NO: 1294724 - RNA, 22 nt, Human
ugaagaccaugaacccucugcu

SEQ ID NO: 1294725 - RNA, 23 nt, Human
ugcaaaagaagccaugugcucaa

SEQ ID NO: 1294726 - RNA, 21 nt, Human
ugcaaaauacauggauggcca

SEQ ID NO: 1294727 - RNA, 19 nt, Human
ugcaaaggccucaaggcca

SEQ ID NO: 1294728 - RNA, 18 nt, Human
ugcccagcucuggucucu

SEQ ID NO: 1294729 - RNA, 24 nt, Human
ugugaagaaguuucacaaagcugg

SEQ ID NO: 1294730 - RNA, 19 nt, Human
ugugcaaaggccucaagga

SEQ ID NO: 1294731 - RNA, 21 nt, Human
ugugcaaaggccucaaggcca

SEQ ID NO: 1294732 - RNA, 21 nt, Human
uugaagaccaugaacccucug

SEQ ID NO: 1294733 - RNA, 25 nt, Human
uuugcuaaagcuauaaacaguucuu

SEQ ID NO: 1294734 - RNA, 21 nt, Human
aaacacaaccaaacuaaacug

SEQ ID NO: 1294735 - RNA, 24 nt, Human
aacaaaagguaagcaaaagggacc

SEQ ID NO: 1294736 - RNA, 19 nt, Human
aaccaagucuccuaauuug

SEQ ID NO: 1294737 - RNA, 21 nt, Human
aagacaaagcaaagcaucaac

SEQ ID NO: 1294738 - RNA, 19 nt, Human
aaggaccaaagauaguacu

SEQ ID NO: 1294739 - RNA, 19 nt, Human
aauacuuuccauugauagc

SEQ ID NO: 1294740 - RNA, 24 nt, Human
acaccacuuguaggccuuugcuag

SEQ ID NO: 1294741 - RNA, 18 nt, Human
accaugaaagugcauaau

SEQ ID NO: 1294742 - RNA, 24 nt, Human
acucgucgcccaggcuggagugca

SEQ ID NO: 1294743 - RNA, 22 nt, Human
acugagaaagacuauaccauga

SEQ ID NO: 1294744 - RNA, 24 nt, Human
acugcagcugcucuuugguuuggc

SEQ ID NO: 1294745 - RNA, 21 nt, Human
acugccaaacuggaguuaugu

SEQ ID NO: 1294746 - RNA, 25 nt, Human
acuucaguuauuucauuccacuucu

SEQ ID NO: 1294747 - RNA, 21 nt, Human
agaugaaaauaaacuuuguaa

SEQ ID NO: 1294748 - RNA, 23 nt, Human
auagucaaaaucugcuaauagaa

SEQ ID NO: 1294749 - RNA, 19 nt, Human
augguacuuguuagguaaa

SEQ ID NO: 1294750 - RNA, 23 nt, Human
auguagaaaugcaaaaaguacca

SEQ ID NO: 1294751 - RNA, 20 nt, Human
caaaagacaaagcaaagcau

SEQ ID NO: 1294752 - RNA, 22 nt, Human
caaaagacaaagcaaagcauca

SEQ ID NO: 1294753 - RNA, 20 nt, Human
caaagaggcagccuuucccu

SEQ ID NO: 1294754 - RNA, 24 nt, Human
caaagcaucaacauuaagucacag

SEQ ID NO: 1294755 - RNA, 21 nt, Human
caaccaaacuaaacuguacuu

SEQ ID NO: 1294756 - RNA, 24 nt, Human
cagccaaaagacaaagcaaagcau

SEQ ID NO: 1294757 - RNA, 19 nt, Human
caggagaacauuucugaaa

SEQ ID NO: 1294758 - RNA, 24 nt, Human
caugucaauguagguuaggccagc

SEQ ID NO: 1294759 - RNA, 22 nt, Human
cauuuuuaauuuaaauuggaaa

SEQ ID NO: 1294760 - RNA, 19 nt, Human
cccaaauaguugauagcaa

SEQ ID NO: 1294761 - RNA, 21 nt, Human
cccaggcuggagugcaaaggc

SEQ ID NO: 1294762 - RNA, 23 nt, Human
cgcccaggcuggagugcaaaggc

SEQ ID NO: 1294763 - RNA, 19 nt, Human
cgcgggagccccggcgacg

SEQ ID NO: 1294764 - RNA, 21 nt, Human
cgucgcccaggcuggagugca

SEQ ID NO: 1294765 - RNA, 24 nt, Human
cucgucgcccaggcuggagugcaa

SEQ ID NO: 1294766 - RNA, 22 nt, Human
cugaaagaucucacaugccuga

SEQ ID NO: 1294767 - RNA, 22 nt, Human
cugccuauucaaugcccagaau

SEQ ID NO: 1294768 - RNA, 25 nt, Human
cuuuguaaacuuguucauuuaaaau

SEQ ID NO: 1294769 - RNA, 24 nt, Human
gaaagugcauaauagugaagaaaa

SEQ ID NO: 1294770 - RNA, 19 nt, Human
gauagcagugcuagucccu

SEQ ID NO: 1294771 - RNA, 19 nt, Human
gcaagaccugaacuucaac

SEQ ID NO: 1294772 - RNA, 19 nt, Human
gcccaggcuggagugcaaa

SEQ ID NO: 1294773 - RNA, 19 nt, Human
gcugaaaugcaaaaauaug

SEQ ID NO: 1294774 - RNA, 22 nt, Human
gcuggagugcaaaggcuuuccg

SEQ ID NO: 1294775 - RNA, 21 nt, Human
ggaguuucacucgucgcccag

SEQ ID NO: 1294776 - RNA, 21 nt, Human
ggcugccgagccccgcguccc

SEQ ID NO: 1294777 - RNA, 26 nt, Human
guacugcagcugcucuuugguuuggc

SEQ ID NO: 1294778 - RNA, 24 nt, Human
guuucacucgucgcccaggcugga

SEQ ID NO: 1294779 - RNA, 24 nt, Human
uaaaguaauucauuaugacuuuug

SEQ ID NO: 1294780 - RNA, 21 nt, Human
uaacaaaauaauauagaauga

SEQ ID NO: 1294781 - RNA, 25 nt, Human
uaauagaaauacaauucaaguaaac

SEQ ID NO: 1294782 - RNA, 23 nt, Human
uaauggcaauggcaagaccugaa

SEQ ID NO: 1294783 - RNA, 18 nt, Human
uacaugucaauguagguu

SEQ ID NO: 1294784 - RNA, 18 nt, Human
uaccaugaaagugcauaa

SEQ ID NO: 1294785 - RNA, 19 nt, Human
uaccaugaaagugcauaau

SEQ ID NO: 1294786 - RNA, 19 nt, Human
uaggccagccaaaagacaa

SEQ ID NO: 1294787 - RNA, 20 nt, Human
uauagaaugaagucauuaga

SEQ ID NO: 1294788 - RNA, 28 nt, Human
ucacaugccugauaauccuuaauuuaaa

SEQ ID NO: 1294789 - RNA, 20 nt, Human
ucacucgucgcccaggcugg

SEQ ID NO: 1294790 - RNA, 21 nt, Human
ucacucgucgcccaggcugga

SEQ ID NO: 1294791 - RNA, 24 nt, Human
ucacucgucgcccaggcuggagug

SEQ ID NO: 1294792 - RNA, 22 nt, Human
ucacuuuaaaauaguguccauc

SEQ ID NO: 1294793 - RNA, 22 nt, Human
ucccacaccacuuguaggccuu

SEQ ID NO: 1294794 - RNA, 19 nt, Human
ucccuagaacaaaagguaa

SEQ ID NO: 1294795 - RNA, 26 nt, Human
ucccugauucccacaccacuuguagg

SEQ ID NO: 1294796 - RNA, 18 nt, Human
ucgcccaggcuggagugc

SEQ ID NO: 1294797 - RNA, 23 nt, Human
ugaaacauauggauuucagacau

SEQ ID NO: 1294798 - RNA, 24 nt, Human
ugaacuucaacuuuauuuuucuua

SEQ ID NO: 1294799 - RNA, 19 nt, Human
ugagauaccaaagaggcag

SEQ ID NO: 1294800 - RNA, 22 nt, Human
ugcaaaaaguaccaggagaaca

SEQ ID NO: 1294801 - RNA, 18 nt, Human
ugcauaauagugaagaaa

SEQ ID NO: 1294802 - RNA, 19 nt, Human
ugccaaacuggaguuaugu

SEQ ID NO: 1294803 - RNA, 23 nt, Human
uggaguuucacucgucgcccagg

SEQ ID NO: 1294804 - RNA, 20 nt, Human
uggcaagaccugaacuucac

SEQ ID NO: 1294805 - RNA, 21 nt, Human
uguacugcagcugcucuuugg

SEQ ID NO: 1294806 - RNA, 18 nt, Human
ugugcuauuaaagauguu

SEQ ID NO: 1294807 - RNA, 18 nt, Human
uguguacaugucaaugua

SEQ ID NO: 1294808 - RNA, 21 nt, Human
uuacugccuauucaaugccca

SEQ ID NO: 1294809 - RNA, 22 nt, Human
uucacucgucgcccaggcugga

SEQ ID NO: 1294810 - RNA, 24 nt, Human
uucacucgucgcccaggcuggagu

SEQ ID NO: 1294811 - RNA, 21 nt, Human
uuucacucgucgcccaggcug

SEQ ID NO: 1294812 - RNA, 23 nt, Human
uuucacucgucgcccaggcugga

SEQ ID NO: 1294813 - RNA, 23 nt, Human
uuucugaaucuauauuacauuuu

SEQ ID NO: 1294814 - RNA, 19 nt, Human
gcgcucagccgguccaggg

SEQ ID NO: 1294815 - RNA, 20 nt, Human
ggcgcucagccgguccaggg

SEQ ID NO: 1294816 - RNA, 26 nt, Human
aaggugggauucaggaagaucccacc

SEQ ID NO: 1294817 - RNA, 27 nt, Human
caaggcgggauucaggaagaucucacc

SEQ ID NO: 1294818 - RNA, 27 nt, Human
caagguggggcucaggaagaucccacc

SEQ ID NO: 1294819 - RNA, 24 nt, Human
ccuccaacccugaugggcaaggcg

SEQ ID NO: 1294820 - RNA, 18 nt, Human
gcacugggugaagcgcug

SEQ ID NO: 1294821 - RNA, 24 nt, Human
gcgagaugggguccaggcaaggcc

SEQ ID NO: 1294822 - RNA, 22 nt, Human
ggcacugggugaagcgcugucc

SEQ ID NO: 1294823 - RNA, 19 nt, Human
ugggguccaggcaaggccc

SEQ ID NO: 1294824 - RNA, 19 nt, Human
ugucugcgauuuucuccuu

SEQ ID NO: 1294825 - RNA, 23 nt, Human
ucuuugauuucugucaugggugc

SEQ ID NO: 1294826 - RNA, 18 nt, Human
ugaaacuggaagccauga

SEQ ID NO: 1294827 - RNA, 19 nt, Human
ugacuccuuugcuuuccuc

SEQ ID NO: 1294828 - RNA, 23 nt, Human
uuagaagucaauccgcccgccgc

SEQ ID NO: 1294829 - RNA, 19 nt, Human
uuuccacugaaacuggaag

SEQ ID NO: 1294830 - RNA, 22 nt, Human
uuuccucuuccucuucuggguu

SEQ ID NO: 1294831 - RNA, 25 nt, Human
aaacaaaaaccagcuggauccagag

SEQ ID NO: 1294832 - RNA, 23 nt, Human
aaaguucugggauuacaggcaca

SEQ ID NO: 1294833 - RNA, 23 nt, Human
aacaacuuucaggucacagacca

SEQ ID NO: 1294834 - RNA, 23 nt, Human
aacauccuuuagccucuuccaca

SEQ ID NO: 1294835 - RNA, 20 nt, Human
aaguuccaggaagaagcuga

SEQ ID NO: 1294836 - RNA, 20 nt, Human
acgggguuucuccauguugg

SEQ ID NO: 1294837 - RNA, 24 nt, Human
acgggguuucuccauguuggccag

SEQ ID NO: 1294838 - RNA, 25 nt, Human
acgggguuucuccauguuggccagu

SEQ ID NO: 1294839 - RNA, 21 nt, Human
agcaaaacaaaaaccagcugg

SEQ ID NO: 1294840 - RNA, 31 nt, Human
aggaagaagcugagccucagcaaaacaaaaa

SEQ ID NO: 1294841 - RNA, 24 nt, Human
aggugauccacccaccucggccuu

SEQ ID NO: 1294842 - RNA, 26 nt, Human
agucuggucucgaacuccugaccucc

SEQ ID NO: 1294843 - RNA, 23 nt, Human
aucaugucagccauuugagaccc

SEQ ID NO: 1294844 - RNA, 24 nt, Human
auuuuuguauuuuuaguagagacg

SEQ ID NO: 1294845 - RNA, 24 nt, Human
caaaguucugggauuacaggcaca

SEQ ID NO: 1294846 - RNA, 24 nt, Human
caccacaccuggcuaauuuuugua

SEQ ID NO: 1294847 - RNA, 22 nt, Human
cacccaccucggccuuccaaag

SEQ ID NO: 1294848 - RNA, 23 nt, Human
cacccaccucggccuuccaaagu

SEQ ID NO: 1294849 - RNA, 24 nt, Human
cagagucuugcucuguugcccagg

SEQ ID NO: 1294850 - RNA, 20 nt, Human
caugucagccauuugagacc

SEQ ID NO: 1294851 - RNA, 22 nt, Human
ccaaaguucugggauuacaggc

SEQ ID NO: 1294852 - RNA, 23 nt, Human
ccaaaguucugggauuacaggca

SEQ ID NO: 1294853 - RNA, 20 nt, Human
ccaggaagaagcugagccuc

SEQ ID NO: 1294854 - RNA, 21 nt, Human
ccaggaagaagcugagccuca

SEQ ID NO: 1294855 - RNA, 22 nt, Human
ccauguuggccagucuggucuc

SEQ ID NO: 1294856 - RNA, 24 nt, Human
ccugaccucaggugauccacccac

SEQ ID NO: 1294857 - RNA, 19 nt, Human
cgggguuucuccauguugg

SEQ ID NO: 1294858 - RNA, 23 nt, Human
cuaauuuuuguauuuuuaguaga

SEQ ID NO: 1294859 - RNA, 24 nt, Human
cuccauguuggccagucuggucuc

SEQ ID NO: 1294860 - RNA, 25 nt, Human
cucggccuuccaaaguucugggauu

SEQ ID NO: 1294861 - RNA, 24 nt, Human
gaccucaggugauccacccaccuc

SEQ ID NO: 1294862 - RNA, 24 nt, Human
gagacgggguuucuccauguuggc

SEQ ID NO: 1294863 - RNA, 25 nt, Human
gagaugccugccugacacagugagg

SEQ ID NO: 1294864 - RNA, 24 nt, Human
gagccucagcaaaacaaaaaccag

SEQ ID NO: 1294865 - RNA, 21 nt, Human
gauuacaggcacaagccacug

SEQ ID NO: 1294866 - RNA, 24 nt, Human
gauuacaggcacaagccacugugc

SEQ ID NO: 1294867 - RNA, 25 nt, Human
gcagaacacuccaacuauucaacaa

SEQ ID NO: 1294868 - RNA, 20 nt, Human
gcucuguugcccaggcugga

SEQ ID NO: 1294869 - RNA, 22 nt, Human
ggagacagagucuugcucuguu

SEQ ID NO: 1294870 - RNA, 24 nt, Human
ggauuacaggcacaagccacugug

SEQ ID NO: 1294871 - RNA, 19 nt, Human
ggucucgaacuccugaccu

SEQ ID NO: 1294872 - RNA, 23 nt, Human
guagagacgggguuucuccaugu

SEQ ID NO: 1294873 - RNA, 24 nt, Human
gugauccacccaccucggccuucc

SEQ ID NO: 1294874 - RNA, 24 nt, Human
uaauuuuuguauuuuuaguagaga

SEQ ID NO: 1294875 - RNA, 23 nt, Human
uacaggcacaagccacugugccc

SEQ ID NO: 1294876 - RNA, 21 nt, Human
uagaaaggaaggcauguauuu

SEQ ID NO: 1294877 - RNA, 24 nt, Human
uaguagagacgggguuucuccaug

SEQ ID NO: 1294878 - RNA, 20 nt, Human
ucaggugauccacccaccuc

SEQ ID NO: 1294879 - RNA, 24 nt, Human
uccaaaguucugggauuacaggca

SEQ ID NO: 1294880 - RNA, 24 nt, Human
uccauguuggccagucuggucucg

SEQ ID NO: 1294881 - RNA, 23 nt, Human
ucucgaacuccugaccucaggug

SEQ ID NO: 1294882 - RNA, 18 nt, Human
ucuguugcccaggcugga

SEQ ID NO: 1294883 - RNA, 23 nt, Human
ucuugcucuguugcccaggcugg

SEQ ID NO: 1294884 - RNA, 24 nt, Human
ucuugcucuguugcccaggcugga

SEQ ID NO: 1294885 - RNA, 21 nt, Human
ugaccucaggugauccaccca

SEQ ID NO: 1294886 - RNA, 24 nt, Human
ugaccucaggugauccacccaccu

SEQ ID NO: 1294887 - RNA, 24 nt, Human
ugauccacccaccucggccuucca

SEQ ID NO: 1294888 - RNA, 21 nt, Human
ugcagcaguagaaaggaaggc

SEQ ID NO: 1294889 - RNA, 23 nt, Human
ugcagcaguagaaaggaaggcau

SEQ ID NO: 1294890 - RNA, 19 nt, Human
ugcucuguugcccaggcug

SEQ ID NO: 1294891 - RNA, 22 nt, Human
uggagacagagucuugcucugu

SEQ ID NO: 1294892 - RNA, 21 nt, Human
ugggauuacaggcacaagcca

SEQ ID NO: 1294893 - RNA, 22 nt, Human
ugggauuacaggcacaagccac

SEQ ID NO: 1294894 - RNA, 22 nt, Human
ugggauuacaggcacaagccac

SEQ ID NO: 1294895 - RNA, 23 nt, Human
ugggauuacaggcacaagccacu

SEQ ID NO: 1294896 - RNA, 24 nt, Human
ugggauuacaggcacaagccacug

SEQ ID NO: 1294897 - RNA, 26 nt, Human
ugggauuacaggcacaagccacugug

SEQ ID NO: 1294898 - RNA, 21 nt, Human
uggucucgaacuccugaccuc

SEQ ID NO: 1294899 - RNA, 21 nt, Human
uguauuuuuaguagagacggg

SEQ ID NO: 1294900 - RNA, 27 nt, Human
uguuggccagucuggucucgaacuccu

SEQ ID NO: 1294901 - RNA, 18 nt, Human
uuaguagagacgggguuu

SEQ ID NO: 1294902 - RNA, 22 nt, Human
uuaguagagacgggguuucucc

SEQ ID NO: 1294903 - RNA, 24 nt, Human
uuaguagagacgggguuucuccau

SEQ ID NO: 1294904 - RNA, 23 nt, Human
uuguauuuuuaguagagacgggg

SEQ ID NO: 1294905 - RNA, 18 nt, Human
uuucuccauguuggccag

SEQ ID NO: 1294906 - RNA, 22 nt, Human
uuuuuaguagagacgggguuuc

SEQ ID NO: 1294907 - RNA, 20 nt, Human
uuuuuguauuuuuaguagag

SEQ ID NO: 1294908 - RNA, 23 nt, Human
agccgccaugugaauuggggaca

SEQ ID NO: 1294909 - RNA, 18 nt, Human
aggagcagcuggggcugg

SEQ ID NO: 1294910 - RNA, 21 nt, Human
caacaggagccggacacaguc

SEQ ID NO: 1294911 - RNA, 24 nt, Human
caagcucccggaccaccucauccu

SEQ ID NO: 1294912 - RNA, 23 nt, Human
caagugguucucuugugcugcca

SEQ ID NO: 1294913 - RNA, 19 nt, Human
cacagaauagggcaugccg

SEQ ID NO: 1294914 - RNA, 20 nt, Human
cagcaggaucucugagauuc

SEQ ID NO: 1294915 - RNA, 21 nt, Human
caggaucucugagauucgcac

SEQ ID NO: 1294916 - RNA, 20 nt, Human
ccauucaacccauucugguu

SEQ ID NO: 1294917 - RNA, 22 nt, Human
ccauuuucacauggccuuccuu

SEQ ID NO: 1294918 - RNA, 23 nt, Human
ccccgauccagcagcagccgcac

SEQ ID NO: 1294919 - RNA, 19 nt, Human
ccccgugguccagcaggau

SEQ ID NO: 1294920 - RNA, 19 nt, Human
ccggacacagucgaggugg

SEQ ID NO: 1294921 - RNA, 22 nt, Human
ccuuagaagccagaugcaagcc

SEQ ID NO: 1294922 - RNA, 26 nt, Human
ccuuagccacccugugguguccacag

SEQ ID NO: 1294923 - RNA, 19 nt, Human
cgccgaagggccuuggggg

SEQ ID NO: 1294924 - RNA, 21 nt, Human
cuccccgauccagcagcagcc

SEQ ID NO: 1294925 - RNA, 20 nt, Human
cugguagcagcaucggcuuc

SEQ ID NO: 1294926 - RNA, 18 nt, Human
gaggaggagcagcugggg

SEQ ID NO: 1294927 - RNA, 20 nt, Human
gaggaggagcagcuggggcu

SEQ ID NO: 1294928 - RNA, 19 nt, Human
gaguuggguuuggccccuu

SEQ ID NO: 1294929 - RNA, 24 nt, Human
gccagaugcaagccauucaaccca

SEQ ID NO: 1294930 - RNA, 18 nt, Human
gcccggcuagagcagcga

SEQ ID NO: 1294931 - RNA, 18 nt, Human
ggagaggugucaauucgu

SEQ ID NO: 1294932 - RNA, 21 nt, Human
gggcuugaggaggagcagcug

SEQ ID NO: 1294933 - RNA, 24 nt, Human
gugaugucgucuaucucugcgucg

SEQ ID NO: 1294934 - RNA, 22 nt, Human
uagcagcaucggcuucgcggaa

SEQ ID NO: 1294935 - RNA, 23 nt, Human
uccaagugguucucuugugcugc

SEQ ID NO: 1294936 - RNA, 21 nt, Human
uccauaguugacaagcucccg

SEQ ID NO: 1294937 - RNA, 19 nt, Human
ucuugguuuuggcuuggau

SEQ ID NO: 1294938 - RNA, 21 nt, Human
ugaggaggagcagcuggggcu

SEQ ID NO: 1294939 - RNA, 22 nt, Human
ugccauguacagggguguaaaa

SEQ ID NO: 1294940 - RNA, 20 nt, Human
uggaguggggucaggugguc

SEQ ID NO: 1294941 - RNA, 22 nt, Human
uggauuggugccccguggucca

SEQ ID NO: 1294942 - RNA, 20 nt, Human
ugggcagccacguggagugg

SEQ ID NO: 1294943 - RNA, 24 nt, Human
uggggucaggugguccagggugau

SEQ ID NO: 1294944 - RNA, 20 nt, Human
ugguuucuaucugggcuccc

SEQ ID NO: 1294945 - RNA, 23 nt, Human
uguccaaguuaccugaucuugcu

SEQ ID NO: 1294946 - RNA, 20 nt, Human
ugugcagaaguucaaccacc

SEQ ID NO: 1294947 - RNA, 20 nt, Human
uuccaguaaaaacuuaacca

SEQ ID NO: 1294948 - RNA, 19 nt, Human
uuccaguaaaaacuuaagg

SEQ ID NO: 1294949 - RNA, 24 nt, Human
uucgcggaagcccacagaauaggg

SEQ ID NO: 1294950 - RNA, 20 nt, Human
uugacaagcucccggaccac

SEQ ID NO: 1294951 - RNA, 21 nt, Human
uugugcagaaguucaaccacc

SEQ ID NO: 1294952 - RNA, 18 nt, Human
aaacaauguuucuacuaa

SEQ ID NO: 1294953 - RNA, 23 nt, Human
aaacaguucagguauggcuccca

SEQ ID NO: 1294954 - RNA, 18 nt, Human
aacguggugaaacaaugu

SEQ ID NO: 1294955 - RNA, 20 nt, Human
aagaaaacaucaaaaaggag

SEQ ID NO: 1294956 - RNA, 19 nt, Human
aagaugccaaacuuuuguc

SEQ ID NO: 1294957 - RNA, 18 nt, Human
aagccaaggagaaaggga

SEQ ID NO: 1294958 - RNA, 18 nt, Human
acaccaggggcccagaga

SEQ ID NO: 1294959 - RNA, 20 nt, Human
agaaaacaucaaaaaggaga

SEQ ID NO: 1294960 - RNA, 20 nt, Human
agaaagaaaacaauggucau

SEQ ID NO: 1294961 - RNA, 24 nt, Human
agacggcagggcuagaucuggggg

SEQ ID NO: 1294962 - RNA, 18 nt, Human
agagaggagggccuggaa

SEQ ID NO: 1294963 - RNA, 24 nt, Human
agcacuuugggaggccgaggcagg

SEQ ID NO: 1294964 - RNA, 21 nt, Human
aggagagggagggaaaggcuu

SEQ ID NO: 1294965 - RNA, 24 nt, Human
aggagggccuggaaccacagcuca

SEQ ID NO: 1294966 - RNA, 21 nt, Human
aggcagaggggagugcaaggg

SEQ ID NO: 1294967 - RNA, 20 nt, Human
aggcaggcggaucacgaggu

SEQ ID NO: 1294968 - RNA, 24 nt, Human
aggcaggcggaucacgaggucagg

SEQ ID NO: 1294969 - RNA, 26 nt, Human
aggcaggcggaucacgaggucaggag

SEQ ID NO: 1294970 - RNA, 21 nt, Human
aggccgaggcaggcggaucac

SEQ ID NO: 1294971 - RNA, 23 nt, Human
aggccgaggcaggcggaucacga

SEQ ID NO: 1294972 - RNA, 24 nt, Human
aggcggaucacgaggucaggagau

SEQ ID NO: 1294973 - RNA, 22 nt, Human
aggcuaaccaguuuccaacacu

SEQ ID NO: 1294974 - RNA, 19 nt, Human
aggcugaggcaggagaaug

SEQ ID NO: 1294975 - RNA, 21 nt, Human
agggaccaggcuucuaugagc

SEQ ID NO: 1294976 - RNA, 24 nt, Human
aguggcucacgccuguaaucccag

SEQ ID NO: 1294977 - RNA, 25 nt, Human
caaaaaaaguuagccggguguggug

SEQ ID NO: 1294978 - RNA, 22 nt, Human
caaagcuuaauaaaagggcugg

SEQ ID NO: 1294979 - RNA, 19 nt, Human
cacagcucagcuuucuguc

SEQ ID NO: 1294980 - RNA, 22 nt, Human
cacccauaacacaacuuuuguu

SEQ ID NO: 1294981 - RNA, 24 nt, Human
cacgccuguaaucccagcacuuug

SEQ ID NO: 1294982 - RNA, 24 nt, Human
cagcacuuugggaggccgaggcag

SEQ ID NO: 1294983 - RNA, 26 nt, Human
cagcacuuugggaggccgaggcaggc

SEQ ID NO: 1294984 - RNA, 24 nt, Human
cagcuacucaggaggcugaggcag

SEQ ID NO: 1294985 - RNA, 23 nt, Human
cagguauggcucccaagcccaga

SEQ ID NO: 1294986 - RNA, 24 nt, Human
cagucccauucccccaggaaauca

SEQ ID NO: 1294987 - RNA, 25 nt, Human
cauccugacacacagauaaaacauc

SEQ ID NO: 1294988 - RNA, 22 nt, Human
ccaagaugccaaacuuuugucu

SEQ ID NO: 1294989 - RNA, 18 nt, Human
ccaaggagaaagggagga

SEQ ID NO: 1294990 - RNA, 23 nt, Human
ccaggcuucuaugagcggggaga

SEQ ID NO: 1294991 - RNA, 25 nt, Human
cccaggaaaucaagaacaaacaaac

SEQ ID NO: 1294992 - RNA, 19 nt, Human
ccccagaaacccuugucuc

SEQ ID NO: 1294993 - RNA, 22 nt, Human
ccccagaaacccuugucuccag

SEQ ID NO: 1294994 - RNA, 21 nt, Human
ccccaggaaaucaagaacaaa

SEQ ID NO: 1294995 - RNA, 20 nt, Human
ccuggcuaacguggugaaac

SEQ ID NO: 1294996 - RNA, 21 nt, Human
ccuggcuaacguggugaaaca

SEQ ID NO: 1294997 - RNA, 21 nt, Human
ccuguagucccagcuacucag

SEQ ID NO: 1294998 - RNA, 19 nt, Human
ccuuugagccuacaguuga

SEQ ID NO: 1294999 - RNA, 20 nt, Human
cgaccaaccuuggacauggc

SEQ ID NO: 1295000 - RNA, 24 nt, Human
cgaggcaggcggaucacgagguca

SEQ ID NO: 1295001 - RNA, 23 nt, Human
cgccuguaaucccagcacuuugg

SEQ ID NO: 1295002 - RNA, 24 nt, Human
cgccuguaaucccagcacuuuggg

SEQ ID NO: 1295003 - RNA, 24 nt, Human
cgccuguagucccagcuacucagg

SEQ ID NO: 1295004 - RNA, 22 nt, Human
cucacgccuguaaucccagcac

SEQ ID NO: 1295005 - RNA, 24 nt, Human
cucacgccuguaaucccagcacuu

SEQ ID NO: 1295006 - RNA, 24 nt, Human
cucggcugggugcaguggcucacg

SEQ ID NO: 1295007 - RNA, 21 nt, Human
cucugaccuuacucaccgccu

SEQ ID NO: 1295008 - RNA, 19 nt, Human
cuggccaaagcagaagccc

SEQ ID NO: 1295009 - RNA, 21 nt, Human
cuggccaaagcagaagcccca

SEQ ID NO: 1295010 - RNA, 23 nt, Human
gaaaaaagauacacaccaggggc

SEQ ID NO: 1295011 - RNA, 18 nt, Human
gacauagaugcuucaagc

SEQ ID NO: 1295012 - RNA, 22 nt, Human
gagggaccaggcuucuaugagc

SEQ ID NO: 1295013 - RNA, 19 nt, Human
gccaggguucccuuaauuc

SEQ ID NO: 1295014 - RNA, 20 nt, Human
gccccagaaacccuugucuc

SEQ ID NO: 1295015 - RNA, 18 nt, Human
gccuuggaggaaacaguu

SEQ ID NO: 1295016 - RNA, 24 nt, Human
gcuaacguggugaaacaauguuuc

SEQ ID NO: 1295017 - RNA, 22 nt, Human
gcuggucugaaagacuggauuc

SEQ ID NO: 1295018 - RNA, 24 nt, Human
ggagaccauccuggcuaacguggu

SEQ ID NO: 1295019 - RNA, 19 nt, Human
ggagagggagggaaaggcu

SEQ ID NO: 1295020 - RNA, 19 nt, Human
ggcugggugcaguggcuca

SEQ ID NO: 1295021 - RNA, 20 nt, Human
gggacaagaaaacaucaaaa

SEQ ID NO: 1295022 - RNA, 24 nt, Human
gggacaagaaaacaucaaaaagga

SEQ ID NO: 1295023 - RNA, 22 nt, Human
gggacuagccuccacccauaac

SEQ ID NO: 1295024 - RNA, 24 nt, Human
gggugcaguggcucacgccuguaa

SEQ ID NO: 1295025 - RNA, 24 nt, Human
gggugugguggcgggcgccuguag

SEQ ID NO: 1295026 - RNA, 19 nt, Human
gguaacagagcaaugcacc

SEQ ID NO: 1295027 - RNA, 24 nt, Human
gguggcgggcgccuguagucccag

SEQ ID NO: 1295028 - RNA, 18 nt, Human
ggugugguggcgggcgcc

SEQ ID NO: 1295029 - RNA, 24 nt, Human
guaggacagcuagaagccuucaag

SEQ ID NO: 1295030 - RNA, 24 nt, Human
guucuugggcuuggagcaggcucu

SEQ ID NO: 1295031 - RNA, 21 nt, Human
guugcaaaggcagaggggagu

SEQ ID NO: 1295032 - RNA, 19 nt, Human
uaacguggugaaacaaugu

SEQ ID NO: 1295033 - RNA, 24 nt, Human
uaacguggugaaacaauguuucua

SEQ ID NO: 1295034 - RNA, 18 nt, Human
uaauucgaccaaccuugg

SEQ ID NO: 1295035 - RNA, 23 nt, Human
uagcggauuuuuuuguuaaauuu

SEQ ID NO: 1295036 - RNA, 23 nt, Human
uauuacaagacauuuuagagaaa

SEQ ID NO: 1295037 - RNA, 25 nt, Human
ucaaaaaggagagggagggaaaggc

SEQ ID NO: 1295038 - RNA, 24 nt, Human
ucacgaggucaggagauggagacc

SEQ ID NO: 1295039 - RNA, 19 nt, Human
ucagagucguauuuuuaug

SEQ ID NO: 1295040 - RNA, 24 nt, Human
ucaggcccagaagacggaugcuag

SEQ ID NO: 1295041 - RNA, 22 nt, Human
ucccaagcccagaaaaaauguu

SEQ ID NO: 1295042 - RNA, 24 nt, Human
ucccugagcuguggccccagaaac

SEQ ID NO: 1295043 - RNA, 22 nt, Human
ucucaugggcugggguaggggg

SEQ ID NO: 1295044 - RNA, 19 nt, Human
ugagcggggagaggcaggg

SEQ ID NO: 1295045 - RNA, 22 nt, Human
ugagcggggagaggcagggcca

SEQ ID NO: 1295046 - RNA, 18 nt, Human
ugccaaacuuuugucuug

SEQ ID NO: 1295047 - RNA, 23 nt, Human
ugcugcccacaguggguuugucu

SEQ ID NO: 1295048 - RNA, 19 nt, Human
uggacauggcuuagaugcu

SEQ ID NO: 1295049 - RNA, 19 nt, Human
uggcauaaaaauucucacu

SEQ ID NO: 1295050 - RNA, 19 nt, Human
uggccaaagcagaagcccc

SEQ ID NO: 1295051 - RNA, 22 nt, Human
uggccaaagcagaagccccagg

SEQ ID NO: 1295052 - RNA, 24 nt, Human
uggcucacgccuguaaucccagca

SEQ ID NO: 1295053 - RNA, 19 nt, Human
ugggaacugggcuagacag

SEQ ID NO: 1295054 - RNA, 20 nt, Human
ugggaggccgaggcaggcgg

SEQ ID NO: 1295055 - RNA, 24 nt, Human
ugggaggccgaggcaggcggauca

SEQ ID NO: 1295056 - RNA, 21 nt, Human
ugggcugggguagggggaggc

SEQ ID NO: 1295057 - RNA, 24 nt, Human
ugguggcgggcgccuguaguccca

SEQ ID NO: 1295058 - RNA, 22 nt, Human
uguagcuuucagagucguauuu

SEQ ID NO: 1295059 - RNA, 18 nt, Human
uguaggaaauggguaaca

SEQ ID NO: 1295060 - RNA, 23 nt, Human
ugugguggcgggcgccuguaguc

SEQ ID NO: 1295061 - RNA, 18 nt, Human
uuagagaaagaaaacaau

SEQ ID NO: 1295062 - RNA, 18 nt, Human
uuagccgggugugguggc

SEQ ID NO: 1295063 - RNA, 24 nt, Human
uuagccgggugugguggcgggcgc

SEQ ID NO: 1295064 - RNA, 23 nt, Human
uucuacuaaaaauacaaaaaaag

SEQ ID NO: 1295065 - RNA, 19 nt, Human
uucuugggcuuggagcagg

SEQ ID NO: 1295066 - RNA, 25 nt, Human
uugggaggccgaggcaggcggauca

SEQ ID NO: 1295067 - RNA, 27 nt, Human
uuggguuuuuuuuuuuuuuacuuuaaa

SEQ ID NO: 1295068 - RNA, 22 nt, Human
uuucuacuaaaaauacaaaaaa

SEQ ID NO: 1295069 - RNA, 21 nt, Human
uuucucauccugacacacaga

SEQ ID NO: 1295070 - RNA, 20 nt, Human
uuugucuugggacaagaaaa

SEQ ID NO: 1295071 - RNA, 27 nt, Human
uuuuguuuguuuuuuggguuuuuuuuu

SEQ ID NO: 1295072 - RNA, 19 nt, Human
uuuuuuuuuuuuuuacuuu

SEQ ID NO: 1295073 - RNA, 19 nt, Human
cacccaggggcagugggcc

SEQ ID NO: 1295074 - RNA, 26 nt, Human
cacccugggccagagcacccaggggc

SEQ ID NO: 1295075 - RNA, 19 nt, Human
cacugaagggaugcugagg

SEQ ID NO: 1295076 - RNA, 18 nt, Human
cacugcagcugggggagg

SEQ ID NO: 1295077 - RNA, 27 nt, Human
cagagucccgggccugcacuccccgag

SEQ ID NO: 1295078 - RNA, 19 nt, Human
cagcagguugacagucuuc

SEQ ID NO: 1295079 - RNA, 19 nt, Human
cccacauuguugguggcug

SEQ ID NO: 1295080 - RNA, 22 nt, Human
ccugggccagagcacccagggg

SEQ ID NO: 1295081 - RNA, 23 nt, Human
ccugggccagagcacccaggggc

SEQ ID NO: 1295082 - RNA, 20 nt, Human
gaccacugcagcugggggag

SEQ ID NO: 1295083 - RNA, 22 nt, Human
ggagcaaagaacacagaccucc

SEQ ID NO: 1295084 - RNA, 20 nt, Human
ggcaggguugcccacauugu

SEQ ID NO: 1295085 - RNA, 24 nt, Human
ggccagagcacccaggggcagugg

SEQ ID NO: 1295086 - RNA, 20 nt, Human
ggccugcacugaagggaugc

SEQ ID NO: 1295087 - RNA, 24 nt, Human
ggucccugaaaaugaagaugggag

SEQ ID NO: 1295088 - RNA, 18 nt, Human
ucccugaaaaugaagaug

SEQ ID NO: 1295089 - RNA, 20 nt, Human
ucccugaaaaugaagauggg

SEQ ID NO: 1295090 - RNA, 23 nt, Human
ugaaauggagcaaagaacacaga

SEQ ID NO: 1295091 - RNA, 19 nt, Human
ugcagcugggggaggggau

SEQ ID NO: 1295092 - RNA, 22 nt, Human
ugcugagggugccacccugggc

SEQ ID NO: 1295093 - RNA, 19 nt, Human
uugguggcugugcaguugu

SEQ ID NO: 1295094 - RNA, 24 nt, Human
aacaacaaucgcccaccaccacuu

SEQ ID NO: 1295095 - RNA, 28 nt, Human
cucaaugaggaauaagaagaauuaagaa

SEQ ID NO: 1295096 - RNA, 24 nt, Human
ucuuuuauaaagaugaagaacaag

SEQ ID NO: 1295097 - RNA, 22 nt, Human
aagguagagaagguagagguca

SEQ ID NO: 1295098 - RNA, 19 nt, Human
aaugcaggggugggggccg

SEQ ID NO: 1295099 - RNA, 21 nt, Human
acaagguagagaagguagagg

SEQ ID NO: 1295100 - RNA, 28 nt, Human
acaccaggcacccccucuccacaccccu

SEQ ID NO: 1295101 - RNA, 25 nt, Human
acaccccugcccuucccccagcccu

SEQ ID NO: 1295102 - RNA, 21 nt, Human
acagcggcagcggcggcgggc

SEQ ID NO: 1295103 - RNA, 26 nt, Human
accccugcaccccagcggggucagca

SEQ ID NO: 1295104 - RNA, 18 nt, Human
accccugcccuuccccca

SEQ ID NO: 1295105 - RNA, 22 nt, Human
accccugcccuucccccagccc

SEQ ID NO: 1295106 - RNA, 20 nt, Human
agcggcagcggcggcgggcg

SEQ ID NO: 1295107 - RNA, 26 nt, Human
agcggcagcggcggcgggcgcagggu

SEQ ID NO: 1295108 - RNA, 18 nt, Human
agcggcggcagcaccagc

SEQ ID NO: 1295109 - RNA, 20 nt, Human
agcugcacaccuugagcccc

SEQ ID NO: 1295110 - RNA, 21 nt, Human
aggcacccccucuccacaccc

SEQ ID NO: 1295111 - RNA, 26 nt, Human
aggggaggggaggggaggggagggcc

SEQ ID NO: 1295112 - RNA, 20 nt, Human
caccaggcacccccucucca

SEQ ID NO: 1295113 - RNA, 26 nt, Human
caccaggcacccccucuccacacccc

SEQ ID NO: 1295114 - RNA, 19 nt, Human
cacccccucuccacacccc

SEQ ID NO: 1295115 - RNA, 23 nt, Human
cacccccucuccacaccccugcc

SEQ ID NO: 1295116 - RNA, 18 nt, Human
caccccugcccuuccccc

SEQ ID NO: 1295117 - RNA, 19 nt, Human
cacuuggugggggcagaga

SEQ ID NO: 1295118 - RNA, 20 nt, Human
cagcggcagcggcggcgggc

SEQ ID NO: 1295119 - RNA, 24 nt, Human
cagcggcagcggcggcgggcgcag

SEQ ID NO: 1295120 - RNA, 18 nt, Human
cagcggcggcgggcgcag

SEQ ID NO: 1295121 - RNA, 18 nt, Human
ccagagcgggcguggggg

SEQ ID NO: 1295122 - RNA, 22 nt, Human
ccaggcacccccucuccacacc

SEQ ID NO: 1295123 - RNA, 18 nt, Human
ccccagcccuccugcagc

SEQ ID NO: 1295124 - RNA, 24 nt, Human
ccccguauccaugaggaagggcuc

SEQ ID NO: 1295125 - RNA, 21 nt, Human
ccccucuccacaccccugccc

SEQ ID NO: 1295126 - RNA, 19 nt, Human
cccuucccccagcccuccu

SEQ ID NO: 1295127 - RNA, 22 nt, Human
ccucagccgcggagcccagggc

SEQ ID NO: 1295128 - RNA, 21 nt, Human
ccucccgggaccccguaucca

SEQ ID NO: 1295129 - RNA, 22 nt, Human
ccugggcaggucccuggugaag

SEQ ID NO: 1295130 - RNA, 22 nt, Human
cgggcgugggggccccccucgg

SEQ ID NO: 1295131 - RNA, 20 nt, Human
cuccacaccccugcccuucc

SEQ ID NO: 1295132 - RNA, 19 nt, Human
cuccuccgaagggaacccc

SEQ ID NO: 1295133 - RNA, 22 nt, Human
cuggugaaggcugccucccggg

SEQ ID NO: 1295134 - RNA, 19 nt, Human
cuugagagagagagagaga

SEQ ID NO: 1295135 - RNA, 19 nt, Human
gaagguagaggucagggug

SEQ ID NO: 1295136 - RNA, 21 nt, Human
gagaaagaagacaccaggcac

SEQ ID NO: 1295137 - RNA, 20 nt, Human
gagccaaucgcgaaugcagg

SEQ ID NO: 1295138 - RNA, 22 nt, Human
gcacagcuacagcuggaucugc

SEQ ID NO: 1295139 - RNA, 20 nt, Human
gcacccccucuccacacccc

SEQ ID NO: 1295140 - RNA, 23 nt, Human
gcagagagagaaagaagacacca

SEQ ID NO: 1295141 - RNA, 18 nt, Human
gccagagcgggcgugggg

SEQ ID NO: 1295142 - RNA, 18 nt, Human
gcggcagcggcggcgggc

SEQ ID NO: 1295143 - RNA, 21 nt, Human
ggaggggaggggaggggaggg

SEQ ID NO: 1295144 - RNA, 21 nt, Human
ggaggggaggggaggggaggg

SEQ ID NO: 1295145 - RNA, 26 nt, Human
ggcacccccucuccacaccccugccc

SEQ ID NO: 1295146 - RNA, 22 nt, Human
ggcgggggaggggaggggaggg

SEQ ID NO: 1295147 - RNA, 18 nt, Human
gggcgggggaggggaggg

SEQ ID NO: 1295148 - RNA, 23 nt, Human
ggggaggggaggggaggggaggg

SEQ ID NO: 1295149 - RNA, 23 nt, Human
ggggaggggaggggaggggaggg

SEQ ID NO: 1295150 - RNA, 20 nt, Human
gguggcauaggugccaggug

SEQ ID NO: 1295151 - RNA, 18 nt, Human
uagagaagguagagguca

SEQ ID NO: 1295152 - RNA, 18 nt, Human
ucagccgcggagcccagg

SEQ ID NO: 1295153 - RNA, 22 nt, Human
ucaggguggaacaaaagggaag

SEQ ID NO: 1295154 - RNA, 19 nt, Human
ucccuaggagaugcugcag

SEQ ID NO: 1295155 - RNA, 22 nt, Human
ucccuggugaaggcugccuccc

SEQ ID NO: 1295156 - RNA, 20 nt, Human
uccugcagcagcgcagacuu

SEQ ID NO: 1295157 - RNA, 22 nt, Human
ucgcgaaugcaggggugggggc

SEQ ID NO: 1295158 - RNA, 19 nt, Human
ucuccugagaggccgucca

SEQ ID NO: 1295159 - RNA, 18 nt, Human
ugcacagcuacagcugga

SEQ ID NO: 1295160 - RNA, 22 nt, Human
ugcaccccagcggggucagcac

SEQ ID NO: 1295161 - RNA, 23 nt, Human
uggcauaggugccagguggaguc

SEQ ID NO: 1295162 - RNA, 22 nt, Human
ugguggcauaggugccaggugg

SEQ ID NO: 1295163 - RNA, 19 nt, Human
uucaggggccauugguggc

SEQ ID NO: 1295164 - RNA, 19 nt, Human
aacacaccaggccccaccu

SEQ ID NO: 1295165 - RNA, 18 nt, Human
aagaaacccaagaaaccc

SEQ ID NO: 1295166 - RNA, 24 nt, Human
aagagaggugaggaggcagcccug

SEQ ID NO: 1295167 - RNA, 23 nt, Human
aaguggccugcucagccucaguc

SEQ ID NO: 1295168 - RNA, 21 nt, Human
aauaagcccucaaccucgccc

SEQ ID NO: 1295169 - RNA, 23 nt, Human
acaaagcugaacacauaugaacg

SEQ ID NO: 1295170 - RNA, 21 nt, Human
acaccaggccccaccuccggc

SEQ ID NO: 1295171 - RNA, 23 nt, Human
acccccagaacccaaacacacca

SEQ ID NO: 1295172 - RNA, 18 nt, Human
acucgacucacugagugg

SEQ ID NO: 1295173 - RNA, 25 nt, Human
acuggcccugccgugcaccuccccc

SEQ ID NO: 1295174 - RNA, 21 nt, Human
acuggcuucaagaaacccaag

SEQ ID NO: 1295175 - RNA, 24 nt, Human
agaaacccaagaaacccuccccac

SEQ ID NO: 1295176 - RNA, 23 nt, Human
agaacccaaacacaccaggcccc

SEQ ID NO: 1295177 - RNA, 24 nt, Human
agcccagcuguccagcuguucagg

SEQ ID NO: 1295178 - RNA, 19 nt, Human
agcccucaaccucgcccca

SEQ ID NO: 1295179 - RNA, 24 nt, Human
agccggggccuggucacagcugcu

SEQ ID NO: 1295180 - RNA, 18 nt, Human
agcugcccccacccaguc

SEQ ID NO: 1295181 - RNA, 19 nt, Human
aggaggagcaggcuuguua

SEQ ID NO: 1295182 - RNA, 22 nt, Human
aggcuuguuacauugccagagc

SEQ ID NO: 1295183 - RNA, 21 nt, Human
agggacagcucgggugugggg

SEQ ID NO: 1295184 - RNA, 23 nt, Human
agguguccccgccccuguggccu

SEQ ID NO: 1295185 - RNA, 23 nt, Human
aguccuggggcuggggcagguuc

SEQ ID NO: 1295186 - RNA, 26 nt, Human
auccacccccagaacccaaacacacc

SEQ ID NO: 1295187 - RNA, 18 nt, Human
augggaaauacuggcuuc

SEQ ID NO: 1295188 - RNA, 20 nt, Human
caaaaugcucuccucuuagg

SEQ ID NO: 1295189 - RNA, 18 nt, Human
caagaaacccaagaaacc

SEQ ID NO: 1295190 - RNA, 25 nt, Human
caagaaacccaagaaacccucccca

SEQ ID NO: 1295191 - RNA, 25 nt, Human
caagaaacccuccccacggagcacc

SEQ ID NO: 1295192 - RNA, 18 nt, Human
caagggacugccaggcug

SEQ ID NO: 1295193 - RNA, 18 nt, Human
cacacccaggcccaggcu

SEQ ID NO: 1295194 - RNA, 22 nt, Human
cacagcccagcuguccagcugu

SEQ ID NO: 1295195 - RNA, 20 nt, Human
cacagcuuaacacgagcuuu

SEQ ID NO: 1295196 - RNA, 19 nt, Human
cacagucuccgugcucccc

SEQ ID NO: 1295197 - RNA, 22 nt, Human
cacccagccaugagggauccac

SEQ ID NO: 1295198 - RNA, 25 nt, Human
cacccaggcccaggcucggaagggc

SEQ ID NO: 1295199 - RNA, 22 nt, Human
cacccagucagccccgggaccu

SEQ ID NO: 1295200 - RNA, 23 nt, Human
caccccuaagggggugcuguggc

SEQ ID NO: 1295201 - RNA, 19 nt, Human
cacccuguaccuacacagc

SEQ ID NO: 1295202 - RNA, 21 nt, Human
caccggacggggccucguggu

SEQ ID NO: 1295203 - RNA, 21 nt, Human
caccucccccacugaauaagc

SEQ ID NO: 1295204 - RNA, 22 nt, Human
caccuccggcacuggggcucac

SEQ ID NO: 1295205 - RNA, 18 nt, Human
cacucacaaagcugaaca

SEQ ID NO: 1295206 - RNA, 20 nt, Human
cacucuccagcccggcuccc

SEQ ID NO: 1295207 - RNA, 22 nt, Human
cacucuccagcccggcuccccu

SEQ ID NO: 1295208 - RNA, 21 nt, Human
cagaaggcgaaggaggagcag

SEQ ID NO: 1295209 - RNA, 22 nt, Human
cagagccggaacaaaagacaga

SEQ ID NO: 1295210 - RNA, 22 nt, Human
cagcagugacagggcuugguca

SEQ ID NO: 1295211 - RNA, 24 nt, Human
cagccccgggacccucuggucugu

SEQ ID NO: 1295212 - RNA, 20 nt, Human
cagcuccagggaaguggccu

SEQ ID NO: 1295213 - RNA, 23 nt, Human
caggcccaggcucggaagggccu

SEQ ID NO: 1295214 - RNA, 23 nt, Human
cagggcccuccccuggacaaggg

SEQ ID NO: 1295215 - RNA, 18 nt, Human
caggggugggugaagggg

SEQ ID NO: 1295216 - RNA, 24 nt, Human
caugagggauccacccccagaacc

SEQ ID NO: 1295217 - RNA, 21 nt, Human
cauggcacccagccaugaggg

SEQ ID NO: 1295218 - RNA, 22 nt, Human
cauggcacccagccaugaggga

SEQ ID NO: 1295219 - RNA, 24 nt, Human
ccacagcccagcuguccagcuguu

SEQ ID NO: 1295220 - RNA, 23 nt, Human
ccacccagucagccccgggaccc

SEQ ID NO: 1295221 - RNA, 18 nt, Human
ccacccccagaacccaaa

SEQ ID NO: 1295222 - RNA, 23 nt, Human
ccacugaauaagcccucaaccuu

SEQ ID NO: 1295223 - RNA, 19 nt, Human
ccacuuccucaucaccccu

SEQ ID NO: 1295224 - RNA, 21 nt, Human
ccaggccacagucuccgugcu

SEQ ID NO: 1295225 - RNA, 19 nt, Human
cccaaaucccaggggccuc

SEQ ID NO: 1295226 - RNA, 22 nt, Human
cccaacagcucccacugccucu

SEQ ID NO: 1295227 - RNA, 22 nt, Human
cccagaacccaaacacaccagg

SEQ ID NO: 1295228 - RNA, 22 nt, Human
cccaggagugcaauugcugggg

SEQ ID NO: 1295229 - RNA, 21 nt, Human
cccauuguucguggauuucca

SEQ ID NO: 1295230 - RNA, 20 nt, Human
ccccaacagcucccacugcc

SEQ ID NO: 1295231 - RNA, 20 nt, Human
ccccacucuccagcccggcu

SEQ ID NO: 1295232 - RNA, 27 nt, Human
ccccagaacccaaacacaccaggcccc

SEQ ID NO: 1295233 - RNA, 22 nt, Human
cccccagaacccaaacacacca

SEQ ID NO: 1295234 - RNA, 20 nt, Human
ccccgucggcugaagacccc

SEQ ID NO: 1295235 - RNA, 20 nt, Human
ccccugcagaagcuucugga

SEQ ID NO: 1295236 - RNA, 22 nt, Human
ccccugcagaagcuucuggaac

SEQ ID NO: 1295237 - RNA, 18 nt, Human
ccccuggacaagggucca

SEQ ID NO: 1295238 - RNA, 21 nt, Human
ccccuguccugcccacagccc

SEQ ID NO: 1295239 - RNA, 22 nt, Human
cccucaaccucgccccacucac

SEQ ID NO: 1295240 - RNA, 18 nt, Human
cccucauccacacccagg

SEQ ID NO: 1295241 - RNA, 22 nt, Human
cccugagcccacguuccuucuc

SEQ ID NO: 1295242 - RNA, 20 nt, Human
cccugccgugcaccuccccc

SEQ ID NO: 1295243 - RNA, 19 nt, Human
ccgccccuguggccugacc

SEQ ID NO: 1295244 - RNA, 19 nt, Human
ccucccccuccaccggggc

SEQ ID NO: 1295245 - RNA, 24 nt, Human
ccucgccccacucacaaagcugaa

SEQ ID NO: 1295246 - RNA, 23 nt, Human
ccugcccgggguccucccugagc

SEQ ID NO: 1295247 - RNA, 18 nt, Human
ccugcggaugaagugggg

SEQ ID NO: 1295248 - RNA, 22 nt, Human
ccugcuggugcaggaaugccaa

SEQ ID NO: 1295249 - RNA, 22 nt, Human
ccuggcagguguccccgccccu

SEQ ID NO: 1295250 - RNA, 18 nt, Human
ccuggggcuggggcaggu

SEQ ID NO: 1295251 - RNA, 21 nt, Human
ccuguccugcccacagcccag

SEQ ID NO: 1295252 - RNA, 19 nt, Human
ccuucccaguugaggaagc

SEQ ID NO: 1295253 - RNA, 22 nt, Human
cgagggcugugguggccuugcu

SEQ ID NO: 1295254 - RNA, 20 nt, Human
cgcacagcccgagagagccc

SEQ ID NO: 1295255 - RNA, 19 nt, Human
cggcuccccaacagcuccc

SEQ ID NO: 1295256 - RNA, 24 nt, Human
cguaaaguggggacagcaaaaugc

SEQ ID NO: 1295257 - RNA, 24 nt, Human
cucacaaagcugaacacauaugaa

SEQ ID NO: 1295258 - RNA, 22 nt, Human
cucagaguccuggggcuggggc

SEQ ID NO: 1295259 - RNA, 27 nt, Human
cucagccucaguccucugcugggagcc

SEQ ID NO: 1295260 - RNA, 22 nt, Human
cucagggugucugccccgucgg

SEQ ID NO: 1295261 - RNA, 18 nt, Human
cuccaaggguacuggccc

SEQ ID NO: 1295262 - RNA, 20 nt, Human
cucccucagcccguccugcu

SEQ ID NO: 1295263 - RNA, 22 nt, Human
cucccuggcagccggggccugg

SEQ ID NO: 1295264 - RNA, 20 nt, Human
cuccgugcuccccacucucc

SEQ ID NO: 1295265 - RNA, 20 nt, Human
cucgcugggagcugccccca

SEQ ID NO: 1295266 - RNA, 21 nt, Human
cucggaagggccucccccucc

SEQ ID NO: 1295267 - RNA, 21 nt, Human
cucucgcugggagcugccccc

SEQ ID NO: 1295268 - RNA, 24 nt, Human
cucugcguugggcagccucucucc

SEQ ID NO: 1295269 - RNA, 28 nt, Human
cugaagacccccucucccuggcagccgg

SEQ ID NO: 1295270 - RNA, 23 nt, Human
cugacugggaccacggcucccca

SEQ ID NO: 1295271 - RNA, 19 nt, Human
cugcacucagaguccuggg

SEQ ID NO: 1295272 - RNA, 19 nt, Human
cugcacucagaguccuggg

SEQ ID NO: 1295273 - RNA, 21 nt, Human
cugccgugcaccucccccacu

SEQ ID NO: 1295274 - RNA, 24 nt, Human
cugcuugcuccuucauucauucac

SEQ ID NO: 1295275 - RNA, 20 nt, Human
cuggcaccauccaggccaca

SEQ ID NO: 1295276 - RNA, 22 nt, Human
cuggcuucaagaaacccaagaa

SEQ ID NO: 1295277 - RNA, 19 nt, Human
cuguggccccccuucccag

SEQ ID NO: 1295278 - RNA, 18 nt, Human
cuucucaacaaccagauc

SEQ ID NO: 1295279 - RNA, 21 nt, Human
cuuguccccugcuuggguccu

SEQ ID NO: 1295280 - RNA, 21 nt, Human
gaacccaaacacaccaggccc

SEQ ID NO: 1295281 - RNA, 22 nt, Human
gagagaccugcccucauccaca

SEQ ID NO: 1295282 - RNA, 18 nt, Human
gagcccauuguucgugga

SEQ ID NO: 1295283 - RNA, 22 nt, Human
gagccggaacaaaagacagaga

SEQ ID NO: 1295284 - RNA, 22 nt, Human
gcacuggugaggcgccucccuc

SEQ ID NO: 1295285 - RNA, 19 nt, Human
gccaggcuguuuccacagu

SEQ ID NO: 1295286 - RNA, 25 nt, Human
gccccacucacaaagcugaacacaa

SEQ ID NO: 1295287 - RNA, 19 nt, Human
gcccggcuccccucuugcu

SEQ ID NO: 1295288 - RNA, 20 nt, Human
gcccgggguccucccugagc

SEQ ID NO: 1295289 - RNA, 26 nt, Human
gccucguggucagccccgcaagggcg

SEQ ID NO: 1295290 - RNA, 19 nt, Human
gccuuaaaccacccugagc

SEQ ID NO: 1295291 - RNA, 21 nt, Human
gcuccagggaaguggccugcu

SEQ ID NO: 1295292 - RNA, 20 nt, Human
gcuggcaucugcugggcuuc

SEQ ID NO: 1295293 - RNA, 19 nt, Human
gcuguuacugugaggcugg

SEQ ID NO: 1295294 - RNA, 21 nt, Human
ggaagggccucccccuccacc

SEQ ID NO: 1295295 - RNA, 18 nt, Human
ggacccucuggucugugc

SEQ ID NO: 1295296 - RNA, 27 nt, Human
ggcagaaggcgaaggaggagggacccc

SEQ ID NO: 1295297 - RNA, 24 nt, Human
gggagcuggugcuguauuagucag

SEQ ID NO: 1295298 - RNA, 23 nt, Human
gggauccacccccagaacccaaa

SEQ ID NO: 1295299 - RNA, 18 nt, Human
gggcagcagugacagggc

SEQ ID NO: 1295300 - RNA, 19 nt, Human
gggcagccucucuccuguu

SEQ ID NO: 1295301 - RNA, 24 nt, Human
gggcagggauucccgagcugagcg

SEQ ID NO: 1295302 - RNA, 18 nt, Human
gggccccacguguggcug

SEQ ID NO: 1295303 - RNA, 19 nt, Human
gggcuggggcagguucaga

SEQ ID NO: 1295304 - RNA, 21 nt, Human
gggcuggggcagguucagauc

SEQ ID NO: 1295305 - RNA, 22 nt, Human
gggggugcuguggccccccuuc

SEQ ID NO: 1295306 - RNA, 19 nt, Human
gguacuggcccugccgugc

SEQ ID NO: 1295307 - RNA, 23 nt, Human
ggugcuguggccccccuucccag

SEQ ID NO: 1295308 - RNA, 21 nt, Human
gugaggaggcagcccugcccg

SEQ ID NO: 1295309 - RNA, 28 nt, Human
gugaugcugggcgcuggcacuggugagg

SEQ ID NO: 1295310 - RNA, 18 nt, Human
guggggcgagggcugugg

SEQ ID NO: 1295311 - RNA, 18 nt, Human
guuccaccggacggggcc

SEQ ID NO: 1295312 - RNA, 19 nt, Human
uaagcccucaaccucgccc

SEQ ID NO: 1295313 - RNA, 25 nt, Human
uaagcccucaaccucgccccacuca

SEQ ID NO: 1295314 - RNA, 18 nt, Human
uacuggcccugccgugca

SEQ ID NO: 1295315 - RNA, 22 nt, Human
uacuuacccaaaucccaggggc

SEQ ID NO: 1295316 - RNA, 18 nt, Human
ucagccagaguccccugu

SEQ ID NO: 1295317 - RNA, 19 nt, Human
uccacacccaggcccaggc

SEQ ID NO: 1295318 - RNA, 19 nt, Human
uccacccccagaacccaaa

SEQ ID NO: 1295319 - RNA, 23 nt, Human
uccacccccagaacccaaacaca

SEQ ID NO: 1295320 - RNA, 22 nt, Human
uccccaacagcucccacugccu

SEQ ID NO: 1295321 - RNA, 21 nt, Human
uccccacggagcaccuuggcu

SEQ ID NO: 1295322 - RNA, 25 nt, Human
ucccccacugaggugcugguggggg

SEQ ID NO: 1295323 - RNA, 23 nt, Human
uccccgccccuguggccugaccc

SEQ ID NO: 1295324 - RNA, 19 nt, Human
uccccuggacaagggucca

SEQ ID NO: 1295325 - RNA, 18 nt, Human
ucccucagcccguccugc

SEQ ID NO: 1295326 - RNA, 20 nt, Human
ucccuggcagccggggccug

SEQ ID NO: 1295327 - RNA, 21 nt, Human
ucccuggcagccggggccugg

SEQ ID NO: 1295328 - RNA, 19 nt, Human
ucccuguggggcgagggcu

SEQ ID NO: 1295329 - RNA, 25 nt, Human
ucucagggugucugccccgucggcu

SEQ ID NO: 1295330 - RNA, 22 nt, Human
ucugagcuccaguguccaaagg

SEQ ID NO: 1295331 - RNA, 18 nt, Human
ucugcguugggcagccuc

SEQ ID NO: 1295332 - RNA, 22 nt, Human
ugaacacauaugaacgcggcuu

SEQ ID NO: 1295333 - RNA, 20 nt, Human
ugaacuugcaguauccccca

SEQ ID NO: 1295334 - RNA, 24 nt, Human
ugagcuccaguguccaaaggccga

SEQ ID NO: 1295335 - RNA, 18 nt, Human
ugaggaggcagcccugcc

SEQ ID NO: 1295336 - RNA, 18 nt, Human
ugaggcuggugcuugaac

SEQ ID NO: 1295337 - RNA, 18 nt, Human
ugauuuaugaggagaggu

SEQ ID NO: 1295338 - RNA, 19 nt, Human
ugcaccucccccacugaau

SEQ ID NO: 1295339 - RNA, 25 nt, Human
ugcaccucccccacugaauaagccc

SEQ ID NO: 1295340 - RNA, 24 nt, Human
ugccaggcuguuuccacaguggcc

SEQ ID NO: 1295341 - RNA, 19 nt, Human
ugcccccacccagucagcc

SEQ ID NO: 1295342 - RNA, 21 nt, Human
ugcccgggguccucccugagc

SEQ ID NO: 1295343 - RNA, 23 nt, Human
ugcguugggcagccucucuccug

SEQ ID NO: 1295344 - RNA, 24 nt, Human
ugcuggcaucugcugggcuucugg

SEQ ID NO: 1295345 - RNA, 19 nt, Human
ugcugguggggggcaggga

SEQ ID NO: 1295346 - RNA, 18 nt, Human
uggcagggcccuccccug

SEQ ID NO: 1295347 - RNA, 23 nt, Human
uggcaucugcugggcuucugguc

SEQ ID NO: 1295348 - RNA, 25 nt, Human
uggggucagcuccagggaaguggcc

SEQ ID NO: 1295349 - RNA, 22 nt, Human
ugggguugggcauccuggcagg

SEQ ID NO: 1295350 - RNA, 22 nt, Human
uggucagccccgcaagggcggg

SEQ ID NO: 1295351 - RNA, 23 nt, Human
uguauaggaagcauggugcuggg

SEQ ID NO: 1295352 - RNA, 21 nt, Human
ugucugccccgucggcugaag

SEQ ID NO: 1295353 - RNA, 22 nt, Human
uguggccccccuucccaguuga

SEQ ID NO: 1295354 - RNA, 19 nt, Human
uguggccugacccuccaag

SEQ ID NO: 1295355 - RNA, 24 nt, Human
uguggggcgagggcugugguggcc

SEQ ID NO: 1295356 - RNA, 19 nt, Human
ugugggguagcugcggcug

SEQ ID NO: 1295357 - RNA, 20 nt, Human
uucagccagaguccccuguc

SEQ ID NO: 1295358 - RNA, 26 nt, Human
uucuggucagcccucagaaagcuuac

SEQ ID NO: 1295359 - RNA, 18 nt, Human
uugcuccuucauucauuc

SEQ ID NO: 1295360 - RNA, 24 nt, Human
uugcugcacucagaguccuggggc

SEQ ID NO: 1295361 - RNA, 21 nt, Human
uugcugucggggcuuacugcu

SEQ ID NO: 1295362 - RNA, 21 nt, Human
uuuaugaggagagguuuagcu

SEQ ID NO: 1295363 - RNA, 20 nt, Human
aacucaugcuuguucuccuc

SEQ ID NO: 1295364 - RNA, 24 nt, Human
aagcaccacaaucucaacucaugc

SEQ ID NO: 1295365 - RNA, 20 nt, Human
cccaaugccuccugcccucc

SEQ ID NO: 1295366 - RNA, 23 nt, Human
cccaaugccuccugcccuccugc

SEQ ID NO: 1295367 - RNA, 28 nt, Human
ccucugugaaaacaaagggauguugcuc

SEQ ID NO: 1295368 - RNA, 23 nt, Human
cucuccuucaaaugcagccccaa

SEQ ID NO: 1295369 - RNA, 23 nt, Human
gagcagcagguuucugaucugga

SEQ ID NO: 1295370 - RNA, 21 nt, Human
gaggagaacugccuuucccca

SEQ ID NO: 1295371 - RNA, 24 nt, Human
uagaggagaacugccuuuccccau

SEQ ID NO: 1295372 - RNA, 19 nt, Human
uccuucaaaugcagcccca

SEQ ID NO: 1295373 - RNA, 21 nt, Human
uccuuugccauguggcuuugc

SEQ ID NO: 1295374 - RNA, 20 nt, Human
ucugccuucucugucauuga

SEQ ID NO: 1295375 - RNA, 20 nt, Human
ugaaaacaaagggauguugc

SEQ ID NO: 1295376 - RNA, 23 nt, Human
uguugcucuccuucaaaugcagc

SEQ ID NO: 1295377 - RNA, 18 nt, Human
accacagacucugacuug

SEQ ID NO: 1295378 - RNA, 20 nt, Human
accaucuuuucaucaugcaa

SEQ ID NO: 1295379 - RNA, 19 nt, Human
ccaucuuuucaucaugcaa

SEQ ID NO: 1295380 - RNA, 23 nt, Human
gggcuacauuuucugaacaagag

SEQ ID NO: 1295381 - RNA, 23 nt, Human
ucaugcaacauuggcuucccaca

SEQ ID NO: 1295382 - RNA, 24 nt, Human
uccgccagaguggucuaacugugc

SEQ ID NO: 1295383 - RNA, 20 nt, Human
ucuaggucuucacuuaauuu

SEQ ID NO: 1295384 - RNA, 20 nt, Human
uucaucaugcaacauuggcu

SEQ ID NO: 1295385 - RNA, 21 nt, Human
caccgccccuccggggggccc

SEQ ID NO: 1295386 - RNA, 18 nt, Human
ccuccggggggcccgggg

SEQ ID NO: 1295387 - RNA, 22 nt, Human
ccuccggggggcccggggacuc

SEQ ID NO: 1295388 - RNA, 21 nt, Human
ggccagcuucugugggacgcu

SEQ ID NO: 1295389 - RNA, 23 nt, Human
gugggacgcuggcgcgcacaccg

SEQ ID NO: 1295390 - RNA, 18 nt, Human
aaccagaggugucguccc

SEQ ID NO: 1295391 - RNA, 18 nt, Human
acacaggaaaucaaauac

SEQ ID NO: 1295392 - RNA, 19 nt, Human
accuuaagaaaaguuagag

SEQ ID NO: 1295393 - RNA, 23 nt, Human
acuuccccgccccaccccccgac

SEQ ID NO: 1295394 - RNA, 22 nt, Human
agagcacuuccccgccccaccc

SEQ ID NO: 1295395 - RNA, 19 nt, Human
agggaggccuuccacagug

SEQ ID NO: 1295396 - RNA, 25 nt, Human
caacaaaaccuuaagaaaaguuaga

SEQ ID NO: 1295397 - RNA, 21 nt, Human
caacacacacaggaaaucaaa

SEQ ID NO: 1295398 - RNA, 19 nt, Human
caauaagucuauccgggcu

SEQ ID NO: 1295399 - RNA, 19 nt, Human
cacacaggaaaucaaauac

SEQ ID NO: 1295400 - RNA, 21 nt, Human
cacagauggcaaaaagccgac

SEQ ID NO: 1295401 - RNA, 24 nt, Human
caccccccgaccccacaacgugcc

SEQ ID NO: 1295402 - RNA, 20 nt, Human
cacuuccccgccccaccccc

SEQ ID NO: 1295403 - RNA, 19 nt, Human
ccagaggugucgucccucu

SEQ ID NO: 1295404 - RNA, 19 nt, Human
ccccgaccccacaacgugc

SEQ ID NO: 1295405 - RNA, 20 nt, Human
ccccgccccaccccccgacc

SEQ ID NO: 1295406 - RNA, 26 nt, Human
ccccgccccaccccccgaccccacaa

SEQ ID NO: 1295407 - RNA, 21 nt, Human
cccgccccaccccccgacccc

SEQ ID NO: 1295408 - RNA, 23 nt, Human
cgccccaccccccgaccccacaa

SEQ ID NO: 1295409 - RNA, 24 nt, Human
cgccccaccccccgaccccacaac

SEQ ID NO: 1295410 - RNA, 19 nt, Human
cgcugaaugacuccacugc

SEQ ID NO: 1295411 - RNA, 18 nt, Human
gcacuugaagggcuagca

SEQ ID NO: 1295412 - RNA, 19 nt, Human
gccccaccccccgacccca

SEQ ID NO: 1295413 - RNA, 26 nt, Human
gggaacacuauuuucaguuggacauc

SEQ ID NO: 1295414 - RNA, 22 nt, Human
guguguguuuuuagaaacuucu

SEQ ID NO: 1295415 - RNA, 24 nt, Human
guuuuuggcaauaagucuauccgg

SEQ ID NO: 1295416 - RNA, 21 nt, Human
uaaaacugcaaggguaaaaug

SEQ ID NO: 1295417 - RNA, 22 nt, Human
uaaaaugcccuuaaugccaggg

SEQ ID NO: 1295418 - RNA, 23 nt, Human
uaacagcuucgaaaagaucuuaa

SEQ ID NO: 1295419 - RNA, 25 nt, Human
uaagaaaaguuagagcacuuccccg

SEQ ID NO: 1295420 - RNA, 24 nt, Human
uaauacauacauacauaguacaua

SEQ ID NO: 1295421 - RNA, 23 nt, Human
uacauacauacauaguacauaga

SEQ ID NO: 1295422 - RNA, 20 nt, Human
uaccagcauuuacacgucag

SEQ ID NO: 1295423 - RNA, 23 nt, Human
ucaaguucugccacccugugugg

SEQ ID NO: 1295424 - RNA, 24 nt, Human
uccacaguguccguacaggccgug

SEQ ID NO: 1295425 - RNA, 22 nt, Human
uccccgccccaccccccgaccc

SEQ ID NO: 1295426 - RNA, 23 nt, Human
uccccgccccaccccccgacccc

SEQ ID NO: 1295427 - RNA, 23 nt, Human
ugcccuuaaugccagggcaacac

SEQ ID NO: 1295428 - RNA, 24 nt, Human
uuccccgccccaccccccgacccc

SEQ ID NO: 1295429 - RNA, 22 nt, Human
uucuuuugaaagcuauuuuuug

SEQ ID NO: 1295430 - RNA, 19 nt, Human
uugaaaaaccagagguguc

SEQ ID NO: 1295431 - RNA, 24 nt, Human
aacauggggugagguggagagggg

SEQ ID NO: 1295432 - RNA, 24 nt, Human
aaccuggagccaaggcagggggcu

SEQ ID NO: 1295433 - RNA, 23 nt, Human
aagcaggauuagucaaaaccagg

SEQ ID NO: 1295434 - RNA, 20 nt, Human
aaggaagagaggcagcgggg

SEQ ID NO: 1295435 - RNA, 23 nt, Human
aaugccaaagccagggagucgga

SEQ ID NO: 1295436 - RNA, 23 nt, Human
acaccgcaacccugcuccagcug

SEQ ID NO: 1295437 - RNA, 22 nt, Human
acccugggacgcccugccgcca

SEQ ID NO: 1295438 - RNA, 24 nt, Human
agaaaguuccuacguggcuuaaaa

SEQ ID NO: 1295439 - RNA, 23 nt, Human
agagccacacauggauguaccag

SEQ ID NO: 1295440 - RNA, 24 nt, Human
agaggcagcggggguuugggggcc

SEQ ID NO: 1295441 - RNA, 19 nt, Human
agagucugggguggccaug

SEQ ID NO: 1295442 - RNA, 21 nt, Human
agcaagagugacccugggcau

SEQ ID NO: 1295443 - RNA, 20 nt, Human
agccccuuccagcucucccc

SEQ ID NO: 1295444 - RNA, 21 nt, Human
agcccuucggcugcuucuacc

SEQ ID NO: 1295445 - RNA, 18 nt, Human
agccgaugccaggguggc

SEQ ID NO: 1295446 - RNA, 18 nt, Human
aggaagagaggcagcggg

SEQ ID NO: 1295447 - RNA, 21 nt, Human
aggcagcggggguuugggggc

SEQ ID NO: 1295448 - RNA, 24 nt, Human
aggcauggagaccaccccccaggg

SEQ ID NO: 1295449 - RNA, 22 nt, Human
aggcugacgccuggggccccag

SEQ ID NO: 1295450 - RNA, 22 nt, Human
aggggcuauugccucuccugcc

SEQ ID NO: 1295451 - RNA, 18 nt, Human
aggguccaccuaucccuc

SEQ ID NO: 1295452 - RNA, 24 nt, Human
agguaguuuccugcccccggcccc

SEQ ID NO: 1295453 - RNA, 22 nt, Human
agguggagaggggcuauggggu

SEQ ID NO: 1295454 - RNA, 20 nt, Human
aggugggggauggggggaag

SEQ ID NO: 1295455 - RNA, 19 nt, Human
auaaaaaacagaagccaag

SEQ ID NO: 1295456 - RNA, 25 nt, Human
auaacaacccuuuucuuuguccucc

SEQ ID NO: 1295457 - RNA, 21 nt, Human
aucugccgucagcucucucca

SEQ ID NO: 1295458 - RNA, 18 nt, Human
cacacguggaagcgguga

SEQ ID NO: 1295459 - RNA, 24 nt, Human
cacccugggacgcccugccgccac

SEQ ID NO: 1295460 - RNA, 20 nt, Human
caccguggagacaccgcaac

SEQ ID NO: 1295461 - RNA, 22 nt, Human
cagagucugggguggccauggg

SEQ ID NO: 1295462 - RNA, 24 nt, Human
cagaucccggcagccaggcccaga

SEQ ID NO: 1295463 - RNA, 21 nt, Human
cagcccagccuccagagcucc

SEQ ID NO: 1295464 - RNA, 22 nt, Human
cagccuccagagcuccgauucc

SEQ ID NO: 1295465 - RNA, 18 nt, Human
cagcgcagggguggaagg

SEQ ID NO: 1295466 - RNA, 24 nt, Human
cagcggguagcaagagugacccug

SEQ ID NO: 1295467 - RNA, 21 nt, Human
caggcauggagaccacccccc

SEQ ID NO: 1295468 - RNA, 24 nt, Human
cauagaaacaucugcaggccuggg

SEQ ID NO: 1295469 - RNA, 22 nt, Human
ccacaggggcuauugccucucc

SEQ ID NO: 1295470 - RNA, 20 nt, Human
ccagagcuuuaacuuuggau

SEQ ID NO: 1295471 - RNA, 22 nt, Human
ccagccuccagagcuccgauuc

SEQ ID NO: 1295472 - RNA, 22 nt, Human
ccagcugguccugcaauugcca

SEQ ID NO: 1295473 - RNA, 18 nt, Human
ccaggcccagagagggaa

SEQ ID NO: 1295474 - RNA, 21 nt, Human
ccagggagucggaguccaggg

SEQ ID NO: 1295475 - RNA, 24 nt, Human
ccccagaucccggcagccaggccc

SEQ ID NO: 1295476 - RNA, 19 nt, Human
ccccaucaccucgcagcug

SEQ ID NO: 1295477 - RNA, 18 nt, Human
ccccccagggcucugggg

SEQ ID NO: 1295478 - RNA, 20 nt, Human
ccccccagggcucuggggug

SEQ ID NO: 1295479 - RNA, 20 nt, Human
ccccggccccuccccugacc

SEQ ID NO: 1295480 - RNA, 18 nt, Human
cccugccgccacccgcgu

SEQ ID NO: 1295481 - RNA, 20 nt, Human
cccugcuccagcugguccug

SEQ ID NO: 1295482 - RNA, 23 nt, Human
ccgcacccugggacgcccugccg

SEQ ID NO: 1295483 - RNA, 24 nt, Human
ccugcccccggccccuccccugac

SEQ ID NO: 1295484 - RNA, 21 nt, Human
ccugccgccacccgcgucucg

SEQ ID NO: 1295485 - RNA, 19 nt, Human
ccugcuccagcugguccug

SEQ ID NO: 1295486 - RNA, 24 nt, Human
cgagagcaccguggagacaccggu

SEQ ID NO: 1295487 - RNA, 23 nt, Human
cgcagcugugacucagaaagacc

SEQ ID NO: 1295488 - RNA, 21 nt, Human
cgcccugccgccacccgcguc

SEQ ID NO: 1295489 - RNA, 18 nt, Human
cggggccuucuggggcug

SEQ ID NO: 1295490 - RNA, 18 nt, Human
cuccugccacccagcucc

SEQ ID NO: 1295491 - RNA, 18 nt, Human
cugcuuccgggcacgccc

SEQ ID NO: 1295492 - RNA, 21 nt, Human
cuggggcugauuuguguggga

SEQ ID NO: 1295493 - RNA, 18 nt, Human
cugggguggccaugggca

SEQ ID NO: 1295494 - RNA, 19 nt, Human
cuugggagccagcaggcug

SEQ ID NO: 1295495 - RNA, 22 nt, Human
gaagagaggcagcggggguuug

SEQ ID NO: 1295496 - RNA, 22 nt, Human
gagagcaccguggagacaccgc

SEQ ID NO: 1295497 - RNA, 19 nt, Human
gagaggaaaggagguggcc

SEQ ID NO: 1295498 - RNA, 21 nt, Human
gagaggcagcggggguuuggg

SEQ ID NO: 1295499 - RNA, 20 nt, Human
gagcaccgaucgcuuuggcu

SEQ ID NO: 1295500 - RNA, 20 nt, Human
gagcuccgauuccgucccag

SEQ ID NO: 1295501 - RNA, 23 nt, Human
gagggcagugggggcagaagggg

SEQ ID NO: 1295502 - RNA, 21 nt, Human
gaucagagucugggguggcca

SEQ ID NO: 1295503 - RNA, 18 nt, Human
gcagcggggguuuggggg

SEQ ID NO: 1295504 - RNA, 19 nt, Human
gcagugggggcagaagggg

SEQ ID NO: 1295505 - RNA, 23 nt, Human
gcgagagcaccguggagacaccg

SEQ ID NO: 1295506 - RNA, 20 nt, Human
gcuauugccucuccugccac

SEQ ID NO: 1295507 - RNA, 21 nt, Human
gcuccugagagugaauccuga

SEQ ID NO: 1295508 - RNA, 24 nt, Human
gcucugaagccuagaaaaagcccc

SEQ ID NO: 1295509 - RNA, 19 nt, Human
ggaaagacaaaaauaacaa

SEQ ID NO: 1295510 - RNA, 23 nt, Human
ggaaagagcugggggagcuuaag

SEQ ID NO: 1295511 - RNA, 18 nt, Human
ggacccaggggucccugg

SEQ ID NO: 1295512 - RNA, 18 nt, Human
ggccuggaugagggcagu

SEQ ID NO: 1295513 - RNA, 23 nt, Human
gggagcaccgaucgcuuuggcuu

SEQ ID NO: 1295514 - RNA, 21 nt, Human
gggauggggggaaggaagaga

SEQ ID NO: 1295515 - RNA, 19 nt, Human
gggcaaggccacagggaug

SEQ ID NO: 1295516 - RNA, 23 nt, Human
gggcagaaggggucuggaucagc

SEQ ID NO: 1295517 - RNA, 22 nt, Human
gggcagugggggcagaaggggu

SEQ ID NO: 1295518 - RNA, 24 nt, Human
ggggcucagcugucccucugggag

SEQ ID NO: 1295519 - RNA, 20 nt, Human
gggggaaggaagagaggcag

SEQ ID NO: 1295520 - RNA, 19 nt, Human
ggucccuggccacugucag

SEQ ID NO: 1295521 - RNA, 19 nt, Human
ggugagguggagaggggcu

SEQ ID NO: 1295522 - RNA, 19 nt, Human
guggaagguggcgagagga

SEQ ID NO: 1295523 - RNA, 20 nt, Human
uaaaagaauuaagccagagg

SEQ ID NO: 1295524 - RNA, 24 nt, Human
uaacaacccuuuucuuuguccucc

SEQ ID NO: 1295525 - RNA, 23 nt, Human
uaccaaccuggagccaaggcagg

SEQ ID NO: 1295526 - RNA, 26 nt, Human
uaccaggagcucugccccucauagaa

SEQ ID NO: 1295527 - RNA, 27 nt, Human
uaucccucaagaaaguuccuacguggc

SEQ ID NO: 1295528 - RNA, 18 nt, Human
ucagaaagaccagcagag

SEQ ID NO: 1295529 - RNA, 19 nt, Human
ucagcugucccucugggag

SEQ ID NO: 1295530 - RNA, 23 nt, Human
ucaggagcccuucggcugcuucu

SEQ ID NO: 1295531 - RNA, 20 nt, Human
uccagcugguccugcaauug

SEQ ID NO: 1295532 - RNA, 24 nt, Human
ucccagaggguucucgcgggugcc

SEQ ID NO: 1295533 - RNA, 18 nt, Human
ucccucaagaaaguuccu

SEQ ID NO: 1295534 - RNA, 22 nt, Human
ucccuggccacugucaggagcc

SEQ ID NO: 1295535 - RNA, 22 nt, Human
ucucgccgugcggggucacuug

SEQ ID NO: 1295536 - RNA, 21 nt, Human
ucugaagccuagaaaaagccc

SEQ ID NO: 1295537 - RNA, 18 nt, Human
ucuggggcugauuugugu

SEQ ID NO: 1295538 - RNA, 24 nt, Human
ugacccugggcaucaacauggggu

SEQ ID NO: 1295539 - RNA, 20 nt, Human
ugacucagaaagaccagcag

SEQ ID NO: 1295540 - RNA, 20 nt, Human
ugagaaacagacaagcggga

SEQ ID NO: 1295541 - RNA, 22 nt, Human
ugagagugaauccugacacggg

SEQ ID NO: 1295542 - RNA, 22 nt, Human
ugaggaugugugcagagagggc

SEQ ID NO: 1295543 - RNA, 19 nt, Human
ugagggcagugggggcaga

SEQ ID NO: 1295544 - RNA, 23 nt, Human
ugagggcagugggggcagaaggg

SEQ ID NO: 1295545 - RNA, 23 nt, Human
ugagguggagaggggcuaugggg

SEQ ID NO: 1295546 - RNA, 18 nt, Human
ugcaaacaaggaggccgc

SEQ ID NO: 1295547 - RNA, 19 nt, Human
ugcagagagggccgcggaa

SEQ ID NO: 1295548 - RNA, 24 nt, Human
ugcccccggccccuccccugaccc

SEQ ID NO: 1295549 - RNA, 18 nt, Human
ugcuccagcugguccugc

SEQ ID NO: 1295550 - RNA, 23 nt, Human
ugcugccaaccaacacaacacac

SEQ ID NO: 1295551 - RNA, 24 nt, Human
uggaagguggcgagaggaaaggag

SEQ ID NO: 1295552 - RNA, 22 nt, Human
uggagaggggcuaugggguucc

SEQ ID NO: 1295553 - RNA, 23 nt, Human
uggaucagccuugcugccaacca

SEQ ID NO: 1295554 - RNA, 21 nt, Human
uggaugagggcagugggggca

SEQ ID NO: 1295555 - RNA, 28 nt, Human
uggcaggcauggagaccaccccccucuu

SEQ ID NO: 1295556 - RNA, 18 nt, Human
ugggaggcggcacagaaa

SEQ ID NO: 1295557 - RNA, 24 nt, Human
uggggucagcacagcgcaggggug

SEQ ID NO: 1295558 - RNA, 23 nt, Human
ugugacucagaaagaccagcaga

SEQ ID NO: 1295559 - RNA, 23 nt, Human
uguggcgcucugcuuccgggcac

SEQ ID NO: 1295560 - RNA, 18 nt, Human
uuagcccacgaggagaug

SEQ ID NO: 1295561 - RNA, 21 nt, Human
uuccaaggacuggagccgcgg

SEQ ID NO: 1295562 - RNA, 22 nt, Human
uugcccaggcccugcaaacaag

SEQ ID NO: 1295563 - RNA, 20 nt, Human
aacagcccugugagguagga

SEQ ID NO: 1295564 - RNA, 20 nt, Human
aagaacaaauccaaagccca

SEQ ID NO: 1295565 - RNA, 19 nt, Human
aagcccagugcagcagcuc

SEQ ID NO: 1295566 - RNA, 21 nt, Human
aaggcaucucguccugggucg

SEQ ID NO: 1295567 - RNA, 21 nt, Human
accccgcacgguggccccagc

SEQ ID NO: 1295568 - RNA, 18 nt, Human
agcucugagcucaggccu

SEQ ID NO: 1295569 - RNA, 23 nt, Human
aggcugggggcgauguugaggcc

SEQ ID NO: 1295570 - RNA, 21 nt, Human
aucacauggggaguucagggu

SEQ ID NO: 1295571 - RNA, 18 nt, Human
cacauggggaguucaggg

SEQ ID NO: 1295572 - RNA, 20 nt, Human
caccaaggguaggcugccgg

SEQ ID NO: 1295573 - RNA, 20 nt, Human
cacccgcagcacuuuaaucc

SEQ ID NO: 1295574 - RNA, 18 nt, Human
caucacauggggaguuca

SEQ ID NO: 1295575 - RNA, 18 nt, Human
cauggccacaucucccca

SEQ ID NO: 1295576 - RNA, 21 nt, Human
ccagcucugagcccguuggca

SEQ ID NO: 1295577 - RNA, 18 nt, Human
ccccaaccacucagcccg

SEQ ID NO: 1295578 - RNA, 18 nt, Human
ccucagcugugccuuucc

SEQ ID NO: 1295579 - RNA, 18 nt, Human
ccuggccucuuccccucc

SEQ ID NO: 1295580 - RNA, 22 nt, Human
ccuggccucuuccccucccuuu

SEQ ID NO: 1295581 - RNA, 20 nt, Human
ccuguacuugaaacacugaa

SEQ ID NO: 1295582 - RNA, 22 nt, Human
cgccccagcacaucccuggcac

SEQ ID NO: 1295583 - RNA, 26 nt, Human
cgccccagcacaucccuggcacacgg

SEQ ID NO: 1295584 - RNA, 26 nt, Human
cguccugggucgcaacacccagcagc

SEQ ID NO: 1295585 - RNA, 19 nt, Human
cucacaagaacaaauccaa

SEQ ID NO: 1295586 - RNA, 25 nt, Human
cucacccgcagcacuuuaaucccca

SEQ ID NO: 1295587 - RNA, 26 nt, Human
cucacccgcagcacuuuaauccccac

SEQ ID NO: 1295588 - RNA, 24 nt, Human
cuuccccucccuuuaguaacccca

SEQ ID NO: 1295589 - RNA, 22 nt, Human
gaacaaauccaaagcccagugc

SEQ ID NO: 1295590 - RNA, 23 nt, Human
gaacaaauccaaagcccagugca

SEQ ID NO: 1295591 - RNA, 23 nt, Human
gaggccgaagccagccacagugc

SEQ ID NO: 1295592 - RNA, 24 nt, Human
gauccagagcagcccggggagccc

SEQ ID NO: 1295593 - RNA, 18 nt, Human
gcccagugcagcagcucu

SEQ ID NO: 1295594 - RNA, 22 nt, Human
gcucugagcucaggccugccgu

SEQ ID NO: 1295595 - RNA, 20 nt, Human
ggaaaggacacagcaguggg

SEQ ID NO: 1295596 - RNA, 23 nt, Human
ggggaaaccgagacacacauuca

SEQ ID NO: 1295597 - RNA, 24 nt, Human
gguaggcugccgggugcacaggga

SEQ ID NO: 1295598 - RNA, 18 nt, Human
guggccccagccagcugg

SEQ ID NO: 1295599 - RNA, 18 nt, Human
uaaccccaucagcagcag

SEQ ID NO: 1295600 - RNA, 27 nt, Human
uagcacaagaccauggccacaucuccc

SEQ ID NO: 1295601 - RNA, 24 nt, Human
ucagcggcccaccuggccucuucc

SEQ ID NO: 1295602 - RNA, 18 nt, Human
ucaggccugccgugcccc

SEQ ID NO: 1295603 - RNA, 22 nt, Human
ucaggguuagccuggaguacga

SEQ ID NO: 1295604 - RNA, 22 nt, Human
uccccacaacagcccugugagg

SEQ ID NO: 1295605 - RNA, 23 nt, Human
ucccgcugcggcucggcgaaagc

SEQ ID NO: 1295606 - RNA, 18 nt, Human
uccugggauccagagcag

SEQ ID NO: 1295607 - RNA, 21 nt, Human
ucucuagcacaagaccauggc

SEQ ID NO: 1295608 - RNA, 19 nt, Human
ugccucagcugugccuuuc

SEQ ID NO: 1295609 - RNA, 21 nt, Human
uggcaccccgcacgguggccc

SEQ ID NO: 1295610 - RNA, 18 nt, Human
uggcccagucagcggccc

SEQ ID NO: 1295611 - RNA, 21 nt, Human
uucaggguuagccuggaguac

SEQ ID NO: 1295612 - RNA, 20 nt, Human
uugaaacacugaacgugaug

SEQ ID NO: 1295613 - RNA, 21 nt, Human
uuguaccgccaucucuagcac

SEQ ID NO: 1295614 - RNA, 23 nt, Human
aacuccugggcucaagcaauccu

SEQ ID NO: 1295615 - RNA, 25 nt, Human
aagcaauccuucugccucaaccucc

SEQ ID NO: 1295616 - RNA, 18 nt, Human
acucugucacccaagcuc

SEQ ID NO: 1295617 - RNA, 19 nt, Human
acucugucacccaagcuca

SEQ ID NO: 1295618 - RNA, 25 nt, Human
acucugucacccaagcucaagugca

SEQ ID NO: 1295619 - RNA, 25 nt, Human
acuuuguugcccaggcuguucucaa

SEQ ID NO: 1295620 - RNA, 20 nt, Human
agugcagaggcgugaucuug

SEQ ID NO: 1295621 - RNA, 24 nt, Human
agugcagaggcgugaucuuggcuc

SEQ ID NO: 1295622 - RNA, 33 nt, Human
caaccaccuaggcucaagagauucucccagcug

SEQ ID NO: 1295623 - RNA, 23 nt, Human
caagcaauccuucugccucaacc

SEQ ID NO: 1295624 - RNA, 28 nt, Human
caagcaauccuucugccucaaccuccca

SEQ ID NO: 1295625 - RNA, 23 nt, Human
cacccaagcucaagugcagaggc

SEQ ID NO: 1295626 - RNA, 19 nt, Human
cacuuuguugcccaggcug

SEQ ID NO: 1295627 - RNA, 24 nt, Human
cacuuuguugcccaggcuguucuc

SEQ ID NO: 1295628 - RNA, 24 nt, Human
cagccucaaccaccuaggcucaag

SEQ ID NO: 1295629 - RNA, 18 nt, Human
ccucaaccaccuaggcuc

SEQ ID NO: 1295630 - RNA, 21 nt, Human
ccugggcucaagcaauccuuc

SEQ ID NO: 1295631 - RNA, 19 nt, Human
ccuucugccucaaccuccc

SEQ ID NO: 1295632 - RNA, 24 nt, Human
cucaagcaauccuucugccucaac

SEQ ID NO: 1295633 - RNA, 18 nt, Human
cucacugcagccucaacc

SEQ ID NO: 1295634 - RNA, 21 nt, Human
cuccugggcucaagcaauccu

SEQ ID NO: 1295635 - RNA, 23 nt, Human
cugcagccucaaccaccuaggcu

SEQ ID NO: 1295636 - RNA, 18 nt, Human
cuucugccucaaccuccc

SEQ ID NO: 1295637 - RNA, 22 nt, Human
cuuggcucacugcagccucaac

SEQ ID NO: 1295638 - RNA, 18 nt, Human
gauagggucuuacucugu

SEQ ID NO: 1295639 - RNA, 22 nt, Human
gcagaggcgugaucuuggcuca

SEQ ID NO: 1295640 - RNA, 18 nt, Human
gccucaaccucccaaaug

SEQ ID NO: 1295641 - RNA, 19 nt, Human
gcucaagugcagaggcgug

SEQ ID NO: 1295642 - RNA, 22 nt, Human
gggcucaagcaauccuucugcc

SEQ ID NO: 1295643 - RNA, 24 nt, Human
uacaggugagugccaccacaccca

SEQ ID NO: 1295644 - RNA, 19 nt, Human
ucaagagauucucccagcc

SEQ ID NO: 1295645 - RNA, 24 nt, Human
ucacugcagccucaaccaccuagg

SEQ ID NO: 1295646 - RNA, 18 nt, Human
uccugggcucaagcaauc

SEQ ID NO: 1295647 - RNA, 20 nt, Human
uccugggcucaagcaauccu

SEQ ID NO: 1295648 - RNA, 20 nt, Human
uccugggcucaagcaauccu

SEQ ID NO: 1295649 - RNA, 21 nt, Human
uccugggcucaagcaauccuu

SEQ ID NO: 1295650 - RNA, 24 nt, Human
uccugggcucaagcaauccuucug

SEQ ID NO: 1295651 - RNA, 21 nt, Human
ucuaguuuuuguagagauugg

SEQ ID NO: 1295652 - RNA, 23 nt, Human
ucucaaacuccugggcucaagca

SEQ ID NO: 1295653 - RNA, 19 nt, Human
ucucacuuuguugcccagg

SEQ ID NO: 1295654 - RNA, 21 nt, Human
ucucacuuuguugcccaggcu

SEQ ID NO: 1295655 - RNA, 22 nt, Human
ucucacuuuguugcccaggcug

SEQ ID NO: 1295656 - RNA, 26 nt, Human
ucucacuuuguugcccaggcuguucu

SEQ ID NO: 1295657 - RNA, 27 nt, Human
ucucacuuuguugcccaggcuguucuc

SEQ ID NO: 1295658 - RNA, 19 nt, Human
ucucccagcccagccuccu

SEQ ID NO: 1295659 - RNA, 24 nt, Human
ucugucacccaagcucaagugcag

SEQ ID NO: 1295660 - RNA, 18 nt, Human
ucuuacucugucacccaa

SEQ ID NO: 1295661 - RNA, 24 nt, Human
ucuuacucugucacccaagcucaa

SEQ ID NO: 1295662 - RNA, 20 nt, Human
ugaaggcuuuguagcccugg

SEQ ID NO: 1295663 - RNA, 23 nt, Human
ugaaggcuuuguagcccugggaa

SEQ ID NO: 1295664 - RNA, 22 nt, Human
ugagauagggucuuacucuguc

SEQ ID NO: 1295665 - RNA, 18 nt, Human
ugagugccaccacaccca

SEQ ID NO: 1295666 - RNA, 18 nt, Human
ugcagaggcgugaucuug

SEQ ID NO: 1295667 - RNA, 19 nt, Human
ugccaccacacccagcuau

SEQ ID NO: 1295668 - RNA, 26 nt, Human
ugccucaaccucccaaauggugcugg

SEQ ID NO: 1295669 - RNA, 24 nt, Human
ugggcucaagcaauccuucugccu

SEQ ID NO: 1295670 - RNA, 23 nt, Human
ugggucucacuuuguugcccagg

SEQ ID NO: 1295671 - RNA, 22 nt, Human
uguugcccaggcuguucucaaa

SEQ ID NO: 1295672 - RNA, 19 nt, Human
uuaguacaggugagugcca

SEQ ID NO: 1295673 - RNA, 20 nt, Human
uucugccucaaccucccaaa

SEQ ID NO: 1295674 - RNA, 24 nt, Human
uugggucucacuuuguugcccagg

SEQ ID NO: 1295675 - RNA, 23 nt, Human
uuuguugcccaggcuguucucaa

SEQ ID NO: 1295676 - RNA, 24 nt, Human
uuuguugcccaggcuguucucaaa

SEQ ID NO: 1295677 - RNA, 23 nt, Human
cuaaguguguauaaaauaccagc

SEQ ID NO: 1295678 - RNA, 20 nt, Human
aagcccacccagagucauac

SEQ ID NO: 1295679 - RNA, 23 nt, Human
aaguguuggagcggguucaagcc

SEQ ID NO: 1295680 - RNA, 23 nt, Human
agagaaccccccgcaccaccuca

SEQ ID NO: 1295681 - RNA, 18 nt, Human
caaacacgcgagcgcggc

SEQ ID NO: 1295682 - RNA, 20 nt, Human
caaagcgguggagagacccg

SEQ ID NO: 1295683 - RNA, 21 nt, Human
caagccaaguccucuggcacc

SEQ ID NO: 1295684 - RNA, 23 nt, Human
caccagcgcccacugcugggucc

SEQ ID NO: 1295685 - RNA, 25 nt, Human
caccagcgcccacugcuggguccaa

SEQ ID NO: 1295686 - RNA, 18 nt, Human
caccagcgucccuaagcc

SEQ ID NO: 1295687 - RNA, 21 nt, Human
caccucagcaaagggcuugug

SEQ ID NO: 1295688 - RNA, 19 nt, Human
cagcaaagggcuugugugu

SEQ ID NO: 1295689 - RNA, 20 nt, Human
ccacgcuccauuucaccaaa

SEQ ID NO: 1295690 - RNA, 25 nt, Human
ccagcgcccccuccaggcgcacucc

SEQ ID NO: 1295691 - RNA, 22 nt, Human
cccacgcuccauuucaccaaaa

SEQ ID NO: 1295692 - RNA, 20 nt, Human
cccacugcuggguccaaggc

SEQ ID NO: 1295693 - RNA, 22 nt, Human
cccagagucauaccauucugcc

SEQ ID NO: 1295694 - RNA, 22 nt, Human
ccccccgcaccaccucagcaaa

SEQ ID NO: 1295695 - RNA, 21 nt, Human
ccccugguccugacuuccacu

SEQ ID NO: 1295696 - RNA, 23 nt, Human
ccuccaggcgcacuccgcaaaca

SEQ ID NO: 1295697 - RNA, 18 nt, Human
ccugacuuccacuccacg

SEQ ID NO: 1295698 - RNA, 19 nt, Human
cucagcaaagggcuugugu

SEQ ID NO: 1295699 - RNA, 20 nt, Human
gagcugccacccacgcucca

SEQ ID NO: 1295700 - RNA, 24 nt, Human
gaggaguuacaguucuuucucacg

SEQ ID NO: 1295701 - RNA, 18 nt, Human
gaucaggacgacugggac

SEQ ID NO: 1295702 - RNA, 24 nt, Human
gcauuucugcaccuucgacacaca

SEQ ID NO: 1295703 - RNA, 20 nt, Human
gccaacuaccugcccuuagc

SEQ ID NO: 1295704 - RNA, 19 nt, Human
gcccuuagcaagcguggag

SEQ ID NO: 1295705 - RNA, 20 nt, Human
gcgagcgcggcgaccgcccc

SEQ ID NO: 1295706 - RNA, 19 nt, Human
guggagagaaccccccgca

SEQ ID NO: 1295707 - RNA, 19 nt, Human
guggagagacccgcccagc

SEQ ID NO: 1295708 - RNA, 27 nt, Human
uagcaagcguggagagaaccccccucu

SEQ ID NO: 1295709 - RNA, 21 nt, Human
ucccuaagcccacccagaguc

SEQ ID NO: 1295710 - RNA, 19 nt, Human
uggagagaaccccccgcac

SEQ ID NO: 1295711 - RNA, 23 nt, Human
uggagcggguucaagccaagucc

SEQ ID NO: 1295712 - RNA, 19 nt, Human
uggggcgaccccugguccu

SEQ ID NO: 1295713 - RNA, 22 nt, Human
ugguccugacuuccacuccacg

SEQ ID NO: 1295714 - RNA, 23 nt, Human
uucaaagucagccaacuaccugc

SEQ ID NO: 1295715 - RNA, 21 nt, Human
uugugcuguuccuuagggcau

SEQ ID NO: 1295716 - RNA, 18 nt, Human
auagucccugcacuuguu

SEQ ID NO: 1295717 - RNA, 20 nt, Human
auugcguguugggaaaaccc

SEQ ID NO: 1295718 - RNA, 19 nt, Human
cuaugugacuguacucacc

SEQ ID NO: 1295719 - RNA, 18 nt, Human
gucccugcacuuguuuau

SEQ ID NO: 1295720 - RNA, 20 nt, Human
uagggcuuuaaccauccuug

SEQ ID NO: 1295721 - RNA, 21 nt, Human
ugggaaaacccgauguaggug

SEQ ID NO: 1295722 - RNA, 18 nt, Human
ccccaggggcagggcucc

SEQ ID NO: 1295723 - RNA, 22 nt, Human
cggggcugcagagucagcagag

SEQ ID NO: 1295724 - RNA, 24 nt, Human
cggggcugcagagucagcagaggg

SEQ ID NO: 1295725 - RNA, 18 nt, Human
gccgggacaauugccugg

SEQ ID NO: 1295726 - RNA, 18 nt, Human
ggcagggcuccugucugc

SEQ ID NO: 1295727 - RNA, 21 nt, Human
ggccugcggggcugcagaguc

SEQ ID NO: 1295728 - RNA, 22 nt, Human
ggguagauccaaggccccaggc

SEQ ID NO: 1295729 - RNA, 21 nt, Human
gguagauccaaggccccaggc

SEQ ID NO: 1295730 - RNA, 18 nt, Human
gucuggaggagcguaaaa

SEQ ID NO: 1295731 - RNA, 27 nt, Human
ugcggggcugcagagucagggucgguc

SEQ ID NO: 1295732 - RNA, 21 nt, Human
ccuucuccuucuuuuucuuuu

SEQ ID NO: 1295733 - RNA, 20 nt, Human
ccuucuuuuucuuuucaacc

SEQ ID NO: 1295734 - RNA, 18 nt, Human
gcugaguacuuccucuua

SEQ ID NO: 1295735 - RNA, 21 nt, Human
guugcaaaaaccuucuccuuc

SEQ ID NO: 1295736 - RNA, 22 nt, Human
uacguggccuuucuuguguucu

SEQ ID NO: 1295737 - RNA, 20 nt, Human
uggauuuagcggcugaguac

SEQ ID NO: 1295738 - RNA, 22 nt, Human
uuagcggcugaguacuuccucu

SEQ ID NO: 1295739 - RNA, 21 nt, Human
uucagcaccacuugaaguaag

SEQ ID NO: 1295740 - RNA, 23 nt, Human
uucuccuucuuuuucuuuucaaa

SEQ ID NO: 1295741 - RNA, 19 nt, Human
accaagaaguuugccaugg

SEQ ID NO: 1295742 - RNA, 22 nt, Human
caacaacaccaagaaguuugcc

SEQ ID NO: 1295743 - RNA, 23 nt, Human
caacaccaagaaguuugccaugg

SEQ ID NO: 1295744 - RNA, 26 nt, Human
cauuuuuaucgccugcuuuuuggggg

SEQ ID NO: 1295745 - RNA, 24 nt, Human
cuccaguuacaacaacaccaagaa

SEQ ID NO: 1295746 - RNA, 18 nt, Human
ggcacaggcgcugccagc

SEQ ID NO: 1295747 - RNA, 24 nt, Human
ugucucauccucauccaagcucca

SEQ ID NO: 1295748 - RNA, 21 nt, Human
aaccacucuucaagcaucuga

SEQ ID NO: 1295749 - RNA, 20 nt, Human
aaccucucuccuccugucac

SEQ ID NO: 1295750 - RNA, 21 nt, Human
aagcaucugauccagcaauuc

SEQ ID NO: 1295751 - RNA, 22 nt, Human
agaagacucagggcaggggagc

SEQ ID NO: 1295752 - RNA, 20 nt, Human
agggcaggggagcaagcugg

SEQ ID NO: 1295753 - RNA, 22 nt, Human
auuggaaccacucuucaagcau

SEQ ID NO: 1295754 - RNA, 18 nt, Human
caccugcagccacaucuc

SEQ ID NO: 1295755 - RNA, 21 nt, Human
cauugaaccucucuccuccug

SEQ ID NO: 1295756 - RNA, 21 nt, Human
ccaucugaauaaguucauccc

SEQ ID NO: 1295757 - RNA, 18 nt, Human
ccuccugucaccugcagc

SEQ ID NO: 1295758 - RNA, 21 nt, Human
cuucaagcaucugauccagca

SEQ ID NO: 1295759 - RNA, 18 nt, Human
gguuauuaccaggaugac

SEQ ID NO: 1295760 - RNA, 21 nt, Human
ucaagcaucugauccagcaau

SEQ ID NO: 1295761 - RNA, 21 nt, Human
uccucagagcucacguaagca

SEQ ID NO: 1295762 - RNA, 21 nt, Human
uccuccugucaccugcagcca

SEQ ID NO: 1295763 - RNA, 23 nt, Human
uccucugucacuggcugcugaac

SEQ ID NO: 1295764 - RNA, 21 nt, Human
ucuccucugucacuggcugcu

SEQ ID NO: 1295765 - RNA, 22 nt, Human
ugaaccucucuccuccugucac

SEQ ID NO: 1295766 - RNA, 18 nt, Human
ugaacuggacagacuugg

SEQ ID NO: 1295767 - RNA, 19 nt, Human
ugaacuggacagacuuggc

SEQ ID NO: 1295768 - RNA, 19 nt, Human
ugccagaggccugguccuc

SEQ ID NO: 1295769 - RNA, 19 nt, Human
ugcugugcaucuacacaaa

SEQ ID NO: 1295770 - RNA, 22 nt, Human
uucagcugcaggacaaugcugc

SEQ ID NO: 1295771 - RNA, 23 nt, Human
uucaucccaagcugauucugaug

SEQ ID NO: 1295772 - RNA, 24 nt, Human
aaagugcugggauuacaggcauga

SEQ ID NO: 1295773 - RNA, 23 nt, Human
aagucuaaguuugaauucuggcu

SEQ ID NO: 1295774 - RNA, 19 nt, Human
aagugcugggauuacaggc

SEQ ID NO: 1295775 - RNA, 21 nt, Human
aagugcugggauuacaggcau

SEQ ID NO: 1295776 - RNA, 26 nt, Human
aagugcugggauuacaggcaugagcc

SEQ ID NO: 1295777 - RNA, 23 nt, Human
accucagccucccaaagugcugg

SEQ ID NO: 1295778 - RNA, 18 nt, Human
acgagguuucaccauguu

SEQ ID NO: 1295779 - RNA, 20 nt, Human
acgagguuucaccauguuug

SEQ ID NO: 1295780 - RNA, 24 nt, Human
acgagguuucaccauguuugccag

SEQ ID NO: 1295781 - RNA, 22 nt, Human
agguuucaccauguuugccagg

SEQ ID NO: 1295782 - RNA, 22 nt, Human
aguagagacgagguuucaccau

SEQ ID NO: 1295783 - RNA, 18 nt, Human
agugcugggauuacaggc

SEQ ID NO: 1295784 - RNA, 20 nt, Human
augagccaccacgccuggcc

SEQ ID NO: 1295785 - RNA, 24 nt, Human
augauccgcccaccucagccuccc

SEQ ID NO: 1295786 - RNA, 18 nt, Human
auguuugccaggaugguc

SEQ ID NO: 1295787 - RNA, 24 nt, Human
caaagugcugggauuacaggcaug

SEQ ID NO: 1295788 - RNA, 18 nt, Human
caccauguuugccaggau

SEQ ID NO: 1295789 - RNA, 19 nt, Human
caccauguuugccaggaug

SEQ ID NO: 1295790 - RNA, 24 nt, Human
caccauguuugccaggauggucuc

SEQ ID NO: 1295791 - RNA, 24 nt, Human
caugauccgcccaccucagccucc

SEQ ID NO: 1295792 - RNA, 23 nt, Human
ccaaagugcugggauuacaggca

SEQ ID NO: 1295793 - RNA, 24 nt, Human
ccaaagugcugggauuacaggcau

SEQ ID NO: 1295794 - RNA, 24 nt, Human
cccaaagugcugggauuacaggca

SEQ ID NO: 1295795 - RNA, 26 nt, Human
ccgcccaccucagccucccaaagugc

SEQ ID NO: 1295796 - RNA, 20 nt, Human
cuccugaccucaugauccgc

SEQ ID NO: 1295797 - RNA, 19 nt, Human
cucuuucacaguccuuccu

SEQ ID NO: 1295798 - RNA, 22 nt, Human
gaccucaugauccgcccaccuc

SEQ ID NO: 1295799 - RNA, 18 nt, Human
gauuacaggcaugagcca

SEQ ID NO: 1295800 - RNA, 21 nt, Human
gauuacaggcaugagccacca

SEQ ID NO: 1295801 - RNA, 22 nt, Human
gauuacaggcaugagccaccac

SEQ ID NO: 1295802 - RNA, 19 nt, Human
ggauuacaggcaugagcca

SEQ ID NO: 1295803 - RNA, 20 nt, Human
ggucucgaucuccugaccuc

SEQ ID NO: 1295804 - RNA, 24 nt, Human
gguuucaccauguuugccaggaug

SEQ ID NO: 1295805 - RNA, 22 nt, Human
uacaggcaugagccaccacgcc

SEQ ID NO: 1295806 - RNA, 22 nt, Human
uagagacgagguuucaccaugu

SEQ ID NO: 1295807 - RNA, 24 nt, Human
uaguagagacgagguuucaccaug

SEQ ID NO: 1295808 - RNA, 26 nt, Human
uaguagagacgagguuucaccauguu

SEQ ID NO: 1295809 - RNA, 18 nt, Human
ucagccucccaaagugcu

SEQ ID NO: 1295810 - RNA, 24 nt, Human
ucccaaagugcugggauuacaggc

SEQ ID NO: 1295811 - RNA, 21 nt, Human
uccgcccaccucagccuccca

SEQ ID NO: 1295812 - RNA, 23 nt, Human
ugaaaauaccauggcuuuauuuu

SEQ ID NO: 1295813 - RNA, 26 nt, Human
ugaaagcauugaguaugauaggaaca

SEQ ID NO: 1295814 - RNA, 23 nt, Human
ugaccucaugauccgcccaccuc

SEQ ID NO: 1295815 - RNA, 24 nt, Human
ugauccgcccaccucagccuccca

SEQ ID NO: 1295816 - RNA, 23 nt, Human
ugccaggauggucucgaucuccu

SEQ ID NO: 1295817 - RNA, 20 nt, Human
uggaacccaaguacuugaaa

SEQ ID NO: 1295818 - RNA, 18 nt, Human
ugggauuacaggcaugag

SEQ ID NO: 1295819 - RNA, 19 nt, Human
ugggauuacaggcaugagc

SEQ ID NO: 1295820 - RNA, 22 nt, Human
ugggauuacaggcaugagccac

SEQ ID NO: 1295821 - RNA, 23 nt, Human
ugggauuacaggcaugagccacc

SEQ ID NO: 1295822 - RNA, 24 nt, Human
ugggauuacaggcaugagccacca

SEQ ID NO: 1295823 - RNA, 24 nt, Human
ugggauuacaggcaugagccacca

SEQ ID NO: 1295824 - RNA, 24 nt, Human
uuaguagagacgagguuucaccau

SEQ ID NO: 1295825 - RNA, 19 nt, Human
uuucaccauguuugccagg

SEQ ID NO: 1295826 - RNA, 20 nt, Human
uuucaccauguuugccagga

SEQ ID NO: 1295827 - RNA, 20 nt, Human
uuucagaagauuacuuacuu

SEQ ID NO: 1295828 - RNA, 24 nt, Human
uuuuuaguagagacgagguuucac

SEQ ID NO: 1295829 - RNA, 24 nt, Human
aaaaaaaagacaacaaaacuagga

SEQ ID NO: 1295830 - RNA, 24 nt, Human
aaaaccaaauauggcggcagggaa

SEQ ID NO: 1295831 - RNA, 24 nt, Human
aaagacugagaaaaaaaaagacaa

SEQ ID NO: 1295832 - RNA, 24 nt, Human
aacaacugacaggugagacccaca

SEQ ID NO: 1295833 - RNA, 24 nt, Human
aaccaaauauggcggcagggaaau

SEQ ID NO: 1295834 - RNA, 20 nt, Human
aagacugagaaaaaaaaaga

SEQ ID NO: 1295835 - RNA, 18 nt, Human
aagagaaaaggguccccg

SEQ ID NO: 1295836 - RNA, 21 nt, Human
aagaugggggaguugagaagg

SEQ ID NO: 1295837 - RNA, 19 nt, Human
aagcaggucacuuguaagg

SEQ ID NO: 1295838 - RNA, 22 nt, Human
aaucaaguugugcagcugggca

SEQ ID NO: 1295839 - RNA, 25 nt, Human
acccucagaauggaggaaacaauuu

SEQ ID NO: 1295840 - RNA, 27 nt, Human
accugacgaugaaacccucagaaugga

SEQ ID NO: 1295841 - RNA, 21 nt, Human
acuaggaagccacagaaacac

SEQ ID NO: 1295842 - RNA, 27 nt, Human
agaaaaaaaaagacaacaaaacuagga

SEQ ID NO: 1295843 - RNA, 21 nt, Human
agacaacaaaacuaggaagcc

SEQ ID NO: 1295844 - RNA, 21 nt, Human
agacaacaaaacuaggaagcc

SEQ ID NO: 1295845 - RNA, 23 nt, Human
agacaacaaaacuaggaagccac

SEQ ID NO: 1295846 - RNA, 21 nt, Human
agacccacagguggagagggc

SEQ ID NO: 1295847 - RNA, 19 nt, Human
agagaaaaggguccccgag

SEQ ID NO: 1295848 - RNA, 22 nt, Human
agcaauauuuugcaguucugau

SEQ ID NO: 1295849 - RNA, 23 nt, Human
caacaaaacuaggaagccacaga

SEQ ID NO: 1295850 - RNA, 22 nt, Human
cagcaugggggugacaaccgcg

SEQ ID NO: 1295851 - RNA, 24 nt, Human
cccgagaugggaagaaaaccaaau

SEQ ID NO: 1295852 - RNA, 20 nt, Human
ccgagaugggaagaaaacca

SEQ ID NO: 1295853 - RNA, 26 nt, Human
cucagaauggaggaaacaauuuuaga

SEQ ID NO: 1295854 - RNA, 20 nt, Human
gagaaaaaaaaagacaacaa

SEQ ID NO: 1295855 - RNA, 24 nt, Human
gugcagcugggcaucuaaaagacu

SEQ ID NO: 1295856 - RNA, 20 nt, Human
uaaacucagcaaacaacuga

SEQ ID NO: 1295857 - RNA, 19 nt, Human
uaagagaaaaggguccccg

SEQ ID NO: 1295858 - RNA, 23 nt, Human
uaggaagccacagaaacacgggu

SEQ ID NO: 1295859 - RNA, 23 nt, Human
ucagcaaacaacugacaggugag

SEQ ID NO: 1295860 - RNA, 19 nt, Human
ucccuguuucucaggcugu

SEQ ID NO: 1295861 - RNA, 24 nt, Human
ucuaaaagacugagaaaaaaaaag

SEQ ID NO: 1295862 - RNA, 22 nt, Human
ugagaaaaaaaaagacaacaaa

SEQ ID NO: 1295863 - RNA, 18 nt, Human
uggcugaaugauauagag

SEQ ID NO: 1295864 - RNA, 23 nt, Human
ugggaagaaaaccaaauauggcg

SEQ ID NO: 1295865 - RNA, 24 nt, Human
uuucucaggcuguagacgaagggg

SEQ ID NO: 1295866 - RNA, 22 nt, Human
ucucaguccccuagaggcccgc

SEQ ID NO: 1295867 - RNA, 24 nt, Human
aauauagucagaaguaaaaacaua

SEQ ID NO: 1295868 - RNA, 19 nt, Human
agucagaaguaaaaacaua

SEQ ID NO: 1295869 - RNA, 23 nt, Human
uagucagaaguaaaaacauacaa

SEQ ID NO: 1295870 - RNA, 23 nt, Human
uauagucagaaguaaaaacauac

SEQ ID NO: 1295871 - RNA, 18 nt, Human
ucagaaguaaaaacauac

SEQ ID NO: 1295872 - RNA, 18 nt, Human
aaauagccccgcgcccac

SEQ ID NO: 1295873 - RNA, 19 nt, Human
acccagcccgcccuccgcc

SEQ ID NO: 1295874 - RNA, 21 nt, Human
agacccaguccccccacccag

SEQ ID NO: 1295875 - RNA, 23 nt, Human
agaggguggcguuguagggcucc

SEQ ID NO: 1295876 - RNA, 21 nt, Human
agccccgcgcccaccucccuc

SEQ ID NO: 1295877 - RNA, 21 nt, Human
aggaggagcagacgcgcagcg

SEQ ID NO: 1295878 - RNA, 24 nt, Human
aggcgggauuaggacggcaggaga

SEQ ID NO: 1295879 - RNA, 18 nt, Human
aggugguucaggucacca

SEQ ID NO: 1295880 - RNA, 18 nt, Human
auuuguucauccaccucc

SEQ ID NO: 1295881 - RNA, 22 nt, Human
caaagccgggcaugaagaaaug

SEQ ID NO: 1295882 - RNA, 21 nt, Human
caaggcccgguacugcuggcu

SEQ ID NO: 1295883 - RNA, 22 nt, Human
caaggcccgguacugcuggcug

SEQ ID NO: 1295884 - RNA, 19 nt, Human
cacacaggugcacccaccu

SEQ ID NO: 1295885 - RNA, 19 nt, Human
cacccaccuguggaucccc

SEQ ID NO: 1295886 - RNA, 19 nt, Human
cacguuggggaaagcugcu

SEQ ID NO: 1295887 - RNA, 18 nt, Human
cagacccaguccccccac

SEQ ID NO: 1295888 - RNA, 21 nt, Human
cagcgacccagcccgcccucc

SEQ ID NO: 1295889 - RNA, 24 nt, Human
caucucauccaugcccucgcccgu

SEQ ID NO: 1295890 - RNA, 25 nt, Human
ccaucccagacccaguccccccacc

SEQ ID NO: 1295891 - RNA, 19 nt, Human
cccagggagugggucagcu

SEQ ID NO: 1295892 - RNA, 20 nt, Human
ccccgcgcccaccucccucc

SEQ ID NO: 1295893 - RNA, 19 nt, Human
ccgcgcccaccucccuccg

SEQ ID NO: 1295894 - RNA, 23 nt, Human
cgcagcgacccagcccgcccucc

SEQ ID NO: 1295895 - RNA, 23 nt, Human
cuccaccacgguguccgacaccu

SEQ ID NO: 1295896 - RNA, 18 nt, Human
cucccagaauaagcaaca

SEQ ID NO: 1295897 - RNA, 27 nt, Human
cucccggaucuuacugagcagaagggu

SEQ ID NO: 1295898 - RNA, 22 nt, Human
cuccucggccguggcauccuga

SEQ ID NO: 1295899 - RNA, 24 nt, Human
cucucggccucggugaauuccauc

SEQ ID NO: 1295900 - RNA, 19 nt, Human
cugagcagaaggguaccca

SEQ ID NO: 1295901 - RNA, 26 nt, Human
gaagcgcaggcacguggugaccccac

SEQ ID NO: 1295902 - RNA, 19 nt, Human
gccgggcaugaagaaaugc

SEQ ID NO: 1295903 - RNA, 21 nt, Human
gcuccaccacgguguccgaca

SEQ ID NO: 1295904 - RNA, 20 nt, Human
ggaaagcucagguguccuug

SEQ ID NO: 1295905 - RNA, 24 nt, Human
ggcucccagaauaagcaacagcuu

SEQ ID NO: 1295906 - RNA, 24 nt, Human
gggcaugaagaaaugcagccgggg

SEQ ID NO: 1295907 - RNA, 22 nt, Human
gggcaugcgaccccugaaaaug

SEQ ID NO: 1295908 - RNA, 23 nt, Human
ggggcaaagccgggcaugaagaa

SEQ ID NO: 1295909 - RNA, 20 nt, Human
ggucacaggcagccaucaug

SEQ ID NO: 1295910 - RNA, 20 nt, Human
gguucaggucaccauaggug

SEQ ID NO: 1295911 - RNA, 18 nt, Human
guucauccaccucccuca

SEQ ID NO: 1295912 - RNA, 24 nt, Human
uaagcaacagcuuuacuuccacac

SEQ ID NO: 1295913 - RNA, 22 nt, Human
uagggcuccaccacgguguccg

SEQ ID NO: 1295914 - RNA, 19 nt, Human
ucacaggcagccaucaugu

SEQ ID NO: 1295915 - RNA, 20 nt, Human
ucagacaccaggucguucau

SEQ ID NO: 1295916 - RNA, 21 nt, Human
ucauguugcucucggccucgg

SEQ ID NO: 1295917 - RNA, 22 nt, Human
ucccagacccaguccccccacc

SEQ ID NO: 1295918 - RNA, 23 nt, Human
ucccagacccaguccccccaccc

SEQ ID NO: 1295919 - RNA, 19 nt, Human
ucccucaugggcaugcgac

SEQ ID NO: 1295920 - RNA, 20 nt, Human
uccgcaggucagcauucagc

SEQ ID NO: 1295921 - RNA, 18 nt, Human
ucggauucggcucccaga

SEQ ID NO: 1295922 - RNA, 19 nt, Human
ugagaaggaggagcagacg

SEQ ID NO: 1295923 - RNA, 21 nt, Human
ugagcugguggacugagaggg

SEQ ID NO: 1295924 - RNA, 19 nt, Human
ugccccggcuggucagugg

SEQ ID NO: 1295925 - RNA, 22 nt, Human
ugcucucggccucggugaauuc

SEQ ID NO: 1295926 - RNA, 22 nt, Human
ugcuguaaacugcucugagaca

SEQ ID NO: 1295927 - RNA, 18 nt, Human
uggcccgggaagcgcagg

SEQ ID NO: 1295928 - RNA, 23 nt, Human
uggcguuguagggcuccaccacg

SEQ ID NO: 1295929 - RNA, 23 nt, Human
uggggaaagcugcucgcuggaga

SEQ ID NO: 1295930 - RNA, 19 nt, Human
uguucauccaccucccuca

SEQ ID NO: 1295931 - RNA, 24 nt, Human
uguuggaaagcucagguguccuug

SEQ ID NO: 1295932 - RNA, 21 nt, Human
uuccacacaggugcacccacc

SEQ ID NO: 1295933 - RNA, 19 nt, Human
uuccacacaggugcacccu

SEQ ID NO: 1295934 - RNA, 21 nt, Human
uuuguucauccaccucccuca

SEQ ID NO: 1295935 - RNA, 22 nt, Human
aaaacuacaacaaagaaaaagu

SEQ ID NO: 1295936 - RNA, 18 nt, Human
aaaagacagcagauacug

SEQ ID NO: 1295937 - RNA, 24 nt, Human
aacuacaacaaagaaaaaguugaa

SEQ ID NO: 1295938 - RNA, 20 nt, Human
aagcuggagaaaagagcuga

SEQ ID NO: 1295939 - RNA, 24 nt, Human
acaaaagacagcagauacugguaa

SEQ ID NO: 1295940 - RNA, 22 nt, Human
acaaaauaauuccucagacaaa

SEQ ID NO: 1295941 - RNA, 24 nt, Human
acgaaguuacaguucucaagugug

SEQ ID NO: 1295942 - RNA, 21 nt, Human
acuccaggacuaaauauggca

SEQ ID NO: 1295943 - RNA, 21 nt, Human
agaacccaaaaugagggccuc

SEQ ID NO: 1295944 - RNA, 19 nt, Human
agauacugguaaaagcuuc

SEQ ID NO: 1295945 - RNA, 18 nt, Human
agauucauuaagugguag

SEQ ID NO: 1295946 - RNA, 24 nt, Human
auaauuacaaaagacagcagauac

SEQ ID NO: 1295947 - RNA, 19 nt, Human
caaaagacagcagauacug

SEQ ID NO: 1295948 - RNA, 20 nt, Human
caaaauaauuccucagacaa

SEQ ID NO: 1295949 - RNA, 22 nt, Human
caaaaugagggccucgcgcucg

SEQ ID NO: 1295950 - RNA, 18 nt, Human
caaacacccagaaauagg

SEQ ID NO: 1295951 - RNA, 19 nt, Human
cacgcuccucuucccccuc

SEQ ID NO: 1295952 - RNA, 24 nt, Human
cacugcaaaagcuggagaaaagag

SEQ ID NO: 1295953 - RNA, 24 nt, Human
cauggaucaaggccauauuuucaa

SEQ ID NO: 1295954 - RNA, 22 nt, Human
ccagccgccgccgcugccgccg

SEQ ID NO: 1295955 - RNA, 23 nt, Human
ccagccgccgccgcugccgccgu

SEQ ID NO: 1295956 - RNA, 22 nt, Human
ccgagagccgccgccgccgccg

SEQ ID NO: 1295957 - RNA, 23 nt, Human
ccgccgccgccgccgcugccugg

SEQ ID NO: 1295958 - RNA, 18 nt, Human
ccgccgccgcugccgccg

SEQ ID NO: 1295959 - RNA, 19 nt, Human
ccgccgccgcugccugggc

SEQ ID NO: 1295960 - RNA, 25 nt, Human
ccgccgcugccugggccucuccccg

SEQ ID NO: 1295961 - RNA, 21 nt, Human
ccucuucccccucucgcucuc

SEQ ID NO: 1295962 - RNA, 21 nt, Human
cgagaagagucaacuuugugu

SEQ ID NO: 1295963 - RNA, 19 nt, Human
cgccgccgccgccgcugcc

SEQ ID NO: 1295964 - RNA, 22 nt, Human
cgccgccgcugccgccguucgc

SEQ ID NO: 1295965 - RNA, 21 nt, Human
cgcuugcacgcuccucuuccc

SEQ ID NO: 1295966 - RNA, 18 nt, Human
cuaguggcugacauucuu

SEQ ID NO: 1295967 - RNA, 18 nt, Human
cucugauuugucuggcua

SEQ ID NO: 1295968 - RNA, 19 nt, Human
cuggugaaauccaccaagc

SEQ ID NO: 1295969 - RNA, 19 nt, Human
gagggccucgcgcucggga

SEQ ID NO: 1295970 - RNA, 21 nt, Human
gccgccgccgccgccgcugcc

SEQ ID NO: 1295971 - RNA, 22 nt, Human
gccgccgccgccgccgcugccu

SEQ ID NO: 1295972 - RNA, 21 nt, Human
gcgcucgggagucggaggaag

SEQ ID NO: 1295973 - RNA, 22 nt, Human
gcuccucuucccccucucgcuc

SEQ ID NO: 1295974 - RNA, 22 nt, Human
gguaaaagcuucaggacagaaa

SEQ ID NO: 1295975 - RNA, 19 nt, Human
uaacuggugaaauccacca

SEQ ID NO: 1295976 - RNA, 19 nt, Human
uaaggaugccaggacacug

SEQ ID NO: 1295977 - RNA, 22 nt, Human
uaauuccucagacaaaugcaca

SEQ ID NO: 1295978 - RNA, 28 nt, Human
uacaccaaacaguuugaagacaagggaa

SEQ ID NO: 1295979 - RNA, 20 nt, Human
uagcaaacaaaauaauuccu

SEQ ID NO: 1295980 - RNA, 23 nt, Human
uagcaaacaaaauaauuccucag

SEQ ID NO: 1295981 - RNA, 21 nt, Human
uaggucucugauccacgcuag

SEQ ID NO: 1295982 - RNA, 21 nt, Human
ucaaagaguuaaugaauccuu

SEQ ID NO: 1295983 - RNA, 23 nt, Human
ucuuugacuuauuaggcauuucc

SEQ ID NO: 1295984 - RNA, 22 nt, Human
ugaagaguauaagggcagaugc

SEQ ID NO: 1295985 - RNA, 23 nt, Human
ugaagcagugugacucuuacauc

SEQ ID NO: 1295986 - RNA, 24 nt, Human
ugaauccuugcauucauucagucu

SEQ ID NO: 1295987 - RNA, 21 nt, Human
ugagaacccaaaaugagggcc

SEQ ID NO: 1295988 - RNA, 20 nt, Human
ugagguacauuuacucaaaa

SEQ ID NO: 1295989 - RNA, 26 nt, Human
uggauagcuguuacucugauuugucu

SEQ ID NO: 1295990 - RNA, 18 nt, Human
uggcaugauuauuuugcu

SEQ ID NO: 1295991 - RNA, 19 nt, Human
uggggggaggagggaagaa

SEQ ID NO: 1295992 - RNA, 23 nt, Human
uggggggaggagggaagaagaau

SEQ ID NO: 1295993 - RNA, 21 nt, Human
ugucaccuuaagcagaaaaga

SEQ ID NO: 1295994 - RNA, 24 nt, Human
uguguuaaaguguucaaagauguc

SEQ ID NO: 1295995 - RNA, 21 nt, Human
uguuuggugaagaguauaagg

SEQ ID NO: 1295996 - RNA, 25 nt, Human
uuaauccauggaucaaggccauauu

SEQ ID NO: 1295997 - RNA, 19 nt, Human
uuacucugauuugucuggc

SEQ ID NO: 1295998 - RNA, 20 nt, Human
uuaguauuuaacaaauucaa

SEQ ID NO: 1295999 - RNA, 20 nt, Human
uucaccgcaacccgagagcc

SEQ ID NO: 1296000 - RNA, 24 nt, Human
uuccuugcccuuuaggucucugau

SEQ ID NO: 1296001 - RNA, 21 nt, Human
uugagauucauuaagugguag

SEQ ID NO: 1296002 - RNA, 21 nt, Human
caccggcggaguccgccuccc

SEQ ID NO: 1296003 - RNA, 19 nt, Human
ccacuagcaacccuccucg

SEQ ID NO: 1296004 - RNA, 23 nt, Human
cccgggacgaugaggcccggucc

SEQ ID NO: 1296005 - RNA, 20 nt, Human
cccuccucgcgagcgguuca

SEQ ID NO: 1296006 - RNA, 21 nt, Human
ccggcggaguccgccuccccc

SEQ ID NO: 1296007 - RNA, 19 nt, Human
cucccgggacgaugaggcc

SEQ ID NO: 1296008 - RNA, 19 nt, Human
gccagcucgcuggucagcg

SEQ ID NO: 1296009 - RNA, 18 nt, Human
gcggaguccgccuccccc

SEQ ID NO: 1296010 - RNA, 22 nt, Human
uccacuagcaacccuccucgcg

SEQ ID NO: 1296011 - RNA, 23 nt, Human
uccacuagcaacccuccucgcga

SEQ ID NO: 1296012 - RNA, 19 nt, Human
ucccgggacgaugaggccc

SEQ ID NO: 1296013 - RNA, 18 nt, Human
aaacgcuccuugcucuuc

SEQ ID NO: 1296014 - RNA, 19 nt, Human
acgaaacauguagagaugc

SEQ ID NO: 1296015 - RNA, 21 nt, Human
agcccugcaucuacacccucc

SEQ ID NO: 1296016 - RNA, 23 nt, Human
augcacaacacgucuuucuggcu

SEQ ID NO: 1296017 - RNA, 25 nt, Human
caacacgucuuucuggcugagacuu

SEQ ID NO: 1296018 - RNA, 22 nt, Human
caccaaaauagaugggcaugac

SEQ ID NO: 1296019 - RNA, 23 nt, Human
caccaaaauagaugggcaugacg

SEQ ID NO: 1296020 - RNA, 25 nt, Human
cagcccugcaucuacacccuccuga

SEQ ID NO: 1296021 - RNA, 23 nt, Human
cagccgcgccccccagccggagg

SEQ ID NO: 1296022 - RNA, 24 nt, Human
ccagaagucuccauccagccuucc

SEQ ID NO: 1296023 - RNA, 21 nt, Human
ccauccagccuuccaguggau

SEQ ID NO: 1296024 - RNA, 22 nt, Human
ccccagccggaggccccuuggg

SEQ ID NO: 1296025 - RNA, 20 nt, Human
cccuccugagcccaccuucc

SEQ ID NO: 1296026 - RNA, 19 nt, Human
cccugcaucuacacccucc

SEQ ID NO: 1296027 - RNA, 20 nt, Human
ccgcgccccccagccggagg

SEQ ID NO: 1296028 - RNA, 19 nt, Human
ccugcaucuacacccuccu

SEQ ID NO: 1296029 - RNA, 18 nt, Human
ccugggagcugcuucuaa

SEQ ID NO: 1296030 - RNA, 23 nt, Human
ccuuuccauuugacuuucccaaa

SEQ ID NO: 1296031 - RNA, 23 nt, Human
cggccagugcucagcacauggua

SEQ ID NO: 1296032 - RNA, 19 nt, Human
cuccgcagccgcgcccccc

SEQ ID NO: 1296033 - RNA, 21 nt, Human
cuggggguuugccuccuucag

SEQ ID NO: 1296034 - RNA, 24 nt, Human
gaacuccgcagccgcgccccccag

SEQ ID NO: 1296035 - RNA, 18 nt, Human
gagcugcuucuaacaccc

SEQ ID NO: 1296036 - RNA, 23 nt, Human
gccuuccaguggauuccugacuc

SEQ ID NO: 1296037 - RNA, 21 nt, Human
gggcagcagacaaugggugug

SEQ ID NO: 1296038 - RNA, 18 nt, Human
gguacagcuccuccucug

SEQ ID NO: 1296039 - RNA, 24 nt, Human
ggugcuggggagggacucacaggg

SEQ ID NO: 1296040 - RNA, 19 nt, Human
guagagaugcugcuggccc

SEQ ID NO: 1296041 - RNA, 20 nt, Human
uagagaugcugcuggcccau

SEQ ID NO: 1296042 - RNA, 24 nt, Human
ucauuccugggagcugcuucuaac

SEQ ID NO: 1296043 - RNA, 19 nt, Human
uccaggacggucccgucuc

SEQ ID NO: 1296044 - RNA, 21 nt, Human
ucuaacaccaccaaaauagau

SEQ ID NO: 1296045 - RNA, 22 nt, Human
ucuuucuggcugagacuucugg

SEQ ID NO: 1296046 - RNA, 18 nt, Human
ugcaaacgcuccuugcuc

SEQ ID NO: 1296047 - RNA, 19 nt, Human
ugccacgaaacauguagag

SEQ ID NO: 1296048 - RNA, 22 nt, Human
uggcuucuggauacucagcccu

SEQ ID NO: 1296049 - RNA, 21 nt, Human
uggggguuugccuccuucagu

SEQ ID NO: 1296050 - RNA, 21 nt, Human
ugguugauaccaugcaaacgc

SEQ ID NO: 1296051 - RNA, 21 nt, Human
ugugcaggugcuggggaggga

SEQ ID NO: 1296052 - RNA, 24 nt, Human
uuccagaagucuccauccagccuu

SEQ ID NO: 1296053 - RNA, 18 nt, Human
uuccuggccuuuccauuu

SEQ ID NO: 1296054 - RNA, 19 nt, Human
uugacuuucccaaacuggg

SEQ ID NO: 1296055 - RNA, 22 nt, Human
uuucccaaacuggguacagcuc

SEQ ID NO: 1296056 - RNA, 21 nt, Human
aaggauucagaggaugaauuc

SEQ ID NO: 1296057 - RNA, 22 nt, Human
cccccugcguccugggccuccg

SEQ ID NO: 1296058 - RNA, 19 nt, Human
ccucccccugcguccuggg

SEQ ID NO: 1296059 - RNA, 21 nt, Human
cugcagggggccagggccggc

SEQ ID NO: 1296060 - RNA, 18 nt, Human
gccacacucuucucuucc

SEQ ID NO: 1296061 - RNA, 19 nt, Human
gcugcagggggccagggcc

SEQ ID NO: 1296062 - RNA, 22 nt, Human
gugcuagauuucuaggaggcca

SEQ ID NO: 1296063 - RNA, 21 nt, Human
uagauuucuaggaggccacac

SEQ ID NO: 1296064 - RNA, 19 nt, Human
uaggaggccacacucuucu

SEQ ID NO: 1296065 - RNA, 20 nt, Human
ucccccugcguccugggccu

SEQ ID NO: 1296066 - RNA, 20 nt, Human
uccucaguuuaccauaacac

SEQ ID NO: 1296067 - RNA, 22 nt, Human
uccugggccuccggggcuccug

SEQ ID NO: 1296068 - RNA, 20 nt, Human
ucuucucuuccuguuccucc

SEQ ID NO: 1296069 - RNA, 23 nt, Human
uuccucccccugcguccugggcc

SEQ ID NO: 1296070 - RNA, 21 nt, Human
aaaaaccaaaacaaaacaaaa

SEQ ID NO: 1296071 - RNA, 25 nt, Human
aaaaaccaaaacaaaacaaaacaaa

SEQ ID NO: 1296072 - RNA, 23 nt, Human
aaaacaaaacaaaacaaaauacc

SEQ ID NO: 1296073 - RNA, 26 nt, Human
aaaaggccagauggcugcagugggca

SEQ ID NO: 1296074 - RNA, 18 nt, Human
aaacaaaacaaaacaaaa

SEQ ID NO: 1296075 - RNA, 24 nt, Human
aaacaaaacaaaacaaaauaccaa

SEQ ID NO: 1296076 - RNA, 19 nt, Human
aaacaagaagcagacgagg

SEQ ID NO: 1296077 - RNA, 23 nt, Human
aaaccaaaacaaaacaaaacaaa

SEQ ID NO: 1296078 - RNA, 24 nt, Human
aaaccaaaacaaaacaaaacaaaa

SEQ ID NO: 1296079 - RNA, 24 nt, Human
aacaaaacaaaauaccaagaacag

SEQ ID NO: 1296080 - RNA, 24 nt, Human
aaccauaacaaaaacuguccuccu

SEQ ID NO: 1296081 - RNA, 24 nt, Human
acaaaacaaaacaaaauaccaaga

SEQ ID NO: 1296082 - RNA, 23 nt, Human
acaagaagcagacgagggggcuc

SEQ ID NO: 1296083 - RNA, 22 nt, Human
acacacuauacuuaaaaggcca

SEQ ID NO: 1296084 - RNA, 20 nt, Human
acaggaacggaagcaccacc

SEQ ID NO: 1296085 - RNA, 21 nt, Human
accacccuucugauggagagc

SEQ ID NO: 1296086 - RNA, 30 nt, Human
accccaccucuauucccuguggccuccaag

SEQ ID NO: 1296087 - RNA, 23 nt, Human
acccccaagggcaugccucuggc

SEQ ID NO: 1296088 - RNA, 21 nt, Human
acccgaccccccaacccuggc

SEQ ID NO: 1296089 - RNA, 21 nt, Human
acccuggcgggaccuuccagg

SEQ ID NO: 1296090 - RNA, 20 nt, Human
acuugauccaugacuuguga

SEQ ID NO: 1296091 - RNA, 19 nt, Human
agaagagucacagagaggc

SEQ ID NO: 1296092 - RNA, 19 nt, Human
agaaggccacauacccggg

SEQ ID NO: 1296093 - RNA, 23 nt, Human
agaaugcuuucacacccaggaac

SEQ ID NO: 1296094 - RNA, 22 nt, Human
agcggucucuucccugaguggc

SEQ ID NO: 1296095 - RNA, 18 nt, Human
aggagguggccugggcag

SEQ ID NO: 1296096 - RNA, 18 nt, Human
aggcagaguccgcagccc

SEQ ID NO: 1296097 - RNA, 23 nt, Human
aggcagcaggggccaggccccuu

SEQ ID NO: 1296098 - RNA, 24 nt, Human
aggcugaaggaggcagaaggccac

SEQ ID NO: 1296099 - RNA, 22 nt, Human
agggccgagacuugagucagaa

SEQ ID NO: 1296100 - RNA, 20 nt, Human
agggggcucaggggggcggg

SEQ ID NO: 1296101 - RNA, 21 nt, Human
auccucaugacaguuuuacac

SEQ ID NO: 1296102 - RNA, 22 nt, Human
augccucuggcuucaugaaccu

SEQ ID NO: 1296103 - RNA, 20 nt, Human
auucccuguggccuccaaaa

SEQ ID NO: 1296104 - RNA, 24 nt, Human
caaaacaaaacaaaacaaaauacc

SEQ ID NO: 1296105 - RNA, 27 nt, Human
caaaacaaaauaccaagaacagaucac

SEQ ID NO: 1296106 - RNA, 21 nt, Human
caaaacaaaauaccaagaacc

SEQ ID NO: 1296107 - RNA, 21 nt, Human
caaaauaccaagaacagauca

SEQ ID NO: 1296108 - RNA, 19 nt, Human
cacacacguacgccagcca

SEQ ID NO: 1296109 - RNA, 21 nt, Human
cacaggaacggaagcaccacc

SEQ ID NO: 1296110 - RNA, 29 nt, Human
cacaugcauucacacacacaugccuggcg

SEQ ID NO: 1296111 - RNA, 19 nt, Human
caccaggcuccucgcuucc

SEQ ID NO: 1296112 - RNA, 18 nt, Human
cacccuucucccgaccaa

SEQ ID NO: 1296113 - RNA, 24 nt, Human
caccucuauucccuguggccucca

SEQ ID NO: 1296114 - RNA, 18 nt, Human
cagaaccuucuggagcag

SEQ ID NO: 1296115 - RNA, 25 nt, Human
cagaaccuucuggagcaguacgcau

SEQ ID NO: 1296116 - RNA, 22 nt, Human
cagacgagggggcucagggggg

SEQ ID NO: 1296117 - RNA, 25 nt, Human
cagaggcccugagcaacaucgggcg

SEQ ID NO: 1296118 - RNA, 20 nt, Human
cagaggcccugagcaacauu

SEQ ID NO: 1296119 - RNA, 28 nt, Human
cagcacgcccacaucaaagguguccccc

SEQ ID NO: 1296120 - RNA, 19 nt, Human
cagcggucucuucccugag

SEQ ID NO: 1296121 - RNA, 20 nt, Human
cagcugggugggcguguggg

SEQ ID NO: 1296122 - RNA, 19 nt, Human
caggaacggaagcaccacc

SEQ ID NO: 1296123 - RNA, 25 nt, Human
caggccccuuccacagcacugccuc

SEQ ID NO: 1296124 - RNA, 20 nt, Human
caggggugggcuggggcccu

SEQ ID NO: 1296125 - RNA, 22 nt, Human
caguggcugcucauggagcugc

SEQ ID NO: 1296126 - RNA, 18 nt, Human
ccacugcagucccaggag

SEQ ID NO: 1296127 - RNA, 21 nt, Human
ccacugcagucccaggaggug

SEQ ID NO: 1296128 - RNA, 19 nt, Human
ccccaagggcaugccucug

SEQ ID NO: 1296129 - RNA, 24 nt, Human
cccccaagggcaugccucuggcuu

SEQ ID NO: 1296130 - RNA, 22 nt, Human
ccccuaaaccauaacaaaaacu

SEQ ID NO: 1296131 - RNA, 20 nt, Human
ccccucacgaugcacauggc

SEQ ID NO: 1296132 - RNA, 18 nt, Human
ccccuggcucugcccagg

SEQ ID NO: 1296133 - RNA, 20 nt, Human
cccgaccccccaacccuggc

SEQ ID NO: 1296134 - RNA, 24 nt, Human
cccgaccccccaacccuggcggga

SEQ ID NO: 1296135 - RNA, 20 nt, Human
ccgcagcccgagggagcuuc

SEQ ID NO: 1296136 - RNA, 22 nt, Human
ccggaaaugcgacacacuauac

SEQ ID NO: 1296137 - RNA, 19 nt, Human
ccucacgaugcacauggcu

SEQ ID NO: 1296138 - RNA, 20 nt, Human
ccucagggccgagacuugag

SEQ ID NO: 1296139 - RNA, 21 nt, Human
ccucaugacaguuuuacacuu

SEQ ID NO: 1296140 - RNA, 19 nt, Human
ccucccucuguacuugauc

SEQ ID NO: 1296141 - RNA, 26 nt, Human
ccuccuuaccccaaaagugcuggagg

SEQ ID NO: 1296142 - RNA, 22 nt, Human
ccucucacccuucucccgacca

SEQ ID NO: 1296143 - RNA, 18 nt, Human
ccucugacuggagacagg

SEQ ID NO: 1296144 - RNA, 19 nt, Human
ccucugccagccacuaccc

SEQ ID NO: 1296145 - RNA, 20 nt, Human
ccucugccagccacuacccc

SEQ ID NO: 1296146 - RNA, 19 nt, Human
ccucuggcuucaugaaccu

SEQ ID NO: 1296147 - RNA, 22 nt, Human
ccugggacuucauaaaccaucc

SEQ ID NO: 1296148 - RNA, 22 nt, Human
cgaccaacccccaagggcaugc

SEQ ID NO: 1296149 - RNA, 20 nt, Human
cgaggaaacugaggcugaag

SEQ ID NO: 1296150 - RNA, 22 nt, Human
cgcaggggugggcuggggcccu

SEQ ID NO: 1296151 - RNA, 20 nt, Human
cggcggaggacacacagcug

SEQ ID NO: 1296152 - RNA, 22 nt, Human
cuaaugcucagacccaggaggc

SEQ ID NO: 1296153 - RNA, 26 nt, Human
cucacccuucucccgaccaaccccca

SEQ ID NO: 1296154 - RNA, 22 nt, Human
cuccccagaucucugagugcuc

SEQ ID NO: 1296155 - RNA, 21 nt, Human
cuccgaaccaagggagagcuc

SEQ ID NO: 1296156 - RNA, 24 nt, Human
cuccgaaccaagggagagcucucc

SEQ ID NO: 1296157 - RNA, 21 nt, Human
cucugcccagggacaccccuc

SEQ ID NO: 1296158 - RNA, 23 nt, Human
cucuucccagaggcccugagcaa

SEQ ID NO: 1296159 - RNA, 22 nt, Human
cugauuauccccuauuugcacg

SEQ ID NO: 1296160 - RNA, 21 nt, Human
cugcccacccccgccgagcug

SEQ ID NO: 1296161 - RNA, 27 nt, Human
cugggugggcgugugggagugcagggg

SEQ ID NO: 1296162 - RNA, 19 nt, Human
cuuagaguccccacugcag

SEQ ID NO: 1296163 - RNA, 18 nt, Human
cuucacacugggcugcua

SEQ ID NO: 1296164 - RNA, 29 nt, Human
cuugauccaugacuugugaguugaacgcg

SEQ ID NO: 1296165 - RNA, 19 nt, Human
gaaaauuuccccuaaacca

SEQ ID NO: 1296166 - RNA, 25 nt, Human
gaaaauuuccccuaaaccauaacaa

SEQ ID NO: 1296167 - RNA, 23 nt, Human
gaacggaagcaccaccccaccuc

SEQ ID NO: 1296168 - RNA, 22 nt, Human
gaccugcagggcccacaccacc

SEQ ID NO: 1296169 - RNA, 19 nt, Human
gagguggccugggcaggca

SEQ ID NO: 1296170 - RNA, 26 nt, Human
gcagacauuagcagcagagcugcacc

SEQ ID NO: 1296171 - RNA, 23 nt, Human
ggacaccccucuccugguucuaa

SEQ ID NO: 1296172 - RNA, 18 nt, Human
ggccagauggcugcaggc

SEQ ID NO: 1296173 - RNA, 22 nt, Human
ggcgugugggagugcaggugug

SEQ ID NO: 1296174 - RNA, 21 nt, Human
gggcccacaccacccuucuga

SEQ ID NO: 1296175 - RNA, 21 nt, Human
ggggagaaucgcaggcagcag

SEQ ID NO: 1296176 - RNA, 18 nt, Human
gguaggaccugcagggcc

SEQ ID NO: 1296177 - RNA, 19 nt, Human
guaugcgcacacacguacg

SEQ ID NO: 1296178 - RNA, 18 nt, Human
uacccggggagaaucgca

SEQ ID NO: 1296179 - RNA, 20 nt, Human
uagaguccccacugcagucc

SEQ ID NO: 1296180 - RNA, 20 nt, Human
uauccccuauuugcacguuc

SEQ ID NO: 1296181 - RNA, 26 nt, Human
uaugcgcacacacguacgccagccaa

SEQ ID NO: 1296182 - RNA, 24 nt, Human
uauucccuguggccuccaaaagag

SEQ ID NO: 1296183 - RNA, 19 nt, Human
ucaaggccgagggguagga

SEQ ID NO: 1296184 - RNA, 18 nt, Human
ucacuugccauggacauc

SEQ ID NO: 1296185 - RNA, 19 nt, Human
ucagaggguggagguccuc

SEQ ID NO: 1296186 - RNA, 22 nt, Human
ucaugaaaauuuccccuaaacc

SEQ ID NO: 1296187 - RNA, 26 nt, Human
uccaaaagagcugggcaaccucugcc

SEQ ID NO: 1296188 - RNA, 28 nt, Human
ucccaccuucagacccuccuccuccccc

SEQ ID NO: 1296189 - RNA, 20 nt, Human
ucccagaggcccugagcaag

SEQ ID NO: 1296190 - RNA, 19 nt, Human
uccccagaucucugagugc

SEQ ID NO: 1296191 - RNA, 22 nt, Human
uccccucugcaccuggugagga

SEQ ID NO: 1296192 - RNA, 20 nt, Human
ucccuccuggacauggaaac

SEQ ID NO: 1296193 - RNA, 20 nt, Human
ucccucugacuggagacagg

SEQ ID NO: 1296194 - RNA, 18 nt, Human
ucccucuguacuugaucc

SEQ ID NO: 1296195 - RNA, 21 nt, Human
ucccugaguggcagguguggu

SEQ ID NO: 1296196 - RNA, 23 nt, Human
ucccugaguggcagguguggucc

SEQ ID NO: 1296197 - RNA, 18 nt, Human
uccgaaccaagggagagc

SEQ ID NO: 1296198 - RNA, 26 nt, Human
uccgcagcccgagggagcuucaaggc

SEQ ID NO: 1296199 - RNA, 25 nt, Human
uccucgcuuccuccccagaucucug

SEQ ID NO: 1296200 - RNA, 23 nt, Human
ucuauucccuguggccuccaaaa

SEQ ID NO: 1296201 - RNA, 29 nt, Human
ucucacccuucucccgaccaacccccaag

SEQ ID NO: 1296202 - RNA, 23 nt, Human
ucuccguccugagcucgcugccc

SEQ ID NO: 1296203 - RNA, 23 nt, Human
ucugcccagggacaccccucucc

SEQ ID NO: 1296204 - RNA, 18 nt, Human
ucuggagcaguacgcauu

SEQ ID NO: 1296205 - RNA, 23 nt, Human
ucuggcuucaugaaccuucgggg

SEQ ID NO: 1296206 - RNA, 19 nt, Human
ugagcaacaucgggcgacg

SEQ ID NO: 1296207 - RNA, 22 nt, Human
ugaguucugaguccucagggcc

SEQ ID NO: 1296208 - RNA, 21 nt, Human
ugcaccccuggcucugcccag

SEQ ID NO: 1296209 - RNA, 24 nt, Human
ugccccacaucuauuucugccaaa

SEQ ID NO: 1296210 - RNA, 27 nt, Human
ugcccugcccacccccgccgagcuuca

SEQ ID NO: 1296211 - RNA, 22 nt, Human
ugccuggcgggaucgcagagga

SEQ ID NO: 1296212 - RNA, 24 nt, Human
ugccuggcgggaucgcagaggaug

SEQ ID NO: 1296213 - RNA, 19 nt, Human
ugcucauggagcugcccuc

SEQ ID NO: 1296214 - RNA, 22 nt, Human
uggaaaacugaaaggucagagg

SEQ ID NO: 1296215 - RNA, 23 nt, Human
uggaggaaagaugguugcaugac

SEQ ID NO: 1296216 - RNA, 19 nt, Human
uggcaggagugggcagaag

SEQ ID NO: 1296217 - RNA, 21 nt, Human
uggcaggagugggcagaaugg

SEQ ID NO: 1296218 - RNA, 21 nt, Human
uggcagguguggucccuggga

SEQ ID NO: 1296219 - RNA, 20 nt, Human
uggccuccaaaagagcuggg

SEQ ID NO: 1296220 - RNA, 21 nt, Human
uggcgggaccuuccagggcug

SEQ ID NO: 1296221 - RNA, 18 nt, Human
uggcuagcagagcucaug

SEQ ID NO: 1296222 - RNA, 19 nt, Human
ugggcaaccucugccagcc

SEQ ID NO: 1296223 - RNA, 20 nt, Human
ugggcaggcaggcaucauug

SEQ ID NO: 1296224 - RNA, 24 nt, Human
ugucagcagacauuagcagcagag

SEQ ID NO: 1296225 - RNA, 26 nt, Human
uuugcacaugcauucacacacacaug

SEQ ID NO: 1296226 - RNA, 24 nt, Human
aggccgaggcgggaggaucacuug

SEQ ID NO: 1296227 - RNA, 22 nt, Human
aggccgggcacaguggcucacg

SEQ ID NO: 1296228 - RNA, 18 nt, Human
aggcgggaggaucacuug

SEQ ID NO: 1296229 - RNA, 19 nt, Human
aggcgggaggaucacuuga

SEQ ID NO: 1296230 - RNA, 24 nt, Human
aguggcucacgccuguaauuccag

SEQ ID NO: 1296231 - RNA, 24 nt, Human
cacgccuguaauuccagcacuucg

SEQ ID NO: 1296232 - RNA, 24 nt, Human
cagcacuucgggaggccgaggcgg

SEQ ID NO: 1296233 - RNA, 22 nt, Human
ccuguaauuccagcacuucggg

SEQ ID NO: 1296234 - RNA, 23 nt, Human
cgccuguaauuccagcacuucgg

SEQ ID NO: 1296235 - RNA, 24 nt, Human
cucacgccuguaauuccagcacuu

SEQ ID NO: 1296236 - RNA, 23 nt, Human
gggaggccgaggcgggaggauca

SEQ ID NO: 1296237 - RNA, 18 nt, Human
gggcacaguggcucacgc

SEQ ID NO: 1296238 - RNA, 24 nt, Human
gggcacaguggcucacgccuguaa

SEQ ID NO: 1296239 - RNA, 22 nt, Human
ucacgccuguaauuccagcacu

SEQ ID NO: 1296240 - RNA, 22 nt, Human
uggcucacgccuguaauuccag

SEQ ID NO: 1296241 - RNA, 24 nt, Human
uggcucacgccuguaauuccagca

SEQ ID NO: 1296242 - RNA, 20 nt, Human
aaaaaagaacauagaaacac

SEQ ID NO: 1296243 - RNA, 18 nt, Human
aaaaggccacaaucugaa

SEQ ID NO: 1296244 - RNA, 26 nt, Human
aaaaggccacaaucugaaaacaaaug

SEQ ID NO: 1296245 - RNA, 21 nt, Human
aaccauaaaguugcaaugggg

SEQ ID NO: 1296246 - RNA, 18 nt, Human
aagaacauagaaacacca

SEQ ID NO: 1296247 - RNA, 21 nt, Human
aagaagaguuaauacuaaaau

SEQ ID NO: 1296248 - RNA, 22 nt, Human
aagcuacaaauuauuuaaaauu

SEQ ID NO: 1296249 - RNA, 20 nt, Human
aagucauuaaagugcuucuc

SEQ ID NO: 1296250 - RNA, 21 nt, Human
aagugcuucucaacaaauucu

SEQ ID NO: 1296251 - RNA, 20 nt, Human
acaaucugaaaacaaauggc

SEQ ID NO: 1296252 - RNA, 22 nt, Human
acgcagcuucauggacaugcgg

SEQ ID NO: 1296253 - RNA, 26 nt, Human
acugcugggcugcuugucuccuuagg

SEQ ID NO: 1296254 - RNA, 22 nt, Human
agaauaaaacucccccugcccu

SEQ ID NO: 1296255 - RNA, 20 nt, Human
agaaucucuggguaggagcc

SEQ ID NO: 1296256 - RNA, 20 nt, Human
agacauuggagaggccaggu

SEQ ID NO: 1296257 - RNA, 18 nt, Human
aggccacaaucugaaaac

SEQ ID NO: 1296258 - RNA, 20 nt, Human
auaaaacucccccugcccuc

SEQ ID NO: 1296259 - RNA, 20 nt, Human
aucuucuucaucucuuauug

SEQ ID NO: 1296260 - RNA, 24 nt, Human
auggacaugcggcuuuugcuaguu

SEQ ID NO: 1296261 - RNA, 20 nt, Human
caacaaauucuuuuucuucu

SEQ ID NO: 1296262 - RNA, 19 nt, Human
cacagccaagaaaugagac

SEQ ID NO: 1296263 - RNA, 24 nt, Human
caccugcacagccaagaaaugaga

SEQ ID NO: 1296264 - RNA, 22 nt, Human
cagccaauaauaaaaggccaca

SEQ ID NO: 1296265 - RNA, 26 nt, Human
cagugauaccacuugaaaugcaaaac

SEQ ID NO: 1296266 - RNA, 18 nt, Human
ccuucagauaaacagaac

SEQ ID NO: 1296267 - RNA, 20 nt, Human
cuaaagaccauuuauuuuga

SEQ ID NO: 1296268 - RNA, 20 nt, Human
cugaaaacaaauggcauuua

SEQ ID NO: 1296269 - RNA, 22 nt, Human
cugugggaguuucacuggguag

SEQ ID NO: 1296270 - RNA, 24 nt, Human
cuucauggacaugcggcuuuugcu

SEQ ID NO: 1296271 - RNA, 22 nt, Human
gaaaggguuaacccuauguucg

SEQ ID NO: 1296272 - RNA, 19 nt, Human
gacauuggagaggccaggu

SEQ ID NO: 1296273 - RNA, 23 nt, Human
gcuugucuccuuaggauuuauug

SEQ ID NO: 1296274 - RNA, 19 nt, Human
guagaauaaaacucccccu

SEQ ID NO: 1296275 - RNA, 19 nt, Human
uaaaacucccccugcccuc

SEQ ID NO: 1296276 - RNA, 21 nt, Human
uaaaaggccacaaucugaaaa

SEQ ID NO: 1296277 - RNA, 23 nt, Human
uaaaaggccacaaucugaaaaca

SEQ ID NO: 1296278 - RNA, 22 nt, Human
uagaauaaaacucccccugccc

SEQ ID NO: 1296279 - RNA, 23 nt, Human
uauaacauggcaucaccugcaca

SEQ ID NO: 1296280 - RNA, 18 nt, Human
ucacuggguagaaucucu

SEQ ID NO: 1296281 - RNA, 18 nt, Human
ucucuguaagcauucagg

SEQ ID NO: 1296282 - RNA, 19 nt, Human
ucucuguaagcauucagga

SEQ ID NO: 1296283 - RNA, 22 nt, Human
ugaaacaauaaauaacuuaaau

SEQ ID NO: 1296284 - RNA, 25 nt, Human
ugaaacaauaaauaacuuaaaucuu

SEQ ID NO: 1296285 - RNA, 24 nt, Human
ugaaggccugaaaggguuaacccu

SEQ ID NO: 1296286 - RNA, 19 nt, Human
ugagaugcuaaagaccauu

SEQ ID NO: 1296287 - RNA, 19 nt, Human
ugcacacagguuguggagc

SEQ ID NO: 1296288 - RNA, 19 nt, Human
ugcuuugggaagaagaguu

SEQ ID NO: 1296289 - RNA, 21 nt, Human
uggauauaacauggcaucacc

SEQ ID NO: 1296290 - RNA, 18 nt, Human
uggcugagccagaggaac

SEQ ID NO: 1296291 - RNA, 23 nt, Human
uggcugagccagaggaacgacgc

SEQ ID NO: 1296292 - RNA, 20 nt, Human
uggguagaaucucuggguag

SEQ ID NO: 1296293 - RNA, 21 nt, Human
uguagaauaaaacuccccccu

SEQ ID NO: 1296294 - RNA, 28 nt, Human
uguagaauaaaacucccccugcccucaa

SEQ ID NO: 1296295 - RNA, 19 nt, Human
uguuauggcagacaugaag

SEQ ID NO: 1296296 - RNA, 23 nt, Human
uuaagcuacaaauuauuuaaaau

SEQ ID NO: 1296297 - RNA, 22 nt, Human
uuaauacuaaaaugauuucagu

SEQ ID NO: 1296298 - RNA, 21 nt, Human
uucaggacuaguaacacccaa

SEQ ID NO: 1296299 - RNA, 18 nt, Human
uucuguguauuaacaggu

SEQ ID NO: 1296300 - RNA, 22 nt, Human
uugcuguaacuuuacaaaugcu

SEQ ID NO: 1296301 - RNA, 22 nt, Human
uugguacaguuucucuaaaucu

SEQ ID NO: 1296302 - RNA, 23 nt, Human
agugcaguggcuugggaaccucc

SEQ ID NO: 1296303 - RNA, 20 nt, Human
cggccugcagagcccuccuc

SEQ ID NO: 1296304 - RNA, 22 nt, Human
guggcuugggaaccucccguuc

SEQ ID NO: 1296305 - RNA, 19 nt, Human
ugcagagcccuccuccuac

SEQ ID NO: 1296306 - RNA, 18 nt, Human
aaggaaccgggagacugg

SEQ ID NO: 1296307 - RNA, 23 nt, Human
aagugcuucccggcgucuaaucc

SEQ ID NO: 1296308 - RNA, 18 nt, Human
accagagucagcucuguc

SEQ ID NO: 1296309 - RNA, 18 nt, Human
acccgcggcgcuccgcuc

SEQ ID NO: 1296310 - RNA, 21 nt, Human
agagggaggauggagcauggu

SEQ ID NO: 1296311 - RNA, 22 nt, Human
agccaggcccucagugcaagcc

SEQ ID NO: 1296312 - RNA, 19 nt, Human
aggcaguuaccuucagccu

SEQ ID NO: 1296313 - RNA, 20 nt, Human
agggaggauggagcauggug

SEQ ID NO: 1296314 - RNA, 25 nt, Human
auccucgcuguuccccccuccaccg

SEQ ID NO: 1296315 - RNA, 18 nt, Human
auggagcauggugaagca

SEQ ID NO: 1296316 - RNA, 22 nt, Human
caacaaggucagcuggccccuu

SEQ ID NO: 1296317 - RNA, 23 nt, Human
caaccuugccaggaagucagaga

SEQ ID NO: 1296318 - RNA, 19 nt, Human
cacacauagccacacaugg

SEQ ID NO: 1296319 - RNA, 18 nt, Human
cacuucuguuucucucug

SEQ ID NO: 1296320 - RNA, 21 nt, Human
ccaaccccucuugccacuguc

SEQ ID NO: 1296321 - RNA, 19 nt, Human
ccacagcuuucuggagugg

SEQ ID NO: 1296322 - RNA, 18 nt, Human
cccccuccaccggcgccc

SEQ ID NO: 1296323 - RNA, 28 nt, Human
ccccucuugccacugucgucccauugac

SEQ ID NO: 1296324 - RNA, 18 nt, Human
cccuaaggcuuccucuuc

SEQ ID NO: 1296325 - RNA, 23 nt, Human
cccuucacacggucacacauagc

SEQ ID NO: 1296326 - RNA, 18 nt, Human
ccggccaacaaggucagc

SEQ ID NO: 1296327 - RNA, 18 nt, Human
ccucagcacuucuguuuc

SEQ ID NO: 1296328 - RNA, 25 nt, Human
ccuccuauggauaaauauucgaggc

SEQ ID NO: 1296329 - RNA, 21 nt, Human
ccucgaaaggauggaagcagg

SEQ ID NO: 1296330 - RNA, 21 nt, Human
ccugggaugagaugugcacgc

SEQ ID NO: 1296331 - RNA, 23 nt, Human
ccuuuuuggcagccccagcccug

SEQ ID NO: 1296332 - RNA, 23 nt, Human
cucggcagcuccucucucccucc

SEQ ID NO: 1296333 - RNA, 19 nt, Human
cuggccccuuccuagcugg

SEQ ID NO: 1296334 - RNA, 23 nt, Human
cuggcuuuggaacagucugggca

SEQ ID NO: 1296335 - RNA, 23 nt, Human
gagcauggugaagcacagguggc

SEQ ID NO: 1296336 - RNA, 22 nt, Human
gagugaagcaggaaggaaccgg

SEQ ID NO: 1296337 - RNA, 19 nt, Human
gcagcuccucucucccucc

SEQ ID NO: 1296338 - RNA, 24 nt, Human
gcaggaaggaaccgggagacugga

SEQ ID NO: 1296339 - RNA, 21 nt, Human
ggaagagagggaggauggagc

SEQ ID NO: 1296340 - RNA, 18 nt, Human
ggagcauggugaagcaca

SEQ ID NO: 1296341 - RNA, 21 nt, Human
ggcagccccagcccuggcuuu

SEQ ID NO: 1296342 - RNA, 24 nt, Human
gguggaagagagggaggauggagc

SEQ ID NO: 1296343 - RNA, 18 nt, Human
gugaagcacagguggccu

SEQ ID NO: 1296344 - RNA, 23 nt, Human
uacaauaaagaccccuaaggcuu

SEQ ID NO: 1296345 - RNA, 19 nt, Human
uauuucacagaauggugac

SEQ ID NO: 1296346 - RNA, 19 nt, Human
ucccuccugggaugagaug

SEQ ID NO: 1296347 - RNA, 21 nt, Human
uccucgcuguuccccccucca

SEQ ID NO: 1296348 - RNA, 21 nt, Human
ucgaaaggauggaagcagggc

SEQ ID NO: 1296349 - RNA, 18 nt, Human
ugagaugugcacgcgaug

SEQ ID NO: 1296350 - RNA, 19 nt, Human
ugcagccagucugcuuucu

SEQ ID NO: 1296351 - RNA, 26 nt, Human
ugcuugugggggaugucagcaguggg

SEQ ID NO: 1296352 - RNA, 20 nt, Human
uggaagagagggaggaugga

SEQ ID NO: 1296353 - RNA, 19 nt, Human
uggccuuuuuggcagcccc

SEQ ID NO: 1296354 - RNA, 18 nt, Human
uggggaggagugaagcag

SEQ ID NO: 1296355 - RNA, 18 nt, Human
uggggaggagugaagcag

SEQ ID NO: 1296356 - RNA, 19 nt, Human
uggggagguggaagagagg

SEQ ID NO: 1296357 - RNA, 20 nt, Human
ugucuucugucccugcagcc

SEQ ID NO: 1296358 - RNA, 24 nt, Human
uguuccccccuccaccggcgccca

SEQ ID NO: 1296359 - RNA, 21 nt, Human
uucacacggucacacauagcc

SEQ ID NO: 1296360 - RNA, 19 nt, Human
uucccggcgucuaauccuc

SEQ ID NO: 1296361 - RNA, 20 nt, Human
uuggcagccccagcccuggc

SEQ ID NO: 1296362 - RNA, 22 nt, Human
uuuuuggcagccccagcccugg

SEQ ID NO: 1296363 - RNA, 22 nt, Human
ccagcaacagcucugacaaccc

SEQ ID NO: 1296364 - RNA, 18 nt, Human
aguaaacugaguucaugu

SEQ ID NO: 1296365 - RNA, 19 nt, Human
ugaaguaaacugaguucau

SEQ ID NO: 1296366 - RNA, 24 nt, Human
ugaaguaaacugaguucaugugaa

SEQ ID NO: 1296367 - RNA, 24 nt, Human
aagcaaaagcuauuucuaccaaag

SEQ ID NO: 1296368 - RNA, 22 nt, Human
acuuaauauaaagcaaaagcua

SEQ ID NO: 1296369 - RNA, 24 nt, Human
auaaagauaaaauaugccauaaua

SEQ ID NO: 1296370 - RNA, 18 nt, Human
caaaggacauugauaaac

SEQ ID NO: 1296371 - RNA, 21 nt, Human
caaauagagagaauauauaug

SEQ ID NO: 1296372 - RNA, 24 nt, Human
caauacauaaagauaaaauaugcc

SEQ ID NO: 1296373 - RNA, 31 nt, Human
cagaugaaucucucucugccuccaaaauccu

SEQ ID NO: 1296374 - RNA, 22 nt, Human
cauaaagauaaaauaugccaua

SEQ ID NO: 1296375 - RNA, 25 nt, Human
ccaucacuugucuaaauuuuacuca

SEQ ID NO: 1296376 - RNA, 24 nt, Human
ccuccaaaauccucagucaugcag

SEQ ID NO: 1296377 - RNA, 19 nt, Human
cgagauagccccucacuga

SEQ ID NO: 1296378 - RNA, 21 nt, Human
cgggccuccgcgucuccagga

SEQ ID NO: 1296379 - RNA, 19 nt, Human
cucaaaauuggagaguugg

SEQ ID NO: 1296380 - RNA, 24 nt, Human
cuccccaauuaaggugucucucuu

SEQ ID NO: 1296381 - RNA, 22 nt, Human
cucccgagcaagucuuucccua

SEQ ID NO: 1296382 - RNA, 23 nt, Human
cucugcaauucuuccucucccca

SEQ ID NO: 1296383 - RNA, 21 nt, Human
gaagagacucgcgcuaccuuu

SEQ ID NO: 1296384 - RNA, 18 nt, Human
gcaguaugaauaauuaac

SEQ ID NO: 1296385 - RNA, 22 nt, Human
ggagaguuggauuccagaccaa

SEQ ID NO: 1296386 - RNA, 18 nt, Human
gggccuccgcgucuccag

SEQ ID NO: 1296387 - RNA, 18 nt, Human
ggugagcgcgcugaaggc

SEQ ID NO: 1296388 - RNA, 21 nt, Human
uaaagcaaaagcuauuucuac

SEQ ID NO: 1296389 - RNA, 22 nt, Human
uaagagcaaagcauucuggaca

SEQ ID NO: 1296390 - RNA, 22 nt, Human
uagaccuccauugguguuccaa

SEQ ID NO: 1296391 - RNA, 20 nt, Human
uagcagacagauuuuuaaac

SEQ ID NO: 1296392 - RNA, 19 nt, Human
uauuaaacugaaauucugu

SEQ ID NO: 1296393 - RNA, 27 nt, Human
uccagaccaagacacugucacuagagc

SEQ ID NO: 1296394 - RNA, 20 nt, Human
ucccuuaaaaucccuuagac

SEQ ID NO: 1296395 - RNA, 22 nt, Human
ucccuuaaaaucccuuagacuc

SEQ ID NO: 1296396 - RNA, 18 nt, Human
ucccuuagacuugcuccc

SEQ ID NO: 1296397 - RNA, 21 nt, Human
ucccuuagacuugcucccgag

SEQ ID NO: 1296398 - RNA, 23 nt, Human
ucugcaauucuuccucuccccaa

SEQ ID NO: 1296399 - RNA, 21 nt, Human
ugaagaagccuccuacaagga

SEQ ID NO: 1296400 - RNA, 20 nt, Human
ugaauuagaagaguauauca

SEQ ID NO: 1296401 - RNA, 19 nt, Human
ugauugaaagcuguuugau

SEQ ID NO: 1296402 - RNA, 19 nt, Human
uggacgcggugagcgcgcu

SEQ ID NO: 1296403 - RNA, 24 nt, Human
uggugugggagaugugccaagugg

SEQ ID NO: 1296404 - RNA, 22 nt, Human
ugucaaauaaagcgaagguuuc

SEQ ID NO: 1296405 - RNA, 19 nt, Human
ugucacuagagcucccuag

SEQ ID NO: 1296406 - RNA, 18 nt, Human
uuaaacugaaauucuguc

SEQ ID NO: 1296407 - RNA, 21 nt, Human
aagagggacuuguauucgaug

SEQ ID NO: 1296408 - RNA, 25 nt, Human
aagcagagccgggcaacuucaggaa

SEQ ID NO: 1296409 - RNA, 24 nt, Human
agauguuaggaagguacacaagcc

SEQ ID NO: 1296410 - RNA, 21 nt, Human
agccuggcaccaaacagccuu

SEQ ID NO: 1296411 - RNA, 21 nt, Human
aguaaaacaaggcucuucuga

SEQ ID NO: 1296412 - RNA, 19 nt, Human
caaaggauuggcuauaauc

SEQ ID NO: 1296413 - RNA, 26 nt, Human
caaggcucuucugacguccuuuggag

SEQ ID NO: 1296414 - RNA, 27 nt, Human
caccgcaacucgccucagauccuccca

SEQ ID NO: 1296415 - RNA, 18 nt, Human
cagaccacagaaaccauc

SEQ ID NO: 1296416 - RNA, 22 nt, Human
cagaccacagaaaccauccgua

SEQ ID NO: 1296417 - RNA, 24 nt, Human
cagaccacagaaaccauccguaaa

SEQ ID NO: 1296418 - RNA, 20 nt, Human
cagcaauaaagaacccuaau

SEQ ID NO: 1296419 - RNA, 18 nt, Human
ccucacuuguggaggugg

SEQ ID NO: 1296420 - RNA, 19 nt, Human
ccucacuuguggaggugga

SEQ ID NO: 1296421 - RNA, 23 nt, Human
cgggcaacuucaggaaagcucau

SEQ ID NO: 1296422 - RNA, 19 nt, Human
cucaggaaugaacacauca

SEQ ID NO: 1296423 - RNA, 21 nt, Human
cuucugcuuuugcagccacag

SEQ ID NO: 1296424 - RNA, 25 nt, Human
gagcacccucauaauguuggaaaua

SEQ ID NO: 1296425 - RNA, 20 nt, Human
gccacaguuuguaauuagcu

SEQ ID NO: 1296426 - RNA, 19 nt, Human
gugcugccggcuucugcuu

SEQ ID NO: 1296427 - RNA, 20 nt, Human
uaaaacaaggcucuucugac

SEQ ID NO: 1296428 - RNA, 19 nt, Human
uagagagcacccucauaau

SEQ ID NO: 1296429 - RNA, 18 nt, Human
ucagaccacagaaaccau

SEQ ID NO: 1296430 - RNA, 21 nt, Human
ucaggaaugaacacaucauca

SEQ ID NO: 1296431 - RNA, 20 nt, Human
ucaucagagagacguugggu

SEQ ID NO: 1296432 - RNA, 20 nt, Human
uccacaaauagagauguuag

SEQ ID NO: 1296433 - RNA, 18 nt, Human
ucuuuggcagauaaaccu

SEQ ID NO: 1296434 - RNA, 20 nt, Human
ugacguccuuuggaguuuca

SEQ ID NO: 1296435 - RNA, 21 nt, Human
uggagguggauuuaguaucag

SEQ ID NO: 1296436 - RNA, 24 nt, Human
uguaauuagcucaggaaugaacac

SEQ ID NO: 1296437 - RNA, 20 nt, Human
uuuuaauucagcaaagcagg

SEQ ID NO: 1296438 - RNA, 22 nt, Human
acggauuuggucguauuaggcg

SEQ ID NO: 1296439 - RNA, 26 nt, Human
aucaaugaccccuucauugaccucaa

SEQ ID NO: 1296440 - RNA, 22 nt, Human
aucaucucugcccccucugcug

SEQ ID NO: 1296441 - RNA, 24 nt, Human
auuguugccaucaaugaccccuuc

SEQ ID NO: 1296442 - RNA, 27 nt, Human
caacaaccucaagaucgucagcaaugc

SEQ ID NO: 1296443 - RNA, 21 nt, Human
caaggagugggacuccuggac

SEQ ID NO: 1296444 - RNA, 19 nt, Human
cacccauggcaaauuccau

SEQ ID NO: 1296445 - RNA, 23 nt, Human
cacccccuccuccaccaccacgg

SEQ ID NO: 1296446 - RNA, 19 nt, Human
cacccccuccuccaccuuc

SEQ ID NO: 1296447 - RNA, 19 nt, Human
cacccccuccuccaccuuc

SEQ ID NO: 1296448 - RNA, 25 nt, Human
cacccccuccuccaccuucaaugcu

SEQ ID NO: 1296449 - RNA, 23 nt, Human
cauggcccacauggccuccaagg

SEQ ID NO: 1296450 - RNA, 18 nt, Human
cauguagaaggcuggggc

SEQ ID NO: 1296451 - RNA, 19 nt, Human
cccccuccuccaccuucaa

SEQ ID NO: 1296452 - RNA, 19 nt, Human
ccuccaccuucaaugcugg

SEQ ID NO: 1296453 - RNA, 23 nt, Human
ccuccgauuucaacagugacacc

SEQ ID NO: 1296454 - RNA, 22 nt, Human
cucaacgaccacuuuguaauga

SEQ ID NO: 1296455 - RNA, 19 nt, Human
cuccagcgagagcacaagg

SEQ ID NO: 1296456 - RNA, 21 nt, Human
cuccuggaccaccaacuccag

SEQ ID NO: 1296457 - RNA, 23 nt, Human
cugagcaccagguggucuccucc

SEQ ID NO: 1296458 - RNA, 21 nt, Human
cugcccccucugcugaugccc

SEQ ID NO: 1296459 - RNA, 22 nt, Human
cugcccccucugcugaugcccc

SEQ ID NO: 1296460 - RNA, 24 nt, Human
cuggugcugaguacgucguggagu

SEQ ID NO: 1296461 - RNA, 21 nt, Human
cuucaaugcuggggcuggcau

SEQ ID NO: 1296462 - RNA, 26 nt, Human
gaccacuuuguaaugaauuuggcuac

SEQ ID NO: 1296463 - RNA, 23 nt, Human
gaccucauggcccacauggccuc

SEQ ID NO: 1296464 - RNA, 18 nt, Human
gcaggggggagccaaaag

SEQ ID NO: 1296465 - RNA, 19 nt, Human
gcccacauggccuccaagg

SEQ ID NO: 1296466 - RNA, 24 nt, Human
gcucauuugcaggggggagccaaa

SEQ ID NO: 1296467 - RNA, 24 nt, Human
uaaaguggauauuguugccaucaa

SEQ ID NO: 1296468 - RNA, 23 nt, Human
uagaaggcuggggcucauuugcc

SEQ ID NO: 1296469 - RNA, 24 nt, Human
ucaagaucgucagcaaugccuccu

SEQ ID NO: 1296470 - RNA, 22 nt, Human
ucaaugaccccuucauugaccu

SEQ ID NO: 1296471 - RNA, 19 nt, Human
uccgauuucaacagugaca

SEQ ID NO: 1296472 - RNA, 23 nt, Human
ugaaggucggagucaacggauuu

SEQ ID NO: 1296473 - RNA, 19 nt, Human
ugaccccuucauugaccuc

SEQ ID NO: 1296474 - RNA, 24 nt, Human
ugagaacgggaaauuugucaucaa

SEQ ID NO: 1296475 - RNA, 24 nt, Human
uggccuccaaggagugggacuccu

SEQ ID NO: 1296476 - RNA, 20 nt, Human
uggcgucuucaccaccaugu

SEQ ID NO: 1296477 - RNA, 24 nt, Human
uggugcugaguacgucguggaguc

SEQ ID NO: 1296478 - RNA, 22 nt, Human
uguugccaucaaugaccccuuc

SEQ ID NO: 1296479 - RNA, 23 nt, Human
uuccaguaugauuccacccaugg

SEQ ID NO: 1296480 - RNA, 19 nt, Human
uuccugccacacucagucc

SEQ ID NO: 1296481 - RNA, 28 nt, Human
aaaaaagaauuccucuaaucaugucacc

SEQ ID NO: 1296482 - RNA, 24 nt, Human
aaaaaagccaaaacugacaaacac

SEQ ID NO: 1296483 - RNA, 18 nt, Human
aaaaagacauacaaucua

SEQ ID NO: 1296484 - RNA, 25 nt, Human
aaaaagacauacaaucuaacacaga

SEQ ID NO: 1296485 - RNA, 24 nt, Human
aaaaauuaaccauauuuugucccu

SEQ ID NO: 1296486 - RNA, 21 nt, Human
aaaagaaaacucaauucagaa

SEQ ID NO: 1296487 - RNA, 24 nt, Human
aaaagaauaaagaauaucuacaaa

SEQ ID NO: 1296488 - RNA, 21 nt, Human
aaacaagccacugcuuccuca

SEQ ID NO: 1296489 - RNA, 21 nt, Human
aaacaauggcaucaaauggac

SEQ ID NO: 1296490 - RNA, 24 nt, Human
aaauauuggcagcuugaauaagcu

SEQ ID NO: 1296491 - RNA, 22 nt, Human
aacaaaggagaaaaaagccaaa

SEQ ID NO: 1296492 - RNA, 21 nt, Human
aacacgaaacauugacuaaua

SEQ ID NO: 1296493 - RNA, 23 nt, Human
aacagagcagcagaagcaucaag

SEQ ID NO: 1296494 - RNA, 24 nt, Human
aacagagcagcagaagcaucaaga

SEQ ID NO: 1296495 - RNA, 22 nt, Human
aacucaauucagaaaugaagaa

SEQ ID NO: 1296496 - RNA, 21 nt, Human
aagaauuccucuaaucauguc

SEQ ID NO: 1296497 - RNA, 24 nt, Human
aauaaagaauaucuacaaaaggga

SEQ ID NO: 1296498 - RNA, 26 nt, Human
aauucagagguauacuucugauuugg

SEQ ID NO: 1296499 - RNA, 18 nt, Human
acaaaacaaaaaaaagag

SEQ ID NO: 1296500 - RNA, 20 nt, Human
acaacaaaggagaaaaaagc

SEQ ID NO: 1296501 - RNA, 23 nt, Human
acaacaaaggagaaaaaagccaa

SEQ ID NO: 1296502 - RNA, 25 nt, Human
acaucaagaaaagaaaacucaauuc

SEQ ID NO: 1296503 - RNA, 21 nt, Human
acccccagagcaucucaauau

SEQ ID NO: 1296504 - RNA, 19 nt, Human
acugcuuccucaaagcaag

SEQ ID NO: 1296505 - RNA, 24 nt, Human
agaaaauccguggugaaaccugaa

SEQ ID NO: 1296506 - RNA, 18 nt, Human
agaaaauuaguuucaggg

SEQ ID NO: 1296507 - RNA, 20 nt, Human
agaaaugaagaaaacuggca

SEQ ID NO: 1296508 - RNA, 25 nt, Human
agaauacaacaaaggagaaaaaagc

SEQ ID NO: 1296509 - RNA, 24 nt, Human
agauggauugguagaggugugucg

SEQ ID NO: 1296510 - RNA, 18 nt, Human
agcaaggaggcaaguacu

SEQ ID NO: 1296511 - RNA, 27 nt, Human
agcaaggaggcaaguacugaagaagaa

SEQ ID NO: 1296512 - RNA, 25 nt, Human
agcagaagcaucaagaucaggucca

SEQ ID NO: 1296513 - RNA, 21 nt, Human
agggacaauuuucauacuaaa

SEQ ID NO: 1296514 - RNA, 24 nt, Human
agucucuuuuuuguggagagaagg

SEQ ID NO: 1296515 - RNA, 19 nt, Human
auaaugcggaacacgaaac

SEQ ID NO: 1296516 - RNA, 18 nt, Human
auacaaucuaacacagac

SEQ ID NO: 1296517 - RNA, 20 nt, Human
aucaaaauggguaaguccuu

SEQ ID NO: 1296518 - RNA, 20 nt, Human
auccagggaaucccagaaau

SEQ ID NO: 1296519 - RNA, 22 nt, Human
caaagcaaggaccaggcuccaa

SEQ ID NO: 1296520 - RNA, 21 nt, Human
caaaggagaaaaaagccaaaa

SEQ ID NO: 1296521 - RNA, 23 nt, Human
caaauaaugcggaacacgaaaca

SEQ ID NO: 1296522 - RNA, 19 nt, Human
caacaucaagaaaagaaaa

SEQ ID NO: 1296523 - RNA, 21 nt, Human
caagaucagguccaaagaguu

SEQ ID NO: 1296524 - RNA, 23 nt, Human
caccacauaaauacugggcaaca

SEQ ID NO: 1296525 - RNA, 19 nt, Human
cacccuuucacuugaucuc

SEQ ID NO: 1296526 - RNA, 22 nt, Human
caccuucagcuaucaaucauuu

SEQ ID NO: 1296527 - RNA, 23 nt, Human
cagagcaucucaauaucccuggc

SEQ ID NO: 1296528 - RNA, 21 nt, Human
cagcaguuccuuaggagccaa

SEQ ID NO: 1296529 - RNA, 22 nt, Human
cagcaguuccuuaggagccaac

SEQ ID NO: 1296530 - RNA, 22 nt, Human
caucaagaaaagaaaacucaau

SEQ ID NO: 1296531 - RNA, 22 nt, Human
caucaagacaauacauaaagaa

SEQ ID NO: 1296532 - RNA, 20 nt, Human
caugcuuauuccuucacaaa

SEQ ID NO: 1296533 - RNA, 23 nt, Human
cauugccaagaaaaccucucagc

SEQ ID NO: 1296534 - RNA, 20 nt, Human
ccaacagagcagcagaagca

SEQ ID NO: 1296535 - RNA, 22 nt, Human
ccagagcaucucaauaucccug

SEQ ID NO: 1296536 - RNA, 20 nt, Human
cccucaggugguuaaaggcc

SEQ ID NO: 1296537 - RNA, 22 nt, Human
ccucaaaaacaaaacaaaaaaa

SEQ ID NO: 1296538 - RNA, 21 nt, Human
ccucacauugccaagaaaacc

SEQ ID NO: 1296539 - RNA, 21 nt, Human
ccuguaggucgaaccaacacu

SEQ ID NO: 1296540 - RNA, 19 nt, Human
ccuuccuuccucuuccucc

SEQ ID NO: 1296541 - RNA, 19 nt, Human
ccuuccuuccucuuccucc

SEQ ID NO: 1296542 - RNA, 23 nt, Human
ccuuucacuugaucucccucuca

SEQ ID NO: 1296543 - RNA, 21 nt, Human
cgaaccaacacucaauccaug

SEQ ID NO: 1296544 - RNA, 19 nt, Human
cuaacacagacugaguggg

SEQ ID NO: 1296545 - RNA, 19 nt, Human
cucaaaagaugauaaacaa

SEQ ID NO: 1296546 - RNA, 20 nt, Human
cucaaaagaugauaaacaau

SEQ ID NO: 1296547 - RNA, 21 nt, Human
cucaaaagaugauaaacaaug

SEQ ID NO: 1296548 - RNA, 21 nt, Human
cucaauucagaaaugaagaaa

SEQ ID NO: 1296549 - RNA, 22 nt, Human
cucacuaccaccuucagcuauc

SEQ ID NO: 1296550 - RNA, 19 nt, Human
cucauauaaugaauccagg

SEQ ID NO: 1296551 - RNA, 22 nt, Human
cuggccaccuacagcaaaauau

SEQ ID NO: 1296552 - RNA, 21 nt, Human
cuguaagcugauuccaaaagc

SEQ ID NO: 1296553 - RNA, 23 nt, Human
cuuccucaaagcaaggaccaggc

SEQ ID NO: 1296554 - RNA, 20 nt, Human
cuucuugaaacaagccacug

SEQ ID NO: 1296555 - RNA, 21 nt, Human
gaaaccugaacauucuacccc

SEQ ID NO: 1296556 - RNA, 19 nt, Human
gaacauucuaccccugcuu

SEQ ID NO: 1296557 - RNA, 22 nt, Human
gaaggaaaccaacaucaagaaa

SEQ ID NO: 1296558 - RNA, 19 nt, Human
gacuggagacagcuagggu

SEQ ID NO: 1296559 - RNA, 22 nt, Human
ggagaagggcuaucauacaaca

SEQ ID NO: 1296560 - RNA, 22 nt, Human
ggcagguauacaauauaccccc

SEQ ID NO: 1296561 - RNA, 24 nt, Human
ggggcaaauucuagacuaaagaaa

SEQ ID NO: 1296562 - RNA, 24 nt, Human
gucaccaucucauauaaugaaucc

SEQ ID NO: 1296563 - RNA, 24 nt, Human
gucucuuuuuuguggagagaaggg

SEQ ID NO: 1296564 - RNA, 25 nt, Human
uaaaaaagcaaaagaauaaagaaua

SEQ ID NO: 1296565 - RNA, 22 nt, Human
uaaaaaucugaccccaaggaau

SEQ ID NO: 1296566 - RNA, 23 nt, Human
uaaagcuuaguugaaucucuaaa

SEQ ID NO: 1296567 - RNA, 20 nt, Human
uaaaguaacuuuaaaaaucu

SEQ ID NO: 1296568 - RNA, 22 nt, Human
uaaaguguccucacuaccaccu

SEQ ID NO: 1296569 - RNA, 18 nt, Human
uaagggcaaaugguucaa

SEQ ID NO: 1296570 - RNA, 19 nt, Human
uaauaaugaagcagaaaaa

SEQ ID NO: 1296571 - RNA, 23 nt, Human
uaccccugcuuuggagaagggcu

SEQ ID NO: 1296572 - RNA, 20 nt, Human
uacugggagauuaaguccau

SEQ ID NO: 1296573 - RNA, 18 nt, Human
uauacaauauacccccag

SEQ ID NO: 1296574 - RNA, 18 nt, Human
uaugaaggaaaccaacau

SEQ ID NO: 1296575 - RNA, 23 nt, Human
uaugagaaacaaaacuggccacc

SEQ ID NO: 1296576 - RNA, 21 nt, Human
ucaauucagaaaugaagaaaa

SEQ ID NO: 1296577 - RNA, 19 nt, Human
ucagaaaugaagaaaacug

SEQ ID NO: 1296578 - RNA, 22 nt, Human
ucagaaguggcuucuugaaaca

SEQ ID NO: 1296579 - RNA, 21 nt, Human
ucagagguauacuucugauuu

SEQ ID NO: 1296580 - RNA, 24 nt, Human
ucauacaacauucagucagcugaa

SEQ ID NO: 1296581 - RNA, 23 nt, Human
uccauauucccaacaaggcuacg

SEQ ID NO: 1296582 - RNA, 23 nt, Human
ucccaacuacugggagauuaagu

SEQ ID NO: 1296583 - RNA, 19 nt, Human
ucccucucagucucuuuuu

SEQ ID NO: 1296584 - RNA, 18 nt, Human
uccguggugaaaccugaa

SEQ ID NO: 1296585 - RNA, 18 nt, Human
uccugagcugcucagccc

SEQ ID NO: 1296586 - RNA, 25 nt, Human
uccuuaggagccaacaugacaggug

SEQ ID NO: 1296587 - RNA, 20 nt, Human
uccuuccuuccucuuccucc

SEQ ID NO: 1296588 - RNA, 18 nt, Human
ucgaaccaacacucaauc

SEQ ID NO: 1296589 - RNA, 20 nt, Human
ucuagacuaaagaaaugauc

SEQ ID NO: 1296590 - RNA, 24 nt, Human
ucuuccaaaugacaacuugaucac

SEQ ID NO: 1296591 - RNA, 25 nt, Human
ugaaacaagccacugcuuccucaaa

SEQ ID NO: 1296592 - RNA, 19 nt, Human
ugaagaagaaaagggacaa

SEQ ID NO: 1296593 - RNA, 23 nt, Human
ugaccccaaggaauccaggacac

SEQ ID NO: 1296594 - RNA, 23 nt, Human
ugagccgcuuacaacagcaguuc

SEQ ID NO: 1296595 - RNA, 19 nt, Human
ugaucucccucucagucuc

SEQ ID NO: 1296596 - RNA, 22 nt, Human
uggguagauucuuagaucagaa

SEQ ID NO: 1296597 - RNA, 21 nt, Human
uguccucacuaccaccuucag

SEQ ID NO: 1296598 - RNA, 23 nt, Human
uuauaaaguaacuuuaaaaaucu

SEQ ID NO: 1296599 - RNA, 22 nt, Human
uuaucuccucaaaaacaaaaca

SEQ ID NO: 1296600 - RNA, 24 nt, Human
uucagaggccaacagagcagcaga

SEQ ID NO: 1296601 - RNA, 19 nt, Human
uuccaaucuauuacgccug

SEQ ID NO: 1296602 - RNA, 20 nt, Human
uuuaaaacaucucccaacua

SEQ ID NO: 1296603 - RNA, 21 nt, Human
uuuaaaguguccucacuacca

SEQ ID NO: 1296604 - RNA, 24 nt, Human
uuuuaaaacaucucccaacuacug

SEQ ID NO: 1296605 - RNA, 20 nt, Human
cuccaacacucugcucuagc

SEQ ID NO: 1296606 - RNA, 21 nt, Human
gauuguuccuggucuccaaca

SEQ ID NO: 1296607 - RNA, 22 nt, Human
gcaaagcacagauuccaaccuu

SEQ ID NO: 1296608 - RNA, 22 nt, Human
uagcacacugugacuacaccuc

SEQ ID NO: 1296609 - RNA, 20 nt, Human
ucuccaacacucugcucuag

SEQ ID NO: 1296610 - RNA, 26 nt, Human
ucuucugauuguuccuggucuccaac

SEQ ID NO: 1296611 - RNA, 19 nt, Human
uuccuggucuccaacacuc

SEQ ID NO: 1296612 - RNA, 20 nt, Human
aacgcugagcugggcaggcc

SEQ ID NO: 1296613 - RNA, 20 nt, Human
aagagaaagggaauucuaaa

SEQ ID NO: 1296614 - RNA, 18 nt, Human
aagccggcgccgggcagc

SEQ ID NO: 1296615 - RNA, 20 nt, Human
aagggacagaggaggaccca

SEQ ID NO: 1296616 - RNA, 23 nt, Human
aaggggagggaaagagagaggga

SEQ ID NO: 1296617 - RNA, 23 nt, Human
acccucggccggcccccagcccu

SEQ ID NO: 1296618 - RNA, 20 nt, Human
agaggaaggcagggggaggg

SEQ ID NO: 1296619 - RNA, 19 nt, Human
agagggaaggacgcagggc

SEQ ID NO: 1296620 - RNA, 21 nt, Human
agagggacugggucccaaggc

SEQ ID NO: 1296621 - RNA, 23 nt, Human
aggacgcagggccagggugggga

SEQ ID NO: 1296622 - RNA, 28 nt, Human
aggcagggggagggucagaaggucgacc

SEQ ID NO: 1296623 - RNA, 21 nt, Human
aggcagggggagggucagagg

SEQ ID NO: 1296624 - RNA, 19 nt, Human
caagaccggcccuccgccc

SEQ ID NO: 1296625 - RNA, 20 nt, Human
cacgacuuggccagcagagc

SEQ ID NO: 1296626 - RNA, 24 nt, Human
caggaagggccgcacacuuuggca

SEQ ID NO: 1296627 - RNA, 18 nt, Human
caggccagucuaguacaa

SEQ ID NO: 1296628 - RNA, 24 nt, Human
ccaggccagucuaguacaaaguua

SEQ ID NO: 1296629 - RNA, 22 nt, Human
cccacgacuuggccagcagagc

SEQ ID NO: 1296630 - RNA, 26 nt, Human
cccaucucgcucgcaccacccggaag

SEQ ID NO: 1296631 - RNA, 23 nt, Human
cccuccgccccaucucgcucgca

SEQ ID NO: 1296632 - RNA, 18 nt, Human
ccgcgcccugcggccugc

SEQ ID NO: 1296633 - RNA, 18 nt, Human
ccgcgcccugcggccugc

SEQ ID NO: 1296634 - RNA, 18 nt, Human
ccuugggccagaccgcuc

SEQ ID NO: 1296635 - RNA, 18 nt, Human
cggaagccggcgccgggc

SEQ ID NO: 1296636 - RNA, 19 nt, Human
cuaguacaaaguuaaggag

SEQ ID NO: 1296637 - RNA, 26 nt, Human
cucccgaagacccucggccggccccc

SEQ ID NO: 1296638 - RNA, 20 nt, Human
gaaggcucugaguggugggg

SEQ ID NO: 1296639 - RNA, 18 nt, Human
gaagggacagaggaggac

SEQ ID NO: 1296640 - RNA, 18 nt, Human
gagaaagggaauucuaaa

SEQ ID NO: 1296641 - RNA, 23 nt, Human
gagccggggcaaaagucugggaa

SEQ ID NO: 1296642 - RNA, 21 nt, Human
gcaaaagucugggaaggggag

SEQ ID NO: 1296643 - RNA, 20 nt, Human
gcaagaggaaggcaggggga

SEQ ID NO: 1296644 - RNA, 18 nt, Human
gcaaugaagggacagagg

SEQ ID NO: 1296645 - RNA, 22 nt, Human
ggaauguaccauguuguuagca

SEQ ID NO: 1296646 - RNA, 22 nt, Human
ggaggacccacgacuuggccag

SEQ ID NO: 1296647 - RNA, 20 nt, Human
ggaggagggggcggacuacc

SEQ ID NO: 1296648 - RNA, 21 nt, Human
ggaggagggggcggacuaccc

SEQ ID NO: 1296649 - RNA, 18 nt, Human
ggaggcugcucagacugu

SEQ ID NO: 1296650 - RNA, 20 nt, Human
ggaugguggggaggaggggg

SEQ ID NO: 1296651 - RNA, 21 nt, Human
ggcccccagcccuugggccag

SEQ ID NO: 1296652 - RNA, 22 nt, Human
ggccggcccccagcccuugggc

SEQ ID NO: 1296653 - RNA, 23 nt, Human
gggaggaugguggggaggagggg

SEQ ID NO: 1296654 - RNA, 20 nt, Human
ggggagggaaagagagaggg

SEQ ID NO: 1296655 - RNA, 19 nt, Human
gguagcagcggcggacggc

SEQ ID NO: 1296656 - RNA, 18 nt, Human
guagcagcggcggacggc

SEQ ID NO: 1296657 - RNA, 24 nt, Human
uaauaaauaauaugaaacagacuu

SEQ ID NO: 1296658 - RNA, 25 nt, Human
uagggaggaugguggggaggagggg

SEQ ID NO: 1296659 - RNA, 25 nt, Human
uagggaggaugguggggaggagggg

SEQ ID NO: 1296660 - RNA, 26 nt, Human
ucccaaggcaagaggaaggcaggggg

SEQ ID NO: 1296661 - RNA, 18 nt, Human
ucccgaagacccucggcc

SEQ ID NO: 1296662 - RNA, 19 nt, Human
uccgccccaucucgcucgc

SEQ ID NO: 1296663 - RNA, 23 nt, Human
ucuccgcgcccugcggccugcuc

SEQ ID NO: 1296664 - RNA, 19 nt, Human
ucucgcucgcaccacccgg

SEQ ID NO: 1296665 - RNA, 23 nt, Human
ucugcaagaccggcccuccgccc

SEQ ID NO: 1296666 - RNA, 20 nt, Human
ugaaacagacugauaacgcu

SEQ ID NO: 1296667 - RNA, 28 nt, Human
ugaaacagacugauaacgcugagcuggg

SEQ ID NO: 1296668 - RNA, 18 nt, Human
ugggauggguggagaagg

SEQ ID NO: 1296669 - RNA, 22 nt, Human
ugggauggguggagaagggcca

SEQ ID NO: 1296670 - RNA, 20 nt, Human
uggggacaaguguuggcuuc

SEQ ID NO: 1296671 - RNA, 22 nt, Human
uggggaggagggggcggacuac

SEQ ID NO: 1296672 - RNA, 18 nt, Human
ugggucccaaggcaagag

SEQ ID NO: 1296673 - RNA, 19 nt, Human
ugggucccaaggcaagagg

SEQ ID NO: 1296674 - RNA, 18 nt, Human
uggguggagaagggccaa

SEQ ID NO: 1296675 - RNA, 21 nt, Human
uggguggagaagggccaaagu

SEQ ID NO: 1296676 - RNA, 19 nt, Human
uggugaugucaggaagggc

SEQ ID NO: 1296677 - RNA, 19 nt, Human
uguggugaugucaggaagg

SEQ ID NO: 1296678 - RNA, 22 nt, Human
aaaaaaaaaagaaaaagaaaag

SEQ ID NO: 1296679 - RNA, 23 nt, Human
aaaaagugcucugacuugaauaa

SEQ ID NO: 1296680 - RNA, 24 nt, Human
aaaagaaaaagaaaaguuugccag

SEQ ID NO: 1296681 - RNA, 19 nt, Human
aaacacacacucacgugca

SEQ ID NO: 1296682 - RNA, 26 nt, Human
aaacaggaaauacacaaaggggaccc

SEQ ID NO: 1296683 - RNA, 20 nt, Human
aaaguuugccaggccuaaag

SEQ ID NO: 1296684 - RNA, 23 nt, Human
aaauucucaugaaacuaaauucc

SEQ ID NO: 1296685 - RNA, 21 nt, Human
aagaaaaguuugccaggccua

SEQ ID NO: 1296686 - RNA, 22 nt, Human
aagcaggguucuaggccgggcg

SEQ ID NO: 1296687 - RNA, 24 nt, Human
aagcgugguggugggcaccuguag

SEQ ID NO: 1296688 - RNA, 21 nt, Human
aaugcggugaaaccccgucuc

SEQ ID NO: 1296689 - RNA, 18 nt, Human
acaccaaaaaguugucca

SEQ ID NO: 1296690 - RNA, 19 nt, Human
acacuugacacucgaaaug

SEQ ID NO: 1296691 - RNA, 20 nt, Human
accagugucaaaauaggaug

SEQ ID NO: 1296692 - RNA, 24 nt, Human
accccgucucuacuaaaaauacaa

SEQ ID NO: 1296693 - RNA, 24 nt, Human
accccgucucuccuaaaaauacaa

SEQ ID NO: 1296694 - RNA, 23 nt, Human
accuguagucccagcuacucagg

SEQ ID NO: 1296695 - RNA, 20 nt, Human
agaaaaagaaaaguuugcca

SEQ ID NO: 1296696 - RNA, 23 nt, Human
agaagauaaaaacagcucuuucc

SEQ ID NO: 1296697 - RNA, 26 nt, Human
agaggcugggagugguuaagaagaua

SEQ ID NO: 1296698 - RNA, 20 nt, Human
agccaagcgugguggugggc

SEQ ID NO: 1296699 - RNA, 22 nt, Human
agccaagcgugguggugggcac

SEQ ID NO: 1296700 - RNA, 19 nt, Human
agccugccagacaaaaacc

SEQ ID NO: 1296701 - RNA, 23 nt, Human
agccuguaaucccagaacuuugg

SEQ ID NO: 1296702 - RNA, 23 nt, Human
agcgugguggugcaugccuguaa

SEQ ID NO: 1296703 - RNA, 22 nt, Human
aggaggaguaacacaagaccug

SEQ ID NO: 1296704 - RNA, 22 nt, Human
aggaggccgaggcggguagauc

SEQ ID NO: 1296705 - RNA, 20 nt, Human
aggcaggaguuaaugcugaa

SEQ ID NO: 1296706 - RNA, 21 nt, Human
aggcaggaguuaaugcugaau

SEQ ID NO: 1296707 - RNA, 21 nt, Human
aggccgaggcggguagaucgc

SEQ ID NO: 1296708 - RNA, 21 nt, Human
aggccgaggcggguggaucac

SEQ ID NO: 1296709 - RNA, 19 nt, Human
aggccugggauuaggggcu

SEQ ID NO: 1296710 - RNA, 22 nt, Human
aggcggguagaucgccugaggu

SEQ ID NO: 1296711 - RNA, 26 nt, Human
aggcggguagaucgccugaggucagg

SEQ ID NO: 1296712 - RNA, 24 nt, Human
aggcggguggaucacgaggucagg

SEQ ID NO: 1296713 - RNA, 21 nt, Human
aggcugaggcaggaguuaaug

SEQ ID NO: 1296714 - RNA, 24 nt, Human
aguggcucaagccuguaaucccag

SEQ ID NO: 1296715 - RNA, 21 nt, Human
auacacaaagaaaaacaugcc

SEQ ID NO: 1296716 - RNA, 24 nt, Human
aucagauaguucaguauaaaccag

SEQ ID NO: 1296717 - RNA, 24 nt, Human
augaaaaacaggaaauacacaaag

SEQ ID NO: 1296718 - RNA, 22 nt, Human
caaaacuuguuucaaagcaaac

SEQ ID NO: 1296719 - RNA, 19 nt, Human
caaaauaggaugcaggaac

SEQ ID NO: 1296720 - RNA, 20 nt, Human
caaaauaggaugcaggaacu

SEQ ID NO: 1296721 - RNA, 24 nt, Human
caaagcaaacugaauucuguauau

SEQ ID NO: 1296722 - RNA, 26 nt, Human
caaccaaaacuuguuucaaagcaaac

SEQ ID NO: 1296723 - RNA, 19 nt, Human
caagaucuucuuacaacca

SEQ ID NO: 1296724 - RNA, 24 nt, Human
caagccuguaaucccagaacuuug

SEQ ID NO: 1296725 - RNA, 23 nt, Human
caaggccugggauuaggggcugg

SEQ ID NO: 1296726 - RNA, 23 nt, Human
cacaaagaaaaacaugccagagg

SEQ ID NO: 1296727 - RNA, 20 nt, Human
cacacaugcauacacauaua

SEQ ID NO: 1296728 - RNA, 31 nt, Human
cacacucacgugcacacaugcauacacauag

SEQ ID NO: 1296729 - RNA, 18 nt, Human
cacauauacacacacacc

SEQ ID NO: 1296730 - RNA, 24 nt, Human
caccuguagucccagcuacucagg

SEQ ID NO: 1296731 - RNA, 26 nt, Human
cacgugcacacaugcauacacauaua

SEQ ID NO: 1296732 - RNA, 24 nt, Human
cagaacuuugggaggccgaggcgg

SEQ ID NO: 1296733 - RNA, 22 nt, Human
cagacaaaaaccgcucaaguau

SEQ ID NO: 1296734 - RNA, 31 nt, Human
cagacaaaaaccgcucaaguauuuauuagaa

SEQ ID NO: 1296735 - RNA, 22 nt, Human
cagcuacucaggaggccgaggc

SEQ ID NO: 1296736 - RNA, 24 nt, Human
cagcuacucaggaggccgaggcgg

SEQ ID NO: 1296737 - RNA, 24 nt, Human
cagcuacuugggaggcugaggcag

SEQ ID NO: 1296738 - RNA, 25 nt, Human
caguuauaaaaaaaaaaaagaaaaa

SEQ ID NO: 1296739 - RNA, 31 nt, Human
cauacacauauacacacacaccccugagcag

SEQ ID NO: 1296740 - RNA, 24 nt, Human
cauacaguguuuauuaguugucag

SEQ ID NO: 1296741 - RNA, 18 nt, Human
caugccagagguaggugc

SEQ ID NO: 1296742 - RNA, 24 nt, Human
caugccuguaaucccagcuacuug

SEQ ID NO: 1296743 - RNA, 20 nt, Human
cauggucccuuggggaauca

SEQ ID NO: 1296744 - RNA, 18 nt, Human
ccccacagcucaccccag

SEQ ID NO: 1296745 - RNA, 19 nt, Human
ccgcgucccgcgcucggga

SEQ ID NO: 1296746 - RNA, 22 nt, Human
ccuguaaucccagaacuuuggg

SEQ ID NO: 1296747 - RNA, 21 nt, Human
ccuguaaucccagcuacuugg

SEQ ID NO: 1296748 - RNA, 22 nt, Human
ccuguaaucccagcuacuuggg

SEQ ID NO: 1296749 - RNA, 21 nt, Human
ccuguagucccagcuacucag

SEQ ID NO: 1296750 - RNA, 21 nt, Human
ccuuguaacuggccuccccca

SEQ ID NO: 1296751 - RNA, 26 nt, Human
cgaggcggguagaucgccugagguca

SEQ ID NO: 1296752 - RNA, 24 nt, Human
cgaggcggguggaucacgagguca

SEQ ID NO: 1296753 - RNA, 23 nt, Human
cgccugaggucaggaguucaaga

SEQ ID NO: 1296754 - RNA, 24 nt, Human
cggguagaucgccugaggucagga

SEQ ID NO: 1296755 - RNA, 22 nt, Human
cuacaguguguacaccaaggcc

SEQ ID NO: 1296756 - RNA, 26 nt, Human
cuaggccgggcgcaguggcucaagcc

SEQ ID NO: 1296757 - RNA, 24 nt, Human
cucaagccuguaaucccagaacuu

SEQ ID NO: 1296758 - RNA, 18 nt, Human
cucaggaggccgaggcgg

SEQ ID NO: 1296759 - RNA, 20 nt, Human
cucccccacagcucacccca

SEQ ID NO: 1296760 - RNA, 21 nt, Human
cucccccacagcucaccccag

SEQ ID NO: 1296761 - RNA, 22 nt, Human
cugaagauucaucuuuuaucuu

SEQ ID NO: 1296762 - RNA, 25 nt, Human
cugaagauucaucuuuuaucuuuug

SEQ ID NO: 1296763 - RNA, 22 nt, Human
gaaaaacaggaaauacacaaag

SEQ ID NO: 1296764 - RNA, 22 nt, Human
gaaaaguuugccaggccuaaag

SEQ ID NO: 1296765 - RNA, 22 nt, Human
gaaacacacacucacgugcaca

SEQ ID NO: 1296766 - RNA, 26 nt, Human
gaaauacacaaagaaaaacaugccag

SEQ ID NO: 1296767 - RNA, 21 nt, Human
gaagaguagaggcugggagug

SEQ ID NO: 1296768 - RNA, 19 nt, Human
gagcgugguggugcaugcc

SEQ ID NO: 1296769 - RNA, 22 nt, Human
gaggaggaguaacacaagaccu

SEQ ID NO: 1296770 - RNA, 23 nt, Human
gaucgccugaggucaggaguuca

SEQ ID NO: 1296771 - RNA, 24 nt, Human
gaucgccugaggucaggaguucaa

SEQ ID NO: 1296772 - RNA, 19 nt, Human
gaugcaggaacuggaaaaa

SEQ ID NO: 1296773 - RNA, 24 nt, Human
gccugaggucaggaguucaagacc

SEQ ID NO: 1296774 - RNA, 20 nt, Human
gccuguaaucccagcuacuu

SEQ ID NO: 1296775 - RNA, 24 nt, Human
gcgucgcuucgcccuccuccccca

SEQ ID NO: 1296776 - RNA, 19 nt, Human
gcuaaugcggugaaacccc

SEQ ID NO: 1296777 - RNA, 24 nt, Human
gcuaaugcggugaaaccccgucuc

SEQ ID NO: 1296778 - RNA, 24 nt, Human
ggaaaaagaaacacacacucacgu

SEQ ID NO: 1296779 - RNA, 21 nt, Human
ggaggccgaggcggguagauc

SEQ ID NO: 1296780 - RNA, 22 nt, Human
ggauuaggggcugggaagagua

SEQ ID NO: 1296781 - RNA, 23 nt, Human
ggcgcaguggcucaagccuguaa

SEQ ID NO: 1296782 - RNA, 21 nt, Human
ggcugggaagaguagaggcug

SEQ ID NO: 1296783 - RNA, 20 nt, Human
gggcaccuguagucccagcu

SEQ ID NO: 1296784 - RNA, 22 nt, Human
ggguucuaggccgggcgcagug

SEQ ID NO: 1296785 - RNA, 21 nt, Human
ggugcaugccuguaaucccag

SEQ ID NO: 1296786 - RNA, 21 nt, Human
gguggaucacgaggucaggag

SEQ ID NO: 1296787 - RNA, 24 nt, Human
gguggugcaugccuguaaucccag

SEQ ID NO: 1296788 - RNA, 24 nt, Human
gguggugggcaccuguagucccag

SEQ ID NO: 1296789 - RNA, 23 nt, Human
guguauaugaauauguacacaua

SEQ ID NO: 1296790 - RNA, 22 nt, Human
uaaaaaaaaaaaagaaaaagaa

SEQ ID NO: 1296791 - RNA, 22 nt, Human
uaaaaagcguauguguugaaaa

SEQ ID NO: 1296792 - RNA, 19 nt, Human
uaacacaagaccuguaaac

SEQ ID NO: 1296793 - RNA, 22 nt, Human
uaacuagauuauuuccacugag

SEQ ID NO: 1296794 - RNA, 19 nt, Human
uaagccaagcgugguggug

SEQ ID NO: 1296795 - RNA, 22 nt, Human
uaaugcggugaaaccccgucuc

SEQ ID NO: 1296796 - RNA, 25 nt, Human
uacaaaagucauaaaaguacaaacc

SEQ ID NO: 1296797 - RNA, 31 nt, Human
uacacauauacacacacaccccugagcauag

SEQ ID NO: 1296798 - RNA, 20 nt, Human
uacaguaaauacuuugaagu

SEQ ID NO: 1296799 - RNA, 23 nt, Human
uacuuugaaguauauuuuuaugg

SEQ ID NO: 1296800 - RNA, 24 nt, Human
uagaucgccugaggucaggaguuc

SEQ ID NO: 1296801 - RNA, 24 nt, Human
uaggccgggcgcaguggcucaagc

SEQ ID NO: 1296802 - RNA, 24 nt, Human
uaggggcugggaagaguagaggcu

SEQ ID NO: 1296803 - RNA, 18 nt, Human
uagugauaccccgucucu

SEQ ID NO: 1296804 - RNA, 21 nt, Human
uauaauaaaauuuucaacaga

SEQ ID NO: 1296805 - RNA, 22 nt, Human
uauggcacagcaauaauauucc

SEQ ID NO: 1296806 - RNA, 20 nt, Human
uauugcuauuuaaaaaaaag

SEQ ID NO: 1296807 - RNA, 18 nt, Human
ucacgaggucaggagauc

SEQ ID NO: 1296808 - RNA, 24 nt, Human
ucacgaggucaggagaucgagacc

SEQ ID NO: 1296809 - RNA, 23 nt, Human
ucgccugaggucaggaguucaag

SEQ ID NO: 1296810 - RNA, 21 nt, Human
ucucuacuaaaaauacaaaaa

SEQ ID NO: 1296811 - RNA, 21 nt, Human
ugaaaaacaggaaauacacaa

SEQ ID NO: 1296812 - RNA, 23 nt, Human
ugaaaccccgucucuccuaaaaa

SEQ ID NO: 1296813 - RNA, 24 nt, Human
ugacaccaaaaaguuguccaucau

SEQ ID NO: 1296814 - RNA, 18 nt, Human
ugacauggaggcgggucu

SEQ ID NO: 1296815 - RNA, 22 nt, Human
ugaggcaggaguuaaugcugaa

SEQ ID NO: 1296816 - RNA, 24 nt, Human
ugaggcaggaguuaaugcugaauu

SEQ ID NO: 1296817 - RNA, 22 nt, Human
ugcacacaugcauacacauaua

SEQ ID NO: 1296818 - RNA, 25 nt, Human
ugcacacaugcauacacauauacac

SEQ ID NO: 1296819 - RNA, 22 nt, Human
ugcaggaacuggaaaaagaaac

SEQ ID NO: 1296820 - RNA, 25 nt, Human
ugcauacacauauacacacacaccc

SEQ ID NO: 1296821 - RNA, 25 nt, Human
ugcauacacauauacacacacaccc

SEQ ID NO: 1296822 - RNA, 23 nt, Human
ugccucuggguccuuucaggugu

SEQ ID NO: 1296823 - RNA, 23 nt, Human
ugccuguaaucccagcuacuugg

SEQ ID NO: 1296824 - RNA, 24 nt, Human
ugccuguaaucccagcuacuuggg

SEQ ID NO: 1296825 - RNA, 23 nt, Human
uggaaaaagaaacacacacucac

SEQ ID NO: 1296826 - RNA, 21 nt, Human
uggaaaaauaauuaaagcuaa

SEQ ID NO: 1296827 - RNA, 20 nt, Human
uggccucccccacagcucac

SEQ ID NO: 1296828 - RNA, 21 nt, Human
uggcucaagccuguaauccca

SEQ ID NO: 1296829 - RNA, 22 nt, Human
uggcucaagccuguaaucccag

SEQ ID NO: 1296830 - RNA, 23 nt, Human
ugggaggccgaggcggguggauc

SEQ ID NO: 1296831 - RNA, 24 nt, Human
ugggaggccgaggcggguggauca

SEQ ID NO: 1296832 - RNA, 19 nt, Human
ugggaggcugaggcaggag

SEQ ID NO: 1296833 - RNA, 19 nt, Human
ugggaggcugaggcaggag

SEQ ID NO: 1296834 - RNA, 21 nt, Human
uggugcaugccuguaauccca

SEQ ID NO: 1296835 - RNA, 22 nt, Human
uggugcaugccuguaaucccag

SEQ ID NO: 1296836 - RNA, 22 nt, Human
uggugggcaccuguagucccag

SEQ ID NO: 1296837 - RNA, 24 nt, Human
ugguggugcaugccuguaauccca

SEQ ID NO: 1296838 - RNA, 24 nt, Human
ugguggugggcaccuguaguccca

SEQ ID NO: 1296839 - RNA, 20 nt, Human
uguacacauacaguguuuau

SEQ ID NO: 1296840 - RNA, 18 nt, Human
uuaaagcaaaaaaguaug

SEQ ID NO: 1296841 - RNA, 22 nt, Human
uuaccacugaagauucaucuuu

SEQ ID NO: 1296842 - RNA, 24 nt, Human
uuagucgagcgugguggugcaugc

SEQ ID NO: 1296843 - RNA, 24 nt, Human
uuaguugucaguaaaaauucucau

SEQ ID NO: 1296844 - RNA, 25 nt, Human
uucaaccaaaacuuguuucaaagca

SEQ ID NO: 1296845 - RNA, 25 nt, Human
uugggaggccgaggcggguggauca

SEQ ID NO: 1296846 - RNA, 20 nt, Human
uugggaggcugaggcaggag

SEQ ID NO: 1296847 - RNA, 22 nt, Human
uuguaacuggccucccccacag

SEQ ID NO: 1296848 - RNA, 19 nt, Human
uuuaacuccgcuuugguag

SEQ ID NO: 1296849 - RNA, 23 nt, Human
aaauauucuuccaggucguuucc

SEQ ID NO: 1296850 - RNA, 19 nt, Human
aagaggccuggggcguccu

SEQ ID NO: 1296851 - RNA, 19 nt, Human
aauaauugccaucuuuaca

SEQ ID NO: 1296852 - RNA, 24 nt, Human
accccaguuccccuguccccccag

SEQ ID NO: 1296853 - RNA, 23 nt, Human
agaaacacaaauaaucuaaaaaa

SEQ ID NO: 1296854 - RNA, 20 nt, Human
aggguccagucuagaucuuc

SEQ ID NO: 1296855 - RNA, 19 nt, Human
aucuguuugguuguacuag

SEQ ID NO: 1296856 - RNA, 21 nt, Human
caaaccaggguccagucuaga

SEQ ID NO: 1296857 - RNA, 19 nt, Human
caggguccagucuagaucu

SEQ ID NO: 1296858 - RNA, 19 nt, Human
ccccuguccccccagcucc

SEQ ID NO: 1296859 - RNA, 18 nt, Human
cccugccccagccucucc

SEQ ID NO: 1296860 - RNA, 19 nt, Human
cccugccccagccucuccc

SEQ ID NO: 1296861 - RNA, 22 nt, Human
cccuggccaagaggccuggggc

SEQ ID NO: 1296862 - RNA, 24 nt, Human
cguccuccggaccccaguuccccu

SEQ ID NO: 1296863 - RNA, 20 nt, Human
cuaaaaaauaaaagcaccaa

SEQ ID NO: 1296864 - RNA, 19 nt, Human
gaguaugugugugugugug

SEQ ID NO: 1296865 - RNA, 21 nt, Human
gcccugccccagccucuccca

SEQ ID NO: 1296866 - RNA, 21 nt, Human
gggaggcccuggccaagaggc

SEQ ID NO: 1296867 - RNA, 19 nt, Human
gucccugagcgcagugucu

SEQ ID NO: 1296868 - RNA, 20 nt, Human
uccccuguccccccagcucc

SEQ ID NO: 1296869 - RNA, 23 nt, Human
ucccugagcgcagugucucucca

SEQ ID NO: 1296870 - RNA, 20 nt, Human
ucuccaguuguuccagaaau

SEQ ID NO: 1296871 - RNA, 19 nt, Human
ucucccaucaagccguccc

SEQ ID NO: 1296872 - RNA, 29 nt, Human
ugugugagaguauguguguguguguguaa

SEQ ID NO: 1296873 - RNA, 22 nt, Human
uguguguguguauuugcuuuuc

SEQ ID NO: 1296874 - RNA, 20 nt, Human
uucacguugcaucugguuau

SEQ ID NO: 1296875 - RNA, 21 nt, Human
uuccugugugagaguaugugu

SEQ ID NO: 1296876 - RNA, 22 nt, Human
agagcaucucccuugaagccuc

SEQ ID NO: 1296877 - RNA, 22 nt, Human
aguaguuuugaggcauguucuu

SEQ ID NO: 1296878 - RNA, 25 nt, Human
aucucccuugaagccucacucacca

SEQ ID NO: 1296879 - RNA, 20 nt, Human
augcugcucaugaccaggag

SEQ ID NO: 1296880 - RNA, 20 nt, Human
caaagagcaucucccuugaa

SEQ ID NO: 1296881 - RNA, 20 nt, Human
cacccugucucuuuauuaaa

SEQ ID NO: 1296882 - RNA, 22 nt, Human
caggacaaagagcaucucccuu

SEQ ID NO: 1296883 - RNA, 24 nt, Human
cccacaaacggaagugguuaacga

SEQ ID NO: 1296884 - RNA, 18 nt, Human
ccugugaugaauccagaa

SEQ ID NO: 1296885 - RNA, 18 nt, Human
cucccuugaagccucacu

SEQ ID NO: 1296886 - RNA, 18 nt, Human
cugaggcuggaggguccu

SEQ ID NO: 1296887 - RNA, 20 nt, Human
cuugcuggcugaggcuggag

SEQ ID NO: 1296888 - RNA, 19 nt, Human
ugaccaggagguccccaca

SEQ ID NO: 1296889 - RNA, 20 nt, Human
ugaccaggagguccccacaa

SEQ ID NO: 1296890 - RNA, 23 nt, Human
ugaccaggagguccccacaaacg

SEQ ID NO: 1296891 - RNA, 18 nt, Human
uggcaggagguaugccuu

SEQ ID NO: 1296892 - RNA, 19 nt, Human
uugaaggcuucgggaugau

SEQ ID NO: 1296893 - RNA, 19 nt, Human
uugcuggcugaggcuggag

SEQ ID NO: 1296894 - RNA, 20 nt, Human
agcacacagacaacccagca

SEQ ID NO: 1296895 - RNA, 19 nt, Human
aaacaaaagcagaaaggga

SEQ ID NO: 1296896 - RNA, 22 nt, Human
aaacaaaagcagaaagggacua

SEQ ID NO: 1296897 - RNA, 24 nt, Human
aaacaucuuuuuuggcuagaaaca

SEQ ID NO: 1296898 - RNA, 24 nt, Human
aagaaccccuuaaacguaaguuga

SEQ ID NO: 1296899 - RNA, 20 nt, Human
aagcagaaagggacuaucug

SEQ ID NO: 1296900 - RNA, 19 nt, Human
aggugugaagauccuugaa

SEQ ID NO: 1296901 - RNA, 21 nt, Human
aggugugaagauccuugaacu

SEQ ID NO: 1296902 - RNA, 18 nt, Human
cacuggaucuucuuuccu

SEQ ID NO: 1296903 - RNA, 22 nt, Human
ccauuuguggacuaacuaucuc

SEQ ID NO: 1296904 - RNA, 19 nt, Human
ccugccgaagaaggaugaa

SEQ ID NO: 1296905 - RNA, 23 nt, Human
cuagaaacaaaagcagaaaggga

SEQ ID NO: 1296906 - RNA, 18 nt, Human
gaagaaggaugaagugcu

SEQ ID NO: 1296907 - RNA, 24 nt, Human
gggguaguugcagguguaggccua

SEQ ID NO: 1296908 - RNA, 18 nt, Human
gugaagauccuugaacug

SEQ ID NO: 1296909 - RNA, 23 nt, Human
uagaaacaaaagcagaaagggac

SEQ ID NO: 1296910 - RNA, 18 nt, Human
ucacuggaucuucuuucc

SEQ ID NO: 1296911 - RNA, 24 nt, Human
uccaacaccacuuaucaugucaga

SEQ ID NO: 1296912 - RNA, 22 nt, Human
ugaaacugggguaguugcaggu

SEQ ID NO: 1296913 - RNA, 25 nt, Human
ugcaguaagaggugcuuuggguccu

SEQ ID NO: 1296914 - RNA, 26 nt, Human
ugguguuugcagaagagaugucuccc

SEQ ID NO: 1296915 - RNA, 19 nt, Human
ugugaagauccuugaacug

SEQ ID NO: 1296916 - RNA, 23 nt, Human
ugugaagauccuugaacuggggg

SEQ ID NO: 1296917 - RNA, 23 nt, Human
uguguuuauggauugacauucca

SEQ ID NO: 1296918 - RNA, 24 nt, Human
uguguuuauggauugacauuccau

SEQ ID NO: 1296919 - RNA, 25 nt, Human
uucauugucucaguuugucuggugu

SEQ ID NO: 1296920 - RNA, 21 nt, Human
uuggguccugcggaaguucau

SEQ ID NO: 1296921 - RNA, 19 nt, Human
uuggugccugccgaagaag

SEQ ID NO: 1296922 - RNA, 18 nt, Human
acgcgcugcucggcgcag

SEQ ID NO: 1296923 - RNA, 22 nt, Human
aggggugaccgggcggcggcgg

SEQ ID NO: 1296924 - RNA, 22 nt, Human
cacacacgcgcugcucggcgca

SEQ ID NO: 1296925 - RNA, 24 nt, Human
cacacgcgcugcucggcgcagccg

SEQ ID NO: 1296926 - RNA, 20 nt, Human
ccuccgggacacccagcgag

SEQ ID NO: 1296927 - RNA, 19 nt, Human
cgggacacccagcgagagg

SEQ ID NO: 1296928 - RNA, 19 nt, Human
cugcucggcgcagccgucu

SEQ ID NO: 1296929 - RNA, 21 nt, Human
gagaggggugaccgggcggcg

SEQ ID NO: 1296930 - RNA, 25 nt, Human
ggacuucugcacacacgcgcugcuc

SEQ ID NO: 1296931 - RNA, 23 nt, Human
aaagcggugagguuugaggaggg

SEQ ID NO: 1296932 - RNA, 22 nt, Human
accccagcuccagcccuggucu

SEQ ID NO: 1296933 - RNA, 21 nt, Human
accuucauaaggugguauggg

SEQ ID NO: 1296934 - RNA, 19 nt, Human
acgccuccacccgguccug

SEQ ID NO: 1296935 - RNA, 25 nt, Human
acuggucccgucuccucgcagaacc

SEQ ID NO: 1296936 - RNA, 22 nt, Human
agaggaaggagggggaucagag

SEQ ID NO: 1296937 - RNA, 18 nt, Human
aggaggggcagaagcagg

SEQ ID NO: 1296938 - RNA, 20 nt, Human
aggcagagaagagauggagu

SEQ ID NO: 1296939 - RNA, 27 nt, Human
aggcagagaagagauggagucuuaggg

SEQ ID NO: 1296940 - RNA, 19 nt, Human
agggggagggaggagagga

SEQ ID NO: 1296941 - RNA, 23 nt, Human
cagcuccagcccuggucuugucu

SEQ ID NO: 1296942 - RNA, 19 nt, Human
ccagaggcagagaagagau

SEQ ID NO: 1296943 - RNA, 21 nt, Human
ccagcuccagcccuggucuug

SEQ ID NO: 1296944 - RNA, 21 nt, Human
ccaggagggccagaggcagag

SEQ ID NO: 1296945 - RNA, 22 nt, Human
ccagggccuagaggugcuuccu

SEQ ID NO: 1296946 - RNA, 24 nt, Human
ccagggugagcgagggguccaggg

SEQ ID NO: 1296947 - RNA, 20 nt, Human
cccccuccccucuuccaccc

SEQ ID NO: 1296948 - RNA, 22 nt, Human
cccucuuccaccccagcuccag

SEQ ID NO: 1296949 - RNA, 24 nt, Human
cccucuuccccacgacagaagaag

SEQ ID NO: 1296950 - RNA, 20 nt, Human
ccuccacccgguccugccug

SEQ ID NO: 1296951 - RNA, 28 nt, Human
cuccccucuuccaccccagcuccagccc

SEQ ID NO: 1296952 - RNA, 21 nt, Human
cucguagagacgccuccaccc

SEQ ID NO: 1296953 - RNA, 18 nt, Human
cucuuccaccccagcucc

SEQ ID NO: 1296954 - RNA, 20 nt, Human
cuggucuugucuuuucaucc

SEQ ID NO: 1296955 - RNA, 21 nt, Human
cuuccaccccagcuccagccc

SEQ ID NO: 1296956 - RNA, 21 nt, Human
cuuuuuuuuuuuuuuccaggg

SEQ ID NO: 1296957 - RNA, 24 nt, Human
gaagagccaggagggccagaggca

SEQ ID NO: 1296958 - RNA, 19 nt, Human
gagaagagauggagucuua

SEQ ID NO: 1296959 - RNA, 24 nt, Human
gagaggaaggagggggaucagagc

SEQ ID NO: 1296960 - RNA, 18 nt, Human
gaggaaggagggggauca

SEQ ID NO: 1296961 - RNA, 19 nt, Human
gaggagaggaaggaggggg

SEQ ID NO: 1296962 - RNA, 21 nt, Human
gaggagaggaaggagggggau

SEQ ID NO: 1296963 - RNA, 19 nt, Human
gcccuggucuugucuuuuc

SEQ ID NO: 1296964 - RNA, 20 nt, Human
gcccuggucuugucuuuuca

SEQ ID NO: 1296965 - RNA, 22 nt, Human
gcccuggucuugucuuuucauc

SEQ ID NO: 1296966 - RNA, 22 nt, Human
gccuccacccgguccugccugu

SEQ ID NO: 1296967 - RNA, 20 nt, Human
ggaaugcagccagugucccc

SEQ ID NO: 1296968 - RNA, 18 nt, Human
ggagaggaaggaggggga

SEQ ID NO: 1296969 - RNA, 23 nt, Human
ggagggaggagaggaaggagggg

SEQ ID NO: 1296970 - RNA, 24 nt, Human
ggccuagaggugcuuccugggggc

SEQ ID NO: 1296971 - RNA, 18 nt, Human
ggcgggggaaugcagcca

SEQ ID NO: 1296972 - RNA, 19 nt, Human
gggcagaagcagggccggc

SEQ ID NO: 1296973 - RNA, 20 nt, Human
gggcagaagcagggccggca

SEQ ID NO: 1296974 - RNA, 19 nt, Human
gggccagggugagcgaggg

SEQ ID NO: 1296975 - RNA, 19 nt, Human
ggggagggaggagaggaag

SEQ ID NO: 1296976 - RNA, 24 nt, Human
ggggagggaggagaggaaggaggg

SEQ ID NO: 1296977 - RNA, 21 nt, Human
gguaugggggguuggggucag

SEQ ID NO: 1296978 - RNA, 24 nt, Human
gugucccccuccccucuuccaccc

SEQ ID NO: 1296979 - RNA, 19 nt, Human
uaugggggguuggggucag

SEQ ID NO: 1296980 - RNA, 19 nt, Human
ucacuggucccgucuccuc

SEQ ID NO: 1296981 - RNA, 21 nt, Human
ucaggggaaaaagucaagggg

SEQ ID NO: 1296982 - RNA, 19 nt, Human
uccaccccagcuccagccc

SEQ ID NO: 1296983 - RNA, 22 nt, Human
uccagggccuagaggugcuucc

SEQ ID NO: 1296984 - RNA, 24 nt, Human
uccagggggagggaggagaggaag

SEQ ID NO: 1296985 - RNA, 21 nt, Human
ucccccuccccucuuccaccc

SEQ ID NO: 1296986 - RNA, 22 nt, Human
ucccccuccccucuuccacccc

SEQ ID NO: 1296987 - RNA, 24 nt, Human
ugcagccagugucccccuccccuc

SEQ ID NO: 1296988 - RNA, 23 nt, Human
ugcucguagagacgccuccaccc

SEQ ID NO: 1296989 - RNA, 18 nt, Human
ugucaggggaaaaaguca

SEQ ID NO: 1296990 - RNA, 23 nt, Human
ugucuuuucaucccucuucccca

SEQ ID NO: 1296991 - RNA, 22 nt, Human
uuucuuuuccuuuuuuuuuuuu

SEQ ID NO: 1296992 - RNA, 24 nt, Human
uuuuuuuuuuccagggggagggag

SEQ ID NO: 1296993 - RNA, 28 nt, Human
aagccaguucuggaccagcuugccgcug

SEQ ID NO: 1296994 - RNA, 23 nt, Human
gugggcugaaugaacugcuuucu

SEQ ID NO: 1296995 - RNA, 20 nt, Human
aacaacuuuucacaagccga

SEQ ID NO: 1296996 - RNA, 20 nt, Human
caaacuguauccagcuuuau

SEQ ID NO: 1296997 - RNA, 18 nt, Human
cagcuuuauuaaagauac

SEQ ID NO: 1296998 - RNA, 22 nt, Human
ccacuguaaaacccaaugaagu

SEQ ID NO: 1296999 - RNA, 27 nt, Human
cucgaaauggaaccacugcucuuuuga

SEQ ID NO: 1297000 - RNA, 21 nt, Human
ggcaucacuggaaaguccaga

SEQ ID NO: 1297001 - RNA, 21 nt, Human
gggcagacagucguuaacagu

SEQ ID NO: 1297002 - RNA, 20 nt, Human
ucaggaagugaaaugaaagu

SEQ ID NO: 1297003 - RNA, 21 nt, Human
ucaggcaggacaugggcagac

SEQ ID NO: 1297004 - RNA, 20 nt, Human
ugccaaaaaucagaaagcca

SEQ ID NO: 1297005 - RNA, 22 nt, Human
ugccaaaaaucagaaagccacu

SEQ ID NO: 1297006 - RNA, 24 nt, Human
ugccaaaaaucagaaagccacugu

SEQ ID NO: 1297007 - RNA, 23 nt, Human
uggaaccacugcucuuuugacag

SEQ ID NO: 1297008 - RNA, 18 nt, Human
uggcaucacuggaaaguc

SEQ ID NO: 1297009 - RNA, 22 nt, Human
uucccuucuucaguggacugcc

SEQ ID NO: 1297010 - RNA, 29 nt, Human
uuuagagugaggguugacauuucacauuu

SEQ ID NO: 1297011 - RNA, 23 nt, Human
agggaaguguuggaccauuucca

SEQ ID NO: 1297012 - RNA, 26 nt, Human
ccagcccacuucccugugacaucacc

SEQ ID NO: 1297013 - RNA, 21 nt, Human
cccacuucccugugacaucac

SEQ ID NO: 1297014 - RNA, 18 nt, Human
cccagcccacuucccugu

SEQ ID NO: 1297015 - RNA, 21 nt, Human
ucccugugacaucaccuaccu

SEQ ID NO: 1297016 - RNA, 20 nt, Human
uggagagggaaguguuggac

SEQ ID NO: 1297017 - RNA, 21 nt, Human
ugugacaucaccuaccugguc

SEQ ID NO: 1297018 - RNA, 22 nt, Human
uuggagagggaaguguuggacc

SEQ ID NO: 1297019 - RNA, 20 nt, Human
aagcccaaguccaggagcuu

SEQ ID NO: 1297020 - RNA, 24 nt, Human
aggcuguuacuugcugcuggggcg

SEQ ID NO: 1297021 - RNA, 20 nt, Human
cagcugcuaagcccaagucc

SEQ ID NO: 1297022 - RNA, 19 nt, Human
ccugugagcggguggggau

SEQ ID NO: 1297023 - RNA, 22 nt, Human
ccugugagcggguggggauggg

SEQ ID NO: 1297024 - RNA, 18 nt, Human
ccuuguccugagcugcuc

SEQ ID NO: 1297025 - RNA, 24 nt, Human
ccuuguccugagcugcucuuucuc

SEQ ID NO: 1297026 - RNA, 21 nt, Human
cucaggaaacugauggcugga

SEQ ID NO: 1297027 - RNA, 23 nt, Human
cugccaggcaggcuguuacuugc

SEQ ID NO: 1297028 - RNA, 20 nt, Human
gcuggauacuccuugcucag

SEQ ID NO: 1297029 - RNA, 18 nt, Human
gcuguuacuugcugcugg

SEQ ID NO: 1297030 - RNA, 20 nt, Human
guccugagcugcucuuucuc

SEQ ID NO: 1297031 - RNA, 18 nt, Human
gugcaaggcucgcugcca

SEQ ID NO: 1297032 - RNA, 20 nt, Human
ugccugugagcgggugggga

SEQ ID NO: 1297033 - RNA, 23 nt, Human
ugccugugagcggguggggaugg

SEQ ID NO: 1297034 - RNA, 27 nt, Human
ugcuggggcgguguccuuguccugagc

SEQ ID NO: 1297035 - RNA, 21 nt, Human
uguccuuguccugagcugcuc

SEQ ID NO: 1297036 - RNA, 22 nt, Human
uguccuuguccugagcugcucu

SEQ ID NO: 1297037 - RNA, 20 nt, Human
ugugagcggguggggauggg

SEQ ID NO: 1297038 - RNA, 26 nt, Human
ugugagcggguggggaugggcccgug

SEQ ID NO: 1297039 - RNA, 23 nt, Human
uguuauggggaaaaggcaagagg

SEQ ID NO: 1297040 - RNA, 21 nt, Human
agaggucuuaaaacccugcuc

SEQ ID NO: 1297041 - RNA, 18 nt, Human
caaggacucaucauuuuu

SEQ ID NO: 1297042 - RNA, 19 nt, Human
caggugcagugaaaagagg

SEQ ID NO: 1297043 - RNA, 25 nt, Human
cccugcuccaaguuuccaguugggg

SEQ ID NO: 1297044 - RNA, 24 nt, Human
uaacuucuauguuccaggugcccc

SEQ ID NO: 1297045 - RNA, 20 nt, Human
ucagcagagggcacaacuga

SEQ ID NO: 1297046 - RNA, 19 nt, Human
uucaaagugagaaagcaga

SEQ ID NO: 1297047 - RNA, 22 nt, Human
aaaaaaaaaaaaaagcccagag

SEQ ID NO: 1297048 - RNA, 29 nt, Human
aaaaaaaaaaaagcccagaguucaaaaga

SEQ ID NO: 1297049 - RNA, 19 nt, Human
aaaaaaaaaaagcccagag

SEQ ID NO: 1297050 - RNA, 26 nt, Human
aaaaaaaaaaagcccagaguucaagg

SEQ ID NO: 1297051 - RNA, 20 nt, Human
aaaaaaagaaaaaauauaua

SEQ ID NO: 1297052 - RNA, 23 nt, Human
aaaaaagcccagaguucaaggcu

SEQ ID NO: 1297053 - RNA, 24 nt, Human
aaucgcuugauugggggaggugga

SEQ ID NO: 1297054 - RNA, 18 nt, Human
aauuagccaggcauggug

SEQ ID NO: 1297055 - RNA, 24 nt, Human
acuauauucauacuuggaagcacu

SEQ ID NO: 1297056 - RNA, 24 nt, Human
acugcacuccagccuggacgacag

SEQ ID NO: 1297057 - RNA, 26 nt, Human
acugcacuccagccuggacgacagag

SEQ ID NO: 1297058 - RNA, 18 nt, Human
acugcauuccagccuggg

SEQ ID NO: 1297059 - RNA, 18 nt, Human
acugcauuccagccuggg

SEQ ID NO: 1297060 - RNA, 22 nt, Human
agaaaaaaaaaugcagauagag

SEQ ID NO: 1297061 - RNA, 18 nt, Human
agccaggcaugguggugc

SEQ ID NO: 1297062 - RNA, 24 nt, Human
agcccagaguucaaggcugcagug

SEQ ID NO: 1297063 - RNA, 25 nt, Human
agccuggacgacagagcugagacuc

SEQ ID NO: 1297064 - RNA, 22 nt, Human
aggcaugguggugcacaccuaa

SEQ ID NO: 1297065 - RNA, 24 nt, Human
aggcugagacaggacaaucgcuug

SEQ ID NO: 1297066 - RNA, 24 nt, Human
agguggaggcuacagugagccgag

SEQ ID NO: 1297067 - RNA, 22 nt, Human
auagagaaaacuuuuagaguca

SEQ ID NO: 1297068 - RNA, 20 nt, Human
aucucaaaaaaaaaaaaaag

SEQ ID NO: 1297069 - RNA, 22 nt, Human
aucucaaccggaaccucugacu

SEQ ID NO: 1297070 - RNA, 22 nt, Human
caaucgcuugauugggggaggu

SEQ ID NO: 1297071 - RNA, 21 nt, Human
caccuaaaaucccagcuacuc

SEQ ID NO: 1297072 - RNA, 25 nt, Human
caccuaaaaucccagcuacucugga

SEQ ID NO: 1297073 - RNA, 18 nt, Human
cacugcacuccagccugg

SEQ ID NO: 1297074 - RNA, 18 nt, Human
cacugcacuccagccugg

SEQ ID NO: 1297075 - RNA, 19 nt, Human
cacugcacuccagccugga

SEQ ID NO: 1297076 - RNA, 19 nt, Human
cacugcacuccagccugga

SEQ ID NO: 1297077 - RNA, 20 nt, Human
cacugcacuccagccuggac

SEQ ID NO: 1297078 - RNA, 21 nt, Human
cacugcacuccagccuggacg

SEQ ID NO: 1297079 - RNA, 22 nt, Human
cacugcacuccagccuggacga

SEQ ID NO: 1297080 - RNA, 23 nt, Human
cacugcacuccagccuggacgac

SEQ ID NO: 1297081 - RNA, 24 nt, Human
cacugcacuccagccuggacgaca

SEQ ID NO: 1297082 - RNA, 19 nt, Human
cacugcauuccagccuggg

SEQ ID NO: 1297083 - RNA, 19 nt, Human
cacugcauuccagccuggg

SEQ ID NO: 1297084 - RNA, 23 nt, Human
cacugcauuccagccugggagca

SEQ ID NO: 1297085 - RNA, 24 nt, Human
cacugcauuccagccugggagcaa

SEQ ID NO: 1297086 - RNA, 22 nt, Human
cagaguucaaggcugcagugcc

SEQ ID NO: 1297087 - RNA, 19 nt, Human
cagccugggagcaaaguga

SEQ ID NO: 1297088 - RNA, 20 nt, Human
cauagaaauacagaaccagu

SEQ ID NO: 1297089 - RNA, 24 nt, Human
caugagucacugcacuccagccug

SEQ ID NO: 1297090 - RNA, 19 nt, Human
ccacugcauuccagccugg

SEQ ID NO: 1297091 - RNA, 20 nt, Human
ccacugcauuccagccuggg

SEQ ID NO: 1297092 - RNA, 20 nt, Human
ccacugcauuccagccuggg

SEQ ID NO: 1297093 - RNA, 22 nt, Human
ccacugcauuccagccugggag

SEQ ID NO: 1297094 - RNA, 23 nt, Human
ccacugcauuccagccugggagc

SEQ ID NO: 1297095 - RNA, 28 nt, Human
ccucugaauagccacugcauuccagccu

SEQ ID NO: 1297096 - RNA, 21 nt, Human
cgccgcggcccggcagggggc

SEQ ID NO: 1297097 - RNA, 24 nt, Human
cucaaaaaaaaaaaaaagcccaga

SEQ ID NO: 1297098 - RNA, 26 nt, Human
cuccaucucaaaaaaaaaaaaaagcc

SEQ ID NO: 1297099 - RNA, 22 nt, Human
cuguugauaauagcugcuucuc

SEQ ID NO: 1297100 - RNA, 24 nt, Human
gaauagccacugcauuccagccug

SEQ ID NO: 1297101 - RNA, 24 nt, Human
gagacaugagucacugcacuccag

SEQ ID NO: 1297102 - RNA, 24 nt, Human
gcacuccagccuggacgacagagc

SEQ ID NO: 1297103 - RNA, 21 nt, Human
ggagguggaggcuacagugag

SEQ ID NO: 1297104 - RNA, 24 nt, Human
ggggagguggaggcuacagugagc

SEQ ID NO: 1297105 - RNA, 23 nt, Human
ggugugucucccaacuugaucuc

SEQ ID NO: 1297106 - RNA, 21 nt, Human
guggugcacaccuaaaauccc

SEQ ID NO: 1297107 - RNA, 24 nt, Human
guuacaucacaguuguccucgacu

SEQ ID NO: 1297108 - RNA, 21 nt, Human
uaaaaauacaaaaauuagcca

SEQ ID NO: 1297109 - RNA, 23 nt, Human
uaaaauagaaaaaaaaaugcaga

SEQ ID NO: 1297110 - RNA, 20 nt, Human
uagagucagauccaaacauu

SEQ ID NO: 1297111 - RNA, 23 nt, Human
ucaaaaaaaaaaaaaagcccaga

SEQ ID NO: 1297112 - RNA, 23 nt, Human
ucaaaaaaaaaaaaaagcccaga

SEQ ID NO: 1297113 - RNA, 24 nt, Human
ucaaaaaaaaaaaaaagcccagag

SEQ ID NO: 1297114 - RNA, 18 nt, Human
ucacugcacuccagccug

SEQ ID NO: 1297115 - RNA, 21 nt, Human
ucacugcacuccagccuggac

SEQ ID NO: 1297116 - RNA, 24 nt, Human
ucacugcacuccagccuggacgac

SEQ ID NO: 1297117 - RNA, 25 nt, Human
uccagccuggacgacagagcugaga

SEQ ID NO: 1297118 - RNA, 22 nt, Human
uccaucucaaaaaaaaaaaaaa

SEQ ID NO: 1297119 - RNA, 23 nt, Human
uccaucucaaaaaaaaaaaaaag

SEQ ID NO: 1297120 - RNA, 24 nt, Human
ucgcuugauugggggagguggagg

SEQ ID NO: 1297121 - RNA, 26 nt, Human
ucuccuauagagaaaacuuuuagagu

SEQ ID NO: 1297122 - RNA, 21 nt, Human
ucucuacuaaaaauacaaaaa

SEQ ID NO: 1297123 - RNA, 18 nt, Human
ucuguuuuguuuuguuug

SEQ ID NO: 1297124 - RNA, 21 nt, Human
ugaauagccacugcauuccag

SEQ ID NO: 1297125 - RNA, 19 nt, Human
ugauugggggagguggagg

SEQ ID NO: 1297126 - RNA, 21 nt, Human
ugcccaaugauuaagccucug

SEQ ID NO: 1297127 - RNA, 25 nt, Human
ugcccaaugauuaagccucugaaua

SEQ ID NO: 1297128 - RNA, 22 nt, Human
uggugcacaccuaaaaucccag

SEQ ID NO: 1297129 - RNA, 23 nt, Human
ugguggugcacaccuaaaauccc

SEQ ID NO: 1297130 - RNA, 19 nt, Human
uguauaauuggcaugcaua

SEQ ID NO: 1297131 - RNA, 21 nt, Human
uguccucgacuacagaaacag

SEQ ID NO: 1297132 - RNA, 21 nt, Human
ugucucuaaaaaaagaaaaaa

SEQ ID NO: 1297133 - RNA, 18 nt, Human
uugcugacaccgcccucg

SEQ ID NO: 1297134 - RNA, 23 nt, Human
uuuaaaaacaagauuuuccauuu

SEQ ID NO: 1297135 - RNA, 27 nt, Human
uuugcugacaccgcccucggaaguaaa

SEQ ID NO: 1297136 - RNA, 21 nt, Human
aaacacaaaugaaaacucacc

SEQ ID NO: 1297137 - RNA, 24 nt, Human
aaacucacacccacccacccccaa

SEQ ID NO: 1297138 - RNA, 21 nt, Human
aaaugaaaacucacacccacc

SEQ ID NO: 1297139 - RNA, 20 nt, Human
aacacaaaugaaaacucaca

SEQ ID NO: 1297140 - RNA, 22 nt, Human
aagcagagugccagggagugag

SEQ ID NO: 1297141 - RNA, 25 nt, Human
aagcagagugccagggagugaggag

SEQ ID NO: 1297142 - RNA, 19 nt, Human
aagcggauccugggcagcg

SEQ ID NO: 1297143 - RNA, 24 nt, Human
acacccacccacccccaagugcau

SEQ ID NO: 1297144 - RNA, 18 nt, Human
acagcgagaggccgagua

SEQ ID NO: 1297145 - RNA, 18 nt, Human
acccacccacccccaagu

SEQ ID NO: 1297146 - RNA, 19 nt, Human
acuccaccagcaggcccac

SEQ ID NO: 1297147 - RNA, 20 nt, Human
acuccaccagcaggcccacc

SEQ ID NO: 1297148 - RNA, 19 nt, Human
agaaagcagagugccaggg

SEQ ID NO: 1297149 - RNA, 22 nt, Human
agaagaaagcagagugccaggg

SEQ ID NO: 1297150 - RNA, 24 nt, Human
agaagaaagcagagugccagggag

SEQ ID NO: 1297151 - RNA, 23 nt, Human
agcacaaggaaaaccaggagaga

SEQ ID NO: 1297152 - RNA, 19 nt, Human
aggagcaggagaaacccau

SEQ ID NO: 1297153 - RNA, 20 nt, Human
auccuuucuuuuuuuuuucu

SEQ ID NO: 1297154 - RNA, 21 nt, Human
caacgguguggucagcagccc

SEQ ID NO: 1297155 - RNA, 19 nt, Human
caagucccuagcacagcga

SEQ ID NO: 1297156 - RNA, 20 nt, Human
caccagcaacggugugguca

SEQ ID NO: 1297157 - RNA, 21 nt, Human
caccagcaacgguguggucag

SEQ ID NO: 1297158 - RNA, 22 nt, Human
cacccccaagugcaugucucca

SEQ ID NO: 1297159 - RNA, 25 nt, Human
cagcaggcccacccuuccagucaag

SEQ ID NO: 1297160 - RNA, 19 nt, Human
cagcgccagccccgaggag

SEQ ID NO: 1297161 - RNA, 22 nt, Human
ccaagugcaugucuccaucacu

SEQ ID NO: 1297162 - RNA, 21 nt, Human
ccaccagcaggcccacccuuc

SEQ ID NO: 1297163 - RNA, 19 nt, Human
ccauuugaaaauauccuuu

SEQ ID NO: 1297164 - RNA, 22 nt, Human
cccaucaucgacaagggcuguc

SEQ ID NO: 1297165 - RNA, 24 nt, Human
ccccaacuccaccagcaggcccac

SEQ ID NO: 1297166 - RNA, 20 nt, Human
cccccaagugcaugucucca

SEQ ID NO: 1297167 - RNA, 18 nt, Human
ccugggcagcgccagccc

SEQ ID NO: 1297168 - RNA, 18 nt, Human
cucacacccacccacccc

SEQ ID NO: 1297169 - RNA, 21 nt, Human
cugucccaagucaauggaaag

SEQ ID NO: 1297170 - RNA, 24 nt, Human
gaaaacucacacccacccaccccc

SEQ ID NO: 1297171 - RNA, 18 nt, Human
gaaagggaaagggugggg

SEQ ID NO: 1297172 - RNA, 22 nt, Human
gaagguuggggggacccagcaa

SEQ ID NO: 1297173 - RNA, 19 nt, Human
gacaagggcugucccaagu

SEQ ID NO: 1297174 - RNA, 18 nt, Human
gagagucugccuccagga

SEQ ID NO: 1297175 - RNA, 19 nt, Human
gccgaguacgccgaggccc

SEQ ID NO: 1297176 - RNA, 20 nt, Human
ggacucagagagucagacag

SEQ ID NO: 1297177 - RNA, 18 nt, Human
ggaggagcaggagaaacc

SEQ ID NO: 1297178 - RNA, 22 nt, Human
ggauccugggcagcgccagccc

SEQ ID NO: 1297179 - RNA, 18 nt, Human
uagaagugacggagagaa

SEQ ID NO: 1297180 - RNA, 20 nt, Human
ucacacccacccacccccaa

SEQ ID NO: 1297181 - RNA, 23 nt, Human
ucacacccacccacccccaagug

SEQ ID NO: 1297182 - RNA, 22 nt, Human
ucuccauugguggccccagcuc

SEQ ID NO: 1297183 - RNA, 22 nt, Human
ucugaauaaaguuggaaaaaga

SEQ ID NO: 1297184 - RNA, 19 nt, Human
ucugccucguauguucaga

SEQ ID NO: 1297185 - RNA, 20 nt, Human
ugaaaauauccuuucuuuuu

SEQ ID NO: 1297186 - RNA, 18 nt, Human
ugacggagagaagacuug

SEQ ID NO: 1297187 - RNA, 18 nt, Human
ugacggagagaagacuug

SEQ ID NO: 1297188 - RNA, 18 nt, Human
uggcuugaacucuuaggg

SEQ ID NO: 1297189 - RNA, 26 nt, Human
uggggguuaggggaagguugggggga

SEQ ID NO: 1297190 - RNA, 21 nt, Human
uguggucagcagccccaacuc

SEQ ID NO: 1297191 - RNA, 20 nt, Human
uucugccucguauguucaga

SEQ ID NO: 1297192 - RNA, 18 nt, Human
uuugaaaauauccuuucu

SEQ ID NO: 1297193 - RNA, 19 nt, Human
aaaaaaaaaaaaaauuagc

SEQ ID NO: 1297194 - RNA, 22 nt, Human
aaaccccaucucuacuaaaaaa

SEQ ID NO: 1297195 - RNA, 20 nt, Human
aaagcacauaucuuuuacaa

SEQ ID NO: 1297196 - RNA, 19 nt, Human
aacauggcgaaaccccauc

SEQ ID NO: 1297197 - RNA, 20 nt, Human
aacauggcgaaaccccaucu

SEQ ID NO: 1297198 - RNA, 21 nt, Human
aacauggcgaaaccccaucuc

SEQ ID NO: 1297199 - RNA, 21 nt, Human
aacauggcgaaaccccaucuc

SEQ ID NO: 1297200 - RNA, 19 nt, Human
aagaaaccggucaggcagg

SEQ ID NO: 1297201 - RNA, 20 nt, Human
aagcaaugaagaucgagcca

SEQ ID NO: 1297202 - RNA, 21 nt, Human
aaguagacuuaugauuaugga

SEQ ID NO: 1297203 - RNA, 23 nt, Human
aaguagacuuaugauuauggaau

SEQ ID NO: 1297204 - RNA, 24 nt, Human
aauacaaaaaaaaaaaaaauuagc

SEQ ID NO: 1297205 - RNA, 20 nt, Human
acaaaagguagucaaaaaca

SEQ ID NO: 1297206 - RNA, 19 nt, Human
acacuuugggaggcacagg

SEQ ID NO: 1297207 - RNA, 25 nt, Human
accccaucucuacuaaaaaauacaa

SEQ ID NO: 1297208 - RNA, 23 nt, Human
acuaaaaaauacaaaaaaaaaaa

SEQ ID NO: 1297209 - RNA, 19 nt, Human
agaagaaaggaagaaaccg

SEQ ID NO: 1297210 - RNA, 20 nt, Human
agaagaaaggaagaaaccgg

SEQ ID NO: 1297211 - RNA, 24 nt, Human
agaguggauccuuaguugaauucu

SEQ ID NO: 1297212 - RNA, 19 nt, Human
aggcagaguggauccuuag

SEQ ID NO: 1297213 - RNA, 18 nt, Human
aggcaggcagaguggauc

SEQ ID NO: 1297214 - RNA, 21 nt, Human
aggcaggcagaguggauccuu

SEQ ID NO: 1297215 - RNA, 24 nt, Human
aggcgggcggaucacgaggucagg

SEQ ID NO: 1297216 - RNA, 23 nt, Human
aguggcucacgccuguaauccca

SEQ ID NO: 1297217 - RNA, 24 nt, Human
caacacuuugggaggcacaggcgg

SEQ ID NO: 1297218 - RNA, 25 nt, Human
cacaggcgggcggaucacgagguca

SEQ ID NO: 1297219 - RNA, 26 nt, Human
caccagaacagaaggaauacugccag

SEQ ID NO: 1297220 - RNA, 24 nt, Human
cacgccuguaaucccaacacuuug

SEQ ID NO: 1297221 - RNA, 20 nt, Human
cacugcagagcagcuggggu

SEQ ID NO: 1297222 - RNA, 18 nt, Human
cacuuugggaggcacagg

SEQ ID NO: 1297223 - RNA, 23 nt, Human
cagaacagaaggaauacugccag

SEQ ID NO: 1297224 - RNA, 18 nt, Human
caggcaggcagaguggau

SEQ ID NO: 1297225 - RNA, 26 nt, Human
cauaucuccggccugagauggucaau

SEQ ID NO: 1297226 - RNA, 23 nt, Human
ccagaacagaaggaauacugcca

SEQ ID NO: 1297227 - RNA, 23 nt, Human
ccagaccauccuggcuaacaugg

SEQ ID NO: 1297228 - RNA, 23 nt, Human
ccagcccugaaucuuggagcaga

SEQ ID NO: 1297229 - RNA, 24 nt, Human
ccuggcuaacauggcgaaacccca

SEQ ID NO: 1297230 - RNA, 19 nt, Human
cgaaaccccaucucuacua

SEQ ID NO: 1297231 - RNA, 24 nt, Human
cgccuguaaucccaacacuuuggg

SEQ ID NO: 1297232 - RNA, 19 nt, Human
cuacuaaaaaauacaaaaa

SEQ ID NO: 1297233 - RNA, 22 nt, Human
cuacuaaaaaauacaaaaaaaa

SEQ ID NO: 1297234 - RNA, 22 nt, Human
cucacgccuguaaucccaacac

SEQ ID NO: 1297235 - RNA, 24 nt, Human
cucacgccuguaaucccaacacuu

SEQ ID NO: 1297236 - RNA, 21 nt, Human
cuggaggcugggcacaguggc

SEQ ID NO: 1297237 - RNA, 23 nt, Human
cuggcuaacauggcgaaacccca

SEQ ID NO: 1297238 - RNA, 22 nt, Human
gagagagaagaaaggaagaaac

SEQ ID NO: 1297239 - RNA, 18 nt, Human
gaugagagagaagaaagg

SEQ ID NO: 1297240 - RNA, 24 nt, Human
gcuaacauggcgaaaccccaucuc

SEQ ID NO: 1297241 - RNA, 19 nt, Human
gcuggaggcugggcacagu

SEQ ID NO: 1297242 - RNA, 19 nt, Human
gcugggcacaguggcucac

SEQ ID NO: 1297243 - RNA, 24 nt, Human
ggccacaaaagguagucaaaaaca

SEQ ID NO: 1297244 - RNA, 21 nt, Human
ggcggaucacgaggucaggag

SEQ ID NO: 1297245 - RNA, 18 nt, Human
gggcacaguggcucacgc

SEQ ID NO: 1297246 - RNA, 24 nt, Human
gggcacaguggcucacgccuguaa

SEQ ID NO: 1297247 - RNA, 23 nt, Human
ggguugcaccucagcugucuaua

SEQ ID NO: 1297248 - RNA, 23 nt, Human
ggugagaggaaacacagaaggga

SEQ ID NO: 1297249 - RNA, 21 nt, Human
guugggcauaucuccggccug

SEQ ID NO: 1297250 - RNA, 20 nt, Human
guuuccuggcucauugugga

SEQ ID NO: 1297251 - RNA, 20 nt, Human
uaaaaaaaucaugcuggagg

SEQ ID NO: 1297252 - RNA, 24 nt, Human
uaacauggcgaaaccccaucucua

SEQ ID NO: 1297253 - RNA, 24 nt, Human
uaaccaaauacuuaaaagcacaua

SEQ ID NO: 1297254 - RNA, 19 nt, Human
uagcuuacuacagaaugau

SEQ ID NO: 1297255 - RNA, 18 nt, Human
ucacgaggucaggagauc

SEQ ID NO: 1297256 - RNA, 24 nt, Human
ucacgaggucaggagauccagacc

SEQ ID NO: 1297257 - RNA, 25 nt, Human
ucaggugagaggaaacacagaaggg

SEQ ID NO: 1297258 - RNA, 21 nt, Human
uccagaggaaagcaaugaaga

SEQ ID NO: 1297259 - RNA, 22 nt, Human
ucucugaagauacguguauugc

SEQ ID NO: 1297260 - RNA, 18 nt, Human
ucugugcaccaggaggau

SEQ ID NO: 1297261 - RNA, 19 nt, Human
ugaaagugcccacaauagg

SEQ ID NO: 1297262 - RNA, 20 nt, Human
ugcuggaggcugggcacagu

SEQ ID NO: 1297263 - RNA, 21 nt, Human
uggcucacgccuguaauccca

SEQ ID NO: 1297264 - RNA, 24 nt, Human
uggcucacgccuguaaucccaaca

SEQ ID NO: 1297265 - RNA, 19 nt, Human
ugggaggcacaggcgggcg

SEQ ID NO: 1297266 - RNA, 24 nt, Human
ugggaggcacaggcgggcggauca

SEQ ID NO: 1297267 - RNA, 18 nt, Human
uggggccuugaaagugcc

SEQ ID NO: 1297268 - RNA, 18 nt, Human
uggucacccgucagaauc

SEQ ID NO: 1297269 - RNA, 23 nt, Human
uuaaaagcacauaucuuuuacaa

SEQ ID NO: 1297270 - RNA, 23 nt, Human
uuauggaaucauaauuuccuugu

SEQ ID NO: 1297271 - RNA, 21 nt, Human
uugcacaauaaccaaauacuu

SEQ ID NO: 1297272 - RNA, 20 nt, Human
aaagugacgggucagccccg

SEQ ID NO: 1297273 - RNA, 19 nt, Human
aagcugcugggacugaggu

SEQ ID NO: 1297274 - RNA, 18 nt, Human
aaugcugaagagccagga

SEQ ID NO: 1297275 - RNA, 22 nt, Human
aaugcugaagagccaggagagg

SEQ ID NO: 1297276 - RNA, 20 nt, Human
acucuacuccacuauggucc

SEQ ID NO: 1297277 - RNA, 19 nt, Human
agaagcugcugggacugag

SEQ ID NO: 1297278 - RNA, 22 nt, Human
agcggcagcuaggcccagcgcg

SEQ ID NO: 1297279 - RNA, 22 nt, Human
aggaacagugggaacacauuuc

SEQ ID NO: 1297280 - RNA, 25 nt, Human
cacaguacccucagcuuaaaaugag

SEQ ID NO: 1297281 - RNA, 23 nt, Human
cacccauuccugggggcccucca

SEQ ID NO: 1297282 - RNA, 19 nt, Human
cagcgcgcgcacgaagggg

SEQ ID NO: 1297283 - RNA, 24 nt, Human
cagugagccuuuauccguggcggc

SEQ ID NO: 1297284 - RNA, 20 nt, Human
ccagaagugaauacucuacu

SEQ ID NO: 1297285 - RNA, 23 nt, Human
ccauuccugggggcccuccauuc

SEQ ID NO: 1297286 - RNA, 22 nt, Human
ccccacuacuaauuggcaucug

SEQ ID NO: 1297287 - RNA, 21 nt, Human
ccccgaggucacucgcgcccc

SEQ ID NO: 1297288 - RNA, 18 nt, Human
ccccgccccguuccgaga

SEQ ID NO: 1297289 - RNA, 22 nt, Human
cccgccccguuccgagagaggg

SEQ ID NO: 1297290 - RNA, 21 nt, Human
cccucagcuuaaaaugaggau

SEQ ID NO: 1297291 - RNA, 18 nt, Human
cccugugcccaaagcucc

SEQ ID NO: 1297292 - RNA, 23 nt, Human
ccugagcggcagcuaggcccagc

SEQ ID NO: 1297293 - RNA, 19 nt, Human
ccugccagugcccuucccu

SEQ ID NO: 1297294 - RNA, 22 nt, Human
ccugugcccaaagcuccagccc

SEQ ID NO: 1297295 - RNA, 23 nt, Human
ccuuccccgccccguuccgagag

SEQ ID NO: 1297296 - RNA, 23 nt, Human
cgacagaaaaggguuucugucuc

SEQ ID NO: 1297297 - RNA, 18 nt, Human
cgcucggucccccugcgg

SEQ ID NO: 1297298 - RNA, 19 nt, Human
cuaccgaucugcaguugcg

SEQ ID NO: 1297299 - RNA, 22 nt, Human
cuauggucccugugcccaaagc

SEQ ID NO: 1297300 - RNA, 23 nt, Human
cuccaauagccuccgcucggucc

SEQ ID NO: 1297301 - RNA, 21 nt, Human
cuccacuauggucccugugcc

SEQ ID NO: 1297302 - RNA, 22 nt, Human
cuggaaggagcuaugguucuca

SEQ ID NO: 1297303 - RNA, 18 nt, Human
cugggggcccuccauuca

SEQ ID NO: 1297304 - RNA, 20 nt, Human
gacccugagcggcagcuagg

SEQ ID NO: 1297305 - RNA, 22 nt, Human
gagaagaaugcugaagagccag

SEQ ID NO: 1297306 - RNA, 18 nt, Human
gcaaggagaggacgcgac

SEQ ID NO: 1297307 - RNA, 20 nt, Human
gcccuggucuggggcugcgg

SEQ ID NO: 1297308 - RNA, 21 nt, Human
ggaaggcuccuguuucagccc

SEQ ID NO: 1297309 - RNA, 18 nt, Human
ggccagaagugaauacuc

SEQ ID NO: 1297310 - RNA, 22 nt, Human
ggccagaagugaauacucuacu

SEQ ID NO: 1297311 - RNA, 19 nt, Human
gggggcccuccauucagug

SEQ ID NO: 1297312 - RNA, 22 nt, Human
gucagccccgacccugagcggc

SEQ ID NO: 1297313 - RNA, 19 nt, Human
gucuggacaaucucuaagg

SEQ ID NO: 1297314 - RNA, 22 nt, Human
uaccgaucugcaguugcguccu

SEQ ID NO: 1297315 - RNA, 21 nt, Human
ucagcuuaaaaugaggaugcu

SEQ ID NO: 1297316 - RNA, 25 nt, Human
uccaauagccuccgcucgguccccc

SEQ ID NO: 1297317 - RNA, 27 nt, Human
ucccccugcggcucgcaaggagaggac

SEQ ID NO: 1297318 - RNA, 21 nt, Human
ucccugugcccaaagcuccag

SEQ ID NO: 1297319 - RNA, 18 nt, Human
ucuccaggagcgggccgg

SEQ ID NO: 1297320 - RNA, 23 nt, Human
ucucuaagguucuucuagaaugg

SEQ ID NO: 1297321 - RNA, 18 nt, Human
ucugcaguugcguccuuu

SEQ ID NO: 1297322 - RNA, 18 nt, Human
ugaggaugcuggucugga

SEQ ID NO: 1297323 - RNA, 20 nt, Human
ugagggagagaagcugcugg

SEQ ID NO: 1297324 - RNA, 21 nt, Human
ugagggagagaagcugcuggg

SEQ ID NO: 1297325 - RNA, 20 nt, Human
ugcggcuccaauagccuccg

SEQ ID NO: 1297326 - RNA, 22 nt, Human
ugcguccuuuccugccagugcc

SEQ ID NO: 1297327 - RNA, 23 nt, Human
uggcggccuccggcuaccgaucu

SEQ ID NO: 1297328 - RNA, 20 nt, Human
uggcucugugacuuucuugc

SEQ ID NO: 1297329 - RNA, 22 nt, Human
ugggggcccuccauucaguguu

SEQ ID NO: 1297330 - RNA, 25 nt, Human
uuccugggggcccuccauucagugu

SEQ ID NO: 1297331 - RNA, 19 nt, Human
uugcguccuuuccugccag

SEQ ID NO: 1297332 - RNA, 19 nt, Human
uuuauccguggcggccucc

SEQ ID NO: 1297333 - RNA, 28 nt, Human
ggauauaggugcuacuuagguuucacuu

SEQ ID NO: 1297334 - RNA, 20 nt, Human
guuuuauauuggauauaggu

SEQ ID NO: 1297335 - RNA, 18 nt, Human
uucacuuucauauaaaaa

SEQ ID NO: 1297336 - RNA, 19 nt, Human
acccgggcagcgcccuucu

SEQ ID NO: 1297337 - RNA, 21 nt, Human
agcacccgggcagcgcccuuc

SEQ ID NO: 1297338 - RNA, 18 nt, Human
aggaagaaacugguaccc

SEQ ID NO: 1297339 - RNA, 19 nt, Human
auggcucuggucauggcuc

SEQ ID NO: 1297340 - RNA, 22 nt, Human
cacgcggccgcggaggcucacc

SEQ ID NO: 1297341 - RNA, 20 nt, Human
cacgggcaggaagcgcagga

SEQ ID NO: 1297342 - RNA, 20 nt, Human
cagcacccgggcagcgcccu

SEQ ID NO: 1297343 - RNA, 22 nt, Human
caggaagaaacugguacccuua

SEQ ID NO: 1297344 - RNA, 20 nt, Human
cccggcuucagccgcgacca

SEQ ID NO: 1297345 - RNA, 21 nt, Human
cccggcuucagccgcgaccac

SEQ ID NO: 1297346 - RNA, 21 nt, Human
gaggcucaccugagggcucac

SEQ ID NO: 1297347 - RNA, 19 nt, Human
gcaggaagcgcagggcggc

SEQ ID NO: 1297348 - RNA, 18 nt, Human
gcagggcggcuuggaggc

SEQ ID NO: 1297349 - RNA, 19 nt, Human
gcccaggcccggcuucagc

SEQ ID NO: 1297350 - RNA, 19 nt, Human
gggaagauggagccgggcu

SEQ ID NO: 1297351 - RNA, 21 nt, Human
guggcagcccguggcgggcac

SEQ ID NO: 1297352 - RNA, 20 nt, Human
ugcccaggcccggcuucagc

SEQ ID NO: 1297353 - RNA, 23 nt, Human
uggcagcccguggcgggcacugu

SEQ ID NO: 1297354 - RNA, 20 nt, Human
uggccagagauaaggcacug

SEQ ID NO: 1297355 - RNA, 18 nt, Human
uggcucaggaagaaacug

SEQ ID NO: 1297356 - RNA, 19 nt, Human
uggcucaggaagaaacugg

SEQ ID NO: 1297357 - RNA, 23 nt, Human
ugggaauggcucuggucauggcu

SEQ ID NO: 1297358 - RNA, 18 nt, Human
ugucagacacgggcagga

SEQ ID NO: 1297359 - RNA, 23 nt, Human
uuccuugaguggcagcccguggc

SEQ ID NO: 1297360 - RNA, 23 nt, Human
aaucucagaauucauuuucuuuu

SEQ ID NO: 1297361 - RNA, 21 nt, Human
cccgacaucuucccaauggac

SEQ ID NO: 1297362 - RNA, 24 nt, Human
cuuguaauauucuggcauucugcu

SEQ ID NO: 1297363 - RNA, 24 nt, Human
gaauugguucuugucuucuguggu

SEQ ID NO: 1297364 - RNA, 26 nt, Human
ucuucccaauggaccuuccaguaccu

SEQ ID NO: 1297365 - RNA, 18 nt, Human
aaaugaccuuccugcauc

SEQ ID NO: 1297366 - RNA, 20 nt, Human
aagcauuuggcagacaaucc

SEQ ID NO: 1297367 - RNA, 18 nt, Human
acgcugccaacucuugcc

SEQ ID NO: 1297368 - RNA, 27 nt, Human
auaauaauggugauaauuuucuuggug

SEQ ID NO: 1297369 - RNA, 26 nt, Human
caaccgcacgcugccaacucuugcca

SEQ ID NO: 1297370 - RNA, 24 nt, Human
caaccugaucaaacaacucccaag

SEQ ID NO: 1297371 - RNA, 19 nt, Human
ccaaggucuucccagcucc

SEQ ID NO: 1297372 - RNA, 18 nt, Human
cgcuauuaaaaaaggauc

SEQ ID NO: 1297373 - RNA, 21 nt, Human
cugggccaugcugccauuuug

SEQ ID NO: 1297374 - RNA, 19 nt, Human
gccaacucuugccacaaga

SEQ ID NO: 1297375 - RNA, 22 nt, Human
ucacugccagucacacuccugg

SEQ ID NO: 1297376 - RNA, 23 nt, Human
ucacugccagucacacuccuggg

SEQ ID NO: 1297377 - RNA, 32 nt, Human
ucugaugauaauaauggugauaauuuucuuuu

SEQ ID NO: 1297378 - RNA, 18 nt, Human
uuaaaugaccuuccugca

SEQ ID NO: 1297379 - RNA, 23 nt, Human
uuggaugcauugacauaccaacc

SEQ ID NO: 1297380 - RNA, 22 nt, Human
cccgcgcggccaggggcgccuc

SEQ ID NO: 1297381 - RNA, 24 nt, Human
cugcccggggcggcggcugggcug

SEQ ID NO: 1297382 - RNA, 21 nt, Human
gggcggcggcugggcuguccg

SEQ ID NO: 1297383 - RNA, 21 nt, Human
ugaagggagccuccuccuuga

SEQ ID NO: 1297384 - RNA, 22 nt, Human
aguaaguagguggcgggagaaa

SEQ ID NO: 1297385 - RNA, 24 nt, Human
aaagugcugggauaacaggcguga

SEQ ID NO: 1297386 - RNA, 23 nt, Human
aacccagaugccccaacucuccu

SEQ ID NO: 1297387 - RNA, 21 nt, Human
aaccgcccccacaacaggccc

SEQ ID NO: 1297388 - RNA, 18 nt, Human
aauaaguacugaacaccu

SEQ ID NO: 1297389 - RNA, 19 nt, Human
acaggccccggugugugau

SEQ ID NO: 1297390 - RNA, 21 nt, Human
acaggcgugagccacugcgcc

SEQ ID NO: 1297391 - RNA, 24 nt, Human
accuugugaucugccugccucggc

SEQ ID NO: 1297392 - RNA, 24 nt, Human
acggaguuuccccauguuggccag

SEQ ID NO: 1297393 - RNA, 21 nt, Human
acuacaccuauuaaagacguu

SEQ ID NO: 1297394 - RNA, 20 nt, Human
agaagcacuuccagaagaau

SEQ ID NO: 1297395 - RNA, 22 nt, Human
agccaugcaagccucaggcccu

SEQ ID NO: 1297396 - RNA, 24 nt, Human
agcgauucuccugccucagccucc

SEQ ID NO: 1297397 - RNA, 22 nt, Human
aguagagacggaguuuccccau

SEQ ID NO: 1297398 - RNA, 18 nt, Human
aguagcugggauuacagg

SEQ ID NO: 1297399 - RNA, 18 nt, Human
agugcaguggcgugaucu

SEQ ID NO: 1297400 - RNA, 20 nt, Human
agugcaguggcgugaucuug

SEQ ID NO: 1297401 - RNA, 24 nt, Human
agugcaguggcgugaucuugacuc

SEQ ID NO: 1297402 - RNA, 18 nt, Human
auuacaggugcauaccau

SEQ ID NO: 1297403 - RNA, 24 nt, Human
auuuuuguauuuuuaguagagacg

SEQ ID NO: 1297404 - RNA, 22 nt, Human
caaaccagcagccagaggcuga

SEQ ID NO: 1297405 - RNA, 24 nt, Human
caaagugcugggauaacaggcgug

SEQ ID NO: 1297406 - RNA, 19 nt, Human
caagccucaggcccucugu

SEQ ID NO: 1297407 - RNA, 22 nt, Human
caagcgauucuccugccucagc

SEQ ID NO: 1297408 - RNA, 21 nt, Human
cacgcucggcuaauuuuugua

SEQ ID NO: 1297409 - RNA, 30 nt, Human
cacucauauuucaaaccagcagccagaggg

SEQ ID NO: 1297410 - RNA, 22 nt, Human
cacugcuaacccagaugcccca

SEQ ID NO: 1297411 - RNA, 19 nt, Human
caguggcgugaucuugacu

SEQ ID NO: 1297412 - RNA, 22 nt, Human
ccaaagugcugggauaacaggc

SEQ ID NO: 1297413 - RNA, 24 nt, Human
ccaaagugcugggauaacaggcgu

SEQ ID NO: 1297414 - RNA, 20 nt, Human
ccaacucuccucacucauau

SEQ ID NO: 1297415 - RNA, 21 nt, Human
ccacugcgccuggccuacuua

SEQ ID NO: 1297416 - RNA, 20 nt, Human
cccagguucaagcgauucuc

SEQ ID NO: 1297417 - RNA, 23 nt, Human
cccagguucaagcgauucuccug

SEQ ID NO: 1297418 - RNA, 24 nt, Human
ccccauguuggccaggauggucuc

SEQ ID NO: 1297419 - RNA, 23 nt, Human
cccgaguagcugggauuacaggu

SEQ ID NO: 1297420 - RNA, 24 nt, Human
cccgaguagcugggauuacaggug

SEQ ID NO: 1297421 - RNA, 20 nt, Human
cccucuguuucuaccucugc

SEQ ID NO: 1297422 - RNA, 21 nt, Human
ccgaguagcugggauuacagg

SEQ ID NO: 1297423 - RNA, 24 nt, Human
ccgcccagguucaagcgauucucc

SEQ ID NO: 1297424 - RNA, 22 nt, Human
ccgcccccacaacaggccccgg

SEQ ID NO: 1297425 - RNA, 24 nt, Human
ccgcccccacaacaggccccggug

SEQ ID NO: 1297426 - RNA, 23 nt, Human
ccugccucagccucccgaguagc

SEQ ID NO: 1297427 - RNA, 24 nt, Human
cggaguuuccccauguuggccagg

SEQ ID NO: 1297428 - RNA, 26 nt, Human
cuacugcacucccuucuccccaaguc

SEQ ID NO: 1297429 - RNA, 18 nt, Human
cucacugcaaccucugcc

SEQ ID NO: 1297430 - RNA, 23 nt, Human
cucagccucccgaguagcuggga

SEQ ID NO: 1297431 - RNA, 23 nt, Human
cucaggcccucuguuucuaccuc

SEQ ID NO: 1297432 - RNA, 20 nt, Human
cugcaaccucugccgcccag

SEQ ID NO: 1297433 - RNA, 24 nt, Human
cugcaaccucugccgcccagguuc

SEQ ID NO: 1297434 - RNA, 24 nt, Human
cugcacccauuaacucgucauuua

SEQ ID NO: 1297435 - RNA, 23 nt, Human
cugccucagccucccgaguagcu

SEQ ID NO: 1297436 - RNA, 23 nt, Human
cugccucggccucccaaagugcu

SEQ ID NO: 1297437 - RNA, 24 nt, Human
cuuacccucaaccgcccccacaac

SEQ ID NO: 1297438 - RNA, 22 nt, Human
gaccuugugaucugccugccuc

SEQ ID NO: 1297439 - RNA, 24 nt, Human
gaccuugugaucugccugccucgg

SEQ ID NO: 1297440 - RNA, 20 nt, Human
gagacggaguuuccccaugu

SEQ ID NO: 1297441 - RNA, 26 nt, Human
gaguagcugggauuacaggugcauac

SEQ ID NO: 1297442 - RNA, 18 nt, Human
gauaacaggcgugagcca

SEQ ID NO: 1297443 - RNA, 22 nt, Human
gauaacaggcgugagccacugc

SEQ ID NO: 1297444 - RNA, 22 nt, Human
gauaacaggcgugagccacugc

SEQ ID NO: 1297445 - RNA, 20 nt, Human
gaugcaaggugguagagagc

SEQ ID NO: 1297446 - RNA, 21 nt, Human
gcaaggugguagagagcagau

SEQ ID NO: 1297447 - RNA, 24 nt, Human
gcgauucuccugccucagccuccc

SEQ ID NO: 1297448 - RNA, 19 nt, Human
ggcgugaucuugacucacu

SEQ ID NO: 1297449 - RNA, 22 nt, Human
ggcuguagugcaguggcgugau

SEQ ID NO: 1297450 - RNA, 18 nt, Human
ggguacgugugcacaacg

SEQ ID NO: 1297451 - RNA, 24 nt, Human
guccaggcuguagugcaguggcgu

SEQ ID NO: 1297452 - RNA, 26 nt, Human
uaacagaagcacuuccagaagaauuc

SEQ ID NO: 1297453 - RNA, 19 nt, Human
uaacagaugcaagguggua

SEQ ID NO: 1297454 - RNA, 24 nt, Human
uaacuacugcacucccuucucccc

SEQ ID NO: 1297455 - RNA, 24 nt, Human
uaauuuuuguauuuuuaguagaga

SEQ ID NO: 1297456 - RNA, 21 nt, Human
uacugcacucccuucucccca

SEQ ID NO: 1297457 - RNA, 21 nt, Human
uaggaaaaaaucuagcuucua

SEQ ID NO: 1297458 - RNA, 24 nt, Human
uaguagagacggaguuuccccaug

SEQ ID NO: 1297459 - RNA, 23 nt, Human
uauaaacacugcuaacccagaug

SEQ ID NO: 1297460 - RNA, 20 nt, Human
ucaaaccagcagccagaggc

SEQ ID NO: 1297461 - RNA, 22 nt, Human
ucaaccgcccccacaacaggcc

SEQ ID NO: 1297462 - RNA, 18 nt, Human
ucacugcaaccucugccg

SEQ ID NO: 1297463 - RNA, 21 nt, Human
ucacugcaaccucugccgccc

SEQ ID NO: 1297464 - RNA, 24 nt, Human
ucacugcaaccucugccgcccagg

SEQ ID NO: 1297465 - RNA, 20 nt, Human
ucagccucccgaguagcugg

SEQ ID NO: 1297466 - RNA, 24 nt, Human
ucccaaagugcugggauaacaggc

SEQ ID NO: 1297467 - RNA, 23 nt, Human
ucccgaguagcugggauuacagg

SEQ ID NO: 1297468 - RNA, 24 nt, Human
ucccgaguagcugggauuacaggu

SEQ ID NO: 1297469 - RNA, 18 nt, Human
ucggccucccaaagugcu

SEQ ID NO: 1297470 - RNA, 24 nt, Human
ucguccaggcuguagugcaguggc

SEQ ID NO: 1297471 - RNA, 21 nt, Human
ucuccucacucauauuucaaa

SEQ ID NO: 1297472 - RNA, 24 nt, Human
ucuccugccucagccucccgagua

SEQ ID NO: 1297473 - RNA, 19 nt, Human
ucugcugggagagauaggg

SEQ ID NO: 1297474 - RNA, 19 nt, Human
ucuugcucugucguccagg

SEQ ID NO: 1297475 - RNA, 22 nt, Human
ucuugcucugucguccaggcug

SEQ ID NO: 1297476 - RNA, 23 nt, Human
ucuugcucugucguccaggcugu

SEQ ID NO: 1297477 - RNA, 18 nt, Human
ugagacagagucuugcuc

SEQ ID NO: 1297478 - RNA, 22 nt, Human
ugagacagagucuugcucuguc

SEQ ID NO: 1297479 - RNA, 21 nt, Human
ugcagguuuguuacauaugua

SEQ ID NO: 1297480 - RNA, 24 nt, Human
ugccucagccucccgaguagcugg

SEQ ID NO: 1297481 - RNA, 21 nt, Human
ugccucggccucccaaagugc

SEQ ID NO: 1297482 - RNA, 24 nt, Human
ugccucggccucccaaagugcugg

SEQ ID NO: 1297483 - RNA, 21 nt, Human
ugcgccuggccuacuuaguuu

SEQ ID NO: 1297484 - RNA, 24 nt, Human
ugcucugucguccaggcuguagug

SEQ ID NO: 1297485 - RNA, 24 nt, Human
uggccaggauggucucgaucucuu

SEQ ID NO: 1297486 - RNA, 20 nt, Human
ugggagagauagggcugaau

SEQ ID NO: 1297487 - RNA, 19 nt, Human
ugggauaacaggcgugagc

SEQ ID NO: 1297488 - RNA, 22 nt, Human
ugggauaacaggcgugagccac

SEQ ID NO: 1297489 - RNA, 22 nt, Human
ugggauaacaggcgugagccac

SEQ ID NO: 1297490 - RNA, 24 nt, Human
ugggauaacaggcgugagccacug

SEQ ID NO: 1297491 - RNA, 21 nt, Human
ugggauuacaggugcauacca

SEQ ID NO: 1297492 - RNA, 21 nt, Human
ugggauuacaggugcauacca

SEQ ID NO: 1297493 - RNA, 22 nt, Human
ugggauuacaggugcauaccau

SEQ ID NO: 1297494 - RNA, 24 nt, Human
ugggauuacaggugcauaccauca

SEQ ID NO: 1297495 - RNA, 21 nt, Human
ugguagagagcagauuaggaa

SEQ ID NO: 1297496 - RNA, 19 nt, Human
uguagugcaguggcgugau

SEQ ID NO: 1297497 - RNA, 19 nt, Human
uguagugcaguggcgugau

SEQ ID NO: 1297498 - RNA, 28 nt, Human
uguagugcaguggcgugauggcucuagc

SEQ ID NO: 1297499 - RNA, 21 nt, Human
ugucguccaggcuguagugca

SEQ ID NO: 1297500 - RNA, 18 nt, Human
uguuacauauguauacau

SEQ ID NO: 1297501 - RNA, 19 nt, Human
uguuacauauguauacaug

SEQ ID NO: 1297502 - RNA, 18 nt, Human
uuaguagagacggaguuu

SEQ ID NO: 1297503 - RNA, 24 nt, Human
uuaguagagacggaguuuccccau

SEQ ID NO: 1297504 - RNA, 21 nt, Human
uucaagcgauucuccugccuc

SEQ ID NO: 1297505 - RNA, 23 nt, Human
uucaagcgauucuccugccucag

SEQ ID NO: 1297506 - RNA, 24 nt, Human
uucaagcgauucuccugccucagc

SEQ ID NO: 1297507 - RNA, 23 nt, Human
uuguauuuuuaguagagacggag

SEQ ID NO: 1297508 - RNA, 25 nt, Human
uuuauucaaacuaagucaugaaauc

SEQ ID NO: 1297509 - RNA, 19 nt, Human
uuuccccauguuggccagg

SEQ ID NO: 1297510 - RNA, 19 nt, Human
uuuuuaguagagacggagu

SEQ ID NO: 1297511 - RNA, 20 nt, Human
uuuuuguauuuuuaguagag

SEQ ID NO: 1297512 - RNA, 20 nt, Human
uuuuuuuuuuugagacagag

SEQ ID NO: 1297513 - RNA, 24 nt, Human
uuuuuuuuuuuugagacagagucu

SEQ ID NO: 1297514 - RNA, 22 nt, Human
aaaaaucccagucaacagguuc

SEQ ID NO: 1297515 - RNA, 22 nt, Human
agauacaaagaucacuguaacu

SEQ ID NO: 1297516 - RNA, 22 nt, Human
agccgcgcgaccccagcagggc

SEQ ID NO: 1297517 - RNA, 19 nt, Human
auggaauacacaaaaggga

SEQ ID NO: 1297518 - RNA, 21 nt, Human
auuuuugcuguugccugcaac

SEQ ID NO: 1297519 - RNA, 19 nt, Human
caaagccacuuuuagacaa

SEQ ID NO: 1297520 - RNA, 20 nt, Human
caaagccgcgcgaccccagc

SEQ ID NO: 1297521 - RNA, 18 nt, Human
caauggauuuaagagguu

SEQ ID NO: 1297522 - RNA, 21 nt, Human
caggagccacgcagguuaccg

SEQ ID NO: 1297523 - RNA, 22 nt, Human
cagucagggcaagggaaagaga

SEQ ID NO: 1297524 - RNA, 19 nt, Human
cauaucuauccaacacagu

SEQ ID NO: 1297525 - RNA, 22 nt, Human
cauuucccuguuucuucuaaaa

SEQ ID NO: 1297526 - RNA, 18 nt, Human
ccaaagccgcgcgacccc

SEQ ID NO: 1297527 - RNA, 21 nt, Human
ccagcagggcuucagauccga

SEQ ID NO: 1297528 - RNA, 22 nt, Human
ccuccaguccccuccagaugcg

SEQ ID NO: 1297529 - RNA, 23 nt, Human
ccuguuucuucuaaaaguucucc

SEQ ID NO: 1297530 - RNA, 18 nt, Human
cuaucaggagccacgcag

SEQ ID NO: 1297531 - RNA, 27 nt, Human
cuggcuucugcgagcauccuuggggcc

SEQ ID NO: 1297532 - RNA, 19 nt, Human
gaguucccaguugcucuuc

SEQ ID NO: 1297533 - RNA, 19 nt, Human
ggcugggguugggggcugg

SEQ ID NO: 1297534 - RNA, 20 nt, Human
uacagcauucaaacaaagcc

SEQ ID NO: 1297535 - RNA, 21 nt, Human
uacuccaacagucagggcaag

SEQ ID NO: 1297536 - RNA, 19 nt, Human
uauaugaagagagaaggua

SEQ ID NO: 1297537 - RNA, 22 nt, Human
ucacuguaacugucagagaggu

SEQ ID NO: 1297538 - RNA, 19 nt, Human
uccaaacgcuaucaggagc

SEQ ID NO: 1297539 - RNA, 24 nt, Human
ucuucagucucccccgcguucuuc

SEQ ID NO: 1297540 - RNA, 20 nt, Human
uggcuucugcgagcauccuu

SEQ ID NO: 1297541 - RNA, 20 nt, Human
uggcuucugcgagcauccuu

SEQ ID NO: 1297542 - RNA, 22 nt, Human
uuccaaacgcuaucaggagcca

SEQ ID NO: 1297543 - RNA, 20 nt, Human
uuguacagcauucaaacaaa

SEQ ID NO: 1297544 - RNA, 22 nt, Human
agugagaaagacuagagagaaa

SEQ ID NO: 1297545 - RNA, 25 nt, Human
auggcagacaagauacaagucccac

SEQ ID NO: 1297546 - RNA, 21 nt, Human
caagguauuauugccagcaug

SEQ ID NO: 1297547 - RNA, 23 nt, Human
caccuagagucucugauguaggg

SEQ ID NO: 1297548 - RNA, 23 nt, Human
cagaaugagcaacaggcugaaaa

SEQ ID NO: 1297549 - RNA, 20 nt, Human
cagcaugggacagaaugagc

SEQ ID NO: 1297550 - RNA, 18 nt, Human
caggaagggcaaaauccc

SEQ ID NO: 1297551 - RNA, 24 nt, Human
cccuauaccccaggaagggcaaaa

SEQ ID NO: 1297552 - RNA, 21 nt, Human
gagcaauucaaaauaagggua

SEQ ID NO: 1297553 - RNA, 20 nt, Human
ggcagacaagauacaagucc

SEQ ID NO: 1297554 - RNA, 18 nt, Human
gguaaugggcugacaagg

SEQ ID NO: 1297555 - RNA, 23 nt, Human
gugauuuuuugaaaacaaacugg

SEQ ID NO: 1297556 - RNA, 24 nt, Human
uaccccaggaagggcaaaauccca

SEQ ID NO: 1297557 - RNA, 22 nt, Human
uaucauauugcuauggacauug

SEQ ID NO: 1297558 - RNA, 22 nt, Human
ucaauauuucugauccccuaua

SEQ ID NO: 1297559 - RNA, 22 nt, Human
ucuuguguugcaauuuuuuaau

SEQ ID NO: 1297560 - RNA, 22 nt, Human
ugacaagguauuauugccagca

SEQ ID NO: 1297561 - RNA, 27 nt, Human
ugacaagguauuauugccagcauggga

SEQ ID NO: 1297562 - RNA, 18 nt, Human
ugagaaagacuagagaga

SEQ ID NO: 1297563 - RNA, 23 nt, Human
ugagcaacaggcugaaaaguuuu

SEQ ID NO: 1297564 - RNA, 21 nt, Human
uguacaagugagaaagacuag

SEQ ID NO: 1297565 - RNA, 20 nt, Human
uguucugauauggcagacaa

SEQ ID NO: 1297566 - RNA, 20 nt, Human
uuuuugaaaacaaacugggu

SEQ ID NO: 1297567 - RNA, 24 nt, Human
aaaguauugggauuacaggcauga

SEQ ID NO: 1297568 - RNA, 19 nt, Human
aaagugcuaggauuauagg

SEQ ID NO: 1297569 - RNA, 19 nt, Human
aagccauucuuagaucugg

SEQ ID NO: 1297570 - RNA, 21 nt, Human
aaguauugggauuacaggcau

SEQ ID NO: 1297571 - RNA, 26 nt, Human
aaguauugggauuacaggcaugagcu

SEQ ID NO: 1297572 - RNA, 20 nt, Human
aagugcuucacuugccucag

SEQ ID NO: 1297573 - RNA, 20 nt, Human
acaccugguuaauuuuuuua

SEQ ID NO: 1297574 - RNA, 19 nt, Human
acugcagccucaaccuccu

SEQ ID NO: 1297575 - RNA, 21 nt, Human
agagacgugcaccaccacacc

SEQ ID NO: 1297576 - RNA, 26 nt, Human
agcagcaucucaaaagggcugacugg

SEQ ID NO: 1297577 - RNA, 18 nt, Human
agccucaaccuccugggc

SEQ ID NO: 1297578 - RNA, 22 nt, Human
aggggagaagcugggcaaagag

SEQ ID NO: 1297579 - RNA, 20 nt, Human
agggugauugguaccugaaa

SEQ ID NO: 1297580 - RNA, 23 nt, Human
aggucuucagcaugacuugguuu

SEQ ID NO: 1297581 - RNA, 23 nt, Human
aguagcugggauuacaggcaugu

SEQ ID NO: 1297582 - RNA, 19 nt, Human
agucagcagcaucucaaaa

SEQ ID NO: 1297583 - RNA, 24 nt, Human
aguggcaugaucuuaguucacugc

SEQ ID NO: 1297584 - RNA, 18 nt, Human
aguggugugaucuuggcu

SEQ ID NO: 1297585 - RNA, 23 nt, Human
augggguuuugccauguuggcca

SEQ ID NO: 1297586 - RNA, 24 nt, Human
augggguuuugccauguuggccag

SEQ ID NO: 1297587 - RNA, 23 nt, Human
augggugcaguggcaugaucuua

SEQ ID NO: 1297588 - RNA, 24 nt, Human
auguuugcauuuuuaguagagaug

SEQ ID NO: 1297589 - RNA, 19 nt, Human
auucuguugcccaagaugg

SEQ ID NO: 1297590 - RNA, 24 nt, Human
caaaguauugggauuacaggcaug

SEQ ID NO: 1297591 - RNA, 24 nt, Human
caaagugcuaggauuauaggcaua

SEQ ID NO: 1297592 - RNA, 22 nt, Human
caagugauucuccugucucagc

SEQ ID NO: 1297593 - RNA, 19 nt, Human
caccugguuaauuuuuuua

SEQ ID NO: 1297594 - RNA, 24 nt, Human
cacuaaguugcccaggcuggucuu

SEQ ID NO: 1297595 - RNA, 23 nt, Human
cacucaggaauuucucccucuca

SEQ ID NO: 1297596 - RNA, 19 nt, Human
cacugcagccucaaccucc

SEQ ID NO: 1297597 - RNA, 21 nt, Human
cacuguaaccuccaccuccug

SEQ ID NO: 1297598 - RNA, 23 nt, Human
cacuguaaccuccaccuccuggg

SEQ ID NO: 1297599 - RNA, 23 nt, Human
cagcagcaucucaaaagggcuga

SEQ ID NO: 1297600 - RNA, 23 nt, Human
cagccucaaccuccugggcucaa

SEQ ID NO: 1297601 - RNA, 24 nt, Human
cagccucaaccuccugggcucaag

SEQ ID NO: 1297602 - RNA, 20 nt, Human
cagccuccugaguagcugag

SEQ ID NO: 1297603 - RNA, 22 nt, Human
caugccuguuuuuuucuggagg

SEQ ID NO: 1297604 - RNA, 24 nt, Human
cauguuggccaggcuggucucgaa

SEQ ID NO: 1297605 - RNA, 24 nt, Human
ccaaaguauugggauuacaggcau

SEQ ID NO: 1297606 - RNA, 24 nt, Human
ccaaagugcuaggauuauaggcau

SEQ ID NO: 1297607 - RNA, 24 nt, Human
ccaccuccuggguucaagugauuc

SEQ ID NO: 1297608 - RNA, 19 nt, Human
ccauguuggccaggcuggu

SEQ ID NO: 1297609 - RNA, 23 nt, Human
ccauguuggccaggcuggucucg

SEQ ID NO: 1297610 - RNA, 24 nt, Human
cccaaaguauugggauuacaggca

SEQ ID NO: 1297611 - RNA, 20 nt, Human
ccccgggcaucucguuccca

SEQ ID NO: 1297612 - RNA, 23 nt, Human
cccgaguagcugggauuacaggc

SEQ ID NO: 1297613 - RNA, 24 nt, Human
cccgaguagcugggauuacaggca

SEQ ID NO: 1297614 - RNA, 23 nt, Human
ccgaguagcugggauuacaggca

SEQ ID NO: 1297615 - RNA, 24 nt, Human
ccgaguagcugggauuacaggcau

SEQ ID NO: 1297616 - RNA, 18 nt, Human
ccucaaccuccugggcuc

SEQ ID NO: 1297617 - RNA, 19 nt, Human
ccucacuaaguugcccagg

SEQ ID NO: 1297618 - RNA, 22 nt, Human
ccuccaccuccuggguucaagu

SEQ ID NO: 1297619 - RNA, 26 nt, Human
ccuccuaccuuggccucccaaagugc

SEQ ID NO: 1297620 - RNA, 24 nt, Human
ccuccuggguucaagugauucucc

SEQ ID NO: 1297621 - RNA, 21 nt, Human
ccucucacccaaccucagcuc

SEQ ID NO: 1297622 - RNA, 24 nt, Human
ccugccacagccuccugaguagcu

SEQ ID NO: 1297623 - RNA, 20 nt, Human
ccuggccucaagccauccuc

SEQ ID NO: 1297624 - RNA, 20 nt, Human
ccugggcucaagccaucuuc

SEQ ID NO: 1297625 - RNA, 23 nt, Human
ccugggcucaagccaucuuccug

SEQ ID NO: 1297626 - RNA, 23 nt, Human
ccuggguucaagugauucuccuc

SEQ ID NO: 1297627 - RNA, 23 nt, Human
ccuggguucaagugauucuccug

SEQ ID NO: 1297628 - RNA, 21 nt, Human
ccuguauggucauuaucacuc

SEQ ID NO: 1297629 - RNA, 24 nt, Human
cucaagccauccuccuaccuuggc

SEQ ID NO: 1297630 - RNA, 21 nt, Human
cucaagccaucuuccugccac

SEQ ID NO: 1297631 - RNA, 24 nt, Human
cucacuguaaccuccaccuccugg

SEQ ID NO: 1297632 - RNA, 26 nt, Human
cucacuguaaccuccaccuccugggu

SEQ ID NO: 1297633 - RNA, 24 nt, Human
cucagccucccgaguagcugggau

SEQ ID NO: 1297634 - RNA, 18 nt, Human
cuccaagugguggaaaag

SEQ ID NO: 1297635 - RNA, 19 nt, Human
cuccuggccucaagccauc

SEQ ID NO: 1297636 - RNA, 20 nt, Human
cuccuggguucaagugauuc

SEQ ID NO: 1297637 - RNA, 21 nt, Human
cuccuggguucaagugauucu

SEQ ID NO: 1297638 - RNA, 19 nt, Human
cugcagccccagccugaag

SEQ ID NO: 1297639 - RNA, 20 nt, Human
cugcagccccagccugaagc

SEQ ID NO: 1297640 - RNA, 27 nt, Human
cugcagccccagccugaagccauucuu

SEQ ID NO: 1297641 - RNA, 21 nt, Human
cuguaaccuccaccuccuggg

SEQ ID NO: 1297642 - RNA, 24 nt, Human
cuguaaccuccaccuccuggguuc

SEQ ID NO: 1297643 - RNA, 23 nt, Human
cugucucagccucccgaguagcu

SEQ ID NO: 1297644 - RNA, 19 nt, Human
cuuuauaggugcuuucuug

SEQ ID NO: 1297645 - RNA, 24 nt, Human
gaccucaagugcuucacuugccuc

SEQ ID NO: 1297646 - RNA, 20 nt, Human
gagaugggguuuugccaugu

SEQ ID NO: 1297647 - RNA, 25 nt, Human
gaguagcugggauuacaggcaugug

SEQ ID NO: 1297648 - RNA, 21 nt, Human
gauuacaggcaugagcuacua

SEQ ID NO: 1297649 - RNA, 24 nt, Human
gauuacaggcaugagcuacuaugc

SEQ ID NO: 1297650 - RNA, 18 nt, Human
gauuacaggcaugugcca

SEQ ID NO: 1297651 - RNA, 24 nt, Human
gauuacaggcaugugccaccaugc

SEQ ID NO: 1297652 - RNA, 18 nt, Human
gauuauaggcauaagcca

SEQ ID NO: 1297653 - RNA, 21 nt, Human
gauuauaggcauaagccaaug

SEQ ID NO: 1297654 - RNA, 21 nt, Human
gauucuccugucucagccucc

SEQ ID NO: 1297655 - RNA, 22 nt, Human
gcaaagaggugacugcagcccc

SEQ ID NO: 1297656 - RNA, 18 nt, Human
gcagcaucucaaaagggc

SEQ ID NO: 1297657 - RNA, 21 nt, Human
gcagccugcugggauuuccag

SEQ ID NO: 1297658 - RNA, 18 nt, Human
gcagguuuuaucugagcg

SEQ ID NO: 1297659 - RNA, 20 nt, Human
gccauguuggccaggcuggu

SEQ ID NO: 1297660 - RNA, 22 nt, Human
gccauguuggccaggcuggucu

SEQ ID NO: 1297661 - RNA, 18 nt, Human
gccucaaccuccugggcu

SEQ ID NO: 1297662 - RNA, 23 nt, Human
gcuggucucgaacuccugaccuc

SEQ ID NO: 1297663 - RNA, 23 nt, Human
gcuggucuugaacuccuggccuc

SEQ ID NO: 1297664 - RNA, 24 nt, Human
ggauuacaggcaugagcuacuaug

SEQ ID NO: 1297665 - RNA, 24 nt, Human
ggauuacaggcaugugccaccaug

SEQ ID NO: 1297666 - RNA, 24 nt, Human
ggauuauaggcauaagccaaugug

SEQ ID NO: 1297667 - RNA, 24 nt, Human
ggcuggucucgaacuccugaccuc

SEQ ID NO: 1297668 - RNA, 24 nt, Human
ggcuggucuugaacuccuggccuc

SEQ ID NO: 1297669 - RNA, 31 nt, Human
ggcugugguacaguggugugaucuuggcucc

SEQ ID NO: 1297670 - RNA, 21 nt, Human
gggagaagcugggcaaagagg

SEQ ID NO: 1297671 - RNA, 19 nt, Human
gggcaggggagaagcuggg

SEQ ID NO: 1297672 - RNA, 22 nt, Human
gggguuuugccauguuggccag

SEQ ID NO: 1297673 - RNA, 23 nt, Human
gggguuuugccauguuggccagg

SEQ ID NO: 1297674 - RNA, 22 nt, Human
ggguuuugccauguuggccagg

SEQ ID NO: 1297675 - RNA, 19 nt, Human
ggucucgaacuccugaccu

SEQ ID NO: 1297676 - RNA, 19 nt, Human
ggugcaguggcaugaucuu

SEQ ID NO: 1297677 - RNA, 19 nt, Human
guacaguggugugaucuug

SEQ ID NO: 1297678 - RNA, 23 nt, Human
guacaguggugugaucuuggcuc

SEQ ID NO: 1297679 - RNA, 23 nt, Human
guagagaugggguuuugccaugu

SEQ ID NO: 1297680 - RNA, 18 nt, Human
guagcugggauuacaggc

SEQ ID NO: 1297681 - RNA, 20 nt, Human
guagcugggauuacaggcau

SEQ ID NO: 1297682 - RNA, 24 nt, Human
gugauucuccugucucagccuccc

SEQ ID NO: 1297683 - RNA, 20 nt, Human
gugcaguggcaugaucuuag

SEQ ID NO: 1297684 - RNA, 21 nt, Human
gugcuucacuugccucagccu

SEQ ID NO: 1297685 - RNA, 24 nt, Human
gugcuucacuugccucagccuccc

SEQ ID NO: 1297686 - RNA, 21 nt, Human
gugugaucuuggcucacugua

SEQ ID NO: 1297687 - RNA, 21 nt, Human
guugcccaggcuggucuugaa

SEQ ID NO: 1297688 - RNA, 19 nt, Human
uaacuuggcagauaagugg

SEQ ID NO: 1297689 - RNA, 24 nt, Human
uaaguugcccaggcuggucuugaa

SEQ ID NO: 1297690 - RNA, 24 nt, Human
uaauguuugcauuuuuaguagaga

SEQ ID NO: 1297691 - RNA, 23 nt, Human
uaauuuuuuuauuuuuuauagag

SEQ ID NO: 1297692 - RNA, 24 nt, Human
uaauuuuuuuauuuuuuauagaga

SEQ ID NO: 1297693 - RNA, 24 nt, Human
uacaggcaugagcuacuaugccca

SEQ ID NO: 1297694 - RNA, 24 nt, Human
uacaggcaugugccaccaugccca

SEQ ID NO: 1297695 - RNA, 19 nt, Human
uacaguggugugaucuugg

SEQ ID NO: 1297696 - RNA, 18 nt, Human
uagaagagcucuugggug

SEQ ID NO: 1297697 - RNA, 22 nt, Human
uagagaugggguuuugccaugu

SEQ ID NO: 1297698 - RNA, 21 nt, Human
uaggauuauaggcauaagcca

SEQ ID NO: 1297699 - RNA, 23 nt, Human
uaggauuauaggcauaagccaau

SEQ ID NO: 1297700 - RNA, 24 nt, Human
uaguagagaugggguuuugccaug

SEQ ID NO: 1297701 - RNA, 23 nt, Human
uaguucacugcagccucaaccuc

SEQ ID NO: 1297702 - RNA, 24 nt, Human
uaguucacugcagccucaaccucc

SEQ ID NO: 1297703 - RNA, 25 nt, Human
ucaagccauccuccuaccuuggccu

SEQ ID NO: 1297704 - RNA, 20 nt, Human
ucacugcagccucaaccucc

SEQ ID NO: 1297705 - RNA, 23 nt, Human
ucacugcagccucaaccuccugg

SEQ ID NO: 1297706 - RNA, 24 nt, Human
ucacugcagccucaaccuccuggg

SEQ ID NO: 1297707 - RNA, 23 nt, Human
ucacuguaaccuccaccuccugg

SEQ ID NO: 1297708 - RNA, 24 nt, Human
ucacuguaaccuccaccuccuggg

SEQ ID NO: 1297709 - RNA, 25 nt, Human
ucacuguaaccuccaccuccugggu

SEQ ID NO: 1297710 - RNA, 27 nt, Human
ucacuguaaccuccaccuccuggguuc

SEQ ID NO: 1297711 - RNA, 20 nt, Human
ucagccucccgaguagcugg

SEQ ID NO: 1297712 - RNA, 19 nt, Human
uccaggucuucagcaugac

SEQ ID NO: 1297713 - RNA, 24 nt, Human
ucccaaaguauugggauuacaggc

SEQ ID NO: 1297714 - RNA, 24 nt, Human
ucccaaagugcuaggauuauaggc

SEQ ID NO: 1297715 - RNA, 24 nt, Human
ucccgaguagcugggauuacaggc

SEQ ID NO: 1297716 - RNA, 20 nt, Human
uccugggcucaagccaucuu

SEQ ID NO: 1297717 - RNA, 22 nt, Human
uccugggcucaagccaucuucc

SEQ ID NO: 1297718 - RNA, 22 nt, Human
uccugggcucaagccaucuucc

SEQ ID NO: 1297719 - RNA, 24 nt, Human
uccugggcucaagccaucuuccug

SEQ ID NO: 1297720 - RNA, 21 nt, Human
uccuggguucaagugauucuc

SEQ ID NO: 1297721 - RNA, 24 nt, Human
uccuggguucaagugauucuccug

SEQ ID NO: 1297722 - RNA, 19 nt, Human
ucucauucuguugcccaag

SEQ ID NO: 1297723 - RNA, 20 nt, Human
ucucauucuguugcccaaga

SEQ ID NO: 1297724 - RNA, 23 nt, Human
ucucauucuguugcccaagaugg

SEQ ID NO: 1297725 - RNA, 23 nt, Human
ucucauucuguugcccaagaugg

SEQ ID NO: 1297726 - RNA, 24 nt, Human
ucucauucuguugcccaagauggg

SEQ ID NO: 1297727 - RNA, 24 nt, Human
ucuccugucucagccucccgagua

SEQ ID NO: 1297728 - RNA, 21 nt, Human
ucucgaacuccugaccucaag

SEQ ID NO: 1297729 - RNA, 23 nt, Human
ucucuucucuguugccuuuguuc

SEQ ID NO: 1297730 - RNA, 21 nt, Human
ucugcucucuucucuguugcc

SEQ ID NO: 1297731 - RNA, 24 nt, Human
ucugcucucuucucuguugccuuu

SEQ ID NO: 1297732 - RNA, 21 nt, Human
ucuugaacuccuggccucaag

SEQ ID NO: 1297733 - RNA, 22 nt, Human
ugaauccauggcuuaacacugg

SEQ ID NO: 1297734 - RNA, 20 nt, Human
ugaccucaagugcuucacuu

SEQ ID NO: 1297735 - RNA, 20 nt, Human
ugacugcagccccagccuga

SEQ ID NO: 1297736 - RNA, 19 nt, Human
ugacuugguuucucagugg

SEQ ID NO: 1297737 - RNA, 24 nt, Human
ugagacuagagacgugcaccacca

SEQ ID NO: 1297738 - RNA, 20 nt, Human
ugauucuccugucucagccu

SEQ ID NO: 1297739 - RNA, 23 nt, Human
ugcagccugcugggauuuccagg

SEQ ID NO: 1297740 - RNA, 22 nt, Human
ugcaguggcaugaucuuaguuc

SEQ ID NO: 1297741 - RNA, 24 nt, Human
ugccacagccuccugaguagcuga

SEQ ID NO: 1297742 - RNA, 24 nt, Human
ugccauguuggccaggcuggucuc

SEQ ID NO: 1297743 - RNA, 26 nt, Human
ugccauguuggccaggcuggucucga

SEQ ID NO: 1297744 - RNA, 23 nt, Human
ugcccaagaugggugcaguggca

SEQ ID NO: 1297745 - RNA, 24 nt, Human
ugcccaggcuggucuugaacuccu

SEQ ID NO: 1297746 - RNA, 24 nt, Human
ugccucagccucccaaaguauugg

SEQ ID NO: 1297747 - RNA, 23 nt, Human
ugcugggauuuccaggucuucag

SEQ ID NO: 1297748 - RNA, 24 nt, Human
ugcuucacuugccucagccuccca

SEQ ID NO: 1297749 - RNA, 21 nt, Human
uggcagauaaguggguaguca

SEQ ID NO: 1297750 - RNA, 19 nt, Human
uggcaugaucuuaguucac

SEQ ID NO: 1297751 - RNA, 24 nt, Human
uggccaggcuggucucgaacuccu

SEQ ID NO: 1297752 - RNA, 20 nt, Human
uggccucaagccauccuccu

SEQ ID NO: 1297753 - RNA, 21 nt, Human
uggccucaagccauccuccua

SEQ ID NO: 1297754 - RNA, 18 nt, Human
ugggauuacaggcaugag

SEQ ID NO: 1297755 - RNA, 19 nt, Human
ugggauuacaggcaugagc

SEQ ID NO: 1297756 - RNA, 19 nt, Human
ugggauuacaggcaugagc

SEQ ID NO: 1297757 - RNA, 21 nt, Human
ugggauuacaggcaugagcua

SEQ ID NO: 1297758 - RNA, 22 nt, Human
ugggauuacaggcaugagcuac

SEQ ID NO: 1297759 - RNA, 22 nt, Human
ugggauuacaggcaugagcuac

SEQ ID NO: 1297760 - RNA, 23 nt, Human
ugggauuacaggcaugagcuacu

SEQ ID NO: 1297761 - RNA, 24 nt, Human
ugggauuacaggcaugagcuacua

SEQ ID NO: 1297762 - RNA, 26 nt, Human
ugggauuacaggcaugagcuacuaug

SEQ ID NO: 1297763 - RNA, 18 nt, Human
ugggauuacaggcaugug

SEQ ID NO: 1297764 - RNA, 21 nt, Human
ugggauuacaggcaugugcca

SEQ ID NO: 1297765 - RNA, 22 nt, Human
ugggauuacaggcaugugccac

SEQ ID NO: 1297766 - RNA, 24 nt, Human
ugggauuacaggcaugugccacca

SEQ ID NO: 1297767 - RNA, 20 nt, Human
uggggcuuguguacaggugc

SEQ ID NO: 1297768 - RNA, 24 nt, Human
ugggguuuugccauguuggccagg

SEQ ID NO: 1297769 - RNA, 23 nt, Human
ugggugcaguggcaugaucuuag

SEQ ID NO: 1297770 - RNA, 21 nt, Human
uggguggaaccuuuaaggaug

SEQ ID NO: 1297771 - RNA, 20 nt, Human
uggguucaagugauucuccu

SEQ ID NO: 1297772 - RNA, 24 nt, Human
uggguucaagugauucuccugucu

SEQ ID NO: 1297773 - RNA, 22 nt, Human
ugguacaguggugugaucuugg

SEQ ID NO: 1297774 - RNA, 24 nt, Human
uggugugaucuuggcucacuguaa

SEQ ID NO: 1297775 - RNA, 24 nt, Human
ugucucagccucccgaguagcugg

SEQ ID NO: 1297776 - RNA, 24 nt, Human
ugugguacaguggugugaucuugg

SEQ ID NO: 1297777 - RNA, 22 nt, Human
uguuuuuauuuuuuuagagaca

SEQ ID NO: 1297778 - RNA, 18 nt, Human
uuaguagagaugggguuu

SEQ ID NO: 1297779 - RNA, 22 nt, Human
uuaguagagaugggguuuugcc

SEQ ID NO: 1297780 - RNA, 24 nt, Human
uuaguagagaugggguuuugccau

SEQ ID NO: 1297781 - RNA, 26 nt, Human
uuauagagacggggccucacuaaguu

SEQ ID NO: 1297782 - RNA, 23 nt, Human
uucaagugauucuccugucucag

SEQ ID NO: 1297783 - RNA, 24 nt, Human
uucacugcagccucaaccuccugg

SEQ ID NO: 1297784 - RNA, 23 nt, Human
uucucccucucacccaaccucag

SEQ ID NO: 1297785 - RNA, 19 nt, Human
uucuuucguugcucaggcu

SEQ ID NO: 1297786 - RNA, 23 nt, Human
uugcucaggcugugguacagugg

SEQ ID NO: 1297787 - RNA, 24 nt, Human
uugcucaggcugugguacaguggu

SEQ ID NO: 1297788 - RNA, 18 nt, Human
uuggccucccaaagugcu

SEQ ID NO: 1297789 - RNA, 21 nt, Human
uuguguacaggugcuuacugu

SEQ ID NO: 1297790 - RNA, 18 nt, Human
uuugacaggcucccucca

SEQ ID NO: 1297791 - RNA, 18 nt, Human
uuugcauuuuuaguagag

SEQ ID NO: 1297792 - RNA, 23 nt, Human
uuuugccauguuggccaggcugg

SEQ ID NO: 1297793 - RNA, 21 nt, Human
uuuuuaguagagaugggguuu

SEQ ID NO: 1297794 - RNA, 24 nt, Human
uuuuuaguagagaugggguuuugc

SEQ ID NO: 1297795 - RNA, 22 nt, Human
cugucucagcagauaagcaacu

SEQ ID NO: 1297796 - RNA, 25 nt, Human
gguccaagcaacaguaauuuuuuuu

SEQ ID NO: 1297797 - RNA, 19 nt, Human
gucaagaacugcugucuca

SEQ ID NO: 1297798 - RNA, 18 nt, Human
uagcuggggucaagaacu

SEQ ID NO: 1297799 - RNA, 20 nt, Human
uguagcuggggucaagaacu

SEQ ID NO: 1297800 - RNA, 24 nt, Human
aaaauacucccucuuuuccaauua

SEQ ID NO: 1297801 - RNA, 22 nt, Human
aaauacucccucuuuuccaauu

SEQ ID NO: 1297802 - RNA, 20 nt, Human
acagcaacauauugcaagca

SEQ ID NO: 1297803 - RNA, 19 nt, Human
agcagcauaugcccuccac

SEQ ID NO: 1297804 - RNA, 19 nt, Human
caccucugccuuccagguu

SEQ ID NO: 1297805 - RNA, 21 nt, Human
cagcauaugcccuccaacguu

SEQ ID NO: 1297806 - RNA, 19 nt, Human
ccagguucaagcgacucuc

SEQ ID NO: 1297807 - RNA, 22 nt, Human
ccagguucaagcgacucuccug

SEQ ID NO: 1297808 - RNA, 22 nt, Human
ccuuccagguucaagcgacucu

SEQ ID NO: 1297809 - RNA, 21 nt, Human
cgcgaucucagcucacugcca

SEQ ID NO: 1297810 - RNA, 22 nt, Human
cuguaagaauccagcugucuuc

SEQ ID NO: 1297811 - RNA, 18 nt, Human
gacugcagaaguagcugu

SEQ ID NO: 1297812 - RNA, 22 nt, Human
gccaccucugccuuccagguuc

SEQ ID NO: 1297813 - RNA, 20 nt, Human
uaacccacagauaaguauca

SEQ ID NO: 1297814 - RNA, 24 nt, Human
uaacccacagauaaguaucacaaa

SEQ ID NO: 1297815 - RNA, 18 nt, Human
ucacugccaccucugccu

SEQ ID NO: 1297816 - RNA, 19 nt, Human
ucacugccaccucugccuu

SEQ ID NO: 1297817 - RNA, 24 nt, Human
ucacugccaccucugccuuccagg

SEQ ID NO: 1297818 - RNA, 24 nt, Human
uggcgcgaucucagcucacugcca

SEQ ID NO: 1297819 - RNA, 25 nt, Human
uuaaaauacucccucuuuuccaauu

SEQ ID NO: 1297820 - RNA, 26 nt, Human
uuaaagagauuaaaaaaaaaaaaacc

SEQ ID NO: 1297821 - RNA, 18 nt, Human
uucaagcgacucuccugc

SEQ ID NO: 1297822 - RNA, 24 nt, Human
uuccagguucaagcgacucuccug

SEQ ID NO: 1297823 - RNA, 25 nt, Human
auagucucugaaaauccuccucauu

SEQ ID NO: 1297824 - RNA, 19 nt, Human
auucccugcaugccuuuga

SEQ ID NO: 1297825 - RNA, 22 nt, Human
cauauaaaugacaaaauugcca

SEQ ID NO: 1297826 - RNA, 19 nt, Human
ccuuuagcuauuucuccca

SEQ ID NO: 1297827 - RNA, 21 nt, Human
cgcuggaugggauucccugca

SEQ ID NO: 1297828 - RNA, 21 nt, Human
cucccauauaaaugacaaaau

SEQ ID NO: 1297829 - RNA, 24 nt, Human
cucuccagggcucucacaucagcu

SEQ ID NO: 1297830 - RNA, 19 nt, Human
cugcaugccuuugacugau

SEQ ID NO: 1297831 - RNA, 22 nt, Human
cuuuauacuacaccuuuagcua

SEQ ID NO: 1297832 - RNA, 23 nt, Human
uaaaaaaugagaaauaaaagccc

SEQ ID NO: 1297833 - RNA, 20 nt, Human
ucugaaaauccuccucauug

SEQ ID NO: 1297834 - RNA, 20 nt, Human
ugagaaauaaaagccccaaa

SEQ ID NO: 1297835 - RNA, 24 nt, Human
ugcuaguguguuuucuaacuguau

SEQ ID NO: 1297836 - RNA, 21 nt, Human
uuugacugauguuucucucca

SEQ ID NO: 1297837 - RNA, 22 nt, Human
aaagccaaaaccagcagagcca

SEQ ID NO: 1297838 - RNA, 22 nt, Human
aacaagaagagagucauugugg

SEQ ID NO: 1297839 - RNA, 21 nt, Human
aacuuggcucuuggagaguga

SEQ ID NO: 1297840 - RNA, 22 nt, Human
aagaaggaaaucaggucugaga

SEQ ID NO: 1297841 - RNA, 20 nt, Human
aagguuacagagaaggaaag

SEQ ID NO: 1297842 - RNA, 21 nt, Human
acaaugaugaaggcagguggc

SEQ ID NO: 1297843 - RNA, 19 nt, Human
acacagcacagacgccugc

SEQ ID NO: 1297844 - RNA, 18 nt, Human
acaguaccuggaaggaga

SEQ ID NO: 1297845 - RNA, 21 nt, Human
acaucccugaaccaagggccu

SEQ ID NO: 1297846 - RNA, 20 nt, Human
accuauguucuuucuucccu

SEQ ID NO: 1297847 - RNA, 24 nt, Human
acgacugcccuuccccgugccccu

SEQ ID NO: 1297848 - RNA, 22 nt, Human
acgcggugucuuucagaggguc

SEQ ID NO: 1297849 - RNA, 23 nt, Human
acucccucaccuccaaggauccu

SEQ ID NO: 1297850 - RNA, 24 nt, Human
acugacugcucccugagggaaggu

SEQ ID NO: 1297851 - RNA, 21 nt, Human
acuggacugacugcucccuga

SEQ ID NO: 1297852 - RNA, 22 nt, Human
acuuuuuugugguacacuuguu

SEQ ID NO: 1297853 - RNA, 21 nt, Human
agaaggaaaucaggucugaga

SEQ ID NO: 1297854 - RNA, 18 nt, Human
agacaaacggacgccaga

SEQ ID NO: 1297855 - RNA, 19 nt, Human
agacucaaaggcccugggg

SEQ ID NO: 1297856 - RNA, 25 nt, Human
agagcaggggacaggggagcaacuu

SEQ ID NO: 1297857 - RNA, 23 nt, Human
agaggaagacccugaggcucaga

SEQ ID NO: 1297858 - RNA, 22 nt, Human
agaguuuggcuuuuauucuaaa

SEQ ID NO: 1297859 - RNA, 18 nt, Human
agcaaaacaggaacuccc

SEQ ID NO: 1297860 - RNA, 20 nt, Human
agcaaaacaggaacucccuc

SEQ ID NO: 1297861 - RNA, 18 nt, Human
agcacagggccuggccag

SEQ ID NO: 1297862 - RNA, 22 nt, Human
agcaggggacaggggagcaacu

SEQ ID NO: 1297863 - RNA, 22 nt, Human
agccaaaaccagcagagccaca

SEQ ID NO: 1297864 - RNA, 26 nt, Human
agccacaagcaaaacaggaacucccu

SEQ ID NO: 1297865 - RNA, 21 nt, Human
agcccagcggccagcugcugg

SEQ ID NO: 1297866 - RNA, 20 nt, Human
aggaacucccucaccuccaa

SEQ ID NO: 1297867 - RNA, 22 nt, Human
aggaagaaggaaaucaggucug

SEQ ID NO: 1297868 - RNA, 23 nt, Human
aggaagaaggaaaucaggucuga

SEQ ID NO: 1297869 - RNA, 21 nt, Human
aggaggccucagccugagccc

SEQ ID NO: 1297870 - RNA, 24 nt, Human
aggcaggaggaggccucagccuga

SEQ ID NO: 1297871 - RNA, 18 nt, Human
aggcagguggcugggccc

SEQ ID NO: 1297872 - RNA, 20 nt, Human
aggcucgagcuccgcggcga

SEQ ID NO: 1297873 - RNA, 24 nt, Human
aggcugagcucccaccuggaagcc

SEQ ID NO: 1297874 - RNA, 21 nt, Human
aucagucacugcacaggcccc

SEQ ID NO: 1297875 - RNA, 21 nt, Human
caaaacaggaacucccucacc

SEQ ID NO: 1297876 - RNA, 18 nt, Human
caaaaccagcagagccac

SEQ ID NO: 1297877 - RNA, 21 nt, Human
caagaagagagucauuguggc

SEQ ID NO: 1297878 - RNA, 19 nt, Human
cacacacacaggggcgaga

SEQ ID NO: 1297879 - RNA, 18 nt, Human
caccucugagucccuucc

SEQ ID NO: 1297880 - RNA, 22 nt, Human
cagagaaggaaagccaaaacca

SEQ ID NO: 1297881 - RNA, 19 nt, Human
cagcaccgccuccugugug

SEQ ID NO: 1297882 - RNA, 20 nt, Human
cagcaggccagcccucccuu

SEQ ID NO: 1297883 - RNA, 20 nt, Human
cagcugcuggucugccuccc

SEQ ID NO: 1297884 - RNA, 22 nt, Human
cagcuguacguggcuggguaug

SEQ ID NO: 1297885 - RNA, 22 nt, Human
caggccccgacgacugcccuuc

SEQ ID NO: 1297886 - RNA, 19 nt, Human
caggggagcaacuuggcuc

SEQ ID NO: 1297887 - RNA, 18 nt, Human
cagggguaugugugugcg

SEQ ID NO: 1297888 - RNA, 19 nt, Human
cauccaaacacgccgggca

SEQ ID NO: 1297889 - RNA, 22 nt, Human
caugcacuggcacacccacgug

SEQ ID NO: 1297890 - RNA, 20 nt, Human
cauucccagaguugcgacug

SEQ ID NO: 1297891 - RNA, 18 nt, Human
ccaaauaggcucgagcuc

SEQ ID NO: 1297892 - RNA, 19 nt, Human
ccacaagcaaaacaggaac

SEQ ID NO: 1297893 - RNA, 19 nt, Human
cccacaagcuuagugcagc

SEQ ID NO: 1297894 - RNA, 19 nt, Human
ccccucuaguccucauucc

SEQ ID NO: 1297895 - RNA, 18 nt, Human
ccccugagacuugggcug

SEQ ID NO: 1297896 - RNA, 19 nt, Human
ccccuuggcgcugcccuga

SEQ ID NO: 1297897 - RNA, 22 nt, Human
cccguccagcccccucuagucc

SEQ ID NO: 1297898 - RNA, 21 nt, Human
cccuggggugggaacacucug

SEQ ID NO: 1297899 - RNA, 18 nt, Human
cccuuggcgcugcccuga

SEQ ID NO: 1297900 - RNA, 20 nt, Human
ccucgcuguccguccgugcc

SEQ ID NO: 1297901 - RNA, 20 nt, Human
ccucuaguccucauucccuc

SEQ ID NO: 1297902 - RNA, 19 nt, Human
ccuggaagcccagcugggc

SEQ ID NO: 1297903 - RNA, 21 nt, Human
ccuggccagcauagaucucug

SEQ ID NO: 1297904 - RNA, 25 nt, Human
ccuggggggagguggacagaggaag

SEQ ID NO: 1297905 - RNA, 20 nt, Human
cgagugguacgggcacgggg

SEQ ID NO: 1297906 - RNA, 21 nt, Human
cgccaaauaggcucgagcucc

SEQ ID NO: 1297907 - RNA, 20 nt, Human
cgcugaggccucggacagac

SEQ ID NO: 1297908 - RNA, 21 nt, Human
cgggcacggggagcccgcgug

SEQ ID NO: 1297909 - RNA, 18 nt, Human
cgggcgggaagcuuccgc

SEQ ID NO: 1297910 - RNA, 24 nt, Human
cgugugcauggaugggcucgcaca

SEQ ID NO: 1297911 - RNA, 27 nt, Human
cucagccugagcccgcggccccuuggc

SEQ ID NO: 1297912 - RNA, 21 nt, Human
cucauucccagaguugcgacu

SEQ ID NO: 1297913 - RNA, 18 nt, Human
cuccaaggauccugguau

SEQ ID NO: 1297914 - RNA, 21 nt, Human
cuccacuggacugacugcucc

SEQ ID NO: 1297915 - RNA, 24 nt, Human
cucccgcgcugggucccaggguuc

SEQ ID NO: 1297916 - RNA, 23 nt, Human
cuccgauaaucugcuuucccgag

SEQ ID NO: 1297917 - RNA, 21 nt, Human
cucugggauaggggcagguug

SEQ ID NO: 1297918 - RNA, 21 nt, Human
cugcccacaagcuuagugcag

SEQ ID NO: 1297919 - RNA, 21 nt, Human
cugcccugaacuggccuggga

SEQ ID NO: 1297920 - RNA, 23 nt, Human
cugcggccuucucuccacucucu

SEQ ID NO: 1297921 - RNA, 19 nt, Human
cugcuggucugccucccgc

SEQ ID NO: 1297922 - RNA, 22 nt, Human
cugggucccaggguucgcgcuc

SEQ ID NO: 1297923 - RNA, 18 nt, Human
cugugguuccaauucuca

SEQ ID NO: 1297924 - RNA, 18 nt, Human
gaacacucuggaacaaga

SEQ ID NO: 1297925 - RNA, 18 nt, Human
gaacccuccaaccgccuc

SEQ ID NO: 1297926 - RNA, 21 nt, Human
gaacucccucaccuccaagga

SEQ ID NO: 1297927 - RNA, 21 nt, Human
gacagacaaacggacgccaga

SEQ ID NO: 1297928 - RNA, 18 nt, Human
gagacuauuucagacugu

SEQ ID NO: 1297929 - RNA, 21 nt, Human
gagguggacagaggaagaccc

SEQ ID NO: 1297930 - RNA, 19 nt, Human
gaguugcgacugaugccaa

SEQ ID NO: 1297931 - RNA, 18 nt, Human
gauaaagagaaaugacaa

SEQ ID NO: 1297932 - RNA, 18 nt, Human
gccccggcaggcaggcga

SEQ ID NO: 1297933 - RNA, 19 nt, Human
gcccgcgugcccccagcaa

SEQ ID NO: 1297934 - RNA, 25 nt, Human
gcccugaacuggccugggagggggu

SEQ ID NO: 1297935 - RNA, 19 nt, Human
gcccuggggugggaacacu

SEQ ID NO: 1297936 - RNA, 24 nt, Human
gccuggguuuacaaaacaaaccuc

SEQ ID NO: 1297937 - RNA, 22 nt, Human
gcucgguccuggcguucacagc

SEQ ID NO: 1297938 - RNA, 18 nt, Human
gcugcggccuucucucca

SEQ ID NO: 1297939 - RNA, 23 nt, Human
gcuuuguuugcugcuguauaucu

SEQ ID NO: 1297940 - RNA, 19 nt, Human
ggaaagccaaaaccagcag

SEQ ID NO: 1297941 - RNA, 20 nt, Human
ggacagacaaacggacgcca

SEQ ID NO: 1297942 - RNA, 22 nt, Human
ggacaggggagcaacuuggcuc

SEQ ID NO: 1297943 - RNA, 22 nt, Human
ggagacgccaaauaggcucgag

SEQ ID NO: 1297944 - RNA, 21 nt, Human
ggagcaacuuggcucuuggag

SEQ ID NO: 1297945 - RNA, 18 nt, Human
ggaugggcucgcacacuu

SEQ ID NO: 1297946 - RNA, 22 nt, Human
ggcagcuuugccggacacgggg

SEQ ID NO: 1297947 - RNA, 20 nt, Human
ggccugaagugggugggugg

SEQ ID NO: 1297948 - RNA, 22 nt, Human
ggcgcacacucaguggccccgg

SEQ ID NO: 1297949 - RNA, 23 nt, Human
gggcgcacacucaguggccccgg

SEQ ID NO: 1297950 - RNA, 21 nt, Human
ggggccucagugguucucucc

SEQ ID NO: 1297951 - RNA, 19 nt, Human
ggguaugugugcaggggua

SEQ ID NO: 1297952 - RNA, 21 nt, Human
gggugacgggggcgcgcccgc

SEQ ID NO: 1297953 - RNA, 23 nt, Human
ggguuuacaaaacaaaccucuuu

SEQ ID NO: 1297954 - RNA, 24 nt, Human
ggugacgggggcgcgcccgcggaa

SEQ ID NO: 1297955 - RNA, 19 nt, Human
gugguucucucccuccauc

SEQ ID NO: 1297956 - RNA, 23 nt, Human
gugugcauggaugggcucgcaca

SEQ ID NO: 1297957 - RNA, 22 nt, Human
uaaacuguagccuuuggcaguu

SEQ ID NO: 1297958 - RNA, 26 nt, Human
uaauagaaccuguggauggggcugcu

SEQ ID NO: 1297959 - RNA, 23 nt, Human
uaaucaccaccgccucaugacaa

SEQ ID NO: 1297960 - RNA, 22 nt, Human
uaauuuguggagauuuuucgau

SEQ ID NO: 1297961 - RNA, 21 nt, Human
uacgggcacggggagcccgcg

SEQ ID NO: 1297962 - RNA, 21 nt, Human
uacguggcuggguaugugugc

SEQ ID NO: 1297963 - RNA, 21 nt, Human
uagaaccuguggauggggcug

SEQ ID NO: 1297964 - RNA, 23 nt, Human
uagagggggagucagacaacaca

SEQ ID NO: 1297965 - RNA, 23 nt, Human
uagcacauuauuuaaaagugcug

SEQ ID NO: 1297966 - RNA, 18 nt, Human
uagccacaagcaaaacag

SEQ ID NO: 1297967 - RNA, 23 nt, Human
uaugugugcagggguaugugugu

SEQ ID NO: 1297968 - RNA, 21 nt, Human
ucagucacugcacaggccccu

SEQ ID NO: 1297969 - RNA, 21 nt, Human
ucaucggccgccuccggacac

SEQ ID NO: 1297970 - RNA, 22 nt, Human
uccaaacacgccgggcacaccg

SEQ ID NO: 1297971 - RNA, 18 nt, Human
uccacggcagagaugggg

SEQ ID NO: 1297972 - RNA, 19 nt, Human
ucccaggguagcucaccuu

SEQ ID NO: 1297973 - RNA, 22 nt, Human
ucccgacccccuggccugagcu

SEQ ID NO: 1297974 - RNA, 23 nt, Human
uccgcccccaugggcacagcggg

SEQ ID NO: 1297975 - RNA, 18 nt, Human
uccucauucccucauucc

SEQ ID NO: 1297976 - RNA, 21 nt, Human
uccucauucccucauucccag

SEQ ID NO: 1297977 - RNA, 22 nt, Human
ucguaagcugcgcugaggccuc

SEQ ID NO: 1297978 - RNA, 20 nt, Human
ucuauaauuuccugucgcuu

SEQ ID NO: 1297979 - RNA, 18 nt, Human
ucucagagcuccuggcca

SEQ ID NO: 1297980 - RNA, 19 nt, Human
ucucagagcuccuggccaa

SEQ ID NO: 1297981 - RNA, 24 nt, Human
ucucagagcuccuggccaaggagu

SEQ ID NO: 1297982 - RNA, 21 nt, Human
ucugggguccaugacagugug

SEQ ID NO: 1297983 - RNA, 23 nt, Human
ucuuucuucccucagcauucuuc

SEQ ID NO: 1297984 - RNA, 22 nt, Human
ugacgggcacaucccugaacca

SEQ ID NO: 1297985 - RNA, 20 nt, Human
ugacuugcguacagccaccc

SEQ ID NO: 1297986 - RNA, 21 nt, Human
ugagggaagguaccauggcug

SEQ ID NO: 1297987 - RNA, 23 nt, Human
ugaggggaaggaggaguuaccgu

SEQ ID NO: 1297988 - RNA, 20 nt, Human
ugaugaaggcagguggcugg

SEQ ID NO: 1297989 - RNA, 25 nt, Human
ugcccuuccccgugccccucucuca

SEQ ID NO: 1297990 - RNA, 19 nt, Human
ugccugcccaucagcgcuc

SEQ ID NO: 1297991 - RNA, 20 nt, Human
ugcggaggagauggggggag

SEQ ID NO: 1297992 - RNA, 19 nt, Human
ugcuggucugccucccgcg

SEQ ID NO: 1297993 - RNA, 20 nt, Human
uggaagcccagcugggcugc

SEQ ID NO: 1297994 - RNA, 18 nt, Human
uggaggggacaguagacu

SEQ ID NO: 1297995 - RNA, 20 nt, Human
uggcacacccacguguccaa

SEQ ID NO: 1297996 - RNA, 21 nt, Human
uggcugcagugaggaagaagg

SEQ ID NO: 1297997 - RNA, 19 nt, Human
uggcugggcccguccagcc

SEQ ID NO: 1297998 - RNA, 20 nt, Human
ugggagggggugacgggggc

SEQ ID NO: 1297999 - RNA, 21 nt, Human
ugggagggggugacgggggcg

SEQ ID NO: 1298000 - RNA, 20 nt, Human
ugggaugcguucucagaaac

SEQ ID NO: 1298001 - RNA, 23 nt, Human
ugggugggaacccuggugcacag

SEQ ID NO: 1298002 - RNA, 21 nt, Human
uggguuuacaaaacaaaccuc

SEQ ID NO: 1298003 - RNA, 20 nt, Human
ugguaaugaucagucacugc

SEQ ID NO: 1298004 - RNA, 18 nt, Human
ugguggggcuggaguggc

SEQ ID NO: 1298005 - RNA, 20 nt, Human
ugguggggcuggaguggcug

SEQ ID NO: 1298006 - RNA, 19 nt, Human
ugugcagggguaugugugu

SEQ ID NO: 1298007 - RNA, 23 nt, Human
ugugguacacuuguuugacacac

SEQ ID NO: 1298008 - RNA, 24 nt, Human
ugugguuccaauucucacaggcug

SEQ ID NO: 1298009 - RNA, 19 nt, Human
ugugugcagggguaugugu

SEQ ID NO: 1298010 - RNA, 22 nt, Human
ugugugugcggaggagaugggg

SEQ ID NO: 1298011 - RNA, 22 nt, Human
uguucuccgcccccaugggccu

SEQ ID NO: 1298012 - RNA, 22 nt, Human
uuagugcagcaccgccuccugu

SEQ ID NO: 1298013 - RNA, 21 nt, Human
uuauucuaaauucagugggau

SEQ ID NO: 1298014 - RNA, 24 nt, Human
uucacagcccagcggccagcugcu

SEQ ID NO: 1298015 - RNA, 25 nt, Human
uucucagagcuccuggccaaggagu

SEQ ID NO: 1298016 - RNA, 18 nt, Human
uucugccaguaauccugg

SEQ ID NO: 1298017 - RNA, 22 nt, Human
uuggaagguuacagagaaggaa

SEQ ID NO: 1298018 - RNA, 21 nt, Human
uuggggcauuucugagggaag

SEQ ID NO: 1298019 - RNA, 18 nt, Human
uugguggggcuggagugg

SEQ ID NO: 1298020 - RNA, 19 nt, Human
uugguggggcuggaguggc

SEQ ID NO: 1298021 - RNA, 19 nt, Human
uuuauauauuaugcuucca

SEQ ID NO: 1298022 - RNA, 18 nt, Human
aaucgcuugaaccuggga

SEQ ID NO: 1298023 - RNA, 24 nt, Human
aaucgcuugaaccugggaggcaga

SEQ ID NO: 1298024 - RNA, 23 nt, Human
accuauaguuccagcuacucggg

SEQ ID NO: 1298025 - RNA, 23 nt, Human
acugcagagagccacucacugau

SEQ ID NO: 1298026 - RNA, 22 nt, Human
agaaucgcuugaaccugggagg

SEQ ID NO: 1298027 - RNA, 19 nt, Human
agccacucacugauuuuca

SEQ ID NO: 1298028 - RNA, 22 nt, Human
aggcaggagaaucgcuugaacc

SEQ ID NO: 1298029 - RNA, 24 nt, Human
aggcaggagaaucgcuugaaccug

SEQ ID NO: 1298030 - RNA, 20 nt, Human
aggcugaggcaggagaaucg

SEQ ID NO: 1298031 - RNA, 24 nt, Human
aggcugaggcaggagaaucgcuug

SEQ ID NO: 1298032 - RNA, 24 nt, Human
cagcuacucgggaggcugaggcag

SEQ ID NO: 1298033 - RNA, 21 nt, Human
ccccuagaugaccuauaguuc

SEQ ID NO: 1298034 - RNA, 21 nt, Human
ccuauaguuccagcuacucgg

SEQ ID NO: 1298035 - RNA, 21 nt, Human
gagagccacucacugauuuuc

SEQ ID NO: 1298036 - RNA, 18 nt, Human
gucucaauccucauacuu

SEQ ID NO: 1298037 - RNA, 25 nt, Human
guugcuagagugaauaaccuuguga

SEQ ID NO: 1298038 - RNA, 27 nt, Human
ucaauccucauacuucuguuuuccccu

SEQ ID NO: 1298039 - RNA, 18 nt, Human
ucgcuugaaccugggagg

SEQ ID NO: 1298040 - RNA, 24 nt, Human
ucgggaggcugaggcaggagaauc

SEQ ID NO: 1298041 - RNA, 20 nt, Human
ugaggcaggagaaucgcuug

SEQ ID NO: 1298042 - RNA, 24 nt, Human
ugaggcaggagaaucgcuugaacc

SEQ ID NO: 1298043 - RNA, 24 nt, Human
ugaggcaggagaaucgcuugaacc

SEQ ID NO: 1298044 - RNA, 19 nt, Human
uguaaccacugcagagagc

SEQ ID NO: 1298045 - RNA, 19 nt, Human
uuagaacauaguauauauu

SEQ ID NO: 1298046 - RNA, 23 nt, Human
uuuuuuaguugcuagagugaaua

SEQ ID NO: 1298047 - RNA, 22 nt, Human
cagucucuucuccucuuucaaa

SEQ ID NO: 1298048 - RNA, 19 nt, Human
ggaguacagacucaauucg

SEQ ID NO: 1298049 - RNA, 22 nt, Human
ucgaacaguguauccacagcuu

SEQ ID NO: 1298050 - RNA, 22 nt, Human
uuuccagucucuucuccucuuu

SEQ ID NO: 1298051 - RNA, 25 nt, Human
aagcaucaggauuacacuuuaaaga

SEQ ID NO: 1298052 - RNA, 20 nt, Human
aagggcuggcaaaauccagg

SEQ ID NO: 1298053 - RNA, 20 nt, Human
acaauacaagggguaggcac

SEQ ID NO: 1298054 - RNA, 24 nt, Human
accagcaccaacuucaucuggaaa

SEQ ID NO: 1298055 - RNA, 23 nt, Human
acuggaacagcaaaagggcuggu

SEQ ID NO: 1298056 - RNA, 20 nt, Human
aguuacaauuuuagcugcuu

SEQ ID NO: 1298057 - RNA, 19 nt, Human
auuagagguauaagcuuug

SEQ ID NO: 1298058 - RNA, 19 nt, Human
auucagagaugauauuuuu

SEQ ID NO: 1298059 - RNA, 19 nt, Human
auuuguuucugcuucccuu

SEQ ID NO: 1298060 - RNA, 19 nt, Human
caacuucaucuggaaaggc

SEQ ID NO: 1298061 - RNA, 21 nt, Human
caagucuccgccugaugguaa

SEQ ID NO: 1298062 - RNA, 23 nt, Human
caauacaagggguaggcacugag

SEQ ID NO: 1298063 - RNA, 23 nt, Human
cacuuuaaagacugucuucugcc

SEQ ID NO: 1298064 - RNA, 20 nt, Human
cagaggacuaccauaguuuc

SEQ ID NO: 1298065 - RNA, 21 nt, Human
cagagucagaaccacagguac

SEQ ID NO: 1298066 - RNA, 25 nt, Human
cagcaaaagggcuggcaaaauccag

SEQ ID NO: 1298067 - RNA, 19 nt, Human
caucuggaaaggcaguucc

SEQ ID NO: 1298068 - RNA, 19 nt, Human
ccccaauaaaucgaaguaa

SEQ ID NO: 1298069 - RNA, 19 nt, Human
ccguggccuucuccucuuc

SEQ ID NO: 1298070 - RNA, 24 nt, Human
ccguggccuucuccucuucugacu

SEQ ID NO: 1298071 - RNA, 19 nt, Human
ccucugcaucaguacuguu

SEQ ID NO: 1298072 - RNA, 21 nt, Human
ccuucuccucuucugacucug

SEQ ID NO: 1298073 - RNA, 27 nt, Human
cgauuuucaagucuccgccugauggua

SEQ ID NO: 1298074 - RNA, 22 nt, Human
cguggccuucuccucuucugaa

SEQ ID NO: 1298075 - RNA, 23 nt, Human
cuuucuggaacaacagacucuga

SEQ ID NO: 1298076 - RNA, 21 nt, Human
gagaugauauuuuugauauga

SEQ ID NO: 1298077 - RNA, 18 nt, Human
uaaaauuccagaggacua

SEQ ID NO: 1298078 - RNA, 23 nt, Human
uaaggcagauaaucgcagcauca

SEQ ID NO: 1298079 - RNA, 18 nt, Human
uacuagauaaugaacugc

SEQ ID NO: 1298080 - RNA, 18 nt, Human
uagcguaccucccacauu

SEQ ID NO: 1298081 - RNA, 24 nt, Human
uagcguaccucccacauuaaugcu

SEQ ID NO: 1298082 - RNA, 21 nt, Human
uauaaguauccaguauaucag

SEQ ID NO: 1298083 - RNA, 19 nt, Human
ucagaaagagaugaaucuu

SEQ ID NO: 1298084 - RNA, 20 nt, Human
ucagagucagaaccacaggu

SEQ ID NO: 1298085 - RNA, 24 nt, Human
ucuggaaugagccccccacucucc

SEQ ID NO: 1298086 - RNA, 23 nt, Human
ucuguaccguggccuucuccucu

SEQ ID NO: 1298087 - RNA, 21 nt, Human
ucuuccugggagacaggaacu

SEQ ID NO: 1298088 - RNA, 20 nt, Human
ugaaucuuguugucuuucug

SEQ ID NO: 1298089 - RNA, 25 nt, Human
uggaacagcaaaagggcuggcaaaa

SEQ ID NO: 1298090 - RNA, 24 nt, Human
uggauaagcaacuacaguacaaua

SEQ ID NO: 1298091 - RNA, 25 nt, Human
ugggagacaggaacaccagcaccaa

SEQ ID NO: 1298092 - RNA, 26 nt, Human
uguuucguucuucugcuuuaauuuua

SEQ ID NO: 1298093 - RNA, 19 nt, Human
uuagacguuuucuguaccg

SEQ ID NO: 1298094 - RNA, 19 nt, Human
uucagagucagagucagaa

SEQ ID NO: 1298095 - RNA, 21 nt, Human
uucucucucauuauuguccca

SEQ ID NO: 1298096 - RNA, 20 nt, Human
uugaauauuuggcgaacauc

SEQ ID NO: 1298097 - RNA, 21 nt, Human
uugcauuguuuuuuccaagca

SEQ ID NO: 1298098 - RNA, 21 nt, Human
uuuaaagacugucuucugccu

SEQ ID NO: 1298099 - RNA, 23 nt, Human
uuuauuagagguauaagcuuugg

SEQ ID NO: 1298100 - RNA, 23 nt, Human
caacuucacugaaaggauuagau

SEQ ID NO: 1298101 - RNA, 25 nt, Human
gaccacugcuuccugcauucacuuu

SEQ ID NO: 1298102 - RNA, 27 nt, Human
ucccuguaauuucagguaaaucucugg

SEQ ID NO: 1298103 - RNA, 22 nt, Human
ugagcccagugugaccacugcu

SEQ ID NO: 1298104 - RNA, 23 nt, Human
ugagcccagugugaccacugcuu

SEQ ID NO: 1298105 - RNA, 18 nt, Human
ugugaccacugcuuccug

SEQ ID NO: 1298106 - RNA, 21 nt, Human
uucacuuuaccccagugugac

SEQ ID NO: 1298107 - RNA, 22 nt, Human
caccaguuacauagggcugccc

SEQ ID NO: 1298108 - RNA, 18 nt, Human
ccucuuccuucucuuugc

SEQ ID NO: 1298109 - RNA, 23 nt, Human
uuccucuuccuucucuuugcaga

SEQ ID NO: 1298110 - RNA, 24 nt, Human
uuccucuuccuucucuuugcagac

SEQ ID NO: 1298111 - RNA, 22 nt, Human
aggcggcggugcagcgcggcgg

SEQ ID NO: 1298112 - RNA, 23 nt, Human
agguccucaacacaggggggucu

SEQ ID NO: 1298113 - RNA, 18 nt, Human
aguacugauuugagguug

SEQ ID NO: 1298114 - RNA, 21 nt, Human
aucggcuuuccucaucuaggu

SEQ ID NO: 1298115 - RNA, 20 nt, Human
cggugcgguggcccagcgcg

SEQ ID NO: 1298116 - RNA, 21 nt, Human
cuccugcuggugccacggggc

SEQ ID NO: 1298117 - RNA, 18 nt, Human
cuuguggugggaaggaac

SEQ ID NO: 1298118 - RNA, 19 nt, Human
gcagcggcggcuugcaggg

SEQ ID NO: 1298119 - RNA, 26 nt, Human
gccgcaacuuaucgcauuuugcgugc

SEQ ID NO: 1298120 - RNA, 22 nt, Human
gcggugcgguggcccagcgcgg

SEQ ID NO: 1298121 - RNA, 19 nt, Human
ggcggcggugcagcgcggc

SEQ ID NO: 1298122 - RNA, 21 nt, Human
uaguggacuguccaucggcuu

SEQ ID NO: 1298123 - RNA, 22 nt, Human
uaucgcauucccucaguacuga

SEQ ID NO: 1298124 - RNA, 22 nt, Human
ugggaaggaacacauucuccug

SEQ ID NO: 1298125 - RNA, 18 nt, Human
uuggcggugcagguccuc

SEQ ID NO: 1298126 - RNA, 19 nt, Human
aagcggagguugcaaugag

SEQ ID NO: 1298127 - RNA, 24 nt, Human
aauugcuugaauccaggaagcgga

SEQ ID NO: 1298128 - RNA, 25 nt, Human
acacagcaagacucuguccauaaaa

SEQ ID NO: 1298129 - RNA, 24 nt, Human
acaccacugcacucuagcuugggc

SEQ ID NO: 1298130 - RNA, 21 nt, Human
accacagguuccuucccaaca

SEQ ID NO: 1298131 - RNA, 24 nt, Human
accacugcacucuagcuugggcga

SEQ ID NO: 1298132 - RNA, 18 nt, Human
acugcacucuagcuuggg

SEQ ID NO: 1298133 - RNA, 25 nt, Human
acugcacucuagcuugggcgacaca

SEQ ID NO: 1298134 - RNA, 20 nt, Human
acuuuaacgggaaagaaaaa

SEQ ID NO: 1298135 - RNA, 20 nt, Human
agagaagccagcacaaaccc

SEQ ID NO: 1298136 - RNA, 25 nt, Human
agagaagccagcacaaaccggaccc

SEQ ID NO: 1298137 - RNA, 24 nt, Human
agccuguagucccagcuacuuggg

SEQ ID NO: 1298138 - RNA, 24 nt, Human
agcuugggcgacacagcaagacuc

SEQ ID NO: 1298139 - RNA, 20 nt, Human
agguuccuucccaacagucc

SEQ ID NO: 1298140 - RNA, 23 nt, Human
agugauagagaagccagcacaaa

SEQ ID NO: 1298141 - RNA, 24 nt, Human
augacaccacugcacucuagcuug

SEQ ID NO: 1298142 - RNA, 20 nt, Human
auggguguaauguguguaag

SEQ ID NO: 1298143 - RNA, 24 nt, Human
caaaaguccacaguccaaagucuc

SEQ ID NO: 1298144 - RNA, 19 nt, Human
cacugcacucuagcuuggg

SEQ ID NO: 1298145 - RNA, 21 nt, Human
cacugcacucuagcuugggcg

SEQ ID NO: 1298146 - RNA, 22 nt, Human
cacugcacucuagcuugggcga

SEQ ID NO: 1298147 - RNA, 23 nt, Human
cacugcacucuagcuugggcgac

SEQ ID NO: 1298148 - RNA, 24 nt, Human
cacugcacucuagcuugggcgaca

SEQ ID NO: 1298149 - RNA, 22 nt, Human
cagcacaaacccacuuuaacgg

SEQ ID NO: 1298150 - RNA, 24 nt, Human
ccacagguuccuucccaacagucc

SEQ ID NO: 1298151 - RNA, 20 nt, Human
ccacugcacucuagcuuggg

SEQ ID NO: 1298152 - RNA, 21 nt, Human
ccacugcacucuagcuugggc

SEQ ID NO: 1298153 - RNA, 21 nt, Human
ccacugcacucuagcuugggc

SEQ ID NO: 1298154 - RNA, 23 nt, Human
ccacugcacucuagcuugggcga

SEQ ID NO: 1298155 - RNA, 24 nt, Human
ccacugcacucuagcuugggcgac

SEQ ID NO: 1298156 - RNA, 21 nt, Human
cccaaaaguccacaguccaaa

SEQ ID NO: 1298157 - RNA, 18 nt, Human
cccaggaacuccaaaaau

SEQ ID NO: 1298158 - RNA, 18 nt, Human
ccuguagucccagcuacu

SEQ ID NO: 1298159 - RNA, 21 nt, Human
ccuguagucccagcuacuugg

SEQ ID NO: 1298160 - RNA, 21 nt, Human
cgggaaagaaaaaguacuuau

SEQ ID NO: 1298161 - RNA, 29 nt, Human
cuuuugcugcgucagcuucauuuuuaacu

SEQ ID NO: 1298162 - RNA, 19 nt, Human
gagguugcaaugagcccag

SEQ ID NO: 1298163 - RNA, 19 nt, Human
ggagguugcaaugagccca

SEQ ID NO: 1298164 - RNA, 20 nt, Human
ggagguugcaaugagcccag

SEQ ID NO: 1298165 - RNA, 22 nt, Human
ggcaugagaauugcuugaaucc

SEQ ID NO: 1298166 - RNA, 19 nt, Human
guuuuauggguguaaugug

SEQ ID NO: 1298167 - RNA, 18 nt, Human
uaauagugguaacagacu

SEQ ID NO: 1298168 - RNA, 20 nt, Human
uagagaagccagcacaaacc

SEQ ID NO: 1298169 - RNA, 24 nt, Human
uagcuugggcgacacagcaagacu

SEQ ID NO: 1298170 - RNA, 20 nt, Human
uaguuccuuggcacugccuu

SEQ ID NO: 1298171 - RNA, 21 nt, Human
uauggguguaauguguguaag

SEQ ID NO: 1298172 - RNA, 23 nt, Human
uauguguagggcccgaacagagu

SEQ ID NO: 1298173 - RNA, 21 nt, Human
uccacaguccaaagucucauc

SEQ ID NO: 1298174 - RNA, 27 nt, Human
uccacaguccaaagucucaucugagac

SEQ ID NO: 1298175 - RNA, 27 nt, Human
ugaaaucuaauuuuagauguuguuucu

SEQ ID NO: 1298176 - RNA, 23 nt, Human
ugacccaggaacuccaaaaaugu

SEQ ID NO: 1298177 - RNA, 22 nt, Human
ugagugauagagaagccagcac

SEQ ID NO: 1298178 - RNA, 19 nt, Human
ugcuugaauccaggaagcg

SEQ ID NO: 1298179 - RNA, 20 nt, Human
uguaguuucaauaaaacauu

SEQ ID NO: 1298180 - RNA, 25 nt, Human
uguguaagagguaggaaguguugcc

SEQ ID NO: 1298181 - RNA, 21 nt, Human
uguuuuauggguguaaugugu

SEQ ID NO: 1298182 - RNA, 18 nt, Human
uucuuuuaguuccuuggc

SEQ ID NO: 1298183 - RNA, 24 nt, Human
uugcuugaauccaggaagcggagg

SEQ ID NO: 1298184 - RNA, 29 nt, Human
aaaaaaacaaaaaaugaaaaacaaaaaag

SEQ ID NO: 1298185 - RNA, 22 nt, Human
aaaaaacaaaaaaugaaaaaca

SEQ ID NO: 1298186 - RNA, 23 nt, Human
aaaacaaaaaaugaaaaacaaaa

SEQ ID NO: 1298187 - RNA, 24 nt, Human
aaaacaaaaaaugaaaaacaaaaa

SEQ ID NO: 1298188 - RNA, 21 nt, Human
aaacuacaguuuaaucauuug

SEQ ID NO: 1298189 - RNA, 18 nt, Human
aagaaaagagaguuuaaa

SEQ ID NO: 1298190 - RNA, 22 nt, Human
aagaaaagagaguuuaaaacac

SEQ ID NO: 1298191 - RNA, 25 nt, Human
aagaggaagcaggagcagacagaga

SEQ ID NO: 1298192 - RNA, 21 nt, Human
aagcagaagcugaaaaaacaa

SEQ ID NO: 1298193 - RNA, 23 nt, Human
aagcagaagcugaaaaaacaauu

SEQ ID NO: 1298194 - RNA, 25 nt, Human
aagcagaagcugaaaaaagggaccc

SEQ ID NO: 1298195 - RNA, 20 nt, Human
aaguacaacaaaaccgaugc

SEQ ID NO: 1298196 - RNA, 19 nt, Human
aagucugcucuucuauaac

SEQ ID NO: 1298197 - RNA, 23 nt, Human
aauaucaucaccaaccucaaacu

SEQ ID NO: 1298198 - RNA, 18 nt, Human
acacaaaccaggaugugg

SEQ ID NO: 1298199 - RNA, 22 nt, Human
acaguuuaaucauuugagggag

SEQ ID NO: 1298200 - RNA, 20 nt, Human
acccaugcagccuaaugcca

SEQ ID NO: 1298201 - RNA, 24 nt, Human
accccuaccccgggaaaaaaaaac

SEQ ID NO: 1298202 - RNA, 20 nt, Human
acuacaguuuaaucauuuga

SEQ ID NO: 1298203 - RNA, 20 nt, Human
agcacuuuaggguugguuga

SEQ ID NO: 1298204 - RNA, 21 nt, Human
aggaagccaacaagaggaagc

SEQ ID NO: 1298205 - RNA, 19 nt, Human
aggcaaaacacaaaccagg

SEQ ID NO: 1298206 - RNA, 23 nt, Human
agggggguaggagaagguuggag

SEQ ID NO: 1298207 - RNA, 23 nt, Human
auacuguaauccagaaaucugcu

SEQ ID NO: 1298208 - RNA, 23 nt, Human
aucuguaccuacaucacucuuca

SEQ ID NO: 1298209 - RNA, 19 nt, Human
caaaauacugaaauugacu

SEQ ID NO: 1298210 - RNA, 23 nt, Human
caaaauacugaaauugacugaua

SEQ ID NO: 1298211 - RNA, 18 nt, Human
caaauacuguaauccaga

SEQ ID NO: 1298212 - RNA, 24 nt, Human
caacaaaauacugaaauugacuga

SEQ ID NO: 1298213 - RNA, 24 nt, Human
caacaaacuugauggaaacucuaa

SEQ ID NO: 1298214 - RNA, 24 nt, Human
caagagcacuuuaggguugguuga

SEQ ID NO: 1298215 - RNA, 22 nt, Human
caaguacaacaaaaccgaugcu

SEQ ID NO: 1298216 - RNA, 19 nt, Human
caauaugcaccccuacccc

SEQ ID NO: 1298217 - RNA, 21 nt, Human
cacaagcagaagcugaaaaaa

SEQ ID NO: 1298218 - RNA, 20 nt, Human
caggacccucagaauguuua

SEQ ID NO: 1298219 - RNA, 18 nt, Human
cagggggguaggagaagg

SEQ ID NO: 1298220 - RNA, 24 nt, Human
cauaaaacguccaggacccucaga

SEQ ID NO: 1298221 - RNA, 20 nt, Human
caucugugcaucuguaccua

SEQ ID NO: 1298222 - RNA, 22 nt, Human
ccaacaagaggaagcaggagca

SEQ ID NO: 1298223 - RNA, 21 nt, Human
ccaaccucaaacuggaacuaa

SEQ ID NO: 1298224 - RNA, 23 nt, Human
ccaaguacaacaaaaccgaugcu

SEQ ID NO: 1298225 - RNA, 21 nt, Human
ccaugcagccuaaugccaugu

SEQ ID NO: 1298226 - RNA, 19 nt, Human
cccaugcagccuaaugcca

SEQ ID NO: 1298227 - RNA, 21 nt, Human
cccaugcagccuaaugccaug

SEQ ID NO: 1298228 - RNA, 23 nt, Human
ccuaaugccauguugcuucucug

SEQ ID NO: 1298229 - RNA, 20 nt, Human
ccuucaagaccagcugcuac

SEQ ID NO: 1298230 - RNA, 19 nt, Human
cggcuccauuaucuccagg

SEQ ID NO: 1298231 - RNA, 18 nt, Human
cuaauagaaauaaucaua

SEQ ID NO: 1298232 - RNA, 26 nt, Human
cuacuagaaugauucuaauuuacugg

SEQ ID NO: 1298233 - RNA, 22 nt, Human
cucacaacaaacuugauggaaa

SEQ ID NO: 1298234 - RNA, 23 nt, Human
cucagcgguggggccaacucgau

SEQ ID NO: 1298235 - RNA, 19 nt, Human
gaacacaguacacacaucc

SEQ ID NO: 1298236 - RNA, 21 nt, Human
gaagucacaagcagaagcuga

SEQ ID NO: 1298237 - RNA, 21 nt, Human
gagaguuuaaaacacugcagg

SEQ ID NO: 1298238 - RNA, 23 nt, Human
gccauguugcuucucuggcacua

SEQ ID NO: 1298239 - RNA, 24 nt, Human
ggcacaggaagccaacaagaggaa

SEQ ID NO: 1298240 - RNA, 22 nt, Human
ggcgaacagaaauuaagaagaa

SEQ ID NO: 1298241 - RNA, 22 nt, Human
gggaaaaaaaaacaaaaaauga

SEQ ID NO: 1298242 - RNA, 22 nt, Human
ggguaggagaagguuggaggga

SEQ ID NO: 1298243 - RNA, 25 nt, Human
guaaaagacggcuccauuaucucca

SEQ ID NO: 1298244 - RNA, 23 nt, Human
gugaacacaguacacacauccaa

SEQ ID NO: 1298245 - RNA, 19 nt, Human
uaaaacguccaggacccuc

SEQ ID NO: 1298246 - RNA, 20 nt, Human
uaagucugcucuucuauaac

SEQ ID NO: 1298247 - RNA, 21 nt, Human
uaagucugcucuucuauaacc

SEQ ID NO: 1298248 - RNA, 24 nt, Human
uacaucacucuucaguuuaccaaa

SEQ ID NO: 1298249 - RNA, 21 nt, Human
uaccccgggaaaaaaaaacaa

SEQ ID NO: 1298250 - RNA, 24 nt, Human
uaccccgggaaaaaaaaacaaaaa

SEQ ID NO: 1298251 - RNA, 22 nt, Human
uacuguaauccagaaaucugcu

SEQ ID NO: 1298252 - RNA, 22 nt, Human
uacuuggcuauauaaaguuuaa

SEQ ID NO: 1298253 - RNA, 24 nt, Human
uagaauaaaaaucuuugucaaagc

SEQ ID NO: 1298254 - RNA, 18 nt, Human
uaggagaagguuggaggg

SEQ ID NO: 1298255 - RNA, 18 nt, Human
uaggcaaaacacaaacca

SEQ ID NO: 1298256 - RNA, 23 nt, Human
uaggcaaaacacaaaccaggaug

SEQ ID NO: 1298257 - RNA, 27 nt, Human
uauacuuuggcaguuuuuuuuuggugg

SEQ ID NO: 1298258 - RNA, 18 nt, Human
uaucuccagggcaugagg

SEQ ID NO: 1298259 - RNA, 18 nt, Human
ucaagcaauuauaaaagc

SEQ ID NO: 1298260 - RNA, 22 nt, Human
ucaguuuaccaaagccucucau

SEQ ID NO: 1298261 - RNA, 20 nt, Human
ucaucaccaaccucaaacug

SEQ ID NO: 1298262 - RNA, 19 nt, Human
uccagggcaugaggaaaau

SEQ ID NO: 1298263 - RNA, 24 nt, Human
uccagggcaugaggaaaauacagg

SEQ ID NO: 1298264 - RNA, 24 nt, Human
uccuaguaacucacaacaaacuug

SEQ ID NO: 1298265 - RNA, 21 nt, Human
ucuguaccuacaucacucuuc

SEQ ID NO: 1298266 - RNA, 21 nt, Human
ucuuugucaaagcucaacaaa

SEQ ID NO: 1298267 - RNA, 19 nt, Human
ugaaaaacaaaaaagucuc

SEQ ID NO: 1298268 - RNA, 22 nt, Human
ugacaaauacuguaauccagaa

SEQ ID NO: 1298269 - RNA, 18 nt, Human
ugaguaaaagacggcucc

SEQ ID NO: 1298270 - RNA, 19 nt, Human
ugcugggcuggcgcagggc

SEQ ID NO: 1298271 - RNA, 20 nt, Human
uggaacuaauagaaauaauc

SEQ ID NO: 1298272 - RNA, 20 nt, Human
ugggauguaacuggcagaaa

SEQ ID NO: 1298273 - RNA, 22 nt, Human
uguaacuggcagaaacaagcac

SEQ ID NO: 1298274 - RNA, 27 nt, Human
ugugcaucuguaccuacaucacucuuc

SEQ ID NO: 1298275 - RNA, 22 nt, Human
uuaaaacacugcagggggguag

SEQ ID NO: 1298276 - RNA, 21 nt, Human
uuauuuacuuuaucuucccua

SEQ ID NO: 1298277 - RNA, 23 nt, Human
uucuacaucugugcaucuguacc

SEQ ID NO: 1298278 - RNA, 21 nt, Human
uucucuggcacuaccuccuag

SEQ ID NO: 1298279 - RNA, 21 nt, Human
uugaggcgaacagaaauuaag

SEQ ID NO: 1298280 - RNA, 20 nt, Human
uuuuuggugguuuuuguuuu

SEQ ID NO: 1298281 - RNA, 21 nt, Human
cccgcgagccgcccgcggccg

SEQ ID NO: 1298282 - RNA, 23 nt, Human
acagcagcaguugaugucacacu

SEQ ID NO: 1298283 - RNA, 22 nt, Human
acugaaauccacggagcugcag

SEQ ID NO: 1298284 - RNA, 24 nt, Human
agaaaagacacugaaauccacgga

SEQ ID NO: 1298285 - RNA, 22 nt, Human
agacacugaaauccacggagcu

SEQ ID NO: 1298286 - RNA, 21 nt, Human
aggcagaaaagacacugaaau

SEQ ID NO: 1298287 - RNA, 24 nt, Human
aggcagaaaagacacugaaaucca

SEQ ID NO: 1298288 - RNA, 20 nt, Human
ugaaauccacggagcugcag

SEQ ID NO: 1298289 - RNA, 21 nt, Human
aaaccggucccauuucccgca

SEQ ID NO: 1298290 - RNA, 22 nt, Human
caccagccucggagccggaccc

SEQ ID NO: 1298291 - RNA, 23 nt, Human
ccagcguugaagccugagcucug

SEQ ID NO: 1298292 - RNA, 20 nt, Human
cccccagcucucggugggcg

SEQ ID NO: 1298293 - RNA, 18 nt, Human
ccccgcccugggcucccc

SEQ ID NO: 1298294 - RNA, 19 nt, Human
cccugggcucccccagcuc

SEQ ID NO: 1298295 - RNA, 23 nt, Human
ccgugcccaccagccucggagcc

SEQ ID NO: 1298296 - RNA, 19 nt, Human
ccuccccgcccugggcucc

SEQ ID NO: 1298297 - RNA, 21 nt, Human
cgcccugggcucccccagcuc

SEQ ID NO: 1298298 - RNA, 20 nt, Human
cggccgcgcccuccccgccc

SEQ ID NO: 1298299 - RNA, 21 nt, Human
cggcgcucgcuccggccgcgc

SEQ ID NO: 1298300 - RNA, 21 nt, Human
cucagcgccgcgaagaacaaa

SEQ ID NO: 1298301 - RNA, 19 nt, Human
cucccaggcugauuucugg

SEQ ID NO: 1298302 - RNA, 19 nt, Human
cuccggccgcgcccucccc

SEQ ID NO: 1298303 - RNA, 20 nt, Human
cucggagccggacccagcuu

SEQ ID NO: 1298304 - RNA, 20 nt, Human
cucucggugggcgccgcguc

SEQ ID NO: 1298305 - RNA, 22 nt, Human
gaacaagucaaaccggucccau

SEQ ID NO: 1298306 - RNA, 21 nt, Human
gacccagcuucucccaggcug

SEQ ID NO: 1298307 - RNA, 19 nt, Human
gccgcgcccuccccgcccu

SEQ ID NO: 1298308 - RNA, 18 nt, Human
gccugagcucuguggcug

SEQ ID NO: 1298309 - RNA, 23 nt, Human
ggugggaggcuaaacuaaccgcc

SEQ ID NO: 1298310 - RNA, 20 nt, Human
ucagcgccgcgaagaacaaa

SEQ ID NO: 1298311 - RNA, 20 nt, Human
ucccgggcggcgcucgcucc

SEQ ID NO: 1298312 - RNA, 24 nt, Human
ucccgggcggcgcucgcuccggcc

SEQ ID NO: 1298313 - RNA, 18 nt, Human
ugauuucuggccuggccc

SEQ ID NO: 1298314 - RNA, 24 nt, Human
ugccagggguucuggcggggcucg

SEQ ID NO: 1298315 - RNA, 19 nt, Human
uggggccgugcccaccagc

SEQ ID NO: 1298316 - RNA, 18 nt, Human
uggugggugggaggcuaa

SEQ ID NO: 1298317 - RNA, 25 nt, Human
aaaccaaaccaaacaaacacacaaa

SEQ ID NO: 1298318 - RNA, 28 nt, Human
aaaccaaaccaaacaaacacacaaaaaa

SEQ ID NO: 1298319 - RNA, 19 nt, Human
aacaugacgaaaccccauc

SEQ ID NO: 1298320 - RNA, 21 nt, Human
aacaugacgaaaccccaucuc

SEQ ID NO: 1298321 - RNA, 21 nt, Human
aacaugacgaaaccccaucuc

SEQ ID NO: 1298322 - RNA, 19 nt, Human
aacuucugccucccgguuc

SEQ ID NO: 1298323 - RNA, 18 nt, Human
aagagaugguucagagac

SEQ ID NO: 1298324 - RNA, 18 nt, Human
aagggguuucacuauguu

SEQ ID NO: 1298325 - RNA, 20 nt, Human
aagggguuucacuauguugg

SEQ ID NO: 1298326 - RNA, 24 nt, Human
aagggguuucacuauguuggccag

SEQ ID NO: 1298327 - RNA, 24 nt, Human
aaugugcugggguuacaggcguga

SEQ ID NO: 1298328 - RNA, 18 nt, Human
acgaaaccccaucucuac

SEQ ID NO: 1298329 - RNA, 25 nt, Human
acgggcgcccgccaccacaccuggc

SEQ ID NO: 1298330 - RNA, 24 nt, Human
acuauguuggccaggcuggucuug

SEQ ID NO: 1298331 - RNA, 25 nt, Human
acucuguugcccaggcuggagugca

SEQ ID NO: 1298332 - RNA, 26 nt, Human
acuucaaagaacggucggcuucgggg

SEQ ID NO: 1298333 - RNA, 20 nt, Human
agagaagggguuucacuaug

SEQ ID NO: 1298334 - RNA, 23 nt, Human
agagucucacucuguugcccagg

SEQ ID NO: 1298335 - RNA, 22 nt, Human
agcacuuugggaggcugaggug

SEQ ID NO: 1298336 - RNA, 19 nt, Human
agccacaguaucgggcagc

SEQ ID NO: 1298337 - RNA, 24 nt, Human
agccugggcaacaugacgaaaccc

SEQ ID NO: 1298338 - RNA, 20 nt, Human
agcgaggagacagacuggga

SEQ ID NO: 1298339 - RNA, 21 nt, Human
aggaguuggagaccagccugg

SEQ ID NO: 1298340 - RNA, 24 nt, Human
aggcugaggugugaggaucacuug

SEQ ID NO: 1298341 - RNA, 25 nt, Human
aggcuggagugcaguggugugaucu

SEQ ID NO: 1298342 - RNA, 22 nt, Human
agggaaaccccaggggaggcgg

SEQ ID NO: 1298343 - RNA, 24 nt, Human
agggguuucacuauguuggccagg

SEQ ID NO: 1298344 - RNA, 18 nt, Human
aguagcugggauuacggg

SEQ ID NO: 1298345 - RNA, 19 nt, Human
agugcaguggugugaucuc

SEQ ID NO: 1298346 - RNA, 20 nt, Human
agugcaguggugugaucucg

SEQ ID NO: 1298347 - RNA, 23 nt, Human
agugcaguggugugaucucggcu

SEQ ID NO: 1298348 - RNA, 24 nt, Human
agugcaguggugugaucucggcuc

SEQ ID NO: 1298349 - RNA, 24 nt, Human
auacaaaccaaaccaaacaaacac

SEQ ID NO: 1298350 - RNA, 19 nt, Human
augcaccccuccuggccag

SEQ ID NO: 1298351 - RNA, 23 nt, Human
auuggagagauuaagugagagga

SEQ ID NO: 1298352 - RNA, 21 nt, Human
caaacaaacacacaaaaaacu

SEQ ID NO: 1298353 - RNA, 21 nt, Human
caacucacccaagaagagccu

SEQ ID NO: 1298354 - RNA, 20 nt, Human
caagaagagccuaauggucg

SEQ ID NO: 1298355 - RNA, 25 nt, Human
caagaagagccuaauggucgcaaga

SEQ ID NO: 1298356 - RNA, 24 nt, Human
caccacaccuggcuaauuuuugua

SEQ ID NO: 1298357 - RNA, 20 nt, Human
cacccaagaagagccuaaug

SEQ ID NO: 1298358 - RNA, 21 nt, Human
cacuauguuggccaggcuggu

SEQ ID NO: 1298359 - RNA, 24 nt, Human
cacuauguuggccaggcuggucuu

SEQ ID NO: 1298360 - RNA, 24 nt, Human
cacucuguugcccaggcuggagug

SEQ ID NO: 1298361 - RNA, 18 nt, Human
cacugcaacuucugccuc

SEQ ID NO: 1298362 - RNA, 21 nt, Human
cacugcaacuucugccucccg

SEQ ID NO: 1298363 - RNA, 19 nt, Human
cagcacccaagggcggcug

SEQ ID NO: 1298364 - RNA, 21 nt, Human
cagcacuuugggaggcugagg

SEQ ID NO: 1298365 - RNA, 23 nt, Human
cagcacuuugggaggcugaggug

SEQ ID NO: 1298366 - RNA, 28 nt, Human
cagccgacacgccccacccccugaaagg

SEQ ID NO: 1298367 - RNA, 21 nt, Human
cagccgacacgccccaccccg

SEQ ID NO: 1298368 - RNA, 24 nt, Human
caggcuggaguccaagagaugguu

SEQ ID NO: 1298369 - RNA, 19 nt, Human
ccaaacaaacacacaaaaa

SEQ ID NO: 1298370 - RNA, 21 nt, Human
ccaaacaaacacacaaaaaac

SEQ ID NO: 1298371 - RNA, 22 nt, Human
ccaaacaaacacacaaaaaacg

SEQ ID NO: 1298372 - RNA, 18 nt, Human
ccaacccgacccggccca

SEQ ID NO: 1298373 - RNA, 22 nt, Human
ccaaugugcugggguuacaggc

SEQ ID NO: 1298374 - RNA, 24 nt, Human
ccaaugugcugggguuacaggcgu

SEQ ID NO: 1298375 - RNA, 20 nt, Human
ccacaguaucgggcagccag

SEQ ID NO: 1298376 - RNA, 19 nt, Human
ccaggccucgggaggcagc

SEQ ID NO: 1298377 - RNA, 22 nt, Human
cccagcacgcagcacccaaggg

SEQ ID NO: 1298378 - RNA, 19 nt, Human
cccaggcuggagugcagug

SEQ ID NO: 1298379 - RNA, 20 nt, Human
cccaggcuggagugcagugg

SEQ ID NO: 1298380 - RNA, 22 nt, Human
ccccuggauuccgguugacgga

SEQ ID NO: 1298381 - RNA, 23 nt, Human
cccgaguagcugggauuacgggc

SEQ ID NO: 1298382 - RNA, 24 nt, Human
cccgaguagcugggauuacgggcg

SEQ ID NO: 1298383 - RNA, 22 nt, Human
cccgguucaagcaauucuccug

SEQ ID NO: 1298384 - RNA, 21 nt, Human
cccuucauccacgacggacag

SEQ ID NO: 1298385 - RNA, 18 nt, Human
ccgcugccccgccugcgc

SEQ ID NO: 1298386 - RNA, 23 nt, Human
ccucccgguucaagcaauucucc

SEQ ID NO: 1298387 - RNA, 24 nt, Human
ccuccuggccagccuugccgggcg

SEQ ID NO: 1298388 - RNA, 24 nt, Human
ccugggcaacaugacgaaacccca

SEQ ID NO: 1298389 - RNA, 21 nt, Human
cgacccggcccagcacgcagg

SEQ ID NO: 1298390 - RNA, 19 nt, Human
cgacggacaggaagggcga

SEQ ID NO: 1298391 - RNA, 21 nt, Human
cgccgcugccccgccugcgcc

SEQ ID NO: 1298392 - RNA, 23 nt, Human
cuaauuuuuguauuuuuaguaga

SEQ ID NO: 1298393 - RNA, 24 nt, Human
cucacucuguugcccaggcuggag

SEQ ID NO: 1298394 - RNA, 24 nt, Human
cucacugcaacuucugccucccgg

SEQ ID NO: 1298395 - RNA, 19 nt, Human
cuccugaucucaagacauc

SEQ ID NO: 1298396 - RNA, 24 nt, Human
cucuucgcuguaaucccagcacuu

SEQ ID NO: 1298397 - RNA, 21 nt, Human
cugaucucaagacaucugcug

SEQ ID NO: 1298398 - RNA, 23 nt, Human
cugcaacuucugccucccgguuc

SEQ ID NO: 1298399 - RNA, 21 nt, Human
cugccccgccugcgccgaaag

SEQ ID NO: 1298400 - RNA, 18 nt, Human
cuggccagccuugccggg

SEQ ID NO: 1298401 - RNA, 23 nt, Human
cugguucagccucccgaguagcu

SEQ ID NO: 1298402 - RNA, 21 nt, Human
cuguaaucccagcacuuuggg

SEQ ID NO: 1298403 - RNA, 24 nt, Human
cuucgcuguaaucccagcacuuug

SEQ ID NO: 1298404 - RNA, 22 nt, Human
gaagggguuucacuauguuggc

SEQ ID NO: 1298405 - RNA, 24 nt, Human
gacaucugcccgccucggccuccc

SEQ ID NO: 1298406 - RNA, 21 nt, Human
gacggacaggaagggcgaccc

SEQ ID NO: 1298407 - RNA, 19 nt, Human
gacuugugguacaggcccu

SEQ ID NO: 1298408 - RNA, 20 nt, Human
gagaaguacugaggccugag

SEQ ID NO: 1298409 - RNA, 21 nt, Human
gagacgcuccucccgaggccu

SEQ ID NO: 1298410 - RNA, 22 nt, Human
gaguagcugggauuacgggcgc

SEQ ID NO: 1298411 - RNA, 24 nt, Human
gaucacuugaguccaggaguugga

SEQ ID NO: 1298412 - RNA, 18 nt, Human
gauuacgggcgcccgcca

SEQ ID NO: 1298413 - RNA, 18 nt, Human
gcaaugcgcgugcccagu

SEQ ID NO: 1298414 - RNA, 23 nt, Human
gcagaauagacaguugaguggau

SEQ ID NO: 1298415 - RNA, 19 nt, Human
gccccaacccgacccggcc

SEQ ID NO: 1298416 - RNA, 23 nt, Human
gccucggccucccaaugugcugg

SEQ ID NO: 1298417 - RNA, 25 nt, Human
ggaaggccccaacccgacccggccc

SEQ ID NO: 1298418 - RNA, 22 nt, Human
ggagaaugcaccccuccuggcc

SEQ ID NO: 1298419 - RNA, 24 nt, Human
ggagaaugcaccccuccuggccag

SEQ ID NO: 1298420 - RNA, 24 nt, Human
ggagacagacugggacaccgagca

SEQ ID NO: 1298421 - RNA, 22 nt, Human
ggagacgguaauaaccuggggg

SEQ ID NO: 1298422 - RNA, 22 nt, Human
ggagacgguaauaaccuggggg

SEQ ID NO: 1298423 - RNA, 24 nt, Human
ggcagaauagacaguugaguggau

SEQ ID NO: 1298424 - RNA, 24 nt, Human
ggcuggaagcgcaaugcgcgugcc

SEQ ID NO: 1298425 - RNA, 22 nt, Human
ggcuggagugcaguggugugau

SEQ ID NO: 1298426 - RNA, 24 nt, Human
ggcuggucuugaacuccugaucuc

SEQ ID NO: 1298427 - RNA, 18 nt, Human
ggggaggcggaggccagc

SEQ ID NO: 1298428 - RNA, 23 nt, Human
ggggaggcggaggccagcgggga

SEQ ID NO: 1298429 - RNA, 22 nt, Human
gggguuucacuauguuggccag

SEQ ID NO: 1298430 - RNA, 23 nt, Human
gggguuucacuauguuggccagg

SEQ ID NO: 1298431 - RNA, 22 nt, Human
ggguuucacuauguuggccagg

SEQ ID NO: 1298432 - RNA, 24 nt, Human
gguuacaggcgugagccacaguau

SEQ ID NO: 1298433 - RNA, 22 nt, Human
gguucagccucccgaguagcug

SEQ ID NO: 1298434 - RNA, 18 nt, Human
guagcugggauuacgggc

SEQ ID NO: 1298435 - RNA, 22 nt, Human
guggcucuucgcuguaauccca

SEQ ID NO: 1298436 - RNA, 24 nt, Human
guucucgguagcagccgacacgcc

SEQ ID NO: 1298437 - RNA, 24 nt, Human
uaauuuuuguauuuuuaguagaga

SEQ ID NO: 1298438 - RNA, 19 nt, Human
uacaagaacgacacuguau

SEQ ID NO: 1298439 - RNA, 24 nt, Human
uacgggcgcccgccaccacaccug

SEQ ID NO: 1298440 - RNA, 21 nt, Human
uacugaggccugagaaggcuc

SEQ ID NO: 1298441 - RNA, 22 nt, Human
uagagaagggguuucacuaugu

SEQ ID NO: 1298442 - RNA, 24 nt, Human
uagagucucacucuguugcccagg

SEQ ID NO: 1298443 - RNA, 24 nt, Human
uaguagagaagggguuucacuaug

SEQ ID NO: 1298444 - RNA, 19 nt, Human
uauguaggaaggccccaac

SEQ ID NO: 1298445 - RNA, 24 nt, Human
uauguuggccaggcuggucuugaa

SEQ ID NO: 1298446 - RNA, 22 nt, Human
ucacuauguuggccaggcuggu

SEQ ID NO: 1298447 - RNA, 24 nt, Human
ucacucuguugcccaggcuggagu

SEQ ID NO: 1298448 - RNA, 19 nt, Human
ucacugcaacuucugccuc

SEQ ID NO: 1298449 - RNA, 23 nt, Human
ucacugcaacuucugccucccgg

SEQ ID NO: 1298450 - RNA, 24 nt, Human
ucacugcaacuucugccucccggu

SEQ ID NO: 1298451 - RNA, 20 nt, Human
ucagccucccgaguagcugg

SEQ ID NO: 1298452 - RNA, 21 nt, Human
ucagucugcaggcuuuuugag

SEQ ID NO: 1298453 - RNA, 21 nt, Human
ucaguuuccugcuuauguggg

SEQ ID NO: 1298454 - RNA, 22 nt, Human
uccaggaguuggagaccagccu

SEQ ID NO: 1298455 - RNA, 24 nt, Human
ucccaaugugcugggguuacaggc

SEQ ID NO: 1298456 - RNA, 24 nt, Human
ucccgaguagcugggauuacgggc

SEQ ID NO: 1298457 - RNA, 20 nt, Human
ucccgguucaagcaauucuc

SEQ ID NO: 1298458 - RNA, 23 nt, Human
ucccgguucaagcaauucuccug

SEQ ID NO: 1298459 - RNA, 22 nt, Human
uccgguugacggacgcgucccc

SEQ ID NO: 1298460 - RNA, 22 nt, Human
uccucuagucagccucaggcuu

SEQ ID NO: 1298461 - RNA, 23 nt, Human
ucggccucccaaugugcuggggu

SEQ ID NO: 1298462 - RNA, 26 nt, Human
ucuacaaaaaauacaaaccaaaccaa

SEQ ID NO: 1298463 - RNA, 23 nt, Human
ucucacucuguugcccaggcugg

SEQ ID NO: 1298464 - RNA, 24 nt, Human
ucucacucuguugcccaggcugga

SEQ ID NO: 1298465 - RNA, 26 nt, Human
ucucacucuguugcccaggcuggagu

SEQ ID NO: 1298466 - RNA, 23 nt, Human
ucucgguagcagccgacacgccc

SEQ ID NO: 1298467 - RNA, 19 nt, Human
ucugcaggcuuuuugagga

SEQ ID NO: 1298468 - RNA, 23 nt, Human
ucugccucccgguucaagcaauu

SEQ ID NO: 1298469 - RNA, 18 nt, Human
ucuguugcccaggcugga

SEQ ID NO: 1298470 - RNA, 21 nt, Human
ucuugaacuccugaucucaag

SEQ ID NO: 1298471 - RNA, 21 nt, Human
ugaggaauucaggguagggcu

SEQ ID NO: 1298472 - RNA, 18 nt, Human
ugcccaggcuggagugca

SEQ ID NO: 1298473 - RNA, 21 nt, Human
ugcccaggcuggagugcagug

SEQ ID NO: 1298474 - RNA, 24 nt, Human
ugcccaggcuggagugcaguggug

SEQ ID NO: 1298475 - RNA, 20 nt, Human
ugcgaggcagaauagacagg

SEQ ID NO: 1298476 - RNA, 23 nt, Human
uggagacgguaauaaccuggggg

SEQ ID NO: 1298477 - RNA, 19 nt, Human
uggagugcaguggugugau

SEQ ID NO: 1298478 - RNA, 23 nt, Human
uggagugcaguggugugaucucg

SEQ ID NO: 1298479 - RNA, 24 nt, Human
uggagugcaguggugugaucucgg

SEQ ID NO: 1298480 - RNA, 24 nt, Human
uggccaggcuggucuugaacuccu

SEQ ID NO: 1298481 - RNA, 22 nt, Human
uggcucuucgcuguaaucccag

SEQ ID NO: 1298482 - RNA, 24 nt, Human
uggcucuucgcuguaaucccagca

SEQ ID NO: 1298483 - RNA, 24 nt, Human
ugggaggcugaggugugaggauca

SEQ ID NO: 1298484 - RNA, 21 nt, Human
ugggauuacgggcgcccgcca

SEQ ID NO: 1298485 - RNA, 22 nt, Human
ugggauuacgggcgcccgccac

SEQ ID NO: 1298486 - RNA, 24 nt, Human
ugggauuacgggcgcccgccacca

SEQ ID NO: 1298487 - RNA, 22 nt, Human
ugggcaacaugacgaaacccca

SEQ ID NO: 1298488 - RNA, 18 nt, Human
ugggguuacaggcgugag

SEQ ID NO: 1298489 - RNA, 19 nt, Human
ugggguuacaggcgugagc

SEQ ID NO: 1298490 - RNA, 21 nt, Human
ugggguuacaggcgugagcca

SEQ ID NO: 1298491 - RNA, 22 nt, Human
ugggguuacaggcgugagccac

SEQ ID NO: 1298492 - RNA, 23 nt, Human
ugggguuacaggcgugagccaca

SEQ ID NO: 1298493 - RNA, 24 nt, Human
ugggguuacaggcgugagccacag

SEQ ID NO: 1298494 - RNA, 24 nt, Human
uguggcucuucgcuguaaucccag

SEQ ID NO: 1298495 - RNA, 21 nt, Human
uguggggauauguaagguugu

SEQ ID NO: 1298496 - RNA, 21 nt, Human
uguugcccaggcuggagugca

SEQ ID NO: 1298497 - RNA, 20 nt, Human
uuacugggguggcgaugguu

SEQ ID NO: 1298498 - RNA, 18 nt, Human
uuaguagagaagggguuu

SEQ ID NO: 1298499 - RNA, 21 nt, Human
uuaguagagaagggguuucac

SEQ ID NO: 1298500 - RNA, 21 nt, Human
uuaguagagaagggguuucac

SEQ ID NO: 1298501 - RNA, 24 nt, Human
uuaguagagaagggguuucacuau

SEQ ID NO: 1298502 - RNA, 24 nt, Human
uucagccucccgaguagcugggau

SEQ ID NO: 1298503 - RNA, 18 nt, Human
uugaguggauauuggcca

SEQ ID NO: 1298504 - RNA, 24 nt, Human
uugcccaggcuggagugcaguggu

SEQ ID NO: 1298505 - RNA, 25 nt, Human
uugggaggcugaggugugaggauca

SEQ ID NO: 1298506 - RNA, 24 nt, Human
uuucacuauguuggccaggcuggu

SEQ ID NO: 1298507 - RNA, 24 nt, Human
uuuuuaguagagaagggguuucac

SEQ ID NO: 1298508 - RNA, 20 nt, Human
uuuuuguauuuuuaguagag

SEQ ID NO: 1298509 - RNA, 24 nt, Human
cugcagcagagguuaugaguccac

SEQ ID NO: 1298510 - RNA, 22 nt, Human
cuguaaucagagguuggagggc

SEQ ID NO: 1298511 - RNA, 21 nt, Human
ucccuuucaaaacuguaauca

SEQ ID NO: 1298512 - RNA, 22 nt, Human
ucuuugguuucacacuuagauu

SEQ ID NO: 1298513 - RNA, 18 nt, Human
aggcaucccucuccccga

SEQ ID NO: 1298514 - RNA, 20 nt, Human
caccccgccgcccacuucuc

SEQ ID NO: 1298515 - RNA, 18 nt, Human
ccacccgggccggcggcc

SEQ ID NO: 1298516 - RNA, 20 nt, Human
ccccauggccuguccgcgcc

SEQ ID NO: 1298517 - RNA, 23 nt, Human
ccccauggccuguccgcgccgcc

SEQ ID NO: 1298518 - RNA, 19 nt, Human
cccccgccaccccgccgcc

SEQ ID NO: 1298519 - RNA, 21 nt, Human
cccgcacccgccgcgagcgcg

SEQ ID NO: 1298520 - RNA, 18 nt, Human
cccuguacggggaagggc

SEQ ID NO: 1298521 - RNA, 18 nt, Human
ccgcccguggggucgggg

SEQ ID NO: 1298522 - RNA, 20 nt, Human
ccgcugccgccgcuggggcc

SEQ ID NO: 1298523 - RNA, 22 nt, Human
ccgcuggcccggcccggguccc

SEQ ID NO: 1298524 - RNA, 18 nt, Human
ccgcuggggcccgcaggg

SEQ ID NO: 1298525 - RNA, 18 nt, Human
ccgggucguccgcagcgc

SEQ ID NO: 1298526 - RNA, 23 nt, Human
cgccggcggccccuagcggacac

SEQ ID NO: 1298527 - RNA, 19 nt, Human
cgcggccuccgggacggcc

SEQ ID NO: 1298528 - RNA, 19 nt, Human
cgcucuccgcugccgccgc

SEQ ID NO: 1298529 - RNA, 18 nt, Human
cggggauccgcccugccc

SEQ ID NO: 1298530 - RNA, 23 nt, Human
cuguccgcgccgcccgccccguc

SEQ ID NO: 1298531 - RNA, 24 nt, Human
gagggcaagccagcgcggggcggu

SEQ ID NO: 1298532 - RNA, 24 nt, Human
gcacacacccucggugacaaauaa

SEQ ID NO: 1298533 - RNA, 20 nt, Human
gccccgcccguggggucggg

SEQ ID NO: 1298534 - RNA, 18 nt, Human
gcccgcaggguggucugg

SEQ ID NO: 1298535 - RNA, 18 nt, Human
gcccggggcucccgcugg

SEQ ID NO: 1298536 - RNA, 24 nt, Human
gcucuccgcugccgccgcuggggc

SEQ ID NO: 1298537 - RNA, 18 nt, Human
gcugccgccgcuggggcc

SEQ ID NO: 1298538 - RNA, 18 nt, Human
ggacacgcgcgcggccuc

SEQ ID NO: 1298539 - RNA, 21 nt, Human
ggagaacaggagggcaagcca

SEQ ID NO: 1298540 - RNA, 21 nt, Human
ggcggccccuagcggacacgc

SEQ ID NO: 1298541 - RNA, 22 nt, Human
gggcgguagugcccaggcaucc

SEQ ID NO: 1298542 - RNA, 24 nt, Human
ucaggcccggggcucccgcuggcc

SEQ ID NO: 1298543 - RNA, 23 nt, Human
uccaacuuuauugcucuggagaa

SEQ ID NO: 1298544 - RNA, 21 nt, Human
uccgcagcgcaggcccggggc

SEQ ID NO: 1298545 - RNA, 22 nt, Human
uccgcccugcccuguacgggga

SEQ ID NO: 1298546 - RNA, 19 nt, Human
uccgcugccgccgcugggg

SEQ ID NO: 1298547 - RNA, 20 nt, Human
uccgcugccgccgcuggggc

SEQ ID NO: 1298548 - RNA, 21 nt, Human
ucggggaggaccccgcacccg

SEQ ID NO: 1298549 - RNA, 20 nt, Human
ugcccaggcaucccucuccc

SEQ ID NO: 1298550 - RNA, 22 nt, Human
uggagaacaggagggcaagcca

SEQ ID NO: 1298551 - RNA, 22 nt, Human
uggcccgccaccgcuggcccgg

SEQ ID NO: 1298552 - RNA, 19 nt, Human
uggggcccgcagggugguc

SEQ ID NO: 1298553 - RNA, 21 nt, Human
uguccgcgccgcccgccccgu

SEQ ID NO: 1298554 - RNA, 24 nt, Human
aaaaaaaaaaaaaaaagaaaagaa

SEQ ID NO: 1298555 - RNA, 22 nt, Human
aagaaagaaaccacccuuccca

SEQ ID NO: 1298556 - RNA, 21 nt, Human
acccguggcagguggccaggu

SEQ ID NO: 1298557 - RNA, 22 nt, Human
acuugcuggcuguuaccuccca

SEQ ID NO: 1298558 - RNA, 22 nt, Human
agaaaaaaaaggaaagaaagaa

SEQ ID NO: 1298559 - RNA, 18 nt, Human
agaaaagaaaaaaaagga

SEQ ID NO: 1298560 - RNA, 23 nt, Human
agaaaagaaaaaaaaggaaagaa

SEQ ID NO: 1298561 - RNA, 18 nt, Human
agagaggcagcagagcag

SEQ ID NO: 1298562 - RNA, 20 nt, Human
aggaaagaaagaaaccaccc

SEQ ID NO: 1298563 - RNA, 18 nt, Human
aggcagugcaggcccagg

SEQ ID NO: 1298564 - RNA, 21 nt, Human
aggcagugcaggcccaggggc

SEQ ID NO: 1298565 - RNA, 20 nt, Human
aggccccagguccaggccaa

SEQ ID NO: 1298566 - RNA, 22 nt, Human
agguucacagcagcaacagccc

SEQ ID NO: 1298567 - RNA, 20 nt, Human
caagccagccagcgcugccc

SEQ ID NO: 1298568 - RNA, 20 nt, Human
caauucaggccccaggucca

SEQ ID NO: 1298569 - RNA, 24 nt, Human
cacaaaaaaaaaaaaaaaaaagaa

SEQ ID NO: 1298570 - RNA, 26 nt, Human
cacaauucaggccccagguccaggcc

SEQ ID NO: 1298571 - RNA, 18 nt, Human
cagcagagaggcagcaga

SEQ ID NO: 1298572 - RNA, 23 nt, Human
cagcauugaaggacaggggaguc

SEQ ID NO: 1298573 - RNA, 24 nt, Human
cagcauugaaggacaggggagugc

SEQ ID NO: 1298574 - RNA, 24 nt, Human
caggccccagguccaggccaaggg

SEQ ID NO: 1298575 - RNA, 19 nt, Human
caggggucaaggucagagg

SEQ ID NO: 1298576 - RNA, 22 nt, Human
ccaggccaagggggccacaccu

SEQ ID NO: 1298577 - RNA, 22 nt, Human
cccaugguuuggcucuuagggc

SEQ ID NO: 1298578 - RNA, 21 nt, Human
cgaagcacaaaaaaaaaaaaa

SEQ ID NO: 1298579 - RNA, 19 nt, Human
cuccaagugggaccagccc

SEQ ID NO: 1298580 - RNA, 26 nt, Human
cucccaagccagccagcgcugcccaa

SEQ ID NO: 1298581 - RNA, 23 nt, Human
gaaagaaaccacccuucccacaa

SEQ ID NO: 1298582 - RNA, 20 nt, Human
gaagcacaaaaaaaaaaaaa

SEQ ID NO: 1298583 - RNA, 22 nt, Human
gcagccaaaggucaggguucag

SEQ ID NO: 1298584 - RNA, 22 nt, Human
gcaggcccaggggcugaggugg

SEQ ID NO: 1298585 - RNA, 21 nt, Human
gccaaggcagccaaaggucag

SEQ ID NO: 1298586 - RNA, 20 nt, Human
gcuggcuguuaccucccaag

SEQ ID NO: 1298587 - RNA, 23 nt, Human
ggccaagggggccacaccugcag

SEQ ID NO: 1298588 - RNA, 20 nt, Human
ggcucuuagggccuggcugg

SEQ ID NO: 1298589 - RNA, 20 nt, Human
gggaugagagagaucagggg

SEQ ID NO: 1298590 - RNA, 25 nt, Human
ucacucaguuuugguacucuggcca

SEQ ID NO: 1298591 - RNA, 21 nt, Human
ucccaagccagccagcgcugc

SEQ ID NO: 1298592 - RNA, 22 nt, Human
ucccaagccagccagcgcugcc

SEQ ID NO: 1298593 - RNA, 19 nt, Human
ucccacaauucaggcccca

SEQ ID NO: 1298594 - RNA, 25 nt, Human
uccgaagcacaaaaaaaaaaaaaaa

SEQ ID NO: 1298595 - RNA, 28 nt, Human
uccgaagcacaaaaaaaaaaaaaaaaaa

SEQ ID NO: 1298596 - RNA, 27 nt, Human
ucuccgaagcacaaaaaaaaaaaaaaa

SEQ ID NO: 1298597 - RNA, 20 nt, Human
ugaaggacaggacccguggc

SEQ ID NO: 1298598 - RNA, 20 nt, Human
ugguccagcagagaggcagc

SEQ ID NO: 1298599 - RNA, 22 nt, Human
uucagacauguaggccaaagcc

SEQ ID NO: 1298600 - RNA, 21 nt, Human
aaucacugaagucuuuaucga

SEQ ID NO: 1298601 - RNA, 19 nt, Human
cuuuaaguuccaauucuuc

SEQ ID NO: 1298602 - RNA, 20 nt, Human
uaucuggaaaaaucacugaa

SEQ ID NO: 1298603 - RNA, 27 nt, Human
uggcuuuaaguuccaauucuuccccuu

SEQ ID NO: 1298604 - RNA, 21 nt, Human
aaguccucuuuucuccacaga

SEQ ID NO: 1298605 - RNA, 21 nt, Human
aggggcccaggugguuccaga

SEQ ID NO: 1298606 - RNA, 18 nt, Human
caaacagggaaggggugg

SEQ ID NO: 1298607 - RNA, 26 nt, Human
cacuuccgccaccaaauaaggggcua

SEQ ID NO: 1298608 - RNA, 20 nt, Human
cagacacagacaucaguggc

SEQ ID NO: 1298609 - RNA, 24 nt, Human
cagccgccgccgcccgcgcugggg

SEQ ID NO: 1298610 - RNA, 27 nt, Human
caguggcuuuuuuacucccugaagucc

SEQ ID NO: 1298611 - RNA, 21 nt, Human
cagugugaccacagugcccuc

SEQ ID NO: 1298612 - RNA, 21 nt, Human
cccgcccagccgccgccgccc

SEQ ID NO: 1298613 - RNA, 18 nt, Human
ccgccgccgcccgcgcug

SEQ ID NO: 1298614 - RNA, 27 nt, Human
ccugaaguccucuuuucuccacagaau

SEQ ID NO: 1298615 - RNA, 22 nt, Human
cgcuggggucccgcugccgcuc

SEQ ID NO: 1298616 - RNA, 23 nt, Human
cucccgcccagccgccgccgccc

SEQ ID NO: 1298617 - RNA, 19 nt, Human
gcagcaguuccugcccucu

SEQ ID NO: 1298618 - RNA, 18 nt, Human
ggggcucccgcccagccg

SEQ ID NO: 1298619 - RNA, 23 nt, Human
gugggccugacucuccgggggcu

SEQ ID NO: 1298620 - RNA, 21 nt, Human
ucaguggcuuuuuuacucccu

SEQ ID NO: 1298621 - RNA, 19 nt, Human
ucccgcccagccgccgccg

SEQ ID NO: 1298622 - RNA, 21 nt, Human
ucuuuucuccacagaauauuu

SEQ ID NO: 1298623 - RNA, 22 nt, Human
ugcccucaggggcccagguggu

SEQ ID NO: 1298624 - RNA, 18 nt, Human
uggcagcaguuccugccc

SEQ ID NO: 1298625 - RNA, 20 nt, Human
uggcgggcacggguguuugg

SEQ ID NO: 1298626 - RNA, 23 nt, Human
ugggccugacucuccgggggcug

SEQ ID NO: 1298627 - RNA, 24 nt, Human
ugggccugacucuccgggggcugg

SEQ ID NO: 1298628 - RNA, 18 nt, Human
uggggucccgcugccgcc

SEQ ID NO: 1298629 - RNA, 18 nt, Human
uuccugaggagggcccag

SEQ ID NO: 1298630 - RNA, 24 nt, Human
uggucaggaagcgcacgaucauug

SEQ ID NO: 1298631 - RNA, 22 nt, Human
agcucugcagcauggcagcccu

SEQ ID NO: 1298632 - RNA, 18 nt, Human
agguggggaagaggccau

SEQ ID NO: 1298633 - RNA, 23 nt, Human
caaagucagcuccucagugccac

SEQ ID NO: 1298634 - RNA, 21 nt, Human
cacagcuuugaccucaggccc

SEQ ID NO: 1298635 - RNA, 19 nt, Human
cagcauggcagcccuaccc

SEQ ID NO: 1298636 - RNA, 19 nt, Human
cagcauggcagcccuaccc

SEQ ID NO: 1298637 - RNA, 21 nt, Human
cagcauggcagcccuaccccc

SEQ ID NO: 1298638 - RNA, 22 nt, Human
cagcauggcagcccuacccccg

SEQ ID NO: 1298639 - RNA, 24 nt, Human
cagcucugcagcauggcagcccua

SEQ ID NO: 1298640 - RNA, 21 nt, Human
cagcugacagaugccuugugc

SEQ ID NO: 1298641 - RNA, 25 nt, Human
cccccgagcaccccaggugugccag

SEQ ID NO: 1298642 - RNA, 22 nt, Human
ccccgagcaccccaggugugcc

SEQ ID NO: 1298643 - RNA, 24 nt, Human
cccgagcaccccaggugugccagg

SEQ ID NO: 1298644 - RNA, 23 nt, Human
ccuacccccgagcaccccaggug

SEQ ID NO: 1298645 - RNA, 21 nt, Human
ccucagugccacaucagcccu

SEQ ID NO: 1298646 - RNA, 22 nt, Human
cuaaacccaaagucagcuccuc

SEQ ID NO: 1298647 - RNA, 18 nt, Human
cuccugggaccugcagcu

SEQ ID NO: 1298648 - RNA, 21 nt, Human
cuccugggaccugcagcugcu

SEQ ID NO: 1298649 - RNA, 24 nt, Human
cuccugggaccugcagcugcuaug

SEQ ID NO: 1298650 - RNA, 21 nt, Human
cugauaccaagagggccuucc

SEQ ID NO: 1298651 - RNA, 21 nt, Human
cuggugguggugguggcuguu

SEQ ID NO: 1298652 - RNA, 19 nt, Human
gaagaggccauggggagag

SEQ ID NO: 1298653 - RNA, 23 nt, Human
gagagcccugauaccaagagggc

SEQ ID NO: 1298654 - RNA, 19 nt, Human
gcaggagacaggggugaug

SEQ ID NO: 1298655 - RNA, 21 nt, Human
uaaauuaaaauuucgcccugg

SEQ ID NO: 1298656 - RNA, 25 nt, Human
ucagcaggagacaggggugaugagc

SEQ ID NO: 1298657 - RNA, 19 nt, Human
ucagcccugcacauucagc

SEQ ID NO: 1298658 - RNA, 23 nt, Human
ucagugccacaucagcccugcag

SEQ ID NO: 1298659 - RNA, 19 nt, Human
ugacagaugccuugugccc

SEQ ID NO: 1298660 - RNA, 20 nt, Human
ugagcuauggggccacaacc

SEQ ID NO: 1298661 - RNA, 22 nt, Human
uggcagcccuacccccgagcac

SEQ ID NO: 1298662 - RNA, 22 nt, Human
uggugguggugguggcuguugg

SEQ ID NO: 1298663 - RNA, 23 nt, Human
acuccagaagcugcugcugcugc

SEQ ID NO: 1298664 - RNA, 21 nt, Human
agaagcugcugcugcugccca

SEQ ID NO: 1298665 - RNA, 20 nt, Human
aggagcggcugcugaaggcc

SEQ ID NO: 1298666 - RNA, 19 nt, Human
caaggagcugaugugggca

SEQ ID NO: 1298667 - RNA, 21 nt, Human
caaggagcugaugugggcacc

SEQ ID NO: 1298668 - RNA, 24 nt, Human
cuccagaagcugcugcugcugccc

SEQ ID NO: 1298669 - RNA, 24 nt, Human
gggcaccgggaccacugguguagg

SEQ ID NO: 1298670 - RNA, 22 nt, Human
ugaaggcccaggggccagagau

SEQ ID NO: 1298671 - RNA, 21 nt, Human
ugccuaggccacuccagaagc

SEQ ID NO: 1298672 - RNA, 22 nt, Human
ugccuaggccacuccagaagcu

SEQ ID NO: 1298673 - RNA, 19 nt, Human
ugggagaagcucaaggagc

SEQ ID NO: 1298674 - RNA, 19 nt, Human
ugggagaagcucaaggagc

SEQ ID NO: 1298675 - RNA, 24 nt, Human
ugggagaagcucaaggagcugaug

SEQ ID NO: 1298676 - RNA, 20 nt, Human
aaaagaaaacaagccagcga

SEQ ID NO: 1298677 - RNA, 22 nt, Human
aaagaaaacaagccagcgaggg

SEQ ID NO: 1298678 - RNA, 22 nt, Human
acccucacccccaggagccugc

SEQ ID NO: 1298679 - RNA, 18 nt, Human
agaccccgcagggcccag

SEQ ID NO: 1298680 - RNA, 18 nt, Human
agauaggagguguccaga

SEQ ID NO: 1298681 - RNA, 21 nt, Human
agcagauaggagguguccaga

SEQ ID NO: 1298682 - RNA, 23 nt, Human
agcugggccugggccacaggagu

SEQ ID NO: 1298683 - RNA, 25 nt, Human
aucgcccuccuccacuaguguccaa

SEQ ID NO: 1298684 - RNA, 26 nt, Human
caaaagaaaacaagccagcgagggca

SEQ ID NO: 1298685 - RNA, 23 nt, Human
caaucccagggaccacccccagu

SEQ ID NO: 1298686 - RNA, 18 nt, Human
cacaggagcugggccugg

SEQ ID NO: 1298687 - RNA, 18 nt, Human
caccuggucucccggggc

SEQ ID NO: 1298688 - RNA, 18 nt, Human
cagaagcuggaucaccgc

SEQ ID NO: 1298689 - RNA, 23 nt, Human
cagacccucacccccaggagccu

SEQ ID NO: 1298690 - RNA, 18 nt, Human
cagcaaaaacagacucag

SEQ ID NO: 1298691 - RNA, 21 nt, Human
cagcaaaaacagacucagaca

SEQ ID NO: 1298692 - RNA, 25 nt, Human
cagcaaaaacagacucagacagacc

SEQ ID NO: 1298693 - RNA, 28 nt, Human
cagcaaaaacagacucagacagacccuc

SEQ ID NO: 1298694 - RNA, 30 nt, Human
cagcaaaaacagacucagacagacccucaa

SEQ ID NO: 1298695 - RNA, 18 nt, Human
cagcagccacaggagcug

SEQ ID NO: 1298696 - RNA, 29 nt, Human
cagccacaggagcugggccugggccacag

SEQ ID NO: 1298697 - RNA, 24 nt, Human
cagcccagcagccacaggagcugg

SEQ ID NO: 1298698 - RNA, 19 nt, Human
cagccguaccagcugcggc

SEQ ID NO: 1298699 - RNA, 25 nt, Human
caggagccugcucccaaccggggcc

SEQ ID NO: 1298700 - RNA, 21 nt, Human
caucgcccuccuccacuagug

SEQ ID NO: 1298701 - RNA, 22 nt, Human
ccaaaagaaaacaagccagcga

SEQ ID NO: 1298702 - RNA, 19 nt, Human
cccaaaagaaaacaagcca

SEQ ID NO: 1298703 - RNA, 20 nt, Human
cccccaggagccugcuccca

SEQ ID NO: 1298704 - RNA, 20 nt, Human
ccgcagggcccagcccagca

SEQ ID NO: 1298705 - RNA, 19 nt, Human
ccgcgccuccucagggcug

SEQ ID NO: 1298706 - RNA, 20 nt, Human
ccgcgccuccucagggcugu

SEQ ID NO: 1298707 - RNA, 18 nt, Human
ccguaccagcugcggcuu

SEQ ID NO: 1298708 - RNA, 19 nt, Human
ccugcagaccccgcagggc

SEQ ID NO: 1298709 - RNA, 18 nt, Human
ccugcucccaaccggggc

SEQ ID NO: 1298710 - RNA, 18 nt, Human
cuagagcagcaaaaacag

SEQ ID NO: 1298711 - RNA, 18 nt, Human
cucccccucucccuccuc

SEQ ID NO: 1298712 - RNA, 21 nt, Human
gagccugcucccaaccggggc

SEQ ID NO: 1298713 - RNA, 21 nt, Human
gcaaaaacagacucagacaga

SEQ ID NO: 1298714 - RNA, 20 nt, Human
gccuccucagggcugugcuc

SEQ ID NO: 1298715 - RNA, 21 nt, Human
gcguccaucgcccuccuccac

SEQ ID NO: 1298716 - RNA, 19 nt, Human
ggagccugcucccaaccgg

SEQ ID NO: 1298717 - RNA, 18 nt, Human
ggagugugccuuggcccc

SEQ ID NO: 1298718 - RNA, 21 nt, Human
ggccacaggagugagcagaua

SEQ ID NO: 1298719 - RNA, 23 nt, Human
ggcgacagagcuacaggagugug

SEQ ID NO: 1298720 - RNA, 21 nt, Human
gggcugaaggcguccaucgcc

SEQ ID NO: 1298721 - RNA, 23 nt, Human
ggugccuggggcugaaggcgucc

SEQ ID NO: 1298722 - RNA, 21 nt, Human
guaaggcuacgcucccccucu

SEQ ID NO: 1298723 - RNA, 22 nt, Human
guccagaagcuggaucaccgca

SEQ ID NO: 1298724 - RNA, 18 nt, Human
uaacuuaccccgucucag

SEQ ID NO: 1298725 - RNA, 23 nt, Human
uaccccgucucagggaucuugcu

SEQ ID NO: 1298726 - RNA, 23 nt, Human
ucacccccaggagccugcuccca

SEQ ID NO: 1298727 - RNA, 21 nt, Human
uccacuaguguccaaucccag

SEQ ID NO: 1298728 - RNA, 23 nt, Human
ucccugcagaccccgcagggccc

SEQ ID NO: 1298729 - RNA, 23 nt, Human
ugagcagauaggagguguccaga

SEQ ID NO: 1298730 - RNA, 25 nt, Human
ugagcagauaggagguguccagaag

SEQ ID NO: 1298731 - RNA, 24 nt, Human
ugccggccagcugggugccugggg

SEQ ID NO: 1298732 - RNA, 18 nt, Human
ugggccugggccacagga

SEQ ID NO: 1298733 - RNA, 21 nt, Human
ugggugccuggggcugaaggc

SEQ ID NO: 1298734 - RNA, 24 nt, Human
ugucccugcagaccccgcagggcc

SEQ ID NO: 1298735 - RNA, 19 nt, Human
accggugacuuuccauccc

SEQ ID NO: 1298736 - RNA, 24 nt, Human
acuugaaggaggccuuucccaucu

SEQ ID NO: 1298737 - RNA, 20 nt, Human
agaaauuggcacaaaugcua

SEQ ID NO: 1298738 - RNA, 22 nt, Human
agaccgaggcauacuugaagga

SEQ ID NO: 1298739 - RNA, 19 nt, Human
agcagccucauucuuaaau

SEQ ID NO: 1298740 - RNA, 21 nt, Human
aggaggccuuucccaucucag

SEQ ID NO: 1298741 - RNA, 23 nt, Human
ccuuucccaucucagcagccuca

SEQ ID NO: 1298742 - RNA, 26 nt, Human
cggugacuuuccaucccuugaaccaa

SEQ ID NO: 1298743 - RNA, 21 nt, Human
cuugaaccaaggcguguuagc

SEQ ID NO: 1298744 - RNA, 20 nt, Human
cuuucaguuuauccaagacc

SEQ ID NO: 1298745 - RNA, 19 nt, Human
gaggccuuucccaucucag

SEQ ID NO: 1298746 - RNA, 24 nt, Human
gcaaaggugaccaccauaccaggu

SEQ ID NO: 1298747 - RNA, 21 nt, Human
gcacaaaugcuacugugucgg

SEQ ID NO: 1298748 - RNA, 25 nt, Human
uccagcauguugucaucauuccaac

SEQ ID NO: 1298749 - RNA, 20 nt, Human
ugacaggcacaagggcuugu

SEQ ID NO: 1298750 - RNA, 20 nt, Human
uuggugguaggacgcagucc

SEQ ID NO: 1298751 - RNA, 24 nt, Human
accacucccaccccugccccaccc

SEQ ID NO: 1298752 - RNA, 18 nt, Human
acucccaccccugcccca

SEQ ID NO: 1298753 - RNA, 22 nt, Human
acucccaccccugccccacccc

SEQ ID NO: 1298754 - RNA, 19 nt, Human
agcggcucccacccggccc

SEQ ID NO: 1298755 - RNA, 23 nt, Human
agggggccuuccccgccacuggg

SEQ ID NO: 1298756 - RNA, 19 nt, Human
cacugcccaggccuggcug

SEQ ID NO: 1298757 - RNA, 22 nt, Human
cacugggaauucugcccuccca

SEQ ID NO: 1298758 - RNA, 19 nt, Human
ccaccauccggcccugacc

SEQ ID NO: 1298759 - RNA, 21 nt, Human
ccaccccugccccaccccugc

SEQ ID NO: 1298760 - RNA, 25 nt, Human
ccacucccaccccugccccaccccu

SEQ ID NO: 1298761 - RNA, 22 nt, Human
cccugccccaccccugccgcaa

SEQ ID NO: 1298762 - RNA, 18 nt, Human
ccgcagcagcuucccggg

SEQ ID NO: 1298763 - RNA, 19 nt, Human
ccucgcccuccucuccucc

SEQ ID NO: 1298764 - RNA, 21 nt, Human
ccuggcuggagcggcucccac

SEQ ID NO: 1298765 - RNA, 18 nt, Human
ccuuccccgccacuggga

SEQ ID NO: 1298766 - RNA, 20 nt, Human
cggcaccgccucucucgccu

SEQ ID NO: 1298767 - RNA, 23 nt, Human
cggcccucgcccuccucuccucc

SEQ ID NO: 1298768 - RNA, 21 nt, Human
cucccaggucucggcaccgcc

SEQ ID NO: 1298769 - RNA, 20 nt, Human
gaccugugcacguggaucuc

SEQ ID NO: 1298770 - RNA, 24 nt, Human
gagcggcucccacccggcccccuu

SEQ ID NO: 1298771 - RNA, 19 nt, Human
gccuucggcccucgcccuc

SEQ ID NO: 1298772 - RNA, 21 nt, Human
uaccacucccaccccugcccc

SEQ ID NO: 1298773 - RNA, 18 nt, Human
ucccacccggcccccuuc

SEQ ID NO: 1298774 - RNA, 22 nt, Human
ucccaggucucggcaccgccuc

SEQ ID NO: 1298775 - RNA, 24 nt, Human
uccccgaccugugcacguggaucu

SEQ ID NO: 1298776 - RNA, 18 nt, Human
ucgcccuccucuccuccc

SEQ ID NO: 1298777 - RNA, 19 nt, Human
ucgcccuccucuccucccc

SEQ ID NO: 1298778 - RNA, 23 nt, Human
ucggcaccgccucucucgccuuc

SEQ ID NO: 1298779 - RNA, 25 nt, Human
ugcccaggccuggcuggagcggcuc

SEQ ID NO: 1298780 - RNA, 19 nt, Human
uucugcccucccagccagg

SEQ ID NO: 1298781 - RNA, 19 nt, Human
aaagagccuagcugggaac

SEQ ID NO: 1298782 - RNA, 19 nt, Human
aagcuccuaggaagcagua

SEQ ID NO: 1298783 - RNA, 23 nt, Human
acagcucaaagccucucugucuc

SEQ ID NO: 1298784 - RNA, 24 nt, Human
agaggguagggguggggggagucc

SEQ ID NO: 1298785 - RNA, 21 nt, Human
agcaguagggagggaguuagg

SEQ ID NO: 1298786 - RNA, 18 nt, Human
agcuccagcucugccagc

SEQ ID NO: 1298787 - RNA, 21 nt, Human
aggccuguuggggaacagccc

SEQ ID NO: 1298788 - RNA, 19 nt, Human
aggguagggguggggggag

SEQ ID NO: 1298789 - RNA, 24 nt, Human
agguugugucccaucugguucuuu

SEQ ID NO: 1298790 - RNA, 26 nt, Human
aguagcaaaugagucaguagccggug

SEQ ID NO: 1298791 - RNA, 26 nt, Human
aucucccucuccccuuuccuucccaa

SEQ ID NO: 1298792 - RNA, 21 nt, Human
caacaggagagccuacaccuc

SEQ ID NO: 1298793 - RNA, 23 nt, Human
caacaggagagccuacaccuccc

SEQ ID NO: 1298794 - RNA, 25 nt, Human
caacaggagagccuacaccucccac

SEQ ID NO: 1298795 - RNA, 22 nt, Human
caauucuugucuugguugggaa

SEQ ID NO: 1298796 - RNA, 18 nt, Human
cagcccccaucagagccc

SEQ ID NO: 1298797 - RNA, 24 nt, Human
cagcuuccucagccguucaaagag

SEQ ID NO: 1298798 - RNA, 18 nt, Human
caggucguccccguaacu

SEQ ID NO: 1298799 - RNA, 21 nt, Human
ccacugcccgcgugcucccgc

SEQ ID NO: 1298800 - RNA, 22 nt, Human
ccccaacaggagagccuacacc

SEQ ID NO: 1298801 - RNA, 21 nt, Human
ccccucaugggaagacauggu

SEQ ID NO: 1298802 - RNA, 18 nt, Human
cccggcccuccagcuucc

SEQ ID NO: 1298803 - RNA, 19 nt, Human
ccgcagccgccgguacagc

SEQ ID NO: 1298804 - RNA, 21 nt, Human
ccggcccuccagcuuccucag

SEQ ID NO: 1298805 - RNA, 18 nt, Human
ccuagcugggaacagggg

SEQ ID NO: 1298806 - RNA, 22 nt, Human
ccucuccccuuuccuucccaac

SEQ ID NO: 1298807 - RNA, 21 nt, Human
cgacuucuggggccuagcacc

SEQ ID NO: 1298808 - RNA, 18 nt, Human
cgcucgaagcguuggcag

SEQ ID NO: 1298809 - RNA, 21 nt, Human
cgcucuccugggcuucagcgu

SEQ ID NO: 1298810 - RNA, 23 nt, Human
cggaagccacccggcccuccagc

SEQ ID NO: 1298811 - RNA, 23 nt, Human
cguagucggccagugcccgcagc

SEQ ID NO: 1298812 - RNA, 21 nt, Human
cuucuggggccuagcaccauu

SEQ ID NO: 1298813 - RNA, 19 nt, Human
cuugggaaucucccucucc

SEQ ID NO: 1298814 - RNA, 32 nt, Human
cuugggaaucucccucuccccuuuccuucccc

SEQ ID NO: 1298815 - RNA, 18 nt, Human
gaacagcccccaucagag

SEQ ID NO: 1298816 - RNA, 20 nt, Human
gaggguagggguggggggag

SEQ ID NO: 1298817 - RNA, 19 nt, Human
gccuagcugggaacagggg

SEQ ID NO: 1298818 - RNA, 20 nt, Human
gccuugggaagggcacuagu

SEQ ID NO: 1298819 - RNA, 24 nt, Human
gcguuggcagcacagcugcuggug

SEQ ID NO: 1298820 - RNA, 18 nt, Human
gcugguggcucucggcgg

SEQ ID NO: 1298821 - RNA, 20 nt, Human
gggcaggguccuuaaugggg

SEQ ID NO: 1298822 - RNA, 22 nt, Human
gggggcugaggaacagcucaaa

SEQ ID NO: 1298823 - RNA, 22 nt, Human
guggcucucggcgggccgcacc

SEQ ID NO: 1298824 - RNA, 24 nt, Human
uaacucgcccgaggaacugaccga

SEQ ID NO: 1298825 - RNA, 20 nt, Human
uaauucuggguucacauuuu

SEQ ID NO: 1298826 - RNA, 18 nt, Human
uacagagugaccccucau

SEQ ID NO: 1298827 - RNA, 20 nt, Human
ucaaagccucucugucucag

SEQ ID NO: 1298828 - RNA, 23 nt, Human
ucaccaguuuuauccaaaggcug

SEQ ID NO: 1298829 - RNA, 21 nt, Human
ucccaacaccaucccccaaca

SEQ ID NO: 1298830 - RNA, 24 nt, Human
ucccccaacaggagagccuacacc

SEQ ID NO: 1298831 - RNA, 26 nt, Human
ucccccaacaggagagccuacaccuc

SEQ ID NO: 1298832 - RNA, 19 nt, Human
uccccguaacucgcccgag

SEQ ID NO: 1298833 - RNA, 18 nt, Human
uccuuaauggggguugca

SEQ ID NO: 1298834 - RNA, 20 nt, Human
ucgaaaagaggagacccggc

SEQ ID NO: 1298835 - RNA, 18 nt, Human
ucugccaggccuguugga

SEQ ID NO: 1298836 - RNA, 20 nt, Human
ucuggggccuagcaccauuc

SEQ ID NO: 1298837 - RNA, 20 nt, Human
ucugguggguuuguuguaac

SEQ ID NO: 1298838 - RNA, 24 nt, Human
ucuucugaaaaaacaaggggcagu

SEQ ID NO: 1298839 - RNA, 19 nt, Human
ucuuggcucagguguuugg

SEQ ID NO: 1298840 - RNA, 18 nt, Human
ugaagaggagucuuggcu

SEQ ID NO: 1298841 - RNA, 25 nt, Human
ugacuugggugggaaaacuagugag

SEQ ID NO: 1298842 - RNA, 24 nt, Human
ugagggaagggguuguugaacuag

SEQ ID NO: 1298843 - RNA, 25 nt, Human
ugagggaagggguuguugaacuagg

SEQ ID NO: 1298844 - RNA, 26 nt, Human
ugagggaagggguuguugaacuaggu

SEQ ID NO: 1298845 - RNA, 19 nt, Human
uggcggagucggagaggcg

SEQ ID NO: 1298846 - RNA, 18 nt, Human
ugggaaaacuagugacuu

SEQ ID NO: 1298847 - RNA, 24 nt, Human
ugggaaagagccuagcugggaaca

SEQ ID NO: 1298848 - RNA, 18 nt, Human
ugggaacaggggucguuu

SEQ ID NO: 1298849 - RNA, 23 nt, Human
ugggaaucucccucuccccuuuc

SEQ ID NO: 1298850 - RNA, 19 nt, Human
uucuuugacagugacuugg

SEQ ID NO: 1298851 - RNA, 19 nt, Human
uuggcauguuaauuuuuau

SEQ ID NO: 1298852 - RNA, 20 nt, Human
uuggcucuuucugaagagga

SEQ ID NO: 1298853 - RNA, 21 nt, Human
uuucugaagaggagucuuggc

SEQ ID NO: 1298854 - RNA, 20 nt, Human
aagcaggugcggugacacgu

SEQ ID NO: 1298855 - RNA, 21 nt, Human
aagcccauuuucccugggugg

SEQ ID NO: 1298856 - RNA, 22 nt, Human
accaugguggcgggagcgggcg

SEQ ID NO: 1298857 - RNA, 20 nt, Human
agaaaagcccguguccugaa

SEQ ID NO: 1298858 - RNA, 23 nt, Human
agccccucgacgcugcgcagcuc

SEQ ID NO: 1298859 - RNA, 18 nt, Human
cacagaaaagcccguguc

SEQ ID NO: 1298860 - RNA, 21 nt, Human
cacuaacccaagugcccugcg

SEQ ID NO: 1298861 - RNA, 22 nt, Human
cagagcccuccugcagccccuc

SEQ ID NO: 1298862 - RNA, 25 nt, Human
caugagcaccuggugaaucuccugc

SEQ ID NO: 1298863 - RNA, 18 nt, Human
ccccuugcccccggccug

SEQ ID NO: 1298864 - RNA, 18 nt, Human
cccgccgcgccacuaacc

SEQ ID NO: 1298865 - RNA, 20 nt, Human
cccgccgcgccacuaaccca

SEQ ID NO: 1298866 - RNA, 21 nt, Human
cccgccgcgccacuaacccaa

SEQ ID NO: 1298867 - RNA, 18 nt, Human
cccgguccaugagcaccu

SEQ ID NO: 1298868 - RNA, 21 nt, Human
cccuccugcagccccucgacg

SEQ ID NO: 1298869 - RNA, 18 nt, Human
ccgcgccgcccgccgcgc

SEQ ID NO: 1298870 - RNA, 18 nt, Human
ccgcgccgcccgccgcgc

SEQ ID NO: 1298871 - RNA, 21 nt, Human
ccggccgccccuugcccccgg

SEQ ID NO: 1298872 - RNA, 19 nt, Human
ccggccucgucaagcccau

SEQ ID NO: 1298873 - RNA, 18 nt, Human
ccucagcgcccuccccac

SEQ ID NO: 1298874 - RNA, 26 nt, Human
ccuccuucuucaggcucucugggcag

SEQ ID NO: 1298875 - RNA, 18 nt, Human
ccugaaugacaaugacuu

SEQ ID NO: 1298876 - RNA, 21 nt, Human
ccugcaccaucuccugggggg

SEQ ID NO: 1298877 - RNA, 18 nt, Human
cgccgcgccacuaaccca

SEQ ID NO: 1298878 - RNA, 22 nt, Human
cggccgccccuugcccccggcc

SEQ ID NO: 1298879 - RNA, 18 nt, Human
cggccgcgcccggccgcc

SEQ ID NO: 1298880 - RNA, 20 nt, Human
cggccggggcggccgccggc

SEQ ID NO: 1298881 - RNA, 21 nt, Human
cggccugcgagccguguuccc

SEQ ID NO: 1298882 - RNA, 24 nt, Human
cuccaaggauccccuguuuucucc

SEQ ID NO: 1298883 - RNA, 22 nt, Human
cugcagccccucgacgcugcgc

SEQ ID NO: 1298884 - RNA, 21 nt, Human
cuuccaccacacgcagcacag

SEQ ID NO: 1298885 - RNA, 21 nt, Human
gacccucagcgcccuccccac

SEQ ID NO: 1298886 - RNA, 20 nt, Human
gagcaugacugauggcagcu

SEQ ID NO: 1298887 - RNA, 27 nt, Human
gagcaugacugauggcagcucggccgc

SEQ ID NO: 1298888 - RNA, 26 nt, Human
gcgcagcuccgagaaguggucgccuc

SEQ ID NO: 1298889 - RNA, 19 nt, Human
gcuaauccuccccucucca

SEQ ID NO: 1298890 - RNA, 19 nt, Human
gcucgaucccaggggcgag

SEQ ID NO: 1298891 - RNA, 20 nt, Human
gcuguccgcgccgcccgccg

SEQ ID NO: 1298892 - RNA, 23 nt, Human
ggccgguggucucaucucccggg

SEQ ID NO: 1298893 - RNA, 24 nt, Human
ggugaaucuccugcaccaucuccu

SEQ ID NO: 1298894 - RNA, 23 nt, Human
gugaaucuccugcaccaucuccu

SEQ ID NO: 1298895 - RNA, 20 nt, Human
ucacagaaaagcccgugucc

SEQ ID NO: 1298896 - RNA, 19 nt, Human
uccagcacguugccaucca

SEQ ID NO: 1298897 - RNA, 21 nt, Human
uccagcacguugccauccagg

SEQ ID NO: 1298898 - RNA, 22 nt, Human
uccaggugcagugagaagcagg

SEQ ID NO: 1298899 - RNA, 18 nt, Human
uccgcgccgcccgccgcg

SEQ ID NO: 1298900 - RNA, 18 nt, Human
uccugcaccaucuccugg

SEQ ID NO: 1298901 - RNA, 18 nt, Human
uccuggggggacaccugc

SEQ ID NO: 1298902 - RNA, 19 nt, Human
ucgacgcugcgcagcuccg

SEQ ID NO: 1298903 - RNA, 19 nt, Human
ucgcgugacccucagcgcc

SEQ ID NO: 1298904 - RNA, 20 nt, Human
ugacccucagcgcccucccc

SEQ ID NO: 1298905 - RNA, 24 nt, Human
ugacuuccuggccgguggucucau

SEQ ID NO: 1298906 - RNA, 25 nt, Human
ugcccccggccugcgagccguguuc

SEQ ID NO: 1298907 - RNA, 23 nt, Human
ugcgcgccgcggcugcugaggga

SEQ ID NO: 1298908 - RNA, 19 nt, Human
uggcucggccgccgccgcc

SEQ ID NO: 1298909 - RNA, 20 nt, Human
uucuucaggcucucugggca

SEQ ID NO: 1298910 - RNA, 25 nt, Human
aaaaaaaaacaaaaacaaaaccuuu

SEQ ID NO: 1298911 - RNA, 22 nt, Human
aacacaucaaauuaccggcgug

SEQ ID NO: 1298912 - RNA, 19 nt, Human
aaggagcuccgcacacaag

SEQ ID NO: 1298913 - RNA, 18 nt, Human
aguucucccgcacuucuc

SEQ ID NO: 1298914 - RNA, 28 nt, Human
cacauacacuagcaaggagcuccgcaca

SEQ ID NO: 1298915 - RNA, 18 nt, Human
cacuucucucccauccca

SEQ ID NO: 1298916 - RNA, 24 nt, Human
ccaguaaaaacaacgcacugggca

SEQ ID NO: 1298917 - RNA, 21 nt, Human
ccgcacacaagcuccuccagu

SEQ ID NO: 1298918 - RNA, 21 nt, Human
ccguaaaaaaaaacaaaaaca

SEQ ID NO: 1298919 - RNA, 21 nt, Human
ccuaagacccugaggaucagg

SEQ ID NO: 1298920 - RNA, 24 nt, Human
ccuacggguccccaucagggucaa

SEQ ID NO: 1298921 - RNA, 23 nt, Human
ccuccuaagacccugaggaucag

SEQ ID NO: 1298922 - RNA, 20 nt, Human
ccuuccuugucuaacucgag

SEQ ID NO: 1298923 - RNA, 23 nt, Human
cgccagcgaagccuaacacggcc

SEQ ID NO: 1298924 - RNA, 19 nt, Human
cuccgaccauaccuccuaa

SEQ ID NO: 1298925 - RNA, 19 nt, Human
cuccgcacacaagcuccuc

SEQ ID NO: 1298926 - RNA, 18 nt, Human
cuccgugaggggcaaagc

SEQ ID NO: 1298927 - RNA, 20 nt, Human
gaccauaccuccuaagaccc

SEQ ID NO: 1298928 - RNA, 21 nt, Human
gaggggcaaagcucccgggga

SEQ ID NO: 1298929 - RNA, 19 nt, Human
gcagugcaucucaacacau

SEQ ID NO: 1298930 - RNA, 23 nt, Human
gcuuucguuccaaagacauuagu

SEQ ID NO: 1298931 - RNA, 23 nt, Human
guugcuguggccacuuaguuccg

SEQ ID NO: 1298932 - RNA, 19 nt, Human
uagcaaggagcuccgcaca

SEQ ID NO: 1298933 - RNA, 18 nt, Human
uaggagccugaugcggca

SEQ ID NO: 1298934 - RNA, 22 nt, Human
ucagggucaacuaacguucucc

SEQ ID NO: 1298935 - RNA, 23 nt, Human
ucucccaucccaacacauacacu

SEQ ID NO: 1298936 - RNA, 25 nt, Human
ucuccgaccauaccuccuaagaccc

SEQ ID NO: 1298937 - RNA, 18 nt, Human
ugcaucucaacacaucaa

SEQ ID NO: 1298938 - RNA, 19 nt, Human
ugucaucccuacucuuuca

SEQ ID NO: 1298939 - RNA, 19 nt, Human
uucaaaucacauaccucua

SEQ ID NO: 1298940 - RNA, 23 nt, Human
uuccaaagacauuaguuuauaga

SEQ ID NO: 1298941 - RNA, 27 nt, Human
caucaaagaagggaaaaagcaagagau

SEQ ID NO: 1298942 - RNA, 22 nt, Human
caucaaagaagggaaaaagcag

SEQ ID NO: 1298943 - RNA, 22 nt, Human
cuaaggguuugcagccuccucu

SEQ ID NO: 1298944 - RNA, 21 nt, Human
cuggcucuaggacacaggguc

SEQ ID NO: 1298945 - RNA, 22 nt, Human
gcugggcuggggaaaagacaac

SEQ ID NO: 1298946 - RNA, 20 nt, Human
ggaaaaagcaagagauggca

SEQ ID NO: 1298947 - RNA, 22 nt, Human
guuugcagccuccucuccaucu

SEQ ID NO: 1298948 - RNA, 21 nt, Human
uaggacacagcuguguucugg

SEQ ID NO: 1298949 - RNA, 21 nt, Human
ucagcacaggcuccuccucac

SEQ ID NO: 1298950 - RNA, 20 nt, Human
ucuaggacacagcuguguuc

SEQ ID NO: 1298951 - RNA, 22 nt, Human
ucucagcacaggcuccuccuca

SEQ ID NO: 1298952 - RNA, 19 nt, Human
uggggcugagaagucucag

SEQ ID NO: 1298953 - RNA, 24 nt, Human
uuugcagccuccucuccaucuucu

SEQ ID NO: 1298954 - RNA, 22 nt, Human
ccacuccccagaccuucucccg

SEQ ID NO: 1298955 - RNA, 23 nt, Human
ccccacuccccagaccuucuccc

SEQ ID NO: 1298956 - RNA, 19 nt, Human
ggacugacaucagcuggua

SEQ ID NO: 1298957 - RNA, 23 nt, Human
ggcggacugacaucagcugguau

SEQ ID NO: 1298958 - RNA, 23 nt, Human
uccaagagcuugagauccccacu

SEQ ID NO: 1298959 - RNA, 18 nt, Human
cacccgccucuuucagag

SEQ ID NO: 1298960 - RNA, 23 nt, Human
ucagagcaauugcagccacagcc

SEQ ID NO: 1298961 - RNA, 19 nt, Human
uucagagcaauugcagcca

SEQ ID NO: 1298962 - RNA, 23 nt, Human
aaacaucuccccuauucccagau

SEQ ID NO: 1298963 - RNA, 23 nt, Human
aaagcugacccaauaccuacagu

SEQ ID NO: 1298964 - RNA, 20 nt, Human
aaaggaaagagacugcugcc

SEQ ID NO: 1298965 - RNA, 23 nt, Human
aacuuccaacucuaaaauaucug

SEQ ID NO: 1298966 - RNA, 22 nt, Human
aagcaggcauucucauucacuu

SEQ ID NO: 1298967 - RNA, 21 nt, Human
aagcugacccaauaccuacag

SEQ ID NO: 1298968 - RNA, 25 nt, Human
acccugcaacccagcgauuagacug

SEQ ID NO: 1298969 - RNA, 18 nt, Human
accuaccagaaaccucaa

SEQ ID NO: 1298970 - RNA, 20 nt, Human
acggcaugaaagcugacccc

SEQ ID NO: 1298971 - RNA, 25 nt, Human
acucugugcuuacucauauucagga

SEQ ID NO: 1298972 - RNA, 19 nt, Human
acugcauaacuuccaacuc

SEQ ID NO: 1298973 - RNA, 20 nt, Human
acuucaaugaacauuugcac

SEQ ID NO: 1298974 - RNA, 21 nt, Human
agaaaauggcagaacaguuac

SEQ ID NO: 1298975 - RNA, 23 nt, Human
agaaaauggcagaacaguuacaa

SEQ ID NO: 1298976 - RNA, 22 nt, Human
agacaaaaauaaauaguagauc

SEQ ID NO: 1298977 - RNA, 24 nt, Human
agacaaaaauaaauaguagaucua

SEQ ID NO: 1298978 - RNA, 25 nt, Human
agacaaaaauaaauaguagaucuaa

SEQ ID NO: 1298979 - RNA, 22 nt, Human
agagaauggaaucaagugacac

SEQ ID NO: 1298980 - RNA, 18 nt, Human
agcaaagaaaguggcuca

SEQ ID NO: 1298981 - RNA, 18 nt, Human
aggaaaaaaaaggaaagg

SEQ ID NO: 1298982 - RNA, 25 nt, Human
aggaaaaauaauauauuuuaaaugc

SEQ ID NO: 1298983 - RNA, 21 nt, Human
augcugcagacagcaaagaaa

SEQ ID NO: 1298984 - RNA, 18 nt, Human
caacaguucugccuucag

SEQ ID NO: 1298985 - RNA, 24 nt, Human
caggaaugagguauggguguuaug

SEQ ID NO: 1298986 - RNA, 20 nt, Human
caggcauucucauucacuac

SEQ ID NO: 1298987 - RNA, 22 nt, Human
caggcauucucauucacuacuu

SEQ ID NO: 1298988 - RNA, 22 nt, Human
caggucacaggccacccugcaa

SEQ ID NO: 1298989 - RNA, 21 nt, Human
ccagagcaaacgaccaggaag

SEQ ID NO: 1298990 - RNA, 18 nt, Human
cccaauaccuacaguacc

SEQ ID NO: 1298991 - RNA, 23 nt, Human
cccugguucaugugaccaagggg

SEQ ID NO: 1298992 - RNA, 24 nt, Human
cccuucucaaaagauacaauuaaa

SEQ ID NO: 1298993 - RNA, 22 nt, Human
ccugcaacccagcgauuagacu

SEQ ID NO: 1298994 - RNA, 20 nt, Human
ccuuaaugccaugcagcuag

SEQ ID NO: 1298995 - RNA, 20 nt, Human
cgcauauccuaagaaaauaa

SEQ ID NO: 1298996 - RNA, 21 nt, Human
cggcaugaaagcugacccaau

SEQ ID NO: 1298997 - RNA, 22 nt, Human
cuacuuguauaacuccaaccuu

SEQ ID NO: 1298998 - RNA, 23 nt, Human
cuccaacaguucugccuucagcc

SEQ ID NO: 1298999 - RNA, 23 nt, Human
cucuagguaaacucugugcuuac

SEQ ID NO: 1299000 - RNA, 21 nt, Human
cucuaugacuguagacuugcu

SEQ ID NO: 1299001 - RNA, 23 nt, Human
cugacccaauaccuacaguacca

SEQ ID NO: 1299002 - RNA, 21 nt, Human
cuuccaacucuaaaauaucug

SEQ ID NO: 1299003 - RNA, 19 nt, Human
cuucuuuuaaaagucagga

SEQ ID NO: 1299004 - RNA, 19 nt, Human
gaaagagacugcugccucu

SEQ ID NO: 1299005 - RNA, 20 nt, Human
gaccaaggggggucuggggu

SEQ ID NO: 1299006 - RNA, 26 nt, Human
gagcaaacgaccaggaaggaagcaac

SEQ ID NO: 1299007 - RNA, 23 nt, Human
gcaaagaaaguggcucagaaacg

SEQ ID NO: 1299008 - RNA, 21 nt, Human
gccugggauggaagggaugga

SEQ ID NO: 1299009 - RNA, 25 nt, Human
gcguguacacacauacacaaacgua

SEQ ID NO: 1299010 - RNA, 21 nt, Human
gcucagaaacgauguaaagag

SEQ ID NO: 1299011 - RNA, 19 nt, Human
ggagauggccagcagggaa

SEQ ID NO: 1299012 - RNA, 19 nt, Human
ggcaggucacaggccaccc

SEQ ID NO: 1299013 - RNA, 21 nt, Human
gggauggaagggauggagaga

SEQ ID NO: 1299014 - RNA, 18 nt, Human
gggggugaaggaagaagg

SEQ ID NO: 1299015 - RNA, 19 nt, Human
ggugaaggaagaaggaaga

SEQ ID NO: 1299016 - RNA, 22 nt, Human
uaaaacaacaacaacucuugaa

SEQ ID NO: 1299017 - RNA, 24 nt, Human
uaaaacacuucuguuggcacuucc

SEQ ID NO: 1299018 - RNA, 18 nt, Human
uaauaggcaccuaccaga

SEQ ID NO: 1299019 - RNA, 23 nt, Human
uaauucauccaaacaucuccccu

SEQ ID NO: 1299020 - RNA, 24 nt, Human
uaauucauccaaacaucuccccua

SEQ ID NO: 1299021 - RNA, 24 nt, Human
uacacacauacacaaacguacugg

SEQ ID NO: 1299022 - RNA, 19 nt, Human
uaccagaaaccucaacauc

SEQ ID NO: 1299023 - RNA, 18 nt, Human
uaccuacaguaccagucc

SEQ ID NO: 1299024 - RNA, 18 nt, Human
uagaaaggaaaaaaaagg

SEQ ID NO: 1299025 - RNA, 22 nt, Human
uagacuugcugacuuuacucug

SEQ ID NO: 1299026 - RNA, 23 nt, Human
uagcaagcaaagaauaaaaggga

SEQ ID NO: 1299027 - RNA, 26 nt, Human
uauaagagcauuuaccagaaagacag

SEQ ID NO: 1299028 - RNA, 21 nt, Human
uaugacuguagacuugcugac

SEQ ID NO: 1299029 - RNA, 18 nt, Human
ucaaugaacauuugcaca

SEQ ID NO: 1299030 - RNA, 22 nt, Human
uccaaauacucaccggccuuca

SEQ ID NO: 1299031 - RNA, 18 nt, Human
uccaggauguagagaagc

SEQ ID NO: 1299032 - RNA, 21 nt, Human
ugaagccccuggggcacaggu

SEQ ID NO: 1299033 - RNA, 21 nt, Human
ugaccaaggggggucuggggu

SEQ ID NO: 1299034 - RNA, 19 nt, Human
ugaugauucuuuaugcucu

SEQ ID NO: 1299035 - RNA, 19 nt, Human
uggauaacagauaacuccu

SEQ ID NO: 1299036 - RNA, 20 nt, Human
uggcaauuuggagauauaug

SEQ ID NO: 1299037 - RNA, 22 nt, Human
ugggauggaagggauggagaga

SEQ ID NO: 1299038 - RNA, 19 nt, Human
uguacauacauguaacagg

SEQ ID NO: 1299039 - RNA, 24 nt, Human
ugugaccaaggggggucugggguu

SEQ ID NO: 1299040 - RNA, 18 nt, Human
uguggaagaaccacucca

SEQ ID NO: 1299041 - RNA, 21 nt, Human
uucccagauguuuauauuguu

SEQ ID NO: 1299042 - RNA, 21 nt, Human
uucuguuggcacuuccacacu

SEQ ID NO: 1299043 - RNA, 21 nt, Human
uugaguucaggauaccaaguc

SEQ ID NO: 1299044 - RNA, 22 nt, Human
uuuucccaauuuucuaaaaccu

SEQ ID NO: 1299045 - RNA, 22 nt, Human
ccggcaacaaaagcgucccgag

SEQ ID NO: 1299046 - RNA, 24 nt, Human
cggggccuccggagcggguggccg

SEQ ID NO: 1299047 - RNA, 24 nt, Human
cuccggagcggguggccgauaccu

SEQ ID NO: 1299048 - RNA, 20 nt, Human
gcggggccuccggagcgggu

SEQ ID NO: 1299049 - RNA, 22 nt, Human
ggccuccggagcggguggccga

SEQ ID NO: 1299050 - RNA, 18 nt, Human
gggggucgaggcggggaa

SEQ ID NO: 1299051 - RNA, 24 nt, Human
ucuccggcaacaaaagcgucccga

SEQ ID NO: 1299052 - RNA, 18 nt, Human
uggcggggccuccggagc

SEQ ID NO: 1299053 - RNA, 25 nt, Human
aggaaaaugaguccuuuuuucuuuu

SEQ ID NO: 1299054 - RNA, 21 nt, Human
aguccuuuuuucuuuuuccag

SEQ ID NO: 1299055 - RNA, 24 nt, Human
caggcgccucccuccucgcgccuc

SEQ ID NO: 1299056 - RNA, 22 nt, Human
ccaaccggcggcuuccggcugc

SEQ ID NO: 1299057 - RNA, 19 nt, Human
ccaguacacgccgcugggc

SEQ ID NO: 1299058 - RNA, 20 nt, Human
ccaguacacgccgcugggcg

SEQ ID NO: 1299059 - RNA, 21 nt, Human
ccaguacacgccgcugggcgc

SEQ ID NO: 1299060 - RNA, 19 nt, Human
cccagucgccgcugcaaag

SEQ ID NO: 1299061 - RNA, 22 nt, Human
cccgcaccgcugccugcuugcg

SEQ ID NO: 1299062 - RNA, 24 nt, Human
cccuccaagcgcccccucucggca

SEQ ID NO: 1299063 - RNA, 26 nt, Human
ccgcggcaacgccaggcgccucccuc

SEQ ID NO: 1299064 - RNA, 22 nt, Human
ccgcugcaaagacaguuuccca

SEQ ID NO: 1299065 - RNA, 24 nt, Human
ccgguggcccuccaagcgcccccu

SEQ ID NO: 1299066 - RNA, 18 nt, Human
ccuccaagcgcccccucu

SEQ ID NO: 1299067 - RNA, 23 nt, Human
ccuccuggagggcgggguuugcg

SEQ ID NO: 1299068 - RNA, 24 nt, Human
cgaagccgccgguggcccuccaag

SEQ ID NO: 1299069 - RNA, 19 nt, Human
cgccgcugcaaagacaguu

SEQ ID NO: 1299070 - RNA, 21 nt, Human
cgcguaccguccacacagagc

SEQ ID NO: 1299071 - RNA, 18 nt, Human
cggcgcaggggcggagcc

SEQ ID NO: 1299072 - RNA, 21 nt, Human
cuuuuuucuuuuuccagcuga

SEQ ID NO: 1299073 - RNA, 24 nt, Human
gcaggggcggagccuccuggaggg

SEQ ID NO: 1299074 - RNA, 20 nt, Human
gcguaccguccacacagagc

SEQ ID NO: 1299075 - RNA, 20 nt, Human
gcugccaaguuuugauacca

SEQ ID NO: 1299076 - RNA, 23 nt, Human
gggcgggguuugcguucacccgc

SEQ ID NO: 1299077 - RNA, 24 nt, Human
uagacagacaagcagauuguuaaa

SEQ ID NO: 1299078 - RNA, 18 nt, Human
ucacagaaaucccaguac

SEQ ID NO: 1299079 - RNA, 19 nt, Human
ucaccagcugccaaguuuu

SEQ ID NO: 1299080 - RNA, 23 nt, Human
ucccagcgccgcggcaacgccag

SEQ ID NO: 1299081 - RNA, 19 nt, Human
ucgaagccgccgguggccc

SEQ ID NO: 1299082 - RNA, 18 nt, Human
ucucggcagccucugcuc

SEQ ID NO: 1299083 - RNA, 19 nt, Human
ugagaaaccucaaguccuu

SEQ ID NO: 1299084 - RNA, 23 nt, Human
ugcccgggcgcgacgcgcugcgg

SEQ ID NO: 1299085 - RNA, 18 nt, Human
ugcucacagaaaucccag

SEQ ID NO: 1299086 - RNA, 24 nt, Human
uuaaaggacacagcauauuaguuu

SEQ ID NO: 1299087 - RNA, 19 nt, Human
uugccgccuagcaaccgcc

SEQ ID NO: 1299088 - RNA, 20 nt, Human
uuuuccagcugacacucuga

SEQ ID NO: 1299089 - RNA, 24 nt, Human
acagcaccucugcuguggggggca

SEQ ID NO: 1299090 - RNA, 21 nt, Human
agaacagcaccucugcugugg

SEQ ID NO: 1299091 - RNA, 25 nt, Human
agcacccccuacaccagaccuccug

SEQ ID NO: 1299092 - RNA, 23 nt, Human
caggagcacccccuacaccagac

SEQ ID NO: 1299093 - RNA, 23 nt, Human
ccucuucagacagggccucagac

SEQ ID NO: 1299094 - RNA, 19 nt, Human
cucagaccuaaggcaggag

SEQ ID NO: 1299095 - RNA, 23 nt, Human
gcugggcccucuucagacagggc

SEQ ID NO: 1299096 - RNA, 22 nt, Human
gggacggaggauggacggagga

SEQ ID NO: 1299097 - RNA, 19 nt, Human
ggggcugggcccucuucag

SEQ ID NO: 1299098 - RNA, 22 nt, Human
guggggggcaucuagcaugggg

SEQ ID NO: 1299099 - RNA, 22 nt, Human
ucagacagggccucagaccuaa

SEQ ID NO: 1299100 - RNA, 20 nt, Human
ucagaccuaaggcaggagca

SEQ ID NO: 1299101 - RNA, 20 nt, Human
uccugggucacaggaaaugc

SEQ ID NO: 1299102 - RNA, 18 nt, Human
ugcagcucuuucugcaga

SEQ ID NO: 1299103 - RNA, 22 nt, Human
uugcagcucuuucugcagaugg

SEQ ID NO: 1299104 - RNA, 22 nt, Human
aaaaaggcagaguaacucagug

SEQ ID NO: 1299105 - RNA, 30 nt, Human
aaacacagcacaaaaggauuaauucacacc

SEQ ID NO: 1299106 - RNA, 22 nt, Human
aaagaauaaaaacgucaaaaag

SEQ ID NO: 1299107 - RNA, 22 nt, Human
aaccucagacaaucuucggcug

SEQ ID NO: 1299108 - RNA, 20 nt, Human
aaguccauuaaccgugaaag

SEQ ID NO: 1299109 - RNA, 20 nt, Human
aaugaaaguuaaagucuugg

SEQ ID NO: 1299110 - RNA, 22 nt, Human
agcacaaaaggauuaauucaca

SEQ ID NO: 1299111 - RNA, 21 nt, Human
agcuaauacugauuaaacaca

SEQ ID NO: 1299112 - RNA, 24 nt, Human
aguuaaaaaauccaacaauuucag

SEQ ID NO: 1299113 - RNA, 20 nt, Human
cacagugaaacaggugcaug

SEQ ID NO: 1299114 - RNA, 24 nt, Human
cagagaaaaauccagugacuuguu

SEQ ID NO: 1299115 - RNA, 21 nt, Human
cagagugggccggccccugcc

SEQ ID NO: 1299116 - RNA, 20 nt, Human
cagcaaccucagacaaucuu

SEQ ID NO: 1299117 - RNA, 24 nt, Human
cauauaaaucuaccaggcuaugga

SEQ ID NO: 1299118 - RNA, 18 nt, Human
cauauguaaccacaggaa

SEQ ID NO: 1299119 - RNA, 23 nt, Human
ccucgcucguaaacuucagcggc

SEQ ID NO: 1299120 - RNA, 23 nt, Human
ccuuuacauucacuauucacagu

SEQ ID NO: 1299121 - RNA, 25 nt, Human
cgggagccagccucugucuucucaa

SEQ ID NO: 1299122 - RNA, 24 nt, Human
cucccugcgccggucggcagagac

SEQ ID NO: 1299123 - RNA, 21 nt, Human
cuccugagcucugaacucuga

SEQ ID NO: 1299124 - RNA, 18 nt, Human
cugacacacaaagaauaa

SEQ ID NO: 1299125 - RNA, 22 nt, Human
cuucccccacuauuugaaaucu

SEQ ID NO: 1299126 - RNA, 18 nt, Human
cuuuuuuuuuuuuuuuug

SEQ ID NO: 1299127 - RNA, 20 nt, Human
gaaaaaaaaacauaauagga

SEQ ID NO: 1299128 - RNA, 20 nt, Human
gaacuucuaaaccaauaccc

SEQ ID NO: 1299129 - RNA, 21 nt, Human
gagacagagaagugguaggag

SEQ ID NO: 1299130 - RNA, 22 nt, Human
gccacagcacagcuguguacca

SEQ ID NO: 1299131 - RNA, 19 nt, Human
ggcacuucuucauuaaguc

SEQ ID NO: 1299132 - RNA, 20 nt, Human
ggcccggaagccucaaggcg

SEQ ID NO: 1299133 - RNA, 20 nt, Human
ggcuguauauccuuaagguu

SEQ ID NO: 1299134 - RNA, 20 nt, Human
gggaggaguccggcgcgcac

SEQ ID NO: 1299135 - RNA, 20 nt, Human
ggggaaaggccucugcgggc

SEQ ID NO: 1299136 - RNA, 18 nt, Human
gggucucggcggaaccaa

SEQ ID NO: 1299137 - RNA, 21 nt, Human
guaaggaaaaggcagcccucc

SEQ ID NO: 1299138 - RNA, 22 nt, Human
guagaauauacauauauaauuc

SEQ ID NO: 1299139 - RNA, 23 nt, Human
gucaaaaaggcagaguaacucag

SEQ ID NO: 1299140 - RNA, 20 nt, Human
uaaacacagcacaaaaggau

SEQ ID NO: 1299141 - RNA, 20 nt, Human
uaaccacaggaauucuacag

SEQ ID NO: 1299142 - RNA, 21 nt, Human
uagccagcaaccucagacaau

SEQ ID NO: 1299143 - RNA, 18 nt, Human
ucagaaugcauggaugca

SEQ ID NO: 1299144 - RNA, 22 nt, Human
ucagaguucugagguugcugac

SEQ ID NO: 1299145 - RNA, 20 nt, Human
ucccugcgccggucggcaga

SEQ ID NO: 1299146 - RNA, 18 nt, Human
ucugaaauacaguuucuu

SEQ ID NO: 1299147 - RNA, 18 nt, Human
ucuuuuuuuuuuuuuuuu

SEQ ID NO: 1299148 - RNA, 23 nt, Human
ucuuuuuuuuuuuuuuuuguuuu

SEQ ID NO: 1299149 - RNA, 23 nt, Human
ucuuuuuuuuuuuuuuuuguuuu

SEQ ID NO: 1299150 - RNA, 19 nt, Human
ugaaaaauaaaguuagcca

SEQ ID NO: 1299151 - RNA, 18 nt, Human
ugacacacaaagaauaaa

SEQ ID NO: 1299152 - RNA, 20 nt, Human
ugacacacaaagaauaaaaa

SEQ ID NO: 1299153 - RNA, 24 nt, Human
ugacacgcgugcugacagagaaaa

SEQ ID NO: 1299154 - RNA, 25 nt, Human
ugacugagccacagcacagcugugu

SEQ ID NO: 1299155 - RNA, 22 nt, Human
ugaguaacugcacugcccucgc

SEQ ID NO: 1299156 - RNA, 23 nt, Human
ugcccucgcucguaaacuucagc

SEQ ID NO: 1299157 - RNA, 21 nt, Human
ugccgggagccagccucuguc

SEQ ID NO: 1299158 - RNA, 24 nt, Human
uggcuccugagcucugaacucuuu

SEQ ID NO: 1299159 - RNA, 21 nt, Human
ugguaggagcugaguuugacg

SEQ ID NO: 1299160 - RNA, 23 nt, Human
aaaaaggccucucucucguguuu

SEQ ID NO: 1299161 - RNA, 19 nt, Human
acccagcuugcaguccagc

SEQ ID NO: 1299162 - RNA, 21 nt, Human
accccccccggcaccuugcug

SEQ ID NO: 1299163 - RNA, 24 nt, Human
accuccuucaggaccucgcaguug

SEQ ID NO: 1299164 - RNA, 20 nt, Human
acgaagcggcgcugggacag

SEQ ID NO: 1299165 - RNA, 21 nt, Human
agcaccagguccagggucucg

SEQ ID NO: 1299166 - RNA, 19 nt, Human
agcaggagccccuccagga

SEQ ID NO: 1299167 - RNA, 19 nt, Human
aggacccucuguggccuga

SEQ ID NO: 1299168 - RNA, 19 nt, Human
aggagggcagcugagggcc

SEQ ID NO: 1299169 - RNA, 19 nt, Human
auggaugcgcugccagccc

SEQ ID NO: 1299170 - RNA, 22 nt, Human
auucaucuccagcagccauacc

SEQ ID NO: 1299171 - RNA, 22 nt, Human
caaacaaggugaaaaaggccuc

SEQ ID NO: 1299172 - RNA, 18 nt, Human
caccagcagcggguucug

SEQ ID NO: 1299173 - RNA, 19 nt, Human
cacccgcgccugaggcccc

SEQ ID NO: 1299174 - RNA, 22 nt, Human
caccgugugcuccuucagcagc

SEQ ID NO: 1299175 - RNA, 18 nt, Human
cagcccacaagguccugg

SEQ ID NO: 1299176 - RNA, 21 nt, Human
caggaagaugccuuugcccug

SEQ ID NO: 1299177 - RNA, 21 nt, Human
caguaggagcugaugauugug

SEQ ID NO: 1299178 - RNA, 21 nt, Human
cauagccguggccaaagaaga

SEQ ID NO: 1299179 - RNA, 20 nt, Human
ccagcagcggguucuggaug

SEQ ID NO: 1299180 - RNA, 18 nt, Human
cccagcuugcaguccagc

SEQ ID NO: 1299181 - RNA, 22 nt, Human
ccccggccgggugcuguggggc

SEQ ID NO: 1299182 - RNA, 23 nt, Human
cccgcgccugaggcccccggaac

SEQ ID NO: 1299183 - RNA, 22 nt, Human
ccgcgccugaggcccccggaac

SEQ ID NO: 1299184 - RNA, 19 nt, Human
ccggagcaggaagaugccu

SEQ ID NO: 1299185 - RNA, 26 nt, Human
ccggagcaggaagaugccuuugcccu

SEQ ID NO: 1299186 - RNA, 24 nt, Human
ccggcggcguuagugucauccgag

SEQ ID NO: 1299187 - RNA, 20 nt, Human
ccgugugcuccuucagcagc

SEQ ID NO: 1299188 - RNA, 19 nt, Human
ccucaccguugugcaggag

SEQ ID NO: 1299189 - RNA, 22 nt, Human
ccuggccuggaccccccccggc

SEQ ID NO: 1299190 - RNA, 18 nt, Human
ccuugcucauggcccgug

SEQ ID NO: 1299191 - RNA, 21 nt, Human
cgaggccccgggccuuccaga

SEQ ID NO: 1299192 - RNA, 20 nt, Human
cgcugggacagcagaggcaa

SEQ ID NO: 1299193 - RNA, 20 nt, Human
cuccacaccgugugcuccuu

SEQ ID NO: 1299194 - RNA, 22 nt, Human
cuccugguuccggagcaggaag

SEQ ID NO: 1299195 - RNA, 21 nt, Human
cucuugaccucacaccacuuc

SEQ ID NO: 1299196 - RNA, 23 nt, Human
cugcagggcggcaacuuccuccu

SEQ ID NO: 1299197 - RNA, 22 nt, Human
cuggaaugggggucguaaaggc

SEQ ID NO: 1299198 - RNA, 25 nt, Human
cuggaccccccccggcaccuugcug

SEQ ID NO: 1299199 - RNA, 22 nt, Human
cuugaccucacaccacuucagc

SEQ ID NO: 1299200 - RNA, 20 nt, Human
gcgccugaggcccccggaac

SEQ ID NO: 1299201 - RNA, 22 nt, Human
gcggcaacuuccuccugguucc

SEQ ID NO: 1299202 - RNA, 18 nt, Human
gcuccacaccgugugcuc

SEQ ID NO: 1299203 - RNA, 21 nt, Human
ggaccccccccggcaccuugc

SEQ ID NO: 1299204 - RNA, 22 nt, Human
ggcagcugagggcccggcggcg

SEQ ID NO: 1299205 - RNA, 21 nt, Human
ggcccggcggcguuaguguca

SEQ ID NO: 1299206 - RNA, 24 nt, Human
gggcggcaacuuccuccugguucc

SEQ ID NO: 1299207 - RNA, 18 nt, Human
gguauccugggcuugucc

SEQ ID NO: 1299208 - RNA, 19 nt, Human
uccaauguagaagaagggc

SEQ ID NO: 1299209 - RNA, 21 nt, Human
uccaauguagaagaagggccc

SEQ ID NO: 1299210 - RNA, 22 nt, Human
uccaggagggcagcugagggcc

SEQ ID NO: 1299211 - RNA, 21 nt, Human
uccaugcuccacaccgugugc

SEQ ID NO: 1299212 - RNA, 22 nt, Human
ucgcaguuggugugcagggcug

SEQ ID NO: 1299213 - RNA, 24 nt, Human
ucuccagcagccauaccuugaagu

SEQ ID NO: 1299214 - RNA, 21 nt, Human
ucuccuucccggaagcugccg

SEQ ID NO: 1299215 - RNA, 24 nt, Human
ucucguguuugagguccaggcggu

SEQ ID NO: 1299216 - RNA, 23 nt, Human
ucugcaccacccgcgccugaggc

SEQ ID NO: 1299217 - RNA, 21 nt, Human
ucuguggccugagguauccug

SEQ ID NO: 1299218 - RNA, 19 nt, Human
ucuucuggccgcgcaggcu

SEQ ID NO: 1299219 - RNA, 22 nt, Human
ucuugugguggauggggucguc

SEQ ID NO: 1299220 - RNA, 19 nt, Human
ugaaaaaggccucucucuc

SEQ ID NO: 1299221 - RNA, 20 nt, Human
ugaggcgagcauagccgugg

SEQ ID NO: 1299222 - RNA, 21 nt, Human
ugagggcccggcggcguuagu

SEQ ID NO: 1299223 - RNA, 21 nt, Human
ugagguauccugggcuugucc

SEQ ID NO: 1299224 - RNA, 25 nt, Human
ugccagcccuugcuuuugcaguagg

SEQ ID NO: 1299225 - RNA, 23 nt, Human
ugcgcugccagcccuugcuuuug

SEQ ID NO: 1299226 - RNA, 23 nt, Human
ugcuguggggcgauggcuuccca

SEQ ID NO: 1299227 - RNA, 21 nt, Human
uggaugcgcugccagcccuug

SEQ ID NO: 1299228 - RNA, 21 nt, Human
uggccgccgaggucgcuggaa

SEQ ID NO: 1299229 - RNA, 18 nt, Human
ugggaagcugguacagca

SEQ ID NO: 1299230 - RNA, 23 nt, Human
uggguuagaauucaucuccagca

SEQ ID NO: 1299231 - RNA, 19 nt, Human
ugguuggaggcugugggcu

SEQ ID NO: 1299232 - RNA, 21 nt, Human
ugucaaaggacgcacgaccug

SEQ ID NO: 1299233 - RNA, 23 nt, Human
ugucaaaggacgcacgaccugcc

SEQ ID NO: 1299234 - RNA, 20 nt, Human
ugucauggaugcgcugccag

SEQ ID NO: 1299235 - RNA, 20 nt, Human
ugugcaggagcacgaagcgg

SEQ ID NO: 1299236 - RNA, 23 nt, Human
uucccaccccccagcaggagccc

SEQ ID NO: 1299237 - RNA, 22 nt, Human
uugcaguccagcuugggcuugg

SEQ ID NO: 1299238 - RNA, 20 nt, Human
aaccuccaccuccugggcuc

SEQ ID NO: 1299239 - RNA, 24 nt, Human
aaggugcugagaucacagguguga

SEQ ID NO: 1299240 - RNA, 21 nt, Human
acaggugcccaccaccacacc

SEQ ID NO: 1299241 - RNA, 22 nt, Human
accauagggagaugucuucuca

SEQ ID NO: 1299242 - RNA, 18 nt, Human
accauguuggccaggcug

SEQ ID NO: 1299243 - RNA, 23 nt, Human
accuaucagguacuggaggugaa

SEQ ID NO: 1299244 - RNA, 24 nt, Human
acucuguugcccaggcuggagugc

SEQ ID NO: 1299245 - RNA, 18 nt, Human
agaacucaagggacagga

SEQ ID NO: 1299246 - RNA, 19 nt, Human
agaucacaggugugagcca

SEQ ID NO: 1299247 - RNA, 20 nt, Human
agcuaugacagagaggggca

SEQ ID NO: 1299248 - RNA, 18 nt, Human
aggaaggagaugaguugg

SEQ ID NO: 1299249 - RNA, 21 nt, Human
aggaaggcagguuugggcugg

SEQ ID NO: 1299250 - RNA, 25 nt, Human
aggcuggagugcaguggcaugaucu

SEQ ID NO: 1299251 - RNA, 24 nt, Human
aggugauccaccugccucggccuc

SEQ ID NO: 1299252 - RNA, 26 nt, Human
aggugcugagaucacaggugugagcc

SEQ ID NO: 1299253 - RNA, 22 nt, Human
aguagagaugggguuucaccau

SEQ ID NO: 1299254 - RNA, 18 nt, Human
agugcaguggcaugaucu

SEQ ID NO: 1299255 - RNA, 19 nt, Human
agugcaguggcaugaucuc

SEQ ID NO: 1299256 - RNA, 21 nt, Human
agugcaguggcaugaucuccg

SEQ ID NO: 1299257 - RNA, 22 nt, Human
augacagagaggggcaggguac

SEQ ID NO: 1299258 - RNA, 22 nt, Human
augggguuucaccauguuggcc

SEQ ID NO: 1299259 - RNA, 24 nt, Human
augggguuucaccauguuggccag

SEQ ID NO: 1299260 - RNA, 18 nt, Human
auucuccugccucagccu

SEQ ID NO: 1299261 - RNA, 18 nt, Human
auucuccugccucagccu

SEQ ID NO: 1299262 - RNA, 21 nt, Human
auucuccugccucagccuccc

SEQ ID NO: 1299263 - RNA, 24 nt, Human
auuuuuguauuuuuaguagagaug

SEQ ID NO: 1299264 - RNA, 26 nt, Human
caaacuccugaccuaaggugauccaa

SEQ ID NO: 1299265 - RNA, 20 nt, Human
caaccuccaccuccugggcu

SEQ ID NO: 1299266 - RNA, 23 nt, Human
caaccuccaccuccugggcucaa

SEQ ID NO: 1299267 - RNA, 24 nt, Human
caaccuccaccuccugggcucaag

SEQ ID NO: 1299268 - RNA, 22 nt, Human
caagauauucuccugccucagc

SEQ ID NO: 1299269 - RNA, 19 nt, Human
caaggugcugagaucacag

SEQ ID NO: 1299270 - RNA, 24 nt, Human
caaggugcugagaucacaggugug

SEQ ID NO: 1299271 - RNA, 20 nt, Human
caagugauucuccugccuca

SEQ ID NO: 1299272 - RNA, 22 nt, Human
caagugauucuccugccucagc

SEQ ID NO: 1299273 - RNA, 23 nt, Human
caaugugugccaggacagauagu

SEQ ID NO: 1299274 - RNA, 19 nt, Human
cacagaacucaagggacag

SEQ ID NO: 1299275 - RNA, 19 nt, Human
cacaggugugagccaccac

SEQ ID NO: 1299276 - RNA, 24 nt, Human
caccacaccuggcuaauuuuugua

SEQ ID NO: 1299277 - RNA, 21 nt, Human
caccauguuggccaggcuggu

SEQ ID NO: 1299278 - RNA, 24 nt, Human
caccauguuggccaggcuggucuc

SEQ ID NO: 1299279 - RNA, 27 nt, Human
caccauguuggccaggcuggucucaaa

SEQ ID NO: 1299280 - RNA, 21 nt, Human
cacugcaaccuccaccuccug

SEQ ID NO: 1299281 - RNA, 23 nt, Human
cacugcaaccuccaccuccuggg

SEQ ID NO: 1299282 - RNA, 20 nt, Human
cacuggacauuucgcacccu

SEQ ID NO: 1299283 - RNA, 24 nt, Human
caggugcccaccaccacaccuggc

SEQ ID NO: 1299284 - RNA, 24 nt, Human
cauguuggccaggcuggucucaaa

SEQ ID NO: 1299285 - RNA, 20 nt, Human
cauuguaacacagacaaagc

SEQ ID NO: 1299286 - RNA, 24 nt, Human
ccaccuccugggcucaagugauuc

SEQ ID NO: 1299287 - RNA, 19 nt, Human
cccaggcuggagugcagug

SEQ ID NO: 1299288 - RNA, 23 nt, Human
cccaggcuggagugcaguggcau

SEQ ID NO: 1299289 - RNA, 22 nt, Human
ccuccaccuccugggcucaagu

SEQ ID NO: 1299290 - RNA, 24 nt, Human
ccucccagguucaagauauucucc

SEQ ID NO: 1299291 - RNA, 21 nt, Human
ccuccugggcucaagugauuc

SEQ ID NO: 1299292 - RNA, 24 nt, Human
ccuccugggcucaagugauucucc

SEQ ID NO: 1299293 - RNA, 21 nt, Human
ccugaccuaaggugauccacc

SEQ ID NO: 1299294 - RNA, 23 nt, Human
ccugaccuaaggugauccaccug

SEQ ID NO: 1299295 - RNA, 24 nt, Human
ccugccucagccucccgaguaagu

SEQ ID NO: 1299296 - RNA, 23 nt, Human
ccugggcucaagugauucuccuc

SEQ ID NO: 1299297 - RNA, 23 nt, Human
ccugggcucaagugauucuccug

SEQ ID NO: 1299298 - RNA, 23 nt, Human
cuaaggugauccaccugccucgg

SEQ ID NO: 1299299 - RNA, 23 nt, Human
cuaauuuuuguauuuuuaguaga

SEQ ID NO: 1299300 - RNA, 23 nt, Human
cucaagugauucuccugccucag

SEQ ID NO: 1299301 - RNA, 24 nt, Human
cucaagugauucuccugccucagc

SEQ ID NO: 1299302 - RNA, 24 nt, Human
cucacugcaaccuccaccuccugg

SEQ ID NO: 1299303 - RNA, 27 nt, Human
cucacugcaaccuccaccuccugggcu

SEQ ID NO: 1299304 - RNA, 18 nt, Human
cuccugccucagccuccc

SEQ ID NO: 1299305 - RNA, 21 nt, Human
cuccugggcucaagugauucu

SEQ ID NO: 1299306 - RNA, 21 nt, Human
cucgcaaggugcugagaucac

SEQ ID NO: 1299307 - RNA, 18 nt, Human
cugcaaccuccaccuccu

SEQ ID NO: 1299308 - RNA, 24 nt, Human
cugcaaccuccaccuccugggcuc

SEQ ID NO: 1299309 - RNA, 21 nt, Human
cuggaucuugauauguguuuc

SEQ ID NO: 1299310 - RNA, 24 nt, Human
cuggggagcccaccucccagguuc

SEQ ID NO: 1299311 - RNA, 19 nt, Human
cuguugcccaggcuggagu

SEQ ID NO: 1299312 - RNA, 19 nt, Human
cuuguggagugggggcugu

SEQ ID NO: 1299313 - RNA, 21 nt, Human
cuuguggagugggggcugugu

SEQ ID NO: 1299314 - RNA, 20 nt, Human
cuuuuguauuuuuaguagag

SEQ ID NO: 1299315 - RNA, 19 nt, Human
gacacagaacucaagggac

SEQ ID NO: 1299316 - RNA, 18 nt, Human
gacagauaguucuggggc

SEQ ID NO: 1299317 - RNA, 21 nt, Human
gacaggaaggagaugaguugg

SEQ ID NO: 1299318 - RNA, 24 nt, Human
gaccuaaggugauccaccugccuc

SEQ ID NO: 1299319 - RNA, 25 nt, Human
gagaccugggcuugggaggcauccc

SEQ ID NO: 1299320 - RNA, 20 nt, Human
gagaugaguuggaggcuggg

SEQ ID NO: 1299321 - RNA, 20 nt, Human
gagaugggguuucaccaugu

SEQ ID NO: 1299322 - RNA, 24 nt, Human
gagaugggguuucaccauguuggc

SEQ ID NO: 1299323 - RNA, 20 nt, Human
gaggcugggacagggguccc

SEQ ID NO: 1299324 - RNA, 19 nt, Human
gaguuggaggcugggacag

SEQ ID NO: 1299325 - RNA, 18 nt, Human
gaucacaggugugagcca

SEQ ID NO: 1299326 - RNA, 21 nt, Human
gauucuccugccucagccucc

SEQ ID NO: 1299327 - RNA, 24 nt, Human
gcaaggugcugagaucacaggugu

SEQ ID NO: 1299328 - RNA, 20 nt, Human
gcccaggcuggagugcagug

SEQ ID NO: 1299329 - RNA, 21 nt, Human
gccugguuuggggaauguucg

SEQ ID NO: 1299330 - RNA, 25 nt, Human
gcuggagugcaguggcaugaucucc

SEQ ID NO: 1299331 - RNA, 22 nt, Human
gcuugggaggcaucccaggugg

SEQ ID NO: 1299332 - RNA, 25 nt, Human
ggacaggggucccugccagggaugc

SEQ ID NO: 1299333 - RNA, 20 nt, Human
ggagacagacaagauggggg

SEQ ID NO: 1299334 - RNA, 24 nt, Human
gggaggcaucccagguggacagug

SEQ ID NO: 1299335 - RNA, 19 nt, Human
gggcuaggaaggcagguuu

SEQ ID NO: 1299336 - RNA, 22 nt, Human
gggcucaagugauucuccugcc

SEQ ID NO: 1299337 - RNA, 22 nt, Human
gggguuucaccauguuggccag

SEQ ID NO: 1299338 - RNA, 20 nt, Human
gggguuuugcuuuaaagccu

SEQ ID NO: 1299339 - RNA, 18 nt, Human
ggguuucaccauguuggc

SEQ ID NO: 1299340 - RNA, 22 nt, Human
ggguuucaccauguuggccagg

SEQ ID NO: 1299341 - RNA, 23 nt, Human
guagagaugggguuucaccaugu

SEQ ID NO: 1299342 - RNA, 19 nt, Human
gugauccaccugccucggc

SEQ ID NO: 1299343 - RNA, 22 nt, Human
gugauccaccugccucggccuc

SEQ ID NO: 1299344 - RNA, 24 nt, Human
gugauucuccugccucagccuccc

SEQ ID NO: 1299345 - RNA, 21 nt, Human
gugcugagaucacagguguga

SEQ ID NO: 1299346 - RNA, 21 nt, Human
gugugagccaccacgcugggc

SEQ ID NO: 1299347 - RNA, 22 nt, Human
uaacuuuuguauuuuuaguaga

SEQ ID NO: 1299348 - RNA, 24 nt, Human
uaauuuuuguauuuuuaguagaga

SEQ ID NO: 1299349 - RNA, 22 nt, Human
uacaggugcccaccaccacacc

SEQ ID NO: 1299350 - RNA, 24 nt, Human
uacucuguugcccaggcuggagug

SEQ ID NO: 1299351 - RNA, 22 nt, Human
uagagaugggguuucaccaugu

SEQ ID NO: 1299352 - RNA, 25 nt, Human
uaggaaggcagguuugggcuggaga

SEQ ID NO: 1299353 - RNA, 24 nt, Human
uaguagagaugggguuucaccaug

SEQ ID NO: 1299354 - RNA, 26 nt, Human
uaguagagaugggguuucaccauguu

SEQ ID NO: 1299355 - RNA, 19 nt, Human
uauguguuucucaguugga

SEQ ID NO: 1299356 - RNA, 23 nt, Human
ucacugcaaccuccaccuccugg

SEQ ID NO: 1299357 - RNA, 24 nt, Human
ucacugcaaccuccaccuccuggg

SEQ ID NO: 1299358 - RNA, 25 nt, Human
ucacugcaaccuccaccuccugggc

SEQ ID NO: 1299359 - RNA, 27 nt, Human
ucacugcaaccuccaccuccugggcuc

SEQ ID NO: 1299360 - RNA, 22 nt, Human
uccaaagaagcaagucuuacua

SEQ ID NO: 1299361 - RNA, 19 nt, Human
uccaaaggaccgacggacc

SEQ ID NO: 1299362 - RNA, 20 nt, Human
uccaaaggaccgacggaccu

SEQ ID NO: 1299363 - RNA, 24 nt, Human
ucccagguggacagugguugaggu

SEQ ID NO: 1299364 - RNA, 21 nt, Human
ucccagguucaagauauucuc

SEQ ID NO: 1299365 - RNA, 24 nt, Human
ucccagguucaagauauucuccug

SEQ ID NO: 1299366 - RNA, 23 nt, Human
ucccgaguaagugggauuacagg

SEQ ID NO: 1299367 - RNA, 24 nt, Human
ucccgaguaagugggauuacaggu

SEQ ID NO: 1299368 - RNA, 21 nt, Human
uccugggcucaagugauucuc

SEQ ID NO: 1299369 - RNA, 22 nt, Human
uccugggcucaagugauucucc

SEQ ID NO: 1299370 - RNA, 24 nt, Human
uccugggcucaagugauucuccug

SEQ ID NO: 1299371 - RNA, 24 nt, Human
ucgcaaggugcugagaucacaggu

SEQ ID NO: 1299372 - RNA, 22 nt, Human
ucuagacuccauccuccauucc

SEQ ID NO: 1299373 - RNA, 25 nt, Human
ucuccugccucagccucccaaguaa

SEQ ID NO: 1299374 - RNA, 18 nt, Human
ucuguugcccaggcugga

SEQ ID NO: 1299375 - RNA, 24 nt, Human
ucuguugcccaggcuggagugcag

SEQ ID NO: 1299376 - RNA, 22 nt, Human
ucuuacucuguugcccaggcug

SEQ ID NO: 1299377 - RNA, 23 nt, Human
ucuuacucuguugcccaggcugg

SEQ ID NO: 1299378 - RNA, 24 nt, Human
ucuuacucuguugcccaggcugga

SEQ ID NO: 1299379 - RNA, 19 nt, Human
ugacacagaacucaaggga

SEQ ID NO: 1299380 - RNA, 18 nt, Human
ugacagagaggggcaggg

SEQ ID NO: 1299381 - RNA, 22 nt, Human
ugaccgugauugccugggauga

SEQ ID NO: 1299382 - RNA, 24 nt, Human
ugaccuaaggugauccaccugccu

SEQ ID NO: 1299383 - RNA, 22 nt, Human
ugagaucacaggugugagccac

SEQ ID NO: 1299384 - RNA, 24 nt, Human
ugagaucacaggugugagccacca

SEQ ID NO: 1299385 - RNA, 23 nt, Human
ugaucuccgcucacugcaaccuc

SEQ ID NO: 1299386 - RNA, 19 nt, Human
ugccaggacagauaguucu

SEQ ID NO: 1299387 - RNA, 21 nt, Human
ugccaggacagauaguucugg

SEQ ID NO: 1299388 - RNA, 18 nt, Human
ugcccaggcuggagugca

SEQ ID NO: 1299389 - RNA, 22 nt, Human
ugcccaggcuggagugcagugg

SEQ ID NO: 1299390 - RNA, 24 nt, Human
ugcccaggcuggagugcaguggca

SEQ ID NO: 1299391 - RNA, 21 nt, Human
ugcccugggcuuuaauuauuu

SEQ ID NO: 1299392 - RNA, 24 nt, Human
ugccucagccucccaaguaacugg

SEQ ID NO: 1299393 - RNA, 24 nt, Human
ugccucagccucccgaguaagugg

SEQ ID NO: 1299394 - RNA, 22 nt, Human
ugccugggaugagaguggagac

SEQ ID NO: 1299395 - RNA, 21 nt, Human
ugccugguuuggggaauguuc

SEQ ID NO: 1299396 - RNA, 24 nt, Human
ugcugagaucacaggugugagcca

SEQ ID NO: 1299397 - RNA, 22 nt, Human
uggaaaggacaggaaguugaug

SEQ ID NO: 1299398 - RNA, 24 nt, Human
uggagucuuacucuguugcccagg

SEQ ID NO: 1299399 - RNA, 19 nt, Human
uggagugcaguggcaugau

SEQ ID NO: 1299400 - RNA, 22 nt, Human
uggagugcaguggcaugaucuc

SEQ ID NO: 1299401 - RNA, 23 nt, Human
uggagugcaguggcaugaucucc

SEQ ID NO: 1299402 - RNA, 24 nt, Human
uggagugcaguggcaugaucuccg

SEQ ID NO: 1299403 - RNA, 24 nt, Human
uggccaggcuggucucaaacuccu

SEQ ID NO: 1299404 - RNA, 24 nt, Human
ugggaaugcaggugcgugccacca

SEQ ID NO: 1299405 - RNA, 20 nt, Human
ugggaugagaguggagacag

SEQ ID NO: 1299406 - RNA, 21 nt, Human
ugggauuacaggugcccacca

SEQ ID NO: 1299407 - RNA, 24 nt, Human
ugggauuacaggugcccaccacca

SEQ ID NO: 1299408 - RNA, 18 nt, Human
ugggcucaagugauucuc

SEQ ID NO: 1299409 - RNA, 24 nt, Human
ugggcucaagugauucuccugccu

SEQ ID NO: 1299410 - RNA, 20 nt, Human
ugggcuggagaccugggcuu

SEQ ID NO: 1299411 - RNA, 24 nt, Human
ugggguuucaccauguuggccagg

SEQ ID NO: 1299412 - RNA, 21 nt, Human
uguauuuuuaguagagauggg

SEQ ID NO: 1299413 - RNA, 18 nt, Human
ugucuggaaaggacagga

SEQ ID NO: 1299414 - RNA, 24 nt, Human
ugucuggaaaggacaggaaguuga

SEQ ID NO: 1299415 - RNA, 22 nt, Human
ugugacacagaacucaagggac

SEQ ID NO: 1299416 - RNA, 18 nt, Human
uuaguagagaugggguuu

SEQ ID NO: 1299417 - RNA, 22 nt, Human
uuaguagagaugggguuucacc

SEQ ID NO: 1299418 - RNA, 24 nt, Human
uuaguagagaugggguuucaccau

SEQ ID NO: 1299419 - RNA, 21 nt, Human
uucaagauauucuccugccuc

SEQ ID NO: 1299420 - RNA, 19 nt, Human
uuccaaagaagcaagucuu

SEQ ID NO: 1299421 - RNA, 19 nt, Human
uugauauguguuucucagu

SEQ ID NO: 1299422 - RNA, 20 nt, Human
uuggaggcugggacaggggu

SEQ ID NO: 1299423 - RNA, 21 nt, Human
uugggaggcaucccaggugga

SEQ ID NO: 1299424 - RNA, 22 nt, Human
uuuaaagauggagucuuacucu

SEQ ID NO: 1299425 - RNA, 24 nt, Human
uuuaaagccuggggagcccaccuc

SEQ ID NO: 1299426 - RNA, 24 nt, Human
uuucaccauguuggccaggcuggu

SEQ ID NO: 1299427 - RNA, 22 nt, Human
uuugcuuuaaagccuggggagc

SEQ ID NO: 1299428 - RNA, 24 nt, Human
uuuuuaguagagaugggguuucac

SEQ ID NO: 1299429 - RNA, 20 nt, Human
uuuuuguauuuuuaguagag

SEQ ID NO: 1299430 - RNA, 18 nt, Human
aauaucccccagagaugg

SEQ ID NO: 1299431 - RNA, 24 nt, Human
aaucacacgcuggccgcccucgag

SEQ ID NO: 1299432 - RNA, 20 nt, Human
accucgggacccaaaggagc

SEQ ID NO: 1299433 - RNA, 22 nt, Human
accucgggacccaaaggagcug

SEQ ID NO: 1299434 - RNA, 18 nt, Human
agccagggcugccauagc

SEQ ID NO: 1299435 - RNA, 18 nt, Human
aggaggaagggggcuuga

SEQ ID NO: 1299436 - RNA, 19 nt, Human
aggaggaagggggcuugag

SEQ ID NO: 1299437 - RNA, 25 nt, Human
aggaggaagggggcuugagccccaa

SEQ ID NO: 1299438 - RNA, 22 nt, Human
cagggagaaaagguacucaggc

SEQ ID NO: 1299439 - RNA, 24 nt, Human
caucauggaauuugcccaguaggg

SEQ ID NO: 1299440 - RNA, 20 nt, Human
ccagggagaaaagguacuca

SEQ ID NO: 1299441 - RNA, 18 nt, Human
ccucgggacccaaaggag

SEQ ID NO: 1299442 - RNA, 24 nt, Human
ccugggaagcaggagagcuuggag

SEQ ID NO: 1299443 - RNA, 21 nt, Human
cugccugcucugcuggggccc

SEQ ID NO: 1299444 - RNA, 21 nt, Human
cugccugcucugcuggggccc

SEQ ID NO: 1299445 - RNA, 21 nt, Human
cuggacaggaccuugugagac

SEQ ID NO: 1299446 - RNA, 22 nt, Human
cuugagccccaagggccccgac

SEQ ID NO: 1299447 - RNA, 22 nt, Human
gaaccuacgagaauauccccca

SEQ ID NO: 1299448 - RNA, 24 nt, Human
gacaugggccgacuccaggaggaa

SEQ ID NO: 1299449 - RNA, 19 nt, Human
gaggaggaagggggcuuga

SEQ ID NO: 1299450 - RNA, 18 nt, Human
gccccaagggccccgacg

SEQ ID NO: 1299451 - RNA, 20 nt, Human
gcccuggggagggcaacagc

SEQ ID NO: 1299452 - RNA, 20 nt, Human
gccugagccaguucuggggu

SEQ ID NO: 1299453 - RNA, 19 nt, Human
gggaagcaggagagcuugg

SEQ ID NO: 1299454 - RNA, 21 nt, Human
gggaagcaggagagcuuggag

SEQ ID NO: 1299455 - RNA, 21 nt, Human
ggggagggcaacagcauaggc

SEQ ID NO: 1299456 - RNA, 27 nt, Human
uccaggaggaaucacacgcuggccgcc

SEQ ID NO: 1299457 - RNA, 19 nt, Human
ucccccagagauggcaccu

SEQ ID NO: 1299458 - RNA, 23 nt, Human
ucugcuggggcccuuguugcaga

SEQ ID NO: 1299459 - RNA, 23 nt, Human
ugagcaccagcucagggucugac

SEQ ID NO: 1299460 - RNA, 19 nt, Human
ugcuggggcccuuguugca

SEQ ID NO: 1299461 - RNA, 21 nt, Human
ugcuggggcccuuguugcaga

SEQ ID NO: 1299462 - RNA, 23 nt, Human
uggccugagccaguucuggggug

SEQ ID NO: 1299463 - RNA, 24 nt, Human
ugugagaccggaggaggaaggggg

SEQ ID NO: 1299464 - RNA, 22 nt, Human
uuggagcagaaggccagggaga

SEQ ID NO: 1299465 - RNA, 24 nt, Human
uugugagaccggaggaggaagggg

SEQ ID NO: 1299466 - RNA, 20 nt, Human
aacacacuggguccccagca

SEQ ID NO: 1299467 - RNA, 18 nt, Human
aagaagccaauaucacug

SEQ ID NO: 1299468 - RNA, 21 nt, Human
acacuggguccccagcacagu

SEQ ID NO: 1299469 - RNA, 18 nt, Human
accacauuggaggccugg

SEQ ID NO: 1299470 - RNA, 21 nt, Human
acccagcaacacacugggucc

SEQ ID NO: 1299471 - RNA, 22 nt, Human
agaagugugauguucccauccc

SEQ ID NO: 1299472 - RNA, 19 nt, Human
agaccuggacaggauggca

SEQ ID NO: 1299473 - RNA, 20 nt, Human
agcagucacagcucagcugg

SEQ ID NO: 1299474 - RNA, 22 nt, Human
agggagcaagggagggaugcag

SEQ ID NO: 1299475 - RNA, 20 nt, Human
agguagcagagacccuggca

SEQ ID NO: 1299476 - RNA, 23 nt, Human
caacacacuggguccccagcaca

SEQ ID NO: 1299477 - RNA, 20 nt, Human
cagaaagggugagcaggaug

SEQ ID NO: 1299478 - RNA, 19 nt, Human
cagaauccagcucaaccac

SEQ ID NO: 1299479 - RNA, 21 nt, Human
cagagacccuggcaaccuccu

SEQ ID NO: 1299480 - RNA, 18 nt, Human
cagcaacacacugggucc

SEQ ID NO: 1299481 - RNA, 21 nt, Human
cagcagggagcaagggaggga

SEQ ID NO: 1299482 - RNA, 21 nt, Human
cauccccagaauccagcucaa

SEQ ID NO: 1299483 - RNA, 18 nt, Human
cauuggaggccuggguga

SEQ ID NO: 1299484 - RNA, 25 nt, Human
ccaggugaucccauuccuggccaau

SEQ ID NO: 1299485 - RNA, 22 nt, Human
ccauccccagaauccagcucaa

SEQ ID NO: 1299486 - RNA, 22 nt, Human
cccagguugggguacaugagac

SEQ ID NO: 1299487 - RNA, 20 nt, Human
ccucugagaagugugauguu

SEQ ID NO: 1299488 - RNA, 18 nt, Human
cucaaagagagauaagaa

SEQ ID NO: 1299489 - RNA, 19 nt, Human
cugccccagaggcuugggg

SEQ ID NO: 1299490 - RNA, 19 nt, Human
gacaggauggcagaaaggg

SEQ ID NO: 1299491 - RNA, 20 nt, Human
gagaagugugauguucccau

SEQ ID NO: 1299492 - RNA, 26 nt, Human
gaggggacccagcaacacacuggguc

SEQ ID NO: 1299493 - RNA, 20 nt, Human
gauggcagaaagggugagca

SEQ ID NO: 1299494 - RNA, 23 nt, Human
gauggcagaaagggugagcagga

SEQ ID NO: 1299495 - RNA, 21 nt, Human
gggacccagcaacacacuggg

SEQ ID NO: 1299496 - RNA, 20 nt, Human
gggcagggaggcucuggaug

SEQ ID NO: 1299497 - RNA, 27 nt, Human
guagcagagacccuggcaaccuccuuc

SEQ ID NO: 1299498 - RNA, 22 nt, Human
gugggcccuucauggaaggggc

SEQ ID NO: 1299499 - RNA, 23 nt, Human
uacaugagaccugccccagaggc

SEQ ID NO: 1299500 - RNA, 19 nt, Human
ucaggagcagauugacaag

SEQ ID NO: 1299501 - RNA, 26 nt, Human
uccccagaauccagcucaaccacauc

SEQ ID NO: 1299502 - RNA, 19 nt, Human
uccccagcacagucuuggg

SEQ ID NO: 1299503 - RNA, 20 nt, Human
ucggugaugaggugaugagu

SEQ ID NO: 1299504 - RNA, 22 nt, Human
ugaccaggugaucccauuccug

SEQ ID NO: 1299505 - RNA, 19 nt, Human
ugagggaccacccagcagg

SEQ ID NO: 1299506 - RNA, 24 nt, Human
ugccccagaggcuugggguucagc

SEQ ID NO: 1299507 - RNA, 18 nt, Human
uggcucugguggcuccac

SEQ ID NO: 1299508 - RNA, 24 nt, Human
uggcucugguggcuccacguucug

SEQ ID NO: 1299509 - RNA, 22 nt, Human
uggcugguggggacaucaaagu

SEQ ID NO: 1299510 - RNA, 18 nt, Human
uggguccccagcacaguc

SEQ ID NO: 1299511 - RNA, 22 nt, Human
uggguccccagcacagucuugg

SEQ ID NO: 1299512 - RNA, 19 nt, Human
uguguacaguagccaugug

SEQ ID NO: 1299513 - RNA, 19 nt, Human
uguucccauccccagaauc

SEQ ID NO: 1299514 - RNA, 20 nt, Human
uucauggaaggggcagggag

SEQ ID NO: 1299515 - RNA, 23 nt, Human
uucauggaaggggcagggaggcu

SEQ ID NO: 1299516 - RNA, 23 nt, Human
uuugacccauuuuuauagaaagc

SEQ ID NO: 1299517 - RNA, 24 nt, Human
aggcccacaggaguagaggggcug

SEQ ID NO: 1299518 - RNA, 21 nt, Human
aguagaggggcugcagcugau

SEQ ID NO: 1299519 - RNA, 21 nt, Human
cagaguaagggcuccagagac

SEQ ID NO: 1299520 - RNA, 20 nt, Human
ccugaggcuccuucacucua

SEQ ID NO: 1299521 - RNA, 18 nt, Human
gaggcccacaggaguaga

SEQ ID NO: 1299522 - RNA, 22 nt, Human
gagugaccugaggcuccuucac

SEQ ID NO: 1299523 - RNA, 25 nt, Human
uagaagaagauagucucugaggccc

SEQ ID NO: 1299524 - RNA, 20 nt, Human
ucaaacaggugauaacaagc

SEQ ID NO: 1299525 - RNA, 19 nt, Human
ugaccugaggcuccuucac

SEQ ID NO: 1299526 - RNA, 23 nt, Human
ugagagggaaagagagcucaaac

SEQ ID NO: 1299527 - RNA, 23 nt, Human
uuccuucuagaagaagauagucu

SEQ ID NO: 1299528 - RNA, 24 nt, Human
agccccugagcucuguccaagcag

SEQ ID NO: 1299529 - RNA, 19 nt, Human
agcucuguccaagcagcag

SEQ ID NO: 1299530 - RNA, 20 nt, Human
aggaagguuugcaccaggac

SEQ ID NO: 1299531 - RNA, 25 nt, Human
caagcagcagcaguucccaacagag

SEQ ID NO: 1299532 - RNA, 25 nt, Human
cagcaguucccaacagagcucuggu

SEQ ID NO: 1299533 - RNA, 20 nt, Human
ccggacagccagggcugggc

SEQ ID NO: 1299534 - RNA, 18 nt, Human
cucugagccccugagcuc

SEQ ID NO: 1299535 - RNA, 23 nt, Human
cucugcucugagccccugagcuc

SEQ ID NO: 1299536 - RNA, 18 nt, Human
cuguguuuccaacucugc

SEQ ID NO: 1299537 - RNA, 22 nt, Human
gcagcagcaguucccaacagag

SEQ ID NO: 1299538 - RNA, 22 nt, Human
gcucuguccaagcagcagcagu

SEQ ID NO: 1299539 - RNA, 19 nt, Human
ggucccggaaagccggaca

SEQ ID NO: 1299540 - RNA, 19 nt, Human
guucccaacagagcucugg

SEQ ID NO: 1299541 - RNA, 20 nt, Human
ugagccccugagcucugucc

SEQ ID NO: 1299542 - RNA, 22 nt, Human
ugagccccugagcucuguccaa

SEQ ID NO: 1299543 - RNA, 23 nt, Human
ugcacuguguuuccaacucugcu

SEQ ID NO: 1299544 - RNA, 18 nt, Human
ugcucugagccccugagc

SEQ ID NO: 1299545 - RNA, 19 nt, Human
uugcacuguguuuccaacu

SEQ ID NO: 1299546 - RNA, 23 nt, Human
caucccccauccgcaccguagaa

SEQ ID NO: 1299547 - RNA, 18 nt, Human
ccauccgcaccguagaac

SEQ ID NO: 1299548 - RNA, 23 nt, Human
cugccccaucccccauccgcacc

SEQ ID NO: 1299549 - RNA, 26 nt, Human
cugccccaucccccauccgcaccgua

SEQ ID NO: 1299550 - RNA, 18 nt, Human
ugccccaucccccauccg

SEQ ID NO: 1299551 - RNA, 19 nt, Human
aaaaaacuuuacaaggaca

SEQ ID NO: 1299552 - RNA, 21 nt, Human
aaaaaacuuuacaaggacagu

SEQ ID NO: 1299553 - RNA, 22 nt, Human
aaaaaggagccaaaugguauca

SEQ ID NO: 1299554 - RNA, 19 nt, Human
aaacucccaaaagaccccg

SEQ ID NO: 1299555 - RNA, 20 nt, Human
aaacucccaaaagaccccgg

SEQ ID NO: 1299556 - RNA, 24 nt, Human
aaacuuuacaaggacagugacugu

SEQ ID NO: 1299557 - RNA, 20 nt, Human
aaagggucucucuaccuaca

SEQ ID NO: 1299558 - RNA, 20 nt, Human
aagaugcccagaguccguag

SEQ ID NO: 1299559 - RNA, 18 nt, Human
acucccucugugaccuug

SEQ ID NO: 1299560 - RNA, 20 nt, Human
agccagggcugcgcggaagc

SEQ ID NO: 1299561 - RNA, 23 nt, Human
aggaguuucuuccugcaggaccu

SEQ ID NO: 1299562 - RNA, 23 nt, Human
agggauggggccgggaauccauu

SEQ ID NO: 1299563 - RNA, 20 nt, Human
aguuucuuccugcaggaccu

SEQ ID NO: 1299564 - RNA, 21 nt, Human
caaacucuggaugagggcugg

SEQ ID NO: 1299565 - RNA, 23 nt, Human
caaacucuggaugagggcugggg

SEQ ID NO: 1299566 - RNA, 23 nt, Human
caagggaaaaaggacgggggagg

SEQ ID NO: 1299567 - RNA, 24 nt, Human
cacugccugccuggaacggccacu

SEQ ID NO: 1299568 - RNA, 20 nt, Human
caguggaaagaugcccagag

SEQ ID NO: 1299569 - RNA, 18 nt, Human
ccaaaagaccccggagua

SEQ ID NO: 1299570 - RNA, 20 nt, Human
cccaaaagaccccggaguac

SEQ ID NO: 1299571 - RNA, 23 nt, Human
ccccggaguacgucggaggugag

SEQ ID NO: 1299572 - RNA, 25 nt, Human
ccuuggcugaaccaagaccgggguc

SEQ ID NO: 1299573 - RNA, 20 nt, Human
cgacaauagcaaucuuuucc

SEQ ID NO: 1299574 - RNA, 19 nt, Human
cgggggaggcaugcaagag

SEQ ID NO: 1299575 - RNA, 21 nt, Human
cuacucggcugcaaacucugg

SEQ ID NO: 1299576 - RNA, 21 nt, Human
gaauccauucaggaaagcugg

SEQ ID NO: 1299577 - RNA, 18 nt, Human
gacagugacuguucugcc

SEQ ID NO: 1299578 - RNA, 23 nt, Human
gaggugaguacgacaauagcaau

SEQ ID NO: 1299579 - RNA, 18 nt, Human
gcaguggaaagaugccca

SEQ ID NO: 1299580 - RNA, 20 nt, Human
gcugaaccaagacgacacug

SEQ ID NO: 1299581 - RNA, 20 nt, Human
ggaagcuaucacucccucug

SEQ ID NO: 1299582 - RNA, 21 nt, Human
gggcuggggauugagagcuuc

SEQ ID NO: 1299583 - RNA, 21 nt, Human
ggggauugagagcuucccaga

SEQ ID NO: 1299584 - RNA, 27 nt, Human
gugaguacgacaauagcaaucuuuucc

SEQ ID NO: 1299585 - RNA, 22 nt, Human
uagccagggcugcgcggaagcu

SEQ ID NO: 1299586 - RNA, 25 nt, Human
uccguagccagggcugcgcggaagc

SEQ ID NO: 1299587 - RNA, 18 nt, Human
ucuggaugagggcugggg

SEQ ID NO: 1299588 - RNA, 23 nt, Human
ugagggauggggccgggaaucca

SEQ ID NO: 1299589 - RNA, 24 nt, Human
ugagggauggggccgggaauccau

SEQ ID NO: 1299590 - RNA, 22 nt, Human
ugccccagaggaaaaacgaucc

SEQ ID NO: 1299591 - RNA, 19 nt, Human
uggcaagggaaaaaggacg

SEQ ID NO: 1299592 - RNA, 19 nt, Human
uggcaagggaaaaaggacg

SEQ ID NO: 1299593 - RNA, 20 nt, Human
uggcugaaccaagacgacac

SEQ ID NO: 1299594 - RNA, 31 nt, Human
ugucaccagggaacuggcaagggaaaaaggg

SEQ ID NO: 1299595 - RNA, 21 nt, Human
uuggcugaaccaagacgacac

SEQ ID NO: 1299596 - RNA, 23 nt, Human
uuucuuccugcaggaccuggauu

SEQ ID NO: 1299597 - RNA, 18 nt, Human
aaccaggcaaggcuggca

SEQ ID NO: 1299598 - RNA, 22 nt, Human
aaugcacucgaaacacguuuaa

SEQ ID NO: 1299599 - RNA, 18 nt, Human
acacaaaucgagcaaaua

SEQ ID NO: 1299600 - RNA, 18 nt, Human
agcaagaaggcgagaacc

SEQ ID NO: 1299601 - RNA, 21 nt, Human
agcaggacaaacccaaaccca

SEQ ID NO: 1299602 - RNA, 18 nt, Human
aggaagagcaagaaggcg

SEQ ID NO: 1299603 - RNA, 25 nt, Human
aggcaggaaggugagcagacuccag

SEQ ID NO: 1299604 - RNA, 20 nt, Human
aggggcuugaggcaggaagg

SEQ ID NO: 1299605 - RNA, 26 nt, Human
agguggcucaggggacaggacagagg

SEQ ID NO: 1299606 - RNA, 19 nt, Human
auagauugugagcuuuaca

SEQ ID NO: 1299607 - RNA, 19 nt, Human
aucugauguccucccucca

SEQ ID NO: 1299608 - RNA, 22 nt, Human
aucugauguccucccuccaccc

SEQ ID NO: 1299609 - RNA, 19 nt, Human
auggagacaaggcgucugc

SEQ ID NO: 1299610 - RNA, 19 nt, Human
caaacccaaacccaucucc

SEQ ID NO: 1299611 - RNA, 20 nt, Human
caaaucgagcaaauaugacu

SEQ ID NO: 1299612 - RNA, 22 nt, Human
cacagcaggacaaacccaaacc

SEQ ID NO: 1299613 - RNA, 26 nt, Human
cacagcaggacaaacccaaacccauc

SEQ ID NO: 1299614 - RNA, 23 nt, Human
caccugaccugagaguggcgggc

SEQ ID NO: 1299615 - RNA, 21 nt, Human
cagacuccagaguucaagaga

SEQ ID NO: 1299616 - RNA, 18 nt, Human
cagagcacagcaggacaa

SEQ ID NO: 1299617 - RNA, 27 nt, Human
cagcaagcugcuuccucgacgaugccu

SEQ ID NO: 1299618 - RNA, 19 nt, Human
cagcaggacaaacccaaac

SEQ ID NO: 1299619 - RNA, 21 nt, Human
cagcaggacaaacccaaaccc

SEQ ID NO: 1299620 - RNA, 21 nt, Human
cuccacccguaacuccccuga

SEQ ID NO: 1299621 - RNA, 22 nt, Human
cuggaccacgugggagaggggc

SEQ ID NO: 1299622 - RNA, 19 nt, Human
cugggcacuugaccaggug

SEQ ID NO: 1299623 - RNA, 18 nt, Human
cuggggaggcuggagucc

SEQ ID NO: 1299624 - RNA, 21 nt, Human
gagaaccaaguguucaggaac

SEQ ID NO: 1299625 - RNA, 24 nt, Human
gcacagcaggacaaacccaaaccc

SEQ ID NO: 1299626 - RNA, 18 nt, Human
ggagaggggcuugaggca

SEQ ID NO: 1299627 - RNA, 19 nt, Human
ggagcagagcacagcagga

SEQ ID NO: 1299628 - RNA, 22 nt, Human
guccucccuccacccguaacuc

SEQ ID NO: 1299629 - RNA, 19 nt, Human
guggcucaggggacaggac

SEQ ID NO: 1299630 - RNA, 22 nt, Human
uaaaagaguagauauggagaca

SEQ ID NO: 1299631 - RNA, 21 nt, Human
uaagaaaauccccagcagcug

SEQ ID NO: 1299632 - RNA, 23 nt, Human
uacaagaaugggaagaaauuauc

SEQ ID NO: 1299633 - RNA, 22 nt, Human
uaccuggaagauacucuuuaac

SEQ ID NO: 1299634 - RNA, 24 nt, Human
uccacccguaacuccccugaaauc

SEQ ID NO: 1299635 - RNA, 23 nt, Human
ucccucugauuaaacaggaguug

SEQ ID NO: 1299636 - RNA, 25 nt, Human
ucugcaggcacacgagagucgcugg

SEQ ID NO: 1299637 - RNA, 18 nt, Human
ugagauggaauuuaaaau

SEQ ID NO: 1299638 - RNA, 20 nt, Human
uggcucaggggacaggacag

SEQ ID NO: 1299639 - RNA, 25 nt, Human
uguggccaguauugagaaccaagug

SEQ ID NO: 1299640 - RNA, 21 nt, Human
uguggcuguggccaguauuga

SEQ ID NO: 1299641 - RNA, 21 nt, Human
uuccucgacgaugccuuugau

SEQ ID NO: 1299642 - RNA, 20 nt, Human
aaagaucuaaaagcugagga

SEQ ID NO: 1299643 - RNA, 21 nt, Human
aacacugcauucaagagugaa

SEQ ID NO: 1299644 - RNA, 28 nt, Human
auuuuucuuucuuuuuuuuuuuuuuuuu

SEQ ID NO: 1299645 - RNA, 20 nt, Human
caccuacugcuucuuccucu

SEQ ID NO: 1299646 - RNA, 23 nt, Human
cagaaggauaaagcuuugcggug

SEQ ID NO: 1299647 - RNA, 18 nt, Human
cagcuccaguuggaauga

SEQ ID NO: 1299648 - RNA, 23 nt, Human
cauaaagaucuaaaagcugagga

SEQ ID NO: 1299649 - RNA, 19 nt, Human
ccucccgucacugaugcug

SEQ ID NO: 1299650 - RNA, 23 nt, Human
ccuugcaaaugaauuuuucuuuc

SEQ ID NO: 1299651 - RNA, 18 nt, Human
uaaagaucuaaaagcuga

SEQ ID NO: 1299652 - RNA, 18 nt, Human
ucccgucacugaugcugg

SEQ ID NO: 1299653 - RNA, 21 nt, Human
ucugcgaggcggaaucaaguc

SEQ ID NO: 1299654 - RNA, 18 nt, Human
ucuuuuuuuuuuuuuuuu

SEQ ID NO: 1299655 - RNA, 23 nt, Human
ugaauucuugaaacacugcauuc

SEQ ID NO: 1299656 - RNA, 22 nt, Human
ugagacggaaucuugcucuguc

SEQ ID NO: 1299657 - RNA, 19 nt, Human
uggaaugacuggggguguc

SEQ ID NO: 1299658 - RNA, 21 nt, Human
uuccuuuuugggggcugccuu

SEQ ID NO: 1299659 - RNA, 29 nt, Human
uucuuucuuuuuuuuuuuuuuuuugagaa

SEQ ID NO: 1299660 - RNA, 24 nt, Human
uuucuuuuuuuuuuuuuuuuuggg

SEQ ID NO: 1299661 - RNA, 21 nt, Human
uuuuugggggcugccuuuagu

SEQ ID NO: 1299662 - RNA, 24 nt, Human
uuuuuuuuuuuugagacggaaucu

SEQ ID NO: 1299663 - RNA, 22 nt, Human
uuuuuuuuuuuuuugagacgga

SEQ ID NO: 1299664 - RNA, 23 nt, Human
aaagcuccaugagggugacaugg

SEQ ID NO: 1299665 - RNA, 20 nt, Human
acaugguggaaccccaauuc

SEQ ID NO: 1299666 - RNA, 22 nt, Human
accggugggggcggagccgcgu

SEQ ID NO: 1299667 - RNA, 18 nt, Human
cacccugaaggcggaucc

SEQ ID NO: 1299668 - RNA, 21 nt, Human
ccaaacaaggcuaacgaaagc

SEQ ID NO: 1299669 - RNA, 23 nt, Human
ccccaauucacccugaaggcgga

SEQ ID NO: 1299670 - RNA, 19 nt, Human
ccccuuuguaucccaaaca

SEQ ID NO: 1299671 - RNA, 23 nt, Human
ccgcagggcugaucucuccagcu

SEQ ID NO: 1299672 - RNA, 18 nt, Human
cgagaggcuggcggugga

SEQ ID NO: 1299673 - RNA, 22 nt, Human
cuccagcugggcugggcuuugg

SEQ ID NO: 1299674 - RNA, 18 nt, Human
cugaucucuccagcuggg

SEQ ID NO: 1299675 - RNA, 21 nt, Human
gcugggcugggcuuuggggac

SEQ ID NO: 1299676 - RNA, 19 nt, Human
ggaaauccuguucacuggc

SEQ ID NO: 1299677 - RNA, 22 nt, Human
ggggagggcgucgggggucggg

SEQ ID NO: 1299678 - RNA, 21 nt, Human
gggugacaugguggaacccca

SEQ ID NO: 1299679 - RNA, 18 nt, Human
ggugacaugguggaaccc

SEQ ID NO: 1299680 - RNA, 18 nt, Human
ggugcccgcagccggccu

SEQ ID NO: 1299681 - RNA, 19 nt, Human
gugcccgcagccggccucg

SEQ ID NO: 1299682 - RNA, 20 nt, Human
guggagugcgcggcaggacc

SEQ ID NO: 1299683 - RNA, 22 nt, Human
ucacuggcucuugaucuuucuc

SEQ ID NO: 1299684 - RNA, 23 nt, Human
ucccuggcugggaaauccuguuc

SEQ ID NO: 1299685 - RNA, 22 nt, Human
ucuccuaauuaccggugggggc

SEQ ID NO: 1299686 - RNA, 18 nt, Human
ugacaugguggaacccca

SEQ ID NO: 1299687 - RNA, 22 nt, Human
ugacaugguggaaccccaauuc

SEQ ID NO: 1299688 - RNA, 24 nt, Human
uggaaccccaauucacccugaagg

SEQ ID NO: 1299689 - RNA, 21 nt, Human
ugggaaauccuguucacuggc

SEQ ID NO: 1299690 - RNA, 22 nt, Human
ugggggcggagccgcgucucca

SEQ ID NO: 1299691 - RNA, 22 nt, Human
uugaaaaucuccuaauuaccgg

SEQ ID NO: 1299692 - RNA, 19 nt, Human
uugcaggugcccgcagccg

SEQ ID NO: 1299693 - RNA, 21 nt, Human
agaccgcggggcagaugggac

SEQ ID NO: 1299694 - RNA, 21 nt, Human
aggcaggcacacaggagaagg

SEQ ID NO: 1299695 - RNA, 23 nt, Human
agggggcugaggguggagaggcc

SEQ ID NO: 1299696 - RNA, 21 nt, Human
cagaugggaccgcugccuccc

SEQ ID NO: 1299697 - RNA, 23 nt, Human
caggcacacaggagaagggcugg

SEQ ID NO: 1299698 - RNA, 23 nt, Human
ccgcugccucccugccuccuggg

SEQ ID NO: 1299699 - RNA, 24 nt, Human
cgaagggacugaagcagggggcug

SEQ ID NO: 1299700 - RNA, 19 nt, Human
gaccgcugccucccugccu

SEQ ID NO: 1299701 - RNA, 18 nt, Human
gcagaugggaccgcugcc

SEQ ID NO: 1299702 - RNA, 24 nt, Human
guggcggcggcaggaggcaggcac

SEQ ID NO: 1299703 - RNA, 21 nt, Human
ugaagcagggggcugagggug

SEQ ID NO: 1299704 - RNA, 21 nt, Human
cagggugcuccaggaggucaa

SEQ ID NO: 1299705 - RNA, 22 nt, Human
agugcugcuauaaauauucuuc

SEQ ID NO: 1299706 - RNA, 21 nt, Human
ccugaaggcaccucucuguga

SEQ ID NO: 1299707 - RNA, 20 nt, Human
ucugaguggcuucccagcuu

SEQ ID NO: 1299708 - RNA, 25 nt, Human
ucuucuaaaugucuucuggugaaca

SEQ ID NO: 1299709 - RNA, 19 nt, Human
uggugaacaucugccaguu

SEQ ID NO: 1299710 - RNA, 19 nt, Human
uucuggugaacaucugcca

SEQ ID NO: 1299711 - RNA, 21 nt, Human
cagaauguccaagaagagccc

SEQ ID NO: 1299712 - RNA, 18 nt, Human
cagugcucucgguauuug

SEQ ID NO: 1299713 - RNA, 24 nt, Human
ccccagggacuccagaauguccaa

SEQ ID NO: 1299714 - RNA, 20 nt, Human
cuccagaauguccaagaaga

SEQ ID NO: 1299715 - RNA, 19 nt, Human
ugagcuucagacuucccuu

SEQ ID NO: 1299716 - RNA, 23 nt, Human
ugcagugcucucgguauuuguua

SEQ ID NO: 1299717 - RNA, 20 nt, Human
aauuugcagacgaacuccuu

SEQ ID NO: 1299718 - RNA, 19 nt, Human
acucaagcuggggaugggc

SEQ ID NO: 1299719 - RNA, 19 nt, Human
aggcucgaggggauggcag

SEQ ID NO: 1299720 - RNA, 21 nt, Human
caccucucuuccuuccugugu

SEQ ID NO: 1299721 - RNA, 22 nt, Human
caccucucuuccuuccuguguu

SEQ ID NO: 1299722 - RNA, 20 nt, Human
caggcucgaggggauggcag

SEQ ID NO: 1299723 - RNA, 21 nt, Human
cugcaccucucuuccuuccug

SEQ ID NO: 1299724 - RNA, 24 nt, Human
cuuugagauguucccauagacuga

SEQ ID NO: 1299725 - RNA, 23 nt, Human
ggcgagaaggcccagaacucaag

SEQ ID NO: 1299726 - RNA, 20 nt, Human
gugcugaggagggaggugag

SEQ ID NO: 1299727 - RNA, 22 nt, Human
uacaggcucgaggggauggcag

SEQ ID NO: 1299728 - RNA, 21 nt, Human
uagaauuugcagacgaacucc

SEQ ID NO: 1299729 - RNA, 19 nt, Human
ucccauagacugaggccgu

SEQ ID NO: 1299730 - RNA, 21 nt, Human
ugaggagggaggugagugagc

SEQ ID NO: 1299731 - RNA, 18 nt, Human
uggcgagaaggcccagaa

SEQ ID NO: 1299732 - RNA, 19 nt, Human
uggcgagaaggcccagaac

SEQ ID NO: 1299733 - RNA, 23 nt, Human
cugaagacgcucauucugaaaga

SEQ ID NO: 1299734 - RNA, 22 nt, Human
aaagcuuuugggccucagggag

SEQ ID NO: 1299735 - RNA, 23 nt, Human
acaagucugacacuuaaagcuuu

SEQ ID NO: 1299736 - RNA, 22 nt, Human
acgcagccucaggaaacguggg

SEQ ID NO: 1299737 - RNA, 23 nt, Human
agacagcaccaucucggggucca

SEQ ID NO: 1299738 - RNA, 21 nt, Human
aggcagacaaaggggucaaca

SEQ ID NO: 1299739 - RNA, 20 nt, Human
agggugcuuccacuggcuuu

SEQ ID NO: 1299740 - RNA, 21 nt, Human
aucuucuuccacacagaguuc

SEQ ID NO: 1299741 - RNA, 22 nt, Human
auggagcccuguucaucuggag

SEQ ID NO: 1299742 - RNA, 22 nt, Human
cacauggauccgcuggcaugga

SEQ ID NO: 1299743 - RNA, 21 nt, Human
caccaagcaggagcgggcccc

SEQ ID NO: 1299744 - RNA, 20 nt, Human
cagacaaaggggucaacaug

SEQ ID NO: 1299745 - RNA, 19 nt, Human
cagccccagggaggucagg

SEQ ID NO: 1299746 - RNA, 21 nt, Human
cagccucaggaaacguggggg

SEQ ID NO: 1299747 - RNA, 18 nt, Human
cccccggagggugcuucc

SEQ ID NO: 1299748 - RNA, 20 nt, Human
ccccucccucacauggaucc

SEQ ID NO: 1299749 - RNA, 23 nt, Human
cccucugaucuucaucuucuucc

SEQ ID NO: 1299750 - RNA, 21 nt, Human
ccuccaagacuuccccgcaag

SEQ ID NO: 1299751 - RNA, 25 nt, Human
ccuccaagacuuccccgcaaguggg

SEQ ID NO: 1299752 - RNA, 25 nt, Human
cgcaagugggcccagggaacacuag

SEQ ID NO: 1299753 - RNA, 20 nt, Human
cguccagaacgugucuuuac

SEQ ID NO: 1299754 - RNA, 18 nt, Human
cuuugcagggaccaccug

SEQ ID NO: 1299755 - RNA, 19 nt, Human
gagggugcuuccacuggcu

SEQ ID NO: 1299756 - RNA, 18 nt, Human
gccucaggaaacgugggg

SEQ ID NO: 1299757 - RNA, 20 nt, Human
ggagggugcuuccacuggcu

SEQ ID NO: 1299758 - RNA, 19 nt, Human
ggccccucccucacaugga

SEQ ID NO: 1299759 - RNA, 21 nt, Human
ggcggugauaucugcgagcac

SEQ ID NO: 1299760 - RNA, 21 nt, Human
gucgggccaguccccccuucc

SEQ ID NO: 1299761 - RNA, 22 nt, Human
guucaucuggagccuugggggc

SEQ ID NO: 1299762 - RNA, 21 nt, Human
uaaaaugucgggccagucccc

SEQ ID NO: 1299763 - RNA, 22 nt, Human
ucacauggauccgcuggcaugg

SEQ ID NO: 1299764 - RNA, 18 nt, Human
ucagaaucugacagauga

SEQ ID NO: 1299765 - RNA, 20 nt, Human
ucccucugaucuucaucuuc

SEQ ID NO: 1299766 - RNA, 22 nt, Human
uccgcuggcauggacagcccca

SEQ ID NO: 1299767 - RNA, 23 nt, Human
ucucuguacaaaccccugagcag

SEQ ID NO: 1299768 - RNA, 20 nt, Human
ucugcgagcaccugucuuca

SEQ ID NO: 1299769 - RNA, 18 nt, Human
ugacagaugaccauccgc

SEQ ID NO: 1299770 - RNA, 18 nt, Human
ugagcaggagguuggcau

SEQ ID NO: 1299771 - RNA, 21 nt, Human
ugccucucccucugaucuuca

SEQ ID NO: 1299772 - RNA, 22 nt, Human
uggagccuugggggcugggacu

SEQ ID NO: 1299773 - RNA, 20 nt, Human
ugggaugugcaucgguugga

SEQ ID NO: 1299774 - RNA, 19 nt, Human
ugggccucagggagcagcu

SEQ ID NO: 1299775 - RNA, 19 nt, Human
uggggggugggggcguggg

SEQ ID NO: 1299776 - RNA, 20 nt, Human
uggggggugggggcguggga

SEQ ID NO: 1299777 - RNA, 20 nt, Human
uucacugggcgguuccucca

SEQ ID NO: 1299778 - RNA, 19 nt, Human
uuccacacagaguucugag

SEQ ID NO: 1299779 - RNA, 26 nt, Human
uuccuccaggccagacgcagccucag

SEQ ID NO: 1299780 - RNA, 21 nt, Human
uucuuccacacagaguucuga

SEQ ID NO: 1299781 - RNA, 22 nt, Human
aagggaagaccguacagcgcga

SEQ ID NO: 1299782 - RNA, 19 nt, Human
agaaugaguggcagggaca

SEQ ID NO: 1299783 - RNA, 21 nt, Human
agaaugaguggcagggacagg

SEQ ID NO: 1299784 - RNA, 21 nt, Human
cgcagccaggguguggguggg

SEQ ID NO: 1299785 - RNA, 19 nt, Human
cgcgauggggaccagggcg

SEQ ID NO: 1299786 - RNA, 20 nt, Human
cgggagcugcgguucuuccu

SEQ ID NO: 1299787 - RNA, 23 nt, Human
gaccagggcggcgggccgcagcc

SEQ ID NO: 1299788 - RNA, 22 nt, Human
gcccucgguguuggaagggaag

SEQ ID NO: 1299789 - RNA, 21 nt, Human
gcugcgguucuuccuccuccg

SEQ ID NO: 1299790 - RNA, 23 nt, Human
ggagcugcgguucuuccuccucc

SEQ ID NO: 1299791 - RNA, 19 nt, Human
gggugugggugggcgacgg

SEQ ID NO: 1299792 - RNA, 22 nt, Human
uggaagggaagaccguacagcg

SEQ ID NO: 1299793 - RNA, 19 nt, Human
uggcagggacagggcggcc

SEQ ID NO: 1299794 - RNA, 19 nt, Human
uggcagggacagggcggcc

SEQ ID NO: 1299795 - RNA, 24 nt, Human
ugggugggcgacggucaaggugcc

SEQ ID NO: 1299796 - RNA, 20 nt, Human
uuccuccuccgcccucaccg

SEQ ID NO: 1299797 - RNA, 20 nt, Human
aaaccuugaauggccuggcg

SEQ ID NO: 1299798 - RNA, 19 nt, Human
acuggcuggcacagggagg

SEQ ID NO: 1299799 - RNA, 19 nt, Human
auggcuucugagucggacu

SEQ ID NO: 1299800 - RNA, 22 nt, Human
auucuguuuggaucugauauuu

SEQ ID NO: 1299801 - RNA, 25 nt, Human
ccuggggcugcugguuucuugccuu

SEQ ID NO: 1299802 - RNA, 23 nt, Human
cuggccuugcugcuuucccuggg

SEQ ID NO: 1299803 - RNA, 21 nt, Human
uaagggcugccggugggaacu

SEQ ID NO: 1299804 - RNA, 19 nt, Human
uacugggacaucccugagc

SEQ ID NO: 1299805 - RNA, 22 nt, Human
uagcaauuugccaaauggagca

SEQ ID NO: 1299806 - RNA, 22 nt, Human
ucccugagcugaauggcuucug

SEQ ID NO: 1299807 - RNA, 26 nt, Human
ucccugagcugaauggcuucugaguc

SEQ ID NO: 1299808 - RNA, 21 nt, Human
ucggacuggcuggcacaggga

SEQ ID NO: 1299809 - RNA, 20 nt, Human
ugaugugaagaugaagaguu

SEQ ID NO: 1299810 - RNA, 21 nt, Human
ugcuuuuuuuccuucuccuga

SEQ ID NO: 1299811 - RNA, 18 nt, Human
ugggaacaaggcaggugu

SEQ ID NO: 1299812 - RNA, 20 nt, Human
ugggacaucccugagcugaa

SEQ ID NO: 1299813 - RNA, 19 nt, Human
uguacugggacaucccuga

SEQ ID NO: 1299814 - RNA, 21 nt, Human
ugugcuuaagggcugccggug

SEQ ID NO: 1299815 - RNA, 20 nt, Human
uuucuugccuuugcugccgu

SEQ ID NO: 1299816 - RNA, 25 nt, Human
cagaggguuuuuccucuuguaacuu

SEQ ID NO: 1299817 - RNA, 20 nt, Human
cuuuucuucucucagcuuuc

SEQ ID NO: 1299818 - RNA, 21 nt, Human
cuuuucuucucucagcuuucu

SEQ ID NO: 1299819 - RNA, 23 nt, Human
gaggguuuuuccucuuguaacuu

SEQ ID NO: 1299820 - RNA, 20 nt, Human
uccccaggcuugcuuaauuu

SEQ ID NO: 1299821 - RNA, 23 nt, Human
ugaucuucagaggguuuuuccuc

SEQ ID NO: 1299822 - RNA, 24 nt, Human
uguuucuguauccucugguaacag

SEQ ID NO: 1299823 - RNA, 20 nt, Human
uucuucucucagcuuucuca

SEQ ID NO: 1299824 - RNA, 21 nt, Human
cccugggccggagaaagacuc

SEQ ID NO: 1299825 - RNA, 25 nt, Human
ccugggccggagaaagaccgggguc

SEQ ID NO: 1299826 - RNA, 21 nt, Human
gcgucgcuucagccuccgagg

SEQ ID NO: 1299827 - RNA, 23 nt, Human
ugccuccggcgucgcuucagccu

SEQ ID NO: 1299828 - RNA, 22 nt, Human
aaaaguacauaaagcccacaaa

SEQ ID NO: 1299829 - RNA, 20 nt, Human
aacauacuccaaauguaaga

SEQ ID NO: 1299830 - RNA, 22 nt, Human
acaaaaauuaugaugcagcccu

SEQ ID NO: 1299831 - RNA, 19 nt, Human
accucggacuucccagccu

SEQ ID NO: 1299832 - RNA, 20 nt, Human
agaaagaccaaauacauauu

SEQ ID NO: 1299833 - RNA, 22 nt, Human
agacgucugacccugcaccucc

SEQ ID NO: 1299834 - RNA, 22 nt, Human
agaguagcucacagaacucagg

SEQ ID NO: 1299835 - RNA, 22 nt, Human
agccacagcacaaaacauaguu

SEQ ID NO: 1299836 - RNA, 21 nt, Human
aggaaagggcuuuauuuacua

SEQ ID NO: 1299837 - RNA, 20 nt, Human
aggcaaaaguacauaaagcc

SEQ ID NO: 1299838 - RNA, 22 nt, Human
aggcaaaaguacauaaagccca

SEQ ID NO: 1299839 - RNA, 23 nt, Human
aggucccaaagguuuuaggagcu

SEQ ID NO: 1299840 - RNA, 19 nt, Human
auacacacacagacgucug

SEQ ID NO: 1299841 - RNA, 19 nt, Human
auauauauauauauauaua

SEQ ID NO: 1299842 - RNA, 19 nt, Human
auauauauauauauauaua

SEQ ID NO: 1299843 - RNA, 19 nt, Human
auauauauauauauauaua

SEQ ID NO: 1299844 - RNA, 19 nt, Human
auauauauauauauauaua

SEQ ID NO: 1299845 - RNA, 19 nt, Human
auauauauauauauauaua

SEQ ID NO: 1299846 - RNA, 19 nt, Human
auauauauauauauauaua

SEQ ID NO: 1299847 - RNA, 19 nt, Human
auauauauauauauauaua

SEQ ID NO: 1299848 - RNA, 19 nt, Human
auauauauauauauauaua

SEQ ID NO: 1299849 - RNA, 19 nt, Human
auauauauauauauauaua

SEQ ID NO: 1299850 - RNA, 19 nt, Human
auauauauauauauauaua

SEQ ID NO: 1299851 - RNA, 19 nt, Human
auauauauauauauauaua

SEQ ID NO: 1299852 - RNA, 19 nt, Human
auauauauauauauauaua

SEQ ID NO: 1299853 - RNA, 19 nt, Human
auauauauauauauauaua

SEQ ID NO: 1299854 - RNA, 19 nt, Human
auauauauauauauauaua

SEQ ID NO: 1299855 - RNA, 19 nt, Human
auauauauauauauauaua

SEQ ID NO: 1299856 - RNA, 19 nt, Human
auauauauauauauauaua

SEQ ID NO: 1299857 - RNA, 19 nt, Human
auauauauauauauauaua

SEQ ID NO: 1299858 - RNA, 19 nt, Human
auauauauauauauauaua

SEQ ID NO: 1299859 - RNA, 19 nt, Human
auauauauauauauauaua

SEQ ID NO: 1299860 - RNA, 19 nt, Human
auauauauauauauauaua

SEQ ID NO: 1299861 - RNA, 19 nt, Human
auauauauauauauauaua

SEQ ID NO: 1299862 - RNA, 19 nt, Human
auauauauauauauauaua

SEQ ID NO: 1299863 - RNA, 19 nt, Human
auauauauauauauauaua

SEQ ID NO: 1299864 - RNA, 19 nt, Human
auauauauauauauauaua

SEQ ID NO: 1299865 - RNA, 21 nt, Human
aucccuguucugucccugcca

SEQ ID NO: 1299866 - RNA, 20 nt, Human
auuuaggccuacugagcccc

SEQ ID NO: 1299867 - RNA, 21 nt, Human
caaaaguacauaaagcccaca

SEQ ID NO: 1299868 - RNA, 22 nt, Human
caaauguaagaaaauacagaga

SEQ ID NO: 1299869 - RNA, 19 nt, Human
caagagcaccuuugucacc

SEQ ID NO: 1299870 - RNA, 23 nt, Human
caagcugauaguacuaagaagca

SEQ ID NO: 1299871 - RNA, 20 nt, Human
caaugcagaagcucucugaa

SEQ ID NO: 1299872 - RNA, 18 nt, Human
cagaaccugagcaugcug

SEQ ID NO: 1299873 - RNA, 23 nt, Human
cagaacugugagaaauaaauuuc

SEQ ID NO: 1299874 - RNA, 22 nt, Human
cagccuccagaacugugagaaa

SEQ ID NO: 1299875 - RNA, 21 nt, Human
caggaacagguuugggggaag

SEQ ID NO: 1299876 - RNA, 23 nt, Human
caggaauaggaagaaagaccaaa

SEQ ID NO: 1299877 - RNA, 23 nt, Human
cagguuaagagcucagucccaua

SEQ ID NO: 1299878 - RNA, 20 nt, Human
cauacacauauauauguaca

SEQ ID NO: 1299879 - RNA, 22 nt, Human
cauauauacauacacauauaua

SEQ ID NO: 1299880 - RNA, 23 nt, Human
cauucacacucaacacugaacac

SEQ ID NO: 1299881 - RNA, 21 nt, Human
cauucgcguacuaccagacac

SEQ ID NO: 1299882 - RNA, 25 nt, Human
ccaaauguaagaaaauacagagaca

SEQ ID NO: 1299883 - RNA, 18 nt, Human
ccaagcugauaguacuaa

SEQ ID NO: 1299884 - RNA, 23 nt, Human
ccacuguaagguaugagccacag

SEQ ID NO: 1299885 - RNA, 21 nt, Human
cccaagcugauaguacuaaga

SEQ ID NO: 1299886 - RNA, 22 nt, Human
ccccaaggucugggaguggggc

SEQ ID NO: 1299887 - RNA, 22 nt, Human
cccccaacuucagacaccaguc

SEQ ID NO: 1299888 - RNA, 19 nt, Human
ccccucuuccuuccccaag

SEQ ID NO: 1299889 - RNA, 18 nt, Human
cccguggcaaccagaccc

SEQ ID NO: 1299890 - RNA, 23 nt, Human
ccuauucugaggccauucagaag

SEQ ID NO: 1299891 - RNA, 20 nt, Human
ccuccagaacugugagaaau

SEQ ID NO: 1299892 - RNA, 22 nt, Human
ccucuaaacacaugguugguuc

SEQ ID NO: 1299893 - RNA, 21 nt, Human
ccugaccucggacuucccagc

SEQ ID NO: 1299894 - RNA, 18 nt, Human
ccuuccccaaggucuggg

SEQ ID NO: 1299895 - RNA, 24 nt, Human
cgacucaaccuucagccccucuuc

SEQ ID NO: 1299896 - RNA, 18 nt, Human
cuaccacuguaagguaug

SEQ ID NO: 1299897 - RNA, 21 nt, Human
cuacugagccccucuccacca

SEQ ID NO: 1299898 - RNA, 18 nt, Human
cucaacacugaacacucc

SEQ ID NO: 1299899 - RNA, 28 nt, Human
cuguguguguguauauauauauaaugua

SEQ ID NO: 1299900 - RNA, 28 nt, Human
cuuccaggggaguauuuucaguauacaa

SEQ ID NO: 1299901 - RNA, 20 nt, Human
cuuugggcucaccacuccuc

SEQ ID NO: 1299902 - RNA, 19 nt, Human
gaaccugagcaugcuggca

SEQ ID NO: 1299903 - RNA, 23 nt, Human
gacaguguccccagaccuuuagc

SEQ ID NO: 1299904 - RNA, 18 nt, Human
gagcuuccacggccccuu

SEQ ID NO: 1299905 - RNA, 22 nt, Human
gcaaaaguacauaaagcccaca

SEQ ID NO: 1299906 - RNA, 18 nt, Human
gccagauggaggcacagg

SEQ ID NO: 1299907 - RNA, 22 nt, Human
ggagaugcacagagggaaaaug

SEQ ID NO: 1299908 - RNA, 24 nt, Human
gggaggucccaaagguuuuaggag

SEQ ID NO: 1299909 - RNA, 22 nt, Human
ggucccaaagguuuuaggagcu

SEQ ID NO: 1299910 - RNA, 21 nt, Human
gguuugggggaaggggcacgg

SEQ ID NO: 1299911 - RNA, 19 nt, Human
guauauauauauauauaua

SEQ ID NO: 1299912 - RNA, 19 nt, Human
guguauauauauauauaua

SEQ ID NO: 1299913 - RNA, 20 nt, Human
guguguauauauauauauau

SEQ ID NO: 1299914 - RNA, 25 nt, Human
uaaaaucagaagaaaauacauaaac

SEQ ID NO: 1299915 - RNA, 26 nt, Human
uaacccccaagcugauaguacuaaga

SEQ ID NO: 1299916 - RNA, 28 nt, Human
uaacucagaaacagccagauggaggcac

SEQ ID NO: 1299917 - RNA, 20 nt, Human
uaagagacauagacuaccac

SEQ ID NO: 1299918 - RNA, 19 nt, Human
uaagcacugugccuaagga

SEQ ID NO: 1299919 - RNA, 20 nt, Human
uaagcacugugccuaaggac

SEQ ID NO: 1299920 - RNA, 19 nt, Human
uaagguaugagccacagca

SEQ ID NO: 1299921 - RNA, 20 nt, Human
uacauacacauauauaugua

SEQ ID NO: 1299922 - RNA, 22 nt, Human
uacauacacauauauauguaca

SEQ ID NO: 1299923 - RNA, 21 nt, Human
uacguagaaaaaacaaaccuu

SEQ ID NO: 1299924 - RNA, 27 nt, Human
uaguagcccaaacgcacuaagacauac

SEQ ID NO: 1299925 - RNA, 18 nt, Human
uauaaauauauauuucug

SEQ ID NO: 1299926 - RNA, 22 nt, Human
uauacauacacauauauaugua

SEQ ID NO: 1299927 - RNA, 23 nt, Human
uauacauacacauauauauguac

SEQ ID NO: 1299928 - RNA, 25 nt, Human
uauacauacacauauauauguacau

SEQ ID NO: 1299929 - RNA, 24 nt, Human
uauauacauacacauauauaugua

SEQ ID NO: 1299930 - RNA, 19 nt, Human
uauauauauauauauauau

SEQ ID NO: 1299931 - RNA, 19 nt, Human
uauauauauauauauauau

SEQ ID NO: 1299932 - RNA, 19 nt, Human
uauauauauauauauauau

SEQ ID NO: 1299933 - RNA, 19 nt, Human
uauauauauauauauauau

SEQ ID NO: 1299934 - RNA, 19 nt, Human
uauauauauauauauauau

SEQ ID NO: 1299935 - RNA, 19 nt, Human
uauauauauauauauauau

SEQ ID NO: 1299936 - RNA, 19 nt, Human
uauauauauauauauauau

SEQ ID NO: 1299937 - RNA, 19 nt, Human
uauauauauauauauauau

SEQ ID NO: 1299938 - RNA, 19 nt, Human
uauauauauauauauauau

SEQ ID NO: 1299939 - RNA, 19 nt, Human
uauauauauauauauauau

SEQ ID NO: 1299940 - RNA, 19 nt, Human
uauauauauauauauauau

SEQ ID NO: 1299941 - RNA, 19 nt, Human
uauauauauauauauauau

SEQ ID NO: 1299942 - RNA, 19 nt, Human
uauauauauauauauauau

SEQ ID NO: 1299943 - RNA, 19 nt, Human
uauauauauauauauauau

SEQ ID NO: 1299944 - RNA, 19 nt, Human
uauauauauauauauauau

SEQ ID NO: 1299945 - RNA, 19 nt, Human
uauauauauauauauauau

SEQ ID NO: 1299946 - RNA, 24 nt, Human
uauauuucuguguguguguauaua

SEQ ID NO: 1299947 - RNA, 22 nt, Human
uaucaucagucuauuauaaaau

SEQ ID NO: 1299948 - RNA, 21 nt, Human
uaugagccacagcacaaaaca

SEQ ID NO: 1299949 - RNA, 18 nt, Human
uauguacauacuaacaug

SEQ ID NO: 1299950 - RNA, 18 nt, Human
uauguacauauauacaua

SEQ ID NO: 1299951 - RNA, 24 nt, Human
uauucugaaaacucuacccccuca

SEQ ID NO: 1299952 - RNA, 24 nt, Human
ucaguuugccaucauguuucauga

SEQ ID NO: 1299953 - RNA, 18 nt, Human
ucauauucuugcaacuug

SEQ ID NO: 1299954 - RNA, 23 nt, Human
uccacaauuucauacauccuuaa

SEQ ID NO: 1299955 - RNA, 19 nt, Human
uccccaaggucugggagug

SEQ ID NO: 1299956 - RNA, 21 nt, Human
uccccagcagguuaagagcuc

SEQ ID NO: 1299957 - RNA, 23 nt, Human
ucccuaaucccuguucugucccc

SEQ ID NO: 1299958 - RNA, 23 nt, Human
ucccuaaucccuguucugucccu

SEQ ID NO: 1299959 - RNA, 22 nt, Human
ucccugccacauacacacacag

SEQ ID NO: 1299960 - RNA, 23 nt, Human
ucccugccacauacacacacaga

SEQ ID NO: 1299961 - RNA, 21 nt, Human
uccuugccaccaacugugugg

SEQ ID NO: 1299962 - RNA, 18 nt, Human
ucugacguggcuacaaag

SEQ ID NO: 1299963 - RNA, 19 nt, Human
ucuuguaaacauacuccaa

SEQ ID NO: 1299964 - RNA, 20 nt, Human
ugagaacugagaucuucaga

SEQ ID NO: 1299965 - RNA, 25 nt, Human
ugagaagucagcaagcaguuugcaa

SEQ ID NO: 1299966 - RNA, 22 nt, Human
ugagcaugccacucaacaccau

SEQ ID NO: 1299967 - RNA, 21 nt, Human
ugccaguacugcuuuggacag

SEQ ID NO: 1299968 - RNA, 25 nt, Human
ugcuagaguagcucacagaacucag

SEQ ID NO: 1299969 - RNA, 22 nt, Human
uggaaaauugcucucaccagaa

SEQ ID NO: 1299970 - RNA, 20 nt, Human
uggacaguguccccagaccu

SEQ ID NO: 1299971 - RNA, 19 nt, Human
uggagaugcacagagggaa

SEQ ID NO: 1299972 - RNA, 20 nt, Human
uggagaugcacagagggaaa

SEQ ID NO: 1299973 - RNA, 19 nt, Human
ugggaggucccaaagguuu

SEQ ID NO: 1299974 - RNA, 18 nt, Human
uguauauauauauauaua

SEQ ID NO: 1299975 - RNA, 22 nt, Human
uguauauauauauauauauaua

SEQ ID NO: 1299976 - RNA, 18 nt, Human
uguguauauauauauaua

SEQ ID NO: 1299977 - RNA, 20 nt, Human
uguguauauauauauauaua

SEQ ID NO: 1299978 - RNA, 20 nt, Human
uguguauauauauauauaua

SEQ ID NO: 1299979 - RNA, 22 nt, Human
uguguauauauauauauauaua

SEQ ID NO: 1299980 - RNA, 18 nt, Human
uguguguauauauauaua

SEQ ID NO: 1299981 - RNA, 24 nt, Human
uguguguauauauauauauauaac

SEQ ID NO: 1299982 - RNA, 18 nt, Human
uguguguguauauauaua

SEQ ID NO: 1299983 - RNA, 24 nt, Human
uguguguguauauauauauauaau

SEQ ID NO: 1299984 - RNA, 23 nt, Human
uguguguguguauauauauauau

SEQ ID NO: 1299985 - RNA, 24 nt, Human
uuagguaucauauucuugcaacuu

SEQ ID NO: 1299986 - RNA, 30 nt, Human
uuauguacauauauacauacacauauauag

SEQ ID NO: 1299987 - RNA, 18 nt, Human
uucaccuuuuaucaaugc

SEQ ID NO: 1299988 - RNA, 23 nt, Human
uuccacuugagagcuucaaagca

SEQ ID NO: 1299989 - RNA, 20 nt, Human
uucccaugauuuccuucuca

SEQ ID NO: 1299990 - RNA, 23 nt, Human
uucccguggcaaccagacccuau

SEQ ID NO: 1299991 - RNA, 22 nt, Human
uugcauuauuucugauaaaugu

SEQ ID NO: 1299992 - RNA, 22 nt, Human
uuuagguugaagaaaaugcuaa

SEQ ID NO: 1299993 - RNA, 24 nt, Human
uuuaugggaagcuuuauucuuagg

SEQ ID NO: 1299994 - RNA, 20 nt, Human
uuugcaaccuggaaaauugc

SEQ ID NO: 1299995 - RNA, 18 nt, Human
uuugcacuuuccaccaug

SEQ ID NO: 1299996 - RNA, 26 nt, Human
aucuuccuccaggcccucuaguguca

SEQ ID NO: 1299997 - RNA, 20 nt, Human
uccuccaggcccucuagugu

SEQ ID NO: 1299998 - RNA, 20 nt, Human
ucggacccccgcugucggug

SEQ ID NO: 1299999 - RNA, 23 nt, Human
ucugauggguuuauuuuaugaug

SEQ ID NO: 1300000 - RNA, 25 nt, Human
aagagaccacagguaggcaguggga

SEQ ID NO: 1300001 - RNA, 24 nt, Human
agaccaguguugagggaagucagg

SEQ ID NO: 1300002 - RNA, 20 nt, Human
agagaccacagguaggcaug

SEQ ID NO: 1300003 - RNA, 23 nt, Human
agggaccuaugcugcucaaggcc

SEQ ID NO: 1300004 - RNA, 19 nt, Human
agucagggaccccaaacgg

SEQ ID NO: 1300005 - RNA, 23 nt, Human
caaggcucaguggaagagaccag

SEQ ID NO: 1300006 - RNA, 24 nt, Human
gagggaccuaugcugcucaaggcc

SEQ ID NO: 1300007 - RNA, 21 nt, Human
ggaagucaucuucugcaaggg

SEQ ID NO: 1300008 - RNA, 20 nt, Human
gguguccaagagaccacagg

SEQ ID NO: 1300009 - RNA, 22 nt, Human
uaacauucacucccagaagagu

SEQ ID NO: 1300010 - RNA, 26 nt, Human
uccaagagaccacagguaggcaugga

SEQ ID NO: 1300011 - RNA, 18 nt, Human
ugaggaggcuuuuugucu

SEQ ID NO: 1300012 - RNA, 19 nt, Human
uucccaggaagucaucuuc

SEQ ID NO: 1300013 - RNA, 24 nt, Human
aaaagaaccaacauggaugcaugg

SEQ ID NO: 1300014 - RNA, 21 nt, Human
aaacaggcacucacacuuuca

SEQ ID NO: 1300015 - RNA, 19 nt, Human
aaauacaaaaagcaagccc

SEQ ID NO: 1300016 - RNA, 18 nt, Human
aaaugaagcuaacaaaua

SEQ ID NO: 1300017 - RNA, 21 nt, Human
aaaugggaauaauaagaauau

SEQ ID NO: 1300018 - RNA, 19 nt, Human
aaccugcaaagguacccuc

SEQ ID NO: 1300019 - RNA, 20 nt, Human
aacugcccacauuuuugcca

SEQ ID NO: 1300020 - RNA, 19 nt, Human
aacuuccucuucuucucug

SEQ ID NO: 1300021 - RNA, 20 nt, Human
aagaacccuccuggggaaga

SEQ ID NO: 1300022 - RNA, 18 nt, Human
aagcacaggcuucucuug

SEQ ID NO: 1300023 - RNA, 20 nt, Human
aagccuuccuuacaaacacc

SEQ ID NO: 1300024 - RNA, 24 nt, Human
aaggccacaaaaaaucagaacgua

SEQ ID NO: 1300025 - RNA, 25 nt, Human
aaguaccuucuaacuacugaucuac

SEQ ID NO: 1300026 - RNA, 24 nt, Human
aagugaucugcccaccuuggccuc

SEQ ID NO: 1300027 - RNA, 24 nt, Human
aagugauucuccugccucacccuc

SEQ ID NO: 1300028 - RNA, 23 nt, Human
aagugcaggauucagggcagggg

SEQ ID NO: 1300029 - RNA, 24 nt, Human
aauaauaaucauaaucaugaaaau

SEQ ID NO: 1300030 - RNA, 21 nt, Human
aauagaaggauucugccugga

SEQ ID NO: 1300031 - RNA, 19 nt, Human
aauaucuacuuaaucucaa

SEQ ID NO: 1300032 - RNA, 19 nt, Human
aaugcugggauuacaggug

SEQ ID NO: 1300033 - RNA, 27 nt, Human
acaaaaagcaagcccauggaugucaac

SEQ ID NO: 1300034 - RNA, 21 nt, Human
acacuugcagguuaacagccu

SEQ ID NO: 1300035 - RNA, 18 nt, Human
acagccucaggggaagac

SEQ ID NO: 1300036 - RNA, 18 nt, Human
acagcucauugcagccuc

SEQ ID NO: 1300037 - RNA, 21 nt, Human
acaggguuucaccauguuggc

SEQ ID NO: 1300038 - RNA, 24 nt, Human
acaggguuucaccauguuggccag

SEQ ID NO: 1300039 - RNA, 25 nt, Human
acaggguuucaccauguuggccagg

SEQ ID NO: 1300040 - RNA, 18 nt, Human
accacuguccuggccugu

SEQ ID NO: 1300041 - RNA, 28 nt, Human
accacuguccuggccuguuuccugucag

SEQ ID NO: 1300042 - RNA, 23 nt, Human
accauguuggccagguuggucuc

SEQ ID NO: 1300043 - RNA, 22 nt, Human
acccacucuuuugcccuuccca

SEQ ID NO: 1300044 - RNA, 25 nt, Human
acccaggcuggaagugcaguggcau

SEQ ID NO: 1300045 - RNA, 18 nt, Human
acccuccagaguagcugg

SEQ ID NO: 1300046 - RNA, 23 nt, Human
acccuguaaaagccuuccuuaca

SEQ ID NO: 1300047 - RNA, 24 nt, Human
accuggcuaauuuuuuuguauuuu

SEQ ID NO: 1300048 - RNA, 18 nt, Human
acgggguuuugauauguu

SEQ ID NO: 1300049 - RNA, 19 nt, Human
acgggguuuugauauguug

SEQ ID NO: 1300050 - RNA, 24 nt, Human
acgggguuuugauauguugcucag

SEQ ID NO: 1300051 - RNA, 28 nt, Human
acuaucuuauauucacacauguguuggu

SEQ ID NO: 1300052 - RNA, 25 nt, Human
acucuguugcccaggcuggaguuca

SEQ ID NO: 1300053 - RNA, 21 nt, Human
acugcaaccuuccucuccugg

SEQ ID NO: 1300054 - RNA, 22 nt, Human
acugcaaccuuccucuccuggg

SEQ ID NO: 1300055 - RNA, 26 nt, Human
acugugucacccaggcuggaagugca

SEQ ID NO: 1300056 - RNA, 21 nt, Human
agaccuuugaaaagggcuuau

SEQ ID NO: 1300057 - RNA, 20 nt, Human
agagaccuaccaccaggaua

SEQ ID NO: 1300058 - RNA, 19 nt, Human
agagagggugaagcucuga

SEQ ID NO: 1300059 - RNA, 23 nt, Human
agcacaaauacagcccagaaaca

SEQ ID NO: 1300060 - RNA, 21 nt, Human
agcccacauuugcauuauguc

SEQ ID NO: 1300061 - RNA, 23 nt, Human
agccccuucccaucuugucuuug

SEQ ID NO: 1300062 - RNA, 19 nt, Human
agcuggguaaugagagacc

SEQ ID NO: 1300063 - RNA, 19 nt, Human
aggaaugugguaguaaagg

SEQ ID NO: 1300064 - RNA, 24 nt, Human
aggcaaucugcccaccuuggucuc

SEQ ID NO: 1300065 - RNA, 23 nt, Human
aggcaggaguaucacuucaaccc

SEQ ID NO: 1300066 - RNA, 18 nt, Human
aggcuaaacuuuuuucuu

SEQ ID NO: 1300067 - RNA, 22 nt, Human
aggcucaggugauccuccuacc

SEQ ID NO: 1300068 - RNA, 18 nt, Human
aggcugagauagcuccca

SEQ ID NO: 1300069 - RNA, 19 nt, Human
aggcugaggcaggaguauc

SEQ ID NO: 1300070 - RNA, 24 nt, Human
agggacuacaggcaugagccacca

SEQ ID NO: 1300071 - RNA, 24 nt, Human
agggauccuccugccucagccucc

SEQ ID NO: 1300072 - RNA, 22 nt, Human
aggggacuugggacucacacag

SEQ ID NO: 1300073 - RNA, 19 nt, Human
aguaccuucuaacuacuga

SEQ ID NO: 1300074 - RNA, 23 nt, Human
aguagcuggaauuauagacgugu

SEQ ID NO: 1300075 - RNA, 18 nt, Human
aguagcugggauuacagg

SEQ ID NO: 1300076 - RNA, 23 nt, Human
agugcaguggcaugaacacagcu

SEQ ID NO: 1300077 - RNA, 24 nt, Human
agugcaguggcaugaacacagcuc

SEQ ID NO: 1300078 - RNA, 24 nt, Human
aguggcaugaucucagcuuacugc

SEQ ID NO: 1300079 - RNA, 23 nt, Human
aucauucaauaauaaucauaauc

SEQ ID NO: 1300080 - RNA, 22 nt, Human
aucccagccaaucugauugcaa

SEQ ID NO: 1300081 - RNA, 20 nt, Human
aucucacucuguugcccagg

SEQ ID NO: 1300082 - RNA, 18 nt, Human
aucucacucuuuccuuag

SEQ ID NO: 1300083 - RNA, 23 nt, Human
aucuuccuauguuguccaggcug

SEQ ID NO: 1300084 - RNA, 18 nt, Human
augaaauaagcuuagccc

SEQ ID NO: 1300085 - RNA, 24 nt, Human
augaacacagcucauugcagccuc

SEQ ID NO: 1300086 - RNA, 19 nt, Human
augcaauacuuuuuuuugg

SEQ ID NO: 1300087 - RNA, 22 nt, Human
auguacccuacaaauauguaua

SEQ ID NO: 1300088 - RNA, 20 nt, Human
augucuccugccucauaagu

SEQ ID NO: 1300089 - RNA, 19 nt, Human
auguggggauaaaagaacc

SEQ ID NO: 1300090 - RNA, 20 nt, Human
auucagggcagggguccucu

SEQ ID NO: 1300091 - RNA, 20 nt, Human
auuuggagacagaaucucac

SEQ ID NO: 1300092 - RNA, 21 nt, Human
caaaauaucacauguacccuu

SEQ ID NO: 1300093 - RNA, 24 nt, Human
caaauugcugggaugacuggcaug

SEQ ID NO: 1300094 - RNA, 18 nt, Human
caacuccauagaaauuca

SEQ ID NO: 1300095 - RNA, 21 nt, Human
caacuccauagaaauucagcu

SEQ ID NO: 1300096 - RNA, 21 nt, Human
caagcauauaaagcccauuuc

SEQ ID NO: 1300097 - RNA, 22 nt, Human
caagggauccuccugccucagc

SEQ ID NO: 1300098 - RNA, 20 nt, Human
caagugauucuccugccuca

SEQ ID NO: 1300099 - RNA, 20 nt, Human
caauggcaguuaaugcuuau

SEQ ID NO: 1300100 - RNA, 23 nt, Human
cacaaagccauccaagcauauaa

SEQ ID NO: 1300101 - RNA, 19 nt, Human
cacacaaguguuccagaag

SEQ ID NO: 1300102 - RNA, 23 nt, Human
cacacaauacacccauguaauaa

SEQ ID NO: 1300103 - RNA, 20 nt, Human
cacaguuugcacuuugaaau

SEQ ID NO: 1300104 - RNA, 24 nt, Human
caccacaccuggcuaauuuuugua

SEQ ID NO: 1300105 - RNA, 21 nt, Human
caccauguuggccagguuggu

SEQ ID NO: 1300106 - RNA, 22 nt, Human
caccauguuggccagguugguc

SEQ ID NO: 1300107 - RNA, 24 nt, Human
caccauguuggccagguuggucuc

SEQ ID NO: 1300108 - RNA, 23 nt, Human
cacccacucuuuugcccuuccca

SEQ ID NO: 1300109 - RNA, 22 nt, Human
caccuucucaagugcaggauuc

SEQ ID NO: 1300110 - RNA, 20 nt, Human
caccuuucauucagucucag

SEQ ID NO: 1300111 - RNA, 19 nt, Human
cacuacacauuguaugcau

SEQ ID NO: 1300112 - RNA, 22 nt, Human
cacucuguugcccaggcuggag

SEQ ID NO: 1300113 - RNA, 21 nt, Human
cacuuaaaaaaugcacugaga

SEQ ID NO: 1300114 - RNA, 20 nt, Human
cacuuacccugauacagaaa

SEQ ID NO: 1300115 - RNA, 19 nt, Human
cacuuugaaauggacccag

SEQ ID NO: 1300116 - RNA, 23 nt, Human
cagaagauugccuacagaggcaa

SEQ ID NO: 1300117 - RNA, 21 nt, Human
cagaaguugguuaauggacac

SEQ ID NO: 1300118 - RNA, 24 nt, Human
cagaaucucacucuguugcccagg

SEQ ID NO: 1300119 - RNA, 19 nt, Human
cagcaucacacaauacacc

SEQ ID NO: 1300120 - RNA, 21 nt, Human
cagcaucacacaauacaccca

SEQ ID NO: 1300121 - RNA, 18 nt, Human
cagccaccacgcacagcc

SEQ ID NO: 1300122 - RNA, 19 nt, Human
cagccuccugaguagcugg

SEQ ID NO: 1300123 - RNA, 24 nt, Human
cagcuacucaggaggcugaggcag

SEQ ID NO: 1300124 - RNA, 24 nt, Human
caggaggcugaggcaggaguauca

SEQ ID NO: 1300125 - RNA, 18 nt, Human
cagggccugguccaugga

SEQ ID NO: 1300126 - RNA, 24 nt, Human
cagggucucacugugucacccagg

SEQ ID NO: 1300127 - RNA, 24 nt, Human
caggguuucaccauguuggccagg

SEQ ID NO: 1300128 - RNA, 19 nt, Human
caguggcaugaucucagcu

SEQ ID NO: 1300129 - RNA, 21 nt, Human
cauaacaagcugcaaacaaga

SEQ ID NO: 1300130 - RNA, 22 nt, Human
cauaaugcugggauuacaggug

SEQ ID NO: 1300131 - RNA, 23 nt, Human
caugaacacagcucauugcagcc

SEQ ID NO: 1300132 - RNA, 22 nt, Human
caugcaccacuguccuggccug

SEQ ID NO: 1300133 - RNA, 20 nt, Human
caugggcagggccuggucca

SEQ ID NO: 1300134 - RNA, 21 nt, Human
cauuuuaaacuaacacugagu

SEQ ID NO: 1300135 - RNA, 22 nt, Human
cauuuuagaccacugagcacuu

SEQ ID NO: 1300136 - RNA, 23 nt, Human
ccaaauacaaaaagcaagcccau

SEQ ID NO: 1300137 - RNA, 18 nt, Human
ccacaaagccauccaagc

SEQ ID NO: 1300138 - RNA, 22 nt, Human
ccacaaggucaaaguugagugu

SEQ ID NO: 1300139 - RNA, 21 nt, Human
ccagagaggcaccuucucaag

SEQ ID NO: 1300140 - RNA, 19 nt, Human
ccagaguagcugggauuac

SEQ ID NO: 1300141 - RNA, 22 nt, Human
ccagaguagcugggauuacagg

SEQ ID NO: 1300142 - RNA, 23 nt, Human
ccagaguagcugggauuacaggu

SEQ ID NO: 1300143 - RNA, 24 nt, Human
ccagaguagcugggauuacaggug

SEQ ID NO: 1300144 - RNA, 23 nt, Human
ccagccaccacgcacagccacaa

SEQ ID NO: 1300145 - RNA, 20 nt, Human
ccaggguacagucaguggag

SEQ ID NO: 1300146 - RNA, 21 nt, Human
ccauaaugcugggauuacagg

SEQ ID NO: 1300147 - RNA, 24 nt, Human
cccaaguagcagggacuacaggca

SEQ ID NO: 1300148 - RNA, 22 nt, Human
cccacauuugcauuaugucuaa

SEQ ID NO: 1300149 - RNA, 19 nt, Human
cccaggcuggaguucagug

SEQ ID NO: 1300150 - RNA, 21 nt, Human
cccaucauuuguuugcuguug

SEQ ID NO: 1300151 - RNA, 21 nt, Human
cccaugguccaccuuuuuauu

SEQ ID NO: 1300152 - RNA, 24 nt, Human
ccccccguucagccagcacugagc

SEQ ID NO: 1300153 - RNA, 21 nt, Human
cccuaggccccaugcaagcuc

SEQ ID NO: 1300154 - RNA, 23 nt, Human
cccuccgaaaucuaaaaugaaag

SEQ ID NO: 1300155 - RNA, 23 nt, Human
cccugagugcccagcaugugccc

SEQ ID NO: 1300156 - RNA, 18 nt, Human
cccugauacagaaagaag

SEQ ID NO: 1300157 - RNA, 25 nt, Human
cccuucagaaagcagauccuugggc

SEQ ID NO: 1300158 - RNA, 23 nt, Human
ccuaccucagccucccaaguagc

SEQ ID NO: 1300159 - RNA, 22 nt, Human
ccuauguuguccaggcuggucu

SEQ ID NO: 1300160 - RNA, 26 nt, Human
ccuccaaauacaaaaagcaagcccau

SEQ ID NO: 1300161 - RNA, 26 nt, Human
ccuccuaccucagccucccaaguagc

SEQ ID NO: 1300162 - RNA, 19 nt, Human
ccugaguagcuggaauuau

SEQ ID NO: 1300163 - RNA, 19 nt, Human
ccugauccaugaaucucug

SEQ ID NO: 1300164 - RNA, 23 nt, Human
ccugcauagacaaaaugaaauaa

SEQ ID NO: 1300165 - RNA, 23 nt, Human
ccugccucagccuccugaguagc

SEQ ID NO: 1300166 - RNA, 24 nt, Human
ccugccucagccuccugaguagcu

SEQ ID NO: 1300167 - RNA, 23 nt, Human
ccuggguucaagugauucuccuc

SEQ ID NO: 1300168 - RNA, 23 nt, Human
ccuggguucaagugauucuccug

SEQ ID NO: 1300169 - RNA, 21 nt, Human
ccuggugcucuccuacccccc

SEQ ID NO: 1300170 - RNA, 18 nt, Human
ccuguaaaagccuuccuu

SEQ ID NO: 1300171 - RNA, 21 nt, Human
ccuguaaucccagcuacucag

SEQ ID NO: 1300172 - RNA, 20 nt, Human
ccuucugcuuuuagucauuu

SEQ ID NO: 1300173 - RNA, 22 nt, Human
ccuugggucccuuuuccuuagc

SEQ ID NO: 1300174 - RNA, 19 nt, Human
cgaaaagaaugacauugag

SEQ ID NO: 1300175 - RNA, 24 nt, Human
cgggguuuugauauguugcucagg

SEQ ID NO: 1300176 - RNA, 23 nt, Human
cucaaggccacaaaaaaucagaa

SEQ ID NO: 1300177 - RNA, 18 nt, Human
cucaagggauccuccugc

SEQ ID NO: 1300178 - RNA, 24 nt, Human
cucaagugaucugcccaccuuggc

SEQ ID NO: 1300179 - RNA, 24 nt, Human
cucacucuguugcccaggcuggag

SEQ ID NO: 1300180 - RNA, 24 nt, Human
cucaggugauccuccuaccucagc

SEQ ID NO: 1300181 - RNA, 23 nt, Human
cucccauggccaggguuccugca

SEQ ID NO: 1300182 - RNA, 20 nt, Human
cuccuggguucaagugauuc

SEQ ID NO: 1300183 - RNA, 21 nt, Human
cuccuggguucaagugauucu

SEQ ID NO: 1300184 - RNA, 23 nt, Human
cuccuggguucaagugauucucc

SEQ ID NO: 1300185 - RNA, 18 nt, Human
cucuggacuacaauuugc

SEQ ID NO: 1300186 - RNA, 23 nt, Human
cugcaaccuuccucuccuggguu

SEQ ID NO: 1300187 - RNA, 20 nt, Human
cugcagucccuacucuaagc

SEQ ID NO: 1300188 - RNA, 19 nt, Human
cuggaagugcaguggcaug

SEQ ID NO: 1300189 - RNA, 21 nt, Human
cuggacaaguucccuuuuaug

SEQ ID NO: 1300190 - RNA, 24 nt, Human
cuggaguucaguggcaugaucuca

SEQ ID NO: 1300191 - RNA, 23 nt, Human
cuuagcucaaggccacaaaaaau

SEQ ID NO: 1300192 - RNA, 22 nt, Human
cuucccaaaagaaucagacacu

SEQ ID NO: 1300193 - RNA, 24 nt, Human
gaaaauauauguaaagaccuuuga

SEQ ID NO: 1300194 - RNA, 18 nt, Human
gaacguaaauuccagccc

SEQ ID NO: 1300195 - RNA, 22 nt, Human
gaagaggccaugcaggcucagg

SEQ ID NO: 1300196 - RNA, 23 nt, Human
gaagccccuucccaucuugucuu

SEQ ID NO: 1300197 - RNA, 18 nt, Human
gaaguagcaacuccauag

SEQ ID NO: 1300198 - RNA, 23 nt, Human
gaaguggagaacaaagauaagug

SEQ ID NO: 1300199 - RNA, 24 nt, Human
gaccuaccaccaggauaguucaaa

SEQ ID NO: 1300200 - RNA, 21 nt, Human
gacuacaggcaugagccacca

SEQ ID NO: 1300201 - RNA, 22 nt, Human
gacucaagugaucugcccaccu

SEQ ID NO: 1300202 - RNA, 19 nt, Human
gagagaccuaccaccagga

SEQ ID NO: 1300203 - RNA, 19 nt, Human
gagagggugaagcucugag

SEQ ID NO: 1300204 - RNA, 22 nt, Human
gagagugaaaguuaccugaggu

SEQ ID NO: 1300205 - RNA, 24 nt, Human
gagcucaggcaaucugcccaccuu

SEQ ID NO: 1300206 - RNA, 26 nt, Human
gaguagcugggauuacaggugcacac

SEQ ID NO: 1300207 - RNA, 24 nt, Human
gagugugguggcacaugccuguaa

SEQ ID NO: 1300208 - RNA, 18 nt, Human
gauuacaggugccagcca

SEQ ID NO: 1300209 - RNA, 23 nt, Human
gcagaugcuacugcaguuuguau

SEQ ID NO: 1300210 - RNA, 24 nt, Human
gcccaggcuggaguucaguggcau

SEQ ID NO: 1300211 - RNA, 19 nt, Human
gccccuucccaucuugucu

SEQ ID NO: 1300212 - RNA, 19 nt, Human
gcucuaauaaugcaguuga

SEQ ID NO: 1300213 - RNA, 18 nt, Human
gcuggaagugcaguggca

SEQ ID NO: 1300214 - RNA, 21 nt, Human
ggaaagauguggaauguucuc

SEQ ID NO: 1300215 - RNA, 20 nt, Human
ggacagguggacaaaugcuc

SEQ ID NO: 1300216 - RNA, 19 nt, Human
ggacuacaggcaugagcca

SEQ ID NO: 1300217 - RNA, 21 nt, Human
ggcacaugccuguaaucccag

SEQ ID NO: 1300218 - RNA, 18 nt, Human
ggcagggguccucuugcc

SEQ ID NO: 1300219 - RNA, 23 nt, Human
ggcucaggugauccuccuaccuc

SEQ ID NO: 1300220 - RNA, 23 nt, Human
gggacuacaggcaugagccacca

SEQ ID NO: 1300221 - RNA, 24 nt, Human
gggauccuccugccucagccuccu

SEQ ID NO: 1300222 - RNA, 19 nt, Human
gggcagggccugguccaug

SEQ ID NO: 1300223 - RNA, 23 nt, Human
gggguuuugauauguugcucagg

SEQ ID NO: 1300224 - RNA, 22 nt, Human
ggguuucaccauguuggccagg

SEQ ID NO: 1300225 - RNA, 19 nt, Human
gguaagaacccuccugggg

SEQ ID NO: 1300226 - RNA, 24 nt, Human
gugauccuccuaccucagccuccc

SEQ ID NO: 1300227 - RNA, 19 nt, Human
gugauucuccugccucacc

SEQ ID NO: 1300228 - RNA, 22 nt, Human
gugccuccacacccagcuuaca

SEQ ID NO: 1300229 - RNA, 23 nt, Human
guggcacaugccuguaaucccag

SEQ ID NO: 1300230 - RNA, 20 nt, Human
guggcaugaggagcuguggg

SEQ ID NO: 1300231 - RNA, 20 nt, Human
guggccugcugaguauuagc

SEQ ID NO: 1300232 - RNA, 19 nt, Human
guguccuaauacauaugua

SEQ ID NO: 1300233 - RNA, 21 nt, Human
guguccuaauacauauguaug

SEQ ID NO: 1300234 - RNA, 19 nt, Human
guuguuccuggugcucucc

SEQ ID NO: 1300235 - RNA, 21 nt, Human
guuugaggugauggauaugca

SEQ ID NO: 1300236 - RNA, 22 nt, Human
uaaaagaaccaacauggaugca

SEQ ID NO: 1300237 - RNA, 26 nt, Human
uaaaagccuuccuuacaaacaccucc

SEQ ID NO: 1300238 - RNA, 18 nt, Human
uaaacaagguacagagaa

SEQ ID NO: 1300239 - RNA, 24 nt, Human
uaaaccugcaaagguacccuccga

SEQ ID NO: 1300240 - RNA, 25 nt, Human
uaaacuccugaacucaagggauccu

SEQ ID NO: 1300241 - RNA, 19 nt, Human
uaaagggagagcugaucau

SEQ ID NO: 1300242 - RNA, 22 nt, Human
uaaaguagcuucaaaacccauu

SEQ ID NO: 1300243 - RNA, 23 nt, Human
uaaaguagcuucaaaacccauuu

SEQ ID NO: 1300244 - RNA, 24 nt, Human
uaaauacuuucacuuaaaaaaugc

SEQ ID NO: 1300245 - RNA, 22 nt, Human
uaacaauaacuuauauauuuca

SEQ ID NO: 1300246 - RNA, 22 nt, Human
uaacaguuagaaguggagaaaa

SEQ ID NO: 1300247 - RNA, 21 nt, Human
uaauuaucaaguaaaaucuca

SEQ ID NO: 1300248 - RNA, 22 nt, Human
uaauuuuuguauuuuuuguaga

SEQ ID NO: 1300249 - RNA, 24 nt, Human
uaauuuuuguauuuuuuguagaga

SEQ ID NO: 1300250 - RNA, 21 nt, Human
uacaaaaagcaagcccaugga

SEQ ID NO: 1300251 - RNA, 22 nt, Human
uacaaacaccuccaguagaucc

SEQ ID NO: 1300252 - RNA, 24 nt, Human
uacagaaagaagguguaaaauuuc

SEQ ID NO: 1300253 - RNA, 23 nt, Human
uacagcccagaaacacuugcagg

SEQ ID NO: 1300254 - RNA, 22 nt, Human
uacaggcaugagccaccacacc

SEQ ID NO: 1300255 - RNA, 21 nt, Human
uaccccaaaucucagcaucac

SEQ ID NO: 1300256 - RNA, 23 nt, Human
uaccccaaaucucagcaucacac

SEQ ID NO: 1300257 - RNA, 23 nt, Human
uaccucagccucccaaguagcag

SEQ ID NO: 1300258 - RNA, 23 nt, Human
uacugcaaccuuccucuccuggg

SEQ ID NO: 1300259 - RNA, 24 nt, Human
uacuuuuuuuuggaaauaggguga

SEQ ID NO: 1300260 - RNA, 20 nt, Human
uagaauucucugauuucuug

SEQ ID NO: 1300261 - RNA, 24 nt, Human
uagacgugugccuccacacccagc

SEQ ID NO: 1300262 - RNA, 20 nt, Human
uagauccuccaaccacuuuc

SEQ ID NO: 1300263 - RNA, 22 nt, Human
uagauccuccaaccacuuucag

SEQ ID NO: 1300264 - RNA, 25 nt, Human
uagcucccauggccaggguuccuuc

SEQ ID NO: 1300265 - RNA, 22 nt, Human
uaggcacaggguuucaccaugu

SEQ ID NO: 1300266 - RNA, 24 nt, Human
uaguaggcacaggguuucaccaug

SEQ ID NO: 1300267 - RNA, 26 nt, Human
uauauaauauauaacuauauagugau

SEQ ID NO: 1300268 - RNA, 19 nt, Human
uaucaugucuccugccuca

SEQ ID NO: 1300269 - RNA, 24 nt, Human
uaucccucaucuacaaaaugggaa

SEQ ID NO: 1300270 - RNA, 24 nt, Human
uauguucccugcaccacuggugcc

SEQ ID NO: 1300271 - RNA, 24 nt, Human
uauguugcucaggcuugucucaaa

SEQ ID NO: 1300272 - RNA, 24 nt, Human
uauguuguccaggcuggucuuaaa

SEQ ID NO: 1300273 - RNA, 18 nt, Human
uauuaggaaugccuuguu

SEQ ID NO: 1300274 - RNA, 24 nt, Human
uauuuggagacagaaucucacucu

SEQ ID NO: 1300275 - RNA, 25 nt, Human
uauuuggagacagaaucucacucug

SEQ ID NO: 1300276 - RNA, 23 nt, Human
ucaaaacccauuugcaaauagau

SEQ ID NO: 1300277 - RNA, 26 nt, Human
ucaaaacccauuugcaaauagaugua

SEQ ID NO: 1300278 - RNA, 23 nt, Human
ucaaaauacauaugaguacaauc

SEQ ID NO: 1300279 - RNA, 22 nt, Human
ucaacccuccaccacuucaggu

SEQ ID NO: 1300280 - RNA, 19 nt, Human
ucaagugauucuccugccu

SEQ ID NO: 1300281 - RNA, 21 nt, Human
ucaccauguuggccagguugg

SEQ ID NO: 1300282 - RNA, 23 nt, Human
ucaccccuucagaaagcagaucc

SEQ ID NO: 1300283 - RNA, 24 nt, Human
ucacucuguugcccaggcuggagu

SEQ ID NO: 1300284 - RNA, 27 nt, Human
ucagaaagcagauccuugggcaccauu

SEQ ID NO: 1300285 - RNA, 22 nt, Human
ucagccuccugaguagcuggaa

SEQ ID NO: 1300286 - RNA, 23 nt, Human
ucagcucaccuuucauucagucu

SEQ ID NO: 1300287 - RNA, 22 nt, Human
ucagucucagacaccgugagaa

SEQ ID NO: 1300288 - RNA, 19 nt, Human
ucauauccagcuucccaaa

SEQ ID NO: 1300289 - RNA, 19 nt, Human
uccacaaagccauccaagc

SEQ ID NO: 1300290 - RNA, 20 nt, Human
uccacaauucucaccccuuc

SEQ ID NO: 1300291 - RNA, 19 nt, Human
uccacuguacaaauaaaau

SEQ ID NO: 1300292 - RNA, 24 nt, Human
uccagaguagcugggauuacaggu

SEQ ID NO: 1300293 - RNA, 25 nt, Human
uccaguagauccuccaaccacuuuc

SEQ ID NO: 1300294 - RNA, 24 nt, Human
ucccaaauugcugggaugacuggc

SEQ ID NO: 1300295 - RNA, 24 nt, Human
ucccaaguagcagggacuacaggc

SEQ ID NO: 1300296 - RNA, 18 nt, Human
ucccagccaaucugauug

SEQ ID NO: 1300297 - RNA, 23 nt, Human
ucccauaaugcugggauuacagg

SEQ ID NO: 1300298 - RNA, 25 nt, Human
ucccugcaccacuggugccuauuuc

SEQ ID NO: 1300299 - RNA, 26 nt, Human
uccuccugccucagccuccugaguag

SEQ ID NO: 1300300 - RNA, 19 nt, Human
uccuggguucaagugauuc

SEQ ID NO: 1300301 - RNA, 21 nt, Human
uccuggguucaagugauucuc

SEQ ID NO: 1300302 - RNA, 24 nt, Human
uccuggguucaagugauucuccug

SEQ ID NO: 1300303 - RNA, 19 nt, Human
uccuugaagaagcuucauu

SEQ ID NO: 1300304 - RNA, 23 nt, Human
ucucaaacuccugagcucaggca

SEQ ID NO: 1300305 - RNA, 24 nt, Human
ucucaccccuucagaaagcagauc

SEQ ID NO: 1300306 - RNA, 23 nt, Human
ucucacucuguugcccaggcugg

SEQ ID NO: 1300307 - RNA, 24 nt, Human
ucucacucuguugcccaggcugga

SEQ ID NO: 1300308 - RNA, 26 nt, Human
ucucacucuguugcccaggcuggagu

SEQ ID NO: 1300309 - RNA, 27 nt, Human
ucucacucuguugcccaggcuggaguu

SEQ ID NO: 1300310 - RNA, 22 nt, Human
ucucacugugucacccaggcug

SEQ ID NO: 1300311 - RNA, 24 nt, Human
ucucacugugucacccaggcugga

SEQ ID NO: 1300312 - RNA, 22 nt, Human
ucuccaggcucaggugauccuc

SEQ ID NO: 1300313 - RNA, 25 nt, Human
ucuccaggcucaggugauccuccua

SEQ ID NO: 1300314 - RNA, 18 nt, Human
ucucugauuucuuggugc

SEQ ID NO: 1300315 - RNA, 19 nt, Human
ucucuugugcugccagcaa

SEQ ID NO: 1300316 - RNA, 21 nt, Human
ucugcccaccuuggucuccca

SEQ ID NO: 1300317 - RNA, 19 nt, Human
ucugugaagaccuguaccc

SEQ ID NO: 1300318 - RNA, 18 nt, Human
ucuguugcccaggcugga

SEQ ID NO: 1300319 - RNA, 19 nt, Human
ucuuccuauguuguccagg

SEQ ID NO: 1300320 - RNA, 21 nt, Human
ucuuccuauguuguccaggcu

SEQ ID NO: 1300321 - RNA, 23 nt, Human
ucuuccuauguuguccaggcugg

SEQ ID NO: 1300322 - RNA, 24 nt, Human
ucuuccuauguuguccaggcuggu

SEQ ID NO: 1300323 - RNA, 23 nt, Human
ucuucuucucugagauuucuaga

SEQ ID NO: 1300324 - RNA, 21 nt, Human
ugaaauggacccagggaagag

SEQ ID NO: 1300325 - RNA, 20 nt, Human
ugaacacagcucauugcagc

SEQ ID NO: 1300326 - RNA, 24 nt, Human
ugaacucaagggauccuccugccu

SEQ ID NO: 1300327 - RNA, 20 nt, Human
ugaagaccuguacccucagu

SEQ ID NO: 1300328 - RNA, 23 nt, Human
ugaagauuauagcaauauuuuug

SEQ ID NO: 1300329 - RNA, 19 nt, Human
ugacuucauauccagcuuc

SEQ ID NO: 1300330 - RNA, 22 nt, Human
ugagaagcuuugcauacccuug

SEQ ID NO: 1300331 - RNA, 19 nt, Human
ugagaucaacccuccacca

SEQ ID NO: 1300332 - RNA, 22 nt, Human
ugagaucaacccuccaccacuu

SEQ ID NO: 1300333 - RNA, 24 nt, Human
ugagcacaaauacagcccagaaac

SEQ ID NO: 1300334 - RNA, 24 nt, Human
ugagccagcaggaaggaucucaca

SEQ ID NO: 1300335 - RNA, 19 nt, Human
ugaggcaggaguaucacuu

SEQ ID NO: 1300336 - RNA, 24 nt, Human
ugaggcaggaguaucacuucaacc

SEQ ID NO: 1300337 - RNA, 25 nt, Human
ugaggcaggaguaucacuucaaccc

SEQ ID NO: 1300338 - RNA, 18 nt, Human
ugaggucagacacugugc

SEQ ID NO: 1300339 - RNA, 18 nt, Human
ugagugggccaggguaca

SEQ ID NO: 1300340 - RNA, 24 nt, Human
ugaucugcccaccuuggccuccca

SEQ ID NO: 1300341 - RNA, 19 nt, Human
ugauuugaucacuacacau

SEQ ID NO: 1300342 - RNA, 19 nt, Human
ugcaaaaagagauuggaaa

SEQ ID NO: 1300343 - RNA, 18 nt, Human
ugcaugggcagggccugg

SEQ ID NO: 1300344 - RNA, 21 nt, Human
ugcauguaucaaaauaucaca

SEQ ID NO: 1300345 - RNA, 18 nt, Human
ugccagcaguucucuucc

SEQ ID NO: 1300346 - RNA, 19 nt, Human
ugccauucaauuucugcag

SEQ ID NO: 1300347 - RNA, 19 nt, Human
ugccauucaauuucugcag

SEQ ID NO: 1300348 - RNA, 21 nt, Human
ugcccaggcuggaguucagug

SEQ ID NO: 1300349 - RNA, 24 nt, Human
ugcccaggcuggaguucaguggca

SEQ ID NO: 1300350 - RNA, 24 nt, Human
ugccucagccuccugaguagcugg

SEQ ID NO: 1300351 - RNA, 24 nt, Human
ugccucauaaguaccacuggacaa

SEQ ID NO: 1300352 - RNA, 19 nt, Human
ugccugagcacaaauacag

SEQ ID NO: 1300353 - RNA, 28 nt, Human
ugccugagcacaaauacagcccagaaac

SEQ ID NO: 1300354 - RNA, 18 nt, Human
ugccuggauuugcaugug

SEQ ID NO: 1300355 - RNA, 24 nt, Human
ugccuguaaucccagcuacucagg

SEQ ID NO: 1300356 - RNA, 21 nt, Human
ugcucuccuaccccccguuca

SEQ ID NO: 1300357 - RNA, 20 nt, Human
ugcugagggaaacagggugg

SEQ ID NO: 1300358 - RNA, 20 nt, Human
ugcugggauuacaggugcca

SEQ ID NO: 1300359 - RNA, 23 nt, Human
ugcugugagauauccacagaacu

SEQ ID NO: 1300360 - RNA, 21 nt, Human
uggaaggaacagaaaaauuuc

SEQ ID NO: 1300361 - RNA, 24 nt, Human
uggaauuauagacgugugccucca

SEQ ID NO: 1300362 - RNA, 24 nt, Human
uggacacaaaaauacaguuagaug

SEQ ID NO: 1300363 - RNA, 18 nt, Human
uggacucaagugaucugc

SEQ ID NO: 1300364 - RNA, 22 nt, Human
uggacucaagugaucugcccac

SEQ ID NO: 1300365 - RNA, 22 nt, Human
uggagacagaaucucacucugu

SEQ ID NO: 1300366 - RNA, 19 nt, Human
uggaguucaguggcaugau

SEQ ID NO: 1300367 - RNA, 19 nt, Human
uggaguucaguggcaugau

SEQ ID NO: 1300368 - RNA, 21 nt, Human
uggcacaugccuguaauccca

SEQ ID NO: 1300369 - RNA, 22 nt, Human
uggcacaugccuguaaucccag

SEQ ID NO: 1300370 - RNA, 24 nt, Human
uggcaugaucucagcuuacugcaa

SEQ ID NO: 1300371 - RNA, 24 nt, Human
uggccagguuggucucaaacuccu

SEQ ID NO: 1300372 - RNA, 19 nt, Human
ugggacagggucucacugu

SEQ ID NO: 1300373 - RNA, 21 nt, Human
ugggagagcauuaggcugaga

SEQ ID NO: 1300374 - RNA, 18 nt, Human
ugggaucuuccuauguug

SEQ ID NO: 1300375 - RNA, 24 nt, Human
ugggaucuuccuauguuguccagg

SEQ ID NO: 1300376 - RNA, 21 nt, Human
ugggauuacaggugcacacca

SEQ ID NO: 1300377 - RNA, 19 nt, Human
ugggauuacaggugcacca

SEQ ID NO: 1300378 - RNA, 22 nt, Human
ugggauuacaggugccagccac

SEQ ID NO: 1300379 - RNA, 24 nt, Human
ugggauuacaggugccagccacca

SEQ ID NO: 1300380 - RNA, 21 nt, Human
uggggauaaaagaaccaacau

SEQ ID NO: 1300381 - RNA, 23 nt, Human
uggguucaagugauucuccugcc

SEQ ID NO: 1300382 - RNA, 19 nt, Human
ugguaagaacccuccuggg

SEQ ID NO: 1300383 - RNA, 24 nt, Human
ugguggcacaugccuguaauccca

SEQ ID NO: 1300384 - RNA, 25 nt, Human
uguaaaagccuuccuuacaaacacc

SEQ ID NO: 1300385 - RNA, 18 nt, Human
uguaauaaaccugcaaag

SEQ ID NO: 1300386 - RNA, 24 nt, Human
uguagagacgggguuuugauaugu

SEQ ID NO: 1300387 - RNA, 20 nt, Human
uguauucauaacaagcugca

SEQ ID NO: 1300388 - RNA, 24 nt, Human
uguccaggcuggucuuaaacuccu

SEQ ID NO: 1300389 - RNA, 23 nt, Human
ugucucaaacucuuggacucaac

SEQ ID NO: 1300390 - RNA, 25 nt, Human
ugugucacccaggcuggaagugcag

SEQ ID NO: 1300391 - RNA, 24 nt, Human
uguguguuguuccuggugcucucc

SEQ ID NO: 1300392 - RNA, 25 nt, Human
uguuaugacaccuccaaauacaaaa

SEQ ID NO: 1300393 - RNA, 24 nt, Human
uuacugcaaccuuccucuccuggg

SEQ ID NO: 1300394 - RNA, 18 nt, Human
uuagcccacccacaggug

SEQ ID NO: 1300395 - RNA, 22 nt, Human
uuaggcugagauagcucccaug

SEQ ID NO: 1300396 - RNA, 24 nt, Human
uuaguaggcacaggguuucaccau

SEQ ID NO: 1300397 - RNA, 21 nt, Human
uucaagugauucuccugccuc

SEQ ID NO: 1300398 - RNA, 23 nt, Human
uucaagugauucuccugccucac

SEQ ID NO: 1300399 - RNA, 18 nt, Human
uucaaguuaguuuacccu

SEQ ID NO: 1300400 - RNA, 24 nt, Human
uucacccuguaaaagccuuccuua

SEQ ID NO: 1300401 - RNA, 27 nt, Human
uucauucauaccccaaaucucagcauc

SEQ ID NO: 1300402 - RNA, 19 nt, Human
uugcagccucuacaucucc

SEQ ID NO: 1300403 - RNA, 21 nt, Human
uugccauucaauuucugcagu

SEQ ID NO: 1300404 - RNA, 21 nt, Human
uugcugggaugacuggcaugc

SEQ ID NO: 1300405 - RNA, 22 nt, Human
uuguagagacgggguuuugaua

SEQ ID NO: 1300406 - RNA, 24 nt, Human
uuguagagacgggguuuugauaug

SEQ ID NO: 1300407 - RNA, 19 nt, Human
uuucaccauguuggccagg

SEQ ID NO: 1300408 - RNA, 20 nt, Human
uuucaccauguuggccaggu

SEQ ID NO: 1300409 - RNA, 23 nt, Human
uuugccaggucccugagugccca

SEQ ID NO: 1300410 - RNA, 20 nt, Human
uuuguagagacgggguuuug

SEQ ID NO: 1300411 - RNA, 24 nt, Human
uuuguagagacgggguuuugauau

SEQ ID NO: 1300412 - RNA, 18 nt, Human
uuuucacauugcuaaguu

SEQ ID NO: 1300413 - RNA, 19 nt, Human
uuuugauauguugcucagg

SEQ ID NO: 1300414 - RNA, 24 nt, Human
uuuuuaguaggcacaggguuucac

SEQ ID NO: 1300415 - RNA, 20 nt, Human
uuuuuguauuuuuuguagag

SEQ ID NO: 1300416 - RNA, 23 nt, Human
uuuuuguauuuuuuguagagacg

SEQ ID NO: 1300417 - RNA, 21 nt, Human
uuuuuuguagagacgggguuu

SEQ ID NO: 1300418 - RNA, 22 nt, Human
uuuuuuguauuuuuaguaggca

SEQ ID NO: 1300419 - RNA, 19 nt, Human
agcuguucaggcuuuuuag

SEQ ID NO: 1300420 - RNA, 24 nt, Human
agcuuccucagcuguucaggcuuu

SEQ ID NO: 1300421 - RNA, 21 nt, Human
aggcuuuuuaggagacucuga

SEQ ID NO: 1300422 - RNA, 23 nt, Human
caaaauggcuccucaggcucuca

SEQ ID NO: 1300423 - RNA, 19 nt, Human
caacacuccaaugaagagc

SEQ ID NO: 1300424 - RNA, 23 nt, Human
cagcuguucaggcuuuuuaggag

SEQ ID NO: 1300425 - RNA, 19 nt, Human
cccauugcucaaaauggcu

SEQ ID NO: 1300426 - RNA, 18 nt, Human
ccccauugcucaaaaugg

SEQ ID NO: 1300427 - RNA, 18 nt, Human
gagcuuccucagcuguuc

SEQ ID NO: 1300428 - RNA, 23 nt, Human
ucaggcuuuuuaggagacucuga

SEQ ID NO: 1300429 - RNA, 18 nt, Human
uuccucagcuguucaggc

SEQ ID NO: 1300430 - RNA, 23 nt, Human
aggucuguggagcgcagccagca

SEQ ID NO: 1300431 - RNA, 25 nt, Human
cagccagcaccuccacugccaagau

SEQ ID NO: 1300432 - RNA, 20 nt, Human
cagcuccucagccucagccu

SEQ ID NO: 1300433 - RNA, 23 nt, Human
ccggcggggacacagcucucccu

SEQ ID NO: 1300434 - RNA, 22 nt, Human
ccucagccucagccugcugcuu

SEQ ID NO: 1300435 - RNA, 23 nt, Human
ccucagccugcugcuuccuuuuu

SEQ ID NO: 1300436 - RNA, 25 nt, Human
ccuccugcccgggcuggcucuggga

SEQ ID NO: 1300437 - RNA, 22 nt, Human
cgcagccagcaccuccacugcc

SEQ ID NO: 1300438 - RNA, 20 nt, Human
cggcaggggggguggggggc

SEQ ID NO: 1300439 - RNA, 26 nt, Human
gacacagcucucccuuguuccugacc

SEQ ID NO: 1300440 - RNA, 21 nt, Human
gcagccagcaccuccacugcc

SEQ ID NO: 1300441 - RNA, 18 nt, Human
gcaggggggguggggggc

SEQ ID NO: 1300442 - RNA, 21 nt, Human
gcccgggcuggcucuggucgc

SEQ ID NO: 1300443 - RNA, 21 nt, Human
gcggggacacagcucucccuu

SEQ ID NO: 1300444 - RNA, 21 nt, Human
ggcaggggggguggggggcgc

SEQ ID NO: 1300445 - RNA, 20 nt, Human
gggguggggggcgccggcgg

SEQ ID NO: 1300446 - RNA, 25 nt, Human
uccccggcaggggggguggggggcg

SEQ ID NO: 1300447 - RNA, 21 nt, Human
ucccuuguuccugccgccagc

SEQ ID NO: 1300448 - RNA, 23 nt, Human
uccucagccucagccugcugcuu

SEQ ID NO: 1300449 - RNA, 19 nt, Human
ugcccgggcuggcucuggu

SEQ ID NO: 1300450 - RNA, 25 nt, Human
uggagcgcagccagcaccuccacug

SEQ ID NO: 1300451 - RNA, 18 nt, Human
uggggggcgccggcgggg

SEQ ID NO: 1300452 - RNA, 21 nt, Human
uuccugccgccagcuccucag

SEQ ID NO: 1300453 - RNA, 24 nt, Human
aaaaaaaaaaacagugccuucaga

SEQ ID NO: 1300454 - RNA, 18 nt, Human
aaaaaaaacagugccuuc

SEQ ID NO: 1300455 - RNA, 23 nt, Human
aaaaagacagagcuauuaacuua

SEQ ID NO: 1300456 - RNA, 24 nt, Human
aaaacauuuaauacauaaaaaagc

SEQ ID NO: 1300457 - RNA, 20 nt, Human
aacaccuagagaaagaacuc

SEQ ID NO: 1300458 - RNA, 24 nt, Human
aagaaagugaaaaaaugaggccgg

SEQ ID NO: 1300459 - RNA, 19 nt, Human
aagcaugcacccaccaugc

SEQ ID NO: 1300460 - RNA, 21 nt, Human
aagcaugcacccaccaugccc

SEQ ID NO: 1300461 - RNA, 25 nt, Human
aagcgauccucccaccucagccucc

SEQ ID NO: 1300462 - RNA, 24 nt, Human
aagggggaaaaaaaaacccaaaag

SEQ ID NO: 1300463 - RNA, 23 nt, Human
aaggguuuuuuuuucuuaaggga

SEQ ID NO: 1300464 - RNA, 21 nt, Human
aaucugcccacuuuggccacc

SEQ ID NO: 1300465 - RNA, 27 nt, Human
aauugcucucccggauuuaaucccuac

SEQ ID NO: 1300466 - RNA, 24 nt, Human
acagaguaagacucugucucaaaa

SEQ ID NO: 1300467 - RNA, 18 nt, Human
acaggguuucaccauguu

SEQ ID NO: 1300468 - RNA, 19 nt, Human
acaggguuucaccauguug

SEQ ID NO: 1300469 - RNA, 24 nt, Human
acaggguuucaccauguugcccag

SEQ ID NO: 1300470 - RNA, 24 nt, Human
accauguugcccaggcuggucucg

SEQ ID NO: 1300471 - RNA, 25 nt, Human
accauguugcccaggcuggucucga

SEQ ID NO: 1300472 - RNA, 23 nt, Human
accucagccuccucaguagcugg

SEQ ID NO: 1300473 - RNA, 21 nt, Human
agaagcauggguaaaagggcc

SEQ ID NO: 1300474 - RNA, 21 nt, Human
agaaugcagaaaaugccuucc

SEQ ID NO: 1300475 - RNA, 23 nt, Human
agacaggguuucaccauguugcc

SEQ ID NO: 1300476 - RNA, 24 nt, Human
agccugggugacagaguaagacuc

SEQ ID NO: 1300477 - RNA, 23 nt, Human
agcuuuuuuuuuguauuuuuggu

SEQ ID NO: 1300478 - RNA, 22 nt, Human
aggcaagaaugcagaaaaugcc

SEQ ID NO: 1300479 - RNA, 18 nt, Human
aggugggagcgcaguggu

SEQ ID NO: 1300480 - RNA, 24 nt, Human
aguggugcagaucacgaggucagg

SEQ ID NO: 1300481 - RNA, 19 nt, Human
auagcuagagacuaaagaa

SEQ ID NO: 1300482 - RNA, 22 nt, Human
auagugcaaacaccaaaaagac

SEQ ID NO: 1300483 - RNA, 20 nt, Human
augcagaaaaugccuuccuc

SEQ ID NO: 1300484 - RNA, 19 nt, Human
auucaagguugcuaugagg

SEQ ID NO: 1300485 - RNA, 24 nt, Human
auugcaguggugccaucucagcuc

SEQ ID NO: 1300486 - RNA, 24 nt, Human
caaaagaaacacuucgauucucau

SEQ ID NO: 1300487 - RNA, 23 nt, Human
caaccuccaccucccaggcucaa

SEQ ID NO: 1300488 - RNA, 24 nt, Human
caaccuccaccucccaggcucaag

SEQ ID NO: 1300489 - RNA, 24 nt, Human
caagaccauccuggcuaagacggu

SEQ ID NO: 1300490 - RNA, 22 nt, Human
caagcaugcacccaccaugccc

SEQ ID NO: 1300491 - RNA, 27 nt, Human
caagcgauccucccaccucagccuccu

SEQ ID NO: 1300492 - RNA, 22 nt, Human
cacagcaaggugguuuuaucag

SEQ ID NO: 1300493 - RNA, 18 nt, Human
caccaaaaagacagagcu

SEQ ID NO: 1300494 - RNA, 24 nt, Human
caccauguugcccaggcuggucuc

SEQ ID NO: 1300495 - RNA, 19 nt, Human
cacccaccaugcccagcuu

SEQ ID NO: 1300496 - RNA, 21 nt, Human
cacugcaaccuccaccuccca

SEQ ID NO: 1300497 - RNA, 23 nt, Human
cagaacaccuagagaaagaacuc

SEQ ID NO: 1300498 - RNA, 23 nt, Human
cagaacaccuagagaaaggggag

SEQ ID NO: 1300499 - RNA, 19 nt, Human
cagagcgcaagcaaucugc

SEQ ID NO: 1300500 - RNA, 19 nt, Human
cagagcgcaagcaaucugc

SEQ ID NO: 1300501 - RNA, 18 nt, Human
cagcaaggugguuuuauc

SEQ ID NO: 1300502 - RNA, 24 nt, Human
caggguuucaccauguugcccagg

SEQ ID NO: 1300503 - RNA, 24 nt, Human
caguaaucaaacaggcucugccag

SEQ ID NO: 1300504 - RNA, 19 nt, Human
cagucucccaaaaaguuau

SEQ ID NO: 1300505 - RNA, 21 nt, Human
cauagcuagagacuaaagaaa

SEQ ID NO: 1300506 - RNA, 23 nt, Human
cauguugcccaggcuggucucga

SEQ ID NO: 1300507 - RNA, 24 nt, Human
cauguugcccaggcuggucucgag

SEQ ID NO: 1300508 - RNA, 26 nt, Human
cauguugcccaggcuggucucgagcu

SEQ ID NO: 1300509 - RNA, 22 nt, Human
ccaccucagccuccucaguagc

SEQ ID NO: 1300510 - RNA, 24 nt, Human
ccaccucccaggcucaagcgaucc

SEQ ID NO: 1300511 - RNA, 20 nt, Human
cccaggcucaagcgauccuc

SEQ ID NO: 1300512 - RNA, 21 nt, Human
ccccagagcuugguacaccuc

SEQ ID NO: 1300513 - RNA, 21 nt, Human
cccuaucccccaucacacaca

SEQ ID NO: 1300514 - RNA, 22 nt, Human
ccgccuaacucugcaacagaaa

SEQ ID NO: 1300515 - RNA, 24 nt, Human
ccucccaccucagccuccucagua

SEQ ID NO: 1300516 - RNA, 22 nt, Human
ccugggugacagaguaagacuc

SEQ ID NO: 1300517 - RNA, 21 nt, Human
cgccuggccugaccucaauuu

SEQ ID NO: 1300518 - RNA, 24 nt, Human
cucaagcgauccucccaccucagc

SEQ ID NO: 1300519 - RNA, 24 nt, Human
cucaauacuuaacucuaccucuac

SEQ ID NO: 1300520 - RNA, 24 nt, Human
cucacugcaaccuccaccucccag

SEQ ID NO: 1300521 - RNA, 24 nt, Human
cucagccuccucaguagcugggac

SEQ ID NO: 1300522 - RNA, 25 nt, Human
cucccaggcucaagcgauccuccca

SEQ ID NO: 1300523 - RNA, 25 nt, Human
cucucagaacaccuagagaaagaac

SEQ ID NO: 1300524 - RNA, 19 nt, Human
cucugucucaaaaaaaaaa

SEQ ID NO: 1300525 - RNA, 23 nt, Human
cugaucagaaauauuugucuguu

SEQ ID NO: 1300526 - RNA, 22 nt, Human
cugcaacagaaacauuucccag

SEQ ID NO: 1300527 - RNA, 23 nt, Human
cugcaaccuccaccucccaggcu

SEQ ID NO: 1300528 - RNA, 18 nt, Human
gacaagcaugcacccacc

SEQ ID NO: 1300529 - RNA, 24 nt, Human
gacagaguaagacucugucucaaa

SEQ ID NO: 1300530 - RNA, 20 nt, Human
gaugagguagaaaaggguag

SEQ ID NO: 1300531 - RNA, 22 nt, Human
gcaaccuccaccucccaggcuc

SEQ ID NO: 1300532 - RNA, 18 nt, Human
gcagaaaaugccuuccuc

SEQ ID NO: 1300533 - RNA, 20 nt, Human
gccuaacucugcaacagaaa

SEQ ID NO: 1300534 - RNA, 22 nt, Human
gccuaacucugcaacagaaaca

SEQ ID NO: 1300535 - RNA, 23 nt, Human
gcuggaauaacaggagugaacca

SEQ ID NO: 1300536 - RNA, 19 nt, Human
ggacuaucugaucagaaau

SEQ ID NO: 1300537 - RNA, 23 nt, Human
gggaaaaaaaaacccaaaagaaa

SEQ ID NO: 1300538 - RNA, 23 nt, Human
gguauaaaagcaauauccagaaa

SEQ ID NO: 1300539 - RNA, 21 nt, Human
ggugcagaucacgaggucagg

SEQ ID NO: 1300540 - RNA, 21 nt, Human
guagagacaggguuucaccau

SEQ ID NO: 1300541 - RNA, 22 nt, Human
guagagacaggguuucaccaug

SEQ ID NO: 1300542 - RNA, 19 nt, Human
gugcagaucacgaggucag

SEQ ID NO: 1300543 - RNA, 18 nt, Human
guuacuuuaaaaugcugu

SEQ ID NO: 1300544 - RNA, 24 nt, Human
guuucaccauguugcccaggcugg

SEQ ID NO: 1300545 - RNA, 28 nt, Human
uaaaaaaaaaaacagugccuucagauaa

SEQ ID NO: 1300546 - RNA, 23 nt, Human
uaaaaaagcacaauuaaaaagua

SEQ ID NO: 1300547 - RNA, 23 nt, Human
uaaaugacacaguaaagguggaa

SEQ ID NO: 1300548 - RNA, 18 nt, Human
uaacucccuaucccccau

SEQ ID NO: 1300549 - RNA, 18 nt, Human
uaagaaggaagccugacc

SEQ ID NO: 1300550 - RNA, 25 nt, Human
uacaacaaaugaugagguagaaaag

SEQ ID NO: 1300551 - RNA, 19 nt, Human
uaccccagagcuugguaca

SEQ ID NO: 1300552 - RNA, 22 nt, Human
uagagacaggguuucaccaugu

SEQ ID NO: 1300553 - RNA, 18 nt, Human
uagcgaaagacugaaguu

SEQ ID NO: 1300554 - RNA, 21 nt, Human
uaggcaagaaugcagaaaaug

SEQ ID NO: 1300555 - RNA, 22 nt, Human
uaggggcucuaauaagauguua

SEQ ID NO: 1300556 - RNA, 21 nt, Human
ucaaagaaagaauaccuaaac

SEQ ID NO: 1300557 - RNA, 24 nt, Human
ucaagacuggcacucaauacuuaa

SEQ ID NO: 1300558 - RNA, 22 nt, Human
ucaagguugcuaugaggucuac

SEQ ID NO: 1300559 - RNA, 21 nt, Human
ucaccauguugcccaggcugg

SEQ ID NO: 1300560 - RNA, 22 nt, Human
ucacccaggugggagcgcagga

SEQ ID NO: 1300561 - RNA, 18 nt, Human
ucacgaggucaggagauc

SEQ ID NO: 1300562 - RNA, 24 nt, Human
ucacgaggucaggagaucaagacc

SEQ ID NO: 1300563 - RNA, 24 nt, Human
ucacugcaaccuccaccucccagg

SEQ ID NO: 1300564 - RNA, 25 nt, Human
ucacugcaaccuccaccucccaggc

SEQ ID NO: 1300565 - RNA, 27 nt, Human
ucacugcaaccuccaccucccaggcuc

SEQ ID NO: 1300566 - RNA, 25 nt, Human
ucagcucacugcaaccuccaccucc

SEQ ID NO: 1300567 - RNA, 25 nt, Human
ucaguagcugggacaagccgggguc

SEQ ID NO: 1300568 - RNA, 18 nt, Human
ucaucuagugagcuggcc

SEQ ID NO: 1300569 - RNA, 24 nt, Human
uccagccugggugacagaguaaga

SEQ ID NO: 1300570 - RNA, 21 nt, Human
ucccaggcucaagcgauccuc

SEQ ID NO: 1300571 - RNA, 21 nt, Human
uccuggcuaagacggugaaac

SEQ ID NO: 1300572 - RNA, 20 nt, Human
uccuuuuuuuugagacagag

SEQ ID NO: 1300573 - RNA, 26 nt, Human
ucugcaacagaaacauuucccaggac

SEQ ID NO: 1300574 - RNA, 19 nt, Human
ucugucacccaggugggag

SEQ ID NO: 1300575 - RNA, 24 nt, Human
ucugucacccaggugggagcgcag

SEQ ID NO: 1300576 - RNA, 22 nt, Human
ugaaaaaaugaggcaaacuaca

SEQ ID NO: 1300577 - RNA, 30 nt, Human
ugaaaagaaagugaaaaaaugaggcaaaac

SEQ ID NO: 1300578 - RNA, 19 nt, Human
ugagacagcgucucuguca

SEQ ID NO: 1300579 - RNA, 22 nt, Human
ugagguauucugaauauauacc

SEQ ID NO: 1300580 - RNA, 21 nt, Human
ugaugagguagaaaaggguag

SEQ ID NO: 1300581 - RNA, 25 nt, Human
ugauuuuaaaagggggaaaaaaaaa

SEQ ID NO: 1300582 - RNA, 21 nt, Human
ugcccaggcuggucucgagcu

SEQ ID NO: 1300583 - RNA, 25 nt, Human
ugccuuccucuuuccucaucuagug

SEQ ID NO: 1300584 - RNA, 22 nt, Human
ugcuaugaggucuaccuugcca

SEQ ID NO: 1300585 - RNA, 20 nt, Human
uggaaggguuuuuuuuucuu

SEQ ID NO: 1300586 - RNA, 24 nt, Human
uggaauaacaggagugaaccaccg

SEQ ID NO: 1300587 - RNA, 28 nt, Human
uggauugcaguggugccauccuagcacg

SEQ ID NO: 1300588 - RNA, 21 nt, Human
ugggacaagcaugcacccacc

SEQ ID NO: 1300589 - RNA, 23 nt, Human
ugguagagacaggguuucaccau

SEQ ID NO: 1300590 - RNA, 24 nt, Human
ugguagagacaggguuucaccaug

SEQ ID NO: 1300591 - RNA, 24 nt, Human
uggugccaucucagcucacugcaa

SEQ ID NO: 1300592 - RNA, 22 nt, Human
uguaagaaggaagccugaccuc

SEQ ID NO: 1300593 - RNA, 22 nt, Human
uguauacugcuuuuuauauaug

SEQ ID NO: 1300594 - RNA, 23 nt, Human
uuaucuaaagauacuguaguuac

SEQ ID NO: 1300595 - RNA, 21 nt, Human
uugagacagagucucugucac

SEQ ID NO: 1300596 - RNA, 21 nt, Human
uugagacagcgucucugucac

SEQ ID NO: 1300597 - RNA, 24 nt, Human
uugguagagacaggguuucaccau

SEQ ID NO: 1300598 - RNA, 19 nt, Human
uuuaaaagggggaaaaaaa

SEQ ID NO: 1300599 - RNA, 24 nt, Human
uuucaccauguugcccaggcuggu

SEQ ID NO: 1300600 - RNA, 23 nt, Human
uuucuuagugcugagacaacagg

SEQ ID NO: 1300601 - RNA, 22 nt, Human
uuuuugguagagacaggguuuc

SEQ ID NO: 1300602 - RNA, 24 nt, Human
uuuuugguagagacaggguuucac

SEQ ID NO: 1300603 - RNA, 21 nt, Human
uuuuuguauuuuugguagaga

SEQ ID NO: 1300604 - RNA, 21 nt, Human
uuuuuuguauuuuugguagag

SEQ ID NO: 1300605 - RNA, 24 nt, Human
uuuuuuguauuuuugguagagaca

SEQ ID NO: 1300606 - RNA, 24 nt, Human
uuuuuuuuguauuuuugguagaga

SEQ ID NO: 1300607 - RNA, 22 nt, Human
uuuuuuuuucuuaagggagacc

SEQ ID NO: 1300608 - RNA, 24 nt, Human
auaccaggucccugaggguuugag

SEQ ID NO: 1300609 - RNA, 23 nt, Human
aucauuugcuucuuuuuuuuuuu

SEQ ID NO: 1300610 - RNA, 19 nt, Human
auggagggagcugauuaca

SEQ ID NO: 1300611 - RNA, 22 nt, Human
caaauagcaguuguugugugaa

SEQ ID NO: 1300612 - RNA, 20 nt, Human
caaugcaugcagaauauaua

SEQ ID NO: 1300613 - RNA, 21 nt, Human
caggaagcaacuacuaaccuu

SEQ ID NO: 1300614 - RNA, 20 nt, Human
cuuagggcuggggaacaaaa

SEQ ID NO: 1300615 - RNA, 22 nt, Human
gggaacaaaagggaagagaugg

SEQ ID NO: 1300616 - RNA, 20 nt, Human
gggcuggggaacaaaaggga

SEQ ID NO: 1300617 - RNA, 18 nt, Human
uaaacacaggaagcaacu

SEQ ID NO: 1300618 - RNA, 24 nt, Human
uauagggagagguuauagaucugg

SEQ ID NO: 1300619 - RNA, 24 nt, Human
ucauuugcuucuuuuuuuuuuuuu

SEQ ID NO: 1300620 - RNA, 29 nt, Human
ucauuugcuucuuuuuuuuuuuuuccuuu

SEQ ID NO: 1300621 - RNA, 21 nt, Human
uccguacacaucugcugauug

SEQ ID NO: 1300622 - RNA, 18 nt, Human
ugaagagggccauggaga

SEQ ID NO: 1300623 - RNA, 22 nt, Human
ugucuugguaucauuugcuucu

SEQ ID NO: 1300624 - RNA, 22 nt, Human
uugagccuacuucaaugcaugc

SEQ ID NO: 1300625 - RNA, 19 nt, Human
uuggguaauaaggcugaag

SEQ ID NO: 1300626 - RNA, 22 nt, Human
aaaaacacaagcauuugacaag

SEQ ID NO: 1300627 - RNA, 22 nt, Human
aaaaagaggauucauacccuag

SEQ ID NO: 1300628 - RNA, 23 nt, Human
aaauaaugcaaguucuggcccuc

SEQ ID NO: 1300629 - RNA, 19 nt, Human
aaauacacaccugugcaca

SEQ ID NO: 1300630 - RNA, 19 nt, Human
aacauuuuccuaacaagua

SEQ ID NO: 1300631 - RNA, 23 nt, Human
aacuaucagaauuaaguaagcaa

SEQ ID NO: 1300632 - RNA, 19 nt, Human
aagcacauaaggguugcuu

SEQ ID NO: 1300633 - RNA, 20 nt, Human
aagcuuuugagagcaaacca

SEQ ID NO: 1300634 - RNA, 26 nt, Human
aaguacuaaaaugcugcaaauuaacu

SEQ ID NO: 1300635 - RNA, 20 nt, Human
aagugaagaaguaaaguuuu

SEQ ID NO: 1300636 - RNA, 21 nt, Human
aaguguaaaaacacaagcauu

SEQ ID NO: 1300637 - RNA, 31 nt, Human
acacacacacgcaaacacacacacacacaca

SEQ ID NO: 1300638 - RNA, 33 nt, Human
acacacacgcaaacacacacacacacacacagu

SEQ ID NO: 1300639 - RNA, 24 nt, Human
acacacgcaaacacacacacacac

SEQ ID NO: 1300640 - RNA, 19 nt, Human
acauaguccucucuguuuc

SEQ ID NO: 1300641 - RNA, 26 nt, Human
accugugcacauacacacacacgcaa

SEQ ID NO: 1300642 - RNA, 18 nt, Human
acucacaaacauuuuccu

SEQ ID NO: 1300643 - RNA, 23 nt, Human
acuuuuuucugugcgcucugcuu

SEQ ID NO: 1300644 - RNA, 22 nt, Human
agaaaaaugaucagaaccugaa

SEQ ID NO: 1300645 - RNA, 18 nt, Human
agaaucacuggggagaag

SEQ ID NO: 1300646 - RNA, 20 nt, Human
agguaaguggaagcuguugg

SEQ ID NO: 1300647 - RNA, 21 nt, Human
aguguucuguaaguuucccuu

SEQ ID NO: 1300648 - RNA, 22 nt, Human
auagcugaagaggguuaaguau

SEQ ID NO: 1300649 - RNA, 23 nt, Human
auguccagugcuccagacugaau

SEQ ID NO: 1300650 - RNA, 22 nt, Human
augucuccugucagagugagca

SEQ ID NO: 1300651 - RNA, 22 nt, Human
caaaaugaucccugauuuauga

SEQ ID NO: 1300652 - RNA, 27 nt, Human
cacacaaauacacaccugugcacauac

SEQ ID NO: 1300653 - RNA, 18 nt, Human
cacacacacacacacaca

SEQ ID NO: 1300654 - RNA, 22 nt, Human
cacacacacgcaaacacacaca

SEQ ID NO: 1300655 - RNA, 22 nt, Human
ccacauaguccucucuguuucu

SEQ ID NO: 1300656 - RNA, 25 nt, Human
ccacauaguccucucuguuucugug

SEQ ID NO: 1300657 - RNA, 19 nt, Human
ccagucucucuuaugaguc

SEQ ID NO: 1300658 - RNA, 23 nt, Human
ccugaauuuuaacagagaaaggg

SEQ ID NO: 1300659 - RNA, 20 nt, Human
cugaccaaaaauaaauaaua

SEQ ID NO: 1300660 - RNA, 21 nt, Human
cugcugggguuaacuaugugu

SEQ ID NO: 1300661 - RNA, 22 nt, Human
cuuauaaaccccaacuucuugc

SEQ ID NO: 1300662 - RNA, 20 nt, Human
cuuuccacauaguccucucu

SEQ ID NO: 1300663 - RNA, 19 nt, Human
gaaaaaaaaaaaaaagagg

SEQ ID NO: 1300664 - RNA, 21 nt, Human
gaauggucuuucaccaauaaa

SEQ ID NO: 1300665 - RNA, 25 nt, Human
gcacauacacacacacgcaaacaca

SEQ ID NO: 1300666 - RNA, 25 nt, Human
gcaggcuucccugcugguaaggcuu

SEQ ID NO: 1300667 - RNA, 20 nt, Human
gguaugccauaaaguaugcc

SEQ ID NO: 1300668 - RNA, 18 nt, Human
guaaugcauucaaagccc

SEQ ID NO: 1300669 - RNA, 23 nt, Human
gugaaaaaaaaaaaaaagaggau

SEQ ID NO: 1300670 - RNA, 18 nt, Human
uaaaaaagcucaauacaa

SEQ ID NO: 1300671 - RNA, 21 nt, Human
uaaaaacacaagcauuugaca

SEQ ID NO: 1300672 - RNA, 25 nt, Human
uaaaaacacaagcauuugacaaggu

SEQ ID NO: 1300673 - RNA, 23 nt, Human
uaaaaagaaagaugacccugaca

SEQ ID NO: 1300674 - RNA, 19 nt, Human
uaaaauuguuuugaaauau

SEQ ID NO: 1300675 - RNA, 22 nt, Human
uaacugguaacuaaauucauaa

SEQ ID NO: 1300676 - RNA, 18 nt, Human
uaaguauagaucucagag

SEQ ID NO: 1300677 - RNA, 18 nt, Human
uaauagcugaagaggguu

SEQ ID NO: 1300678 - RNA, 19 nt, Human
uaaugcaaguucuggcccu

SEQ ID NO: 1300679 - RNA, 23 nt, Human
uacaaguacuaaaaugcugcaaa

SEQ ID NO: 1300680 - RNA, 19 nt, Human
uacacacaaacacaagugu

SEQ ID NO: 1300681 - RNA, 26 nt, Human
uacacacacacgcaaacacacacaca

SEQ ID NO: 1300682 - RNA, 22 nt, Human
uacccaauuaguagagaguuua

SEQ ID NO: 1300683 - RNA, 31 nt, Human
uaccuuauaaaccccaacuucuugcuaaauu

SEQ ID NO: 1300684 - RNA, 26 nt, Human
uagacacacaaauacacaccugugca

SEQ ID NO: 1300685 - RNA, 18 nt, Human
uauaaucaaauguuaacu

SEQ ID NO: 1300686 - RNA, 19 nt, Human
uauaaucaaauguuaacuc

SEQ ID NO: 1300687 - RNA, 19 nt, Human
uaucgcccaccaaaaugaa

SEQ ID NO: 1300688 - RNA, 22 nt, Human
uauguaaugcauucaaagcccc

SEQ ID NO: 1300689 - RNA, 25 nt, Human
uauuauguaaugcauucaaagcccc

SEQ ID NO: 1300690 - RNA, 24 nt, Human
ucaaagcccccaaaguuuuccaag

SEQ ID NO: 1300691 - RNA, 20 nt, Human
ucaaauguuaacucaauaau

SEQ ID NO: 1300692 - RNA, 22 nt, Human
ucagaaccugaauuuuaacaga

SEQ ID NO: 1300693 - RNA, 21 nt, Human
uccacagugaaaacccugaau

SEQ ID NO: 1300694 - RNA, 23 nt, Human
uccacagugaaaacccugaauaa

SEQ ID NO: 1300695 - RNA, 24 nt, Human
uccacagugaaaacccugaauaaa

SEQ ID NO: 1300696 - RNA, 22 nt, Human
ucucagagaccaaauaacugcu

SEQ ID NO: 1300697 - RNA, 19 nt, Human
ucuguagaguuagcugaug

SEQ ID NO: 1300698 - RNA, 21 nt, Human
ugaauuuucagaagaaggauc

SEQ ID NO: 1300699 - RNA, 19 nt, Human
ugagugcauuuuguauuuc

SEQ ID NO: 1300700 - RNA, 24 nt, Human
ugcacugcccagcuucuaacuacc

SEQ ID NO: 1300701 - RNA, 25 nt, Human
ugcuuuauuuauguccagugcucca

SEQ ID NO: 1300702 - RNA, 20 nt, Human
ugcuuuccauugggggaagg

SEQ ID NO: 1300703 - RNA, 23 nt, Human
uggaauggucuuucaccaauaaa

SEQ ID NO: 1300704 - RNA, 25 nt, Human
uggcuuagaaaaaugaucagaaccu

SEQ ID NO: 1300705 - RNA, 20 nt, Human
uggggugaaaaaaaaaaaaa

SEQ ID NO: 1300706 - RNA, 22 nt, Human
uggggugaaaaaaaaaaaaaag

SEQ ID NO: 1300707 - RNA, 21 nt, Human
uguaauucccacguguguaua

SEQ ID NO: 1300708 - RNA, 24 nt, Human
uguaucgcccaccaaaaugaaauc

SEQ ID NO: 1300709 - RNA, 22 nt, Human
ugugcacauacacacacacgca

SEQ ID NO: 1300710 - RNA, 26 nt, Human
ugugcacauacacacacacgcaaaca

SEQ ID NO: 1300711 - RNA, 18 nt, Human
uuacucguuuucccacaa

SEQ ID NO: 1300712 - RNA, 21 nt, Human
uucaaagcccccaaaguuuuc

SEQ ID NO: 1300713 - RNA, 25 nt, Human
uucaagacccugaacaaacugcaaa

SEQ ID NO: 1300714 - RNA, 19 nt, Human
uucaaguagauugaguuua

SEQ ID NO: 1300715 - RNA, 24 nt, Human
uucauaaaguacuuugaaaguuua

SEQ ID NO: 1300716 - RNA, 21 nt, Human
uuccugguggaugcacuugag

SEQ ID NO: 1300717 - RNA, 26 nt, Human
uugaggaacauucaaauaaguagaaa

SEQ ID NO: 1300718 - RNA, 26 nt, Human
uuuaauuuacuauuucugaccaaaaa

SEQ ID NO: 1300719 - RNA, 23 nt, Human
uuucaaguagauugaguuuacuu

SEQ ID NO: 1300720 - RNA, 25 nt, Human
uuugaaauauguacuuuaccuuuaa

SEQ ID NO: 1300721 - RNA, 19 nt, Human
uuugaaaugucacagcagc

SEQ ID NO: 1300722 - RNA, 20 nt, Human
uuugaaaugucacagcagca

SEQ ID NO: 1300723 - RNA, 20 nt, Human
uuuuggacuuaggaaaacug

SEQ ID NO: 1300724 - RNA, 24 nt, Human
uuuuuugagguaugccauaaagua

SEQ ID NO: 1300725 - RNA, 23 nt, Human
cacccaaaccacagguugcagaa

SEQ ID NO: 1300726 - RNA, 23 nt, Human
cccaaaccacagguugcagaaaa

SEQ ID NO: 1300727 - RNA, 18 nt, Human
ccucacacccaaaccaca

SEQ ID NO: 1300728 - RNA, 22 nt, Human
cucccucuuccucacacccaaa

SEQ ID NO: 1300729 - RNA, 24 nt, Human
ucacacccaaaccacagguugcaa

SEQ ID NO: 1300730 - RNA, 24 nt, Human
ucccucuuccucacacccaaacca

SEQ ID NO: 1300731 - RNA, 24 nt, Human
uccucacacccaaaccacagguug

SEQ ID NO: 1300732 - RNA, 22 nt, Human
aaacagaagaaaaccagauucu

SEQ ID NO: 1300733 - RNA, 19 nt, Human
acagaagaaaaccagauuc

SEQ ID NO: 1300734 - RNA, 22 nt, Human
caaacagaagaaaaccagauuc

SEQ ID NO: 1300735 - RNA, 22 nt, Human
uauagcucaguaucaaauccaa

SEQ ID NO: 1300736 - RNA, 22 nt, Human
uaucaaauccaaacagaagaaa

SEQ ID NO: 1300737 - RNA, 24 nt, Human
ucaaauccaaacagaagaaaacca

SEQ ID NO: 1300738 - RNA, 19 nt, Human
uccaaacagaagaaaacca

SEQ ID NO: 1300739 - RNA, 22 nt, Human
ugaauccaguauagcucaguau

SEQ ID NO: 1300740 - RNA, 19 nt, Human
uguacuugguugcuuguga

SEQ ID NO: 1300741 - RNA, 25 nt, Human
ugucagugaauccaguauagcucag

SEQ ID NO: 1300742 - RNA, 19 nt, Human
uugguugcuugugauuuau

SEQ ID NO: 1300743 - RNA, 22 nt, Human
aaacagaagaaaaccagauucu

SEQ ID NO: 1300744 - RNA, 19 nt, Human
acagaagaaaaccagauuc

SEQ ID NO: 1300745 - RNA, 22 nt, Human
uauagcucaguaucaaauccaa

SEQ ID NO: 1300746 - RNA, 22 nt, Human
uaucaaauccaaacagaagaaa

SEQ ID NO: 1300747 - RNA, 24 nt, Human
ucaaauccaaacagaagaaaacca

SEQ ID NO: 1300748 - RNA, 19 nt, Human
uccaaacagaagaaaacca

SEQ ID NO: 1300749 - RNA, 22 nt, Human
ugaauccaguauagcucaguau

SEQ ID NO: 1300750 - RNA, 19 nt, Human
uguacuugguugcuuguga

SEQ ID NO: 1300751 - RNA, 25 nt, Human
ugucagugaauccaguauagcucag

SEQ ID NO: 1300752 - RNA, 19 nt, Human
uugguugcuugugauuuau

SEQ ID NO: 1300753 - RNA, 24 nt, Human
aaagagccugggggagaggggagg

SEQ ID NO: 1300754 - RNA, 21 nt, Human
aaauggccggggagggggugc

SEQ ID NO: 1300755 - RNA, 23 nt, Human
accagugcccccucccuccccag

SEQ ID NO: 1300756 - RNA, 21 nt, Human
agagccugggggagaggggag

SEQ ID NO: 1300757 - RNA, 19 nt, Human
agagcucugcccagccgcu

SEQ ID NO: 1300758 - RNA, 18 nt, Human
agaggagccccugccccu

SEQ ID NO: 1300759 - RNA, 24 nt, Human
agccugggggagaggggagggcca

SEQ ID NO: 1300760 - RNA, 18 nt, Human
aggggcagggcugggggu

SEQ ID NO: 1300761 - RNA, 22 nt, Human
caaggggacgccccccggcccg

SEQ ID NO: 1300762 - RNA, 20 nt, Human
cagaauuuccagggucaagc

SEQ ID NO: 1300763 - RNA, 19 nt, Human
cagcagcaguuuggggguu

SEQ ID NO: 1300764 - RNA, 21 nt, Human
cagcagcaguuuggggguugg

SEQ ID NO: 1300765 - RNA, 19 nt, Human
caggguggggguggagggg

SEQ ID NO: 1300766 - RNA, 22 nt, Human
cagugcccccucccuccccagg

SEQ ID NO: 1300767 - RNA, 21 nt, Human
ccaaggggcagggcugggggu

SEQ ID NO: 1300768 - RNA, 22 nt, Human
cccagccgcucuaguccaaggg

SEQ ID NO: 1300769 - RNA, 23 nt, Human
cccccugcugagccugcucauuc

SEQ ID NO: 1300770 - RNA, 21 nt, Human
ccccgcgccgggcggcggccc

SEQ ID NO: 1300771 - RNA, 18 nt, Human
cccguggggcucggggga

SEQ ID NO: 1300772 - RNA, 20 nt, Human
ccgcugccggcugcccgggc

SEQ ID NO: 1300773 - RNA, 19 nt, Human
ccucgcccgcggcucccuc

SEQ ID NO: 1300774 - RNA, 24 nt, Human
cgaaauggacaaggccggaggucc

SEQ ID NO: 1300775 - RNA, 18 nt, Human
cggcccggggggcgccag

SEQ ID NO: 1300776 - RNA, 23 nt, Human
cggccgggcauggcccguggggc

SEQ ID NO: 1300777 - RNA, 22 nt, Human
cgggaccgggaccgcggggccg

SEQ ID NO: 1300778 - RNA, 24 nt, Human
cggggccguggggggcgcggggcg

SEQ ID NO: 1300779 - RNA, 20 nt, Human
cggggggcgccagcgcgggg

SEQ ID NO: 1300780 - RNA, 21 nt, Human
cuccccagggcugaggccucu

SEQ ID NO: 1300781 - RNA, 22 nt, Human
cuccccagggcugaggccucug

SEQ ID NO: 1300782 - RNA, 23 nt, Human
cuccccagggcugaggccucugc

SEQ ID NO: 1300783 - RNA, 18 nt, Human
cucccuggccggcuuccc

SEQ ID NO: 1300784 - RNA, 21 nt, Human
cucgcucccuggccggcuucc

SEQ ID NO: 1300785 - RNA, 18 nt, Human
cugagccugcucauuccc

SEQ ID NO: 1300786 - RNA, 18 nt, Human
cugccccccugcugagcc

SEQ ID NO: 1300787 - RNA, 18 nt, Human
cugcccgggccccgaucg

SEQ ID NO: 1300788 - RNA, 20 nt, Human
gaaagagccugggggagagg

SEQ ID NO: 1300789 - RNA, 21 nt, Human
gagccccugccccuguuuaga

SEQ ID NO: 1300790 - RNA, 26 nt, Human
gagccucaggguggggguggaggggg

SEQ ID NO: 1300791 - RNA, 19 nt, Human
gagggggauggcccagaau

SEQ ID NO: 1300792 - RNA, 21 nt, Human
gaucccucgcccgcggcuccc

SEQ ID NO: 1300793 - RNA, 19 nt, Human
gcccgggccccgaucgcuc

SEQ ID NO: 1300794 - RNA, 21 nt, Human
gcggccaaggggcagggcugg

SEQ ID NO: 1300795 - RNA, 18 nt, Human
gcggggcgcgggccggug

SEQ ID NO: 1300796 - RNA, 23 nt, Human
gcggggcgcgggccggugggcuc

SEQ ID NO: 1300797 - RNA, 18 nt, Human
gcucccuggccggcuucc

SEQ ID NO: 1300798 - RNA, 18 nt, Human
gcucgggggacgugggug

SEQ ID NO: 1300799 - RNA, 19 nt, Human
gcucugaaggcgggguggg

SEQ ID NO: 1300800 - RNA, 18 nt, Human
ggacgugggugaugcggc

SEQ ID NO: 1300801 - RNA, 19 nt, Human
ggagaggggagggcagacu

SEQ ID NO: 1300802 - RNA, 19 nt, Human
ggcagacuagggguggggc

SEQ ID NO: 1300803 - RNA, 26 nt, Human
ggcccggggggcgccagcgcggggcc

SEQ ID NO: 1300804 - RNA, 25 nt, Human
gggagaggggagggcagacuagggg

SEQ ID NO: 1300805 - RNA, 18 nt, Human
gggcauggcccguggggc

SEQ ID NO: 1300806 - RNA, 21 nt, Human
gggcugggggugcacaggcgu

SEQ ID NO: 1300807 - RNA, 19 nt, Human
gggggagaggggagggcag

SEQ ID NO: 1300808 - RNA, 19 nt, Human
ggguuccccgcagcagcag

SEQ ID NO: 1300809 - RNA, 22 nt, Human
ggguuccccgcagcagcaguuu

SEQ ID NO: 1300810 - RNA, 19 nt, Human
ggguuggagaggcuggggg

SEQ ID NO: 1300811 - RNA, 22 nt, Human
gugcggguacccccccaccugc

SEQ ID NO: 1300812 - RNA, 19 nt, Human
uccuccaggcgacauagaa

SEQ ID NO: 1300813 - RNA, 21 nt, Human
ucugcggccaaggggcagggc

SEQ ID NO: 1300814 - RNA, 21 nt, Human
ugcccccucccuccccagggc

SEQ ID NO: 1300815 - RNA, 24 nt, Human
uggagggggauggcccagaauuuc

SEQ ID NO: 1300816 - RNA, 21 nt, Human
uggcagaggagccccugcccc

SEQ ID NO: 1300817 - RNA, 21 nt, Human
uggcagggcccaaguuucccc

SEQ ID NO: 1300818 - RNA, 24 nt, Human
uggggggcgcggggcgcgggccgg

SEQ ID NO: 1300819 - RNA, 20 nt, Human
uggggguuggagaggcuggg

SEQ ID NO: 1300820 - RNA, 23 nt, Human
uggggguuggagaggcugggggc

SEQ ID NO: 1300821 - RNA, 18 nt, Human
uuagagcucugcccagcc

SEQ ID NO: 1300822 - RNA, 19 nt, Human
uuagagcucugcccagccg

SEQ ID NO: 1300823 - RNA, 23 nt, Human
uuggcagggcccaaguuuccccc

SEQ ID NO: 1300824 - RNA, 20 nt, Human
aaccacauucccgccaaguc

SEQ ID NO: 1300825 - RNA, 21 nt, Human
acaggcaccagccaccacgcc

SEQ ID NO: 1300826 - RNA, 21 nt, Human
acggggcgggggcggcucugc

SEQ ID NO: 1300827 - RNA, 18 nt, Human
acgggguuucacuguguu

SEQ ID NO: 1300828 - RNA, 19 nt, Human
acgggguuucacuguguua

SEQ ID NO: 1300829 - RNA, 20 nt, Human
acgggguuucacuguguuag

SEQ ID NO: 1300830 - RNA, 24 nt, Human
acgggguuucacuguguuagccag

SEQ ID NO: 1300831 - RNA, 21 nt, Human
acuguguggccuccuggcccc

SEQ ID NO: 1300832 - RNA, 21 nt, Human
agaaaaccacauucccgccaa

SEQ ID NO: 1300833 - RNA, 19 nt, Human
agccccgccccuccugccc

SEQ ID NO: 1300834 - RNA, 22 nt, Human
agcgaugggacagcaucuggaa

SEQ ID NO: 1300835 - RNA, 21 nt, Human
agucaaggaagagcggggcuu

SEQ ID NO: 1300836 - RNA, 20 nt, Human
agugaggaagcaggauucag

SEQ ID NO: 1300837 - RNA, 21 nt, Human
aucacuguguggccuccuggc

SEQ ID NO: 1300838 - RNA, 21 nt, Human
augugugaccgaaaaaggagg

SEQ ID NO: 1300839 - RNA, 20 nt, Human
caaaggauggacuugguguu

SEQ ID NO: 1300840 - RNA, 18 nt, Human
caacaggaaucccucagg

SEQ ID NO: 1300841 - RNA, 19 nt, Human
caacccacuggcacgucug

SEQ ID NO: 1300842 - RNA, 22 nt, Human
cacgccauucuccugccucagc

SEQ ID NO: 1300843 - RNA, 21 nt, Human
cacugcaagcuccuccuccug

SEQ ID NO: 1300844 - RNA, 19 nt, Human
cacuguguggccuccuggc

SEQ ID NO: 1300845 - RNA, 18 nt, Human
cacuguguuagccaggau

SEQ ID NO: 1300846 - RNA, 19 nt, Human
cacuguguuagccaggaug

SEQ ID NO: 1300847 - RNA, 24 nt, Human
cacuguguuagccaggauggucuc

SEQ ID NO: 1300848 - RNA, 23 nt, Human
cagauagcugggacuacaggcac

SEQ ID NO: 1300849 - RNA, 18 nt, Human
cagcacggugggccugac

SEQ ID NO: 1300850 - RNA, 19 nt, Human
caggagcaggaguccugug

SEQ ID NO: 1300851 - RNA, 20 nt, Human
ccacaaacgcguuguuccgc

SEQ ID NO: 1300852 - RNA, 20 nt, Human
ccaccacgcccggcuaauuu

SEQ ID NO: 1300853 - RNA, 20 nt, Human
ccagcugaucuuacauuuua

SEQ ID NO: 1300854 - RNA, 24 nt, Human
cccagauagcugggacuacaggca

SEQ ID NO: 1300855 - RNA, 21 nt, Human
ccccgugcagggcccugggcc

SEQ ID NO: 1300856 - RNA, 23 nt, Human
ccccugagcaccagcacgguggg

SEQ ID NO: 1300857 - RNA, 22 nt, Human
cccgccaagucugccuuccuca

SEQ ID NO: 1300858 - RNA, 18 nt, Human
cccucaccuuugaagaaa

SEQ ID NO: 1300859 - RNA, 19 nt, Human
cccuggcagcucccccuac

SEQ ID NO: 1300860 - RNA, 24 nt, Human
cccugggccgaagccccgccccuc

SEQ ID NO: 1300861 - RNA, 19 nt, Human
ccgccccuccugccccugc

SEQ ID NO: 1300862 - RNA, 18 nt, Human
ccucagggcuucuggaag

SEQ ID NO: 1300863 - RNA, 23 nt, Human
ccuccugccccugccggcugggc

SEQ ID NO: 1300864 - RNA, 19 nt, Human
ccuccuggccccauccuaa

SEQ ID NO: 1300865 - RNA, 19 nt, Human
ccuggcagcucccccuacc

SEQ ID NO: 1300866 - RNA, 19 nt, Human
ccuggccccauccuaaggc

SEQ ID NO: 1300867 - RNA, 19 nt, Human
ccuggccccguccuaaggc

SEQ ID NO: 1300868 - RNA, 19 nt, Human
ccuggccccguccuaaggc

SEQ ID NO: 1300869 - RNA, 22 nt, Human
ccuggccccguccuaaggcaag

SEQ ID NO: 1300870 - RNA, 18 nt, Human
cgccccuccugccccugc

SEQ ID NO: 1300871 - RNA, 25 nt, Human
cggugggccugacggggcgggggcg

SEQ ID NO: 1300872 - RNA, 18 nt, Human
cguccuaaggcgagugcc

SEQ ID NO: 1300873 - RNA, 21 nt, Human
cuaugcuguccucaaggucaa

SEQ ID NO: 1300874 - RNA, 23 nt, Human
cucacugcaagcuccuccuccug

SEQ ID NO: 1300875 - RNA, 20 nt, Human
cuccugccucagccucccag

SEQ ID NO: 1300876 - RNA, 21 nt, Human
cuccuggguucacgccauucu

SEQ ID NO: 1300877 - RNA, 21 nt, Human
cucgggacucugagcgauggg

SEQ ID NO: 1300878 - RNA, 22 nt, Human
cugagcaccagcacggugggcc

SEQ ID NO: 1300879 - RNA, 21 nt, Human
cugcagaggguggcuccuucu

SEQ ID NO: 1300880 - RNA, 23 nt, Human
cugccucagccucccagauagcu

SEQ ID NO: 1300881 - RNA, 23 nt, Human
cuggguaaccaacaggaaucccu

SEQ ID NO: 1300882 - RNA, 19 nt, Human
cuguggggcuggacgggag

SEQ ID NO: 1300883 - RNA, 22 nt, Human
cuucagggcuccugcagagggu

SEQ ID NO: 1300884 - RNA, 24 nt, Human
cuucugaccucgugaucugcccgc

SEQ ID NO: 1300885 - RNA, 21 nt, Human
gaagccccgccccuccugccc

SEQ ID NO: 1300886 - RNA, 22 nt, Human
gaccucgugaucugcccgccuc

SEQ ID NO: 1300887 - RNA, 24 nt, Human
gaccucgugaucugcccgccucgg

SEQ ID NO: 1300888 - RNA, 20 nt, Human
gcaagcgccuggccuccugg

SEQ ID NO: 1300889 - RNA, 22 nt, Human
gcaagcuccuccuccuggguuc

SEQ ID NO: 1300890 - RNA, 23 nt, Human
gcccggcuaauuuuuuguauuuu

SEQ ID NO: 1300891 - RNA, 20 nt, Human
gcccucuucuuguggaguuc

SEQ ID NO: 1300892 - RNA, 20 nt, Human
gccucggccucccaaagugg

SEQ ID NO: 1300893 - RNA, 22 nt, Human
gcucacugcaagcuccuccucc

SEQ ID NO: 1300894 - RNA, 19 nt, Human
gcucagagccccugggccc

SEQ ID NO: 1300895 - RNA, 20 nt, Human
gcucagagccccugggcccc

SEQ ID NO: 1300896 - RNA, 22 nt, Human
gcuguggggcuggacgggagac

SEQ ID NO: 1300897 - RNA, 18 nt, Human
ggaaaugcucagagcccc

SEQ ID NO: 1300898 - RNA, 19 nt, Human
ggcagcucccccuaccccc

SEQ ID NO: 1300899 - RNA, 21 nt, Human
ggcggcuccucagggcuucug

SEQ ID NO: 1300900 - RNA, 21 nt, Human
ggcgggggcggcucugcagga

SEQ ID NO: 1300901 - RNA, 23 nt, Human
gggguuucacuguguuagccagg

SEQ ID NO: 1300902 - RNA, 22 nt, Human
ggguuucacuguguuagccagg

SEQ ID NO: 1300903 - RNA, 20 nt, Human
ggucucgaucuucugaccuc

SEQ ID NO: 1300904 - RNA, 23 nt, Human
guagagacgggguuucacugugu

SEQ ID NO: 1300905 - RNA, 24 nt, Human
gugaucugcccgccucggccuccc

SEQ ID NO: 1300906 - RNA, 20 nt, Human
gugcucccagcaggaugcag

SEQ ID NO: 1300907 - RNA, 23 nt, Human
guggguguauccuguggcgucac

SEQ ID NO: 1300908 - RNA, 23 nt, Human
uaaguuacagaaaccacaguuga

SEQ ID NO: 1300909 - RNA, 24 nt, Human
uaauuuuuuguauuuuuaguagag

SEQ ID NO: 1300910 - RNA, 23 nt, Human
uacaggcaccagccaccacgccc

SEQ ID NO: 1300911 - RNA, 20 nt, Human
uaguagagacgggguuucac

SEQ ID NO: 1300912 - RNA, 24 nt, Human
uaguagagacgggguuucacugug

SEQ ID NO: 1300913 - RNA, 24 nt, Human
ucacugcaagcuccuccuccuggg

SEQ ID NO: 1300914 - RNA, 20 nt, Human
ucacuggggcccacaggugg

SEQ ID NO: 1300915 - RNA, 24 nt, Human
ucacuguguuagccaggauggucu

SEQ ID NO: 1300916 - RNA, 21 nt, Human
ucagggcuucuggaagguugu

SEQ ID NO: 1300917 - RNA, 20 nt, Human
uccauaugcuguggucaucg

SEQ ID NO: 1300918 - RNA, 23 nt, Human
ucccacaaacgcguuguuccgcc

SEQ ID NO: 1300919 - RNA, 24 nt, Human
ucccagauagcugggacuacaggc

SEQ ID NO: 1300920 - RNA, 27 nt, Human
ucccccuacccccucaccuuugaagaa

SEQ ID NO: 1300921 - RNA, 21 nt, Human
ucccgccaagucugccuuccu

SEQ ID NO: 1300922 - RNA, 22 nt, Human
ucccucaggcuguggggcugga

SEQ ID NO: 1300923 - RNA, 22 nt, Human
uccuaaggcaagcgccuggccu

SEQ ID NO: 1300924 - RNA, 22 nt, Human
uccuaaggcaagugccuggccu

SEQ ID NO: 1300925 - RNA, 22 nt, Human
uccuaaggcgagugccuggccu

SEQ ID NO: 1300926 - RNA, 20 nt, Human
uccucagggcuucuggaagg

SEQ ID NO: 1300927 - RNA, 25 nt, Human
uccuccuggguucacgccauucucc

SEQ ID NO: 1300928 - RNA, 24 nt, Human
uccuggguucacgccauucuccug

SEQ ID NO: 1300929 - RNA, 26 nt, Human
ucuccugccucagccucccagauagc

SEQ ID NO: 1300930 - RNA, 19 nt, Human
ucuggguaaccaacaggaa

SEQ ID NO: 1300931 - RNA, 19 nt, Human
ucuugugaggcgcuggccc

SEQ ID NO: 1300932 - RNA, 20 nt, Human
ucuugugaggcgcuggcccu

SEQ ID NO: 1300933 - RNA, 23 nt, Human
ugaggcgcuggcccucuucuugu

SEQ ID NO: 1300934 - RNA, 21 nt, Human
ugccggcugggcccuggcagc

SEQ ID NO: 1300935 - RNA, 24 nt, Human
ugccucagccucccagauagcugg

SEQ ID NO: 1300936 - RNA, 23 nt, Human
ugcuguggucaucgucucuuugu

SEQ ID NO: 1300937 - RNA, 22 nt, Human
uggcagcucccccuacccccuc

SEQ ID NO: 1300938 - RNA, 20 nt, Human
uggcccgaaacaaacugcgg

SEQ ID NO: 1300939 - RNA, 20 nt, Human
uggccuccuggccccauccu

SEQ ID NO: 1300940 - RNA, 19 nt, Human
uggccuccuggccccgucc

SEQ ID NO: 1300941 - RNA, 19 nt, Human
uggccuccuggccccgucc

SEQ ID NO: 1300942 - RNA, 20 nt, Human
uggccuccuggccccguccu

SEQ ID NO: 1300943 - RNA, 20 nt, Human
uggccuccuggccccguccu

SEQ ID NO: 1300944 - RNA, 21 nt, Human
ugggacuacaggcaccagcca

SEQ ID NO: 1300945 - RNA, 22 nt, Human
ugggacuacaggcaccagccac

SEQ ID NO: 1300946 - RNA, 24 nt, Human
ugggacuacaggcaccagccacca

SEQ ID NO: 1300947 - RNA, 19 nt, Human
ugggaugcuccauccaggg

SEQ ID NO: 1300948 - RNA, 20 nt, Human
uggggcccacaggugguggu

SEQ ID NO: 1300949 - RNA, 20 nt, Human
uggguucacgccauucuccu

SEQ ID NO: 1300950 - RNA, 21 nt, Human
uguauuuuuaguagagacggg

SEQ ID NO: 1300951 - RNA, 24 nt, Human
ugucaaagucaaggaagagcgggg

SEQ ID NO: 1300952 - RNA, 20 nt, Human
ugucucgggacucugagcga

SEQ ID NO: 1300953 - RNA, 18 nt, Human
uuaguagagacgggguuu

SEQ ID NO: 1300954 - RNA, 21 nt, Human
uuaguagagacgggguuucac

SEQ ID NO: 1300955 - RNA, 21 nt, Human
uuaguagagacgggguuucac

SEQ ID NO: 1300956 - RNA, 24 nt, Human
uuaguagagacgggguuucacugu

SEQ ID NO: 1300957 - RNA, 21 nt, Human
uucacuguguuagccaggaug

SEQ ID NO: 1300958 - RNA, 22 nt, Human
uucuccugccucagccucccag

SEQ ID NO: 1300959 - RNA, 20 nt, Human
uugaagaaaaccacauuccc

SEQ ID NO: 1300960 - RNA, 20 nt, Human
uugaucuugugaggcgcugg

SEQ ID NO: 1300961 - RNA, 23 nt, Human
uuguauuuuuaguagagacgggg

SEQ ID NO: 1300962 - RNA, 19 nt, Human
uuucacuguguuagccagg

SEQ ID NO: 1300963 - RNA, 18 nt, Human
uuugcugggcccucccug

SEQ ID NO: 1300964 - RNA, 24 nt, Human
uuuuuaguagagacgggguuucac

SEQ ID NO: 1300965 - RNA, 21 nt, Human
uuuuuguauuuuuaguagaga

SEQ ID NO: 1300966 - RNA, 24 nt, Human
uuuuuuguauuuuuaguagagacg

SEQ ID NO: 1300967 - RNA, 21 nt, Human
uuggucacagugauuauucuu

SEQ ID NO: 1300968 - RNA, 23 nt, Human
aaaaauuagccaggcaguggugg

SEQ ID NO: 1300969 - RNA, 24 nt, Human
aaagguugcagugagcugagaucg

SEQ ID NO: 1300970 - RNA, 21 nt, Human
aacacuugaaauagcuucuaa

SEQ ID NO: 1300971 - RNA, 19 nt, Human
aacauggugaaaccccauc

SEQ ID NO: 1300972 - RNA, 20 nt, Human
aacauggugaaaccccaucu

SEQ ID NO: 1300973 - RNA, 20 nt, Human
aacauggugaaaccccaucu

SEQ ID NO: 1300974 - RNA, 21 nt, Human
aacauggugaaaccccaucuc

SEQ ID NO: 1300975 - RNA, 23 nt, Human
aagaaaaaaaauuauuucuucca

SEQ ID NO: 1300976 - RNA, 22 nt, Human
aagagguuccacucagaaucca

SEQ ID NO: 1300977 - RNA, 26 nt, Human
aagcgggcggaucacuugaggucagg

SEQ ID NO: 1300978 - RNA, 24 nt, Human
aaucacuugagcccgggagacaaa

SEQ ID NO: 1300979 - RNA, 21 nt, Human
acaaaacuaugaagaaaaaaa

SEQ ID NO: 1300980 - RNA, 21 nt, Human
accacacuccagccuggugag

SEQ ID NO: 1300981 - RNA, 23 nt, Human
acucagaauccaacagaaccuuu

SEQ ID NO: 1300982 - RNA, 24 nt, Human
acuugaggucaggaguuugagacc

SEQ ID NO: 1300983 - RNA, 20 nt, Human
agacaaagguugcagugagc

SEQ ID NO: 1300984 - RNA, 24 nt, Human
agacaaagguugcagugagcugag

SEQ ID NO: 1300985 - RNA, 22 nt, Human
agccuggccaacauggugaaac

SEQ ID NO: 1300986 - RNA, 24 nt, Human
agccuggccaacauggugaaaccc

SEQ ID NO: 1300987 - RNA, 20 nt, Human
aggaguuugagaccagccug

SEQ ID NO: 1300988 - RNA, 25 nt, Human
aggcaaaaaguauagaaaggggacc

SEQ ID NO: 1300989 - RNA, 24 nt, Human
aggcugagggaggagaaucacuug

SEQ ID NO: 1300990 - RNA, 18 nt, Human
agggaggagaaucacuug

SEQ ID NO: 1300991 - RNA, 24 nt, Human
agggaggagaaucacuugagcccg

SEQ ID NO: 1300992 - RNA, 20 nt, Human
aguuguaacaauagcucugg

SEQ ID NO: 1300993 - RNA, 24 nt, Human
aucacuugaggucaggaguuugag

SEQ ID NO: 1300994 - RNA, 22 nt, Human
aucccaacacuuuggaaggcca

SEQ ID NO: 1300995 - RNA, 24 nt, Human
aucgugcuaccacacuccagccug

SEQ ID NO: 1300996 - RNA, 19 nt, Human
augccuguaaucccaacac

SEQ ID NO: 1300997 - RNA, 24 nt, Human
auuugaagauuucaccuuccacuu

SEQ ID NO: 1300998 - RNA, 18 nt, Human
caaaaacaccauuuuucc

SEQ ID NO: 1300999 - RNA, 18 nt, Human
caaaggcaaaaaguauag

SEQ ID NO: 1301000 - RNA, 26 nt, Human
caaaggcaaaaaguauagaaagacag

SEQ ID NO: 1301001 - RNA, 20 nt, Human
caaagucagaugcuuguccc

SEQ ID NO: 1301002 - RNA, 24 nt, Human
caacauggugaaaccccaucucua

SEQ ID NO: 1301003 - RNA, 24 nt, Human
caagcgggcggaucacuugagguc

SEQ ID NO: 1301004 - RNA, 24 nt, Human
caccaacgauuguugauucgugcu

SEQ ID NO: 1301005 - RNA, 20 nt, Human
caccuguaaucucagcugcu

SEQ ID NO: 1301006 - RNA, 24 nt, Human
caccuguaaucucagcugcuuggg

SEQ ID NO: 1301007 - RNA, 18 nt, Human
cacuccagccuggugagu

SEQ ID NO: 1301008 - RNA, 23 nt, Human
cacuugaggucaggaguuugaga

SEQ ID NO: 1301009 - RNA, 21 nt, Human
caguuguaacaauagcucugg

SEQ ID NO: 1301010 - RNA, 20 nt, Human
caugccuguaaucccaacac

SEQ ID NO: 1301011 - RNA, 24 nt, Human
caugccuguaaucccaacacuuug

SEQ ID NO: 1301012 - RNA, 24 nt, Human
ccaagcgggcggaucacuugaggu

SEQ ID NO: 1301013 - RNA, 26 nt, Human
ccaagcgggcggaucacuugagguca

SEQ ID NO: 1301014 - RNA, 24 nt, Human
ccagaaaguucugcuccagcaguu

SEQ ID NO: 1301015 - RNA, 19 nt, Human
ccaggaccugcagcgguga

SEQ ID NO: 1301016 - RNA, 21 nt, Human
ccugcaguuucuccaggaccu

SEQ ID NO: 1301017 - RNA, 23 nt, Human
ccuggccaacauggugaaacccc

SEQ ID NO: 1301018 - RNA, 24 nt, Human
ccuggccaacauggugaaacccca

SEQ ID NO: 1301019 - RNA, 24 nt, Human
cggaucacuugaggucaggaguuu

SEQ ID NO: 1301020 - RNA, 27 nt, Human
cggaucacuugaggucaggaguuugag

SEQ ID NO: 1301021 - RNA, 24 nt, Human
cgggagacaaagguugcagugagc

SEQ ID NO: 1301022 - RNA, 18 nt, Human
cgggcggaucacuugagg

SEQ ID NO: 1301023 - RNA, 24 nt, Human
cgggcggaucacuugaggucagga

SEQ ID NO: 1301024 - RNA, 24 nt, Human
cucaugccuguaaucccaacacuu

SEQ ID NO: 1301025 - RNA, 19 nt, Human
cuggaucaaagucaccaac

SEQ ID NO: 1301026 - RNA, 23 nt, Human
cuggccaacauggugaaacccca

SEQ ID NO: 1301027 - RNA, 21 nt, Human
cuguaaucucagcugcuuggg

SEQ ID NO: 1301028 - RNA, 23 nt, Human
gagaaucacuugagcccgggaga

SEQ ID NO: 1301029 - RNA, 23 nt, Human
gagaucgugcuaccacacuccag

SEQ ID NO: 1301030 - RNA, 24 nt, Human
gaucacuugaggucaggaguuuga

SEQ ID NO: 1301031 - RNA, 24 nt, Human
gccaacauggugaaaccccaucuc

SEQ ID NO: 1301032 - RNA, 18 nt, Human
gcuaccacacuccagccu

SEQ ID NO: 1301033 - RNA, 22 nt, Human
ggaucacuugaggucaggaguu

SEQ ID NO: 1301034 - RNA, 22 nt, Human
ggaucacuugaggucaggaguu

SEQ ID NO: 1301035 - RNA, 19 nt, Human
ggucaggaguuugagacca

SEQ ID NO: 1301036 - RNA, 23 nt, Human
gguggcucaugccuguaauccca

SEQ ID NO: 1301037 - RNA, 25 nt, Human
uaaaauaauauaauucaugggacuu

SEQ ID NO: 1301038 - RNA, 19 nt, Human
uaacuggaggaacuggagc

SEQ ID NO: 1301039 - RNA, 22 nt, Human
uaccaaaaauauaaaaaauuag

SEQ ID NO: 1301040 - RNA, 26 nt, Human
uaccaaaaauauaaaaaauuagccag

SEQ ID NO: 1301041 - RNA, 24 nt, Human
uaccacacuccagccuggugagua

SEQ ID NO: 1301042 - RNA, 26 nt, Human
uauagaaagacaguggugguuaauuu

SEQ ID NO: 1301043 - RNA, 24 nt, Human
ucaaucuugaaauccaaaggcaua

SEQ ID NO: 1301044 - RNA, 25 nt, Human
ucacuugagcccgggagacaaaggu

SEQ ID NO: 1301045 - RNA, 25 nt, Human
ucaguuguaacaauagcucugguuc

SEQ ID NO: 1301046 - RNA, 21 nt, Human
uccaggguaacuggagaacuc

SEQ ID NO: 1301047 - RNA, 21 nt, Human
ucuccaauuugaagauuucac

SEQ ID NO: 1301048 - RNA, 24 nt, Human
ucucuaccaaaaauauaaaaaauu

SEQ ID NO: 1301049 - RNA, 23 nt, Human
ucuucaagcagcaucuccaauuu

SEQ ID NO: 1301050 - RNA, 23 nt, Human
ugagaccagccuggccaacaugg

SEQ ID NO: 1301051 - RNA, 24 nt, Human
ugagaccagccuggccaacauggu

SEQ ID NO: 1301052 - RNA, 24 nt, Human
ugagcccgggagacaaagguugca

SEQ ID NO: 1301053 - RNA, 19 nt, Human
ugagggaggagaaucacuu

SEQ ID NO: 1301054 - RNA, 20 nt, Human
ugagggaggagaaucacuug

SEQ ID NO: 1301055 - RNA, 24 nt, Human
ugagggaggagaaucacuugagcc

SEQ ID NO: 1301056 - RNA, 18 nt, Human
ugaggucaggaguuugag

SEQ ID NO: 1301057 - RNA, 20 nt, Human
ugaucuacaaaaauuuucuu

SEQ ID NO: 1301058 - RNA, 20 nt, Human
ugcaccuguaaucucagcug

SEQ ID NO: 1301059 - RNA, 18 nt, Human
ugcaguuucuccaggacc

SEQ ID NO: 1301060 - RNA, 23 nt, Human
ugccuguaaucccaacacuuugg

SEQ ID NO: 1301061 - RNA, 21 nt, Human
ugcuuguggacuugcugcugc

SEQ ID NO: 1301062 - RNA, 23 nt, Human
uggaaggccaagcgggcggauca

SEQ ID NO: 1301063 - RNA, 18 nt, Human
uggaggaacuggagcauc

SEQ ID NO: 1301064 - RNA, 22 nt, Human
uggcaugcaccuguaaucucag

SEQ ID NO: 1301065 - RNA, 24 nt, Human
uggccaacauggugaaaccccauc

SEQ ID NO: 1301066 - RNA, 21 nt, Human
uggccagaaaguucugcucca

SEQ ID NO: 1301067 - RNA, 21 nt, Human
uggcucaugccuguaauccca

SEQ ID NO: 1301068 - RNA, 24 nt, Human
uggcucaugccuguaaucccaaca

SEQ ID NO: 1301069 - RNA, 24 nt, Human
ugggaggcugagggaggagaauca

SEQ ID NO: 1301070 - RNA, 24 nt, Human
ugguggcaugcaccuguaaucuca

SEQ ID NO: 1301071 - RNA, 19 nt, Human
uggugguuaauuugaauuc

SEQ ID NO: 1301072 - RNA, 23 nt, Human
uuagcaagguaaugagcuucuuu

SEQ ID NO: 1301073 - RNA, 18 nt, Human
uugcagugagcugagauc

SEQ ID NO: 1301074 - RNA, 21 nt, Human
uugcagugagcugagaucgug

SEQ ID NO: 1301075 - RNA, 22 nt, Human
uugcagugagcugagaucgugc

SEQ ID NO: 1301076 - RNA, 22 nt, Human
uugcagugagcugagaucgugc

SEQ ID NO: 1301077 - RNA, 25 nt, Human
uugggaggcugagggaggagaauca

SEQ ID NO: 1301078 - RNA, 23 nt, Human
uuguaacaauagcucugguucuc

SEQ ID NO: 1301079 - RNA, 22 nt, Human
uuuaaaugauucuguuucucag

SEQ ID NO: 1301080 - RNA, 23 nt, Human
uuucagguggcucaugccuguaa

SEQ ID NO: 1301081 - RNA, 23 nt, Human
uuuucagguggcucaugccugua

SEQ ID NO: 1301082 - RNA, 20 nt, Human
aagcggacaggugggcgagu

SEQ ID NO: 1301083 - RNA, 23 nt, Human
agaugaucuguugacuccagagc

SEQ ID NO: 1301084 - RNA, 19 nt, Human
aggcagguggagucaggga

SEQ ID NO: 1301085 - RNA, 20 nt, Human
ccacaauucccagcugucaa

SEQ ID NO: 1301086 - RNA, 18 nt, Human
ccacuugcugagggugaa

SEQ ID NO: 1301087 - RNA, 24 nt, Human
cccaucgccacagagucucugagu

SEQ ID NO: 1301088 - RNA, 24 nt, Human
cucacuuagcaaaacuuccuuuuc

SEQ ID NO: 1301089 - RNA, 19 nt, Human
cuggaugucuucuggccag

SEQ ID NO: 1301090 - RNA, 19 nt, Human
gcggacaggugggcgagug

SEQ ID NO: 1301091 - RNA, 18 nt, Human
gcugucaauacaggaggg

SEQ ID NO: 1301092 - RNA, 18 nt, Human
gguggagucagggacugg

SEQ ID NO: 1301093 - RNA, 21 nt, Human
uccacuugcugagggugaagu

SEQ ID NO: 1301094 - RNA, 18 nt, Human
ucccagcugucaauacag

SEQ ID NO: 1301095 - RNA, 22 nt, Human
uggcuacauuuggggacagcac

SEQ ID NO: 1301096 - RNA, 23 nt, Human
ugucaauacaggaggggacuuug

SEQ ID NO: 1301097 - RNA, 22 nt, Human
ugucuuaucucuaagagcucca

SEQ ID NO: 1301098 - RNA, 18 nt, Human
ugucuucuggccagugaa

SEQ ID NO: 1301099 - RNA, 21 nt, Human
uguucugggcaccuggaggca

SEQ ID NO: 1301100 - RNA, 18 nt, Human
uguugacuccagagcagc

SEQ ID NO: 1301101 - RNA, 21 nt, Human
uugguuuggggaaaagaugau

SEQ ID NO: 1301102 - RNA, 21 nt, Human
uuucucagaaccagacaccuc

SEQ ID NO: 1301103 - RNA, 20 nt, Human
aaagcccaggaggggagaca

SEQ ID NO: 1301104 - RNA, 20 nt, Human
aacacggugaaaccccgucu

SEQ ID NO: 1301105 - RNA, 21 nt, Human
aacacggugaaaccccgucuc

SEQ ID NO: 1301106 - RNA, 25 nt, Human
acagggcaggaggaaagcccaggag

SEQ ID NO: 1301107 - RNA, 24 nt, Human
accccgucucuacuaaaaauacaa

SEQ ID NO: 1301108 - RNA, 19 nt, Human
acccuuugguggcugagaa

SEQ ID NO: 1301109 - RNA, 21 nt, Human
acccuuugguggcugagaagc

SEQ ID NO: 1301110 - RNA, 25 nt, Human
aggcagagaggugaagaucuuaggg

SEQ ID NO: 1301111 - RNA, 20 nt, Human
aggccaagcagcugggcuga

SEQ ID NO: 1301112 - RNA, 21 nt, Human
aggccaagcagcugggcugag

SEQ ID NO: 1301113 - RNA, 24 nt, Human
aggcgcgcggaucacgaggucagg

SEQ ID NO: 1301114 - RNA, 21 nt, Human
aggcugcugcccacagggcag

SEQ ID NO: 1301115 - RNA, 19 nt, Human
aggugccgggaaauuaugc

SEQ ID NO: 1301116 - RNA, 19 nt, Human
auaacuaacaccauaauaa

SEQ ID NO: 1301117 - RNA, 22 nt, Human
auuaugcugugagagggucagg

SEQ ID NO: 1301118 - RNA, 20 nt, Human
caagcagcugggcugagucc

SEQ ID NO: 1301119 - RNA, 22 nt, Human
caagcagcugggcugaguccca

SEQ ID NO: 1301120 - RNA, 22 nt, Human
caccauaauaaccagaguucca

SEQ ID NO: 1301121 - RNA, 18 nt, Human
caccuguagucccagcug

SEQ ID NO: 1301122 - RNA, 25 nt, Human
caccuguagucccagcugcucgcga

SEQ ID NO: 1301123 - RNA, 24 nt, Human
caggccgggugcggcggcucgggc

SEQ ID NO: 1301124 - RNA, 18 nt, Human
ccaggaggggagacaaga

SEQ ID NO: 1301125 - RNA, 25 nt, Human
ccaucugagaggagaggagagugag

SEQ ID NO: 1301126 - RNA, 23 nt, Human
cccacagggcaggaggaaagccc

SEQ ID NO: 1301127 - RNA, 18 nt, Human
cccuuugguggcugagaa

SEQ ID NO: 1301128 - RNA, 20 nt, Human
ccucaauccucaggcccaag

SEQ ID NO: 1301129 - RNA, 23 nt, Human
ccuggcuaacacggugaaacccc

SEQ ID NO: 1301130 - RNA, 24 nt, Human
ccuggcuaacacggugaaaccccg

SEQ ID NO: 1301131 - RNA, 20 nt, Human
ccuguagucccagcugcucg

SEQ ID NO: 1301132 - RNA, 20 nt, Human
ccugugacucugaggaacgc

SEQ ID NO: 1301133 - RNA, 24 nt, Human
cgagaccauccuggcuaacacggu

SEQ ID NO: 1301134 - RNA, 19 nt, Human
cgcucagggcacugggcgg

SEQ ID NO: 1301135 - RNA, 23 nt, Human
cggaucacgaggucaggaaaucg

SEQ ID NO: 1301136 - RNA, 22 nt, Human
cggcucgggccuguaaucccag

SEQ ID NO: 1301137 - RNA, 24 nt, Human
cggcucgggccuguaaucccagca

SEQ ID NO: 1301138 - RNA, 21 nt, Human
cgggcaccuguagucccagcu

SEQ ID NO: 1301139 - RNA, 24 nt, Human
cgggccuguaaucccagcacuuug

SEQ ID NO: 1301140 - RNA, 24 nt, Human
cucgggccuguaaucccagcacuu

SEQ ID NO: 1301141 - RNA, 18 nt, Human
cuggcuaacacggugaaa

SEQ ID NO: 1301142 - RNA, 22 nt, Human
cugugagagggucaggccaagc

SEQ ID NO: 1301143 - RNA, 20 nt, Human
cuuagggaagccccugaccc

SEQ ID NO: 1301144 - RNA, 20 nt, Human
gaagccccugacccagccua

SEQ ID NO: 1301145 - RNA, 18 nt, Human
gacccagccuaggcugcu

SEQ ID NO: 1301146 - RNA, 24 nt, Human
gaucacgaggucaggaaaucgaga

SEQ ID NO: 1301147 - RNA, 18 nt, Human
gccaagcagcugggcuga

SEQ ID NO: 1301148 - RNA, 19 nt, Human
gccgggugcggcggcucgg

SEQ ID NO: 1301149 - RNA, 19 nt, Human
gcgcggaucacgaggucag

SEQ ID NO: 1301150 - RNA, 20 nt, Human
gcggcggcucgggccuguaa

SEQ ID NO: 1301151 - RNA, 24 nt, Human
gcuaacacggugaaaccccgucuc

SEQ ID NO: 1301152 - RNA, 20 nt, Human
ggcaccuguagucccagcug

SEQ ID NO: 1301153 - RNA, 23 nt, Human
ggccuguaaucccagcacuuugg

SEQ ID NO: 1301154 - RNA, 24 nt, Human
ggcggcucgggccuguaaucccag

SEQ ID NO: 1301155 - RNA, 21 nt, Human
ggcgggcaccuguagucccag

SEQ ID NO: 1301156 - RNA, 22 nt, Human
ggcgugguggcgggcaccugua

SEQ ID NO: 1301157 - RNA, 20 nt, Human
ggggcaguagggaggcagag

SEQ ID NO: 1301158 - RNA, 24 nt, Human
gguggcgggcaccuguagucccag

SEQ ID NO: 1301159 - RNA, 22 nt, Human
uaacacggugaaaccccgucuc

SEQ ID NO: 1301160 - RNA, 24 nt, Human
uaacacggugaaaccccgucucua

SEQ ID NO: 1301161 - RNA, 23 nt, Human
uaggccucaauccucaggcccaa

SEQ ID NO: 1301162 - RNA, 24 nt, Human
ucacgaggucaggaaaucgagacc

SEQ ID NO: 1301163 - RNA, 30 nt, Human
ucagaacaacaccugcaggccgggugcggg

SEQ ID NO: 1301164 - RNA, 21 nt, Human
uccucaggcccaagauacuug

SEQ ID NO: 1301165 - RNA, 22 nt, Human
ucucuacuaaaaauacaaaaaa

SEQ ID NO: 1301166 - RNA, 20 nt, Human
ucuuagggaagccccugacc

SEQ ID NO: 1301167 - RNA, 26 nt, Human
ugagaggagaggagagugagaagggg

SEQ ID NO: 1301168 - RNA, 21 nt, Human
uggggcaguagggaggcagag

SEQ ID NO: 1301169 - RNA, 24 nt, Human
ugguggcgggcaccuguaguccca

SEQ ID NO: 1301170 - RNA, 22 nt, Human
ugugacucugaggaacgccugc

SEQ ID NO: 1301171 - RNA, 18 nt, Human
uuagccgggcgugguggc

SEQ ID NO: 1301172 - RNA, 24 nt, Human
uuagccgggcgugguggcgggcac

SEQ ID NO: 1301173 - RNA, 18 nt, Human
uuccaucugagaggagag

SEQ ID NO: 1301174 - RNA, 23 nt, Human
ggaugcuuuuuuuuuaaguuccu

SEQ ID NO: 1301175 - RNA, 25 nt, Human
cauagaauagucaagaccacagaga

SEQ ID NO: 1301176 - RNA, 22 nt, Human
gaauagucaagaccacagagac

SEQ ID NO: 1301177 - RNA, 23 nt, Human
acagggacuguugccaucuccca

SEQ ID NO: 1301178 - RNA, 22 nt, Human
agaaacaggggaggcagagcca

SEQ ID NO: 1301179 - RNA, 20 nt, Human
agacaaccaugggaaccacu

SEQ ID NO: 1301180 - RNA, 22 nt, Human
agagaguagaggccagagccca

SEQ ID NO: 1301181 - RNA, 20 nt, Human
agagccagagggaggagaga

SEQ ID NO: 1301182 - RNA, 21 nt, Human
agaggccagagcccaggcagg

SEQ ID NO: 1301183 - RNA, 22 nt, Human
agaguagaggccagagcccagg

SEQ ID NO: 1301184 - RNA, 21 nt, Human
aggaagugucucccugacgga

SEQ ID NO: 1301185 - RNA, 20 nt, Human
aggcaggauacagcaccgug

SEQ ID NO: 1301186 - RNA, 20 nt, Human
aggccagagcccaggcagga

SEQ ID NO: 1301187 - RNA, 24 nt, Human
aggggugggguuccuaaagggugg

SEQ ID NO: 1301188 - RNA, 22 nt, Human
caagcacugccacagagggcuc

SEQ ID NO: 1301189 - RNA, 20 nt, Human
caccgccacagacauaaggg

SEQ ID NO: 1301190 - RNA, 20 nt, Human
caccgugccaccgccacaga

SEQ ID NO: 1301191 - RNA, 23 nt, Human
cagcaccgugccaccgccacaga

SEQ ID NO: 1301192 - RNA, 21 nt, Human
caggccccugagaaacagggg

SEQ ID NO: 1301193 - RNA, 20 nt, Human
caugcgcauuggcugagccg

SEQ ID NO: 1301194 - RNA, 23 nt, Human
ccacagagggcuccugcuuugcc

SEQ ID NO: 1301195 - RNA, 22 nt, Human
ccagagcccaggcaggauacag

SEQ ID NO: 1301196 - RNA, 20 nt, Human
ccaggcaggauacagcaccg

SEQ ID NO: 1301197 - RNA, 19 nt, Human
cccaagcacugccacagag

SEQ ID NO: 1301198 - RNA, 19 nt, Human
ccgacacccaagcacugcc

SEQ ID NO: 1301199 - RNA, 21 nt, Human
ccucagagccccgacacccaa

SEQ ID NO: 1301200 - RNA, 25 nt, Human
ccucagagccccgacacccaagcac

SEQ ID NO: 1301201 - RNA, 19 nt, Human
cgacacccaagcacugcca

SEQ ID NO: 1301202 - RNA, 19 nt, Human
cgcgccucgcgcaugcgca

SEQ ID NO: 1301203 - RNA, 23 nt, Human
cgggagaaaccgcucgcgccucg

SEQ ID NO: 1301204 - RNA, 18 nt, Human
cguggagaggugaggccg

SEQ ID NO: 1301205 - RNA, 25 nt, Human
gaaacaggggaggcagagccagagg

SEQ ID NO: 1301206 - RNA, 19 nt, Human
gacguucccgucgaccccg

SEQ ID NO: 1301207 - RNA, 18 nt, Human
gacugguuucuaagacaa

SEQ ID NO: 1301208 - RNA, 19 nt, Human
gaggcagagccagagggag

SEQ ID NO: 1301209 - RNA, 20 nt, Human
gccagagcgagaggcaucca

SEQ ID NO: 1301210 - RNA, 24 nt, Human
gccccugagaaacaggggaggcag

SEQ ID NO: 1301211 - RNA, 19 nt, Human
ggacugggaagucaucuuu

SEQ ID NO: 1301212 - RNA, 19 nt, Human
ggaggagagaguagaggcc

SEQ ID NO: 1301213 - RNA, 19 nt, Human
gggaggcagagccagaggg

SEQ ID NO: 1301214 - RNA, 19 nt, Human
ggggaggcagagccagagg

SEQ ID NO: 1301215 - RNA, 24 nt, Human
uaaggggugggguuccuaaagggu

SEQ ID NO: 1301216 - RNA, 21 nt, Human
uacagcaccgugccaccgcca

SEQ ID NO: 1301217 - RNA, 18 nt, Human
uccagugacagggacugu

SEQ ID NO: 1301218 - RNA, 19 nt, Human
ugccacagagggcuccugc

SEQ ID NO: 1301219 - RNA, 19 nt, Human
ugugacgggagaaaccgcu

SEQ ID NO: 1301220 - RNA, 24 nt, Human
uucccggcuuccucuugcugacug

SEQ ID NO: 1301221 - RNA, 22 nt, Human
acucuaugaucccagagagagg

SEQ ID NO: 1301222 - RNA, 19 nt, Human
acugcaacuuccaugaugc

SEQ ID NO: 1301223 - RNA, 26 nt, Human
agaguggaguccagguggcacccacu

SEQ ID NO: 1301224 - RNA, 20 nt, Human
caccuuggacucuaugaucc

SEQ ID NO: 1301225 - RNA, 30 nt, Human
cagaugacaguguucagcugagaaaguccc

SEQ ID NO: 1301226 - RNA, 21 nt, Human
ccaauggcuccucggucuucu

SEQ ID NO: 1301227 - RNA, 21 nt, Human
ccacugcccgagcaucauguu

SEQ ID NO: 1301228 - RNA, 25 nt, Human
ccagagcuucucugcaggcauccaa

SEQ ID NO: 1301229 - RNA, 22 nt, Human
ccccagagcuucucugcaggca

SEQ ID NO: 1301230 - RNA, 20 nt, Human
cguaucuucagaucuuuuca

SEQ ID NO: 1301231 - RNA, 21 nt, Human
cuuggccugguauucuuuggc

SEQ ID NO: 1301232 - RNA, 18 nt, Human
gccugguauucuuuggcu

SEQ ID NO: 1301233 - RNA, 22 nt, Human
ucauauagcuagauccaguaga

SEQ ID NO: 1301234 - RNA, 23 nt, Human
uccaugaugcaagaauuucucuu

SEQ ID NO: 1301235 - RNA, 24 nt, Human
ucguguuguguugaauuccaaugg

SEQ ID NO: 1301236 - RNA, 22 nt, Human
ucucugcaggcauccaaggggc

SEQ ID NO: 1301237 - RNA, 19 nt, Human
ucuggguucuugccugaag

SEQ ID NO: 1301238 - RNA, 21 nt, Human
ugaauaccagggugaauggaa

SEQ ID NO: 1301239 - RNA, 23 nt, Human
ugacugaagccccagagcuucuc

SEQ ID NO: 1301240 - RNA, 21 nt, Human
ugaucccagagagaggggaga

SEQ ID NO: 1301241 - RNA, 18 nt, Human
ugccugaagcucuggcag

SEQ ID NO: 1301242 - RNA, 21 nt, Human
ugccugaagcucuggcagaug

SEQ ID NO: 1301243 - RNA, 24 nt, Human
uggcagaugacaguguucagcuga

SEQ ID NO: 1301244 - RNA, 18 nt, Human
uggccgagaggccacaga

SEQ ID NO: 1301245 - RNA, 24 nt, Human
uggccugguauucuuuggcuuauu

SEQ ID NO: 1301246 - RNA, 21 nt, Human
ugggauuggccgagaggccac

SEQ ID NO: 1301247 - RNA, 21 nt, Human
uuauuuugucaugucuggggu

SEQ ID NO: 1301248 - RNA, 21 nt, Human
uugucaugucugggguuucau

SEQ ID NO: 1301249 - RNA, 18 nt, Human
aagccaaauauaagucac

SEQ ID NO: 1301250 - RNA, 25 nt, Human
agacaggaaagaaauguugcaucga

SEQ ID NO: 1301251 - RNA, 18 nt, Human
cagaaauggagcuguuca

SEQ ID NO: 1301252 - RNA, 21 nt, Human
cauaagucaguagccaggggc

SEQ ID NO: 1301253 - RNA, 20 nt, Human
caugugcacagaaauggagc

SEQ ID NO: 1301254 - RNA, 24 nt, Human
cuagugagggagggagccuucuuc

SEQ ID NO: 1301255 - RNA, 30 nt, Human
cuuggaaauccuguccauagauucuuccuu

SEQ ID NO: 1301256 - RNA, 24 nt, Human
gcgcaucuggaacaaugcauacag

SEQ ID NO: 1301257 - RNA, 23 nt, Human
uacaaacagcccagacaggaaag

SEQ ID NO: 1301258 - RNA, 20 nt, Human
ugcacagaaauggagcuguu

SEQ ID NO: 1301259 - RNA, 18 nt, Human
uggcaagagcgcaucugg

SEQ ID NO: 1301260 - RNA, 19 nt, Human
uguccauagauucuuccuu

SEQ ID NO: 1301261 - RNA, 21 nt, Human
uuccaccaacaugugcacaga

SEQ ID NO: 1301262 - RNA, 21 nt, Human
aaaaucccaaaagagcccuuu

SEQ ID NO: 1301263 - RNA, 21 nt, Human
agaaaaaucccaaaagagccc

SEQ ID NO: 1301264 - RNA, 21 nt, Human
agagcccuuugcucuuuuucu

SEQ ID NO: 1301265 - RNA, 19 nt, Human
aggaaagagaaaaauccca

SEQ ID NO: 1301266 - RNA, 22 nt, Human
aggaaagagaaaaaucccaaaa

SEQ ID NO: 1301267 - RNA, 20 nt, Human
auacuccccuuuccuucuca

SEQ ID NO: 1301268 - RNA, 19 nt, Human
cauaguacuugcgcaaggc

SEQ ID NO: 1301269 - RNA, 23 nt, Human
cccaaaagagcccuuugcucuuu

SEQ ID NO: 1301270 - RNA, 18 nt, Human
uacugcuguuccagguca

SEQ ID NO: 1301271 - RNA, 21 nt, Human
uccaggucagagagagagcuc

SEQ ID NO: 1301272 - RNA, 19 nt, Human
ucccaaaagagcccuuugc

SEQ ID NO: 1301273 - RNA, 20 nt, Human
ucuuuuucuugugcucucug

SEQ ID NO: 1301274 - RNA, 23 nt, Human
ugucaaggaaagagaaaaauccc

SEQ ID NO: 1301275 - RNA, 21 nt, Human
uuccaggucagagagagagcu

SEQ ID NO: 1301276 - RNA, 19 nt, Human
aaccaauccgacacccgcc

SEQ ID NO: 1301277 - RNA, 25 nt, Human
aggagaauccuguugggggaggcgg

SEQ ID NO: 1301278 - RNA, 18 nt, Human
aggcgggggccggugguc

SEQ ID NO: 1301279 - RNA, 22 nt, Human
auaaagcccccagccggacgcu

SEQ ID NO: 1301280 - RNA, 23 nt, Human
ccaaaggagaauccuguuggggg

SEQ ID NO: 1301281 - RNA, 19 nt, Human
ccagcaggcugaagagagg

SEQ ID NO: 1301282 - RNA, 21 nt, Human
cccccagccggacgcugccgc

SEQ ID NO: 1301283 - RNA, 18 nt, Human
cccccuaauaaagccccc

SEQ ID NO: 1301284 - RNA, 23 nt, Human
ccggugcccccuaauaaagcccc

SEQ ID NO: 1301285 - RNA, 18 nt, Human
ccuaauaaagcccccagc

SEQ ID NO: 1301286 - RNA, 21 nt, Human
ccuguugggggaggcgggggc

SEQ ID NO: 1301287 - RNA, 23 nt, Human
cuaccgggguuuggcaacuuccg

SEQ ID NO: 1301288 - RNA, 23 nt, Human
cucuuggcuuuaaaauaaccacc

SEQ ID NO: 1301289 - RNA, 19 nt, Human
cuguggcccaaaggagaau

SEQ ID NO: 1301290 - RNA, 21 nt, Human
cuguugggggaggcgggggcc

SEQ ID NO: 1301291 - RNA, 25 nt, Human
cuuuaaaauaaccaccaaguagaaa

SEQ ID NO: 1301292 - RNA, 24 nt, Human
gcgggggccgguggucgcuaacca

SEQ ID NO: 1301293 - RNA, 18 nt, Human
ggaggcgggggccggugg

SEQ ID NO: 1301294 - RNA, 24 nt, Human
uaaguuuacagcuugguaaauuua

SEQ ID NO: 1301295 - RNA, 18 nt, Human
uacaaagaguaaaccugg

SEQ ID NO: 1301296 - RNA, 24 nt, Human
uacagcuugguaaauuuagccucu

SEQ ID NO: 1301297 - RNA, 24 nt, Human
uagcagcacccggugcccccuaau

SEQ ID NO: 1301298 - RNA, 23 nt, Human
uagccucuuggcuuuaaaauaac

SEQ ID NO: 1301299 - RNA, 18 nt, Human
uguagcagcacccggugc

SEQ ID NO: 1301300 - RNA, 21 nt, Human
uguugggggaggcgggggccg

SEQ ID NO: 1301301 - RNA, 25 nt, Human
uucccaaaaggaaaacuuucccaaa

SEQ ID NO: 1301302 - RNA, 18 nt, Human
uuuaaaauaaccaccaag

SEQ ID NO: 1301303 - RNA, 19 nt, Human
aacacggagaaaccccguc

SEQ ID NO: 1301304 - RNA, 20 nt, Human
aacacggagaaaccccgucu

SEQ ID NO: 1301305 - RNA, 20 nt, Human
acaagggugaaacuccgucu

SEQ ID NO: 1301306 - RNA, 21 nt, Human
acaagggugaaacuccgucuc

SEQ ID NO: 1301307 - RNA, 20 nt, Human
acaccauugcacuccagccu

SEQ ID NO: 1301308 - RNA, 23 nt, Human
accauguugcccaggcggucugg

SEQ ID NO: 1301309 - RNA, 22 nt, Human
accgggggcacgguggcucacg

SEQ ID NO: 1301310 - RNA, 22 nt, Human
accgggggcgcgguggcucacg

SEQ ID NO: 1301311 - RNA, 18 nt, Human
accggguuucaccauguu

SEQ ID NO: 1301312 - RNA, 19 nt, Human
accggguuucaccauguug

SEQ ID NO: 1301313 - RNA, 24 nt, Human
accggguuucaccauguugcccag

SEQ ID NO: 1301314 - RNA, 22 nt, Human
accucugccucuuggguucaag

SEQ ID NO: 1301315 - RNA, 25 nt, Human
acuccagccuggacaacaaggguga

SEQ ID NO: 1301316 - RNA, 18 nt, Human
agcccgaccaacacggag

SEQ ID NO: 1301317 - RNA, 18 nt, Human
agcuaccacgccaggccg

SEQ ID NO: 1301318 - RNA, 18 nt, Human
aggcaggagaaucaccua

SEQ ID NO: 1301319 - RNA, 23 nt, Human
aggcaggagaaucaccuaaaucc

SEQ ID NO: 1301320 - RNA, 24 nt, Human
aggcaggagaaucaccuaaauccg

SEQ ID NO: 1301321 - RNA, 20 nt, Human
aggccgagguugcggugggc

SEQ ID NO: 1301322 - RNA, 24 nt, Human
aggccgagguugcggugggcaaag

SEQ ID NO: 1301323 - RNA, 21 nt, Human
aggcggaggcggguggaucac

SEQ ID NO: 1301324 - RNA, 22 nt, Human
aggcggguggaucacccgaggu

SEQ ID NO: 1301325 - RNA, 26 nt, Human
aggcggguggaucacccgaggucagg

SEQ ID NO: 1301326 - RNA, 18 nt, Human
aggcggucuggaacuccu

SEQ ID NO: 1301327 - RNA, 23 nt, Human
agguugcggugggcaaagaucac

SEQ ID NO: 1301328 - RNA, 24 nt, Human
agugcaauggcaugaucucggcuc

SEQ ID NO: 1301329 - RNA, 24 nt, Human
aucacaccauugcacuccagccug

SEQ ID NO: 1301330 - RNA, 18 nt, Human
auugcacuccagccugga

SEQ ID NO: 1301331 - RNA, 25 nt, Human
auugcacuccagccuggacaacaag

SEQ ID NO: 1301332 - RNA, 22 nt, Human
caagcgauuuucuugccucagc

SEQ ID NO: 1301333 - RNA, 19 nt, Human
cacagcuaacuugcccucc

SEQ ID NO: 1301334 - RNA, 19 nt, Human
caccaggaagcgcagccgg

SEQ ID NO: 1301335 - RNA, 18 nt, Human
caccauguugcccaggcg

SEQ ID NO: 1301336 - RNA, 21 nt, Human
caccauguugcccaggcgguc

SEQ ID NO: 1301337 - RNA, 30 nt, Human
caccauguugcccaggcggucuggaacucc

SEQ ID NO: 1301338 - RNA, 19 nt, Human
cacgccaccaggaagcgca

SEQ ID NO: 1301339 - RNA, 19 nt, Human
cacgccugcaaucccagca

SEQ ID NO: 1301340 - RNA, 19 nt, Human
cacgccugcaaucccagca

SEQ ID NO: 1301341 - RNA, 20 nt, Human
cacuccagccuggacaacaa

SEQ ID NO: 1301342 - RNA, 23 nt, Human
cacuccagccuggacaacaaggg

SEQ ID NO: 1301343 - RNA, 25 nt, Human
cacuccagccuggacaacaagggug

SEQ ID NO: 1301344 - RNA, 23 nt, Human
cacugcgaccucugccucuuggg

SEQ ID NO: 1301345 - RNA, 21 nt, Human
cagagaccggguuucaccaug

SEQ ID NO: 1301346 - RNA, 22 nt, Human
cagcggccuuggguuugggcuc

SEQ ID NO: 1301347 - RNA, 27 nt, Human
cagcggccuuggguuugggcuccagcc

SEQ ID NO: 1301348 - RNA, 21 nt, Human
cagcuaacuugcccuccgcgc

SEQ ID NO: 1301349 - RNA, 22 nt, Human
cauguugcccaggcggucugga

SEQ ID NO: 1301350 - RNA, 23 nt, Human
cauguugcccaggcggucuggaa

SEQ ID NO: 1301351 - RNA, 18 nt, Human
cauugcacuccagccugg

SEQ ID NO: 1301352 - RNA, 20 nt, Human
cauugcacuccagccuggac

SEQ ID NO: 1301353 - RNA, 21 nt, Human
cauugcacuccagccuggaca

SEQ ID NO: 1301354 - RNA, 19 nt, Human
ccauugcacuccagccugg

SEQ ID NO: 1301355 - RNA, 20 nt, Human
ccauugcacuccagccugga

SEQ ID NO: 1301356 - RNA, 21 nt, Human
ccauugcacuccagccuggac

SEQ ID NO: 1301357 - RNA, 22 nt, Human
ccauugcacuccagccuggaca

SEQ ID NO: 1301358 - RNA, 23 nt, Human
ccauugcacuccagccuggacaa

SEQ ID NO: 1301359 - RNA, 22 nt, Human
cccaggcuggagugcaauggca

SEQ ID NO: 1301360 - RNA, 18 nt, Human
ccccagccgggcccccuc

SEQ ID NO: 1301361 - RNA, 19 nt, Human
ccccagccgggcccccucg

SEQ ID NO: 1301362 - RNA, 19 nt, Human
ccccucgcgccgcugcggc

SEQ ID NO: 1301363 - RNA, 21 nt, Human
cccuccgcgccauuccacgcc

SEQ ID NO: 1301364 - RNA, 23 nt, Human
ccgaucuauuccuuucugguuac

SEQ ID NO: 1301365 - RNA, 19 nt, Human
ccggaccggcgcccagccc

SEQ ID NO: 1301366 - RNA, 24 nt, Human
ccggguuucaccauguugcccagg

SEQ ID NO: 1301367 - RNA, 19 nt, Human
ccuccgcgccauuccacgc

SEQ ID NO: 1301368 - RNA, 21 nt, Human
ccugcaaucccagcacccagg

SEQ ID NO: 1301369 - RNA, 24 nt, Human
cgagguugcggugggcaaagauca

SEQ ID NO: 1301370 - RNA, 26 nt, Human
cgccaggccgaucuauuccuuucugg

SEQ ID NO: 1301371 - RNA, 23 nt, Human
cgccugcaaucccagcacccagg

SEQ ID NO: 1301372 - RNA, 27 nt, Human
cggaggcggguggaucacccgagguca

SEQ ID NO: 1301373 - RNA, 19 nt, Human
cggcaucggcgaagaggcc

SEQ ID NO: 1301374 - RNA, 21 nt, Human
cggcggcagcggcccuaggac

SEQ ID NO: 1301375 - RNA, 21 nt, Human
cgggaggccgagguugcggug

SEQ ID NO: 1301376 - RNA, 24 nt, Human
cgggaggccgagguugcggugggc

SEQ ID NO: 1301377 - RNA, 24 nt, Human
cggguggaucacccgaggucagga

SEQ ID NO: 1301378 - RNA, 22 nt, Human
cggguuucaccauguugcccag

SEQ ID NO: 1301379 - RNA, 19 nt, Human
cucaagcgaucugccacac

SEQ ID NO: 1301380 - RNA, 23 nt, Human
cucacgccugcaaucccagcacc

SEQ ID NO: 1301381 - RNA, 23 nt, Human
cucacgccugcaaucccagcacc

SEQ ID NO: 1301382 - RNA, 24 nt, Human
cucacgccugcaaucccagcaccc

SEQ ID NO: 1301383 - RNA, 24 nt, Human
cucacgccugcaaucccagcaccc

SEQ ID NO: 1301384 - RNA, 24 nt, Human
cucacugcgaccucugccucuugg

SEQ ID NO: 1301385 - RNA, 20 nt, Human
cucgcgccgcugcggcugcu

SEQ ID NO: 1301386 - RNA, 24 nt, Human
cugcgaccucugccucuuggguuc

SEQ ID NO: 1301387 - RNA, 24 nt, Human
cuggagugcaauggcaugaucucg

SEQ ID NO: 1301388 - RNA, 18 nt, Human
cugggaucacaaggggga

SEQ ID NO: 1301389 - RNA, 19 nt, Human
cuugccggaccggcgccca

SEQ ID NO: 1301390 - RNA, 21 nt, Human
gacagucccaggcuggagugc

SEQ ID NO: 1301391 - RNA, 27 nt, Human
gaggcgggcguaucacuccccaagggg

SEQ ID NO: 1301392 - RNA, 19 nt, Human
gagguugcggugggcaaag

SEQ ID NO: 1301393 - RNA, 24 nt, Human
gaucacccgaggucaggagcuuga

SEQ ID NO: 1301394 - RNA, 23 nt, Human
gcaggagaaucaccuaaauccgg

SEQ ID NO: 1301395 - RNA, 19 nt, Human
gccugucaggggacagucc

SEQ ID NO: 1301396 - RNA, 23 nt, Human
gcggcccuaggacucggcgggcg

SEQ ID NO: 1301397 - RNA, 18 nt, Human
gcggccuuggguuugggc

SEQ ID NO: 1301398 - RNA, 22 nt, Human
gcggucuggaacuccuaggcuc

SEQ ID NO: 1301399 - RNA, 19 nt, Human
gcuggagugcaauggcaug

SEQ ID NO: 1301400 - RNA, 21 nt, Human
ggaccggcgcccagcccucca

SEQ ID NO: 1301401 - RNA, 23 nt, Human
ggcgcgguggcucacgccugcaa

SEQ ID NO: 1301402 - RNA, 21 nt, Human
ggcucacgccugcaaucccag

SEQ ID NO: 1301403 - RNA, 19 nt, Human
ggcuccagccccagccggg

SEQ ID NO: 1301404 - RNA, 24 nt, Human
gggcacgguggcucacgccugcaa

SEQ ID NO: 1301405 - RNA, 22 nt, Human
ggguuucaccauguugcccagg

SEQ ID NO: 1301406 - RNA, 21 nt, Human
gguggaucacccgaggucagg

SEQ ID NO: 1301407 - RNA, 24 nt, Human
gguggcucacgccugcaaucccag

SEQ ID NO: 1301408 - RNA, 24 nt, Human
gguggcucacgccugcaaucccag

SEQ ID NO: 1301409 - RNA, 24 nt, Human
gugaaacuccgucucaaaacagag

SEQ ID NO: 1301410 - RNA, 23 nt, Human
ucaaaacagagaccggguuucac

SEQ ID NO: 1301411 - RNA, 19 nt, Human
ucaagcgauuuucuugccu

SEQ ID NO: 1301412 - RNA, 23 nt, Human
ucacaccauugcacuccagccug

SEQ ID NO: 1301413 - RNA, 31 nt, Human
ucacaccauugcacuccagccuggacaacaa

SEQ ID NO: 1301414 - RNA, 22 nt, Human
ucacagcuaacuugcccuccgc

SEQ ID NO: 1301415 - RNA, 18 nt, Human
ucacccgaggucaggagc

SEQ ID NO: 1301416 - RNA, 19 nt, Human
ucacccgaggucaggagcu

SEQ ID NO: 1301417 - RNA, 24 nt, Human
ucacugcgaccucugccucuuggg

SEQ ID NO: 1301418 - RNA, 24 nt, Human
ucccaggcuggagugcaauggcau

SEQ ID NO: 1301419 - RNA, 19 nt, Human
uccgggaggccgagguugc

SEQ ID NO: 1301420 - RNA, 18 nt, Human
uccuaggcucaagcgauc

SEQ ID NO: 1301421 - RNA, 20 nt, Human
uccuaggcucaagcgaucug

SEQ ID NO: 1301422 - RNA, 21 nt, Human
ucgcgccgcugcggcugcugc

SEQ ID NO: 1301423 - RNA, 23 nt, Human
ucggcgaagaggccuugccggac

SEQ ID NO: 1301424 - RNA, 23 nt, Human
ucggcggcagcggcccuaggacu

SEQ ID NO: 1301425 - RNA, 21 nt, Human
ugcaaucccagcacccaggga

SEQ ID NO: 1301426 - RNA, 21 nt, Human
ugcaaucccagcacccaggga

SEQ ID NO: 1301427 - RNA, 19 nt, Human
ugcacuccagccuggacaa

SEQ ID NO: 1301428 - RNA, 20 nt, Human
ugcggugggcaaagaucaac

SEQ ID NO: 1301429 - RNA, 19 nt, Human
uggagugcaauggcaugau

SEQ ID NO: 1301430 - RNA, 24 nt, Human
uggagugcaauggcaugaucucgg

SEQ ID NO: 1301431 - RNA, 23 nt, Human
uggaucacccgaggucaggagcu

SEQ ID NO: 1301432 - RNA, 24 nt, Human
uggaucacccgaggucaggagcuu

SEQ ID NO: 1301433 - RNA, 27 nt, Human
uggaucacccgaggucaggagcuugag

SEQ ID NO: 1301434 - RNA, 22 nt, Human
uggcucacgccugcaaucccag

SEQ ID NO: 1301435 - RNA, 24 nt, Human
uggcucacgccugcaaucccagca

SEQ ID NO: 1301436 - RNA, 24 nt, Human
uggcucacgccugcaaucccagca

SEQ ID NO: 1301437 - RNA, 23 nt, Human
uggguucaagcgauuuucuugcc

SEQ ID NO: 1301438 - RNA, 24 nt, Human
uggguucaagcgauuuucuugccu

SEQ ID NO: 1301439 - RNA, 23 nt, Human
uuacuaaauuggaccgggggcgc

SEQ ID NO: 1301440 - RNA, 23 nt, Human
uucaagcgauuuucuugccucag

SEQ ID NO: 1301441 - RNA, 19 nt, Human
uugggcuccagccccagcc

SEQ ID NO: 1301442 - RNA, 20 nt, Human
uuucaccauguugcccaggc

SEQ ID NO: 1301443 - RNA, 20 nt, Human
cgacaggagcucauacggca

SEQ ID NO: 1301444 - RNA, 23 nt, Human
cgacaggagcucauacggcagag

SEQ ID NO: 1301445 - RNA, 22 nt, Human
aaaaaagaaaaaugcuaaagga

SEQ ID NO: 1301446 - RNA, 18 nt, Human
aaaaagcucccccaaaag

SEQ ID NO: 1301447 - RNA, 19 nt, Human
aaauaaacuuaaacuauaa

SEQ ID NO: 1301448 - RNA, 21 nt, Human
aacauuaaaaaagcauggcag

SEQ ID NO: 1301449 - RNA, 23 nt, Human
aauucuuggccuuuaaacaacuc

SEQ ID NO: 1301450 - RNA, 19 nt, Human
acaaaguaauaaacagugc

SEQ ID NO: 1301451 - RNA, 27 nt, Human
acacagaaaauggaggaaaggggaccc

SEQ ID NO: 1301452 - RNA, 21 nt, Human
acuuuccucuucugugagauu

SEQ ID NO: 1301453 - RNA, 24 nt, Human
aggcuguuuccaauucuuggccuu

SEQ ID NO: 1301454 - RNA, 23 nt, Human
agucuaacauucaaaggaaguaa

SEQ ID NO: 1301455 - RNA, 23 nt, Human
augccagagugaacaucagugag

SEQ ID NO: 1301456 - RNA, 22 nt, Human
cacuuuccucuucugugagauu

SEQ ID NO: 1301457 - RNA, 19 nt, Human
cagccuauuccaaaccaaa

SEQ ID NO: 1301458 - RNA, 19 nt, Human
cagccuauuccaaaccaaa

SEQ ID NO: 1301459 - RNA, 21 nt, Human
cagugagagccacagacacac

SEQ ID NO: 1301460 - RNA, 25 nt, Human
cagugcacacuugggggcaaacuac

SEQ ID NO: 1301461 - RNA, 18 nt, Human
ccaaaccaaagagaacag

SEQ ID NO: 1301462 - RNA, 21 nt, Human
ccacuuuccucuucugugaga

SEQ ID NO: 1301463 - RNA, 19 nt, Human
ccagaggaggccacuuucc

SEQ ID NO: 1301464 - RNA, 21 nt, Human
cucccaucaccaauacacaga

SEQ ID NO: 1301465 - RNA, 22 nt, Human
cuuaaacuauaaauuagaaaca

SEQ ID NO: 1301466 - RNA, 20 nt, Human
gaagagcucacugugauuaa

SEQ ID NO: 1301467 - RNA, 22 nt, Human
gaggaggccacuuuccucuucu

SEQ ID NO: 1301468 - RNA, 22 nt, Human
uaaauuagaaacacaaauaauc

SEQ ID NO: 1301469 - RNA, 19 nt, Human
uacaaaguaauaaacagug

SEQ ID NO: 1301470 - RNA, 21 nt, Human
uagaaacacaaauaaucauga

SEQ ID NO: 1301471 - RNA, 20 nt, Human
ucugaaugcuguagugaaua

SEQ ID NO: 1301472 - RNA, 23 nt, Human
ucuugagcagcuguuugaugaug

SEQ ID NO: 1301473 - RNA, 22 nt, Human
ugaaauuaaaaaagaaaaaugc

SEQ ID NO: 1301474 - RNA, 28 nt, Human
ugaacucccaccacguaagggcaaacuc

SEQ ID NO: 1301475 - RNA, 24 nt, Human
ugaauauacaugcugcaauaacau

SEQ ID NO: 1301476 - RNA, 21 nt, Human
uggcagccuauuccaaaccaa

SEQ ID NO: 1301477 - RNA, 18 nt, Human
uggccuuuaaacaacucu

SEQ ID NO: 1301478 - RNA, 18 nt, Human
ugggcaaagagugggucu

SEQ ID NO: 1301479 - RNA, 23 nt, Human
uuaaaaaagaaaaaugcuaaagg

SEQ ID NO: 1301480 - RNA, 21 nt, Human
uugagcuaaggaagagcucac

SEQ ID NO: 1301481 - RNA, 22 nt, Human
uuggccuuuaaacaacucuaaa

SEQ ID NO: 1301482 - RNA, 20 nt, Human
uuuaaaaauuucuugagcag

SEQ ID NO: 1301483 - RNA, 21 nt, Human
aagcccuggacacguaggagu

SEQ ID NO: 1301484 - RNA, 18 nt, Human
agacccuccucugcacuc

SEQ ID NO: 1301485 - RNA, 18 nt, Human
agauguuaagguccaacc

SEQ ID NO: 1301486 - RNA, 18 nt, Human
agccccugccagacccuc

SEQ ID NO: 1301487 - RNA, 23 nt, Human
agcuaggcggccugagcagcccc

SEQ ID NO: 1301488 - RNA, 21 nt, Human
caccccuuccucccugcacag

SEQ ID NO: 1301489 - RNA, 22 nt, Human
cagacccuccucugcacuccuc

SEQ ID NO: 1301490 - RNA, 20 nt, Human
ccaaggaagggguggaguug

SEQ ID NO: 1301491 - RNA, 23 nt, Human
ccagacccuccucugcacuccuc

SEQ ID NO: 1301492 - RNA, 22 nt, Human
cccaagcccuggacacguagga

SEQ ID NO: 1301493 - RNA, 19 nt, Human
ccccugccagacccuccuc

SEQ ID NO: 1301494 - RNA, 22 nt, Human
cccugcacagcucuggcucuuc

SEQ ID NO: 1301495 - RNA, 23 nt, Human
ccucucaccccuuccucccugca

SEQ ID NO: 1301496 - RNA, 18 nt, Human
ccucugcacuccucugcc

SEQ ID NO: 1301497 - RNA, 24 nt, Human
ccucugcacuccucugccuaaguc

SEQ ID NO: 1301498 - RNA, 21 nt, Human
ccugccagacccuccucugca

SEQ ID NO: 1301499 - RNA, 21 nt, Human
cggcccaagcccuggacacgu

SEQ ID NO: 1301500 - RNA, 19 nt, Human
cucucaccccuuccucccu

SEQ ID NO: 1301501 - RNA, 19 nt, Human
cugagcagccccugccaga

SEQ ID NO: 1301502 - RNA, 21 nt, Human
cugcacagcucuggcucuucc

SEQ ID NO: 1301503 - RNA, 18 nt, Human
cuuccucccugcacagcu

SEQ ID NO: 1301504 - RNA, 22 nt, Human
gggcaaggccaaggaaggggug

SEQ ID NO: 1301505 - RNA, 22 nt, Human
uaggcgggcaggggcaaggcca

SEQ ID NO: 1301506 - RNA, 23 nt, Human
ucuaggugugggggccccccucu

SEQ ID NO: 1301507 - RNA, 21 nt, Human
ugagcagccccugccagaccc

SEQ ID NO: 1301508 - RNA, 23 nt, Human
ugccagacccuccucugcacucc

SEQ ID NO: 1301509 - RNA, 20 nt, Human
uggcaaaggggcagcuaggc

SEQ ID NO: 1301510 - RNA, 24 nt, Human
uguaggcgggcaggggcaaggcca

SEQ ID NO: 1301511 - RNA, 22 nt, Human
uuagggaacacucuuccuucag

SEQ ID NO: 1301512 - RNA, 18 nt, Human
acaggggagccugacggg

SEQ ID NO: 1301513 - RNA, 24 nt, Human
acccgcgcuaccuccuccagaccc

SEQ ID NO: 1301514 - RNA, 18 nt, Human
acccggagggcggcgggg

SEQ ID NO: 1301515 - RNA, 19 nt, Human
acccuccccgcucccuggg

SEQ ID NO: 1301516 - RNA, 20 nt, Human
accuccuccagacccgcgcg

SEQ ID NO: 1301517 - RNA, 18 nt, Human
acugacaacugugcuuuc

SEQ ID NO: 1301518 - RNA, 19 nt, Human
agguucugguuggggcagc

SEQ ID NO: 1301519 - RNA, 25 nt, Human
agucugcugggacacagagcugggu

SEQ ID NO: 1301520 - RNA, 20 nt, Human
caaucaggcaggcaggggca

SEQ ID NO: 1301521 - RNA, 22 nt, Human
caaucugucguagcuccccacu

SEQ ID NO: 1301522 - RNA, 23 nt, Human
caccacgugcccgagccgggggc

SEQ ID NO: 1301523 - RNA, 22 nt, Human
cacccggggaccgcuccuagcc

SEQ ID NO: 1301524 - RNA, 18 nt, Human
cagcgaauucccgcuucc

SEQ ID NO: 1301525 - RNA, 19 nt, Human
cagguccgcgguggaggcg

SEQ ID NO: 1301526 - RNA, 20 nt, Human
cauccaagguucugguuggg

SEQ ID NO: 1301527 - RNA, 22 nt, Human
cauccaagguucugguuggggc

SEQ ID NO: 1301528 - RNA, 18 nt, Human
ccacuggcaguguguaug

SEQ ID NO: 1301529 - RNA, 19 nt, Human
ccagacccgcgcuaccucc

SEQ ID NO: 1301530 - RNA, 21 nt, Human
ccagggugacggugguuagag

SEQ ID NO: 1301531 - RNA, 23 nt, Human
ccagguccaccaguuuuccccug

SEQ ID NO: 1301532 - RNA, 22 nt, Human
ccccgcauugugccuccagacc

SEQ ID NO: 1301533 - RNA, 28 nt, Human
ccccgggccgcagauauaccagggcucc

SEQ ID NO: 1301534 - RNA, 21 nt, Human
ccccuccggccccacgcgucc

SEQ ID NO: 1301535 - RNA, 24 nt, Human
cccgcugcgcuccagccccgggcc

SEQ ID NO: 1301536 - RNA, 20 nt, Human
cccuccggccucgcgucucc

SEQ ID NO: 1301537 - RNA, 21 nt, Human
cccucuggcgacuccggccgc

SEQ ID NO: 1301538 - RNA, 21 nt, Human
ccgcauugugccuccagaccc

SEQ ID NO: 1301539 - RNA, 19 nt, Human
ccgccaccacgugcccgag

SEQ ID NO: 1301540 - RNA, 21 nt, Human
ccgcugcgcuccagccccggg

SEQ ID NO: 1301541 - RNA, 22 nt, Human
ccgcugcgcuccagccccgggc

SEQ ID NO: 1301542 - RNA, 23 nt, Human
ccggagagacccggagggcggcg

SEQ ID NO: 1301543 - RNA, 19 nt, Human
ccuccagacccgcgcuacc

SEQ ID NO: 1301544 - RNA, 20 nt, Human
ccuuccucccucugaucuca

SEQ ID NO: 1301545 - RNA, 24 nt, Human
cgagaggaaauaggcccggcaggu

SEQ ID NO: 1301546 - RNA, 26 nt, Human
cgcacugucuccuccgguccugcgug

SEQ ID NO: 1301547 - RNA, 23 nt, Human
cgcauugugccuccagacccgcg

SEQ ID NO: 1301548 - RNA, 20 nt, Human
cggcggggcccggggucucc

SEQ ID NO: 1301549 - RNA, 24 nt, Human
cuccagacccgcgcguccccucug

SEQ ID NO: 1301550 - RNA, 22 nt, Human
cugcagccccgcauugugccuc

SEQ ID NO: 1301551 - RNA, 19 nt, Human
cugcgcuccagccccgggc

SEQ ID NO: 1301552 - RNA, 23 nt, Human
cuggcacuuccgcaagcagccuu

SEQ ID NO: 1301553 - RNA, 19 nt, Human
cuggggcagguccgcggug

SEQ ID NO: 1301554 - RNA, 23 nt, Human
cuggggcagguccgcgguggagg

SEQ ID NO: 1301555 - RNA, 21 nt, Human
cugguuggggcagccacaagg

SEQ ID NO: 1301556 - RNA, 22 nt, Human
gaaggugcucucuguuugaggg

SEQ ID NO: 1301557 - RNA, 18 nt, Human
gacccgcgcuaccuccuc

SEQ ID NO: 1301558 - RNA, 20 nt, Human
gacugacaacugugcuuucu

SEQ ID NO: 1301559 - RNA, 21 nt, Human
gagcuggguggauuuccagcu

SEQ ID NO: 1301560 - RNA, 22 nt, Human
gaggcugcugaagucgucccag

SEQ ID NO: 1301561 - RNA, 21 nt, Human
gagugggaggaaggucugagu

SEQ ID NO: 1301562 - RNA, 18 nt, Human
gauccgcacugucuccuc

SEQ ID NO: 1301563 - RNA, 21 nt, Human
gccagugagcacccggggacc

SEQ ID NO: 1301564 - RNA, 19 nt, Human
gcccggggucuccuuccuc

SEQ ID NO: 1301565 - RNA, 19 nt, Human
gccgccaccacgugcccga

SEQ ID NO: 1301566 - RNA, 19 nt, Human
gcuuucuuaggguggaguu

SEQ ID NO: 1301567 - RNA, 25 nt, Human
ggacccggagagacccggagggcgg

SEQ ID NO: 1301568 - RNA, 18 nt, Human
ggcacuuccgcaagcagc

SEQ ID NO: 1301569 - RNA, 18 nt, Human
gggaagucgggaggguac

SEQ ID NO: 1301570 - RNA, 18 nt, Human
gggcuggggcagguccgc

SEQ ID NO: 1301571 - RNA, 24 nt, Human
ggggcuggggcagguccgcggugg

SEQ ID NO: 1301572 - RNA, 24 nt, Human
gggugacugacaacugugcuuucu

SEQ ID NO: 1301573 - RNA, 22 nt, Human
uccagccacagcaguggagaaa

SEQ ID NO: 1301574 - RNA, 26 nt, Human
uccagcucuuccuguggggggccgcc

SEQ ID NO: 1301575 - RNA, 20 nt, Human
ucccugggguuguguuuccg

SEQ ID NO: 1301576 - RNA, 18 nt, Human
uccuuccucccucugauc

SEQ ID NO: 1301577 - RNA, 24 nt, Human
ucugcugggacacagagcugggug

SEQ ID NO: 1301578 - RNA, 23 nt, Human
ugacugacaacugugcuuucuua

SEQ ID NO: 1301579 - RNA, 24 nt, Human
ugagcuagggggcguggccccagg

SEQ ID NO: 1301580 - RNA, 26 nt, Human
ugaggggugacugacaacugugcuuu

SEQ ID NO: 1301581 - RNA, 22 nt, Human
ugagucuuggugguaucuugug

SEQ ID NO: 1301582 - RNA, 19 nt, Human
ugcugggacacagagcugg

SEQ ID NO: 1301583 - RNA, 22 nt, Human
uggcagccagagggccggggag

SEQ ID NO: 1301584 - RNA, 21 nt, Human
ugggagcggcuguaaauaaua

SEQ ID NO: 1301585 - RNA, 24 nt, Human
ugggaggaaggucugagucuuugg

SEQ ID NO: 1301586 - RNA, 23 nt, Human
ugggucuccagggugacgguggu

SEQ ID NO: 1301587 - RNA, 25 nt, Human
ugguuggggcagccacaaggugucu

SEQ ID NO: 1301588 - RNA, 20 nt, Human
uguccagccacagcagugga

SEQ ID NO: 1301589 - RNA, 24 nt, Human
uuccgcaagcagccuuuccagcug

SEQ ID NO: 1301590 - RNA, 20 nt, Human
uuuuccccugucccguggag

SEQ ID NO: 1301591 - RNA, 19 nt, Human
aaagugcuaggauuacagg

SEQ ID NO: 1301592 - RNA, 24 nt, Human
aaagugcuaggauuacagguguga

SEQ ID NO: 1301593 - RNA, 20 nt, Human
aacggagacuuguucuugug

SEQ ID NO: 1301594 - RNA, 23 nt, Human
aagaaggaggaccagaaaugaag

SEQ ID NO: 1301595 - RNA, 28 nt, Human
aagcagaaacgugaaagaaaagggaccc

SEQ ID NO: 1301596 - RNA, 19 nt, Human
aagugcuaggauuacaggu

SEQ ID NO: 1301597 - RNA, 23 nt, Human
acacaccuguguggguaccaaca

SEQ ID NO: 1301598 - RNA, 18 nt, Human
acgccuggccuccgcgug

SEQ ID NO: 1301599 - RNA, 21 nt, Human
agaaagcagaaacgugaaaga

SEQ ID NO: 1301600 - RNA, 22 nt, Human
aggcagcugcccaacucugccc

SEQ ID NO: 1301601 - RNA, 23 nt, Human
aggugugagucaccacgccuggc

SEQ ID NO: 1301602 - RNA, 21 nt, Human
augggccaggggggcacuuuc

SEQ ID NO: 1301603 - RNA, 24 nt, Human
caaagugcuaggauuacaggugug

SEQ ID NO: 1301604 - RNA, 19 nt, Human
caacacugccgaugcuccc

SEQ ID NO: 1301605 - RNA, 19 nt, Human
caccacgccuggccuccgc

SEQ ID NO: 1301606 - RNA, 27 nt, Human
cagcaagguucucuccccaucagguuc

SEQ ID NO: 1301607 - RNA, 21 nt, Human
ccaaagugcuaggauuacagg

SEQ ID NO: 1301608 - RNA, 24 nt, Human
ccaaagugcuaggauuacaggugu

SEQ ID NO: 1301609 - RNA, 23 nt, Human
ccauguggggcccccagcaaggu

SEQ ID NO: 1301610 - RNA, 21 nt, Human
cccagcaagguucucucccca

SEQ ID NO: 1301611 - RNA, 25 nt, Human
ccuggcccauguggggguccccugg

SEQ ID NO: 1301612 - RNA, 22 nt, Human
cucugcccuggcugccccuggc

SEQ ID NO: 1301613 - RNA, 19 nt, Human
gaagaaggaggaccagaaa

SEQ ID NO: 1301614 - RNA, 18 nt, Human
gagcaagcacaaaaccac

SEQ ID NO: 1301615 - RNA, 18 nt, Human
gauuacaggugugaguca

SEQ ID NO: 1301616 - RNA, 21 nt, Human
gauuacaggugugagucacca

SEQ ID NO: 1301617 - RNA, 22 nt, Human
gauuacaggugugagucaccac

SEQ ID NO: 1301618 - RNA, 21 nt, Human
gcaucugucucucucaugcuc

SEQ ID NO: 1301619 - RNA, 20 nt, Human
gccuggccuccgcguggccu

SEQ ID NO: 1301620 - RNA, 21 nt, Human
gcuuugucucucucucucucu

SEQ ID NO: 1301621 - RNA, 22 nt, Human
ggauuacaggugugagucacca

SEQ ID NO: 1301622 - RNA, 24 nt, Human
ggcuggucuugaacuccugagcuc

SEQ ID NO: 1301623 - RNA, 21 nt, Human
ggcuguuguucccacaacaca

SEQ ID NO: 1301624 - RNA, 18 nt, Human
gguugaccaggcuggucu

SEQ ID NO: 1301625 - RNA, 22 nt, Human
gguugaccaggcuggucuugaa

SEQ ID NO: 1301626 - RNA, 20 nt, Human
gugagcaagcacaaaaccac

SEQ ID NO: 1301627 - RNA, 23 nt, Human
uacaggugugagucaccacgccu

SEQ ID NO: 1301628 - RNA, 21 nt, Human
uaccaacacugccgaugcucc

SEQ ID NO: 1301629 - RNA, 18 nt, Human
uaggauuacaggugugag

SEQ ID NO: 1301630 - RNA, 18 nt, Human
uaggauuacaggugugag

SEQ ID NO: 1301631 - RNA, 22 nt, Human
uaggauuacaggugugagucac

SEQ ID NO: 1301632 - RNA, 24 nt, Human
uaggauuacaggugugagucacca

SEQ ID NO: 1301633 - RNA, 26 nt, Human
ucaaaacacaccuguguggguaccaa

SEQ ID NO: 1301634 - RNA, 18 nt, Human
ucagaaagcagaaacgug

SEQ ID NO: 1301635 - RNA, 23 nt, Human
ucccaaagugcuaggauuacagg

SEQ ID NO: 1301636 - RNA, 22 nt, Human
uccccaucagguuccaagaaga

SEQ ID NO: 1301637 - RNA, 22 nt, Human
uccgcguggccuuuggcuuggg

SEQ ID NO: 1301638 - RNA, 21 nt, Human
ucucaggcagcugcccaacuc

SEQ ID NO: 1301639 - RNA, 21 nt, Human
ucuugaacuccugagcucaug

SEQ ID NO: 1301640 - RNA, 21 nt, Human
ucuuggccucccaaagugcua

SEQ ID NO: 1301641 - RNA, 24 nt, Human
ugaccaggcuggucuugaacuccu

SEQ ID NO: 1301642 - RNA, 18 nt, Human
ugagcaagcacaaaacca

SEQ ID NO: 1301643 - RNA, 19 nt, Human
ugagcaagcacaaaaccac

SEQ ID NO: 1301644 - RNA, 26 nt, Human
ugaggugugugggcaucucccacgga

SEQ ID NO: 1301645 - RNA, 24 nt, Human
ugcuaggauuacaggugugaguca

SEQ ID NO: 1301646 - RNA, 21 nt, Human
ugugagucaccacgccuggcc

SEQ ID NO: 1301647 - RNA, 20 nt, Human
uucuucucagaaagcagaaa

SEQ ID NO: 1301648 - RNA, 21 nt, Human
uuguagagacaagguugacca

SEQ ID NO: 1301649 - RNA, 20 nt, Human
uuuuuuguagagacaagguu

SEQ ID NO: 1301650 - RNA, 20 nt, Human
aaaaaugcuaaaaucaucug

SEQ ID NO: 1301651 - RNA, 23 nt, Human
aaaaugcuaaaaucaucugagcc

SEQ ID NO: 1301652 - RNA, 21 nt, Human
aaucaucugagccuucauuga

SEQ ID NO: 1301653 - RNA, 20 nt, Human
cuccgcccagcuuugacccc

SEQ ID NO: 1301654 - RNA, 20 nt, Human
cuggaguaccugaggcugag

SEQ ID NO: 1301655 - RNA, 21 nt, Human
gagcagguaacucacggcacc

SEQ ID NO: 1301656 - RNA, 20 nt, Human
uaccugaggcugagacuggc

SEQ ID NO: 1301657 - RNA, 22 nt, Human
uauugcuaaaaaaaugcuaaaa

SEQ ID NO: 1301658 - RNA, 20 nt, Human
ucaguauggugguugcugaa

SEQ ID NO: 1301659 - RNA, 21 nt, Human
ugagcagguaacucacggcac

SEQ ID NO: 1301660 - RNA, 25 nt, Human
ugaguugggaucuuuuugcuggugu

SEQ ID NO: 1301661 - RNA, 22 nt, Human
ugaugacuacugaucaguaugg

SEQ ID NO: 1301662 - RNA, 21 nt, Human
ugcuaaaaaaaugcuaaaauc

SEQ ID NO: 1301663 - RNA, 18 nt, Human
ugcugcugcuugucacug

SEQ ID NO: 1301664 - RNA, 21 nt, Human
ugcugcugcuugucacuggag

SEQ ID NO: 1301665 - RNA, 24 nt, Human
uggaguaccugaggcugagacugg

SEQ ID NO: 1301666 - RNA, 24 nt, Human
ugguugcugaagguugaacuggcu

SEQ ID NO: 1301667 - RNA, 27 nt, Human
uuauugcuaaaaaaaugcuaaaaucau

SEQ ID NO: 1301668 - RNA, 19 nt, Human
uugcugaagguugaacugg

SEQ ID NO: 1301669 - RNA, 20 nt, Human
aaacauuacccaaucaaaac

SEQ ID NO: 1301670 - RNA, 19 nt, Human
aacauuccaguugcugagu

SEQ ID NO: 1301671 - RNA, 18 nt, Human
aagaacagaaacauuacc

SEQ ID NO: 1301672 - RNA, 20 nt, Human
aaucacuagagaaugagaaa

SEQ ID NO: 1301673 - RNA, 18 nt, Human
accuaagaaauuucaguc

SEQ ID NO: 1301674 - RNA, 20 nt, Human
acgcaugggaaauauucuuu

SEQ ID NO: 1301675 - RNA, 21 nt, Human
ccaaauauuaauaaacauucc

SEQ ID NO: 1301676 - RNA, 21 nt, Human
cccuucucaauuccaaaaauc

SEQ ID NO: 1301677 - RNA, 30 nt, Human
ccugagaccuccuuaacaguuuuccacuuu

SEQ ID NO: 1301678 - RNA, 20 nt, Human
cuacccuucucaauuccaaa

SEQ ID NO: 1301679 - RNA, 20 nt, Human
cuugccuaguauccugaagu

SEQ ID NO: 1301680 - RNA, 19 nt, Human
gaaguauauuuuccaaaua

SEQ ID NO: 1301681 - RNA, 20 nt, Human
gagcuacuguugccuaucag

SEQ ID NO: 1301682 - RNA, 24 nt, Human
gguaacucaaaaauuagcuugaaa

SEQ ID NO: 1301683 - RNA, 21 nt, Human
uaaagugaaauaucccccucu

SEQ ID NO: 1301684 - RNA, 25 nt, Human
uauaaucaaaucuugacauucuacc

SEQ ID NO: 1301685 - RNA, 24 nt, Human
uauucuugccuaguauccugaagu

SEQ ID NO: 1301686 - RNA, 20 nt, Human
ucccuaccuaagaaauuuca

SEQ ID NO: 1301687 - RNA, 22 nt, Human
ucuacccuucucaauuccaaaa

SEQ ID NO: 1301688 - RNA, 25 nt, Human
ucuacccuucucaauuccaaaaauc

SEQ ID NO: 1301689 - RNA, 24 nt, Human
ucugacucccuuaacaaguagcaa

SEQ ID NO: 1301690 - RNA, 26 nt, Human
ugaaaaugccuuaagcucuauaccau

SEQ ID NO: 1301691 - RNA, 18 nt, Human
ugagcaugaaaaugccuu

SEQ ID NO: 1301692 - RNA, 18 nt, Human
uggaaguauauuuuccaa

SEQ ID NO: 1301693 - RNA, 21 nt, Human
uggaaguauauuuuccaaaua

SEQ ID NO: 1301694 - RNA, 22 nt, Human
ugguaacucaaaaauuagcuug

SEQ ID NO: 1301695 - RNA, 22 nt, Human
uucaguaggagcuacuguugcc

SEQ ID NO: 1301696 - RNA, 21 nt, Human
uucuugccuaguauccugaag

SEQ ID NO: 1301697 - RNA, 18 nt, Human
uuucaguaggagcuacug

SEQ ID NO: 1301698 - RNA, 19 nt, Human
uuuucuaaauucccugggu

SEQ ID NO: 1301699 - RNA, 22 nt, Human
cagguauccaccugucagugcc

SEQ ID NO: 1301700 - RNA, 22 nt, Human
cagugccacagccacugguggu

SEQ ID NO: 1301701 - RNA, 22 nt, Human
cccuggcucccuggggccucuc

SEQ ID NO: 1301702 - RNA, 21 nt, Human
cccuggggccucuccaaacac

SEQ ID NO: 1301703 - RNA, 21 nt, Human
ccugucagugccacagccacu

SEQ ID NO: 1301704 - RNA, 23 nt, Human
ccugucagugccacagccacugg

SEQ ID NO: 1301705 - RNA, 21 nt, Human
cuaaggaaagagaagccaggu

SEQ ID NO: 1301706 - RNA, 18 nt, Human
cucccuggggccucucca

SEQ ID NO: 1301707 - RNA, 19 nt, Human
cucccuggggccucuccaa

SEQ ID NO: 1301708 - RNA, 22 nt, Human
cugcuggcucccuggcucccug

SEQ ID NO: 1301709 - RNA, 22 nt, Human
cuggggccucuccaaacaccag

SEQ ID NO: 1301710 - RNA, 19 nt, Human
uagcuucuacaucccuggu

SEQ ID NO: 1301711 - RNA, 18 nt, Human
ucuccaaacaccaggguu

SEQ ID NO: 1301712 - RNA, 24 nt, Human
uggcucccuggcucccuggggccu

SEQ ID NO: 1301713 - RNA, 19 nt, Human
uggggccucuccaaacacc

SEQ ID NO: 1301714 - RNA, 19 nt, Human
ugucagugccacagccacu

SEQ ID NO: 1301715 - RNA, 22 nt, Human
aaaaggaaaagaacagcaaaag

SEQ ID NO: 1301716 - RNA, 21 nt, Human
aaacagaaauaaaagauacua

SEQ ID NO: 1301717 - RNA, 23 nt, Human
aaacagaaauaaaagauacuauc

SEQ ID NO: 1301718 - RNA, 22 nt, Human
aaagaacagcaaaagucaggag

SEQ ID NO: 1301719 - RNA, 19 nt, Human
aacacagcucucccugucu

SEQ ID NO: 1301720 - RNA, 20 nt, Human
aacacagcucucccugucuc

SEQ ID NO: 1301721 - RNA, 20 nt, Human
aaccuaaacccgccuuccuu

SEQ ID NO: 1301722 - RNA, 18 nt, Human
aagaagugauagaguuuc

SEQ ID NO: 1301723 - RNA, 22 nt, Human
aagcacuuuauuuuuuauauau

SEQ ID NO: 1301724 - RNA, 20 nt, Human
aaguuuuucauucuuccuug

SEQ ID NO: 1301725 - RNA, 19 nt, Human
acacagcucucccugucuc

SEQ ID NO: 1301726 - RNA, 19 nt, Human
accauguauaugacaggau

SEQ ID NO: 1301727 - RNA, 22 nt, Human
accuuacgaauccaaagaacug

SEQ ID NO: 1301728 - RNA, 23 nt, Human
acuauagagaguugaaaccuaaa

SEQ ID NO: 1301729 - RNA, 22 nt, Human
acugccagaggcccauaccggc

SEQ ID NO: 1301730 - RNA, 20 nt, Human
agaagcuggacuagagacgg

SEQ ID NO: 1301731 - RNA, 22 nt, Human
agcccagaaacacagcucuccc

SEQ ID NO: 1301732 - RNA, 18 nt, Human
aggacgucauuuuguaaa

SEQ ID NO: 1301733 - RNA, 22 nt, Human
augugccacccagucacagagu

SEQ ID NO: 1301734 - RNA, 20 nt, Human
caacaccuguaguugaauau

SEQ ID NO: 1301735 - RNA, 20 nt, Human
caacuuuacugccgcagccc

SEQ ID NO: 1301736 - RNA, 19 nt, Human
cacagcucucccugucucc

SEQ ID NO: 1301737 - RNA, 19 nt, Human
caccaugaucuucaucaca

SEQ ID NO: 1301738 - RNA, 27 nt, Human
caccuaugaugccauguaccaaauuca

SEQ ID NO: 1301739 - RNA, 18 nt, Human
cagcaguggcaaugggac

SEQ ID NO: 1301740 - RNA, 22 nt, Human
cagcucucccugucuccaacuc

SEQ ID NO: 1301741 - RNA, 23 nt, Human
cagcucucccugucuccaacucc

SEQ ID NO: 1301742 - RNA, 22 nt, Human
cauuuuguaaaguuuaacuucu

SEQ ID NO: 1301743 - RNA, 23 nt, Human
ccaccagauuguacauacugugu

SEQ ID NO: 1301744 - RNA, 23 nt, Human
ccauuuuugaggugcaagcaguu

SEQ ID NO: 1301745 - RNA, 18 nt, Human
cccuugcaaaaggaaaag

SEQ ID NO: 1301746 - RNA, 21 nt, Human
cccuugcaaaaggaaaagaac

SEQ ID NO: 1301747 - RNA, 20 nt, Human
ccucacuugauuugaaaggg

SEQ ID NO: 1301748 - RNA, 19 nt, Human
ccuuccgguggagcugccu

SEQ ID NO: 1301749 - RNA, 18 nt, Human
ccuuccugcccuuuccca

SEQ ID NO: 1301750 - RNA, 18 nt, Human
cgccuuaagccauucagc

SEQ ID NO: 1301751 - RNA, 18 nt, Human
cguaggucaaaagggucu

SEQ ID NO: 1301752 - RNA, 18 nt, Human
cucccugucuccaacucc

SEQ ID NO: 1301753 - RNA, 22 nt, Human
cucucccugucuccaacuccag

SEQ ID NO: 1301754 - RNA, 19 nt, Human
gaggauguggaggcccugc

SEQ ID NO: 1301755 - RNA, 20 nt, Human
gcaaaagucaggagcaguaa

SEQ ID NO: 1301756 - RNA, 18 nt, Human
gcaguggcaaugggacuc

SEQ ID NO: 1301757 - RNA, 22 nt, Human
ggcacccccuugcaaaaggaaa

SEQ ID NO: 1301758 - RNA, 18 nt, Human
ggccugacucggugugcg

SEQ ID NO: 1301759 - RNA, 18 nt, Human
gggcggcaaugacagaag

SEQ ID NO: 1301760 - RNA, 25 nt, Human
uaaaacaugaaacuauaaauuuagg

SEQ ID NO: 1301761 - RNA, 24 nt, Human
uaaaguaagaucuccuugccucuu

SEQ ID NO: 1301762 - RNA, 21 nt, Human
uaagagcuguuacuuuuucag

SEQ ID NO: 1301763 - RNA, 22 nt, Human
uacacagacauccauaugcagc

SEQ ID NO: 1301764 - RNA, 18 nt, Human
uacauauacacagacauc

SEQ ID NO: 1301765 - RNA, 24 nt, Human
uacauauacacagacauccauaug

SEQ ID NO: 1301766 - RNA, 22 nt, Human
uaccaggcaucucaguaacucc

SEQ ID NO: 1301767 - RNA, 19 nt, Human
uagaagcuggacuagagac

SEQ ID NO: 1301768 - RNA, 18 nt, Human
uagaggcccagaucccau

SEQ ID NO: 1301769 - RNA, 22 nt, Human
uauacacagacauccauaugca

SEQ ID NO: 1301770 - RNA, 21 nt, Human
uauauguauauaccauguaua

SEQ ID NO: 1301771 - RNA, 23 nt, Human
uauauugucauaauauauugagu

SEQ ID NO: 1301772 - RNA, 28 nt, Human
uaugacaggauguuuguccugggacacc

SEQ ID NO: 1301773 - RNA, 20 nt, Human
uauguauauaccauguauau

SEQ ID NO: 1301774 - RNA, 18 nt, Human
uccaguaagcccuccuca

SEQ ID NO: 1301775 - RNA, 23 nt, Human
ucccagguggucugaagucaggu

SEQ ID NO: 1301776 - RNA, 21 nt, Human
ucccaucacaaaguuuuucau

SEQ ID NO: 1301777 - RNA, 23 nt, Human
ucgaccugcucaccacuggugau

SEQ ID NO: 1301778 - RNA, 23 nt, Human
ucucaguaacuccuagacuuuuu

SEQ ID NO: 1301779 - RNA, 19 nt, Human
ucuccaacuccaguaagcc

SEQ ID NO: 1301780 - RNA, 18 nt, Human
ucuguguuaaaacaugaa

SEQ ID NO: 1301781 - RNA, 18 nt, Human
ucuuaaacgcugaucuua

SEQ ID NO: 1301782 - RNA, 20 nt, Human
ucuuaaccguuucuuggcuu

SEQ ID NO: 1301783 - RNA, 18 nt, Human
ugaaggacaucuauuucc

SEQ ID NO: 1301784 - RNA, 21 nt, Human
ugauauccauuuuugaggugc

SEQ ID NO: 1301785 - RNA, 20 nt, Human
ugauauguauaguacauaua

SEQ ID NO: 1301786 - RNA, 23 nt, Human
ugaugccaacuuuacugccgcag

SEQ ID NO: 1301787 - RNA, 23 nt, Human
ugauggaaguuuuguagauaagu

SEQ ID NO: 1301788 - RNA, 24 nt, Human
ugaugugccacccagucacagagu

SEQ ID NO: 1301789 - RNA, 19 nt, Human
ugcaaaaggaaaagaacag

SEQ ID NO: 1301790 - RNA, 18 nt, Human
ugccagugaaggacaucu

SEQ ID NO: 1301791 - RNA, 19 nt, Human
ugccuuggaggauguggag

SEQ ID NO: 1301792 - RNA, 20 nt, Human
ugcggccacuucggcacugc

SEQ ID NO: 1301793 - RNA, 18 nt, Human
uggcacauuuuccccagc

SEQ ID NO: 1301794 - RNA, 21 nt, Human
uguggaggcccugcacccaag

SEQ ID NO: 1301795 - RNA, 20 nt, Human
uguggcuuuuuuuguucacc

SEQ ID NO: 1301796 - RNA, 23 nt, Human
ugugugcuugguugauauguaua

SEQ ID NO: 1301797 - RNA, 19 nt, Human
uugaaaccuaaacccgccu

SEQ ID NO: 1301798 - RNA, 23 nt, Human
uuggcacccccuugcaaaaggaa

SEQ ID NO: 1301799 - RNA, 28 nt, Human
uuuuguuuugguuuuuuauuuuuugucu

SEQ ID NO: 1301800 - RNA, 19 nt, Human
aagcacccagcccaacuga

SEQ ID NO: 1301801 - RNA, 20 nt, Human
acccagcccaacugagcuug

SEQ ID NO: 1301802 - RNA, 22 nt, Human
ccagugcaaacuggacugggaa

SEQ ID NO: 1301803 - RNA, 22 nt, Human
cccaacugagcuugaaugcccu

SEQ ID NO: 1301804 - RNA, 19 nt, Human
cgggagacaaaguugaacc

SEQ ID NO: 1301805 - RNA, 22 nt, Human
cugaugaccucugauguucucu

SEQ ID NO: 1301806 - RNA, 21 nt, Human
cuuuuggcuuugaauaaucuu

SEQ ID NO: 1301807 - RNA, 20 nt, Human
gaagcacccagcccaacuga

SEQ ID NO: 1301808 - RNA, 23 nt, Human
gggcugcaccagugcaaacuggg

SEQ ID NO: 1301809 - RNA, 20 nt, Human
ucauuggucaauacaggcaa

SEQ ID NO: 1301810 - RNA, 21 nt, Human
ucucuuggaagcacccagccc

SEQ ID NO: 1301811 - RNA, 21 nt, Human
ugaaggguuucugcaagagaa

SEQ ID NO: 1301812 - RNA, 18 nt, Human
uguuggcuuuuggcuuug

SEQ ID NO: 1301813 - RNA, 23 nt, Human
uuggaagcacccagcccaacuga

SEQ ID NO: 1301814 - RNA, 21 nt, Human
aacaccuucccauucuucagc

SEQ ID NO: 1301815 - RNA, 19 nt, Human
aaccaggcgggcacuggcc

SEQ ID NO: 1301816 - RNA, 21 nt, Human
aacuccaccccgcuccaccuc

SEQ ID NO: 1301817 - RNA, 22 nt, Human
aagagcacccagucuuggacuc

SEQ ID NO: 1301818 - RNA, 19 nt, Human
aaggcagggcggccaggug

SEQ ID NO: 1301819 - RNA, 23 nt, Human
acaaggacuguggccacuggaca

SEQ ID NO: 1301820 - RNA, 21 nt, Human
acaaugagacacagcgggcac

SEQ ID NO: 1301821 - RNA, 18 nt, Human
acacagccacuguguccc

SEQ ID NO: 1301822 - RNA, 18 nt, Human
acgggguggcucugggcc

SEQ ID NO: 1301823 - RNA, 20 nt, Human
acucaacaccuucccauucu

SEQ ID NO: 1301824 - RNA, 20 nt, Human
agagagccauggcaugcagg

SEQ ID NO: 1301825 - RNA, 24 nt, Human
agaggcccuuugguggagaagccc

SEQ ID NO: 1301826 - RNA, 21 nt, Human
agaguccugacuggcacccuc

SEQ ID NO: 1301827 - RNA, 19 nt, Human
agcauuccugggacucgug

SEQ ID NO: 1301828 - RNA, 18 nt, Human
agccuggguggugaguuc

SEQ ID NO: 1301829 - RNA, 23 nt, Human
agcuccgggccagauggcucucc

SEQ ID NO: 1301830 - RNA, 19 nt, Human
aggaagguucagagccuca

SEQ ID NO: 1301831 - RNA, 19 nt, Human
aggcaaagaugggagcaga

SEQ ID NO: 1301832 - RNA, 18 nt, Human
auccucaacugaaacccc

SEQ ID NO: 1301833 - RNA, 18 nt, Human
caacugaaaccccugcca

SEQ ID NO: 1301834 - RNA, 19 nt, Human
caacugaaaccccugccag

SEQ ID NO: 1301835 - RNA, 19 nt, Human
cacagccacuguguccccc

SEQ ID NO: 1301836 - RNA, 21 nt, Human
cacaggaagguucagagccuc

SEQ ID NO: 1301837 - RNA, 21 nt, Human
cacagucugucuccuucaggg

SEQ ID NO: 1301838 - RNA, 25 nt, Human
caccagugggugcucccacacagcc

SEQ ID NO: 1301839 - RNA, 19 nt, Human
cagcagcagcagcagcccc

SEQ ID NO: 1301840 - RNA, 20 nt, Human
cagccugggagcagcagcag

SEQ ID NO: 1301841 - RNA, 25 nt, Human
cagucuucucccccagcuucccucc

SEQ ID NO: 1301842 - RNA, 18 nt, Human
cagugggcugcucucacc

SEQ ID NO: 1301843 - RNA, 19 nt, Human
caucaggaguggccagggg

SEQ ID NO: 1301844 - RNA, 21 nt, Human
caucugaaccccgcuaaaggc

SEQ ID NO: 1301845 - RNA, 23 nt, Human
caugucagucuggcucacacugg

SEQ ID NO: 1301846 - RNA, 22 nt, Human
ccacuaggcagcagugugaccc

SEQ ID NO: 1301847 - RNA, 22 nt, Human
ccagaccagacgggacucaggg

SEQ ID NO: 1301848 - RNA, 20 nt, Human
ccauugugcucccaggaaau

SEQ ID NO: 1301849 - RNA, 21 nt, Human
cccacacagccacuguguccc

SEQ ID NO: 1301850 - RNA, 23 nt, Human
cccacacagccacuguguccccc

SEQ ID NO: 1301851 - RNA, 26 nt, Human
cccaugguggaggcaaagaugggagc

SEQ ID NO: 1301852 - RNA, 18 nt, Human
ccccaggcagugggcugc

SEQ ID NO: 1301853 - RNA, 22 nt, Human
ccccauugccauugaacgccug

SEQ ID NO: 1301854 - RNA, 23 nt, Human
cccccugucacaaccaggcgggc

SEQ ID NO: 1301855 - RNA, 19 nt, Human
ccccuggggacgggguggc

SEQ ID NO: 1301856 - RNA, 19 nt, Human
ccccuggggacgggguggc

SEQ ID NO: 1301857 - RNA, 21 nt, Human
ccccuggggacgggguggcuc

SEQ ID NO: 1301858 - RNA, 24 nt, Human
ccccuggggacgggguggggcgcg

SEQ ID NO: 1301859 - RNA, 25 nt, Human
ccccuggggacgggguggggcgcug

SEQ ID NO: 1301860 - RNA, 18 nt, Human
cccguagcgguucugggc

SEQ ID NO: 1301861 - RNA, 22 nt, Human
cccuccacucugagucuggccu

SEQ ID NO: 1301862 - RNA, 22 nt, Human
cccuuugguggagaagcccagg

SEQ ID NO: 1301863 - RNA, 18 nt, Human
ccuaucccgcugccagga

SEQ ID NO: 1301864 - RNA, 18 nt, Human
ccugcagcacagccccag

SEQ ID NO: 1301865 - RNA, 20 nt, Human
ccugcagcacagccccagcc

SEQ ID NO: 1301866 - RNA, 20 nt, Human
ccuugaguggcacaggaagg

SEQ ID NO: 1301867 - RNA, 23 nt, Human
cgcugccaggaaauggacacagg

SEQ ID NO: 1301868 - RNA, 21 nt, Human
cggcgggaaggcagggcggcc

SEQ ID NO: 1301869 - RNA, 19 nt, Human
cgugcuguucucugccacg

SEQ ID NO: 1301870 - RNA, 21 nt, Human
cucaauggauucuggauguug

SEQ ID NO: 1301871 - RNA, 19 nt, Human
cucgugggcacgggaaggg

SEQ ID NO: 1301872 - RNA, 21 nt, Human
cugaaaccccugccagcauca

SEQ ID NO: 1301873 - RNA, 21 nt, Human
cugcagcacagccccagccug

SEQ ID NO: 1301874 - RNA, 21 nt, Human
cuucaggggcccaauuucccc

SEQ ID NO: 1301875 - RNA, 18 nt, Human
gaaauggauggcucaggc

SEQ ID NO: 1301876 - RNA, 23 nt, Human
gacacaggcggcucacccuccac

SEQ ID NO: 1301877 - RNA, 19 nt, Human
gagccaguugggcccuugg

SEQ ID NO: 1301878 - RNA, 21 nt, Human
gagccugcagcacagccccag

SEQ ID NO: 1301879 - RNA, 19 nt, Human
gcagcacagccccagccug

SEQ ID NO: 1301880 - RNA, 25 nt, Human
gcagcaccagugggugcucccacac

SEQ ID NO: 1301881 - RNA, 20 nt, Human
gcagugguacucgugggcac

SEQ ID NO: 1301882 - RNA, 22 nt, Human
gccaggugcagggagccaucug

SEQ ID NO: 1301883 - RNA, 25 nt, Human
gccccuggggacgggguggcucugg

SEQ ID NO: 1301884 - RNA, 22 nt, Human
gccuugaguggcacaggaaggu

SEQ ID NO: 1301885 - RNA, 21 nt, Human
gcuaaaggcagcuguuucaca

SEQ ID NO: 1301886 - RNA, 21 nt, Human
ggaaggcagggcggccaggug

SEQ ID NO: 1301887 - RNA, 20 nt, Human
ggaagggaggcuccggcggg

SEQ ID NO: 1301888 - RNA, 21 nt, Human
ggagggggggguggcucccag

SEQ ID NO: 1301889 - RNA, 21 nt, Human
gggaaggcagggcggccaggu

SEQ ID NO: 1301890 - RNA, 19 nt, Human
ggggacgggguggcucugg

SEQ ID NO: 1301891 - RNA, 24 nt, Human
ggggugcugcccaugguggaggca

SEQ ID NO: 1301892 - RNA, 23 nt, Human
guacuauuguugugagucagccu

SEQ ID NO: 1301893 - RNA, 24 nt, Human
gugcugcccaugguggaggcaaag

SEQ ID NO: 1301894 - RNA, 20 nt, Human
guggcucugggcccccuguc

SEQ ID NO: 1301895 - RNA, 22 nt, Human
uauucagggcugugccauugug

SEQ ID NO: 1301896 - RNA, 19 nt, Human
ucagccagaccagacggga

SEQ ID NO: 1301897 - RNA, 20 nt, Human
ucagucuucucccccagcuu

SEQ ID NO: 1301898 - RNA, 21 nt, Human
uccaccccgcuccaccucaau

SEQ ID NO: 1301899 - RNA, 20 nt, Human
ucccaugucagucuggcucc

SEQ ID NO: 1301900 - RNA, 22 nt, Human
ucccauucuucagccagaccag

SEQ ID NO: 1301901 - RNA, 23 nt, Human
ucccauucuucagccagaccaga

SEQ ID NO: 1301902 - RNA, 24 nt, Human
ucccccagcuucccuccacucuga

SEQ ID NO: 1301903 - RNA, 18 nt, Human
ucccuccacucugagucu

SEQ ID NO: 1301904 - RNA, 20 nt, Human
ucugggccacgcagugguac

SEQ ID NO: 1301905 - RNA, 21 nt, Human
ugacacugcuggccaggagca

SEQ ID NO: 1301906 - RNA, 18 nt, Human
ugacccggugguuggcag

SEQ ID NO: 1301907 - RNA, 19 nt, Human
ugauguggaggaugccacc

SEQ ID NO: 1301908 - RNA, 25 nt, Human
ugcaggccccuggggacgggguggc

SEQ ID NO: 1301909 - RNA, 19 nt, Human
ugccaggaaauggacacag

SEQ ID NO: 1301910 - RNA, 26 nt, Human
ugcucccaggaaauggauggcucagg

SEQ ID NO: 1301911 - RNA, 19 nt, Human
ugcuggagggggggguggc

SEQ ID NO: 1301912 - RNA, 21 nt, Human
uggagcuccgggccagauggc

SEQ ID NO: 1301913 - RNA, 24 nt, Human
uggaggaugccacuaggcagcagu

SEQ ID NO: 1301914 - RNA, 19 nt, Human
uggaggcaaagaugggagc

SEQ ID NO: 1301915 - RNA, 19 nt, Human
uggagggggggguggcucc

SEQ ID NO: 1301916 - RNA, 20 nt, Human
uggagggggggguggcuccc

SEQ ID NO: 1301917 - RNA, 20 nt, Human
uggaugcccaccacaacccc

SEQ ID NO: 1301918 - RNA, 22 nt, Human
uggaugcccaccacaaccccag

SEQ ID NO: 1301919 - RNA, 20 nt, Human
uggcacugcugcccggaggc

SEQ ID NO: 1301920 - RNA, 22 nt, Human
uggccaggggcacaucacacaa

SEQ ID NO: 1301921 - RNA, 24 nt, Human
uggccugguuggagcccgugcugu

SEQ ID NO: 1301922 - RNA, 23 nt, Human
uggcugcaagagcacccagucuu

SEQ ID NO: 1301923 - RNA, 21 nt, Human
ugggcccccugucacaaccag

SEQ ID NO: 1301924 - RNA, 20 nt, Human
ugggcugauaaagccugggu

SEQ ID NO: 1301925 - RNA, 18 nt, Human
uggugaguucagucuucu

SEQ ID NO: 1301926 - RNA, 21 nt, Human
ugucacaaccaggcgggcacu

SEQ ID NO: 1301927 - RNA, 22 nt, Human
ugucauagagagcagccgguuc

SEQ ID NO: 1301928 - RNA, 18 nt, Human
uguguagaggaaggagcu

SEQ ID NO: 1301929 - RNA, 19 nt, Human
uguguagaggaaggagcug

SEQ ID NO: 1301930 - RNA, 24 nt, Human
uguguagaggaaggagcugacacu

SEQ ID NO: 1301931 - RNA, 24 nt, Human
uucagggcugugccauugugcucc

SEQ ID NO: 1301932 - RNA, 20 nt, Human
uucccaggacucaacaccuu

SEQ ID NO: 1301933 - RNA, 21 nt, Human
uucucccccagcuucccucca

SEQ ID NO: 1301934 - RNA, 21 nt, Human
uuggcaguauucagggcugug

SEQ ID NO: 1301935 - RNA, 24 nt, Human
accaguccuacuccucccaacccc

SEQ ID NO: 1301936 - RNA, 23 nt, Human
acucuuucacccucucuucaggg

SEQ ID NO: 1301937 - RNA, 19 nt, Human
acuggagcccgcgcggccc

SEQ ID NO: 1301938 - RNA, 28 nt, Human
agaccaguccuacuccucccaaccccca

SEQ ID NO: 1301939 - RNA, 22 nt, Human
agccaggaggccccagccaggc

SEQ ID NO: 1301940 - RNA, 20 nt, Human
agcccucggccagauuccuu

SEQ ID NO: 1301941 - RNA, 19 nt, Human
aggaggccccagccaggca

SEQ ID NO: 1301942 - RNA, 23 nt, Human
auucucucucucucagucgggcc

SEQ ID NO: 1301943 - RNA, 24 nt, Human
caagcccucggccagauuccuuua

SEQ ID NO: 1301944 - RNA, 21 nt, Human
cagcgacucuuucacccucuc

SEQ ID NO: 1301945 - RNA, 20 nt, Human
caggguggggagaaacgggg

SEQ ID NO: 1301946 - RNA, 24 nt, Human
ccaaacagcuccugggugcagcga

SEQ ID NO: 1301947 - RNA, 22 nt, Human
cccaacccccaaaagauggcau

SEQ ID NO: 1301948 - RNA, 22 nt, Human
ccucuagacuccgaugugccac

SEQ ID NO: 1301949 - RNA, 19 nt, Human
cuugggaaaagggagacaa

SEQ ID NO: 1301950 - RNA, 21 nt, Human
gagcuugcggugcgugcucag

SEQ ID NO: 1301951 - RNA, 24 nt, Human
gaggguagaugagacucaagaaug

SEQ ID NO: 1301952 - RNA, 19 nt, Human
ggcuggagcuugcggugcg

SEQ ID NO: 1301953 - RNA, 19 nt, Human
guccuacuccucccaaccc

SEQ ID NO: 1301954 - RNA, 24 nt, Human
uaacagguuauucucucucucuca

SEQ ID NO: 1301955 - RNA, 28 nt, Human
uaacagguuauucucucucucucaguuc

SEQ ID NO: 1301956 - RNA, 23 nt, Human
uacacaucacggaaaccuauggg

SEQ ID NO: 1301957 - RNA, 23 nt, Human
uagaaaaggcggcgagaauccug

SEQ ID NO: 1301958 - RNA, 22 nt, Human
uagaccaaacagcuccugggug

SEQ ID NO: 1301959 - RNA, 22 nt, Human
uagaugagacucaagaaugaua

SEQ ID NO: 1301960 - RNA, 22 nt, Human
ucagaccaguccuacuccuccc

SEQ ID NO: 1301961 - RNA, 21 nt, Human
ucccaacccccaaaagauggc

SEQ ID NO: 1301962 - RNA, 24 nt, Human
uccuacuccucccaacccccaaaa

SEQ ID NO: 1301963 - RNA, 20 nt, Human
uccugggugcagcgacucuu

SEQ ID NO: 1301964 - RNA, 23 nt, Human
ugcucagccaggaggccccagcc

SEQ ID NO: 1301965 - RNA, 21 nt, Human
uucaggguggggagaaacggg

SEQ ID NO: 1301966 - RNA, 18 nt, Human
uugcggugcgugcucagc

SEQ ID NO: 1301967 - RNA, 26 nt, Human
uuuagaccaaacagcuccugggugca

SEQ ID NO: 1301968 - RNA, 20 nt, Human
aaaaaccuacuuguacugcu

SEQ ID NO: 1301969 - RNA, 19 nt, Human
aaaaagaaaacaaaaccaa

SEQ ID NO: 1301970 - RNA, 20 nt, Human
aaaaagccuacauccaaauc

SEQ ID NO: 1301971 - RNA, 24 nt, Human
aaaagaaaaauuucaaauagaaag

SEQ ID NO: 1301972 - RNA, 25 nt, Human
aaacaaaacagauaaaaagaaaaca

SEQ ID NO: 1301973 - RNA, 23 nt, Human
aaacaaaaccaaaaauccagagc

SEQ ID NO: 1301974 - RNA, 26 nt, Human
aaacaaaaccaaaaauccagagccca

SEQ ID NO: 1301975 - RNA, 29 nt, Human
aaacagauaaaaagaaaacaaaaccaaag

SEQ ID NO: 1301976 - RNA, 26 nt, Human
aaaccucuaaaauuccuuccaauucu

SEQ ID NO: 1301977 - RNA, 21 nt, Human
aacaaccagaugauguccacc

SEQ ID NO: 1301978 - RNA, 21 nt, Human
aacugggaucacaggggccug

SEQ ID NO: 1301979 - RNA, 22 nt, Human
aagccuacauccaaauccccag

SEQ ID NO: 1301980 - RNA, 18 nt, Human
aagggaaugugaggaagg

SEQ ID NO: 1301981 - RNA, 19 nt, Human
aaggggcgagugacugggg

SEQ ID NO: 1301982 - RNA, 18 nt, Human
aaguccuagaaagaggug

SEQ ID NO: 1301983 - RNA, 24 nt, Human
aauguauaaaaauucccauugaaa

SEQ ID NO: 1301984 - RNA, 30 nt, Human
acaaaacagauaaaaagaaaacaaaaccaa

SEQ ID NO: 1301985 - RNA, 22 nt, Human
acacaacuccaacuagaaaacc

SEQ ID NO: 1301986 - RNA, 22 nt, Human
acccugcuaguucuaaauccuc

SEQ ID NO: 1301987 - RNA, 23 nt, Human
agacaaagaaucugggcccaggg

SEQ ID NO: 1301988 - RNA, 21 nt, Human
agacaaagucauuugggccca

SEQ ID NO: 1301989 - RNA, 21 nt, Human
agacagguugcuaaagccaaa

SEQ ID NO: 1301990 - RNA, 23 nt, Human
agagaaaauauggucucuggagg

SEQ ID NO: 1301991 - RNA, 19 nt, Human
agagaaguuagaaaaagcc

SEQ ID NO: 1301992 - RNA, 20 nt, Human
agaggugggaguguggggug

SEQ ID NO: 1301993 - RNA, 18 nt, Human
agaguaaaccaauauugc

SEQ ID NO: 1301994 - RNA, 21 nt, Human
agcaccacccagacaggcagc

SEQ ID NO: 1301995 - RNA, 25 nt, Human
agcuguguuucccuuaccacuggcu

SEQ ID NO: 1301996 - RNA, 18 nt, Human
aggaaaaacaagcccagg

SEQ ID NO: 1301997 - RNA, 21 nt, Human
aggaaaagaugaaaaaagucc

SEQ ID NO: 1301998 - RNA, 25 nt, Human
aggaaaagaugaaaaaaguccagag

SEQ ID NO: 1301999 - RNA, 21 nt, Human
aggaagugacaggguccaagg

SEQ ID NO: 1302000 - RNA, 25 nt, Human
aggagaaagaggcagaagaaucugg

SEQ ID NO: 1302001 - RNA, 21 nt, Human
aggagggacaggggaacaaaa

SEQ ID NO: 1302002 - RNA, 20 nt, Human
aggcagaagaaucuggcuug

SEQ ID NO: 1302003 - RNA, 21 nt, Human
aggcagaagaaucuggcuugg

SEQ ID NO: 1302004 - RNA, 18 nt, Human
aggggaacaaaagaaaaa

SEQ ID NO: 1302005 - RNA, 18 nt, Human
agguccagagggcaagag

SEQ ID NO: 1302006 - RNA, 26 nt, Human
aggugggagugugggguggaggaggg

SEQ ID NO: 1302007 - RNA, 20 nt, Human
agugcagagggauggggaaa

SEQ ID NO: 1302008 - RNA, 19 nt, Human
caaaaccaaaaauccagag

SEQ ID NO: 1302009 - RNA, 20 nt, Human
caaaaccaaaaauccagagc

SEQ ID NO: 1302010 - RNA, 24 nt, Human
caaagugaaguccuagaaagaggu

SEQ ID NO: 1302011 - RNA, 23 nt, Human
caaccaaaaccaaaaauaaaaca

SEQ ID NO: 1302012 - RNA, 18 nt, Human
caacgaggaaacuuucuc

SEQ ID NO: 1302013 - RNA, 23 nt, Human
cacaguaccuaacacauaguagg

SEQ ID NO: 1302014 - RNA, 22 nt, Human
cacccugcuaguucuaaauccu

SEQ ID NO: 1302015 - RNA, 24 nt, Human
caccuggaggcacccaccaugaaa

SEQ ID NO: 1302016 - RNA, 21 nt, Human
cagaacugggaucacaggggc

SEQ ID NO: 1302017 - RNA, 21 nt, Human
cagcaaugagacaccuguggu

SEQ ID NO: 1302018 - RNA, 24 nt, Human
cagcaccacccagacaggcagcag

SEQ ID NO: 1302019 - RNA, 19 nt, Human
cagcagggccacaaagaaa

SEQ ID NO: 1302020 - RNA, 22 nt, Human
ccaaaccauucuccacauaccc

SEQ ID NO: 1302021 - RNA, 20 nt, Human
ccaagaaagaggaaaacuga

SEQ ID NO: 1302022 - RNA, 28 nt, Human
ccagagucuucugggacugccuggccaa

SEQ ID NO: 1302023 - RNA, 18 nt, Human
ccaggccaaaaguacaug

SEQ ID NO: 1302024 - RNA, 21 nt, Human
ccaggccaaaaguacaugcag

SEQ ID NO: 1302025 - RNA, 19 nt, Human
cccagacaggcagcagggc

SEQ ID NO: 1302026 - RNA, 18 nt, Human
cccagggagacaaaguca

SEQ ID NO: 1302027 - RNA, 23 nt, Human
cccauguccccagauuccagaca

SEQ ID NO: 1302028 - RNA, 22 nt, Human
ccccagauuccagacaaaacuc

SEQ ID NO: 1302029 - RNA, 20 nt, Human
ccccauguccccagauucca

SEQ ID NO: 1302030 - RNA, 28 nt, Human
ccuaacacauaguaggcacucaauaaau

SEQ ID NO: 1302031 - RNA, 25 nt, Human
ccugacccuaaucucaaaacccaac

SEQ ID NO: 1302032 - RNA, 21 nt, Human
ccuggaggcacccaccaugaa

SEQ ID NO: 1302033 - RNA, 23 nt, Human
ccuguacaagaagaaucugugug

SEQ ID NO: 1302034 - RNA, 19 nt, Human
cgaguacaacaccucccuu

SEQ ID NO: 1302035 - RNA, 21 nt, Human
cuaaagccaaaccccaugucc

SEQ ID NO: 1302036 - RNA, 24 nt, Human
cuaaagccaaaccccaugucccca

SEQ ID NO: 1302037 - RNA, 23 nt, Human
cuaaauccucuuuugggugcuug

SEQ ID NO: 1302038 - RNA, 25 nt, Human
cuagaaaaccucuaaaauuccuucc

SEQ ID NO: 1302039 - RNA, 20 nt, Human
cucaaagaauguuucagacc

SEQ ID NO: 1302040 - RNA, 18 nt, Human
cucaaccuccaaaccauu

SEQ ID NO: 1302041 - RNA, 21 nt, Human
cucugcucacucagggccugg

SEQ ID NO: 1302042 - RNA, 21 nt, Human
cuucauuuucuuucccucuca

SEQ ID NO: 1302043 - RNA, 20 nt, Human
cuucgucgggccagcaccac

SEQ ID NO: 1302044 - RNA, 19 nt, Human
cuucugggacugccuggcc

SEQ ID NO: 1302045 - RNA, 26 nt, Human
gaaaaguagaaacaaccagaugaugu

SEQ ID NO: 1302046 - RNA, 19 nt, Human
gaagggaaugugaggaagg

SEQ ID NO: 1302047 - RNA, 24 nt, Human
gaaguuagaaaaagccuacaucca

SEQ ID NO: 1302048 - RNA, 22 nt, Human
gagagaaaauauggucucugga

SEQ ID NO: 1302049 - RNA, 22 nt, Human
gagggauggggaaaauguugag

SEQ ID NO: 1302050 - RNA, 19 nt, Human
gcaggugucuccuguccag

SEQ ID NO: 1302051 - RNA, 19 nt, Human
gccagauucaaaggggcac

SEQ ID NO: 1302052 - RNA, 21 nt, Human
ggaaaaacaagcccaggcugg

SEQ ID NO: 1302053 - RNA, 18 nt, Human
ggaaaaacaagcccaggg

SEQ ID NO: 1302054 - RNA, 20 nt, Human
ggagggagagaaaauauggu

SEQ ID NO: 1302055 - RNA, 18 nt, Human
ggagggguuguugauguu

SEQ ID NO: 1302056 - RNA, 22 nt, Human
ggaggucuagggcagguuccug

SEQ ID NO: 1302057 - RNA, 22 nt, Human
ggagugugggguggaggaggga

SEQ ID NO: 1302058 - RNA, 22 nt, Human
gggcaagagaacagaacuggga

SEQ ID NO: 1302059 - RNA, 24 nt, Human
gguagggguggcuggagaccacag

SEQ ID NO: 1302060 - RNA, 23 nt, Human
gucguuuagggaaauaaauacug

SEQ ID NO: 1302061 - RNA, 18 nt, Human
gugcacuguuccauuuuu

SEQ ID NO: 1302062 - RNA, 19 nt, Human
gugguuguccucaaccucc

SEQ ID NO: 1302063 - RNA, 18 nt, Human
guguuugggaguguuacu

SEQ ID NO: 1302064 - RNA, 19 nt, Human
uaaggagagguggagggaa

SEQ ID NO: 1302065 - RNA, 21 nt, Human
uaaggagagguggagggaagg

SEQ ID NO: 1302066 - RNA, 18 nt, Human
uacgguucuaugauucca

SEQ ID NO: 1302067 - RNA, 21 nt, Human
uagaaaaagccuacauccaaa

SEQ ID NO: 1302068 - RNA, 19 nt, Human
uagaaacaaccagaugaug

SEQ ID NO: 1302069 - RNA, 24 nt, Human
uagaaacaggaucauugccuaagc

SEQ ID NO: 1302070 - RNA, 19 nt, Human
uagggccaagacagguugc

SEQ ID NO: 1302071 - RNA, 19 nt, Human
uaggggcagaggaguuggg

SEQ ID NO: 1302072 - RNA, 21 nt, Human
ucaaaacccaaccuggcaagc

SEQ ID NO: 1302073 - RNA, 20 nt, Human
ucaaaggggcacauggccuu

SEQ ID NO: 1302074 - RNA, 21 nt, Human
ucauuuucuuucccucucacc

SEQ ID NO: 1302075 - RNA, 19 nt, Human
uccaacuagaaaaccucua

SEQ ID NO: 1302076 - RNA, 24 nt, Human
uccacauacccaugaccugacccu

SEQ ID NO: 1302077 - RNA, 20 nt, Human
ucccuuggaggugggcccuu

SEQ ID NO: 1302078 - RNA, 20 nt, Human
ucuagggcagguuccuggga

SEQ ID NO: 1302079 - RNA, 21 nt, Human
ucuguguuucccaaauucuug

SEQ ID NO: 1302080 - RNA, 22 nt, Human
ugaacgaauaaaugauugguga

SEQ ID NO: 1302081 - RNA, 19 nt, Human
ugaaguccuagaaagaggu

SEQ ID NO: 1302082 - RNA, 20 nt, Human
ugagguggaggaaaagauga

SEQ ID NO: 1302083 - RNA, 20 nt, Human
ugcacuguuccauuuuuucc

SEQ ID NO: 1302084 - RNA, 20 nt, Human
ugcagagggauggggaaaau

SEQ ID NO: 1302085 - RNA, 19 nt, Human
ugcaggagagcucaucuug

SEQ ID NO: 1302086 - RNA, 25 nt, Human
ugccuguacaagaagaaucugugug

SEQ ID NO: 1302087 - RNA, 19 nt, Human
uggagcaggugucuccugu

SEQ ID NO: 1302088 - RNA, 19 nt, Human
uggaggagggacaggggaa

SEQ ID NO: 1302089 - RNA, 22 nt, Human
uggcuggagaccacagggacac

SEQ ID NO: 1302090 - RNA, 24 nt, Human
ugggacugccuggccaaauuccag

SEQ ID NO: 1302091 - RNA, 19 nt, Human
ugggagugugggguggagg

SEQ ID NO: 1302092 - RNA, 24 nt, Human
ugggguagggguggcuggagacca

SEQ ID NO: 1302093 - RNA, 23 nt, Human
uggguagaagccaagaaagagga

SEQ ID NO: 1302094 - RNA, 23 nt, Human
ugggugcuugguaaggagaggug

SEQ ID NO: 1302095 - RNA, 18 nt, Human
ugguaaggagagguggag

SEQ ID NO: 1302096 - RNA, 19 nt, Human
uguacaagaagaaucugug

SEQ ID NO: 1302097 - RNA, 21 nt, Human
uguacugcuuaucucaggcca

SEQ ID NO: 1302098 - RNA, 18 nt, Human
uguccagagcuuugaagu

SEQ ID NO: 1302099 - RNA, 24 nt, Human
uguggauuuuggggaaccaauagg

SEQ ID NO: 1302100 - RNA, 19 nt, Human
ugugggguggaggagggac

SEQ ID NO: 1302101 - RNA, 20 nt, Human
uguugguagaaacaggauca

SEQ ID NO: 1302102 - RNA, 22 nt, Human
uuaagacacaguucuguaacuu

SEQ ID NO: 1302103 - RNA, 22 nt, Human
uuaccacuggcuuaucagugcc

SEQ ID NO: 1302104 - RNA, 21 nt, Human
uuagaaaaagccuacauccaa

SEQ ID NO: 1302105 - RNA, 22 nt, Human
uucccuuggaggugggcccuug

SEQ ID NO: 1302106 - RNA, 23 nt, Human
uuccugggauaaggugcaguguu

SEQ ID NO: 1302107 - RNA, 23 nt, Human
uucuaaauccucuuuugggugcu

SEQ ID NO: 1302108 - RNA, 22 nt, Human
uugcuaaagccaaaccccaugu

SEQ ID NO: 1302109 - RNA, 19 nt, Human
uuugucaauucaguuauag

SEQ ID NO: 1302110 - RNA, 21 nt, Human
uuuguggguagaagccaagaa

SEQ ID NO: 1302111 - RNA, 22 nt, Human
aaacccuccaaauccacucucc

SEQ ID NO: 1302112 - RNA, 23 nt, Human
cacugagaccuuuccgaguuuaa

SEQ ID NO: 1302113 - RNA, 19 nt, Human
cagacgcagcccugcaacu

SEQ ID NO: 1302114 - RNA, 20 nt, Human
ccugcaacuuugcugugcac

SEQ ID NO: 1302115 - RNA, 18 nt, Human
gcccugcaacuuugcugu

SEQ ID NO: 1302116 - RNA, 21 nt, Human
guagugcagacgcagcccugc

SEQ ID NO: 1302117 - RNA, 22 nt, Human
gugcagacgcagcccugcaacu

SEQ ID NO: 1302118 - RNA, 21 nt, Human
uaaacccuccaaauccacucu

SEQ ID NO: 1302119 - RNA, 21 nt, Human
ugaagguuuuugauuccuucc

SEQ ID NO: 1302120 - RNA, 25 nt, Human
ugaagguuuuugauuccuuccauaa

SEQ ID NO: 1302121 - RNA, 24 nt, Human
ugcaggaaaacuuguugaucagug

SEQ ID NO: 1302122 - RNA, 18 nt, Human
uuuaaacccuccaaaucc

SEQ ID NO: 1302123 - RNA, 20 nt, Human
aagauagccagugcugcucc

SEQ ID NO: 1302124 - RNA, 26 nt, Human
aagcgaccuugacguguauugaaggu

SEQ ID NO: 1302125 - RNA, 24 nt, Human
acacugcgcuucaggaaaucucaa

SEQ ID NO: 1302126 - RNA, 25 nt, Human
accuggcucgugagugcgucugggu

SEQ ID NO: 1302127 - RNA, 26 nt, Human
acugcgggagaggcggaacccacuug

SEQ ID NO: 1302128 - RNA, 18 nt, Human
agaacaucacagcugugg

SEQ ID NO: 1302129 - RNA, 22 nt, Human
agaacaucacagcugugguccc

SEQ ID NO: 1302130 - RNA, 19 nt, Human
agcgaagcuggcagggagc

SEQ ID NO: 1302131 - RNA, 18 nt, Human
aggugcuggccuugguug

SEQ ID NO: 1302132 - RNA, 24 nt, Human
augcaguuuugaaaaccuggaaac

SEQ ID NO: 1302133 - RNA, 18 nt, Human
augguuuggggaagggag

SEQ ID NO: 1302134 - RNA, 24 nt, Human
auuucuguuuucuaaaacuggaag

SEQ ID NO: 1302135 - RNA, 19 nt, Human
caaguccugggggaugugc

SEQ ID NO: 1302136 - RNA, 23 nt, Human
cacagcuguggucccagaugaga

SEQ ID NO: 1302137 - RNA, 23 nt, Human
cagaacaucacagcugugguccc

SEQ ID NO: 1302138 - RNA, 24 nt, Human
cagccgccaauauaaacgaauaaa

SEQ ID NO: 1302139 - RNA, 19 nt, Human
ccaagugauuuuaccuccc

SEQ ID NO: 1302140 - RNA, 21 nt, Human
ccacguucaagcuuguguguc

SEQ ID NO: 1302141 - RNA, 19 nt, Human
ccauauugcacagcagaac

SEQ ID NO: 1302142 - RNA, 22 nt, Human
cccccauacccccaggaccugg

SEQ ID NO: 1302143 - RNA, 22 nt, Human
ccccgggcugcgcaggcuccuc

SEQ ID NO: 1302144 - RNA, 25 nt, Human
ccucuaagaggccacguucaagcuu

SEQ ID NO: 1302145 - RNA, 20 nt, Human
ccuggcagcccccauacccc

SEQ ID NO: 1302146 - RNA, 22 nt, Human
ccugggccccgggcugcgcagg

SEQ ID NO: 1302147 - RNA, 19 nt, Human
cgccccuggcagcccccau

SEQ ID NO: 1302148 - RNA, 19 nt, Human
cgggagaggcggaacccac

SEQ ID NO: 1302149 - RNA, 23 nt, Human
cgggagaggcggaacccacuugc

SEQ ID NO: 1302150 - RNA, 23 nt, Human
cuacuucugaauuacuucucaac

SEQ ID NO: 1302151 - RNA, 18 nt, Human
cucgugagugcgucuggg

SEQ ID NO: 1302152 - RNA, 25 nt, Human
cugaauuacuucucaacuguauggu

SEQ ID NO: 1302153 - RNA, 22 nt, Human
cuggggccgagcugaggggcug

SEQ ID NO: 1302154 - RNA, 21 nt, Human
cuucaggaaaucucaaguucc

SEQ ID NO: 1302155 - RNA, 23 nt, Human
gaaaggugacccauauuguaaua

SEQ ID NO: 1302156 - RNA, 20 nt, Human
gaaggugugugugccaaaug

SEQ ID NO: 1302157 - RNA, 23 nt, Human
gagaaaagaaauacucucaacgu

SEQ ID NO: 1302158 - RNA, 19 nt, Human
gagcuccucuaagaggcca

SEQ ID NO: 1302159 - RNA, 20 nt, Human
gaggcgggaaauaggcuggg

SEQ ID NO: 1302160 - RNA, 21 nt, Human
gcaggccccccaggagagggc

SEQ ID NO: 1302161 - RNA, 27 nt, Human
gccgagcugaggggcugaacacagcag

SEQ ID NO: 1302162 - RNA, 20 nt, Human
gccucuccuccugggccccg

SEQ ID NO: 1302163 - RNA, 20 nt, Human
gcuggacacaggaaagccca

SEQ ID NO: 1302164 - RNA, 23 nt, Human
gcuggcagggagcagacuggcuu

SEQ ID NO: 1302165 - RNA, 18 nt, Human
ggacaggaguguuuguca

SEQ ID NO: 1302166 - RNA, 18 nt, Human
ggaugugcucugcccagc

SEQ ID NO: 1302167 - RNA, 23 nt, Human
ggcuggggccgagcugaggggcu

SEQ ID NO: 1302168 - RNA, 22 nt, Human
gguacuucugguaccguguuga

SEQ ID NO: 1302169 - RNA, 19 nt, Human
uaacguacccacauuuugc

SEQ ID NO: 1302170 - RNA, 23 nt, Human
uaccaguguuuacauaucugaca

SEQ ID NO: 1302171 - RNA, 23 nt, Human
uaccuccaccuuuacuaaagucu

SEQ ID NO: 1302172 - RNA, 20 nt, Human
uacuguuuucuuaauaagcg

SEQ ID NO: 1302173 - RNA, 21 nt, Human
uagccagugcugcucccaggu

SEQ ID NO: 1302174 - RNA, 25 nt, Human
uagccagugcugcucccagguggua

SEQ ID NO: 1302175 - RNA, 23 nt, Human
ucaaauggaggcgggaaauaggc

SEQ ID NO: 1302176 - RNA, 23 nt, Human
ucacucugggcgguguuuccugu

SEQ ID NO: 1302177 - RNA, 22 nt, Human
ucagcacucggccccccacugc

SEQ ID NO: 1302178 - RNA, 23 nt, Human
ucauuuuucauacuguuuucuua

SEQ ID NO: 1302179 - RNA, 27 nt, Human
uccugggccccgggcugcgcaggcucc

SEQ ID NO: 1302180 - RNA, 22 nt, Human
ucgccugcccagcaggcccccc

SEQ ID NO: 1302181 - RNA, 21 nt, Human
ucgcuggacacaggaaagccc

SEQ ID NO: 1302182 - RNA, 20 nt, Human
ucuaaaacuggaagcgaccu

SEQ ID NO: 1302183 - RNA, 19 nt, Human
ucuucuggccuacuucuga

SEQ ID NO: 1302184 - RNA, 21 nt, Human
ugacaucgagcuccucuaaga

SEQ ID NO: 1302185 - RNA, 21 nt, Human
ugacccauauugcacagcaga

SEQ ID NO: 1302186 - RNA, 19 nt, Human
ugagaugcagauuucuguu

SEQ ID NO: 1302187 - RNA, 20 nt, Human
ugagaugcagauuucuguuu

SEQ ID NO: 1302188 - RNA, 21 nt, Human
ugaggggcugaacacagcagu

SEQ ID NO: 1302189 - RNA, 19 nt, Human
uggcagcccccauaccccc

SEQ ID NO: 1302190 - RNA, 19 nt, Human
ugggccccgggcugcgcag

SEQ ID NO: 1302191 - RNA, 22 nt, Human
ugggggaugugcucugcccagc

SEQ ID NO: 1302192 - RNA, 22 nt, Human
ugucuggauuuucuuguaccag

SEQ ID NO: 1302193 - RNA, 23 nt, Human
uguggacaggaguguuugucauu

SEQ ID NO: 1302194 - RNA, 19 nt, Human
uugaaaaccuggaaacauc

SEQ ID NO: 1302195 - RNA, 24 nt, Human
uugguuucucucugccccgugugg

SEQ ID NO: 1302196 - RNA, 21 nt, Human
ugaauuaaaugucuuucuuga

SEQ ID NO: 1302197 - RNA, 24 nt, Human
acaccgcaauggccgaggaccagu

SEQ ID NO: 1302198 - RNA, 23 nt, Human
acugaaacacaccgcaauggccg

SEQ ID NO: 1302199 - RNA, 20 nt, Human
acuuagguucaaguucuuuc

SEQ ID NO: 1302200 - RNA, 21 nt, Human
caacuccuccacaagcgcgcu

SEQ ID NO: 1302201 - RNA, 20 nt, Human
caccgcaauggccgaggacc

SEQ ID NO: 1302202 - RNA, 26 nt, Human
cacuaucauuacuaaagagcugaaag

SEQ ID NO: 1302203 - RNA, 19 nt, Human
cauuacuaaagagcugaaa

SEQ ID NO: 1302204 - RNA, 21 nt, Human
ccuccacaacuccuccacaag

SEQ ID NO: 1302205 - RNA, 21 nt, Human
gacuuaacagaaagggagguu

SEQ ID NO: 1302206 - RNA, 21 nt, Human
ggucgucgacaggcguccucc

SEQ ID NO: 1302207 - RNA, 22 nt, Human
guccuccacaacuccuccacaa

SEQ ID NO: 1302208 - RNA, 26 nt, Human
guuacaauuaaacuauucuaaagacu

SEQ ID NO: 1302209 - RNA, 24 nt, Human
uccuccacaacuccuccacaagcg

SEQ ID NO: 1302210 - RNA, 21 nt, Human
uuaaacuauucuaaagacuua

SEQ ID NO: 1302211 - RNA, 22 nt, Human
uucaccugagguggccccuucu

SEQ ID NO: 1302212 - RNA, 20 nt, Human
uucuuuaggaauaguugcua

SEQ ID NO: 1302213 - RNA, 18 nt, Human
uugacaguguuagagaga

SEQ ID NO: 1302214 - RNA, 30 nt, Human
uuuagauuugacuuaacagaaagggagguu

SEQ ID NO: 1302215 - RNA, 23 nt, Human
uuugacuuaacagaaagggaggu

SEQ ID NO: 1302216 - RNA, 21 nt, Human
aagccuccuagggccacccag

SEQ ID NO: 1302217 - RNA, 19 nt, Human
aagggccagagcuaagagu

SEQ ID NO: 1302218 - RNA, 23 nt, Human
acacuggaugggguggggugggg

SEQ ID NO: 1302219 - RNA, 23 nt, Human
accaagaaaucccuuccccacuc

SEQ ID NO: 1302220 - RNA, 19 nt, Human
agaaaucccuuccccacuc

SEQ ID NO: 1302221 - RNA, 19 nt, Human
agcugagcccccuucuuuu

SEQ ID NO: 1302222 - RNA, 26 nt, Human
aggcacagcaagggggccacgauggc

SEQ ID NO: 1302223 - RNA, 21 nt, Human
agggggccacgauggcuucca

SEQ ID NO: 1302224 - RNA, 22 nt, Human
agguuuucagcacagagugcuc

SEQ ID NO: 1302225 - RNA, 18 nt, Human
aucccuuccccacucugg

SEQ ID NO: 1302226 - RNA, 18 nt, Human
caagcccagagggcagac

SEQ ID NO: 1302227 - RNA, 19 nt, Human
caaggccccuacccaagcc

SEQ ID NO: 1302228 - RNA, 22 nt, Human
cacagcccccauuccgggcagg

SEQ ID NO: 1302229 - RNA, 23 nt, Human
cacccagccaaaguccagagagc

SEQ ID NO: 1302230 - RNA, 21 nt, Human
cacuggauggggugggguggg

SEQ ID NO: 1302231 - RNA, 18 nt, Human
cagagagcugugaagagg

SEQ ID NO: 1302232 - RNA, 20 nt, Human
cagcugagcccccuucuuuu

SEQ ID NO: 1302233 - RNA, 21 nt, Human
caggcacagcaagggggccac

SEQ ID NO: 1302234 - RNA, 18 nt, Human
ccaagaaaucccuucccc

SEQ ID NO: 1302235 - RNA, 19 nt, Human
ccaggcaacguccgugagc

SEQ ID NO: 1302236 - RNA, 20 nt, Human
ccaggcacagcaagggggcc

SEQ ID NO: 1302237 - RNA, 18 nt, Human
ccaugggucuggcuucau

SEQ ID NO: 1302238 - RNA, 20 nt, Human
cccaagcccagagggcagac

SEQ ID NO: 1302239 - RNA, 24 nt, Human
cccaagcccagagggcagacagcu

SEQ ID NO: 1302240 - RNA, 22 nt, Human
cccccauuccgggcaggcuucu

SEQ ID NO: 1302241 - RNA, 18 nt, Human
ccuacccaagcccagagg

SEQ ID NO: 1302242 - RNA, 20 nt, Human
ccucucggccaugggucugg

SEQ ID NO: 1302243 - RNA, 24 nt, Human
ccugcgcccuggcccaccaucagc

SEQ ID NO: 1302244 - RNA, 23 nt, Human
cgcccuggcccaccaucagcaac

SEQ ID NO: 1302245 - RNA, 18 nt, Human
cugggaucuucaaagaga

SEQ ID NO: 1302246 - RNA, 19 nt, Human
gaagacuuccucugcuucc

SEQ ID NO: 1302247 - RNA, 21 nt, Human
gagcccccuucuuuuugaccc

SEQ ID NO: 1302248 - RNA, 21 nt, Human
gagcuaagaguggcagccacg

SEQ ID NO: 1302249 - RNA, 22 nt, Human
gagggccacccagcuguggucc

SEQ ID NO: 1302250 - RNA, 24 nt, Human
gcuggaguggaagggccagagcua

SEQ ID NO: 1302251 - RNA, 21 nt, Human
ggaagggccagagcuaagagu

SEQ ID NO: 1302252 - RNA, 19 nt, Human
ggacaccgugagguucaaa

SEQ ID NO: 1302253 - RNA, 22 nt, Human
ggaguggaagggccagagcuaa

SEQ ID NO: 1302254 - RNA, 25 nt, Human
gggaggaagacuuccucugcuuccu

SEQ ID NO: 1302255 - RNA, 19 nt, Human
gggcagacagcugagcccc

SEQ ID NO: 1302256 - RNA, 21 nt, Human
ggucagcagacacggugggcu

SEQ ID NO: 1302257 - RNA, 22 nt, Human
uaagaguggcagccacguggcg

SEQ ID NO: 1302258 - RNA, 22 nt, Human
uacccaagcccagagggcagac

SEQ ID NO: 1302259 - RNA, 21 nt, Human
uaguccaaggccccuacccaa

SEQ ID NO: 1302260 - RNA, 23 nt, Human
ucaaaaccaagaaaucccuuccc

SEQ ID NO: 1302261 - RNA, 19 nt, Human
uccaaggccccuacccaag

SEQ ID NO: 1302262 - RNA, 19 nt, Human
ugacaagaagggcaguugg

SEQ ID NO: 1302263 - RNA, 21 nt, Human
ugccccagagggcucaccauc

SEQ ID NO: 1302264 - RNA, 19 nt, Human
uggcccagugaccaggcaa

SEQ ID NO: 1302265 - RNA, 23 nt, Human
ugggagggagaccugcgcccugg

SEQ ID NO: 1302266 - RNA, 19 nt, Human
ugggaucuucaaagagagc

SEQ ID NO: 1302267 - RNA, 18 nt, Human
ugggccucaguuuccccc

SEQ ID NO: 1302268 - RNA, 20 nt, Human
aaaacacagguaaaggugcc

SEQ ID NO: 1302269 - RNA, 24 nt, Human
aaaacacagguaaaggugccacca

SEQ ID NO: 1302270 - RNA, 20 nt, Human
aaccuggccugguuugugca

SEQ ID NO: 1302271 - RNA, 20 nt, Human
aaggugccaccagccagagg

SEQ ID NO: 1302272 - RNA, 25 nt, Human
accuugcucaccuucuacuugucca

SEQ ID NO: 1302273 - RNA, 21 nt, Human
acguugggaugaccugccugc

SEQ ID NO: 1302274 - RNA, 22 nt, Human
agaagagagaaggagagaagag

SEQ ID NO: 1302275 - RNA, 18 nt, Human
agccaggaauggguggga

SEQ ID NO: 1302276 - RNA, 24 nt, Human
agccaggaaugggugggagaccug

SEQ ID NO: 1302277 - RNA, 26 nt, Human
aggcaagaagaagagaagagggaccc

SEQ ID NO: 1302278 - RNA, 20 nt, Human
aggcagaaaagugacaccuc

SEQ ID NO: 1302279 - RNA, 22 nt, Human
agugcugagguacaaggaagga

SEQ ID NO: 1302280 - RNA, 22 nt, Human
aguggggaggaguggcuggggc

SEQ ID NO: 1302281 - RNA, 21 nt, Human
caaaacacagguaaaggugcc

SEQ ID NO: 1302282 - RNA, 21 nt, Human
caaacccaggcaucucugcac

SEQ ID NO: 1302283 - RNA, 21 nt, Human
caagcacaggagggaggcuga

SEQ ID NO: 1302284 - RNA, 18 nt, Human
cacaggagggaggcugag

SEQ ID NO: 1302285 - RNA, 19 nt, Human
caccucggcccccuccaga

SEQ ID NO: 1302286 - RNA, 20 nt, Human
caccuugcucaccuucuacu

SEQ ID NO: 1302287 - RNA, 27 nt, Human
cagcaagccccccugccccgcaggcuc

SEQ ID NO: 1302288 - RNA, 18 nt, Human
cagccagagguuucaggc

SEQ ID NO: 1302289 - RNA, 24 nt, Human
cagccagagguuucaggcagaaaa

SEQ ID NO: 1302290 - RNA, 18 nt, Human
cagcccccugccaccucg

SEQ ID NO: 1302291 - RNA, 18 nt, Human
cagcccccugccaccucg

SEQ ID NO: 1302292 - RNA, 22 nt, Human
cagcccccugccaccucggccc

SEQ ID NO: 1302293 - RNA, 20 nt, Human
caggcaucucugcacucucu

SEQ ID NO: 1302294 - RNA, 21 nt, Human
caguggggaggaguggcuggg

SEQ ID NO: 1302295 - RNA, 19 nt, Human
caugccagcccccugccac

SEQ ID NO: 1302296 - RNA, 20 nt, Human
ccaaaccugggcacagucac

SEQ ID NO: 1302297 - RNA, 18 nt, Human
ccagagugcugagguaca

SEQ ID NO: 1302298 - RNA, 19 nt, Human
ccaggcaucucugcacucu

SEQ ID NO: 1302299 - RNA, 19 nt, Human
cccagcaagccccccugcc

SEQ ID NO: 1302300 - RNA, 20 nt, Human
cccaggcacagcugcagcca

SEQ ID NO: 1302301 - RNA, 20 nt, Human
cccccugccaccucggcccc

SEQ ID NO: 1302302 - RNA, 21 nt, Human
ccccugccaccucggcccccu

SEQ ID NO: 1302303 - RNA, 22 nt, Human
cccgcccucccaggcacagcug

SEQ ID NO: 1302304 - RNA, 22 nt, Human
ccgugcgucuccucucagcugc

SEQ ID NO: 1302305 - RNA, 22 nt, Human
ccucagagcuggugggagccag

SEQ ID NO: 1302306 - RNA, 23 nt, Human
ccucagagcuggugggagccagg

SEQ ID NO: 1302307 - RNA, 19 nt, Human
ccucaggauucuguaacac

SEQ ID NO: 1302308 - RNA, 22 nt, Human
ccugcagaaaggagcuacccac

SEQ ID NO: 1302309 - RNA, 24 nt, Human
ccugccaccucggcccccuccaga

SEQ ID NO: 1302310 - RNA, 23 nt, Human
ccuucuacuuguccacauaccuc

SEQ ID NO: 1302311 - RNA, 22 nt, Human
ccuuugaucucucggagcagcu

SEQ ID NO: 1302312 - RNA, 20 nt, Human
cgcaggcucaguuguaccug

SEQ ID NO: 1302313 - RNA, 18 nt, Human
cgccugggcacuaugggc

SEQ ID NO: 1302314 - RNA, 21 nt, Human
cguugggaugaccugccugca

SEQ ID NO: 1302315 - RNA, 20 nt, Human
cucaauuaagcuccuuuaaa

SEQ ID NO: 1302316 - RNA, 24 nt, Human
cucagaggcccagcaagccccccu

SEQ ID NO: 1302317 - RNA, 19 nt, Human
cucaggacaagaacucagg

SEQ ID NO: 1302318 - RNA, 22 nt, Human
cugaaaggacccauuugugaug

SEQ ID NO: 1302319 - RNA, 23 nt, Human
cugcaguggggaggaguggcugg

SEQ ID NO: 1302320 - RNA, 21 nt, Human
cugccaccucggcccccucca

SEQ ID NO: 1302321 - RNA, 19 nt, Human
cugguuugugcaagcucag

SEQ ID NO: 1302322 - RNA, 21 nt, Human
gaaccugaaaggacccauuug

SEQ ID NO: 1302323 - RNA, 18 nt, Human
gagcagcuggagaucaug

SEQ ID NO: 1302324 - RNA, 25 nt, Human
gagcccacuccaaauucagauccaa

SEQ ID NO: 1302325 - RNA, 24 nt, Human
gcaaaacacagguaaaggugccac

SEQ ID NO: 1302326 - RNA, 21 nt, Human
gcaaacccaggcaucucugca

SEQ ID NO: 1302327 - RNA, 23 nt, Human
gcaagccccccugccccgcaggc

SEQ ID NO: 1302328 - RNA, 18 nt, Human
gccccgcccucccaggca

SEQ ID NO: 1302329 - RNA, 23 nt, Human
gcucaauaaagcaccucuucacc

SEQ ID NO: 1302330 - RNA, 24 nt, Human
gcugagguacaaggaaggaaccug

SEQ ID NO: 1302331 - RNA, 20 nt, Human
ggacucaggacaagaacuca

SEQ ID NO: 1302332 - RNA, 24 nt, Human
ggcugcaguggggaggaguggcug

SEQ ID NO: 1302333 - RNA, 21 nt, Human
gggcacagcuacccaccgugc

SEQ ID NO: 1302334 - RNA, 23 nt, Human
gugauggcagcaguggcccacgu

SEQ ID NO: 1302335 - RNA, 18 nt, Human
guggagcaguugcuaugg

SEQ ID NO: 1302336 - RNA, 19 nt, Human
gugggagccaggaaugggg

SEQ ID NO: 1302337 - RNA, 18 nt, Human
uaacauaaacagggcuga

SEQ ID NO: 1302338 - RNA, 22 nt, Human
uaacccagugggcccgagcaag

SEQ ID NO: 1302339 - RNA, 24 nt, Human
uaucaggcaggagccccgcccucc

SEQ ID NO: 1302340 - RNA, 25 nt, Human
uccaaguugaggccaaaccgggguc

SEQ ID NO: 1302341 - RNA, 23 nt, Human
uccuggacucaggacaagaacuc

SEQ ID NO: 1302342 - RNA, 21 nt, Human
ucucagaggcccagcaagccc

SEQ ID NO: 1302343 - RNA, 23 nt, Human
ucucugcuuccagagcccacucc

SEQ ID NO: 1302344 - RNA, 18 nt, Human
ucugcugugauucugggg

SEQ ID NO: 1302345 - RNA, 25 nt, Human
ugagguacaaggaaggaaccugaaa

SEQ ID NO: 1302346 - RNA, 18 nt, Human
ugcacucucagaggccca

SEQ ID NO: 1302347 - RNA, 23 nt, Human
ugcaguggggaggaguggcuggg

SEQ ID NO: 1302348 - RNA, 24 nt, Human
ugccugauucgugaaucauucauu

SEQ ID NO: 1302349 - RNA, 25 nt, Human
ugcucaccuucuacuuguccacaua

SEQ ID NO: 1302350 - RNA, 20 nt, Human
uggacagaacuaacccagug

SEQ ID NO: 1302351 - RNA, 18 nt, Human
uggagacacuggcugcag

SEQ ID NO: 1302352 - RNA, 22 nt, Human
uggcaagcacaggagggaggcu

SEQ ID NO: 1302353 - RNA, 21 nt, Human
uggccggaaggcccuccucag

SEQ ID NO: 1302354 - RNA, 19 nt, Human
uggcugcaguggggaggag

SEQ ID NO: 1302355 - RNA, 25 nt, Human
uggcugcaguggggaggaguggcug

SEQ ID NO: 1302356 - RNA, 19 nt, Human
uggcuggggcugugcacuc

SEQ ID NO: 1302357 - RNA, 20 nt, Human
uggcuggggcugugcacucc

SEQ ID NO: 1302358 - RNA, 19 nt, Human
ugggaugaccugccugcag

SEQ ID NO: 1302359 - RNA, 21 nt, Human
ugggcacagucacaaccuggc

SEQ ID NO: 1302360 - RNA, 19 nt, Human
ugggcccgagcaaaacaca

SEQ ID NO: 1302361 - RNA, 18 nt, Human
ugugauggcagcaguggc

SEQ ID NO: 1302362 - RNA, 19 nt, Human
ugugauucugggggcugcc

SEQ ID NO: 1302363 - RNA, 19 nt, Human
uucaggcagaaaagugaca

SEQ ID NO: 1302364 - RNA, 19 nt, Human
uucuacuuguccacauacc

SEQ ID NO: 1302365 - RNA, 19 nt, Human
uucuugccaaauugcaggc

SEQ ID NO: 1302366 - RNA, 22 nt, Human
uugcuaagccuucuaaugaccc

SEQ ID NO: 1302367 - RNA, 21 nt, Human
acaacaaauggggagacugga

SEQ ID NO: 1302368 - RNA, 18 nt, Human
ucucugagcggucagcuc

SEQ ID NO: 1302369 - RNA, 24 nt, Human
uuacaacaaauggggagacuggac

SEQ ID NO: 1302370 - RNA, 21 nt, Human
cugugcagagcccugggggag

SEQ ID NO: 1302371 - RNA, 22 nt, Human
cugugcagagcccugggggagc

SEQ ID NO: 1302372 - RNA, 20 nt, Human
gacaaugaggcuguaagcac

SEQ ID NO: 1302373 - RNA, 20 nt, Human
gagacacggccagcuccagu

SEQ ID NO: 1302374 - RNA, 22 nt, Human
gcuguaagcaccuggaggugga

SEQ ID NO: 1302375 - RNA, 19 nt, Human
ggagcacucucacagacuc

SEQ ID NO: 1302376 - RNA, 22 nt, Human
ggccaugagccugugcagagcc

SEQ ID NO: 1302377 - RNA, 21 nt, Human
ucagacaaugaggcuguaagc

SEQ ID NO: 1302378 - RNA, 18 nt, Human
ucccagagacacggccag

SEQ ID NO: 1302379 - RNA, 20 nt, Human
ucccagagacacggccagcu

SEQ ID NO: 1302380 - RNA, 24 nt, Human
ucucacagacuccagguuucccag

SEQ ID NO: 1302381 - RNA, 21 nt, Human
ucuucagacaaugaggcugua

SEQ ID NO: 1302382 - RNA, 23 nt, Human
gaccacagcuaucauaauguucu

SEQ ID NO: 1302383 - RNA, 22 nt, Human
ucucaucuucuucaaacuuguu

SEQ ID NO: 1302384 - RNA, 23 nt, Human
uucaaacuuguuaaucauagacu

SEQ ID NO: 1302385 - RNA, 21 nt, Human
uucuugauuucgugucucauc

SEQ ID NO: 1302386 - RNA, 20 nt, Human
uuuggauuuuuuucugccuu

SEQ ID NO: 1302387 - RNA, 21 nt, Human
aaaaguuccuucuugucuuug

SEQ ID NO: 1302388 - RNA, 23 nt, Human
aaaguuccuucuugucuuugccu

SEQ ID NO: 1302389 - RNA, 20 nt, Human
agcuggaaaaugccaggacu

SEQ ID NO: 1302390 - RNA, 18 nt, Human
caccagcaugaggagccc

SEQ ID NO: 1302391 - RNA, 23 nt, Human
cuccuuccauguccacuggcggg

SEQ ID NO: 1302392 - RNA, 23 nt, Human
cugcugcuucugcauucagggcg

SEQ ID NO: 1302393 - RNA, 24 nt, Human
cuucuugucuuugccuaauuuaac

SEQ ID NO: 1302394 - RNA, 20 nt, Human
gagcaguggcagcgggguug

SEQ ID NO: 1302395 - RNA, 21 nt, Human
gcggcacuccuuccaugucca

SEQ ID NO: 1302396 - RNA, 22 nt, Human
ggcucaggagcaguggcagcgg

SEQ ID NO: 1302397 - RNA, 18 nt, Human
ucaggagcaguggcagcg

SEQ ID NO: 1302398 - RNA, 25 nt, Human
uccuggagauuaaaugagauuuucc

SEQ ID NO: 1302399 - RNA, 23 nt, Human
ucucacaaauaguaucuuagucu

SEQ ID NO: 1302400 - RNA, 23 nt, Human
ucugagcuggaaaaugccaggac

SEQ ID NO: 1302401 - RNA, 19 nt, Human
uggcagcgggguugcacca

SEQ ID NO: 1302402 - RNA, 25 nt, Human
aacaagaagugaaggaagagggacc

SEQ ID NO: 1302403 - RNA, 20 nt, Human
aaggaagaagacuggugaca

SEQ ID NO: 1302404 - RNA, 20 nt, Human
acaggcacaccucacuuccc

SEQ ID NO: 1302405 - RNA, 18 nt, Human
accucacuucccagacag

SEQ ID NO: 1302406 - RNA, 18 nt, Human
accucacuuccuagacag

SEQ ID NO: 1302407 - RNA, 21 nt, Human
agaaagaucacacacaaggcu

SEQ ID NO: 1302408 - RNA, 22 nt, Human
agaauccagugaaaauggcugc

SEQ ID NO: 1302409 - RNA, 23 nt, Human
agcuucaucauuucucccugaag

SEQ ID NO: 1302410 - RNA, 24 nt, Human
agguaaacaaaucuucuggucaag

SEQ ID NO: 1302411 - RNA, 22 nt, Human
auccgaauaugcuaccuuucug

SEQ ID NO: 1302412 - RNA, 23 nt, Human
caacaagaagugaaggaagaaga

SEQ ID NO: 1302413 - RNA, 21 nt, Human
cacacacaaggcugucacuuc

SEQ ID NO: 1302414 - RNA, 20 nt, Human
cacagcagccgggcagaggc

SEQ ID NO: 1302415 - RNA, 24 nt, Human
cagaaagaucacacacaaggcugg

SEQ ID NO: 1302416 - RNA, 21 nt, Human
cagaggcgcuccucacuuccc

SEQ ID NO: 1302417 - RNA, 24 nt, Human
cagcagagacgcaccucacuuccu

SEQ ID NO: 1302418 - RNA, 22 nt, Human
cggcagccaggcacaggcacac

SEQ ID NO: 1302419 - RNA, 21 nt, Human
cgggcagcagagacgcaccuc

SEQ ID NO: 1302420 - RNA, 21 nt, Human
cucugaaggaugcaguugagg

SEQ ID NO: 1302421 - RNA, 25 nt, Human
gaaaaaaaaaagaaauagcacucug

SEQ ID NO: 1302422 - RNA, 23 nt, Human
guaaacaaaucuucuggucaaga

SEQ ID NO: 1302423 - RNA, 24 nt, Human
guugauuuucuucugauagcuuca

SEQ ID NO: 1302424 - RNA, 23 nt, Human
uagguaaacaaaucuucugguca

SEQ ID NO: 1302425 - RNA, 21 nt, Human
ucaagagaaaaaaaaaagaaa

SEQ ID NO: 1302426 - RNA, 22 nt, Human
ugcggcagccaggcacaggcac

SEQ ID NO: 1302427 - RNA, 18 nt, Human
uggggagggcagaaagau

SEQ ID NO: 1302428 - RNA, 21 nt, Human
ugguagguaaacaaaucuucu

SEQ ID NO: 1302429 - RNA, 22 nt, Human
uggucaagagaaaaaaaaaaga

SEQ ID NO: 1302430 - RNA, 18 nt, Human
aacccugacagguaaaaa

SEQ ID NO: 1302431 - RNA, 19 nt, Human
acccugacagguaaaaaaa

SEQ ID NO: 1302432 - RNA, 18 nt, Human
cccgucagcaccugcuga

SEQ ID NO: 1302433 - RNA, 18 nt, Human
cccugacagguaaaaaaa

SEQ ID NO: 1302434 - RNA, 20 nt, Human
gccuuucugcuucuccagga

SEQ ID NO: 1302435 - RNA, 19 nt, Human
uuguacccgucagcaccug

SEQ ID NO: 1302436 - RNA, 18 nt, Human
gcaggcugggaggaggga

SEQ ID NO: 1302437 - RNA, 26 nt, Human
uauuaauucuguagcagguuaaggga

SEQ ID NO: 1302438 - RNA, 22 nt, Human
acgcagcucaggaacuggagga

SEQ ID NO: 1302439 - RNA, 20 nt, Human
cuuuguaccuguuguccuuc

SEQ ID NO: 1302440 - RNA, 19 nt, Human
guccgaacgcagcucagga

SEQ ID NO: 1302441 - RNA, 22 nt, Human
uacaauacgacagggguccgaa

SEQ ID NO: 1302442 - RNA, 18 nt, Human
uagguguccaaguagaaa

SEQ ID NO: 1302443 - RNA, 22 nt, Human
aaguccccuuuuggagaugccc

SEQ ID NO: 1302444 - RNA, 20 nt, Human
uggaaggaaauuccacccgc

SEQ ID NO: 1302445 - RNA, 19 nt, Human
aaauaaauuuaaacuauaa

SEQ ID NO: 1302446 - RNA, 19 nt, Human
aaauaaauuuaaacuauaa

SEQ ID NO: 1302447 - RNA, 19 nt, Human
aaauaaauuuaaacuauaa

SEQ ID NO: 1302448 - RNA, 19 nt, Human
aaauaaauuuaaacuauaa

SEQ ID NO: 1302449 - RNA, 18 nt, Human
aacagcuucuccaccucu

SEQ ID NO: 1302450 - RNA, 18 nt, Human
aacagcuucuccaccucu

SEQ ID NO: 1302451 - RNA, 18 nt, Human
aagaugccagagugaaca

SEQ ID NO: 1302452 - RNA, 23 nt, Human
agccucuccugcuccuccugccg

SEQ ID NO: 1302453 - RNA, 19 nt, Human
caccucuuccagcagccuc

SEQ ID NO: 1302454 - RNA, 19 nt, Human
caccucuuccagcagccuc

SEQ ID NO: 1302455 - RNA, 26 nt, Human
cagcagccucucccucuccagcagcc

SEQ ID NO: 1302456 - RNA, 23 nt, Human
ccagcagccucuccugcuccucc

SEQ ID NO: 1302457 - RNA, 21 nt, Human
cccgcagccucuccagcuccu

SEQ ID NO: 1302458 - RNA, 19 nt, Human
ccuccugccgccucuccug

SEQ ID NO: 1302459 - RNA, 21 nt, Human
ccucuccagcagccucuccug

SEQ ID NO: 1302460 - RNA, 23 nt, Human
ccucuccagcuccugcagagucu

SEQ ID NO: 1302461 - RNA, 23 nt, Human
cuaacagcuucuccaccucuucc

SEQ ID NO: 1302462 - RNA, 23 nt, Human
cuaacagcuucuccaccucuucc

SEQ ID NO: 1302463 - RNA, 19 nt, Human
cuccuccugccgccucucc

SEQ ID NO: 1302464 - RNA, 24 nt, Human
cugcuccuccugccgccucuccug

SEQ ID NO: 1302465 - RNA, 22 nt, Human
cuuaaauguuuuguuuuuuuuu

SEQ ID NO: 1302466 - RNA, 19 nt, Human
gccacagccucucauccug

SEQ ID NO: 1302467 - RNA, 20 nt, Human
ggauauuaaccccuuaaaug

SEQ ID NO: 1302468 - RNA, 22 nt, Human
uaaaagaugccagagugaacau

SEQ ID NO: 1302469 - RNA, 20 nt, Human
uaaauuagaaacacaaauaa

SEQ ID NO: 1302470 - RNA, 27 nt, Human
uaaauuagaaacacaaauaaauuuaaa

SEQ ID NO: 1302471 - RNA, 27 nt, Human
uaaauuagaaacacaaauaaauuuaaa

SEQ ID NO: 1302472 - RNA, 27 nt, Human
uaaauuagaaacacaaauaaauuuaaa

SEQ ID NO: 1302473 - RNA, 27 nt, Human
uaaauuagaaacacaaauaaauuuaaa

SEQ ID NO: 1302474 - RNA, 18 nt, Human
uagaaacacaaauaaaca

SEQ ID NO: 1302475 - RNA, 18 nt, Human
uccagcagccucucccuc

SEQ ID NO: 1302476 - RNA, 22 nt, Human
uccagcagccucucccucucca

SEQ ID NO: 1302477 - RNA, 19 nt, Human
ucccucuccagcagccucu

SEQ ID NO: 1302478 - RNA, 18 nt, Human
ucuaacagcuucuccacc

SEQ ID NO: 1302479 - RNA, 18 nt, Human
ucuaacagcuucuccacc

SEQ ID NO: 1302480 - RNA, 21 nt, Human
ucuaacagcuucuccaccucu

SEQ ID NO: 1302481 - RNA, 21 nt, Human
ucuaacagcuucuccaccucu

SEQ ID NO: 1302482 - RNA, 24 nt, Human
ucuccaccucuuccagcagccucu

SEQ ID NO: 1302483 - RNA, 24 nt, Human
ucuccaccucuuccagcagccucu

SEQ ID NO: 1302484 - RNA, 19 nt, Human
ucuccagcucccgcagccu

SEQ ID NO: 1302485 - RNA, 19 nt, Human
ucuccagcucccgcagccu

SEQ ID NO: 1302486 - RNA, 22 nt, Human
ucuccugcuccuccugccgccu

SEQ ID NO: 1302487 - RNA, 26 nt, Human
ucuccuguucuaacagcuucuccacc

SEQ ID NO: 1302488 - RNA, 26 nt, Human
ucuccuguucuaacagcuucuccacc

SEQ ID NO: 1302489 - RNA, 24 nt, Human
ucuuccagcagccucucccucucc

SEQ ID NO: 1302490 - RNA, 23 nt, Human
ucuuccagcagccucuccugccc

SEQ ID NO: 1302491 - RNA, 22 nt, Human
ugaacaugagagaaacacccac

SEQ ID NO: 1302492 - RNA, 19 nt, Human
ugagagaaacacccacucu

SEQ ID NO: 1302493 - RNA, 22 nt, Human
uuuaaacuauaaauuagaaaca

SEQ ID NO: 1302494 - RNA, 22 nt, Human
uuuaaacuauaaauuagaaaca

SEQ ID NO: 1302495 - RNA, 22 nt, Human
uuuaaacuauaaauuagaaaca

SEQ ID NO: 1302496 - RNA, 22 nt, Human
uuuaaacuauaaauuagaaaca

SEQ ID NO: 1302497 - RNA, 20 nt, Human
ccuccaaaccucugaagcgc

SEQ ID NO: 1302498 - RNA, 19 nt, Human
ccucugaagcgcuccgugc

SEQ ID NO: 1302499 - RNA, 20 nt, Human
gcggcgggguaagcuggagc

SEQ ID NO: 1302500 - RNA, 19 nt, Human
uccgugcacgcgacgcggc

SEQ ID NO: 1302501 - RNA, 18 nt, Human
ugagguuccggcccccuc

SEQ ID NO: 1302502 - RNA, 22 nt, Human
uggagcccucgccgcgagcccu

SEQ ID NO: 1302503 - RNA, 20 nt, Human
uuugagguuccggcccccuc

SEQ ID NO: 1302504 - RNA, 23 nt, Human
aaacaaaaugcaauuuuccccau

SEQ ID NO: 1302505 - RNA, 23 nt, Human
aaggcaaagacaguaggaggccu

SEQ ID NO: 1302506 - RNA, 18 nt, Human
accaccuccaccauaaca

SEQ ID NO: 1302507 - RNA, 22 nt, Human
accauaacaauuucuagaaaca

SEQ ID NO: 1302508 - RNA, 21 nt, Human
aggaggccuucuaagaaggga

SEQ ID NO: 1302509 - RNA, 25 nt, Human
auguaaacaaaaugcaauuuucccc

SEQ ID NO: 1302510 - RNA, 19 nt, Human
caccacauguaaacaaaau

SEQ ID NO: 1302511 - RNA, 21 nt, Human
cacccagaccaccuccaccau

SEQ ID NO: 1302512 - RNA, 20 nt, Human
ccgaggcucgcccggccggc

SEQ ID NO: 1302513 - RNA, 20 nt, Human
ccgccgcggccucgcggacc

SEQ ID NO: 1302514 - RNA, 21 nt, Human
ccgccgcggccucgcggaccu

SEQ ID NO: 1302515 - RNA, 19 nt, Human
ccgggucgcccgcgcuucg

SEQ ID NO: 1302516 - RNA, 20 nt, Human
ccgggucgcccgcgcuucgc

SEQ ID NO: 1302517 - RNA, 26 nt, Human
ccucgcggaccuggcccgcccgaccc

SEQ ID NO: 1302518 - RNA, 25 nt, Human
ccuucagacucacccagaccaccuc

SEQ ID NO: 1302519 - RNA, 19 nt, Human
cgcccggccggcugcuccc

SEQ ID NO: 1302520 - RNA, 19 nt, Human
cgugcaggugcgacggccg

SEQ ID NO: 1302521 - RNA, 19 nt, Human
gcaaagacaguaggaggcc

SEQ ID NO: 1302522 - RNA, 19 nt, Human
gcccggccggcugcucccc

SEQ ID NO: 1302523 - RNA, 23 nt, Human
ggaccuggcccgcccgacccccg

SEQ ID NO: 1302524 - RNA, 19 nt, Human
ugcacagcugccgccgcgg

SEQ ID NO: 1302525 - RNA, 23 nt, Human
uggcccgcccgacccccgggucg

SEQ ID NO: 1302526 - RNA, 23 nt, Human
uguucaccacauguaaacaaaau

SEQ ID NO: 1302527 - RNA, 18 nt, Human
uuuaaagggaguuaaaac

SEQ ID NO: 1302528 - RNA, 20 nt, Human
aaaaaaacaacaaccaaaca

SEQ ID NO: 1302529 - RNA, 22 nt, Human
aaaaacagcaggcggcucaggc

SEQ ID NO: 1302530 - RNA, 21 nt, Human
aaacaaaaaauuaaaaucaac

SEQ ID NO: 1302531 - RNA, 24 nt, Human
aaacaaaaaauuaaaaucaacuua

SEQ ID NO: 1302532 - RNA, 24 nt, Human
aaagugcugggauuacagguguga

SEQ ID NO: 1302533 - RNA, 23 nt, Human
aacaaaauucaaacaggagcaga

SEQ ID NO: 1302534 - RNA, 24 nt, Human
aacaaccaaacaacaauaacaaaa

SEQ ID NO: 1302535 - RNA, 26 nt, Human
aacaaccaaacaacaauaacaaaauu

SEQ ID NO: 1302536 - RNA, 18 nt, Human
aaccaaacaacaauaaca

SEQ ID NO: 1302537 - RNA, 25 nt, Human
aagcaauucuccugccucagccucc

SEQ ID NO: 1302538 - RNA, 24 nt, Human
aaguagcugggauuacaggcaugu

SEQ ID NO: 1302539 - RNA, 18 nt, Human
aagugcugggauuacagg

SEQ ID NO: 1302540 - RNA, 19 nt, Human
aagugcugggauuacaggu

SEQ ID NO: 1302541 - RNA, 26 nt, Human
aagugcugggauuacaggugugagcc

SEQ ID NO: 1302542 - RNA, 27 nt, Human
aaugacaggaacggaaaagggagggcc

SEQ ID NO: 1302543 - RNA, 24 nt, Human
aauuuuguauuuuuagcagagaug

SEQ ID NO: 1302544 - RNA, 19 nt, Human
acacagucuuccuccaucc

SEQ ID NO: 1302545 - RNA, 26 nt, Human
accacuuacccagccuuccgaagcac

SEQ ID NO: 1302546 - RNA, 19 nt, Human
acccaggcuggagugcagu

SEQ ID NO: 1302547 - RNA, 25 nt, Human
acccgccuuggccucccaaagugcu

SEQ ID NO: 1302548 - RNA, 18 nt, Human
acccucauuuccaagacc

SEQ ID NO: 1302549 - RNA, 21 nt, Human
acuuaaaaaaacaacaaccaa

SEQ ID NO: 1302550 - RNA, 21 nt, Human
agagauggggcugaggcauag

SEQ ID NO: 1302551 - RNA, 22 nt, Human
agaggcucgcuggccacgaacg

SEQ ID NO: 1302552 - RNA, 22 nt, Human
agauggggcugaggcauagggg

SEQ ID NO: 1302553 - RNA, 24 nt, Human
agcagaacaauggggucaaagaaa

SEQ ID NO: 1302554 - RNA, 23 nt, Human
agcagagauggggcugaggcaua

SEQ ID NO: 1302555 - RNA, 22 nt, Human
agcagagaugggguuuugccau

SEQ ID NO: 1302556 - RNA, 25 nt, Human
agcguccacauagccagcggacagc

SEQ ID NO: 1302557 - RNA, 21 nt, Human
agcuggugguguccagacugu

SEQ ID NO: 1302558 - RNA, 21 nt, Human
agcuggugguguccagacugu

SEQ ID NO: 1302559 - RNA, 19 nt, Human
aggagaaagaggacgauaa

SEQ ID NO: 1302560 - RNA, 20 nt, Human
aggagaaagaggacgauaaa

SEQ ID NO: 1302561 - RNA, 19 nt, Human
aggcuggagugcaguggca

SEQ ID NO: 1302562 - RNA, 21 nt, Human
aggggcuugaaggcgagaggc

SEQ ID NO: 1302563 - RNA, 24 nt, Human
aggugauccacccgccuuggccuc

SEQ ID NO: 1302564 - RNA, 23 nt, Human
aggugugagccaccgugcccggc

SEQ ID NO: 1302565 - RNA, 23 nt, Human
aguagcugggauuacaggcaugu

SEQ ID NO: 1302566 - RNA, 18 nt, Human
agucuuccuccauccugu

SEQ ID NO: 1302567 - RNA, 20 nt, Human
agugcaguggcacgaccuug

SEQ ID NO: 1302568 - RNA, 23 nt, Human
agugcaguggcacgaccuuggcu

SEQ ID NO: 1302569 - RNA, 24 nt, Human
agugcaguggcacgaccuuggcuc

SEQ ID NO: 1302570 - RNA, 23 nt, Human
augggguuuugccauguugguca

SEQ ID NO: 1302571 - RNA, 24 nt, Human
augggguuuugccauguuggucag

SEQ ID NO: 1302572 - RNA, 21 nt, Human
auucuccugccucagccuccc

SEQ ID NO: 1302573 - RNA, 19 nt, Human
caaaauucaaacaggagca

SEQ ID NO: 1302574 - RNA, 24 nt, Human
caaacaacaauaacaaaauucaaa

SEQ ID NO: 1302575 - RNA, 24 nt, Human
caaagugcugggauuacaggugug

SEQ ID NO: 1302576 - RNA, 21 nt, Human
caacaaccaaacaacaauaac

SEQ ID NO: 1302577 - RNA, 20 nt, Human
caaccuccaccucccagguu

SEQ ID NO: 1302578 - RNA, 23 nt, Human
caaccuccaccucccagguucaa

SEQ ID NO: 1302579 - RNA, 23 nt, Human
caacuuaaaaaaacaacaaccaa

SEQ ID NO: 1302580 - RNA, 24 nt, Human
caacuuaaaaaaacaacaaccaaa

SEQ ID NO: 1302581 - RNA, 22 nt, Human
caagcaauucuccugccucagc

SEQ ID NO: 1302582 - RNA, 18 nt, Human
caaugcugcagggcugag

SEQ ID NO: 1302583 - RNA, 20 nt, Human
cacauagccagcggacagcu

SEQ ID NO: 1302584 - RNA, 23 nt, Human
cacccgccuuggccucccaaagu

SEQ ID NO: 1302585 - RNA, 24 nt, Human
cacccgccuuggccucccaaagug

SEQ ID NO: 1302586 - RNA, 25 nt, Human
caccugcauuauuacauauccuucc

SEQ ID NO: 1302587 - RNA, 21 nt, Human
cacugcaaccuccaccuccca

SEQ ID NO: 1302588 - RNA, 22 nt, Human
cagagaugggguuuugccaugu

SEQ ID NO: 1302589 - RNA, 18 nt, Human
cagcaacaaggacagggg

SEQ ID NO: 1302590 - RNA, 19 nt, Human
cagcaacaaggacaggggc

SEQ ID NO: 1302591 - RNA, 23 nt, Human
cagcaaugcccccaggaggcaga

SEQ ID NO: 1302592 - RNA, 24 nt, Human
cagccuuccgaagcacuuuuccca

SEQ ID NO: 1302593 - RNA, 26 nt, Human
cagcucgggacacaacuuugggcagg

SEQ ID NO: 1302594 - RNA, 26 nt, Human
caggaaaaacagcaggcggcucaggc

SEQ ID NO: 1302595 - RNA, 19 nt, Human
caggaacggaaagguucuc

SEQ ID NO: 1302596 - RNA, 19 nt, Human
cagggcagcagaacaaugg

SEQ ID NO: 1302597 - RNA, 25 nt, Human
cagggcugagaggcugugagccaga

SEQ ID NO: 1302598 - RNA, 19 nt, Human
cagguaagcucccuacaaa

SEQ ID NO: 1302599 - RNA, 20 nt, Human
caguucccagagcugugguu

SEQ ID NO: 1302600 - RNA, 24 nt, Human
cauguuggucaggcuggucuugaa

SEQ ID NO: 1302601 - RNA, 22 nt, Human
cauuguuggcauagaggguggg

SEQ ID NO: 1302602 - RNA, 21 nt, Human
ccaaagugcugggauuacagg

SEQ ID NO: 1302603 - RNA, 21 nt, Human
ccaaagugcugggauuacagg

SEQ ID NO: 1302604 - RNA, 24 nt, Human
ccaaagugcugggauuacaggugu

SEQ ID NO: 1302605 - RNA, 23 nt, Human
ccaaguagcugggauuacaggca

SEQ ID NO: 1302606 - RNA, 24 nt, Human
ccaaguagcugggauuacaggcau

SEQ ID NO: 1302607 - RNA, 20 nt, Human
ccaccaaacccggcaaauuu

SEQ ID NO: 1302608 - RNA, 27 nt, Human
ccaccucccagguucaagcaauucuuu

SEQ ID NO: 1302609 - RNA, 19 nt, Human
ccauguuggucaggcuggu

SEQ ID NO: 1302610 - RNA, 21 nt, Human
ccauguuggucaggcuggucu

SEQ ID NO: 1302611 - RNA, 23 nt, Human
cccaaguagcugggauuacaggc

SEQ ID NO: 1302612 - RNA, 24 nt, Human
cccaaguagcugggauuacaggca

SEQ ID NO: 1302613 - RNA, 23 nt, Human
cccagguucaagcaauucuccug

SEQ ID NO: 1302614 - RNA, 21 nt, Human
ccccugcgaugaaggcuccug

SEQ ID NO: 1302615 - RNA, 20 nt, Human
cccuucuuacuuuuuucacc

SEQ ID NO: 1302616 - RNA, 19 nt, Human
ccuccaugcccagcuggug

SEQ ID NO: 1302617 - RNA, 24 nt, Human
ccucccagguucaagcaauucucc

SEQ ID NO: 1302618 - RNA, 21 nt, Human
ccuccuccaccacucugcguc

SEQ ID NO: 1302619 - RNA, 22 nt, Human
ccugaccucaggugauccaccc

SEQ ID NO: 1302620 - RNA, 23 nt, Human
ccugaccucaggugauccacccg

SEQ ID NO: 1302621 - RNA, 23 nt, Human
ccugccucagccucccaaguagc

SEQ ID NO: 1302622 - RNA, 24 nt, Human
ccugccucagccucccaaguagcu

SEQ ID NO: 1302623 - RNA, 19 nt, Human
ccugcgaugaaggcuccug

SEQ ID NO: 1302624 - RNA, 21 nt, Human
ccuguaauuggcuccugaagc

SEQ ID NO: 1302625 - RNA, 19 nt, Human
ccuucggaccuccuccacc

SEQ ID NO: 1302626 - RNA, 19 nt, Human
cggccacuugaagccaggc

SEQ ID NO: 1302627 - RNA, 24 nt, Human
cucacugcaaccuccaccucccag

SEQ ID NO: 1302628 - RNA, 23 nt, Human
cucagccucccaaguagcuggga

SEQ ID NO: 1302629 - RNA, 24 nt, Human
cucaggugauccacccgccuuggc

SEQ ID NO: 1302630 - RNA, 25 nt, Human
cuccaaugacaggaacgggguaccc

SEQ ID NO: 1302631 - RNA, 20 nt, Human
cuccaggaccccuccaugcc

SEQ ID NO: 1302632 - RNA, 18 nt, Human
cuccaugcccagcuggug

SEQ ID NO: 1302633 - RNA, 24 nt, Human
cugcaaccuccaccucccagguuc

SEQ ID NO: 1302634 - RNA, 24 nt, Human
cugcacaggcaccccugcgaugaa

SEQ ID NO: 1302635 - RNA, 18 nt, Human
cugcccugaggaggaggg

SEQ ID NO: 1302636 - RNA, 22 nt, Human
cugcgaugaaggcuccugguuu

SEQ ID NO: 1302637 - RNA, 25 nt, Human
cuggcucugccccagcguccacauu

SEQ ID NO: 1302638 - RNA, 18 nt, Human
cugucacccaggcuggag

SEQ ID NO: 1302639 - RNA, 22 nt, Human
gacaggcugcacaggccggacc

SEQ ID NO: 1302640 - RNA, 23 nt, Human
gaccucaggugauccacccgccu

SEQ ID NO: 1302641 - RNA, 19 nt, Human
gaccuuggcucacugcaac

SEQ ID NO: 1302642 - RNA, 24 nt, Human
gagaugggguuuugccauguuggu

SEQ ID NO: 1302643 - RNA, 24 nt, Human
gaggacgauaaaggccagaagcac

SEQ ID NO: 1302644 - RNA, 21 nt, Human
gagggggugagaggcugaggc

SEQ ID NO: 1302645 - RNA, 18 nt, Human
gauuacaggcaugugcca

SEQ ID NO: 1302646 - RNA, 18 nt, Human
gauuacaggugugagcca

SEQ ID NO: 1302647 - RNA, 20 nt, Human
gauuacaggugugagccacc

SEQ ID NO: 1302648 - RNA, 21 nt, Human
gauuacaggugugagccaccg

SEQ ID NO: 1302649 - RNA, 22 nt, Human
gcaaccuccaccucccagguuc

SEQ ID NO: 1302650 - RNA, 23 nt, Human
gcagagaugggguuuugccaugu

SEQ ID NO: 1302651 - RNA, 19 nt, Human
gcaguggcacgaccuuggc

SEQ ID NO: 1302652 - RNA, 20 nt, Human
gccauguuggucaggcuggu

SEQ ID NO: 1302653 - RNA, 24 nt, Human
gccauguuggucaggcuggucuug

SEQ ID NO: 1302654 - RNA, 22 nt, Human
gcccugaggaggagggggugag

SEQ ID NO: 1302655 - RNA, 22 nt, Human
gccggcccaccacaaucacagg

SEQ ID NO: 1302656 - RNA, 22 nt, Human
gccuuggccucccaaagugcug

SEQ ID NO: 1302657 - RNA, 25 nt, Human
gcucugucacccaggcuggagugca

SEQ ID NO: 1302658 - RNA, 19 nt, Human
gcuggagugcaguggcacg

SEQ ID NO: 1302659 - RNA, 23 nt, Human
gcuggucuugaacuccugaccuc

SEQ ID NO: 1302660 - RNA, 23 nt, Human
ggaaaaacagcaggcggcucagg

SEQ ID NO: 1302661 - RNA, 23 nt, Human
ggacaggcugcacaggcaccccu

SEQ ID NO: 1302662 - RNA, 24 nt, Human
ggacaggcugcacaggccggaccc

SEQ ID NO: 1302663 - RNA, 18 nt, Human
ggaccccuccaugcccag

SEQ ID NO: 1302664 - RNA, 20 nt, Human
ggaccccuccaugcccagcu

SEQ ID NO: 1302665 - RNA, 18 nt, Human
ggaccuccuccaccacuc

SEQ ID NO: 1302666 - RNA, 21 nt, Human
ggaggaagcccagcaggaaaa

SEQ ID NO: 1302667 - RNA, 20 nt, Human
ggaggagggggugagaggcu

SEQ ID NO: 1302668 - RNA, 19 nt, Human
ggauuacaggcaugugcca

SEQ ID NO: 1302669 - RNA, 21 nt, Human
ggcaaagggccagaggagaaa

SEQ ID NO: 1302670 - RNA, 21 nt, Human
ggccacuugaagccaggcaaa

SEQ ID NO: 1302671 - RNA, 24 nt, Human
ggcuggucuugaacuccugaccuc

SEQ ID NO: 1302672 - RNA, 22 nt, Human
gggguuuugccauguuggucag

SEQ ID NO: 1302673 - RNA, 23 nt, Human
gggguuuugccauguuggucagg

SEQ ID NO: 1302674 - RNA, 22 nt, Human
ggguuuugccauguuggucagg

SEQ ID NO: 1302675 - RNA, 19 nt, Human
ggucuugaacuccugaccu

SEQ ID NO: 1302676 - RNA, 18 nt, Human
guagcugggauuacaggc

SEQ ID NO: 1302677 - RNA, 24 nt, Human
gugauccacccgccuuggccuccc

SEQ ID NO: 1302678 - RNA, 21 nt, Human
uaagcucccuacaaacucaca

SEQ ID NO: 1302679 - RNA, 23 nt, Human
uacaggugugagccaccgugccc

SEQ ID NO: 1302680 - RNA, 24 nt, Human
uagcagagaugggguuuugccaug

SEQ ID NO: 1302681 - RNA, 22 nt, Human
uauucuauuaucuuucuuccca

SEQ ID NO: 1302682 - RNA, 24 nt, Human
ucacccaggcuggagugcaguggc

SEQ ID NO: 1302683 - RNA, 24 nt, Human
ucacugcaaccuccaccucccagg

SEQ ID NO: 1302684 - RNA, 25 nt, Human
ucacugcaaccuccaccucccaggu

SEQ ID NO: 1302685 - RNA, 26 nt, Human
ucacugcaaccuccaccucccagguu

SEQ ID NO: 1302686 - RNA, 18 nt, Human
ucagccucccaaguagcu

SEQ ID NO: 1302687 - RNA, 20 nt, Human
ucagccucccaaguagcugg

SEQ ID NO: 1302688 - RNA, 18 nt, Human
uccaacgccaccuucagc

SEQ ID NO: 1302689 - RNA, 23 nt, Human
uccacauccacaaugcugcaggg

SEQ ID NO: 1302690 - RNA, 22 nt, Human
uccaggaccccuccaugcccag

SEQ ID NO: 1302691 - RNA, 19 nt, Human
uccauuuauuccccacuuc

SEQ ID NO: 1302692 - RNA, 23 nt, Human
ucccaaagugcugggauuacagg

SEQ ID NO: 1302693 - RNA, 24 nt, Human
ucccaaguagcugggauuacaggc

SEQ ID NO: 1302694 - RNA, 21 nt, Human
ucccagguucaagcaauucuc

SEQ ID NO: 1302695 - RNA, 24 nt, Human
ucccagguucaagcaauucuccug

SEQ ID NO: 1302696 - RNA, 23 nt, Human
uccugagguggcccgccuucgga

SEQ ID NO: 1302697 - RNA, 23 nt, Human
ucgguggcuggaaugcccagagc

SEQ ID NO: 1302698 - RNA, 26 nt, Human
ucuccugccucagccucccaaguagc

SEQ ID NO: 1302699 - RNA, 23 nt, Human
ucucugugacacugcucauaccc

SEQ ID NO: 1302700 - RNA, 23 nt, Human
ucugaacauuguuggcauagagg

SEQ ID NO: 1302701 - RNA, 24 nt, Human
ucugucacccaggcuggagugcag

SEQ ID NO: 1302702 - RNA, 23 nt, Human
ucuugaacuccugaccucaggug

SEQ ID NO: 1302703 - RNA, 22 nt, Human
ucuugcucugucacccaggcug

SEQ ID NO: 1302704 - RNA, 23 nt, Human
ucuugcucugucacccaggcugg

SEQ ID NO: 1302705 - RNA, 24 nt, Human
ucuugcucugucacccaggcugga

SEQ ID NO: 1302706 - RNA, 21 nt, Human
ugaagccaggcaaagggccag

SEQ ID NO: 1302707 - RNA, 21 nt, Human
ugaccucaggugauccacccg

SEQ ID NO: 1302708 - RNA, 24 nt, Human
ugaccucaggugauccacccgccu

SEQ ID NO: 1302709 - RNA, 19 nt, Human
ugaggaggagggggugaga

SEQ ID NO: 1302710 - RNA, 22 nt, Human
ugcccagagccugugccaugac

SEQ ID NO: 1302711 - RNA, 20 nt, Human
ugccccagcguccacauagc

SEQ ID NO: 1302712 - RNA, 23 nt, Human
ugccccagcguccacauagccag

SEQ ID NO: 1302713 - RNA, 22 nt, Human
ugcccugaggaggaggggguga

SEQ ID NO: 1302714 - RNA, 24 nt, Human
ugccucagccucccaaguagcugg

SEQ ID NO: 1302715 - RNA, 24 nt, Human
ugcucugucacccaggcuggagug

SEQ ID NO: 1302716 - RNA, 24 nt, Human
ugcugggauuacaggugugagcca

SEQ ID NO: 1302717 - RNA, 22 nt, Human
uggaaugcccagagccugugcc

SEQ ID NO: 1302718 - RNA, 23 nt, Human
uggagugcaguggcacgaccuug

SEQ ID NO: 1302719 - RNA, 24 nt, Human
uggagugcaguggcacgaccuugg

SEQ ID NO: 1302720 - RNA, 20 nt, Human
uggcuccugaagcugcuccu

SEQ ID NO: 1302721 - RNA, 18 nt, Human
ugggauuacaggcaugug

SEQ ID NO: 1302722 - RNA, 21 nt, Human
ugggauuacaggcaugugcca

SEQ ID NO: 1302723 - RNA, 22 nt, Human
ugggauuacaggcaugugccac

SEQ ID NO: 1302724 - RNA, 24 nt, Human
ugggauuacaggcaugugccacca

SEQ ID NO: 1302725 - RNA, 18 nt, Human
ugggauuacaggugugag

SEQ ID NO: 1302726 - RNA, 21 nt, Human
ugggauuacaggugugagcca

SEQ ID NO: 1302727 - RNA, 22 nt, Human
ugggauuacaggugugagccac

SEQ ID NO: 1302728 - RNA, 23 nt, Human
ugggauuacaggugugagccacc

SEQ ID NO: 1302729 - RNA, 23 nt, Human
ugggauuacaggugugagccacc

SEQ ID NO: 1302730 - RNA, 24 nt, Human
ugggauuacaggugugagccaccg

SEQ ID NO: 1302731 - RNA, 20 nt, Human
ugggcaggucacagggcagc

SEQ ID NO: 1302732 - RNA, 20 nt, Human
uggggcagcaacaaggacag

SEQ ID NO: 1302733 - RNA, 24 nt, Human
uggggcagcaacaaggacaggggc

SEQ ID NO: 1302734 - RNA, 24 nt, Human
ugggguuuugccauguuggucagg

SEQ ID NO: 1302735 - RNA, 24 nt, Human
uggucaggcuggucuugaacuccu

SEQ ID NO: 1302736 - RNA, 24 nt, Human
uuaaaaucaacuuaaaaaaacaac

SEQ ID NO: 1302737 - RNA, 22 nt, Human
uuaagauuuuccuucuuccuuc

SEQ ID NO: 1302738 - RNA, 26 nt, Human
uuacuuuuuucaccugcauuauuaca

SEQ ID NO: 1302739 - RNA, 18 nt, Human
uuagcagagaugggguuu

SEQ ID NO: 1302740 - RNA, 22 nt, Human
uuagcagagaugggguuuugcc

SEQ ID NO: 1302741 - RNA, 24 nt, Human
uuagcagagaugggguuuugccau

SEQ ID NO: 1302742 - RNA, 21 nt, Human
uucaagcaauucuccugccuc

SEQ ID NO: 1302743 - RNA, 24 nt, Human
uucaagcaauucuccugccucagc

SEQ ID NO: 1302744 - RNA, 20 nt, Human
uuccaagaccacuuacccag

SEQ ID NO: 1302745 - RNA, 22 nt, Human
uucccagagcugugguuccaac

SEQ ID NO: 1302746 - RNA, 22 nt, Human
uucgguggcuggaaugcccaga

SEQ ID NO: 1302747 - RNA, 24 nt, Human
uugccauguuggucaggcuggucu

SEQ ID NO: 1302748 - RNA, 24 nt, Human
uugcucugucacccaggcuggagu

SEQ ID NO: 1302749 - RNA, 18 nt, Human
uuggccucccaaagugcu

SEQ ID NO: 1302750 - RNA, 23 nt, Human
uuguauuuuuagcagagaugggg

SEQ ID NO: 1302751 - RNA, 21 nt, Human
uuuaagauuuuccuucuuccu

SEQ ID NO: 1302752 - RNA, 23 nt, Human
uuuccuucuuccuucucauuucu

SEQ ID NO: 1302753 - RNA, 23 nt, Human
uuuugccauguuggucaggcugg

SEQ ID NO: 1302754 - RNA, 21 nt, Human
uuuuuagcagagaugggguuu

SEQ ID NO: 1302755 - RNA, 21 nt, Human
uuuuuagcagagaugggguuu

SEQ ID NO: 1302756 - RNA, 18 nt, Human
aaaauuagcugggcaugg

SEQ ID NO: 1302757 - RNA, 21 nt, Human
aaacagcgucagugaagaaaa

SEQ ID NO: 1302758 - RNA, 21 nt, Human
aaacugaaaaggagaagcugg

SEQ ID NO: 1302759 - RNA, 27 nt, Human
aaccugcccuuccuuaccgccccucug

SEQ ID NO: 1302760 - RNA, 20 nt, Human
aagaaaaaacggguccagca

SEQ ID NO: 1302761 - RNA, 22 nt, Human
aagaaaaaacggguccagcaga

SEQ ID NO: 1302762 - RNA, 19 nt, Human
aagaagcgcaggccaggcg

SEQ ID NO: 1302763 - RNA, 22 nt, Human
aagcagaagaaggggccacggg

SEQ ID NO: 1302764 - RNA, 18 nt, Human
aagcaggaaggagaagga

SEQ ID NO: 1302765 - RNA, 28 nt, Human
aagcaggaaggagaaggagaagggaccc

SEQ ID NO: 1302766 - RNA, 21 nt, Human
aagggaaggggaggggaggac

SEQ ID NO: 1302767 - RNA, 22 nt, Human
aaggugagcggcgcuggcgccc

SEQ ID NO: 1302768 - RNA, 19 nt, Human
aaucaaggcagcugaccug

SEQ ID NO: 1302769 - RNA, 21 nt, Human
aauguuaaaacacagaaaaga

SEQ ID NO: 1302770 - RNA, 22 nt, Human
acaaugacccacucgauagacc

SEQ ID NO: 1302771 - RNA, 23 nt, Human
acccagagcgcccccacccacac

SEQ ID NO: 1302772 - RNA, 24 nt, Human
acccugucucuacaaaaaauacaa

SEQ ID NO: 1302773 - RNA, 19 nt, Human
accugcccuuccuuaccgc

SEQ ID NO: 1302774 - RNA, 24 nt, Human
acucuccaauagccaaaugcaauc

SEQ ID NO: 1302775 - RNA, 24 nt, Human
acuugaggucaggaguuugagacc

SEQ ID NO: 1302776 - RNA, 22 nt, Human
agaaaagaucuggcauuacaaa

SEQ ID NO: 1302777 - RNA, 29 nt, Human
agaaaagaucuggcauuacaaagucccag

SEQ ID NO: 1302778 - RNA, 20 nt, Human
agagaaauagaugaaaggua

SEQ ID NO: 1302779 - RNA, 24 nt, Human
agagagcaggaccaugugcugguc

SEQ ID NO: 1302780 - RNA, 20 nt, Human
agagagccagccuugccagg

SEQ ID NO: 1302781 - RNA, 20 nt, Human
agagcaggaacugucacgca

SEQ ID NO: 1302782 - RNA, 18 nt, Human
agagcgcccccacccaca

SEQ ID NO: 1302783 - RNA, 21 nt, Human
agagcgcccccacccacacug

SEQ ID NO: 1302784 - RNA, 27 nt, Human
agcacagggcagcccugguaggggggg

SEQ ID NO: 1302785 - RNA, 24 nt, Human
agcaguuugggaggccaagguggg

SEQ ID NO: 1302786 - RNA, 19 nt, Human
agcugugugaccccagcca

SEQ ID NO: 1302787 - RNA, 22 nt, Human
aggaaggaacauaccaguguuu

SEQ ID NO: 1302788 - RNA, 21 nt, Human
aggaauguuaaaacacagaaa

SEQ ID NO: 1302789 - RNA, 20 nt, Human
aggagaagcugggcccccaa

SEQ ID NO: 1302790 - RNA, 20 nt, Human
aggaguuugagaccaacuug

SEQ ID NO: 1302791 - RNA, 21 nt, Human
aggccaagguggguggaucac

SEQ ID NO: 1302792 - RNA, 23 nt, Human
aggccaggccuugggcagcccug

SEQ ID NO: 1302793 - RNA, 22 nt, Human
aggccucugugacuuggaaaca

SEQ ID NO: 1302794 - RNA, 20 nt, Human
aggcgcggaccccagcaacc

SEQ ID NO: 1302795 - RNA, 24 nt, Human
aggcgcuagcacagggcagcccug

SEQ ID NO: 1302796 - RNA, 24 nt, Human
aggcggcagccaccacaaugaccc

SEQ ID NO: 1302797 - RNA, 21 nt, Human
agggaggggaggcuaaggggc

SEQ ID NO: 1302798 - RNA, 22 nt, Human
agggaggggaggcuaaggggcc

SEQ ID NO: 1302799 - RNA, 23 nt, Human
aggggcgggguggggcaagcugg

SEQ ID NO: 1302800 - RNA, 20 nt, Human
agggggggagugaggggccg

SEQ ID NO: 1302801 - RNA, 23 nt, Human
agguggguggaucacuugagguc

SEQ ID NO: 1302802 - RNA, 20 nt, Human
agugaagaaaauaugcacag

SEQ ID NO: 1302803 - RNA, 23 nt, Human
aguggaugggaggaaggaaggga

SEQ ID NO: 1302804 - RNA, 24 nt, Human
aguggcucacgccuguaaucccag

SEQ ID NO: 1302805 - RNA, 24 nt, Human
aguuugggaggccaaggugggugg

SEQ ID NO: 1302806 - RNA, 20 nt, Human
aucacuugaggucaggaguu

SEQ ID NO: 1302807 - RNA, 22 nt, Human
augcuccucccaccccaccccu

SEQ ID NO: 1302808 - RNA, 18 nt, Human
auguuaaaacacagaaaa

SEQ ID NO: 1302809 - RNA, 23 nt, Human
auuacaaagucccaaccacaugg

SEQ ID NO: 1302810 - RNA, 22 nt, Human
auuccuucacuucccugcagcu

SEQ ID NO: 1302811 - RNA, 22 nt, Human
caaacugaaaaggagaagcugg

SEQ ID NO: 1302812 - RNA, 22 nt, Human
caacauggagaaacccugucuc

SEQ ID NO: 1302813 - RNA, 24 nt, Human
caacauggagaaacccugucucua

SEQ ID NO: 1302814 - RNA, 18 nt, Human
caacccucuccaccagcc

SEQ ID NO: 1302815 - RNA, 23 nt, Human
caaccggcaggcaggccaggccu

SEQ ID NO: 1302816 - RNA, 19 nt, Human
caacuugggcaacauggag

SEQ ID NO: 1302817 - RNA, 19 nt, Human
caagcuggccccgucccuc

SEQ ID NO: 1302818 - RNA, 19 nt, Human
caagggaaggggaggggag

SEQ ID NO: 1302819 - RNA, 23 nt, Human
caaggugagcggcgcuggcgccc

SEQ ID NO: 1302820 - RNA, 24 nt, Human
caagguggguggaucacuugaggu

SEQ ID NO: 1302821 - RNA, 26 nt, Human
caagguggguggaucacuugagguca

SEQ ID NO: 1302822 - RNA, 22 nt, Human
cacacagcuuguaaagggcaga

SEQ ID NO: 1302823 - RNA, 23 nt, Human
cacauggaacguguccuagaggc

SEQ ID NO: 1302824 - RNA, 19 nt, Human
caccgacaaccggcaggca

SEQ ID NO: 1302825 - RNA, 24 nt, Human
cacgccuguaaucccagcaguuug

SEQ ID NO: 1302826 - RNA, 23 nt, Human
cacuugaggucaggaguuugaga

SEQ ID NO: 1302827 - RNA, 20 nt, Human
cagaagaaaaaacgggucca

SEQ ID NO: 1302828 - RNA, 24 nt, Human
cagcacagccucgugggccuccaa

SEQ ID NO: 1302829 - RNA, 24 nt, Human
cagcaguuugggaggccaaggugg

SEQ ID NO: 1302830 - RNA, 19 nt, Human
cagccacagacacugggcc

SEQ ID NO: 1302831 - RNA, 18 nt, Human
cagcccccuccggccccc

SEQ ID NO: 1302832 - RNA, 20 nt, Human
cagccuaagucucuaagucu

SEQ ID NO: 1302833 - RNA, 23 nt, Human
caggcacugcuuccgagccccuc

SEQ ID NO: 1302834 - RNA, 21 nt, Human
caggcaggccaggccuugggc

SEQ ID NO: 1302835 - RNA, 26 nt, Human
caggccccuuuccucccucccuuuuc

SEQ ID NO: 1302836 - RNA, 23 nt, Human
caggccgggcagaguggcucacg

SEQ ID NO: 1302837 - RNA, 19 nt, Human
caggcuccccugaaacgcc

SEQ ID NO: 1302838 - RNA, 18 nt, Human
cagggcagcccugguagg

SEQ ID NO: 1302839 - RNA, 18 nt, Human
cauuaaccaagccgggua

SEQ ID NO: 1302840 - RNA, 26 nt, Human
cauuacaaagucccaaccacauggaa

SEQ ID NO: 1302841 - RNA, 24 nt, Human
ccaaagagaaaggaugcagagaaa

SEQ ID NO: 1302842 - RNA, 19 nt, Human
ccaagccggguaaugaaug

SEQ ID NO: 1302843 - RNA, 21 nt, Human
ccacauucuguccuuugaucc

SEQ ID NO: 1302844 - RNA, 25 nt, Human
ccacccagagcgcccccacccacac

SEQ ID NO: 1302845 - RNA, 20 nt, Human
ccagaagaaaaaacgggucc

SEQ ID NO: 1302846 - RNA, 22 nt, Human
ccagagaaccugcccuuccuua

SEQ ID NO: 1302847 - RNA, 22 nt, Human
ccagcagcugugugaccccagc

SEQ ID NO: 1302848 - RNA, 19 nt, Human
ccagcaguuugggaggcca

SEQ ID NO: 1302849 - RNA, 21 nt, Human
ccaggccccuuuccucccucc

SEQ ID NO: 1302850 - RNA, 19 nt, Human
cccacacugcuccgaaugc

SEQ ID NO: 1302851 - RNA, 18 nt, Human
cccacccacacugcuccg

SEQ ID NO: 1302852 - RNA, 19 nt, Human
cccacccacacugcuccga

SEQ ID NO: 1302853 - RNA, 22 nt, Human
cccacccacacugcuccgaaug

SEQ ID NO: 1302854 - RNA, 18 nt, Human
cccacgguugcccccagc

SEQ ID NO: 1302855 - RNA, 26 nt, Human
ccccagagaaccugcccuuccuuacc

SEQ ID NO: 1302856 - RNA, 22 nt, Human
cccccacccacacugcuccgaa

SEQ ID NO: 1302857 - RNA, 23 nt, Human
ccccccagaagagagaagcagca

SEQ ID NO: 1302858 - RNA, 27 nt, Human
ccccugaaugaugacaucaggccccug

SEQ ID NO: 1302859 - RNA, 18 nt, Human
ccccuuuccucccucccu

SEQ ID NO: 1302860 - RNA, 19 nt, Human
ccccuuuccucccucccuu

SEQ ID NO: 1302861 - RNA, 21 nt, Human
ccccuuuccucccucccuuuu

SEQ ID NO: 1302862 - RNA, 19 nt, Human
cccugaaacgccaagcucu

SEQ ID NO: 1302863 - RNA, 21 nt, Human
ccuccaggccccuuuccuccc

SEQ ID NO: 1302864 - RNA, 19 nt, Human
ccucccaccccaccccugc

SEQ ID NO: 1302865 - RNA, 19 nt, Human
ccucccucaaguccccagg

SEQ ID NO: 1302866 - RNA, 21 nt, Human
ccucccucaaguccccaggcu

SEQ ID NO: 1302867 - RNA, 21 nt, Human
ccucuuccuucagcauguuca

SEQ ID NO: 1302868 - RNA, 21 nt, Human
ccuggcccccugguuucuuuc

SEQ ID NO: 1302869 - RNA, 23 nt, Human
ccuggccugugugggcuccagag

SEQ ID NO: 1302870 - RNA, 23 nt, Human
ccuugggcagcccuggcuggucc

SEQ ID NO: 1302871 - RNA, 24 nt, Human
cgccuguaaucccagcaguuuggg

SEQ ID NO: 1302872 - RNA, 19 nt, Human
cggcaggcaggccaggccu

SEQ ID NO: 1302873 - RNA, 24 nt, Human
cgggagggaggggaggcuaagggg

SEQ ID NO: 1302874 - RNA, 22 nt, Human
cgggccccagagaaccugccgg

SEQ ID NO: 1302875 - RNA, 20 nt, Human
cuagagcuggucuccuccac

SEQ ID NO: 1302876 - RNA, 21 nt, Human
cucacgccuguaaucccagca

SEQ ID NO: 1302877 - RNA, 21 nt, Human
cucacgccuguaaucccagca

SEQ ID NO: 1302878 - RNA, 21 nt, Human
cuccuccacccagagcgcccc

SEQ ID NO: 1302879 - RNA, 23 nt, Human
cuccucccaccccaccccugcaa

SEQ ID NO: 1302880 - RNA, 24 nt, Human
cugacccagcagcugugugacccc

SEQ ID NO: 1302881 - RNA, 21 nt, Human
cuggcccccugguuucuuucc

SEQ ID NO: 1302882 - RNA, 19 nt, Human
cugguuucuuuccaaggcu

SEQ ID NO: 1302883 - RNA, 26 nt, Human
cugguuucuuuccaaggcuccucauu

SEQ ID NO: 1302884 - RNA, 23 nt, Human
cuguacucaacagagacaggaac

SEQ ID NO: 1302885 - RNA, 18 nt, Human
cugucaucagaaccgcau

SEQ ID NO: 1302886 - RNA, 25 nt, Human
cugucucuacaaaaaauacaaaaag

SEQ ID NO: 1302887 - RNA, 21 nt, Human
cuucccauggcacugguaccu

SEQ ID NO: 1302888 - RNA, 18 nt, Human
gaaggaagggagggaggg

SEQ ID NO: 1302889 - RNA, 19 nt, Human
gaaggggaggggaggacgg

SEQ ID NO: 1302890 - RNA, 25 nt, Human
gacguggaagcaggaaggagaagga

SEQ ID NO: 1302891 - RNA, 21 nt, Human
gacuuggaaacagcgucagug

SEQ ID NO: 1302892 - RNA, 18 nt, Human
gagaaccugccaguccgg

SEQ ID NO: 1302893 - RNA, 19 nt, Human
gagaagcaagggaagggga

SEQ ID NO: 1302894 - RNA, 21 nt, Human
gaggggaggacgggagaaggc

SEQ ID NO: 1302895 - RNA, 24 nt, Human
gaucacuugaggucaggaguuuga

SEQ ID NO: 1302896 - RNA, 20 nt, Human
gauggguagaugauggaugg

SEQ ID NO: 1302897 - RNA, 18 nt, Human
gcaaaacccucccagaca

SEQ ID NO: 1302898 - RNA, 19 nt, Human
gcacagggcagcccuggua

SEQ ID NO: 1302899 - RNA, 18 nt, Human
gcagaagaaggggccacg

SEQ ID NO: 1302900 - RNA, 20 nt, Human
gcagagagccagccuugcca

SEQ ID NO: 1302901 - RNA, 19 nt, Human
gcagccaccacaaugaccc

SEQ ID NO: 1302902 - RNA, 19 nt, Human
gcaucagaggguuuucagg

SEQ ID NO: 1302903 - RNA, 24 nt, Human
gcaugguggucccagcuacuuggg

SEQ ID NO: 1302904 - RNA, 21 nt, Human
gccaagcucuggguggaaguu

SEQ ID NO: 1302905 - RNA, 21 nt, Human
gccccagagaaccugcccuuc

SEQ ID NO: 1302906 - RNA, 21 nt, Human
gcccccaaagagaaaggaugc

SEQ ID NO: 1302907 - RNA, 22 nt, Human
gcccgggcaaaacccucccaga

SEQ ID NO: 1302908 - RNA, 18 nt, Human
gccugugcgggccccaga

SEQ ID NO: 1302909 - RNA, 22 nt, Human
gcuccucccaccccaccccugc

SEQ ID NO: 1302910 - RNA, 18 nt, Human
gcuuggagagaaagaagc

SEQ ID NO: 1302911 - RNA, 21 nt, Human
ggacgggagaaggcaguggga

SEQ ID NO: 1302912 - RNA, 21 nt, Human
ggacguggaagcaggaaggag

SEQ ID NO: 1302913 - RNA, 19 nt, Human
ggagggaggggaggcuaag

SEQ ID NO: 1302914 - RNA, 21 nt, Human
ggaggggaggcacuccugugg

SEQ ID NO: 1302915 - RNA, 22 nt, Human
ggaucacuugaggucaggaguu

SEQ ID NO: 1302916 - RNA, 20 nt, Human
ggaugcccacgguugccccc

SEQ ID NO: 1302917 - RNA, 18 nt, Human
ggcaucagaggguuuuca

SEQ ID NO: 1302918 - RNA, 18 nt, Human
ggccgggcuggggagggc

SEQ ID NO: 1302919 - RNA, 19 nt, Human
ggccgggcuggggagggcc

SEQ ID NO: 1302920 - RNA, 19 nt, Human
ggccuugggcagcccuggc

SEQ ID NO: 1302921 - RNA, 24 nt, Human
gggaaggggaggggaggacgggag

SEQ ID NO: 1302922 - RNA, 22 nt, Human
gggaggggaggacgggagaagg

SEQ ID NO: 1302923 - RNA, 24 nt, Human
gggcagaguggcucacgccuguaa

SEQ ID NO: 1302924 - RNA, 19 nt, Human
gggccgggagggaggggag

SEQ ID NO: 1302925 - RNA, 19 nt, Human
gggcgggguggggcaagcu

SEQ ID NO: 1302926 - RNA, 22 nt, Human
gggcucaguuuccaaacaaaag

SEQ ID NO: 1302927 - RNA, 20 nt, Human
gggcuuccagaacgcagucu

SEQ ID NO: 1302928 - RNA, 18 nt, Human
ggggaggggaggacggga

SEQ ID NO: 1302929 - RNA, 19 nt, Human
ggggaggggcggggugggg

SEQ ID NO: 1302930 - RNA, 23 nt, Human
ggggcgggguggggcaagcuggc

SEQ ID NO: 1302931 - RNA, 19 nt, Human
ggucaggaguuugagacca

SEQ ID NO: 1302932 - RNA, 24 nt, Human
ggucccccuccuccuccaggcccc

SEQ ID NO: 1302933 - RNA, 21 nt, Human
gguggaucacuugaggucagg

SEQ ID NO: 1302934 - RNA, 22 nt, Human
gguggcggggccuggagagaga

SEQ ID NO: 1302935 - RNA, 27 nt, Human
guccuagaggcuccucaacaggcauca

SEQ ID NO: 1302936 - RNA, 23 nt, Human
guccuggccugugcaggccccag

SEQ ID NO: 1302937 - RNA, 19 nt, Human
gucuggaggggaugcaggg

SEQ ID NO: 1302938 - RNA, 18 nt, Human
gugcugggccccauggag

SEQ ID NO: 1302939 - RNA, 19 nt, Human
gugcugggccccauggagc

SEQ ID NO: 1302940 - RNA, 18 nt, Human
guggcggggccuggagag

SEQ ID NO: 1302941 - RNA, 20 nt, Human
guuugggaggccaagguggg

SEQ ID NO: 1302942 - RNA, 23 nt, Human
uaaaagauggggugacacucucc

SEQ ID NO: 1302943 - RNA, 18 nt, Human
uaaccaaggcccccaucc

SEQ ID NO: 1302944 - RNA, 21 nt, Human
uacaaagucccaaccacaugg

SEQ ID NO: 1302945 - RNA, 20 nt, Human
uaccaguguuuccugaucaa

SEQ ID NO: 1302946 - RNA, 23 nt, Human
uagaagaccccagguaauaaaga

SEQ ID NO: 1302947 - RNA, 21 nt, Human
ucacacagcuuguaaagggca

SEQ ID NO: 1302948 - RNA, 19 nt, Human
ucacuugaggucaggaguu

SEQ ID NO: 1302949 - RNA, 21 nt, Human
ucagcccccuccggccccccc

SEQ ID NO: 1302950 - RNA, 20 nt, Human
uccaccagccuaagucucua

SEQ ID NO: 1302951 - RNA, 23 nt, Human
ucccagacacgugugaaggccuc

SEQ ID NO: 1302952 - RNA, 20 nt, Human
uccgaacucaacagagacag

SEQ ID NO: 1302953 - RNA, 24 nt, Human
uccuccacccagagcgcccccacc

SEQ ID NO: 1302954 - RNA, 22 nt, Human
uccucccaccccaccccugcaa

SEQ ID NO: 1302955 - RNA, 19 nt, Human
uccuggccugugcaggccc

SEQ ID NO: 1302956 - RNA, 20 nt, Human
uccuugaggggcugcauucu

SEQ ID NO: 1302957 - RNA, 24 nt, Human
ucucugcuguggaggggaggggcg

SEQ ID NO: 1302958 - RNA, 18 nt, Human
ucucugggcucaguuucc

SEQ ID NO: 1302959 - RNA, 23 nt, Human
ucuguacucaacagagacaggaa

SEQ ID NO: 1302960 - RNA, 18 nt, Human
ugaaacgccaagcucugg

SEQ ID NO: 1302961 - RNA, 18 nt, Human
ugaccagcagucacgcac

SEQ ID NO: 1302962 - RNA, 23 nt, Human
ugacuuggaaacagcgucaguga

SEQ ID NO: 1302963 - RNA, 24 nt, Human
ugagaccaacuugggcaacaugga

SEQ ID NO: 1302964 - RNA, 23 nt, Human
ugaggccugggcagggcuuccag

SEQ ID NO: 1302965 - RNA, 18 nt, Human
ugaggucaggaguuugag

SEQ ID NO: 1302966 - RNA, 18 nt, Human
ugaguggaugggaggaag

SEQ ID NO: 1302967 - RNA, 21 nt, Human
ugcaagugcccgggcaaaacc

SEQ ID NO: 1302968 - RNA, 19 nt, Human
ugcacaggccgggcagagu

SEQ ID NO: 1302969 - RNA, 19 nt, Human
ugcccgggcaaaacccucc

SEQ ID NO: 1302970 - RNA, 24 nt, Human
ugcccgggcaaaacccucccagac

SEQ ID NO: 1302971 - RNA, 24 nt, Human
ugccggucuguacucaacagagac

SEQ ID NO: 1302972 - RNA, 21 nt, Human
ugcuccucccaccccaccccu

SEQ ID NO: 1302973 - RNA, 21 nt, Human
ugcugggccccauggagccag

SEQ ID NO: 1302974 - RNA, 24 nt, Human
ugcuggucuguacucgagagagac

SEQ ID NO: 1302975 - RNA, 19 nt, Human
ugcuguggaggggaggggc

SEQ ID NO: 1302976 - RNA, 19 nt, Human
uggaagcaggaaggagaag

SEQ ID NO: 1302977 - RNA, 18 nt, Human
uggagagagaggcagcca

SEQ ID NO: 1302978 - RNA, 23 nt, Human
uggaucacuugaggucaggaguu

SEQ ID NO: 1302979 - RNA, 24 nt, Human
uggaucacuugaggucaggaguuu

SEQ ID NO: 1302980 - RNA, 27 nt, Human
uggaucacuugaggucaggaguuugag

SEQ ID NO: 1302981 - RNA, 21 nt, Human
uggaugggaggaaggaaggga

SEQ ID NO: 1302982 - RNA, 22 nt, Human
uggcauuacaaagucccaacca

SEQ ID NO: 1302983 - RNA, 21 nt, Human
uggccagaagaaaaaacgggu

SEQ ID NO: 1302984 - RNA, 23 nt, Human
uggcgaguguguggugugcccgc

SEQ ID NO: 1302985 - RNA, 24 nt, Human
uggcgaguguguggugugcccgcu

SEQ ID NO: 1302986 - RNA, 22 nt, Human
uggcucacgccuguaaucccag

SEQ ID NO: 1302987 - RNA, 24 nt, Human
uggcucacgccuguaaucccagca

SEQ ID NO: 1302988 - RNA, 21 nt, Human
uggcugaacagagguggcggg

SEQ ID NO: 1302989 - RNA, 21 nt, Human
ugggaccagguuugguuaggu

SEQ ID NO: 1302990 - RNA, 26 nt, Human
ugggaccagguuugguuagguaggcg

SEQ ID NO: 1302991 - RNA, 23 nt, Human
ugggagagggaaaucaaggcagc

SEQ ID NO: 1302992 - RNA, 19 nt, Human
ugggaggaaggaagggagg

SEQ ID NO: 1302993 - RNA, 26 nt, Human
ugggaggaaggaagggagggagggag

SEQ ID NO: 1302994 - RNA, 23 nt, Human
ugggaggccaagguggguggauc

SEQ ID NO: 1302995 - RNA, 24 nt, Human
ugggaggccaagguggguggauca

SEQ ID NO: 1302996 - RNA, 20 nt, Human
ugggcaacauggagaaaccc

SEQ ID NO: 1302997 - RNA, 22 nt, Human
ugggcauucaggcugugucugu

SEQ ID NO: 1302998 - RNA, 21 nt, Human
ugggccuccaaugaugcccaa

SEQ ID NO: 1302999 - RNA, 19 nt, Human
ugggcuggagcccagcgaa

SEQ ID NO: 1303000 - RNA, 22 nt, Human
uggggagggccagggggucagg

SEQ ID NO: 1303001 - RNA, 18 nt, Human
ugggugaguggaugggag

SEQ ID NO: 1303002 - RNA, 24 nt, Human
uggguggaucacuugaggucagga

SEQ ID NO: 1303003 - RNA, 21 nt, Human
uggucucugggcucaguuucc

SEQ ID NO: 1303004 - RNA, 22 nt, Human
uguucagcacagccucgugggc

SEQ ID NO: 1303005 - RNA, 18 nt, Human
uuagcugggcaugguggu

SEQ ID NO: 1303006 - RNA, 19 nt, Human
uuccaaggcuccucauucc

SEQ ID NO: 1303007 - RNA, 19 nt, Human
uuccccuggcccccugguu

SEQ ID NO: 1303008 - RNA, 22 nt, Human
uuccugaguuucuccagaggaa

SEQ ID NO: 1303009 - RNA, 19 nt, Human
uugggcaacauggagaaac

SEQ ID NO: 1303010 - RNA, 19 nt, Human
uuguggucucugggcucag

SEQ ID NO: 1303011 - RNA, 20 nt, Human
uuuccaggcacugcuuccga

SEQ ID NO: 1303012 - RNA, 18 nt, Human
agccagccgcucacccuc

SEQ ID NO: 1303013 - RNA, 31 nt, Human
ccuccgugaugaugucagcacuugcugcuuu

SEQ ID NO: 1303014 - RNA, 19 nt, Human
ugaugucagcacuugcugc

SEQ ID NO: 1303015 - RNA, 23 nt, Human
uucccagccagccagccgcucac

SEQ ID NO: 1303016 - RNA, 22 nt, Human
aacucaacuuucccacauuacc

SEQ ID NO: 1303017 - RNA, 21 nt, Human
acccaggcaaauaguuuucca

SEQ ID NO: 1303018 - RNA, 22 nt, Human
aggcaaauaguuuuccaguuuc

SEQ ID NO: 1303019 - RNA, 19 nt, Human
cauuuuaguugagucaaga

SEQ ID NO: 1303020 - RNA, 24 nt, Human
cccacauuaccuucaucaucacaa

SEQ ID NO: 1303021 - RNA, 24 nt, Human
uaaagugaauaacagcacugucaa

SEQ ID NO: 1303022 - RNA, 18 nt, Human
ucagugcaaaggaagcug

SEQ ID NO: 1303023 - RNA, 19 nt, Human
ucucccaacucaacuuucc

SEQ ID NO: 1303024 - RNA, 22 nt, Human
ugagaauacugaauaccaucca

SEQ ID NO: 1303025 - RNA, 19 nt, Human
ugcaaaggaagcugguaaa

SEQ ID NO: 1303026 - RNA, 23 nt, Human
ugggagcaaggcucucccaacuc

SEQ ID NO: 1303027 - RNA, 20 nt, Human
ccgcggcuggggacggaggc

SEQ ID NO: 1303028 - RNA, 19 nt, Human
gccacucuucggguggauu

SEQ ID NO: 1303029 - RNA, 21 nt, Human
uaccuaagugaagaggagagc

SEQ ID NO: 1303030 - RNA, 22 nt, Human
uucccgagccgcggcuggggac

SEQ ID NO: 1303031 - RNA, 18 nt, Human
ccccuccuuccuccagcc

SEQ ID NO: 1303032 - RNA, 19 nt, Human
ccccuccuuccuccagccc

SEQ ID NO: 1303033 - RNA, 21 nt, Human
cccuccuuccuccagccccca

SEQ ID NO: 1303034 - RNA, 18 nt, Human
ugcccggggccucccgca

SEQ ID NO: 1303035 - RNA, 19 nt, Human
cagagaauccuucuccuuc

SEQ ID NO: 1303036 - RNA, 19 nt, Human
gccacucugcuuccuguca

SEQ ID NO: 1303037 - RNA, 26 nt, Human
gcuuaauuaaguuuuuagugcauacu

SEQ ID NO: 1303038 - RNA, 21 nt, Human
ggguuggugcuugccacacuu

SEQ ID NO: 1303039 - RNA, 20 nt, Human
ugccacacuucuuauagaaa

SEQ ID NO: 1303040 - RNA, 23 nt, Human
aaacagcucaaaggggugucccg

SEQ ID NO: 1303041 - RNA, 21 nt, Human
aagaagauccuggggcucaga

SEQ ID NO: 1303042 - RNA, 20 nt, Human
aagugcccugccagaggucc

SEQ ID NO: 1303043 - RNA, 20 nt, Human
agaggucccugccagccccg

SEQ ID NO: 1303044 - RNA, 22 nt, Human
agcaauggggauaaggaagaga

SEQ ID NO: 1303045 - RNA, 21 nt, Human
agccccgggcuccuguagccu

SEQ ID NO: 1303046 - RNA, 21 nt, Human
aggacgcguacgaggggccca

SEQ ID NO: 1303047 - RNA, 18 nt, Human
aggaggcagagaggguag

SEQ ID NO: 1303048 - RNA, 18 nt, Human
aggcaggaggcagagagg

SEQ ID NO: 1303049 - RNA, 19 nt, Human
aggcggggcgaggcggggc

SEQ ID NO: 1303050 - RNA, 22 nt, Human
aggucccugccagccccgggcu

SEQ ID NO: 1303051 - RNA, 22 nt, Human
agucgggcagcaugucaagucc

SEQ ID NO: 1303052 - RNA, 18 nt, Human
caaagggcgaggaguucc

SEQ ID NO: 1303053 - RNA, 22 nt, Human
cagcccgggucccuccgaaagc

SEQ ID NO: 1303054 - RNA, 19 nt, Human
cagcgcaggauaagagggu

SEQ ID NO: 1303055 - RNA, 19 nt, Human
cagcgccgggaccccacgc

SEQ ID NO: 1303056 - RNA, 23 nt, Human
ccagaggucccugccagccccgg

SEQ ID NO: 1303057 - RNA, 20 nt, Human
ccccacgcacugagcagagc

SEQ ID NO: 1303058 - RNA, 19 nt, Human
ccccgggcuccuguagccu

SEQ ID NO: 1303059 - RNA, 27 nt, Human
ccuccgaaagcugagagggagaagggg

SEQ ID NO: 1303060 - RNA, 21 nt, Human
cgacaggcagucgggcagcau

SEQ ID NO: 1303061 - RNA, 19 nt, Human
cgcacugagcagagcggca

SEQ ID NO: 1303062 - RNA, 24 nt, Human
cgcccucuaagcgggaaacagcuc

SEQ ID NO: 1303063 - RNA, 18 nt, Human
cgccggcagggggcggcg

SEQ ID NO: 1303064 - RNA, 21 nt, Human
cggcagggggcggcguccgcc

SEQ ID NO: 1303065 - RNA, 20 nt, Human
cggcccaggcgugcgcgcaa

SEQ ID NO: 1303066 - RNA, 20 nt, Human
cggcgaggacguggcgcccc

SEQ ID NO: 1303067 - RNA, 18 nt, Human
cgggccguggccccugcc

SEQ ID NO: 1303068 - RNA, 22 nt, Human
cucccugagcaauggggauaag

SEQ ID NO: 1303069 - RNA, 18 nt, Human
cuccgaaagcugagaggg

SEQ ID NO: 1303070 - RNA, 24 nt, Human
cucgcccucggccgacaggcaguc

SEQ ID NO: 1303071 - RNA, 20 nt, Human
cugcagcccuugggcggagg

SEQ ID NO: 1303072 - RNA, 23 nt, Human
cugccagccccgggcuccuguag

SEQ ID NO: 1303073 - RNA, 18 nt, Human
gacacugagggcgcggga

SEQ ID NO: 1303074 - RNA, 24 nt, Human
gacacugagggcgcgggaucgggc

SEQ ID NO: 1303075 - RNA, 19 nt, Human
gacagcgcaggauaagagg

SEQ ID NO: 1303076 - RNA, 18 nt, Human
gagcagagcggcacgagc

SEQ ID NO: 1303077 - RNA, 24 nt, Human
gagccgggccguggccccugccaa

SEQ ID NO: 1303078 - RNA, 19 nt, Human
gcaagaagauccuggggcu

SEQ ID NO: 1303079 - RNA, 18 nt, Human
gcaaggacgcguacgagg

SEQ ID NO: 1303080 - RNA, 19 nt, Human
gcagagcggcacgagcacc

SEQ ID NO: 1303081 - RNA, 22 nt, Human
gcagugcaaacaccucaucuac

SEQ ID NO: 1303082 - RNA, 24 nt, Human
gccccgggcuccuguagccuccgg

SEQ ID NO: 1303083 - RNA, 18 nt, Human
gcccgcgcgacgcguccc

SEQ ID NO: 1303084 - RNA, 18 nt, Human
gcccgggacagcgcagga

SEQ ID NO: 1303085 - RNA, 20 nt, Human
gcggccgggacacugagggc

SEQ ID NO: 1303086 - RNA, 18 nt, Human
ggacacggaucgcugacc

SEQ ID NO: 1303087 - RNA, 21 nt, Human
ggaucgggcgagggaagaggc

SEQ ID NO: 1303088 - RNA, 22 nt, Human
ggcaaagggcgaggaguucccg

SEQ ID NO: 1303089 - RNA, 18 nt, Human
ggcgagggaagaggcggg

SEQ ID NO: 1303090 - RNA, 19 nt, Human
ggcgccccggcaggugcac

SEQ ID NO: 1303091 - RNA, 19 nt, Human
ggggcgaggcggggcgggg

SEQ ID NO: 1303092 - RNA, 23 nt, Human
guggccccugccagcagccggcg

SEQ ID NO: 1303093 - RNA, 19 nt, Human
uaagcgggaaacagcucaa

SEQ ID NO: 1303094 - RNA, 21 nt, Human
uaaggaagagaggcccgggac

SEQ ID NO: 1303095 - RNA, 20 nt, Human
uacgaggggcccacgcggcg

SEQ ID NO: 1303096 - RNA, 20 nt, Human
uccgaaagcugagagggaga

SEQ ID NO: 1303097 - RNA, 24 nt, Human
ucgcugcagcccuugggcggaggg

SEQ ID NO: 1303098 - RNA, 30 nt, Human
ucuaccugcaggcaggaggcagagaggguu

SEQ ID NO: 1303099 - RNA, 31 nt, Human
ucugcagcaggggcaagaagauccuggggcc

SEQ ID NO: 1303100 - RNA, 22 nt, Human
ugagcagagcggcacgagcacc

SEQ ID NO: 1303101 - RNA, 19 nt, Human
ugcaaacaccucaucuacc

SEQ ID NO: 1303102 - RNA, 20 nt, Human
ugcgcgcaaggacgcguacg

SEQ ID NO: 1303103 - RNA, 21 nt, Human
uucccggccgcuguaccugac

SEQ ID NO: 1303104 - RNA, 22 nt, Human
uucggccuaugguggccccagc

SEQ ID NO: 1303105 - RNA, 27 nt, Human
aaggcaaaacaucuguguuauuacgga

SEQ ID NO: 1303106 - RNA, 22 nt, Human
agcccccucagacugaauguua

SEQ ID NO: 1303107 - RNA, 24 nt, Human
cacaagcccccucagacugaaugu

SEQ ID NO: 1303108 - RNA, 21 nt, Human
cggacacaagcccccucagac

SEQ ID NO: 1303109 - RNA, 18 nt, Human
cccuuucuuucucucucc

SEQ ID NO: 1303110 - RNA, 24 nt, Human
aaaaggaagggguuggaaacaaaa

SEQ ID NO: 1303111 - RNA, 20 nt, Human
aaaggcccaaagcauccaag

SEQ ID NO: 1303112 - RNA, 21 nt, Human
aaugauaaggugcaggcagaa

SEQ ID NO: 1303113 - RNA, 23 nt, Human
aauguaacaaagaaagaguugaa

SEQ ID NO: 1303114 - RNA, 22 nt, Human
acaggcaacauuaagccucuga

SEQ ID NO: 1303115 - RNA, 22 nt, Human
accagucauaaccuauggagca

SEQ ID NO: 1303116 - RNA, 24 nt, Human
acuuuuauaauuaaccacugaagu

SEQ ID NO: 1303117 - RNA, 21 nt, Human
agacacuugggacaaaaggug

SEQ ID NO: 1303118 - RNA, 18 nt, Human
agaggaacagagauggcc

SEQ ID NO: 1303119 - RNA, 20 nt, Human
agaggaacagagauggccug

SEQ ID NO: 1303120 - RNA, 20 nt, Human
agcagucaaaggcccaaagc

SEQ ID NO: 1303121 - RNA, 23 nt, Human
agccaaacaguuaaaaagucaga

SEQ ID NO: 1303122 - RNA, 24 nt, Human
aggaaggagggcagcggaagagga

SEQ ID NO: 1303123 - RNA, 21 nt, Human
aggaagugaucuauaccaagg

SEQ ID NO: 1303124 - RNA, 20 nt, Human
aggacacccaaacaugugcc

SEQ ID NO: 1303125 - RNA, 21 nt, Human
aggagggcagcggaagaggag

SEQ ID NO: 1303126 - RNA, 22 nt, Human
aggagggcagcggaagaggagg

SEQ ID NO: 1303127 - RNA, 19 nt, Human
aggcagaaucacgggugac

SEQ ID NO: 1303128 - RNA, 21 nt, Human
auccaagcccagugggcuucu

SEQ ID NO: 1303129 - RNA, 23 nt, Human
auggagcagucaaaggcccaaag

SEQ ID NO: 1303130 - RNA, 24 nt, Human
auggggcaacagugaccugggcaa

SEQ ID NO: 1303131 - RNA, 18 nt, Human
auuacugccaccaccucu

SEQ ID NO: 1303132 - RNA, 21 nt, Human
caccagucauaaccuauggag

SEQ ID NO: 1303133 - RNA, 21 nt, Human
cagcggaagaggaggcaugcc

SEQ ID NO: 1303134 - RNA, 19 nt, Human
cagugggaacugaggacug

SEQ ID NO: 1303135 - RNA, 20 nt, Human
cauuaagccucugaggggga

SEQ ID NO: 1303136 - RNA, 22 nt, Human
ccaaagcauccaagcccagugg

SEQ ID NO: 1303137 - RNA, 23 nt, Human
ccacaauuacugccaccaccucu

SEQ ID NO: 1303138 - RNA, 19 nt, Human
ccacuggagaaccugauug

SEQ ID NO: 1303139 - RNA, 19 nt, Human
ccagacuggaaccacgauu

SEQ ID NO: 1303140 - RNA, 19 nt, Human
ccagagaagaagcuccuuc

SEQ ID NO: 1303141 - RNA, 22 nt, Human
ccccugagcgaaccugaggcuc

SEQ ID NO: 1303142 - RNA, 18 nt, Human
ccuuucccacccugaaga

SEQ ID NO: 1303143 - RNA, 21 nt, Human
cucaggaaaauggaggcagau

SEQ ID NO: 1303144 - RNA, 21 nt, Human
cucucacucuagaacuggacc

SEQ ID NO: 1303145 - RNA, 21 nt, Human
cugagucccuucuccuucaga

SEQ ID NO: 1303146 - RNA, 22 nt, Human
cugcaaccagacuggaaccacg

SEQ ID NO: 1303147 - RNA, 21 nt, Human
cugcccucuucaacuccaagu

SEQ ID NO: 1303148 - RNA, 19 nt, Human
cuggagaaccugauugucc

SEQ ID NO: 1303149 - RNA, 18 nt, Human
cuggagauaacaaaagga

SEQ ID NO: 1303150 - RNA, 22 nt, Human
cuggagcauggguaagguuccu

SEQ ID NO: 1303151 - RNA, 23 nt, Human
cuggagcauggguaagguuccug

SEQ ID NO: 1303152 - RNA, 23 nt, Human
cugucaggggcagcuugggccac

SEQ ID NO: 1303153 - RNA, 25 nt, Human
gaaaagagaggacacccaaacaugu

SEQ ID NO: 1303154 - RNA, 20 nt, Human
gaaaauggaggcagauaccc

SEQ ID NO: 1303155 - RNA, 22 nt, Human
gaagcuccuucuccagccgccc

SEQ ID NO: 1303156 - RNA, 18 nt, Human
gaauaguagaaacaaaac

SEQ ID NO: 1303157 - RNA, 19 nt, Human
gaauaguagaaacaaaaca

SEQ ID NO: 1303158 - RNA, 19 nt, Human
gaccggcagacacuuggga

SEQ ID NO: 1303159 - RNA, 18 nt, Human
gagaagaagcuccuucuc

SEQ ID NO: 1303160 - RNA, 21 nt, Human
gagcgaaccugaggcucccac

SEQ ID NO: 1303161 - RNA, 21 nt, Human
gcaaacuuuccaaacggaaaa

SEQ ID NO: 1303162 - RNA, 18 nt, Human
gcagugggaacugaggac

SEQ ID NO: 1303163 - RNA, 21 nt, Human
gcagugggaacugaggacugg

SEQ ID NO: 1303164 - RNA, 22 nt, Human
gccaagucaggugggccagguu

SEQ ID NO: 1303165 - RNA, 19 nt, Human
gccauagcaucaaacugga

SEQ ID NO: 1303166 - RNA, 26 nt, Human
gccccugagcgaaccugaggcuccca

SEQ ID NO: 1303167 - RNA, 18 nt, Human
ggaacugagcggcugaua

SEQ ID NO: 1303168 - RNA, 22 nt, Human
ggacaaaagguggugugcccgg

SEQ ID NO: 1303169 - RNA, 25 nt, Human
ggauuuuaucagaaaagagaggaca

SEQ ID NO: 1303170 - RNA, 18 nt, Human
ggcacgggguugggaagg

SEQ ID NO: 1303171 - RNA, 23 nt, Human
gggcaacagugaccugggcaaaa

SEQ ID NO: 1303172 - RNA, 18 nt, Human
ggucgaccggcagacacu

SEQ ID NO: 1303173 - RNA, 26 nt, Human
ggugggccagguucuccgaacauggg

SEQ ID NO: 1303174 - RNA, 25 nt, Human
guccugugccaggugaaggacgcug

SEQ ID NO: 1303175 - RNA, 18 nt, Human
uacacaucacaaugaugg

SEQ ID NO: 1303176 - RNA, 23 nt, Human
uacauugaaaaaaggaaagacau

SEQ ID NO: 1303177 - RNA, 24 nt, Human
uacauugaaaaaaggaaagacauu

SEQ ID NO: 1303178 - RNA, 23 nt, Human
uagaacuggaccaccccagagga

SEQ ID NO: 1303179 - RNA, 19 nt, Human
uagccaccgccaggcccug

SEQ ID NO: 1303180 - RNA, 18 nt, Human
uaguagaaacaaaacaca

SEQ ID NO: 1303181 - RNA, 19 nt, Human
uaucagaaaagagaggaca

SEQ ID NO: 1303182 - RNA, 23 nt, Human
uccacaggcaacauuaagccucu

SEQ ID NO: 1303183 - RNA, 24 nt, Human
uccacaggcaacauuaagccucug

SEQ ID NO: 1303184 - RNA, 21 nt, Human
ucccagugugccugacucccu

SEQ ID NO: 1303185 - RNA, 22 nt, Human
ucuaaagugaauucugugcuga

SEQ ID NO: 1303186 - RNA, 22 nt, Human
ucuagaacuggaccaccccaga

SEQ ID NO: 1303187 - RNA, 22 nt, Human
ucuauaccaagguuugcaggga

SEQ ID NO: 1303188 - RNA, 26 nt, Human
ucugcaaccagacuggaaccacgauu

SEQ ID NO: 1303189 - RNA, 19 nt, Human
ucugcaggcgcugccaccg

SEQ ID NO: 1303190 - RNA, 22 nt, Human
ucuugcauguccugugccaggu

SEQ ID NO: 1303191 - RNA, 24 nt, Human
ugaaaaaaggaaagacauuuuuuc

SEQ ID NO: 1303192 - RNA, 18 nt, Human
ugaaaaguagguaacgaa

SEQ ID NO: 1303193 - RNA, 19 nt, Human
ugaccugggcaaaaggcug

SEQ ID NO: 1303194 - RNA, 18 nt, Human
ugaggacuggagggcgug

SEQ ID NO: 1303195 - RNA, 18 nt, Human
ugcaccugggauccucga

SEQ ID NO: 1303196 - RNA, 21 nt, Human
ugccaggugaaggacgcugga

SEQ ID NO: 1303197 - RNA, 24 nt, Human
ugcccagaagaaaguuaauggcaa

SEQ ID NO: 1303198 - RNA, 24 nt, Human
ugccugacucccuuucucucacuc

SEQ ID NO: 1303199 - RNA, 19 nt, Human
ugccuugcuccaagucugg

SEQ ID NO: 1303200 - RNA, 20 nt, Human
ugcugccccugagcgaaccu

SEQ ID NO: 1303201 - RNA, 21 nt, Human
uggaucgggacagauuuccag

SEQ ID NO: 1303202 - RNA, 18 nt, Human
ugggagggcccugggucc

SEQ ID NO: 1303203 - RNA, 22 nt, Human
ugggcugggaugggcacugcuc

SEQ ID NO: 1303204 - RNA, 25 nt, Human
uguccugugccaggugaaggacgcu

SEQ ID NO: 1303205 - RNA, 21 nt, Human
ugugccugacucccuuucucu

SEQ ID NO: 1303206 - RNA, 23 nt, Human
ugugcugagucccuucuccuuca

SEQ ID NO: 1303207 - RNA, 20 nt, Human
ugugcugucaggggcagcuu

SEQ ID NO: 1303208 - RNA, 23 nt, Human
ugugcugucaggggcagcuuggg

SEQ ID NO: 1303209 - RNA, 24 nt, Human
ugugcugucaggggcagcuugggc

SEQ ID NO: 1303210 - RNA, 23 nt, Human
uuaacacuagcagaggaguccaa

SEQ ID NO: 1303211 - RNA, 21 nt, Human
uuaaucaucuggcuugcaaaa

SEQ ID NO: 1303212 - RNA, 24 nt, Human
uuaguggacugacuccaagguugc

SEQ ID NO: 1303213 - RNA, 18 nt, Human
uucagggccucaaggggc

SEQ ID NO: 1303214 - RNA, 19 nt, Human
uucugugcugagucccuuc

SEQ ID NO: 1303215 - RNA, 21 nt, Human
uugagcucaggaaaauggagg

SEQ ID NO: 1303216 - RNA, 23 nt, Human
uugcagggaagucgaauguucuc

SEQ ID NO: 1303217 - RNA, 22 nt, Human
uugcugccccugagcgaaccug

SEQ ID NO: 1303218 - RNA, 18 nt, Human
uugcuugaagcccucuga

SEQ ID NO: 1303219 - RNA, 23 nt, Human
uugggccacuuugcugccccuga

SEQ ID NO: 1303220 - RNA, 19 nt, Human
uuugcagaaaucacugcag

SEQ ID NO: 1303221 - RNA, 21 nt, Human
uuugcagaaaucacugcagau

SEQ ID NO: 1303222 - RNA, 26 nt, Human
aaaaacugaucaauucuuucucuaua

SEQ ID NO: 1303223 - RNA, 19 nt, Human
aagaauucuuuacauacgc

SEQ ID NO: 1303224 - RNA, 19 nt, Human
acugaucaauucuuucucu

SEQ ID NO: 1303225 - RNA, 20 nt, Human
agaauucuuuacauacgccc

SEQ ID NO: 1303226 - RNA, 23 nt, Human
agcugccaaagcgagcugagcag

SEQ ID NO: 1303227 - RNA, 18 nt, Human
aggaagggauaggaaggg

SEQ ID NO: 1303228 - RNA, 21 nt, Human
aggaagggauaggaagggggc

SEQ ID NO: 1303229 - RNA, 20 nt, Human
caaaugacgcaacugaaccc

SEQ ID NO: 1303230 - RNA, 21 nt, Human
caagcugccaaagcgagcuga

SEQ ID NO: 1303231 - RNA, 21 nt, Human
cgagguuggaaagaaucugcc

SEQ ID NO: 1303232 - RNA, 28 nt, Human
cuagauaauagcacaggcgguuuucuuu

SEQ ID NO: 1303233 - RNA, 23 nt, Human
cuccccgguugcgcgugcgcacu

SEQ ID NO: 1303234 - RNA, 18 nt, Human
cugaucaauucuuucucu

SEQ ID NO: 1303235 - RNA, 23 nt, Human
cuuugguguccaagcaaaaacug

SEQ ID NO: 1303236 - RNA, 21 nt, Human
gcggagcgcagagacgcgcug

SEQ ID NO: 1303237 - RNA, 25 nt, Human
gcggagcgcagagacgcgcugaagc

SEQ ID NO: 1303238 - RNA, 23 nt, Human
gcugauuggcggcgacgcgggag

SEQ ID NO: 1303239 - RNA, 19 nt, Human
ggauaggaagggggcggag

SEQ ID NO: 1303240 - RNA, 24 nt, Human
gguuggaaagaaucugccaguagu

SEQ ID NO: 1303241 - RNA, 21 nt, Human
uacgcccaccaagcugccaaa

SEQ ID NO: 1303242 - RNA, 20 nt, Human
ugcgcgugcgcacugugcag

SEQ ID NO: 1303243 - RNA, 19 nt, Human
uggaaagaaucugccagua

SEQ ID NO: 1303244 - RNA, 19 nt, Human
uucuuuacauacgcccacc

SEQ ID NO: 1303245 - RNA, 19 nt, Human
uuuuccuuugguguccaag

SEQ ID NO: 1303246 - RNA, 22 nt, Human
aaagacaaaggcccuuaaggga

SEQ ID NO: 1303247 - RNA, 19 nt, Human
aacacggugaagagcuucc

SEQ ID NO: 1303248 - RNA, 21 nt, Human
aacacggugaagagcuuccgu

SEQ ID NO: 1303249 - RNA, 23 nt, Human
aagaggagacagggcugagggga

SEQ ID NO: 1303250 - RNA, 19 nt, Human
aagccucgcuggcagcucc

SEQ ID NO: 1303251 - RNA, 21 nt, Human
aaggagggaggcaccagcagg

SEQ ID NO: 1303252 - RNA, 23 nt, Human
acauuuucccagguccccugcca

SEQ ID NO: 1303253 - RNA, 20 nt, Human
acccaaacagaccugacuag

SEQ ID NO: 1303254 - RNA, 26 nt, Human
acccagagcagcccugcggcccuccu

SEQ ID NO: 1303255 - RNA, 22 nt, Human
accucagacccaaacagaccug

SEQ ID NO: 1303256 - RNA, 18 nt, Human
acugcagaagaggagaca

SEQ ID NO: 1303257 - RNA, 26 nt, Human
agaacagacacggugaagaaggagau

SEQ ID NO: 1303258 - RNA, 20 nt, Human
agaagccaagagagcaggca

SEQ ID NO: 1303259 - RNA, 19 nt, Human
agaauguuccaugcaccuc

SEQ ID NO: 1303260 - RNA, 19 nt, Human
agacacggugaagaaggag

SEQ ID NO: 1303261 - RNA, 21 nt, Human
agacccaaacagaccugacua

SEQ ID NO: 1303262 - RNA, 27 nt, Human
agacccaaacagaccugacuagguggu

SEQ ID NO: 1303263 - RNA, 21 nt, Human
agacccagagcagcccugcgg

SEQ ID NO: 1303264 - RNA, 19 nt, Human
agcagcgcgccuggcacgc

SEQ ID NO: 1303265 - RNA, 22 nt, Human
agcccugcggcccuccuacccg

SEQ ID NO: 1303266 - RNA, 19 nt, Human
agcugcuuugggaagaaug

SEQ ID NO: 1303267 - RNA, 20 nt, Human
agcuggggaugcccucuagg

SEQ ID NO: 1303268 - RNA, 20 nt, Human
caccucagacccaaacagac

SEQ ID NO: 1303269 - RNA, 20 nt, Human
caccuccuggcugaaagggg

SEQ ID NO: 1303270 - RNA, 22 nt, Human
cacgccgaaccacgcgcccuug

SEQ ID NO: 1303271 - RNA, 19 nt, Human
cagcccugcggcccuccua

SEQ ID NO: 1303272 - RNA, 18 nt, Human
cagcgcgccuggcacgcc

SEQ ID NO: 1303273 - RNA, 22 nt, Human
caggauagggggcgaucggucg

SEQ ID NO: 1303274 - RNA, 19 nt, Human
ccaugcaccucagacccaa

SEQ ID NO: 1303275 - RNA, 25 nt, Human
ccaugugcccgaggcuguucaccgg

SEQ ID NO: 1303276 - RNA, 18 nt, Human
ccccaggaaacuuugggg

SEQ ID NO: 1303277 - RNA, 21 nt, Human
ccgaucauacuucacuucacu

SEQ ID NO: 1303278 - RNA, 19 nt, Human
ccucuaggcuggguccugc

SEQ ID NO: 1303279 - RNA, 22 nt, Human
cgaagggagacagaagccaaga

SEQ ID NO: 1303280 - RNA, 21 nt, Human
cgcggaggccccaggaaacuu

SEQ ID NO: 1303281 - RNA, 19 nt, Human
cuccauccuggccccuggc

SEQ ID NO: 1303282 - RNA, 18 nt, Human
cuccccugggcuggcucc

SEQ ID NO: 1303283 - RNA, 24 nt, Human
cuccuccauccuggccccuggcug

SEQ ID NO: 1303284 - RNA, 23 nt, Human
cugaaaagaggcuguccgaucau

SEQ ID NO: 1303285 - RNA, 19 nt, Human
cugcggcccuccuacccgc

SEQ ID NO: 1303286 - RNA, 27 nt, Human
cugcugggcuuuuuucccuucugaggc

SEQ ID NO: 1303287 - RNA, 24 nt, Human
cuggccccuggcuguuaaggucgc

SEQ ID NO: 1303288 - RNA, 19 nt, Human
cugggcuuuuuucccuucu

SEQ ID NO: 1303289 - RNA, 26 nt, Human
cugggcuuuuuucccuucugaggcuc

SEQ ID NO: 1303290 - RNA, 22 nt, Human
gacucgccccggguccccuccg

SEQ ID NO: 1303291 - RNA, 22 nt, Human
gauauccacgcuggauuggaug

SEQ ID NO: 1303292 - RNA, 21 nt, Human
gaucauacuucacuucacagg

SEQ ID NO: 1303293 - RNA, 20 nt, Human
gcagcccugcggcccuccua

SEQ ID NO: 1303294 - RNA, 20 nt, Human
gccaaagacaaaggcccuua

SEQ ID NO: 1303295 - RNA, 20 nt, Human
gccccggguccccuccgccc

SEQ ID NO: 1303296 - RNA, 22 nt, Human
gccccggguccccuccgcccgc

SEQ ID NO: 1303297 - RNA, 24 nt, Human
gcugaaucuggccuccccugggcu

SEQ ID NO: 1303298 - RNA, 19 nt, Human
gcugggccgacugcgcccc

SEQ ID NO: 1303299 - RNA, 23 nt, Human
ggagacagggcugaggggagaga

SEQ ID NO: 1303300 - RNA, 21 nt, Human
ggccccuggcuguuacaacuu

SEQ ID NO: 1303301 - RNA, 23 nt, Human
ggcucuccuccggcgggcccucc

SEQ ID NO: 1303302 - RNA, 24 nt, Human
gggauauccacgcuggauuggaug

SEQ ID NO: 1303303 - RNA, 19 nt, Human
ggguccccuccgcccgccc

SEQ ID NO: 1303304 - RNA, 20 nt, Human
ggugugacaagaacagacac

SEQ ID NO: 1303305 - RNA, 18 nt, Human
gugacugcgaagagggcg

SEQ ID NO: 1303306 - RNA, 21 nt, Human
uaaaugugcagaucccaacug

SEQ ID NO: 1303307 - RNA, 19 nt, Human
uacauuuucccaggucccc

SEQ ID NO: 1303308 - RNA, 24 nt, Human
uacccagaauguuccaugcaccuc

SEQ ID NO: 1303309 - RNA, 18 nt, Human
uacuagucagugcugcua

SEQ ID NO: 1303310 - RNA, 23 nt, Human
uauuccaauccugugaccuuggc

SEQ ID NO: 1303311 - RNA, 19 nt, Human
ucagacccaaacagaccug

SEQ ID NO: 1303312 - RNA, 21 nt, Human
ucauguucuccuccuuuccag

SEQ ID NO: 1303313 - RNA, 18 nt, Human
uccaauccugugaccuug

SEQ ID NO: 1303314 - RNA, 23 nt, Human
uccaccuccuggcugaaaggggg

SEQ ID NO: 1303315 - RNA, 18 nt, Human
ucccagaugggcagauua

SEQ ID NO: 1303316 - RNA, 18 nt, Human
uccccugggcuggcuccc

SEQ ID NO: 1303317 - RNA, 18 nt, Human
ucccgacgucccgcugcc

SEQ ID NO: 1303318 - RNA, 23 nt, Human
ucccucaggggcaggcaaggggu

SEQ ID NO: 1303319 - RNA, 18 nt, Human
uccuacccgccaugugcc

SEQ ID NO: 1303320 - RNA, 18 nt, Human
uccucugucuccauuguc

SEQ ID NO: 1303321 - RNA, 22 nt, Human
ucuccuccuuuccagcuugaag

SEQ ID NO: 1303322 - RNA, 20 nt, Human
ugaaaagaggcuguccgauc

SEQ ID NO: 1303323 - RNA, 20 nt, Human
ugacaagaacagacacggug

SEQ ID NO: 1303324 - RNA, 20 nt, Human
ugacucgccccggguccccu

SEQ ID NO: 1303325 - RNA, 23 nt, Human
ugaggcucuugcauguccugggg

SEQ ID NO: 1303326 - RNA, 19 nt, Human
ugcagggugggaccugcug

SEQ ID NO: 1303327 - RNA, 20 nt, Human
ugcccucuaggcuggguccu

SEQ ID NO: 1303328 - RNA, 23 nt, Human
ugcuaggccaaugggccaaagac

SEQ ID NO: 1303329 - RNA, 19 nt, Human
ugcuuugggaagaauggag

SEQ ID NO: 1303330 - RNA, 23 nt, Human
uggcacgccgaaccacgcgcccu

SEQ ID NO: 1303331 - RNA, 22 nt, Human
uggccccuggcuguuacaacuu

SEQ ID NO: 1303332 - RNA, 23 nt, Human
uggcucccgacgucccgcugccu

SEQ ID NO: 1303333 - RNA, 22 nt, Human
uggcugugcagggugggaccug

SEQ ID NO: 1303334 - RNA, 21 nt, Human
ugggaccugcugucucggcca

SEQ ID NO: 1303335 - RNA, 24 nt, Human
ugggaggugauggcaagcagcggg

SEQ ID NO: 1303336 - RNA, 19 nt, Human
uguccugggguggcuuggc

SEQ ID NO: 1303337 - RNA, 22 nt, Human
ugucuggggcgagcggacaggg

SEQ ID NO: 1303338 - RNA, 19 nt, Human
ugugcagaucccaacugca

SEQ ID NO: 1303339 - RNA, 19 nt, Human
uugucauaaaagcugaaaa

SEQ ID NO: 1303340 - RNA, 22 nt, Human
uuuccagcuugaagcuggggca

SEQ ID NO: 1303341 - RNA, 22 nt, Human
ccaaugauggugugaaacucuc

SEQ ID NO: 1303342 - RNA, 23 nt, Human
ugauggugugaaacucucaguga

SEQ ID NO: 1303343 - RNA, 26 nt, Human
gaaccgagagccaggacgcgcaggga

SEQ ID NO: 1303344 - RNA, 18 nt, Human
gagcugacgcugcaggug

SEQ ID NO: 1303345 - RNA, 18 nt, Human
aagcgccgucccgggcca

SEQ ID NO: 1303346 - RNA, 21 nt, Human
acacauguaccagacagucaa

SEQ ID NO: 1303347 - RNA, 19 nt, Human
agggaggacugcucugggc

SEQ ID NO: 1303348 - RNA, 23 nt, Human
cacauguaccagacagucaagca

SEQ ID NO: 1303349 - RNA, 20 nt, Human
cagguaggacacauguacca

SEQ ID NO: 1303350 - RNA, 22 nt, Human
cccgcgcucaucuucccggagc

SEQ ID NO: 1303351 - RNA, 18 nt, Human
cucggccauggcccucgg

SEQ ID NO: 1303352 - RNA, 24 nt, Human
gcccugccuggcugcaagcgccgu

SEQ ID NO: 1303353 - RNA, 19 nt, Human
uaccagacagucaagcagg

SEQ ID NO: 1303354 - RNA, 23 nt, Human
aagguacuuuuaucaaacuucgg

SEQ ID NO: 1303355 - RNA, 18 nt, Human
ccgccccgccgcgcgccc

SEQ ID NO: 1303356 - RNA, 24 nt, Human
ccgccuccgccccgccgcgcgccc

SEQ ID NO: 1303357 - RNA, 21 nt, Human
ccgccuccgccuccgccccgc

SEQ ID NO: 1303358 - RNA, 18 nt, Human
ccgcgccgccgccgccgc

SEQ ID NO: 1303359 - RNA, 19 nt, Human
ccgcgccgccgccgccgcu

SEQ ID NO: 1303360 - RNA, 21 nt, Human
ccgcgccgccgccgccgcucu

SEQ ID NO: 1303361 - RNA, 21 nt, Human
ccgcgccgccgccgccgcucu

SEQ ID NO: 1303362 - RNA, 19 nt, Human
ccgcgcgcccucccgcugc

SEQ ID NO: 1303363 - RNA, 25 nt, Human
ccgcugccgacccgcgccgccgccg

SEQ ID NO: 1303364 - RNA, 18 nt, Human
ccucccgcugccgacccg

SEQ ID NO: 1303365 - RNA, 24 nt, Human
cuuuuaucaugucuacaguaauug

SEQ ID NO: 1303366 - RNA, 23 nt, Human
gccgacccgcgccgccgccgccg

SEQ ID NO: 1303367 - RNA, 22 nt, Human
ugccgacccgcgccgccgccgc

SEQ ID NO: 1303368 - RNA, 20 nt, Human
uucucggcgccgacuccgcc

SEQ ID NO: 1303369 - RNA, 27 nt, Human
ccaacaaagaaacauuucaaaauuaaa

SEQ ID NO: 1303370 - RNA, 22 nt, Human
ucagaguucaccucaauaucuc

SEQ ID NO: 1303371 - RNA, 19 nt, Human
uuaaaguuccaggacacuc

SEQ ID NO: 1303372 - RNA, 23 nt, Human
agccgcucggagcugcugggcuu

SEQ ID NO: 1303373 - RNA, 22 nt, Human
aggugcugcaaaccggucugcc

SEQ ID NO: 1303374 - RNA, 23 nt, Human
caagcgggaacccgcgcccgagc

SEQ ID NO: 1303375 - RNA, 21 nt, Human
cacacaccggcugagacgccc

SEQ ID NO: 1303376 - RNA, 18 nt, Human
cugaagcuccggccgcug

SEQ ID NO: 1303377 - RNA, 21 nt, Human
cugcugcuccucucggucccc

SEQ ID NO: 1303378 - RNA, 18 nt, Human
cugcugggcuuuggcggc

SEQ ID NO: 1303379 - RNA, 20 nt, Human
gaacccgcgcccgagcccgg

SEQ ID NO: 1303380 - RNA, 20 nt, Human
gcccgagcccggcgggcgcc

SEQ ID NO: 1303381 - RNA, 18 nt, Human
gccgcugcugcuccucuc

SEQ ID NO: 1303382 - RNA, 19 nt, Human
ggaacccgcgcccgagccc

SEQ ID NO: 1303383 - RNA, 18 nt, Human
ggacaggcgcccgguccc

SEQ ID NO: 1303384 - RNA, 19 nt, Human
ggacaggcgcccggucccc

SEQ ID NO: 1303385 - RNA, 20 nt, Human
ucucgguccccgguucccgg

SEQ ID NO: 1303386 - RNA, 22 nt, Human
ugagacgcccagcccacugcgg

SEQ ID NO: 1303387 - RNA, 19 nt, Human
ucaaauccuuugugcuguu

SEQ ID NO: 1303388 - RNA, 18 nt, Human
aagcagccaugguggggc

SEQ ID NO: 1303389 - RNA, 20 nt, Human
agcagccaugguggggccag

SEQ ID NO: 1303390 - RNA, 23 nt, Human
aggacaucccaguggcuuugaag

SEQ ID NO: 1303391 - RNA, 26 nt, Human
aggcaagcagccaugguggggccagg

SEQ ID NO: 1303392 - RNA, 23 nt, Human
auggagauggggagcuggucaug

SEQ ID NO: 1303393 - RNA, 22 nt, Human
ccagccagucaagacggucaau

SEQ ID NO: 1303394 - RNA, 24 nt, Human
ccaggugccuggaggacaucccag

SEQ ID NO: 1303395 - RNA, 23 nt, Human
cccaggugccuggaggacauccc

SEQ ID NO: 1303396 - RNA, 22 nt, Human
gaaacucgagcuucauaaacca

SEQ ID NO: 1303397 - RNA, 19 nt, Human
gggacccaggugccuggag

SEQ ID NO: 1303398 - RNA, 19 nt, Human
gggagcuggucaugggacc

SEQ ID NO: 1303399 - RNA, 24 nt, Human
ggggagcuggucaugggacccagg

SEQ ID NO: 1303400 - RNA, 23 nt, Human
uaaaccagugaaaugccuacccc

SEQ ID NO: 1303401 - RNA, 18 nt, Human
uaccccuauggagauggg

SEQ ID NO: 1303402 - RNA, 20 nt, Human
ugaaaugccuaccccuaugg

SEQ ID NO: 1303403 - RNA, 24 nt, Human
uggucaugggacccaggugccugg

SEQ ID NO: 1303404 - RNA, 27 nt, Human
uuuuuuuuuuuuuuuuuuuuuuugggg

SEQ ID NO: 1303405 - RNA, 19 nt, Human
cuggggcuguguccagagg

SEQ ID NO: 1303406 - RNA, 20 nt, Human
cugugcccccaugcccgggc

SEQ ID NO: 1303407 - RNA, 21 nt, Human
gaccaggcugguccuacccag

SEQ ID NO: 1303408 - RNA, 18 nt, Human
uacccagguccuggggcu

SEQ ID NO: 1303409 - RNA, 20 nt, Human
uccugaccaguggcccuggg

SEQ ID NO: 1303410 - RNA, 25 nt, Human
uccuggggcuguguccagagggugg

SEQ ID NO: 1303411 - RNA, 21 nt, Human
ugaccaguggcccuggggagg

SEQ ID NO: 1303412 - RNA, 25 nt, Human
ugcccgggcauaucgaaugcggagg

SEQ ID NO: 1303413 - RNA, 19 nt, Human
uggggcuguguccagaggg

SEQ ID NO: 1303414 - RNA, 21 nt, Human
uuaggccugugcccccaugcc

SEQ ID NO: 1303415 - RNA, 19 nt, Human
guccccaguaaauauuugc

SEQ ID NO: 1303416 - RNA, 18 nt, Human
ugcuucagcugcuucugc

SEQ ID NO: 1303417 - RNA, 20 nt, Human
aaaaccaaaggaaggcagga

SEQ ID NO: 1303418 - RNA, 18 nt, Human
aaaggaaggcaggacucu

SEQ ID NO: 1303419 - RNA, 22 nt, Human
aaaguaaaaccaaaggaaggca

SEQ ID NO: 1303420 - RNA, 18 nt, Human
aaggaaggcaggacucug

SEQ ID NO: 1303421 - RNA, 19 nt, Human
aggcaggacucugcguggc

SEQ ID NO: 1303422 - RNA, 24 nt, Human
cugaguucaaaguaaaaccaaagg

SEQ ID NO: 1303423 - RNA, 23 nt, Human
gcgacggccaccuggucuucuau

SEQ ID NO: 1303424 - RNA, 20 nt, Human
ucacuuauuccauuaggaga

SEQ ID NO: 1303425 - RNA, 18 nt, Human
uucaaaguaaaaccaaag

SEQ ID NO: 1303426 - RNA, 21 nt, Human
aaauguguuugcacaguuugg

SEQ ID NO: 1303427 - RNA, 18 nt, Human
acccacgcggcggccgcg

SEQ ID NO: 1303428 - RNA, 26 nt, Human
agacccggcgaggccccccuccgaga

SEQ ID NO: 1303429 - RNA, 26 nt, Human
agacugcagccuccccccagcccucc

SEQ ID NO: 1303430 - RNA, 18 nt, Human
agggagggggugggcagg

SEQ ID NO: 1303431 - RNA, 18 nt, Human
agggagggggugggcagg

SEQ ID NO: 1303432 - RNA, 22 nt, Human
agggagggggugggcagggagg

SEQ ID NO: 1303433 - RNA, 19 nt, Human
cagcuccucuccguccccu

SEQ ID NO: 1303434 - RNA, 27 nt, Human
caggaaggccccuggaaagcacugaag

SEQ ID NO: 1303435 - RNA, 19 nt, Human
caggaaggcccugcagcag

SEQ ID NO: 1303436 - RNA, 18 nt, Human
cagggagggggugggcag

SEQ ID NO: 1303437 - RNA, 18 nt, Human
ccccccuccgagacugca

SEQ ID NO: 1303438 - RNA, 19 nt, Human
ccgagacugcagccucccc

SEQ ID NO: 1303439 - RNA, 21 nt, Human
ccuccagacccggcgaggccc

SEQ ID NO: 1303440 - RNA, 18 nt, Human
ccuccugcagcuccucuc

SEQ ID NO: 1303441 - RNA, 19 nt, Human
ccuccugcagcuccucucc

SEQ ID NO: 1303442 - RNA, 20 nt, Human
cuacacuguaacuagcagca

SEQ ID NO: 1303443 - RNA, 20 nt, Human
cuccagacccggcgaggccc

SEQ ID NO: 1303444 - RNA, 21 nt, Human
cuccgagacugcagccucccc

SEQ ID NO: 1303445 - RNA, 20 nt, Human
cugcagccuccccccagccc

SEQ ID NO: 1303446 - RNA, 23 nt, Human
cugcagccuccccccagcccucc

SEQ ID NO: 1303447 - RNA, 20 nt, Human
gacccggcgaggccccccuc

SEQ ID NO: 1303448 - RNA, 23 nt, Human
gacugcagccuccccccagcccu

SEQ ID NO: 1303449 - RNA, 21 nt, Human
gagacugcagccuccccccag

SEQ ID NO: 1303450 - RNA, 18 nt, Human
gaucgauacggcagggag

SEQ ID NO: 1303451 - RNA, 22 nt, Human
gcagcuccucuccguccccucc

SEQ ID NO: 1303452 - RNA, 23 nt, Human
gcagggaggguccugaacacaug

SEQ ID NO: 1303453 - RNA, 19 nt, Human
gccgcgguggaggaucagg

SEQ ID NO: 1303454 - RNA, 18 nt, Human
gcggcagggggaacgggc

SEQ ID NO: 1303455 - RNA, 18 nt, Human
gcugcugggcugcugggc

SEQ ID NO: 1303456 - RNA, 22 nt, Human
gcugggcacaggaaggccccug

SEQ ID NO: 1303457 - RNA, 19 nt, Human
gcugggcugcugggccggg

SEQ ID NO: 1303458 - RNA, 20 nt, Human
ggcaggaaggcccugcagca

SEQ ID NO: 1303459 - RNA, 19 nt, Human
ggcagggaggguccugaac

SEQ ID NO: 1303460 - RNA, 24 nt, Human
ggcagggaggguccugaacacaug

SEQ ID NO: 1303461 - RNA, 19 nt, Human
uacggcagggagggggugg

SEQ ID NO: 1303462 - RNA, 23 nt, Human
uaguggccuagcuccaacucugu

SEQ ID NO: 1303463 - RNA, 26 nt, Human
uccccccagcccuccugcagcucccc

SEQ ID NO: 1303464 - RNA, 18 nt, Human
uccucuccguccccuccu

SEQ ID NO: 1303465 - RNA, 21 nt, Human
ucuguccaggcaggaaggccc

SEQ ID NO: 1303466 - RNA, 23 nt, Human
ugagaggacagacccacgcggcg

SEQ ID NO: 1303467 - RNA, 18 nt, Human
uggccuagcuccaacucu

SEQ ID NO: 1303468 - RNA, 19 nt, Human
ugucucugcuguccccucc

SEQ ID NO: 1303469 - RNA, 19 nt, Human
ugugggcugcugggcugcu

SEQ ID NO: 1303470 - RNA, 18 nt, Human
cuccaauauucuucaguu

SEQ ID NO: 1303471 - RNA, 22 nt, Human
cacauaauucccaaacuucacc

SEQ ID NO: 1303472 - RNA, 21 nt, Human
caccuccaaaucuccuuccaa

SEQ ID NO: 1303473 - RNA, 20 nt, Human
uccaaaucuccuuccaaguu

SEQ ID NO: 1303474 - RNA, 20 nt, Human
ucccaaacuucaccuccaaa

SEQ ID NO: 1303475 - RNA, 23 nt, Human
ucuguguuguuuuggcugggccu

SEQ ID NO: 1303476 - RNA, 25 nt, Human
ucuguguuguuuuggcugggccuug

SEQ ID NO: 1303477 - RNA, 23 nt, Human
uggcugggccuugcacacauucu

SEQ ID NO: 1303478 - RNA, 21 nt, Human
ugggccuugcacacauucuug

SEQ ID NO: 1303479 - RNA, 21 nt, Human
uuccaaguucuguguuguuuu

SEQ ID NO: 1303480 - RNA, 20 nt, Human
uucuguguuguuuuggcugg

SEQ ID NO: 1303481 - RNA, 19 nt, Human
uucuugucuucugaucaau

SEQ ID NO: 1303482 - RNA, 19 nt, Human
uuggcugggccuugcacac

SEQ ID NO: 1303483 - RNA, 19 nt, Human
uccugggccugucugagga

SEQ ID NO: 1303484 - RNA, 22 nt, Human
aaugucacugucccugccccac

SEQ ID NO: 1303485 - RNA, 22 nt, Human
acagacagacggagccaccaag

SEQ ID NO: 1303486 - RNA, 18 nt, Human
acccgcgggcggacggac

SEQ ID NO: 1303487 - RNA, 23 nt, Human
acccgcgggcggacggacagaca

SEQ ID NO: 1303488 - RNA, 20 nt, Human
agacagacggagccaccaag

SEQ ID NO: 1303489 - RNA, 24 nt, Human
cggacggacagacagacggagcca

SEQ ID NO: 1303490 - RNA, 21 nt, Human
ucucccauaauucugugcauc

SEQ ID NO: 1303491 - RNA, 20 nt, Human
ugggacuacagaaaugucac

SEQ ID NO: 1303492 - RNA, 20 nt, Human
ugggacuacagaaaugucac

SEQ ID NO: 1303493 - RNA, 21 nt, Human
ugggacuacagaaaugucacu

SEQ ID NO: 1303494 - RNA, 22 nt, Human
ugggacuacagaaaugucacug

SEQ ID NO: 1303495 - RNA, 22 nt, Human
caccagcccuugccccgcccac

SEQ ID NO: 1303496 - RNA, 20 nt, Human
cagagcccggcgagcucucc

SEQ ID NO: 1303497 - RNA, 18 nt, Human
ccccgcccacccuggugg

SEQ ID NO: 1303498 - RNA, 18 nt, Human
cgccucagagcccggcga

SEQ ID NO: 1303499 - RNA, 19 nt, Human
gaggaagccgcugcguucc

SEQ ID NO: 1303500 - RNA, 20 nt, Human
gcgagcucuccucagccuag

SEQ ID NO: 1303501 - RNA, 18 nt, Human
uaggaggaagccgcugcg

SEQ ID NO: 1303502 - RNA, 23 nt, Human
ucagagcccggcgagcucuccuc

SEQ ID NO: 1303503 - RNA, 18 nt, Human
uccugcgccucagagccc

SEQ ID NO: 1303504 - RNA, 18 nt, Human
ucggugauugguggagca

SEQ ID NO: 1303505 - RNA, 22 nt, Human
ugccccgcccacccugguggcu

SEQ ID NO: 1303506 - RNA, 23 nt, Human
ugccccgcccacccugguggcug

SEQ ID NO: 1303507 - RNA, 25 nt, Human
aaguacuuucuucucuuugucccug

SEQ ID NO: 1303508 - RNA, 19 nt, Human
aaugauaaggaacaggaaa

SEQ ID NO: 1303509 - RNA, 27 nt, Human
acaaugaugauaagaaguacuuucuuc

SEQ ID NO: 1303510 - RNA, 22 nt, Human
agaccuucauucuucuggauuu

SEQ ID NO: 1303511 - RNA, 23 nt, Human
aggaaaugucgcaacaaguucuc

SEQ ID NO: 1303512 - RNA, 27 nt, Human
caacaaguucuccugacaaugaggucc

SEQ ID NO: 1303513 - RNA, 20 nt, Human
caggaaaugucgcaacaagu

SEQ ID NO: 1303514 - RNA, 26 nt, Human
gaaguacuuucuucucuuugucccug

SEQ ID NO: 1303515 - RNA, 21 nt, Human
gacgguugcaaaaugaaucuc

SEQ ID NO: 1303516 - RNA, 23 nt, Human
gcaaacccgauagucaauuucca

SEQ ID NO: 1303517 - RNA, 26 nt, Human
uacuuucuucucuuugucccugcaga

SEQ ID NO: 1303518 - RNA, 24 nt, Human
ucaauuuccagcucagcuuugaua

SEQ ID NO: 1303519 - RNA, 19 nt, Human
uccaaaugauaaggaacag

SEQ ID NO: 1303520 - RNA, 23 nt, Human
aggcagggagcccugaucccauu

SEQ ID NO: 1303521 - RNA, 20 nt, Human
agggacuaggggucugggcc

SEQ ID NO: 1303522 - RNA, 24 nt, Human
aucccauugcccucccucuccccg

SEQ ID NO: 1303523 - RNA, 21 nt, Human
caaggcagggagcccugaucc

SEQ ID NO: 1303524 - RNA, 22 nt, Human
ccuaggccagggcucaacagac

SEQ ID NO: 1303525 - RNA, 20 nt, Human
cgcccaggacggccuggcag

SEQ ID NO: 1303526 - RNA, 23 nt, Human
ggccuggcaggcagauccaaguc

SEQ ID NO: 1303527 - RNA, 21 nt, Human
gucauguugcuuccugcagcg

SEQ ID NO: 1303528 - RNA, 23 nt, Human
ucccauugcccucccucuccccg

SEQ ID NO: 1303529 - RNA, 25 nt, Human
ucccauugcccucccucuccccgug

SEQ ID NO: 1303530 - RNA, 25 nt, Human
uggcaggcagauccaaguccccucu

SEQ ID NO: 1303531 - RNA, 21 nt, Human
uuccugcagcgcccaggacgg

SEQ ID NO: 1303532 - RNA, 23 nt, Human
aggcacugguagaggguggggcc

SEQ ID NO: 1303533 - RNA, 20 nt, Human
gcgguaguggaaggacuugu

SEQ ID NO: 1303534 - RNA, 20 nt, Human
gggucaggguggagaagucc

SEQ ID NO: 1303535 - RNA, 22 nt, Human
ggguggggcccuggugggaggc

SEQ ID NO: 1303536 - RNA, 22 nt, Human
gucaggguggagaaguccaggg

SEQ ID NO: 1303537 - RNA, 21 nt, Human
ugcgguaguggaaggacuugu

SEQ ID NO: 1303538 - RNA, 23 nt, Human
ugcgguaguggaaggacuuguca

SEQ ID NO: 1303539 - RNA, 22 nt, Human
uggcgcuugagcugggucaggg

SEQ ID NO: 1303540 - RNA, 19 nt, Human
ugguagaggguggggcccu

SEQ ID NO: 1303541 - RNA, 23 nt, Human
uucgugggccuugagcucgcugg

SEQ ID NO: 1303542 - RNA, 25 nt, Human
uucgugggccuugagcucgcugggg

SEQ ID NO: 1303543 - RNA, 23 nt, Human
aaaaaacaaaacaaaaacaaaaa

SEQ ID NO: 1303544 - RNA, 22 nt, Human
aaaaacaaaaaaaccuucaaag

SEQ ID NO: 1303545 - RNA, 25 nt, Human
aaaacaaaaacaaaaaaaccuucaa

SEQ ID NO: 1303546 - RNA, 21 nt, Human
aaaacaaaacaaaaacaaaaa

SEQ ID NO: 1303547 - RNA, 26 nt, Human
aaacaaaaacaaaaaaaccuucaaag

SEQ ID NO: 1303548 - RNA, 26 nt, Human
aaacaaaacaaaaacaaaaaaaccuu

SEQ ID NO: 1303549 - RNA, 24 nt, Human
aaacacaacauaggcauuaauauu

SEQ ID NO: 1303550 - RNA, 19 nt, Human
aacauggugaaaccccguc

SEQ ID NO: 1303551 - RNA, 20 nt, Human
aacauggugaaaccccgucu

SEQ ID NO: 1303552 - RNA, 21 nt, Human
aacauggugaaaccccgucuc

SEQ ID NO: 1303553 - RNA, 23 nt, Human
aagagaaaggaggcuugggugca

SEQ ID NO: 1303554 - RNA, 24 nt, Human
aagcgcuugaacccagaaggcaga

SEQ ID NO: 1303555 - RNA, 23 nt, Human
acaaaaacaaaaaaaccuucaaa

SEQ ID NO: 1303556 - RNA, 24 nt, Human
acaaaacaaaaacaaaaaaaccuu

SEQ ID NO: 1303557 - RNA, 27 nt, Human
acaaaacaaaaacaaaaaaaccuucaa

SEQ ID NO: 1303558 - RNA, 28 nt, Human
acaaaacaaaaacaaaaaaaccuucaaa

SEQ ID NO: 1303559 - RNA, 24 nt, Human
accccgucucuacuaaaaauacaa

SEQ ID NO: 1303560 - RNA, 24 nt, Human
accugaggucaggaguucgagacc

SEQ ID NO: 1303561 - RNA, 18 nt, Human
acgccacugcacuccagc

SEQ ID NO: 1303562 - RNA, 18 nt, Human
acuccagccugggagaca

SEQ ID NO: 1303563 - RNA, 18 nt, Human
acugcacuccagccuggg

SEQ ID NO: 1303564 - RNA, 18 nt, Human
acugcacuccagccuggg

SEQ ID NO: 1303565 - RNA, 27 nt, Human
acugcacuccagccugggagacaacag

SEQ ID NO: 1303566 - RNA, 20 nt, Human
agagguugcagugagccaag

SEQ ID NO: 1303567 - RNA, 23 nt, Human
agagguugcagugagccaagauc

SEQ ID NO: 1303568 - RNA, 24 nt, Human
agagguugcagugagccaagauca

SEQ ID NO: 1303569 - RNA, 20 nt, Human
agaucaacucuaauacgaaa

SEQ ID NO: 1303570 - RNA, 23 nt, Human
agccaggcgugguggcaggcgcc

SEQ ID NO: 1303571 - RNA, 22 nt, Human
agccuggccaacauggugaaac

SEQ ID NO: 1303572 - RNA, 24 nt, Human
agccuggccaacauggugaaaccc

SEQ ID NO: 1303573 - RNA, 22 nt, Human
aggcaaaagagaaaggagggac

SEQ ID NO: 1303574 - RNA, 19 nt, Human
aggcagagguugcagugag

SEQ ID NO: 1303575 - RNA, 24 nt, Human
aggcagagguugcagugagccaag

SEQ ID NO: 1303576 - RNA, 18 nt, Human
aggcaggagaagcgcuug

SEQ ID NO: 1303577 - RNA, 24 nt, Human
aggcaggagaagcgcuugaaccca

SEQ ID NO: 1303578 - RNA, 25 nt, Human
aggcaggagaagcgcuugaacccag

SEQ ID NO: 1303579 - RNA, 18 nt, Human
aggcagguggaucaccug

SEQ ID NO: 1303580 - RNA, 22 nt, Human
aggcagguggaucaccugaggu

SEQ ID NO: 1303581 - RNA, 26 nt, Human
aggcagguggaucaccugaggucagg

SEQ ID NO: 1303582 - RNA, 24 nt, Human
aggcgugguggcaggcgccuguaa

SEQ ID NO: 1303583 - RNA, 24 nt, Human
aggcugaggcaggagaagcgcuug

SEQ ID NO: 1303584 - RNA, 24 nt, Human
agugacucacgccuguaaucccag

SEQ ID NO: 1303585 - RNA, 19 nt, Human
auacaccauccauaaagaa

SEQ ID NO: 1303586 - RNA, 24 nt, Human
aucacgccacugcacuccagccug

SEQ ID NO: 1303587 - RNA, 23 nt, Human
caaaaacaaaaaaaccuucaaag

SEQ ID NO: 1303588 - RNA, 24 nt, Human
caaaacaaaaacaaaaaaaccuuc

SEQ ID NO: 1303589 - RNA, 19 nt, Human
caacagccaaacuccaucu

SEQ ID NO: 1303590 - RNA, 24 nt, Human
caacauggugaaaccccgucucua

SEQ ID NO: 1303591 - RNA, 24 nt, Human
caagaucacgccacugcacuccag

SEQ ID NO: 1303592 - RNA, 24 nt, Human
caaggcagguggaucaccugaggu

SEQ ID NO: 1303593 - RNA, 26 nt, Human
caaggcagguggaucaccugagguca

SEQ ID NO: 1303594 - RNA, 22 nt, Human
cacaguccagaaagugcuucuc

SEQ ID NO: 1303595 - RNA, 23 nt, Human
caccugaggucaggaguucgaga

SEQ ID NO: 1303596 - RNA, 24 nt, Human
cacgccuguaaucccagcacuuug

SEQ ID NO: 1303597 - RNA, 18 nt, Human
cacugcacuccagccugg

SEQ ID NO: 1303598 - RNA, 19 nt, Human
cacugcacuccagccuggg

SEQ ID NO: 1303599 - RNA, 22 nt, Human
cacugcacuccagccugggaga

SEQ ID NO: 1303600 - RNA, 25 nt, Human
cacugcacuccagccugggagacaa

SEQ ID NO: 1303601 - RNA, 25 nt, Human
cacugcacuccagccugggagacaa

SEQ ID NO: 1303602 - RNA, 21 nt, Human
cagcacuuugagaggccaagg

SEQ ID NO: 1303603 - RNA, 24 nt, Human
cagcacuuugagaggccaaggcag

SEQ ID NO: 1303604 - RNA, 24 nt, Human
cagcuacuugggaggcugaggcag

SEQ ID NO: 1303605 - RNA, 24 nt, Human
cagguggaucaccugaggucagga

SEQ ID NO: 1303606 - RNA, 24 nt, Human
caucucaaaaaacaaaacaaaaac

SEQ ID NO: 1303607 - RNA, 19 nt, Human
ccacugcacuccagccugg

SEQ ID NO: 1303608 - RNA, 20 nt, Human
ccacugcacuccagccuggg

SEQ ID NO: 1303609 - RNA, 22 nt, Human
ccacugcacuccagccugggag

SEQ ID NO: 1303610 - RNA, 24 nt, Human
ccacugcacuccagccugggagac

SEQ ID NO: 1303611 - RNA, 22 nt, Human
ccugaggucaggaguucgagac

SEQ ID NO: 1303612 - RNA, 23 nt, Human
ccuggccaacauggugaaacccc

SEQ ID NO: 1303613 - RNA, 24 nt, Human
ccuggccaacauggugaaaccccg

SEQ ID NO: 1303614 - RNA, 19 nt, Human
ccuguaaucccagcuacuu

SEQ ID NO: 1303615 - RNA, 21 nt, Human
ccuguaaucccagcuacuugg

SEQ ID NO: 1303616 - RNA, 24 nt, Human
cgagaccagccuggccaacauggu

SEQ ID NO: 1303617 - RNA, 26 nt, Human
cgccacugcacuccagccugggagac

SEQ ID NO: 1303618 - RNA, 23 nt, Human
cgccuguaaucccagcuacuugg

SEQ ID NO: 1303619 - RNA, 24 nt, Human
cgccuguaaucccagcuacuuggg

SEQ ID NO: 1303620 - RNA, 19 nt, Human
cguggcagcacucuccucc

SEQ ID NO: 1303621 - RNA, 23 nt, Human
cuaauacgaaauccaucugcaau

SEQ ID NO: 1303622 - RNA, 22 nt, Human
cucacgccuguaaucccagcac

SEQ ID NO: 1303623 - RNA, 24 nt, Human
cucacgccuguaaucccagcacuu

SEQ ID NO: 1303624 - RNA, 19 nt, Human
cucagcaggaaaagaaaaa

SEQ ID NO: 1303625 - RNA, 23 nt, Human
cuccaucucaaaaaacaaaacaa

SEQ ID NO: 1303626 - RNA, 20 nt, Human
cuuaaacacaacauaggcau

SEQ ID NO: 1303627 - RNA, 20 nt, Human
gagauuccccacaaaaaccg

SEQ ID NO: 1303628 - RNA, 18 nt, Human
gagguugcagugagccaa

SEQ ID NO: 1303629 - RNA, 21 nt, Human
gaucaccugaggucaggaguu

SEQ ID NO: 1303630 - RNA, 24 nt, Human
gaucaccugaggucaggaguucga

SEQ ID NO: 1303631 - RNA, 22 nt, Human
gcaggagaagcgcuugaaccca

SEQ ID NO: 1303632 - RNA, 24 nt, Human
gccaacauggugaaaccccgucuc

SEQ ID NO: 1303633 - RNA, 20 nt, Human
gccaagaucacgccacugca

SEQ ID NO: 1303634 - RNA, 19 nt, Human
gcuucucaauggcagauuc

SEQ ID NO: 1303635 - RNA, 21 nt, Human
ggagaagcgcuugaacccaga

SEQ ID NO: 1303636 - RNA, 21 nt, Human
ggcaggcgccuguaaucccag

SEQ ID NO: 1303637 - RNA, 24 nt, Human
gggugcagugacucacgccuguaa

SEQ ID NO: 1303638 - RNA, 24 nt, Human
gguggcaggcgccuguaaucccag

SEQ ID NO: 1303639 - RNA, 20 nt, Human
uaggcaaaagagaaaggagg

SEQ ID NO: 1303640 - RNA, 21 nt, Human
ucaaaaaacaaaacaaaaaca

SEQ ID NO: 1303641 - RNA, 20 nt, Human
ucaacacaugaauagcagac

SEQ ID NO: 1303642 - RNA, 20 nt, Human
ucaccugaggucaggaguuc

SEQ ID NO: 1303643 - RNA, 23 nt, Human
ucacgccacugcacuccagccug

SEQ ID NO: 1303644 - RNA, 24 nt, Human
ucagaugcgagaucaacucuaaua

SEQ ID NO: 1303645 - RNA, 19 nt, Human
ucagcagauaauagcacuu

SEQ ID NO: 1303646 - RNA, 21 nt, Human
ucagcagauaauagcacuuuu

SEQ ID NO: 1303647 - RNA, 20 nt, Human
uccacaguccagaaagugcu

SEQ ID NO: 1303648 - RNA, 25 nt, Human
ucucaaaaaacaaaacaaaaacaaa

SEQ ID NO: 1303649 - RNA, 24 nt, Human
ucucuacuaaaaauacaaaaaauu

SEQ ID NO: 1303650 - RNA, 21 nt, Human
ugaauaaacugagaaugugga

SEQ ID NO: 1303651 - RNA, 23 nt, Human
ugaauaaacugagaauguggaag

SEQ ID NO: 1303652 - RNA, 21 nt, Human
ugacucacgccuguaauccca

SEQ ID NO: 1303653 - RNA, 22 nt, Human
ugacucacgccuguaaucccag

SEQ ID NO: 1303654 - RNA, 24 nt, Human
ugacucacgccuguaaucccagca

SEQ ID NO: 1303655 - RNA, 24 nt, Human
ugagaggccaaggcagguggauca

SEQ ID NO: 1303656 - RNA, 24 nt, Human
ugaggcaggagaagcgcuugaacc

SEQ ID NO: 1303657 - RNA, 25 nt, Human
ugaggcaggagaagcgcuugaaccc

SEQ ID NO: 1303658 - RNA, 24 nt, Human
uggaucaccugaggucaggaguuc

SEQ ID NO: 1303659 - RNA, 27 nt, Human
uggaucaccugaggucaggaguucgag

SEQ ID NO: 1303660 - RNA, 22 nt, Human
uggcaggcgccuguaaucccag

SEQ ID NO: 1303661 - RNA, 24 nt, Human
uggccaacauggugaaaccccguc

SEQ ID NO: 1303662 - RNA, 18 nt, Human
ugggaggcugaggcagga

SEQ ID NO: 1303663 - RNA, 19 nt, Human
ugggaggcugaggcaggag

SEQ ID NO: 1303664 - RNA, 24 nt, Human
ugguggcaggcgccuguaauccca

SEQ ID NO: 1303665 - RNA, 20 nt, Human
uugcagugagccaagaucac

SEQ ID NO: 1303666 - RNA, 21 nt, Human
uugcguggcagcacucuccuc

SEQ ID NO: 1303667 - RNA, 23 nt, Human
uuuuauuagcaguacucagcagg

SEQ ID NO: 1303668 - RNA, 18 nt, Human
aaaaagcuguaugugugu

SEQ ID NO: 1303669 - RNA, 23 nt, Human
aacagguuuauuuagcucuguuc

SEQ ID NO: 1303670 - RNA, 26 nt, Human
aacauuucuuuuuuuucuuugggggc

SEQ ID NO: 1303671 - RNA, 24 nt, Human
aacucaaucaacagcgggccgcaa

SEQ ID NO: 1303672 - RNA, 19 nt, Human
aagcaggaggaaguagcug

SEQ ID NO: 1303673 - RNA, 25 nt, Human
aagcgauucuccugacccagccucc

SEQ ID NO: 1303674 - RNA, 18 nt, Human
aaguagcugggauuacag

SEQ ID NO: 1303675 - RNA, 24 nt, Human
aaguagcugggauuacagucaugc

SEQ ID NO: 1303676 - RNA, 20 nt, Human
acaauaaagauauuccugga

SEQ ID NO: 1303677 - RNA, 18 nt, Human
agcaggauggucccagga

SEQ ID NO: 1303678 - RNA, 20 nt, Human
agccacccaauccuacccaa

SEQ ID NO: 1303679 - RNA, 23 nt, Human
agcgauucuccugacccagccuc

SEQ ID NO: 1303680 - RNA, 23 nt, Human
agugcaguggcgugaucuuggcu

SEQ ID NO: 1303681 - RNA, 24 nt, Human
agugcaguggcgugaucuuggcuc

SEQ ID NO: 1303682 - RNA, 18 nt, Human
auauacagagaucucugc

SEQ ID NO: 1303683 - RNA, 20 nt, Human
augaagcugagaacacgccu

SEQ ID NO: 1303684 - RNA, 22 nt, Human
caaaccgauugaugguaaagca

SEQ ID NO: 1303685 - RNA, 23 nt, Human
caaagcagaagaauauacagaga

SEQ ID NO: 1303686 - RNA, 23 nt, Human
caaccuccaccucccaguuaaag

SEQ ID NO: 1303687 - RNA, 23 nt, Human
caaguugccagaggauuuuuagc

SEQ ID NO: 1303688 - RNA, 20 nt, Human
cacugcaaccuccaccuccc

SEQ ID NO: 1303689 - RNA, 18 nt, Human
cagcgggccgcaagguuc

SEQ ID NO: 1303690 - RNA, 22 nt, Human
caggagucaucuucccacuucc

SEQ ID NO: 1303691 - RNA, 21 nt, Human
caggauggucccaggacccaa

SEQ ID NO: 1303692 - RNA, 23 nt, Human
ccaauccuacccaaccacaguau

SEQ ID NO: 1303693 - RNA, 24 nt, Human
ccacccaauccuacccaaccacag

SEQ ID NO: 1303694 - RNA, 18 nt, Human
ccaccuaugaagcugaga

SEQ ID NO: 1303695 - RNA, 23 nt, Human
cccaaccacaguaucucuuggga

SEQ ID NO: 1303696 - RNA, 22 nt, Human
cccaaguagcugggauuacagu

SEQ ID NO: 1303697 - RNA, 25 nt, Human
cccaauccuacccaaccacaguauc

SEQ ID NO: 1303698 - RNA, 18 nt, Human
cccgccgugccucugaaa

SEQ ID NO: 1303699 - RNA, 20 nt, Human
ccgcaagguucaaggcugca

SEQ ID NO: 1303700 - RNA, 26 nt, Human
ccggugacaauaaagauauuccugga

SEQ ID NO: 1303701 - RNA, 23 nt, Human
ccucccaguuaaagcgauucucc

SEQ ID NO: 1303702 - RNA, 23 nt, Human
ccucugaaaaaugggaggugaca

SEQ ID NO: 1303703 - RNA, 23 nt, Human
ccugacccagccucccaaguagc

SEQ ID NO: 1303704 - RNA, 22 nt, Human
ccugucgauugccuggcugagg

SEQ ID NO: 1303705 - RNA, 24 nt, Human
cucacugcaaccuccaccucccag

SEQ ID NO: 1303706 - RNA, 20 nt, Human
cucgcucgcugcuucuccug

SEQ ID NO: 1303707 - RNA, 21 nt, Human
cucuucucuccuucuuugcca

SEQ ID NO: 1303708 - RNA, 22 nt, Human
cugcaaccuccaccucccaguu

SEQ ID NO: 1303709 - RNA, 21 nt, Human
cuggagacaaggaacucuguu

SEQ ID NO: 1303710 - RNA, 23 nt, Human
cuucuccuucuccuucuucuuuu

SEQ ID NO: 1303711 - RNA, 18 nt, Human
cuucucuccuucuuugcc

SEQ ID NO: 1303712 - RNA, 18 nt, Human
cuucuucuuuuugaggug

SEQ ID NO: 1303713 - RNA, 18 nt, Human
gaacucaaucaacagcgg

SEQ ID NO: 1303714 - RNA, 30 nt, Human
gaaugcaccaccuaugaagcugagaacacc

SEQ ID NO: 1303715 - RNA, 21 nt, Human
gacaguuuuucuucuggagac

SEQ ID NO: 1303716 - RNA, 20 nt, Human
gacccagccucccaaguagc

SEQ ID NO: 1303717 - RNA, 18 nt, Human
gacgggguucuaagacag

SEQ ID NO: 1303718 - RNA, 18 nt, Human
gagcuuccugcugugcuc

SEQ ID NO: 1303719 - RNA, 24 nt, Human
gauuacagucaugcaccaccaugc

SEQ ID NO: 1303720 - RNA, 23 nt, Human
gcaaagcagaagaauauacagag

SEQ ID NO: 1303721 - RNA, 24 nt, Human
gcaaagcagaagaauauacagaga

SEQ ID NO: 1303722 - RNA, 20 nt, Human
gcaaccuccaccucccaguu

SEQ ID NO: 1303723 - RNA, 18 nt, Human
gcugcugaugugggcaga

SEQ ID NO: 1303724 - RNA, 20 nt, Human
gcuugauauaagaaagauug

SEQ ID NO: 1303725 - RNA, 20 nt, Human
ggaauccaagcagggggacc

SEQ ID NO: 1303726 - RNA, 25 nt, Human
ggacccagagagauuuaucuggugg

SEQ ID NO: 1303727 - RNA, 20 nt, Human
ggagacaaggaacucuguuc

SEQ ID NO: 1303728 - RNA, 18 nt, Human
gucacacaccacugccac

SEQ ID NO: 1303729 - RNA, 18 nt, Human
gucccaggagucaucuuc

SEQ ID NO: 1303730 - RNA, 25 nt, Human
uaaauugauaagcggugguacguca

SEQ ID NO: 1303731 - RNA, 21 nt, Human
uaagacagcggaacucaauca

SEQ ID NO: 1303732 - RNA, 19 nt, Human
uagcuguggccuuaucccu

SEQ ID NO: 1303733 - RNA, 18 nt, Human
uaucaugcuagcaggacc

SEQ ID NO: 1303734 - RNA, 28 nt, Human
ucaagguaguuuaaguacaacuucuccu

SEQ ID NO: 1303735 - RNA, 20 nt, Human
ucacacaccacugccacaau

SEQ ID NO: 1303736 - RNA, 19 nt, Human
ucacugcaaccuccaccuc

SEQ ID NO: 1303737 - RNA, 23 nt, Human
ucacugcaaccuccaccucccag

SEQ ID NO: 1303738 - RNA, 24 nt, Human
ucacugcaaccuccaccucccagu

SEQ ID NO: 1303739 - RNA, 26 nt, Human
ucacugcaaccuccaccucccaguua

SEQ ID NO: 1303740 - RNA, 20 nt, Human
ucagacaggccuuuaugagc

SEQ ID NO: 1303741 - RNA, 19 nt, Human
ucagccacccaauccuacc

SEQ ID NO: 1303742 - RNA, 24 nt, Human
ucaggaauguagauaaucuccuuc

SEQ ID NO: 1303743 - RNA, 20 nt, Human
uccagaaccugaugccuuac

SEQ ID NO: 1303744 - RNA, 23 nt, Human
ucccaaguagcugggauuacagu

SEQ ID NO: 1303745 - RNA, 20 nt, Human
ucccaguuaaagcgauucuc

SEQ ID NO: 1303746 - RNA, 23 nt, Human
ucccaguuaaagcgauucuccug

SEQ ID NO: 1303747 - RNA, 21 nt, Human
ucccuuggacccuuguucagc

SEQ ID NO: 1303748 - RNA, 27 nt, Human
uccguggcuguaagagggccggggucc

SEQ ID NO: 1303749 - RNA, 18 nt, Human
ucgcucgcugcuucuccu

SEQ ID NO: 1303750 - RNA, 22 nt, Human
ucuccuagcugcauaucaugcu

SEQ ID NO: 1303751 - RNA, 18 nt, Human
ucugggaagcucugaacu

SEQ ID NO: 1303752 - RNA, 21 nt, Human
ucuucucuucucuccuucuuu

SEQ ID NO: 1303753 - RNA, 18 nt, Human
ucuucuuuuugaggugga

SEQ ID NO: 1303754 - RNA, 24 nt, Human
ucuugcucuguuucccacucugga

SEQ ID NO: 1303755 - RNA, 19 nt, Human
ucuuuuuuuucuuuccacc

SEQ ID NO: 1303756 - RNA, 24 nt, Human
ugacccagccucccaaguagcugg

SEQ ID NO: 1303757 - RNA, 22 nt, Human
ugagguggagucuugcucuguu

SEQ ID NO: 1303758 - RNA, 22 nt, Human
ugcaaagcagaagaauauacag

SEQ ID NO: 1303759 - RNA, 22 nt, Human
ugcaguggcgugaucuuggcuc

SEQ ID NO: 1303760 - RNA, 21 nt, Human
ugcaugcggaauccaagcagg

SEQ ID NO: 1303761 - RNA, 20 nt, Human
ugccuuacugaagagagcac

SEQ ID NO: 1303762 - RNA, 19 nt, Human
uggagugcaguggcgugau

SEQ ID NO: 1303763 - RNA, 23 nt, Human
uggagugcaguggcgugaucuug

SEQ ID NO: 1303764 - RNA, 24 nt, Human
uggagugcaguggcgugaucuugg

SEQ ID NO: 1303765 - RNA, 21 nt, Human
ugggauuacagucaugcacca

SEQ ID NO: 1303766 - RNA, 24 nt, Human
ugggauuacagucaugcaccacca

SEQ ID NO: 1303767 - RNA, 23 nt, Human
uguaaggcccuguggaugcaaag

SEQ ID NO: 1303768 - RNA, 22 nt, Human
ugugaagaagcagcaagaaugc

SEQ ID NO: 1303769 - RNA, 20 nt, Human
ugugaggggagaauguggca

SEQ ID NO: 1303770 - RNA, 21 nt, Human
ugugaggggagaauguggcau

SEQ ID NO: 1303771 - RNA, 20 nt, Human
ugugugugaggggagaaugu

SEQ ID NO: 1303772 - RNA, 22 nt, Human
uguuucuuuccaaugucuggcu

SEQ ID NO: 1303773 - RNA, 21 nt, Human
uguuuguuuuuuguuuuuuuu

SEQ ID NO: 1303774 - RNA, 24 nt, Human
uucccacucuggagugcaguggcg

SEQ ID NO: 1303775 - RNA, 20 nt, Human
uucccaggcuccagaaccug

SEQ ID NO: 1303776 - RNA, 19 nt, Human
uucuccugacccagccucc

SEQ ID NO: 1303777 - RNA, 25 nt, Human
uugguauucuacucagcugagcagg

SEQ ID NO: 1303778 - RNA, 20 nt, Human
uuguuuguuuguuuguuuuu

SEQ ID NO: 1303779 - RNA, 26 nt, Human
uuguuuguuuguuuuuuguuuuuuuu

SEQ ID NO: 1303780 - RNA, 23 nt, Human
uuuaucuggugaccuuucugcau

SEQ ID NO: 1303781 - RNA, 22 nt, Human
uuugagguggagucuugcucug

SEQ ID NO: 1303782 - RNA, 20 nt, Human
uuuuuguuuguuuguuuuuu

SEQ ID NO: 1303783 - RNA, 22 nt, Human
uuuuuuuguuuguuuguuuuuu

SEQ ID NO: 1303784 - RNA, 19 nt, Human
agacaguaggaggaggugg

SEQ ID NO: 1303785 - RNA, 20 nt, Human
agcacagaagacaguaggag

SEQ ID NO: 1303786 - RNA, 24 nt, Human
aggaaagggaccagaugaagagga

SEQ ID NO: 1303787 - RNA, 18 nt, Human
ccuuccucucuggggccu

SEQ ID NO: 1303788 - RNA, 21 nt, Human
gcuucuagggacaauaaccga

SEQ ID NO: 1303789 - RNA, 24 nt, Human
uaaaacucagguuccacucaacaa

SEQ ID NO: 1303790 - RNA, 18 nt, Human
uccacucaacaaggaagu

SEQ ID NO: 1303791 - RNA, 21 nt, Human
ugaagaggagcagaagauccu

SEQ ID NO: 1303792 - RNA, 20 nt, Human
ugagacacaagcagagggaa

SEQ ID NO: 1303793 - RNA, 19 nt, Human
uggaaggaaagggaccaga

SEQ ID NO: 1303794 - RNA, 25 nt, Human
cagcagcagcugcuuugccacaguu

SEQ ID NO: 1303795 - RNA, 19 nt, Human
gcagcagcagcugcuuugc

SEQ ID NO: 1303796 - RNA, 20 nt, Human
uacuggcagcagcagcugcu

SEQ ID NO: 1303797 - RNA, 21 nt, Human
ugccaugccaaacucuauuuc

SEQ ID NO: 1303798 - RNA, 22 nt, Human
cagccacagcgauguucuagcc

SEQ ID NO: 1303799 - RNA, 18 nt, Human
caggagcugauguggagg

SEQ ID NO: 1303800 - RNA, 23 nt, Human
ccucccgcgugcgcuccugcgcu

SEQ ID NO: 1303801 - RNA, 22 nt, Human
ccugcgcuuccaccagaccuua

SEQ ID NO: 1303802 - RNA, 20 nt, Human
cuccgccgcggaacucacag

SEQ ID NO: 1303803 - RNA, 19 nt, Human
cucuuuuuguuuuccaccc

SEQ ID NO: 1303804 - RNA, 21 nt, Human
ucccgcgugcgcuccugcgcu

SEQ ID NO: 1303805 - RNA, 26 nt, Human
uccgccgcggaacucacagagguugg

SEQ ID NO: 1303806 - RNA, 19 nt, Human
uucccccgccauagccucc

SEQ ID NO: 1303807 - RNA, 18 nt, Human
uuuccacccggccuggcu

SEQ ID NO: 1303808 - RNA, 23 nt, Human
uuuguuuuccacccggccuggcu

SEQ ID NO: 1303809 - RNA, 23 nt, Human
uuuucagcgccgggugagggucc

SEQ ID NO: 1303810 - RNA, 20 nt, Human
aaaaccauucaccaaagaca

SEQ ID NO: 1303811 - RNA, 21 nt, Human
aaaaggacugacuuucagaga

SEQ ID NO: 1303812 - RNA, 22 nt, Human
aaauuauacagcauuuucacaa

SEQ ID NO: 1303813 - RNA, 20 nt, Human
aacagagugagacuccaucu

SEQ ID NO: 1303814 - RNA, 22 nt, Human
aaugauggagguaaaccaagga

SEQ ID NO: 1303815 - RNA, 24 nt, Human
aauugcuugaacccgggaggcaga

SEQ ID NO: 1303816 - RNA, 22 nt, Human
acagaacacaggcuccaaacau

SEQ ID NO: 1303817 - RNA, 23 nt, Human
acagagugagacuccaucucaaa

SEQ ID NO: 1303818 - RNA, 24 nt, Human
acagagugagacuccaucucaaaa

SEQ ID NO: 1303819 - RNA, 19 nt, Human
acagcauuuucacaaaguu

SEQ ID NO: 1303820 - RNA, 21 nt, Human
acagugcagagcauuuuugaa

SEQ ID NO: 1303821 - RNA, 24 nt, Human
accuugccucuacuaaaaauacaa

SEQ ID NO: 1303822 - RNA, 24 nt, Human
acuccagccugggcaacagaguga

SEQ ID NO: 1303823 - RNA, 24 nt, Human
acugguaaaaauauacagauguua

SEQ ID NO: 1303824 - RNA, 26 nt, Human
agagcauuuuugaacugauaaacaag

SEQ ID NO: 1303825 - RNA, 24 nt, Human
agagguuucagugagccgagaucg

SEQ ID NO: 1303826 - RNA, 20 nt, Human
agccaggcaugguggugggc

SEQ ID NO: 1303827 - RNA, 24 nt, Human
agccugggcaacagagugagacuc

SEQ ID NO: 1303828 - RNA, 21 nt, Human
aggaggguggggguuuuaaaa

SEQ ID NO: 1303829 - RNA, 21 nt, Human
aggcagagguuucagugagcc

SEQ ID NO: 1303830 - RNA, 24 nt, Human
aggcagagguuucagugagccgag

SEQ ID NO: 1303831 - RNA, 23 nt, Human
aggcagggaauugcuugaacccg

SEQ ID NO: 1303832 - RNA, 18 nt, Human
aggcagguggaucacagg

SEQ ID NO: 1303833 - RNA, 19 nt, Human
aggcagguggaucacaggg

SEQ ID NO: 1303834 - RNA, 24 nt, Human
aggcagguggaucacagggucagg

SEQ ID NO: 1303835 - RNA, 24 nt, Human
aggcaugguggugggcaccuguaa

SEQ ID NO: 1303836 - RNA, 23 nt, Human
aggcugaggcagggaauugcuug

SEQ ID NO: 1303837 - RNA, 18 nt, Human
agguggaucacaggguca

SEQ ID NO: 1303838 - RNA, 24 nt, Human
agguggaucacagggucaggaguu

SEQ ID NO: 1303839 - RNA, 24 nt, Human
aguggugcacgccuguaaucccag

SEQ ID NO: 1303840 - RNA, 26 nt, Human
auaaaaccauucaccaaagacaugcu

SEQ ID NO: 1303841 - RNA, 20 nt, Human
aucacagggucaggaguucc

SEQ ID NO: 1303842 - RNA, 22 nt, Human
aucccagcacuuugggaagcca

SEQ ID NO: 1303843 - RNA, 24 nt, Human
aucgugccauugcacuccagccug

SEQ ID NO: 1303844 - RNA, 24 nt, Human
auugcacuccagccugggcaacag

SEQ ID NO: 1303845 - RNA, 25 nt, Human
caaaggucuuuuuuuuuuuuuuaag

SEQ ID NO: 1303846 - RNA, 20 nt, Human
caacagguccauaucaaaaa

SEQ ID NO: 1303847 - RNA, 25 nt, Human
caacagguccauaucaaaaaaagaa

SEQ ID NO: 1303848 - RNA, 22 nt, Human
caacaugugaagggcgucucuu

SEQ ID NO: 1303849 - RNA, 18 nt, Human
caaggaggguggggguuu

SEQ ID NO: 1303850 - RNA, 20 nt, Human
caaggcagguggaucacagg

SEQ ID NO: 1303851 - RNA, 24 nt, Human
caaggcagguggaucacaggguca

SEQ ID NO: 1303852 - RNA, 18 nt, Human
caccuguaaucccagcua

SEQ ID NO: 1303853 - RNA, 21 nt, Human
caccuguaaucccagcuauuc

SEQ ID NO: 1303854 - RNA, 22 nt, Human
cacgccuguaaucccagcacuu

SEQ ID NO: 1303855 - RNA, 24 nt, Human
cacgccuguaaucccagcacuuug

SEQ ID NO: 1303856 - RNA, 22 nt, Human
cacuccagccugggcaacagag

SEQ ID NO: 1303857 - RNA, 24 nt, Human
cacuccagccugggcaacagagug

SEQ ID NO: 1303858 - RNA, 18 nt, Human
cagaacacaggcuccaaa

SEQ ID NO: 1303859 - RNA, 19 nt, Human
cagaacacaggcuccaaac

SEQ ID NO: 1303860 - RNA, 24 nt, Human
cagcacuuugggaagccaaggcag

SEQ ID NO: 1303861 - RNA, 25 nt, Human
cagcacuuugggaagccaaggcagg

SEQ ID NO: 1303862 - RNA, 19 nt, Human
cagcaguggcuucaugaga

SEQ ID NO: 1303863 - RNA, 19 nt, Human
cagugagccgagaucgugc

SEQ ID NO: 1303864 - RNA, 20 nt, Human
cagugagccgagaucgugcc

SEQ ID NO: 1303865 - RNA, 19 nt, Human
caugccaagucguucuucc

SEQ ID NO: 1303866 - RNA, 22 nt, Human
cauucaccaaagacaugcuuaa

SEQ ID NO: 1303867 - RNA, 19 nt, Human
cauugcacuccagccuggg

SEQ ID NO: 1303868 - RNA, 21 nt, Human
cauugcacuccagccugggca

SEQ ID NO: 1303869 - RNA, 22 nt, Human
cauugcacuccagccugggcaa

SEQ ID NO: 1303870 - RNA, 24 nt, Human
cauugcacuccagccugggcaaca

SEQ ID NO: 1303871 - RNA, 23 nt, Human
ccaaagacaugcuuaauuuuuga

SEQ ID NO: 1303872 - RNA, 19 nt, Human
ccagccaggcaugguggug

SEQ ID NO: 1303873 - RNA, 20 nt, Human
ccauugcacuccagccuggg

SEQ ID NO: 1303874 - RNA, 21 nt, Human
ccauugcacuccagccugggc

SEQ ID NO: 1303875 - RNA, 22 nt, Human
ccauugcacuccagccugggca

SEQ ID NO: 1303876 - RNA, 23 nt, Human
ccauugcacuccagccugggcaa

SEQ ID NO: 1303877 - RNA, 24 nt, Human
ccauugcacuccagccugggcaac

SEQ ID NO: 1303878 - RNA, 21 nt, Human
cccagcaguggcuucaugaga

SEQ ID NO: 1303879 - RNA, 22 nt, Human
ccugggcaacagagugagacuc

SEQ ID NO: 1303880 - RNA, 22 nt, Human
ccuguaaucccagcacuuuggg

SEQ ID NO: 1303881 - RNA, 18 nt, Human
cuacuauaaauuugaauc

SEQ ID NO: 1303882 - RNA, 18 nt, Human
cucaaaaaaaaaaaaaaa

SEQ ID NO: 1303883 - RNA, 19 nt, Human
cuccaucucaaaaaaaaaa

SEQ ID NO: 1303884 - RNA, 20 nt, Human
cucuacuaaaaauacaaaaa

SEQ ID NO: 1303885 - RNA, 24 nt, Human
cuugaccaagauggugaaaccuug

SEQ ID NO: 1303886 - RNA, 23 nt, Human
gaaaaagccuaugauuuugguua

SEQ ID NO: 1303887 - RNA, 19 nt, Human
gaaaccuugccucuacuaa

SEQ ID NO: 1303888 - RNA, 23 nt, Human
gaccaagauggugaaaccuugcc

SEQ ID NO: 1303889 - RNA, 23 nt, Human
gagaucgugccauugcacuccag

SEQ ID NO: 1303890 - RNA, 19 nt, Human
gaucacaaucacagauuua

SEQ ID NO: 1303891 - RNA, 22 nt, Human
gaucacagggucaggaguucca

SEQ ID NO: 1303892 - RNA, 24 nt, Human
gaucacagggucaggaguuccaga

SEQ ID NO: 1303893 - RNA, 18 nt, Human
gcaauuaaaugcuuuucu

SEQ ID NO: 1303894 - RNA, 20 nt, Human
gcacgccuguaaucccagca

SEQ ID NO: 1303895 - RNA, 24 nt, Human
gcacuccagccugggcaacagagu

SEQ ID NO: 1303896 - RNA, 22 nt, Human
gccauugcacuccagccugggc

SEQ ID NO: 1303897 - RNA, 24 nt, Human
gccauugcacuccagccugggcaa

SEQ ID NO: 1303898 - RNA, 21 nt, Human
gcuggacucaguggugcacgc

SEQ ID NO: 1303899 - RNA, 20 nt, Human
ggagguaaaccaaggagggu

SEQ ID NO: 1303900 - RNA, 23 nt, Human
ggagguaaaccaaggaggguggg

SEQ ID NO: 1303901 - RNA, 19 nt, Human
ggcaccuguaaucccagcu

SEQ ID NO: 1303902 - RNA, 24 nt, Human
gguggugggcaccuguaaucccag

SEQ ID NO: 1303903 - RNA, 19 nt, Human
gucuagaguguauguaagg

SEQ ID NO: 1303904 - RNA, 19 nt, Human
guggaucacagggucagga

SEQ ID NO: 1303905 - RNA, 23 nt, Human
guggaucacagggucaggaguuc

SEQ ID NO: 1303906 - RNA, 22 nt, Human
guggugcacgccuguaauccca

SEQ ID NO: 1303907 - RNA, 24 nt, Human
guuuugguagaaguggucugagaa

SEQ ID NO: 1303908 - RNA, 18 nt, Human
uaaaacagacaguuaaca

SEQ ID NO: 1303909 - RNA, 23 nt, Human
uaaaacagacaguuaacauaaua

SEQ ID NO: 1303910 - RNA, 20 nt, Human
uaaaagacaaaucaaccuuc

SEQ ID NO: 1303911 - RNA, 21 nt, Human
uaacauuaugggcuucuccuc

SEQ ID NO: 1303912 - RNA, 18 nt, Human
uacugaucuaucuuaacg

SEQ ID NO: 1303913 - RNA, 25 nt, Human
uauaugcaaacagucacaauaugca

SEQ ID NO: 1303914 - RNA, 18 nt, Human
uauugaguagauaaaagg

SEQ ID NO: 1303915 - RNA, 18 nt, Human
uauuucuuacaugccaag

SEQ ID NO: 1303916 - RNA, 24 nt, Human
ucacagggucaggaguuccagacc

SEQ ID NO: 1303917 - RNA, 22 nt, Human
ucaccaaagacaugcuuaauuu

SEQ ID NO: 1303918 - RNA, 23 nt, Human
ucauuguuguuuuuuaaugaugg

SEQ ID NO: 1303919 - RNA, 23 nt, Human
uccagccugggcaacagagugag

SEQ ID NO: 1303920 - RNA, 24 nt, Human
uccagccugggcaacagagugaga

SEQ ID NO: 1303921 - RNA, 23 nt, Human
uccaucucaaaaaaaaaaaaaaa

SEQ ID NO: 1303922 - RNA, 29 nt, Human
uccaucucaaaaaaaaaaaaaaaagaaaa

SEQ ID NO: 1303923 - RNA, 23 nt, Human
ucgugccauugcacuccagccug

SEQ ID NO: 1303924 - RNA, 18 nt, Human
ucucaaaaaaaaaaaaaa

SEQ ID NO: 1303925 - RNA, 18 nt, Human
ucugaaaauaaaaccgau

SEQ ID NO: 1303926 - RNA, 26 nt, Human
ucugcaguuuacugguugacugcacu

SEQ ID NO: 1303927 - RNA, 25 nt, Human
ucuuccauucuggagaacaccucuu

SEQ ID NO: 1303928 - RNA, 18 nt, Human
ugaaaauaaaaccgauau

SEQ ID NO: 1303929 - RNA, 22 nt, Human
ugaacugauaaacaagaauaua

SEQ ID NO: 1303930 - RNA, 19 nt, Human
ugaccaagauggugaaacc

SEQ ID NO: 1303931 - RNA, 22 nt, Human
ugagaccaagugucuacuuugc

SEQ ID NO: 1303932 - RNA, 22 nt, Human
ugagccgagaucgugccauugc

SEQ ID NO: 1303933 - RNA, 23 nt, Human
ugaggcagggaauugcuugaacc

SEQ ID NO: 1303934 - RNA, 23 nt, Human
ugaggcagggaauugcuugaacc

SEQ ID NO: 1303935 - RNA, 24 nt, Human
ugaggcagggaauugcuugaaccc

SEQ ID NO: 1303936 - RNA, 22 nt, Human
ugcacuccagccugggcaacag

SEQ ID NO: 1303937 - RNA, 22 nt, Human
ugcacuccagccugggcaacag

SEQ ID NO: 1303938 - RNA, 22 nt, Human
ugccacaacauaauuaauaaac

SEQ ID NO: 1303939 - RNA, 23 nt, Human
ugccacaacauaauuaauaaaca

SEQ ID NO: 1303940 - RNA, 22 nt, Human
uggaucacagggucaggaguuc

SEQ ID NO: 1303941 - RNA, 24 nt, Human
ugggaagccaaggcagguggauca

SEQ ID NO: 1303942 - RNA, 21 nt, Human
uggugcacgccuguaauccca

SEQ ID NO: 1303943 - RNA, 22 nt, Human
uggugcacgccuguaaucccag

SEQ ID NO: 1303944 - RNA, 24 nt, Human
uggugcacgccuguaaucccagca

SEQ ID NO: 1303945 - RNA, 22 nt, Human
uggugggcaccuguaaucccag

SEQ ID NO: 1303946 - RNA, 24 nt, Human
ugguggugggcaccuguaauccca

SEQ ID NO: 1303947 - RNA, 18 nt, Human
ugucuuauauguuuuagg

SEQ ID NO: 1303948 - RNA, 19 nt, Human
uguuuugguagaagugguc

SEQ ID NO: 1303949 - RNA, 20 nt, Human
uuauacagcauuuucacaaa

SEQ ID NO: 1303950 - RNA, 22 nt, Human
uucaaaaguugacauuaucaga

SEQ ID NO: 1303951 - RNA, 27 nt, Human
uugaccaagauggugaaaccuugccuc

SEQ ID NO: 1303952 - RNA, 18 nt, Human
uugcuugaacccgggagg

SEQ ID NO: 1303953 - RNA, 24 nt, Human
uugcuugaacccgggaggcagagg

SEQ ID NO: 1303954 - RNA, 24 nt, Human
uuucacaaaguucaaugcacagaa

SEQ ID NO: 1303955 - RNA, 18 nt, Human
aacacacacaacacacac

SEQ ID NO: 1303956 - RNA, 21 nt, Human
acacaacacacacacacaaaa

SEQ ID NO: 1303957 - RNA, 29 nt, Human
acacacacacacaacccaaacacacacaa

SEQ ID NO: 1303958 - RNA, 24 nt, Human
acagagugagacucugucucaaaa

SEQ ID NO: 1303959 - RNA, 23 nt, Human
acucugucucaaaaacacacaca

SEQ ID NO: 1303960 - RNA, 19 nt, Human
acuggagugcaauggcgug

SEQ ID NO: 1303961 - RNA, 23 nt, Human
agcugggugucguggugcgugcc

SEQ ID NO: 1303962 - RNA, 23 nt, Human
aggccgggagugggguggaaggg

SEQ ID NO: 1303963 - RNA, 24 nt, Human
aggccgggagugggguggaagggu

SEQ ID NO: 1303964 - RNA, 21 nt, Human
aggccuggugucaggccggga

SEQ ID NO: 1303965 - RNA, 18 nt, Human
aggcgggaggaucaccug

SEQ ID NO: 1303966 - RNA, 20 nt, Human
agugcaauggcgugaucucg

SEQ ID NO: 1303967 - RNA, 24 nt, Human
agugcaauggcgugaucucggcuc

SEQ ID NO: 1303968 - RNA, 25 nt, Human
caaaaacacacacacacacaaccca

SEQ ID NO: 1303969 - RNA, 20 nt, Human
cacaacacacacacacaaaa

SEQ ID NO: 1303970 - RNA, 21 nt, Human
cacaacacacacacacaaaau

SEQ ID NO: 1303971 - RNA, 20 nt, Human
cacacaacccaaacacacac

SEQ ID NO: 1303972 - RNA, 22 nt, Human
cacacaacccaaacacacacaa

SEQ ID NO: 1303973 - RNA, 25 nt, Human
cacacaacccaaacacacacaacac

SEQ ID NO: 1303974 - RNA, 24 nt, Human
cacacacaaaaucagcuggguguc

SEQ ID NO: 1303975 - RNA, 21 nt, Human
cacacacaacacacacacaca

SEQ ID NO: 1303976 - RNA, 23 nt, Human
cacacacaacacacacacacaaa

SEQ ID NO: 1303977 - RNA, 23 nt, Human
cacacacaacccaaacacacaca

SEQ ID NO: 1303978 - RNA, 19 nt, Human
cacacacacacaacccaaa

SEQ ID NO: 1303979 - RNA, 21 nt, Human
cacugcaaccuccgccuccug

SEQ ID NO: 1303980 - RNA, 23 nt, Human
cacugcaaccuccgccuccuggg

SEQ ID NO: 1303981 - RNA, 25 nt, Human
cccaaacacacacaacacacacaca

SEQ ID NO: 1303982 - RNA, 20 nt, Human
ccgggagugggguggaaggg

SEQ ID NO: 1303983 - RNA, 19 nt, Human
ccuccgccuccugggugac

SEQ ID NO: 1303984 - RNA, 22 nt, Human
ccugggugacagagugagacuc

SEQ ID NO: 1303985 - RNA, 21 nt, Human
ccuguagugccagcuacuugg

SEQ ID NO: 1303986 - RNA, 22 nt, Human
ccuguagugccagcuacuuggg

SEQ ID NO: 1303987 - RNA, 20 nt, Human
ccugucucagcaugaugccc

SEQ ID NO: 1303988 - RNA, 27 nt, Human
cucaaaaacacacacacacacaaccca

SEQ ID NO: 1303989 - RNA, 24 nt, Human
cucacugcaaccuccgccuccugg

SEQ ID NO: 1303990 - RNA, 22 nt, Human
cugcaaccuccgccuccugggu

SEQ ID NO: 1303991 - RNA, 23 nt, Human
cugcugccgcucucguaagcagc

SEQ ID NO: 1303992 - RNA, 19 nt, Human
cugucucagcaugaugccc

SEQ ID NO: 1303993 - RNA, 20 nt, Human
cugucucagcaugaugcccc

SEQ ID NO: 1303994 - RNA, 24 nt, Human
gacagagugagacucugucucaaa

SEQ ID NO: 1303995 - RNA, 19 nt, Human
gaucaccugaacccaggaa

SEQ ID NO: 1303996 - RNA, 20 nt, Human
gaucaccugaacccaggaag

SEQ ID NO: 1303997 - RNA, 24 nt, Human
gcccaaacuggagugcaauggcgu

SEQ ID NO: 1303998 - RNA, 23 nt, Human
gccuccugggugacagagugaga

SEQ ID NO: 1303999 - RNA, 27 nt, Human
gcucccugcugcugccgcucucguaag

SEQ ID NO: 1304000 - RNA, 20 nt, Human
gcucucguaagcagcaagcu

SEQ ID NO: 1304001 - RNA, 21 nt, Human
gcucuuguugcccaaacugga

SEQ ID NO: 1304002 - RNA, 24 nt, Human
gugacagagugagacucugucuca

SEQ ID NO: 1304003 - RNA, 18 nt, Human
guggugcgugccuguagu

SEQ ID NO: 1304004 - RNA, 22 nt, Human
guggugcgugccuguagugcca

SEQ ID NO: 1304005 - RNA, 23 nt, Human
ucaaaaacacacacacacacaac

SEQ ID NO: 1304006 - RNA, 23 nt, Human
ucacugcaaccuccgccuccugg

SEQ ID NO: 1304007 - RNA, 24 nt, Human
ucacugcaaccuccgccuccuggg

SEQ ID NO: 1304008 - RNA, 25 nt, Human
ucacugcaaccuccgccuccugggu

SEQ ID NO: 1304009 - RNA, 20 nt, Human
ucagcugggugucguggugc

SEQ ID NO: 1304010 - RNA, 22 nt, Human
ucagcugggugucguggugcga

SEQ ID NO: 1304011 - RNA, 18 nt, Human
ucccaaaauggauggaag

SEQ ID NO: 1304012 - RNA, 21 nt, Human
uccgccuccugggugacagag

SEQ ID NO: 1304013 - RNA, 23 nt, Human
uccgccuccugggugacagagug

SEQ ID NO: 1304014 - RNA, 19 nt, Human
ugagaagagcuagcccagc

SEQ ID NO: 1304015 - RNA, 21 nt, Human
ugagaagagcuagcccagcug

SEQ ID NO: 1304016 - RNA, 23 nt, Human
ugagacagaguuuugcucuuguu

SEQ ID NO: 1304017 - RNA, 20 nt, Human
ugaggcgggaggaucaccug

SEQ ID NO: 1304018 - RNA, 21 nt, Human
ugaggcgggaggaucaccuga

SEQ ID NO: 1304019 - RNA, 24 nt, Human
ugaggcgggaggaucaccugaacc

SEQ ID NO: 1304020 - RNA, 21 nt, Human
ugcccaaacuggagugcaaug

SEQ ID NO: 1304021 - RNA, 23 nt, Human
ugccuguagugccagcuacuugg

SEQ ID NO: 1304022 - RNA, 24 nt, Human
ugccuguagugccagcuacuuggg

SEQ ID NO: 1304023 - RNA, 18 nt, Human
uggaagggccccaaaaug

SEQ ID NO: 1304024 - RNA, 18 nt, Human
uggaagggucccaaaaug

SEQ ID NO: 1304025 - RNA, 19 nt, Human
uggagugcaauggcgugau

SEQ ID NO: 1304026 - RNA, 23 nt, Human
uggagugcaauggcgugaucucg

SEQ ID NO: 1304027 - RNA, 24 nt, Human
uggagugcaauggcgugaucucgg

SEQ ID NO: 1304028 - RNA, 20 nt, Human
uggcgugaucucggcucacu

SEQ ID NO: 1304029 - RNA, 19 nt, Human
uggcucuccugucucagca

SEQ ID NO: 1304030 - RNA, 24 nt, Human
uggcugaggcgggaggaucaccug

SEQ ID NO: 1304031 - RNA, 22 nt, Human
ugggguggaagggucccaaaau

SEQ ID NO: 1304032 - RNA, 21 nt, Human
ugggugacagagugagacucu

SEQ ID NO: 1304033 - RNA, 18 nt, Human
uggguggcugaggcggga

SEQ ID NO: 1304034 - RNA, 24 nt, Human
uggguggcugaggcgggaggauca

SEQ ID NO: 1304035 - RNA, 24 nt, Human
uggugcgugccuguagugccagcu

SEQ ID NO: 1304036 - RNA, 21 nt, Human
uggugucaggccgggaguggg

SEQ ID NO: 1304037 - RNA, 20 nt, Human
uguugcccaaacuggagugc

SEQ ID NO: 1304038 - RNA, 23 nt, Human
uuaacauauuuuuuccuacaggg

SEQ ID NO: 1304039 - RNA, 23 nt, Human
uugcucuuguugcccaaacugga

SEQ ID NO: 1304040 - RNA, 25 nt, Human
uuggguggcugaggcgggaggauca

SEQ ID NO: 1304041 - RNA, 23 nt, Human
uuguugcccaaacuggagugcaa

SEQ ID NO: 1304042 - RNA, 24 nt, Human
uuugcucuuguugcccaaacugga

SEQ ID NO: 1304043 - RNA, 24 nt, Human
uuuugcucuuguugcccaaacugg

SEQ ID NO: 1304044 - RNA, 23 nt, Human
aaaaggacaaauauuuagccaga

SEQ ID NO: 1304045 - RNA, 22 nt, Human
aaagaaaugaggcagaaaguau

SEQ ID NO: 1304046 - RNA, 23 nt, Human
aaagaaaugaggcagaaaguauc

SEQ ID NO: 1304047 - RNA, 24 nt, Human
aaagaaaugaggcagaaaguaucu

SEQ ID NO: 1304048 - RNA, 21 nt, Human
aacaaaaagccacuuuugacc

SEQ ID NO: 1304049 - RNA, 19 nt, Human
aacaaaaggaccagcuaaa

SEQ ID NO: 1304050 - RNA, 19 nt, Human
aagccacuuuugaccaauu

SEQ ID NO: 1304051 - RNA, 21 nt, Human
aagccugcuacugcccccuga

SEQ ID NO: 1304052 - RNA, 21 nt, Human
acaaaaagccacuuuugacca

SEQ ID NO: 1304053 - RNA, 22 nt, Human
acagacagcaugauaccugagc

SEQ ID NO: 1304054 - RNA, 20 nt, Human
acauagccagucuuuccccu

SEQ ID NO: 1304055 - RNA, 21 nt, Human
accaauugcucccuacauaga

SEQ ID NO: 1304056 - RNA, 25 nt, Human
accaggcaaauuuaugcagugcguu

SEQ ID NO: 1304057 - RNA, 21 nt, Human
agacagcaugauaccugagca

SEQ ID NO: 1304058 - RNA, 19 nt, Human
agauggaggcgaauuugga

SEQ ID NO: 1304059 - RNA, 18 nt, Human
agcaaauaaaucaacuac

SEQ ID NO: 1304060 - RNA, 18 nt, Human
agccugcuacugcccccu

SEQ ID NO: 1304061 - RNA, 24 nt, Human
aucaucuccuuaucaauacagccc

SEQ ID NO: 1304062 - RNA, 23 nt, Human
caaaaggaccagcuaaaaugaca

SEQ ID NO: 1304063 - RNA, 21 nt, Human
caaagcaucuuugucuucccg

SEQ ID NO: 1304064 - RNA, 23 nt, Human
caaagccugcuacugcccccuga

SEQ ID NO: 1304065 - RNA, 27 nt, Human
caaauaaaucaacuaccaugaucagaa

SEQ ID NO: 1304066 - RNA, 22 nt, Human
caacuaccaugaucagaagggc

SEQ ID NO: 1304067 - RNA, 21 nt, Human
caccgagcccacuaggccucc

SEQ ID NO: 1304068 - RNA, 24 nt, Human
cagcuaaaaugacauuaacugaua

SEQ ID NO: 1304069 - RNA, 21 nt, Human
caucuccuuaucaauacagcc

SEQ ID NO: 1304070 - RNA, 19 nt, Human
cauuuuguuuuuccugcuu

SEQ ID NO: 1304071 - RNA, 26 nt, Human
ccacgcaccgagcccacuaggccucc

SEQ ID NO: 1304072 - RNA, 19 nt, Human
ccacugccgucaucgccgc

SEQ ID NO: 1304073 - RNA, 19 nt, Human
ccagaaaagaaaugaggca

SEQ ID NO: 1304074 - RNA, 24 nt, Human
ccccgaaaaaucucaugaacccac

SEQ ID NO: 1304075 - RNA, 20 nt, Human
ccccgagccgccgccgaccc

SEQ ID NO: 1304076 - RNA, 23 nt, Human
ccccugagcuuccugcauuucuc

SEQ ID NO: 1304077 - RNA, 19 nt, Human
ccccuuguggaaacaaaaa

SEQ ID NO: 1304078 - RNA, 22 nt, Human
ccgagcccacuaggccuccacu

SEQ ID NO: 1304079 - RNA, 24 nt, Human
ccugagcaaauaaaucaacuacca

SEQ ID NO: 1304080 - RNA, 19 nt, Human
ccugcuacugcccccugag

SEQ ID NO: 1304081 - RNA, 19 nt, Human
cgccuuaaaaauagaaaca

SEQ ID NO: 1304082 - RNA, 20 nt, Human
cggaaacuguucuggaccaa

SEQ ID NO: 1304083 - RNA, 22 nt, Human
cggagccgggcgggggaggacg

SEQ ID NO: 1304084 - RNA, 19 nt, Human
cggcuccucagguacuccc

SEQ ID NO: 1304085 - RNA, 21 nt, Human
cgggagccgggccccccgcuu

SEQ ID NO: 1304086 - RNA, 21 nt, Human
cguagcccgcggguggacccc

SEQ ID NO: 1304087 - RNA, 19 nt, Human
cuccucagguacucccggc

SEQ ID NO: 1304088 - RNA, 18 nt, Human
cuccuuaucaauacagcc

SEQ ID NO: 1304089 - RNA, 21 nt, Human
cugaguggcuaugcuguggaa

SEQ ID NO: 1304090 - RNA, 22 nt, Human
cuuaaaaauagaaacaaaagga

SEQ ID NO: 1304091 - RNA, 21 nt, Human
gaaaauaacugauuuagaagc

SEQ ID NO: 1304092 - RNA, 21 nt, Human
gacugucauuaggauuuccau

SEQ ID NO: 1304093 - RNA, 20 nt, Human
gauucuuucuacugcacccc

SEQ ID NO: 1304094 - RNA, 18 nt, Human
gcaaagcaucuuugucuu

SEQ ID NO: 1304095 - RNA, 18 nt, Human
gcaccgagcccacuaggc

SEQ ID NO: 1304096 - RNA, 23 nt, Human
gccgacccacgcaccgagcccac

SEQ ID NO: 1304097 - RNA, 18 nt, Human
ggagccgggccccccgcu

SEQ ID NO: 1304098 - RNA, 22 nt, Human
ggcaucuuguugcauguaguug

SEQ ID NO: 1304099 - RNA, 19 nt, Human
guggcggagccgggcgggg

SEQ ID NO: 1304100 - RNA, 21 nt, Human
uaaaaauagaaacaaaaggac

SEQ ID NO: 1304101 - RNA, 20 nt, Human
uaaaaugacauuaacugaua

SEQ ID NO: 1304102 - RNA, 20 nt, Human
uccaaaauaaccagaaaaga

SEQ ID NO: 1304103 - RNA, 23 nt, Human
ucccaaaauugacuaauccaaaa

SEQ ID NO: 1304104 - RNA, 19 nt, Human
uccccgaaaaaucucauga

SEQ ID NO: 1304105 - RNA, 20 nt, Human
ucuaaaaaaucuccaucuuu

SEQ ID NO: 1304106 - RNA, 24 nt, Human
ugagcuuccugcauuucucuuuuc

SEQ ID NO: 1304107 - RNA, 22 nt, Human
ugcaaagccugcuacugccccc

SEQ ID NO: 1304108 - RNA, 22 nt, Human
ugcaauuagcaaagaggaaaug

SEQ ID NO: 1304109 - RNA, 20 nt, Human
uggaagagaucugcuaagca

SEQ ID NO: 1304110 - RNA, 21 nt, Human
uggaaggcuguuuuacaagag

SEQ ID NO: 1304111 - RNA, 23 nt, Human
uggauuaucuagcauguuaguuu

SEQ ID NO: 1304112 - RNA, 22 nt, Human
uuagcgaccauuuuguuuuucc

SEQ ID NO: 1304113 - RNA, 27 nt, Human
uucaaagcauuauuggugcaauuagca

SEQ ID NO: 1304114 - RNA, 20 nt, Human
uucaccuccuuguuguaugg

SEQ ID NO: 1304115 - RNA, 21 nt, Human
uuccuagguugacucuuauau

SEQ ID NO: 1304116 - RNA, 23 nt, Human
uuccugcauuucucuuuucuuga

SEQ ID NO: 1304117 - RNA, 22 nt, Human
uuggugcaauuagcaaagagga

SEQ ID NO: 1304118 - RNA, 20 nt, Human
uugugugcuuccuguuugcu

SEQ ID NO: 1304119 - RNA, 23 nt, Human
uuucuugaaaaaucagugcuuga

SEQ ID NO: 1304120 - RNA, 18 nt, Human
uuuuuccugcuuucucuc

SEQ ID NO: 1304121 - RNA, 26 nt, Human
caguagaaauggaaucagaaaacaua

SEQ ID NO: 1304122 - RNA, 25 nt, Human
cuaaauguguggaaaacugcagaca

SEQ ID NO: 1304123 - RNA, 22 nt, Human
ucagaaaacauauuaacuuuag

SEQ ID NO: 1304124 - RNA, 21 nt, Human
uucaucugaaacauugauugu

SEQ ID NO: 1304125 - RNA, 20 nt, Human
aaaaggaacagggaaguugc

SEQ ID NO: 1304126 - RNA, 22 nt, Human
agcagagugcaggacaguccag

SEQ ID NO: 1304127 - RNA, 22 nt, Human
aggaacaguuggaaagccaaag

SEQ ID NO: 1304128 - RNA, 26 nt, Human
aggaacaguuggaaagccaaagagac

SEQ ID NO: 1304129 - RNA, 18 nt, Human
aggagccgcgcuccccgc

SEQ ID NO: 1304130 - RNA, 19 nt, Human
agggaaccccggaaggagc

SEQ ID NO: 1304131 - RNA, 21 nt, Human
caaacugcagagcccaggcaa

SEQ ID NO: 1304132 - RNA, 21 nt, Human
cacggucgccugugcccgggc

SEQ ID NO: 1304133 - RNA, 19 nt, Human
cacuaaaguugagcagagu

SEQ ID NO: 1304134 - RNA, 18 nt, Human
cccgcccuccaguaaggc

SEQ ID NO: 1304135 - RNA, 19 nt, Human
ccgcgccaguuaauggcug

SEQ ID NO: 1304136 - RNA, 23 nt, Human
ccugugcccgggcaccccggagc

SEQ ID NO: 1304137 - RNA, 21 nt, Human
cgugcggugcucccacauccu

SEQ ID NO: 1304138 - RNA, 21 nt, Human
cuacccggaggcgcugggcgg

SEQ ID NO: 1304139 - RNA, 19 nt, Human
cuccacggucgccugugcc

SEQ ID NO: 1304140 - RNA, 22 nt, Human
cugggcugugcgccccgccggc

SEQ ID NO: 1304141 - RNA, 22 nt, Human
cuuugguucccacccgcccucc

SEQ ID NO: 1304142 - RNA, 26 nt, Human
gagcaaagcaacguuuaugaaaagga

SEQ ID NO: 1304143 - RNA, 20 nt, Human
gcaaccgcugggcugugcgc

SEQ ID NO: 1304144 - RNA, 22 nt, Human
gccggcgccgguaggagccgcg

SEQ ID NO: 1304145 - RNA, 23 nt, Human
gccggcgccgguaggagccgcgc

SEQ ID NO: 1304146 - RNA, 21 nt, Human
gcugugcgccccgccggcgcc

SEQ ID NO: 1304147 - RNA, 21 nt, Human
ggaacagggaaguugcaugga

SEQ ID NO: 1304148 - RNA, 22 nt, Human
uccucugagagcaagaggcaga

SEQ ID NO: 1304149 - RNA, 19 nt, Human
uccuggccucuccucucca

SEQ ID NO: 1304150 - RNA, 23 nt, Human
ugagagcaagaggcagauggugc

SEQ ID NO: 1304151 - RNA, 20 nt, Human
ugagaggaggaaaacugaga

SEQ ID NO: 1304152 - RNA, 24 nt, Human
uggaguaaacucuacugagaggag

SEQ ID NO: 1304153 - RNA, 19 nt, Human
cagaauuggaacagaagca

SEQ ID NO: 1304154 - RNA, 19 nt, Human
cauuuaaaaaaucucuaaa

SEQ ID NO: 1304155 - RNA, 21 nt, Human
cucacauuuauaucaauuuuu

SEQ ID NO: 1304156 - RNA, 20 nt, Human
ucagaauuggaacagaagca

SEQ ID NO: 1304157 - RNA, 24 nt, Human
uuaaaaaaucucuaaaucucuuua

SEQ ID NO: 1304158 - RNA, 22 nt, Human
aucagcuuccuuugaugauaac

SEQ ID NO: 1304159 - RNA, 21 nt, Human
cgguugcuauuaaauuccuuc

SEQ ID NO: 1304160 - RNA, 23 nt, Human
uaacuugcaauuucaauacuccg

SEQ ID NO: 1304161 - RNA, 21 nt, Human
ugccagaaaaaugugcuauga

SEQ ID NO: 1304162 - RNA, 22 nt, Human
uucaaguguucuucaaucucag

SEQ ID NO: 1304163 - RNA, 19 nt, Human
aaauagccuguguguaaag

SEQ ID NO: 1304164 - RNA, 27 nt, Human
cacagaauacaaacucagacccuuuga

SEQ ID NO: 1304165 - RNA, 27 nt, Human
cgagcucuuccacucgucucaccacac

SEQ ID NO: 1304166 - RNA, 23 nt, Human
guacaacaaagacagcuuuuuga

SEQ ID NO: 1304167 - RNA, 22 nt, Human
gucucaccacacuagagacugc

SEQ ID NO: 1304168 - RNA, 20 nt, Human
uaaguugcuguaugugggcc

SEQ ID NO: 1304169 - RNA, 20 nt, Human
uauuuaugauuacccagcua

SEQ ID NO: 1304170 - RNA, 19 nt, Human
ucagacccuuugauccacu

SEQ ID NO: 1304171 - RNA, 21 nt, Human
uccacacaggaguuucaauuu

SEQ ID NO: 1304172 - RNA, 19 nt, Human
ucuuccacucgucucacca

SEQ ID NO: 1304173 - RNA, 21 nt, Human
uuaguaguacaacaaagacag

SEQ ID NO: 1304174 - RNA, 28 nt, Human
uuaguaguacaacaaagacagcuuuuuu

SEQ ID NO: 1304175 - RNA, 20 nt, Human
uucaccggcagcuucgcuaa

SEQ ID NO: 1304176 - RNA, 28 nt, Human
aaacagagagagagcacggcauaccugg

SEQ ID NO: 1304177 - RNA, 18 nt, Human
accagcacugugcccauc

SEQ ID NO: 1304178 - RNA, 22 nt, Human
accuccaacuccaguaggccac

SEQ ID NO: 1304179 - RNA, 27 nt, Human
agagcacggcauaccugggcacaccag

SEQ ID NO: 1304180 - RNA, 19 nt, Human
aggcacugaauuuuuuuuu

SEQ ID NO: 1304181 - RNA, 24 nt, Human
aguauucagggcaaaaucuaugca

SEQ ID NO: 1304182 - RNA, 20 nt, Human
augagguaaagacccgaaac

SEQ ID NO: 1304183 - RNA, 18 nt, Human
auugcuauaacucuuagg

SEQ ID NO: 1304184 - RNA, 24 nt, Human
caaaaauagauucagucucuccuu

SEQ ID NO: 1304185 - RNA, 23 nt, Human
caaaucccaaaauacucugggag

SEQ ID NO: 1304186 - RNA, 21 nt, Human
caccacuggaaacagagagag

SEQ ID NO: 1304187 - RNA, 22 nt, Human
caccacuggaaacagagagaga

SEQ ID NO: 1304188 - RNA, 26 nt, Human
cacuggaaacagagagagagcacggc

SEQ ID NO: 1304189 - RNA, 21 nt, Human
cauguuguucaaaucccaaaa

SEQ ID NO: 1304190 - RNA, 21 nt, Human
ccagaaccagcacugugccca

SEQ ID NO: 1304191 - RNA, 19 nt, Human
cugugagaccuccaacucc

SEQ ID NO: 1304192 - RNA, 23 nt, Human
gaaaauaaauccuuuuucaugga

SEQ ID NO: 1304193 - RNA, 20 nt, Human
gccuuaaaauuaccaccacu

SEQ ID NO: 1304194 - RNA, 22 nt, Human
ggagauaggggccaaaaaaaga

SEQ ID NO: 1304195 - RNA, 24 nt, Human
ggccuuaaaauuaccaccacugga

SEQ ID NO: 1304196 - RNA, 21 nt, Human
uaaccauguuguucaaauccc

SEQ ID NO: 1304197 - RNA, 22 nt, Human
uaaucaaaauaggauuuuuaca

SEQ ID NO: 1304198 - RNA, 23 nt, Human
uacuuuuagcuucaggauuaacc

SEQ ID NO: 1304199 - RNA, 19 nt, Human
ucucuucuccccagggagc

SEQ ID NO: 1304200 - RNA, 30 nt, Human
ucuucuggugcugcugugagaccuccaacu

SEQ ID NO: 1304201 - RNA, 18 nt, Human
ugaauauucucuucuccc

SEQ ID NO: 1304202 - RNA, 20 nt, Human
ugagaaggauuagcauaaua

SEQ ID NO: 1304203 - RNA, 18 nt, Human
ugagguaaagacccgaaa

SEQ ID NO: 1304204 - RNA, 18 nt, Human
uuaccaccacuggaaaca

SEQ ID NO: 1304205 - RNA, 19 nt, Human
uuccagaaccagcacugug

SEQ ID NO: 1304206 - RNA, 21 nt, Human
aagaagccggaguugaaggcg

SEQ ID NO: 1304207 - RNA, 18 nt, Human
aagcaaagggcgaggagc

SEQ ID NO: 1304208 - RNA, 21 nt, Human
aggacggggcggauuaggggu

SEQ ID NO: 1304209 - RNA, 22 nt, Human
aggggcucacgccugaucucgg

SEQ ID NO: 1304210 - RNA, 19 nt, Human
agugcggggacagccaggu

SEQ ID NO: 1304211 - RNA, 19 nt, Human
caacccgaagaaaucgccc

SEQ ID NO: 1304212 - RNA, 19 nt, Human
cagagguaagcuguacccc

SEQ ID NO: 1304213 - RNA, 21 nt, Human
cccgaagaaaucgcccucuuu

SEQ ID NO: 1304214 - RNA, 21 nt, Human
ccgcuucuccccacacagauc

SEQ ID NO: 1304215 - RNA, 19 nt, Human
cucacgccugaucucggac

SEQ ID NO: 1304216 - RNA, 19 nt, Human
gagugcggggacagccagg

SEQ ID NO: 1304217 - RNA, 20 nt, Human
gaguugaaggcgcgaacgca

SEQ ID NO: 1304218 - RNA, 20 nt, Human
gcauccucgccuucgggaga

SEQ ID NO: 1304219 - RNA, 25 nt, Human
gggcgaggagcccccgcuggcagcc

SEQ ID NO: 1304220 - RNA, 23 nt, Human
ggggaacugaagaagccggaguu

SEQ ID NO: 1304221 - RNA, 19 nt, Human
uaaggcagggaccucgagc

SEQ ID NO: 1304222 - RNA, 19 nt, Human
uagcuccccagggaggggc

SEQ ID NO: 1304223 - RNA, 24 nt, Human
uaggggucuggcagggugggaggg

SEQ ID NO: 1304224 - RNA, 25 nt, Human
ucggagugcggggacagccaggugu

SEQ ID NO: 1304225 - RNA, 21 nt, Human
uggcauccucgccuucgggag

SEQ ID NO: 1304226 - RNA, 19 nt, Human
ugggaggggcucacgccug

SEQ ID NO: 1304227 - RNA, 24 nt, Human
ugguugaguggagcugaguccuuu

SEQ ID NO: 1304228 - RNA, 20 nt, Human
uguaccccggauuguggcau

SEQ ID NO: 1304229 - RNA, 22 nt, Human
uuguggcauccucgccuucggg

SEQ ID NO: 1304230 - RNA, 24 nt, Human
aaaagacagaaaacaaaaaugagc

SEQ ID NO: 1304231 - RNA, 24 nt, Human
aacaaaaaugagcuuuaaguaaac

SEQ ID NO: 1304232 - RNA, 20 nt, Human
aaggaauauaccaaaagagc

SEQ ID NO: 1304233 - RNA, 25 nt, Human
aaugagcuuuaaguaaacaaaacua

SEQ ID NO: 1304234 - RNA, 24 nt, Human
acagaaaacaaaaaugagcuuuaa

SEQ ID NO: 1304235 - RNA, 18 nt, Human
acuuuuauccugaacugg

SEQ ID NO: 1304236 - RNA, 25 nt, Human
agaaaaagaaaaauguuggauaaaa

SEQ ID NO: 1304237 - RNA, 28 nt, Human
agacagaaaacaaaaaugaggggacccc

SEQ ID NO: 1304238 - RNA, 20 nt, Human
augccuucauacauaucuug

SEQ ID NO: 1304239 - RNA, 20 nt, Human
auuccauugucucuuccccu

SEQ ID NO: 1304240 - RNA, 23 nt, Human
auuccauugucucuuccccucca

SEQ ID NO: 1304241 - RNA, 22 nt, Human
caagugacauacaaagagaaug

SEQ ID NO: 1304242 - RNA, 28 nt, Human
cagcaaacuuuuauccugaacuggguuc

SEQ ID NO: 1304243 - RNA, 20 nt, Human
cagguaggaaaaaaaauguu

SEQ ID NO: 1304244 - RNA, 23 nt, Human
caguaaauagaagccauuucugu

SEQ ID NO: 1304245 - RNA, 21 nt, Human
cuauaagauaacaauguccaa

SEQ ID NO: 1304246 - RNA, 21 nt, Human
cucaggaauaaaaucaucucc

SEQ ID NO: 1304247 - RNA, 22 nt, Human
gaaaaaauauuuacacagauua

SEQ ID NO: 1304248 - RNA, 20 nt, Human
gaauaaucagaauugaccug

SEQ ID NO: 1304249 - RNA, 19 nt, Human
uaaauagaagccauuucug

SEQ ID NO: 1304250 - RNA, 21 nt, Human
uaacaaacuauaagauaacaa

SEQ ID NO: 1304251 - RNA, 24 nt, Human
uaacaauguccaaaauuugaaacc

SEQ ID NO: 1304252 - RNA, 19 nt, Human
ucagagggauagaucauuc

SEQ ID NO: 1304253 - RNA, 19 nt, Human
uccaagugacauacaaaga

SEQ ID NO: 1304254 - RNA, 21 nt, Human
uccauugucucuuccccucca

SEQ ID NO: 1304255 - RNA, 18 nt, Human
ucuccuggcagcaaacuu

SEQ ID NO: 1304256 - RNA, 28 nt, Human
ucuccuggcagcaaacuuuuauccugag

SEQ ID NO: 1304257 - RNA, 23 nt, Human
ucucuuccccuccacucucucaa

SEQ ID NO: 1304258 - RNA, 28 nt, Human
ugaaaaauauaauccaagugacauacaa

SEQ ID NO: 1304259 - RNA, 23 nt, Human
uggauaaaaccuuaaaaguagaa

SEQ ID NO: 1304260 - RNA, 21 nt, Human
uggcagcaaacuuuuauccug

SEQ ID NO: 1304261 - RNA, 23 nt, Human
uucuucuuuacaucaagccuuaa

SEQ ID NO: 1304262 - RNA, 22 nt, Human
uuuaaaauaaauauuaucagag

SEQ ID NO: 1304263 - RNA, 20 nt, Human
uuuaaguaaacaaaacuaca

SEQ ID NO: 1304264 - RNA, 26 nt, Human
aaaacagaaugaaaauugugaggccc

SEQ ID NO: 1304265 - RNA, 26 nt, Human
aaacagaaugaaaauugugaggccca

SEQ ID NO: 1304266 - RNA, 22 nt, Human
aagcauacagucagaauaagcc

SEQ ID NO: 1304267 - RNA, 18 nt, Human
agaaaacagaaugaaaau

SEQ ID NO: 1304268 - RNA, 24 nt, Human
agcagaaaugaaaauauauaguuu

SEQ ID NO: 1304269 - RNA, 22 nt, Human
aggaaaugcauuuuuuucucuc

SEQ ID NO: 1304270 - RNA, 18 nt, Human
aggaaucagaguugcauu

SEQ ID NO: 1304271 - RNA, 20 nt, Human
aggaaucagaguugcauuuu

SEQ ID NO: 1304272 - RNA, 23 nt, Human
aggcccaaggcagcuagcagcag

SEQ ID NO: 1304273 - RNA, 19 nt, Human
caaggcagcuagcagcaga

SEQ ID NO: 1304274 - RNA, 21 nt, Human
caguuuauugaaaaggaugau

SEQ ID NO: 1304275 - RNA, 19 nt, Human
ccaguccaguuucuuucca

SEQ ID NO: 1304276 - RNA, 21 nt, Human
gaauaagccuaucuaaggucc

SEQ ID NO: 1304277 - RNA, 21 nt, Human
gcagaaaugaaaauauauagu

SEQ ID NO: 1304278 - RNA, 20 nt, Human
guugaugguggugaugggcc

SEQ ID NO: 1304279 - RNA, 18 nt, Human
uaaggucccuugcugcaa

SEQ ID NO: 1304280 - RNA, 23 nt, Human
uagaaaagaugaaugcuacugug

SEQ ID NO: 1304281 - RNA, 25 nt, Human
uagcagcagaaaugaaaauauauag

SEQ ID NO: 1304282 - RNA, 23 nt, Human
uaguugaugguggugaugggcca

SEQ ID NO: 1304283 - RNA, 19 nt, Human
uaugcaaaaugaauacagu

SEQ ID NO: 1304284 - RNA, 23 nt, Human
ucuaaggucccuugcugcaaggu

SEQ ID NO: 1304285 - RNA, 21 nt, Human
ugguggucucaaaacuuaaaa

SEQ ID NO: 1304286 - RNA, 22 nt, Human
ugguggugaugggccacagugu

SEQ ID NO: 1304287 - RNA, 25 nt, Human
ugguggugaugggccacaguguggu

SEQ ID NO: 1304288 - RNA, 18 nt, Human
uuaauuuuggggaaaaaa

SEQ ID NO: 1304289 - RNA, 22 nt, Human
uugaauggagagaggaaaggua

SEQ ID NO: 1304290 - RNA, 21 nt, Human
uugaugguggugaugggccac

SEQ ID NO: 1304291 - RNA, 22 nt, Human
uuuauugaaaaggaugauacag

SEQ ID NO: 1304292 - RNA, 23 nt, Human
uuuccaaacucacauuuguugaa

SEQ ID NO: 1304293 - RNA, 18 nt, Human
uuuuggggaaaaaagcaa

SEQ ID NO: 1304294 - RNA, 19 nt, Human
uggcagcauuccuuauaau

SEQ ID NO: 1304295 - RNA, 20 nt, Human
aacacaggugaagcucauca

SEQ ID NO: 1304296 - RNA, 23 nt, Human
aacacaggugaagcucaucaucu

SEQ ID NO: 1304297 - RNA, 21 nt, Human
caagcaacagagaccacagca

SEQ ID NO: 1304298 - RNA, 21 nt, Human
caccagcagcuguccguaacc

SEQ ID NO: 1304299 - RNA, 21 nt, Human
cacgcaagcaacagagaccac

SEQ ID NO: 1304300 - RNA, 20 nt, Human
cacggcucagccgucgcccc

SEQ ID NO: 1304301 - RNA, 22 nt, Human
ccagcagcuguccguaaccaaa

SEQ ID NO: 1304302 - RNA, 21 nt, Human
cccacggcucagccgucgccc

SEQ ID NO: 1304303 - RNA, 24 nt, Human
ccguaaccaaaaccaccuuccuca

SEQ ID NO: 1304304 - RNA, 26 nt, Human
cgaaaaccgagcacgcaagcaacaga

SEQ ID NO: 1304305 - RNA, 18 nt, Human
cgagcacgcaagcaacag

SEQ ID NO: 1304306 - RNA, 19 nt, Human
cgagcacgcaagcaacaga

SEQ ID NO: 1304307 - RNA, 21 nt, Human
cguaaccaaaaccaccuuccu

SEQ ID NO: 1304308 - RNA, 22 nt, Human
uccgagacugacccagcggcuc

SEQ ID NO: 1304309 - RNA, 22 nt, Human
ugacccagcggcuccacccacg

SEQ ID NO: 1304310 - RNA, 19 nt, Human
aaacagaagaaaaagccuc

SEQ ID NO: 1304311 - RNA, 26 nt, Human
aaacagaagaaaaagccucaaaucug

SEQ ID NO: 1304312 - RNA, 27 nt, Human
aaacagaagaaaaagccucaaaucuga

SEQ ID NO: 1304313 - RNA, 23 nt, Human
aagcacucuucugggucaauguu

SEQ ID NO: 1304314 - RNA, 20 nt, Human
acagagaaaaggaacccaga

SEQ ID NO: 1304315 - RNA, 21 nt, Human
accuucagaagccaagaggaa

SEQ ID NO: 1304316 - RNA, 22 nt, Human
agaaacagaagaaaaagccuca

SEQ ID NO: 1304317 - RNA, 24 nt, Human
agguagccccaaaacuccagcuga

SEQ ID NO: 1304318 - RNA, 21 nt, Human
augcuuucauuuuguacugug

SEQ ID NO: 1304319 - RNA, 19 nt, Human
caagaggaaagcacucuuc

SEQ ID NO: 1304320 - RNA, 18 nt, Human
cagaagaaaaagccucaa

SEQ ID NO: 1304321 - RNA, 24 nt, Human
cauuuuuauaaaaaggaaaguauu

SEQ ID NO: 1304322 - RNA, 21 nt, Human
ccaaaacuccagcugauguua

SEQ ID NO: 1304323 - RNA, 24 nt, Human
ccagaaacagaagaaaaagccuca

SEQ ID NO: 1304324 - RNA, 22 nt, Human
ccagcugauguuacaagagucu

SEQ ID NO: 1304325 - RNA, 24 nt, Human
ccccaaaacuccagcugauguuac

SEQ ID NO: 1304326 - RNA, 20 nt, Human
cugggucaauguucuucucu

SEQ ID NO: 1304327 - RNA, 20 nt, Human
cuggucccuuuugucauugu

SEQ ID NO: 1304328 - RNA, 19 nt, Human
ggaaagaucacauauuuuu

SEQ ID NO: 1304329 - RNA, 25 nt, Human
uaaggccagaaacagaagaaaaagc

SEQ ID NO: 1304330 - RNA, 25 nt, Human
uacagagaaaaggaacccagacagu

SEQ ID NO: 1304331 - RNA, 25 nt, Human
uaccuucagaagccaagaggaaagc

SEQ ID NO: 1304332 - RNA, 22 nt, Human
ucaaaaauuacaacuccgugag

SEQ ID NO: 1304333 - RNA, 27 nt, Human
ucccuuuugucauuguuucucuguaau

SEQ ID NO: 1304334 - RNA, 22 nt, Human
ucugaaaaguacuacagagaaa

SEQ ID NO: 1304335 - RNA, 18 nt, Human
ugaaaaguacuacagaga

SEQ ID NO: 1304336 - RNA, 24 nt, Human
ugaaaaguacuacagagaaaagga

SEQ ID NO: 1304337 - RNA, 18 nt, Human
ugagaguuguuuuuuauu

SEQ ID NO: 1304338 - RNA, 22 nt, Human
ugauagguagccccaaaacucc

SEQ ID NO: 1304339 - RNA, 21 nt, Human
uguccuguccuaagaggaaag

SEQ ID NO: 1304340 - RNA, 22 nt, Human
uucuuggcccauucuugccuuc

SEQ ID NO: 1304341 - RNA, 22 nt, Human
aacaaagccagucgugccugaa

SEQ ID NO: 1304342 - RNA, 21 nt, Human
acaaccucacccaacaaagcc

SEQ ID NO: 1304343 - RNA, 20 nt, Human
accacaacaaccucacccaa

SEQ ID NO: 1304344 - RNA, 22 nt, Human
accacaacaaccucacccaaca

SEQ ID NO: 1304345 - RNA, 22 nt, Human
acccaacaaagccagucgugcc

SEQ ID NO: 1304346 - RNA, 19 nt, Human
agccacaggaacaccacaa

SEQ ID NO: 1304347 - RNA, 21 nt, Human
aguaaugccaucagugggcac

SEQ ID NO: 1304348 - RNA, 19 nt, Human
caagacugaagaauuaaca

SEQ ID NO: 1304349 - RNA, 21 nt, Human
cacaacaaccucacccaacaa

SEQ ID NO: 1304350 - RNA, 19 nt, Human
caccacaacaaccucaccc

SEQ ID NO: 1304351 - RNA, 21 nt, Human
cacugcuaaugcaagacugaa

SEQ ID NO: 1304352 - RNA, 22 nt, Human
caggaacaccacaacaaccuca

SEQ ID NO: 1304353 - RNA, 22 nt, Human
caucagugggcacugcuaaugc

SEQ ID NO: 1304354 - RNA, 23 nt, Human
ccacaggaacaccacaacaaccu

SEQ ID NO: 1304355 - RNA, 19 nt, Human
ccagggugauggucuuucc

SEQ ID NO: 1304356 - RNA, 22 nt, Human
ccauucaacgaaaccuuuauua

SEQ ID NO: 1304357 - RNA, 19 nt, Human
ccuaaguuggggcaaaugg

SEQ ID NO: 1304358 - RNA, 19 nt, Human
ccugcaaagaugagccucu

SEQ ID NO: 1304359 - RNA, 19 nt, Human
cuaaugcaagacugaagaa

SEQ ID NO: 1304360 - RNA, 19 nt, Human
gacucuuucuggaugcugu

SEQ ID NO: 1304361 - RNA, 23 nt, Human
ggauacgaggaugcugcgaauca

SEQ ID NO: 1304362 - RNA, 23 nt, Human
ucacccaacaaagccagucgugc

SEQ ID NO: 1304363 - RNA, 19 nt, Human
ucaggcgcaggaccaggug

SEQ ID NO: 1304364 - RNA, 24 nt, Human
ucagggucuucacgaagaucuuca

SEQ ID NO: 1304365 - RNA, 19 nt, Human
ugaaacuuguaauuucuaa

SEQ ID NO: 1304366 - RNA, 23 nt, Human
ugcuaaugcaagacugaagaauu

SEQ ID NO: 1304367 - RNA, 21 nt, Human
ugcugcgaaucacguccagcc

SEQ ID NO: 1304368 - RNA, 20 nt, Human
uucacgaagaucuucauacc

SEQ ID NO: 1304369 - RNA, 19 nt, Human
uucauccuggaucuuggcu

SEQ ID NO: 1304370 - RNA, 20 nt, Human
uucauccuggaucuuggcuu

SEQ ID NO: 1304371 - RNA, 22 nt, Human
uuuucgauggugucacugggcu

SEQ ID NO: 1304372 - RNA, 18 nt, Human
aaaaccaaugaaaauuug

SEQ ID NO: 1304373 - RNA, 22 nt, Human
aaaaccaaugaaaauuugccau

SEQ ID NO: 1304374 - RNA, 25 nt, Human
aaaaccaaugaaaauuugccauggc

SEQ ID NO: 1304375 - RNA, 25 nt, Human
aaccaaugaaaauuugccauggccu

SEQ ID NO: 1304376 - RNA, 23 nt, Human
accaaauauuaauauucacaugu

SEQ ID NO: 1304377 - RNA, 22 nt, Human
auaaaaccaaugaaaauuugcc

SEQ ID NO: 1304378 - RNA, 20 nt, Human
caccaaauauuaauauucac

SEQ ID NO: 1304379 - RNA, 22 nt, Human
cagcagucuuucucuggcaucc

SEQ ID NO: 1304380 - RNA, 20 nt, Human
caugggaauauguauucuuu

SEQ ID NO: 1304381 - RNA, 23 nt, Human
gggaauauguauucuuucaacuc

SEQ ID NO: 1304382 - RNA, 26 nt, Human
ucagggcagguaugaucugguucaua

SEQ ID NO: 1304383 - RNA, 25 nt, Human
ucuauaaucaugaauaagauaaaac

SEQ ID NO: 1304384 - RNA, 21 nt, Human
ugaucugguucauaucaguag

SEQ ID NO: 1304385 - RNA, 20 nt, Human
ugcagcagucuuucucuggc

SEQ ID NO: 1304386 - RNA, 21 nt, Human
ugggaauauguauucuuucaa

SEQ ID NO: 1304387 - RNA, 21 nt, Human
accacagaggguaccugagac

SEQ ID NO: 1304388 - RNA, 20 nt, Human
aguaguuucuuaauuuucau

SEQ ID NO: 1304389 - RNA, 20 nt, Human
augcagugguuuuugucuau

SEQ ID NO: 1304390 - RNA, 19 nt, Human
caaauaguaguaguuucuu

SEQ ID NO: 1304391 - RNA, 23 nt, Human
caaguccaccaaagguaggcgau

SEQ ID NO: 1304392 - RNA, 18 nt, Human
cagaggguaccugagacc

SEQ ID NO: 1304393 - RNA, 21 nt, Human
cagcaguacucaauggguggu

SEQ ID NO: 1304394 - RNA, 21 nt, Human
caggaagucuauaaggucaaa

SEQ ID NO: 1304395 - RNA, 23 nt, Human
ccacugggauaauucuguuucau

SEQ ID NO: 1304396 - RNA, 24 nt, Human
cuccagcaucuucuguccaguacc

SEQ ID NO: 1304397 - RNA, 21 nt, Human
uaacccacugggauaauucug

SEQ ID NO: 1304398 - RNA, 22 nt, Human
uaccacaugugagguucauuug

SEQ ID NO: 1304399 - RNA, 23 nt, Human
uagcagcaguacucaaugggugg

SEQ ID NO: 1304400 - RNA, 22 nt, Human
uaucccuuuuuggagauaacuu

SEQ ID NO: 1304401 - RNA, 22 nt, Human
ucuuaccacuggacaggagaga

SEQ ID NO: 1304402 - RNA, 24 nt, Human
uuucuccagcaucuucuguccagu

SEQ ID NO: 1304403 - RNA, 19 nt, Human
cggagcuccucaaaggaag

SEQ ID NO: 1304404 - RNA, 21 nt, Human
guugucucuguugcuuucuuc

SEQ ID NO: 1304405 - RNA, 21 nt, Human
uagcaguauuugguuucauac

SEQ ID NO: 1304406 - RNA, 20 nt, Human
ugcuuuuuucuuuguccucc

SEQ ID NO: 1304407 - RNA, 21 nt, Human
uuaauagcaguauuugguuuc

SEQ ID NO: 1304408 - RNA, 20 nt, Human
aaaguggagaguugggggug

SEQ ID NO: 1304409 - RNA, 18 nt, Human
aacaccccuguugcauuc

SEQ ID NO: 1304410 - RNA, 18 nt, Human
acagcccagggaaggccc

SEQ ID NO: 1304411 - RNA, 18 nt, Human
agguggggcucuucacug

SEQ ID NO: 1304412 - RNA, 20 nt, Human
cacagguggaggggcuggaa

SEQ ID NO: 1304413 - RNA, 18 nt, Human
caccgugccccccaaggc

SEQ ID NO: 1304414 - RNA, 22 nt, Human
cacuuugcaccgugccccccaa

SEQ ID NO: 1304415 - RNA, 23 nt, Human
cagcacagcccagggaaggccca

SEQ ID NO: 1304416 - RNA, 22 nt, Human
cccccgcaacaccccuguugca

SEQ ID NO: 1304417 - RNA, 26 nt, Human
ccugugccugcagcacagcccaggga

SEQ ID NO: 1304418 - RNA, 25 nt, Human
gcacagcccagggaagggggaacgc

SEQ ID NO: 1304419 - RNA, 20 nt, Human
ggagaguugggggugagggg

SEQ ID NO: 1304420 - RNA, 18 nt, Human
gugaccccgagguggggc

SEQ ID NO: 1304421 - RNA, 20 nt, Human
guggagaguugggggugagg

SEQ ID NO: 1304422 - RNA, 22 nt, Human
guggagaguugggggugagggg

SEQ ID NO: 1304423 - RNA, 19 nt, Human
ugaccccgagguggggcuc

SEQ ID NO: 1304424 - RNA, 18 nt, Human
ugcccccgcaacaccccu

SEQ ID NO: 1304425 - RNA, 22 nt, Human
uggagaguugggggugaggggc

SEQ ID NO: 1304426 - RNA, 21 nt, Human
agcagaagccccaucccagga

SEQ ID NO: 1304427 - RNA, 21 nt, Human
aggcaggaggcagcucugggg

SEQ ID NO: 1304428 - RNA, 24 nt, Human
agugccaggcaggaggcagcucug

SEQ ID NO: 1304429 - RNA, 21 nt, Human
ccaggaggggaguguggcggc

SEQ ID NO: 1304430 - RNA, 24 nt, Human
ugagugagcccgggagcagaagcc

SEQ ID NO: 1304431 - RNA, 22 nt, Human
uggcggcagugccaggcaggag

SEQ ID NO: 1304432 - RNA, 18 nt, Human
uguggcggcagugccagg

SEQ ID NO: 1304433 - RNA, 19 nt, Human
aaacaggcauacaacacgc

SEQ ID NO: 1304434 - RNA, 22 nt, Human
aaacaggcauacaacacgcagc

SEQ ID NO: 1304435 - RNA, 18 nt, Human
aagagucuggcuccuggc

SEQ ID NO: 1304436 - RNA, 24 nt, Human
acacagaugcucccacguggucca

SEQ ID NO: 1304437 - RNA, 19 nt, Human
accccaccucccugcugca

SEQ ID NO: 1304438 - RNA, 21 nt, Human
accccaccucccugcugcagc

SEQ ID NO: 1304439 - RNA, 21 nt, Human
acucuauugcccaggcuggag

SEQ ID NO: 1304440 - RNA, 25 nt, Human
acucuauugcccaggcuggagugca

SEQ ID NO: 1304441 - RNA, 24 nt, Human
acuuuaugacuaaaacaggcaguc

SEQ ID NO: 1304442 - RNA, 18 nt, Human
agugcaguggugcaaucg

SEQ ID NO: 1304443 - RNA, 21 nt, Human
agugcaguggugcaaucggcu

SEQ ID NO: 1304444 - RNA, 22 nt, Human
agugcaguggugcaaucggcuc

SEQ ID NO: 1304445 - RNA, 28 nt, Human
auacaacacgcagcauaaacacacccaa

SEQ ID NO: 1304446 - RNA, 26 nt, Human
caacacgcagcauaaacacacccaaa

SEQ ID NO: 1304447 - RNA, 21 nt, Human
cagcagaaguggcacugcucc

SEQ ID NO: 1304448 - RNA, 24 nt, Human
cagggucuuacucuauugcccagg

SEQ ID NO: 1304449 - RNA, 23 nt, Human
cauaaacacacccaaaugagacu

SEQ ID NO: 1304450 - RNA, 27 nt, Human
cauacaacacgcagcauaaacacaccc

SEQ ID NO: 1304451 - RNA, 18 nt, Human
cccaccccaccucccugc

SEQ ID NO: 1304452 - RNA, 24 nt, Human
cccugcugcagcgcuagaaaaaga

SEQ ID NO: 1304453 - RNA, 20 nt, Human
gcagcauaaacacacccaaa

SEQ ID NO: 1304454 - RNA, 21 nt, Human
gcauacaacacgcagcauaaa

SEQ ID NO: 1304455 - RNA, 19 nt, Human
gcccaggcuggagugcagu

SEQ ID NO: 1304456 - RNA, 19 nt, Human
uauugcccaggcuggagug

SEQ ID NO: 1304457 - RNA, 18 nt, Human
ucacugcagccuugaacu

SEQ ID NO: 1304458 - RNA, 21 nt, Human
ucagcccagcagaaguggcac

SEQ ID NO: 1304459 - RNA, 21 nt, Human
ucccugcugcagcgcuagaaa

SEQ ID NO: 1304460 - RNA, 24 nt, Human
ucuauugcccaggcuggagugcag

SEQ ID NO: 1304461 - RNA, 21 nt, Human
ucuccgcugcaggucagccca

SEQ ID NO: 1304462 - RNA, 23 nt, Human
ucuuacucuauugcccaggcugg

SEQ ID NO: 1304463 - RNA, 24 nt, Human
ucuuacucuauugcccaggcugga

SEQ ID NO: 1304464 - RNA, 22 nt, Human
ucuuccuuggggaggaagaugg

SEQ ID NO: 1304465 - RNA, 22 nt, Human
ugcacacagaugcucccacgug

SEQ ID NO: 1304466 - RNA, 20 nt, Human
ugcaguggugcaaucggcuc

SEQ ID NO: 1304467 - RNA, 18 nt, Human
ugcccaggcuggagugca

SEQ ID NO: 1304468 - RNA, 21 nt, Human
ugcccaggcuggagugcagug

SEQ ID NO: 1304469 - RNA, 24 nt, Human
ugcccaggcuggagugcaguggug

SEQ ID NO: 1304470 - RNA, 22 nt, Human
ugcugcagcgcuagaaaaagaa

SEQ ID NO: 1304471 - RNA, 20 nt, Human
uggagugcaguggugcaauc

SEQ ID NO: 1304472 - RNA, 21 nt, Human
uggagugcaguggugcaaucg

SEQ ID NO: 1304473 - RNA, 22 nt, Human
uggagugcaguggugcaaucgg

SEQ ID NO: 1304474 - RNA, 23 nt, Human
uggcaggcgcugaggaucagcag

SEQ ID NO: 1304475 - RNA, 28 nt, Human
uggcaggcgcugaggaucagcagaucug

SEQ ID NO: 1304476 - RNA, 18 nt, Human
uggggaggaagaugggcc

SEQ ID NO: 1304477 - RNA, 22 nt, Human
uggugcaaucggcucacugcag

SEQ ID NO: 1304478 - RNA, 24 nt, Human
uuacucuauugcccaggcuggagu

SEQ ID NO: 1304479 - RNA, 24 nt, Human
uugcccaggcuggagugcaguggu

SEQ ID NO: 1304480 - RNA, 23 nt, Human
aacacauucacguaaaacucuca

SEQ ID NO: 1304481 - RNA, 22 nt, Human
cacucugccaaccuggcccacc

SEQ ID NO: 1304482 - RNA, 19 nt, Human
ccuggcccacccacagagc

SEQ ID NO: 1304483 - RNA, 21 nt, Human
uaaaacucucaaaggcggcca

SEQ ID NO: 1304484 - RNA, 23 nt, Human
uauacaacacauucacguaaaac

SEQ ID NO: 1304485 - RNA, 20 nt, Human
ugccaaccuggcccacccac

SEQ ID NO: 1304486 - RNA, 21 nt, Human
uguauacaacacauucacgua

SEQ ID NO: 1304487 - RNA, 23 nt, Human
uguauacaacacauucacguagu

SEQ ID NO: 1304488 - RNA, 24 nt, Human
uucuuugccaguguuguauacaac

SEQ ID NO: 1304489 - RNA, 18 nt, Human
aaagucacuuucagacca

SEQ ID NO: 1304490 - RNA, 23 nt, Human
aaauggccaugaaaaucaaucuu

SEQ ID NO: 1304491 - RNA, 20 nt, Human
aacacagcaaaauccugucu

SEQ ID NO: 1304492 - RNA, 20 nt, Human
aacacagcaaaauccugucu

SEQ ID NO: 1304493 - RNA, 21 nt, Human
aagcaagacauaggcacagag

SEQ ID NO: 1304494 - RNA, 22 nt, Human
aaguaaaugcaguaauggaaac

SEQ ID NO: 1304495 - RNA, 21 nt, Human
acauacaaaugaaagauacca

SEQ ID NO: 1304496 - RNA, 19 nt, Human
accagucugggcaacacag

SEQ ID NO: 1304497 - RNA, 22 nt, Human
acugcaacauuuucuaaaccca

SEQ ID NO: 1304498 - RNA, 19 nt, Human
agacugaggugggaggaug

SEQ ID NO: 1304499 - RNA, 21 nt, Human
agagauaacggaugagaaagc

SEQ ID NO: 1304500 - RNA, 24 nt, Human
agagauacaaacuuuaugaccucc

SEQ ID NO: 1304501 - RNA, 18 nt, Human
agagcaacucacaaggaa

SEQ ID NO: 1304502 - RNA, 19 nt, Human
agauacaaacuuuaugacc

SEQ ID NO: 1304503 - RNA, 19 nt, Human
agauauggaaauagggaac

SEQ ID NO: 1304504 - RNA, 21 nt, Human
agaugacaaauauacaaggca

SEQ ID NO: 1304505 - RNA, 23 nt, Human
agcuaggugugguggcaugugcc

SEQ ID NO: 1304506 - RNA, 20 nt, Human
aggaguuugagaccagucug

SEQ ID NO: 1304507 - RNA, 19 nt, Human
aggcaaagcagggagucca

SEQ ID NO: 1304508 - RNA, 20 nt, Human
aggcauugaagccugacacu

SEQ ID NO: 1304509 - RNA, 19 nt, Human
aggcuucaauccccuccca

SEQ ID NO: 1304510 - RNA, 24 nt, Human
agucugggcaacacagcaaaaucc

SEQ ID NO: 1304511 - RNA, 24 nt, Human
aucuguccuuuuuuuuuuuuuuuu

SEQ ID NO: 1304512 - RNA, 28 nt, Human
aucuguccuuuuuuuuuuuuuuuuuuuu

SEQ ID NO: 1304513 - RNA, 22 nt, Human
auugugcuuucuuccacagaac

SEQ ID NO: 1304514 - RNA, 22 nt, Human
auugugcuuucuuccacagggg

SEQ ID NO: 1304515 - RNA, 21 nt, Human
caaaaaagcaagacauaggca

SEQ ID NO: 1304516 - RNA, 19 nt, Human
caacacagcaaaauccugu

SEQ ID NO: 1304517 - RNA, 21 nt, Human
caacacagcaaaauccugucu

SEQ ID NO: 1304518 - RNA, 21 nt, Human
caagguggaaucccagaggcc

SEQ ID NO: 1304519 - RNA, 24 nt, Human
cacagcaaaauccugucuuaaaaa

SEQ ID NO: 1304520 - RNA, 19 nt, Human
cacagcauucuucuaucuc

SEQ ID NO: 1304521 - RNA, 18 nt, Human
caccauuuaaaaacuucc

SEQ ID NO: 1304522 - RNA, 22 nt, Human
cagcaaaaaagcaagacauagg

SEQ ID NO: 1304523 - RNA, 25 nt, Human
cagcaaaaaagcaagacauaggcac

SEQ ID NO: 1304524 - RNA, 26 nt, Human
cagcaaaaaagcaagacauaggcaca

SEQ ID NO: 1304525 - RNA, 21 nt, Human
cagccucuacccaucaaucau

SEQ ID NO: 1304526 - RNA, 22 nt, Human
cauucaaaucccuuacuuguuc

SEQ ID NO: 1304527 - RNA, 21 nt, Human
ccaacacagggcacuugaaga

SEQ ID NO: 1304528 - RNA, 18 nt, Human
ccacaaaagacaggcugg

SEQ ID NO: 1304529 - RNA, 20 nt, Human
ccacagaugacaaauauaca

SEQ ID NO: 1304530 - RNA, 24 nt, Human
ccaucuguccuuuuuuuuuuuuuu

SEQ ID NO: 1304531 - RNA, 18 nt, Human
cccagagacacacucuca

SEQ ID NO: 1304532 - RNA, 22 nt, Human
cccaggucuccaaaucacuuuc

SEQ ID NO: 1304533 - RNA, 21 nt, Human
ccccagagacacacucucacc

SEQ ID NO: 1304534 - RNA, 21 nt, Human
cccccagagacacacucucac

SEQ ID NO: 1304535 - RNA, 21 nt, Human
cccgaagugccugggaacugg

SEQ ID NO: 1304536 - RNA, 18 nt, Human
ccucucagccacccucuc

SEQ ID NO: 1304537 - RNA, 18 nt, Human
ccucuuguccggggaacc

SEQ ID NO: 1304538 - RNA, 21 nt, Human
ccugcugucugguuccacuac

SEQ ID NO: 1304539 - RNA, 24 nt, Human
ccuuuugugaggugacgacgaagu

SEQ ID NO: 1304540 - RNA, 24 nt, Human
ccuuuuuuuuuuuuuuuuuuuuaa

SEQ ID NO: 1304541 - RNA, 24 nt, Human
cgaagugaaaucgccuacucuguu

SEQ ID NO: 1304542 - RNA, 21 nt, Human
cucagggaucauugugcgggu

SEQ ID NO: 1304543 - RNA, 23 nt, Human
cugcagauugggaauaauugugc

SEQ ID NO: 1304544 - RNA, 21 nt, Human
cuggaggcuucaauccccucc

SEQ ID NO: 1304545 - RNA, 21 nt, Human
cugggcaacacagcaaaaucc

SEQ ID NO: 1304546 - RNA, 21 nt, Human
cuguaaucucugaaggccucc

SEQ ID NO: 1304547 - RNA, 23 nt, Human
cuguccuuuuuuuuuuuuuuuuu

SEQ ID NO: 1304548 - RNA, 18 nt, Human
cuuucagaccaauggcuu

SEQ ID NO: 1304549 - RNA, 19 nt, Human
gaacucagcaaaaaagcaa

SEQ ID NO: 1304550 - RNA, 19 nt, Human
gacagaggaauugcuuuuu

SEQ ID NO: 1304551 - RNA, 24 nt, Human
gaucucuugaacccaggaguuuga

SEQ ID NO: 1304552 - RNA, 23 nt, Human
gcaguaauggaaacaguaagaac

SEQ ID NO: 1304553 - RNA, 21 nt, Human
gccacauacaaaugaaagaua

SEQ ID NO: 1304554 - RNA, 26 nt, Human
gccacccucucgcuucucauggauuc

SEQ ID NO: 1304555 - RNA, 24 nt, Human
gccugggaacuggaggccucuguc

SEQ ID NO: 1304556 - RNA, 22 nt, Human
ggaaccuuggccaacacagggc

SEQ ID NO: 1304557 - RNA, 24 nt, Human
ggggaaccuuggccaacacagggc

SEQ ID NO: 1304558 - RNA, 22 nt, Human
gguccacaaaagacaggcuggu

SEQ ID NO: 1304559 - RNA, 18 nt, Human
guccuguaaucucugaag

SEQ ID NO: 1304560 - RNA, 20 nt, Human
uaaaacaaugguugaagagc

SEQ ID NO: 1304561 - RNA, 23 nt, Human
uaaaauaaaugguuguaaggagc

SEQ ID NO: 1304562 - RNA, 21 nt, Human
uaaaauguuccauacaaggca

SEQ ID NO: 1304563 - RNA, 27 nt, Human
uaaacccaucuguccuuuuuuuuuuuu

SEQ ID NO: 1304564 - RNA, 20 nt, Human
uaaagauagagauacaaacu

SEQ ID NO: 1304565 - RNA, 19 nt, Human
uaaaucucuagcugccaca

SEQ ID NO: 1304566 - RNA, 20 nt, Human
uaaaugaauccuauuauugc

SEQ ID NO: 1304567 - RNA, 22 nt, Human
uagaagaaaagcauaguaucau

SEQ ID NO: 1304568 - RNA, 18 nt, Human
uauuucauucaaaucccu

SEQ ID NO: 1304569 - RNA, 19 nt, Human
ucaaaucccuuacuuguuc

SEQ ID NO: 1304570 - RNA, 21 nt, Human
ucauucaaaucccuuacuugu

SEQ ID NO: 1304571 - RNA, 23 nt, Human
uccaacaucucuauugaaugaga

SEQ ID NO: 1304572 - RNA, 20 nt, Human
uccacuaccugguaucuggu

SEQ ID NO: 1304573 - RNA, 23 nt, Human
uccuauuauugcaaaccuuugau

SEQ ID NO: 1304574 - RNA, 18 nt, Human
uccuuuuuuuuuuuuuuu

SEQ ID NO: 1304575 - RNA, 18 nt, Human
uccuuuuuuuuuuuuuuu

SEQ ID NO: 1304576 - RNA, 20 nt, Human
ucucauggauucaccuggag

SEQ ID NO: 1304577 - RNA, 24 nt, Human
ucucugaaggccuccauuuccccc

SEQ ID NO: 1304578 - RNA, 23 nt, Human
ucucuugaacccaggaguuugag

SEQ ID NO: 1304579 - RNA, 18 nt, Human
ucuguccuuuuuuuuuuu

SEQ ID NO: 1304580 - RNA, 24 nt, Human
ucuugaacccaggaguuugagacc

SEQ ID NO: 1304581 - RNA, 23 nt, Human
ugaacccaggaguuugagaccag

SEQ ID NO: 1304582 - RNA, 21 nt, Human
ugaagauaagagauaacggau

SEQ ID NO: 1304583 - RNA, 25 nt, Human
ugaagauaagagauaacggaugaga

SEQ ID NO: 1304584 - RNA, 18 nt, Human
ugacaauggaauugauga

SEQ ID NO: 1304585 - RNA, 24 nt, Human
ugaggugggaggauggaucucuug

SEQ ID NO: 1304586 - RNA, 24 nt, Human
ugcaaucaugccaaauggccauga

SEQ ID NO: 1304587 - RNA, 18 nt, Human
ugccugggaacuggaggc

SEQ ID NO: 1304588 - RNA, 23 nt, Human
ugccugucaucccagcuuucagg

SEQ ID NO: 1304589 - RNA, 23 nt, Human
uggaucucuugaacccaggaguu

SEQ ID NO: 1304590 - RNA, 24 nt, Human
uggaucucuugaacccaggaguuu

SEQ ID NO: 1304591 - RNA, 24 nt, Human
uggcaugugccugucaucccagcu

SEQ ID NO: 1304592 - RNA, 22 nt, Human
uggccaaacacuucuuuguauc

SEQ ID NO: 1304593 - RNA, 21 nt, Human
ugggaaaguuuaauuuuuugc

SEQ ID NO: 1304594 - RNA, 26 nt, Human
ugggaggauggaucucuugaacccag

SEQ ID NO: 1304595 - RNA, 21 nt, Human
ugguccuucucuauguucuga

SEQ ID NO: 1304596 - RNA, 22 nt, Human
uguccuuuuuuuuuuuuuuuuu

SEQ ID NO: 1304597 - RNA, 23 nt, Human
uguggccaaacacuucuuuguau

SEQ ID NO: 1304598 - RNA, 24 nt, Human
uguggccaaacacuucuuuguauc

SEQ ID NO: 1304599 - RNA, 23 nt, Human
uuaaaagagcacuugaugcccag

SEQ ID NO: 1304600 - RNA, 20 nt, Human
uuaaggaccugcugucuggu

SEQ ID NO: 1304601 - RNA, 20 nt, Human
uuacuaauugaccacagcau

SEQ ID NO: 1304602 - RNA, 22 nt, Human
uuauauauagugcuuuguccuu

SEQ ID NO: 1304603 - RNA, 19 nt, Human
uucacugauagaagaaaag

SEQ ID NO: 1304604 - RNA, 20 nt, Human
uucacugcaacauuuucuaa

SEQ ID NO: 1304605 - RNA, 23 nt, Human
uucacugcaacauuuucuaaacc

SEQ ID NO: 1304606 - RNA, 18 nt, Human
uucaggagacugaggugg

SEQ ID NO: 1304607 - RNA, 18 nt, Human
uuccagcacugucuuagg

SEQ ID NO: 1304608 - RNA, 24 nt, Human
uucccauaggaucucugguuuuau

SEQ ID NO: 1304609 - RNA, 23 nt, Human
uugcucccuaacuuuguucugga

SEQ ID NO: 1304610 - RNA, 22 nt, Human
uugguccuucucuauguucuga

SEQ ID NO: 1304611 - RNA, 22 nt, Human
uuucagaccaauggcuuuagca

SEQ ID NO: 1304612 - RNA, 21 nt, Human
uuuuccuuccuuggaggucuu

SEQ ID NO: 1304613 - RNA, 22 nt, Human
uuuuuuuuuuuuaaaugaaucc

SEQ ID NO: 1304614 - RNA, 23 nt, Human
uuuuuuuuuuuuuuuuuuaaaug

SEQ ID NO: 1304615 - RNA, 18 nt, Human
aaugcuggcaccgacaua

SEQ ID NO: 1304616 - RNA, 19 nt, Human
acugugugccuggcacugu

SEQ ID NO: 1304617 - RNA, 19 nt, Human
agaggcccuuggagaagcc

SEQ ID NO: 1304618 - RNA, 24 nt, Human
ccccacccaccgaaggguuuacaa

SEQ ID NO: 1304619 - RNA, 23 nt, Human
cugcugucacaaugcuggcaccg

SEQ ID NO: 1304620 - RNA, 20 nt, Human
cugucacaaugcuggcaccg

SEQ ID NO: 1304621 - RNA, 25 nt, Human
gugagaucggacacacacacacaaa

SEQ ID NO: 1304622 - RNA, 19 nt, Human
uacaauauacuugugagau

SEQ ID NO: 1304623 - RNA, 18 nt, Human
uaggauauggcccccacc

SEQ ID NO: 1304624 - RNA, 18 nt, Human
uauggcccccacccaccg

SEQ ID NO: 1304625 - RNA, 19 nt, Human
ugcuggcaccgacauaaga

SEQ ID NO: 1304626 - RNA, 21 nt, Human
ugcugucacaaugcuggcacc

SEQ ID NO: 1304627 - RNA, 19 nt, Human
aacaaaaaugaagcgucug

SEQ ID NO: 1304628 - RNA, 24 nt, Human
aacaacaaaaaugaagcgucugga

SEQ ID NO: 1304629 - RNA, 22 nt, Human
aacacagugcacgcgccgucuc

SEQ ID NO: 1304630 - RNA, 19 nt, Human
aacccaggaccaggaacac

SEQ ID NO: 1304631 - RNA, 23 nt, Human
acaacaaaaaugaagcgucugga

SEQ ID NO: 1304632 - RNA, 24 nt, Human
accucacccucuuugugcccugcc

SEQ ID NO: 1304633 - RNA, 18 nt, Human
agcccaagagaguggcga

SEQ ID NO: 1304634 - RNA, 19 nt, Human
augaagcgucuggaaggcc

SEQ ID NO: 1304635 - RNA, 22 nt, Human
caccagucugcuacgggucccc

SEQ ID NO: 1304636 - RNA, 21 nt, Human
cagcccaaauugagccagaga

SEQ ID NO: 1304637 - RNA, 23 nt, Human
caggaccaggaacacagugcacg

SEQ ID NO: 1304638 - RNA, 24 nt, Human
ccagagaaaaagaucgcaaagacc

SEQ ID NO: 1304639 - RNA, 22 nt, Human
cccaaauugagccagagaaaaa

SEQ ID NO: 1304640 - RNA, 21 nt, Human
cccccagcccaagagaguggc

SEQ ID NO: 1304641 - RNA, 21 nt, Human
ccccgcuuccucuaacaccca

SEQ ID NO: 1304642 - RNA, 21 nt, Human
cccugccgcaaacccaaacaa

SEQ ID NO: 1304643 - RNA, 18 nt, Human
ccgcaaacccaaacaaca

SEQ ID NO: 1304644 - RNA, 21 nt, Human
ccgcaaacccaaacaacaaaa

SEQ ID NO: 1304645 - RNA, 21 nt, Human
ccggagggagccacuacggca

SEQ ID NO: 1304646 - RNA, 19 nt, Human
ccucacccucuuugugccc

SEQ ID NO: 1304647 - RNA, 21 nt, Human
ccucuggaacccaggaccagg

SEQ ID NO: 1304648 - RNA, 21 nt, Human
ccuucuccuucuuuuucuuuu

SEQ ID NO: 1304649 - RNA, 21 nt, Human
cugccgcaaacccaaacaaca

SEQ ID NO: 1304650 - RNA, 22 nt, Human
cuggaaggccucucaguuagcc

SEQ ID NO: 1304651 - RNA, 27 nt, Human
gaacacagugcacgcgccgucuccccg

SEQ ID NO: 1304652 - RNA, 21 nt, Human
gaaucagcccaaauugagccg

SEQ ID NO: 1304653 - RNA, 20 nt, Human
gcuuccucuaacacccacca

SEQ ID NO: 1304654 - RNA, 21 nt, Human
guugcgagaaccuucuccuuc

SEQ ID NO: 1304655 - RNA, 19 nt, Human
uccggucggggacgcuggg

SEQ ID NO: 1304656 - RNA, 23 nt, Human
ucuccccgcuuccucuaacaccc

SEQ ID NO: 1304657 - RNA, 26 nt, Human
ucuggaacccaggaccaggaacacag

SEQ ID NO: 1304658 - RNA, 22 nt, Human
ugcgagaaccuucuccuucuuu

SEQ ID NO: 1304659 - RNA, 18 nt, Human
uggaacccaggaccagga

SEQ ID NO: 1304660 - RNA, 24 nt, Human
uggaacccaggaccaggaacacag

SEQ ID NO: 1304661 - RNA, 22 nt, Human
ugguuuuguaacaguugcgaga

SEQ ID NO: 1304662 - RNA, 23 nt, Human
uucuccuucuuuuucuuuucaaa

SEQ ID NO: 1304663 - RNA, 18 nt, Human
aaaaaaagaaacagaacc

SEQ ID NO: 1304664 - RNA, 19 nt, Human
aaaaagaaacagaacccau

SEQ ID NO: 1304665 - RNA, 18 nt, Human
aaacgaugccucagucga

SEQ ID NO: 1304666 - RNA, 19 nt, Human
aaagaaacagaacccauug

SEQ ID NO: 1304667 - RNA, 24 nt, Human
aaagugccgggaucacaggcggga

SEQ ID NO: 1304668 - RNA, 25 nt, Human
aaccucacggcccacacccagucuc

SEQ ID NO: 1304669 - RNA, 19 nt, Human
aacuuagaucuaccaguga

SEQ ID NO: 1304670 - RNA, 25 nt, Human
aagaggcacagccgcagcccaggac

SEQ ID NO: 1304671 - RNA, 23 nt, Human
aagcaacggugucugagcagaaa

SEQ ID NO: 1304672 - RNA, 19 nt, Human
aaguagcugggacuacagg

SEQ ID NO: 1304673 - RNA, 20 nt, Human
aaguagcugggacuacaggc

SEQ ID NO: 1304674 - RNA, 25 nt, Human
aaguagcugggacuacaggcgcccg

SEQ ID NO: 1304675 - RNA, 26 nt, Human
aagugccgggaucacaggcgggagcc

SEQ ID NO: 1304676 - RNA, 23 nt, Human
acaggcgcccgccaccacgcccg

SEQ ID NO: 1304677 - RNA, 19 nt, Human
acgcugcagcgauacuccc

SEQ ID NO: 1304678 - RNA, 18 nt, Human
acgggguuucaccguguu

SEQ ID NO: 1304679 - RNA, 19 nt, Human
acgggguuucaccguguua

SEQ ID NO: 1304680 - RNA, 20 nt, Human
acgggguuucaccguguuag

SEQ ID NO: 1304681 - RNA, 24 nt, Human
acgggguuucaccguguuagccag

SEQ ID NO: 1304682 - RNA, 18 nt, Human
acugcaagcuccgccucc

SEQ ID NO: 1304683 - RNA, 23 nt, Human
acugcuaguugagacuaaaauag

SEQ ID NO: 1304684 - RNA, 19 nt, Human
agauguagaggcccggggc

SEQ ID NO: 1304685 - RNA, 23 nt, Human
aggcccggggcgcuugugggcaa

SEQ ID NO: 1304686 - RNA, 25 nt, Human
aggcuggagugcaguggugccaucu

SEQ ID NO: 1304687 - RNA, 20 nt, Human
agugcaguggugccaucucg

SEQ ID NO: 1304688 - RNA, 24 nt, Human
agugcaguggugccaucucggcuc

SEQ ID NO: 1304689 - RNA, 20 nt, Human
augugccgcacaagguuuuc

SEQ ID NO: 1304690 - RNA, 23 nt, Human
auucucagcauacacaacucuga

SEQ ID NO: 1304691 - RNA, 26 nt, Human
caaagugccgggaucacaggcgggag

SEQ ID NO: 1304692 - RNA, 23 nt, Human
caagagauguagaggcccggggc

SEQ ID NO: 1304693 - RNA, 21 nt, Human
cacagagcaggacgcugcagc

SEQ ID NO: 1304694 - RNA, 18 nt, Human
caccguguuagccaggau

SEQ ID NO: 1304695 - RNA, 24 nt, Human
caccguguuagccaggauggucuc

SEQ ID NO: 1304696 - RNA, 22 nt, Human
cacgccauucuccugccucagc

SEQ ID NO: 1304697 - RNA, 24 nt, Human
cagagucuugcucuguugcccagg

SEQ ID NO: 1304698 - RNA, 19 nt, Human
cagccaagagccaaaggug

SEQ ID NO: 1304699 - RNA, 18 nt, Human
cagcgauacucccucccu

SEQ ID NO: 1304700 - RNA, 18 nt, Human
caggaugucuuagaggca

SEQ ID NO: 1304701 - RNA, 21 nt, Human
caggcgcccgccaccacgccc

SEQ ID NO: 1304702 - RNA, 20 nt, Human
ccaaagugccgggaucacag

SEQ ID NO: 1304703 - RNA, 21 nt, Human
ccaggcacagagcaggacgcu

SEQ ID NO: 1304704 - RNA, 21 nt, Human
ccaucugggaucggggagcaa

SEQ ID NO: 1304705 - RNA, 23 nt, Human
cccaaguagcugggacuacaggc

SEQ ID NO: 1304706 - RNA, 23 nt, Human
cccaaguagcugggacuacaggc

SEQ ID NO: 1304707 - RNA, 21 nt, Human
cccacacccagucucuccgac

SEQ ID NO: 1304708 - RNA, 19 nt, Human
cccaggcuggagugcagug

SEQ ID NO: 1304709 - RNA, 22 nt, Human
cccucaccacuuccauccucuc

SEQ ID NO: 1304710 - RNA, 20 nt, Human
ccgcccggccggauuuggca

SEQ ID NO: 1304711 - RNA, 24 nt, Human
ccuaaaccucacggcccacaccca

SEQ ID NO: 1304712 - RNA, 24 nt, Human
ccuaaagccuccuaaaccucacgg

SEQ ID NO: 1304713 - RNA, 24 nt, Human
ccucaccacuuccauccucucaga

SEQ ID NO: 1304714 - RNA, 22 nt, Human
ccucacggcccacacccagucu

SEQ ID NO: 1304715 - RNA, 21 nt, Human
ccugaggcaaaugugccgcac

SEQ ID NO: 1304716 - RNA, 23 nt, Human
ccugccucagccucccaaguagc

SEQ ID NO: 1304717 - RNA, 24 nt, Human
ccugccucagccucccaaguagcu

SEQ ID NO: 1304718 - RNA, 22 nt, Human
cgaagggagauaggaaccugcc

SEQ ID NO: 1304719 - RNA, 26 nt, Human
cgcagcccaggacccaugcugaugcc

SEQ ID NO: 1304720 - RNA, 18 nt, Human
cgccggggagcccagugc

SEQ ID NO: 1304721 - RNA, 19 nt, Human
cgccucccggguucacgcc

SEQ ID NO: 1304722 - RNA, 24 nt, Human
cgccucggccucccaaagugccgg

SEQ ID NO: 1304723 - RNA, 19 nt, Human
cggacuccagccaagagcc

SEQ ID NO: 1304724 - RNA, 24 nt, Human
cgggguuucaccguguuagccagg

SEQ ID NO: 1304725 - RNA, 20 nt, Human
cuaaaccucacggcccacac

SEQ ID NO: 1304726 - RNA, 23 nt, Human
cuaaaccucacggcccacaccca

SEQ ID NO: 1304727 - RNA, 24 nt, Human
cucagccucccaaguagcugggac

SEQ ID NO: 1304728 - RNA, 21 nt, Human
cucccggguucacgccauucu

SEQ ID NO: 1304729 - RNA, 24 nt, Human
cuccugaccucgugauccgcccgc

SEQ ID NO: 1304730 - RNA, 20 nt, Human
cugcagcgauacucccuccc

SEQ ID NO: 1304731 - RNA, 21 nt, Human
cuuccuucuccuaaagccucc

SEQ ID NO: 1304732 - RNA, 21 nt, Human
cuugcucuguugcccaggcug

SEQ ID NO: 1304733 - RNA, 22 nt, Human
gaccucgugauccgcccgccuc

SEQ ID NO: 1304734 - RNA, 22 nt, Human
gaccucgugauccgcccgccuc

SEQ ID NO: 1304735 - RNA, 24 nt, Human
gaccucgugauccgcccgccucgg

SEQ ID NO: 1304736 - RNA, 22 nt, Human
gacuccagccaagagccaaagg

SEQ ID NO: 1304737 - RNA, 21 nt, Human
gagacagagucuugcucuguu

SEQ ID NO: 1304738 - RNA, 24 nt, Human
gagacgggguuucaccguguuagc

SEQ ID NO: 1304739 - RNA, 23 nt, Human
gauccaguaauauaaccaggcac

SEQ ID NO: 1304740 - RNA, 21 nt, Human
gcaagcaacggugucugagca

SEQ ID NO: 1304741 - RNA, 19 nt, Human
gccacguucugugcuuucg

SEQ ID NO: 1304742 - RNA, 23 nt, Human
gcccggcuaauuuuuuguauuuu

SEQ ID NO: 1304743 - RNA, 25 nt, Human
gccucccggguucacgccauucucc

SEQ ID NO: 1304744 - RNA, 25 nt, Human
gcucuguugcccaggcuggagugca

SEQ ID NO: 1304745 - RNA, 21 nt, Human
gcuggagugcaguggugccag

SEQ ID NO: 1304746 - RNA, 20 nt, Human
ggagcccagugcagucuucc

SEQ ID NO: 1304747 - RNA, 24 nt, Human
ggauggucucgaucuccugaccuc

SEQ ID NO: 1304748 - RNA, 23 nt, Human
gggguuucaccguguuagccagg

SEQ ID NO: 1304749 - RNA, 23 nt, Human
guagagacgggguuucaccgugu

SEQ ID NO: 1304750 - RNA, 24 nt, Human
gugauccgcccgccucggccuccc

SEQ ID NO: 1304751 - RNA, 22 nt, Human
guggguuggacaaggggagggc

SEQ ID NO: 1304752 - RNA, 19 nt, Human
gugucagcauggggaggaa

SEQ ID NO: 1304753 - RNA, 22 nt, Human
uaaaaaaagaaacagaacccau

SEQ ID NO: 1304754 - RNA, 23 nt, Human
uaaaccucacggcccacacccag

SEQ ID NO: 1304755 - RNA, 20 nt, Human
uaaacuaccaagagauguag

SEQ ID NO: 1304756 - RNA, 24 nt, Human
uaacuggaacaguuuuuuuaauuc

SEQ ID NO: 1304757 - RNA, 24 nt, Human
uaauuuuuuguauuuuuaguagag

SEQ ID NO: 1304758 - RNA, 25 nt, Human
uaauuuuuuguauuuuuaguagaga

SEQ ID NO: 1304759 - RNA, 23 nt, Human
uacaggcgcccgccaccacgccc

SEQ ID NO: 1304760 - RNA, 21 nt, Human
uaguagagacgggguuucacc

SEQ ID NO: 1304761 - RNA, 24 nt, Human
uaguagagacgggguuucaccgug

SEQ ID NO: 1304762 - RNA, 25 nt, Human
uaguagagacgggguuucaccgugu

SEQ ID NO: 1304763 - RNA, 26 nt, Human
uaguagagacgggguuucaccguugg

SEQ ID NO: 1304764 - RNA, 24 nt, Human
ucaccguguuagccaggauggucu

SEQ ID NO: 1304765 - RNA, 18 nt, Human
ucacugcaagcuccgccu

SEQ ID NO: 1304766 - RNA, 19 nt, Human
ucacugcaagcuccgccuc

SEQ ID NO: 1304767 - RNA, 24 nt, Human
ucacugcaagcuccgccucccggg

SEQ ID NO: 1304768 - RNA, 20 nt, Human
ucagccucccaaguagcugg

SEQ ID NO: 1304769 - RNA, 21 nt, Human
uccauccucucagauaagauc

SEQ ID NO: 1304770 - RNA, 24 nt, Human
ucccaaagugccgggaucacaggc

SEQ ID NO: 1304771 - RNA, 24 nt, Human
ucccaaguagcugggacuacaggc

SEQ ID NO: 1304772 - RNA, 21 nt, Human
ucccggguucacgccauucuc

SEQ ID NO: 1304773 - RNA, 24 nt, Human
ucccggguucacgccauucuccug

SEQ ID NO: 1304774 - RNA, 26 nt, Human
ucuccugccucagccucccaaguagc

SEQ ID NO: 1304775 - RNA, 20 nt, Human
ucucucaucugugaaaugga

SEQ ID NO: 1304776 - RNA, 23 nt, Human
ucugugcuuucggacuccagcca

SEQ ID NO: 1304777 - RNA, 18 nt, Human
ucuguugcccaggcugga

SEQ ID NO: 1304778 - RNA, 24 nt, Human
ucuguugcccaggcuggagugcag

SEQ ID NO: 1304779 - RNA, 22 nt, Human
ucuuccuucuccuaaagccucc

SEQ ID NO: 1304780 - RNA, 23 nt, Human
ucuuccuucuccuaaagccuccu

SEQ ID NO: 1304781 - RNA, 22 nt, Human
ucuugcucuguugcccaggcug

SEQ ID NO: 1304782 - RNA, 22 nt, Human
ucuugcucuguugcccaggcug

SEQ ID NO: 1304783 - RNA, 23 nt, Human
ucuugcucuguugcccaggcugg

SEQ ID NO: 1304784 - RNA, 24 nt, Human
ucuugcucuguugcccaggcugga

SEQ ID NO: 1304785 - RNA, 22 nt, Human
ugaccgugaauuaacuggaaca

SEQ ID NO: 1304786 - RNA, 21 nt, Human
ugauuuggaaacgaugccuca

SEQ ID NO: 1304787 - RNA, 22 nt, Human
ugcaguggugccaucucggcuc

SEQ ID NO: 1304788 - RNA, 24 nt, Human
ugccaagcaggaugucuuagaggc

SEQ ID NO: 1304789 - RNA, 18 nt, Human
ugcccaggcuggagugca

SEQ ID NO: 1304790 - RNA, 21 nt, Human
ugcccaggcuggagugcagug

SEQ ID NO: 1304791 - RNA, 24 nt, Human
ugcccaggcuggagugcaguggug

SEQ ID NO: 1304792 - RNA, 20 nt, Human
ugccgggaucacaggcggga

SEQ ID NO: 1304793 - RNA, 24 nt, Human
ugccucagccucccaaguagcugg

SEQ ID NO: 1304794 - RNA, 24 nt, Human
ugcucuguugcccaggcuggagug

SEQ ID NO: 1304795 - RNA, 20 nt, Human
uggaccuuuagcaaacacuu

SEQ ID NO: 1304796 - RNA, 28 nt, Human
uggagugcaguggugccauccuagcacg

SEQ ID NO: 1304797 - RNA, 23 nt, Human
uggagugcaguggugccaucucg

SEQ ID NO: 1304798 - RNA, 24 nt, Human
uggagugcaguggugccaucucgg

SEQ ID NO: 1304799 - RNA, 23 nt, Human
uggauucucagcauacacaacuc

SEQ ID NO: 1304800 - RNA, 22 nt, Human
uggcaagcuugccugauaacug

SEQ ID NO: 1304801 - RNA, 28 nt, Human
uggcaagcuugccugauaacuggccugg

SEQ ID NO: 1304802 - RNA, 21 nt, Human
ugggacuacaggcgcccgcca

SEQ ID NO: 1304803 - RNA, 22 nt, Human
ugggacuacaggcgcccgccac

SEQ ID NO: 1304804 - RNA, 24 nt, Human
ugggacuacaggcgcccgccacca

SEQ ID NO: 1304805 - RNA, 24 nt, Human
uuaauucuuaaaaaaagaaacaga

SEQ ID NO: 1304806 - RNA, 18 nt, Human
uuaguagagacgggguuu

SEQ ID NO: 1304807 - RNA, 22 nt, Human
uuaguagagacgggguuucacc

SEQ ID NO: 1304808 - RNA, 24 nt, Human
uuaguagagacgggguuucaccgu

SEQ ID NO: 1304809 - RNA, 18 nt, Human
uucuggguggaauuuugc

SEQ ID NO: 1304810 - RNA, 24 nt, Human
uugcccaggcuggagugcaguggu

SEQ ID NO: 1304811 - RNA, 24 nt, Human
uugcucuguugcccaggcuggagu

SEQ ID NO: 1304812 - RNA, 20 nt, Human
uugcuggauugaugucuggc

SEQ ID NO: 1304813 - RNA, 23 nt, Human
uuguauuuuuaguagagacgggg

SEQ ID NO: 1304814 - RNA, 19 nt, Human
uuucaccguguuagccagg

SEQ ID NO: 1304815 - RNA, 24 nt, Human
uuuuuaguagagacgggguuucac

SEQ ID NO: 1304816 - RNA, 21 nt, Human
uuuuuguauuuuuaguagaga

SEQ ID NO: 1304817 - RNA, 24 nt, Human
uuuuuuguauuuuuaguagagacg

SEQ ID NO: 1304818 - RNA, 19 nt, Human
aggggaaggggagaaaggg

SEQ ID NO: 1304819 - RNA, 26 nt, Human
aggggaaggggagaaaggguucggag

SEQ ID NO: 1304820 - RNA, 23 nt, Human
cggagagaggccagugagcggcg

SEQ ID NO: 1304821 - RNA, 23 nt, Human
gagaaaggguucggagagaggcc

SEQ ID NO: 1304822 - RNA, 22 nt, Human
gaggccagugagcggcgaagga

SEQ ID NO: 1304823 - RNA, 21 nt, Human
gggagcggaagcucaagaaag

SEQ ID NO: 1304824 - RNA, 25 nt, Human
aaacaaaaacuuaaauuuuuacagc

SEQ ID NO: 1304825 - RNA, 21 nt, Human
uaaaagaaauacauuucuguu

SEQ ID NO: 1304826 - RNA, 19 nt, Human
uaaauuauauuuugaaaaa

SEQ ID NO: 1304827 - RNA, 19 nt, Human
uacacaucccaaauugcac

SEQ ID NO: 1304828 - RNA, 18 nt, Human
uacagcuuugugguuuuu

SEQ ID NO: 1304829 - RNA, 22 nt, Human
uaguaaaaauaaaauuagcaua

SEQ ID NO: 1304830 - RNA, 27 nt, Human
uauacacaucccaaauugcacacaucc

SEQ ID NO: 1304831 - RNA, 19 nt, Human
uauucuacgaguaaaaaca

SEQ ID NO: 1304832 - RNA, 24 nt, Human
ucaaaagaauauacacaucccaaa

SEQ ID NO: 1304833 - RNA, 18 nt, Human
ugcaucagucaaaagaau

SEQ ID NO: 1304834 - RNA, 25 nt, Human
ugccuuauucaucuaauuuucuuca

SEQ ID NO: 1304835 - RNA, 22 nt, Human
uggggaaacauuaaacauuaaa

SEQ ID NO: 1304836 - RNA, 24 nt, Human
uguggggaaacauuaaacauuaaa

SEQ ID NO: 1304837 - RNA, 19 nt, Human
uuacagcuuugugguuuuu

SEQ ID NO: 1304838 - RNA, 20 nt, Human
accaagugaugcccucccug

SEQ ID NO: 1304839 - RNA, 23 nt, Human
caaggccccuaacuuggaugugg

SEQ ID NO: 1304840 - RNA, 21 nt, Human
ggcaggcguugaucgagucug

SEQ ID NO: 1304841 - RNA, 21 nt, Human
ugaaguguucuuuuccaugca

SEQ ID NO: 1304842 - RNA, 19 nt, Human
uuccaugcacaaggccccu

SEQ ID NO: 1304843 - RNA, 21 nt, Human
aaaaagcagaacaaagaucac

SEQ ID NO: 1304844 - RNA, 18 nt, Human
aaagagaaaguacaaaga

SEQ ID NO: 1304845 - RNA, 22 nt, Human
aagcagaacaaagaucacaugg

SEQ ID NO: 1304846 - RNA, 22 nt, Human
aaggguuucaaaaggggagggg

SEQ ID NO: 1304847 - RNA, 20 nt, Human
acaaggcaaagggcaaaagc

SEQ ID NO: 1304848 - RNA, 21 nt, Human
aggcaaagggcaaaagcagaa

SEQ ID NO: 1304849 - RNA, 23 nt, Human
aucacauauuggugggaccauga

SEQ ID NO: 1304850 - RNA, 20 nt, Human
augacaaggcaaagggcaaa

SEQ ID NO: 1304851 - RNA, 22 nt, Human
auuuuccauaagugucagcugg

SEQ ID NO: 1304852 - RNA, 22 nt, Human
caaaaagcagaacaaagaucaa

SEQ ID NO: 1304853 - RNA, 18 nt, Human
caaaagcagaacuacuga

SEQ ID NO: 1304854 - RNA, 18 nt, Human
caaaagcagaacuacuga

SEQ ID NO: 1304855 - RNA, 18 nt, Human
caacaaagaugacaaggc

SEQ ID NO: 1304856 - RNA, 18 nt, Human
gaccaugaugcccaccug

SEQ ID NO: 1304857 - RNA, 23 nt, Human
gcagaacaaagaucacaugcuuc

SEQ ID NO: 1304858 - RNA, 26 nt, Human
gcagaacaaagaucacaugcuucuga

SEQ ID NO: 1304859 - RNA, 23 nt, Human
gcagaacuacugauaagggucca

SEQ ID NO: 1304860 - RNA, 19 nt, Human
ggcaaaaagcagaacaaag

SEQ ID NO: 1304861 - RNA, 23 nt, Human
uacaaagagaggaauuuuacagc

SEQ ID NO: 1304862 - RNA, 18 nt, Human
ucacaugcuucaaagggc

SEQ ID NO: 1304863 - RNA, 23 nt, Human
uccaacaaagaugacaaggcaaa

SEQ ID NO: 1304864 - RNA, 23 nt, Human
ugagaaauaaagagaaaguacaa

SEQ ID NO: 1304865 - RNA, 23 nt, Human
ugagggaacaggacaaagggcaa

SEQ ID NO: 1304866 - RNA, 19 nt, Human
uggcugagaaauaaagaga

SEQ ID NO: 1304867 - RNA, 25 nt, Human
uggcugagaaauaaagagaaaguac

SEQ ID NO: 1304868 - RNA, 22 nt, Human
uucaaagggcaaaaagcagaac

SEQ ID NO: 1304869 - RNA, 22 nt, Human
agaaaaagaaaugaaaagagga

SEQ ID NO: 1304870 - RNA, 21 nt, Human
agcuggaagagcagggagggg

SEQ ID NO: 1304871 - RNA, 19 nt, Human
agggagggggcuggugcca

SEQ ID NO: 1304872 - RNA, 25 nt, Human
agugcaucagagccuggcagcugga

SEQ ID NO: 1304873 - RNA, 23 nt, Human
caggccaggaaugacagccccua

SEQ ID NO: 1304874 - RNA, 23 nt, Human
cggagaaaaagaaaugaaaagag

SEQ ID NO: 1304875 - RNA, 18 nt, Human
gagcagggagggggcugg

SEQ ID NO: 1304876 - RNA, 21 nt, Human
gagcaggugaggcaugcucuu

SEQ ID NO: 1304877 - RNA, 23 nt, Human
ggaaugacagccccuagaccacg

SEQ ID NO: 1304878 - RNA, 22 nt, Human
ggagccacggaaggcuguugag

SEQ ID NO: 1304879 - RNA, 22 nt, Human
ggaggagaaggagguggaagug

SEQ ID NO: 1304880 - RNA, 27 nt, Human
ucaggccaggaaugacagccccuagac

SEQ ID NO: 1304881 - RNA, 18 nt, Human
ugaaaagaggaugcggug

SEQ ID NO: 1304882 - RNA, 20 nt, Human
uggaagagcagggagggggc

SEQ ID NO: 1304883 - RNA, 19 nt, Human
uggaggagaaggaggugga

SEQ ID NO: 1304884 - RNA, 21 nt, Human
uggcagcuggaagagcaggga

SEQ ID NO: 1304885 - RNA, 18 nt, Human
uuagcccaugggcaaaug

SEQ ID NO: 1304886 - RNA, 22 nt, Human
aacagccccauaacaaaagaga

SEQ ID NO: 1304887 - RNA, 21 nt, Human
aacuagauguuccugagacaa

SEQ ID NO: 1304888 - RNA, 26 nt, Human
aagagagaaugacaagagaagcaaag

SEQ ID NO: 1304889 - RNA, 24 nt, Human
aagcaaaggcagaaaccccugaua

SEQ ID NO: 1304890 - RNA, 21 nt, Human
accacuuuucaguugaaaaag

SEQ ID NO: 1304891 - RNA, 27 nt, Human
acccccagccuccaagccucucuccau

SEQ ID NO: 1304892 - RNA, 19 nt, Human
agaggagaggagggaggaa

SEQ ID NO: 1304893 - RNA, 20 nt, Human
agcagccagcuaccucccuu

SEQ ID NO: 1304894 - RNA, 23 nt, Human
agccccauaacaaaagagaacua

SEQ ID NO: 1304895 - RNA, 24 nt, Human
aggaagaagaaaguauacuccucc

SEQ ID NO: 1304896 - RNA, 19 nt, Human
aggaggauguucucuucug

SEQ ID NO: 1304897 - RNA, 24 nt, Human
aggcagaaaccccugauaaaccca

SEQ ID NO: 1304898 - RNA, 22 nt, Human
aggcgcagagcuggagacaggc

SEQ ID NO: 1304899 - RNA, 18 nt, Human
aggcugugugugcaccag

SEQ ID NO: 1304900 - RNA, 25 nt, Human
augacaagagaagcaaaggcagaaa

SEQ ID NO: 1304901 - RNA, 24 nt, Human
caaaagagaacuacugaucugagc

SEQ ID NO: 1304902 - RNA, 23 nt, Human
cacagaaucagagauccagucuc

SEQ ID NO: 1304903 - RNA, 19 nt, Human
cacccccagccuccaagcc

SEQ ID NO: 1304904 - RNA, 22 nt, Human
cagagauccagucucacuuuuc

SEQ ID NO: 1304905 - RNA, 19 nt, Human
cagaggagaggagggagga

SEQ ID NO: 1304906 - RNA, 19 nt, Human
cagcggcaagagagaauga

SEQ ID NO: 1304907 - RNA, 18 nt, Human
cagcuaccucccuucucu

SEQ ID NO: 1304908 - RNA, 24 nt, Human
cagcucaauguuuggcuucucuca

SEQ ID NO: 1304909 - RNA, 21 nt, Human
cagcuuuguccuuccuggagg

SEQ ID NO: 1304910 - RNA, 25 nt, Human
cauuuuuguuuuauuuuucugaaaa

SEQ ID NO: 1304911 - RNA, 23 nt, Human
ccaguuccacguggcugcagagg

SEQ ID NO: 1304912 - RNA, 22 nt, Human
cccuucucuuccucccccgcug

SEQ ID NO: 1304913 - RNA, 18 nt, Human
ccucccuucucuuccucc

SEQ ID NO: 1304914 - RNA, 20 nt, Human
ccucccuucucuuccucccc

SEQ ID NO: 1304915 - RNA, 22 nt, Human
cgagaggaccgccucacuagug

SEQ ID NO: 1304916 - RNA, 19 nt, Human
cuaccucccuucucuuccu

SEQ ID NO: 1304917 - RNA, 21 nt, Human
cucacccccagccuccaagcc

SEQ ID NO: 1304918 - RNA, 22 nt, Human
cucacuuuuccacaaaucucca

SEQ ID NO: 1304919 - RNA, 19 nt, Human
cuccaagccucucuccauu

SEQ ID NO: 1304920 - RNA, 21 nt, Human
cuccaagccucucuccauuuc

SEQ ID NO: 1304921 - RNA, 21 nt, Human
cuccaaggcugugugugcacc

SEQ ID NO: 1304922 - RNA, 22 nt, Human
cuuggguggaagggaccaugcu

SEQ ID NO: 1304923 - RNA, 24 nt, Human
cuuucucuguguuucugaaacaag

SEQ ID NO: 1304924 - RNA, 18 nt, Human
gaacugauaggaggaugu

SEQ ID NO: 1304925 - RNA, 22 nt, Human
gagaaugacaagagaagcaaag

SEQ ID NO: 1304926 - RNA, 24 nt, Human
gagaaugacaagagaagcaaaggc

SEQ ID NO: 1304927 - RNA, 23 nt, Human
gaggcgcagagcuggagacaggc

SEQ ID NO: 1304928 - RNA, 19 nt, Human
gauccggcccaccacuguu

SEQ ID NO: 1304929 - RNA, 18 nt, Human
gcagagcuggagacaggc

SEQ ID NO: 1304930 - RNA, 18 nt, Human
gcuuuguccuuccuggag

SEQ ID NO: 1304931 - RNA, 19 nt, Human
ggagaggagggaggaagaa

SEQ ID NO: 1304932 - RNA, 26 nt, Human
ggggacuuuggcuaagacuauuaggu

SEQ ID NO: 1304933 - RNA, 19 nt, Human
guggcaguccaguggaagg

SEQ ID NO: 1304934 - RNA, 18 nt, Human
gugguagcagagucgagg

SEQ ID NO: 1304935 - RNA, 24 nt, Human
uaaccccucccaacuccucacacc

SEQ ID NO: 1304936 - RNA, 22 nt, Human
uacugaucugagcauaggaaag

SEQ ID NO: 1304937 - RNA, 25 nt, Human
uagaagcaucuuuuugggacauccu

SEQ ID NO: 1304938 - RNA, 20 nt, Human
uagaggcucuaccacuuuuc

SEQ ID NO: 1304939 - RNA, 22 nt, Human
uagcagagucgaggcugucuug

SEQ ID NO: 1304940 - RNA, 21 nt, Human
uaguauucucggaugcaaccu

SEQ ID NO: 1304941 - RNA, 23 nt, Human
uaucagcuuuguccuuccuggag

SEQ ID NO: 1304942 - RNA, 24 nt, Human
uaucuugagacucacccccagccu

SEQ ID NO: 1304943 - RNA, 25 nt, Human
ucagcucaauguuuggcuucucuca

SEQ ID NO: 1304944 - RNA, 27 nt, Human
uccaagccucucuccauuucucuaacc

SEQ ID NO: 1304945 - RNA, 20 nt, Human
uccacguggcugcagaggcc

SEQ ID NO: 1304946 - RNA, 24 nt, Human
ucucacuuuuccacaaaucuccaa

SEQ ID NO: 1304947 - RNA, 19 nt, Human
ugaaauuaacggauguguc

SEQ ID NO: 1304948 - RNA, 21 nt, Human
ugagacucacccccagccucc

SEQ ID NO: 1304949 - RNA, 24 nt, Human
ugagacucacccccagccuccaag

SEQ ID NO: 1304950 - RNA, 19 nt, Human
ugagagggaccaguuggug

SEQ ID NO: 1304951 - RNA, 22 nt, Human
ugaguguucuccacuccuccua

SEQ ID NO: 1304952 - RNA, 21 nt, Human
ugcagaggccucacaaucauc

SEQ ID NO: 1304953 - RNA, 19 nt, Human
ugccacuggggacuuuggc

SEQ ID NO: 1304954 - RNA, 26 nt, Human
ugcuucugcucuuuccuaugguuuca

SEQ ID NO: 1304955 - RNA, 18 nt, Human
uggaacagccccauaaca

SEQ ID NO: 1304956 - RNA, 21 nt, Human
uggaacagccccauaacaaaa

SEQ ID NO: 1304957 - RNA, 27 nt, Human
uggaaggaaggucuuuugaggucaacc

SEQ ID NO: 1304958 - RNA, 22 nt, Human
uggaagggaccaugcugaccuc

SEQ ID NO: 1304959 - RNA, 20 nt, Human
ugucacagaaucagagaucc

SEQ ID NO: 1304960 - RNA, 22 nt, Human
ugucuccuuuggaacagcccca

SEQ ID NO: 1304961 - RNA, 20 nt, Human
ugucuuguauccugguuuca

SEQ ID NO: 1304962 - RNA, 24 nt, Human
ugucuugugcuucugcucuuuccu

SEQ ID NO: 1304963 - RNA, 21 nt, Human
uguuguggcaguccaguggaa

SEQ ID NO: 1304964 - RNA, 21 nt, Human
uguuguuuugaacugauagga

SEQ ID NO: 1304965 - RNA, 23 nt, Human
uuaaccccucccaacuccucaca

SEQ ID NO: 1304966 - RNA, 27 nt, Human
uuagguuugcuuucaacuagauguucc

SEQ ID NO: 1304967 - RNA, 19 nt, Human
uucucaguuaccauuauuu

SEQ ID NO: 1304968 - RNA, 22 nt, Human
uuugaggucacuuagaagcauc

SEQ ID NO: 1304969 - RNA, 24 nt, Human
acaaacuuuuaaaaaugcucagag

SEQ ID NO: 1304970 - RNA, 20 nt, Human
acuuuuaaaaaugcucagag

SEQ ID NO: 1304971 - RNA, 21 nt, Human
ccauuggggaaaauaagccuu

SEQ ID NO: 1304972 - RNA, 18 nt, Human
gaaaaucugguuaaauua

SEQ ID NO: 1304973 - RNA, 23 nt, Human
uaaacaaacuuuuaaaaaugcuc

SEQ ID NO: 1304974 - RNA, 24 nt, Human
ugaacuucuaaagcuauaucaagu

SEQ ID NO: 1304975 - RNA, 24 nt, Human
ugaugaguguuggguugaucaccu

SEQ ID NO: 1304976 - RNA, 19 nt, Human
ugcuuuacauauucagaaa

SEQ ID NO: 1304977 - RNA, 24 nt, Human
ugucagaaaaucugguuaaauuag

SEQ ID NO: 1304978 - RNA, 23 nt, Human
uguggaauuguaaacaaacuuuu

SEQ ID NO: 1304979 - RNA, 21 nt, Human
uuaaaaaauacaauguaauaa

SEQ ID NO: 1304980 - RNA, 20 nt, Human
uuuacauuuaaaaaauacaa

SEQ ID NO: 1304981 - RNA, 22 nt, Human
aaaugccagaaagaaaugaacu

SEQ ID NO: 1304982 - RNA, 20 nt, Human
agagguuuccuggucccugg

SEQ ID NO: 1304983 - RNA, 21 nt, Human
cagaaagaaaugaacugggua

SEQ ID NO: 1304984 - RNA, 18 nt, Human
caggcgggcuuccugccu

SEQ ID NO: 1304985 - RNA, 19 nt, Human
ccagcacucaagcaagagg

SEQ ID NO: 1304986 - RNA, 19 nt, Human
cuucuggccugaguuccag

SEQ ID NO: 1304987 - RNA, 25 nt, Human
ggagaggacggucggagcuucauug

SEQ ID NO: 1304988 - RNA, 23 nt, Human
ggaggggacauuuaagcuucaga

SEQ ID NO: 1304989 - RNA, 18 nt, Human
cagcagggggucgugccu

SEQ ID NO: 1304990 - RNA, 23 nt, Human
ccccgcagcagugggucgugccu

SEQ ID NO: 1304991 - RNA, 19 nt, Human
ccccucagcagggggucgu

SEQ ID NO: 1304992 - RNA, 18 nt, Human
ccccuuguccacuugucc

SEQ ID NO: 1304993 - RNA, 23 nt, Human
ccuuguccacuuguccuccuuca

SEQ ID NO: 1304994 - RNA, 21 nt, Human
cgggaacaggcaaguuauuuu

SEQ ID NO: 1304995 - RNA, 20 nt, Human
cugcagcagggguccgugcc

SEQ ID NO: 1304996 - RNA, 25 nt, Human
cuuguccuccuucacuaaucgguug

SEQ ID NO: 1304997 - RNA, 27 nt, Human
uauuuuaaaucuguaucuucuguuguc

SEQ ID NO: 1304998 - RNA, 24 nt, Human
uccgcagcagggggaucaugcccu

SEQ ID NO: 1304999 - RNA, 19 nt, Human
ucgugccugugaacagccc

SEQ ID NO: 1305000 - RNA, 27 nt, Human
ucuguaucuucuguugucaagaucugu

SEQ ID NO: 1305001 - RNA, 24 nt, Human
aagcacgucuaagagccuuaugag

SEQ ID NO: 1305002 - RNA, 18 nt, Human
caaccuccgggaccaucu

SEQ ID NO: 1305003 - RNA, 19 nt, Human
caagaagaugggugaccac

SEQ ID NO: 1305004 - RNA, 20 nt, Human
cacaggcugggaggcccaga

SEQ ID NO: 1305005 - RNA, 25 nt, Human
cagccuccgaccgcccuccaauuuc

SEQ ID NO: 1305006 - RNA, 21 nt, Human
cagugggucugucucuugcuu

SEQ ID NO: 1305007 - RNA, 21 nt, Human
ccacaggcugggaggcccaga

SEQ ID NO: 1305008 - RNA, 22 nt, Human
ccaccugacgaaccuccacagg

SEQ ID NO: 1305009 - RNA, 20 nt, Human
ccuagaugaggaagugaagc

SEQ ID NO: 1305010 - RNA, 18 nt, Human
ccuccacaggcugggagg

SEQ ID NO: 1305011 - RNA, 24 nt, Human
cuaagagccuuaugagcccagcga

SEQ ID NO: 1305012 - RNA, 25 nt, Human
cucaucaagaagaugggugaccacc

SEQ ID NO: 1305013 - RNA, 22 nt, Human
cucuccacuugcaaccuccggg

SEQ ID NO: 1305014 - RNA, 24 nt, Human
cuucugggaccugccagcaccguu

SEQ ID NO: 1305015 - RNA, 21 nt, Human
gaccaccugacgaaccuccac

SEQ ID NO: 1305016 - RNA, 25 nt, Human
gaccgcccuccaauuuccucuccac

SEQ ID NO: 1305017 - RNA, 21 nt, Human
gcgaguaucucuucgaaaggc

SEQ ID NO: 1305018 - RNA, 20 nt, Human
gggaggcccagaggcugggc

SEQ ID NO: 1305019 - RNA, 21 nt, Human
gggcugggcgaguaucucuuc

SEQ ID NO: 1305020 - RNA, 26 nt, Human
gggucugucucuugcuucaacagugu

SEQ ID NO: 1305021 - RNA, 21 nt, Human
uaagagccuuaugagcccagc

SEQ ID NO: 1305022 - RNA, 21 nt, Human
ucaagaagaugggugaccacc

SEQ ID NO: 1305023 - RNA, 21 nt, Human
uccagccuccgaccgcccucc

SEQ ID NO: 1305024 - RNA, 19 nt, Human
uccuggagacucacuuccu

SEQ ID NO: 1305025 - RNA, 24 nt, Human
uccuggagacucacuuccuagaug

SEQ ID NO: 1305026 - RNA, 21 nt, Human
ucugccuaagccucucccucc

SEQ ID NO: 1305027 - RNA, 22 nt, Human
ucugccuaagccucucccucca

SEQ ID NO: 1305028 - RNA, 23 nt, Human
ucugugacuuccuggagacucac

SEQ ID NO: 1305029 - RNA, 19 nt, Human
ugaagcucaucaagaagau

SEQ ID NO: 1305030 - RNA, 19 nt, Human
ugacuuccuggagacucac

SEQ ID NO: 1305031 - RNA, 20 nt, Human
ugccagcaccguuuuugucc

SEQ ID NO: 1305032 - RNA, 22 nt, Human
uggacggaacagauccggggac

SEQ ID NO: 1305033 - RNA, 23 nt, Human
uuggacggaacagauccggggac

SEQ ID NO: 1305034 - RNA, 24 nt, Human
uuuggacggaacagauccggggac

SEQ ID NO: 1305035 - RNA, 20 nt, Human
aaaggagaggcuacugcugc

SEQ ID NO: 1305036 - RNA, 22 nt, Human
aaggagaggcuacugcugcugc

SEQ ID NO: 1305037 - RNA, 23 nt, Human
agcacaaaagcgacagaagccca

SEQ ID NO: 1305038 - RNA, 19 nt, Human
agcagggaggacagagccc

SEQ ID NO: 1305039 - RNA, 20 nt, Human
agcccagagggcgagggucc

SEQ ID NO: 1305040 - RNA, 22 nt, Human
aggagaggcuacugcugcugcu

SEQ ID NO: 1305041 - RNA, 23 nt, Human
caaaagcgacagaagcccagagg

SEQ ID NO: 1305042 - RNA, 23 nt, Human
cacaaaagcgacagaagcccaga

SEQ ID NO: 1305043 - RNA, 18 nt, Human
cagcacaaaagcgacaga

SEQ ID NO: 1305044 - RNA, 22 nt, Human
ccaagggccuggaguggccaag

SEQ ID NO: 1305045 - RNA, 19 nt, Human
cccuggccccuuuccugga

SEQ ID NO: 1305046 - RNA, 19 nt, Human
cccugguugcugccugcuc

SEQ ID NO: 1305047 - RNA, 23 nt, Human
ccggcugugcccuggccccuuuc

SEQ ID NO: 1305048 - RNA, 22 nt, Human
ccuggaguggccaagggcggug

SEQ ID NO: 1305049 - RNA, 20 nt, Human
ccugugugggacucggaggc

SEQ ID NO: 1305050 - RNA, 18 nt, Human
cgagggucccaggagccu

SEQ ID NO: 1305051 - RNA, 20 nt, Human
cgccggcugugcccuggccc

SEQ ID NO: 1305052 - RNA, 19 nt, Human
cgguggggaaacggaggcc

SEQ ID NO: 1305053 - RNA, 20 nt, Human
gccggcugugcccuggcccc

SEQ ID NO: 1305054 - RNA, 19 nt, Human
ggaaacggaggccucaaaa

SEQ ID NO: 1305055 - RNA, 22 nt, Human
ggaaacggaggccucaaaagga

SEQ ID NO: 1305056 - RNA, 19 nt, Human
ggaagcagggaggacagag

SEQ ID NO: 1305057 - RNA, 18 nt, Human
uacugcugcugcuucugc

SEQ ID NO: 1305058 - RNA, 18 nt, Human
ucgccggcugugcccugg

SEQ ID NO: 1305059 - RNA, 24 nt, Human
ucggaggcuccgcggugucgccgg

SEQ ID NO: 1305060 - RNA, 18 nt, Human
ugagucaggggugcgagg

SEQ ID NO: 1305061 - RNA, 18 nt, Human
ugccugcucucucggcca

SEQ ID NO: 1305062 - RNA, 19 nt, Human
ugcugcugcuucugcuugc

SEQ ID NO: 1305063 - RNA, 23 nt, Human
uggaggaagcagggaggacagag

SEQ ID NO: 1305064 - RNA, 22 nt, Human
ugucccggugacugggugaggc

SEQ ID NO: 1305065 - RNA, 20 nt, Human
uugcugggccugugugggac

SEQ ID NO: 1305066 - RNA, 19 nt, Human
uuuggaggaagcagggagg

SEQ ID NO: 1305067 - RNA, 25 nt, Human
aaacugaaaugaaugaagcagucug

SEQ ID NO: 1305068 - RNA, 23 nt, Human
aaagggaaaugguaggagaagga

SEQ ID NO: 1305069 - RNA, 22 nt, Human
aagaggccaggcuaauggaaua

SEQ ID NO: 1305070 - RNA, 28 nt, Human
aagaggccaggcuaauggaauacagaca

SEQ ID NO: 1305071 - RNA, 19 nt, Human
aagcagccccucguuuguu

SEQ ID NO: 1305072 - RNA, 21 nt, Human
aagcagccccucguuuguuga

SEQ ID NO: 1305073 - RNA, 19 nt, Human
aauacagacaccagagagg

SEQ ID NO: 1305074 - RNA, 18 nt, Human
acauugaggcccagagcc

SEQ ID NO: 1305075 - RNA, 25 nt, Human
acugaagucacagaaacugaguuug

SEQ ID NO: 1305076 - RNA, 20 nt, Human
agagagggacugaagucaca

SEQ ID NO: 1305077 - RNA, 19 nt, Human
agagcaaggcagcaucugu

SEQ ID NO: 1305078 - RNA, 21 nt, Human
agcagaagacaguucaugugu

SEQ ID NO: 1305079 - RNA, 19 nt, Human
aggcagcaucugucuuggg

SEQ ID NO: 1305080 - RNA, 19 nt, Human
aggcaggggaggugcuggg

SEQ ID NO: 1305081 - RNA, 21 nt, Human
aggcaggggaggugcuggggg

SEQ ID NO: 1305082 - RNA, 21 nt, Human
aggcaggugccugugugguca

SEQ ID NO: 1305083 - RNA, 20 nt, Human
aggggaggugcugggggacc

SEQ ID NO: 1305084 - RNA, 20 nt, Human
aucccugucccugguuccuc

SEQ ID NO: 1305085 - RNA, 26 nt, Human
caacagagauugucuggaggauggcc

SEQ ID NO: 1305086 - RNA, 18 nt, Human
cacagaaacugaguuugc

SEQ ID NO: 1305087 - RNA, 21 nt, Human
cagaacaaagugggguccucu

SEQ ID NO: 1305088 - RNA, 24 nt, Human
cagaacaaagugggguccucuucc

SEQ ID NO: 1305089 - RNA, 26 nt, Human
cagaaucagcaucuccucuuuccugg

SEQ ID NO: 1305090 - RNA, 20 nt, Human
cagcaaaccucaaauaaaau

SEQ ID NO: 1305091 - RNA, 21 nt, Human
cagcaaaccucaaauaaaaua

SEQ ID NO: 1305092 - RNA, 19 nt, Human
caggacgcaguagauucug

SEQ ID NO: 1305093 - RNA, 23 nt, Human
cagggccagacccacacgcugcu

SEQ ID NO: 1305094 - RNA, 21 nt, Human
cagguguguguccuucuggcu

SEQ ID NO: 1305095 - RNA, 22 nt, Human
cccacacgcugcucaccgaggc

SEQ ID NO: 1305096 - RNA, 22 nt, Human
cccuggggcuggccaucgagcc

SEQ ID NO: 1305097 - RNA, 19 nt, Human
ccucggaggcuggcgcggc

SEQ ID NO: 1305098 - RNA, 22 nt, Human
cgagagcaaggcagcaucuguc

SEQ ID NO: 1305099 - RNA, 21 nt, Human
cggcggagcguuaggggagga

SEQ ID NO: 1305100 - RNA, 22 nt, Human
cggguaggagggaucagcugga

SEQ ID NO: 1305101 - RNA, 19 nt, Human
cguggccgagggccagugc

SEQ ID NO: 1305102 - RNA, 21 nt, Human
cucagaaucauggcgggaggc

SEQ ID NO: 1305103 - RNA, 18 nt, Human
cugcuggcgggagcuggc

SEQ ID NO: 1305104 - RNA, 20 nt, Human
cuggagcugacggaggucaa

SEQ ID NO: 1305105 - RNA, 19 nt, Human
cuguggaaaugcugagucu

SEQ ID NO: 1305106 - RNA, 21 nt, Human
gaagggacaggcgagagcaag

SEQ ID NO: 1305107 - RNA, 22 nt, Human
gagaauguggaguggcucuggg

SEQ ID NO: 1305108 - RNA, 27 nt, Human
gagagcaaggcagcaucugucuuggga

SEQ ID NO: 1305109 - RNA, 19 nt, Human
gaugcaucagggaagaggc

SEQ ID NO: 1305110 - RNA, 23 nt, Human
gcacauggcuggggaggccucag

SEQ ID NO: 1305111 - RNA, 19 nt, Human
gcacugggcccagagcagu

SEQ ID NO: 1305112 - RNA, 19 nt, Human
gccgcaggcgauccuggag

SEQ ID NO: 1305113 - RNA, 19 nt, Human
gcgcaaauaagaugacuga

SEQ ID NO: 1305114 - RNA, 21 nt, Human
gcguagcuugcuuguggcccc

SEQ ID NO: 1305115 - RNA, 19 nt, Human
gcgugcaggcagaggccag

SEQ ID NO: 1305116 - RNA, 19 nt, Human
ggaaaugcugagucugugu

SEQ ID NO: 1305117 - RNA, 28 nt, Human
ggaaaugguaggagaaggaccgguaccc

SEQ ID NO: 1305118 - RNA, 21 nt, Human
ggacaucgaguccacaggugu

SEQ ID NO: 1305119 - RNA, 21 nt, Human
ggcuuggaaacauugcuggua

SEQ ID NO: 1305120 - RNA, 20 nt, Human
guaaccccgaggcaggugcc

SEQ ID NO: 1305121 - RNA, 22 nt, Human
gucagccuggagcuggagcuga

SEQ ID NO: 1305122 - RNA, 19 nt, Human
guccagacaaggguagaag

SEQ ID NO: 1305123 - RNA, 22 nt, Human
uaaaaugagaacauugaggccc

SEQ ID NO: 1305124 - RNA, 24 nt, Human
uaagccaggugcuggggaaacuga

SEQ ID NO: 1305125 - RNA, 23 nt, Human
uacagacaccagagagggacuga

SEQ ID NO: 1305126 - RNA, 20 nt, Human
uagauucuggucaccgggua

SEQ ID NO: 1305127 - RNA, 21 nt, Human
ucagccuggagcuggagcuga

SEQ ID NO: 1305128 - RNA, 18 nt, Human
uccacagguguguguccu

SEQ ID NO: 1305129 - RNA, 23 nt, Human
ucccugguuccucuucacucauu

SEQ ID NO: 1305130 - RNA, 20 nt, Human
ucccuuagagaacugcugaa

SEQ ID NO: 1305131 - RNA, 23 nt, Human
ucccuuagagaacugcugaauuc

SEQ ID NO: 1305132 - RNA, 21 nt, Human
uccuggaggagaagcugaagc

SEQ ID NO: 1305133 - RNA, 25 nt, Human
ucucacaguguuucuuggggcuuca

SEQ ID NO: 1305134 - RNA, 24 nt, Human
ucuuaggucacugcagcaaaccuc

SEQ ID NO: 1305135 - RNA, 18 nt, Human
ugaaaugaaugaagcagu

SEQ ID NO: 1305136 - RNA, 23 nt, Human
ugaaaugaaugaagcagucugug

SEQ ID NO: 1305137 - RNA, 20 nt, Human
ugaaauguuaaaagcugugg

SEQ ID NO: 1305138 - RNA, 21 nt, Human
ugaaauguuaaaagcugugga

SEQ ID NO: 1305139 - RNA, 24 nt, Human
ugagaacauugaggcccagagcca

SEQ ID NO: 1305140 - RNA, 21 nt, Human
ugagucugugucuuuccccuu

SEQ ID NO: 1305141 - RNA, 24 nt, Human
ugcagcaaaccucaaauaaaauaa

SEQ ID NO: 1305142 - RNA, 18 nt, Human
ugcaucagggaagaggcc

SEQ ID NO: 1305143 - RNA, 19 nt, Human
ugcaucagggaagaggcca

SEQ ID NO: 1305144 - RNA, 21 nt, Human
ugcaucagggaagaggccagg

SEQ ID NO: 1305145 - RNA, 24 nt, Human
ugcuuguggccccuuagugugccc

SEQ ID NO: 1305146 - RNA, 18 nt, Human
uggaaaugcugagucugu

SEQ ID NO: 1305147 - RNA, 21 nt, Human
uggaauacagacaccagagag

SEQ ID NO: 1305148 - RNA, 22 nt, Human
uggaguggcucuggggcguagc

SEQ ID NO: 1305149 - RNA, 20 nt, Human
uggcagcccugggccaggcg

SEQ ID NO: 1305150 - RNA, 26 nt, Human
uggcagcuuugggaacuguggaguuu

SEQ ID NO: 1305151 - RNA, 20 nt, Human
uggccccuuagugugcccuc

SEQ ID NO: 1305152 - RNA, 23 nt, Human
uggcgggcggagucacccugggg

SEQ ID NO: 1305153 - RNA, 19 nt, Human
uggggaaacugaaaugaau

SEQ ID NO: 1305154 - RNA, 20 nt, Human
uguccuucuggcucaccucg

SEQ ID NO: 1305155 - RNA, 19 nt, Human
ugucuggaggauggccccu

SEQ ID NO: 1305156 - RNA, 21 nt, Human
uuaagccaggugcuggggaaa

SEQ ID NO: 1305157 - RNA, 18 nt, Human
uucuuacguggcagcagc

SEQ ID NO: 1305158 - RNA, 21 nt, Human
uugcucaccaaggcugucauu

SEQ ID NO: 1305159 - RNA, 20 nt, Human
uuguggaaguucuucuuggg

SEQ ID NO: 1305160 - RNA, 21 nt, Human
gagcgcgauguacgaggaggg

SEQ ID NO: 1305161 - RNA, 18 nt, Human
uguacgaggaggggggcu

SEQ ID NO: 1305162 - RNA, 20 nt, Human
caacagguuucuccgucugu

SEQ ID NO: 1305163 - RNA, 21 nt, Human
ccaacagguuucuccgucuuu

SEQ ID NO: 1305164 - RNA, 21 nt, Human
guuguaccaacagguuucucc

SEQ ID NO: 1305165 - RNA, 25 nt, Human
ucuguagcaggagugaugaugagac

SEQ ID NO: 1305166 - RNA, 22 nt, Human
aaaaaaaaaacugcccagaaaa

SEQ ID NO: 1305167 - RNA, 18 nt, Human
aaaaaaaaacugcccaga

SEQ ID NO: 1305168 - RNA, 21 nt, Human
aaaaaacugcccagaaaaccc

SEQ ID NO: 1305169 - RNA, 21 nt, Human
ccaguaauuaagcaaaaggga

SEQ ID NO: 1305170 - RNA, 25 nt, Human
cucuuuaaaaaaaaaacugcccaga

SEQ ID NO: 1305171 - RNA, 21 nt, Human
uaaaaaaaaaacugcccagaa

SEQ ID NO: 1305172 - RNA, 24 nt, Human
uaauccucuucuuacuccaacucu

SEQ ID NO: 1305173 - RNA, 24 nt, Human
uuuauuugccuuuccuuuuuaauc

SEQ ID NO: 1305174 - RNA, 18 nt, Human
acaaagcccuuuccagug

SEQ ID NO: 1305175 - RNA, 20 nt, Human
agcgcgccgagcaccgggcg

SEQ ID NO: 1305176 - RNA, 18 nt, Human
aggcguggcuuauucagu

SEQ ID NO: 1305177 - RNA, 19 nt, Human
agguccccccggucccgca

SEQ ID NO: 1305178 - RNA, 19 nt, Human
ccagcggcugugcugcggc

SEQ ID NO: 1305179 - RNA, 21 nt, Human
cccccggucccgcacccuacc

SEQ ID NO: 1305180 - RNA, 21 nt, Human
ccccggucccgcacccuaccc

SEQ ID NO: 1305181 - RNA, 19 nt, Human
ccccucugccuccaggucc

SEQ ID NO: 1305182 - RNA, 18 nt, Human
cccgcacccuacccugcg

SEQ ID NO: 1305183 - RNA, 19 nt, Human
cccgcgcggggucugaggc

SEQ ID NO: 1305184 - RNA, 21 nt, Human
cgcacgcccugccggguaagc

SEQ ID NO: 1305185 - RNA, 19 nt, Human
cgccauggagccggcgccc

SEQ ID NO: 1305186 - RNA, 22 nt, Human
cggcuccccgagcccggucgcc

SEQ ID NO: 1305187 - RNA, 19 nt, Human
cgguucuccccucugccuc

SEQ ID NO: 1305188 - RNA, 24 nt, Human
cugccuccagguccccccgguccc

SEQ ID NO: 1305189 - RNA, 19 nt, Human
cugcgcacgcccugccggg

SEQ ID NO: 1305190 - RNA, 19 nt, Human
gagagaggacuaggcagug

SEQ ID NO: 1305191 - RNA, 23 nt, Human
gagcccggucgccauggagccgg

SEQ ID NO: 1305192 - RNA, 21 nt, Human
gagcgcgcccuggacgcugcc

SEQ ID NO: 1305193 - RNA, 23 nt, Human
gagcgcgccgagcaccgggcggc

SEQ ID NO: 1305194 - RNA, 20 nt, Human
gcacgcccugccggguaagc

SEQ ID NO: 1305195 - RNA, 19 nt, Human
gcgccccgcgcggggucug

SEQ ID NO: 1305196 - RNA, 20 nt, Human
gcugcgggaccagcgggcgg

SEQ ID NO: 1305197 - RNA, 18 nt, Human
gcugugcugcggcgcgga

SEQ ID NO: 1305198 - RNA, 22 nt, Human
ggaccagcgggcgggcggcucc

SEQ ID NO: 1305199 - RNA, 19 nt, Human
uccccccggucccgcaccc

SEQ ID NO: 1305200 - RNA, 24 nt, Human
ucccggaaggcugcgggaccagcg

SEQ ID NO: 1305201 - RNA, 19 nt, Human
ugccggcaccgcuuccucc

SEQ ID NO: 1305202 - RNA, 21 nt, Human
ugggaggcguggcuuauucag

SEQ ID NO: 1305203 - RNA, 22 nt, Human
uuccucccggaaggcugcggga

SEQ ID NO: 1305204 - RNA, 27 nt, Human
aacacauaaauaauccaaccugaacgg

SEQ ID NO: 1305205 - RNA, 19 nt, Human
aagguggugggaaacugga

SEQ ID NO: 1305206 - RNA, 18 nt, Human
accgauccuggagucucu

SEQ ID NO: 1305207 - RNA, 18 nt, Human
agagaggguuaaagugcu

SEQ ID NO: 1305208 - RNA, 19 nt, Human
agagggaggggagaguggc

SEQ ID NO: 1305209 - RNA, 27 nt, Human
aggaagagggaggggagaguggcccaa

SEQ ID NO: 1305210 - RNA, 22 nt, Human
aggggaugggggaaggaagagg

SEQ ID NO: 1305211 - RNA, 22 nt, Human
augggggaaggaagagggaggg

SEQ ID NO: 1305212 - RNA, 23 nt, Human
auucuggagcugagucuggggaa

SEQ ID NO: 1305213 - RNA, 21 nt, Human
cacccuucccccagcuuccca

SEQ ID NO: 1305214 - RNA, 19 nt, Human
cagggauucuuuuccaccc

SEQ ID NO: 1305215 - RNA, 21 nt, Human
ccacaacacauaaauaaucca

SEQ ID NO: 1305216 - RNA, 20 nt, Human
ccugcucucugcucugguuu

SEQ ID NO: 1305217 - RNA, 18 nt, Human
ccuggagcgcagaaccug

SEQ ID NO: 1305218 - RNA, 20 nt, Human
ccugucuucccuccaauccc

SEQ ID NO: 1305219 - RNA, 23 nt, Human
cgaagaagguauucuggagcuga

SEQ ID NO: 1305220 - RNA, 20 nt, Human
cucccaccccugccuggccc

SEQ ID NO: 1305221 - RNA, 19 nt, Human
gaagagaggguuaaagugc

SEQ ID NO: 1305222 - RNA, 21 nt, Human
gaaggaagagggaggggagag

SEQ ID NO: 1305223 - RNA, 22 nt, Human
gaaggaagagggaggggagagu

SEQ ID NO: 1305224 - RNA, 23 nt, Human
gaccugucuucccuccaaucccc

SEQ ID NO: 1305225 - RNA, 22 nt, Human
gcagcgaagaagguauucugga

SEQ ID NO: 1305226 - RNA, 22 nt, Human
ggaaaggggaugggggaaggaa

SEQ ID NO: 1305227 - RNA, 19 nt, Human
ggaagguggggaggaaagg

SEQ ID NO: 1305228 - RNA, 21 nt, Human
ggccuggagcgcagaaccugc

SEQ ID NO: 1305229 - RNA, 18 nt, Human
ggcucucccaccccugcc

SEQ ID NO: 1305230 - RNA, 23 nt, Human
gggaagagaggguuaaagugcug

SEQ ID NO: 1305231 - RNA, 23 nt, Human
gggaagguggggaggaaagggga

SEQ ID NO: 1305232 - RNA, 23 nt, Human
ggggaugggggaaggaagaggga

SEQ ID NO: 1305233 - RNA, 19 nt, Human
guccugcucucugcucugg

SEQ ID NO: 1305234 - RNA, 22 nt, Human
gucuagaccugucuucccucca

SEQ ID NO: 1305235 - RNA, 22 nt, Human
uccaagguggugggaaacugga

SEQ ID NO: 1305236 - RNA, 19 nt, Human
ucccccagcuucccaauuc

SEQ ID NO: 1305237 - RNA, 25 nt, Human
ucccccagcuucccaauucuaccag

SEQ ID NO: 1305238 - RNA, 21 nt, Human
ucucugacuccggccuggagc

SEQ ID NO: 1305239 - RNA, 22 nt, Human
ugagucuggggaagguggggag

SEQ ID NO: 1305240 - RNA, 24 nt, Human
ugagucuggggaagguggggagga

SEQ ID NO: 1305241 - RNA, 21 nt, Human
ugggaggaguccaagguggug

SEQ ID NO: 1305242 - RNA, 25 nt, Human
uggggaagguggggaggaaaggggg

SEQ ID NO: 1305243 - RNA, 22 nt, Human
uggggaggaaaggggauggggg

SEQ ID NO: 1305244 - RNA, 22 nt, Human
ugggggaaggaagagggagggg

SEQ ID NO: 1305245 - RNA, 23 nt, Human
acagggacuguugccaucuccca

SEQ ID NO: 1305246 - RNA, 22 nt, Human
accgcucccgccucgcgcaugc

SEQ ID NO: 1305247 - RNA, 22 nt, Human
agaaacaggggaggcagagcca

SEQ ID NO: 1305248 - RNA, 20 nt, Human
agacaaccaugggaaccacu

SEQ ID NO: 1305249 - RNA, 22 nt, Human
agagaguagaggccagagccca

SEQ ID NO: 1305250 - RNA, 20 nt, Human
agagccagagggaggagaga

SEQ ID NO: 1305251 - RNA, 21 nt, Human
agaggccagagcccaggcagg

SEQ ID NO: 1305252 - RNA, 22 nt, Human
agaguagaggccagagcccagg

SEQ ID NO: 1305253 - RNA, 21 nt, Human
aggaagugucucccugacgga

SEQ ID NO: 1305254 - RNA, 20 nt, Human
aggcaggauacagcaccgug

SEQ ID NO: 1305255 - RNA, 19 nt, Human
aggcauuuggccagagcga

SEQ ID NO: 1305256 - RNA, 20 nt, Human
aggccagagcccaggcagga

SEQ ID NO: 1305257 - RNA, 24 nt, Human
aggggugggguuccuaaagggugg

SEQ ID NO: 1305258 - RNA, 20 nt, Human
caccgccacagacauaaggg

SEQ ID NO: 1305259 - RNA, 21 nt, Human
caccgugccaccgccacagac

SEQ ID NO: 1305260 - RNA, 23 nt, Human
cagcaccgugccaccgccacaga

SEQ ID NO: 1305261 - RNA, 21 nt, Human
caggccccugagaaacagggg

SEQ ID NO: 1305262 - RNA, 20 nt, Human
caugcgcauuggcugagccg

SEQ ID NO: 1305263 - RNA, 23 nt, Human
ccacagagggcuccugcuuugcc

SEQ ID NO: 1305264 - RNA, 22 nt, Human
ccagagcccaggcaggauacag

SEQ ID NO: 1305265 - RNA, 19 nt, Human
ccaggcaggauacagcacc

SEQ ID NO: 1305266 - RNA, 19 nt, Human
cccaagcacugccacagag

SEQ ID NO: 1305267 - RNA, 19 nt, Human
ccgacacccaagcacugcc

SEQ ID NO: 1305268 - RNA, 21 nt, Human
ccucagagccccgacacccaa

SEQ ID NO: 1305269 - RNA, 25 nt, Human
ccucagagccccgacacccaagcac

SEQ ID NO: 1305270 - RNA, 19 nt, Human
cgacacccaagcacugcca

SEQ ID NO: 1305271 - RNA, 23 nt, Human
cgggagaaaccgcucccgccucg

SEQ ID NO: 1305272 - RNA, 18 nt, Human
cguggagaggugaggccg

SEQ ID NO: 1305273 - RNA, 25 nt, Human
gaaacaggggaggcagagccagagg

SEQ ID NO: 1305274 - RNA, 19 nt, Human
gacguucccgucgaccccg

SEQ ID NO: 1305275 - RNA, 18 nt, Human
gacugguuucuaagacaa

SEQ ID NO: 1305276 - RNA, 19 nt, Human
gaggcagagccagagggag

SEQ ID NO: 1305277 - RNA, 19 nt, Human
gcacugccacagagggcuc

SEQ ID NO: 1305278 - RNA, 20 nt, Human
gccagagcgagaggcaucca

SEQ ID NO: 1305279 - RNA, 24 nt, Human
gccccugagaaacaggggaggcag

SEQ ID NO: 1305280 - RNA, 19 nt, Human
ggacugggaagucaucuuu

SEQ ID NO: 1305281 - RNA, 19 nt, Human
ggaggagagaguagaggcc

SEQ ID NO: 1305282 - RNA, 19 nt, Human
gggaggcagagccagaggg

SEQ ID NO: 1305283 - RNA, 24 nt, Human
uaaggggugggguuccuaaagggu

SEQ ID NO: 1305284 - RNA, 21 nt, Human
uacagcaccgugccaccgcca

SEQ ID NO: 1305285 - RNA, 18 nt, Human
uccagugacagggacugu

SEQ ID NO: 1305286 - RNA, 19 nt, Human
ugccacagagggcuccugc

SEQ ID NO: 1305287 - RNA, 19 nt, Human
ugugacgggagaaaccgcu

SEQ ID NO: 1305288 - RNA, 24 nt, Human
uucccggcuuccucuugcugacug

SEQ ID NO: 1305289 - RNA, 18 nt, Human
aaagugcugggauuacaa

SEQ ID NO: 1305290 - RNA, 24 nt, Human
aaagugcugggauuacaaguguga

SEQ ID NO: 1305291 - RNA, 19 nt, Human
aacugaacucccaggugcc

SEQ ID NO: 1305292 - RNA, 20 nt, Human
aagcguguuggggucuccuc

SEQ ID NO: 1305293 - RNA, 19 nt, Human
aaguagcugggauuauagg

SEQ ID NO: 1305294 - RNA, 24 nt, Human
aaguagcugggauuauaggcacac

SEQ ID NO: 1305295 - RNA, 24 nt, Human
aagugauccgccugccuuggcuuc

SEQ ID NO: 1305296 - RNA, 18 nt, Human
aagugcugggauuacaag

SEQ ID NO: 1305297 - RNA, 19 nt, Human
aagugcugggauuacaagu

SEQ ID NO: 1305298 - RNA, 26 nt, Human
aagugcugggauuacaagugugagcc

SEQ ID NO: 1305299 - RNA, 22 nt, Human
aauagagacaggguuucaccau

SEQ ID NO: 1305300 - RNA, 21 nt, Human
aaucaggaaggucggaaucuc

SEQ ID NO: 1305301 - RNA, 18 nt, Human
acaggguuucaccauguu

SEQ ID NO: 1305302 - RNA, 21 nt, Human
acaggguuucaccauguuggc

SEQ ID NO: 1305303 - RNA, 24 nt, Human
acaggguuucaccauguuggccag

SEQ ID NO: 1305304 - RNA, 18 nt, Human
accacuguccaaaagcau

SEQ ID NO: 1305305 - RNA, 18 nt, Human
accauguuggccaggcug

SEQ ID NO: 1305306 - RNA, 23 nt, Human
acccaggcuggaguguaguggug

SEQ ID NO: 1305307 - RNA, 20 nt, Human
acccuucuuuuuuuucuucu

SEQ ID NO: 1305308 - RNA, 21 nt, Human
accgccuggcuaauuuuugua

SEQ ID NO: 1305309 - RNA, 25 nt, Human
acucugucacccagacuggagugca

SEQ ID NO: 1305310 - RNA, 24 nt, Human
aggcacacaccacuaccgccuggc

SEQ ID NO: 1305311 - RNA, 19 nt, Human
aggcucaagugauucuccu

SEQ ID NO: 1305312 - RNA, 24 nt, Human
agugcaguagcacgaucucggcuc

SEQ ID NO: 1305313 - RNA, 24 nt, Human
agugcugggauuacaagugugagc

SEQ ID NO: 1305314 - RNA, 21 nt, Human
aguguaguggugcaaucucag

SEQ ID NO: 1305315 - RNA, 20 nt, Human
aguuauucuccugccucagc

SEQ ID NO: 1305316 - RNA, 18 nt, Human
aucucacucugucaccca

SEQ ID NO: 1305317 - RNA, 24 nt, Human
auuuuuguacuuuuaguagagaug

SEQ ID NO: 1305318 - RNA, 24 nt, Human
caaagugcugggauuacaagugug

SEQ ID NO: 1305319 - RNA, 23 nt, Human
caaccucuuccucccaggcucaa

SEQ ID NO: 1305320 - RNA, 22 nt, Human
caagugauccgccugccuuggc

SEQ ID NO: 1305321 - RNA, 22 nt, Human
caagugauucuccugucuuagc

SEQ ID NO: 1305322 - RNA, 21 nt, Human
caccauguuggccaggcuggu

SEQ ID NO: 1305323 - RNA, 24 nt, Human
caccauguuggccaggcuggucuc

SEQ ID NO: 1305324 - RNA, 27 nt, Human
caccauguuggccaggcuggucucaaa

SEQ ID NO: 1305325 - RNA, 24 nt, Human
cacccaggcuggaguguaguggug

SEQ ID NO: 1305326 - RNA, 23 nt, Human
cacucugucacccagacuggagu

SEQ ID NO: 1305327 - RNA, 24 nt, Human
cacucugucacccagacuggagug

SEQ ID NO: 1305328 - RNA, 21 nt, Human
cacugcaaccucuuccuccca

SEQ ID NO: 1305329 - RNA, 24 nt, Human
cacugcacccagccugaauuucuc

SEQ ID NO: 1305330 - RNA, 24 nt, Human
caggguuucaccauguuggccagg

SEQ ID NO: 1305331 - RNA, 28 nt, Human
caucucccggauuccaguuauucuccuu

SEQ ID NO: 1305332 - RNA, 24 nt, Human
cauguuggccaggcuggucucaaa

SEQ ID NO: 1305333 - RNA, 24 nt, Human
cauuuuguacuuuuaauagagaca

SEQ ID NO: 1305334 - RNA, 20 nt, Human
ccaaagugcugggauuacaa

SEQ ID NO: 1305335 - RNA, 21 nt, Human
ccaaagugcugggauuacaag

SEQ ID NO: 1305336 - RNA, 24 nt, Human
ccaaagugcugggauuacaagugu

SEQ ID NO: 1305337 - RNA, 19 nt, Human
ccacugcacccagccugaa

SEQ ID NO: 1305338 - RNA, 20 nt, Human
ccacugcacccagccugaau

SEQ ID NO: 1305339 - RNA, 23 nt, Human
ccagcagaggcuguguccucucc

SEQ ID NO: 1305340 - RNA, 24 nt, Human
ccaguuauucuccugccucagccu

SEQ ID NO: 1305341 - RNA, 20 nt, Human
cccaaccucagaccacuguc

SEQ ID NO: 1305342 - RNA, 23 nt, Human
cccaaguagcugggauuauaggc

SEQ ID NO: 1305343 - RNA, 24 nt, Human
cccaaguagcugggauuauaggca

SEQ ID NO: 1305344 - RNA, 23 nt, Human
cccaggcucaagugauucuccuc

SEQ ID NO: 1305345 - RNA, 20 nt, Human
ccgccuggcuaauuuuugua

SEQ ID NO: 1305346 - RNA, 21 nt, Human
ccucaagugauccgccugccu

SEQ ID NO: 1305347 - RNA, 24 nt, Human
ccucccaggcucaagugauucucc

SEQ ID NO: 1305348 - RNA, 24 nt, Human
ccucucagguagcugggauuacag

SEQ ID NO: 1305349 - RNA, 22 nt, Human
ccugccuuggcuucccaaagug

SEQ ID NO: 1305350 - RNA, 22 nt, Human
ccuggagauccugggugaaugg

SEQ ID NO: 1305351 - RNA, 18 nt, Human
ccuggccucaagugaucc

SEQ ID NO: 1305352 - RNA, 18 nt, Human
ccuggccucaagugaucc

SEQ ID NO: 1305353 - RNA, 21 nt, Human
ccuggccucaagugauccgcc

SEQ ID NO: 1305354 - RNA, 23 nt, Human
ccuggccucaagugauccgccug

SEQ ID NO: 1305355 - RNA, 23 nt, Human
cucaagugauccgccugccuugg

SEQ ID NO: 1305356 - RNA, 18 nt, Human
cucaagugauucuccugu

SEQ ID NO: 1305357 - RNA, 24 nt, Human
cucacugcaacaugcaucucccgg

SEQ ID NO: 1305358 - RNA, 19 nt, Human
cucacugcaaccucuuccu

SEQ ID NO: 1305359 - RNA, 24 nt, Human
cucacugcaaccucuuccucccag

SEQ ID NO: 1305360 - RNA, 24 nt, Human
cucagccucucagguagcugggau

SEQ ID NO: 1305361 - RNA, 23 nt, Human
cucagguagcugggauuacaggu

SEQ ID NO: 1305362 - RNA, 24 nt, Human
cucagguagcugggauuacaggug

SEQ ID NO: 1305363 - RNA, 20 nt, Human
cucaugccaaccuggcaacc

SEQ ID NO: 1305364 - RNA, 19 nt, Human
cucccaggcucaagugauu

SEQ ID NO: 1305365 - RNA, 25 nt, Human
cucccaggcucaagugauucuccug

SEQ ID NO: 1305366 - RNA, 20 nt, Human
cucccaggugccgacagagu

SEQ ID NO: 1305367 - RNA, 23 nt, Human
cucccggauuccaguuauucucc

SEQ ID NO: 1305368 - RNA, 24 nt, Human
cuccugccacugucccaaccucag

SEQ ID NO: 1305369 - RNA, 23 nt, Human
cugcaaccucuuccucccaggcu

SEQ ID NO: 1305370 - RNA, 24 nt, Human
cugcaaccucuuccucccaggcuc

SEQ ID NO: 1305371 - RNA, 20 nt, Human
cugccaggcugaucucuugu

SEQ ID NO: 1305372 - RNA, 23 nt, Human
cugccucagccucucagguagcu

SEQ ID NO: 1305373 - RNA, 19 nt, Human
cugggugaaugguaucucc

SEQ ID NO: 1305374 - RNA, 23 nt, Human
cugucuuagccucccaaguagcu

SEQ ID NO: 1305375 - RNA, 23 nt, Human
cuuagccucccaaguagcuggga

SEQ ID NO: 1305376 - RNA, 18 nt, Human
cuuccucccaggcucaag

SEQ ID NO: 1305377 - RNA, 21 nt, Human
cuugcuuugucacccaggcug

SEQ ID NO: 1305378 - RNA, 24 nt, Human
cuugcuuugucacccaggcuggag

SEQ ID NO: 1305379 - RNA, 19 nt, Human
cuuuuaguagagauggggu

SEQ ID NO: 1305380 - RNA, 22 nt, Human
gacagaaucuugcuuugucacc

SEQ ID NO: 1305381 - RNA, 18 nt, Human
gauuacaagugugagcca

SEQ ID NO: 1305382 - RNA, 19 nt, Human
gauuacaagugugagccac

SEQ ID NO: 1305383 - RNA, 23 nt, Human
gauuacaagugugagccacugca

SEQ ID NO: 1305384 - RNA, 18 nt, Human
gauuacaggugccugcca

SEQ ID NO: 1305385 - RNA, 21 nt, Human
gccauaaugcccagcuccauu

SEQ ID NO: 1305386 - RNA, 22 nt, Human
gccuuggcuucccaaagugcug

SEQ ID NO: 1305387 - RNA, 24 nt, Human
gccuuggcuucccaaagugcuggg

SEQ ID NO: 1305388 - RNA, 21 nt, Human
gcucacugcaaccucuuccuc

SEQ ID NO: 1305389 - RNA, 23 nt, Human
gcuggucucaaacuccuggccuc

SEQ ID NO: 1305390 - RNA, 24 nt, Human
gcuugaagcguguuggggucuccu

SEQ ID NO: 1305391 - RNA, 24 nt, Human
ggcuggucucaaacuccuggccuc

SEQ ID NO: 1305392 - RNA, 22 nt, Human
ggguuucaccauguuggccagg

SEQ ID NO: 1305393 - RNA, 18 nt, Human
guagcugggauuacaggu

SEQ ID NO: 1305394 - RNA, 20 nt, Human
guagcugggauuacaggugc

SEQ ID NO: 1305395 - RNA, 18 nt, Human
guagcugggauuauaggc

SEQ ID NO: 1305396 - RNA, 18 nt, Human
guccaacugaacucccag

SEQ ID NO: 1305397 - RNA, 24 nt, Human
gugauucuccugucuuagccuccc

SEQ ID NO: 1305398 - RNA, 23 nt, Human
uaacugccaggcugaucucuugu

SEQ ID NO: 1305399 - RNA, 24 nt, Human
uaauagagacaggguuucaccaug

SEQ ID NO: 1305400 - RNA, 26 nt, Human
uaauagagacaggguuucaccauguu

SEQ ID NO: 1305401 - RNA, 24 nt, Human
uaauuuuuguacuuuuaguagaga

SEQ ID NO: 1305402 - RNA, 24 nt, Human
uacaagugugagccacugcaccca

SEQ ID NO: 1305403 - RNA, 21 nt, Human
uagagacaggguuucaccaug

SEQ ID NO: 1305404 - RNA, 22 nt, Human
uagagacaggguuucaccaugu

SEQ ID NO: 1305405 - RNA, 19 nt, Human
uauucuccugccucagccu

SEQ ID NO: 1305406 - RNA, 24 nt, Human
ucacccaggcuggaguguaguggu

SEQ ID NO: 1305407 - RNA, 24 nt, Human
ucacugcaacaugcaucucccgga

SEQ ID NO: 1305408 - RNA, 24 nt, Human
ucacugcaaccucuuccucccagg

SEQ ID NO: 1305409 - RNA, 25 nt, Human
ucaggaugggaaagaaaaguagggu

SEQ ID NO: 1305410 - RNA, 21 nt, Human
ucagguagcugggauuacagg

SEQ ID NO: 1305411 - RNA, 18 nt, Human
ucccaaagugcugggauu

SEQ ID NO: 1305412 - RNA, 23 nt, Human
ucccaaagugcugggauuacaag

SEQ ID NO: 1305413 - RNA, 24 nt, Human
ucccaaguagcugggauuauaggc

SEQ ID NO: 1305414 - RNA, 21 nt, Human
ucccaggcucaagugauucuc

SEQ ID NO: 1305415 - RNA, 24 nt, Human
ucccaggcucaagugauucuccug

SEQ ID NO: 1305416 - RNA, 21 nt, Human
ucccaggugccgacagagucc

SEQ ID NO: 1305417 - RNA, 18 nt, Human
uccccagguucuccuucc

SEQ ID NO: 1305418 - RNA, 21 nt, Human
uccccagguucuccuuccuga

SEQ ID NO: 1305419 - RNA, 21 nt, Human
ucccggauuccaguuauucuc

SEQ ID NO: 1305420 - RNA, 24 nt, Human
ucccggauuccaguuauucuccug

SEQ ID NO: 1305421 - RNA, 21 nt, Human
uccugggugaaugguaucucc

SEQ ID NO: 1305422 - RNA, 18 nt, Human
uccuuggucuucuucugg

SEQ ID NO: 1305423 - RNA, 24 nt, Human
ucucacucugucacccagacugga

SEQ ID NO: 1305424 - RNA, 26 nt, Human
ucucacucugucacccagacuggagu

SEQ ID NO: 1305425 - RNA, 27 nt, Human
ucucacucugucacccagacuggagug

SEQ ID NO: 1305426 - RNA, 23 nt, Human
ucucagguagcugggauuacagg

SEQ ID NO: 1305427 - RNA, 24 nt, Human
ucucagguagcugggauuacaggu

SEQ ID NO: 1305428 - RNA, 24 nt, Human
ucuccugccucagccucucaggua

SEQ ID NO: 1305429 - RNA, 26 nt, Human
ucuccugucuuagccucccaaguagc

SEQ ID NO: 1305430 - RNA, 24 nt, Human
ucugucacccagacuggagugcag

SEQ ID NO: 1305431 - RNA, 19 nt, Human
ucuuccucccaggcucaag

SEQ ID NO: 1305432 - RNA, 22 nt, Human
ucuugcuuugucacccaggcug

SEQ ID NO: 1305433 - RNA, 23 nt, Human
ucuugcuuugucacccaggcugg

SEQ ID NO: 1305434 - RNA, 24 nt, Human
ucuugcuuugucacccaggcugga

SEQ ID NO: 1305435 - RNA, 18 nt, Human
ucuuuuuuuuuuuuuuuu

SEQ ID NO: 1305436 - RNA, 21 nt, Human
ugaauuucuccauucuuccca

SEQ ID NO: 1305437 - RNA, 23 nt, Human
ugacccuucuuuuuuuucuucuu

SEQ ID NO: 1305438 - RNA, 22 nt, Human
ugcaguagcacgaucucggcuc

SEQ ID NO: 1305439 - RNA, 24 nt, Human
ugccucagccucucagguagcugg

SEQ ID NO: 1305440 - RNA, 19 nt, Human
ugccuuggcuucccaaagu

SEQ ID NO: 1305441 - RNA, 27 nt, Human
ugcugggauuacaagugugagccacug

SEQ ID NO: 1305442 - RNA, 24 nt, Human
ugcuuugucacccaggcuggagug

SEQ ID NO: 1305443 - RNA, 23 nt, Human
uggagugcaguagcacgaucucg

SEQ ID NO: 1305444 - RNA, 24 nt, Human
uggagugcaguagcacgaucucgg

SEQ ID NO: 1305445 - RNA, 23 nt, Human
uggaguguaguggugcaaucuca

SEQ ID NO: 1305446 - RNA, 24 nt, Human
uggaguguaguggugcaaucucag

SEQ ID NO: 1305447 - RNA, 24 nt, Human
uggccaggcuggucucaaacuccu

SEQ ID NO: 1305448 - RNA, 18 nt, Human
uggccucaagugauccgc

SEQ ID NO: 1305449 - RNA, 24 nt, Human
uggccucaagugauccgccugccu

SEQ ID NO: 1305450 - RNA, 19 nt, Human
ugggagaagucaggagugg

SEQ ID NO: 1305451 - RNA, 24 nt, Human
ugggagaagucaggaguggagaac

SEQ ID NO: 1305452 - RNA, 19 nt, Human
ugggauuacaagugugagc

SEQ ID NO: 1305453 - RNA, 21 nt, Human
ugggauuacaagugugagcca

SEQ ID NO: 1305454 - RNA, 22 nt, Human
ugggauuacaagugugagccac

SEQ ID NO: 1305455 - RNA, 22 nt, Human
ugggauuacaagugugagccac

SEQ ID NO: 1305456 - RNA, 24 nt, Human
ugggauuacaagugugagccacug

SEQ ID NO: 1305457 - RNA, 19 nt, Human
ugggauuacaggugccugc

SEQ ID NO: 1305458 - RNA, 21 nt, Human
ugggauuacaggugccugcca

SEQ ID NO: 1305459 - RNA, 21 nt, Human
ugggauuacaggugccugcca

SEQ ID NO: 1305460 - RNA, 22 nt, Human
ugggauuacaggugccugccau

SEQ ID NO: 1305461 - RNA, 21 nt, Human
ugggauuauaggcacacacca

SEQ ID NO: 1305462 - RNA, 22 nt, Human
ugggauuauaggcacacaccac

SEQ ID NO: 1305463 - RNA, 24 nt, Human
uggugcaaucucagcucacugcaa

SEQ ID NO: 1305464 - RNA, 20 nt, Human
uguacaugcccguuucagag

SEQ ID NO: 1305465 - RNA, 22 nt, Human
uguaguggugcaaucucagcuc

SEQ ID NO: 1305466 - RNA, 19 nt, Human
ugucacccaggcuggagug

SEQ ID NO: 1305467 - RNA, 21 nt, Human
uguccaaaagcaucuucaggg

SEQ ID NO: 1305468 - RNA, 22 nt, Human
ugucccagcagaggcugugucc

SEQ ID NO: 1305469 - RNA, 19 nt, Human
uguccuggagauccugggu

SEQ ID NO: 1305470 - RNA, 24 nt, Human
uuaauagagacaggguuucaccau

SEQ ID NO: 1305471 - RNA, 18 nt, Human
uuaguagagaugggguuu

SEQ ID NO: 1305472 - RNA, 21 nt, Human
uuccaguuauucuccugccuc

SEQ ID NO: 1305473 - RNA, 18 nt, Human
uuccugaccucugacccu

SEQ ID NO: 1305474 - RNA, 23 nt, Human
uucuucccacacacccuccccag

SEQ ID NO: 1305475 - RNA, 19 nt, Human
uugaagcguguuggggucu

SEQ ID NO: 1305476 - RNA, 24 nt, Human
uugaagcguguuggggucuccucu

SEQ ID NO: 1305477 - RNA, 24 nt, Human
uugcuuugucacccaggcuggagu

SEQ ID NO: 1305478 - RNA, 24 nt, Human
uuucaccauguuggccaggcuggu

SEQ ID NO: 1305479 - RNA, 20 nt, Human
uuuuuguacuuuuaguagag

SEQ ID NO: 1305480 - RNA, 26 nt, Human
uuuuuuuuuuuugagauagcaucuca

SEQ ID NO: 1305481 - RNA, 27 nt, Human
uuuuuuuuuuuuuuuuuuuuuuugggg

SEQ ID NO: 1305482 - RNA, 27 nt, Human
accccaccccugcuccuuggaggacaa

SEQ ID NO: 1305483 - RNA, 21 nt, Human
aucuuugucccaggccaggag

SEQ ID NO: 1305484 - RNA, 23 nt, Human
augguccagguucuucuagauga

SEQ ID NO: 1305485 - RNA, 24 nt, Human
cacaaaugguuccucuccuccuuc

SEQ ID NO: 1305486 - RNA, 22 nt, Human
cccaccccugcuccuuggagga

SEQ ID NO: 1305487 - RNA, 19 nt, Human
ccccuggguccgguguucu

SEQ ID NO: 1305488 - RNA, 23 nt, Human
ccccuggguccgguguucuucuc

SEQ ID NO: 1305489 - RNA, 20 nt, Human
ccgaugaccucaggccucca

SEQ ID NO: 1305490 - RNA, 25 nt, Human
ccucaagcagccuguugaaggccuc

SEQ ID NO: 1305491 - RNA, 19 nt, Human
cuagaaguaccccacccca

SEQ ID NO: 1305492 - RNA, 22 nt, Human
cucuccuccuuccugaugucug

SEQ ID NO: 1305493 - RNA, 19 nt, Human
ggacuccuagaaguacccc

SEQ ID NO: 1305494 - RNA, 23 nt, Human
uaaaguuccugcugaaaauccac

SEQ ID NO: 1305495 - RNA, 19 nt, Human
uaccccaccccaccccugc

SEQ ID NO: 1305496 - RNA, 22 nt, Human
uagaugaucugcacaaaugguu

SEQ ID NO: 1305497 - RNA, 20 nt, Human
ucaagcagccuguugaaggc

SEQ ID NO: 1305498 - RNA, 25 nt, Human
ucucaggccgaugaccucaggccuc

SEQ ID NO: 1305499 - RNA, 21 nt, Human
ucugcacaaaugguuccucuc

SEQ ID NO: 1305500 - RNA, 22 nt, Human
ugaucugcacaaaugguuccuc

SEQ ID NO: 1305501 - RNA, 23 nt, Human
uggaauaaaguuccugcugaaaa

SEQ ID NO: 1305502 - RNA, 19 nt, Human
agaggcggaggggagaugg

SEQ ID NO: 1305503 - RNA, 19 nt, Human
aggcggaggggagaugggu

SEQ ID NO: 1305504 - RNA, 24 nt, Human
aggcggaggggagaugggucggcu

SEQ ID NO: 1305505 - RNA, 18 nt, Human
cagccggggcgcgggcgg

SEQ ID NO: 1305506 - RNA, 21 nt, Human
ccagccguuccuauggcgaca

SEQ ID NO: 1305507 - RNA, 24 nt, Human
cccgggcuccgcucggccgcuccc

SEQ ID NO: 1305508 - RNA, 18 nt, Human
ccgcucccucuccgcaga

SEQ ID NO: 1305509 - RNA, 19 nt, Human
gcagccaaagaggcggagg

SEQ ID NO: 1305510 - RNA, 18 nt, Human
ggagucuccgggacccgg

SEQ ID NO: 1305511 - RNA, 22 nt, Human
ggccggaggugcaacugcagcc

SEQ ID NO: 1305512 - RNA, 18 nt, Human
ggcgcgggcgguugcgcu

SEQ ID NO: 1305513 - RNA, 21 nt, Human
ggcggaggggagauggguccc

SEQ ID NO: 1305514 - RNA, 23 nt, Human
gggacagccggggcgcgggcggu

SEQ ID NO: 1305515 - RNA, 24 nt, Human
uaaccuccaacgccagccguuccu

SEQ ID NO: 1305516 - RNA, 22 nt, Human
ucuccgggacccgggcuccgcu

SEQ ID NO: 1305517 - RNA, 18 nt, Human
uggccggaggugcaacug

SEQ ID NO: 1305518 - RNA, 30 nt, Human
caccuuugccaucuccccauguucccaauu

SEQ ID NO: 1305519 - RNA, 23 nt, Human
ccacucucccuuugaucugcauu

SEQ ID NO: 1305520 - RNA, 18 nt, Human
ccccauguucccaauuca

SEQ ID NO: 1305521 - RNA, 19 nt, Human
cugcauuuguauuucuucu

SEQ ID NO: 1305522 - RNA, 20 nt, Human
gaauaucucuugaagucugg

SEQ ID NO: 1305523 - RNA, 18 nt, Human
gauguucuucaguggcag

SEQ ID NO: 1305524 - RNA, 24 nt, Human
gccaucuccccauguucccaauuc

SEQ ID NO: 1305525 - RNA, 21 nt, Human
gucuggaaaucucaaccacuc

SEQ ID NO: 1305526 - RNA, 22 nt, Human
uaacuggugaacgccaucaauc

SEQ ID NO: 1305527 - RNA, 18 nt, Human
ucagguugucuuucaguc

SEQ ID NO: 1305528 - RNA, 20 nt, Human
ucaguugcccccacaacuaa

SEQ ID NO: 1305529 - RNA, 24 nt, Human
ucaucuucaccuuugccaucuccc

SEQ ID NO: 1305530 - RNA, 19 nt, Human
ucucaaccacucucccuuu

SEQ ID NO: 1305531 - RNA, 21 nt, Human
ugcauuuguauuucuucuggg

SEQ ID NO: 1305532 - RNA, 22 nt, Human
ugucuucguugccuuccuugau

SEQ ID NO: 1305533 - RNA, 27 nt, Human
uuaauggccucucuuaugucuucguug

SEQ ID NO: 1305534 - RNA, 21 nt, Human
uucaccuuugccaucucccca

SEQ ID NO: 1305535 - RNA, 18 nt, Human
uuccuugauauuuucagu

SEQ ID NO: 1305536 - RNA, 26 nt, Human
uugccuuccuugauauuuucaguugc

SEQ ID NO: 1305537 - RNA, 21 nt, Human
uuguuuuuaauggccucucuu

SEQ ID NO: 1305538 - RNA, 19 nt, Human
aaggcugaagauuacugac

SEQ ID NO: 1305539 - RNA, 21 nt, Human
aauuuccuccucaacacaggc

SEQ ID NO: 1305540 - RNA, 19 nt, Human
accggcgagcggcuccucc

SEQ ID NO: 1305541 - RNA, 23 nt, Human
agacaggcugcucaggucggacc

SEQ ID NO: 1305542 - RNA, 24 nt, Human
agacaggcugcucaggucggaccc

SEQ ID NO: 1305543 - RNA, 18 nt, Human
auaauuuccuccucaaca

SEQ ID NO: 1305544 - RNA, 20 nt, Human
caaggccgaagaaaacauuc

SEQ ID NO: 1305545 - RNA, 23 nt, Human
caguuccaaguggaaggcugaag

SEQ ID NO: 1305546 - RNA, 19 nt, Human
cccugaacugccuugaccc

SEQ ID NO: 1305547 - RNA, 20 nt, Human
ccgugggccucucucugucu

SEQ ID NO: 1305548 - RNA, 22 nt, Human
ccucucucugucugaagacagg

SEQ ID NO: 1305549 - RNA, 24 nt, Human
cucaacacaggcuggagauauacu

SEQ ID NO: 1305550 - RNA, 23 nt, Human
cuuugacccugaacugccuugac

SEQ ID NO: 1305551 - RNA, 19 nt, Human
gcccggccccuccccuccc

SEQ ID NO: 1305552 - RNA, 18 nt, Human
gcggaggcggcaaaaccg

SEQ ID NO: 1305553 - RNA, 20 nt, Human
gcugcgaaggcaaaggcgga

SEQ ID NO: 1305554 - RNA, 23 nt, Human
gcugcgaaggcaaaggcggaggc

SEQ ID NO: 1305555 - RNA, 19 nt, Human
ggccccuccccuccccgcc

SEQ ID NO: 1305556 - RNA, 19 nt, Human
ggcuccucccgcccggccc

SEQ ID NO: 1305557 - RNA, 18 nt, Human
gugggccucucucugucu

SEQ ID NO: 1305558 - RNA, 24 nt, Human
uacuuugacccugaacugccuuga

SEQ ID NO: 1305559 - RNA, 21 nt, Human
ucccgcccggcccggcccggc

SEQ ID NO: 1305560 - RNA, 20 nt, Human
ucucucugucugaagacagg

SEQ ID NO: 1305561 - RNA, 24 nt, Human
ucuuuucauuauuauuguaauaau

SEQ ID NO: 1305562 - RNA, 18 nt, Human
ugcccuggaggcggcugc

SEQ ID NO: 1305563 - RNA, 25 nt, Human
ugccuugacccuuaauugauaacuc

SEQ ID NO: 1305564 - RNA, 18 nt, Human
ugguucuuuggagaaaua

SEQ ID NO: 1305565 - RNA, 23 nt, Human
uucaaggccgaagaaaacauuca

SEQ ID NO: 1305566 - RNA, 21 nt, Human
uuccaaguggaaggcugaaga

SEQ ID NO: 1305567 - RNA, 25 nt, Human
uuuauugcuauuaucacucuuuuca

SEQ ID NO: 1305568 - RNA, 19 nt, Human
aagcacucagaaaaggggc

SEQ ID NO: 1305569 - RNA, 23 nt, Human
acuuccaagcacucagaaaaggg

SEQ ID NO: 1305570 - RNA, 25 nt, Human
agagaggcaaccgcucugugucuuc

SEQ ID NO: 1305571 - RNA, 19 nt, Human
aggaaucacagguuaaucu

SEQ ID NO: 1305572 - RNA, 18 nt, Human
aggagagagcaggcggug

SEQ ID NO: 1305573 - RNA, 19 nt, Human
auccugccguuuucuucug

SEQ ID NO: 1305574 - RNA, 24 nt, Human
cacucagaaaaggggcauggccuc

SEQ ID NO: 1305575 - RNA, 26 nt, Human
cagcugcacugccagaaucggagcgc

SEQ ID NO: 1305576 - RNA, 22 nt, Human
caggaaggccuggguuuuggug

SEQ ID NO: 1305577 - RNA, 19 nt, Human
caggagagagcaggcggug

SEQ ID NO: 1305578 - RNA, 23 nt, Human
ccuccacguccuccagggcggcu

SEQ ID NO: 1305579 - RNA, 19 nt, Human
cgccucugaauuuauaccc

SEQ ID NO: 1305580 - RNA, 23 nt, Human
cggacaggaacuggcucuuuccg

SEQ ID NO: 1305581 - RNA, 21 nt, Human
cggcagcggugacccagggcc

SEQ ID NO: 1305582 - RNA, 21 nt, Human
cgggggaaaaggcguggucac

SEQ ID NO: 1305583 - RNA, 24 nt, Human
cuccaggacuguggcugccucccc

SEQ ID NO: 1305584 - RNA, 21 nt, Human
cuggcccuggaucuuucagga

SEQ ID NO: 1305585 - RNA, 20 nt, Human
cuggucaaacucccaaaaau

SEQ ID NO: 1305586 - RNA, 18 nt, Human
gcugaguucgugcgcgug

SEQ ID NO: 1305587 - RNA, 20 nt, Human
ggccagccaggaaucacagg

SEQ ID NO: 1305588 - RNA, 18 nt, Human
gggggaaaaggcgugguc

SEQ ID NO: 1305589 - RNA, 20 nt, Human
ggugcauggacggacaggaa

SEQ ID NO: 1305590 - RNA, 24 nt, Human
ggugcauggacggacaggaacugg

SEQ ID NO: 1305591 - RNA, 23 nt, Human
ucagaaaucguuggcugaguucg

SEQ ID NO: 1305592 - RNA, 21 nt, Human
uccaggaaggccuggguuuug

SEQ ID NO: 1305593 - RNA, 21 nt, Human
ucccacagcugcacugccaga

SEQ ID NO: 1305594 - RNA, 20 nt, Human
uccccaauccuggggaaccu

SEQ ID NO: 1305595 - RNA, 18 nt, Human
uccccuagcaccuccagg

SEQ ID NO: 1305596 - RNA, 24 nt, Human
ucuccaggacuguggcugccuccc

SEQ ID NO: 1305597 - RNA, 18 nt, Human
ugagaagggcguuguggg

SEQ ID NO: 1305598 - RNA, 22 nt, Human
ugagcuuccaacuccccaaucc

SEQ ID NO: 1305599 - RNA, 23 nt, Human
ugagcuuccaacuccccaauccu

SEQ ID NO: 1305600 - RNA, 18 nt, Human
ugauuccggguccugucc

SEQ ID NO: 1305601 - RNA, 21 nt, Human
ugggaggacaagcgagucuca

SEQ ID NO: 1305602 - RNA, 19 nt, Human
uggucaaacucccaaaaau

SEQ ID NO: 1305603 - RNA, 22 nt, Human
ugugggcagcuccaugccaugg

SEQ ID NO: 1305604 - RNA, 22 nt, Human
uguucaggcucaggccucucca

SEQ ID NO: 1305605 - RNA, 19 nt, Human
ugaagucauuguucuuaua

SEQ ID NO: 1305606 - RNA, 20 nt, Human
ugggguccccuuccuuugcc

SEQ ID NO: 1305607 - RNA, 22 nt, Human
ugggguccccuuccuuugccag

SEQ ID NO: 1305608 - RNA, 21 nt, Human
uuugaagucauuguucuuaua

SEQ ID NO: 1305609 - RNA, 24 nt, Human
acggcgcuggucggcugaggcagg

SEQ ID NO: 1305610 - RNA, 22 nt, Human
aggacggggacaggggcgacgg

SEQ ID NO: 1305611 - RNA, 27 nt, Human
caccacagcgucaggggcugaggcccg

SEQ ID NO: 1305612 - RNA, 24 nt, Human
ccccgcuccucccacuucucuuuc

SEQ ID NO: 1305613 - RNA, 18 nt, Human
ccucccacuucucuuucc

SEQ ID NO: 1305614 - RNA, 21 nt, Human
ccucccacuucucuuuccuug

SEQ ID NO: 1305615 - RNA, 18 nt, Human
ccuccgcagcauccucgc

SEQ ID NO: 1305616 - RNA, 24 nt, Human
ccucugcggccuuucccuccucuc

SEQ ID NO: 1305617 - RNA, 18 nt, Human
ccuuggucugggcugcac

SEQ ID NO: 1305618 - RNA, 21 nt, Human
cgacggcgaggcgcggcggag

SEQ ID NO: 1305619 - RNA, 25 nt, Human
cggagcaggacucucggcuucuccu

SEQ ID NO: 1305620 - RNA, 24 nt, Human
cggccucugcggccuuucccuccu

SEQ ID NO: 1305621 - RNA, 22 nt, Human
cggcgaggcgcggcggagucac

SEQ ID NO: 1305622 - RNA, 18 nt, Human
cggcgccggagcaggacu

SEQ ID NO: 1305623 - RNA, 23 nt, Human
cucgcggccucugcggccuuucc

SEQ ID NO: 1305624 - RNA, 24 nt, Human
cucgcggccucugcggccuuuccc

SEQ ID NO: 1305625 - RNA, 22 nt, Human
cugcggccuuucccuccucucg

SEQ ID NO: 1305626 - RNA, 20 nt, Human
gagcguagucguccugagcc

SEQ ID NO: 1305627 - RNA, 19 nt, Human
gcugcaaccgccacggccg

SEQ ID NO: 1305628 - RNA, 21 nt, Human
ggugcuccggcggcgccggag

SEQ ID NO: 1305629 - RNA, 21 nt, Human
ucagugaagaaauuagcaggg

SEQ ID NO: 1305630 - RNA, 22 nt, Human
ucccuuauagaaaugguggagu

SEQ ID NO: 1305631 - RNA, 25 nt, Human
uccgcagcauccucgcggccucugc

SEQ ID NO: 1305632 - RNA, 18 nt, Human
uccugagccgcggaggac

SEQ ID NO: 1305633 - RNA, 21 nt, Human
ucugcggccuuucccuccucu

SEQ ID NO: 1305634 - RNA, 22 nt, Human
uggagucagugaagaaauuagc

SEQ ID NO: 1305635 - RNA, 18 nt, Human
uggucggcugaggcaggc

SEQ ID NO: 1305636 - RNA, 23 nt, Human
uggucugggcugcacaacuaggc

SEQ ID NO: 1305637 - RNA, 23 nt, Human
uucucuuuccuuggucugggcug

SEQ ID NO: 1305638 - RNA, 22 nt, Human
ccucuaagauuauaguuauuaa

SEQ ID NO: 1305639 - RNA, 23 nt, Human
aaaacaccagcaccaagaguuca

SEQ ID NO: 1305640 - RNA, 20 nt, Human
aacaccagcaccaagaguuc

SEQ ID NO: 1305641 - RNA, 18 nt, Human
aagaauggccucaaccuc

SEQ ID NO: 1305642 - RNA, 18 nt, Human
agaguucauccugguccu

SEQ ID NO: 1305643 - RNA, 19 nt, Human
agugaacaugggcaggaua

SEQ ID NO: 1305644 - RNA, 21 nt, Human
auaaagcuuccacccuccccu

SEQ ID NO: 1305645 - RNA, 18 nt, Human
caaaacaccagcaccaag

SEQ ID NO: 1305646 - RNA, 23 nt, Human
caaaacaccagcaccaagaguuc

SEQ ID NO: 1305647 - RNA, 20 nt, Human
cacaucuucagcaccuggga

SEQ ID NO: 1305648 - RNA, 26 nt, Human
caccagcaccaagaguucauccuggu

SEQ ID NO: 1305649 - RNA, 18 nt, Human
caggccagaaaauaucac

SEQ ID NO: 1305650 - RNA, 18 nt, Human
caggggcucuuucugccc

SEQ ID NO: 1305651 - RNA, 18 nt, Human
caguccuucuccuccguu

SEQ ID NO: 1305652 - RNA, 26 nt, Human
ccaaaacaccagcaccaagaguucau

SEQ ID NO: 1305653 - RNA, 20 nt, Human
ccaaaauccuucuuuauccu

SEQ ID NO: 1305654 - RNA, 18 nt, Human
ccaggccagaaaauauca

SEQ ID NO: 1305655 - RNA, 20 nt, Human
cccuccaaaauccuucuuua

SEQ ID NO: 1305656 - RNA, 26 nt, Human
cccuuccagaagaaccuuccccucca

SEQ ID NO: 1305657 - RNA, 19 nt, Human
cuagacuucaacccuacaa

SEQ ID NO: 1305658 - RNA, 19 nt, Human
cugccaguccuucuccucc

SEQ ID NO: 1305659 - RNA, 18 nt, Human
cugcccaaaacaccagca

SEQ ID NO: 1305660 - RNA, 22 nt, Human
cugggaucugccaguccuucuc

SEQ ID NO: 1305661 - RNA, 21 nt, Human
cuuccacccuccccuuccaga

SEQ ID NO: 1305662 - RNA, 20 nt, Human
cuuccagaagaaccuucccc

SEQ ID NO: 1305663 - RNA, 24 nt, Human
gaaagccaggccagaaaauaucac

SEQ ID NO: 1305664 - RNA, 19 nt, Human
gagagggaaagccaggcca

SEQ ID NO: 1305665 - RNA, 21 nt, Human
gcccaaaacaccagcaccaag

SEQ ID NO: 1305666 - RNA, 18 nt, Human
gcugaauaaagcuuccac

SEQ ID NO: 1305667 - RNA, 26 nt, Human
uaaagcuuccacccuccccuuccaga

SEQ ID NO: 1305668 - RNA, 18 nt, Human
uaaggcauuuccgaaguc

SEQ ID NO: 1305669 - RNA, 25 nt, Human
ucaacccuacaauggagugaacaug

SEQ ID NO: 1305670 - RNA, 19 nt, Human
uccaaaauccuucuuuauc

SEQ ID NO: 1305671 - RNA, 19 nt, Human
uccacccuccccuuccaga

SEQ ID NO: 1305672 - RNA, 22 nt, Human
uccagaagaaccuuccccucca

SEQ ID NO: 1305673 - RNA, 23 nt, Human
ucugagagggaaagccaggccag

SEQ ID NO: 1305674 - RNA, 19 nt, Human
ucuucagcaccugggaucu

SEQ ID NO: 1305675 - RNA, 18 nt, Human
ugaauuacaacaccuagu

SEQ ID NO: 1305676 - RNA, 23 nt, Human
ugagagaaaagaagccucaggcu

SEQ ID NO: 1305677 - RNA, 22 nt, Human
ugggaaaugagagaaaagaagc

SEQ ID NO: 1305678 - RNA, 19 nt, Human
uucaagaauggccucaacc

SEQ ID NO: 1305679 - RNA, 20 nt, Human
uuuccgaaguccuuccaugg

SEQ ID NO: 1305680 - RNA, 20 nt, Human
aauaccggcggggaggggag

SEQ ID NO: 1305681 - RNA, 18 nt, Human
accggcggggaggggagg

SEQ ID NO: 1305682 - RNA, 25 nt, Human
agcagccggcgucuccgccagcgcc

SEQ ID NO: 1305683 - RNA, 22 nt, Human
ccugcuccuuccacugcggccg

SEQ ID NO: 1305684 - RNA, 24 nt, Human
cggcggggaggggaggagcagccg

SEQ ID NO: 1305685 - RNA, 18 nt, Human
cggggaggggaggagcag

SEQ ID NO: 1305686 - RNA, 23 nt, Human
cuaacuguggaugugucuucucc

SEQ ID NO: 1305687 - RNA, 21 nt, Human
gaagaaagugcuaacugugga

SEQ ID NO: 1305688 - RNA, 24 nt, Human
gcagccggcgucuccgccagcgcc

SEQ ID NO: 1305689 - RNA, 25 nt, Human
gccugcuccuuccacugcggccgcc

SEQ ID NO: 1305690 - RNA, 18 nt, Human
uaccggcggggaggggag

SEQ ID NO: 1305691 - RNA, 21 nt, Human
uggaugugucuucuccagaga

SEQ ID NO: 1305692 - RNA, 18 nt, Human
augagucagucguuucuu

SEQ ID NO: 1305693 - RNA, 18 nt, Human
ugagucagucguuucuuc

SEQ ID NO: 1305694 - RNA, 28 nt, Human
aaacaaaaaugggacauccaaacuccag

SEQ ID NO: 1305695 - RNA, 25 nt, Human
aauguaggaguuccuccagguacca

SEQ ID NO: 1305696 - RNA, 22 nt, Human
accaucaguuucccuaguucug

SEQ ID NO: 1305697 - RNA, 20 nt, Human
aggcugucuggccuugggau

SEQ ID NO: 1305698 - RNA, 20 nt, Human
ccaucaguuucccuaguucu

SEQ ID NO: 1305699 - RNA, 23 nt, Human
ggaguuccuccagguacucacuu

SEQ ID NO: 1305700 - RNA, 26 nt, Human
uaaaacaaaaaugggacauccaaacc

SEQ ID NO: 1305701 - RNA, 18 nt, Human
uaggaguuccuccaggua

SEQ ID NO: 1305702 - RNA, 18 nt, Human
uaguucagauggaucuua

SEQ ID NO: 1305703 - RNA, 18 nt, Human
uaguucagauggaucuua

SEQ ID NO: 1305704 - RNA, 22 nt, Human
uaguucagauggaucuuaccag

SEQ ID NO: 1305705 - RNA, 24 nt, Human
uaucacaguuaaaauuauaguuaa

SEQ ID NO: 1305706 - RNA, 19 nt, Human
uauuuaauagagggacacc

SEQ ID NO: 1305707 - RNA, 24 nt, Human
ucuggccuugggauuccaggagga

SEQ ID NO: 1305708 - RNA, 22 nt, Human
uccaccucgcuggaaauaccgc

SEQ ID NO: 1305709 - RNA, 21 nt, Human
gaugcuguccgggcugaugcg

SEQ ID NO: 1305710 - RNA, 21 nt, Human
ugaugcuguccgggcugaugc

SEQ ID NO: 1305711 - RNA, 19 nt, Human
aaauaaacuuaaacuauaa

SEQ ID NO: 1305712 - RNA, 23 nt, Human
aaccucuagcucccuuucggcuu

SEQ ID NO: 1305713 - RNA, 26 nt, Human
aagccacagagacccacucucuuuua

SEQ ID NO: 1305714 - RNA, 19 nt, Human
aagcccuuuuuaggucauc

SEQ ID NO: 1305715 - RNA, 21 nt, Human
aaguauuaaauagugcaaacu

SEQ ID NO: 1305716 - RNA, 24 nt, Human
aaucucuggauuugaaccucuagc

SEQ ID NO: 1305717 - RNA, 26 nt, Human
acaaagaaaucauguuacuucuucca

SEQ ID NO: 1305718 - RNA, 18 nt, Human
agaaugccaccacugccc

SEQ ID NO: 1305719 - RNA, 19 nt, Human
agaaugccaccacugcccc

SEQ ID NO: 1305720 - RNA, 21 nt, Human
agacagagaucuaaccaggcg

SEQ ID NO: 1305721 - RNA, 20 nt, Human
agcacugaucaacaccucca

SEQ ID NO: 1305722 - RNA, 20 nt, Human
agcucccuuucggcuuucug

SEQ ID NO: 1305723 - RNA, 24 nt, Human
agugcaaacuuggggcaaaccaca

SEQ ID NO: 1305724 - RNA, 23 nt, Human
aguucucggccuuuaaacaacuc

SEQ ID NO: 1305725 - RNA, 22 nt, Human
augagcccagagcacauacaaa

SEQ ID NO: 1305726 - RNA, 23 nt, Human
augcugccauuuguuuuccuguc

SEQ ID NO: 1305727 - RNA, 19 nt, Human
auucuuggcaacagaacaa

SEQ ID NO: 1305728 - RNA, 19 nt, Human
auuuaaaaagcucccccaa

SEQ ID NO: 1305729 - RNA, 23 nt, Human
caaaaucccaccaagcacugauc

SEQ ID NO: 1305730 - RNA, 21 nt, Human
caacagaacaaaugaaacaca

SEQ ID NO: 1305731 - RNA, 19 nt, Human
caacugcugcagcucauga

SEQ ID NO: 1305732 - RNA, 24 nt, Human
caccaagcacugaucaacaccucc

SEQ ID NO: 1305733 - RNA, 24 nt, Human
cagagugaacaucagugaaagcca

SEQ ID NO: 1305734 - RNA, 21 nt, Human
caucaaaaaagaguacaacug

SEQ ID NO: 1305735 - RNA, 18 nt, Human
cauguccccagaaugcca

SEQ ID NO: 1305736 - RNA, 18 nt, Human
ccaaaccgagcagucaug

SEQ ID NO: 1305737 - RNA, 21 nt, Human
ccagaaguggcugucucaugg

SEQ ID NO: 1305738 - RNA, 21 nt, Human
ccagaaugccaccacugcccc

SEQ ID NO: 1305739 - RNA, 18 nt, Human
ccagagcacauacaaauc

SEQ ID NO: 1305740 - RNA, 22 nt, Human
ccagcugauguuccacuuguuc

SEQ ID NO: 1305741 - RNA, 23 nt, Human
cccagaaugccaccacugccccu

SEQ ID NO: 1305742 - RNA, 23 nt, Human
cccaggcugggagugggugagac

SEQ ID NO: 1305743 - RNA, 24 nt, Human
ccccagaaugccaccacugccccu

SEQ ID NO: 1305744 - RNA, 27 nt, Human
ccccagaaugccaccacugccccugcc

SEQ ID NO: 1305745 - RNA, 18 nt, Human
ccccaggcugggaguggg

SEQ ID NO: 1305746 - RNA, 18 nt, Human
cccguggauaccuguugc

SEQ ID NO: 1305747 - RNA, 19 nt, Human
cccguggauaccuguugcu

SEQ ID NO: 1305748 - RNA, 23 nt, Human
ccucuagcucccuuucgggggcc

SEQ ID NO: 1305749 - RNA, 18 nt, Human
ccugccccgggacaggcc

SEQ ID NO: 1305750 - RNA, 18 nt, Human
cggccuuuaaacaacucu

SEQ ID NO: 1305751 - RNA, 22 nt, Human
cuaaaggaacuacaauaguaca

SEQ ID NO: 1305752 - RNA, 21 nt, Human
cucccaucaccaauacacaga

SEQ ID NO: 1305753 - RNA, 20 nt, Human
cucccuuucggcuuucuguu

SEQ ID NO: 1305754 - RNA, 18 nt, Human
cucuacaucugagugucc

SEQ ID NO: 1305755 - RNA, 24 nt, Human
cucuacaucugagugucccccaaa

SEQ ID NO: 1305756 - RNA, 21 nt, Human
cugaucaacaccuccagucac

SEQ ID NO: 1305757 - RNA, 21 nt, Human
cugcaaugaauguugcagacg

SEQ ID NO: 1305758 - RNA, 22 nt, Human
cugccauuuguuuuccuguucc

SEQ ID NO: 1305759 - RNA, 24 nt, Human
cuggggggugagccuucuucccca

SEQ ID NO: 1305760 - RNA, 22 nt, Human
cuuaaacuauaaauuagaaaca

SEQ ID NO: 1305761 - RNA, 22 nt, Human
cuucuuccccaggcugggagug

SEQ ID NO: 1305762 - RNA, 20 nt, Human
gagcaaacaaagaaaucaug

SEQ ID NO: 1305763 - RNA, 19 nt, Human
gagcacauacaaauccuaa

SEQ ID NO: 1305764 - RNA, 19 nt, Human
gagcccagagcacauacaa

SEQ ID NO: 1305765 - RNA, 21 nt, Human
gaguuucuucugccauugcag

SEQ ID NO: 1305766 - RNA, 19 nt, Human
gcaacagaacaaaugaaac

SEQ ID NO: 1305767 - RNA, 26 nt, Human
gcuggaacaccagggcuguuucucug

SEQ ID NO: 1305768 - RNA, 21 nt, Human
ggaugcugccauuuguuuucc

SEQ ID NO: 1305769 - RNA, 19 nt, Human
ggccagauccuuggacucu

SEQ ID NO: 1305770 - RNA, 19 nt, Human
ggggaugggguggacucug

SEQ ID NO: 1305771 - RNA, 20 nt, Human
ggggaugggguggacucugg

SEQ ID NO: 1305772 - RNA, 23 nt, Human
guggggagggaggcgggcuuggg

SEQ ID NO: 1305773 - RNA, 25 nt, Human
uaaaaacacauggcagccuauucca

SEQ ID NO: 1305774 - RNA, 21 nt, Human
uaaaggaacuacaauaguaca

SEQ ID NO: 1305775 - RNA, 20 nt, Human
uaaauuagaaacacaaauaa

SEQ ID NO: 1305776 - RNA, 20 nt, Human
uaagaagaaugccaaccagu

SEQ ID NO: 1305777 - RNA, 27 nt, Human
uaagcuaggaaagguuuuccacaucca

SEQ ID NO: 1305778 - RNA, 19 nt, Human
uacaaaguauuaaauagug

SEQ ID NO: 1305779 - RNA, 23 nt, Human
uacaaauccuaaaggaacuacaa

SEQ ID NO: 1305780 - RNA, 19 nt, Human
uacauuaagaagaaugcca

SEQ ID NO: 1305781 - RNA, 21 nt, Human
uacauuaagaagaaugccaac

SEQ ID NO: 1305782 - RNA, 24 nt, Human
uagaaacacaaauaaucauaagug

SEQ ID NO: 1305783 - RNA, 19 nt, Human
uagcagaacauaggcaaau

SEQ ID NO: 1305784 - RNA, 23 nt, Human
uagcagaugauguagggcucucc

SEQ ID NO: 1305785 - RNA, 21 nt, Human
uaguuuugugcaaauaguggg

SEQ ID NO: 1305786 - RNA, 20 nt, Human
ucaucaaaaaagaguacaac

SEQ ID NO: 1305787 - RNA, 23 nt, Human
uccccagaaugccaccacugccc

SEQ ID NO: 1305788 - RNA, 18 nt, Human
uccccaggcugggagugg

SEQ ID NO: 1305789 - RNA, 23 nt, Human
ucccccaaaauguuauuacuccc

SEQ ID NO: 1305790 - RNA, 22 nt, Human
ucggccuuuaaacaacucuaaa

SEQ ID NO: 1305791 - RNA, 22 nt, Human
ucucugccaauauucuuuuaac

SEQ ID NO: 1305792 - RNA, 20 nt, Human
ucucuggauuugaaccucua

SEQ ID NO: 1305793 - RNA, 24 nt, Human
ucuggggggugagccuucuucccc

SEQ ID NO: 1305794 - RNA, 21 nt, Human
ucuucugaucuuuacuaaaua

SEQ ID NO: 1305795 - RNA, 25 nt, Human
ucuucuguuguuucaaagauuugau

SEQ ID NO: 1305796 - RNA, 28 nt, Human
ugaacucccaccacguaagggcaaacuc

SEQ ID NO: 1305797 - RNA, 21 nt, Human
ugaagagcucacugugauuaa

SEQ ID NO: 1305798 - RNA, 24 nt, Human
ugaauauacaugcuucaauaacau

SEQ ID NO: 1305799 - RNA, 21 nt, Human
ugacagcagagagagcccgcu

SEQ ID NO: 1305800 - RNA, 22 nt, Human
ugagagaauguuucguguggua

SEQ ID NO: 1305801 - RNA, 21 nt, Human
ugagggaaaggcuguuuccag

SEQ ID NO: 1305802 - RNA, 21 nt, Human
ugaguggcaaccaccagaagu

SEQ ID NO: 1305803 - RNA, 20 nt, Human
ugaucaacaccuccagucac

SEQ ID NO: 1305804 - RNA, 18 nt, Human
ugauguagggcucucccc

SEQ ID NO: 1305805 - RNA, 21 nt, Human
ugccaccacugccccugcccc

SEQ ID NO: 1305806 - RNA, 23 nt, Human
ugccccugccccgggacaggccc

SEQ ID NO: 1305807 - RNA, 24 nt, Human
ugcuucaauaacauuaaaaacaca

SEQ ID NO: 1305808 - RNA, 21 nt, Human
uggaagacagagaucuaacca

SEQ ID NO: 1305809 - RNA, 23 nt, Human
uggacucuggggggugagccuuc

SEQ ID NO: 1305810 - RNA, 20 nt, Human
uggcaacagaacaaaugaaa

SEQ ID NO: 1305811 - RNA, 23 nt, Human
ugggagugggugagacgagacuc

SEQ ID NO: 1305812 - RNA, 22 nt, Human
uggggagggaggcgggcuuggg

SEQ ID NO: 1305813 - RNA, 18 nt, Human
uguuucuucuguuguuuc

SEQ ID NO: 1305814 - RNA, 20 nt, Human
uuuaaaaauuucuugagcag

SEQ ID NO: 1305815 - RNA, 18 nt, Human
uuuccaguucucggccuu

SEQ ID NO: 1305816 - RNA, 23 nt, Human
uuuccuguaggaaguggaagaca

SEQ ID NO: 1305817 - RNA, 23 nt, Human
ccacuucccacacacaaacuuuc

SEQ ID NO: 1305818 - RNA, 20 nt, Human
cccaucaaccccuaugauga

SEQ ID NO: 1305819 - RNA, 21 nt, Human
cugcuuccacuucccacacac

SEQ ID NO: 1305820 - RNA, 19 nt, Human
gacuguguuuguugaaaag

SEQ ID NO: 1305821 - RNA, 21 nt, Human
gcccaucaaccccuaugauga

SEQ ID NO: 1305822 - RNA, 21 nt, Human
uagaauaaagcuggcccauca

SEQ ID NO: 1305823 - RNA, 18 nt, Human
ucccacacacaaacuuuc

SEQ ID NO: 1305824 - RNA, 22 nt, Human
ucccacacacaaacuuucuaau

SEQ ID NO: 1305825 - RNA, 18 nt, Human
uuuguugaaaagaacaga

SEQ ID NO: 1305826 - RNA, 24 nt, Human
aagcgcucucggggaugcgggggu

SEQ ID NO: 1305827 - RNA, 20 nt, Human
caccaagcgcucucggggau

SEQ ID NO: 1305828 - RNA, 19 nt, Human
cagcgccccggccccagcc

SEQ ID NO: 1305829 - RNA, 24 nt, Human
ccccagcccgcaccccgaaguggc

SEQ ID NO: 1305830 - RNA, 21 nt, Human
ccccggccccagcccgcaccc

SEQ ID NO: 1305831 - RNA, 21 nt, Human
ccccggccccagcccgcaccu

SEQ ID NO: 1305832 - RNA, 18 nt, Human
cccgcaccccgaaguggc

SEQ ID NO: 1305833 - RNA, 23 nt, Human
cccggccccagcccgcaccgguu

SEQ ID NO: 1305834 - RNA, 22 nt, Human
cuaagccugaagacacagcgug

SEQ ID NO: 1305835 - RNA, 22 nt, Human
aagagcgccccggagcccacaa

SEQ ID NO: 1305836 - RNA, 24 nt, Human
aaggagcccacuggucucacaggc

SEQ ID NO: 1305837 - RNA, 21 nt, Human
acaagggaagagcgccccgga

SEQ ID NO: 1305838 - RNA, 21 nt, Human
acacagacaguggccucaggc

SEQ ID NO: 1305839 - RNA, 19 nt, Human
acagacaguggccucaggc

SEQ ID NO: 1305840 - RNA, 19 nt, Human
acggaacuggaagcucuaa

SEQ ID NO: 1305841 - RNA, 19 nt, Human
agcagaccccuggcaucug

SEQ ID NO: 1305842 - RNA, 23 nt, Human
aggaguugccuucuauggugaca

SEQ ID NO: 1305843 - RNA, 21 nt, Human
aguggccucaggcagcccggc

SEQ ID NO: 1305844 - RNA, 18 nt, Human
aguggguggggacagcug

SEQ ID NO: 1305845 - RNA, 21 nt, Human
cacaaguaggaguugccuucu

SEQ ID NO: 1305846 - RNA, 22 nt, Human
cacuaauucccaucaggccgaa

SEQ ID NO: 1305847 - RNA, 19 nt, Human
cagagcccccugucuucug

SEQ ID NO: 1305848 - RNA, 20 nt, Human
cagugcgucucccuccuccu

SEQ ID NO: 1305849 - RNA, 23 nt, Human
caguggccucaggcagcccggcu

SEQ ID NO: 1305850 - RNA, 25 nt, Human
caugcccccuccaccgccccuccug

SEQ ID NO: 1305851 - RNA, 20 nt, Human
ccagacaugcccccuccacc

SEQ ID NO: 1305852 - RNA, 21 nt, Human
cccccugucuucuggccucau

SEQ ID NO: 1305853 - RNA, 19 nt, Human
ccccggagcccacaauggg

SEQ ID NO: 1305854 - RNA, 20 nt, Human
ccccuccaccgccccuccug

SEQ ID NO: 1305855 - RNA, 21 nt, Human
cccuccagacaugcccccucc

SEQ ID NO: 1305856 - RNA, 25 nt, Human
cccuccagacaugcccccuccaccg

SEQ ID NO: 1305857 - RNA, 18 nt, Human
ccggagcccacaaugggc

SEQ ID NO: 1305858 - RNA, 22 nt, Human
ccuaagacggaacuggaagcuc

SEQ ID NO: 1305859 - RNA, 21 nt, Human
ccuccagacaugcccccucca

SEQ ID NO: 1305860 - RNA, 22 nt, Human
ccuccagacaugcccccuccac

SEQ ID NO: 1305861 - RNA, 21 nt, Human
ccugcguugaugcuagagcag

SEQ ID NO: 1305862 - RNA, 20 nt, Human
cgagcgcuccccgugccuca

SEQ ID NO: 1305863 - RNA, 21 nt, Human
cgccacagacucugauugcuc

SEQ ID NO: 1305864 - RNA, 23 nt, Human
cuccaccgccccuccugaggacg

SEQ ID NO: 1305865 - RNA, 24 nt, Human
cuucacgcagagcccccugucuuc

SEQ ID NO: 1305866 - RNA, 27 nt, Human
gagcgccccggagcccacaaugggcac

SEQ ID NO: 1305867 - RNA, 21 nt, Human
ggacgcucaucuuugaaaaug

SEQ ID NO: 1305868 - RNA, 24 nt, Human
ggcaggggcuggugggcuucacgc

SEQ ID NO: 1305869 - RNA, 18 nt, Human
uaagacggaacuggaagc

SEQ ID NO: 1305870 - RNA, 21 nt, Human
uaggaguugccuucuauggug

SEQ ID NO: 1305871 - RNA, 18 nt, Human
uauuucagucuaaucuga

SEQ ID NO: 1305872 - RNA, 26 nt, Human
ucacgcagagcccccugucuucuggc

SEQ ID NO: 1305873 - RNA, 23 nt, Human
ucagcacaagggaagagcgcccc

SEQ ID NO: 1305874 - RNA, 22 nt, Human
uccccgugccucaggucccucc

SEQ ID NO: 1305875 - RNA, 19 nt, Human
ucgccacagacucugauug

SEQ ID NO: 1305876 - RNA, 22 nt, Human
ucuauggugacauggcuucucu

SEQ ID NO: 1305877 - RNA, 24 nt, Human
ugccucaggucccuccagacaugc

SEQ ID NO: 1305878 - RNA, 23 nt, Human
uguaguggguggggacagcugac

SEQ ID NO: 1305879 - RNA, 20 nt, Human
uuagaaaaaugaaugcagug

SEQ ID NO: 1305880 - RNA, 26 nt, Human
uugaaaauguccuaagacggaacugg

SEQ ID NO: 1305881 - RNA, 24 nt, Human
acauaguuccuugccucuggggac

SEQ ID NO: 1305882 - RNA, 19 nt, Human
acccagagcagagugaacc

SEQ ID NO: 1305883 - RNA, 23 nt, Human
acccagagcagagugaaccccag

SEQ ID NO: 1305884 - RNA, 18 nt, Human
accccagaaaugcugagg

SEQ ID NO: 1305885 - RNA, 23 nt, Human
acugugccuggccuuggggcugg

SEQ ID NO: 1305886 - RNA, 18 nt, Human
agaaggagggaggaaggg

SEQ ID NO: 1305887 - RNA, 19 nt, Human
agaaggagggaggaaggga

SEQ ID NO: 1305888 - RNA, 21 nt, Human
agagagaaggagggaggaagg

SEQ ID NO: 1305889 - RNA, 19 nt, Human
agguagacagagagaagga

SEQ ID NO: 1305890 - RNA, 20 nt, Human
cacaguacccagagcagagu

SEQ ID NO: 1305891 - RNA, 23 nt, Human
cacaguacccagagcagagugaa

SEQ ID NO: 1305892 - RNA, 21 nt, Human
cacauaguuccuugccucugg

SEQ ID NO: 1305893 - RNA, 19 nt, Human
cagagagaaggagggagga

SEQ ID NO: 1305894 - RNA, 22 nt, Human
cagagugaaccccagaaaugcu

SEQ ID NO: 1305895 - RNA, 22 nt, Human
ccagagcagagugaaccccaga

SEQ ID NO: 1305896 - RNA, 23 nt, Human
cccagagcagagugaaccccaga

SEQ ID NO: 1305897 - RNA, 21 nt, Human
ccccagaaaugcugagguaga

SEQ ID NO: 1305898 - RNA, 18 nt, Human
ccgggcuuaguccuugca

SEQ ID NO: 1305899 - RNA, 24 nt, Human
cugccucuggguuuaauuuauguu

SEQ ID NO: 1305900 - RNA, 23 nt, Human
cuguguuuuucuccuugaaccac

SEQ ID NO: 1305901 - RNA, 20 nt, Human
gaagggaaguugauggcugu

SEQ ID NO: 1305902 - RNA, 22 nt, Human
gagugaaccccagaaaugcuga

SEQ ID NO: 1305903 - RNA, 21 nt, Human
ggaguccuuuacacaguaccc

SEQ ID NO: 1305904 - RNA, 18 nt, Human
ggccuuggggcugggaac

SEQ ID NO: 1305905 - RNA, 19 nt, Human
ggccuuggggcugggaaca

SEQ ID NO: 1305906 - RNA, 25 nt, Human
gggaggaagggagaccuacaggcuu

SEQ ID NO: 1305907 - RNA, 19 nt, Human
ggggcugggaacacuggag

SEQ ID NO: 1305908 - RNA, 22 nt, Human
gguagacagagagaaggaggga

SEQ ID NO: 1305909 - RNA, 24 nt, Human
guugauggcuguggaguccuuuac

SEQ ID NO: 1305910 - RNA, 26 nt, Human
uaacugugaggaggagaaacucggag

SEQ ID NO: 1305911 - RNA, 19 nt, Human
ucacaggugagaagggaga

SEQ ID NO: 1305912 - RNA, 18 nt, Human
uccuugcaguccccgcac

SEQ ID NO: 1305913 - RNA, 26 nt, Human
ugaaccacugugauguaaagaaaucu

SEQ ID NO: 1305914 - RNA, 20 nt, Human
ugaagggaaguugauggcug

SEQ ID NO: 1305915 - RNA, 18 nt, Human
ugagguagacagagagaa

SEQ ID NO: 1305916 - RNA, 21 nt, Human
ugagguagacagagagaagga

SEQ ID NO: 1305917 - RNA, 24 nt, Human
uguaaagaaaucucagcucuuuca

SEQ ID NO: 1305918 - RNA, 24 nt, Human
uguggcgcugacugccucuggguu

SEQ ID NO: 1305919 - RNA, 21 nt, Human
uugauggcuguggaguccuuu

SEQ ID NO: 1305920 - RNA, 24 nt, Human
uuucuccuugaaccacugugaugu

SEQ ID NO: 1305921 - RNA, 18 nt, Human
aaggagcuggccugauuu

SEQ ID NO: 1305922 - RNA, 20 nt, Human
aaggagcuggccugauuugg

SEQ ID NO: 1305923 - RNA, 21 nt, Human
acacaguaguacuagggccca

SEQ ID NO: 1305924 - RNA, 18 nt, Human
accccauggguuacagaa

SEQ ID NO: 1305925 - RNA, 26 nt, Human
agaaauaauugaaagggaucuccagc

SEQ ID NO: 1305926 - RNA, 23 nt, Human
agaguguaaggaggccccuucuu

SEQ ID NO: 1305927 - RNA, 21 nt, Human
agauuccacccauagcagccc

SEQ ID NO: 1305928 - RNA, 20 nt, Human
auagaguguaaggaggcccc

SEQ ID NO: 1305929 - RNA, 21 nt, Human
caacccuucagacuuaggaca

SEQ ID NO: 1305930 - RNA, 18 nt, Human
cacccauagcagccccuc

SEQ ID NO: 1305931 - RNA, 22 nt, Human
cagaaggagcuggccugauuug

SEQ ID NO: 1305932 - RNA, 19 nt, Human
cagauggaggagaccccau

SEQ ID NO: 1305933 - RNA, 20 nt, Human
cauggguuacagaaggagcu

SEQ ID NO: 1305934 - RNA, 21 nt, Human
ccacagcguggaaggugggcg

SEQ ID NO: 1305935 - RNA, 19 nt, Human
cccauagcagccccucuuc

SEQ ID NO: 1305936 - RNA, 18 nt, Human
ccccagaaggggcacagg

SEQ ID NO: 1305937 - RNA, 20 nt, Human
ccuaugcuucagcaauagag

SEQ ID NO: 1305938 - RNA, 20 nt, Human
gaaggggcacagggucuucc

SEQ ID NO: 1305939 - RNA, 21 nt, Human
gaaggugggcggcaggugcac

SEQ ID NO: 1305940 - RNA, 20 nt, Human
ggagaaggggucccuaugcu

SEQ ID NO: 1305941 - RNA, 20 nt, Human
ggucuuccacacuguggcug

SEQ ID NO: 1305942 - RNA, 22 nt, Human
guuacagaaggagcuggccuga

SEQ ID NO: 1305943 - RNA, 23 nt, Human
uaacacaaaacaaugucugcauc

SEQ ID NO: 1305944 - RNA, 22 nt, Human
uggaaggugggcggcaggugca

SEQ ID NO: 1305945 - RNA, 19 nt, Human
uggccugauuuggagaagg

SEQ ID NO: 1305946 - RNA, 18 nt, Human
uggcucuaggccaacccu

SEQ ID NO: 1305947 - RNA, 24 nt, Human
uguaaaaacaauaacacaaaacaa

SEQ ID NO: 1305948 - RNA, 22 nt, Human
agggccacugcuaguucuuggu

SEQ ID NO: 1305949 - RNA, 21 nt, Human
aguuugaacaagcuccuccca

SEQ ID NO: 1305950 - RNA, 19 nt, Human
caccagaaguggcuguguc

SEQ ID NO: 1305951 - RNA, 18 nt, Human
cacguagccucuccuccu

SEQ ID NO: 1305952 - RNA, 20 nt, Human
cacguagccucuccuccugu

SEQ ID NO: 1305953 - RNA, 21 nt, Human
ccagaaguggcugugucaggg

SEQ ID NO: 1305954 - RNA, 20 nt, Human
ccccaggugagugguaacca

SEQ ID NO: 1305955 - RNA, 22 nt, Human
ccuccugucuccuguucaggag

SEQ ID NO: 1305956 - RNA, 23 nt, Human
cguagccucuccuccugucuccu

SEQ ID NO: 1305957 - RNA, 22 nt, Human
cuggaaugccagggcucuuccu

SEQ ID NO: 1305958 - RNA, 22 nt, Human
cuguuagcuccugcuggaaugc

SEQ ID NO: 1305959 - RNA, 22 nt, Human
gccuggagcugucuucccacac

SEQ ID NO: 1305960 - RNA, 26 nt, Human
gcuggaaugccagggcucuuccucug

SEQ ID NO: 1305961 - RNA, 21 nt, Human
ggaaugccagggcucuuccuc

SEQ ID NO: 1305962 - RNA, 22 nt, Human
ggccagggguucagccgucugg

SEQ ID NO: 1305963 - RNA, 19 nt, Human
ggcucuggggccagggguu

SEQ ID NO: 1305964 - RNA, 25 nt, Human
gggggcucuggggccagggguucag

SEQ ID NO: 1305965 - RNA, 21 nt, Human
ggucucaucuuguagcugcuc

SEQ ID NO: 1305966 - RNA, 23 nt, Human
uccucugccaauaugcuuuuaac

SEQ ID NO: 1305967 - RNA, 19 nt, Human
ucucaucuuguagcugcuc

SEQ ID NO: 1305968 - RNA, 28 nt, Human
ucucuagcuccuuccuuagggggccgcc

SEQ ID NO: 1305969 - RNA, 20 nt, Human
ucuguaccagauguaucuca

SEQ ID NO: 1305970 - RNA, 23 nt, Human
ucuguaccagauguaucucaugc

SEQ ID NO: 1305971 - RNA, 22 nt, Human
ugaacaagcuccucccaagcuu

SEQ ID NO: 1305972 - RNA, 21 nt, Human
ugagugguaaccaccagaagu

SEQ ID NO: 1305973 - RNA, 22 nt, Human
ugaguugacugauuauugcgga

SEQ ID NO: 1305974 - RNA, 24 nt, Human
uggaaugccagggcucuuccucug

SEQ ID NO: 1305975 - RNA, 26 nt, Human
uggaaugccagggcucuuccucugac

SEQ ID NO: 1305976 - RNA, 25 nt, Human
uguaccagauguaucucaugcuucu

SEQ ID NO: 1305977 - RNA, 24 nt, Human
uguucaggagacucaacaucugau

SEQ ID NO: 1305978 - RNA, 19 nt, Human
uuccaccucagccuggagc

SEQ ID NO: 1305979 - RNA, 22 nt, Human
gcaguagacgcagcaaagaaag

SEQ ID NO: 1305980 - RNA, 20 nt, Human
gucuuaagugucaucuggcc

SEQ ID NO: 1305981 - RNA, 24 nt, Human
ucuuaagugucaucuggcaucuuc

SEQ ID NO: 1305982 - RNA, 19 nt, Human
agccacagaguucacggcu

SEQ ID NO: 1305983 - RNA, 22 nt, Human
auggaaaccucugguggaggcc

SEQ ID NO: 1305984 - RNA, 23 nt, Human
cuagaacuacagcccguccccca

SEQ ID NO: 1305985 - RNA, 21 nt, Human
gaacuacagcccgucccccag

SEQ ID NO: 1305986 - RNA, 20 nt, Human
gaggcagccacagaguucac

SEQ ID NO: 1305987 - RNA, 21 nt, Human
gggcagauggaaaccucuggu

SEQ ID NO: 1305988 - RNA, 20 nt, Human
ugaguuaaaaucagguucua

SEQ ID NO: 1305989 - RNA, 20 nt, Human
aagauugccugugacgcugu

SEQ ID NO: 1305990 - RNA, 23 nt, Human
acuccggccccgaggcucucccg

SEQ ID NO: 1305991 - RNA, 18 nt, Human
agcgcagcguucuggaag

SEQ ID NO: 1305992 - RNA, 18 nt, Human
augguaguagaagcaaga

SEQ ID NO: 1305993 - RNA, 23 nt, Human
augguaguagaagcaagauugcc

SEQ ID NO: 1305994 - RNA, 21 nt, Human
cagcgcccacgcgacuccggc

SEQ ID NO: 1305995 - RNA, 22 nt, Human
cccccagcgcccacgcgacucc

SEQ ID NO: 1305996 - RNA, 19 nt, Human
ccgccccgcccccagcgcc

SEQ ID NO: 1305997 - RNA, 20 nt, Human
ccgccccgcccccagcgccc

SEQ ID NO: 1305998 - RNA, 23 nt, Human
ccgucacccaggucuccagaacc

SEQ ID NO: 1305999 - RNA, 22 nt, Human
cgccccgcccccagcgcccacg

SEQ ID NO: 1306000 - RNA, 18 nt, Human
cggccccgaggcucuccc

SEQ ID NO: 1306001 - RNA, 20 nt, Human
cucccgagcgcagcguucug

SEQ ID NO: 1306002 - RNA, 21 nt, Human
cugagggcagcagucggccuu

SEQ ID NO: 1306003 - RNA, 24 nt, Human
cuugcccucugacugccagcuggg

SEQ ID NO: 1306004 - RNA, 23 nt, Human
gagaugcucuugcccucugacug

SEQ ID NO: 1306005 - RNA, 20 nt, Human
gcagugggcgcccgccccgc

SEQ ID NO: 1306006 - RNA, 22 nt, Human
gccccgauaacugagggcagca

SEQ ID NO: 1306007 - RNA, 25 nt, Human
gggcagcagucggccuugggcguuc

SEQ ID NO: 1306008 - RNA, 24 nt, Human
uacauuucuccuuuuccaugcugc

SEQ ID NO: 1306009 - RNA, 19 nt, Human
uaguagaagcaagauugcc

SEQ ID NO: 1306010 - RNA, 24 nt, Human
uccaugcugcacugcacccuggaa

SEQ ID NO: 1306011 - RNA, 19 nt, Human
ucgagaugcucuugcccuc

SEQ ID NO: 1306012 - RNA, 23 nt, Human
ucugacugccagcuggguuuggu

SEQ ID NO: 1306013 - RNA, 21 nt, Human
ucuuucauuugccucuucagg

SEQ ID NO: 1306014 - RNA, 23 nt, Human
ugagggcagcagucggccuuggg

SEQ ID NO: 1306015 - RNA, 24 nt, Human
ugagggcagcagucggccuugggc

SEQ ID NO: 1306016 - RNA, 23 nt, Human
uggaauuggccuguaugcgcugc

SEQ ID NO: 1306017 - RNA, 19 nt, Human
uuucauuugccucuucagg

SEQ ID NO: 1306018 - RNA, 18 nt, Human
aacagcuucuccaccucu

SEQ ID NO: 1306019 - RNA, 20 nt, Human
cacauagccucuccuccugu

SEQ ID NO: 1306020 - RNA, 19 nt, Human
caccucuuccagcagccuc

SEQ ID NO: 1306021 - RNA, 19 nt, Human
caccucuuccagcagccuc

SEQ ID NO: 1306022 - RNA, 18 nt, Human
cacguagccucuccuccu

SEQ ID NO: 1306023 - RNA, 26 nt, Human
cagcagccucucccucuccagcagcc

SEQ ID NO: 1306024 - RNA, 20 nt, Human
cagcucccgcagagucuccu

SEQ ID NO: 1306025 - RNA, 23 nt, Human
caggagcuucuccaccucuucca

SEQ ID NO: 1306026 - RNA, 20 nt, Human
ccagcagccucucccucucc

SEQ ID NO: 1306027 - RNA, 22 nt, Human
ccuccugccgccucuccuguuc

SEQ ID NO: 1306028 - RNA, 21 nt, Human
ccucuccagcagccucuccug

SEQ ID NO: 1306029 - RNA, 23 nt, Human
ccucuccagcucccgcagagucu

SEQ ID NO: 1306030 - RNA, 23 nt, Human
ccucuccuccuguucacacagcc

SEQ ID NO: 1306031 - RNA, 21 nt, Human
ccucuccugcuccuccugccg

SEQ ID NO: 1306032 - RNA, 23 nt, Human
cuaacagcuucuccaccucuucc

SEQ ID NO: 1306033 - RNA, 19 nt, Human
cuccuccugccgccucucc

SEQ ID NO: 1306034 - RNA, 24 nt, Human
cugcuccuccugccgccucuccug

SEQ ID NO: 1306035 - RNA, 20 nt, Human
gaagccucuccugcuccagg

SEQ ID NO: 1306036 - RNA, 23 nt, Human
gagcuccuccaccucguccagga

SEQ ID NO: 1306037 - RNA, 19 nt, Human
gccacagccucucauccug

SEQ ID NO: 1306038 - RNA, 19 nt, Human
ggagcuccuccaccucguc

SEQ ID NO: 1306039 - RNA, 19 nt, Human
ucacacagccucuccucau

SEQ ID NO: 1306040 - RNA, 21 nt, Human
ucacacagccucuccuccugu

SEQ ID NO: 1306041 - RNA, 21 nt, Human
ucacguagccucuccuccugu

SEQ ID NO: 1306042 - RNA, 18 nt, Human
uccagcagccucucccuc

SEQ ID NO: 1306043 - RNA, 22 nt, Human
uccagcagccucucccucucca

SEQ ID NO: 1306044 - RNA, 24 nt, Human
uccagcagccucuccugcuccucc

SEQ ID NO: 1306045 - RNA, 19 nt, Human
ucccucuccagcagccucu

SEQ ID NO: 1306046 - RNA, 18 nt, Human
ucuaacagcuucuccacc

SEQ ID NO: 1306047 - RNA, 21 nt, Human
ucuaacagcuucuccaccucu

SEQ ID NO: 1306048 - RNA, 24 nt, Human
ucuccaccucuuccagcagccucu

SEQ ID NO: 1306049 - RNA, 24 nt, Human
ucuccaccucuuccagcagccucu

SEQ ID NO: 1306050 - RNA, 20 nt, Human
ucuccagcucccgcagaguc

SEQ ID NO: 1306051 - RNA, 19 nt, Human
ucuccagcucccgcagccu

SEQ ID NO: 1306052 - RNA, 22 nt, Human
ucuccugcuccuccugccgccu

SEQ ID NO: 1306053 - RNA, 24 nt, Human
ucuccugcugccacagccucucau

SEQ ID NO: 1306054 - RNA, 26 nt, Human
ucuccuguucuaacagcuucuccacc

SEQ ID NO: 1306055 - RNA, 23 nt, Human
ucuuccagcagccucuccugccc

SEQ ID NO: 1306056 - RNA, 27 nt, Human
ugcccuggcagcuucuccuguucacac

SEQ ID NO: 1306057 - RNA, 23 nt, Human
uuaccgaagccucuccugcucca

SEQ ID NO: 1306058 - RNA, 24 nt, Human
aagcuccaguucuggggccuggcc

SEQ ID NO: 1306059 - RNA, 19 nt, Human
agcagugacagagaaugca

SEQ ID NO: 1306060 - RNA, 23 nt, Human
agcagugacagagaaugcaggug

SEQ ID NO: 1306061 - RNA, 18 nt, Human
caccucaguggcuuuggc

SEQ ID NO: 1306062 - RNA, 18 nt, Human
cagcccagcgggcggcaa

SEQ ID NO: 1306063 - RNA, 23 nt, Human
ccagcgggcggcaagcucuucuu

SEQ ID NO: 1306064 - RNA, 23 nt, Human
gcagcccagcgggcggcaagcuc

SEQ ID NO: 1306065 - RNA, 21 nt, Human
gcccagcgggcggcaagcucu

SEQ ID NO: 1306066 - RNA, 20 nt, Human
guucuggggccuggcccucu

SEQ ID NO: 1306067 - RNA, 18 nt, Human
ucuugacaaggggacuga

SEQ ID NO: 1306068 - RNA, 23 nt, Human
uggcuuuggcugucugggagagg

SEQ ID NO: 1306069 - RNA, 22 nt, Human
uggggccuggcccucuguggca

SEQ ID NO: 1306070 - RNA, 18 nt, Human
ugucgcccguguggucca

SEQ ID NO: 1306071 - RNA, 22 nt, Human
aaauggcuuucuaccauaaaga

SEQ ID NO: 1306072 - RNA, 19 nt, Human
auuguauuuucuugaagaa

SEQ ID NO: 1306073 - RNA, 23 nt, Human
ccucuugaagugcagauauagcc

SEQ ID NO: 1306074 - RNA, 20 nt, Human
gaauaggcuugggggcugcc

SEQ ID NO: 1306075 - RNA, 19 nt, Human
guuacauuugggcucugag

SEQ ID NO: 1306076 - RNA, 22 nt, Human
ugugaccaaauggcuuucuacc

SEQ ID NO: 1306077 - RNA, 21 nt, Human
uguggcuuuuaauauuguauu

SEQ ID NO: 1306078 - RNA, 19 nt, Human
uucacaacugguuuuacag

SEQ ID NO: 1306079 - RNA, 22 nt, Human
aaacauaguacagcauuucuca

SEQ ID NO: 1306080 - RNA, 23 nt, Human
aaacuggcacucacugcggcaca

SEQ ID NO: 1306081 - RNA, 18 nt, Human
aacuuagcgucucuuccu

SEQ ID NO: 1306082 - RNA, 22 nt, Human
acaauaguuacuggaaaaaccc

SEQ ID NO: 1306083 - RNA, 24 nt, Human
agagggaauuuuuuuaaccugcca

SEQ ID NO: 1306084 - RNA, 23 nt, Human
agcgucucuuccugguaaauggc

SEQ ID NO: 1306085 - RNA, 24 nt, Human
aggaaaaaaaaccaugauuaucac

SEQ ID NO: 1306086 - RNA, 20 nt, Human
caacagcauuaggugguuag

SEQ ID NO: 1306087 - RNA, 23 nt, Human
caagcaccguuuaauccaggacu

SEQ ID NO: 1306088 - RNA, 24 nt, Human
cacuauuacaaaaacuauucagaa

SEQ ID NO: 1306089 - RNA, 23 nt, Human
cagaccucuggaaucagaaacuc

SEQ ID NO: 1306090 - RNA, 24 nt, Human
cagagggaauuuuuuuaaccugcc

SEQ ID NO: 1306091 - RNA, 20 nt, Human
caggacuucaaauaaguuuc

SEQ ID NO: 1306092 - RNA, 21 nt, Human
ccagaccucuggaaucagaaa

SEQ ID NO: 1306093 - RNA, 21 nt, Human
ccucaguguguguagccaggg

SEQ ID NO: 1306094 - RNA, 26 nt, Human
cucaaaguguggucacuggaccaaca

SEQ ID NO: 1306095 - RNA, 22 nt, Human
cugcggcacaccggcccuuuuu

SEQ ID NO: 1306096 - RNA, 21 nt, Human
cuucaggccacgcaugcuucc

SEQ ID NO: 1306097 - RNA, 18 nt, Human
gccuggaacacggugagg

SEQ ID NO: 1306098 - RNA, 22 nt, Human
gggcagagacaggaaagugagg

SEQ ID NO: 1306099 - RNA, 24 nt, Human
uaaauaggaaaaaaaaccaugauu

SEQ ID NO: 1306100 - RNA, 18 nt, Human
uaacuggacgccuggaac

SEQ ID NO: 1306101 - RNA, 18 nt, Human
uacagcauuucucaaagu

SEQ ID NO: 1306102 - RNA, 23 nt, Human
uaucguaauaaauaggaaaaaaa

SEQ ID NO: 1306103 - RNA, 18 nt, Human
ucauucaaacuggcacuc

SEQ ID NO: 1306104 - RNA, 24 nt, Human
ucguaauaaauaggaaaaaaaacc

SEQ ID NO: 1306105 - RNA, 20 nt, Human
ugaggugagaauuuuuaaau

SEQ ID NO: 1306106 - RNA, 18 nt, Human
ugcucgguucccauguga

SEQ ID NO: 1306107 - RNA, 25 nt, Human
uuagagacauucccauuaagggcag

SEQ ID NO: 1306108 - RNA, 18 nt, Human
uuagcgucucuuccuggu

SEQ ID NO: 1306109 - RNA, 21 nt, Human
uucccauuaagggcagagacu

SEQ ID NO: 1306110 - RNA, 19 nt, Human
uugcucgguucccauguga

SEQ ID NO: 1306111 - RNA, 21 nt, Human
uuuuaaaccauaaaugaggug

SEQ ID NO: 1306112 - RNA, 23 nt, Human
aggcacucucauuugcuucuguu

SEQ ID NO: 1306113 - RNA, 20 nt, Human
auuugcuucuguugcuuuuu

SEQ ID NO: 1306114 - RNA, 20 nt, Human
ccccacaaugaccacuucca

SEQ ID NO: 1306115 - RNA, 24 nt, Human
ccuacuccuggacucggccagcua

SEQ ID NO: 1306116 - RNA, 18 nt, Human
ccuggacucggccagcua

SEQ ID NO: 1306117 - RNA, 21 nt, Human
ccugggucacacaaacgggaa

SEQ ID NO: 1306118 - RNA, 19 nt, Human
ccuucagcucaaaauuuac

SEQ ID NO: 1306119 - RNA, 24 nt, Human
cuggaggugauagggguuucucuu

SEQ ID NO: 1306120 - RNA, 20 nt, Human
gaaugccccacaaugaccac

SEQ ID NO: 1306121 - RNA, 23 nt, Human
ggaaugccccacaaugaccacuu

SEQ ID NO: 1306122 - RNA, 22 nt, Human
gucacacaaacgggaaugcccc

SEQ ID NO: 1306123 - RNA, 20 nt, Human
ucacacaaacgggaaugccc

SEQ ID NO: 1306124 - RNA, 18 nt, Human
ugagauagaaucucgcuc

SEQ ID NO: 1306125 - RNA, 29 nt, Human
ugcuuuuuuuuuuuuuuuuuuuuugagaa

SEQ ID NO: 1306126 - RNA, 25 nt, Human
uuuuuuuuuuuugagauagaaucuc

SEQ ID NO: 1306127 - RNA, 18 nt, Human
uuuuuuuuuuuuuuuuug

SEQ ID NO: 1306128 - RNA, 20 nt, Human
acagacaaugacuaacagag

SEQ ID NO: 1306129 - RNA, 19 nt, Human
accacaauaacaacacgga

SEQ ID NO: 1306130 - RNA, 19 nt, Human
agcagccagacgccgcuac

SEQ ID NO: 1306131 - RNA, 21 nt, Human
agccagagccucccggacucc

SEQ ID NO: 1306132 - RNA, 21 nt, Human
aguggagaggcggggcccgga

SEQ ID NO: 1306133 - RNA, 18 nt, Human
cacugaguauacacauuc

SEQ ID NO: 1306134 - RNA, 19 nt, Human
cagccagacgccgcuacca

SEQ ID NO: 1306135 - RNA, 20 nt, Human
ccccgcggacgccaaaguca

SEQ ID NO: 1306136 - RNA, 18 nt, Human
cccgcggacgccaaaguc

SEQ ID NO: 1306137 - RNA, 20 nt, Human
ccgccgaguggagaggcggg

SEQ ID NO: 1306138 - RNA, 20 nt, Human
ccgcgacuggagcagccaga

SEQ ID NO: 1306139 - RNA, 24 nt, Human
ccuacacugaguauacacauucaa

SEQ ID NO: 1306140 - RNA, 22 nt, Human
ccucccggacuccggagccgcc

SEQ ID NO: 1306141 - RNA, 21 nt, Human
ccugaguuuccugcccaccag

SEQ ID NO: 1306142 - RNA, 26 nt, Human
cgcgggcagcggcgcgcaggccaggc

SEQ ID NO: 1306143 - RNA, 20 nt, Human
cuccggagccgccggggucc

SEQ ID NO: 1306144 - RNA, 22 nt, Human
cuccugaguuuccugcccacca

SEQ ID NO: 1306145 - RNA, 19 nt, Human
cugaguuuccugcccacca

SEQ ID NO: 1306146 - RNA, 18 nt, Human
gcagccagacgccgcuac

SEQ ID NO: 1306147 - RNA, 25 nt, Human
gcagccagagccucccggacuccgg

SEQ ID NO: 1306148 - RNA, 24 nt, Human
gcgcaggccaggcgcuaggacucg

SEQ ID NO: 1306149 - RNA, 18 nt, Human
gggcagcggcgcgcaggc

SEQ ID NO: 1306150 - RNA, 22 nt, Human
uaaaauuaguagaaauggcuuc

SEQ ID NO: 1306151 - RNA, 24 nt, Human
uagauuaaauauuacuccugaguu

SEQ ID NO: 1306152 - RNA, 18 nt, Human
uauaugccagaagacaga

SEQ ID NO: 1306153 - RNA, 18 nt, Human
uaugccagaagacagaac

SEQ ID NO: 1306154 - RNA, 18 nt, Human
uccaauauugcacuugau

SEQ ID NO: 1306155 - RNA, 26 nt, Human
ucccggacuccggagccgccgggguc

SEQ ID NO: 1306156 - RNA, 19 nt, Human
ugccagaagacagaacacu

SEQ ID NO: 1306157 - RNA, 19 nt, Human
uggcuuccaauauugcacu

SEQ ID NO: 1306158 - RNA, 20 nt, Human
uuauaugccagaagacagaa

SEQ ID NO: 1306159 - RNA, 20 nt, Human
uugagguaaggacugggaau

SEQ ID NO: 1306160 - RNA, 24 nt, Human
caaaugacccuuucgugcagccca

SEQ ID NO: 1306161 - RNA, 21 nt, Human
ggguuuacaaguuuaucucca

SEQ ID NO: 1306162 - RNA, 19 nt, Human
uacaauaauggcagugaaa

SEQ ID NO: 1306163 - RNA, 18 nt, Human
ucaacacuuacaugcaau

SEQ ID NO: 1306164 - RNA, 20 nt, Human
ucagucaacacuuacaugca

SEQ ID NO: 1306165 - RNA, 19 nt, Human
uccaaaugacccuuucgug

SEQ ID NO: 1306166 - RNA, 19 nt, Human
ugggaagaauaacauuaug

SEQ ID NO: 1306167 - RNA, 20 nt, Human
aaaaggaaagacuuucucau

SEQ ID NO: 1306168 - RNA, 21 nt, Human
acccgcucuguguucuacgcc

SEQ ID NO: 1306169 - RNA, 24 nt, Human
agaagcacaaacaugguuucucca

SEQ ID NO: 1306170 - RNA, 26 nt, Human
agaagcacaaacaugguuucuccaaa

SEQ ID NO: 1306171 - RNA, 20 nt, Human
agccagaugaucuggugggc

SEQ ID NO: 1306172 - RNA, 22 nt, Human
caaaacaugagaucggcuuagc

SEQ ID NO: 1306173 - RNA, 21 nt, Human
caagaauuggucacagucuca

SEQ ID NO: 1306174 - RNA, 23 nt, Human
caccuccaaggugucaacuccaa

SEQ ID NO: 1306175 - RNA, 22 nt, Human
cagcaggugcuucucaaggcuu

SEQ ID NO: 1306176 - RNA, 24 nt, Human
cagcugggcagcuuggacugcucu

SEQ ID NO: 1306177 - RNA, 21 nt, Human
ccaccuccaaggugucaacuc

SEQ ID NO: 1306178 - RNA, 24 nt, Human
ccaccuccaaggugucaacuccuu

SEQ ID NO: 1306179 - RNA, 21 nt, Human
ccuccaaggugucaacuccaa

SEQ ID NO: 1306180 - RNA, 21 nt, Human
cuuggacugcucccacagucc

SEQ ID NO: 1306181 - RNA, 21 nt, Human
gagcaggccauuugcuguccu

SEQ ID NO: 1306182 - RNA, 18 nt, Human
ggauugaacugaagaagc

SEQ ID NO: 1306183 - RNA, 21 nt, Human
uccaaaaaaggaaagacuuuc

SEQ ID NO: 1306184 - RNA, 22 nt, Human
ucugcagcugggcagcuuggac

SEQ ID NO: 1306185 - RNA, 24 nt, Human
ucugcagcugggcagcuuggacug

SEQ ID NO: 1306186 - RNA, 21 nt, Human
ucuuggcagcagugguucuga

SEQ ID NO: 1306187 - RNA, 24 nt, Human
ugcaacagguucaucagguggacc

SEQ ID NO: 1306188 - RNA, 21 nt, Human
uggaccuuuuggccccuucug

SEQ ID NO: 1306189 - RNA, 22 nt, Human
ugggccuggaagcgcuggcugu

SEQ ID NO: 1306190 - RNA, 19 nt, Human
uggugggccuggaagcgcu

SEQ ID NO: 1306191 - RNA, 24 nt, Human
ugucaagaauuggucacagucuca

SEQ ID NO: 1306192 - RNA, 21 nt, Human
ugucagcaucuuggcagcagu

SEQ ID NO: 1306193 - RNA, 18 nt, Human
uuaaccaccuccaaggug

SEQ ID NO: 1306194 - RNA, 19 nt, Human
aacacaguaucugcaucuc

SEQ ID NO: 1306195 - RNA, 20 nt, Human
aaggaaacacaguaucugca

SEQ ID NO: 1306196 - RNA, 23 nt, Human
agcaaggaaacacaguaucugca

SEQ ID NO: 1306197 - RNA, 22 nt, Human
caaaugucacauucugggaaug

SEQ ID NO: 1306198 - RNA, 22 nt, Human
cagguccgugaaggggaauuca

SEQ ID NO: 1306199 - RNA, 28 nt, Human
cccagcauccuuaggcuucagguccguu

SEQ ID NO: 1306200 - RNA, 18 nt, Human
ccgagcucuguuccugcu

SEQ ID NO: 1306201 - RNA, 26 nt, Human
cucaugggaggcuguugucuuguagg

SEQ ID NO: 1306202 - RNA, 18 nt, Human
cugccgagcucuguuccu

SEQ ID NO: 1306203 - RNA, 19 nt, Human
cuuguaggcacaaaaguac

SEQ ID NO: 1306204 - RNA, 18 nt, Human
gcacaaaaguaccuccca

SEQ ID NO: 1306205 - RNA, 20 nt, Human
gcucuguuccugcuuguacc

SEQ ID NO: 1306206 - RNA, 19 nt, Human
gugaccaccagcugcaagu

SEQ ID NO: 1306207 - RNA, 21 nt, Human
uaaccuuggccagcacgaucc

SEQ ID NO: 1306208 - RNA, 18 nt, Human
ugaaggggaauucagcuu

SEQ ID NO: 1306209 - RNA, 22 nt, Human
ugucacauucugggaaugagcc

SEQ ID NO: 1306210 - RNA, 22 nt, Human
uuaguggccagggcugucuucu

SEQ ID NO: 1306211 - RNA, 21 nt, Human
aagaaggcuuucuccaaagcc

SEQ ID NO: 1306212 - RNA, 22 nt, Human
acuagccugcagcccuucuaac

SEQ ID NO: 1306213 - RNA, 21 nt, Human
agaaggcuuucuccaaagccc

SEQ ID NO: 1306214 - RNA, 21 nt, Human
ccagcucagccuggagucucu

SEQ ID NO: 1306215 - RNA, 24 nt, Human
ccuggaagggggggccgggaagcu

SEQ ID NO: 1306216 - RNA, 22 nt, Human
ccuucuaacauggugaccuggg

SEQ ID NO: 1306217 - RNA, 21 nt, Human
cggccuggaagggggggccgg

SEQ ID NO: 1306218 - RNA, 20 nt, Human
gaccugggccuacggaaggc

SEQ ID NO: 1306219 - RNA, 22 nt, Human
gcccuucuaacauggugaccug

SEQ ID NO: 1306220 - RNA, 19 nt, Human
gccuggagucucuuggaca

SEQ ID NO: 1306221 - RNA, 20 nt, Human
gccuggagucucuuggacac

SEQ ID NO: 1306222 - RNA, 19 nt, Human
ggccuggaagggggggccg

SEQ ID NO: 1306223 - RNA, 21 nt, Human
gggccgggaagcugagagcac

SEQ ID NO: 1306224 - RNA, 20 nt, Human
ucuccaaagccccucggcug

SEQ ID NO: 1306225 - RNA, 21 nt, Human
ucuccaaagccccucggcugc

SEQ ID NO: 1306226 - RNA, 21 nt, Human
ugagagcacuagccugcagcc

SEQ ID NO: 1306227 - RNA, 23 nt, Human
uggagucucuuggacacaggguc

SEQ ID NO: 1306228 - RNA, 23 nt, Human
uucuccaaagccccucggcugca

SEQ ID NO: 1306229 - RNA, 23 nt, Human
uuccguagaaauucuaggcacug

SEQ ID NO: 1306230 - RNA, 21 nt, Human
agcaccugccgcaaccuuggu

SEQ ID NO: 1306231 - RNA, 22 nt, Human
aggggaagcaccugccgcaacc

SEQ ID NO: 1306232 - RNA, 20 nt, Human
aguauccaacccagacucac

SEQ ID NO: 1306233 - RNA, 25 nt, Human
ccucuggguggccaucgucuugucc

SEQ ID NO: 1306234 - RNA, 21 nt, Human
gaagcaccugccgcaaccuug

SEQ ID NO: 1306235 - RNA, 22 nt, Human
ugaugggggucugcuggggggu

SEQ ID NO: 1306236 - RNA, 22 nt, Human
aaagugcccccacgugauaccu

SEQ ID NO: 1306237 - RNA, 18 nt, Human
acagcagagggaagcugg

SEQ ID NO: 1306238 - RNA, 22 nt, Human
acccagugcccacaaccaacua

SEQ ID NO: 1306239 - RNA, 22 nt, Human
agcaguggcgguagcgguagcc

SEQ ID NO: 1306240 - RNA, 24 nt, Human
agcuaagacgaaagugcccccacg

SEQ ID NO: 1306241 - RNA, 22 nt, Human
auggccauaggauugggagcac

SEQ ID NO: 1306242 - RNA, 21 nt, Human
caaggaucccccgcagcagcc

SEQ ID NO: 1306243 - RNA, 22 nt, Human
caagucccagagaccuuaggga

SEQ ID NO: 1306244 - RNA, 18 nt, Human
cagcaguggcgguagcgg

SEQ ID NO: 1306245 - RNA, 23 nt, Human
cagcucccucaaguagcagggcc

SEQ ID NO: 1306246 - RNA, 20 nt, Human
cagggccagggcaucccagu

SEQ ID NO: 1306247 - RNA, 23 nt, Human
ccacacgccugucagguucagca

SEQ ID NO: 1306248 - RNA, 20 nt, Human
ccacgugauaccucuaaccc

SEQ ID NO: 1306249 - RNA, 23 nt, Human
cccagugcccacaaccaacuacc

SEQ ID NO: 1306250 - RNA, 20 nt, Human
cccucagaguccacuucacu

SEQ ID NO: 1306251 - RNA, 21 nt, Human
cccucagaguccacuucacuc

SEQ ID NO: 1306252 - RNA, 20 nt, Human
ccucuuucuuuuuauuuaaa

SEQ ID NO: 1306253 - RNA, 18 nt, Human
cgaagcaacagccguggc

SEQ ID NO: 1306254 - RNA, 30 nt, Human; identical to SEQ ID NO: 349988

SEQ ID NO: 1306255 - RNA, 23 nt, Human
cggccuccgcggcccucugcccu

SEQ ID NO: 1306256 - RNA, 21 nt, Human
cuccgcggcccucugcccucc

SEQ ID NO: 1306257 - RNA, 21 nt, Human
cugcggccuccgcggcccucu

SEQ ID NO: 1306258 - RNA, 21 nt, Human
gaccggaaagggccacaagga

SEQ ID NO: 1306259 - RNA, 24 nt, Human
gcagcaguguggccugaugggggg

SEQ ID NO: 1306260 - RNA, 25 nt, Human
ggcagcaguguggccugaugggggg

SEQ ID NO: 1306261 - RNA, 23 nt, Human
uaacccagugcccacaaccaacu

SEQ ID NO: 1306262 - RNA, 24 nt, Human
uaaccgaagcaacagccguggcac

SEQ ID NO: 1306263 - RNA, 21 nt, Human
uagcgguagcccucagagucc

SEQ ID NO: 1306264 - RNA, 21 nt, Human
ucccccgcagcagccgugggu

SEQ ID NO: 1306265 - RNA, 18 nt, Human
ugcaacugcggccuccgc

SEQ ID NO: 1306266 - RNA, 19 nt, Human
uggcacagcagagggaagc

SEQ ID NO: 1306267 - RNA, 22 nt, Human
uggcagcaguguggccugaugg

SEQ ID NO: 1306268 - RNA, 19 nt, Human
uggccugauggggggacua

SEQ ID NO: 1306269 - RNA, 24 nt, Human
uggcgguagcgguagcccucagag

SEQ ID NO: 1306270 - RNA, 21 nt, Human
uuuuauuuaaauaaccgaagc

SEQ ID NO: 1306271 - RNA, 18 nt, Human
aaaauacucucgccuguc

SEQ ID NO: 1306272 - RNA, 22 nt, Human
aaaguaugccaucugugguucg

SEQ ID NO: 1306273 - RNA, 21 nt, Human
aagcaccaucacacagguuga

SEQ ID NO: 1306274 - RNA, 19 nt, Human
agguugaugagugcagcug

SEQ ID NO: 1306275 - RNA, 21 nt, Human
caccugauagguguggugauc

SEQ ID NO: 1306276 - RNA, 21 nt, Human
cagcaggaaacaaucaagaaa

SEQ ID NO: 1306277 - RNA, 19 nt, Human
cugucugccauggcagggu

SEQ ID NO: 1306278 - RNA, 22 nt, Human
gaagcaccaucacacagguuga

SEQ ID NO: 1306279 - RNA, 25 nt, Human
gacagcaggaaacaaucaagaaaga

SEQ ID NO: 1306280 - RNA, 18 nt, Human
gccugucugccauggcag

SEQ ID NO: 1306281 - RNA, 21 nt, Human
ggaaacaaucaagaaagaccg

SEQ ID NO: 1306282 - RNA, 20 nt, Human
gugcagcugacccauagaac

SEQ ID NO: 1306283 - RNA, 20 nt, Human
ugcagcugacccauagaacu

SEQ ID NO: 1306284 - RNA, 26 nt, Human
uggaaaauacucucgccugucugcca

SEQ ID NO: 1306285 - RNA, 23 nt, Human
aagaugucuuccaggacaauuuu

SEQ ID NO: 1306286 - RNA, 18 nt, Human
acuccgcaggugucuuga

SEQ ID NO: 1306287 - RNA, 25 nt, Human
aggagguggcugguggcccauccug

SEQ ID NO: 1306288 - RNA, 20 nt, Human
agguggcugguggcccaucc

SEQ ID NO: 1306289 - RNA, 23 nt, Human
cagcugugagguagggccaguag

SEQ ID NO: 1306290 - RNA, 25 nt, Human
cauccgcugaggguagagcugaggg

SEQ ID NO: 1306291 - RNA, 22 nt, Human
cauucugaccucaagaagucag

SEQ ID NO: 1306292 - RNA, 21 nt, Human
ccgcugaggguagagcugagg

SEQ ID NO: 1306293 - RNA, 19 nt, Human
ccuccuggcucucugcugu

SEQ ID NO: 1306294 - RNA, 22 nt, Human
ccuccuggcucucugcuguaca

SEQ ID NO: 1306295 - RNA, 21 nt, Human
cuccacugccgccauucugac

SEQ ID NO: 1306296 - RNA, 24 nt, Human
ggguagagcugaggguggaagggg

SEQ ID NO: 1306297 - RNA, 18 nt, Human
uagagcagacacuuggaa

SEQ ID NO: 1306298 - RNA, 18 nt, Human
uccgcaggugucuugaga

SEQ ID NO: 1306299 - RNA, 18 nt, Human
ugaguuggaggagguggc

SEQ ID NO: 1306300 - RNA, 23 nt, Human
uggaaggugucuugaggcucagg

SEQ ID NO: 1306301 - RNA, 24 nt, Human
uuuuuaaaguuucagcugugaggu

SEQ ID NO: 1306302 - RNA, 18 nt, Human
caggagccuccugagggg

SEQ ID NO: 1306303 - RNA, 26 nt, Human
caggagccuccugaggggcucuguua

SEQ ID NO: 1306304 - RNA, 31 nt, Human
ccccuccugggcaggagccuccugaggggcu

SEQ ID NO: 1306305 - RNA, 18 nt, Human
ccugaggggcucugucuu

SEQ ID NO: 1306306 - RNA, 24 nt, Human
cuccucgucauucucacucccgaa

SEQ ID NO: 1306307 - RNA, 23 nt, Human
uccugggcaggagccuccugagg

SEQ ID NO: 1306308 - RNA, 24 nt, Human
ucuucagccccuucucgugaaggg

SEQ ID NO: 1306309 - RNA, 19 nt, Human
cacaaagaaaaaugacccc

SEQ ID NO: 1306310 - RNA, 18 nt, Human
uaugaugaaaauuuagaa

SEQ ID NO: 1306311 - RNA, 19 nt, Human
ucuggaaaaacugucuuca

SEQ ID NO: 1306312 - RNA, 21 nt, Human
ugaaaaauaagcuucagcgga

SEQ ID NO: 1306313 - RNA, 20 nt, Human
ugcaucagcaauaccauaca

SEQ ID NO: 1306314 - RNA, 19 nt, Human
ugggaagaacaauuuagcu

SEQ ID NO: 1306315 - RNA, 24 nt, Human
aaaaaaaaaaaagguauuuacuaa

SEQ ID NO: 1306316 - RNA, 21 nt, Human
aaaaacagaugaagguggccg

SEQ ID NO: 1306317 - RNA, 19 nt, Human
aaaacagaugaagguggcc

SEQ ID NO: 1306318 - RNA, 20 nt, Human
aaaugugaacaaucaaaacc

SEQ ID NO: 1306319 - RNA, 19 nt, Human
accugcaucugcccccucc

SEQ ID NO: 1306320 - RNA, 21 nt, Human
accugcaucugcccccuccag

SEQ ID NO: 1306321 - RNA, 19 nt, Human
acugcacugcagcagccgg

SEQ ID NO: 1306322 - RNA, 21 nt, Human
acugcacugcagcagccggca

SEQ ID NO: 1306323 - RNA, 21 nt, Human
agaacaggaaaaaagucugaa

SEQ ID NO: 1306324 - RNA, 22 nt, Human
agaaguaauauuucagacuaga

SEQ ID NO: 1306325 - RNA, 19 nt, Human
caggagauaaccugagauu

SEQ ID NO: 1306326 - RNA, 19 nt, Human
cauugaacaggaacaaggc

SEQ ID NO: 1306327 - RNA, 20 nt, Human
cauugaacaggaacaaggcu

SEQ ID NO: 1306328 - RNA, 27 nt, Human
ccauuuugccacuauuauucauauuaa

SEQ ID NO: 1306329 - RNA, 19 nt, Human
cccagagaaaaccacagac

SEQ ID NO: 1306330 - RNA, 21 nt, Human
cccgcguggucggcgucuucc

SEQ ID NO: 1306331 - RNA, 19 nt, Human
ccugcaucugcccccucca

SEQ ID NO: 1306332 - RNA, 23 nt, Human
ccugcaucugcccccuccagaag

SEQ ID NO: 1306333 - RNA, 20 nt, Human
cggcgucuuccugcaccggg

SEQ ID NO: 1306334 - RNA, 23 nt, Human
cguggucggcgucuuccugcacc

SEQ ID NO: 1306335 - RNA, 22 nt, Human
cuacugcacugcagcagccggc

SEQ ID NO: 1306336 - RNA, 18 nt, Human
cuccagcagcuacugcac

SEQ ID NO: 1306337 - RNA, 18 nt, Human
cuucggguacccuucugu

SEQ ID NO: 1306338 - RNA, 19 nt, Human
gaacaggaaaaaagucuga

SEQ ID NO: 1306339 - RNA, 20 nt, Human
gaacaggaaaaaagucugaa

SEQ ID NO: 1306340 - RNA, 19 nt, Human
gacuagaacaggaaaaaag

SEQ ID NO: 1306341 - RNA, 19 nt, Human
gcagcagccggcaccugca

SEQ ID NO: 1306342 - RNA, 22 nt, Human
ggccuccucagccuccagcagc

SEQ ID NO: 1306343 - RNA, 21 nt, Human
uaaaacuucaucugcccaaaa

SEQ ID NO: 1306344 - RNA, 26 nt, Human
uaaaucuucauuucgauugaguucua

SEQ ID NO: 1306345 - RNA, 24 nt, Human
uacugcacugcagcagccggcacc

SEQ ID NO: 1306346 - RNA, 22 nt, Human
uauaaaacuucaucugcccaaa

SEQ ID NO: 1306347 - RNA, 22 nt, Human
ucaccacucugcugggaaaaac

SEQ ID NO: 1306348 - RNA, 22 nt, Human
uccugcaccggguccgggccuc

SEQ ID NO: 1306349 - RNA, 19 nt, Human
ucugcccccuccagaagcu

SEQ ID NO: 1306350 - RNA, 20 nt, Human
uggcccagagaaaaccacag

SEQ ID NO: 1306351 - RNA, 21 nt, Human
ugggaaaaacagaugaaggug

SEQ ID NO: 1306352 - RNA, 21 nt, Human
ugggaaaaacagaugaaggug

SEQ ID NO: 1306353 - RNA, 18 nt, Human
ugugaacaaucaaaacca

SEQ ID NO: 1306354 - RNA, 22 nt, Human
uuacuaaaauaacaaauugugu

SEQ ID NO: 1306355 - RNA, 20 nt, Human
uucagacuagaacaggaaaa

SEQ ID NO: 1306356 - RNA, 21 nt, Human
uucucauuucuucggguaccc

SEQ ID NO: 1306357 - RNA, 23 nt, Human
agcuccgcggcccccacggcccc

SEQ ID NO: 1306358 - RNA, 18 nt, Human
cagggcagcuccgcggcc

SEQ ID NO: 1306359 - RNA, 23 nt, Human
cccacggccccgcacccucugcc

SEQ ID NO: 1306360 - RNA, 24 nt, Human
ccccacggccccgcacccucugcc

SEQ ID NO: 1306361 - RNA, 23 nt, Human
ccccgcacccucugccuccccgc

SEQ ID NO: 1306362 - RNA, 23 nt, Human
ccccgcgggugcugccgccgcuu

SEQ ID NO: 1306363 - RNA, 18 nt, Human
ccgcacccucugccuccc

SEQ ID NO: 1306364 - RNA, 23 nt, Human
cggcccccacggccccgcacccu

SEQ ID NO: 1306365 - RNA, 21 nt, Human
cuaccgggcgcuggggccagg

SEQ ID NO: 1306366 - RNA, 21 nt, Human
cugccgccuagucugggcuga

SEQ ID NO: 1306367 - RNA, 23 nt, Human
gcugccgccgcuugcugaaaugc

SEQ ID NO: 1306368 - RNA, 18 nt, Human
ggccaggcccucgggucc

SEQ ID NO: 1306369 - RNA, 20 nt, Human
ggggccaggcccucgggucc

SEQ ID NO: 1306370 - RNA, 22 nt, Human
ggucccgccgguccgggcugcc

SEQ ID NO: 1306371 - RNA, 19 nt, Human
ggugcugccgccgcuugcu

SEQ ID NO: 1306372 - RNA, 20 nt, Human
uccccgcgggugcugccgcc

SEQ ID NO: 1306373 - RNA, 21 nt, Human
uccccgcgggugcugccgccg

SEQ ID NO: 1306374 - RNA, 19 nt, Human
ucccgccgguccgggcugc

SEQ ID NO: 1306375 - RNA, 21 nt, Human
uggcuggcccuggagccgcug

SEQ ID NO: 1306376 - RNA, 18 nt, Human
aaacaacagaaaaccucc

SEQ ID NO: 1306377 - RNA, 18 nt, Human
aaccacagagccgaucug

SEQ ID NO: 1306378 - RNA, 18 nt, Human
aagacagugacccuaaac

SEQ ID NO: 1306379 - RNA, 22 nt, Human
aagccagagagagccccaaggc

SEQ ID NO: 1306380 - RNA, 25 nt, Human
aagugauccucccaccucagccuuc

SEQ ID NO: 1306381 - RNA, 21 nt, Human
acaacagaaaaccuccauaga

SEQ ID NO: 1306382 - RNA, 19 nt, Human
acccaggcuggagugcagu

SEQ ID NO: 1306383 - RNA, 23 nt, Human
acccaggcuggagugcaguggug

SEQ ID NO: 1306384 - RNA, 21 nt, Human
acugcaaccucugccuccugg

SEQ ID NO: 1306385 - RNA, 21 nt, Human
acugcaaccucugccuccugg

SEQ ID NO: 1306386 - RNA, 22 nt, Human
acugcaaccucugccuccuggg

SEQ ID NO: 1306387 - RNA, 24 nt, Human
agcagcugauggaagagaaccaca

SEQ ID NO: 1306388 - RNA, 19 nt, Human
agcugauggaagagaacca

SEQ ID NO: 1306389 - RNA, 22 nt, Human
aggaaugcaauaauaaaaaaga

SEQ ID NO: 1306390 - RNA, 18 nt, Human
aggaugauagcucacugu

SEQ ID NO: 1306391 - RNA, 25 nt, Human
aggcuggagugcaguggugcgaucu

SEQ ID NO: 1306392 - RNA, 21 nt, Human
agggagaagccagagagagcc

SEQ ID NO: 1306393 - RNA, 18 nt, Human
aguagcugggacuacaga

SEQ ID NO: 1306394 - RNA, 21 nt, Human
agucccacuccuuucccucug

SEQ ID NO: 1306395 - RNA, 24 nt, Human
agugauucuccugacucagccucc

SEQ ID NO: 1306396 - RNA, 19 nt, Human
agugcaguggugcgaucuc

SEQ ID NO: 1306397 - RNA, 23 nt, Human
agugcaguggugcgaucucaacu

SEQ ID NO: 1306398 - RNA, 18 nt, Human
auagcucacuguagccuc

SEQ ID NO: 1306399 - RNA, 28 nt, Human
caacuccugggcucaagugauccucccu

SEQ ID NO: 1306400 - RNA, 20 nt, Human
caagugauccucccaccuca

SEQ ID NO: 1306401 - RNA, 27 nt, Human
caagugauccucccaccucagccuucc

SEQ ID NO: 1306402 - RNA, 22 nt, Human
caagugauucuccugacucagc

SEQ ID NO: 1306403 - RNA, 24 nt, Human
caauggguuccacuagccaagcuu

SEQ ID NO: 1306404 - RNA, 21 nt, Human
cacccaggcuggagugcagug

SEQ ID NO: 1306405 - RNA, 23 nt, Human
caccuuccagacagccccggaca

SEQ ID NO: 1306406 - RNA, 23 nt, Human
caggaaugcaauaauaaaaaaga

SEQ ID NO: 1306407 - RNA, 24 nt, Human
caugauaaaauuuggaccacaggg

SEQ ID NO: 1306408 - RNA, 25 nt, Human
ccaacuccugggcucaagugauccu

SEQ ID NO: 1306409 - RNA, 19 nt, Human
cccgaguagcugggacuac

SEQ ID NO: 1306410 - RNA, 22 nt, Human
cccuuuugccuuuuucuguucc

SEQ ID NO: 1306411 - RNA, 19 nt, Human
ccucccaccucagccuucc

SEQ ID NO: 1306412 - RNA, 24 nt, Human
ccuccuggguucaagugauucucc

SEQ ID NO: 1306413 - RNA, 20 nt, Human
ccucugagccaguagauggg

SEQ ID NO: 1306414 - RNA, 22 nt, Human
ccucugccuccuggguucaagu

SEQ ID NO: 1306415 - RNA, 19 nt, Human
ccucuggcuuuggcauccu

SEQ ID NO: 1306416 - RNA, 23 nt, Human
ccugacucagccucccgaguagc

SEQ ID NO: 1306417 - RNA, 22 nt, Human
ccugggcucaagugauccuccc

SEQ ID NO: 1306418 - RNA, 23 nt, Human
ccuggguucaagugauucuccuc

SEQ ID NO: 1306419 - RNA, 23 nt, Human
ccuggguucaagugauucuccug

SEQ ID NO: 1306420 - RNA, 20 nt, Human
ccuucucugccacccucacc

SEQ ID NO: 1306421 - RNA, 21 nt, Human
ccuuuugccuuuuucuguucc

SEQ ID NO: 1306422 - RNA, 24 nt, Human
cucaagugauccucccaccucagc

SEQ ID NO: 1306423 - RNA, 21 nt, Human
cucacuguagccuccaacucc

SEQ ID NO: 1306424 - RNA, 24 nt, Human
cucacuguagccuccaacuccugg

SEQ ID NO: 1306425 - RNA, 24 nt, Human
cucagccucccgaguagcugggac

SEQ ID NO: 1306426 - RNA, 20 nt, Human
cuccuggguucaagugauuc

SEQ ID NO: 1306427 - RNA, 21 nt, Human
cuccuggguucaagugauucu

SEQ ID NO: 1306428 - RNA, 24 nt, Human
cucgcucugucacccaggcuggag

SEQ ID NO: 1306429 - RNA, 20 nt, Human
cucugucacccaggcuggag

SEQ ID NO: 1306430 - RNA, 21 nt, Human
cucuuuuuuuuuucuccuuuu

SEQ ID NO: 1306431 - RNA, 23 nt, Human
cugacucagccucccgaguagcu

SEQ ID NO: 1306432 - RNA, 23 nt, Human
cugcaaccucugccuccuggguu

SEQ ID NO: 1306433 - RNA, 24 nt, Human
cugcaaccucugccuccuggguuc

SEQ ID NO: 1306434 - RNA, 23 nt, Human
cugccuccuggguucaagugauu

SEQ ID NO: 1306435 - RNA, 21 nt, Human
gagggcgagcugggcuucuuc

SEQ ID NO: 1306436 - RNA, 22 nt, Human
gaguagcugggacuacagacag

SEQ ID NO: 1306437 - RNA, 21 nt, Human
gagugcaguggugcgaucuca

SEQ ID NO: 1306438 - RNA, 22 nt, Human
gcaaccucugccuccuggguuc

SEQ ID NO: 1306439 - RNA, 22 nt, Human
gcucaagugauccucccaccuc

SEQ ID NO: 1306440 - RNA, 25 nt, Human
gcucugucacccaggcuggagugca

SEQ ID NO: 1306441 - RNA, 18 nt, Human
gcucuuuuuuuuuucucc

SEQ ID NO: 1306442 - RNA, 23 nt, Human
ggagaagccagagagagccccaa

SEQ ID NO: 1306443 - RNA, 23 nt, Human
gggagaagccagagagagcccca

SEQ ID NO: 1306444 - RNA, 19 nt, Human
gggcgagggcgagcugggc

SEQ ID NO: 1306445 - RNA, 21 nt, Human
gggcucaagugauccucccac

SEQ ID NO: 1306446 - RNA, 22 nt, Human
gggcucaagugauccucccacc

SEQ ID NO: 1306447 - RNA, 24 nt, Human
gugauccucccaccucagccuucc

SEQ ID NO: 1306448 - RNA, 24 nt, Human
gugauucuccugacucagccuccc

SEQ ID NO: 1306449 - RNA, 21 nt, Human
uacugcaaccucugccuccug

SEQ ID NO: 1306450 - RNA, 23 nt, Human
uacugcaaccucugccuccuggg

SEQ ID NO: 1306451 - RNA, 24 nt, Human
uagcucacuguagccuccaacucc

SEQ ID NO: 1306452 - RNA, 19 nt, Human
uagcugggacuacagacag

SEQ ID NO: 1306453 - RNA, 22 nt, Human
ucacccaggcuggagugcagug

SEQ ID NO: 1306454 - RNA, 21 nt, Human
ucaccuuccagacagccccgg

SEQ ID NO: 1306455 - RNA, 24 nt, Human
ucacuguagccuccaacuccuggg

SEQ ID NO: 1306456 - RNA, 23 nt, Human
ucagccucccgaguagcugggac

SEQ ID NO: 1306457 - RNA, 19 nt, Human
uccagacagccccggacac

SEQ ID NO: 1306458 - RNA, 18 nt, Human
ucccgaguagcugggacu

SEQ ID NO: 1306459 - RNA, 23 nt, Human
ucccuuuugccuuuuucuguucc

SEQ ID NO: 1306460 - RNA, 21 nt, Human
uccugggcucaagugauccuc

SEQ ID NO: 1306461 - RNA, 22 nt, Human
uccugggcucaagugauccucc

SEQ ID NO: 1306462 - RNA, 24 nt, Human
uccugggcucaagugauccuccca

SEQ ID NO: 1306463 - RNA, 21 nt, Human
uccuggguucaagugauucuc

SEQ ID NO: 1306464 - RNA, 24 nt, Human
uccuggguucaagugauucuccug

SEQ ID NO: 1306465 - RNA, 24 nt, Human
ucgcucugucacccaggcuggagu

SEQ ID NO: 1306466 - RNA, 23 nt, Human
ucucagugcucagggacaggaau

SEQ ID NO: 1306467 - RNA, 19 nt, Human
ucucgcucugucacccagg

SEQ ID NO: 1306468 - RNA, 23 nt, Human
ucucgcucugucacccaggcugg

SEQ ID NO: 1306469 - RNA, 24 nt, Human
ucucgcucugucacccaggcugga

SEQ ID NO: 1306470 - RNA, 26 nt, Human
ucucgcucugucacccaggcuggagu

SEQ ID NO: 1306471 - RNA, 27 nt, Human
ucucgcucugucacccaggcuggagug

SEQ ID NO: 1306472 - RNA, 24 nt, Human
ucugucacccaggcuggagugcag

SEQ ID NO: 1306473 - RNA, 22 nt, Human
ucuuuuuuuuuucuccuuuuua

SEQ ID NO: 1306474 - RNA, 20 nt, Human
ugacucagccucccgaguag

SEQ ID NO: 1306475 - RNA, 24 nt, Human
ugacucagccucccgaguagcugg

SEQ ID NO: 1306476 - RNA, 22 nt, Human
ugagauggagucucgcucuguc

SEQ ID NO: 1306477 - RNA, 23 nt, Human
ugauggaagagaaccacagggug

SEQ ID NO: 1306478 - RNA, 20 nt, Human
ugauucuccugacucagccu

SEQ ID NO: 1306479 - RNA, 27 nt, Human
ugcaauaauaaaaaagaaaagaagguc

SEQ ID NO: 1306480 - RNA, 22 nt, Human
ugccuccuggguucaagugauu

SEQ ID NO: 1306481 - RNA, 20 nt, Human
uggaagagaaccacagggug

SEQ ID NO: 1306482 - RNA, 21 nt, Human
uggaccacagggagaagccag

SEQ ID NO: 1306483 - RNA, 20 nt, Human
uggaccacagggagaagccg

SEQ ID NO: 1306484 - RNA, 23 nt, Human
uggagugcaguggugcgaucuca

SEQ ID NO: 1306485 - RNA, 24 nt, Human
ugggcucaagugauccucccaccu

SEQ ID NO: 1306486 - RNA, 23 nt, Human
uggguucaagugauucuccugac

SEQ ID NO: 1306487 - RNA, 24 nt, Human
uggugcgaucucaacuuacugcaa

SEQ ID NO: 1306488 - RNA, 18 nt, Human
uguucaaacaacagaaaa

SEQ ID NO: 1306489 - RNA, 24 nt, Human
uuacugcaaccucugccuccuggg

SEQ ID NO: 1306490 - RNA, 21 nt, Human
uucaaacaacagaaaaccucc

SEQ ID NO: 1306491 - RNA, 23 nt, Human
uucaagugauucuccugacucag

SEQ ID NO: 1306492 - RNA, 24 nt, Human
uucaagugauucuccugacucagc

SEQ ID NO: 1306493 - RNA, 23 nt, Human
uucuugggggucacccgaggcug

SEQ ID NO: 1306494 - RNA, 22 nt, Human
uugccuuuuucuguuccuguau

SEQ ID NO: 1306495 - RNA, 23 nt, Human
uugucucaucccagggaugggag

SEQ ID NO: 1306496 - RNA, 19 nt, Human
aaagugcuaggauuacaag

SEQ ID NO: 1306497 - RNA, 20 nt, Human
aaagugcuaggauuacaagg

SEQ ID NO: 1306498 - RNA, 21 nt, Human
aaagugcuaggauuacaaggg

SEQ ID NO: 1306499 - RNA, 23 nt, Human
aaccugguccuuccugcugucac

SEQ ID NO: 1306500 - RNA, 22 nt, Human
aagugcuaggauuacaagggcu

SEQ ID NO: 1306501 - RNA, 25 nt, Human
acagcuggguguccuaccggggccc

SEQ ID NO: 1306502 - RNA, 20 nt, Human
acaggccugcgaggggucgg

SEQ ID NO: 1306503 - RNA, 22 nt, Human
accccccccccccaaaagaaug

SEQ ID NO: 1306504 - RNA, 18 nt, Human
acgcagguguuccgggcu

SEQ ID NO: 1306505 - RNA, 25 nt, Human
acuauguugcccaggcuggucucaa

SEQ ID NO: 1306506 - RNA, 25 nt, Human
acucauucuuuuuuuuuuuuuuuuu

SEQ ID NO: 1306507 - RNA, 19 nt, Human
acuccgugccccgcacccc

SEQ ID NO: 1306508 - RNA, 21 nt, Human
acuccgugccccgcacccccc

SEQ ID NO: 1306509 - RNA, 18 nt, Human
acugcacucuagccuggg

SEQ ID NO: 1306510 - RNA, 24 nt, Human
agaagccagagauuguagugagcu

SEQ ID NO: 1306511 - RNA, 22 nt, Human
agaccgaggccgaggugcugga

SEQ ID NO: 1306512 - RNA, 19 nt, Human
agagauuguagugagcuca

SEQ ID NO: 1306513 - RNA, 25 nt, Human
agaggaugagagaaagacaaaaagg

SEQ ID NO: 1306514 - RNA, 23 nt, Human
agcugaggcaggagacucacuug

SEQ ID NO: 1306515 - RNA, 18 nt, Human
aggcaggagacucacuug

SEQ ID NO: 1306516 - RNA, 22 nt, Human
aggcaggagacucacuugaacc

SEQ ID NO: 1306517 - RNA, 18 nt, Human
agggagcgcuggggagga

SEQ ID NO: 1306518 - RNA, 24 nt, Human
aucucacucuguagccaggcugga

SEQ ID NO: 1306519 - RNA, 19 nt, Human
auucuagucauucauucac

SEQ ID NO: 1306520 - RNA, 25 nt, Human
caaagugcuaggauuacaagggcua

SEQ ID NO: 1306521 - RNA, 20 nt, Human
caaguaauucuccugccuca

SEQ ID NO: 1306522 - RNA, 22 nt, Human
caaguaauucuccugccucagc

SEQ ID NO: 1306523 - RNA, 22 nt, Human
caagugauccuccugccucggc

SEQ ID NO: 1306524 - RNA, 27 nt, Human
caagugauccuccugccucggccuccc

SEQ ID NO: 1306525 - RNA, 28 nt, Human
caagugauccuccugccucggccuccca

SEQ ID NO: 1306526 - RNA, 21 nt, Human
caccgcccgcagaccgaggcc

SEQ ID NO: 1306527 - RNA, 19 nt, Human
caccuccaggcaguccaga

SEQ ID NO: 1306528 - RNA, 19 nt, Human
caccuuguccgaguuccau

SEQ ID NO: 1306529 - RNA, 19 nt, Human
cacuauguugcccaggcug

SEQ ID NO: 1306530 - RNA, 24 nt, Human
cacuauguugcccaggcuggucuc

SEQ ID NO: 1306531 - RNA, 27 nt, Human
cacuauguugcccaggcuggucucaaa

SEQ ID NO: 1306532 - RNA, 21 nt, Human
cacucuguagccaggcuggag

SEQ ID NO: 1306533 - RNA, 22 nt, Human
cacucuguagccaggcuggagu

SEQ ID NO: 1306534 - RNA, 23 nt, Human
cacugaaaccucugccucccaag

SEQ ID NO: 1306535 - RNA, 18 nt, Human
cacugcacucuagccugg

SEQ ID NO: 1306536 - RNA, 19 nt, Human
cacugcacucuagccuggg

SEQ ID NO: 1306537 - RNA, 20 nt, Human
cacugcacucuagccugggc

SEQ ID NO: 1306538 - RNA, 21 nt, Human
cacugcacucuagccugggcc

SEQ ID NO: 1306539 - RNA, 20 nt, Human
cacugcacuucacaguuugc

SEQ ID NO: 1306540 - RNA, 24 nt, Human
cagccgcacccugcuccuguuggc

SEQ ID NO: 1306541 - RNA, 20 nt, Human
cagccuccugaguagcugag

SEQ ID NO: 1306542 - RNA, 24 nt, Human
caggcuggagugcagugaccacga

SEQ ID NO: 1306543 - RNA, 26 nt, Human
cagggccaaggaggcuuggauggagc

SEQ ID NO: 1306544 - RNA, 21 nt, Human
cauaacauggugaaaggcaaa

SEQ ID NO: 1306545 - RNA, 22 nt, Human
caucaugucgcccaagcucuuc

SEQ ID NO: 1306546 - RNA, 21 nt, Human
cauucuuuuuuuuuuuuuuuu

SEQ ID NO: 1306547 - RNA, 19 nt, Human
ccaaagugcuaggauuaca

SEQ ID NO: 1306548 - RNA, 20 nt, Human
ccacugcacucuagccuggg

SEQ ID NO: 1306549 - RNA, 20 nt, Human
ccacugcacucuagccuggg

SEQ ID NO: 1306550 - RNA, 21 nt, Human
ccacugcacucuagccugggc

SEQ ID NO: 1306551 - RNA, 24 nt, Human
ccagcccgcgcucuuccgcacccc

SEQ ID NO: 1306552 - RNA, 22 nt, Human
ccaggagcccuggucuggggga

SEQ ID NO: 1306553 - RNA, 19 nt, Human
ccccgcacccccccccccc

SEQ ID NO: 1306554 - RNA, 20 nt, Human
ccccgcacccccccccccca

SEQ ID NO: 1306555 - RNA, 23 nt, Human
ccccgcaccccccccccccaaaa

SEQ ID NO: 1306556 - RNA, 23 nt, Human
ccccgugcuagacuccgugcccc

SEQ ID NO: 1306557 - RNA, 18 nt, Human
cccgcacccccccccccc

SEQ ID NO: 1306558 - RNA, 20 nt, Human
cccgcgcucuuccgcacccc

SEQ ID NO: 1306559 - RNA, 18 nt, Human
cccuguguccgugucccg

SEQ ID NO: 1306560 - RNA, 20 nt, Human
ccgcaccccccccccccaaa

SEQ ID NO: 1306561 - RNA, 21 nt, Human
ccgcaccccccccccccaaaa

SEQ ID NO: 1306562 - RNA, 23 nt, Human
ccgcccgcagaccgaggccgagg

SEQ ID NO: 1306563 - RNA, 21 nt, Human
ccgcucgguucccgcgugccc

SEQ ID NO: 1306564 - RNA, 18 nt, Human
ccgucaccagcuuccugu

SEQ ID NO: 1306565 - RNA, 22 nt, Human
ccguguauuguccccugugucc

SEQ ID NO: 1306566 - RNA, 22 nt, Human
ccucaagugauccuccugccuc

SEQ ID NO: 1306567 - RNA, 21 nt, Human
ccuccagaauguaccguucau

SEQ ID NO: 1306568 - RNA, 22 nt, Human
ccuccaggcaguccagaacgug

SEQ ID NO: 1306569 - RNA, 24 nt, Human
ccucccaaguucaaguaauucucc

SEQ ID NO: 1306570 - RNA, 26 nt, Human
ccuccugccucggccucccaaagugc

SEQ ID NO: 1306571 - RNA, 18 nt, Human
ccuggccucaagugaucc

SEQ ID NO: 1306572 - RNA, 21 nt, Human
ccuggccucaagugauccucc

SEQ ID NO: 1306573 - RNA, 22 nt, Human
ccuggccucaagugauccuccu

SEQ ID NO: 1306574 - RNA, 23 nt, Human
ccuggccucaagugauccuccug

SEQ ID NO: 1306575 - RNA, 22 nt, Human
cgcaccccccccccccaaaaga

SEQ ID NO: 1306576 - RNA, 22 nt, Human
cgcaccccuccagaauguaccg

SEQ ID NO: 1306577 - RNA, 24 nt, Human
cuaccggggcccuggccuggacug

SEQ ID NO: 1306578 - RNA, 24 nt, Human
cucaagugauccuccugccucggc

SEQ ID NO: 1306579 - RNA, 22 nt, Human
cucacugaaaccucugccuccc

SEQ ID NO: 1306580 - RNA, 23 nt, Human
cucacugaaaccucugccuccca

SEQ ID NO: 1306581 - RNA, 23 nt, Human
cuccagcccgcgcucuuccgcac

SEQ ID NO: 1306582 - RNA, 18 nt, Human
cugaaaccucugccuccc

SEQ ID NO: 1306583 - RNA, 24 nt, Human
cugaaaccucugccucccaaguuc

SEQ ID NO: 1306584 - RNA, 22 nt, Human
cugcaccuaugugcccggcacc

SEQ ID NO: 1306585 - RNA, 25 nt, Human
cugcccacccguguauuguccccug

SEQ ID NO: 1306586 - RNA, 23 nt, Human
cugccucagccuccugaguagcu

SEQ ID NO: 1306587 - RNA, 23 nt, Human
cugccucggccucccaaagugcu

SEQ ID NO: 1306588 - RNA, 24 nt, Human
cugugccugcgcuucuucucuccc

SEQ ID NO: 1306589 - RNA, 21 nt, Human
cuuuuuuuuuuuuuuuuuuuu

SEQ ID NO: 1306590 - RNA, 24 nt, Human
gacagucucacuauguugcccagg

SEQ ID NO: 1306591 - RNA, 20 nt, Human
gacuccgugccccgcacccc

SEQ ID NO: 1306592 - RNA, 21 nt, Human
gagaaagacaaaaaggggcca

SEQ ID NO: 1306593 - RNA, 19 nt, Human
gagacucacuugaaccaga

SEQ ID NO: 1306594 - RNA, 20 nt, Human
gagcucacgccacugcacuc

SEQ ID NO: 1306595 - RNA, 23 nt, Human
gagcucacgccacugcacucuag

SEQ ID NO: 1306596 - RNA, 22 nt, Human
gcaguccagaacgugggcaaca

SEQ ID NO: 1306597 - RNA, 20 nt, Human
gccacugcacucuagccugg

SEQ ID NO: 1306598 - RNA, 20 nt, Human
gccucagccuccugaguagc

SEQ ID NO: 1306599 - RNA, 18 nt, Human
gccugcgaggggucgggg

SEQ ID NO: 1306600 - RNA, 22 nt, Human
gccugggccccgugcuagacuc

SEQ ID NO: 1306601 - RNA, 20 nt, Human
gcugcagcccaccgugcgcc

SEQ ID NO: 1306602 - RNA, 20 nt, Human
gcuggagugcagugaccacg

SEQ ID NO: 1306603 - RNA, 23 nt, Human
gcuggucucaaacuccuggccuc

SEQ ID NO: 1306604 - RNA, 18 nt, Human
gcuuggauggagccgcug

SEQ ID NO: 1306605 - RNA, 21 nt, Human
gcuuggauggagccgcugcag

SEQ ID NO: 1306606 - RNA, 20 nt, Human
ggagcagagcgcgcagacgc

SEQ ID NO: 1306607 - RNA, 23 nt, Human
ggccacuggcacgcccacguagg

SEQ ID NO: 1306608 - RNA, 22 nt, Human
ggccucaagugauccuccugcc

SEQ ID NO: 1306609 - RNA, 24 nt, Human
ggcuggucucaaacuccuggccuc

SEQ ID NO: 1306610 - RNA, 19 nt, Human
ggggagggggcugccagga

SEQ ID NO: 1306611 - RNA, 25 nt, Human
ggggcgggcgaagagcgguggggaa

SEQ ID NO: 1306612 - RNA, 23 nt, Human
guaauucuccugccucagccucc

SEQ ID NO: 1306613 - RNA, 18 nt, Human
guagccaggcuggagugc

SEQ ID NO: 1306614 - RNA, 21 nt, Human
gucagggacggagccuaaggg

SEQ ID NO: 1306615 - RNA, 18 nt, Human
uaaaccuagcagaaccug

SEQ ID NO: 1306616 - RNA, 22 nt, Human
uaaguuagagacagucucacua

SEQ ID NO: 1306617 - RNA, 20 nt, Human
uaauucuccugccucagccu

SEQ ID NO: 1306618 - RNA, 26 nt, Human
uagaacagaaauuuauuuucucacag

SEQ ID NO: 1306619 - RNA, 24 nt, Human
uagcagaaccugguccuuccugcu

SEQ ID NO: 1306620 - RNA, 23 nt, Human
uauguugcccaggcuggucucaa

SEQ ID NO: 1306621 - RNA, 24 nt, Human
uauguugcccaggcuggucucaaa

SEQ ID NO: 1306622 - RNA, 23 nt, Human
ucacgccacugcacucuagccug

SEQ ID NO: 1306623 - RNA, 24 nt, Human
ucacucuguagccaggcuggagug

SEQ ID NO: 1306624 - RNA, 18 nt, Human
ucacugaaaccucugccu

SEQ ID NO: 1306625 - RNA, 19 nt, Human
ucacugaaaccucugccuc

SEQ ID NO: 1306626 - RNA, 24 nt, Human
ucacugaaaccucugccucccaag

SEQ ID NO: 1306627 - RNA, 23 nt, Human
ucagccuccugaguagcugaggc

SEQ ID NO: 1306628 - RNA, 25 nt, Human
ucagccuccugaguagcugaggcag

SEQ ID NO: 1306629 - RNA, 18 nt, Human
ucauucauucacucacuc

SEQ ID NO: 1306630 - RNA, 25 nt, Human
uccaacccaggucugcuuuggugac

SEQ ID NO: 1306631 - RNA, 19 nt, Human
uccagaauguaccguucau

SEQ ID NO: 1306632 - RNA, 22 nt, Human
uccagcccgcgcucuuccgcac

SEQ ID NO: 1306633 - RNA, 20 nt, Human
uccagggccaaggaggcuug

SEQ ID NO: 1306634 - RNA, 23 nt, Human
ucccaaagugcuaggauuacaag

SEQ ID NO: 1306635 - RNA, 21 nt, Human
ucccaaguucaaguaauucuc

SEQ ID NO: 1306636 - RNA, 24 nt, Human
ucccaaguucaaguaauucuccug

SEQ ID NO: 1306637 - RNA, 19 nt, Human
ucucacuauguugcccagg

SEQ ID NO: 1306638 - RNA, 23 nt, Human
ucucacuauguugcccaggcugg

SEQ ID NO: 1306639 - RNA, 24 nt, Human
ucucacuauguugcccaggcuggu

SEQ ID NO: 1306640 - RNA, 26 nt, Human
ucucacuauguugcccaggcuggucu

SEQ ID NO: 1306641 - RNA, 27 nt, Human
ucucacuauguugcccaggcuggucuc

SEQ ID NO: 1306642 - RNA, 23 nt, Human
ucucacucuguagccaggcugga

SEQ ID NO: 1306643 - RNA, 22 nt, Human
ucucaggcugcaccuaugugcc

SEQ ID NO: 1306644 - RNA, 24 nt, Human
ucuccugccucagccuccugagua

SEQ ID NO: 1306645 - RNA, 18 nt, Human
ucuguagccaggcuggag

SEQ ID NO: 1306646 - RNA, 23 nt, Human
ucuguagccaggcuggagugcag

SEQ ID NO: 1306647 - RNA, 19 nt, Human
ugaaaccucugccucccaa

SEQ ID NO: 1306648 - RNA, 25 nt, Human
ugagagaaagacaaaaaggggccag

SEQ ID NO: 1306649 - RNA, 18 nt, Human
ugagagccacuguuccug

SEQ ID NO: 1306650 - RNA, 20 nt, Human
ugaggcaggagacucacuug

SEQ ID NO: 1306651 - RNA, 24 nt, Human
ugaggcaggagacucacuugaacc

SEQ ID NO: 1306652 - RNA, 23 nt, Human
ugcacagcuggguguccuaccgg

SEQ ID NO: 1306653 - RNA, 23 nt, Human
ugccaacccgccccguuccacgc

SEQ ID NO: 1306654 - RNA, 18 nt, Human
ugccaggagcccuggucu

SEQ ID NO: 1306655 - RNA, 22 nt, Human
ugccaggagcccuggucugggg

SEQ ID NO: 1306656 - RNA, 24 nt, Human
ugcccaggcuggucucaaacuccu

SEQ ID NO: 1306657 - RNA, 22 nt, Human
ugccccgcacccccccccccca

SEQ ID NO: 1306658 - RNA, 24 nt, Human
ugccccgcaccccccccccccaaa

SEQ ID NO: 1306659 - RNA, 24 nt, Human
ugccucagccuccugaguagcuga

SEQ ID NO: 1306660 - RNA, 27 nt, Human
ugccucccaaguucaaguaauucuuuu

SEQ ID NO: 1306661 - RNA, 21 nt, Human
ugccucggccucccaaagugc

SEQ ID NO: 1306662 - RNA, 23 nt, Human
ugccucggccucccaaagugcua

SEQ ID NO: 1306663 - RNA, 24 nt, Human
ugccucggccucccaaagugcuag

SEQ ID NO: 1306664 - RNA, 24 nt, Human
ugccugcgcuucuucucucccgac

SEQ ID NO: 1306665 - RNA, 20 nt, Human
ugcuaggauuacaagggcua

SEQ ID NO: 1306666 - RNA, 18 nt, Human
uggauggagccgcugcag

SEQ ID NO: 1306667 - RNA, 18 nt, Human
uggccucaagugauccuc

SEQ ID NO: 1306668 - RNA, 20 nt, Human
uggccucaagugauccuccu

SEQ ID NO: 1306669 - RNA, 24 nt, Human
uggccucaagugauccuccugccu

SEQ ID NO: 1306670 - RNA, 18 nt, Human
ugggaaguccaaggucau

SEQ ID NO: 1306671 - RNA, 20 nt, Human
ugggccggguuggacugggc

SEQ ID NO: 1306672 - RNA, 19 nt, Human
uggggaggaccagggaggc

SEQ ID NO: 1306673 - RNA, 21 nt, Human
uggggaggaccagggaggcug

SEQ ID NO: 1306674 - RNA, 21 nt, Human
ugggggacuccagcccgcgcu

SEQ ID NO: 1306675 - RNA, 19 nt, Human
ugggggcccugcugagcgc

SEQ ID NO: 1306676 - RNA, 22 nt, Human
uguauuguccccuguguccgug

SEQ ID NO: 1306677 - RNA, 18 nt, Human
uguccccuguguccgugu

SEQ ID NO: 1306678 - RNA, 21 nt, Human
uucaaguaauucuccugccuc

SEQ ID NO: 1306679 - RNA, 23 nt, Human
uucaaguaauucuccugccucag

SEQ ID NO: 1306680 - RNA, 24 nt, Human
uucaaguaauucuccugccucagc

SEQ ID NO: 1306681 - RNA, 19 nt, Human
uucccgcgugccccgccgu

SEQ ID NO: 1306682 - RNA, 27 nt, Human
uucuuuuuuuuuuuuuuuuuuuugggg

SEQ ID NO: 1306683 - RNA, 23 nt, Human
uugaaccagaagccagagauugu

SEQ ID NO: 1306684 - RNA, 26 nt, Human
uuuuuuuuuuuugagauggaaucuca

SEQ ID NO: 1306685 - RNA, 20 nt, Human
uuuuuuuuuuuuuuuugaga

SEQ ID NO: 1306686 - RNA, 19 nt, Human
acacagcgagacuucgucu

SEQ ID NO: 1306687 - RNA, 20 nt, Human
acacagcgagacuucgucuc

SEQ ID NO: 1306688 - RNA, 20 nt, Human
acacagcgagacuucgucuc

SEQ ID NO: 1306689 - RNA, 22 nt, Human
agccugggugacacagcgagac

SEQ ID NO: 1306690 - RNA, 23 nt, Human
agccugggugacacagcgagacu

SEQ ID NO: 1306691 - RNA, 22 nt, Human
caccacaauggccucagaggac

SEQ ID NO: 1306692 - RNA, 18 nt, Human
cagcgagacuucgucucg

SEQ ID NO: 1306693 - RNA, 22 nt, Human
ccacuucccaccauucugaugc

SEQ ID NO: 1306694 - RNA, 20 nt, Human
ccccaguccucccacucugc

SEQ ID NO: 1306695 - RNA, 21 nt, Human
ccccguguccuccuucaccaa

SEQ ID NO: 1306696 - RNA, 20 nt, Human
ccugggugacacagcgagac

SEQ ID NO: 1306697 - RNA, 21 nt, Human
ccugggugacacagcgagacu

SEQ ID NO: 1306698 - RNA, 19 nt, Human
ccuugggcuacucagugcc

SEQ ID NO: 1306699 - RNA, 20 nt, Human
cuagaccccaguccucccac

SEQ ID NO: 1306700 - RNA, 23 nt, Human
gaccccaguccucccacucugcg

SEQ ID NO: 1306701 - RNA, 20 nt, Human
gaccccguguccuccuucac

SEQ ID NO: 1306702 - RNA, 24 nt, Human
gcaugguggugggcgccugugguc

SEQ ID NO: 1306703 - RNA, 18 nt, Human
uagaccccaguccuccca

SEQ ID NO: 1306704 - RNA, 20 nt, Human
ucccagcaggcugcuagacc

SEQ ID NO: 1306705 - RNA, 21 nt, Human
aaaaaagaaaaacugaacuuc

SEQ ID NO: 1306706 - RNA, 21 nt, Human
aaacggaucagagggaaagcu

SEQ ID NO: 1306707 - RNA, 22 nt, Human
aaaguuugauuuaggcuuaaag

SEQ ID NO: 1306708 - RNA, 26 nt, Human
aagaaaaauauuuaaaauaaagaaaa

SEQ ID NO: 1306709 - RNA, 22 nt, Human
acacccccgcaccccugcaagc

SEQ ID NO: 1306710 - RNA, 23 nt, Human
accaggcagggccgcccggaguc

SEQ ID NO: 1306711 - RNA, 19 nt, Human
accccggaccgcccagucu

SEQ ID NO: 1306712 - RNA, 18 nt, Human
accccuggggugggucug

SEQ ID NO: 1306713 - RNA, 21 nt, Human
acugcccccggccuccagcac

SEQ ID NO: 1306714 - RNA, 19 nt, Human
acuucgaucuucuucucca

SEQ ID NO: 1306715 - RNA, 20 nt, Human
agaaaugucauucuggucgu

SEQ ID NO: 1306716 - RNA, 19 nt, Human
agccuggcagggcggagcc

SEQ ID NO: 1306717 - RNA, 27 nt, Human
agcuucguuucuuacucggauggagac

SEQ ID NO: 1306718 - RNA, 20 nt, Human
aggcaggccccggugcagcc

SEQ ID NO: 1306719 - RNA, 25 nt, Human
aggcgacaggccugcgguuuucaca

SEQ ID NO: 1306720 - RNA, 20 nt, Human
agggcggagccuaggccgcg

SEQ ID NO: 1306721 - RNA, 19 nt, Human
aggggacagggaugcggua

SEQ ID NO: 1306722 - RNA, 20 nt, Human
caauuuaaaaguggccgccu

SEQ ID NO: 1306723 - RNA, 23 nt, Human
cacccccgcaccccugcaagcuc

SEQ ID NO: 1306724 - RNA, 27 nt, Human
cacgaguccgcggagcgccagucacac

SEQ ID NO: 1306725 - RNA, 24 nt, Human
cacugcacugcccacgaguuugcc

SEQ ID NO: 1306726 - RNA, 24 nt, Human
cacugcccacgaguuugcggggug

SEQ ID NO: 1306727 - RNA, 20 nt, Human
caggacccacuaggugggcc

SEQ ID NO: 1306728 - RNA, 26 nt, Human
caggcgagcuucccucgucgcggccc

SEQ ID NO: 1306729 - RNA, 23 nt, Human
ccacuaggugggccgcucggccc

SEQ ID NO: 1306730 - RNA, 18 nt, Human
ccagcacugcacugccca

SEQ ID NO: 1306731 - RNA, 22 nt, Human
ccccagguccgcaggccgccuc

SEQ ID NO: 1306732 - RNA, 19 nt, Human
cccccgcaccccugcaagc

SEQ ID NO: 1306733 - RNA, 22 nt, Human
cccccgcaccccugcaagcucc

SEQ ID NO: 1306734 - RNA, 23 nt, Human
cccccgcaccccugcaagcuccc

SEQ ID NO: 1306735 - RNA, 23 nt, Human
ccccgcaccccugcaagcucccg

SEQ ID NO: 1306736 - RNA, 25 nt, Human
ccccggccgaacccuacauguccuc

SEQ ID NO: 1306737 - RNA, 19 nt, Human
cccucgcacccgcccucug

SEQ ID NO: 1306738 - RNA, 22 nt, Human
cccugcggguccgccacugccc

SEQ ID NO: 1306739 - RNA, 20 nt, Human
cccuggggugggucugaccc

SEQ ID NO: 1306740 - RNA, 21 nt, Human
ccgcaccccugcaagcucccc

SEQ ID NO: 1306741 - RNA, 22 nt, Human
ccgccacugcccccggccucca

SEQ ID NO: 1306742 - RNA, 22 nt, Human
ccgcccucugcucugccgcucc

SEQ ID NO: 1306743 - RNA, 20 nt, Human
ccgccuaggcgacaggccug

SEQ ID NO: 1306744 - RNA, 22 nt, Human
ccgcgcgcggacucggcuuccc

SEQ ID NO: 1306745 - RNA, 19 nt, Human
ccucauauacucgcccgga

SEQ ID NO: 1306746 - RNA, 22 nt, Human
ccuccagcacugcacugcccac

SEQ ID NO: 1306747 - RNA, 20 nt, Human
cgagcagagaggugggagac

SEQ ID NO: 1306748 - RNA, 21 nt, Human
cgaggggacagggaugcggua

SEQ ID NO: 1306749 - RNA, 22 nt, Human
cgcccagucucagccuaaaaac

SEQ ID NO: 1306750 - RNA, 23 nt, Human
cgccccgggguuggagguuccca

SEQ ID NO: 1306751 - RNA, 19 nt, Human
cggccgaacccuacauguc

SEQ ID NO: 1306752 - RNA, 23 nt, Human
cuccagcacugcacugcccacga

SEQ ID NO: 1306753 - RNA, 23 nt, Human
cucggccccaagccuggcagggc

SEQ ID NO: 1306754 - RNA, 18 nt, Human
gaaccccggaccgcccag

SEQ ID NO: 1306755 - RNA, 19 nt, Human
gacaagguuacccugcggg

SEQ ID NO: 1306756 - RNA, 22 nt, Human
gagguucccacggagccgggaa

SEQ ID NO: 1306757 - RNA, 21 nt, Human
gccuaggccgcgcgccccggg

SEQ ID NO: 1306758 - RNA, 24 nt, Human
gcgacccuuuccugcuggccuucu

SEQ ID NO: 1306759 - RNA, 21 nt, Human
gcggagcgccagucacacccc

SEQ ID NO: 1306760 - RNA, 23 nt, Human
gcggggugugagcgccgaaggag

SEQ ID NO: 1306761 - RNA, 22 nt, Human
ggaaaagucagcucguacguuu

SEQ ID NO: 1306762 - RNA, 18 nt, Human
ggcugcugggggcucggg

SEQ ID NO: 1306763 - RNA, 20 nt, Human
ggggaaagguggggcgggaa

SEQ ID NO: 1306764 - RNA, 22 nt, Human
gguaguaggggaaagguggggc

SEQ ID NO: 1306765 - RNA, 19 nt, Human
ggugugagcgccgaaggag

SEQ ID NO: 1306766 - RNA, 22 nt, Human
gguuuucacaguguaaaacgga

SEQ ID NO: 1306767 - RNA, 18 nt, Human
guagguuuccccuaggaa

SEQ ID NO: 1306768 - RNA, 20 nt, Human
uacugcggauggcaccggaa

SEQ ID NO: 1306769 - RNA, 23 nt, Human
uauaaacgaaaauaaaaguuuga

SEQ ID NO: 1306770 - RNA, 24 nt, Human
ucacacccccgcaccccugcaagc

SEQ ID NO: 1306771 - RNA, 23 nt, Human
ucagccuaaaaacuuggauccaa

SEQ ID NO: 1306772 - RNA, 18 nt, Human
uccccaggucaggaccca

SEQ ID NO: 1306773 - RNA, 26 nt, Human
ucccugaagcgggacuuacucaaccu

SEQ ID NO: 1306774 - RNA, 24 nt, Human
uccgcaggccgccucccuucccuc

SEQ ID NO: 1306775 - RNA, 18 nt, Human
uccgcgacccuuuccugc

SEQ ID NO: 1306776 - RNA, 25 nt, Human
uccgcggagcgccagucacaccccc

SEQ ID NO: 1306777 - RNA, 25 nt, Human
uccuacgguuguggaugugccaguc

SEQ ID NO: 1306778 - RNA, 19 nt, Human
uccugggugugcgggaguc

SEQ ID NO: 1306779 - RNA, 19 nt, Human
ucgcacccgcccucugcuc

SEQ ID NO: 1306780 - RNA, 18 nt, Human
ucgcggagggaagcgagg

SEQ ID NO: 1306781 - RNA, 19 nt, Human
ucugccgcucccgguccug

SEQ ID NO: 1306782 - RNA, 21 nt, Human
ucugucuuucccagaaagcgg

SEQ ID NO: 1306783 - RNA, 23 nt, Human
ugcugggggcucgggaggugcgc

SEQ ID NO: 1306784 - RNA, 19 nt, Human
uggcugaggcaauggcacc

SEQ ID NO: 1306785 - RNA, 22 nt, Human
uucacaguguaaaacggaucag

SEQ ID NO: 1306786 - RNA, 20 nt, Human
uuccccaggucaggacccac

SEQ ID NO: 1306787 - RNA, 24 nt, Human
uucccuggugucaccaaauaaaca

SEQ ID NO: 1306788 - RNA, 18 nt, Human
uucuggucguuccucccu

SEQ ID NO: 1306789 - RNA, 23 nt, Human
uugguuuuucgucuauuugcuuc

SEQ ID NO: 1306790 - RNA, 19 nt, Human
aaaaaagaaaaacugaacu

SEQ ID NO: 1306791 - RNA, 18 nt, Human
aaacgaaaauaaaaguuu

SEQ ID NO: 1306792 - RNA, 21 nt, Human
aaacggaucagagggaaagcu

SEQ ID NO: 1306793 - RNA, 22 nt, Human
aaaguuugauuuaggcuuaaag

SEQ ID NO: 1306794 - RNA, 26 nt, Human
aagaaaaauauuuaaaauaaagaaaa

SEQ ID NO: 1306795 - RNA, 23 nt, Human
aagcagauagcagcaggcaucag

SEQ ID NO: 1306796 - RNA, 19 nt, Human
accccggaccgcccagucu

SEQ ID NO: 1306797 - RNA, 18 nt, Human
accccuggggugggucug

SEQ ID NO: 1306798 - RNA, 21 nt, Human
acugcccccggccuccagcac

SEQ ID NO: 1306799 - RNA, 19 nt, Human
acuucgaucuucuucucca

SEQ ID NO: 1306800 - RNA, 20 nt, Human
agaaaugucauucuggucgu

SEQ ID NO: 1306801 - RNA, 20 nt, Human
agacaagguuacccugcggg

SEQ ID NO: 1306802 - RNA, 19 nt, Human
agccuggcagggcggagcc

SEQ ID NO: 1306803 - RNA, 25 nt, Human
aggcgacaggccugcgguuuucaca

SEQ ID NO: 1306804 - RNA, 20 nt, Human
caauuuaaaaguggccgccu

SEQ ID NO: 1306805 - RNA, 24 nt, Human
cacugcacugcccacgaguuugcc

SEQ ID NO: 1306806 - RNA, 24 nt, Human
cacugcccacgaguuugcggggug

SEQ ID NO: 1306807 - RNA, 24 nt, Human
cagcaggcaucagcacacuccggc

SEQ ID NO: 1306808 - RNA, 28 nt, Human
cagcuucguuucuuacucggauggagac

SEQ ID NO: 1306809 - RNA, 20 nt, Human
caggacccacuaggugggcc

SEQ ID NO: 1306810 - RNA, 22 nt, Human
cagggcggagccuaggccgcgc

SEQ ID NO: 1306811 - RNA, 23 nt, Human
ccacuaggugggccgcucggccc

SEQ ID NO: 1306812 - RNA, 18 nt, Human
ccagcacugcacugccca

SEQ ID NO: 1306813 - RNA, 18 nt, Human
ccccaggucaggacccac

SEQ ID NO: 1306814 - RNA, 22 nt, Human
ccccagguccgcaggccgccuc

SEQ ID NO: 1306815 - RNA, 24 nt, Human
cccgccgcuacagggagaagugcg

SEQ ID NO: 1306816 - RNA, 24 nt, Human
cccgguggugccaccuuaagaguc

SEQ ID NO: 1306817 - RNA, 19 nt, Human
cccucgcacccgcccucug

SEQ ID NO: 1306818 - RNA, 22 nt, Human
cccugcggguccgccacugccc

SEQ ID NO: 1306819 - RNA, 20 nt, Human
cccuggggugggucugaccc

SEQ ID NO: 1306820 - RNA, 22 nt, Human
ccgccacugcccccggccucca

SEQ ID NO: 1306821 - RNA, 22 nt, Human
ccgcccucugcucugccgcucc

SEQ ID NO: 1306822 - RNA, 20 nt, Human
ccgccuaggcgacaggccug

SEQ ID NO: 1306823 - RNA, 22 nt, Human
ccgcgcgcggacucggcuuccc

SEQ ID NO: 1306824 - RNA, 19 nt, Human
ccucauauacucgcccgga

SEQ ID NO: 1306825 - RNA, 22 nt, Human
ccuccagcacugcacugcccac

SEQ ID NO: 1306826 - RNA, 22 nt, Human
cgcccagucucagccuaaaaac

SEQ ID NO: 1306827 - RNA, 23 nt, Human
cgccccgggguuggagguuccca

SEQ ID NO: 1306828 - RNA, 21 nt, Human
cgcccggaauuuucaaucucg

SEQ ID NO: 1306829 - RNA, 23 nt, Human
cuccagcacugcacugcccacga

SEQ ID NO: 1306830 - RNA, 23 nt, Human
cucggccccaagccuggcagggc

SEQ ID NO: 1306831 - RNA, 22 nt, Human
cugucgaaaucgcuagcugcgc

SEQ ID NO: 1306832 - RNA, 18 nt, Human
gaaccccggaccgcccag

SEQ ID NO: 1306833 - RNA, 19 nt, Human
gagcacaguuaccaaugcc

SEQ ID NO: 1306834 - RNA, 22 nt, Human
gagguucccacggagccgggaa

SEQ ID NO: 1306835 - RNA, 21 nt, Human
gccuaggccgcgcgccccggg

SEQ ID NO: 1306836 - RNA, 23 nt, Human
gcggggugugagcgccgaaggag

SEQ ID NO: 1306837 - RNA, 20 nt, Human
gcugcggguugcgcgcgggc

SEQ ID NO: 1306838 - RNA, 22 nt, Human
ggaaaagucagcucguacguuu

SEQ ID NO: 1306839 - RNA, 19 nt, Human
ggugugagcgccgaaggag

SEQ ID NO: 1306840 - RNA, 22 nt, Human
gguuuucacaguguaaaacgga

SEQ ID NO: 1306841 - RNA, 21 nt, Human
gugggcugcugggggcucggg

SEQ ID NO: 1306842 - RNA, 21 nt, Human
uacucgcccggaauuuucaau

SEQ ID NO: 1306843 - RNA, 20 nt, Human
uacugcggauggcaccggaa

SEQ ID NO: 1306844 - RNA, 23 nt, Human
uauaaacgaaaauaaaaguuuga

SEQ ID NO: 1306845 - RNA, 23 nt, Human
ucagccuaaaaacuuggauccaa

SEQ ID NO: 1306846 - RNA, 26 nt, Human
ucccugaagcgggacuuacucaaccu

SEQ ID NO: 1306847 - RNA, 24 nt, Human
uccgcaggccgccucccuucccuc

SEQ ID NO: 1306848 - RNA, 18 nt, Human
uccgcgacccuuuccugc

SEQ ID NO: 1306849 - RNA, 27 nt, Human
uccgcgacccuuuccugcuggccuucu

SEQ ID NO: 1306850 - RNA, 25 nt, Human
uccuacgguuguggaugugccaguc

SEQ ID NO: 1306851 - RNA, 19 nt, Human
uccugggugugcgggaguc

SEQ ID NO: 1306852 - RNA, 19 nt, Human
ucgcacccgcccucugcuc

SEQ ID NO: 1306853 - RNA, 19 nt, Human
ucugccgcucccgguccug

SEQ ID NO: 1306854 - RNA, 21 nt, Human
ucugucuuucccagaaagcgg

SEQ ID NO: 1306855 - RNA, 23 nt, Human
ugcugggggcucgggaggugcgc

SEQ ID NO: 1306856 - RNA, 22 nt, Human
uucacaguguaaaacggaucag

SEQ ID NO: 1306857 - RNA, 24 nt, Human
uucccuggugucaccaaauaaaca

SEQ ID NO: 1306858 - RNA, 18 nt, Human
uucuggucguuccucccu

SEQ ID NO: 1306859 - RNA, 23 nt, Human
uugguuuuucgucuauuugcuuc

SEQ ID NO: 1306860 - RNA, 20 nt, Human
aaacaagcccacuucaugua

SEQ ID NO: 1306861 - RNA, 24 nt, Human
aaagugcagggauuucaggcauga

SEQ ID NO: 1306862 - RNA, 24 nt, Human
aaagugcugggauuacaggcguga

SEQ ID NO: 1306863 - RNA, 24 nt, Human
aaagugcugggauuacaggcguga

SEQ ID NO: 1306864 - RNA, 19 nt, Human
aaccccaucucugccacac

SEQ ID NO: 1306865 - RNA, 24 nt, Human
aaccucaggugaucugcuugccuc

SEQ ID NO: 1306866 - RNA, 19 nt, Human
aagugcugggauuacaggc

SEQ ID NO: 1306867 - RNA, 19 nt, Human
aagugcugggauuacaggc

SEQ ID NO: 1306868 - RNA, 19 nt, Human
aagugcugggauuacaggc

SEQ ID NO: 1306869 - RNA, 19 nt, Human
aagugcugggauuacaggc

SEQ ID NO: 1306870 - RNA, 26 nt, Human
aagugcugggauuacaggcgugagcc

SEQ ID NO: 1306871 - RNA, 26 nt, Human
aagugcugggauuacaggcgugagcc

SEQ ID NO: 1306872 - RNA, 19 nt, Human
acagaccacaccccauagu

SEQ ID NO: 1306873 - RNA, 19 nt, Human
acaggguuucaccauguug

SEQ ID NO: 1306874 - RNA, 20 nt, Human
acaggguuucaccauguugu

SEQ ID NO: 1306875 - RNA, 24 nt, Human
acaggguuucaccauguuguccag

SEQ ID NO: 1306876 - RNA, 20 nt, Human
acaggguuucaucguauugg

SEQ ID NO: 1306877 - RNA, 23 nt, Human
acaggguuucaucguauuggcca

SEQ ID NO: 1306878 - RNA, 24 nt, Human
acaggguuucaucguauuggccag

SEQ ID NO: 1306879 - RNA, 19 nt, Human
accacaaccccaucucugc

SEQ ID NO: 1306880 - RNA, 20 nt, Human
accauguuguccaggcuggu

SEQ ID NO: 1306881 - RNA, 20 nt, Human
acccagggcuggguacuuuu

SEQ ID NO: 1306882 - RNA, 23 nt, Human
accccgccucauccccaccagcc

SEQ ID NO: 1306883 - RNA, 22 nt, Human
acccgccucagccucccaaagu

SEQ ID NO: 1306884 - RNA, 24 nt, Human
accucaugaucugccugccuuggc

SEQ ID NO: 1306885 - RNA, 21 nt, Human
accucugagaagucagaugaa

SEQ ID NO: 1306886 - RNA, 18 nt, Human
acgggguuucuccauguu

SEQ ID NO: 1306887 - RNA, 19 nt, Human
acgggguuucuccauguug

SEQ ID NO: 1306888 - RNA, 27 nt, Human
acgggguuucuccauguuguuggucag

SEQ ID NO: 1306889 - RNA, 27 nt, Human
acucugucacccaggcuagagugcaau

SEQ ID NO: 1306890 - RNA, 26 nt, Human
agaaagcagaccucugagaagucaga

SEQ ID NO: 1306891 - RNA, 18 nt, Human
agacaggguuucaucgua

SEQ ID NO: 1306892 - RNA, 19 nt, Human
agagacaggguuucaucgu

SEQ ID NO: 1306893 - RNA, 21 nt, Human
agccggcguuuugccccuugc

SEQ ID NO: 1306894 - RNA, 18 nt, Human
agccuccugaguagcuag

SEQ ID NO: 1306895 - RNA, 20 nt, Human
aggcaugcaccaccacaccc

SEQ ID NO: 1306896 - RNA, 20 nt, Human
aggcaugcaccaccacgccc

SEQ ID NO: 1306897 - RNA, 20 nt, Human
agggaagggggucaggguuc

SEQ ID NO: 1306898 - RNA, 21 nt, Human
agggggucaggguuccugcag

SEQ ID NO: 1306899 - RNA, 24 nt, Human
aggugauccacccgccucagccuc

SEQ ID NO: 1306900 - RNA, 24 nt, Human
aggugaucugcuugccucggccuc

SEQ ID NO: 1306901 - RNA, 21 nt, Human
aguagcuaggauuacaggcau

SEQ ID NO: 1306902 - RNA, 23 nt, Human
aguagcugggauuacagucaugu

SEQ ID NO: 1306903 - RNA, 24 nt, Human
agugauucuccugccucagccucc

SEQ ID NO: 1306904 - RNA, 21 nt, Human
agugcaauggugcgaucucag

SEQ ID NO: 1306905 - RNA, 18 nt, Human
agugcugggauuacaggc

SEQ ID NO: 1306906 - RNA, 18 nt, Human
agugcugggauuacaggc

SEQ ID NO: 1306907 - RNA, 24 nt, Human
aucguauuggccaggcuggucucg

SEQ ID NO: 1306908 - RNA, 19 nt, Human
aucugccugccuuggccuc

SEQ ID NO: 1306909 - RNA, 24 nt, Human
augagaaagcagaccucugagaaa

SEQ ID NO: 1306910 - RNA, 23 nt, Human
auuuugcucgucgcccaggcugg

SEQ ID NO: 1306911 - RNA, 24 nt, Human
auuuugcucgucgcccaggcugga

SEQ ID NO: 1306912 - RNA, 22 nt, Human
auuuuuguauuuuuaguagaga

SEQ ID NO: 1306913 - RNA, 24 nt, Human
auuuuuguauuuuuaguagagaca

SEQ ID NO: 1306914 - RNA, 24 nt, Human
caaagugcagggauuucaggcaug

SEQ ID NO: 1306915 - RNA, 24 nt, Human
caaagugcugggauuacaggcgug

SEQ ID NO: 1306916 - RNA, 24 nt, Human
caaagugcugggauuacaggcgug

SEQ ID NO: 1306917 - RNA, 23 nt, Human
caaccuccaccucccggguucaa

SEQ ID NO: 1306918 - RNA, 21 nt, Human
caaccuccggcuccuggguuc

SEQ ID NO: 1306919 - RNA, 22 nt, Human
caagugauucuccugccucagc

SEQ ID NO: 1306920 - RNA, 21 nt, Human
cacacaguugugacccuaucc

SEQ ID NO: 1306921 - RNA, 22 nt, Human
cacaguugugacccuauccucc

SEQ ID NO: 1306922 - RNA, 23 nt, Human
cacaguugugacccuauccuccc

SEQ ID NO: 1306923 - RNA, 21 nt, Human
caccacaaccuccggcuccug

SEQ ID NO: 1306924 - RNA, 22 nt, Human
caccaccacgcccagguaauuu

SEQ ID NO: 1306925 - RNA, 19 nt, Human
caccaugccugauuuuugu

SEQ ID NO: 1306926 - RNA, 21 nt, Human
caccauguuguccaggcuggu

SEQ ID NO: 1306927 - RNA, 24 nt, Human
caccauguuguccaggcugguuuu

SEQ ID NO: 1306928 - RNA, 31 nt, Human
caccauguuguccaggcugguuuugaacucc

SEQ ID NO: 1306929 - RNA, 24 nt, Human
caccccauagucccugggccucca

SEQ ID NO: 1306930 - RNA, 23 nt, Human
caccccgccucauccccaccagc

SEQ ID NO: 1306931 - RNA, 23 nt, Human
cacccgccucagccucccaaagu

SEQ ID NO: 1306932 - RNA, 22 nt, Human
cacucugucacccaggcuagag

SEQ ID NO: 1306933 - RNA, 23 nt, Human
cacucugucacccaggcuagagu

SEQ ID NO: 1306934 - RNA, 21 nt, Human
cacugcaaccuccaccucccg

SEQ ID NO: 1306935 - RNA, 23 nt, Human
cacugcaaccuccaccucccggg

SEQ ID NO: 1306936 - RNA, 22 nt, Human
cagaggccuccugaggccuccu

SEQ ID NO: 1306937 - RNA, 19 nt, Human
cagccuccugaguagcuag

SEQ ID NO: 1306938 - RNA, 24 nt, Human
caggaucgggaugaaggcugcuga

SEQ ID NO: 1306939 - RNA, 23 nt, Human
cagggcuggguacuuuuuggggu

SEQ ID NO: 1306940 - RNA, 18 nt, Human
caggguuccugcaggaag

SEQ ID NO: 1306941 - RNA, 24 nt, Human
caggguuucaccauguuguccagg

SEQ ID NO: 1306942 - RNA, 24 nt, Human
caggguuucaucguauuggccagg

SEQ ID NO: 1306943 - RNA, 22 nt, Human
cauccccaccagccaccccggc

SEQ ID NO: 1306944 - RNA, 21 nt, Human
cauccccuccuucccacagcc

SEQ ID NO: 1306945 - RNA, 23 nt, Human
caugagccaccucgccuuucagc

SEQ ID NO: 1306946 - RNA, 21 nt, Human
caugaucugccugccuuggcc

SEQ ID NO: 1306947 - RNA, 21 nt, Human
caugccugauuuuuguauuuu

SEQ ID NO: 1306948 - RNA, 24 nt, Human
cauguuguccaggcugguuuugaa

SEQ ID NO: 1306949 - RNA, 20 nt, Human
cauguuguuggucaggcugg

SEQ ID NO: 1306950 - RNA, 24 nt, Human
ccaaagugcagggauuucaggcau

SEQ ID NO: 1306951 - RNA, 22 nt, Human
ccaaagugcugggauuacaggc

SEQ ID NO: 1306952 - RNA, 22 nt, Human
ccaaagugcugggauuacaggc

SEQ ID NO: 1306953 - RNA, 22 nt, Human
ccaaagugcugggauuacaggc

SEQ ID NO: 1306954 - RNA, 22 nt, Human
ccaaagugcugggauuacaggc

SEQ ID NO: 1306955 - RNA, 24 nt, Human
ccaaagugcugggauuacaggcgu

SEQ ID NO: 1306956 - RNA, 24 nt, Human
ccaaagugcugggauuacaggcgu

SEQ ID NO: 1306957 - RNA, 21 nt, Human
ccacaaccccaucucugccac

SEQ ID NO: 1306958 - RNA, 23 nt, Human
ccacaaccuccggcuccuggguu

SEQ ID NO: 1306959 - RNA, 24 nt, Human
ccacaaccuccggcuccuggguuc

SEQ ID NO: 1306960 - RNA, 26 nt, Human
ccacccgccucagccucccaaagugc

SEQ ID NO: 1306961 - RNA, 24 nt, Human
ccaccucccggguucaagugauuc

SEQ ID NO: 1306962 - RNA, 18 nt, Human
ccacgguggucugaccug

SEQ ID NO: 1306963 - RNA, 20 nt, Human
ccagccaccccggcuuggga

SEQ ID NO: 1306964 - RNA, 22 nt, Human
ccauguuguuggucaggcuggu

SEQ ID NO: 1306965 - RNA, 25 nt, Human
ccauguuguuggucaggcuggucuc

SEQ ID NO: 1306966 - RNA, 26 nt, Human
ccauguuguuggucaggcuggucucg

SEQ ID NO: 1306967 - RNA, 26 nt, Human
cccacacaaugaagguuuaugaagcu

SEQ ID NO: 1306968 - RNA, 23 nt, Human
cccacagcccugcuugcucugga

SEQ ID NO: 1306969 - RNA, 19 nt, Human
cccaccccgccucaucccc

SEQ ID NO: 1306970 - RNA, 20 nt, Human
cccagauuccagggccucca

SEQ ID NO: 1306971 - RNA, 21 nt, Human
cccauagucccugggccucca

SEQ ID NO: 1306972 - RNA, 19 nt, Human
ccccaagcccagagugcuc

SEQ ID NO: 1306973 - RNA, 21 nt, Human
ccccagauuccagggccucca

SEQ ID NO: 1306974 - RNA, 19 nt, Human
cccccagaguagaaaaccc

SEQ ID NO: 1306975 - RNA, 21 nt, Human
cccccagaguagaaaacccag

SEQ ID NO: 1306976 - RNA, 22 nt, Human
cccccagaguagaaaacccagg

SEQ ID NO: 1306977 - RNA, 22 nt, Human
cccgaguagcugggauuacagu

SEQ ID NO: 1306978 - RNA, 23 nt, Human
cccggguucaagugauucuccuc

SEQ ID NO: 1306979 - RNA, 23 nt, Human
cccggguucaagugauucuccug

SEQ ID NO: 1306980 - RNA, 24 nt, Human
cccuaggccacuuuccuaagccuu

SEQ ID NO: 1306981 - RNA, 22 nt, Human
ccucagauccaugaccuggccg

SEQ ID NO: 1306982 - RNA, 21 nt, Human
ccuccaccacaaccccaucuc

SEQ ID NO: 1306983 - RNA, 19 nt, Human
ccucccaaagugcagggau

SEQ ID NO: 1306984 - RNA, 21 nt, Human
ccucccggguucaagugauuc

SEQ ID NO: 1306985 - RNA, 24 nt, Human
ccucccggguucaagugauucucc

SEQ ID NO: 1306986 - RNA, 22 nt, Human
ccuccgagagucccgcuuuaga

SEQ ID NO: 1306987 - RNA, 23 nt, Human
ccuccugaggccuccuacucccc

SEQ ID NO: 1306988 - RNA, 22 nt, Human
ccugaccucaggugauccaccc

SEQ ID NO: 1306989 - RNA, 23 nt, Human
ccugaccucaggugauccacccg

SEQ ID NO: 1306990 - RNA, 21 nt, Human
ccugaccucaugaucugccug

SEQ ID NO: 1306991 - RNA, 23 nt, Human
ccugaguagcuaggauuacaggc

SEQ ID NO: 1306992 - RNA, 24 nt, Human
ccugaguagcuaggauuacaggca

SEQ ID NO: 1306993 - RNA, 23 nt, Human
ccugccucagccuccugaguagc

SEQ ID NO: 1306994 - RNA, 24 nt, Human
ccugccucaggcucccgaguagcu

SEQ ID NO: 1306995 - RNA, 22 nt, Human
ccugccuuggccucccaaagug

SEQ ID NO: 1306996 - RNA, 19 nt, Human
ccugcugcuguggccucug

SEQ ID NO: 1306997 - RNA, 22 nt, Human
ccugcuucacagaccacacccc

SEQ ID NO: 1306998 - RNA, 19 nt, Human
ccuuccuagacgugcagga

SEQ ID NO: 1306999 - RNA, 23 nt, Human
cgccucagccucccaaagugcag

SEQ ID NO: 1307000 - RNA, 24 nt, Human
cgcucuuguugcccaggcuggagu

SEQ ID NO: 1307001 - RNA, 21 nt, Human
cgcuuuagagaaacacgaagg

SEQ ID NO: 1307002 - RNA, 20 nt, Human
cggcagggcuggaaggagcc

SEQ ID NO: 1307003 - RNA, 29 nt, Human
cggcuaguuuuguauuuuuaguagagacg

SEQ ID NO: 1307004 - RNA, 24 nt, Human
cgggaugaaggcugcugaguccca

SEQ ID NO: 1307005 - RNA, 18 nt, Human
cguauuggccaggcuggu

SEQ ID NO: 1307006 - RNA, 19 nt, Human
cguggucccugcccacugg

SEQ ID NO: 1307007 - RNA, 18 nt, Human
cguuuugccccuugcccc

SEQ ID NO: 1307008 - RNA, 24 nt, Human
cucacugcaaccuccaccucccgg

SEQ ID NO: 1307009 - RNA, 24 nt, Human
cucacugcaaccuccacuucccga

SEQ ID NO: 1307010 - RNA, 22 nt, Human
cucauccccaccagccaccccg

SEQ ID NO: 1307011 - RNA, 18 nt, Human
cucaugaucugccugccu

SEQ ID NO: 1307012 - RNA, 24 nt, Human
cuccugaccucaugaucugccugc

SEQ ID NO: 1307013 - RNA, 24 nt, Human
cuccugaguagcuaggauuacagg

SEQ ID NO: 1307014 - RNA, 21 nt, Human
cuccuggguucaagcaauucu

SEQ ID NO: 1307015 - RNA, 18 nt, Human
cucgucgcccaggcugga

SEQ ID NO: 1307016 - RNA, 19 nt, Human
cucgucgcccaggcuggag

SEQ ID NO: 1307017 - RNA, 21 nt, Human
cugagagggaugugcgcagca

SEQ ID NO: 1307018 - RNA, 24 nt, Human
cugaguagcuaggauuacaggcau

SEQ ID NO: 1307019 - RNA, 18 nt, Human
cugagucccaccccgccu

SEQ ID NO: 1307020 - RNA, 23 nt, Human
cugcaaccuccaccucccggguu

SEQ ID NO: 1307021 - RNA, 24 nt, Human
cugcaaccuccaccucccggguuc

SEQ ID NO: 1307022 - RNA, 23 nt, Human
cugcaaccuccacuucccgaauu

SEQ ID NO: 1307023 - RNA, 24 nt, Human
cugcaaccuccacuucccgaauuc

SEQ ID NO: 1307024 - RNA, 23 nt, Human
cugccucagccuccugaguagcu

SEQ ID NO: 1307025 - RNA, 23 nt, Human
cugccuuggccucccaaagugcu

SEQ ID NO: 1307026 - RNA, 19 nt, Human
cugcuguggccucugucgu

SEQ ID NO: 1307027 - RNA, 23 nt, Human
cuggagcacaguggugcgauccu

SEQ ID NO: 1307028 - RNA, 23 nt, Human
cugggccuccagagcaaagggaa

SEQ ID NO: 1307029 - RNA, 20 nt, Human
cuguggccucugucgugguc

SEQ ID NO: 1307030 - RNA, 24 nt, Human
cuugccucggccucccaaagugcu

SEQ ID NO: 1307031 - RNA, 24 nt, Human
cuuguugcccaggcuggagugcaa

SEQ ID NO: 1307032 - RNA, 18 nt, Human
gaaccugcuucacagacc

SEQ ID NO: 1307033 - RNA, 18 nt, Human
gaagggggucaggguucc

SEQ ID NO: 1307034 - RNA, 23 nt, Human
gacaggguuucaccauguugucc

SEQ ID NO: 1307035 - RNA, 22 nt, Human
gacccuauccucccuaggccac

SEQ ID NO: 1307036 - RNA, 24 nt, Human
gaccucaggugauccacccgccuc

SEQ ID NO: 1307037 - RNA, 21 nt, Human
gaccucaugaucugccugccu

SEQ ID NO: 1307038 - RNA, 20 nt, Human
gagacgggguuucuccaugu

SEQ ID NO: 1307039 - RNA, 19 nt, Human
gagggaagauggagccggc

SEQ ID NO: 1307040 - RNA, 22 nt, Human
gaguagcuaggauuacaggcau

SEQ ID NO: 1307041 - RNA, 24 nt, Human
gaguagcuaggauuacaggcaugc

SEQ ID NO: 1307042 - RNA, 25 nt, Human
gaguagcugggauuacagucaugug

SEQ ID NO: 1307043 - RNA, 18 nt, Human
gauuacaggcgugagcca

SEQ ID NO: 1307044 - RNA, 18 nt, Human
gauuacaggcgugagcca

SEQ ID NO: 1307045 - RNA, 21 nt, Human
gauuacaggcgugagccacca

SEQ ID NO: 1307046 - RNA, 22 nt, Human
gauuacaggcgugagccaccac

SEQ ID NO: 1307047 - RNA, 21 nt, Human
gauuacaggcgugagccaccg

SEQ ID NO: 1307048 - RNA, 22 nt, Human
gauuacaggcgugagccaccgu

SEQ ID NO: 1307049 - RNA, 22 nt, Human
gauuacagucaugugccaccau

SEQ ID NO: 1307050 - RNA, 20 nt, Human
gauuucaggcaugagccacc

SEQ ID NO: 1307051 - RNA, 22 nt, Human
gcaaccuccacuucccgaauuc

SEQ ID NO: 1307052 - RNA, 19 nt, Human
gccagaggccuccugaggc

SEQ ID NO: 1307053 - RNA, 20 nt, Human
gcccaggcuggagcacagug

SEQ ID NO: 1307054 - RNA, 19 nt, Human
gcccaggcuggagugcaau

SEQ ID NO: 1307055 - RNA, 18 nt, Human
gccucugucguggucccg

SEQ ID NO: 1307056 - RNA, 19 nt, Human
gccuggggagggcccagau

SEQ ID NO: 1307057 - RNA, 22 nt, Human
gccuuggccucccaaagugcug

SEQ ID NO: 1307058 - RNA, 24 nt, Human
gcuagagugcaauggcacgaucua

SEQ ID NO: 1307059 - RNA, 19 nt, Human
gcucgucgcccaggcugga

SEQ ID NO: 1307060 - RNA, 24 nt, Human
gcucuuguugcccaggcuggagug

SEQ ID NO: 1307061 - RNA, 30 nt, Human
gcuggagugcaauggugcgaucucagcucc

SEQ ID NO: 1307062 - RNA, 23 nt, Human
gcuggucucgaacucccaaccuc

SEQ ID NO: 1307063 - RNA, 23 nt, Human
gcuggucucgagcuccugaccuc

SEQ ID NO: 1307064 - RNA, 23 nt, Human
gcugguuuugaacuccugaccuc

SEQ ID NO: 1307065 - RNA, 18 nt, Human
ggaaaggaagggaagggg

SEQ ID NO: 1307066 - RNA, 19 nt, Human
ggaaaggaagggaaggggg

SEQ ID NO: 1307067 - RNA, 18 nt, Human
ggaagggaagggggucag

SEQ ID NO: 1307068 - RNA, 22 nt, Human
ggaauuuugcucgucgcccagg

SEQ ID NO: 1307069 - RNA, 23 nt, Human
ggaccagaaucagggaggaggga

SEQ ID NO: 1307070 - RNA, 22 nt, Human
ggauuacaggcaugcaccacca

SEQ ID NO: 1307071 - RNA, 19 nt, Human
ggauuacaggcgugagcca

SEQ ID NO: 1307072 - RNA, 21 nt, Human
ggccguggucccugcccacug

SEQ ID NO: 1307073 - RNA, 21 nt, Human
ggccugggcuccauuccugcc

SEQ ID NO: 1307074 - RNA, 26 nt, Human
ggcuaguuuuguauuuuuaguagaga

SEQ ID NO: 1307075 - RNA, 22 nt, Human
ggcuccuggguucaagcaauuc

SEQ ID NO: 1307076 - RNA, 24 nt, Human
ggcuggucucgagcuccugaccuc

SEQ ID NO: 1307077 - RNA, 24 nt, Human
ggcugguuuugaacuccugaccuc

SEQ ID NO: 1307078 - RNA, 22 nt, Human
ggguucaagugauucuccugcc

SEQ ID NO: 1307079 - RNA, 23 nt, Human
ggguucaagugauucuccugccu

SEQ ID NO: 1307080 - RNA, 25 nt, Human
ggguuucuccauguuguuggucagg

SEQ ID NO: 1307081 - RNA, 19 nt, Human
ggucucgagcuccugaccu

SEQ ID NO: 1307082 - RNA, 20 nt, Human
guagaaugugcugggaaugc

SEQ ID NO: 1307083 - RNA, 23 nt, Human
guagagacgggguuucuccaugu

SEQ ID NO: 1307084 - RNA, 20 nt, Human
guagcuaggauuacaggcau

SEQ ID NO: 1307085 - RNA, 24 nt, Human
gugauccacccgccucagccuccc

SEQ ID NO: 1307086 - RNA, 23 nt, Human
gugauucuccugccucagccucc

SEQ ID NO: 1307087 - RNA, 23 nt, Human
guuucaccauguuguccaggcug

SEQ ID NO: 1307088 - RNA, 24 nt, Human
guuucaccauguuguccaggcugg

SEQ ID NO: 1307089 - RNA, 25 nt, Human
uaauuuuauuuuugagauggaguuu

SEQ ID NO: 1307090 - RNA, 26 nt, Human
uaauuuucuuguauuuuugguagaga

SEQ ID NO: 1307091 - RNA, 23 nt, Human
uacaggcaugcaccaccacaccc

SEQ ID NO: 1307092 - RNA, 24 nt, Human
uacaggcaugcaccaccacgccca

SEQ ID NO: 1307093 - RNA, 22 nt, Human
uacaggcgugagccaccacacc

SEQ ID NO: 1307094 - RNA, 23 nt, Human
uacaggcgugagccaccgugacc

SEQ ID NO: 1307095 - RNA, 22 nt, Human
uacagucaugugccaccaugcc

SEQ ID NO: 1307096 - RNA, 19 nt, Human
uagaaacaggaugcccuuc

SEQ ID NO: 1307097 - RNA, 22 nt, Human
uagagacaggguuucaccaugu

SEQ ID NO: 1307098 - RNA, 21 nt, Human
uaggauuacaggcaugcacca

SEQ ID NO: 1307099 - RNA, 24 nt, Human
uaggauuacaggcaugcaccacca

SEQ ID NO: 1307100 - RNA, 24 nt, Human
uaguagagacaggguuucaccaug

SEQ ID NO: 1307101 - RNA, 26 nt, Human
uaguagagacaggguuucaccauguu

SEQ ID NO: 1307102 - RNA, 24 nt, Human
uaguagagacgggguuucuccaug

SEQ ID NO: 1307103 - RNA, 19 nt, Human
uauuggccaggcuggucuc

SEQ ID NO: 1307104 - RNA, 25 nt, Human
uauuuugagacagagucucacucug

SEQ ID NO: 1307105 - RNA, 19 nt, Human
ucaagugauucuccugccu

SEQ ID NO: 1307106 - RNA, 27 nt, Human
ucaccacaaccuccggcuccuggguuc

SEQ ID NO: 1307107 - RNA, 23 nt, Human
ucacugcaaccuccaccucccgg

SEQ ID NO: 1307108 - RNA, 24 nt, Human
ucacugcaaccuccaccucccggg

SEQ ID NO: 1307109 - RNA, 25 nt, Human
ucacugcaaccuccaccucccgggu

SEQ ID NO: 1307110 - RNA, 27 nt, Human
ucacugcaaccuccaccucccggguuc

SEQ ID NO: 1307111 - RNA, 18 nt, Human
ucacugcaaccuccacuu

SEQ ID NO: 1307112 - RNA, 19 nt, Human
ucacugcaaccuccacuuc

SEQ ID NO: 1307113 - RNA, 21 nt, Human
ucacugcaaccuccacuuccc

SEQ ID NO: 1307114 - RNA, 22 nt, Human
ucacugcaaccuccacuucccg

SEQ ID NO: 1307115 - RNA, 24 nt, Human
ucacugcaaccuccacuucccgaa

SEQ ID NO: 1307116 - RNA, 21 nt, Human
uccacccgccucagccuccca

SEQ ID NO: 1307117 - RNA, 24 nt, Human
ucccaaagugcagggauuucaggc

SEQ ID NO: 1307118 - RNA, 24 nt, Human
ucccaaagugcugggauuacaggc

SEQ ID NO: 1307119 - RNA, 24 nt, Human
ucccaaagugcugggauuacaggc

SEQ ID NO: 1307120 - RNA, 18 nt, Human
ucccacagcccugcuugc

SEQ ID NO: 1307121 - RNA, 19 nt, Human
ucccaccccgccucauccc

SEQ ID NO: 1307122 - RNA, 21 nt, Human
ucccgaauucaagcgauucuc

SEQ ID NO: 1307123 - RNA, 24 nt, Human
ucccgaauucaagcgauucuccug

SEQ ID NO: 1307124 - RNA, 23 nt, Human
ucccgagggccuggggagggccc

SEQ ID NO: 1307125 - RNA, 22 nt, Human
ucccgaguagcugggauuacag

SEQ ID NO: 1307126 - RNA, 23 nt, Human
ucccgaguagcugggauuacagu

SEQ ID NO: 1307127 - RNA, 21 nt, Human
ucccggguucaagugauucuc

SEQ ID NO: 1307128 - RNA, 24 nt, Human
ucccggguucaagugauucuccug

SEQ ID NO: 1307129 - RNA, 19 nt, Human
ucccuaggccacuuuccua

SEQ ID NO: 1307130 - RNA, 21 nt, Human
ucccuugcugcccaucuguga

SEQ ID NO: 1307131 - RNA, 19 nt, Human
uccugaguagcuaggauua

SEQ ID NO: 1307132 - RNA, 24 nt, Human
uccugaguagcuaggauuacaggc

SEQ ID NO: 1307133 - RNA, 19 nt, Human
uccuggguucaagcaauuc

SEQ ID NO: 1307134 - RNA, 22 nt, Human
ucgcucuuguugcccaggcugg

SEQ ID NO: 1307135 - RNA, 23 nt, Human
ucgcucuuguugcccaggcugga

SEQ ID NO: 1307136 - RNA, 19 nt, Human
ucucacucugucacccagg

SEQ ID NO: 1307137 - RNA, 22 nt, Human
ucucacucugucacccaggcua

SEQ ID NO: 1307138 - RNA, 26 nt, Human
ucucacucugucacccaggcuagagu

SEQ ID NO: 1307139 - RNA, 27 nt, Human
ucucacucugucacccaggcuagagug

SEQ ID NO: 1307140 - RNA, 24 nt, Human
ucuccugccucagccuccugagua

SEQ ID NO: 1307141 - RNA, 22 nt, Human
ucugagaagucagaugaaaggu

SEQ ID NO: 1307142 - RNA, 24 nt, Human
ucugucacccaggcuagagugcaa

SEQ ID NO: 1307143 - RNA, 22 nt, Human
ucuuguugcccaggcuggagug

SEQ ID NO: 1307144 - RNA, 19 nt, Human
ugaagccccagauuccaga

SEQ ID NO: 1307145 - RNA, 21 nt, Human
ugaccucaggugauccacccg

SEQ ID NO: 1307146 - RNA, 24 nt, Human
ugaccucaggugauccacccgccu

SEQ ID NO: 1307147 - RNA, 23 nt, Human
ugaccuggccggguaaggaaagg

SEQ ID NO: 1307148 - RNA, 20 nt, Human
ugagaaacaagcccacuuca

SEQ ID NO: 1307149 - RNA, 18 nt, Human
ugagaaagcagaccucug

SEQ ID NO: 1307150 - RNA, 26 nt, Human
ugagaaagcagaccucugagaaguca

SEQ ID NO: 1307151 - RNA, 18 nt, Human
ugagacagagucucacuc

SEQ ID NO: 1307152 - RNA, 22 nt, Human
ugagacagagucucacucuguc

SEQ ID NO: 1307153 - RNA, 21 nt, Human
ugaggccuccuacuccccaag

SEQ ID NO: 1307154 - RNA, 23 nt, Human
ugagucccaccccgccucauccc

SEQ ID NO: 1307155 - RNA, 20 nt, Human
ugauucuccugccucagccu

SEQ ID NO: 1307156 - RNA, 24 nt, Human
ugauuuuuguauuuuuaguagaga

SEQ ID NO: 1307157 - RNA, 24 nt, Human
ugcacagugaaccugcuucacaga

SEQ ID NO: 1307158 - RNA, 18 nt, Human
ugcccaggcuggagugca

SEQ ID NO: 1307159 - RNA, 21 nt, Human
ugcccaggcuggagugcaaug

SEQ ID NO: 1307160 - RNA, 24 nt, Human
ugcccaggcuggagugcaauggug

SEQ ID NO: 1307161 - RNA, 24 nt, Human
ugccucagccuccugaguagcuag

SEQ ID NO: 1307162 - RNA, 21 nt, Human
ugccucaggcucccgaguagc

SEQ ID NO: 1307163 - RNA, 24 nt, Human
ugccucaggcucccgaguagcugg

SEQ ID NO: 1307164 - RNA, 21 nt, Human
ugccucggccucccaaagugc

SEQ ID NO: 1307165 - RNA, 24 nt, Human
ugccucggccucccaaagugcugg

SEQ ID NO: 1307166 - RNA, 18 nt, Human
ugccugccuuggccuccc

SEQ ID NO: 1307167 - RNA, 23 nt, Human
ugcgcagcaccuccgagaguccc

SEQ ID NO: 1307168 - RNA, 24 nt, Human
ugcugggauuacaggcgugagcca

SEQ ID NO: 1307169 - RNA, 24 nt, Human
ugcugggauuacaggcgugagcca

SEQ ID NO: 1307170 - RNA, 22 nt, Human
uggaaggagccugagagggaug

SEQ ID NO: 1307171 - RNA, 21 nt, Human
uggaaggaugcacccuaucag

SEQ ID NO: 1307172 - RNA, 23 nt, Human
uggaauuuugcucgucgcccagg

SEQ ID NO: 1307173 - RNA, 19 nt, Human
uggaggcugauggggucac

SEQ ID NO: 1307174 - RNA, 23 nt, Human
uggagugcaauggugcgaucuca

SEQ ID NO: 1307175 - RNA, 24 nt, Human
uggagugcaauggugcgaucucag

SEQ ID NO: 1307176 - RNA, 24 nt, Human
uggccaggcuggucucgagcuccu

SEQ ID NO: 1307177 - RNA, 23 nt, Human
uggcguucugucucaucacucug

SEQ ID NO: 1307178 - RNA, 22 nt, Human
ugggagggaagauggagccggc

SEQ ID NO: 1307179 - RNA, 18 nt, Human
ugggauuacaggcgugag

SEQ ID NO: 1307180 - RNA, 18 nt, Human
ugggauuacaggcgugag

SEQ ID NO: 1307181 - RNA, 19 nt, Human
ugggauuacaggcgugagc

SEQ ID NO: 1307182 - RNA, 21 nt, Human
ugggauuacaggcgugagcca

SEQ ID NO: 1307183 - RNA, 22 nt, Human
ugggauuacaggcgugagccac

SEQ ID NO: 1307184 - RNA, 22 nt, Human
ugggauuacaggcgugagccac

SEQ ID NO: 1307185 - RNA, 23 nt, Human
ugggauuacaggcgugagccacc

SEQ ID NO: 1307186 - RNA, 23 nt, Human
ugggauuacaggcgugagccacc

SEQ ID NO: 1307187 - RNA, 23 nt, Human
ugggauuacaggcgugagccacc

SEQ ID NO: 1307188 - RNA, 24 nt, Human
ugggauuacaggcgugagccacca

SEQ ID NO: 1307189 - RNA, 24 nt, Human
ugggauuacaggcgugagccaccg

SEQ ID NO: 1307190 - RNA, 18 nt, Human
ugggauuacagucaugug

SEQ ID NO: 1307191 - RNA, 24 nt, Human
ugggauuacagucaugugccacca

SEQ ID NO: 1307192 - RNA, 25 nt, Human
uggggagggcccagauggggaaucu

SEQ ID NO: 1307193 - RNA, 22 nt, Human
ugguagagacaggguuucaucg

SEQ ID NO: 1307194 - RNA, 23 nt, Human
uggucaggcuggucucgaacucc

SEQ ID NO: 1307195 - RNA, 24 nt, Human
uggugcgaucucagcucaccacaa

SEQ ID NO: 1307196 - RNA, 20 nt, Human
uguaacagaacucagggucu

SEQ ID NO: 1307197 - RNA, 20 nt, Human
ugucacccaggcuagagugc

SEQ ID NO: 1307198 - RNA, 24 nt, Human
uguccaggcugguuuugaacuccu

SEQ ID NO: 1307199 - RNA, 20 nt, Human
ugugagaaacaagcccacuu

SEQ ID NO: 1307200 - RNA, 20 nt, Human
uguugcccaggcuggagugc

SEQ ID NO: 1307201 - RNA, 24 nt, Human
uuaguagagacaggguuucaccau

SEQ ID NO: 1307202 - RNA, 18 nt, Human
uuaguagagacgggguuu

SEQ ID NO: 1307203 - RNA, 24 nt, Human
uuaguagagacgggguuucuccau

SEQ ID NO: 1307204 - RNA, 21 nt, Human
uucaagcgauucuccugccuc

SEQ ID NO: 1307205 - RNA, 23 nt, Human
uucaagcgauucuccugccucag

SEQ ID NO: 1307206 - RNA, 25 nt, Human
uucaagcgauucuccugccucaggc

SEQ ID NO: 1307207 - RNA, 21 nt, Human
uucaagugauucuccugccuc

SEQ ID NO: 1307208 - RNA, 23 nt, Human
uucaagugauucuccugccucag

SEQ ID NO: 1307209 - RNA, 24 nt, Human
uucaagugauucuccugccucagc

SEQ ID NO: 1307210 - RNA, 18 nt, Human
uucacagaccacacccca

SEQ ID NO: 1307211 - RNA, 19 nt, Human
uucacagaccacaccccau

SEQ ID NO: 1307212 - RNA, 24 nt, Human
uucgcucuuguugcccaggcugga

SEQ ID NO: 1307213 - RNA, 20 nt, Human
uucuacaggcaugcaccacc

SEQ ID NO: 1307214 - RNA, 23 nt, Human
uucuccugccucaggcucccgag

SEQ ID NO: 1307215 - RNA, 21 nt, Human
uucuuguauuuuugguagaga

SEQ ID NO: 1307216 - RNA, 20 nt, Human
uugagcccggugacucaggu

SEQ ID NO: 1307217 - RNA, 24 nt, Human
uugccucggccucccaaagugcug

SEQ ID NO: 1307218 - RNA, 20 nt, Human
uugcucgucgcccaggcugg

SEQ ID NO: 1307219 - RNA, 21 nt, Human
uugcucgucgcccaggcugga

SEQ ID NO: 1307220 - RNA, 18 nt, Human
uuggccucccaaagugcu

SEQ ID NO: 1307221 - RNA, 24 nt, Human
uugguagagacaggguuucaucgu

SEQ ID NO: 1307222 - RNA, 23 nt, Human
uuguauuuuuaguagagacgggg

SEQ ID NO: 1307223 - RNA, 24 nt, Human
uuuaugaagccccagauuccaggg

SEQ ID NO: 1307224 - RNA, 23 nt, Human
uuucaccauguuguccaggcugg

SEQ ID NO: 1307225 - RNA, 24 nt, Human
uuucaccauguuguccaggcuggu

SEQ ID NO: 1307226 - RNA, 23 nt, Human
uuucaucguauuggccaggcugu

SEQ ID NO: 1307227 - RNA, 24 nt, Human
uuucgcucuuguugcccaggcugg

SEQ ID NO: 1307228 - RNA, 21 nt, Human
uuucuuguauuuuugguagag

SEQ ID NO: 1307229 - RNA, 24 nt, Human
uuucuuguauuuuugguagagaca

SEQ ID NO: 1307230 - RNA, 21 nt, Human
uuuugcucgucgcccaggcug

SEQ ID NO: 1307231 - RNA, 23 nt, Human
uuuugcucgucgcccaggcugga

SEQ ID NO: 1307232 - RNA, 19 nt, Human
uuuuguauuuuuaguagag

SEQ ID NO: 1307233 - RNA, 20 nt, Human
uuuuguauuuuuaguagaga

SEQ ID NO: 1307234 - RNA, 24 nt, Human
uuuuuaguagagacaggguuucac

SEQ ID NO: 1307235 - RNA, 22 nt, Human
uuuuuaguagagacgggguuuc

SEQ ID NO: 1307236 - RNA, 22 nt, Human
uuuuugguagagacaggguuuc

SEQ ID NO: 1307237 - RNA, 24 nt, Human
uuuuugguagagacaggguuucau

SEQ ID NO: 1307238 - RNA, 20 nt, Human
uuuuuguauuuuuaguagag

SEQ ID NO: 1307239 - RNA, 18 nt, Human
aagaaccuucugcuguca

SEQ ID NO: 1307240 - RNA, 21 nt, Human
acaaugaugacccuccccgag

SEQ ID NO: 1307241 - RNA, 24 nt, Human
acagcagcucccagacccgccggc

SEQ ID NO: 1307242 - RNA, 21 nt, Human
acccccaccugggaccccagc

SEQ ID NO: 1307243 - RNA, 18 nt, Human
agagcagcagcagggggc

SEQ ID NO: 1307244 - RNA, 22 nt, Human
agagggccauggagggucccac

SEQ ID NO: 1307245 - RNA, 19 nt, Human
agcagcgccugcagacagg

SEQ ID NO: 1307246 - RNA, 19 nt, Human
agccagaagcgacggcggc

SEQ ID NO: 1307247 - RNA, 21 nt, Human
aggcaggcugguggcugggag

SEQ ID NO: 1307248 - RNA, 24 nt, Human
aggcaggcugguggcugggagggc

SEQ ID NO: 1307249 - RNA, 33 nt, Human
aggcaggcugguggcugggagggcuccaugucg

SEQ ID NO: 1307250 - RNA, 21 nt, Human
agggaaaacggauucagagca

SEQ ID NO: 1307251 - RNA, 25 nt, Human
agggaucuggagucagaaccggggg

SEQ ID NO: 1307252 - RNA, 22 nt, Human
agucagaaccgggggaaggcag

SEQ ID NO: 1307253 - RNA, 22 nt, Human
auccccccgaauccccccacca

SEQ ID NO: 1307254 - RNA, 28 nt, Human
augguuuaucacaaugaugacccucccc

SEQ ID NO: 1307255 - RNA, 23 nt, Human
caaccaacucaaggacagcagcu

SEQ ID NO: 1307256 - RNA, 21 nt, Human
caaggacagcagcucccagac

SEQ ID NO: 1307257 - RNA, 24 nt, Human
caaugaugacccuccccgaggccu

SEQ ID NO: 1307258 - RNA, 19 nt, Human
cacaaugaugacccucccc

SEQ ID NO: 1307259 - RNA, 23 nt, Human
cacccacagggaaaacggauuca

SEQ ID NO: 1307260 - RNA, 18 nt, Human
caccugggcugagcagug

SEQ ID NO: 1307261 - RNA, 21 nt, Human
cagaacccagcuucccagggc

SEQ ID NO: 1307262 - RNA, 18 nt, Human
cagacccgccggcugcug

SEQ ID NO: 1307263 - RNA, 22 nt, Human
cagacccgccggcugcuggggu

SEQ ID NO: 1307264 - RNA, 19 nt, Human
cagcagcagggggcgggca

SEQ ID NO: 1307265 - RNA, 20 nt, Human
cagcagcagggggcgggcag

SEQ ID NO: 1307266 - RNA, 22 nt, Human
cagcagcagggggcgggcaggg

SEQ ID NO: 1307267 - RNA, 21 nt, Human
cagcagcgccugcagacaggc

SEQ ID NO: 1307268 - RNA, 23 nt, Human
cagcagcgccugcagacaggcgu

SEQ ID NO: 1307269 - RNA, 22 nt, Human
cagcuucccagggcccaaccaa

SEQ ID NO: 1307270 - RNA, 18 nt, Human
cagugagucuucaggguc

SEQ ID NO: 1307271 - RNA, 18 nt, Human
caucuacgguuccacacc

SEQ ID NO: 1307272 - RNA, 22 nt, Human
ccacccccaccugggaccccag

SEQ ID NO: 1307273 - RNA, 20 nt, Human
ccaccugggaccccagcugu

SEQ ID NO: 1307274 - RNA, 23 nt, Human
ccacugggcaccaggccuggucc

SEQ ID NO: 1307275 - RNA, 23 nt, Human
ccagccccaggcacagcucagaa

SEQ ID NO: 1307276 - RNA, 24 nt, Human
ccaggccugguccauggggagcga

SEQ ID NO: 1307277 - RNA, 20 nt, Human
cccaccagagggccauggag

SEQ ID NO: 1307278 - RNA, 18 nt, Human
cccacccccaccugggac

SEQ ID NO: 1307279 - RNA, 22 nt, Human
cccacccccaccugggacccca

SEQ ID NO: 1307280 - RNA, 24 nt, Human
ccccaccugggaccccagcuguac

SEQ ID NO: 1307281 - RNA, 24 nt, Human
ccccaggcacagcucagaaggcuc

SEQ ID NO: 1307282 - RNA, 22 nt, Human
cccccagccccaggcacagcuc

SEQ ID NO: 1307283 - RNA, 18 nt, Human
ccccccgaauccccccac

SEQ ID NO: 1307284 - RNA, 18 nt, Human
ccccccgaauccccccac

SEQ ID NO: 1307285 - RNA, 27 nt, Human
cccccgaauccccccaccagagggcca

SEQ ID NO: 1307286 - RNA, 18 nt, Human
ccccgaggccucuccuac

SEQ ID NO: 1307287 - RNA, 23 nt, Human
ccccgaggccucuccuacgguaa

SEQ ID NO: 1307288 - RNA, 20 nt, Human
cccgaauccccccaccagag

SEQ ID NO: 1307289 - RNA, 27 nt, Human
ccucacuuuauccccccgaaucccccc

SEQ ID NO: 1307290 - RNA, 19 nt, Human
ccuccccgaggccucuccu

SEQ ID NO: 1307291 - RNA, 20 nt, Human
ccuccccgaggccucuccua

SEQ ID NO: 1307292 - RNA, 22 nt, Human
ccugggaccccagcuguacagg

SEQ ID NO: 1307293 - RNA, 24 nt, Human
ccuucugcugucauuaaccgcgau

SEQ ID NO: 1307294 - RNA, 18 nt, Human
cgacaaagaaccuucugc

SEQ ID NO: 1307295 - RNA, 19 nt, Human
cgacagugaacauggaggc

SEQ ID NO: 1307296 - RNA, 24 nt, Human
cgucaggaagcuucgcugcugagg

SEQ ID NO: 1307297 - RNA, 25 nt, Human
cguccaugcuggccugauagcccca

SEQ ID NO: 1307298 - RNA, 18 nt, Human
cucacuuuauccccccga

SEQ ID NO: 1307299 - RNA, 22 nt, Human
gagcagcagcagggggcgggca

SEQ ID NO: 1307300 - RNA, 18 nt, Human
gcagcagcagggggcggg

SEQ ID NO: 1307301 - RNA, 22 nt, Human
gcagcagcgccugcagacaggc

SEQ ID NO: 1307302 - RNA, 21 nt, Human
gcagcucccagacccgccggc

SEQ ID NO: 1307303 - RNA, 18 nt, Human
gcccuguccccccagccc

SEQ ID NO: 1307304 - RNA, 22 nt, Human
gcugccagaacccagcuuccca

SEQ ID NO: 1307305 - RNA, 21 nt, Human
gcugcugggguuccagggccc

SEQ ID NO: 1307306 - RNA, 22 nt, Human
ggcccaaccaacucaaggacag

SEQ ID NO: 1307307 - RNA, 23 nt, Human
ggcugggagggcuccaugugggc

SEQ ID NO: 1307308 - RNA, 23 nt, Human
gguccauggggagcgacaaagaa

SEQ ID NO: 1307309 - RNA, 21 nt, Human
ucacaaugaugacccuccccg

SEQ ID NO: 1307310 - RNA, 21 nt, Human
ucaccugggcugagcagugag

SEQ ID NO: 1307311 - RNA, 19 nt, Human
ucccagggcccaaccaacu

SEQ ID NO: 1307312 - RNA, 22 nt, Human
ucccagggcccaaccaacucaa

SEQ ID NO: 1307313 - RNA, 24 nt, Human
uccccccagccccaggcacagcuc

SEQ ID NO: 1307314 - RNA, 24 nt, Human
ucugcacaauccucacuuuauccc

SEQ ID NO: 1307315 - RNA, 21 nt, Human
ugagucuucagggucugcccc

SEQ ID NO: 1307316 - RNA, 21 nt, Human
ugcacaauccucacuuuaucc

SEQ ID NO: 1307317 - RNA, 18 nt, Human
ugcugggguuccagggcc

SEQ ID NO: 1307318 - RNA, 19 nt, Human
uggcuccugucccaccccc

SEQ ID NO: 1307319 - RNA, 20 nt, Human
uggcugggagggcuccaugu

SEQ ID NO: 1307320 - RNA, 24 nt, Human
uggcugggagggcuccaugugggc

SEQ ID NO: 1307321 - RNA, 21 nt, Human
ugggaccccagcuguacaggc

SEQ ID NO: 1307322 - RNA, 21 nt, Human
ugggccuggcugaggagccag

SEQ ID NO: 1307323 - RNA, 18 nt, Human
ugggcugggcugggaggc

SEQ ID NO: 1307324 - RNA, 21 nt, Human
ugggguuccagggcccugucc

SEQ ID NO: 1307325 - RNA, 20 nt, Human
ugguccauggggagcgacaa

SEQ ID NO: 1307326 - RNA, 21 nt, Human
uuccagggcccugucccccca

SEQ ID NO: 1307327 - RNA, 18 nt, Human
aaaaaaaaguuguccaaa

SEQ ID NO: 1307328 - RNA, 20 nt, Human
aaaacauuuucaaaagagcu

SEQ ID NO: 1307329 - RNA, 21 nt, Human
aaacuaaaaggagcuaccugg

SEQ ID NO: 1307330 - RNA, 20 nt, Human
aaaugaccuaaaacuaaagc

SEQ ID NO: 1307331 - RNA, 19 nt, Human
aaggcuugucucuaccuuu

SEQ ID NO: 1307332 - RNA, 19 nt, Human
aagggaagcugguuaccaa

SEQ ID NO: 1307333 - RNA, 19 nt, Human
cacucugccuagcacuuac

SEQ ID NO: 1307334 - RNA, 24 nt, Human
ccaaaagccuuucuaaccagguua

SEQ ID NO: 1307335 - RNA, 24 nt, Human
ccccaaaaaauauaacuauccuag

SEQ ID NO: 1307336 - RNA, 21 nt, Human
ccuuuguuagcuucucuggcu

SEQ ID NO: 1307337 - RNA, 22 nt, Human
cuaauauaugucuccuucaucu

SEQ ID NO: 1307338 - RNA, 18 nt, Human
cugcuaaguuggucaaaa

SEQ ID NO: 1307339 - RNA, 21 nt, Human
cuggacuugcuguuaucagaa

SEQ ID NO: 1307340 - RNA, 20 nt, Human
cuggcacaaacucacgaaga

SEQ ID NO: 1307341 - RNA, 20 nt, Human
cugggaaacaaaguucaucc

SEQ ID NO: 1307342 - RNA, 22 nt, Human
gaguauuuaaagaaaaagcuag

SEQ ID NO: 1307343 - RNA, 23 nt, Human
gauggcacuuaaaaaaaaguugu

SEQ ID NO: 1307344 - RNA, 18 nt, Human
ggggcccucagcaaaccc

SEQ ID NO: 1307345 - RNA, 23 nt, Human
uaaagcuacaagguaaaggcaca

SEQ ID NO: 1307346 - RNA, 25 nt, Human
uaaauaaagcggaaaaugcaggaaa

SEQ ID NO: 1307347 - RNA, 21 nt, Human
uagaaagugcaccuguaagaa

SEQ ID NO: 1307348 - RNA, 22 nt, Human
uagaaagugcaccuguaagaaa

SEQ ID NO: 1307349 - RNA, 21 nt, Human
uagaacccccaaaaaauauaa

SEQ ID NO: 1307350 - RNA, 21 nt, Human
uagaacccccaaaaaauauaa

SEQ ID NO: 1307351 - RNA, 22 nt, Human
uagaacccccaaaaaauauaac

SEQ ID NO: 1307352 - RNA, 22 nt, Human
uauaaaaacugcuuuugucugc

SEQ ID NO: 1307353 - RNA, 20 nt, Human
ucaaaagagcugaccuaaua

SEQ ID NO: 1307354 - RNA, 20 nt, Human
uccaaaagccuuucuaaccu

SEQ ID NO: 1307355 - RNA, 25 nt, Human
uccaaauauuucaacuuuuuuugga

SEQ ID NO: 1307356 - RNA, 22 nt, Human
uccaacuucaauguuguagaac

SEQ ID NO: 1307357 - RNA, 18 nt, Human
uccuuuagcuaguuugau

SEQ ID NO: 1307358 - RNA, 22 nt, Human
ugauguaugguaaauggcuagg

SEQ ID NO: 1307359 - RNA, 18 nt, Human
uggaaggagccuucuggg

SEQ ID NO: 1307360 - RNA, 24 nt, Human
uggaaggagccuucuggggcccuc

SEQ ID NO: 1307361 - RNA, 18 nt, Human
uggaauagcuuauuaaca

SEQ ID NO: 1307362 - RNA, 18 nt, Human
uggaaugcuauccuuaaa

SEQ ID NO: 1307363 - RNA, 23 nt, Human
uguuaucagaaugcuuuuucacu

SEQ ID NO: 1307364 - RNA, 18 nt, Human
uuagggucauguguuagg

SEQ ID NO: 1307365 - RNA, 20 nt, Human
uucaaaagagcugaccuaau

SEQ ID NO: 1307366 - RNA, 23 nt, Human
uuccccuauacuaggauucagca

SEQ ID NO: 1307367 - RNA, 20 nt, Human
uuucaucacuaacaauuucu

SEQ ID NO: 1307368 - RNA, 23 nt, Human
acacacacauucagauuugcgcg

SEQ ID NO: 1307369 - RNA, 22 nt, Human
aggacaaugggagguaucgggc

SEQ ID NO: 1307370 - RNA, 21 nt, Human
cagccaauagcaaacgggcuc

SEQ ID NO: 1307371 - RNA, 20 nt, Human
ccccggagacagccaauagc

SEQ ID NO: 1307372 - RNA, 22 nt, Human
uuggcgguagccaauaggagcc

SEQ ID NO: 1307373 - RNA, 20 nt, Human
aaagcaucccauaagcugaa

SEQ ID NO: 1307374 - RNA, 23 nt, Human
aaccuaucuagaaacaaaacuuc

SEQ ID NO: 1307375 - RNA, 19 nt, Human
acugcagcuuccuucuccu

SEQ ID NO: 1307376 - RNA, 19 nt, Human
agcaucccauaagcugaaa

SEQ ID NO: 1307377 - RNA, 26 nt, Human
aggcuuuaacugucaagagaugugag

SEQ ID NO: 1307378 - RNA, 23 nt, Human
agguauuugguuccuaggaaucu

SEQ ID NO: 1307379 - RNA, 18 nt, Human
caaccuaucuagaaacaa

SEQ ID NO: 1307380 - RNA, 18 nt, Human
ccugaaaaucaaaggaaa

SEQ ID NO: 1307381 - RNA, 24 nt, Human
cuaugaacuaaugcuuuaucuccc

SEQ ID NO: 1307382 - RNA, 18 nt, Human
gccacugggcuggaaucc

SEQ ID NO: 1307383 - RNA, 18 nt, Human
gccaggccacugggcugg

SEQ ID NO: 1307384 - RNA, 18 nt, Human
uaagcugaaaucuggugc

SEQ ID NO: 1307385 - RNA, 19 nt, Human
uacacuuaaaauuaagcuc

SEQ ID NO: 1307386 - RNA, 22 nt, Human
uacagauauaugaaaaugccaa

SEQ ID NO: 1307387 - RNA, 19 nt, Human
uagauaaaauaccugaaaa

SEQ ID NO: 1307388 - RNA, 21 nt, Human
ucaaacaaccuaucuagaaac

SEQ ID NO: 1307389 - RNA, 24 nt, Human
ucaagagugugauaugcaaggucg

SEQ ID NO: 1307390 - RNA, 24 nt, Human
ucccauaagcugaaaucuggugcu

SEQ ID NO: 1307391 - RNA, 26 nt, Human
uccuaaaugcagccacagagcaauca

SEQ ID NO: 1307392 - RNA, 20 nt, Human
ucgagacccaaguccucaau

SEQ ID NO: 1307393 - RNA, 21 nt, Human
ugaauacaugcaaggugguua

SEQ ID NO: 1307394 - RNA, 22 nt, Human
ugaccugaguccaaggagggua

SEQ ID NO: 1307395 - RNA, 22 nt, Human
ugaguccaaggaggguaggcac

SEQ ID NO: 1307396 - RNA, 25 nt, Human
ugggcuggaaucagucauccuagag

SEQ ID NO: 1307397 - RNA, 21 nt, Human
ugguuccuaggaaucugccgg

SEQ ID NO: 1307398 - RNA, 29 nt, Human
uugaagguucuguuuuaugcuacacuuaa

SEQ ID NO: 1307399 - RNA, 21 nt, Human
aagccuugucacaaguguggu

SEQ ID NO: 1307400 - RNA, 18 nt, Human
acaugcaccccaccacag

SEQ ID NO: 1307401 - RNA, 19 nt, Human
cucuuuaggcacugguucu

SEQ ID NO: 1307402 - RNA, 24 nt, Human
cuuacaguuccuguggucucucuc

SEQ ID NO: 1307403 - RNA, 19 nt, Human
gaacgccagcagcauccuc

SEQ ID NO: 1307404 - RNA, 19 nt, Human
gacaucuucaggggacuca

SEQ ID NO: 1307405 - RNA, 25 nt, Human
gcugcccgaggggccgccgccgucg

SEQ ID NO: 1307406 - RNA, 18 nt, Human
uaccuggaucgucugacc

SEQ ID NO: 1307407 - RNA, 23 nt, Human
uagcccggaugucgcugcccccu

SEQ ID NO: 1307408 - RNA, 21 nt, Human
uagcugcccgaggggccgccg

SEQ ID NO: 1307409 - RNA, 23 nt, Human
ucacaagugugguuugaacgcca

SEQ ID NO: 1307410 - RNA, 24 nt, Human
ucacaugcaccccaccacaggaga

SEQ ID NO: 1307411 - RNA, 24 nt, Human
ucccuuacaguuccuguggucucu

SEQ ID NO: 1307412 - RNA, 25 nt, Human
ucccuuacaguuccuguggucucuc

SEQ ID NO: 1307413 - RNA, 20 nt, Human
ugaacagaaagccuugucac

SEQ ID NO: 1307414 - RNA, 20 nt, Human
uguggucucucucuuuaggc

SEQ ID NO: 1307415 - RNA, 25 nt, Human
uguggucucucucuuuaggcacugg

SEQ ID NO: 1307416 - RNA, 19 nt, Human
uuggccccgggaggaggau

SEQ ID NO: 1307417 - RNA, 18 nt, Human
aaagucaacaugcuucuc

SEQ ID NO: 1307418 - RNA, 24 nt, Human
aacccugcucugccccagccccac

SEQ ID NO: 1307419 - RNA, 20 nt, Human
acccggccggccaucccgcc

SEQ ID NO: 1307420 - RNA, 18 nt, Human
acccugcucugccccagc

SEQ ID NO: 1307421 - RNA, 18 nt, Human
acuccaccagcaagcagc

SEQ ID NO: 1307422 - RNA, 18 nt, Human
agacgugagggucacccg

SEQ ID NO: 1307423 - RNA, 18 nt, Human
agagccccgccgagcccc

SEQ ID NO: 1307424 - RNA, 25 nt, Human
agaggagucugcccagccuugggag

SEQ ID NO: 1307425 - RNA, 21 nt, Human
agcggcccaugggcggcgggc

SEQ ID NO: 1307426 - RNA, 18 nt, Human
aggaacccugcucugccc

SEQ ID NO: 1307427 - RNA, 23 nt, Human
aggaacccugcucugccccagcc

SEQ ID NO: 1307428 - RNA, 22 nt, Human
agggaggguggacgcggguggg

SEQ ID NO: 1307429 - RNA, 21 nt, Human
caccagcaagcagcaguacca

SEQ ID NO: 1307430 - RNA, 22 nt, Human
cacgccccauucccaucccacc

SEQ ID NO: 1307431 - RNA, 25 nt, Human
cagagccccgccgagccccgcgccc

SEQ ID NO: 1307432 - RNA, 19 nt, Human
cagcagcuucugagaggag

SEQ ID NO: 1307433 - RNA, 23 nt, Human
cagcaguaccagcgccauccucg

SEQ ID NO: 1307434 - RNA, 21 nt, Human
cagcucaagcgaggcgcgcag

SEQ ID NO: 1307435 - RNA, 18 nt, Human
cagcucagccccugcucc

SEQ ID NO: 1307436 - RNA, 19 nt, Human
caggggaugcgucuugcau

SEQ ID NO: 1307437 - RNA, 20 nt, Human
cauugacccugagcuguggc

SEQ ID NO: 1307438 - RNA, 23 nt, Human
cccacgccccauucccaucccac

SEQ ID NO: 1307439 - RNA, 24 nt, Human
cccaugcuggauaaccagcaggag

SEQ ID NO: 1307440 - RNA, 20 nt, Human
ccccagccccacgccccauu

SEQ ID NO: 1307441 - RNA, 23 nt, Human
ccccaggaacccugcucugcccc

SEQ ID NO: 1307442 - RNA, 25 nt, Human
ccccaggaacccugcucugccccag

SEQ ID NO: 1307443 - RNA, 23 nt, Human
ccccgccgagccccgcgcccccu

SEQ ID NO: 1307444 - RNA, 18 nt, Human
ccccgcgcccccuacccg

SEQ ID NO: 1307445 - RNA, 19 nt, Human
ccccuccuccccacccacc

SEQ ID NO: 1307446 - RNA, 19 nt, Human
ccccugcuccaggcuaggg

SEQ ID NO: 1307447 - RNA, 19 nt, Human
cccggugcugcccgguccc

SEQ ID NO: 1307448 - RNA, 19 nt, Human
cccuccuccccacccaccg

SEQ ID NO: 1307449 - RNA, 18 nt, Human
cccugcuccaggcuaggg

SEQ ID NO: 1307450 - RNA, 24 nt, Human
cccugggcuucagggaaguugccc

SEQ ID NO: 1307451 - RNA, 18 nt, Human
ccgccgagccccgcgccc

SEQ ID NO: 1307452 - RNA, 19 nt, Human
ccgccgagccccgcgcccc

SEQ ID NO: 1307453 - RNA, 21 nt, Human
ccgcgcccccuacccggccgg

SEQ ID NO: 1307454 - RNA, 18 nt, Human
ccgcgcgcccggugcugc

SEQ ID NO: 1307455 - RNA, 18 nt, Human
ccggcccgccgcccccgg

SEQ ID NO: 1307456 - RNA, 22 nt, Human
ccucuggaucagggagggugga

SEQ ID NO: 1307457 - RNA, 21 nt, Human
cgagccccgcgcccccuaccc

SEQ ID NO: 1307458 - RNA, 19 nt, Human
cgccgggacgagcggccca

SEQ ID NO: 1307459 - RNA, 18 nt, Human
cggccgccucuagccugc

SEQ ID NO: 1307460 - RNA, 21 nt, Human
cggcgggcggcugcguggcgc

SEQ ID NO: 1307461 - RNA, 20 nt, Human
cggcgggcuggcggcgggcg

SEQ ID NO: 1307462 - RNA, 26 nt, Human
cggcggggcccccucccuuggaagcc

SEQ ID NO: 1307463 - RNA, 21 nt, Human
cgucagagccccgccgagccc

SEQ ID NO: 1307464 - RNA, 22 nt, Human
cgucagagccccgccgagcccc

SEQ ID NO: 1307465 - RNA, 23 nt, Human
cuagccugcaagccaggccgcgc

SEQ ID NO: 1307466 - RNA, 20 nt, Human
cuccuccccacccaccgccc

SEQ ID NO: 1307467 - RNA, 24 nt, Human
cuccucccgcugccucggccgccu

SEQ ID NO: 1307468 - RNA, 20 nt, Human
cucugccccagccccacgcc

SEQ ID NO: 1307469 - RNA, 22 nt, Human
cugcucugccccagccccacgc

SEQ ID NO: 1307470 - RNA, 27 nt, Human
cuggaucagggaggguggacgcgggug

SEQ ID NO: 1307471 - RNA, 24 nt, Human
cuugcauugacccugagcuguggc

SEQ ID NO: 1307472 - RNA, 20 nt, Human
gaccacagcagaacccuuca

SEQ ID NO: 1307473 - RNA, 22 nt, Human
gcagcaguaccagcgccauccu

SEQ ID NO: 1307474 - RNA, 20 nt, Human
gcccgcgccgcgcuccgggg

SEQ ID NO: 1307475 - RNA, 19 nt, Human
gcccuuggguugggggagg

SEQ ID NO: 1307476 - RNA, 18 nt, Human
gccucggacuccaccagc

SEQ ID NO: 1307477 - RNA, 19 nt, Human
gcgcucgcggcuggcuccg

SEQ ID NO: 1307478 - RNA, 18 nt, Human
gcggcccaugggcggcgg

SEQ ID NO: 1307479 - RNA, 19 nt, Human
gcgggggugggagagggcc

SEQ ID NO: 1307480 - RNA, 20 nt, Human
gcuccgggggggaaucgggg

SEQ ID NO: 1307481 - RNA, 22 nt, Human
gcucggggcccgcgucccgcuc

SEQ ID NO: 1307482 - RNA, 28 nt, Human
ggacgcgggugggacuugggggacugcc

SEQ ID NO: 1307483 - RNA, 23 nt, Human
ggagucacguuuucccagccucc

SEQ ID NO: 1307484 - RNA, 23 nt, Human
ggccggcgcgagaggaggggccg

SEQ ID NO: 1307485 - RNA, 18 nt, Human
ggcggcgggcuggcggcg

SEQ ID NO: 1307486 - RNA, 18 nt, Human
ggcggcgggcuggcggcg

SEQ ID NO: 1307487 - RNA, 23 nt, Human
gggcccccucccuuggaagcccc

SEQ ID NO: 1307488 - RNA, 19 nt, Human
gggcggcgggcuggcggcg

SEQ ID NO: 1307489 - RNA, 24 nt, Human
gggcgggggugggagagggccugg

SEQ ID NO: 1307490 - RNA, 19 nt, Human
ggggccccuccuccccacc

SEQ ID NO: 1307491 - RNA, 19 nt, Human
ggggcgggggugggagagg

SEQ ID NO: 1307492 - RNA, 19 nt, Human
ggggugggagagggccugg

SEQ ID NO: 1307493 - RNA, 24 nt, Human
ggguugggggaggggugcugcugg

SEQ ID NO: 1307494 - RNA, 22 nt, Human
ggucugggccugcucggggccc

SEQ ID NO: 1307495 - RNA, 18 nt, Human
guccccggcccgccgccc

SEQ ID NO: 1307496 - RNA, 18 nt, Human
uaccagggcugccccagg

SEQ ID NO: 1307497 - RNA, 21 nt, Human
uaccagggcugccccaggaac

SEQ ID NO: 1307498 - RNA, 19 nt, Human
ucagccccugcuccaggcu

SEQ ID NO: 1307499 - RNA, 23 nt, Human
ucaggccccgcgcugcccgcgcc

SEQ ID NO: 1307500 - RNA, 27 nt, Human
ucaggccccgcgcugcccgcgccgcgc

SEQ ID NO: 1307501 - RNA, 19 nt, Human
ucaggccucggacuccacc

SEQ ID NO: 1307502 - RNA, 21 nt, Human
uccaguggcggcugcugcugc

SEQ ID NO: 1307503 - RNA, 22 nt, Human
ucccaccgacgugggcccuggg

SEQ ID NO: 1307504 - RNA, 20 nt, Human
ucccagccucccaguggacg

SEQ ID NO: 1307505 - RNA, 20 nt, Human
ucccgccucuggaucaggga

SEQ ID NO: 1307506 - RNA, 23 nt, Human
ucccuuggaagcccccaggaaaa

SEQ ID NO: 1307507 - RNA, 19 nt, Human
uccgcgcgcccggugcugc

SEQ ID NO: 1307508 - RNA, 24 nt, Human
uccuccccacccaccgcccuaccc

SEQ ID NO: 1307509 - RNA, 22 nt, Human
uccucggggggccccuccuccc

SEQ ID NO: 1307510 - RNA, 19 nt, Human
ucggccgccucuagccugc

SEQ ID NO: 1307511 - RNA, 21 nt, Human
ucggggggccccuccucccca

SEQ ID NO: 1307512 - RNA, 19 nt, Human
ucugaacuggggaggaggg

SEQ ID NO: 1307513 - RNA, 21 nt, Human
ucugccccagccccacgcccc

SEQ ID NO: 1307514 - RNA, 21 nt, Human
ugacccugagcuguggcgccu

SEQ ID NO: 1307515 - RNA, 21 nt, Human
ugagaggagucugcccagccu

SEQ ID NO: 1307516 - RNA, 21 nt, Human
ugcauucugaacuggggagga

SEQ ID NO: 1307517 - RNA, 21 nt, Human
ugcccgcgccgcgcuccgggg

SEQ ID NO: 1307518 - RNA, 24 nt, Human
ugcccuuggguugggggaggggug

SEQ ID NO: 1307519 - RNA, 21 nt, Human
ugccucggccgccucuagccu

SEQ ID NO: 1307520 - RNA, 23 nt, Human
uggaagcccccaggaaaagucaa

SEQ ID NO: 1307521 - RNA, 21 nt, Human
uggcggcgggcggcugcgugg

SEQ ID NO: 1307522 - RNA, 25 nt, Human
ugggagagggccugggaccacagca

SEQ ID NO: 1307523 - RNA, 23 nt, Human
aaaaaucaccucagaaaacugcc

SEQ ID NO: 1307524 - RNA, 19 nt, Human
aaaucaccucagaaaacug

SEQ ID NO: 1307525 - RNA, 20 nt, Human
aaaugacuguuuuauuucca

SEQ ID NO: 1307526 - RNA, 23 nt, Human
aauaguuuugcauuugcuaucau

SEQ ID NO: 1307527 - RNA, 22 nt, Human
agacaugaaaagagcaggccag

SEQ ID NO: 1307528 - RNA, 22 nt, Human
agauaaaagugaaagcugucug

SEQ ID NO: 1307529 - RNA, 22 nt, Human
aggccagguggauuacuugagg

SEQ ID NO: 1307530 - RNA, 23 nt, Human
aggccagguggauuacuugaggu

SEQ ID NO: 1307531 - RNA, 22 nt, Human
aguaauggauucucccaggcac

SEQ ID NO: 1307532 - RNA, 20 nt, Human
aguuuuuuuuuuuuuuuuuu

SEQ ID NO: 1307533 - RNA, 22 nt, Human
auguuaagacaugaaaagagca

SEQ ID NO: 1307534 - RNA, 18 nt, Human
cagcaaaugcuggacucu

SEQ ID NO: 1307535 - RNA, 24 nt, Human
caggccagguggauuacuugaggu

SEQ ID NO: 1307536 - RNA, 24 nt, Human
cagguggauuacuugaggucagga

SEQ ID NO: 1307537 - RNA, 22 nt, Human
caguaauggauucucccaggca

SEQ ID NO: 1307538 - RNA, 23 nt, Human
cuuaagccaggaguauaacuacu

SEQ ID NO: 1307539 - RNA, 19 nt, Human
gagaggcagaacaaaaaga

SEQ ID NO: 1307540 - RNA, 18 nt, Human
gauuacuugaggucagga

SEQ ID NO: 1307541 - RNA, 22 nt, Human
gauuacuugaggucaggaguuu

SEQ ID NO: 1307542 - RNA, 24 nt, Human
gauuacuugaggucaggaguuuga

SEQ ID NO: 1307543 - RNA, 22 nt, Human
gcagcuuuuagagguaggaauu

SEQ ID NO: 1307544 - RNA, 22 nt, Human
ggauuacuugaggucaggaguu

SEQ ID NO: 1307545 - RNA, 21 nt, Human
gucuacucacuacguagcaac

SEQ ID NO: 1307546 - RNA, 20 nt, Human
guggauuacuugaggucagg

SEQ ID NO: 1307547 - RNA, 18 nt, Human
uaacuacuucaaauacac

SEQ ID NO: 1307548 - RNA, 20 nt, Human
uacuauacccaagagaaagu

SEQ ID NO: 1307549 - RNA, 20 nt, Human
uagagguaggaauuccuucu

SEQ ID NO: 1307550 - RNA, 18 nt, Human
uaggaauuccuucucuac

SEQ ID NO: 1307551 - RNA, 21 nt, Human
ucacuaccuuuucaguuuuuu

SEQ ID NO: 1307552 - RNA, 23 nt, Human
ucagcaaaugcuggacucucccu

SEQ ID NO: 1307553 - RNA, 18 nt, Human
uccacaaguaaaguagau

SEQ ID NO: 1307554 - RNA, 18 nt, Human
ucucccaggcacuaaacu

SEQ ID NO: 1307555 - RNA, 25 nt, Human
ugaaaagagcaggccagguggauua

SEQ ID NO: 1307556 - RNA, 22 nt, Human
ugaaagcugucugaggcuuacu

SEQ ID NO: 1307557 - RNA, 19 nt, Human
ugaggcuuacuauacccaa

SEQ ID NO: 1307558 - RNA, 18 nt, Human
ugaggucaggaguuugag

SEQ ID NO: 1307559 - RNA, 19 nt, Human
uggauuacuugaggucagg

SEQ ID NO: 1307560 - RNA, 23 nt, Human
uggauuacuugaggucaggaguu

SEQ ID NO: 1307561 - RNA, 24 nt, Human
uggauuacuugaggucaggaguuu

SEQ ID NO: 1307562 - RNA, 25 nt, Human
uguagaaucugugucagcaaaugcu

SEQ ID NO: 1307563 - RNA, 18 nt, Human
ugugucagcaaaugcugg

SEQ ID NO: 1307564 - RNA, 19 nt, Human
uugagaggcagaacaaaaa

SEQ ID NO: 1307565 - RNA, 24 nt, Human
uuugagaggcagaacaaaaagaaa

SEQ ID NO: 1307566 - RNA, 25 nt, Human
uuuuuuuuuuuuuuuuuuuuuaagg

SEQ ID NO: 1307567 - RNA, 18 nt, Human
accuggggcacagccggg

SEQ ID NO: 1307568 - RNA, 18 nt, Human
agacaggauacauagggg

SEQ ID NO: 1307569 - RNA, 23 nt, Human
agacaggauacauaggggauuau

SEQ ID NO: 1307570 - RNA, 26 nt, Human
agaguccuuuucucuuucuccucugg

SEQ ID NO: 1307571 - RNA, 19 nt, Human
aguccuuuucucuuucuuu

SEQ ID NO: 1307572 - RNA, 18 nt, Human
cccucagucucugaaagu

SEQ ID NO: 1307573 - RNA, 25 nt, Human
ccuccugucucccucccuggcuuca

SEQ ID NO: 1307574 - RNA, 21 nt, Human
ccugcccuccugucucccucc

SEQ ID NO: 1307575 - RNA, 22 nt, Human
cucccuggcuucacccacaagg

SEQ ID NO: 1307576 - RNA, 18 nt, Human
cugcggcgaggcgaggag

SEQ ID NO: 1307577 - RNA, 19 nt, Human
gacaggauacauaggggau

SEQ ID NO: 1307578 - RNA, 22 nt, Human
gaggagauguggggagaggaag

SEQ ID NO: 1307579 - RNA, 20 nt, Human
gcccuccugucucccucccu

SEQ ID NO: 1307580 - RNA, 19 nt, Human
ggaccuggggcacagccgg

SEQ ID NO: 1307581 - RNA, 21 nt, Human
ggcgaggagauguggggagag

SEQ ID NO: 1307582 - RNA, 24 nt, Human
ggcugauuucugugggagcucucu

SEQ ID NO: 1307583 - RNA, 19 nt, Human
ggggagaggaagagcggcg

SEQ ID NO: 1307584 - RNA, 21 nt, Human
uaugauacgauacucaaaacc

SEQ ID NO: 1307585 - RNA, 21 nt, Human
uccacgaugugcucauuuagg

SEQ ID NO: 1307586 - RNA, 18 nt, Human
uccuccugcccuccuguc

SEQ ID NO: 1307587 - RNA, 23 nt, Human
ucucuaggcagaacccucagucu

SEQ ID NO: 1307588 - RNA, 18 nt, Human
ucucugaaagucggguuc

SEQ ID NO: 1307589 - RNA, 20 nt, Human
ucucugaaagucggguucgu

SEQ ID NO: 1307590 - RNA, 21 nt, Human
ucugaguagccuauagagucc

SEQ ID NO: 1307591 - RNA, 19 nt, Human
ugaaacguucucagguccc

SEQ ID NO: 1307592 - RNA, 24 nt, Human
ugaugacguuauuggaugaaacgu

SEQ ID NO: 1307593 - RNA, 22 nt, Human
uggggcacagccgggcccacug

SEQ ID NO: 1307594 - RNA, 20 nt, Human
ugucucccucccuggcuuca

SEQ ID NO: 1307595 - RNA, 22 nt, Human
uguggggagaggaagagcggcc

SEQ ID NO: 1307596 - RNA, 26 nt, Human
uucucuuucuuucccuuggugaggag

SEQ ID NO: 1307597 - RNA, 18 nt, Human
agucaguccagagcugcc

SEQ ID NO: 1307598 - RNA, 18 nt, Human
aguccagagcugcccagu

SEQ ID NO: 1307599 - RNA, 21 nt, Human
caccugcagucaguccagagc

SEQ ID NO: 1307600 - RNA, 18 nt, Human
cccagucuugaauauaau

SEQ ID NO: 1307601 - RNA, 19 nt, Human
cgggcgggucggcgcugcc

SEQ ID NO: 1307602 - RNA, 24 nt, Human
gacgcgcagggcccggcggugggc

SEQ ID NO: 1307603 - RNA, 20 nt, Human
gcccggcggugggcgggcgg

SEQ ID NO: 1307604 - RNA, 25 nt, Human
ggacaucaccugcagucaguccaga

SEQ ID NO: 1307605 - RNA, 22 nt, Human
ggagacccccgcccucaacuga

SEQ ID NO: 1307606 - RNA, 19 nt, Human
ugaauauaaucauggccaa

SEQ ID NO: 1307607 - RNA, 21 nt, Human
ugggcgggcgggucggcgccu

SEQ ID NO: 1307608 - RNA, 21 nt, Human
aaaccgacaccuucggccucg

SEQ ID NO: 1307609 - RNA, 20 nt, Human
aagcagcaucaagccccggg

SEQ ID NO: 1307610 - RNA, 25 nt, Human
aagcagcaucaagccccgggucccc

SEQ ID NO: 1307611 - RNA, 21 nt, Human
agaccaacauggagaaggcca

SEQ ID NO: 1307612 - RNA, 18 nt, Human
agugccgccgcagccgcc

SEQ ID NO: 1307613 - RNA, 20 nt, Human
auggagaaggccaacccgga

SEQ ID NO: 1307614 - RNA, 19 nt, Human
caagccccggguccccgcc

SEQ ID NO: 1307615 - RNA, 21 nt, Human
ccaccagcaguauauugauaa

SEQ ID NO: 1307616 - RNA, 21 nt, Human
ccacugggccaggcccaagca

SEQ ID NO: 1307617 - RNA, 20 nt, Human
ccaggcccaagcagcaucaa

SEQ ID NO: 1307618 - RNA, 22 nt, Human
cccaccagcaguauauugauaa

SEQ ID NO: 1307619 - RNA, 21 nt, Human
ccccgccccuucacguucccg

SEQ ID NO: 1307620 - RNA, 22 nt, Human
cccggaagugccgccgcagccg

SEQ ID NO: 1307621 - RNA, 20 nt, Human
ccgaaccaagcgcccgcagc

SEQ ID NO: 1307622 - RNA, 18 nt, Human
ccgcagccgcccgcccgg

SEQ ID NO: 1307623 - RNA, 22 nt, Human
ccuuucaguuguguauauauuu

SEQ ID NO: 1307624 - RNA, 19 nt, Human
cgaaccaagcgcccgcagc

SEQ ID NO: 1307625 - RNA, 25 nt, Human
cgagaccaacauggagaaggccaac

SEQ ID NO: 1307626 - RNA, 18 nt, Human
cgcagccgcccgcccggu

SEQ ID NO: 1307627 - RNA, 19 nt, Human
cgcccgcgucgcgcgccuc

SEQ ID NO: 1307628 - RNA, 23 nt, Human
cucggaauaggguucuuugaaaa

SEQ ID NO: 1307629 - RNA, 23 nt, Human
gaggccccgccccuucacguucc

SEQ ID NO: 1307630 - RNA, 20 nt, Human
ggagaaggccaacccggaag

SEQ ID NO: 1307631 - RNA, 23 nt, Human
gggccaggcccaagcagcaucaa

SEQ ID NO: 1307632 - RNA, 23 nt, Human
ucccuaggacccgccacugggcc

SEQ ID NO: 1307633 - RNA, 23 nt, Human
ucuguauuuuaaaaaccgacacc

SEQ ID NO: 1307634 - RNA, 21 nt, Human
ugaccucgaggccccgccccu

SEQ ID NO: 1307635 - RNA, 24 nt, Human
ugugggauggcagcuugcccaagg

SEQ ID NO: 1307636 - RNA, 20 nt, Human
uguguauauauuugaggugu

SEQ ID NO: 1307637 - RNA, 21 nt, Human
uugcccaagguuaaacagcaa

SEQ ID NO: 1307638 - RNA, 22 nt, Human
uuguguauauauuugaggugug

SEQ ID NO: 1307639 - RNA, 24 nt, Human
uuguguauauauuugagguguggu

SEQ ID NO: 1307640 - RNA, 19 nt, Human
uuucuuguuguccuuaugu

SEQ ID NO: 1307641 - RNA, 21 nt, Human
cccauaccccagugcaguuga

SEQ ID NO: 1307642 - RNA, 26 nt, Human
uugacaaucacgucugcgccuucucu

SEQ ID NO: 1307643 - RNA, 23 nt, Human
aaauguccucauggaucuucucc

SEQ ID NO: 1307644 - RNA, 22 nt, Human
acagucugcguucugcaucagc

SEQ ID NO: 1307645 - RNA, 21 nt, Human
agcgcagggugauggugcugg

SEQ ID NO: 1307646 - RNA, 18 nt, Human
agcucuucccccaugcuc

SEQ ID NO: 1307647 - RNA, 21 nt, Human
augugcaggaucuggucugug

SEQ ID NO: 1307648 - RNA, 21 nt, Human
cacagcacaaagccaucuaga

SEQ ID NO: 1307649 - RNA, 23 nt, Human
cacagcccgggggauguagugcu

SEQ ID NO: 1307650 - RNA, 19 nt, Human
cagcacagcccgggggaug

SEQ ID NO: 1307651 - RNA, 19 nt, Human
caucuuguccugguuggga

SEQ ID NO: 1307652 - RNA, 19 nt, Human
cauggaucuucucccucug

SEQ ID NO: 1307653 - RNA, 19 nt, Human
cauuguccauguagcuggg

SEQ ID NO: 1307654 - RNA, 20 nt, Human
ccaccacguugcucaucuug

SEQ ID NO: 1307655 - RNA, 18 nt, Human
ccaugagcugcugcacaa

SEQ ID NO: 1307656 - RNA, 21 nt, Human
cccagcaaugaacugacacag

SEQ ID NO: 1307657 - RNA, 25 nt, Human
ccucauggaucuucucccucuggga

SEQ ID NO: 1307658 - RNA, 23 nt, Human
ccucugggagaaucugcuggccc

SEQ ID NO: 1307659 - RNA, 22 nt, Human
ccucuugagugugaggagugaa

SEQ ID NO: 1307660 - RNA, 22 nt, Human
cgacagguagauguucucuggg

SEQ ID NO: 1307661 - RNA, 19 nt, Human
cuggucugugauguuaaaa

SEQ ID NO: 1307662 - RNA, 20 nt, Human
cugguucagggcuguguugu

SEQ ID NO: 1307663 - RNA, 23 nt, Human
gagaaucugcuggcccaguuguu

SEQ ID NO: 1307664 - RNA, 18 nt, Human
gagagaaggauggguucu

SEQ ID NO: 1307665 - RNA, 22 nt, Human
gaggauggaguggaucaccugg

SEQ ID NO: 1307666 - RNA, 18 nt, Human
gagugaauuauaaagcug

SEQ ID NO: 1307667 - RNA, 20 nt, Human
gcagggugauggugcuggcc

SEQ ID NO: 1307668 - RNA, 23 nt, Human
gcuccugggugccccaggagaug

SEQ ID NO: 1307669 - RNA, 20 nt, Human
ggcuguguugugcagcacca

SEQ ID NO: 1307670 - RNA, 19 nt, Human
gggcuccagguccagcagc

SEQ ID NO: 1307671 - RNA, 23 nt, Human
gucacuaccaucugccuccuggu

SEQ ID NO: 1307672 - RNA, 24 nt, Human
guccuugaacauguccuccuugcg

SEQ ID NO: 1307673 - RNA, 20 nt, Human
gugcagcaccaccacacagg

SEQ ID NO: 1307674 - RNA, 18 nt, Human
uaggagcccaggccagaa

SEQ ID NO: 1307675 - RNA, 21 nt, Human
ucacuaccaucugccuccugg

SEQ ID NO: 1307676 - RNA, 22 nt, Human
ucagccucuugagugugaggag

SEQ ID NO: 1307677 - RNA, 19 nt, Human
uccugguugggaaacacug

SEQ ID NO: 1307678 - RNA, 24 nt, Human
uccugguugggaaacacugaguau

SEQ ID NO: 1307679 - RNA, 18 nt, Human
ugagagaaggauggguuc

SEQ ID NO: 1307680 - RNA, 23 nt, Human
ugaggagugaauuauaaagcugg

SEQ ID NO: 1307681 - RNA, 22 nt, Human
ugaggcgaugaggccuaugagg

SEQ ID NO: 1307682 - RNA, 21 nt, Human
ugcagcaccaccacacagucu

SEQ ID NO: 1307683 - RNA, 19 nt, Human
ugccugguagaaaaagaug

SEQ ID NO: 1307684 - RNA, 23 nt, Human
ugccugguagaaaaagauguccu

SEQ ID NO: 1307685 - RNA, 20 nt, Human
ugcucaucgucugccuggua

SEQ ID NO: 1307686 - RNA, 21 nt, Human
uggacaccagcugguuggucu

SEQ ID NO: 1307687 - RNA, 24 nt, Human
uggaucaccuggggcuccaggucc

SEQ ID NO: 1307688 - RNA, 23 nt, Human
ugggguagcgcagggugauggug

SEQ ID NO: 1307689 - RNA, 22 nt, Human
ugguagaaaaagauguccuugu

SEQ ID NO: 1307690 - RNA, 25 nt, Human
uguccaucucaucaaaguuguccuu

SEQ ID NO: 1307691 - RNA, 18 nt, Human
uugggaaacacugaguau

SEQ ID NO: 1307692 - RNA, 23 nt, Human
caggagucuucuuuucagugucc

SEQ ID NO: 1307693 - RNA, 18 nt, Human
ccagagcaggagucuucu

SEQ ID NO: 1307694 - RNA, 24 nt, Human
aaacccuaccuaaagacuaagaag

SEQ ID NO: 1307695 - RNA, 18 nt, Human
aaauaacuuucuaagaca

SEQ ID NO: 1307696 - RNA, 19 nt, Human
aacaagaauaacuucccau

SEQ ID NO: 1307697 - RNA, 18 nt, Human
aagacaaaugacaaaggc

SEQ ID NO: 1307698 - RNA, 22 nt, Human
aagaugaccuuuacauaaaaau

SEQ ID NO: 1307699 - RNA, 22 nt, Human
agcaaaggcagaaaguauucau

SEQ ID NO: 1307700 - RNA, 21 nt, Human
caacaggaaccuuuacacucc

SEQ ID NO: 1307701 - RNA, 23 nt, Human
cacuuuagccugguggggaaagc

SEQ ID NO: 1307702 - RNA, 26 nt, Human
cagaagaaacaagaauaacuucccau

SEQ ID NO: 1307703 - RNA, 19 nt, Human
cccuucguucuuuuuccuc

SEQ ID NO: 1307704 - RNA, 20 nt, Human
cccuucguucuuuuuccucu

SEQ ID NO: 1307705 - RNA, 21 nt, Human
ccucucagaagaaacaagaau

SEQ ID NO: 1307706 - RNA, 25 nt, Human
ccucucagaagaaacaagaauaacu

SEQ ID NO: 1307707 - RNA, 19 nt, Human
cuaucauuagcaaaggcag

SEQ ID NO: 1307708 - RNA, 20 nt, Human
cuguuaaugauggugaaccu

SEQ ID NO: 1307709 - RNA, 19 nt, Human
cuuuuuccucucagaagaa

SEQ ID NO: 1307710 - RNA, 18 nt, Human
gauucucgacaugauguu

SEQ ID NO: 1307711 - RNA, 18 nt, Human
gcugaaauacgaacucug

SEQ ID NO: 1307712 - RNA, 22 nt, Human
uaagaagcacuuuagccuggug

SEQ ID NO: 1307713 - RNA, 24 nt, Human
uaagacaaaugacaaaggcuuuuu

SEQ ID NO: 1307714 - RNA, 25 nt, Human
uagaauaacuaucauuagcaaaggc

SEQ ID NO: 1307715 - RNA, 26 nt, Human
uagaauaacuaucauuagcaaaggca

SEQ ID NO: 1307716 - RNA, 20 nt, Human
uaggaaggauaaacaaagcu

SEQ ID NO: 1307717 - RNA, 24 nt, Human
uauagaaugaaaauauaccuuuag

SEQ ID NO: 1307718 - RNA, 20 nt, Human
uauaucauugaugaagcucc

SEQ ID NO: 1307719 - RNA, 23 nt, Human
uaucauuagcaaaggcagaaagu

SEQ ID NO: 1307720 - RNA, 23 nt, Human
uauguaacauaauuauagaauga

SEQ ID NO: 1307721 - RNA, 24 nt, Human
ucuguucuguguguccuuuggaga

SEQ ID NO: 1307722 - RNA, 21 nt, Human
ugaaauuaaauguuccccuuc

SEQ ID NO: 1307723 - RNA, 22 nt, Human
ugaaauuaaauguuccccuucg

SEQ ID NO: 1307724 - RNA, 19 nt, Human
ugaaguucaaaacccuacc

SEQ ID NO: 1307725 - RNA, 20 nt, Human
ugauucucgacaugauguuu

SEQ ID NO: 1307726 - RNA, 22 nt, Human
ugcagagcuuuagagcaagcac

SEQ ID NO: 1307727 - RNA, 22 nt, Human
uggaauaaagacuggaaaauuu

SEQ ID NO: 1307728 - RNA, 21 nt, Human
uuaaauguuccccuucguucu

SEQ ID NO: 1307729 - RNA, 23 nt, Human
uuacugcauucaaauccccggau

SEQ ID NO: 1307730 - RNA, 26 nt, Human
uuaguaaagacauauuuuuucacuau

SEQ ID NO: 1307731 - RNA, 24 nt, Human
uuuacaucagaaggccuuucuaaa

SEQ ID NO: 1307732 - RNA, 19 nt, Human
uuuucaugaauucuuuggu

SEQ ID NO: 1307733 - RNA, 21 nt, Human
cacuuucucuuccuucucauc

SEQ ID NO: 1307734 - RNA, 20 nt, Human
cagcucacuuucucuuccuu

SEQ ID NO: 1307735 - RNA, 23 nt, Human
cccgcccagcucacuuucucuuc

SEQ ID NO: 1307736 - RNA, 23 nt, Human
ccuccuugcccaacuccuccucu

SEQ ID NO: 1307737 - RNA, 19 nt, Human
cuccuccuugcccaacucc

SEQ ID NO: 1307738 - RNA, 20 nt, Human
ucacuuucucuuccuucuca

SEQ ID NO: 1307739 - RNA, 18 nt, Human
uccuccuucuccucuauc

SEQ ID NO: 1307740 - RNA, 24 nt, Human
ucuccucuucuuccuccucuuccc

SEQ ID NO: 1307741 - RNA, 18 nt, Human
ucugucuccucuucuucc

SEQ ID NO: 1307742 - RNA, 20 nt, Human
ucugucuccucuucuuccuc

SEQ ID NO: 1307743 - RNA, 18 nt, Human
ucuuccuccucuuccucc

SEQ ID NO: 1307744 - RNA, 22 nt, Human
ucuuccuccucuuccuccucca

SEQ ID NO: 1307745 - RNA, 20 nt, Human
ugggcccgaugcccgcccag

SEQ ID NO: 1307746 - RNA, 23 nt, Human
uuccuccucuuccuccuccaacu

SEQ ID NO: 1307747 - RNA, 27 nt, Human
aaaaauggcaaagagagaccgguaccc

SEQ ID NO: 1307748 - RNA, 23 nt, Human
aaaccagucauaggccaucacac

SEQ ID NO: 1307749 - RNA, 21 nt, Human
acagccagcccagagaaagca

SEQ ID NO: 1307750 - RNA, 19 nt, Human
acagguuggagaggaagaa

SEQ ID NO: 1307751 - RNA, 21 nt, Human
accgcacuuccgccucccucg

SEQ ID NO: 1307752 - RNA, 23 nt, Human
agagaaagcagccaccugcuaga

SEQ ID NO: 1307753 - RNA, 18 nt, Human
agaggaagaaguacaugg

SEQ ID NO: 1307754 - RNA, 23 nt, Human
agaggaagaaguacaugggggug

SEQ ID NO: 1307755 - RNA, 25 nt, Human
agccugcauaggagaugacucugcu

SEQ ID NO: 1307756 - RNA, 25 nt, Human
aggaagaaguacaugggggugugga

SEQ ID NO: 1307757 - RNA, 20 nt, Human
auucaauaacugguuuucca

SEQ ID NO: 1307758 - RNA, 19 nt, Human
caaaaauggcaaagagaga

SEQ ID NO: 1307759 - RNA, 21 nt, Human
caaggacagguuggagaggaa

SEQ ID NO: 1307760 - RNA, 18 nt, Human
cacauggacaggaacagc

SEQ ID NO: 1307761 - RNA, 22 nt, Human
caccgcacuuccgccucccucg

SEQ ID NO: 1307762 - RNA, 21 nt, Human
cagagaaagcagccaccugcu

SEQ ID NO: 1307763 - RNA, 20 nt, Human
cagcccagagaaagcagcca

SEQ ID NO: 1307764 - RNA, 23 nt, Human
cagcccagagaaagcagccaccu

SEQ ID NO: 1307765 - RNA, 19 nt, Human
cagccugcauaggagauga

SEQ ID NO: 1307766 - RNA, 26 nt, Human
caugucucucuuccaugccuccaaaa

SEQ ID NO: 1307767 - RNA, 23 nt, Human
ccaggaugaugagcagguucccc

SEQ ID NO: 1307768 - RNA, 18 nt, Human
cccugagacuucaacaac

SEQ ID NO: 1307769 - RNA, 23 nt, Human
ccuccaaaaauggcaaagagaga

SEQ ID NO: 1307770 - RNA, 26 nt, Human
ccucccacagccagcccagagaaagc

SEQ ID NO: 1307771 - RNA, 25 nt, Human
cggccggguccccaccucgggagcc

SEQ ID NO: 1307772 - RNA, 19 nt, Human
cuuccaugccuccaaaaau

SEQ ID NO: 1307773 - RNA, 22 nt, Human
gaaagcagccaccugcuagaac

SEQ ID NO: 1307774 - RNA, 21 nt, Human
ggguguggaggugggagucag

SEQ ID NO: 1307775 - RNA, 22 nt, Human
gguguggaggugggagucaggg

SEQ ID NO: 1307776 - RNA, 21 nt, Human
uacauggggguguggaggugg

SEQ ID NO: 1307777 - RNA, 21 nt, Human
uagcgggugacagauggcuac

SEQ ID NO: 1307778 - RNA, 23 nt, Human
uccaaaaauggcaaagagagaca

SEQ ID NO: 1307779 - RNA, 18 nt, Human
ucccacagccagcccaga

SEQ ID NO: 1307780 - RNA, 26 nt, Human
uggauccccugagacuucaacaacuc

SEQ ID NO: 1307781 - RNA, 18 nt, Human
uggauguccacaaucauc

SEQ ID NO: 1307782 - RNA, 18 nt, Human
uggggguguggagguggg

SEQ ID NO: 1307783 - RNA, 24 nt, Human
uguggaggugggagucagggcugg

SEQ ID NO: 1307784 - RNA, 18 nt, Human
aagagagagcugcauaug

SEQ ID NO: 1307785 - RNA, 20 nt, Human
aagugguagcuucuucuuau

SEQ ID NO: 1307786 - RNA, 18 nt, Human
acagaaagcccacaguug

SEQ ID NO: 1307787 - RNA, 21 nt, Human
agagcuggugugggagccuca

SEQ ID NO: 1307788 - RNA, 20 nt, Human
agccucaggccccagagagc

SEQ ID NO: 1307789 - RNA, 19 nt, Human
aggccaggggagagcuggu

SEQ ID NO: 1307790 - RNA, 18 nt, Human
agugguagcuucuucuua

SEQ ID NO: 1307791 - RNA, 18 nt, Human
aguguggauggaagaaca

SEQ ID NO: 1307792 - RNA, 19 nt, Human
aguuaugcagcgcacagcc

SEQ ID NO: 1307793 - RNA, 23 nt, Human
aguugauggugccugucagcugg

SEQ ID NO: 1307794 - RNA, 18 nt, Human
auggagacuggggaagac

SEQ ID NO: 1307795 - RNA, 23 nt, Human
cacacucacauugugucugugug

SEQ ID NO: 1307796 - RNA, 22 nt, Human
cagacuccaaagcuaugagaag

SEQ ID NO: 1307797 - RNA, 20 nt, Human
cagccuacauggcuguacag

SEQ ID NO: 1307798 - RNA, 21 nt, Human
cagccuacauggcuguacagg

SEQ ID NO: 1307799 - RNA, 20 nt, Human
cagcgcacagccuacauggc

SEQ ID NO: 1307800 - RNA, 23 nt, Human
caggagugagcugccuucuuugu

SEQ ID NO: 1307801 - RNA, 20 nt, Human
caggcaugcaccugguuuua

SEQ ID NO: 1307802 - RNA, 22 nt, Human
caggccccagagagcccucggg

SEQ ID NO: 1307803 - RNA, 24 nt, Human
cauaguccagguggccgcugacca

SEQ ID NO: 1307804 - RNA, 19 nt, Human
cauucuuguccccaggccu

SEQ ID NO: 1307805 - RNA, 21 nt, Human
ccauacugaaugcaauucagc

SEQ ID NO: 1307806 - RNA, 21 nt, Human
ccccagagagcccucgggacc

SEQ ID NO: 1307807 - RNA, 19 nt, Human
ccccugcaguagccguuga

SEQ ID NO: 1307808 - RNA, 23 nt, Human
ccccuuccuuccauuuccuuucc

SEQ ID NO: 1307809 - RNA, 19 nt, Human
cccgaggguauaagagaga

SEQ ID NO: 1307810 - RNA, 21 nt, Human
cccuggaguuaugcagcgcac

SEQ ID NO: 1307811 - RNA, 21 nt, Human
ccgguccugggacucuaaccu

SEQ ID NO: 1307812 - RNA, 19 nt, Human
ccucgggaccuccugaugg

SEQ ID NO: 1307813 - RNA, 20 nt, Human
ccucuggggacaggcagcuu

SEQ ID NO: 1307814 - RNA, 20 nt, Human
ccugcagcagcacgggcugu

SEQ ID NO: 1307815 - RNA, 19 nt, Human
ccugggaggaacccgaggg

SEQ ID NO: 1307816 - RNA, 18 nt, Human
ccuguccugcagcagcac

SEQ ID NO: 1307817 - RNA, 18 nt, Human
ccuuccauuuccuuuccc

SEQ ID NO: 1307818 - RNA, 21 nt, Human
cgaggguauaagagagagcug

SEQ ID NO: 1307819 - RNA, 25 nt, Human
cgguccugggacucuaaccugugcu

SEQ ID NO: 1307820 - RNA, 25 nt, Human
cuccaaauuccccuuccuuccauuu

SEQ ID NO: 1307821 - RNA, 21 nt, Human
cucccggacaccaccuuccgg

SEQ ID NO: 1307822 - RNA, 20 nt, Human
cuccuaagagcaggagugag

SEQ ID NO: 1307823 - RNA, 18 nt, Human
cuccuguccugcagcagc

SEQ ID NO: 1307824 - RNA, 23 nt, Human
cugcucuguugcugccaguugau

SEQ ID NO: 1307825 - RNA, 21 nt, Human
cugggacucuaaccugugcuu

SEQ ID NO: 1307826 - RNA, 19 nt, Human
cuggggacaggcagcuucc

SEQ ID NO: 1307827 - RNA, 24 nt, Human
cuucccaagggugggcguguucuc

SEQ ID NO: 1307828 - RNA, 22 nt, Human
cuuuccauguaaaauucauucu

SEQ ID NO: 1307829 - RNA, 21 nt, Human
gagcaggagugagcugccuuc

SEQ ID NO: 1307830 - RNA, 26 nt, Human
gagcaggagugagcugccuucuuugu

SEQ ID NO: 1307831 - RNA, 22 nt, Human
gcugcaccgaggaugugcggua

SEQ ID NO: 1307832 - RNA, 22 nt, Human
ggaagaacaggcaugcaccugg

SEQ ID NO: 1307833 - RNA, 20 nt, Human
uaccugcgccugcucuguug

SEQ ID NO: 1307834 - RNA, 26 nt, Human
uaggaaagaggccuguggaaauccug

SEQ ID NO: 1307835 - RNA, 23 nt, Human
uaguccagguggccgcugaccac

SEQ ID NO: 1307836 - RNA, 19 nt, Human
ucaccaugcucuguuagug

SEQ ID NO: 1307837 - RNA, 23 nt, Human
uccaaauuccccuuccuuccauu

SEQ ID NO: 1307838 - RNA, 25 nt, Human
uccaaauuccccuuccuuccauuuc

SEQ ID NO: 1307839 - RNA, 20 nt, Human
ucccaaugcuuggcuucucc

SEQ ID NO: 1307840 - RNA, 21 nt, Human
ucccggacaccaccuuccgga

SEQ ID NO: 1307841 - RNA, 30 nt, Human
ucccggacaccaccuuccggaaaggcuccu

SEQ ID NO: 1307842 - RNA, 21 nt, Human
uccucccggacaccaccuucc

SEQ ID NO: 1307843 - RNA, 22 nt, Human
ucucccuccacaggcgcaccca

SEQ ID NO: 1307844 - RNA, 18 nt, Human
ucuccuaagagcaggagu

SEQ ID NO: 1307845 - RNA, 25 nt, Human
ucuccuaagagcaggagugagcugc

SEQ ID NO: 1307846 - RNA, 21 nt, Human
ugaaugcaauucagcauguau

SEQ ID NO: 1307847 - RNA, 19 nt, Human
ugaggccaggggagagcug

SEQ ID NO: 1307848 - RNA, 21 nt, Human
ugcagcagcacgggcuguagg

SEQ ID NO: 1307849 - RNA, 21 nt, Human
ugcuuggcauaguccaggugg

SEQ ID NO: 1307850 - RNA, 19 nt, Human
ugcuugguugacucugcag

SEQ ID NO: 1307851 - RNA, 24 nt, Human
ugcuugguugacucugcaggucuc

SEQ ID NO: 1307852 - RNA, 18 nt, Human
uggaagaacaggcaugca

SEQ ID NO: 1307853 - RNA, 19 nt, Human
ugggaggaacccgagggua

SEQ ID NO: 1307854 - RNA, 20 nt, Human
uggugccugucagcuggugg

SEQ ID NO: 1307855 - RNA, 21 nt, Human
ugguggggcuccucuggggac

SEQ ID NO: 1307856 - RNA, 18 nt, Human
uggugugggagccucagg

SEQ ID NO: 1307857 - RNA, 18 nt, Human
uguaaaauucauucuugu

SEQ ID NO: 1307858 - RNA, 21 nt, Human
ugugacucaugucccuggagu

SEQ ID NO: 1307859 - RNA, 23 nt, Human
uuauugaggccaggggagagcug

SEQ ID NO: 1307860 - RNA, 20 nt, Human
uuauuuauugcuguuguuau

SEQ ID NO: 1307861 - RNA, 21 nt, Human
uucauucuuguccccaggccu

SEQ ID NO: 1307862 - RNA, 21 nt, Human
uuccauuuccuuucccuuuca

SEQ ID NO: 1307863 - RNA, 21 nt, Human
uuccccuuccuuccauuuccu

SEQ ID NO: 1307864 - RNA, 22 nt, Human
uuuauugcuguuguuauccccu

SEQ ID NO: 1307865 - RNA, 24 nt, Human
aaaaaagacaacaaaacuagaaag

SEQ ID NO: 1307866 - RNA, 23 nt, Human
aaaccaaauauggcagcagggaa

SEQ ID NO: 1307867 - RNA, 24 nt, Human
aaagacugagaaaaaaaaagacaa

SEQ ID NO: 1307868 - RNA, 22 nt, Human
aaagagaaaaggguccccaaga

SEQ ID NO: 1307869 - RNA, 24 nt, Human
aaccaaauauggcagcagggaaau

SEQ ID NO: 1307870 - RNA, 26 nt, Human
aacccucagaauggaggaaacaauuu

SEQ ID NO: 1307871 - RNA, 19 nt, Human
aagagaaaaggguccccaa

SEQ ID NO: 1307872 - RNA, 21 nt, Human
aagaugggagaguugagaagg

SEQ ID NO: 1307873 - RNA, 19 nt, Human
aagcaggucacuuguaagg

SEQ ID NO: 1307874 - RNA, 19 nt, Human
accugaugaagaaacccuc

SEQ ID NO: 1307875 - RNA, 21 nt, Human
acuagaaaggcacagaaacac

SEQ ID NO: 1307876 - RNA, 18 nt, Human
agaaaaaaaaagacaaca

SEQ ID NO: 1307877 - RNA, 24 nt, Human
agaaaaaaaaagacaacaaaacua

SEQ ID NO: 1307878 - RNA, 22 nt, Human
agacaacaaaacuagaaaggca

SEQ ID NO: 1307879 - RNA, 21 nt, Human
agacccacagguggagagggc

SEQ ID NO: 1307880 - RNA, 20 nt, Human
agagaaaaggguccccaaga

SEQ ID NO: 1307881 - RNA, 26 nt, Human
agaugaagggggucagcaugggggug

SEQ ID NO: 1307882 - RNA, 20 nt, Human
agcgggugacagauggcuac

SEQ ID NO: 1307883 - RNA, 24 nt, Human
aggaaacaauuuuagagaaagaga

SEQ ID NO: 1307884 - RNA, 23 nt, Human
caacaaaacuagaaaggcacaga

SEQ ID NO: 1307885 - RNA, 23 nt, Human
cagcaauauuuugcaguucugac

SEQ ID NO: 1307886 - RNA, 20 nt, Human
cagcaugggggugaccagug

SEQ ID NO: 1307887 - RNA, 19 nt, Human
caggcgagacccacaggug

SEQ ID NO: 1307888 - RNA, 20 nt, Human
ccaagaugggaagaaaacca

SEQ ID NO: 1307889 - RNA, 24 nt, Human
ccaagaugggaagaaaaccaaaua

SEQ ID NO: 1307890 - RNA, 24 nt, Human
cccaagaugggaagaaaaccaaau

SEQ ID NO: 1307891 - RNA, 30 nt, Human
cucagaauggaggaaacaauuuuagagaaa

SEQ ID NO: 1307892 - RNA, 20 nt, Human
gaaagagaaaagggucccca

SEQ ID NO: 1307893 - RNA, 18 nt, Human
gaugggagaguugagaag

SEQ ID NO: 1307894 - RNA, 21 nt, Human
gcuguagaugaagggggucag

SEQ ID NO: 1307895 - RNA, 24 nt, Human
gugcagcugggagucuaaaagacu

SEQ ID NO: 1307896 - RNA, 23 nt, Human
uaaaagacugagaaaaaaaaaga

SEQ ID NO: 1307897 - RNA, 20 nt, Human
uaaacucagcaaacaacuga

SEQ ID NO: 1307898 - RNA, 22 nt, Human
uagaugaagggggucagcaugg

SEQ ID NO: 1307899 - RNA, 21 nt, Human
uagcgggugacagauggcuac

SEQ ID NO: 1307900 - RNA, 20 nt, Human
ucagcaaacaacugacaggc

SEQ ID NO: 1307901 - RNA, 23 nt, Human
ucagcaaacaacugacaggcgag

SEQ ID NO: 1307902 - RNA, 24 nt, Human
ucuaaaagacugagaaaaaaaaag

SEQ ID NO: 1307903 - RNA, 20 nt, Human
ugaagggggucagcaugggg

SEQ ID NO: 1307904 - RNA, 22 nt, Human
ugaagggggucagcaugggggu

SEQ ID NO: 1307905 - RNA, 19 nt, Human
ugaauagaagcaauucaca

SEQ ID NO: 1307906 - RNA, 23 nt, Human
ugaauagaagcaauucacaagua

SEQ ID NO: 1307907 - RNA, 22 nt, Human
ugagaaaaaaaaagacaacaaa

SEQ ID NO: 1307908 - RNA, 23 nt, Human
ugggaagaaaaccaaauauggca

SEQ ID NO: 1307909 - RNA, 24 nt, Human
uuucucaggcuguagaugaagggg

SEQ ID NO: 1307910 - RNA, 20 nt, Human
aacaaggacuguuaaaaaug

SEQ ID NO: 1307911 - RNA, 18 nt, Human
aagagcauuggaaaagaa

SEQ ID NO: 1307912 - RNA, 21 nt, Human
caccguacaaucauuaagagc

SEQ ID NO: 1307913 - RNA, 20 nt, Human
gacuguuaaaaaugguagcu

SEQ ID NO: 1307914 - RNA, 19 nt, Human
gaggaauccuggcuucugg

SEQ ID NO: 1307915 - RNA, 18 nt, Human
uaacaaggacuguuaaaa

SEQ ID NO: 1307916 - RNA, 24 nt, Human
uaacaaggacuguuaaaaauggua

SEQ ID NO: 1307917 - RNA, 21 nt, Human
uaacugcagaguucagagagg

SEQ ID NO: 1307918 - RNA, 18 nt, Human
uaagugcaauuaagacug

SEQ ID NO: 1307919 - RNA, 20 nt, Human
ucuccacaucaucuuacaga

SEQ ID NO: 1307920 - RNA, 20 nt, Human
uggaaaagaaugaaauagca

SEQ ID NO: 1307921 - RNA, 20 nt, Human
uuaaaaaugguagcuuucuu

SEQ ID NO: 1307922 - RNA, 23 nt, Human
uuacagaguucuacuguaaccaa

SEQ ID NO: 1307923 - RNA, 24 nt, Human
uucuucuccuuuuccuuacucucc

SEQ ID NO: 1307924 - RNA, 20 nt, Human
uaacuuugaucuuucugagg

SEQ ID NO: 1307925 - RNA, 23 nt, Human
ccuuccagcuacagggcucauuu

SEQ ID NO: 1307926 - RNA, 19 nt, Human
uuguucuaauuugccuucc

SEQ ID NO: 1307927 - RNA, 23 nt, Human
uuugccuuccagcuacagggcuc

SEQ ID NO: 1307928 - RNA, 22 nt, Human
aagagcuggugaccgcggagac

SEQ ID NO: 1307929 - RNA, 18 nt, Human
aggacaggggaaggcggu

SEQ ID NO: 1307930 - RNA, 21 nt, Human
cagaaccgcacccugcucuuc

SEQ ID NO: 1307931 - RNA, 31 nt, Human
cuacgcgcacugucuccccaucuucacccuc

SEQ ID NO: 1307932 - RNA, 21 nt, Human
cugcucuucagugcaccagug

SEQ ID NO: 1307933 - RNA, 19 nt, Human
gaaggggaccucugcccuc

SEQ ID NO: 1307934 - RNA, 19 nt, Human
gcagcuggcagggaggggg

SEQ ID NO: 1307935 - RNA, 24 nt, Human
ggacaggggcuucaggacagggga

SEQ ID NO: 1307936 - RNA, 24 nt, Human
ggcggugggggcagcuggcaggga

SEQ ID NO: 1307937 - RNA, 27 nt, Human
ggcggugggggcagcuggcagggaggg

SEQ ID NO: 1307938 - RNA, 20 nt, Human
gggggcagcuggcagggagg

SEQ ID NO: 1307939 - RNA, 18 nt, Human
uaucccaagucacucggg

SEQ ID NO: 1307940 - RNA, 21 nt, Human
ucccuuguagaguucugugcc

SEQ ID NO: 1307941 - RNA, 22 nt, Human
ucuaucccaagucacucgggag

SEQ ID NO: 1307942 - RNA, 18 nt, Human
ugucuggggcggauggua

SEQ ID NO: 1307943 - RNA, 18 nt, Human
acaaaggugccugaguga

SEQ ID NO: 1307944 - RNA, 18 nt, Human
agccacuuugugaccaug

SEQ ID NO: 1307945 - RNA, 22 nt, Human
agggagcagcuugcacaaaggc

SEQ ID NO: 1307946 - RNA, 21 nt, Human
cuccuccuucuccccagagga

SEQ ID NO: 1307947 - RNA, 23 nt, Human
gaaucagccuucacagaagcuga

SEQ ID NO: 1307948 - RNA, 19 nt, Human
gguagagggagcagcuugc

SEQ ID NO: 1307949 - RNA, 21 nt, Human
uagaucuugaagacagcagca

SEQ ID NO: 1307950 - RNA, 25 nt, Human
uagaucuugaagacagcagcagcuu

SEQ ID NO: 1307951 - RNA, 19 nt, Human
ucagccuucacagaagcug

SEQ ID NO: 1307952 - RNA, 22 nt, Human
ucuccccagaggagacaaaggu

SEQ ID NO: 1307953 - RNA, 25 nt, Human
ugaagacagcagcagcuugacaaau

SEQ ID NO: 1307954 - RNA, 21 nt, Human
ugagcagcuccuccuucuccc

SEQ ID NO: 1307955 - RNA, 18 nt, Human
ugagugguggcagccacu

SEQ ID NO: 1307956 - RNA, 19 nt, Human
ugagugguggcagccacuu

SEQ ID NO: 1307957 - RNA, 20 nt, Human
ugagugguggcagccacuuu

SEQ ID NO: 1307958 - RNA, 24 nt, Human
ugaugagggugagcagcuccuccu

SEQ ID NO: 1307959 - RNA, 23 nt, Human
uucacagaagcugaugcuguaga

SEQ ID NO: 1307960 - RNA, 24 nt, Human
uuccagguagagggagcagcuugc

SEQ ID NO: 1307961 - RNA, 24 nt, Human
uugaagacagcagcagcuugacaa

SEQ ID NO: 1307962 - RNA, 18 nt, Human
agguagcuccgggcgggg

SEQ ID NO: 1307963 - RNA, 18 nt, Human
cagcagcugcaacagccg

SEQ ID NO: 1307964 - RNA, 25 nt, Human
cagcagcugcaacagccgcacgaag

SEQ ID NO: 1307965 - RNA, 26 nt, Human
cgcagcagcugcaacagccgcacgaa

SEQ ID NO: 1307966 - RNA, 24 nt, Human
aaaaaucuauaaagaacugaaaca

SEQ ID NO: 1307967 - RNA, 19 nt, Human
aaacaacaugauccacagc

SEQ ID NO: 1307968 - RNA, 21 nt, Human
aacaacaugauccacagccuu

SEQ ID NO: 1307969 - RNA, 22 nt, Human
aacuacugagugaaauuagacc

SEQ ID NO: 1307970 - RNA, 25 nt, Human
acagaugcaaaauucaguuuaaaaa

SEQ ID NO: 1307971 - RNA, 26 nt, Human
agaacugaaacaacaugauccacagc

SEQ ID NO: 1307972 - RNA, 23 nt, Human
agaguuuucucaaacaggucauu

SEQ ID NO: 1307973 - RNA, 21 nt, Human
agggguuucuccccuauauca

SEQ ID NO: 1307974 - RNA, 19 nt, Human
cacucagcuguacuuuggc

SEQ ID NO: 1307975 - RNA, 21 nt, Human
caugauccacagccuuguuuu

SEQ ID NO: 1307976 - RNA, 23 nt, Human
cauggugguagugagucaucuuc

SEQ ID NO: 1307977 - RNA, 21 nt, Human
cccuuguuuucccuugacucc

SEQ ID NO: 1307978 - RNA, 18 nt, Human
ccuaaacccaauauagga

SEQ ID NO: 1307979 - RNA, 24 nt, Human
cuucucauauucuaaggauuccau

SEQ ID NO: 1307980 - RNA, 18 nt, Human
gcccuuguuuucccuuga

SEQ ID NO: 1307981 - RNA, 18 nt, Human
uacugagugaaauuagac

SEQ ID NO: 1307982 - RNA, 19 nt, Human
uauuuuggcuuuaucuucc

SEQ ID NO: 1307983 - RNA, 21 nt, Human
ucugucuacaaggaguaacau

SEQ ID NO: 1307984 - RNA, 20 nt, Human
ugaaacaacaugauccacag

SEQ ID NO: 1307985 - RNA, 18 nt, Human
ugagagcaggugguaagc

SEQ ID NO: 1307986 - RNA, 23 nt, Human
ugagagcaggugguaagcuucua

SEQ ID NO: 1307987 - RNA, 19 nt, Human
uggacauggugguagugag

SEQ ID NO: 1307988 - RNA, 20 nt, Human
ugucaagggguuucuccccu

SEQ ID NO: 1307989 - RNA, 23 nt, Human
ugucuacaaggaguaacauuuaa

SEQ ID NO: 1307990 - RNA, 19 nt, Human
uuggagguuggacauggug

SEQ ID NO: 1307991 - RNA, 26 nt, Human
uugguucaacuuuccccuuuccauuu

SEQ ID NO: 1307992 - RNA, 18 nt, Human
uuuauucuucauguacac

SEQ ID NO: 1307993 - RNA, 20 nt, Human
aguagcuacacugacacuua

SEQ ID NO: 1307994 - RNA, 21 nt, Human
cauggcuaaauuaaaauucuc

SEQ ID NO: 1307995 - RNA, 22 nt, Human
cuacaguagcuacacugacacu

SEQ ID NO: 1307996 - RNA, 25 nt, Human
uaacaagucuuauuucuuuagaucu

SEQ ID NO: 1307997 - RNA, 21 nt, Human
uaaguccauaccaauaacaaa

SEQ ID NO: 1307998 - RNA, 24 nt, Human
uagaucucuccuucauaaaaucuu

SEQ ID NO: 1307999 - RNA, 21 nt, Human
uaucagaauuugcuugaaaaa

SEQ ID NO: 1308000 - RNA, 20 nt, Human
ugucucuagggacucuguuu

SEQ ID NO: 1308001 - RNA, 21 nt, Human
uuaauccaugacauccaaguu

SEQ ID NO: 1308002 - RNA, 21 nt, Human
uuucuuuagaucucuccuuca

SEQ ID NO: 1308003 - RNA, 28 nt, Human
uuuuuaauccaugacauccaaguucacc

SEQ ID NO: 1308004 - RNA, 21 nt, Human
ccgcugacccuggucuuccuc

SEQ ID NO: 1308005 - RNA, 22 nt, Human
cggaccgugccgccgcugaccc

SEQ ID NO: 1308006 - RNA, 20 nt, Human
gcggaacggaccgugccgcc

SEQ ID NO: 1308007 - RNA, 19 nt, Human
gcuggggucacaggagagg

SEQ ID NO: 1308008 - RNA, 24 nt, Human
aaacacagcuucaggaaagacugg

SEQ ID NO: 1308009 - RNA, 27 nt, Human
acacagcuucaggaaagagggaacgcc

SEQ ID NO: 1308010 - RNA, 19 nt, Human
aggcagguguucccuucca

SEQ ID NO: 1308011 - RNA, 20 nt, Human
caugaaaaguccagaggaaa

SEQ ID NO: 1308012 - RNA, 19 nt, Human
ccuccauuucuccaccaca

SEQ ID NO: 1308013 - RNA, 21 nt, Human
cucucucccuccauuucucca

SEQ ID NO: 1308014 - RNA, 20 nt, Human
gaaagcaauuuauuggcuca

SEQ ID NO: 1308015 - RNA, 20 nt, Human
ucaggaacuguugauuucuc

SEQ ID NO: 1308016 - RNA, 18 nt, Human
ucccuccauuucuccacc

SEQ ID NO: 1308017 - RNA, 19 nt, Human
uucaggaaagacuggaucc

SEQ ID NO: 1308018 - RNA, 24 nt, Human
aaugaucuccagguaccuuuacac

SEQ ID NO: 1308019 - RNA, 22 nt, Human
accccagccacccuugguccca

SEQ ID NO: 1308020 - RNA, 23 nt, Human
accccagccacccuuggucccaa

SEQ ID NO: 1308021 - RNA, 24 nt, Human
accccagccacccuuggucccagc

SEQ ID NO: 1308022 - RNA, 20 nt, Human
aucacauaagaaacacauau

SEQ ID NO: 1308023 - RNA, 21 nt, Human
aucugugaggacagucccccc

SEQ ID NO: 1308024 - RNA, 18 nt, Human
cacauaagaaacacauau

SEQ ID NO: 1308025 - RNA, 23 nt, Human
caccccagccacccuugguccca

SEQ ID NO: 1308026 - RNA, 26 nt, Human
cacugcaaacagccggcggcuccuca

SEQ ID NO: 1308027 - RNA, 20 nt, Human
caucagcaaagggaagcccc

SEQ ID NO: 1308028 - RNA, 18 nt, Human
cauccggguuccaucagc

SEQ ID NO: 1308029 - RNA, 21 nt, Human
ccaccugugcacucccugagc

SEQ ID NO: 1308030 - RNA, 26 nt, Human
ccagcacacgcccgggcgcgcagcca

SEQ ID NO: 1308031 - RNA, 20 nt, Human
ccagccacccuuggucccag

SEQ ID NO: 1308032 - RNA, 26 nt, Human
cccagccacccuuggucccagcugcc

SEQ ID NO: 1308033 - RNA, 22 nt, Human
cccugcuagggcuaggccacag

SEQ ID NO: 1308034 - RNA, 18 nt, Human
cccuuggucccagcugcc

SEQ ID NO: 1308035 - RNA, 19 nt, Human
ccucccgccuacccugcua

SEQ ID NO: 1308036 - RNA, 22 nt, Human
ccuccgcgucgcuggcgggagc

SEQ ID NO: 1308037 - RNA, 23 nt, Human
cggaggggccucagcccauggug

SEQ ID NO: 1308038 - RNA, 18 nt, Human
gcccaugguggugggggg

SEQ ID NO: 1308039 - RNA, 19 nt, Human
gcccgggcgcgcagccagg

SEQ ID NO: 1308040 - RNA, 18 nt, Human
gcuccuuccccuccuccc

SEQ ID NO: 1308041 - RNA, 19 nt, Human
ggagcccgggcugguggcc

SEQ ID NO: 1308042 - RNA, 25 nt, Human
ggagcuccuuccccuccucccgccu

SEQ ID NO: 1308043 - RNA, 23 nt, Human
ggccucagcccaugguggugggg

SEQ ID NO: 1308044 - RNA, 19 nt, Human
ggccuugaggcagagcugg

SEQ ID NO: 1308045 - RNA, 23 nt, Human
uaggccacagauacacagggcga

SEQ ID NO: 1308046 - RNA, 19 nt, Human
ucacaaggugaggagcccg

SEQ ID NO: 1308047 - RNA, 23 nt, Human
ucacaaggugaggagcccgggcu

SEQ ID NO: 1308048 - RNA, 22 nt, Human
uccccccagccccugugccucc

SEQ ID NO: 1308049 - RNA, 24 nt, Human
ucccugagcggaaaugccugacuc

SEQ ID NO: 1308050 - RNA, 21 nt, Human
ucugugaggacagucccccca

SEQ ID NO: 1308051 - RNA, 21 nt, Human
ugaacgcagaguccaugggcc

SEQ ID NO: 1308052 - RNA, 23 nt, Human
ugaaugacaaugaucuccaggua

SEQ ID NO: 1308053 - RNA, 21 nt, Human
ugaggcagagcuggaagcugc

SEQ ID NO: 1308054 - RNA, 21 nt, Human
ugcugggucgaggggaaucag

SEQ ID NO: 1308055 - RNA, 25 nt, Human
uggaagcugcuacgcggaggggccu

SEQ ID NO: 1308056 - RNA, 19 nt, Human
uggagagaugggcacagag

SEQ ID NO: 1308057 - RNA, 20 nt, Human
uggcccuggagagaugggca

SEQ ID NO: 1308058 - RNA, 24 nt, Human
ugguggugggggggcaccccagcc

SEQ ID NO: 1308059 - RNA, 23 nt, Human
uugaggcagagcuggaagcugcu

SEQ ID NO: 1308060 - RNA, 21 nt, Human
uuuaaaauacaccuuuuuaca

SEQ ID NO: 1308061 - RNA, 18 nt, Human
aacacagcagagcaggag

SEQ ID NO: 1308062 - RNA, 24 nt, Human
aacccuccccagagcugggagcca

SEQ ID NO: 1308063 - RNA, 23 nt, Human
aagaaggagauagagggggaagg

SEQ ID NO: 1308064 - RNA, 24 nt, Human
aagaaggagauagagggggaagga

SEQ ID NO: 1308065 - RNA, 24 nt, Human
aagaugauaccucugcauuuucug

SEQ ID NO: 1308066 - RNA, 26 nt, Human
acccuccccagagcugggagccauug

SEQ ID NO: 1308067 - RNA, 20 nt, Human
agaaagaaacacaucucaaa

SEQ ID NO: 1308068 - RNA, 20 nt, Human
agagggggaaggaggaaaca

SEQ ID NO: 1308069 - RNA, 20 nt, Human
agcugggaaacuccaacuuu

SEQ ID NO: 1308070 - RNA, 21 nt, Human
aggcagaaagaaacacaucuc

SEQ ID NO: 1308071 - RNA, 18 nt, Human
agggggaaggaggaaaca

SEQ ID NO: 1308072 - RNA, 20 nt, Human
agggggaaggaggaaacagc

SEQ ID NO: 1308073 - RNA, 22 nt, Human
agguccuuagaacacagcagag

SEQ ID NO: 1308074 - RNA, 22 nt, Human
auccgcaaacgggcauuuccuu

SEQ ID NO: 1308075 - RNA, 21 nt, Human
auuugcucacugccaggaugg

SEQ ID NO: 1308076 - RNA, 23 nt, Human
caaugucaaaguaaaugcacuuc

SEQ ID NO: 1308077 - RNA, 22 nt, Human
cagaaagaaacacaucucaaag

SEQ ID NO: 1308078 - RNA, 19 nt, Human
cagccccacaggccugcug

SEQ ID NO: 1308079 - RNA, 21 nt, Human
caggaaccaacggccagcucc

SEQ ID NO: 1308080 - RNA, 18 nt, Human
ccaaaaguaguuacaagc

SEQ ID NO: 1308081 - RNA, 19 nt, Human
ccaagaaagaugauaccuc

SEQ ID NO: 1308082 - RNA, 21 nt, Human
cccacaggccugcugcggcca

SEQ ID NO: 1308083 - RNA, 19 nt, Human
cguggcucaaacccucccc

SEQ ID NO: 1308084 - RNA, 21 nt, Human
cuccccagcguuuucuuuuuc

SEQ ID NO: 1308085 - RNA, 18 nt, Human
cuguggcuggaauggagg

SEQ ID NO: 1308086 - RNA, 21 nt, Human
cuucugcugaagccaguacaa

SEQ ID NO: 1308087 - RNA, 18 nt, Human
gaaaagguguaauacccu

SEQ ID NO: 1308088 - RNA, 20 nt, Human
gaacugcgugugggauuugc

SEQ ID NO: 1308089 - RNA, 21 nt, Human
gacagaagggaaagaaggaga

SEQ ID NO: 1308090 - RNA, 20 nt, Human
ggaauggaggcagaaagaaa

SEQ ID NO: 1308091 - RNA, 21 nt, Human
ggauuugcucacugccaggau

SEQ ID NO: 1308092 - RNA, 18 nt, Human
gggaaggaggaaacagcg

SEQ ID NO: 1308093 - RNA, 18 nt, Human
uacaagccugguuaucug

SEQ ID NO: 1308094 - RNA, 23 nt, Human
uagaacacagcagagcaggagca

SEQ ID NO: 1308095 - RNA, 24 nt, Human
uaguuacaagcuauaucaauguca

SEQ ID NO: 1308096 - RNA, 21 nt, Human
ucaaaguaaaugcacuucauc

SEQ ID NO: 1308097 - RNA, 22 nt, Human
ucagagcuuggagcggcccccg

SEQ ID NO: 1308098 - RNA, 21 nt, Human
uccccagccccacaggccugc

SEQ ID NO: 1308099 - RNA, 23 nt, Human
ucuuuugauguaaagauggaagu

SEQ ID NO: 1308100 - RNA, 20 nt, Human
ugagaucaaaguguuagggg

SEQ ID NO: 1308101 - RNA, 19 nt, Human
ugcauuuucugguggaaaa

SEQ ID NO: 1308102 - RNA, 18 nt, Human
uggcgcuguccccagccc

SEQ ID NO: 1308103 - RNA, 21 nt, Human
ugggauuugcucacugccagg

SEQ ID NO: 1308104 - RNA, 22 nt, Human
uguuaaaaugggacgcuuucaa

SEQ ID NO: 1308105 - RNA, 23 nt, Human
uuucccgagaagagcuccagcuc

SEQ ID NO: 1308106 - RNA, 23 nt, Human
agcuguaucccaggcuuuugggu

SEQ ID NO: 1308107 - RNA, 24 nt, Human
cuuuugaaaccagcuguaucccag

SEQ ID NO: 1308108 - RNA, 22 nt, Human
uugaaaccagcuguaucccagg

SEQ ID NO: 1308109 - RNA, 25 nt, Human
aaacccuuuccucccaacccugagg

SEQ ID NO: 1308110 - RNA, 21 nt, Human
aacccuuuccucccaacccug

SEQ ID NO: 1308111 - RNA, 20 nt, Human
aggcaaacaggcuuucgaag

SEQ ID NO: 1308112 - RNA, 19 nt, Human
agggguaggugagggucgc

SEQ ID NO: 1308113 - RNA, 21 nt, Human
aguggcacagucaucccaggg

SEQ ID NO: 1308114 - RNA, 22 nt, Human
aguggcacagucaucccaggga

SEQ ID NO: 1308115 - RNA, 23 nt, Human
aguugcugggcggcgguggagau

SEQ ID NO: 1308116 - RNA, 22 nt, Human
cagagauuccuuuucucggccc

SEQ ID NO: 1308117 - RNA, 21 nt, Human
cagucaucccagggacccaga

SEQ ID NO: 1308118 - RNA, 21 nt, Human
cccaacccugaggcaaacagg

SEQ ID NO: 1308119 - RNA, 27 nt, Human
ccuugguacuuuccaaacccuuuccuc

SEQ ID NO: 1308120 - RNA, 21 nt, Human
cggcccgaacccgcugugcgg

SEQ ID NO: 1308121 - RNA, 23 nt, Human
cuaguaaaguccaagaaucaaaa

SEQ ID NO: 1308122 - RNA, 20 nt, Human
cugaggcaaacaggcuuucg

SEQ ID NO: 1308123 - RNA, 24 nt, Human
gaggagccagcgggccgcaagcaa

SEQ ID NO: 1308124 - RNA, 19 nt, Human
gcccagcugcgccugugcc

SEQ ID NO: 1308125 - RNA, 20 nt, Human
gccugugccuugggcucucc

SEQ ID NO: 1308126 - RNA, 24 nt, Human
gggcggcgguggagauagcggcgg

SEQ ID NO: 1308127 - RNA, 27 nt, Human
gggcggcgguggagauagcggcgguga

SEQ ID NO: 1308128 - RNA, 22 nt, Human
uccaaacccuuuccucccaacc

SEQ ID NO: 1308129 - RNA, 21 nt, Human
uccucagaugcgucuuuggag

SEQ ID NO: 1308130 - RNA, 22 nt, Human
ucuccugacacggcccauccgg

SEQ ID NO: 1308131 - RNA, 26 nt, Human
ugaggcaaacaggcuuucgaagaccc

SEQ ID NO: 1308132 - RNA, 23 nt, Human
ugccugagcuucugagugagccu

SEQ ID NO: 1308133 - RNA, 23 nt, Human
uuccaaacccuuuccucccaacc

SEQ ID NO: 1308134 - RNA, 21 nt, Human
aaccuggggcagccagggggc

SEQ ID NO: 1308135 - RNA, 25 nt, Human
acagucaggccccugaccucacacc

SEQ ID NO: 1308136 - RNA, 25 nt, Human
agccagccuccagcugccauaccug

SEQ ID NO: 1308137 - RNA, 23 nt, Human
caaccuggggcagccagggggcu

SEQ ID NO: 1308138 - RNA, 20 nt, Human
cacagucaggccccugaccu

SEQ ID NO: 1308139 - RNA, 26 nt, Human
cacagucaggccccugaccucacacc

SEQ ID NO: 1308140 - RNA, 18 nt, Human
cagcugccauaccugcug

SEQ ID NO: 1308141 - RNA, 21 nt, Human
caggccccugaccucacaccg

SEQ ID NO: 1308142 - RNA, 22 nt, Human
cagucaggccccugaccucaca

SEQ ID NO: 1308143 - RNA, 20 nt, Human
cauccagccagccuccagcu

SEQ ID NO: 1308144 - RNA, 18 nt, Human
ccaaugaggucaguuccc

SEQ ID NO: 1308145 - RNA, 22 nt, Human
ccagagacugguagaugaccac

SEQ ID NO: 1308146 - RNA, 27 nt, Human
cccucuccacuuauacuccucuccuca

SEQ ID NO: 1308147 - RNA, 24 nt, Human
cuccagcugccauaccugcugccc

SEQ ID NO: 1308148 - RNA, 19 nt, Human
cucuccacuuauacuccuc

SEQ ID NO: 1308149 - RNA, 18 nt, Human
gucacaaccuggggcagc

SEQ ID NO: 1308150 - RNA, 18 nt, Human
uccagccagccuccagcu

SEQ ID NO: 1308151 - RNA, 22 nt, Human
ucuccaggauuccacucagucc

SEQ ID NO: 1308152 - RNA, 22 nt, Human
ucuuuccaggagaccaggcugg

SEQ ID NO: 1308153 - RNA, 19 nt, Human
ugguagaugaccacuuuau

SEQ ID NO: 1308154 - RNA, 23 nt, Human
uuauacuccucuccucacaaauc

SEQ ID NO: 1308155 - RNA, 20 nt, Human
aagaaacuuacacauacccc

SEQ ID NO: 1308156 - RNA, 19 nt, Human
aagaaagacaggaacauaa

SEQ ID NO: 1308157 - RNA, 23 nt, Human
aagcaacacgguguacuaugaug

SEQ ID NO: 1308158 - RNA, 20 nt, Human
aauaaagcucuuuuaccuuu

SEQ ID NO: 1308159 - RNA, 19 nt, Human
aauuguguguggaucucaa

SEQ ID NO: 1308160 - RNA, 24 nt, Human
acagccuaugcaccuucccuuccu

SEQ ID NO: 1308161 - RNA, 21 nt, Human
acuaacaucaagaaagacagg

SEQ ID NO: 1308162 - RNA, 19 nt, Human
agaaacuuacacauacccc

SEQ ID NO: 1308163 - RNA, 19 nt, Human
agaaacuuacacauacccc

SEQ ID NO: 1308164 - RNA, 19 nt, Human
agaaggaagaggacaaugg

SEQ ID NO: 1308165 - RNA, 21 nt, Human
agaaggaagaggacaauggag

SEQ ID NO: 1308166 - RNA, 26 nt, Human
agagcagaaaaugucuugcuugcauu

SEQ ID NO: 1308167 - RNA, 22 nt, Human
agaggacaauggaguaccuaca

SEQ ID NO: 1308168 - RNA, 22 nt, Human
agauaagaggcaaaacugagag

SEQ ID NO: 1308169 - RNA, 20 nt, Human
agcugacugcauuaaucuca

SEQ ID NO: 1308170 - RNA, 20 nt, Human
auuguguguggaucucaaaa

SEQ ID NO: 1308171 - RNA, 21 nt, Human
caaauaccuuugguauauucu

SEQ ID NO: 1308172 - RNA, 19 nt, Human
cacucuguuauuaacaacc

SEQ ID NO: 1308173 - RNA, 24 nt, Human
cacucuguuauuaacaaccucacu

SEQ ID NO: 1308174 - RNA, 21 nt, Human
cagaaggaagaggacaaugga

SEQ ID NO: 1308175 - RNA, 23 nt, Human
caggguacacuaccccagcacuu

SEQ ID NO: 1308176 - RNA, 27 nt, Human
cauagaaucaaaagaggauuccaauaa

SEQ ID NO: 1308177 - RNA, 24 nt, Human
caucaagaaagacaggaacauaau

SEQ ID NO: 1308178 - RNA, 23 nt, Human
caucacucuguuauuaacaaccu

SEQ ID NO: 1308179 - RNA, 25 nt, Human
ccccagcacuucugggggcugugcc

SEQ ID NO: 1308180 - RNA, 22 nt, Human
cuaaccaacacauagaaucaaa

SEQ ID NO: 1308181 - RNA, 24 nt, Human
cuaaccaacacauagaaucaaaag

SEQ ID NO: 1308182 - RNA, 24 nt, Human
cucaugugaaagauaagaggcaaa

SEQ ID NO: 1308183 - RNA, 18 nt, Human
cugcauuaaucucaccgu

SEQ ID NO: 1308184 - RNA, 24 nt, Human
cugccccagaaggaagaggacaau

SEQ ID NO: 1308185 - RNA, 23 nt, Human
cuguuaacaucagagcagaaaau

SEQ ID NO: 1308186 - RNA, 22 nt, Human
cuuaaagaacugcuguaguccu

SEQ ID NO: 1308187 - RNA, 23 nt, Human
gaaaagaauuuuuuuaaagugaa

SEQ ID NO: 1308188 - RNA, 22 nt, Human
gaagauacacaugcuauaccuc

SEQ ID NO: 1308189 - RNA, 24 nt, Human
gaguuuuccucaggguacacuacc

SEQ ID NO: 1308190 - RNA, 21 nt, Human
uaacuuuuuacuagucacacu

SEQ ID NO: 1308191 - RNA, 21 nt, Human
uaagagaagcauaaauuuaug

SEQ ID NO: 1308192 - RNA, 21 nt, Human
uaccccagcacuucugggggc

SEQ ID NO: 1308193 - RNA, 24 nt, Human
uaccucauuguagaauuuuucacu

SEQ ID NO: 1308194 - RNA, 22 nt, Human
ucaguauagacagcuuuucuca

SEQ ID NO: 1308195 - RNA, 23 nt, Human
uccucaugugaaagauaagaggc

SEQ ID NO: 1308196 - RNA, 23 nt, Human
ucucugugaguuuuccucagggu

SEQ ID NO: 1308197 - RNA, 23 nt, Human
ugaaagauaagaggcaaaacuga

SEQ ID NO: 1308198 - RNA, 20 nt, Human
ugagagggcuaguaucccuu

SEQ ID NO: 1308199 - RNA, 22 nt, Human
ugccccagaaggaagaggacaa

SEQ ID NO: 1308200 - RNA, 21 nt, Human
ugguucacagcuaagcaacac

SEQ ID NO: 1308201 - RNA, 18 nt, Human
uuaaaaauugcaucacuc

SEQ ID NO: 1308202 - RNA, 21 nt, Human
uuauaaugugucucccagucu

SEQ ID NO: 1308203 - RNA, 21 nt, Human
uucugggggcugugccgucug

SEQ ID NO: 1308204 - RNA, 20 nt, Human
uugcuaucugcuaaccaaca

SEQ ID NO: 1308205 - RNA, 18 nt, Human
uugguccuugaauugugu

SEQ ID NO: 1308206 - RNA, 26 nt, Human
uuuuucagagucauccuucggaaauc

SEQ ID NO: 1308207 - RNA, 24 nt, Human
ucuugagcaacugucgugggcccc

SEQ ID NO: 1308208 - RNA, 21 nt, Human
uggcauguugugcucagcucc

SEQ ID NO: 1308209 - RNA, 22 nt, Human
cucugaagggcaaugggaaggg

SEQ ID NO: 1308210 - RNA, 19 nt, Human
gcuggggcagggaggcuuc

SEQ ID NO: 1308211 - RNA, 19 nt, Human
ugggaagggugcuggggca

SEQ ID NO: 1308212 - RNA, 24 nt, Human
accgcagccaccucagccggccca

SEQ ID NO: 1308213 - RNA, 19 nt, Human
agccuuguccuaagggagc

SEQ ID NO: 1308214 - RNA, 23 nt, Human
aggcacuuuucaugcuguugaca

SEQ ID NO: 1308215 - RNA, 18 nt, Human
agguuuggcaaacaagcu

SEQ ID NO: 1308216 - RNA, 18 nt, Human
caccgcccaaagcaaggu

SEQ ID NO: 1308217 - RNA, 22 nt, Human
caccuguggaugucuuagaggc

SEQ ID NO: 1308218 - RNA, 22 nt, Human
caggagccucauuuacucccau

SEQ ID NO: 1308219 - RNA, 23 nt, Human
ccgcccaaagcaagguuuggcaa

SEQ ID NO: 1308220 - RNA, 23 nt, Human
cgcccaaagcaagguuuggcaaa

SEQ ID NO: 1308221 - RNA, 24 nt, Human
cuccacagucaccacacgcugauc

SEQ ID NO: 1308222 - RNA, 23 nt, Human
cuucucuagaguuucuggauuuc

SEQ ID NO: 1308223 - RNA, 20 nt, Human
gaggaaccuggggcucagga

SEQ ID NO: 1308224 - RNA, 18 nt, Human
gggcucaggaugggcgcc

SEQ ID NO: 1308225 - RNA, 21 nt, Human
gggggaggucagcguggggaa

SEQ ID NO: 1308226 - RNA, 21 nt, Human
gugaggaaccuggggcucagg

SEQ ID NO: 1308227 - RNA, 25 nt, Human
uaccgcagccaccucagccggccca

SEQ ID NO: 1308228 - RNA, 21 nt, Human
uccacagucaccacacgcuga

SEQ ID NO: 1308229 - RNA, 19 nt, Human
uccaccgcccaaagcaagg

SEQ ID NO: 1308230 - RNA, 20 nt, Human
uccaccgcccaaagcaaggu

SEQ ID NO: 1308231 - RNA, 19 nt, Human
uccagggcuggugcuggcg

SEQ ID NO: 1308232 - RNA, 23 nt, Human
uccagggcuggugcuggcgagcc

SEQ ID NO: 1308233 - RNA, 23 nt, Human
ucuaugggggaggucagcguggg

SEQ ID NO: 1308234 - RNA, 20 nt, Human
ugacaugugaggaaccuggg

SEQ ID NO: 1308235 - RNA, 22 nt, Human
ugacaugugaggaaccuggggc

SEQ ID NO: 1308236 - RNA, 19 nt, Human
ugaggaaccuggggcucag

SEQ ID NO: 1308237 - RNA, 20 nt, Human
ugaggaaccuggggcucagg

SEQ ID NO: 1308238 - RNA, 18 nt, Human
ugccagcaugagaucgca

SEQ ID NO: 1308239 - RNA, 20 nt, Human
ugcucugagggacagagccu

SEQ ID NO: 1308240 - RNA, 20 nt, Human
ugcuggcgagccccggccgc

SEQ ID NO: 1308241 - RNA, 22 nt, Human
ugcuggcgagccccggccgcgc

SEQ ID NO: 1308242 - RNA, 21 nt, Human
uggauuucccaggagccucau

SEQ ID NO: 1308243 - RNA, 23 nt, Human
ugggacaugauauucugucucca

SEQ ID NO: 1308244 - RNA, 21 nt, Human
uggugcuggcgagccccggcc

SEQ ID NO: 1308245 - RNA, 18 nt, Human
ugugaggaaccuggggcu

SEQ ID NO: 1308246 - RNA, 20 nt, Human
ugugcuguguguaaaugccu

SEQ ID NO: 1308247 - RNA, 26 nt, Human
uugacaugugaggaaccuggggcuca

SEQ ID NO: 1308248 - RNA, 23 nt, Human
uuuaacacugcacaccuguggau

SEQ ID NO: 1308249 - RNA, 23 nt, Human
aagcacccccaaccuggggcagg

SEQ ID NO: 1308250 - RNA, 20 nt, Human
agcgucucuccaaagcaccc

SEQ ID NO: 1308251 - RNA, 23 nt, Human
aggugccuuucgggucugcuggc

SEQ ID NO: 1308252 - RNA, 21 nt, Human
caccccuuuaucccgcugcag

SEQ ID NO: 1308253 - RNA, 23 nt, Human
caccuucagaccugaguuggguc

SEQ ID NO: 1308254 - RNA, 18 nt, Human
ccuccaggugccuuucgg

SEQ ID NO: 1308255 - RNA, 19 nt, Human
ccuccaggugcuccaucgu

SEQ ID NO: 1308256 - RNA, 18 nt, Human
ccuggcccgagaaggggg

SEQ ID NO: 1308257 - RNA, 18 nt, Human
cggagauagggguggcag

SEQ ID NO: 1308258 - RNA, 27 nt, Human
cuuucgggucugcuggccuccaggugc

SEQ ID NO: 1308259 - RNA, 18 nt, Human
gagauagggguggcagcu

SEQ ID NO: 1308260 - RNA, 20 nt, Human
guaggugggagggacuuccu

SEQ ID NO: 1308261 - RNA, 21 nt, Human
uccaaagcacccccaaccugg

SEQ ID NO: 1308262 - RNA, 24 nt, Human
uccaaagcacccccaaccuggggc

SEQ ID NO: 1308263 - RNA, 19 nt, Human
ucccacaccccuuuauccc

SEQ ID NO: 1308264 - RNA, 18 nt, Human
uggggcaggugucucagg

SEQ ID NO: 1308265 - RNA, 20 nt, Human
uggggcaggugucucaggcc

SEQ ID NO: 1308266 - RNA, 23 nt, Human
ugucucaggccucuccaucggag

SEQ ID NO: 1308267 - RNA, 28 nt, Human
aaaaauaacauucuugcccguaaccucc

SEQ ID NO: 1308268 - RNA, 22 nt, Human
ccuccuauagacaccagaaaaa

SEQ ID NO: 1308269 - RNA, 24 nt, Human
ccuccuauagacaccagaaaaagu

SEQ ID NO: 1308270 - RNA, 21 nt, Human
ugggagaacuugccgagcgcc

SEQ ID NO: 1308271 - RNA, 20 nt, Human
uucaaaaauaacauucuugc

SEQ ID NO: 1308272 - RNA, 25 nt, Human
aaaacaaagaaacaaaaaaacaaaa

SEQ ID NO: 1308273 - RNA, 23 nt, Human
aaaacaccaaaacuucuagaaga

SEQ ID NO: 1308274 - RNA, 22 nt, Human
aaaagcacacuuucccuccccc

SEQ ID NO: 1308275 - RNA, 24 nt, Human
aaacaaaaaaacaaaacaccaaaa

SEQ ID NO: 1308276 - RNA, 22 nt, Human
aaacaccaaaacuucuagaaga

SEQ ID NO: 1308277 - RNA, 23 nt, Human
aaacagaagaaacccuugugauc

SEQ ID NO: 1308278 - RNA, 22 nt, Human
aaacuccucaugauacuacacu

SEQ ID NO: 1308279 - RNA, 24 nt, Human
aaagugcugggauuacagguguga

SEQ ID NO: 1308280 - RNA, 23 nt, Human
aacaaagaaacaaaaaaacaaaa

SEQ ID NO: 1308281 - RNA, 18 nt, Human
aagaaacaaaaaaacaaa

SEQ ID NO: 1308282 - RNA, 22 nt, Human
aagaacaaauugauagacugga

SEQ ID NO: 1308283 - RNA, 21 nt, Human
aagaugcuccacaucacuagu

SEQ ID NO: 1308284 - RNA, 21 nt, Human
aagugauucuccugccucagc

SEQ ID NO: 1308285 - RNA, 18 nt, Human
aagugcugggauuacagg

SEQ ID NO: 1308286 - RNA, 19 nt, Human
aagugcugggauuacaggu

SEQ ID NO: 1308287 - RNA, 26 nt, Human
aagugcugggauuacaggugugagcc

SEQ ID NO: 1308288 - RNA, 24 nt, Human
aaucgcuugaaccugggaggugga

SEQ ID NO: 1308289 - RNA, 20 nt, Human
aaugacacaaauacucaacu

SEQ ID NO: 1308290 - RNA, 21 nt, Human
accaaaaaugcaauccauaaa

SEQ ID NO: 1308291 - RNA, 24 nt, Human
accuugugaucugccugucuuggc

SEQ ID NO: 1308292 - RNA, 20 nt, Human
acgggguuucaucauguugg

SEQ ID NO: 1308293 - RNA, 22 nt, Human
acgggguuucaucauguugguc

SEQ ID NO: 1308294 - RNA, 23 nt, Human
acgggguuucaucauguuggucu

SEQ ID NO: 1308295 - RNA, 24 nt, Human
acgggguuucaucauguuggucug

SEQ ID NO: 1308296 - RNA, 25 nt, Human
acgggguuucaucauguuggucugg

SEQ ID NO: 1308297 - RNA, 25 nt, Human
acuccagccugggcaacgagaguga

SEQ ID NO: 1308298 - RNA, 25 nt, Human
acucuguugccuaggcuggagugca

SEQ ID NO: 1308299 - RNA, 24 nt, Human
acuuucccucccccaucaagagac

SEQ ID NO: 1308300 - RNA, 22 nt, Human
agaaucgcuugaaccugggagg

SEQ ID NO: 1308301 - RNA, 22 nt, Human
agacauuucacccaagaaaaua

SEQ ID NO: 1308302 - RNA, 23 nt, Human
agacgggguuucaucauguuggu

SEQ ID NO: 1308303 - RNA, 23 nt, Human
agaggugauucuaauauuucuuu

SEQ ID NO: 1308304 - RNA, 18 nt, Human
agagugaaacucugucuc

SEQ ID NO: 1308305 - RNA, 21 nt, Human
aggaggcuagugaaagcuaug

SEQ ID NO: 1308306 - RNA, 19 nt, Human
aggaggcugaggcaagaga

SEQ ID NO: 1308307 - RNA, 22 nt, Human
aggcaagagaaucgcuugaacc

SEQ ID NO: 1308308 - RNA, 24 nt, Human
aggcaagagaaucgcuugaaccug

SEQ ID NO: 1308309 - RNA, 24 nt, Human
aggcugaggcaagagaaucgcuug

SEQ ID NO: 1308310 - RNA, 25 nt, Human
aggcuggagugcaguggcacaaucu

SEQ ID NO: 1308311 - RNA, 20 nt, Human
agguggaggaugcggugagc

SEQ ID NO: 1308312 - RNA, 22 nt, Human
aguacagacgggguuucaucau

SEQ ID NO: 1308313 - RNA, 24 nt, Human
agugauucuccugccucagccucc

SEQ ID NO: 1308314 - RNA, 20 nt, Human
agugcaguggcacaaucucg

SEQ ID NO: 1308315 - RNA, 24 nt, Human
agugcaguggcacaaucucggcuc

SEQ ID NO: 1308316 - RNA, 21 nt, Human
auaggcacccgccaccaugcc

SEQ ID NO: 1308317 - RNA, 24 nt, Human
aucaaucuauucccaucauugaau

SEQ ID NO: 1308318 - RNA, 24 nt, Human
aucgcgccauugcacuccagccug

SEQ ID NO: 1308319 - RNA, 24 nt, Human
aucucacuuuucuagagaauccaa

SEQ ID NO: 1308320 - RNA, 23 nt, Human
auugcacuccagccugggcaacg

SEQ ID NO: 1308321 - RNA, 24 nt, Human
auugcacuccagccugggcaacga

SEQ ID NO: 1308322 - RNA, 20 nt, Human
auuugaucagacauuucacc

SEQ ID NO: 1308323 - RNA, 24 nt, Human
caaaaaaacaaagaaacaaaaaaa

SEQ ID NO: 1308324 - RNA, 27 nt, Human
caaaaaaacaaagaaacaaaaaaacaa

SEQ ID NO: 1308325 - RNA, 23 nt, Human
caaaacaccaaaacuucuagaag

SEQ ID NO: 1308326 - RNA, 24 nt, Human
caaaacaccaaaacuucuagaaga

SEQ ID NO: 1308327 - RNA, 20 nt, Human
caaaacuucuagaagaaaac

SEQ ID NO: 1308328 - RNA, 23 nt, Human
caaaagcacacuuucccuccccc

SEQ ID NO: 1308329 - RNA, 24 nt, Human
caaagaacuaaguuucagccagua

SEQ ID NO: 1308330 - RNA, 20 nt, Human
caaagugcugggauuacagg

SEQ ID NO: 1308331 - RNA, 23 nt, Human
caaagugcugggauuacaggugu

SEQ ID NO: 1308332 - RNA, 24 nt, Human
caaagugcugggauuacaggugug

SEQ ID NO: 1308333 - RNA, 26 nt, Human
caacagauuugaucagacauuucacc

SEQ ID NO: 1308334 - RNA, 18 nt, Human
caaccccauuuaggaggc

SEQ ID NO: 1308335 - RNA, 23 nt, Human
caacgagagugaaacucugucuc

SEQ ID NO: 1308336 - RNA, 24 nt, Human
caacuuuucaacucuaaaguacug

SEQ ID NO: 1308337 - RNA, 21 nt, Human
caaucaaucuauucccaucau

SEQ ID NO: 1308338 - RNA, 22 nt, Human
cacaaaagggcuccauccaagu

SEQ ID NO: 1308339 - RNA, 19 nt, Human
cacaugauagaauccaccu

SEQ ID NO: 1308340 - RNA, 23 nt, Human
caccaaaaaugcaauccauaaaa

SEQ ID NO: 1308341 - RNA, 22 nt, Human
caccaaaacuucuagaagaaaa

SEQ ID NO: 1308342 - RNA, 24 nt, Human
caccaugccuggcuaauuuuugua

SEQ ID NO: 1308343 - RNA, 23 nt, Human
cacuccagccugggcaacgagag

SEQ ID NO: 1308344 - RNA, 24 nt, Human
cacuccagccugggcaacgagagu

SEQ ID NO: 1308345 - RNA, 25 nt, Human
cacuccagccugggcaacgagagug

SEQ ID NO: 1308346 - RNA, 24 nt, Human
cacucuguugccuaggcuggagug

SEQ ID NO: 1308347 - RNA, 21 nt, Human
cacugcaaccuccgccuccca

SEQ ID NO: 1308348 - RNA, 23 nt, Human
cacuuucccucccccaucaagag

SEQ ID NO: 1308349 - RNA, 23 nt, Human
cagacauuucacccaagaaaaua

SEQ ID NO: 1308350 - RNA, 19 nt, Human
cagccucccgaguagcgga

SEQ ID NO: 1308351 - RNA, 22 nt, Human
cauacuuguacacaaaagcaca

SEQ ID NO: 1308352 - RNA, 24 nt, Human
caucauguuggucuggcuggucuc

SEQ ID NO: 1308353 - RNA, 21 nt, Human
cauguuggucuggcuggucuc

SEQ ID NO: 1308354 - RNA, 22 nt, Human
cauguuggucuggcuggucucg

SEQ ID NO: 1308355 - RNA, 19 nt, Human
cauugcacuccagccuggg

SEQ ID NO: 1308356 - RNA, 21 nt, Human
cauugcacuccagccugggca

SEQ ID NO: 1308357 - RNA, 22 nt, Human
cauugcacuccagccugggcaa

SEQ ID NO: 1308358 - RNA, 23 nt, Human
cauugcacuccagccugggcaac

SEQ ID NO: 1308359 - RNA, 24 nt, Human
cauugcacuccagccugggcaacg

SEQ ID NO: 1308360 - RNA, 24 nt, Human
cauugcacuccagccugggcaacg

SEQ ID NO: 1308361 - RNA, 20 nt, Human
ccaaaacuucuagaagaaaa

SEQ ID NO: 1308362 - RNA, 20 nt, Human
ccauugcacuccagccuggg

SEQ ID NO: 1308363 - RNA, 21 nt, Human
ccauugcacuccagccugggc

SEQ ID NO: 1308364 - RNA, 23 nt, Human
ccauugcacuccagccugggcaa

SEQ ID NO: 1308365 - RNA, 24 nt, Human
ccauugcacuccagccugggcaac

SEQ ID NO: 1308366 - RNA, 24 nt, Human
ccgccucccauguuuaagugauuc

SEQ ID NO: 1308367 - RNA, 23 nt, Human
ccucaugauacuacacuugaucu

SEQ ID NO: 1308368 - RNA, 24 nt, Human
ccucccauguuuaagugauucucc

SEQ ID NO: 1308369 - RNA, 25 nt, Human
ccucccccaucaagagacaaccaaa

SEQ ID NO: 1308370 - RNA, 20 nt, Human
ccuccuggaaugggaccugg

SEQ ID NO: 1308371 - RNA, 21 nt, Human
ccugaccuugugaucugccug

SEQ ID NO: 1308372 - RNA, 23 nt, Human
ccugccucagccucccgaguagc

SEQ ID NO: 1308373 - RNA, 22 nt, Human
ccugucuuggccucucaaagug

SEQ ID NO: 1308374 - RNA, 24 nt, Human
cgccauugcacuccagccugggca

SEQ ID NO: 1308375 - RNA, 24 nt, Human
cuaauggcaauuagauaaucuuuu

SEQ ID NO: 1308376 - RNA, 19 nt, Human
cucaaauguucuguacagc

SEQ ID NO: 1308377 - RNA, 21 nt, Human
cucaacucugauguacaaaau

SEQ ID NO: 1308378 - RNA, 24 nt, Human
cucacucuguugccuaggcuggag

SEQ ID NO: 1308379 - RNA, 23 nt, Human
cucccccaucaagagacaaccaa

SEQ ID NO: 1308380 - RNA, 24 nt, Human
cuccugaccuugugaucugccugu

SEQ ID NO: 1308381 - RNA, 24 nt, Human
cugcaaccuccgccucccauguuu

SEQ ID NO: 1308382 - RNA, 27 nt, Human
cugucucaaaaaaacaaagaaacaaaa

SEQ ID NO: 1308383 - RNA, 22 nt, Human
cuucuagaagaaaacagaagaa

SEQ ID NO: 1308384 - RNA, 19 nt, Human
cuugaaccugggaggugga

SEQ ID NO: 1308385 - RNA, 24 nt, Human
cuuggccucucaaagugcugggau

SEQ ID NO: 1308386 - RNA, 24 nt, Human
cuuuucuagagaauccaaacuagg

SEQ ID NO: 1308387 - RNA, 21 nt, Human
gaccuugugaucugccugucu

SEQ ID NO: 1308388 - RNA, 24 nt, Human
gaccuugugaucugccugucuugg

SEQ ID NO: 1308389 - RNA, 19 nt, Human
gagagugaaacucugucuc

SEQ ID NO: 1308390 - RNA, 23 nt, Human
gagagugaaacucugucucaaaa

SEQ ID NO: 1308391 - RNA, 23 nt, Human
gagaucgcgccauugcacuccag

SEQ ID NO: 1308392 - RNA, 23 nt, Human
gaggaugcggugagcugagaucg

SEQ ID NO: 1308393 - RNA, 20 nt, Human
gagugcaguggcacaaucuc

SEQ ID NO: 1308394 - RNA, 18 nt, Human
gauuacaggugugagcca

SEQ ID NO: 1308395 - RNA, 22 nt, Human
gauuacaggugugagccacugc

SEQ ID NO: 1308396 - RNA, 22 nt, Human
gauuacaggugugagccacugc

SEQ ID NO: 1308397 - RNA, 18 nt, Human
gccacugcgcccggccac

SEQ ID NO: 1308398 - RNA, 22 nt, Human
gccauugcacuccagccugggc

SEQ ID NO: 1308399 - RNA, 24 nt, Human
gccauugcacuccagccugggcaa

SEQ ID NO: 1308400 - RNA, 20 nt, Human
gccuaggcuggagugcagug

SEQ ID NO: 1308401 - RNA, 20 nt, Human
gccucagccucccgaguagc

SEQ ID NO: 1308402 - RNA, 19 nt, Human
gcuggagugcaguggcaca

SEQ ID NO: 1308403 - RNA, 18 nt, Human
ggaggaugcggugagcug

SEQ ID NO: 1308404 - RNA, 24 nt, Human
ggaggaugcggugagcugagaucg

SEQ ID NO: 1308405 - RNA, 24 nt, Human
ggcuggucucgaacuccugaccuu

SEQ ID NO: 1308406 - RNA, 22 nt, Human
ggggcccuugcuccagugucuc

SEQ ID NO: 1308407 - RNA, 26 nt, Human
ggggcccuugcuccagugucucuagu

SEQ ID NO: 1308408 - RNA, 23 nt, Human
gggguuucaucauguuggucugg

SEQ ID NO: 1308409 - RNA, 22 nt, Human
ggguuucaucauguuggucugg

SEQ ID NO: 1308410 - RNA, 20 nt, Human
ggucucgaacuccugaccuu

SEQ ID NO: 1308411 - RNA, 24 nt, Human
gucucuaguugguguccacucauc

SEQ ID NO: 1308412 - RNA, 22 nt, Human
gucuuggccucucaaagugcug

SEQ ID NO: 1308413 - RNA, 24 nt, Human
gugauucuccugccucagccuccc

SEQ ID NO: 1308414 - RNA, 24 nt, Human
guguauuuccaaagaacuaaguuu

SEQ ID NO: 1308415 - RNA, 21 nt, Human
uaaaauacugcaccaaaaaug

SEQ ID NO: 1308416 - RNA, 20 nt, Human
uaagugauucuccugccuca

SEQ ID NO: 1308417 - RNA, 22 nt, Human
uaagugauucuccugccucagc

SEQ ID NO: 1308418 - RNA, 24 nt, Human
uaauuuuuguauuuuuaguacaga

SEQ ID NO: 1308419 - RNA, 19 nt, Human
uacaggugugagccacugc

SEQ ID NO: 1308420 - RNA, 23 nt, Human
uacaggugugagccacugcgccc

SEQ ID NO: 1308421 - RNA, 18 nt, Human
uaggaggcuagugaaagc

SEQ ID NO: 1308422 - RNA, 18 nt, Human
uaggaguuuuggaaaucu

SEQ ID NO: 1308423 - RNA, 24 nt, Human
uaguacagacgggguuucaucaug

SEQ ID NO: 1308424 - RNA, 20 nt, Human
uaucaauagugguuuaaaaa

SEQ ID NO: 1308425 - RNA, 20 nt, Human
uaugugaauggcaaauaagc

SEQ ID NO: 1308426 - RNA, 21 nt, Human
ucaaaaaaacaaagaaacaaa

SEQ ID NO: 1308427 - RNA, 20 nt, Human
ucaaagugcugggauuacag

SEQ ID NO: 1308428 - RNA, 21 nt, Human
ucaaagugcugggauuacagg

SEQ ID NO: 1308429 - RNA, 24 nt, Human
ucaaagugcugggauuacaggugu

SEQ ID NO: 1308430 - RNA, 19 nt, Human
ucacacuguggggcccuug

SEQ ID NO: 1308431 - RNA, 21 nt, Human
ucacacuguggggcccuugcu

SEQ ID NO: 1308432 - RNA, 24 nt, Human
ucacucuguugccuaggcuggagu

SEQ ID NO: 1308433 - RNA, 18 nt, Human
ucacugcaaccuccgccu

SEQ ID NO: 1308434 - RNA, 19 nt, Human
ucacugcaaccuccgccuc

SEQ ID NO: 1308435 - RNA, 22 nt, Human
ucacugcaaccuccgccuccca

SEQ ID NO: 1308436 - RNA, 24 nt, Human
ucacugcaaccuccgccucccaug

SEQ ID NO: 1308437 - RNA, 27 nt, Human
ucacugcaaccuccgccucccauguuu

SEQ ID NO: 1308438 - RNA, 21 nt, Human
ucagccucccgaguagcggag

SEQ ID NO: 1308439 - RNA, 22 nt, Human
ucagucccaaucucaaauguuc

SEQ ID NO: 1308440 - RNA, 23 nt, Human
uccaggaaaaugacaccagcaag

SEQ ID NO: 1308441 - RNA, 24 nt, Human
ucccauguuuaagugauucuccug

SEQ ID NO: 1308442 - RNA, 23 nt, Human
ucccgaguagcggaguuauaggc

SEQ ID NO: 1308443 - RNA, 23 nt, Human
ucgcgccauugcacuccagccug

SEQ ID NO: 1308444 - RNA, 24 nt, Human
ucgcuugaaccugggagguggagg

SEQ ID NO: 1308445 - RNA, 21 nt, Human
ucuagaagaaaacagaagaaa

SEQ ID NO: 1308446 - RNA, 23 nt, Human
ucucaaagugcugggauuacagg

SEQ ID NO: 1308447 - RNA, 24 nt, Human
ucucaaagugcugggauuacaggu

SEQ ID NO: 1308448 - RNA, 23 nt, Human
ucucacucuguugccuaggcugg

SEQ ID NO: 1308449 - RNA, 24 nt, Human
ucucacucuguugccuaggcugga

SEQ ID NO: 1308450 - RNA, 24 nt, Human
ucuccugccucagccucccgagua

SEQ ID NO: 1308451 - RNA, 25 nt, Human
ucucuuaccccuccaaacagcuuca

SEQ ID NO: 1308452 - RNA, 24 nt, Human
ucuguugccuaggcuggagugcag

SEQ ID NO: 1308453 - RNA, 18 nt, Human
ucuuuuuuuuuuuuuuuu

SEQ ID NO: 1308454 - RNA, 26 nt, Human
ucuuuuuuuuuuuuuuuuuuuuuuuu

SEQ ID NO: 1308455 - RNA, 26 nt, Human
ugaauuuucugguuuuacuuguguau

SEQ ID NO: 1308456 - RNA, 21 nt, Human
ugacaccagcaaguuaacucc

SEQ ID NO: 1308457 - RNA, 22 nt, Human
ugagauggagucucacucuguu

SEQ ID NO: 1308458 - RNA, 22 nt, Human
ugagcugagaucgcgccauugc

SEQ ID NO: 1308459 - RNA, 20 nt, Human
ugaggcaagagaaucgcuug

SEQ ID NO: 1308460 - RNA, 24 nt, Human
ugaggcaagagaaucgcuugaacc

SEQ ID NO: 1308461 - RNA, 25 nt, Human
ugaggcaagagaaucgcuugaaccu

SEQ ID NO: 1308462 - RNA, 24 nt, Human
ugagguaacagaucccaugagaua

SEQ ID NO: 1308463 - RNA, 21 nt, Human
ugaucagacauuucacccaag

SEQ ID NO: 1308464 - RNA, 21 nt, Human
ugaucugaauuuucugguuuu

SEQ ID NO: 1308465 - RNA, 20 nt, Human
ugauucuccugccucagccu

SEQ ID NO: 1308466 - RNA, 23 nt, Human
ugcacuccagccugggcaacgag

SEQ ID NO: 1308467 - RNA, 19 nt, Human
ugccuaggcuggagugcag

SEQ ID NO: 1308468 - RNA, 20 nt, Human
ugccuaggcuggagugcagu

SEQ ID NO: 1308469 - RNA, 21 nt, Human
ugccuaggcuggagugcagug

SEQ ID NO: 1308470 - RNA, 22 nt, Human
ugccuaggcuggagugcagugg

SEQ ID NO: 1308471 - RNA, 24 nt, Human
ugccuaggcuggagugcaguggca

SEQ ID NO: 1308472 - RNA, 23 nt, Human
ugccucagccucccgaguagcgg

SEQ ID NO: 1308473 - RNA, 24 nt, Human
ugcugggauuacaggugugagcca

SEQ ID NO: 1308474 - RNA, 24 nt, Human
uggagugcaguggcacaaucucgg

SEQ ID NO: 1308475 - RNA, 24 nt, Human
uggcacaaucucggcucacugcaa

SEQ ID NO: 1308476 - RNA, 23 nt, Human
ugggagaaaauauuugcauauga

SEQ ID NO: 1308477 - RNA, 25 nt, Human
ugggagaaaauauuugcauaugaua

SEQ ID NO: 1308478 - RNA, 21 nt, Human
ugggagguggaggaugcggug

SEQ ID NO: 1308479 - RNA, 24 nt, Human
ugggagguggaggaugcggugagc

SEQ ID NO: 1308480 - RNA, 18 nt, Human
ugggauuacaggugugag

SEQ ID NO: 1308481 - RNA, 19 nt, Human
ugggauuacaggugugagc

SEQ ID NO: 1308482 - RNA, 21 nt, Human
ugggauuacaggugugagcca

SEQ ID NO: 1308483 - RNA, 22 nt, Human
ugggauuacaggugugagccac

SEQ ID NO: 1308484 - RNA, 22 nt, Human
ugggauuacaggugugagccac

SEQ ID NO: 1308485 - RNA, 24 nt, Human
ugggauuacaggugugagccacug

SEQ ID NO: 1308486 - RNA, 22 nt, Human
uggggugggauuccaauauauc

SEQ ID NO: 1308487 - RNA, 24 nt, Human
uggguaaacaguaugagaauaucc

SEQ ID NO: 1308488 - RNA, 24 nt, Human
uggucuggcuggucucgaacuccu

SEQ ID NO: 1308489 - RNA, 21 nt, Human
ugucacacuguggggcccuug

SEQ ID NO: 1308490 - RNA, 22 nt, Human
ugucacacuguggggcccuugc

SEQ ID NO: 1308491 - RNA, 24 nt, Human
uguucucuuaccccuccaaacagc

SEQ ID NO: 1308492 - RNA, 20 nt, Human
uguugccuaggcuggagugc

SEQ ID NO: 1308493 - RNA, 20 nt, Human
uuaaaaauuucugcuccuua

SEQ ID NO: 1308494 - RNA, 20 nt, Human
uuaaaauuuuuuaugcugac

SEQ ID NO: 1308495 - RNA, 24 nt, Human
uuaguacagacgggguuucaucau

SEQ ID NO: 1308496 - RNA, 19 nt, Human
uuauaggcacccgccacca

SEQ ID NO: 1308497 - RNA, 20 nt, Human
uuauaggcacccgccaccau

SEQ ID NO: 1308498 - RNA, 19 nt, Human
uucugccacaaaagggcuc

SEQ ID NO: 1308499 - RNA, 24 nt, Human
uugaaccugggagguggaggaugc

SEQ ID NO: 1308500 - RNA, 23 nt, Human
uuguauuuuuaguacagacgggg

SEQ ID NO: 1308501 - RNA, 23 nt, Human
uuuaagugauucuccugccucag

SEQ ID NO: 1308502 - RNA, 22 nt, Human
uuuacauaccuucgugcugggc

SEQ ID NO: 1308503 - RNA, 23 nt, Human
uuuagcaucaucaaccccauuua

SEQ ID NO: 1308504 - RNA, 25 nt, Human
uuuauaauaauguaucaauaguggu

SEQ ID NO: 1308505 - RNA, 21 nt, Human
uuucaucauguuggucuggcu

SEQ ID NO: 1308506 - RNA, 23 nt, Human
uuuucagucucuguaauccccuu

SEQ ID NO: 1308507 - RNA, 24 nt, Human
uuuuuaguacagacgggguuucau

SEQ ID NO: 1308508 - RNA, 20 nt, Human
uuuuuguauuuuuaguacag

SEQ ID NO: 1308509 - RNA, 23 nt, Human
uuuuuguauuuuuaguacagacg

SEQ ID NO: 1308510 - RNA, 26 nt, Human
uuuuuuuuuuuugagauggagucuca

SEQ ID NO: 1308511 - RNA, 22 nt, Human
uuuuuuuuuuuuuugagaugga

SEQ ID NO: 1308512 - RNA, 18 nt, Human
uuuuuuuuuuuuuuuuug

SEQ ID NO: 1308513 - RNA, 24 nt, Human
uggccugcuuuuagaugacaguga

SEQ ID NO: 1308514 - RNA, 24 nt, Human
aaagugcugagauuacaggcauga

SEQ ID NO: 1308515 - RNA, 26 nt, Human
aagugcugagauuacaggcaugagcc

SEQ ID NO: 1308516 - RNA, 18 nt, Human
acgggguuuccccguguu

SEQ ID NO: 1308517 - RNA, 24 nt, Human
acgggguuuccccguguuaaacag

SEQ ID NO: 1308518 - RNA, 22 nt, Human
agauuacaggcaugagccaccg

SEQ ID NO: 1308519 - RNA, 24 nt, Human
agauuacaggcaugagccaccgug

SEQ ID NO: 1308520 - RNA, 20 nt, Human
aguagagacgggguuucccc

SEQ ID NO: 1308521 - RNA, 31 nt, Human
augauccgcccgccucggcguuggccucccc

SEQ ID NO: 1308522 - RNA, 24 nt, Human
caaagugcugagauuacaggcaug

SEQ ID NO: 1308523 - RNA, 23 nt, Human
cagccaacaaccccucuccuuuu

SEQ ID NO: 1308524 - RNA, 23 nt, Human
ccaaagugcugagauuacaggca

SEQ ID NO: 1308525 - RNA, 24 nt, Human
ccaaagugcugagauuacaggcau

SEQ ID NO: 1308526 - RNA, 22 nt, Human
ccguguuaaacaggauggucuc

SEQ ID NO: 1308527 - RNA, 21 nt, Human
cucccaaagugcugagauuac

SEQ ID NO: 1308528 - RNA, 24 nt, Human
cuccugaccucaugauccgcccgc

SEQ ID NO: 1308529 - RNA, 22 nt, Human
gaccucaugauccgcccgccuc

SEQ ID NO: 1308530 - RNA, 18 nt, Human
gauuacaggcaugagcca

SEQ ID NO: 1308531 - RNA, 24 nt, Human
gauuacaggcaugagccaccgugc

SEQ ID NO: 1308532 - RNA, 21 nt, Human
gcguuggccucccaaagugcu

SEQ ID NO: 1308533 - RNA, 20 nt, Human
ggucucgaucuccugaccuc

SEQ ID NO: 1308534 - RNA, 23 nt, Human
guagagacgggguuuccccgugu

SEQ ID NO: 1308535 - RNA, 22 nt, Human
uaaacaggauggucucgaucuc

SEQ ID NO: 1308536 - RNA, 24 nt, Human
uacaggcaugagccaccgugccca

SEQ ID NO: 1308537 - RNA, 21 nt, Human
uaguagagacgggguuucccc

SEQ ID NO: 1308538 - RNA, 22 nt, Human
uaguagagacgggguuuccccg

SEQ ID NO: 1308539 - RNA, 24 nt, Human
uaguagagacgggguuuccccgug

SEQ ID NO: 1308540 - RNA, 26 nt, Human
uaguagagacgggguuuccccguugg

SEQ ID NO: 1308541 - RNA, 24 nt, Human
ucccaaagugcugagauuacaggc

SEQ ID NO: 1308542 - RNA, 24 nt, Human
uccccguguuaaacaggauggucu

SEQ ID NO: 1308543 - RNA, 21 nt, Human
ugagauuacaggcaugagcca

SEQ ID NO: 1308544 - RNA, 22 nt, Human
ugagauuacaggcaugagccac

SEQ ID NO: 1308545 - RNA, 23 nt, Human
ugagauuacaggcaugagccacc

SEQ ID NO: 1308546 - RNA, 24 nt, Human
ugagauuacaggcaugagccaccg

SEQ ID NO: 1308547 - RNA, 26 nt, Human
ugagauuacaggcaugagccaccgug

SEQ ID NO: 1308548 - RNA, 21 nt, Human
uguauuuuuaguagagacggg

SEQ ID NO: 1308549 - RNA, 18 nt, Human
uuaguagagacgggguuu

SEQ ID NO: 1308550 - RNA, 22 nt, Human
uuaguagagacgggguuucccc

SEQ ID NO: 1308551 - RNA, 24 nt, Human
uuaguagagacgggguuuccccgu

SEQ ID NO: 1308552 - RNA, 22 nt, Human
uuuuuaguagagacgggguuuc

SEQ ID NO: 1308553 - RNA, 21 nt, Human
uuuuuguauuuuuaguagaga

SEQ ID NO: 1308554 - RNA, 21 nt, Human
uuuuuuguauuuuuaguagag

SEQ ID NO: 1308555 - RNA, 24 nt, Human
uuuuuuguauuuuuaguagagacg

SEQ ID NO: 1308556 - RNA, 23 nt, Human
aaggugccugagaguaggacagg

SEQ ID NO: 1308557 - RNA, 18 nt, Human
acuugggagaggaugguc

SEQ ID NO: 1308558 - RNA, 18 nt, Human
agcucagggaggcuggug

SEQ ID NO: 1308559 - RNA, 23 nt, Human
aggacaggggucacuaagaaaaa

SEQ ID NO: 1308560 - RNA, 19 nt, Human
aggauauaaggugccugag

SEQ ID NO: 1308561 - RNA, 20 nt, Human
auggucagugccaguccugg

SEQ ID NO: 1308562 - RNA, 23 nt, Human
caacuuuaucagagagccaaggg

SEQ ID NO: 1308563 - RNA, 19 nt, Human
ccugagaguaggacagggg

SEQ ID NO: 1308564 - RNA, 19 nt, Human
gagaggauggucagugcca

SEQ ID NO: 1308565 - RNA, 18 nt, Human
gcacccacagcuccaacu

SEQ ID NO: 1308566 - RNA, 20 nt, Human
gcagagagagacugggugga

SEQ ID NO: 1308567 - RNA, 24 nt, Human
ggacaggggucacuaagaaaaaaa

SEQ ID NO: 1308568 - RNA, 19 nt, Human
gugaaaugcugcacccaca

SEQ ID NO: 1308569 - RNA, 18 nt, Human
ucacuguaaagggguggc

SEQ ID NO: 1308570 - RNA, 22 nt, Human
ucagagagccaagggaggccuu

SEQ ID NO: 1308571 - RNA, 24 nt, Human
ucagagagccaagggaggccuuug

SEQ ID NO: 1308572 - RNA, 20 nt, Human
ugaaaugcugcacccacagc

SEQ ID NO: 1308573 - RNA, 21 nt, Human
ugaaaugcugcacccacagcu

SEQ ID NO: 1308574 - RNA, 24 nt, Human
ugaaaugcugcacccacagcuccu

SEQ ID NO: 1308575 - RNA, 20 nt, Human
uuacuugggagaggaugguc

SEQ ID NO: 1308576 - RNA, 21 nt, Human
aagagcuuuccggggccuggg

SEQ ID NO: 1308577 - RNA, 21 nt, Human
acaguccuccgcuuccugccu

SEQ ID NO: 1308578 - RNA, 26 nt, Human
accucgaggcagguccuggagagaag

SEQ ID NO: 1308579 - RNA, 23 nt, Human
agccuuggcaaacagauagcacu

SEQ ID NO: 1308580 - RNA, 20 nt, Human
caaaguccccaaaggccuuc

SEQ ID NO: 1308581 - RNA, 22 nt, Human
caaggucuccacguuguucagg

SEQ ID NO: 1308582 - RNA, 22 nt, Human
caccugauucucuccacacccc

SEQ ID NO: 1308583 - RNA, 20 nt, Human
cagaguccccaucgcuccuc

SEQ ID NO: 1308584 - RNA, 21 nt, Human
cagauccugcacagagucccc

SEQ ID NO: 1308585 - RNA, 18 nt, Human
cagccccuguucugugug

SEQ ID NO: 1308586 - RNA, 27 nt, Human
cagugugucuccucucugucacagucc

SEQ ID NO: 1308587 - RNA, 18 nt, Human
caucgcuccucccucuac

SEQ ID NO: 1308588 - RNA, 19 nt, Human
ccaaaggccuucuccucag

SEQ ID NO: 1308589 - RNA, 25 nt, Human
ccagccgauaaaaguccuggggcuc

SEQ ID NO: 1308590 - RNA, 23 nt, Human
ccccaucgcuccucccucuacag

SEQ ID NO: 1308591 - RNA, 19 nt, Human
ccccugcccucucccgagc

SEQ ID NO: 1308592 - RNA, 21 nt, Human
cccgagccuggugccggucca

SEQ ID NO: 1308593 - RNA, 22 nt, Human
ccuggagagaagggaagcagau

SEQ ID NO: 1308594 - RNA, 20 nt, Human
ccuggagcgaucuacugccc

SEQ ID NO: 1308595 - RNA, 21 nt, Human
cuccacaccuggggccaggug

SEQ ID NO: 1308596 - RNA, 18 nt, Human
cuccucucugucacaguc

SEQ ID NO: 1308597 - RNA, 21 nt, Human
cugauucucuccacaccccgc

SEQ ID NO: 1308598 - RNA, 22 nt, Human
cugcacagaguccccaucgcuc

SEQ ID NO: 1308599 - RNA, 25 nt, Human
cuucugcccuacauccccaagaguc

SEQ ID NO: 1308600 - RNA, 18 nt, Human
gaagcagauccugcacag

SEQ ID NO: 1308601 - RNA, 18 nt, Human
gcacagaguccccaucga

SEQ ID NO: 1308602 - RNA, 21 nt, Human
gcacucacgggccuccuccau

SEQ ID NO: 1308603 - RNA, 19 nt, Human
gccaccagccgauaaaagu

SEQ ID NO: 1308604 - RNA, 19 nt, Human
gcucaccugauucucucca

SEQ ID NO: 1308605 - RNA, 23 nt, Human
ggucaggccccugcccucucccg

SEQ ID NO: 1308606 - RNA, 19 nt, Human
gucacaguccuccgcuucc

SEQ ID NO: 1308607 - RNA, 24 nt, Human
uaaccagggggaagugcagcacaa

SEQ ID NO: 1308608 - RNA, 23 nt, Human
ucaccugauucucuccacacccc

SEQ ID NO: 1308609 - RNA, 23 nt, Human
ucaggccccugcccucucccgaa

SEQ ID NO: 1308610 - RNA, 24 nt, Human
uccaaaaacacacaaggagagccc

SEQ ID NO: 1308611 - RNA, 23 nt, Human
uccaagcugcaauucugcaagag

SEQ ID NO: 1308612 - RNA, 23 nt, Human
uccccaucgcuccucccucuaca

SEQ ID NO: 1308613 - RNA, 22 nt, Human
ucccuggagcgaucuacugccc

SEQ ID NO: 1308614 - RNA, 23 nt, Human
uccggggccuggggcaccucgag

SEQ ID NO: 1308615 - RNA, 21 nt, Human
uccucagccuuggcaaacaga

SEQ ID NO: 1308616 - RNA, 22 nt, Human
ucuccucagcuguuugucgcuc

SEQ ID NO: 1308617 - RNA, 21 nt, Human
ucugcccuacauccccaagag

SEQ ID NO: 1308618 - RNA, 22 nt, Human
ugacaaaguccccaaaggccuu

SEQ ID NO: 1308619 - RNA, 18 nt, Human
ugagcagugugucuccuc

SEQ ID NO: 1308620 - RNA, 20 nt, Human
ugagcagugugucuccucuc

SEQ ID NO: 1308621 - RNA, 19 nt, Human
ugagggccaccagccgaua

SEQ ID NO: 1308622 - RNA, 18 nt, Human
ugauucucuccacacccc

SEQ ID NO: 1308623 - RNA, 20 nt, Human
ugcccaucuucuccaaaaac

SEQ ID NO: 1308624 - RNA, 23 nt, Human
ugcccaucuucuccaaaaacaca

SEQ ID NO: 1308625 - RNA, 20 nt, Human
uggcaaacagauagcacuca

SEQ ID NO: 1308626 - RNA, 24 nt, Human
uggucaggccccugcccucucccg

SEQ ID NO: 1308627 - RNA, 21 nt, Human
ugucuccucucugucacaguc

SEQ ID NO: 1308628 - RNA, 21 nt, Human
uucugcccuacauccccaaga

SEQ ID NO: 1308629 - RNA, 25 nt, Human
uucugugucuggggugggcucugug

SEQ ID NO: 1308630 - RNA, 22 nt, Human
aaaaagacaaagcuacaacaga

SEQ ID NO: 1308631 - RNA, 24 nt, Human
aagaaaaauaaaaagacaaagcua

SEQ ID NO: 1308632 - RNA, 18 nt, Human
acuaccacaauuuacagg

SEQ ID NO: 1308633 - RNA, 22 nt, Human
cgcucucucucuccugcuaaga

SEQ ID NO: 1308634 - RNA, 25 nt, Human
cugacuauggaucaucguuccuucu

SEQ ID NO: 1308635 - RNA, 20 nt, Human
cuuuccugacaacuccucgc

SEQ ID NO: 1308636 - RNA, 18 nt, Human
gcuaugacaguccugaac

SEQ ID NO: 1308637 - RNA, 22 nt, Human
uaagcugcaguaacuuuucuga

SEQ ID NO: 1308638 - RNA, 23 nt, Human
uaugacaguccugaacaagaagg

SEQ ID NO: 1308639 - RNA, 18 nt, Human
ucuuuuuuuuuuuuuuug

SEQ ID NO: 1308640 - RNA, 21 nt, Human
uggcuaugacaguccugaaca

SEQ ID NO: 1308641 - RNA, 24 nt, Human
uguaaugaaaagaaaaauaaaaag

SEQ ID NO: 1308642 - RNA, 21 nt, Human
ugucucaaaguaaccugcagc

SEQ ID NO: 1308643 - RNA, 20 nt, Human
uucuuuuuuuuuuuuuuugu

SEQ ID NO: 1308644 - RNA, 24 nt, Human
uucuuuuuuuuuuuuuuugugaaa

SEQ ID NO: 1308645 - RNA, 18 nt, Human
uugcaaacuguggcuaug

SEQ ID NO: 1308646 - RNA, 22 nt, Human
uuuuuuuuuuuuuuugugaaaa

SEQ ID NO: 1308647 - RNA, 22 nt, Human
aaaaaacccgauccuugaaggc

SEQ ID NO: 1308648 - RNA, 20 nt, Human
aaaacccgauccuugaaggc

SEQ ID NO: 1308649 - RNA, 25 nt, Human
aagugaucuucccaccucggccucc

SEQ ID NO: 1308650 - RNA, 22 nt, Human
agccccugcggccccaggucag

SEQ ID NO: 1308651 - RNA, 23 nt, Human
agcuccugcgccccucucugcug

SEQ ID NO: 1308652 - RNA, 20 nt, Human
agggccggccuggacagagc

SEQ ID NO: 1308653 - RNA, 18 nt, Human
aggugccucugagggcac

SEQ ID NO: 1308654 - RNA, 23 nt, Human
aguacaggccugacucugagggu

SEQ ID NO: 1308655 - RNA, 27 nt, Human
caagugaucuucccaccucggccuccc

SEQ ID NO: 1308656 - RNA, 20 nt, Human
cagccccugcggccccaggu

SEQ ID NO: 1308657 - RNA, 22 nt, Human
ccucugagggcacugggacggc

SEQ ID NO: 1308658 - RNA, 24 nt, Human
ccugaccucaagugaucuucccac

SEQ ID NO: 1308659 - RNA, 20 nt, Human
ccugcgccccucucugcugu

SEQ ID NO: 1308660 - RNA, 24 nt, Human
cucaagugaucuucccaccucggc

SEQ ID NO: 1308661 - RNA, 23 nt, Human
cugggacggcgguggccugcacc

SEQ ID NO: 1308662 - RNA, 24 nt, Human
gaccucaagugaucuucccaccuc

SEQ ID NO: 1308663 - RNA, 23 nt, Human
gagggcacugggacggcgguggc

SEQ ID NO: 1308664 - RNA, 19 nt, Human
gcggcagcuccugcgcccc

SEQ ID NO: 1308665 - RNA, 21 nt, Human
gcugcaaccccucauuuucuu

SEQ ID NO: 1308666 - RNA, 19 nt, Human
ggcagcuccugcgccccuc

SEQ ID NO: 1308667 - RNA, 22 nt, Human
gggcacugggacggcgguggcc

SEQ ID NO: 1308668 - RNA, 23 nt, Human
gggcacugggacggcgguggccu

SEQ ID NO: 1308669 - RNA, 20 nt, Human
gggggcucuuggguccuggg

SEQ ID NO: 1308670 - RNA, 18 nt, Human
gggugcagaugaauuggg

SEQ ID NO: 1308671 - RNA, 20 nt, Human
ggucucaaacuccugaccuc

SEQ ID NO: 1308672 - RNA, 24 nt, Human
gugaucuucccaccucggccuccc

SEQ ID NO: 1308673 - RNA, 19 nt, Human
gugcugcccugguguucgg

SEQ ID NO: 1308674 - RNA, 23 nt, Human
guggccugcaccugcccagccca

SEQ ID NO: 1308675 - RNA, 19 nt, Human
uacaggccugacucugagg

SEQ ID NO: 1308676 - RNA, 21 nt, Human
uaccggccuaggucagccuga

SEQ ID NO: 1308677 - RNA, 27 nt, Human
uccuuggggugcagaugaauuggggug

SEQ ID NO: 1308678 - RNA, 18 nt, Human
ugaccucaagugaucuuc

SEQ ID NO: 1308679 - RNA, 20 nt, Human
ugaccucaagugaucuuccc

SEQ ID NO: 1308680 - RNA, 21 nt, Human
ugaccucaagugaucuuccca

SEQ ID NO: 1308681 - RNA, 24 nt, Human
ugaccucaagugaucuucccaccu

SEQ ID NO: 1308682 - RNA, 21 nt, Human
ugacgaugauuaaaaaaaccc

SEQ ID NO: 1308683 - RNA, 18 nt, Human
ugauuaaaaaaacccgau

SEQ ID NO: 1308684 - RNA, 27 nt, Human
ugcugcccugguguucgguggucaacc

SEQ ID NO: 1308685 - RNA, 23 nt, Human
uggcagggaaccgagcccacagu

SEQ ID NO: 1308686 - RNA, 25 nt, Human
uggcagggaaccgagcccacagugg

SEQ ID NO: 1308687 - RNA, 20 nt, Human
uggggugcagaugaauuggg

SEQ ID NO: 1308688 - RNA, 23 nt, Human
uggguccuggggcgcugcaaccc

SEQ ID NO: 1308689 - RNA, 20 nt, Human
ugguguucgggggcucuugg

SEQ ID NO: 1308690 - RNA, 21 nt, Human
uguccaggauggucucaaacu

SEQ ID NO: 1308691 - RNA, 23 nt, Human
uguccuggccgcggcagcuccug

SEQ ID NO: 1308692 - RNA, 24 nt, Human
uuccuuggggugcagaugaauugg

SEQ ID NO: 1308693 - RNA, 18 nt, Human
uuggguccuggggcgcug

SEQ ID NO: 1308694 - RNA, 21 nt, Human
aaaaagauaauuuacagauua

SEQ ID NO: 1308695 - RNA, 22 nt, Human
aaaacagacagguauuaggaug

SEQ ID NO: 1308696 - RNA, 24 nt, Human
aaaacagacagguauuaggaugua

SEQ ID NO: 1308697 - RNA, 23 nt, Human
aaacuccugggcuaaagcaaucc

SEQ ID NO: 1308698 - RNA, 19 nt, Human
aaagugcugggauuacagg

SEQ ID NO: 1308699 - RNA, 20 nt, Human
aaagugcugggauuacaggc

SEQ ID NO: 1308700 - RNA, 23 nt, Human
aaagugcugggauuacaggcgua

SEQ ID NO: 1308701 - RNA, 24 nt, Human
aaagugcugggauuauaggcauga

SEQ ID NO: 1308702 - RNA, 19 nt, Human
aaauagcugcugcacucca

SEQ ID NO: 1308703 - RNA, 24 nt, Human
aaauagcugcugcacuccagccug

SEQ ID NO: 1308704 - RNA, 25 nt, Human
aagcaauccucccaccuugaccucc

SEQ ID NO: 1308705 - RNA, 21 nt, Human
aagcagcugggacuacaaggu

SEQ ID NO: 1308706 - RNA, 25 nt, Human
aagcagcugggacuacaagguauac

SEQ ID NO: 1308707 - RNA, 25 nt, Human
aaggagaaauaggaaggaaccagac

SEQ ID NO: 1308708 - RNA, 24 nt, Human
aaggcacugccuguaucccagagc

SEQ ID NO: 1308709 - RNA, 19 nt, Human
aagugcugggauuacaggc

SEQ ID NO: 1308710 - RNA, 19 nt, Human
aagugcugggauuacaggc

SEQ ID NO: 1308711 - RNA, 26 nt, Human
aagugcugggauuacaggcguaagcc

SEQ ID NO: 1308712 - RNA, 19 nt, Human
aagugcugggauuauaggc

SEQ ID NO: 1308713 - RNA, 21 nt, Human
aagugcugggauuauaggcau

SEQ ID NO: 1308714 - RNA, 19 nt, Human
aaguggugggauuacagcu

SEQ ID NO: 1308715 - RNA, 24 nt, Human
aauagagcaagacucugucucaaa

SEQ ID NO: 1308716 - RNA, 20 nt, Human
acacugcacuccagccugag

SEQ ID NO: 1308717 - RNA, 21 nt, Human
acacugcacuccagccugagc

SEQ ID NO: 1308718 - RNA, 24 nt, Human
acaugcucccucuucuuuccauuu

SEQ ID NO: 1308719 - RNA, 24 nt, Human
accauguuggcccggcuggucucg

SEQ ID NO: 1308720 - RNA, 25 nt, Human
accccaagaauauaaaaauaaaaau

SEQ ID NO: 1308721 - RNA, 19 nt, Human
accccggcacugcugcccu

SEQ ID NO: 1308722 - RNA, 22 nt, Human
accuccaccucccaggcuccag

SEQ ID NO: 1308723 - RNA, 24 nt, Human
acucagagagacuccugaaaaaga

SEQ ID NO: 1308724 - RNA, 18 nt, Human
acugcacuccagccugag

SEQ ID NO: 1308725 - RNA, 24 nt, Human
acugcacuccagccugagcaauag

SEQ ID NO: 1308726 - RNA, 21 nt, Human
acugcagugagccgagaucgc

SEQ ID NO: 1308727 - RNA, 21 nt, Human
agaaauaggaaggaaccagac

SEQ ID NO: 1308728 - RNA, 18 nt, Human
agaauauaaaaauaaaaa

SEQ ID NO: 1308729 - RNA, 18 nt, Human
agagcaagacucugucuc

SEQ ID NO: 1308730 - RNA, 22 nt, Human
agagcaagacucugucucaaaa

SEQ ID NO: 1308731 - RNA, 24 nt, Human
agcacuuagggaggcugagguggg

SEQ ID NO: 1308732 - RNA, 22 nt, Human
agccacucgggaguugaaaaua

SEQ ID NO: 1308733 - RNA, 24 nt, Human
agccugagcaauagagcaagacuc

SEQ ID NO: 1308734 - RNA, 22 nt, Human
agccugggcaaaauagugagac

SEQ ID NO: 1308735 - RNA, 23 nt, Human
agccugggcaaaauagugagacc

SEQ ID NO: 1308736 - RNA, 23 nt, Human
agccugggcaacauaggauaacu

SEQ ID NO: 1308737 - RNA, 24 nt, Human
agcugcugcacuccagccugggca

SEQ ID NO: 1308738 - RNA, 22 nt, Human
agcugggacuacaagguauaca

SEQ ID NO: 1308739 - RNA, 23 nt, Human
aggaaaggagaaauaggaaggaa

SEQ ID NO: 1308740 - RNA, 23 nt, Human
aggacuacaggagugagccacca

SEQ ID NO: 1308741 - RNA, 21 nt, Human
aggaguuggagaccagccugg

SEQ ID NO: 1308742 - RNA, 21 nt, Human
aggcaugagccgccacaccca

SEQ ID NO: 1308743 - RNA, 24 nt, Human
aggcugagguggcaggaucgauug

SEQ ID NO: 1308744 - RNA, 24 nt, Human
aggcugaggugggaggauugcuug

SEQ ID NO: 1308745 - RNA, 24 nt, Human
aggucgagacugcagugagccgag

SEQ ID NO: 1308746 - RNA, 24 nt, Human
agugacucacaccuguaaucucag

SEQ ID NO: 1308747 - RNA, 20 nt, Human
agugcaguggcacaaucuug

SEQ ID NO: 1308748 - RNA, 24 nt, Human
agugcaguggcacaaucuuggcuc

SEQ ID NO: 1308749 - RNA, 18 nt, Human
agugcugggauuacaggc

SEQ ID NO: 1308750 - RNA, 21 nt, Human
aucauuucuuucuuuuuccug

SEQ ID NO: 1308751 - RNA, 24 nt, Human
aucgcaacacugcacuccagccug

SEQ ID NO: 1308752 - RNA, 23 nt, Human
augaggcaacauggaagcgugaa

SEQ ID NO: 1308753 - RNA, 23 nt, Human
auugcuugagcccaggaguugga

SEQ ID NO: 1308754 - RNA, 24 nt, Human
caaagugcugggauuacaggcgua

SEQ ID NO: 1308755 - RNA, 24 nt, Human
caaagugcugggauuauaggcaug

SEQ ID NO: 1308756 - RNA, 21 nt, Human
caacauaggauaacugguauc

SEQ ID NO: 1308757 - RNA, 18 nt, Human
caaccuccaccucccagg

SEQ ID NO: 1308758 - RNA, 20 nt, Human
caaccuccaccucccaggcu

SEQ ID NO: 1308759 - RNA, 23 nt, Human
caaccuccaccucccaggcucca

SEQ ID NO: 1308760 - RNA, 24 nt, Human
cacaccuguaaucucagcacuuag

SEQ ID NO: 1308761 - RNA, 22 nt, Human
caccacguccagcuaguuuuua

SEQ ID NO: 1308762 - RNA, 18 nt, Human
caccauguuggcccggcu

SEQ ID NO: 1308763 - RNA, 24 nt, Human
caccauguuggcccggcuggucuc

SEQ ID NO: 1308764 - RNA, 28 nt, Human
caccucccaggcuccagcaauccuccuu

SEQ ID NO: 1308765 - RNA, 23 nt, Human
caccuguaaucucagcacuuagg

SEQ ID NO: 1308766 - RNA, 23 nt, Human
caccuguaaucucagcacuuagg

SEQ ID NO: 1308767 - RNA, 21 nt, Human
cacgcaccuacagguaguccc

SEQ ID NO: 1308768 - RNA, 23 nt, Human
cacuccagccugagcaauagagc

SEQ ID NO: 1308769 - RNA, 20 nt, Human
cacuccagccugggcaaaau

SEQ ID NO: 1308770 - RNA, 19 nt, Human
cacugcacuccagccugag

SEQ ID NO: 1308771 - RNA, 20 nt, Human
cacugcacuccagccugagc

SEQ ID NO: 1308772 - RNA, 21 nt, Human
cacugcacuccagccugagca

SEQ ID NO: 1308773 - RNA, 22 nt, Human
cacugcacuccagccugagcaa

SEQ ID NO: 1308774 - RNA, 27 nt, Human
cacugcacuccagccugagcaauagag

SEQ ID NO: 1308775 - RNA, 22 nt, Human
cacugccuguaucccagagcac

SEQ ID NO: 1308776 - RNA, 24 nt, Human
cacugccuguaucccagagcaccc

SEQ ID NO: 1308777 - RNA, 20 nt, Human
cacugcugcccuugcagaga

SEQ ID NO: 1308778 - RNA, 22 nt, Human
cacuuauccuccugaguagcca

SEQ ID NO: 1308779 - RNA, 22 nt, Human
cagacaugcucccucuucuuuc

SEQ ID NO: 1308780 - RNA, 24 nt, Human
cagcacuuagggaggcugaggugg

SEQ ID NO: 1308781 - RNA, 18 nt, Human
cagcucccugagccagaa

SEQ ID NO: 1308782 - RNA, 24 nt, Human
cagggucuggcucuguugcccagg

SEQ ID NO: 1308783 - RNA, 18 nt, Human
cagguauuaggauguacu

SEQ ID NO: 1308784 - RNA, 21 nt, Human
cagguuggacuugaacuccug

SEQ ID NO: 1308785 - RNA, 22 nt, Human
cagugagccgagaucgcaacac

SEQ ID NO: 1308786 - RNA, 21 nt, Human
caguggccugcaugccccacu

SEQ ID NO: 1308787 - RNA, 19 nt, Human
cagugguaucucauuuuug

SEQ ID NO: 1308788 - RNA, 24 nt, Human
cauuauguuccccaggcuggucuc

SEQ ID NO: 1308789 - RNA, 21 nt, Human
cauugcaaucucuaccuccug

SEQ ID NO: 1308790 - RNA, 22 nt, Human
ccaaagugcugggauuacaggc

SEQ ID NO: 1308791 - RNA, 22 nt, Human
ccaaagugcugggauuacaggc

SEQ ID NO: 1308792 - RNA, 24 nt, Human
ccaaagugcugggauuacaggcgu

SEQ ID NO: 1308793 - RNA, 24 nt, Human
ccaaagugcugggauuauaggcau

SEQ ID NO: 1308794 - RNA, 27 nt, Human
ccaccucccaggcuccagcaauccuuu

SEQ ID NO: 1308795 - RNA, 21 nt, Human
ccacugugcccagcccugaau

SEQ ID NO: 1308796 - RNA, 26 nt, Human
ccagcaauccuccugccucauccucc

SEQ ID NO: 1308797 - RNA, 24 nt, Human
ccaggcuccagcaauccuccugcc

SEQ ID NO: 1308798 - RNA, 24 nt, Human
cccaagaauauaaaaauaaaaaua

SEQ ID NO: 1308799 - RNA, 22 nt, Human
cccagagcaccccggcacugcu

SEQ ID NO: 1308800 - RNA, 21 nt, Human
cccaggcuccagcaauccucc

SEQ ID NO: 1308801 - RNA, 22 nt, Human
ccgaaguggugggauuacagcu

SEQ ID NO: 1308802 - RNA, 24 nt, Human
ccgaaguggugggauuacagcuau

SEQ ID NO: 1308803 - RNA, 27 nt, Human
ccuacagguagucccagcuacuccaga

SEQ ID NO: 1308804 - RNA, 19 nt, Human
ccucauccucccaagcagc

SEQ ID NO: 1308805 - RNA, 19 nt, Human
ccucccaccuugaccuccc

SEQ ID NO: 1308806 - RNA, 22 nt, Human
ccucccaccuugaccucccgaa

SEQ ID NO: 1308807 - RNA, 20 nt, Human
ccugaccucaagugauucac

SEQ ID NO: 1308808 - RNA, 20 nt, Human
ccugaccucaagugauucac

SEQ ID NO: 1308809 - RNA, 22 nt, Human
ccugagcaauagagcaagacuc

SEQ ID NO: 1308810 - RNA, 20 nt, Human
ccuggaaucaagggauccgc

SEQ ID NO: 1308811 - RNA, 19 nt, Human
ccugucuagccacucggga

SEQ ID NO: 1308812 - RNA, 21 nt, Human
ccugucuagccacucgggagu

SEQ ID NO: 1308813 - RNA, 24 nt, Human
cgagaucgcaacacugcacuccag

SEQ ID NO: 1308814 - RNA, 22 nt, Human
cgugcugcccagguuggacuug

SEQ ID NO: 1308815 - RNA, 21 nt, Human
cucaagugauucacucgccuc

SEQ ID NO: 1308816 - RNA, 22 nt, Human
cucacaccuguaaucucagcac

SEQ ID NO: 1308817 - RNA, 24 nt, Human
cucacaccuguaaucucagcacuu

SEQ ID NO: 1308818 - RNA, 19 nt, Human
cucauugcaaucucuaccu

SEQ ID NO: 1308819 - RNA, 19 nt, Human
cuccagcaauccuccugcc

SEQ ID NO: 1308820 - RNA, 19 nt, Human
cuccugaccucaagugauu

SEQ ID NO: 1308821 - RNA, 24 nt, Human
cuccugaguagccaggacuacagg

SEQ ID NO: 1308822 - RNA, 21 nt, Human
cucugugcuaagucacccuuc

SEQ ID NO: 1308823 - RNA, 21 nt, Human
cugaaaaagauaauuuacaga

SEQ ID NO: 1308824 - RNA, 20 nt, Human
cugaagggacugauaaggua

SEQ ID NO: 1308825 - RNA, 18 nt, Human
cugcacuccagccugggc

SEQ ID NO: 1308826 - RNA, 19 nt, Human
cugcacuccagccugggca

SEQ ID NO: 1308827 - RNA, 20 nt, Human
cugcacuccagccugggcaa

SEQ ID NO: 1308828 - RNA, 21 nt, Human
cugcacuccagccugggcaaa

SEQ ID NO: 1308829 - RNA, 20 nt, Human
cugcagugagccgagaucgc

SEQ ID NO: 1308830 - RNA, 25 nt, Human
cugccucauccucccaagcagcugg

SEQ ID NO: 1308831 - RNA, 21 nt, Human
cugcugcacuccagccugggc

SEQ ID NO: 1308832 - RNA, 24 nt, Human
cugcugcccuugcagagaucagug

SEQ ID NO: 1308833 - RNA, 18 nt, Human
cuuggccggguguggugg

SEQ ID NO: 1308834 - RNA, 21 nt, Human
gaaccagacagacaugcuccc

SEQ ID NO: 1308835 - RNA, 18 nt, Human
gaaguggugggauuacag

SEQ ID NO: 1308836 - RNA, 24 nt, Human
gaccucaagugauucacucgccuc

SEQ ID NO: 1308837 - RNA, 18 nt, Human
gacuacaggagugagcca

SEQ ID NO: 1308838 - RNA, 24 nt, Human
gagacugcagugagccgagaucgg

SEQ ID NO: 1308839 - RNA, 25 nt, Human
gagcaccccggcacugcugcccuug

SEQ ID NO: 1308840 - RNA, 24 nt, Human
gagccgccacacccagccuuuuug

SEQ ID NO: 1308841 - RNA, 21 nt, Human
gaggugggaggauugcuugag

SEQ ID NO: 1308842 - RNA, 24 nt, Human
gaggugggaggauugcuugagccc

SEQ ID NO: 1308843 - RNA, 25 nt, Human
gaguagccaggacuacaggagugag

SEQ ID NO: 1308844 - RNA, 18 nt, Human
gauuaaguauuuacagug

SEQ ID NO: 1308845 - RNA, 19 nt, Human
gauuacagcuauaaaccac

SEQ ID NO: 1308846 - RNA, 21 nt, Human
gauuacagcuauaaaccacug

SEQ ID NO: 1308847 - RNA, 18 nt, Human
gauuacaggcguaagcca

SEQ ID NO: 1308848 - RNA, 21 nt, Human
gauuacaggcguaagccacca

SEQ ID NO: 1308849 - RNA, 21 nt, Human
gauuauaggcaugagccgcca

SEQ ID NO: 1308850 - RNA, 22 nt, Human
gauuauaggcaugagccgccac

SEQ ID NO: 1308851 - RNA, 24 nt, Human
gauugcuugagcccaggaguugga

SEQ ID NO: 1308852 - RNA, 18 nt, Human
gcaaccuccaccucccag

SEQ ID NO: 1308853 - RNA, 22 nt, Human
gcaaccuccaccucccaggcuc

SEQ ID NO: 1308854 - RNA, 24 nt, Human
gcacuccagccugagcaauagagc

SEQ ID NO: 1308855 - RNA, 20 nt, Human
gcccagguuguagugcagug

SEQ ID NO: 1308856 - RNA, 24 nt, Human
gccugggaggucgagacugcagug

SEQ ID NO: 1308857 - RNA, 21 nt, Human
gcucauugcaaucucuaccuc

SEQ ID NO: 1308858 - RNA, 25 nt, Human
gcugcacuccagccugggcaaaaua

SEQ ID NO: 1308859 - RNA, 24 nt, Human
gcugcugcacuccagccugggcaa

SEQ ID NO: 1308860 - RNA, 23 nt, Human
gcuggucucgaacuccugaccuc

SEQ ID NO: 1308861 - RNA, 18 nt, Human
ggaaaaccccccuugcug

SEQ ID NO: 1308862 - RNA, 22 nt, Human
ggaaccagacagacaugcuccc

SEQ ID NO: 1308863 - RNA, 22 nt, Human
ggacuacaggagugagccacca

SEQ ID NO: 1308864 - RNA, 24 nt, Human
ggacuacaggagugagccaccaug

SEQ ID NO: 1308865 - RNA, 22 nt, Human
ggaguuggagaccagccugggc

SEQ ID NO: 1308866 - RNA, 19 nt, Human
ggauuacaggcguaagcca

SEQ ID NO: 1308867 - RNA, 20 nt, Human
ggcaggaucgauugagccug

SEQ ID NO: 1308868 - RNA, 21 nt, Human
ggcugggcacagugacucaca

SEQ ID NO: 1308869 - RNA, 22 nt, Human
ggcugggcacagugacucacac

SEQ ID NO: 1308870 - RNA, 24 nt, Human
ggcuggucucgaacuccugaccuc

SEQ ID NO: 1308871 - RNA, 21 nt, Human
gggaggcugaggugggaggau

SEQ ID NO: 1308872 - RNA, 24 nt, Human
gggcacagugacucacaccuguaa

SEQ ID NO: 1308873 - RNA, 19 nt, Human
ggggguuucaccauguugg

SEQ ID NO: 1308874 - RNA, 24 nt, Human
ggggguuucaccauguuggcccgg

SEQ ID NO: 1308875 - RNA, 18 nt, Human
gggguuucaccauguugg

SEQ ID NO: 1308876 - RNA, 23 nt, Human
gggguuucaccauguuggcccgg

SEQ ID NO: 1308877 - RNA, 19 nt, Human
ggucucgaacuccugaccu

SEQ ID NO: 1308878 - RNA, 22 nt, Human
guagagacggggguuucaccau

SEQ ID NO: 1308879 - RNA, 23 nt, Human
guagagacggggguuucaccaug

SEQ ID NO: 1308880 - RNA, 19 nt, Human
guuucuuggccgggugugg

SEQ ID NO: 1308881 - RNA, 20 nt, Human
uaaaacuccaguacugauca

SEQ ID NO: 1308882 - RNA, 23 nt, Human
uaaaagauuaccugggccggggc

SEQ ID NO: 1308883 - RNA, 23 nt, Human
uaagauaauacuaaaggugaauu

SEQ ID NO: 1308884 - RNA, 23 nt, Human
uaagcaugauucucuuaggcacu

SEQ ID NO: 1308885 - RNA, 19 nt, Human
uaauaagauaauacuaaag

SEQ ID NO: 1308886 - RNA, 24 nt, Human
uaauuuuaguauuuuggguagaga

SEQ ID NO: 1308887 - RNA, 24 nt, Human
uacagcuauaaaccacugugccca

SEQ ID NO: 1308888 - RNA, 24 nt, Human
uacaggagugagccaccaugccca

SEQ ID NO: 1308889 - RNA, 24 nt, Human
uacaggcguaagccaccacgucca

SEQ ID NO: 1308890 - RNA, 20 nt, Human
uaccugggcgugguggcacg

SEQ ID NO: 1308891 - RNA, 19 nt, Human
uacuccagaggcugaggug

SEQ ID NO: 1308892 - RNA, 21 nt, Human
uagagacggggguuucaccau

SEQ ID NO: 1308893 - RNA, 22 nt, Human
uagagacggggguuucaccaug

SEQ ID NO: 1308894 - RNA, 21 nt, Human
uaggaaggaaccagacagaca

SEQ ID NO: 1308895 - RNA, 20 nt, Human
uaggacagcucccugagcca

SEQ ID NO: 1308896 - RNA, 20 nt, Human
uaucccagagcaccccggca

SEQ ID NO: 1308897 - RNA, 23 nt, Human
uauguuccccaggcuggucucaa

SEQ ID NO: 1308898 - RNA, 24 nt, Human
uauguuccccaggcuggucucaaa

SEQ ID NO: 1308899 - RNA, 20 nt, Human
uauuaguaucuucaacaacc

SEQ ID NO: 1308900 - RNA, 19 nt, Human
ucauugcaaucucuaccuc

SEQ ID NO: 1308901 - RNA, 22 nt, Human
ucauugcaaucucuaccuccug

SEQ ID NO: 1308902 - RNA, 25 nt, Human
ucauugcaaucucuaccuccugagc

SEQ ID NO: 1308903 - RNA, 24 nt, Human
ucccaaagugcugggauuacaggc

SEQ ID NO: 1308904 - RNA, 24 nt, Human
ucccaaagugcugggauuauaggc

SEQ ID NO: 1308905 - RNA, 21 nt, Human
ucccaggcuccagcaauccuc

SEQ ID NO: 1308906 - RNA, 25 nt, Human
uccccaggcuggucucaaacuccug

SEQ ID NO: 1308907 - RNA, 22 nt, Human
ucccgaaguggugggauuacag

SEQ ID NO: 1308908 - RNA, 18 nt, Human
ucccugagccagaagacu

SEQ ID NO: 1308909 - RNA, 18 nt, Human
ucccuguggggugaaacu

SEQ ID NO: 1308910 - RNA, 24 nt, Human
uccuccugccucauccucccaagc

SEQ ID NO: 1308911 - RNA, 20 nt, Human
ucgcaacacugcacuccagc

SEQ ID NO: 1308912 - RNA, 24 nt, Human
ucgccucggacucccaaagugcug

SEQ ID NO: 1308913 - RNA, 19 nt, Human
ucggacucccaaagugcug

SEQ ID NO: 1308914 - RNA, 21 nt, Human
ucucaaacuccugggcuaaag

SEQ ID NO: 1308915 - RNA, 24 nt, Human
ucucauuauguuccccaggcuggu

SEQ ID NO: 1308916 - RNA, 21 nt, Human
ucucgaacuccugaccucaag

SEQ ID NO: 1308917 - RNA, 20 nt, Human
ucucggccucccaaagugcu

SEQ ID NO: 1308918 - RNA, 19 nt, Human
ucuggcucuguugcccagg

SEQ ID NO: 1308919 - RNA, 24 nt, Human
ucuggcucuguugcccagguugua

SEQ ID NO: 1308920 - RNA, 21 nt, Human
ucuucgugcugcccagguugg

SEQ ID NO: 1308921 - RNA, 22 nt, Human
ucuucgugcugcccagguugga

SEQ ID NO: 1308922 - RNA, 20 nt, Human
ugaccucaagugauucacuc

SEQ ID NO: 1308923 - RNA, 24 nt, Human
ugaccucaagugauucacucgccu

SEQ ID NO: 1308924 - RNA, 22 nt, Human
ugacucacaccuguaaucucag

SEQ ID NO: 1308925 - RNA, 24 nt, Human
ugacucacaccuguaaucucagca

SEQ ID NO: 1308926 - RNA, 22 nt, Human
ugagacagggucuggcucuguu

SEQ ID NO: 1308927 - RNA, 22 nt, Human
ugagaccccaagaauauaaaaa

SEQ ID NO: 1308928 - RNA, 23 nt, Human
ugagcccaggaguuggagaccag

SEQ ID NO: 1308929 - RNA, 18 nt, Human
ugagccugggaggucgag

SEQ ID NO: 1308930 - RNA, 24 nt, Human
ugagccugggaggucgagacugca

SEQ ID NO: 1308931 - RNA, 18 nt, Human
ugaggaaaggagaaauag

SEQ ID NO: 1308932 - RNA, 24 nt, Human
ugagguggcaggaucgauugagcc

SEQ ID NO: 1308933 - RNA, 20 nt, Human
ugaggugggaggauugcuug

SEQ ID NO: 1308934 - RNA, 22 nt, Human
ugaggugggaggauugcuugag

SEQ ID NO: 1308935 - RNA, 23 nt, Human
ugaggugggaggauugcuugagc

SEQ ID NO: 1308936 - RNA, 24 nt, Human
ugaggugggaggauugcuugagcc

SEQ ID NO: 1308937 - RNA, 24 nt, Human
ugaguagccaggacuacaggagug

SEQ ID NO: 1308938 - RNA, 20 nt, Human
ugcaaccuccaccucccagg

SEQ ID NO: 1308939 - RNA, 22 nt, Human
ugcagagaucaguggccugcau

SEQ ID NO: 1308940 - RNA, 24 nt, Human
ugcccagguuggacuugaacuccu

SEQ ID NO: 1308941 - RNA, 24 nt, Human
ugccccacuuguugaaccucucug

SEQ ID NO: 1308942 - RNA, 22 nt, Human
ugcccuugcagagaucaguggc

SEQ ID NO: 1308943 - RNA, 24 nt, Human
ugccucauccucccaagcagcugg

SEQ ID NO: 1308944 - RNA, 28 nt, Human
ugccucauccucccaagcagcugggacu

SEQ ID NO: 1308945 - RNA, 20 nt, Human
ugcugcacuccagccugggc

SEQ ID NO: 1308946 - RNA, 24 nt, Human
ugcugggauuacaggcguaagcca

SEQ ID NO: 1308947 - RNA, 24 nt, Human
uggcacaaucuuggcucauugcaa

SEQ ID NO: 1308948 - RNA, 26 nt, Human
uggcacgcaccuacagguagucccag

SEQ ID NO: 1308949 - RNA, 24 nt, Human
uggcccggcuggucucgaacuccu

SEQ ID NO: 1308950 - RNA, 24 nt, Human
ugggaggucgagacugcagugagc

SEQ ID NO: 1308951 - RNA, 22 nt, Human
ugggauuacagcuauaaaccac

SEQ ID NO: 1308952 - RNA, 24 nt, Human
ugggauuacagcuauaaaccacug

SEQ ID NO: 1308953 - RNA, 18 nt, Human
ugggauuacaggcguaag

SEQ ID NO: 1308954 - RNA, 19 nt, Human
ugggauuacaggcguaagc

SEQ ID NO: 1308955 - RNA, 22 nt, Human
ugggauuacaggcguaagccac

SEQ ID NO: 1308956 - RNA, 24 nt, Human
ugggauuacaggcguaagccacca

SEQ ID NO: 1308957 - RNA, 18 nt, Human
ugggauuauaggcaugag

SEQ ID NO: 1308958 - RNA, 19 nt, Human
ugggauuauaggcaugagc

SEQ ID NO: 1308959 - RNA, 21 nt, Human
ugggauuauaggcaugagccg

SEQ ID NO: 1308960 - RNA, 22 nt, Human
ugggauuauaggcaugagccgc

SEQ ID NO: 1308961 - RNA, 23 nt, Human
ugggauuauaggcaugagccgcc

SEQ ID NO: 1308962 - RNA, 24 nt, Human
ugggauuauaggcaugagccgcca

SEQ ID NO: 1308963 - RNA, 22 nt, Human
ugggcaaaauagugagacccca

SEQ ID NO: 1308964 - RNA, 25 nt, Human
uguagagacggggguuucaccaugu

SEQ ID NO: 1308965 - RNA, 24 nt, Human
uguagugcaguggcacaaucuugg

SEQ ID NO: 1308966 - RNA, 24 nt, Human
uuaagccauccuuccacuuauccu

SEQ ID NO: 1308967 - RNA, 24 nt, Human
uuaauuaaauaaaauaaaacucca

SEQ ID NO: 1308968 - RNA, 18 nt, Human
uuaccugggcgugguggc

SEQ ID NO: 1308969 - RNA, 20 nt, Human
uuagcuaacacagugguuaa

SEQ ID NO: 1308970 - RNA, 20 nt, Human
uuagggaggcugagguggga

SEQ ID NO: 1308971 - RNA, 23 nt, Human
uucaccuucucaacugucuucaa

SEQ ID NO: 1308972 - RNA, 23 nt, Human
uucagccugcaaauagcugcugc

SEQ ID NO: 1308973 - RNA, 21 nt, Human
uuccugaagggcuggaugagg

SEQ ID NO: 1308974 - RNA, 22 nt, Human
uugagacagggucuggcucugu

SEQ ID NO: 1308975 - RNA, 25 nt, Human
uugagacagggucuggcucuguugc

SEQ ID NO: 1308976 - RNA, 18 nt, Human
uugcaaccuccaccuccc

SEQ ID NO: 1308977 - RNA, 23 nt, Human
uugcaaccuccaccucccaggcu

SEQ ID NO: 1308978 - RNA, 21 nt, Human
uugcuugagcccaggaguugg

SEQ ID NO: 1308979 - RNA, 25 nt, Human
uuguagagacggggguuucaccaug

SEQ ID NO: 1308980 - RNA, 28 nt, Human
uuguugaaccucucugugcuuggacccc

SEQ ID NO: 1308981 - RNA, 21 nt, Human
uuucaccauguuggcccggcu

SEQ ID NO: 1308982 - RNA, 24 nt, Human
uuucuucgugcugcccagguugga

SEQ ID NO: 1308983 - RNA, 19 nt, Human
uuucuuuuuuuacagaugg

SEQ ID NO: 1308984 - RNA, 24 nt, Human
uuugcaaccuccaccucccaggcu

SEQ ID NO: 1308985 - RNA, 25 nt, Human
uuuguagagacggggguuucaccau

SEQ ID NO: 1308986 - RNA, 24 nt, Human
uuuguucaccuucucaacugucuu

SEQ ID NO: 1308987 - RNA, 26 nt, Human
uuuucuuuuuuuacagaugggucuca

SEQ ID NO: 1308988 - RNA, 24 nt, Human
uuuuugcaaccuccaccucccagg

SEQ ID NO: 1308989 - RNA, 25 nt, Human
uuuuuuguagagacggggguuucac

SEQ ID NO: 1308990 - RNA, 23 nt, Human
uuuuuuuuugagacagggucugg

SEQ ID NO: 1308991 - RNA, 23 nt, Human
uuuuuuuuuuuugagacaggguc

SEQ ID NO: 1308992 - RNA, 25 nt, Human
uuuuuuuuuuuuuuuugagacaggg

SEQ ID NO: 1308993 - RNA, 31 nt, Human
uuuuuuuuuuuuuuuugagacagggucuggg

SEQ ID NO: 1308994 - RNA, 23 nt, Human
caccaaugguacccccaaauuca

SEQ ID NO: 1308995 - RNA, 25 nt, Human
ccaccaaugguacccccaaauucac

SEQ ID NO: 1308996 - RNA, 24 nt, Human
ugaaauaccaccaaugguaccccc

SEQ ID NO: 1308997 - RNA, 22 nt, Human
ugcagaaccugaaauaccacca

SEQ ID NO: 1308998 - RNA, 21 nt, Human
acacagcaggcccggcgggcc

SEQ ID NO: 1308999 - RNA, 20 nt, Human
acacggcucuugcuaacacc

SEQ ID NO: 1309000 - RNA, 23 nt, Human
acacggcucuugcuaacaccucu

SEQ ID NO: 1309001 - RNA, 23 nt, Human
agcacacggcucuugcuaacacc

SEQ ID NO: 1309002 - RNA, 20 nt, Human
agcuggggacagagagggug

SEQ ID NO: 1309003 - RNA, 27 nt, Human
aggaggcccaggccugggccguagccc

SEQ ID NO: 1309004 - RNA, 19 nt, Human
caagcuggcagacccugcc

SEQ ID NO: 1309005 - RNA, 25 nt, Human
cagcagcaggaggcccaggccuggg

SEQ ID NO: 1309006 - RNA, 20 nt, Human
ccacagaaacucugacacag

SEQ ID NO: 1309007 - RNA, 19 nt, Human
ccaggccccuggucggagg

SEQ ID NO: 1309008 - RNA, 19 nt, Human
ccccuggucggaggggugg

SEQ ID NO: 1309009 - RNA, 20 nt, Human
ccuggaguuagagcaguggc

SEQ ID NO: 1309010 - RNA, 24 nt, Human
cucaaagagagacuuccucaaaga

SEQ ID NO: 1309011 - RNA, 26 nt, Human
cucaaagggagguccucaaagagaga

SEQ ID NO: 1309012 - RNA, 23 nt, Human
cugacacagcaggcccggcgggc

SEQ ID NO: 1309013 - RNA, 21 nt, Human
gcaaugcccgcccuggccaga

SEQ ID NO: 1309014 - RNA, 21 nt, Human
gcagcaggaggcccaggccug

SEQ ID NO: 1309015 - RNA, 20 nt, Human
ggacagagagggugugggga

SEQ ID NO: 1309016 - RNA, 18 nt, Human
uaaaagaggcagcaaugc

SEQ ID NO: 1309017 - RNA, 20 nt, Human
uaaaagaggcagcaaugccc

SEQ ID NO: 1309018 - RNA, 24 nt, Human
ucaaagagagacuuccucaaagau

SEQ ID NO: 1309019 - RNA, 23 nt, Human
ucccccggccacagaaacucuga

SEQ ID NO: 1309020 - RNA, 19 nt, Human
ucccggggcugagucaccc

SEQ ID NO: 1309021 - RNA, 23 nt, Human
ugaccccucagccuuuucuuccc

SEQ ID NO: 1309022 - RNA, 23 nt, Human
uggaguuagagcaguggcccccg

SEQ ID NO: 1309023 - RNA, 19 nt, Human
ugggucagcagcaggaggc

SEQ ID NO: 1309024 - RNA, 22 nt, Human
gcacagguaggagcauguccuc

SEQ ID NO: 1309025 - RNA, 28 nt, Human
uaggagcauguccucugcguggccucug

SEQ ID NO: 1309026 - RNA, 19 nt, Human
uccaggaggcaccccaggc

SEQ ID NO: 1309027 - RNA, 21 nt, Human
ugcguggccucugcacuggaa

SEQ ID NO: 1309028 - RNA, 21 nt, Human
aaacaaguucuccgugcccuu

SEQ ID NO: 1309029 - RNA, 20 nt, Human
aaagccuuggagaucucaca

SEQ ID NO: 1309030 - RNA, 24 nt, Human
auguacugguguauaugugugugu

SEQ ID NO: 1309031 - RNA, 19 nt, Human
cagcagggcgggugugcuc

SEQ ID NO: 1309032 - RNA, 19 nt, Human
ccacucggggggagggcgg

SEQ ID NO: 1309033 - RNA, 18 nt, Human
ccuucuuuagacuaugcu

SEQ ID NO: 1309034 - RNA, 19 nt, Human
cgaggacgccacucggggg

SEQ ID NO: 1309035 - RNA, 23 nt, Human
cucucccaucccagcagugacug

SEQ ID NO: 1309036 - RNA, 24 nt, Human
gaaaacagcugugcacagcagggc

SEQ ID NO: 1309037 - RNA, 20 nt, Human
guguauguacugguguauau

SEQ ID NO: 1309038 - RNA, 22 nt, Human
uaagagacacacaagcaaacga

SEQ ID NO: 1309039 - RNA, 18 nt, Human
uagaaaacagcugugcac

SEQ ID NO: 1309040 - RNA, 22 nt, Human
ucucuauauuagaaaacagcug

SEQ ID NO: 1309041 - RNA, 22 nt, Human
uguaagagacacacaagcaaac

SEQ ID NO: 1309042 - RNA, 19 nt, Human
uguauguacugguguauau

SEQ ID NO: 1309043 - RNA, 22 nt, Human
uguguguaugucgguguaugua

SEQ ID NO: 1309044 - RNA, 21 nt, Human
uucuuuagacuaugcuaguug

SEQ ID NO: 1309045 - RNA, 19 nt, Human
aggcucucccaggccacau

SEQ ID NO: 1309046 - RNA, 21 nt, Human
cacuccuugcuuggcguccuc

SEQ ID NO: 1309047 - RNA, 21 nt, Human
cagaaucaccacuccuugcuu

SEQ ID NO: 1309048 - RNA, 23 nt, Human
cauucgagcccgucuacccccag

SEQ ID NO: 1309049 - RNA, 18 nt, Human
ccccuaggcucucccagg

SEQ ID NO: 1309050 - RNA, 21 nt, Human
ccccuggggcccccuaggcuc

SEQ ID NO: 1309051 - RNA, 20 nt, Human
cccuccaaagccagcacucc

SEQ ID NO: 1309052 - RNA, 20 nt, Human
cccuggggcccccuaggcuc

SEQ ID NO: 1309053 - RNA, 21 nt, Human
ccucuugccucccccucguaa

SEQ ID NO: 1309054 - RNA, 21 nt, Human
ccugcaggugcaggguggugg

SEQ ID NO: 1309055 - RNA, 23 nt, Human
cgagcccgucuacccccagcuga

SEQ ID NO: 1309056 - RNA, 18 nt, Human
gaaguuuaaaggcucaca

SEQ ID NO: 1309057 - RNA, 21 nt, Human
gcacuccugugccaaagcccc

SEQ ID NO: 1309058 - RNA, 22 nt, Human
gccucccccucguaauuaguuc

SEQ ID NO: 1309059 - RNA, 20 nt, Human
ggaggugugggcagaggacc

SEQ ID NO: 1309060 - RNA, 21 nt, Human
ucccaggccacauucgagccc

SEQ ID NO: 1309061 - RNA, 21 nt, Human
ucccuccaaagccagcacucc

SEQ ID NO: 1309062 - RNA, 24 nt, Human
ucccuccuagggcacugucugugu

SEQ ID NO: 1309063 - RNA, 22 nt, Human
ugaaggccacagucccuccaaa

SEQ ID NO: 1309064 - RNA, 18 nt, Human
ugccaaagccccugcagg

SEQ ID NO: 1309065 - RNA, 18 nt, Human
ugugccaaagccccugca

SEQ ID NO: 1309066 - RNA, 26 nt, Human
aggcuuuaaggaauuuuauuccugau

SEQ ID NO: 1309067 - RNA, 22 nt, Human
ccagggaagugcugaugaaaau

SEQ ID NO: 1309068 - RNA, 26 nt, Human
ugauucaagugcugcgaaaauguuga

SEQ ID NO: 1309069 - RNA, 20 nt, Human
agcccuuucacaguugaccu

SEQ ID NO: 1309070 - RNA, 20 nt, Human
ugagauuuuugaaaucugga

SEQ ID NO: 1309071 - RNA, 21 nt, Human
aaguagccucgaugugaaagu

SEQ ID NO: 1309072 - RNA, 18 nt, Human
aagucacagucgggacac

SEQ ID NO: 1309073 - RNA, 18 nt, Human
acaaagaaggaccccagg

SEQ ID NO: 1309074 - RNA, 19 nt, Human
acacugguuccugucacug

SEQ ID NO: 1309075 - RNA, 21 nt, Human
accagccccucuguccuccug

SEQ ID NO: 1309076 - RNA, 23 nt, Human
agagaagccacaccugagaccag

SEQ ID NO: 1309077 - RNA, 18 nt, Human
agcacaaagaaggacccc

SEQ ID NO: 1309078 - RNA, 22 nt, Human
agccacaccugagaccagcccc

SEQ ID NO: 1309079 - RNA, 20 nt, Human
caaagaaggaccccaggaca

SEQ ID NO: 1309080 - RNA, 21 nt, Human
cagccccucuguccuccugcc

SEQ ID NO: 1309081 - RNA, 21 nt, Human
cggugcagacgggagcacaga

SEQ ID NO: 1309082 - RNA, 18 nt, Human
cuccugccucugcaugca

SEQ ID NO: 1309083 - RNA, 24 nt, Human
gaaauccuaucacguccucaggcu

SEQ ID NO: 1309084 - RNA, 18 nt, Human
ggagcacagagaggguga

SEQ ID NO: 1309085 - RNA, 18 nt, Human
ggugcagcacaaagaagg

SEQ ID NO: 1309086 - RNA, 20 nt, Human
gucacagucgggacacuggu

SEQ ID NO: 1309087 - RNA, 21 nt, Human
guccuugugugucccugaggg

SEQ ID NO: 1309088 - RNA, 22 nt, Human
ucccugcaggaggcagaagggg

SEQ ID NO: 1309089 - RNA, 25 nt, Human
ucugcaugcagcgucccugcaggag

SEQ ID NO: 1309090 - RNA, 20 nt, Human
ugaaauccuaucacguccuc

SEQ ID NO: 1309091 - RNA, 23 nt, Human
ugagaccagccccucuguccucc

SEQ ID NO: 1309092 - RNA, 18 nt, Human
ugagagaagccacaccug

SEQ ID NO: 1309093 - RNA, 18 nt, Human
ugaggaggauggagaugg

SEQ ID NO: 1309094 - RNA, 19 nt, Human
uggggcgggaaugaaaucc

SEQ ID NO: 1309095 - RNA, 19 nt, Human
uggggugcacaggcagcuu

SEQ ID NO: 1309096 - RNA, 23 nt, Human
aaacaaaaaaaugcaugcucuaa

SEQ ID NO: 1309097 - RNA, 24 nt, Human
aaacaaaaaaaugcaugcucuaau

SEQ ID NO: 1309098 - RNA, 21 nt, Human
aagaaagaaaauaauggcaga

SEQ ID NO: 1309099 - RNA, 22 nt, Human
aagaaagcaaacaaaaaaaugc

SEQ ID NO: 1309100 - RNA, 20 nt, Human
acaguuugagaucguuuucc

SEQ ID NO: 1309101 - RNA, 23 nt, Human
agaaagcaaacaaaaaaaugcau

SEQ ID NO: 1309102 - RNA, 21 nt, Human
aucaagauucccacaguuuga

SEQ ID NO: 1309103 - RNA, 25 nt, Human
cacaguuugagaucguuuuccaucc

SEQ ID NO: 1309104 - RNA, 20 nt, Human
gaaagcaaacaaaaaaaugc

SEQ ID NO: 1309105 - RNA, 20 nt, Human
uaaagaaagaaaauaauggc

SEQ ID NO: 1309106 - RNA, 23 nt, Human
ugaaaagaaagcaaacaaaaaaa

SEQ ID NO: 1309107 - RNA, 19 nt, Human
uuugagaucguuuuccauc

SEQ ID NO: 1309108 - RNA, 20 nt, Human
gcugucacuuggucucugcc

SEQ ID NO: 1309109 - RNA, 24 nt, Human
uauagcccuaaaguuaaaagcaag

SEQ ID NO: 1309110 - RNA, 20 nt, Human
ucagugugagugcguuuggg

SEQ ID NO: 1309111 - RNA, 22 nt, Human
uggcugucacuuggucucugcc

SEQ ID NO: 1309112 - RNA, 19 nt, Human
uggggcagguccaacuggc

SEQ ID NO: 1309113 - RNA, 23 nt, Human
uggggcagguccaacuggcuguc

SEQ ID NO: 1309114 - RNA, 24 nt, Human
uucaaauuggucaguaaauuggaa

SEQ ID NO: 1309115 - RNA, 26 nt, Human
uuccagaaauaacugacgauugucuu

SEQ ID NO: 1309116 - RNA, 18 nt, Human
uuggggcagguccaacug

SEQ ID NO: 1309117 - RNA, 22 nt, Human
uuggggcagguccaacuggcug

SEQ ID NO: 1309118 - RNA, 22 nt, Human
aaacaggccaagaaauguccac

SEQ ID NO: 1309119 - RNA, 24 nt, Human
aaagugcugggauuacagguguga

SEQ ID NO: 1309120 - RNA, 24 nt, Human
aagaaaacccacaggaaaacaggc

SEQ ID NO: 1309121 - RNA, 19 nt, Human
aaguagcugggacuacaga

SEQ ID NO: 1309122 - RNA, 26 nt, Human
aaguagcugggacuacagaugccugc

SEQ ID NO: 1309123 - RNA, 18 nt, Human
aagugcugggauuacagg

SEQ ID NO: 1309124 - RNA, 19 nt, Human
aagugcugggauuacaggu

SEQ ID NO: 1309125 - RNA, 26 nt, Human
aagugcugggauuacaggugugaacc

SEQ ID NO: 1309126 - RNA, 18 nt, Human
acucugucacccaggcug

SEQ ID NO: 1309127 - RNA, 25 nt, Human
acucugucacccaggcuggagugua

SEQ ID NO: 1309128 - RNA, 23 nt, Human
acugugaguccucuuucccacuc

SEQ ID NO: 1309129 - RNA, 20 nt, Human
agaugccugccaucacgccc

SEQ ID NO: 1309130 - RNA, 25 nt, Human
aggugauccucccacuucagcuucc

SEQ ID NO: 1309131 - RNA, 19 nt, Human
aggugugaaccacugugcc

SEQ ID NO: 1309132 - RNA, 21 nt, Human
agugacgaggcagccaaauga

SEQ ID NO: 1309133 - RNA, 20 nt, Human
aguguaguggcacgaucaug

SEQ ID NO: 1309134 - RNA, 23 nt, Human
auaucaugcugaagaaaacccac

SEQ ID NO: 1309135 - RNA, 18 nt, Human
aucucacucugucaccca

SEQ ID NO: 1309136 - RNA, 24 nt, Human
auggucagcuggcuaacugugagu

SEQ ID NO: 1309137 - RNA, 21 nt, Human
caaagguaaauacccaaccca

SEQ ID NO: 1309138 - RNA, 24 nt, Human
caaagugcugggauuacaggugug

SEQ ID NO: 1309139 - RNA, 20 nt, Human
caagcuccugagcucagucu

SEQ ID NO: 1309140 - RNA, 24 nt, Human
caagcuccugagcucagucugccu

SEQ ID NO: 1309141 - RNA, 23 nt, Human
cacucugucacccaggcuggagu

SEQ ID NO: 1309142 - RNA, 24 nt, Human
cacucugucacccaggcuggagug

SEQ ID NO: 1309143 - RNA, 24 nt, Human
cacuucagcuucccaaguagcugg

SEQ ID NO: 1309144 - RNA, 26 nt, Human
caggccaagaaauguccacugcauga

SEQ ID NO: 1309145 - RNA, 19 nt, Human
caugucauguguguacaac

SEQ ID NO: 1309146 - RNA, 23 nt, Human
cauguugcccaggcuggucucaa

SEQ ID NO: 1309147 - RNA, 24 nt, Human
cauguugcccaggcuggucucaag

SEQ ID NO: 1309148 - RNA, 20 nt, Human
cauuugggguuccucugcuc

SEQ ID NO: 1309149 - RNA, 21 nt, Human
ccaaagugcugggauuacagg

SEQ ID NO: 1309150 - RNA, 21 nt, Human
ccaaagugcugggauuacagg

SEQ ID NO: 1309151 - RNA, 24 nt, Human
ccaaagugcugggauuacaggugu

SEQ ID NO: 1309152 - RNA, 21 nt, Human
ccacaggaaaacaggccaaga

SEQ ID NO: 1309153 - RNA, 24 nt, Human
ccaccuccagagcucaggugaucc

SEQ ID NO: 1309154 - RNA, 25 nt, Human
ccaggccaagggugaucuuuaaaca

SEQ ID NO: 1309155 - RNA, 19 nt, Human
ccauguugcccaggcuggu

SEQ ID NO: 1309156 - RNA, 22 nt, Human
cccaagaaucaccuuuaaaaca

SEQ ID NO: 1309157 - RNA, 23 nt, Human
cccaagaaucaccuuuaaaacaa

SEQ ID NO: 1309158 - RNA, 23 nt, Human
cccaaguagcugggacuacagau

SEQ ID NO: 1309159 - RNA, 23 nt, Human
ccucccacuucagcuucccaagu

SEQ ID NO: 1309160 - RNA, 21 nt, Human
cuaggccucccaaagugcugg

SEQ ID NO: 1309161 - RNA, 24 nt, Human
cucacucugucacccaggcuggag

SEQ ID NO: 1309162 - RNA, 24 nt, Human
cucaggugauccucccacuucagc

SEQ ID NO: 1309163 - RNA, 23 nt, Human
cugaacuuuaaucaucuuuagca

SEQ ID NO: 1309164 - RNA, 22 nt, Human
cugugaguccucuuucccacuc

SEQ ID NO: 1309165 - RNA, 20 nt, Human
gaagaaaacccacaggaaaa

SEQ ID NO: 1309166 - RNA, 20 nt, Human
gagacaggaucucacucugu

SEQ ID NO: 1309167 - RNA, 24 nt, Human
gagcucaggugauccucccacuuc

SEQ ID NO: 1309168 - RNA, 24 nt, Human
gagugaccgcugcuacaggucacu

SEQ ID NO: 1309169 - RNA, 19 nt, Human
gauuacaggugugaaccac

SEQ ID NO: 1309170 - RNA, 21 nt, Human
gauuacaggugugaaccacug

SEQ ID NO: 1309171 - RNA, 20 nt, Human
gccauguugcccaggcuggu

SEQ ID NO: 1309172 - RNA, 23 nt, Human
gggguuccucugcucagccgcug

SEQ ID NO: 1309173 - RNA, 25 nt, Human
gggugauuuuuuuuuuuuuuugaga

SEQ ID NO: 1309174 - RNA, 22 nt, Human
ggguuuuugccauguugcccag

SEQ ID NO: 1309175 - RNA, 23 nt, Human
ggguuuuugccauguugcccagg

SEQ ID NO: 1309176 - RNA, 21 nt, Human
ggucagcuggcuaacugugag

SEQ ID NO: 1309177 - RNA, 21 nt, Human
gguuccucugcucagccgcug

SEQ ID NO: 1309178 - RNA, 24 nt, Human
guggguuuuugccauguugcccag

SEQ ID NO: 1309179 - RNA, 23 nt, Human
uaauuuuuguacuuuuuguagag

SEQ ID NO: 1309180 - RNA, 24 nt, Human
uaauuuuuguacuuuuuguagagg

SEQ ID NO: 1309181 - RNA, 21 nt, Human
uacagaccaugaauuaacaaa

SEQ ID NO: 1309182 - RNA, 22 nt, Human
uagagguggguuuuugccaugu

SEQ ID NO: 1309183 - RNA, 21 nt, Human
uaguagcccauggucuauucu

SEQ ID NO: 1309184 - RNA, 24 nt, Human
uauuauuucgcacacucugaaaug

SEQ ID NO: 1309185 - RNA, 18 nt, Human
ucaagcuccugagcucag

SEQ ID NO: 1309186 - RNA, 24 nt, Human
ucacccaggcuggaguguaguggc

SEQ ID NO: 1309187 - RNA, 24 nt, Human
ucacucugucacccaggcuggagu

SEQ ID NO: 1309188 - RNA, 19 nt, Human
ucauggcagccuccaccuc

SEQ ID NO: 1309189 - RNA, 22 nt, Human
ucauggcagccuccaccuccag

SEQ ID NO: 1309190 - RNA, 19 nt, Human
uccacaauuaaauaagaga

SEQ ID NO: 1309191 - RNA, 23 nt, Human
ucccaaagugcugggauuacagg

SEQ ID NO: 1309192 - RNA, 18 nt, Human
ucccaaguagcugggacu

SEQ ID NO: 1309193 - RNA, 20 nt, Human
ucucaagcuccugagcucag

SEQ ID NO: 1309194 - RNA, 23 nt, Human
ucucacucugucacccaggcugg

SEQ ID NO: 1309195 - RNA, 24 nt, Human
ucucacucugucacccaggcugga

SEQ ID NO: 1309196 - RNA, 26 nt, Human
ucucacucugucacccaggcuggagu

SEQ ID NO: 1309197 - RNA, 27 nt, Human
ucucacucugucacccaggcuggagug

SEQ ID NO: 1309198 - RNA, 24 nt, Human
ucugucacccaggcuggaguguag

SEQ ID NO: 1309199 - RNA, 20 nt, Human
ugagacaggaucucacucug

SEQ ID NO: 1309200 - RNA, 22 nt, Human
ugagacaggaucucacucuguc

SEQ ID NO: 1309201 - RNA, 19 nt, Human
ugaguccucuuucccacuc

SEQ ID NO: 1309202 - RNA, 24 nt, Human
ugccauguugcccaggcuggucuc

SEQ ID NO: 1309203 - RNA, 24 nt, Human
ugcccaggcuggucucaagcuccu

SEQ ID NO: 1309204 - RNA, 28 nt, Human
ugcccaggcuggucucaagcuccugagc

SEQ ID NO: 1309205 - RNA, 23 nt, Human
ugcugggauuacaggugugaacc

SEQ ID NO: 1309206 - RNA, 24 nt, Human
uggaacuucagucauggucagcug

SEQ ID NO: 1309207 - RNA, 21 nt, Human
uggaguguaguggcacgauca

SEQ ID NO: 1309208 - RNA, 24 nt, Human
uggaguguaguggcacgaucaugg

SEQ ID NO: 1309209 - RNA, 18 nt, Human
uggcagccuccaccucca

SEQ ID NO: 1309210 - RNA, 22 nt, Human
uggcagccuccaccuccagagc

SEQ ID NO: 1309211 - RNA, 22 nt, Human
uggcucauggcagccuccaccu

SEQ ID NO: 1309212 - RNA, 21 nt, Human
ugggacuacagaugccugcca

SEQ ID NO: 1309213 - RNA, 24 nt, Human
ugggacuacagaugccugccauca

SEQ ID NO: 1309214 - RNA, 22 nt, Human
ugggauuacaggugugaaccac

SEQ ID NO: 1309215 - RNA, 22 nt, Human
ugggauuacaggugugaaccac

SEQ ID NO: 1309216 - RNA, 22 nt, Human
ugggauuacaggugugaaccac

SEQ ID NO: 1309217 - RNA, 24 nt, Human
ugggauuacaggugugaaccacug

SEQ ID NO: 1309218 - RNA, 30 nt, Human
ugggauuacaggugugaaccacugugccaa

SEQ ID NO: 1309219 - RNA, 19 nt, Human
uggguuuuugccauguugc

SEQ ID NO: 1309220 - RNA, 24 nt, Human
uggguuuuugccauguugcccagg

SEQ ID NO: 1309221 - RNA, 24 nt, Human
uguagagguggguuuuugccaugu

SEQ ID NO: 1309222 - RNA, 23 nt, Human
uguaguggcacgaucauggcuca

SEQ ID NO: 1309223 - RNA, 18 nt, Human
uguccaagucauuugggg

SEQ ID NO: 1309224 - RNA, 23 nt, Human
uuaacaaaugucuucaaacccaa

SEQ ID NO: 1309225 - RNA, 24 nt, Human
uucagcuucccaaguagcugggac

SEQ ID NO: 1309226 - RNA, 25 nt, Human
uuuguacuuuuuguagagguggguu

SEQ ID NO: 1309227 - RNA, 24 nt, Human
uuuguagagguggguuuuugccau

SEQ ID NO: 1309228 - RNA, 21 nt, Human
uuuucuagacaaagguaaaua

SEQ ID NO: 1309229 - RNA, 23 nt, Human
uuuugccauguugcccaggcugg

SEQ ID NO: 1309230 - RNA, 23 nt, Human
uuuuugccauguugcccaggcug

SEQ ID NO: 1309231 - RNA, 24 nt, Human
uuuuugccauguugcccaggcugg

SEQ ID NO: 1309232 - RNA, 22 nt, Human
uuuuuuuuuuugagacaggauc

SEQ ID NO: 1309233 - RNA, 20 nt, Human
uuuuuuuuuuugagacaggg

SEQ ID NO: 1309234 - RNA, 26 nt, Human
uuuuuuuuuuuugagacaggaucuca

SEQ ID NO: 1309235 - RNA, 19 nt, Human
aaaacaggguaagcacaug

SEQ ID NO: 1309236 - RNA, 18 nt, Human
acuggggcaggcaggcgg

SEQ ID NO: 1309237 - RNA, 21 nt, Human
agcaagcugucagcagggcag

SEQ ID NO: 1309238 - RNA, 22 nt, Human
aggcaggcggcacagcaagcug

SEQ ID NO: 1309239 - RNA, 22 nt, Human
augggcaaaacaggguaagcac

SEQ ID NO: 1309240 - RNA, 19 nt, Human
caggguaagcacaugggcc

SEQ ID NO: 1309241 - RNA, 20 nt, Human
ccgccacguccagggcccgc

SEQ ID NO: 1309242 - RNA, 25 nt, Human
ccgccacguccagggcccgcucccc

SEQ ID NO: 1309243 - RNA, 24 nt, Human
ggcauugacccgcaacacugagcu

SEQ ID NO: 1309244 - RNA, 18 nt, Human
gggcaggagaccggcagg

SEQ ID NO: 1309245 - RNA, 24 nt, Human
gugcaguuacgugcuagaugcucc

SEQ ID NO: 1309246 - RNA, 22 nt, Human
ucugccgccacguccagggccc

SEQ ID NO: 1309247 - RNA, 21 nt, Human
ucuucaugggcaaaacagggu

SEQ ID NO: 1309248 - RNA, 20 nt, Human
ugccgccacguccagggccc

SEQ ID NO: 1309249 - RNA, 19 nt, Human
uugguggugagggcgugca

SEQ ID NO: 1309250 - RNA, 20 nt, Human
uugguggugagggcgugcaa

SEQ ID NO: 1309251 - RNA, 19 nt, Human
acacacuucaggaucacgc

SEQ ID NO: 1309252 - RNA, 18 nt, Human
ugaaauaaaaguauacac

SEQ ID NO: 1309253 - RNA, 21 nt, Human
ugaauugaagaaaaaaggcca

SEQ ID NO: 1309254 - RNA, 20 nt, Human
ugagaaacgaacacacacac

SEQ ID NO: 1309255 - RNA, 21 nt, Human
uuugaauugaagaaaaaaggc

SEQ ID NO: 1309256 - RNA, 19 nt, Human
aaaaaacuuccaugcccuu

SEQ ID NO: 1309257 - RNA, 19 nt, Human
aaagagcuaauacacagac

SEQ ID NO: 1309258 - RNA, 20 nt, Human
aaagcaaaagaacgaaaugc

SEQ ID NO: 1309259 - RNA, 19 nt, Human
aagcaaaagaacgaaaugc

SEQ ID NO: 1309260 - RNA, 22 nt, Human
aagcagagaagacaggaggucc

SEQ ID NO: 1309261 - RNA, 19 nt, Human
acaaagcaaaagaacgaaa

SEQ ID NO: 1309262 - RNA, 26 nt, Human
acaaagcaaaagaacgaaaugcgcaa

SEQ ID NO: 1309263 - RNA, 20 nt, Human
acaaagucuaccaugcaccc

SEQ ID NO: 1309264 - RNA, 19 nt, Human
acacuauccccaugucccc

SEQ ID NO: 1309265 - RNA, 19 nt, Human
acucaugcugggggcaaag

SEQ ID NO: 1309266 - RNA, 26 nt, Human
acuuccaugcccuuccauuccccucc

SEQ ID NO: 1309267 - RNA, 18 nt, Human
agcagauauuaauguucu

SEQ ID NO: 1309268 - RNA, 22 nt, Human
agcuuccaacucacaacacugc

SEQ ID NO: 1309269 - RNA, 23 nt, Human
aggcgacgcccgucgcaacucca

SEQ ID NO: 1309270 - RNA, 19 nt, Human
augcacccagaagcagaga

SEQ ID NO: 1309271 - RNA, 24 nt, Human
caacuccaggccaccgagugcacc

SEQ ID NO: 1309272 - RNA, 23 nt, Human
caacuccgagagaacagaccaaa

SEQ ID NO: 1309273 - RNA, 19 nt, Human
ccacacuauccccaugucc

SEQ ID NO: 1309274 - RNA, 21 nt, Human
ccacaucauccuuguugccua

SEQ ID NO: 1309275 - RNA, 22 nt, Human
ccagcagauauuaauguucucc

SEQ ID NO: 1309276 - RNA, 21 nt, Human
cccaccaacuccgagagaagg

SEQ ID NO: 1309277 - RNA, 19 nt, Human
cccauggcugcagcgggga

SEQ ID NO: 1309278 - RNA, 18 nt, Human
ccccauggcugcagcggg

SEQ ID NO: 1309279 - RNA, 20 nt, Human
ccccgaggcuaggcgacgcc

SEQ ID NO: 1309280 - RNA, 23 nt, Human
cccuuccauuccccucccuccaa

SEQ ID NO: 1309281 - RNA, 24 nt, Human
ccggaacagcuccugcaucccaag

SEQ ID NO: 1309282 - RNA, 21 nt, Human
ccgggaccgcucuggcccaac

SEQ ID NO: 1309283 - RNA, 20 nt, Human
ccuacagcaauggucugccc

SEQ ID NO: 1309284 - RNA, 21 nt, Human
ccuacagcaauggucugccuu

SEQ ID NO: 1309285 - RNA, 22 nt, Human
ccucgaacuugaacugcucuuc

SEQ ID NO: 1309286 - RNA, 22 nt, Human
cgagagaacagaccaaacuaac

SEQ ID NO: 1309287 - RNA, 26 nt, Human
cgccgagggccccauggcugcagcgg

SEQ ID NO: 1309288 - RNA, 21 nt, Human
cgcgcgucuugcuguggcccc

SEQ ID NO: 1309289 - RNA, 22 nt, Human
cggaacagcuccugcaucccaa

SEQ ID NO: 1309290 - RNA, 22 nt, Human
cuuccauuccccucccuccaaa

SEQ ID NO: 1309291 - RNA, 23 nt, Human
gaagcagagaagacaggaggucc

SEQ ID NO: 1309292 - RNA, 19 nt, Human
gaccccgaggcuaggcgac

SEQ ID NO: 1309293 - RNA, 19 nt, Human
gcaaagaauggaaagagcu

SEQ ID NO: 1309294 - RNA, 19 nt, Human
gcccuuccauuccccuccc

SEQ ID NO: 1309295 - RNA, 18 nt, Human
gucgcaacuccaggccac

SEQ ID NO: 1309296 - RNA, 24 nt, Human
uacucgcacugcagaguccacgcg

SEQ ID NO: 1309297 - RNA, 25 nt, Human
uagggugcccaccaacuccgagaga

SEQ ID NO: 1309298 - RNA, 22 nt, Human
uauuaaaugcucaauucucaaa

SEQ ID NO: 1309299 - RNA, 19 nt, Human
ucacaguggcaaugcauuu

SEQ ID NO: 1309300 - RNA, 19 nt, Human
ucacugagcaccacggggc

SEQ ID NO: 1309301 - RNA, 22 nt, Human
uccccauguccccgauaauugu

SEQ ID NO: 1309302 - RNA, 19 nt, Human
uccgagagaacagaccaaa

SEQ ID NO: 1309303 - RNA, 21 nt, Human
uccgagagaacagaccaaacu

SEQ ID NO: 1309304 - RNA, 20 nt, Human
uccuuguugccuacagcaau

SEQ ID NO: 1309305 - RNA, 19 nt, Human
ucgcgcgucuugcuguggc

SEQ ID NO: 1309306 - RNA, 23 nt, Human
ucucaaaauuauauauauauuuu

SEQ ID NO: 1309307 - RNA, 22 nt, Human
ucugccggggccuccucucccu

SEQ ID NO: 1309308 - RNA, 27 nt, Human
ugaccagagacguuuacaauuuauacc

SEQ ID NO: 1309309 - RNA, 21 nt, Human
ugcacccagaagcagagaaga

SEQ ID NO: 1309310 - RNA, 19 nt, Human
ugcaucccaagcacguagc

SEQ ID NO: 1309311 - RNA, 24 nt, Human
ugccacaaagucuaccaugcaccc

SEQ ID NO: 1309312 - RNA, 18 nt, Human
ugcgcagccugaccagag

SEQ ID NO: 1309313 - RNA, 23 nt, Human
uggaaagagcuaauacacagaca

SEQ ID NO: 1309314 - RNA, 22 nt, Human
uggucugcccaucaggacucca

SEQ ID NO: 1309315 - RNA, 20 nt, Human
ugugcgccagaacucgcgcg

SEQ ID NO: 1309316 - RNA, 21 nt, Human
uguucuccccuuuaguguuca

SEQ ID NO: 1309317 - RNA, 22 nt, Human
uucuccagcaagaagacgcugg

SEQ ID NO: 1309318 - RNA, 19 nt, Human
uuggcgcugugcgccagaa

SEQ ID NO: 1309319 - RNA, 23 nt, Human
uuuguaguccucacaucccagau

SEQ ID NO: 1309320 - RNA, 19 nt, Human
aaaaucccuccaugcuaac

SEQ ID NO: 1309321 - RNA, 19 nt, Human
acuccacuacccagccaau

SEQ ID NO: 1309322 - RNA, 24 nt, Human
aucaucccucucuccuacaaauuc

SEQ ID NO: 1309323 - RNA, 23 nt, Human
caacacuccacuacccagccaau

SEQ ID NO: 1309324 - RNA, 22 nt, Human
cacuacccagccaaugguagcc

SEQ ID NO: 1309325 - RNA, 31 nt, Human
cacuccacuacccagccaaugguagcccuaa

SEQ ID NO: 1309326 - RNA, 19 nt, Human
ccaaugguagcccuaaaau

SEQ ID NO: 1309327 - RNA, 18 nt, Human
cgacuaacuccaggcugc

SEQ ID NO: 1309328 - RNA, 19 nt, Human
cgacuaacuccaggcugcc

SEQ ID NO: 1309329 - RNA, 24 nt, Human
cuaaaaucccuccaugcuaacugg

SEQ ID NO: 1309330 - RNA, 25 nt, Human
cuguauauacaccucucgcgauccc

SEQ ID NO: 1309331 - RNA, 21 nt, Human
gcccuaaaaucccuccaugcu

SEQ ID NO: 1309332 - RNA, 21 nt, Human
ggacgagacaaucacgccccu

SEQ ID NO: 1309333 - RNA, 21 nt, Human
uaaaaucccuccaugcuaacu

SEQ ID NO: 1309334 - RNA, 18 nt, Human
ucaaucaucccucucucc

SEQ ID NO: 1309335 - RNA, 19 nt, Human
ucacauacuucucccagca

SEQ ID NO: 1309336 - RNA, 23 nt, Human
ucuccuacaaauuccucugcuac

SEQ ID NO: 1309337 - RNA, 19 nt, Human
uuuuccaucucacauacuu

SEQ ID NO: 1309338 - RNA, 20 nt, Human
acgucgccgcgcgggcuggg

SEQ ID NO: 1309339 - RNA, 24 nt, Human
augucagggacgaagucuuuuccc

SEQ ID NO: 1309340 - RNA, 21 nt, Human
ccccgcuccgggccccgcccc

SEQ ID NO: 1309341 - RNA, 19 nt, Human
cccuggagcuggaaggccc

SEQ ID NO: 1309342 - RNA, 18 nt, Human
ccgcgcgggcugggccuc

SEQ ID NO: 1309343 - RNA, 19 nt, Human
ccgcuccgggccccgcccc

SEQ ID NO: 1309344 - RNA, 18 nt, Human
ccgggccccgccccugcc

SEQ ID NO: 1309345 - RNA, 19 nt, Human
ccugggucgggauuugggg

SEQ ID NO: 1309346 - RNA, 19 nt, Human
cgcgggcugggccuccaag

SEQ ID NO: 1309347 - RNA, 23 nt, Human
cgcgggcugggccuccaaggccc

SEQ ID NO: 1309348 - RNA, 26 nt, Human
cucggccccgccccgaagccgguucc

SEQ ID NO: 1309349 - RNA, 18 nt, Human
gccccugccugggucggg

SEQ ID NO: 1309350 - RNA, 22 nt, Human
gccgcgcgggcugggccuccaa

SEQ ID NO: 1309351 - RNA, 22 nt, Human
ggagcuggaaggcccagaagug

SEQ ID NO: 1309352 - RNA, 19 nt, Human
guggcuucaaaugcccucg

SEQ ID NO: 1309353 - RNA, 19 nt, Human
guggguggccgucagucgg

SEQ ID NO: 1309354 - RNA, 22 nt, Human
uccaaggccccgcuccgggccc

SEQ ID NO: 1309355 - RNA, 20 nt, Human
uccgggccccgccccugccu

SEQ ID NO: 1309356 - RNA, 20 nt, Human
uggguugcggccacgcaggc

SEQ ID NO: 1309357 - RNA, 20 nt, Human
uugcggugguucauuucuuc

SEQ ID NO: 1309358 - RNA, 20 nt, Human
aaacaaaaucucaagcugug

SEQ ID NO: 1309359 - RNA, 24 nt, Human
aaagugcugggauuauaggcauga

SEQ ID NO: 1309360 - RNA, 18 nt, Human
aacaacaacaggaggcuu

SEQ ID NO: 1309361 - RNA, 22 nt, Human
aagcagacagaucugggaauca

SEQ ID NO: 1309362 - RNA, 25 nt, Human
aagcgauucuccugccucagccucc

SEQ ID NO: 1309363 - RNA, 22 nt, Human
aaguagcugggauuauaagcau

SEQ ID NO: 1309364 - RNA, 24 nt, Human
aaguagcugggauuauaagcaugc

SEQ ID NO: 1309365 - RNA, 19 nt, Human
aagugcugggauuauaggc

SEQ ID NO: 1309366 - RNA, 21 nt, Human
aagugcugggauuauaggcau

SEQ ID NO: 1309367 - RNA, 19 nt, Human
acaggguuuccucauguug

SEQ ID NO: 1309368 - RNA, 21 nt, Human
acaguggcauaaucucggcuc

SEQ ID NO: 1309369 - RNA, 24 nt, Human
acccacgcuggaguacaguggcau

SEQ ID NO: 1309370 - RNA, 25 nt, Human
acccgccuuggccucccaaagugcu

SEQ ID NO: 1309371 - RNA, 24 nt, Human
acucugucacccacgcuggaguac

SEQ ID NO: 1309372 - RNA, 18 nt, Human
agacaggguuuccucaug

SEQ ID NO: 1309373 - RNA, 21 nt, Human
agcaagcagacagaucuggga

SEQ ID NO: 1309374 - RNA, 21 nt, Human
aggacccgcaguagccgggau

SEQ ID NO: 1309375 - RNA, 21 nt, Human
aggcaugagccaccaugccca

SEQ ID NO: 1309376 - RNA, 22 nt, Human
aggccaaagugcacuuuuaauc

SEQ ID NO: 1309377 - RNA, 24 nt, Human
aguacaguggcauaaucucggcuc

SEQ ID NO: 1309378 - RNA, 21 nt, Human
aguagccgggaugcgcucccc

SEQ ID NO: 1309379 - RNA, 24 nt, Human
auaagcaugcaccaacacacccag

SEQ ID NO: 1309380 - RNA, 24 nt, Human
auuuuuguauuuuuaguagagaca

SEQ ID NO: 1309381 - RNA, 24 nt, Human
caaagugcugggauuauaggcaug

SEQ ID NO: 1309382 - RNA, 24 nt, Human
caacacacccagcuaauuuuugua

SEQ ID NO: 1309383 - RNA, 22 nt, Human
caacaggaggcuuugacucagc

SEQ ID NO: 1309384 - RNA, 23 nt, Human
caaccuccaccuccuggguucaa

SEQ ID NO: 1309385 - RNA, 22 nt, Human
caagcgauucuccugccucagc

SEQ ID NO: 1309386 - RNA, 22 nt, Human
cacacagugaaacuaaacaaaa

SEQ ID NO: 1309387 - RNA, 21 nt, Human
cacagagauggaauggcaaca

SEQ ID NO: 1309388 - RNA, 22 nt, Human
cacagugaaacuaaacaaaauc

SEQ ID NO: 1309389 - RNA, 23 nt, Human
cacccgccuuggccucccaaagu

SEQ ID NO: 1309390 - RNA, 24 nt, Human
cacccgccuuggccucccaaagug

SEQ ID NO: 1309391 - RNA, 18 nt, Human
cacgcaaacuucuucuug

SEQ ID NO: 1309392 - RNA, 21 nt, Human
cacugcaaccuccaccuccug

SEQ ID NO: 1309393 - RNA, 23 nt, Human
cacugcaaccuccaccuccuggg

SEQ ID NO: 1309394 - RNA, 20 nt, Human
cagcugccguaaggcuccgc

SEQ ID NO: 1309395 - RNA, 20 nt, Human
caggcagcacccccucacca

SEQ ID NO: 1309396 - RNA, 19 nt, Human
caggguuuccucauguugg

SEQ ID NO: 1309397 - RNA, 24 nt, Human
ccaaagugcugggauuauaggcau

SEQ ID NO: 1309398 - RNA, 24 nt, Human
ccaccuccuggguucaagcgauuc

SEQ ID NO: 1309399 - RNA, 21 nt, Human
ccaggacccgcaguagccggg

SEQ ID NO: 1309400 - RNA, 19 nt, Human
cccaaguagcugggauuau

SEQ ID NO: 1309401 - RNA, 20 nt, Human
cccacgcuggaguacagugg

SEQ ID NO: 1309402 - RNA, 19 nt, Human
cccuaacaacaacaggagg

SEQ ID NO: 1309403 - RNA, 24 nt, Human
ccucauguuggccacgcuagucuu

SEQ ID NO: 1309404 - RNA, 19 nt, Human
ccuccaccuccuggguuca

SEQ ID NO: 1309405 - RNA, 24 nt, Human
ccuccuggguucaagcgauucucc

SEQ ID NO: 1309406 - RNA, 23 nt, Human
ccugccucagccucccaaguagc

SEQ ID NO: 1309407 - RNA, 24 nt, Human
ccugccucagccucccaaguagcu

SEQ ID NO: 1309408 - RNA, 23 nt, Human
ccuggguucaagcgauucuccug

SEQ ID NO: 1309409 - RNA, 21 nt, Human
cggaagacuuuuccugucucc

SEQ ID NO: 1309410 - RNA, 26 nt, Human
cuacucaugacucaaaacggaagacu

SEQ ID NO: 1309411 - RNA, 24 nt, Human
cucacucugucacccacgcuggag

SEQ ID NO: 1309412 - RNA, 24 nt, Human
cucacugcaaccuccaccuccugg

SEQ ID NO: 1309413 - RNA, 26 nt, Human
cucacugcaaccuccaccuccugggu

SEQ ID NO: 1309414 - RNA, 23 nt, Human
cucagccucccaaguagcuggga

SEQ ID NO: 1309415 - RNA, 21 nt, Human
cuccuggguucaagcgauucu

SEQ ID NO: 1309416 - RNA, 23 nt, Human
cugaauuucauaaaaauaugaag

SEQ ID NO: 1309417 - RNA, 23 nt, Human
cugcaaccuccaccuccuggguu

SEQ ID NO: 1309418 - RNA, 24 nt, Human
cugcaaccuccaccuccuggguuc

SEQ ID NO: 1309419 - RNA, 18 nt, Human
cuggagaacuucacgcaa

SEQ ID NO: 1309420 - RNA, 20 nt, Human
gagacaggguuuccucaugu

SEQ ID NO: 1309421 - RNA, 21 nt, Human
gauuauaggcaugagccacca

SEQ ID NO: 1309422 - RNA, 22 nt, Human
gauuauaggcaugagccaccau

SEQ ID NO: 1309423 - RNA, 21 nt, Human
gauucuccugccucagccucc

SEQ ID NO: 1309424 - RNA, 22 nt, Human
gccuuggccucccaaagugcug

SEQ ID NO: 1309425 - RNA, 24 nt, Human
gcgauucuccugccucagccuccc

SEQ ID NO: 1309426 - RNA, 23 nt, Human
gcuagucuugaacuccuagccuc

SEQ ID NO: 1309427 - RNA, 24 nt, Human
gcucuggggaagcaugcugagcuc

SEQ ID NO: 1309428 - RNA, 19 nt, Human
gcuggaguacaguggcaua

SEQ ID NO: 1309429 - RNA, 24 nt, Human
ggauuauaggcaugagccaccaug

SEQ ID NO: 1309430 - RNA, 21 nt, Human
gggaaucacugaggaugcucu

SEQ ID NO: 1309431 - RNA, 24 nt, Human
gugagccacccgccuuggccuccc

SEQ ID NO: 1309432 - RNA, 24 nt, Human
uaauuuuuguauuuuuaguagaga

SEQ ID NO: 1309433 - RNA, 22 nt, Human
uagagacaggguuuccucaugu

SEQ ID NO: 1309434 - RNA, 24 nt, Human
uagcagcuagcuacugguuucuua

SEQ ID NO: 1309435 - RNA, 24 nt, Human
uaguagagacaggguuuccucaug

SEQ ID NO: 1309436 - RNA, 19 nt, Human
ucaagcgauucuccugccu

SEQ ID NO: 1309437 - RNA, 23 nt, Human
ucacugcaaccuccaccuccugg

SEQ ID NO: 1309438 - RNA, 23 nt, Human
ucacugcaaccuccaccuccugg

SEQ ID NO: 1309439 - RNA, 24 nt, Human
ucacugcaaccuccaccuccuggg

SEQ ID NO: 1309440 - RNA, 27 nt, Human
ucacugcaaccuccaccuccuggguuc

SEQ ID NO: 1309441 - RNA, 18 nt, Human
ucagccucccaaguagcu

SEQ ID NO: 1309442 - RNA, 20 nt, Human
ucagccucccaaguagcugg

SEQ ID NO: 1309443 - RNA, 22 nt, Human
uccacagcaagcagacagaucu

SEQ ID NO: 1309444 - RNA, 24 nt, Human
ucccaaagugcugggauuauaggc

SEQ ID NO: 1309445 - RNA, 18 nt, Human
uccgcaggugaagaccca

SEQ ID NO: 1309446 - RNA, 22 nt, Human
uccgcaggugaagacccaggac

SEQ ID NO: 1309447 - RNA, 18 nt, Human
uccuagccucaagugagc

SEQ ID NO: 1309448 - RNA, 21 nt, Human
uccuggguucaagcgauucuc

SEQ ID NO: 1309449 - RNA, 24 nt, Human
uccuggguucaagcgauucuccug

SEQ ID NO: 1309450 - RNA, 19 nt, Human
uccuuagauccaugccagc

SEQ ID NO: 1309451 - RNA, 24 nt, Human
ucucacucugucacccacgcugga

SEQ ID NO: 1309452 - RNA, 26 nt, Human
ucuccugccucagccucccaaguagc

SEQ ID NO: 1309453 - RNA, 24 nt, Human
ucugucacccacgcuggaguacag

SEQ ID NO: 1309454 - RNA, 21 nt, Human
ucuugaacuccuagccucaag

SEQ ID NO: 1309455 - RNA, 18 nt, Human
ugaaaugagaaaagauca

SEQ ID NO: 1309456 - RNA, 18 nt, Human
ugaaguguuaacacagag

SEQ ID NO: 1309457 - RNA, 19 nt, Human
ugagaagagcccugaaaug

SEQ ID NO: 1309458 - RNA, 18 nt, Human
ugagacagagucucacuc

SEQ ID NO: 1309459 - RNA, 22 nt, Human
ugagacagagucucacucuguc

SEQ ID NO: 1309460 - RNA, 23 nt, Human
ugagugaaauauaaucuccugaa

SEQ ID NO: 1309461 - RNA, 20 nt, Human
ugccagccucucacaaauua

SEQ ID NO: 1309462 - RNA, 24 nt, Human
ugccucagccucccaaguagcugg

SEQ ID NO: 1309463 - RNA, 24 nt, Human
uggaguacaguggcauaaucucgg

SEQ ID NO: 1309464 - RNA, 22 nt, Human
uggcaacagacuuuaugaaagc

SEQ ID NO: 1309465 - RNA, 24 nt, Human
uggccacgcuagucuugaacuccu

SEQ ID NO: 1309466 - RNA, 21 nt, Human
ugggauuauaagcaugcacca

SEQ ID NO: 1309467 - RNA, 23 nt, Human
ugggauuauaagcaugcaccaac

SEQ ID NO: 1309468 - RNA, 18 nt, Human
ugggauuauaggcaugag

SEQ ID NO: 1309469 - RNA, 22 nt, Human
ugggauuauaggcaugagccac

SEQ ID NO: 1309470 - RNA, 23 nt, Human
ugggauuauaggcaugagccacc

SEQ ID NO: 1309471 - RNA, 24 nt, Human
ugggauuauaggcaugagccacca

SEQ ID NO: 1309472 - RNA, 25 nt, Human
ugggauuauaggcaugagccaccau

SEQ ID NO: 1309473 - RNA, 23 nt, Human
uggguucaagcgauucuccugcc

SEQ ID NO: 1309474 - RNA, 24 nt, Human
uggguucaagcgauucuccugccu

SEQ ID NO: 1309475 - RNA, 24 nt, Human
uuaguagagacaggguuuccucau

SEQ ID NO: 1309476 - RNA, 21 nt, Human
uucaagcgauucuccugccuc

SEQ ID NO: 1309477 - RNA, 23 nt, Human
uucaagcgauucuccugccucag

SEQ ID NO: 1309478 - RNA, 24 nt, Human
uucaagcgauucuccugccucagc

SEQ ID NO: 1309479 - RNA, 18 nt, Human
uuggccucccaaagugcu

SEQ ID NO: 1309480 - RNA, 23 nt, Human
uugguggcugugaaccucuccau

SEQ ID NO: 1309481 - RNA, 24 nt, Human
uuuaguagagacaggguuuccuca

SEQ ID NO: 1309482 - RNA, 21 nt, Human
uuuccucauguuggccacgcu

SEQ ID NO: 1309483 - RNA, 20 nt, Human
uuuccugucuccugauccuu

SEQ ID NO: 1309484 - RNA, 24 nt, Human
uuugacucagccacauuccccagg

SEQ ID NO: 1309485 - RNA, 20 nt, Human
uuuuuguauuuuuaguagag

SEQ ID NO: 1309486 - RNA, 23 nt, Human
agaagccgggggaggaggcgggg

SEQ ID NO: 1309487 - RNA, 21 nt, Human
agccgggggaggaggcggggg

SEQ ID NO: 1309488 - RNA, 20 nt, Human
cgguagaagccgggggagga

SEQ ID NO: 1309489 - RNA, 19 nt, Human
gcgccccgguagaagccgg

SEQ ID NO: 1309490 - RNA, 18 nt, Human
gggggaggaggcgggggc

SEQ ID NO: 1309491 - RNA, 19 nt, Human
aaacagaggcccaggaaac

SEQ ID NO: 1309492 - RNA, 25 nt, Human
aaauauccugcugagaaacugaccc

SEQ ID NO: 1309493 - RNA, 22 nt, Human
aaguccacagccacauccucaa

SEQ ID NO: 1309494 - RNA, 21 nt, Human
agagucucuccaacccaugau

SEQ ID NO: 1309495 - RNA, 22 nt, Human
aggggcaggcggggcacucacg

SEQ ID NO: 1309496 - RNA, 21 nt, Human
augaacuacagacacacuccu

SEQ ID NO: 1309497 - RNA, 22 nt, Human
auguggaaucuggcugagggcu

SEQ ID NO: 1309498 - RNA, 24 nt, Human
cacagccacauccucaaagacccu

SEQ ID NO: 1309499 - RNA, 19 nt, Human
cauuucuggugaacguggc

SEQ ID NO: 1309500 - RNA, 21 nt, Human
ccacugaguccaugucccggg

SEQ ID NO: 1309501 - RNA, 20 nt, Human
ccucaaagaccacugagucc

SEQ ID NO: 1309502 - RNA, 21 nt, Human
cggcuaggacagaggcguccc

SEQ ID NO: 1309503 - RNA, 24 nt, Human
cuaaaacagaggcccaggaaacau

SEQ ID NO: 1309504 - RNA, 23 nt, Human
cuccuugaguguccacuuucagg

SEQ ID NO: 1309505 - RNA, 25 nt, Human
cugagcagaauccagcaaagcccac

SEQ ID NO: 1309506 - RNA, 26 nt, Human
cugagcagaauccagcaaagcccacu

SEQ ID NO: 1309507 - RNA, 19 nt, Human
gaacuacagacacacuccu

SEQ ID NO: 1309508 - RNA, 25 nt, Human
gacugucccaaauuuuuccuaaaaa

SEQ ID NO: 1309509 - RNA, 20 nt, Human
gaguuucaucaucuacugag

SEQ ID NO: 1309510 - RNA, 19 nt, Human
gucuccagcaucacaucuc

SEQ ID NO: 1309511 - RNA, 19 nt, Human
uaaaacagaggcccaggaa

SEQ ID NO: 1309512 - RNA, 20 nt, Human
uaaaacagaggcccaggaaa

SEQ ID NO: 1309513 - RNA, 24 nt, Human
uaaaacagaggcccaggaaacauu

SEQ ID NO: 1309514 - RNA, 23 nt, Human
uaaauauccugcugagaaacuga

SEQ ID NO: 1309515 - RNA, 19 nt, Human
uacuguuuuacuccaggug

SEQ ID NO: 1309516 - RNA, 20 nt, Human
uagaggucccucugagcaga

SEQ ID NO: 1309517 - RNA, 21 nt, Human
ucacagagucucuccaaccca

SEQ ID NO: 1309518 - RNA, 22 nt, Human
uccaacccaugauuucuacuga

SEQ ID NO: 1309519 - RNA, 26 nt, Human
ucccucugagcagaauccagcaaagc

SEQ ID NO: 1309520 - RNA, 20 nt, Human
ucuacugagauuucuccccu

SEQ ID NO: 1309521 - RNA, 21 nt, Human
ucuccacauugaucauuacuu

SEQ ID NO: 1309522 - RNA, 21 nt, Human
ugaacuacagacacacuccuu

SEQ ID NO: 1309523 - RNA, 18 nt, Human
ugagcgcgacaggaaccg

SEQ ID NO: 1309524 - RNA, 19 nt, Human
ugauaugguuuguguccag

SEQ ID NO: 1309525 - RNA, 18 nt, Human
ugcccacauuccuggcac

SEQ ID NO: 1309526 - RNA, 21 nt, Human
ugcuaagacugucccaaauuu

SEQ ID NO: 1309527 - RNA, 19 nt, Human
ugcugagaaacugacccac

SEQ ID NO: 1309528 - RNA, 20 nt, Human
uggcugagggcuucuccaca

SEQ ID NO: 1309529 - RNA, 19 nt, Human
uguggaaucuggcugaggg

SEQ ID NO: 1309530 - RNA, 21 nt, Human
uuacuccagguggaauuuucu

SEQ ID NO: 1309531 - RNA, 23 nt, Human
uugcaaaugaacuacagacacac

SEQ ID NO: 1309532 - RNA, 19 nt, Human
cccccacagggugucucca

SEQ ID NO: 1309533 - RNA, 19 nt, Human
gagcgguagggaggcggcc

SEQ ID NO: 1309534 - RNA, 21 nt, Human
gggaggcggccaaaugcgacg

SEQ ID NO: 1309535 - RNA, 18 nt, Human
uggagcgguagggaggcg

SEQ ID NO: 1309536 - RNA, 18 nt, Human
ugucgcaguccgacuggc

SEQ ID NO: 1309537 - RNA, 22 nt, Human
ugucuccaucuucccuauuuau

SEQ ID NO: 1309538 - RNA, 20 nt, Human
aaaccaggcuguccggaaag

SEQ ID NO: 1309539 - RNA, 21 nt, Human
aacaauaagccgaagaaggga

SEQ ID NO: 1309540 - RNA, 19 nt, Human
aagaagggaaaccaggcug

SEQ ID NO: 1309541 - RNA, 21 nt, Human
aaggguggagggugagggugg

SEQ ID NO: 1309542 - RNA, 22 nt, Human
acaaacaagggcuggggacaca

SEQ ID NO: 1309543 - RNA, 20 nt, Human
aggagggcagggggccaaag

SEQ ID NO: 1309544 - RNA, 18 nt, Human
agggagaggagggcaggg

SEQ ID NO: 1309545 - RNA, 21 nt, Human
agggagaggagggcagggggc

SEQ ID NO: 1309546 - RNA, 22 nt, Human
agggagaggagggcagggggcc

SEQ ID NO: 1309547 - RNA, 24 nt, Human
caauaagccgaagaagggaaacca

SEQ ID NO: 1309548 - RNA, 24 nt, Human
cagaacucaaaaucugaaaucuga

SEQ ID NO: 1309549 - RNA, 22 nt, Human
ccaaaaaucagaacucaaaauc

SEQ ID NO: 1309550 - RNA, 23 nt, Human
ccuucugccuuuauuucccugau

SEQ ID NO: 1309551 - RNA, 22 nt, Human
gagcauccgaggucagcagcaa

SEQ ID NO: 1309552 - RNA, 20 nt, Human
gcacacacguccccaauccc

SEQ ID NO: 1309553 - RNA, 20 nt, Human
ggagaggagggcagggggcc

SEQ ID NO: 1309554 - RNA, 18 nt, Human
ggagggagaggagggcag

SEQ ID NO: 1309555 - RNA, 19 nt, Human
ggagggugaggguggaggg

SEQ ID NO: 1309556 - RNA, 24 nt, Human
gguccaucugggagggagaggagg

SEQ ID NO: 1309557 - RNA, 23 nt, Human
ucacugccuucugccuuuauucu

SEQ ID NO: 1309558 - RNA, 18 nt, Human
ucagcagcaaagggugga

SEQ ID NO: 1309559 - RNA, 24 nt, Human
ucccauagcacacacguccccaau

SEQ ID NO: 1309560 - RNA, 20 nt, Human
uccccaaucccagaaacuuu

SEQ ID NO: 1309561 - RNA, 24 nt, Human
uccccaaucccagaaacuuuacuc

SEQ ID NO: 1309562 - RNA, 21 nt, Human
ucccugaucucugucccuucc

SEQ ID NO: 1309563 - RNA, 21 nt, Human
uccuuguuuacaaacaagggc

SEQ ID NO: 1309564 - RNA, 18 nt, Human
ucugauggaacaauaagc

SEQ ID NO: 1309565 - RNA, 22 nt, Human
ugaccaaaaaucagaacucaaa

SEQ ID NO: 1309566 - RNA, 22 nt, Human
ugaggguggagggcaccccugg

SEQ ID NO: 1309567 - RNA, 19 nt, Human
ugaucucugucccuuccuu

SEQ ID NO: 1309568 - RNA, 19 nt, Human
uggaacaauaagccgaaga

SEQ ID NO: 1309569 - RNA, 23 nt, Human
ugggagggagaggagggcagggg

SEQ ID NO: 1309570 - RNA, 24 nt, Human
aaaucaucagugaagagagagaac

SEQ ID NO: 1309571 - RNA, 24 nt, Human
aacgggccaggcccugggggacuc

SEQ ID NO: 1309572 - RNA, 19 nt, Human
aagcaaagaggaccagcca

SEQ ID NO: 1309573 - RNA, 19 nt, Human
aagcaaagaggaccagcca

SEQ ID NO: 1309574 - RNA, 20 nt, Human
acuaagcaaagaggaccagc

SEQ ID NO: 1309575 - RNA, 25 nt, Human
acuucaaaggugucauuuuggaggg

SEQ ID NO: 1309576 - RNA, 19 nt, Human
agaggaaggagaaggaaag

SEQ ID NO: 1309577 - RNA, 21 nt, Human
agaguccguccgacuccgccc

SEQ ID NO: 1309578 - RNA, 21 nt, Human
aggcaggaaugaaucugcccg

SEQ ID NO: 1309579 - RNA, 22 nt, Human
aggcaggaaugaaucugcccga

SEQ ID NO: 1309580 - RNA, 24 nt, Human
agugaagagagagaacugcaagga

SEQ ID NO: 1309581 - RNA, 19 nt, Human
aucucuucaucuucuuucu

SEQ ID NO: 1309582 - RNA, 18 nt, Human
auuuuaaauugcauccaa

SEQ ID NO: 1309583 - RNA, 22 nt, Human
caaggagaagggagaguggggg

SEQ ID NO: 1309584 - RNA, 21 nt, Human
cagaaggacucugccuccccu

SEQ ID NO: 1309585 - RNA, 19 nt, Human
caggacccgcgggaauccu

SEQ ID NO: 1309586 - RNA, 23 nt, Human
caggcagcacaugagaggagcca

SEQ ID NO: 1309587 - RNA, 23 nt, Human
caucccccagcucgauacacaac

SEQ ID NO: 1309588 - RNA, 20 nt, Human
cauuuuggaggcugcucugg

SEQ ID NO: 1309589 - RNA, 26 nt, Human
ccagugcacgcuggcagccgcgggag

SEQ ID NO: 1309590 - RNA, 19 nt, Human
cccgagucccugcccagaa

SEQ ID NO: 1309591 - RNA, 24 nt, Human
cccgcaccggacgcgcucucaggg

SEQ ID NO: 1309592 - RNA, 18 nt, Human
cccugggccucagugccc

SEQ ID NO: 1309593 - RNA, 24 nt, Human
ccgacuccgcccgcaccggacgcg

SEQ ID NO: 1309594 - RNA, 23 nt, Human
ccgcgggaggcgaggcgggcgcg

SEQ ID NO: 1309595 - RNA, 18 nt, Human
ccgggcagacgcgccgag

SEQ ID NO: 1309596 - RNA, 22 nt, Human
ccugggccucagugcccgggag

SEQ ID NO: 1309597 - RNA, 22 nt, Human
cgacuccgcccgcaccggacgc

SEQ ID NO: 1309598 - RNA, 23 nt, Human
cgacuccgcccgcaccggacgcg

SEQ ID NO: 1309599 - RNA, 20 nt, Human
cguccgacuccgcccgcacc

SEQ ID NO: 1309600 - RNA, 24 nt, Human
cucagggcagaggaggucggcgga

SEQ ID NO: 1309601 - RNA, 20 nt, Human
cuggauggaauccaaggguc

SEQ ID NO: 1309602 - RNA, 21 nt, Human
cuucuccucccuuuacauccc

SEQ ID NO: 1309603 - RNA, 21 nt, Human
gagcagucgcgccggaaccga

SEQ ID NO: 1309604 - RNA, 23 nt, Human
gcaccggacgcgcucucagggcu

SEQ ID NO: 1309605 - RNA, 19 nt, Human
gcccgcaccggacgcgcuc

SEQ ID NO: 1309606 - RNA, 21 nt, Human
gccggaaccgagccgcgaauc

SEQ ID NO: 1309607 - RNA, 20 nt, Human
gccucagugcccgggagaag

SEQ ID NO: 1309608 - RNA, 22 nt, Human
gcgaauccgcgccgccucgcgc

SEQ ID NO: 1309609 - RNA, 21 nt, Human
gcgccggaaccgagccgcgaa

SEQ ID NO: 1309610 - RNA, 22 nt, Human
ggaaauguggggcaggcaggaa

SEQ ID NO: 1309611 - RNA, 20 nt, Human
guggggcaggcaggaaugaa

SEQ ID NO: 1309612 - RNA, 19 nt, Human
uaagcaaagaggaccagcc

SEQ ID NO: 1309613 - RNA, 19 nt, Human
uaagcaaagaggaccagcc

SEQ ID NO: 1309614 - RNA, 18 nt, Human
uagaggaaggagaaggaa

SEQ ID NO: 1309615 - RNA, 21 nt, Human
uccgacuccgcccgcaccgga

SEQ ID NO: 1309616 - RNA, 20 nt, Human
ucgauacacaacuucaaagg

SEQ ID NO: 1309617 - RNA, 18 nt, Human
ucuuucuucuccucccuu

SEQ ID NO: 1309618 - RNA, 22 nt, Human
ugagaggagccauauccagggc

SEQ ID NO: 1309619 - RNA, 23 nt, Human
ugagaggagccauauccagggcg

SEQ ID NO: 1309620 - RNA, 20 nt, Human
ugcccgcgcgaggcgugaag

SEQ ID NO: 1309621 - RNA, 22 nt, Human
uggcagccgcgggaggcgaggc

SEQ ID NO: 1309622 - RNA, 25 nt, Human
uggggcaggcaggaaugaaucugcc

SEQ ID NO: 1309623 - RNA, 22 nt, Human
aagaaucuuuauugaacuugcu

SEQ ID NO: 1309624 - RNA, 21 nt, Human
aagcccacaucucagaagcac

SEQ ID NO: 1309625 - RNA, 23 nt, Human
acuuccaagaaucuuuauugaac

SEQ ID NO: 1309626 - RNA, 22 nt, Human
caaccacaucagaggaguuuuc

SEQ ID NO: 1309627 - RNA, 19 nt, Human
cacuggcgacagggagggc

SEQ ID NO: 1309628 - RNA, 22 nt, Human
cagcagucaggaucacacguac

SEQ ID NO: 1309629 - RNA, 24 nt, Human
cgacagggagggccccagcuggca

SEQ ID NO: 1309630 - RNA, 24 nt, Human
uagcaacagcgugugcaagcccac

SEQ ID NO: 1309631 - RNA, 21 nt, Human
uggaaaaaaaaaagugcccac

SEQ ID NO: 1309632 - RNA, 23 nt, Human
uggaaaaaaaaaagugcccacug

SEQ ID NO: 1309633 - RNA, 25 nt, Human
uggcgacagggagggccccagcugg

SEQ ID NO: 1309634 - RNA, 21 nt, Human
ugggcugcuuaucugggaagc

SEQ ID NO: 1309635 - RNA, 18 nt, Human
ugucugaaggagccaggg

SEQ ID NO: 1309636 - RNA, 21 nt, Human
caggccccgggccccccuccc

SEQ ID NO: 1309637 - RNA, 24 nt, Human
caucagggccaauucaguucugcc

SEQ ID NO: 1309638 - RNA, 23 nt, Human
caugcagagacucccugccccca

SEQ ID NO: 1309639 - RNA, 24 nt, Human
cccaggccccgggccccccucccu

SEQ ID NO: 1309640 - RNA, 22 nt, Human
cccauauaucccagcugacgcc

SEQ ID NO: 1309641 - RNA, 21 nt, Human
cucccugcccccauauauccc

SEQ ID NO: 1309642 - RNA, 19 nt, Human
gcagagacucccugccccc

SEQ ID NO: 1309643 - RNA, 20 nt, Human
gccccgggccccccucccuu

SEQ ID NO: 1309644 - RNA, 20 nt, Human
gggaguuggcuggggcuggg

SEQ ID NO: 1309645 - RNA, 23 nt, Human
ucaaacaucggccaugcagagac

SEQ ID NO: 1309646 - RNA, 22 nt, Human
ucagugccgggaguuggcuggg

SEQ ID NO: 1309647 - RNA, 23 nt, Human
ucccagcugacgccccaggcccc

SEQ ID NO: 1309648 - RNA, 21 nt, Human
ucccuugcaggccaucagggc

SEQ ID NO: 1309649 - RNA, 19 nt, Human
uguaguguucagugccggg

SEQ ID NO: 1309650 - RNA, 22 nt, Human
aggccuuucccgcgcucucugc

SEQ ID NO: 1309651 - RNA, 22 nt, Human
agguagggcaggggcuucgggc

SEQ ID NO: 1309652 - RNA, 18 nt, Human
aguaacugaacaacucau

SEQ ID NO: 1309653 - RNA, 20 nt, Human
caggggcuucgggcuggugg

SEQ ID NO: 1309654 - RNA, 21 nt, Human
ccaaguaacugaacaacucau

SEQ ID NO: 1309655 - RNA, 18 nt, Human
ccgcgcgucuucuccucc

SEQ ID NO: 1309656 - RNA, 20 nt, Human
cuguccgcgcgucuucuccu

SEQ ID NO: 1309657 - RNA, 18 nt, Human
uccuccagguagggcagg

SEQ ID NO: 1309658 - RNA, 23 nt, Human
ucuccuccagguagggcaggggc

SEQ ID NO: 1309659 - RNA, 19 nt, Human
ugcgacgugggcaccgcca

SEQ ID NO: 1309660 - RNA, 18 nt, Human
ugggacaggacagcaucc

SEQ ID NO: 1309661 - RNA, 22 nt, Human
uguccgcgcgucuucuccucca

SEQ ID NO: 1309662 - RNA, 20 nt, Human
ugucuuuuuuguuauuguug

SEQ ID NO: 1309663 - RNA, 21 nt, Human
uuagcuguccgcgcgucuucu

SEQ ID NO: 1309664 - RNA, 26 nt, Human
uuuuguuauuguugccaaguaacuga

SEQ ID NO: 1309665 - RNA, 25 nt, Human
uuuuuuguuauuguugccaaguaac

SEQ ID NO: 1309666 - RNA, 20 nt, Human
aaacccagggcccgcggcaa

SEQ ID NO: 1309667 - RNA, 23 nt, Human
aacccagggcccgcggcaaaaaa

SEQ ID NO: 1309668 - RNA, 18 nt, Human
aagacaccagccacuuac

SEQ ID NO: 1309669 - RNA, 21 nt, Human
aagacaccagccacuuaccaa

SEQ ID NO: 1309670 - RNA, 24 nt, Human
aagagaaagccaggcugcuucaaa

SEQ ID NO: 1309671 - RNA, 24 nt, Human
aagcaaccaccagcccugggaccc

SEQ ID NO: 1309672 - RNA, 22 nt, Human
acagaugggcggacagacagac

SEQ ID NO: 1309673 - RNA, 20 nt, Human
accaagagaaagccaggcug

SEQ ID NO: 1309674 - RNA, 20 nt, Human
agacccaaagcaaccaccag

SEQ ID NO: 1309675 - RNA, 18 nt, Human
agagaaagccaggcugcu

SEQ ID NO: 1309676 - RNA, 18 nt, Human
aggcugcuucaaacccag

SEQ ID NO: 1309677 - RNA, 19 nt, Human
caaagcaaccaccagcccu

SEQ ID NO: 1309678 - RNA, 24 nt, Human
caaagcaaccaccagcccugggac

SEQ ID NO: 1309679 - RNA, 23 nt, Human
caaccaccagcccugggacccug

SEQ ID NO: 1309680 - RNA, 21 nt, Human
cacaggcuguugaggcaggag

SEQ ID NO: 1309681 - RNA, 22 nt, Human
caccacacaggcuguugaggca

SEQ ID NO: 1309682 - RNA, 21 nt, Human
cagccccacaccggcuuugcc

SEQ ID NO: 1309683 - RNA, 18 nt, Human
caggcuguugaggcagga

SEQ ID NO: 1309684 - RNA, 20 nt, Human
ccagggcccgcggcaaaaaa

SEQ ID NO: 1309685 - RNA, 21 nt, Human
cccagaaggagaggggaggcc

SEQ ID NO: 1309686 - RNA, 18 nt, Human
ccccagccccacaccggc

SEQ ID NO: 1309687 - RNA, 22 nt, Human
ccggccggggagucuggaagcc

SEQ ID NO: 1309688 - RNA, 20 nt, Human
ccugggacccugagacauga

SEQ ID NO: 1309689 - RNA, 25 nt, Human
cggcuuugccaccacacaggcuguu

SEQ ID NO: 1309690 - RNA, 21 nt, Human
cugcggcccagaaggagaggg

SEQ ID NO: 1309691 - RNA, 23 nt, Human
gacaaagaggacaguaagagaaa

SEQ ID NO: 1309692 - RNA, 22 nt, Human
gccggguccccuccuggagaac

SEQ ID NO: 1309693 - RNA, 26 nt, Human
gcggcccagaaggagaggggaggccg

SEQ ID NO: 1309694 - RNA, 20 nt, Human
ggacagauggacaaacaggu

SEQ ID NO: 1309695 - RNA, 18 nt, Human
ggagggacagaugggugg

SEQ ID NO: 1309696 - RNA, 19 nt, Human
ggcugagcucagauugcag

SEQ ID NO: 1309697 - RNA, 22 nt, Human
ggugggggcugaagacagacac

SEQ ID NO: 1309698 - RNA, 25 nt, Human
guagcuguagacccaaagcaaccac

SEQ ID NO: 1309699 - RNA, 24 nt, Human
uaagacaccagccacuuaccaagg

SEQ ID NO: 1309700 - RNA, 26 nt, Human
uaagagaaagauggucagauagacaa

SEQ ID NO: 1309701 - RNA, 26 nt, Human
uaccaagagaaagccaggcugcuuca

SEQ ID NO: 1309702 - RNA, 24 nt, Human
uagauagacucacagguaauugga

SEQ ID NO: 1309703 - RNA, 19 nt, Human
uagcuguagacccaaagca

SEQ ID NO: 1309704 - RNA, 22 nt, Human
uagcuguagacccaaagcaacc

SEQ ID NO: 1309705 - RNA, 21 nt, Human
ugaauggacagacggcuggca

SEQ ID NO: 1309706 - RNA, 19 nt, Human
uggcagcuguggcgagcug

SEQ ID NO: 1309707 - RNA, 20 nt, Human
uggcaucuaggccuucgccu

SEQ ID NO: 1309708 - RNA, 22 nt, Human
ugggacccugagacaugaccuc

SEQ ID NO: 1309709 - RNA, 23 nt, Human
ugggacccugagacaugaccucc

SEQ ID NO: 1309710 - RNA, 21 nt, Human
uguagacccaaagcaaccacc

SEQ ID NO: 1309711 - RNA, 23 nt, Human
aaacuucuuuauagucucugcuu

SEQ ID NO: 1309712 - RNA, 18 nt, Human
acuaaccgaaacaccauu

SEQ ID NO: 1309713 - RNA, 21 nt, Human
acuacgggcuacaggcaagga

SEQ ID NO: 1309714 - RNA, 26 nt, Human
agcagcuaugggcucauucaguucug

SEQ ID NO: 1309715 - RNA, 20 nt, Human
auugcacuuagaaccguuac

SEQ ID NO: 1309716 - RNA, 21 nt, Human
ccucagcaauaugcucggccu

SEQ ID NO: 1309717 - RNA, 18 nt, Human
cucauugcacuuagaacc

SEQ ID NO: 1309718 - RNA, 18 nt, Human
cuccugcuaugagcuagg

SEQ ID NO: 1309719 - RNA, 25 nt, Human
cucuucuuucucuucuucugguuuu

SEQ ID NO: 1309720 - RNA, 23 nt, Human
cuuucucuucuucugguuuuucu

SEQ ID NO: 1309721 - RNA, 18 nt, Human
uagaaccguuacuaaccg

SEQ ID NO: 1309722 - RNA, 24 nt, Human
uagucucugcuucagacaagauuu

SEQ ID NO: 1309723 - RNA, 22 nt, Human
ucauuauucuccucugaagccu

SEQ ID NO: 1309724 - RNA, 20 nt, Human
ucugguuuuucuucuggauu

SEQ ID NO: 1309725 - RNA, 23 nt, Human
ucuuucucuucuucugguuuuuc

SEQ ID NO: 1309726 - RNA, 27 nt, Human
ucuuucucuucuucugguuuuucuucc

SEQ ID NO: 1309727 - RNA, 18 nt, Human
ugacagcagggagaaacu

SEQ ID NO: 1309728 - RNA, 21 nt, Human
uggaaggaagcagcuaugggc

SEQ ID NO: 1309729 - RNA, 22 nt, Human
uuacuaaccgaaacaccauuug

SEQ ID NO: 1309730 - RNA, 19 nt, Human
uuccagaggcagcuggaag

SEQ ID NO: 1309731 - RNA, 20 nt, Human
uuccucagcaauaugcucgg

SEQ ID NO: 1309732 - RNA, 23 nt, Human
uugacagcagggagaaacuucuu

SEQ ID NO: 1309733 - RNA, 18 nt, Human
acagugagcucugucauu

SEQ ID NO: 1309734 - RNA, 23 nt, Human
agcuccagguugcuggacugaag

SEQ ID NO: 1309735 - RNA, 20 nt, Human
agcugugggggcugcagggg

SEQ ID NO: 1309736 - RNA, 22 nt, Human
aggugggcgguggggcugggcu

SEQ ID NO: 1309737 - RNA, 21 nt, Human
aguggaguugggaagggccgg

SEQ ID NO: 1309738 - RNA, 23 nt, Human
caggggcuguuugugugucaaag

SEQ ID NO: 1309739 - RNA, 24 nt, Human
cccaucagcuggcugucuuugccc

SEQ ID NO: 1309740 - RNA, 25 nt, Human
cccgugcaccugcuugauggggccg

SEQ ID NO: 1309741 - RNA, 19 nt, Human
cccugagcacagugagcuc

SEQ ID NO: 1309742 - RNA, 20 nt, Human
ccugggagcccgagaggagg

SEQ ID NO: 1309743 - RNA, 18 nt, Human
ccuggggucaguucugug

SEQ ID NO: 1309744 - RNA, 20 nt, Human
ccuggggucaguucugugga

SEQ ID NO: 1309745 - RNA, 20 nt, Human
cucugugcugacucaggcuc

SEQ ID NO: 1309746 - RNA, 20 nt, Human
cuggggucaguucuguggag

SEQ ID NO: 1309747 - RNA, 18 nt, Human
gagcccgagaggaggcag

SEQ ID NO: 1309748 - RNA, 21 nt, Human
gagcugugggggcugcagggg

SEQ ID NO: 1309749 - RNA, 23 nt, Human
gaggauccuggggucaguucugu

SEQ ID NO: 1309750 - RNA, 18 nt, Human
gauaggugggcggugggg

SEQ ID NO: 1309751 - RNA, 18 nt, Human
gcggagaccucugucuca

SEQ ID NO: 1309752 - RNA, 23 nt, Human
gcgguggggcugggcuuggcuuc

SEQ ID NO: 1309753 - RNA, 20 nt, Human
gcucugugcugacucaggcu

SEQ ID NO: 1309754 - RNA, 18 nt, Human
ggagaccucugucucagg

SEQ ID NO: 1309755 - RNA, 19 nt, Human
ggcugcaggggaggggagu

SEQ ID NO: 1309756 - RNA, 26 nt, Human
gggccggggugggaccugucagcuuc

SEQ ID NO: 1309757 - RNA, 18 nt, Human
ggggauaggugggcggug

SEQ ID NO: 1309758 - RNA, 20 nt, Human
ggggcugggcuuggcuucag

SEQ ID NO: 1309759 - RNA, 20 nt, Human
ggggugggaccugucagcuu

SEQ ID NO: 1309760 - RNA, 23 nt, Human
guggugucagaggaguggccggg

SEQ ID NO: 1309761 - RNA, 20 nt, Human
gugucagaggaguggccggg

SEQ ID NO: 1309762 - RNA, 20 nt, Human
ucccaucagcuggcugucuu

SEQ ID NO: 1309763 - RNA, 23 nt, Human
ucccaucagcuggcugucuuugc

SEQ ID NO: 1309764 - RNA, 20 nt, Human
ucugagcccggacuguugcc

SEQ ID NO: 1309765 - RNA, 18 nt, Human
ucugccuggcagaagugu

SEQ ID NO: 1309766 - RNA, 18 nt, Human
ucugugcugacucaggcu

SEQ ID NO: 1309767 - RNA, 20 nt, Human
ucuuccaggccuggcugccu

SEQ ID NO: 1309768 - RNA, 22 nt, Human
ucuuccaggccuggcugccugg

SEQ ID NO: 1309769 - RNA, 25 nt, Human
ugaagaggacgucaguacaugguuc

SEQ ID NO: 1309770 - RNA, 19 nt, Human
ugacucaggcucugccugg

SEQ ID NO: 1309771 - RNA, 22 nt, Human
ugcaggggaggggaguuguagg

SEQ ID NO: 1309772 - RNA, 19 nt, Human
ugccccagaacaguggucg

SEQ ID NO: 1309773 - RNA, 18 nt, Human
ugccugggacccuggcug

SEQ ID NO: 1309774 - RNA, 21 nt, Human
ugcggagaccucugucucagg

SEQ ID NO: 1309775 - RNA, 23 nt, Human
uggauuugcugcggagaccucug

SEQ ID NO: 1309776 - RNA, 18 nt, Human
uggccgggccugggagcc

SEQ ID NO: 1309777 - RNA, 22 nt, Human
ugggaagggccggggugggacc

SEQ ID NO: 1309778 - RNA, 19 nt, Human
ugggaccugucagcuucca

SEQ ID NO: 1309779 - RNA, 22 nt, Human
ugggagcccgagaggaggcagc

SEQ ID NO: 1309780 - RNA, 21 nt, Human
ugggggcugcaggggagggga

SEQ ID NO: 1309781 - RNA, 18 nt, Human
uggguggauuugcugcgg

SEQ ID NO: 1309782 - RNA, 18 nt, Human
ugucaaagcuccagguug

SEQ ID NO: 1309783 - RNA, 21 nt, Human
uucugagcccggacuguugcc

SEQ ID NO: 1309784 - RNA, 19 nt, Human
acuacaguuucuuagaauu

SEQ ID NO: 1309785 - RNA, 21 nt, Human
caguuucuuagaauuuccugc

SEQ ID NO: 1309786 - RNA, 25 nt, Human
uuuccugccguugauguuuuucuug

SEQ ID NO: 1309787 - RNA, 18 nt, Human
uuucuugaauacacugaa

SEQ ID NO: 1309788 - RNA, 25 nt, Human
aaaaacaucucaaggcaucacaggg

SEQ ID NO: 1309789 - RNA, 19 nt, Human
aaaaugaaggccuagaagg

SEQ ID NO: 1309790 - RNA, 20 nt, Human
aacaugccgaaaccccgucu

SEQ ID NO: 1309791 - RNA, 21 nt, Human
aacaugccgaaaccccgucuc

SEQ ID NO: 1309792 - RNA, 18 nt, Human
aaucgcuugaaccuggga

SEQ ID NO: 1309793 - RNA, 24 nt, Human
aaucgcuugaaccugggaggcaga

SEQ ID NO: 1309794 - RNA, 26 nt, Human
acaaaacaaaauaaaacaaacaaaaa

SEQ ID NO: 1309795 - RNA, 18 nt, Human
acccugaggucaggagag

SEQ ID NO: 1309796 - RNA, 23 nt, Human
acuaauacaaaaauuagccccgu

SEQ ID NO: 1309797 - RNA, 21 nt, Human
acucaaaaacaaaacaaaaua

SEQ ID NO: 1309798 - RNA, 22 nt, Human
agaaucgcuugaaccugggagg

SEQ ID NO: 1309799 - RNA, 24 nt, Human
agccuaggugacaaagccagacuc

SEQ ID NO: 1309800 - RNA, 24 nt, Human
aggcaagguggcucacgccuguaa

SEQ ID NO: 1309801 - RNA, 22 nt, Human
aggcaggagaaucgcuugaacc

SEQ ID NO: 1309802 - RNA, 24 nt, Human
aggcaggagaaucgcuugaaccug

SEQ ID NO: 1309803 - RNA, 21 nt, Human
aggccgaggugggcugaucac

SEQ ID NO: 1309804 - RNA, 19 nt, Human
auggggccaaagaaaaggg

SEQ ID NO: 1309805 - RNA, 20 nt, Human
caaaaaaaaaaagagagaaa

SEQ ID NO: 1309806 - RNA, 24 nt, Human
caaaaacaaaacaaaauaaaacaa

SEQ ID NO: 1309807 - RNA, 24 nt, Human
caaaacaaaauaaaacaaacaaaa

SEQ ID NO: 1309808 - RNA, 25 nt, Human
caaaauuucaaagauaaagcaacau

SEQ ID NO: 1309809 - RNA, 22 nt, Human
caacauaaaauauggggccaaa

SEQ ID NO: 1309810 - RNA, 24 nt, Human
caacaugccgaaaccccgucucua

SEQ ID NO: 1309811 - RNA, 18 nt, Human
caacuuccagcuccaucc

SEQ ID NO: 1309812 - RNA, 24 nt, Human
cacaccuguaaucucagcuacuug

SEQ ID NO: 1309813 - RNA, 20 nt, Human
caccuguaaucucagcuacu

SEQ ID NO: 1309814 - RNA, 24 nt, Human
caccuguaaucucagcuacuuggg

SEQ ID NO: 1309815 - RNA, 24 nt, Human
cacgccuguaaucccggcacuuug

SEQ ID NO: 1309816 - RNA, 20 nt, Human
cacuacaugccagccuaggu

SEQ ID NO: 1309817 - RNA, 20 nt, Human
cagcaaaggcugguuguggc

SEQ ID NO: 1309818 - RNA, 21 nt, Human
cagcaaaggcugguuguggca

SEQ ID NO: 1309819 - RNA, 22 nt, Human
caggagagacuggccuggccaa

SEQ ID NO: 1309820 - RNA, 21 nt, Human
cauauaacaguuaagaaaaaa

SEQ ID NO: 1309821 - RNA, 18 nt, Human
caugcaauucgaacccau

SEQ ID NO: 1309822 - RNA, 21 nt, Human
ccagccuaggugacaaagcca

SEQ ID NO: 1309823 - RNA, 23 nt, Human
ccccgugugguggcacacaccug

SEQ ID NO: 1309824 - RNA, 21 nt, Human
cccuaaguuuucauaaccaaa

SEQ ID NO: 1309825 - RNA, 23 nt, Human
ccuggccaacaugccgaaacccc

SEQ ID NO: 1309826 - RNA, 24 nt, Human
ccuggccaacaugccgaaaccccg

SEQ ID NO: 1309827 - RNA, 21 nt, Human
ccuguaaucucagcuacuugg

SEQ ID NO: 1309828 - RNA, 25 nt, Human
cgaggugggcugaucacccugaggu

SEQ ID NO: 1309829 - RNA, 27 nt, Human
cgaggugggcugaucacccugagguca

SEQ ID NO: 1309830 - RNA, 18 nt, Human
cgccuguaaucccggcac

SEQ ID NO: 1309831 - RNA, 24 nt, Human
cggcacuuugugaggccgaggugg

SEQ ID NO: 1309832 - RNA, 22 nt, Human
cucacgccuguaaucccggcac

SEQ ID NO: 1309833 - RNA, 24 nt, Human
cucacgccuguaaucccggcacuu

SEQ ID NO: 1309834 - RNA, 24 nt, Human
cugggaggcagagauugcagauca

SEQ ID NO: 1309835 - RNA, 21 nt, Human
cuguaaucucagcuacuuggg

SEQ ID NO: 1309836 - RNA, 18 nt, Human
gaucacccugaggucagg

SEQ ID NO: 1309837 - RNA, 19 nt, Human
gaucacccugaggucagga

SEQ ID NO: 1309838 - RNA, 19 nt, Human
gcacuuugugaggccgagg

SEQ ID NO: 1309839 - RNA, 23 nt, Human
gcacuuugugaggccgagguggg

SEQ ID NO: 1309840 - RNA, 24 nt, Human
gcagaucaugccacuacaugccag

SEQ ID NO: 1309841 - RNA, 22 nt, Human
gccaaaauguagauucaaucca

SEQ ID NO: 1309842 - RNA, 23 nt, Human
gccagccuaggugacaaagccag

SEQ ID NO: 1309843 - RNA, 23 nt, Human
gccuggccaacaugccgaaaccc

SEQ ID NO: 1309844 - RNA, 22 nt, Human
ggauuucaggcauaaaacaaug

SEQ ID NO: 1309845 - RNA, 19 nt, Human
ggcucacgccuguaauccc

SEQ ID NO: 1309846 - RNA, 20 nt, Human
gggcugaggcaggagaaucg

SEQ ID NO: 1309847 - RNA, 24 nt, Human
gggcugaggcaggagaaucgcuug

SEQ ID NO: 1309848 - RNA, 23 nt, Human
ggugacaaagccagacucaaaaa

SEQ ID NO: 1309849 - RNA, 22 nt, Human
gguggcucacgccuguaauccc

SEQ ID NO: 1309850 - RNA, 24 nt, Human
gguggcucacgccuguaaucccgg

SEQ ID NO: 1309851 - RNA, 18 nt, Human
gguuguggcaaaguuuca

SEQ ID NO: 1309852 - RNA, 24 nt, Human
uaaaacaaacaaaaaaacugcaua

SEQ ID NO: 1309853 - RNA, 24 nt, Human
uaaaacaaacaaaaaaacugcaua

SEQ ID NO: 1309854 - RNA, 21 nt, Human
uaaaaugaaggccuagaagga

SEQ ID NO: 1309855 - RNA, 19 nt, Human
uaaccaaaaaaaaaaagag

SEQ ID NO: 1309856 - RNA, 22 nt, Human
uaacuucugacucuaguuuccc

SEQ ID NO: 1309857 - RNA, 25 nt, Human
uacaugccagccuaggugacaaagc

SEQ ID NO: 1309858 - RNA, 23 nt, Human
uacuuggggggcugaggcaggag

SEQ ID NO: 1309859 - RNA, 18 nt, Human
ucaauccaacauuaugcc

SEQ ID NO: 1309860 - RNA, 22 nt, Human
ucacgccuguaaucccggcacu

SEQ ID NO: 1309861 - RNA, 19 nt, Human
ucaucuagaauuauuuggu

SEQ ID NO: 1309862 - RNA, 21 nt, Human
ucaugaaaaacaaaaaaaaac

SEQ ID NO: 1309863 - RNA, 22 nt, Human
ucauucgaacccauucgugcau

SEQ ID NO: 1309864 - RNA, 28 nt, Human
ucauugcauccuuuucauggggcccucc

SEQ ID NO: 1309865 - RNA, 23 nt, Human
ucauuucaaacugcaugaugugg

SEQ ID NO: 1309866 - RNA, 20 nt, Human
ucccggcacuuugugaggcc

SEQ ID NO: 1309867 - RNA, 18 nt, Human
ucgcuugaaccugggagg

SEQ ID NO: 1309868 - RNA, 18 nt, Human
ugaaggccuagaaggauc

SEQ ID NO: 1309869 - RNA, 20 nt, Human
ugaggcaggagaaucgcuug

SEQ ID NO: 1309870 - RNA, 24 nt, Human
ugaggcaggagaaucgcuugaacc

SEQ ID NO: 1309871 - RNA, 25 nt, Human
ugaggcaggagaaucgcuugaaccu

SEQ ID NO: 1309872 - RNA, 18 nt, Human
ugaggucaggagagacug

SEQ ID NO: 1309873 - RNA, 21 nt, Human
ugaggucaggagagacuggcc

SEQ ID NO: 1309874 - RNA, 19 nt, Human
ugaucacccugaggucagg

SEQ ID NO: 1309875 - RNA, 22 nt, Human
uggcacacaccuguaaucucag

SEQ ID NO: 1309876 - RNA, 24 nt, Human
uggccuggccaacaugccgaaacc

SEQ ID NO: 1309877 - RNA, 20 nt, Human
uggcucacgccuguaauccc

SEQ ID NO: 1309878 - RNA, 24 nt, Human
uggcucacgccuguaaucccggca

SEQ ID NO: 1309879 - RNA, 23 nt, Human
ugggaggcagagauugcagauca

SEQ ID NO: 1309880 - RNA, 23 nt, Human
uggggggcugaggcaggagaauc

SEQ ID NO: 1309881 - RNA, 23 nt, Human
ugguggcacacaccuguaaucuc

SEQ ID NO: 1309882 - RNA, 24 nt, Human
ugguggcacacaccuguaaucuca

SEQ ID NO: 1309883 - RNA, 20 nt, Human
ugugaggccgaggugggcug

SEQ ID NO: 1309884 - RNA, 20 nt, Human
ugugcuacagcaaaggcugg

SEQ ID NO: 1309885 - RNA, 21 nt, Human
uucauaaccaaaaaaaaaaag

SEQ ID NO: 1309886 - RNA, 22 nt, Human
uugaccuuuugaaacauccaaa

SEQ ID NO: 1309887 - RNA, 24 nt, Human
uuggggggcugaggcaggagaauc

SEQ ID NO: 1309888 - RNA, 19 nt, Human
aggagcuggccgcugaggg

SEQ ID NO: 1309889 - RNA, 23 nt, Human
cacccuaagaugggaagggcagg

SEQ ID NO: 1309890 - RNA, 20 nt, Human
ccaccaaggcuggccugaga

SEQ ID NO: 1309891 - RNA, 19 nt, Human
cgacacccuaagaugggaa

SEQ ID NO: 1309892 - RNA, 24 nt, Human
cuagaaaccucccaccaaggcugg

SEQ ID NO: 1309893 - RNA, 22 nt, Human
cucccaccaaggcuggccugag

SEQ ID NO: 1309894 - RNA, 21 nt, Human
ggcgaggagcuggccgcugag

SEQ ID NO: 1309895 - RNA, 19 nt, Human
ggguggcgagcgggcugag

SEQ ID NO: 1309896 - RNA, 21 nt, Human
uaacgaacuuuggaaugauau

SEQ ID NO: 1309897 - RNA, 20 nt, Human
uauucauuuaaaacaaacuu

SEQ ID NO: 1309898 - RNA, 18 nt, Human
uccuagaaaccucccacc

SEQ ID NO: 1309899 - RNA, 24 nt, Human
ucucuuuauugagggaauaagagu

SEQ ID NO: 1309900 - RNA, 26 nt, Human
ugagggaauaagagucugucucagac

SEQ ID NO: 1309901 - RNA, 20 nt, Human
ugagguggcuacggccgagg

SEQ ID NO: 1309902 - RNA, 22 nt, Human
ugagguggcuacggccgagggg

SEQ ID NO: 1309903 - RNA, 19 nt, Human
uggcuacggccgaggggag

SEQ ID NO: 1309904 - RNA, 21 nt, Human
ugggaagggcagggagcgaau

SEQ ID NO: 1309905 - RNA, 20 nt, Human
ccaaaacagaauccucccug

SEQ ID NO: 1309906 - RNA, 24 nt, Human
cccaaaacagaauccucccugagg

SEQ ID NO: 1309907 - RNA, 22 nt, Human
gugaugcaggcggagacccugc

SEQ ID NO: 1309908 - RNA, 22 nt, Human
ucccaaaacagaauccucccug

SEQ ID NO: 1309909 - RNA, 22 nt, Human
ucccugagguagucggagagca

SEQ ID NO: 1309910 - RNA, 25 nt, Human
uugaacccuuaucaauagguuuugg

SEQ ID NO: 1309911 - RNA, 23 nt, Human
aaaaugcuucuaaccucagucug

SEQ ID NO: 1309912 - RNA, 26 nt, Human
auaaaauuaucuucuugcugccaaag

SEQ ID NO: 1309913 - RNA, 23 nt, Human
auuuucaggaagaggcaaaacuu

SEQ ID NO: 1309914 - RNA, 18 nt, Human
ccaaagaaaaugcuucua

SEQ ID NO: 1309915 - RNA, 31 nt, Human
cuucuugcugccaaagaaaaugcuucuaacu

SEQ ID NO: 1309916 - RNA, 24 nt, Human
cuugcugccaaagaaaaugcuucu

SEQ ID NO: 1309917 - RNA, 23 nt, Human
uauaagauuuuauuaaaccuuua

SEQ ID NO: 1309918 - RNA, 18 nt, Human
ucaggaagaggcaaaacu

SEQ ID NO: 1309919 - RNA, 19 nt, Human
ucaugucucucucucucuu

SEQ ID NO: 1309920 - RNA, 18 nt, Human
ucucucucucucucucua

SEQ ID NO: 1309921 - RNA, 20 nt, Human
uucuaaccucagucugguag

SEQ ID NO: 1309922 - RNA, 22 nt, Human
uuucaggaagaggcaaaacuuc

SEQ ID NO: 1309923 - RNA, 21 nt, Human
aauaaugguugccaggaggga

SEQ ID NO: 1309924 - RNA, 24 nt, Human
accugaagcuggaagaagugagga

SEQ ID NO: 1309925 - RNA, 24 nt, Human
agaagaacagagcugaaacccagg

SEQ ID NO: 1309926 - RNA, 18 nt, Human
agagcugaaacccagggu

SEQ ID NO: 1309927 - RNA, 22 nt, Human
agccaucaaaagcaaggagcaa

SEQ ID NO: 1309928 - RNA, 19 nt, Human
aggggcgagaggaaggggg

SEQ ID NO: 1309929 - RNA, 23 nt, Human
caagugauagaauaauagaaaca

SEQ ID NO: 1309930 - RNA, 23 nt, Human
ccagggugcacacacuguguggu

SEQ ID NO: 1309931 - RNA, 19 nt, Human
cgagaggaagggggccaca

SEQ ID NO: 1309932 - RNA, 26 nt, Human
cucguggugauggaaggguucucccu

SEQ ID NO: 1309933 - RNA, 19 nt, Human
gaauaauagaaacagagaa

SEQ ID NO: 1309934 - RNA, 22 nt, Human
gagauauuaccacugggggaaa

SEQ ID NO: 1309935 - RNA, 22 nt, Human
gagggaaggagguggcaggggc

SEQ ID NO: 1309936 - RNA, 22 nt, Human
gcugaaacccaggguggccugg

SEQ ID NO: 1309937 - RNA, 19 nt, Human
gcugugauguugugccacc

SEQ ID NO: 1309938 - RNA, 22 nt, Human
gguugccaggagggaaggaggu

SEQ ID NO: 1309939 - RNA, 19 nt, Human
uacuuugagauccuggcug

SEQ ID NO: 1309940 - RNA, 24 nt, Human
uccaaaccaugggaugcgacucag

SEQ ID NO: 1309941 - RNA, 22 nt, Human
uccggagagcucugccaaguga

SEQ ID NO: 1309942 - RNA, 24 nt, Human
uggaagaagugaggacccgugacg

SEQ ID NO: 1309943 - RNA, 23 nt, Human
agacuaacaaauccaccuuggca

SEQ ID NO: 1309944 - RNA, 26 nt, Human
caccaaggagacugcagucaaauaaa

SEQ ID NO: 1309945 - RNA, 18 nt, Human
caccaccugugccucugc

SEQ ID NO: 1309946 - RNA, 18 nt, Human
caccaccugugccucugc

SEQ ID NO: 1309947 - RNA, 22 nt, Human
cgaaaaguacugaaaaugcuau

SEQ ID NO: 1309948 - RNA, 26 nt, Human
cgccucuacugucugccaccaccugu

SEQ ID NO: 1309949 - RNA, 19 nt, Human
cuacugucugccaccaccu

SEQ ID NO: 1309950 - RNA, 24 nt, Human
cucacagcuuuggccacgcacucc

SEQ ID NO: 1309951 - RNA, 20 nt, Human
gacuugggcaauguggccag

SEQ ID NO: 1309952 - RNA, 21 nt, Human
gggcaauguggccaggagggc

SEQ ID NO: 1309953 - RNA, 20 nt, Human
ggucagaaaaaucaacauuu

SEQ ID NO: 1309954 - RNA, 27 nt, Human
uaaauacauaauacagaagccugugug

SEQ ID NO: 1309955 - RNA, 18 nt, Human
uauuagcugaauuuguga

SEQ ID NO: 1309956 - RNA, 20 nt, Human
uauuucaaauauauuuucac

SEQ ID NO: 1309957 - RNA, 19 nt, Human
uauuuuucccauuuuguuu

SEQ ID NO: 1309958 - RNA, 22 nt, Human
ugaguuauccuuauuuuuccca

SEQ ID NO: 1309959 - RNA, 24 nt, Human
ugaguuauccuuauuuuucccauu

SEQ ID NO: 1309960 - RNA, 19 nt, Human
ugccaccaccugugccucu

SEQ ID NO: 1309961 - RNA, 18 nt, Human
uguccuaggccgaggcua

SEQ ID NO: 1309962 - RNA, 24 nt, Human
uuagcugaauuugugauuuccuuu

SEQ ID NO: 1309963 - RNA, 24 nt, Human
uuauggucagaaaaaucaacauuu

SEQ ID NO: 1309964 - RNA, 25 nt, Human
aaaucaaagccacuauggcaaagaa

SEQ ID NO: 1309965 - RNA, 24 nt, Human
aaauucuuuuuaucucccccaccc

SEQ ID NO: 1309966 - RNA, 24 nt, Human
aauucuccacauauuuguauuuuu

SEQ ID NO: 1309967 - RNA, 24 nt, Human
auaugacgcacaaagccaaaaugg

SEQ ID NO: 1309968 - RNA, 19 nt, Human
aucucccccaccccacaaa

SEQ ID NO: 1309969 - RNA, 20 nt, Human
caaaacagggauuuuuaaac

SEQ ID NO: 1309970 - RNA, 24 nt, Human
caaagaaacaggagauuguacaga

SEQ ID NO: 1309971 - RNA, 25 nt, Human
caaagaaacaggagauuguacagau

SEQ ID NO: 1309972 - RNA, 22 nt, Human
caccccacaaaccaguaauuca

SEQ ID NO: 1309973 - RNA, 19 nt, Human
cacuauggcaaagaaacag

SEQ ID NO: 1309974 - RNA, 18 nt, Human
cagcuaauccaucccacu

SEQ ID NO: 1309975 - RNA, 23 nt, Human
caggacaaaacagggauuuuuaa

SEQ ID NO: 1309976 - RNA, 24 nt, Human
cauauaaucccaaaucaaagccac

SEQ ID NO: 1309977 - RNA, 27 nt, Human
ccaccccacaaaccaguaauucagcaa

SEQ ID NO: 1309978 - RNA, 23 nt, Human
cuuuuuaucucccccaccccaca

SEQ ID NO: 1309979 - RNA, 21 nt, Human
cuuuuuggcagaaucauccaa

SEQ ID NO: 1309980 - RNA, 20 nt, Human
gggauuuuuaaacuuuuuuu

SEQ ID NO: 1309981 - RNA, 19 nt, Human
uaaaauuucaggacaaaac

SEQ ID NO: 1309982 - RNA, 20 nt, Human
ucacagcuaauccaucccac

SEQ ID NO: 1309983 - RNA, 24 nt, Human
ucauccaaagaguuuuucacagcu

SEQ ID NO: 1309984 - RNA, 22 nt, Human
ugagaccaaaauucuccacaua

SEQ ID NO: 1309985 - RNA, 24 nt, Human
uggcaaagaaacaggagauuguac

SEQ ID NO: 1309986 - RNA, 24 nt, Human
uguacagaugguaaggcgaccauc

SEQ ID NO: 1309987 - RNA, 21 nt, Human
uucuuuuuaucucccccaccc

SEQ ID NO: 1309988 - RNA, 19 nt, Human
gaaggaacuuuugggggcu

SEQ ID NO: 1309989 - RNA, 20 nt, Human
uggaaggaacuuuugggggc

SEQ ID NO: 1309990 - RNA, 22 nt, Human
uggaaggaacuuuugggggcug

SEQ ID NO: 1309991 - RNA, 19 nt, Human
aacaacaaaaaacccagag

SEQ ID NO: 1309992 - RNA, 21 nt, Human
aaccacacaacaacaaaaaac

SEQ ID NO: 1309993 - RNA, 27 nt, Human
aaccacacaacaacaaaaaacccagag

SEQ ID NO: 1309994 - RNA, 29 nt, Human
aaccacacaacaacaaaaaacccagagug

SEQ ID NO: 1309995 - RNA, 25 nt, Human
aauaauaaccacacaacaacaaaaa

SEQ ID NO: 1309996 - RNA, 22 nt, Human
acaacaaaaaacccagagugaa

SEQ ID NO: 1309997 - RNA, 23 nt, Human
acaacaaguuugggauaagguuc

SEQ ID NO: 1309998 - RNA, 21 nt, Human
agacuuagagaggcccaucua

SEQ ID NO: 1309999 - RNA, 21 nt, Human
auuugacuugugucacugagg

SEQ ID NO: 1310000 - RNA, 21 nt, Human
caaaaaacccagagugaaacu

SEQ ID NO: 1310001 - RNA, 25 nt, Human
caacaaaaaacccagagugaaacua

SEQ ID NO: 1310002 - RNA, 26 nt, Human
caacaacaaaaaacccagagugaaac

SEQ ID NO: 1310003 - RNA, 27 nt, Human
caacaacaaaaaacccagagugaaacu

SEQ ID NO: 1310004 - RNA, 21 nt, Human
ccacacaacaacaaaaaaccc

SEQ ID NO: 1310005 - RNA, 22 nt, Human
ccacacaacaacaaaaaaccca

SEQ ID NO: 1310006 - RNA, 24 nt, Human
ccacacaacaacaaaaaacccaga

SEQ ID NO: 1310007 - RNA, 19 nt, Human
gagaauaauaaccacacaa

SEQ ID NO: 1310008 - RNA, 22 nt, Human
gagaauaauaaccacacaacaa

SEQ ID NO: 1310009 - RNA, 21 nt, Human
ucauugugaucccaacuuuca

SEQ ID NO: 1310010 - RNA, 20 nt, Human
ucuaggugguaaaaaacgcu

SEQ ID NO: 1310011 - RNA, 25 nt, Human
ugagcaaauagacuuagagaggccc

SEQ ID NO: 1310012 - RNA, 18 nt, Human
uggcuuccaucacuccuu

SEQ ID NO: 1310013 - RNA, 23 nt, Human
uucauugagcaaauagacuuaga

SEQ ID NO: 1310014 - RNA, 25 nt, Human
aaaaaaaaaaaacaaacaaacaaac

SEQ ID NO: 1310015 - RNA, 26 nt, Human
aaaaaaaaaaaacaaacaaacaaaca

SEQ ID NO: 1310016 - RNA, 28 nt, Human
aaaaaaaaaacuacugugggaaaaagga

SEQ ID NO: 1310017 - RNA, 25 nt, Human
aaaaaaaacaaacaaacaaacaaaa

SEQ ID NO: 1310018 - RNA, 28 nt, Human
aaaaaaacaaacaaacaaacaaaaaaaa

SEQ ID NO: 1310019 - RNA, 19 nt, Human
aaaaagccugauacacuaa

SEQ ID NO: 1310020 - RNA, 21 nt, Human
aaaaagccugauacacuaaac

SEQ ID NO: 1310021 - RNA, 19 nt, Human
aacuaacuaaaaaaagccu

SEQ ID NO: 1310022 - RNA, 21 nt, Human
aagaaucauuaucauaggaag

SEQ ID NO: 1310023 - RNA, 18 nt, Human
aagcaauucgagcaaaaa

SEQ ID NO: 1310024 - RNA, 24 nt, Human
aagggucauuucaaaaaucagagg

SEQ ID NO: 1310025 - RNA, 22 nt, Human
aauaacagcagguuuagaggaa

SEQ ID NO: 1310026 - RNA, 22 nt, Human
aaucauuaucauaggaagcaaa

SEQ ID NO: 1310027 - RNA, 25 nt, Human
aaugucuucccuaaaaguggguaac

SEQ ID NO: 1310028 - RNA, 24 nt, Human
accauguccagcuaauuuuuugua

SEQ ID NO: 1310029 - RNA, 19 nt, Human
acccaggcuggagugcagu

SEQ ID NO: 1310030 - RNA, 18 nt, Human
acgggguuucaacguguu

SEQ ID NO: 1310031 - RNA, 19 nt, Human
acgggguuucaacguguua

SEQ ID NO: 1310032 - RNA, 20 nt, Human
acgggguuucaacguguuag

SEQ ID NO: 1310033 - RNA, 24 nt, Human
agcuuagagcaagaauaaucacaa

SEQ ID NO: 1310034 - RNA, 25 nt, Human
aggcuggagugcaguggcacgaucu

SEQ ID NO: 1310035 - RNA, 21 nt, Human
agggaaguuucagcuuagagc

SEQ ID NO: 1310036 - RNA, 18 nt, Human
aguagagacgggguuuca

SEQ ID NO: 1310037 - RNA, 22 nt, Human
aguagagacgggguuucaacgu

SEQ ID NO: 1310038 - RNA, 21 nt, Human
agucugggauuacaggcguga

SEQ ID NO: 1310039 - RNA, 20 nt, Human
agugcaguggcacgaucucg

SEQ ID NO: 1310040 - RNA, 23 nt, Human
agugcaguggcacgaucucggcu

SEQ ID NO: 1310041 - RNA, 24 nt, Human
agugcaguggcacgaucucggcuc

SEQ ID NO: 1310042 - RNA, 22 nt, Human
augaaaaacuuacaaaaagucu

SEQ ID NO: 1310043 - RNA, 21 nt, Human
caaaauggaccagaagaauca

SEQ ID NO: 1310044 - RNA, 24 nt, Human
caaauacauaugcucagauuuacc

SEQ ID NO: 1310045 - RNA, 20 nt, Human
caaccucugccuccuggguu

SEQ ID NO: 1310046 - RNA, 18 nt, Human
caacguguuaggcaggau

SEQ ID NO: 1310047 - RNA, 24 nt, Human
caacguguuaggcaggauggucuc

SEQ ID NO: 1310048 - RNA, 21 nt, Human
cacugcaaccucugccuccug

SEQ ID NO: 1310049 - RNA, 23 nt, Human
cacugcaaccucugccuccuggg

SEQ ID NO: 1310050 - RNA, 19 nt, Human
cagcagguuuagaggaaga

SEQ ID NO: 1310051 - RNA, 22 nt, Human
caggauggucuccgucucuuga

SEQ ID NO: 1310052 - RNA, 19 nt, Human
caggugcccuaugaagucc

SEQ ID NO: 1310053 - RNA, 24 nt, Human
cagguuuagaggaagaggaaaaaa

SEQ ID NO: 1310054 - RNA, 22 nt, Human
caugccauucuccugccucagc

SEQ ID NO: 1310055 - RNA, 24 nt, Human
ccacaaaaaguuaaaagaaauaac

SEQ ID NO: 1310056 - RNA, 21 nt, Human
ccacagucugggauuacaggc

SEQ ID NO: 1310057 - RNA, 21 nt, Human
ccacagucugggauuacaggc

SEQ ID NO: 1310058 - RNA, 23 nt, Human
ccacagucugggauuacaggcgu

SEQ ID NO: 1310059 - RNA, 18 nt, Human
ccacugcacccggccaga

SEQ ID NO: 1310060 - RNA, 27 nt, Human
cccacaaaaaguuaaaagaaauaacag

SEQ ID NO: 1310061 - RNA, 24 nt, Human
cccacagucugggauuacaggcgu

SEQ ID NO: 1310062 - RNA, 20 nt, Human
ccucugccuccuggguucau

SEQ ID NO: 1310063 - RNA, 24 nt, Human
ccugauuagcugggacuacaggca

SEQ ID NO: 1310064 - RNA, 24 nt, Human
cggccagacuuuaaaaaaaaaaaa

SEQ ID NO: 1310065 - RNA, 24 nt, Human
cucacugcaaccucugccuccugg

SEQ ID NO: 1310066 - RNA, 22 nt, Human
cuccugccucagccuccugauu

SEQ ID NO: 1310067 - RNA, 21 nt, Human
cuccuggguucaugccauucu

SEQ ID NO: 1310068 - RNA, 24 nt, Human
cucuugacuucgugaucugcccgc

SEQ ID NO: 1310069 - RNA, 19 nt, Human
cugauuagcugggacuaca

SEQ ID NO: 1310070 - RNA, 24 nt, Human
cugcaaccucugccuccuggguuc

SEQ ID NO: 1310071 - RNA, 23 nt, Human
cugccucagccuccugauuagcu

SEQ ID NO: 1310072 - RNA, 18 nt, Human
cugucacccaggcuggag

SEQ ID NO: 1310073 - RNA, 25 nt, Human
cuugacuucgugaucugcccgccug

SEQ ID NO: 1310074 - RNA, 27 nt, Human
cuuuaaaaaaaaaaaacaaacaaacaa

SEQ ID NO: 1310075 - RNA, 22 nt, Human
gaaaaacuuacaaaaagucugu

SEQ ID NO: 1310076 - RNA, 21 nt, Human
gaagaggaaaaaauaauaaga

SEQ ID NO: 1310077 - RNA, 24 nt, Human
gacuacaggcacccguuaccaugu

SEQ ID NO: 1310078 - RNA, 23 nt, Human
gacuucgugaucugcccgccugg

SEQ ID NO: 1310079 - RNA, 21 nt, Human
gagauggagucuugcucuguc

SEQ ID NO: 1310080 - RNA, 22 nt, Human
gauacacuaaacaaaacccaaa

SEQ ID NO: 1310081 - RNA, 18 nt, Human
gauuacaggcgugagcca

SEQ ID NO: 1310082 - RNA, 19 nt, Human
gauuacaggcgugagccac

SEQ ID NO: 1310083 - RNA, 23 nt, Human
gauuacaggcgugagccacugca

SEQ ID NO: 1310084 - RNA, 22 nt, Human
gcaaccucugccuccuggguuc

SEQ ID NO: 1310085 - RNA, 25 nt, Human
gcucugucacccaggcuggagugca

SEQ ID NO: 1310086 - RNA, 19 nt, Human
gcuggagugcaguggcacg

SEQ ID NO: 1310087 - RNA, 23 nt, Human
ggguuuaauuuuucccacaaaaa

SEQ ID NO: 1310088 - RNA, 26 nt, Human
uaaaaaaaaaaaacaaacaaacaaac

SEQ ID NO: 1310089 - RNA, 23 nt, Human
uaacuaaaaaaagccugauacac

SEQ ID NO: 1310090 - RNA, 25 nt, Human
uaagcuaagagaacagaaaaaauga

SEQ ID NO: 1310091 - RNA, 24 nt, Human
uaauuuuuuguauuuuuaguagag

SEQ ID NO: 1310092 - RNA, 25 nt, Human
uaauuuuuuguauuuuuaguagaga

SEQ ID NO: 1310093 - RNA, 24 nt, Human
uacaggcacccguuaccaugucca

SEQ ID NO: 1310094 - RNA, 19 nt, Human
uacaggcgugagccacugc

SEQ ID NO: 1310095 - RNA, 23 nt, Human
uacaggcgugagccacugcaccc

SEQ ID NO: 1310096 - RNA, 19 nt, Human
uaccucagccaccuuucac

SEQ ID NO: 1310097 - RNA, 24 nt, Human
uaggcaggauggucuccgucucuu

SEQ ID NO: 1310098 - RNA, 19 nt, Human
uaguagagacgggguuuca

SEQ ID NO: 1310099 - RNA, 22 nt, Human
uaguagagacgggguuucaacg

SEQ ID NO: 1310100 - RNA, 24 nt, Human
uaguagagacgggguuucaacgug

SEQ ID NO: 1310101 - RNA, 22 nt, Human
uaugcaguugcaaaauguguga

SEQ ID NO: 1310102 - RNA, 22 nt, Human
uauguauagaaaagucuacacu

SEQ ID NO: 1310103 - RNA, 24 nt, Human
ucacccaggcuggagugcaguggc

SEQ ID NO: 1310104 - RNA, 24 nt, Human
ucacugcaaccucugccuccuggg

SEQ ID NO: 1310105 - RNA, 25 nt, Human
ucacugcaaccucugccuccugggu

SEQ ID NO: 1310106 - RNA, 18 nt, Human
ucaugccauucuccugcc

SEQ ID NO: 1310107 - RNA, 23 nt, Human
ucccacagucugggauuacaggc

SEQ ID NO: 1310108 - RNA, 24 nt, Human
uccugauuagcugggacuacaggc

SEQ ID NO: 1310109 - RNA, 21 nt, Human
uccuggguucaugccauucuc

SEQ ID NO: 1310110 - RNA, 24 nt, Human
uccuggguucaugccauucuccug

SEQ ID NO: 1310111 - RNA, 24 nt, Human
ucugucacccaggcuggagugcag

SEQ ID NO: 1310112 - RNA, 23 nt, Human
ucuugcucugucacccaggcugg

SEQ ID NO: 1310113 - RNA, 24 nt, Human
ucuugcucugucacccaggcugga

SEQ ID NO: 1310114 - RNA, 22 nt, Human
ugaaacuuugguuuagagguaa

SEQ ID NO: 1310115 - RNA, 20 nt, Human
ugaaaugcgggaaaccacag

SEQ ID NO: 1310116 - RNA, 21 nt, Human
ugaaguccugucccuuuagaa

SEQ ID NO: 1310117 - RNA, 23 nt, Human
ugacuucgugaucugcccgccug

SEQ ID NO: 1310118 - RNA, 24 nt, Human
ugagauaucuuaaugaauaacauc

SEQ ID NO: 1310119 - RNA, 24 nt, Human
ugccucagccuccugauuagcugg

SEQ ID NO: 1310120 - RNA, 19 nt, Human
ugccuccuggguucaugcc

SEQ ID NO: 1310121 - RNA, 24 nt, Human
ugcucugucacccaggcuggagug

SEQ ID NO: 1310122 - RNA, 22 nt, Human
uggaaaagaaacuaacaugcua

SEQ ID NO: 1310123 - RNA, 19 nt, Human
uggagucuugcucugucac

SEQ ID NO: 1310124 - RNA, 23 nt, Human
uggagugcaguggcacgaucucg

SEQ ID NO: 1310125 - RNA, 24 nt, Human
uggagugcaguggcacgaucucgg

SEQ ID NO: 1310126 - RNA, 18 nt, Human
ugggacuacaggcacccg

SEQ ID NO: 1310127 - RNA, 24 nt, Human
ugggacuacaggcacccguuacca

SEQ ID NO: 1310128 - RNA, 25 nt, Human
ugggacuacaggcacccguuaccau

SEQ ID NO: 1310129 - RNA, 18 nt, Human
ugggauuacaggcgugag

SEQ ID NO: 1310130 - RNA, 19 nt, Human
ugggauuacaggcgugagc

SEQ ID NO: 1310131 - RNA, 21 nt, Human
ugggauuacaggcgugagcca

SEQ ID NO: 1310132 - RNA, 22 nt, Human
ugggauuacaggcgugagccac

SEQ ID NO: 1310133 - RNA, 22 nt, Human
ugggauuacaggcgugagccac

SEQ ID NO: 1310134 - RNA, 24 nt, Human
ugggauuacaggcgugagccacug

SEQ ID NO: 1310135 - RNA, 26 nt, Human
ugggauuacaggcgugagccacugca

SEQ ID NO: 1310136 - RNA, 21 nt, Human
uguauuuuuaguagagacggg

SEQ ID NO: 1310137 - RNA, 23 nt, Human
ugucugaagaccuagaaauguca

SEQ ID NO: 1310138 - RNA, 24 nt, Human
uuaauuuuucccacaaaaaguuaa

SEQ ID NO: 1310139 - RNA, 18 nt, Human
uuaguagagacgggguuu

SEQ ID NO: 1310140 - RNA, 20 nt, Human
uuaguagagacgggguuuca

SEQ ID NO: 1310141 - RNA, 22 nt, Human
uuaguagagacgggguuucaac

SEQ ID NO: 1310142 - RNA, 24 nt, Human
uuaguagagacgggguuucaacgu

SEQ ID NO: 1310143 - RNA, 19 nt, Human
uucaugccauucuccugcc

SEQ ID NO: 1310144 - RNA, 19 nt, Human
uucgagcaaaaaucaagga

SEQ ID NO: 1310145 - RNA, 24 nt, Human
uugcucugucacccaggcuggagu

SEQ ID NO: 1310146 - RNA, 26 nt, Human
uuuaaaaaaaaaaaacaaacaaacaa

SEQ ID NO: 1310147 - RNA, 22 nt, Human
uuuuuaguagagacgggguuuc

SEQ ID NO: 1310148 - RNA, 21 nt, Human
uuuuuguauuuuuaguagaga

SEQ ID NO: 1310149 - RNA, 24 nt, Human
uuuuuuguauuuuuaguagagacg

SEQ ID NO: 1310150 - RNA, 21 nt, Human
aacccuuuguuggaaugcuuu

SEQ ID NO: 1310151 - RNA, 22 nt, Human
aacccuuuguuggaaugcuuuc

SEQ ID NO: 1310152 - RNA, 19 nt, Human
caacaaauaucuuuuucac

SEQ ID NO: 1310153 - RNA, 24 nt, Human
caguccuugacuuuuuugcccaua

SEQ ID NO: 1310154 - RNA, 22 nt, Human
cauaaacaugaguauuuguaua

SEQ ID NO: 1310155 - RNA, 23 nt, Human
ccugaucuuugauaaucuucucu

SEQ ID NO: 1310156 - RNA, 19 nt, Human
cguggcugcauccaccucc

SEQ ID NO: 1310157 - RNA, 21 nt, Human
cguggcugcauccaccuccuc

SEQ ID NO: 1310158 - RNA, 18 nt, Human
gccuugcauucguggcug

SEQ ID NO: 1310159 - RNA, 22 nt, Human
gucacaaauacaguccuugacu

SEQ ID NO: 1310160 - RNA, 18 nt, Human
guggcagcuaggcccugc

SEQ ID NO: 1310161 - RNA, 25 nt, Human
guucuccuugguuccacaacuuuuc

SEQ ID NO: 1310162 - RNA, 30 nt, Human
uccuugguuccacaacuuuuccauccaccu

SEQ ID NO: 1310163 - RNA, 22 nt, Human
ucucuuagcugauguuuuucag

SEQ ID NO: 1310164 - RNA, 18 nt, Human
ugcauccaccuccuccac

SEQ ID NO: 1310165 - RNA, 19 nt, Human
uggcugaguucaugaaucu

SEQ ID NO: 1310166 - RNA, 19 nt, Human
uguuguaaccuguagcuuc

SEQ ID NO: 1310167 - RNA, 19 nt, Human
uugcauucguggcugcauc

SEQ ID NO: 1310168 - RNA, 27 nt, Human
uuucuugccacugccucagucaugauu

SEQ ID NO: 1310169 - RNA, 23 nt, Human
uuuucaguguuuucuuuaaugcc

SEQ ID NO: 1310170 - RNA, 24 nt, Human
uuuuccauccaccuuguguggccu

SEQ ID NO: 1310171 - RNA, 22 nt, Human
aaaaaacuuagcccaugcugac

SEQ ID NO: 1310172 - RNA, 21 nt, Human
aaaaacaaaaagaaacaagca

SEQ ID NO: 1310173 - RNA, 23 nt, Human
aaaacaaaaagaaacaagcagaa

SEQ ID NO: 1310174 - RNA, 24 nt, Human
aaaacaaaaagaaacaagcagaaa

SEQ ID NO: 1310175 - RNA, 25 nt, Human
aaaaggccaagaauaagcaguggga

SEQ ID NO: 1310176 - RNA, 25 nt, Human
aaacaagaaaggaggaaaagggacc

SEQ ID NO: 1310177 - RNA, 22 nt, Human
aaacuccaagcagaagccccag

SEQ ID NO: 1310178 - RNA, 23 nt, Human
aaacuggaaagagaagauucugg

SEQ ID NO: 1310179 - RNA, 23 nt, Human
aaagagaagauucuggaagagaa

SEQ ID NO: 1310180 - RNA, 19 nt, Human
aaagugcugggauuacaga

SEQ ID NO: 1310181 - RNA, 24 nt, Human
aaagugcugggauuacagacauga

SEQ ID NO: 1310182 - RNA, 21 nt, Human
aagaggccugcuuugggcuag

SEQ ID NO: 1310183 - RNA, 24 nt, Human
aagagguuucgccauguuggccag

SEQ ID NO: 1310184 - RNA, 18 nt, Human
aagcagaagccccagaga

SEQ ID NO: 1310185 - RNA, 24 nt, Human
aagcagacaacacugucugccaga

SEQ ID NO: 1310186 - RNA, 23 nt, Human
aagcagcuccagccaguucugcc

SEQ ID NO: 1310187 - RNA, 24 nt, Human
aagcagcuccagccaguucugccc

SEQ ID NO: 1310188 - RNA, 18 nt, Human
aaggacccaagaugccag

SEQ ID NO: 1310189 - RNA, 21 nt, Human
aagugcugggauuacagacau

SEQ ID NO: 1310190 - RNA, 24 nt, Human
aaucugcaagucuguuagggaguu

SEQ ID NO: 1310191 - RNA, 19 nt, Human
acaaagugcugggauuaca

SEQ ID NO: 1310192 - RNA, 24 nt, Human
acaaagugcugggauuacagacau

SEQ ID NO: 1310193 - RNA, 18 nt, Human
acagaguagaucgcaggg

SEQ ID NO: 1310194 - RNA, 23 nt, Human
acaggugcccaccaccacgcccg

SEQ ID NO: 1310195 - RNA, 21 nt, Human
acaugaaccacugcgccuggc

SEQ ID NO: 1310196 - RNA, 19 nt, Human
acccaggcuggagugcaau

SEQ ID NO: 1310197 - RNA, 19 nt, Human
acugcaagacccuccuggg

SEQ ID NO: 1310198 - RNA, 23 nt, Human
agagaacacauucaagacccaaa

SEQ ID NO: 1310199 - RNA, 18 nt, Human
agagaagauucuggaaga

SEQ ID NO: 1310200 - RNA, 24 nt, Human
agagguuucgccauguuggccagg

SEQ ID NO: 1310201 - RNA, 26 nt, Human
agcccuggcuuuuccuccaaaaacaa

SEQ ID NO: 1310202 - RNA, 23 nt, Human
aggaggaaaagaauuugggcuaa

SEQ ID NO: 1310203 - RNA, 24 nt, Human
aggaggaaaagaauuugggcuaaa

SEQ ID NO: 1310204 - RNA, 20 nt, Human
aggugcccaccaccacgccc

SEQ ID NO: 1310205 - RNA, 19 nt, Human
agguguuauaaacaagccu

SEQ ID NO: 1310206 - RNA, 18 nt, Human
aguagcugggauuacagg

SEQ ID NO: 1310207 - RNA, 19 nt, Human
agugauuuccauuuuccua

SEQ ID NO: 1310208 - RNA, 24 nt, Human
agugcaauggcacaaucuuggcuc

SEQ ID NO: 1310209 - RNA, 21 nt, Human
aguggagagaguuccugaccu

SEQ ID NO: 1310210 - RNA, 22 nt, Human
auaacaaucucauuuauccucc

SEQ ID NO: 1310211 - RNA, 22 nt, Human
aucaacuucugucaggcccaca

SEQ ID NO: 1310212 - RNA, 22 nt, Human
auccucaauguacugcuuucuc

SEQ ID NO: 1310213 - RNA, 22 nt, Human
aucucauuuauccucccagcaa

SEQ ID NO: 1310214 - RNA, 23 nt, Human
augacugcaagacccuccugggc

SEQ ID NO: 1310215 - RNA, 23 nt, Human
augccucccagagcaagcucacc

SEQ ID NO: 1310216 - RNA, 18 nt, Human
auucuccugccucagccu

SEQ ID NO: 1310217 - RNA, 22 nt, Human
auuuuugcauuuuuaguagaga

SEQ ID NO: 1310218 - RNA, 18 nt, Human
caaaaacaaaaagaaaca

SEQ ID NO: 1310219 - RNA, 23 nt, Human
caaaaacaaaaagaaacaagcag

SEQ ID NO: 1310220 - RNA, 27 nt, Human
caaaaagaaacaagcagaaaucucauu

SEQ ID NO: 1310221 - RNA, 23 nt, Human
caaagugcugggauuacagacau

SEQ ID NO: 1310222 - RNA, 24 nt, Human
caaagugcugggauuacagacaug

SEQ ID NO: 1310223 - RNA, 18 nt, Human
caacuccugggggugauc

SEQ ID NO: 1310224 - RNA, 19 nt, Human
caagcagaagccccagaga

SEQ ID NO: 1310225 - RNA, 24 nt, Human
caagcagaagccccagagaaacua

SEQ ID NO: 1310226 - RNA, 20 nt, Human
caagugauucuccugccuca

SEQ ID NO: 1310227 - RNA, 22 nt, Human
caagugauucuccugccucagc

SEQ ID NO: 1310228 - RNA, 23 nt, Human
cacauucaagacccaaauaucaa

SEQ ID NO: 1310229 - RNA, 24 nt, Human
caccucagccucacaaagugcugg

SEQ ID NO: 1310230 - RNA, 24 nt, Human
caccugaauucucugaaaauaauu

SEQ ID NO: 1310231 - RNA, 21 nt, Human
cacugcaacuucugccuccca

SEQ ID NO: 1310232 - RNA, 21 nt, Human
cacugcaacuucugccuccca

SEQ ID NO: 1310233 - RNA, 23 nt, Human
cagaaaacguacccacuuuucac

SEQ ID NO: 1310234 - RNA, 19 nt, Human
cagagaaaagcaaccaaag

SEQ ID NO: 1310235 - RNA, 21 nt, Human
cagcacagacagcccugagca

SEQ ID NO: 1310236 - RNA, 23 nt, Human
cagcucacccacaucaagagccu

SEQ ID NO: 1310237 - RNA, 19 nt, Human
caggugcccaccaccacgc

SEQ ID NO: 1310238 - RNA, 21 nt, Human
caggugcccaccaccacgccc

SEQ ID NO: 1310239 - RNA, 19 nt, Human
caguccugagccaacuccu

SEQ ID NO: 1310240 - RNA, 22 nt, Human
caugcugacugccccccuccug

SEQ ID NO: 1310241 - RNA, 21 nt, Human
cauggcacuguccaaccucug

SEQ ID NO: 1310242 - RNA, 24 nt, Human
cauguuggccaggcuggucuugaa

SEQ ID NO: 1310243 - RNA, 22 nt, Human
ccaggaaacuauccuuccaagg

SEQ ID NO: 1310244 - RNA, 21 nt, Human
ccaucagcucuggguuacagg

SEQ ID NO: 1310245 - RNA, 19 nt, Human
ccauguuggccaggcuggu

SEQ ID NO: 1310246 - RNA, 21 nt, Human
ccauguuggccaggcuggucu

SEQ ID NO: 1310247 - RNA, 21 nt, Human
ccauguuggccaggcuggucu

SEQ ID NO: 1310248 - RNA, 21 nt, Human
cccaccaccacgcccggcuga

SEQ ID NO: 1310249 - RNA, 21 nt, Human
cccagaaaaucuggaaggcug

SEQ ID NO: 1310250 - RNA, 19 nt, Human
cccaugcugacugcccccc

SEQ ID NO: 1310251 - RNA, 20 nt, Human
cccaugcugacugccccccu

SEQ ID NO: 1310252 - RNA, 19 nt, Human
ccccucugcuuuccagucc

SEQ ID NO: 1310253 - RNA, 23 nt, Human
cccgaguagcugggauuacaggu

SEQ ID NO: 1310254 - RNA, 24 nt, Human
cccgaguagcugggauuacaggug

SEQ ID NO: 1310255 - RNA, 23 nt, Human
cccggcugauuuuugcauuuuua

SEQ ID NO: 1310256 - RNA, 21 nt, Human
ccgaguagcugggauuacagg

SEQ ID NO: 1310257 - RNA, 23 nt, Human
ccucaucagaaaacguacccacu

SEQ ID NO: 1310258 - RNA, 24 nt, Human
ccucccacguucaagugauucucc

SEQ ID NO: 1310259 - RNA, 19 nt, Human
ccucccagcaacuuggagu

SEQ ID NO: 1310260 - RNA, 20 nt, Human
ccuccuggugguaucuggga

SEQ ID NO: 1310261 - RNA, 23 nt, Human
ccugccucagccucccgaguagc

SEQ ID NO: 1310262 - RNA, 19 nt, Human
ccugggcaagaacaaaaaa

SEQ ID NO: 1310263 - RNA, 27 nt, Human
cgccauguuggccaggcuggucuugaa

SEQ ID NO: 1310264 - RNA, 24 nt, Human
cguuagaggccauuugucauuugc

SEQ ID NO: 1310265 - RNA, 23 nt, Human
cucacugcaacuucugccuccca

SEQ ID NO: 1310266 - RNA, 24 nt, Human
cucagccucccgaguagcugggau

SEQ ID NO: 1310267 - RNA, 19 nt, Human
cuccaaaaacaaaaagaaa

SEQ ID NO: 1310268 - RNA, 19 nt, Human
cuccaaaaacaaaaagaaa

SEQ ID NO: 1310269 - RNA, 18 nt, Human
cuccaagcagaagcccca

SEQ ID NO: 1310270 - RNA, 25 nt, Human
cucccuccaaugggcccccucugcu

SEQ ID NO: 1310271 - RNA, 22 nt, Human
cuccugaccucgugaucugccc

SEQ ID NO: 1310272 - RNA, 19 nt, Human
cuccugggcccucugcaua

SEQ ID NO: 1310273 - RNA, 22 nt, Human
cugaaggucauagccagagugg

SEQ ID NO: 1310274 - RNA, 24 nt, Human
cugcaacuucugccucccacguuc

SEQ ID NO: 1310275 - RNA, 19 nt, Human
cugcaagacccuccugggc

SEQ ID NO: 1310276 - RNA, 20 nt, Human
cugccccccuccugaccagg

SEQ ID NO: 1310277 - RNA, 23 nt, Human
cugccucagccucccgaguagcu

SEQ ID NO: 1310278 - RNA, 24 nt, Human
cuuaucacccaggcuggagugcaa

SEQ ID NO: 1310279 - RNA, 21 nt, Human
cuucccauucccucuuuagcc

SEQ ID NO: 1310280 - RNA, 22 nt, Human
cuugcucuuaucacccaggcug

SEQ ID NO: 1310281 - RNA, 24 nt, Human
cuugcucuuaucacccaggcugga

SEQ ID NO: 1310282 - RNA, 19 nt, Human
gaaaagcaaccaaagaggc

SEQ ID NO: 1310283 - RNA, 21 nt, Human
gaacucgagaaggauagauuu

SEQ ID NO: 1310284 - RNA, 22 nt, Human
gaagagguuucgccauguuggc

SEQ ID NO: 1310285 - RNA, 22 nt, Human
gaccucgugaucugcccaccuc

SEQ ID NO: 1310286 - RNA, 24 nt, Human
gaccucgugaucugcccaccucag

SEQ ID NO: 1310287 - RNA, 23 nt, Human
gagagggcacugaaugcaagacu

SEQ ID NO: 1310288 - RNA, 24 nt, Human
gagaguuccugaccuuugcauggu

SEQ ID NO: 1310289 - RNA, 25 nt, Human
gagccaacuccugggggugaucuug

SEQ ID NO: 1310290 - RNA, 22 nt, Human
gagguuucgccauguuggccag

SEQ ID NO: 1310291 - RNA, 23 nt, Human
gagguuucgccauguuggccagg

SEQ ID NO: 1310292 - RNA, 19 nt, Human
gagugcaauggcacaaucu

SEQ ID NO: 1310293 - RNA, 22 nt, Human
gauuacagacaugaaccacugc

SEQ ID NO: 1310294 - RNA, 21 nt, Human
gauucuccugccucagccucc

SEQ ID NO: 1310295 - RNA, 21 nt, Human
gcagcuccagccaguucugcc

SEQ ID NO: 1310296 - RNA, 24 nt, Human
gccaagugauuuccauuuuccuau

SEQ ID NO: 1310297 - RNA, 18 nt, Human
gccaugguguuggaagaa

SEQ ID NO: 1310298 - RNA, 21 nt, Human
gcucacugcaacuucugccuc

SEQ ID NO: 1310299 - RNA, 21 nt, Human
gcucuuaucacccaggcugga

SEQ ID NO: 1310300 - RNA, 24 nt, Human
gcucuuaucacccaggcuggagug

SEQ ID NO: 1310301 - RNA, 19 nt, Human
gcuggagugcaauggcaca

SEQ ID NO: 1310302 - RNA, 23 nt, Human
gcuggucuugaacuccugaccuc

SEQ ID NO: 1310303 - RNA, 21 nt, Human
gcuuugggcuaggcaaagggg

SEQ ID NO: 1310304 - RNA, 19 nt, Human
ggaagacagcucacccaca

SEQ ID NO: 1310305 - RNA, 26 nt, Human
ggaccaaaccaagaacucgcagggaa

SEQ ID NO: 1310306 - RNA, 22 nt, Human
ggcaucuucaaaaccagcagca

SEQ ID NO: 1310307 - RNA, 20 nt, Human
ggccagagcuugugccaugu

SEQ ID NO: 1310308 - RNA, 24 nt, Human
ggcuggucuugaacuccugaccuc

SEQ ID NO: 1310309 - RNA, 24 nt, Human
gggcaagaacaaaaaauagucuuu

SEQ ID NO: 1310310 - RNA, 19 nt, Human
ggucuugaacuccugaccu

SEQ ID NO: 1310311 - RNA, 21 nt, Human
gugaucugcccaccucagccu

SEQ ID NO: 1310312 - RNA, 24 nt, Human
gugauucuccugccucagccuccc

SEQ ID NO: 1310313 - RNA, 24 nt, Human
guuucauucuacuauuaagaacaa

SEQ ID NO: 1310314 - RNA, 23 nt, Human
uacaggugcccaccaccacgccc

SEQ ID NO: 1310315 - RNA, 19 nt, Human
uaccauagacgagguugga

SEQ ID NO: 1310316 - RNA, 18 nt, Human
uacuuuuuguuggaagga

SEQ ID NO: 1310317 - RNA, 21 nt, Human
uagagaugcuauucucuccau

SEQ ID NO: 1310318 - RNA, 19 nt, Human
uagaggcaucucacccaua

SEQ ID NO: 1310319 - RNA, 22 nt, Human
uagguaauguucuuguguuucc

SEQ ID NO: 1310320 - RNA, 24 nt, Human
uaguagagaagagguuucgccaug

SEQ ID NO: 1310321 - RNA, 19 nt, Human
uagugacacaugugaguuu

SEQ ID NO: 1310322 - RNA, 21 nt, Human
uagugcaucuuaggugcuggg

SEQ ID NO: 1310323 - RNA, 23 nt, Human
uagugugaggaacuccugggagg

SEQ ID NO: 1310324 - RNA, 20 nt, Human
uaucacccaggcuggagugc

SEQ ID NO: 1310325 - RNA, 25 nt, Human
uauucuaccacucuuuuugccuaaa

SEQ ID NO: 1310326 - RNA, 21 nt, Human
ucaaaaccagcagcaccugaa

SEQ ID NO: 1310327 - RNA, 18 nt, Human
ucaagugauucuccugcc

SEQ ID NO: 1310328 - RNA, 18 nt, Human
ucacaaagugcugggauu

SEQ ID NO: 1310329 - RNA, 18 nt, Human
ucacccaggcuggagugc

SEQ ID NO: 1310330 - RNA, 18 nt, Human
ucacugcaacuucugccu

SEQ ID NO: 1310331 - RNA, 19 nt, Human
ucacugcaacuucugccuc

SEQ ID NO: 1310332 - RNA, 22 nt, Human
ucacugcaacuucugccuccca

SEQ ID NO: 1310333 - RNA, 24 nt, Human
ucacugcaacuucugccucccacg

SEQ ID NO: 1310334 - RNA, 20 nt, Human
ucagccucccgaguagcugg

SEQ ID NO: 1310335 - RNA, 24 nt, Human
ucauuugccuucccauucccucuu

SEQ ID NO: 1310336 - RNA, 22 nt, Human
uccaaccucugaaaggagcaca

SEQ ID NO: 1310337 - RNA, 24 nt, Human
ucccacguucaagugauucuccug

SEQ ID NO: 1310338 - RNA, 21 nt, Human
ucccagcagggcaggccccuu

SEQ ID NO: 1310339 - RNA, 23 nt, Human
ucccgaguagcugggauuacagg

SEQ ID NO: 1310340 - RNA, 24 nt, Human
ucccgaguagcugggauuacaggu

SEQ ID NO: 1310341 - RNA, 18 nt, Human
ucccuccaaugggccccc

SEQ ID NO: 1310342 - RNA, 20 nt, Human
uccuucuucuuuccccuuca

SEQ ID NO: 1310343 - RNA, 22 nt, Human
uccuucuucuuuccccuucccu

SEQ ID NO: 1310344 - RNA, 22 nt, Human
ucgccauguuggccaggcuggu

SEQ ID NO: 1310345 - RNA, 24 nt, Human
ucgccauguuggccaggcuggucu

SEQ ID NO: 1310346 - RNA, 22 nt, Human
ucuagggaccaaaccaagaacu

SEQ ID NO: 1310347 - RNA, 24 nt, Human
ucuccugccucagccucccgagua

SEQ ID NO: 1310348 - RNA, 22 nt, Human
ucuccuggacagcaucaguccc

SEQ ID NO: 1310349 - RNA, 19 nt, Human
ucugcccaccucagccuca

SEQ ID NO: 1310350 - RNA, 22 nt, Human
ucugcccaccucagccucacaa

SEQ ID NO: 1310351 - RNA, 19 nt, Human
ucuguaaaaaacuuagccc

SEQ ID NO: 1310352 - RNA, 24 nt, Human
ucuuaaacuccaagcagaagcccc

SEQ ID NO: 1310353 - RNA, 20 nt, Human
ucuuaucacccaggcuggag

SEQ ID NO: 1310354 - RNA, 19 nt, Human
ucuugaacuccugaccucg

SEQ ID NO: 1310355 - RNA, 24 nt, Human
ucuugcucuuaucacccaggcugg

SEQ ID NO: 1310356 - RNA, 25 nt, Human
ucuugcucuuaucacccaggcugga

SEQ ID NO: 1310357 - RNA, 24 nt, Human
ugaaaauuuuacuaccaaacauau

SEQ ID NO: 1310358 - RNA, 18 nt, Human
ugacccaaaguggagcag

SEQ ID NO: 1310359 - RNA, 21 nt, Human
ugacugcaagacccuccuggg

SEQ ID NO: 1310360 - RNA, 25 nt, Human
ugagcaaaggcccagcuggucacag

SEQ ID NO: 1310361 - RNA, 21 nt, Human
ugagugggaacucgagaagga

SEQ ID NO: 1310362 - RNA, 23 nt, Human
ugaguuccacauaacacauuauu

SEQ ID NO: 1310363 - RNA, 22 nt, Human
ugaucugcccaccucagccuca

SEQ ID NO: 1310364 - RNA, 18 nt, Human
ugcauaauguugaguggc

SEQ ID NO: 1310365 - RNA, 24 nt, Human
ugccucagccucccgaguagcugg

SEQ ID NO: 1310366 - RNA, 21 nt, Human
ugcucuuaucacccaggcugg

SEQ ID NO: 1310367 - RNA, 24 nt, Human
ugcucuuaucacccaggcuggagu

SEQ ID NO: 1310368 - RNA, 23 nt, Human
ugcugggauuacagacaugaacc

SEQ ID NO: 1310369 - RNA, 21 nt, Human
uggaaagagaagauucuggaa

SEQ ID NO: 1310370 - RNA, 22 nt, Human
uggaaagagaagauucuggaag

SEQ ID NO: 1310371 - RNA, 18 nt, Human
uggaagaagggggaaggg

SEQ ID NO: 1310372 - RNA, 18 nt, Human
uggaagaagggggaaggu

SEQ ID NO: 1310373 - RNA, 24 nt, Human
uggagugcaauggcacaaucuugg

SEQ ID NO: 1310374 - RNA, 22 nt, Human
uggagugggcuauaaggggagg

SEQ ID NO: 1310375 - RNA, 24 nt, Human
uggcacaaucuuggcucacugcaa

SEQ ID NO: 1310376 - RNA, 24 nt, Human
uggccaggcuggucuugaacuccu

SEQ ID NO: 1310377 - RNA, 25 nt, Human
ugggaagacagcucacccacaucaa

SEQ ID NO: 1310378 - RNA, 21 nt, Human
ugggauuacagacaugaacca

SEQ ID NO: 1310379 - RNA, 23 nt, Human
ugggauuacagacaugaaccacu

SEQ ID NO: 1310380 - RNA, 24 nt, Human
ugggauuacagacaugaaccacug

SEQ ID NO: 1310381 - RNA, 24 nt, Human
ugggauuacagacaugaaccacug

SEQ ID NO: 1310382 - RNA, 21 nt, Human
ugggauuacaggugcccacca

SEQ ID NO: 1310383 - RNA, 24 nt, Human
ugggauuacaggugcccaccacca

SEQ ID NO: 1310384 - RNA, 22 nt, Human
uggggaaaaacaagaaaggagg

SEQ ID NO: 1310385 - RNA, 24 nt, Human
uggggacugguacugucuuggauu

SEQ ID NO: 1310386 - RNA, 22 nt, Human
ugguuagugacacaugugaguu

SEQ ID NO: 1310387 - RNA, 23 nt, Human
uguaaaaaacuuagcccaugcug

SEQ ID NO: 1310388 - RNA, 24 nt, Human
uguccaacacugcuagaggcaucu

SEQ ID NO: 1310389 - RNA, 26 nt, Human
ugugaggaacuccugggaggggucug

SEQ ID NO: 1310390 - RNA, 22 nt, Human
uguuuccccugggggaaauacc

SEQ ID NO: 1310391 - RNA, 21 nt, Human
uuaaacuccaagcagaagccc

SEQ ID NO: 1310392 - RNA, 24 nt, Human
uuaguagagaagagguuucgccau

SEQ ID NO: 1310393 - RNA, 25 nt, Human
uucaaaaccagcagcaccugaauuc

SEQ ID NO: 1310394 - RNA, 21 nt, Human
uucaagugauucuccugccuc

SEQ ID NO: 1310395 - RNA, 23 nt, Human
uucaagugauucuccugccucag

SEQ ID NO: 1310396 - RNA, 24 nt, Human
uucaagugauucuccugccucagc

SEQ ID NO: 1310397 - RNA, 24 nt, Human
uuccuccaguaauaaagggaaagc

SEQ ID NO: 1310398 - RNA, 24 nt, Human
uucuaggaagggugauaagagcua

SEQ ID NO: 1310399 - RNA, 22 nt, Human
uucucuccauggcaaacuucag

SEQ ID NO: 1310400 - RNA, 23 nt, Human
uucugugaaugguaucaauagua

SEQ ID NO: 1310401 - RNA, 23 nt, Human
uugaaggucauaacuauuaagug

SEQ ID NO: 1310402 - RNA, 24 nt, Human
uugaaggucauaacuauuaagugg

SEQ ID NO: 1310403 - RNA, 22 nt, Human
uugcaacguuagaggccauuug

SEQ ID NO: 1310404 - RNA, 23 nt, Human
uuucauucuacuauuaagaacaa

SEQ ID NO: 1310405 - RNA, 24 nt, Human
uuucgccauguuggccaggcuggu

SEQ ID NO: 1310406 - RNA, 22 nt, Human
uuuuuaguagagaagagguuuc

SEQ ID NO: 1310407 - RNA, 20 nt, Human
uuuuugcauuuuuaguagag

SEQ ID NO: 1310408 - RNA, 20 nt, Human
cucuuuuugggccaccgacc

SEQ ID NO: 1310409 - RNA, 24 nt, Human
guguuucuuuuuuuuuuuuuuuuu

SEQ ID NO: 1310410 - RNA, 18 nt, Human
ucuuuuuuuuuuuuuuuu

SEQ ID NO: 1310411 - RNA, 30 nt, Human
uuguguuucuuuuuuuuuuuuuuuuuuuuc

SEQ ID NO: 1310412 - RNA, 19 nt, Human
aaagauaugcacacaacuu

SEQ ID NO: 1310413 - RNA, 22 nt, Human
agccuggaagcgcucaccagug

SEQ ID NO: 1310414 - RNA, 23 nt, Human
agggaggauguuggcagggcugg

SEQ ID NO: 1310415 - RNA, 18 nt, Human
cacagggaggauguuggc

SEQ ID NO: 1310416 - RNA, 18 nt, Human
ccccgggccacgacugcc

SEQ ID NO: 1310417 - RNA, 19 nt, Human
cccuugaaugugggcugga

SEQ ID NO: 1310418 - RNA, 19 nt, Human
cuauaccaaaaaaaagcag

SEQ ID NO: 1310419 - RNA, 23 nt, Human
cugaggugaugcuuacuuccucu

SEQ ID NO: 1310420 - RNA, 21 nt, Human
cuuacuuccucuccccuugaa

SEQ ID NO: 1310421 - RNA, 23 nt, Human
gacugaggcugggggcugcccuc

SEQ ID NO: 1310422 - RNA, 18 nt, Human
gggaggauguuggcaggg

SEQ ID NO: 1310423 - RNA, 18 nt, Human
gggggcugcccucagagg

SEQ ID NO: 1310424 - RNA, 18 nt, Human
uaccaaaaaaaagcaguu

SEQ ID NO: 1310425 - RNA, 24 nt, Human
uaccugaauuugcaaaucagacau

SEQ ID NO: 1310426 - RNA, 18 nt, Human
ucaccagugcaacguucu

SEQ ID NO: 1310427 - RNA, 25 nt, Human
uccccgggccacgacugccauggcu

SEQ ID NO: 1310428 - RNA, 19 nt, Human
ugauccccgggccacgacu

SEQ ID NO: 1310429 - RNA, 18 nt, Human
ugccauggcuuguggcug

SEQ ID NO: 1310430 - RNA, 22 nt, Human
uggaaugauccccgggccacga

SEQ ID NO: 1310431 - RNA, 19 nt, Human
uggacugaggcugggggcu

SEQ ID NO: 1310432 - RNA, 19 nt, Human
uggcugcagugcugcuccu

SEQ ID NO: 1310433 - RNA, 18 nt, Human
ugugccugaggugaugcu

SEQ ID NO: 1310434 - RNA, 19 nt, Human
ugugccugaggugaugcuu

SEQ ID NO: 1310435 - RNA, 22 nt, Human
uuaauguugcugcuguaaauag

SEQ ID NO: 1310436 - RNA, 20 nt, Human
uugucuuaaagauaugcaca

SEQ ID NO: 1310437 - RNA, 21 nt, Human
uuuaaagauauaccugaauuu

SEQ ID NO: 1310438 - RNA, 21 nt, Human
agcuaauagccagcgcagucc

SEQ ID NO: 1310439 - RNA, 18 nt, Human
aguagguggaguuguaug

SEQ ID NO: 1310440 - RNA, 19 nt, Human
cauuccuguucugguggag

SEQ ID NO: 1310441 - RNA, 22 nt, Human
cuaauagccagcgcaguccuuc

SEQ ID NO: 1310442 - RNA, 22 nt, Human
cugugugaugagcaucuuucuc

SEQ ID NO: 1310443 - RNA, 23 nt, Human
cuguuacuuucuuuuacuuucuc

SEQ ID NO: 1310444 - RNA, 22 nt, Human
gagaugaaccuguuugcuaagg

SEQ ID NO: 1310445 - RNA, 24 nt, Human
ggagggauaucaacuguuucuuuu

SEQ ID NO: 1310446 - RNA, 18 nt, Human
gguaggugguaguuggca

SEQ ID NO: 1310447 - RNA, 24 nt, Human
uaguccugauaguucuggagauga

SEQ ID NO: 1310448 - RNA, 19 nt, Human
uccagagccuguguuauuc

SEQ ID NO: 1310449 - RNA, 22 nt, Human
uccuuugacauuccuguucugg

SEQ ID NO: 1310450 - RNA, 23 nt, Human
ucuguuuuucucuuuacuuucuc

SEQ ID NO: 1310451 - RNA, 18 nt, Human
ucuuggagauugagaugc

SEQ ID NO: 1310452 - RNA, 22 nt, Human
ugagcaucuuucuccagagccu

SEQ ID NO: 1310453 - RNA, 23 nt, Human
ugaugagcaucuuucuccagagc

SEQ ID NO: 1310454 - RNA, 19 nt, Human
uggagaugaaccuguuugc

SEQ ID NO: 1310455 - RNA, 18 nt, Human
uguauggggaguguagaa

SEQ ID NO: 1310456 - RNA, 23 nt, Human
uucugguggagaagcugugugau

SEQ ID NO: 1310457 - RNA, 20 nt, Human
agaaugcagcuucccuucgc

SEQ ID NO: 1310458 - RNA, 21 nt, Human
caccugccaccuucucaucuu

SEQ ID NO: 1310459 - RNA, 19 nt, Human
caucuaucuucccaugucc

SEQ ID NO: 1310460 - RNA, 22 nt, Human
ccccagugcacaccugccaccu

SEQ ID NO: 1310461 - RNA, 24 nt, Human
cguucuggucucuucauagcccca

SEQ ID NO: 1310462 - RNA, 21 nt, Human
cuccagugauccuguuccacc

SEQ ID NO: 1310463 - RNA, 24 nt, Human
uaauagcagaaugcagcuucccuu

SEQ ID NO: 1310464 - RNA, 22 nt, Human
uccuagggcagagaaagauggc

SEQ ID NO: 1310465 - RNA, 19 nt, Human
uccuguuccacccagcuuc

SEQ ID NO: 1310466 - RNA, 22 nt, Human
ugacuguaagagguguuucuuc

SEQ ID NO: 1310467 - RNA, 25 nt, Human
ugauccuguuccacccagcuucuuc

SEQ ID NO: 1310468 - RNA, 21 nt, Human
uuaggagucuggguuccaggg

SEQ ID NO: 1310469 - RNA, 21 nt, Human
aaaagucuuucagaugaguuc

SEQ ID NO: 1310470 - RNA, 20 nt, Human
aacacagugaugcccugucu

SEQ ID NO: 1310471 - RNA, 21 nt, Human
aacacagugaugcccugucuc

SEQ ID NO: 1310472 - RNA, 20 nt, Human
aagaagcaucuuugaacucc

SEQ ID NO: 1310473 - RNA, 18 nt, Human
aagacgagauguucaagc

SEQ ID NO: 1310474 - RNA, 20 nt, Human
aaggaccaguaaagccagua

SEQ ID NO: 1310475 - RNA, 18 nt, Human
acuacguccauuaaagcu

SEQ ID NO: 1310476 - RNA, 24 nt, Human
acuuugggagaccgaggugggcag

SEQ ID NO: 1310477 - RNA, 25 nt, Human
agaauaccuugccuucaaguaaauu

SEQ ID NO: 1310478 - RNA, 21 nt, Human
agaccgaggugggcagauugc

SEQ ID NO: 1310479 - RNA, 24 nt, Human
agcacuuugggagaccgagguggg

SEQ ID NO: 1310480 - RNA, 24 nt, Human
aguggcucacuccuguaaucccag

SEQ ID NO: 1310481 - RNA, 22 nt, Human
caagaccaagcagcaacacagu

SEQ ID NO: 1310482 - RNA, 25 nt, Human
caagaccaagcagcaacacagugcc

SEQ ID NO: 1310483 - RNA, 27 nt, Human
caagaccaagcagcaacacagugccaa

SEQ ID NO: 1310484 - RNA, 24 nt, Human
cacuccacguuaacacaugcucaa

SEQ ID NO: 1310485 - RNA, 24 nt, Human
cacuccuguaaucccagcacuuug

SEQ ID NO: 1310486 - RNA, 24 nt, Human
cagcacuuugggagaccgaggugg

SEQ ID NO: 1310487 - RNA, 19 nt, Human
cagugccagagcagguggu

SEQ ID NO: 1310488 - RNA, 19 nt, Human
cccaggaaaaaucaucuac

SEQ ID NO: 1310489 - RNA, 22 nt, Human
ccccaaggaccaguaaagccag

SEQ ID NO: 1310490 - RNA, 22 nt, Human
ccuguaaucccagcacuuuggg

SEQ ID NO: 1310491 - RNA, 25 nt, Human
cgaggugggcagauugcuugagcca

SEQ ID NO: 1310492 - RNA, 20 nt, Human
cgugaccagggcuuagccaa

SEQ ID NO: 1310493 - RNA, 24 nt, Human
cucacuccuguaaucccagcacuu

SEQ ID NO: 1310494 - RNA, 20 nt, Human
cuccaagaagcaucuuugaa

SEQ ID NO: 1310495 - RNA, 24 nt, Human
cugaacacaagaccaagcagcaac

SEQ ID NO: 1310496 - RNA, 24 nt, Human
cugagacagacguugcucuuuuac

SEQ ID NO: 1310497 - RNA, 22 nt, Human
cuuccacaggucuaaaaaugga

SEQ ID NO: 1310498 - RNA, 22 nt, Human
gaacagacauaaugcuugaaac

SEQ ID NO: 1310499 - RNA, 21 nt, Human
gaacuccucccaugcaggccc

SEQ ID NO: 1310500 - RNA, 22 nt, Human
gaccaagcagcaacacagugcc

SEQ ID NO: 1310501 - RNA, 24 nt, Human
gagccaguucaagaccagccuugg

SEQ ID NO: 1310502 - RNA, 20 nt, Human
ggacuagaagcuugacugag

SEQ ID NO: 1310503 - RNA, 18 nt, Human
ggcagggcgcaguggcuc

SEQ ID NO: 1310504 - RNA, 24 nt, Human
gggcgcaguggcucacuccuguaa

SEQ ID NO: 1310505 - RNA, 19 nt, Human
gucucggguaggcuccacc

SEQ ID NO: 1310506 - RNA, 20 nt, Human
uaauauaccacuccacguua

SEQ ID NO: 1310507 - RNA, 22 nt, Human
uacuguguuucauuaaucccac

SEQ ID NO: 1310508 - RNA, 20 nt, Human
uauagaauaccuugccuuca

SEQ ID NO: 1310509 - RNA, 25 nt, Human
ucaggcagggcgcaguggcucacuc

SEQ ID NO: 1310510 - RNA, 21 nt, Human
ucauauccucccauaucagaa

SEQ ID NO: 1310511 - RNA, 20 nt, Human
ucuggacuagaagcuugacu

SEQ ID NO: 1310512 - RNA, 18 nt, Human
ugaaacaaaaucucucac

SEQ ID NO: 1310513 - RNA, 19 nt, Human
ugaggggaagauggcauga

SEQ ID NO: 1310514 - RNA, 21 nt, Human
ugaugccagccuucaggauuu

SEQ ID NO: 1310515 - RNA, 25 nt, Human
ugcuaaggacgcugugggagucgcu

SEQ ID NO: 1310516 - RNA, 25 nt, Human
uggauacuugugauaugaugcucca

SEQ ID NO: 1310517 - RNA, 22 nt, Human
uggcagccuccccaaggaccag

SEQ ID NO: 1310518 - RNA, 21 nt, Human
uggcucacuccuguaauccca

SEQ ID NO: 1310519 - RNA, 24 nt, Human
uggcucacuccuguaaucccagca

SEQ ID NO: 1310520 - RNA, 22 nt, Human
ugggagaccgaggugggcagau

SEQ ID NO: 1310521 - RNA, 24 nt, Human
ugggagaccgaggugggcagauug

SEQ ID NO: 1310522 - RNA, 21 nt, Human
uguucaagcacguuauucaac

SEQ ID NO: 1310523 - RNA, 20 nt, Human
uugaaacaaaaucucucacu

SEQ ID NO: 1310524 - RNA, 19 nt, Human
uugaagccuaaguaaaugu

SEQ ID NO: 1310525 - RNA, 20 nt, Human
uugcaacuuucuuccugauu

SEQ ID NO: 1310526 - RNA, 18 nt, Human
uugcacuugaggggaaga

SEQ ID NO: 1310527 - RNA, 21 nt, Human
uuggcagccuccccaaggacg

SEQ ID NO: 1310528 - RNA, 23 nt, Human
uuucccauuuuacuacauucacu

SEQ ID NO: 1310529 - RNA, 18 nt, Human
uuucuuaucuuccacagg

SEQ ID NO: 1310530 - RNA, 21 nt, Human
acacagcaagaaggagcagag

SEQ ID NO: 1310531 - RNA, 22 nt, Human
acacagcaagaaggagcagaga

SEQ ID NO: 1310532 - RNA, 24 nt, Human
agaagaaaaaacuguuccagagag

SEQ ID NO: 1310533 - RNA, 24 nt, Human
aggagcagagaugggauuugaagu

SEQ ID NO: 1310534 - RNA, 19 nt, Human
cagaagaaaaaacuguucc

SEQ ID NO: 1310535 - RNA, 21 nt, Human
ugaauucucagaacaaccuua

SEQ ID NO: 1310536 - RNA, 22 nt, Human
ugagguagguaugauuucaacu

SEQ ID NO: 1310537 - RNA, 24 nt, Human
ugggauuugaaguuggcuacauga

SEQ ID NO: 1310538 - RNA, 22 nt, Human
uuuccagaagaaaaaacuguuc

SEQ ID NO: 1310539 - RNA, 24 nt, Human
aaaauaacaacuccauuaugccca

SEQ ID NO: 1310540 - RNA, 23 nt, Human
aaauaacaacuccauuaugccca

SEQ ID NO: 1310541 - RNA, 18 nt, Human
cugaauaaggugaagucc

SEQ ID NO: 1310542 - RNA, 22 nt, Human
gggcacuggagcauacagaucu

SEQ ID NO: 1310543 - RNA, 24 nt, Human
uaaaauaacaacuccauuaugccc

SEQ ID NO: 1310544 - RNA, 23 nt, Human
uacuucuaaaauaacaacuccuu

SEQ ID NO: 1310545 - RNA, 21 nt, Human
ucuaaaauaacaacuccauua

SEQ ID NO: 1310546 - RNA, 18 nt, Human
ugcccaguauuaauuuga

SEQ ID NO: 1310547 - RNA, 19 nt, Human
aggcaggguaagagaccag

SEQ ID NO: 1310548 - RNA, 23 nt, Human
gugugaggcaggguaagagaccc

SEQ ID NO: 1310549 - RNA, 20 nt, Human
ugaggcaggguaagagacca

SEQ ID NO: 1310550 - RNA, 18 nt, Human
aagaaagagaaaggagaa

SEQ ID NO: 1310551 - RNA, 22 nt, Human
aagaaagagaaaggagaacagu

SEQ ID NO: 1310552 - RNA, 23 nt, Human
aaggaccucacagcccuaaagau

SEQ ID NO: 1310553 - RNA, 21 nt, Human
aaggagaagaaaaugcaggag

SEQ ID NO: 1310554 - RNA, 23 nt, Human
acaaggagaagaaaaugcaggag

SEQ ID NO: 1310555 - RNA, 19 nt, Human
accaucauccccacaugcc

SEQ ID NO: 1310556 - RNA, 18 nt, Human
acuacacucaguuuuugc

SEQ ID NO: 1310557 - RNA, 18 nt, Human
agaagaaagagaaaggag

SEQ ID NO: 1310558 - RNA, 23 nt, Human
agaccaucauccccacaugccag

SEQ ID NO: 1310559 - RNA, 22 nt, Human
agaggaaggaugucaucaagag

SEQ ID NO: 1310560 - RNA, 20 nt, Human
aggagaagaaaaugcaggag

SEQ ID NO: 1310561 - RNA, 22 nt, Human
aggaggaggagguguccacacu

SEQ ID NO: 1310562 - RNA, 25 nt, Human
aggcagaagaaagagaaaggggacc

SEQ ID NO: 1310563 - RNA, 19 nt, Human
aggcugugaugaccuucag

SEQ ID NO: 1310564 - RNA, 23 nt, Human
caaggaccaguaguggugagcac

SEQ ID NO: 1310565 - RNA, 18 nt, Human
caccagugccucuuccau

SEQ ID NO: 1310566 - RNA, 20 nt, Human
caccagugccucuuccaucc

SEQ ID NO: 1310567 - RNA, 21 nt, Human
caccagugccucuuccauccc

SEQ ID NO: 1310568 - RNA, 19 nt, Human
cagcagcaggacuccugca

SEQ ID NO: 1310569 - RNA, 19 nt, Human
caggaggaggaggugucca

SEQ ID NO: 1310570 - RNA, 19 nt, Human
caucaagagaggcugugau

SEQ ID NO: 1310571 - RNA, 23 nt, Human
caugaaagggaacuauaagcaga

SEQ ID NO: 1310572 - RNA, 20 nt, Human
ccagugccucuuccaucccc

SEQ ID NO: 1310573 - RNA, 20 nt, Human
ccccacaugccagcagcagg

SEQ ID NO: 1310574 - RNA, 18 nt, Human
ccccaugaggggaggacc

SEQ ID NO: 1310575 - RNA, 21 nt, Human
cccuaaagaucaugaaaggga

SEQ ID NO: 1310576 - RNA, 21 nt, Human
gagcacacacugaggcugagc

SEQ ID NO: 1310577 - RNA, 19 nt, Human
gcagaagaaagagaaagga

SEQ ID NO: 1310578 - RNA, 19 nt, Human
ggaggaggagguguccaca

SEQ ID NO: 1310579 - RNA, 21 nt, Human
guuccaccagugccucuucca

SEQ ID NO: 1310580 - RNA, 24 nt, Human
uagcaucgguuccaccagugccuc

SEQ ID NO: 1310581 - RNA, 24 nt, Human
uccauccccaacacagaugaggag

SEQ ID NO: 1310582 - RNA, 21 nt, Human
uccccaacacagaugaggagg

SEQ ID NO: 1310583 - RNA, 18 nt, Human
ugaaggcacaccaggaca

SEQ ID NO: 1310584 - RNA, 19 nt, Human
ugagcagaagaggaaggau

SEQ ID NO: 1310585 - RNA, 18 nt, Human
ugaggggaggaccaggcc

SEQ ID NO: 1310586 - RNA, 27 nt, Human
ugugaaggcacaccaggacaaccccca

SEQ ID NO: 1310587 - RNA, 23 nt, Human
uguuccaguccuucaaugucuuc

SEQ ID NO: 1310588 - RNA, 20 nt, Human
ugauuucuuggauucccccu

SEQ ID NO: 1310589 - RNA, 23 nt, Human
uuucuuggauucccccucguaua

SEQ ID NO: 1310590 - RNA, 20 nt, Human
agcagcagccaagugcugag

SEQ ID NO: 1310591 - RNA, 21 nt, Human
cggcagcagcagccaagugcu

SEQ ID NO: 1310592 - RNA, 24 nt, Human
cggcagcagcagccaagugcugag

SEQ ID NO: 1310593 - RNA, 22 nt, Human
gccaagugcugaguggauugag

SEQ ID NO: 1310594 - RNA, 21 nt, Human
uccagaaggcacuagaagcuc

SEQ ID NO: 1310595 - RNA, 18 nt, Human
ugaguggauugagugcca

SEQ ID NO: 1310596 - RNA, 24 nt, Human
acucaggggcggccucagguuugg

SEQ ID NO: 1310597 - RNA, 19 nt, Human
agguggcguaggcggggag

SEQ ID NO: 1310598 - RNA, 18 nt, Human
ugcccagacucaggggcg

SEQ ID NO: 1310599 - RNA, 22 nt, Human
uggcggagcagcggcuggggcc

SEQ ID NO: 1310600 - RNA, 21 nt, Human
uuaggcuugcaggccgcggag

SEQ ID NO: 1310601 - RNA, 23 nt, Human
uuggcggagcagcggcuggggcc

SEQ ID NO: 1310602 - RNA, 19 nt, Human
acugcagccucaaccuccu

SEQ ID NO: 1310603 - RNA, 21 nt, Human
acugcucugacucugucucca

SEQ ID NO: 1310604 - RNA, 18 nt, Human
agcgcagaaaucgaaaac

SEQ ID NO: 1310605 - RNA, 19 nt, Human
aggaggcugccuggcuggg

SEQ ID NO: 1310606 - RNA, 18 nt, Human
aggcaggagugcaguggc

SEQ ID NO: 1310607 - RNA, 20 nt, Human
agugcaguggcgcgaucaua

SEQ ID NO: 1310608 - RNA, 22 nt, Human
agugcaguggcgcgaucauacc

SEQ ID NO: 1310609 - RNA, 18 nt, Human
auaccucacugcagccuc

SEQ ID NO: 1310610 - RNA, 21 nt, Human
caaccccagcaacuucuuugg

SEQ ID NO: 1310611 - RNA, 25 nt, Human
caaccuccugggcucaugugauccu

SEQ ID NO: 1310612 - RNA, 20 nt, Human
caccgugugcccgaggaggc

SEQ ID NO: 1310613 - RNA, 19 nt, Human
cacugcagccucaaccucc

SEQ ID NO: 1310614 - RNA, 23 nt, Human
cagccucaaccuccugggcucau

SEQ ID NO: 1310615 - RNA, 22 nt, Human
ccacccuugacugcucugacuc

SEQ ID NO: 1310616 - RNA, 22 nt, Human
cccaggcaggagugcaguggcg

SEQ ID NO: 1310617 - RNA, 22 nt, Human
cccucccacgaaccuucuccca

SEQ ID NO: 1310618 - RNA, 22 nt, Human
ccggcgccuucaccgugugccc

SEQ ID NO: 1310619 - RNA, 18 nt, Human
ccucaaccuccugggcuc

SEQ ID NO: 1310620 - RNA, 20 nt, Human
ccucccacgaaccuucuccc

SEQ ID NO: 1310621 - RNA, 19 nt, Human
ccucccgccucagcguccc

SEQ ID NO: 1310622 - RNA, 20 nt, Human
ccuggcagggagggacgggc

SEQ ID NO: 1310623 - RNA, 24 nt, Human
cgccauuagcuuugaggaggguuc

SEQ ID NO: 1310624 - RNA, 20 nt, Human
cggccgaagcggcgccgcgg

SEQ ID NO: 1310625 - RNA, 18 nt, Human
cgugugcccgaggaggcu

SEQ ID NO: 1310626 - RNA, 24 nt, Human
cucacugcagccucaaccuccugg

SEQ ID NO: 1310627 - RNA, 20 nt, Human
cucaguugcccaggcaggag

SEQ ID NO: 1310628 - RNA, 18 nt, Human
cucaugugauccucccgc

SEQ ID NO: 1310629 - RNA, 22 nt, Human
cucccauuuuacugaggcccag

SEQ ID NO: 1310630 - RNA, 22 nt, Human
cuccuggcgguucuccgcuccg

SEQ ID NO: 1310631 - RNA, 23 nt, Human
cugacaagagugcagucccucuc

SEQ ID NO: 1310632 - RNA, 22 nt, Human
cugcagccucaaccuccugggc

SEQ ID NO: 1310633 - RNA, 21 nt, Human
cuggccuccuggaagggcugg

SEQ ID NO: 1310634 - RNA, 20 nt, Human
cugggcuccagccuccuggc

SEQ ID NO: 1310635 - RNA, 19 nt, Human
gagaguuuguccucugcgg

SEQ ID NO: 1310636 - RNA, 21 nt, Human
gagugcagucccucucgaggc

SEQ ID NO: 1310637 - RNA, 20 nt, Human
gcccaggcaggagugcagug

SEQ ID NO: 1310638 - RNA, 19 nt, Human
gcuccgcaaccccagcaac

SEQ ID NO: 1310639 - RNA, 27 nt, Human
gcucuucgcuguuagggcuucccugac

SEQ ID NO: 1310640 - RNA, 19 nt, Human
ggagggacgggcuugggcc

SEQ ID NO: 1310641 - RNA, 18 nt, Human
ggagugcaguggcgcgau

SEQ ID NO: 1310642 - RNA, 21 nt, Human
gguggcagagacaggcaguga

SEQ ID NO: 1310643 - RNA, 24 nt, Human
gugauccucccgccucagcguccc

SEQ ID NO: 1310644 - RNA, 24 nt, Human
uaccucacugcagccucaaccucc

SEQ ID NO: 1310645 - RNA, 23 nt, Human
ucacugcagccucaaccuccugg

SEQ ID NO: 1310646 - RNA, 24 nt, Human
ucacugcagccucaaccuccuggg

SEQ ID NO: 1310647 - RNA, 28 nt, Human
uccauuuuuauuuuggaggccccuccca

SEQ ID NO: 1310648 - RNA, 19 nt, Human
ucccacgaaccuucuccca

SEQ ID NO: 1310649 - RNA, 22 nt, Human
ucccacgaaccuucucccauuu

SEQ ID NO: 1310650 - RNA, 23 nt, Human
ucccguguacccagauauggcgg

SEQ ID NO: 1310651 - RNA, 22 nt, Human
uccgcaaccccagcaacuucuu

SEQ ID NO: 1310652 - RNA, 21 nt, Human
uccgcuccgcaaccccagcaa

SEQ ID NO: 1310653 - RNA, 22 nt, Human
uccugggcucaugugauccucc

SEQ ID NO: 1310654 - RNA, 24 nt, Human
uccugggcucaugugauccucccg

SEQ ID NO: 1310655 - RNA, 19 nt, Human
ucuccgcuccgcaacccca

SEQ ID NO: 1310656 - RNA, 22 nt, Human
ugaagcgccauuagcuuugagg

SEQ ID NO: 1310657 - RNA, 19 nt, Human
ugacucugucuccagcagc

SEQ ID NO: 1310658 - RNA, 24 nt, Human
ugauggcagugucaggugcacucu

SEQ ID NO: 1310659 - RNA, 23 nt, Human
ugcacagggagcugagccccucc

SEQ ID NO: 1310660 - RNA, 18 nt, Human
ugcccaggcaggagugca

SEQ ID NO: 1310661 - RNA, 19 nt, Human
uggaagggcuggaagcucc

SEQ ID NO: 1310662 - RNA, 28 nt, Human
uggaggccccucccacgaaccuucuccc

SEQ ID NO: 1310663 - RNA, 26 nt, Human
uggaggccccucccacgaaccuuuuc

SEQ ID NO: 1310664 - RNA, 22 nt, Human
uggcagagacaggcagugauac

SEQ ID NO: 1310665 - RNA, 24 nt, Human
ugggcucaugugauccucccgccu

SEQ ID NO: 1310666 - RNA, 19 nt, Human
ugggcuccagccuccuggc

SEQ ID NO: 1310667 - RNA, 18 nt, Human
uuugaagcgccauuagcu

SEQ ID NO: 1310668 - RNA, 20 nt, Human
gcuaugaaacagccaugggg

SEQ ID NO: 1310669 - RNA, 23 nt, Human
gugguacagagggcuaugaaaca

SEQ ID NO: 1310670 - RNA, 22 nt, Human
aacagggagggaggaugcaacc

SEQ ID NO: 1310671 - RNA, 24 nt, Human
aagauccggaacagggagggagga

SEQ ID NO: 1310672 - RNA, 19 nt, Human
agccggugccaaucagacu

SEQ ID NO: 1310673 - RNA, 19 nt, Human
aggcaggggaugcgagggc

SEQ ID NO: 1310674 - RNA, 25 nt, Human
aggcugcagccgaaaugggggucgg

SEQ ID NO: 1310675 - RNA, 20 nt, Human
aggcuggagccggaauggga

SEQ ID NO: 1310676 - RNA, 23 nt, Human
ccggaacagggagggaggaugca

SEQ ID NO: 1310677 - RNA, 22 nt, Human
cgcaagauaagauccggaacag

SEQ ID NO: 1310678 - RNA, 18 nt, Human
cugcagccgaaauggggg

SEQ ID NO: 1310679 - RNA, 22 nt, Human
cuugagucaucagcuggcgaug

SEQ ID NO: 1310680 - RNA, 20 nt, Human
gagcaaguagaaugggccau

SEQ ID NO: 1310681 - RNA, 18 nt, Human
gaugcgagggcaggucca

SEQ ID NO: 1310682 - RNA, 18 nt, Human
gcgcuggcgcaagauaag

SEQ ID NO: 1310683 - RNA, 18 nt, Human
ggagccggugccaaucag

SEQ ID NO: 1310684 - RNA, 24 nt, Human
ucuugagucaucagcuggcgaugg

SEQ ID NO: 1310685 - RNA, 23 nt, Human
ugaggucuggcuacgggauccug

SEQ ID NO: 1310686 - RNA, 22 nt, Human
auccuuaguggggcuguuugag

SEQ ID NO: 1310687 - RNA, 22 nt, Human
caggcauccuauccccagccuc

SEQ ID NO: 1310688 - RNA, 18 nt, Human
ccucccaagagggccggg

SEQ ID NO: 1310689 - RNA, 22 nt, Human
gaggagccggggcacguuccag

SEQ ID NO: 1310690 - RNA, 18 nt, Human
ggacaggcauccuauccc

SEQ ID NO: 1310691 - RNA, 24 nt, Human
ggaggagccggggcacguuccagg

SEQ ID NO: 1310692 - RNA, 22 nt, Human
ggaugugaaagcuguuugugau

SEQ ID NO: 1310693 - RNA, 21 nt, Human
uaaagcuaccacagauauaag

SEQ ID NO: 1310694 - RNA, 22 nt, Human
uccccagccucuuccugucuuc

SEQ ID NO: 1310695 - RNA, 22 nt, Human
ugaucccugcccuuucuaccuc

SEQ ID NO: 1310696 - RNA, 21 nt, Human
uuaguggaugugaaagcuguu

SEQ ID NO: 1310697 - RNA, 19 nt, Human
uuccuuaucuuucaaaugg

SEQ ID NO: 1310698 - RNA, 24 nt, Human
uugagagccucccaagagggccgg

SEQ ID NO: 1310699 - RNA, 22 nt, Human
uugugaucaguaaagcuaccac

SEQ ID NO: 1310700 - RNA, 20 nt, Human
aggaggaucuauaugaugug

SEQ ID NO: 1310701 - RNA, 19 nt, Human
gacacaggagaugggaagg

SEQ ID NO: 1310702 - RNA, 20 nt, Human
ugaggaggaucuauaugaug

SEQ ID NO: 1310703 - RNA, 18 nt, Human
ugauguggucaaaucacu

SEQ ID NO: 1310704 - RNA, 22 nt, Human
uguggucaaaucacuuucagcc

SEQ ID NO: 1310705 - RNA, 22 nt, Human
aaaccgaagcccaacuguaagc

SEQ ID NO: 1310706 - RNA, 19 nt, Human
aaccuaagaaacccagacu

SEQ ID NO: 1310707 - RNA, 22 nt, Human
aagaaacccagacugcgcaaac

SEQ ID NO: 1310708 - RNA, 21 nt, Human
aagccccgcgucaggccggga

SEQ ID NO: 1310709 - RNA, 22 nt, Human
acccccuaaaccuaagaaaccc

SEQ ID NO: 1310710 - RNA, 23 nt, Human
agaaacccacccaacccccuaaa

SEQ ID NO: 1310711 - RNA, 21 nt, Human
agagaaacccacccaaccccc

SEQ ID NO: 1310712 - RNA, 23 nt, Human
agagaaacccacccaacccccua

SEQ ID NO: 1310713 - RNA, 24 nt, Human
agagaaacccacccaacccccuaa

SEQ ID NO: 1310714 - RNA, 20 nt, Human
agcaagaccagcgugcccgc

SEQ ID NO: 1310715 - RNA, 21 nt, Human
aggccgggagcgggacagaga

SEQ ID NO: 1310716 - RNA, 21 nt, Human
cacccaacccccuaaaccuaa

SEQ ID NO: 1310717 - RNA, 21 nt, Human
caccgcacccccagagaaacc

SEQ ID NO: 1310718 - RNA, 23 nt, Human
cacgauacugcuucuccccgcag

SEQ ID NO: 1310719 - RNA, 26 nt, Human
cagacugcgcaaaccgaagcccaacu

SEQ ID NO: 1310720 - RNA, 23 nt, Human
cagcggguggguauuccuggggc

SEQ ID NO: 1310721 - RNA, 19 nt, Human
ccaacccccuaaaccuaag

SEQ ID NO: 1310722 - RNA, 21 nt, Human
ccacccaacccccuaaaccua

SEQ ID NO: 1310723 - RNA, 23 nt, Human
ccacccaacccccuaaaccuaag

SEQ ID NO: 1310724 - RNA, 19 nt, Human
ccagagaaacccacccaac

SEQ ID NO: 1310725 - RNA, 21 nt, Human
cccaacccccuaaaccuaaga

SEQ ID NO: 1310726 - RNA, 26 nt, Human
cccacccaacccccuaaaccuaagaa

SEQ ID NO: 1310727 - RNA, 27 nt, Human
cccaccgcacccccagagaaacccacc

SEQ ID NO: 1310728 - RNA, 24 nt, Human
cccagagaaacccacccaaccccc

SEQ ID NO: 1310729 - RNA, 21 nt, Human
ccccagagaaacccacccaac

SEQ ID NO: 1310730 - RNA, 24 nt, Human
ccccagagaaacccacccaacccc

SEQ ID NO: 1310731 - RNA, 24 nt, Human
cccccagagaaacccacccaaccc

SEQ ID NO: 1310732 - RNA, 18 nt, Human
cccccagagaaacccacu

SEQ ID NO: 1310733 - RNA, 23 nt, Human
cccccuaaaccuaagaaacccag

SEQ ID NO: 1310734 - RNA, 24 nt, Human
cccccuaaaccuaagaaacccaga

SEQ ID NO: 1310735 - RNA, 19 nt, Human
ccccuaaaccuaagaaacc

SEQ ID NO: 1310736 - RNA, 21 nt, Human
cgcacccccagagaaacccac

SEQ ID NO: 1310737 - RNA, 25 nt, Human
cgcacccccagagaaacccacccaa

SEQ ID NO: 1310738 - RNA, 19 nt, Human
cgcagcagcggcugccgau

SEQ ID NO: 1310739 - RNA, 18 nt, Human
cugcuucuccccgcagca

SEQ ID NO: 1310740 - RNA, 23 nt, Human
cuggaagccccgcgucaggccgg

SEQ ID NO: 1310741 - RNA, 19 nt, Human
gagccgccgcgcgaaaccg

SEQ ID NO: 1310742 - RNA, 20 nt, Human
gcacccccagagaaacccac

SEQ ID NO: 1310743 - RNA, 20 nt, Human
gccgccgcgcgaaaccggcg

SEQ ID NO: 1310744 - RNA, 24 nt, Human
guauuccuggggcuccguggacgu

SEQ ID NO: 1310745 - RNA, 22 nt, Human
uaagaaacccagacugcgcaaa

SEQ ID NO: 1310746 - RNA, 18 nt, Human
ucaggccgggagcgggac

SEQ ID NO: 1310747 - RNA, 20 nt, Human
uccccgcagcagcggcugcc

SEQ ID NO: 1310748 - RNA, 27 nt, Human
ugcgcaaaccgaagcccaacuguaagc

SEQ ID NO: 1310749 - RNA, 18 nt, Human
uggggcuccguggacguu

SEQ ID NO: 1310750 - RNA, 24 nt, Human
aaaacucaccagcccaacaaaccc

SEQ ID NO: 1310751 - RNA, 23 nt, Human
aaacccccccagccccagugucc

SEQ ID NO: 1310752 - RNA, 22 nt, Human
aaacucaccagcccaacaaacc

SEQ ID NO: 1310753 - RNA, 27 nt, Human
accagcccaacaaacccccccagcccc

SEQ ID NO: 1310754 - RNA, 23 nt, Human
agacaagaggagaacggcgacgg

SEQ ID NO: 1310755 - RNA, 18 nt, Human
agcccaacaaaccccccc

SEQ ID NO: 1310756 - RNA, 19 nt, Human
augacuggguaucuucggc

SEQ ID NO: 1310757 - RNA, 20 nt, Human
caacaaacccccccagcccc

SEQ ID NO: 1310758 - RNA, 20 nt, Human
caccagcccaacaaaccccc

SEQ ID NO: 1310759 - RNA, 21 nt, Human
cagcccaacaaacccccccag

SEQ ID NO: 1310760 - RNA, 18 nt, Human
cagugucccccccaacgc

SEQ ID NO: 1310761 - RNA, 21 nt, Human
caugacuggguaucuucggcc

SEQ ID NO: 1310762 - RNA, 22 nt, Human
ccaacaaacccccccagcccca

SEQ ID NO: 1310763 - RNA, 23 nt, Human
ccagccccagugucccccccaac

SEQ ID NO: 1310764 - RNA, 19 nt, Human
cccagccccaguguccccc

SEQ ID NO: 1310765 - RNA, 23 nt, Human
ccccagccccaguguccccccca

SEQ ID NO: 1310766 - RNA, 19 nt, Human
cccccagccccaguguccc

SEQ ID NO: 1310767 - RNA, 22 nt, Human
cccccucuggggcccucaaccu

SEQ ID NO: 1310768 - RNA, 18 nt, Human
ccccgggucagggcucuc

SEQ ID NO: 1310769 - RNA, 19 nt, Human
ccucuggggcccucaaccu

SEQ ID NO: 1310770 - RNA, 21 nt, Human
cucgaaaacucaccagcccaa

SEQ ID NO: 1310771 - RNA, 19 nt, Human
cucucugggcguccccuca

SEQ ID NO: 1310772 - RNA, 18 nt, Human
gacuggguaucuucggcc

SEQ ID NO: 1310773 - RNA, 21 nt, Human
gaggagaacggcgacggagug

SEQ ID NO: 1310774 - RNA, 18 nt, Human
gcccugggccucuucaaa

SEQ ID NO: 1310775 - RNA, 20 nt, Human
gcccugggccucuucaaauc

SEQ ID NO: 1310776 - RNA, 21 nt, Human
ggcccugggccucuucaaauc

SEQ ID NO: 1310777 - RNA, 21 nt, Human
gucagggcucucugggcgucc

SEQ ID NO: 1310778 - RNA, 18 nt, Human
ucaccagcccaacaaacc

SEQ ID NO: 1310779 - RNA, 26 nt, Human
ucgcugcaguauccacuuggugcucc

SEQ ID NO: 1310780 - RNA, 22 nt, Human
ugcuucccccucuggggcccuc

SEQ ID NO: 1310781 - RNA, 18 nt, Human
agcaagugcagccccagg

SEQ ID NO: 1310782 - RNA, 19 nt, Human
agcaccagcagcuuccacc

SEQ ID NO: 1310783 - RNA, 19 nt, Human
agccacgagauccccgcgc

SEQ ID NO: 1310784 - RNA, 21 nt, Human
agcccuggccagcuggccugu

SEQ ID NO: 1310785 - RNA, 25 nt, Human
agcccuggccagcuggccuguggga

SEQ ID NO: 1310786 - RNA, 21 nt, Human
aggccucaggucugugcgcag

SEQ ID NO: 1310787 - RNA, 20 nt, Human
aggcucggggcagugggcag

SEQ ID NO: 1310788 - RNA, 20 nt, Human
agggcuuuggcgucugggcc

SEQ ID NO: 1310789 - RNA, 18 nt, Human
agguccuggacacaaggc

SEQ ID NO: 1310790 - RNA, 18 nt, Human
caagcgcccgcgggaccg

SEQ ID NO: 1310791 - RNA, 26 nt, Human
cacagauccaggggcccaggagcccu

SEQ ID NO: 1310792 - RNA, 20 nt, Human
cacgagauccccgcgccucc

SEQ ID NO: 1310793 - RNA, 22 nt, Human
cagcccuggccagcuggccugu

SEQ ID NO: 1310794 - RNA, 20 nt, Human
cagccucccucugugccaag

SEQ ID NO: 1310795 - RNA, 21 nt, Human
cagcgaggggcucccgaggcg

SEQ ID NO: 1310796 - RNA, 21 nt, Human
cagcggagccacgagaucccc

SEQ ID NO: 1310797 - RNA, 25 nt, Human
caugugcguggagggguacgugugg

SEQ ID NO: 1310798 - RNA, 20 nt, Human
ccaggacacacaucuggggg

SEQ ID NO: 1310799 - RNA, 24 nt, Human
ccaggcaccucugagaacugucac

SEQ ID NO: 1310800 - RNA, 24 nt, Human
ccccgcgccuccggcugacguccg

SEQ ID NO: 1310801 - RNA, 19 nt, Human
ccccggcucggcccaggug

SEQ ID NO: 1310802 - RNA, 24 nt, Human
ccccuccgcaggccacagugacag

SEQ ID NO: 1310803 - RNA, 19 nt, Human
cccgcccccccgcagagga

SEQ ID NO: 1310804 - RNA, 19 nt, Human
cccguccccuccgcaggcc

SEQ ID NO: 1310805 - RNA, 20 nt, Human
cccguguccgugguggggag

SEQ ID NO: 1310806 - RNA, 23 nt, Human
cccugugcagggcugagcaccag

SEQ ID NO: 1310807 - RNA, 20 nt, Human
ccgggagcugcgccucagac

SEQ ID NO: 1310808 - RNA, 20 nt, Human
ccgggucuccagccucccuc

SEQ ID NO: 1310809 - RNA, 18 nt, Human
ccgucugggccagcagcc

SEQ ID NO: 1310810 - RNA, 25 nt, Human
ccuccugcccucucucccacgguua

SEQ ID NO: 1310811 - RNA, 20 nt, Human
ccucugagaacugucacggg

SEQ ID NO: 1310812 - RNA, 20 nt, Human
ccuugcccugccuuucacag

SEQ ID NO: 1310813 - RNA, 20 nt, Human
ccuuggccuccccgcccccc

SEQ ID NO: 1310814 - RNA, 22 nt, Human
cgaccacuccugggugggagcc

SEQ ID NO: 1310815 - RNA, 18 nt, Human
cgagauccccgcgccucc

SEQ ID NO: 1310816 - RNA, 22 nt, Human
cgaggggcucccgaggcggccc

SEQ ID NO: 1310817 - RNA, 21 nt, Human
cggcucggcccaggugugcgg

SEQ ID NO: 1310818 - RNA, 20 nt, Human
cuccagccucccucugugcc

SEQ ID NO: 1310819 - RNA, 25 nt, Human
cucggcccaggugugcgggccgcgg

SEQ ID NO: 1310820 - RNA, 19 nt, Human
cugaccccucugugcacgc

SEQ ID NO: 1310821 - RNA, 20 nt, Human
cugaccccucugugcacgcc

SEQ ID NO: 1310822 - RNA, 22 nt, Human
cugagcaccagcagcuuccacc

SEQ ID NO: 1310823 - RNA, 19 nt, Human
cuuuggggguauucugcgg

SEQ ID NO: 1310824 - RNA, 20 nt, Human
gaacaagcgcccgcgggacc

SEQ ID NO: 1310825 - RNA, 20 nt, Human
gacccggcccgggcccgugg

SEQ ID NO: 1310826 - RNA, 20 nt, Human
gacuguggggaugguucagg

SEQ ID NO: 1310827 - RNA, 19 nt, Human
gagcaagugcagccccagg

SEQ ID NO: 1310828 - RNA, 19 nt, Human
gagccgaguggggcgccca

SEQ ID NO: 1310829 - RNA, 20 nt, Human
gagccgaguggggcgcccag

SEQ ID NO: 1310830 - RNA, 23 nt, Human
gaggccggguggccugggcgggg

SEQ ID NO: 1310831 - RNA, 19 nt, Human
gauggacccggcccgggcc

SEQ ID NO: 1310832 - RNA, 24 nt, Human
gcagccccagguuggaggcgagcg

SEQ ID NO: 1310833 - RNA, 24 nt, Human
gcagcccuggccagcuggccugug

SEQ ID NO: 1310834 - RNA, 18 nt, Human
gccugugggagccaggcu

SEQ ID NO: 1310835 - RNA, 21 nt, Human
gcggcagauggugcccacauc

SEQ ID NO: 1310836 - RNA, 18 nt, Human
gcgggguccgaggaggcc

SEQ ID NO: 1310837 - RNA, 22 nt, Human
ggagcccguguccguggugggg

SEQ ID NO: 1310838 - RNA, 21 nt, Human
ggagggcuuuggcgucugggc

SEQ ID NO: 1310839 - RNA, 18 nt, Human
ggcaaggcugacgggagg

SEQ ID NO: 1310840 - RNA, 21 nt, Human
ggccggguggccugggcgggg

SEQ ID NO: 1310841 - RNA, 18 nt, Human
ggcugacguccgggcgcc

SEQ ID NO: 1310842 - RNA, 20 nt, Human
gggcaaggcugacgggaggg

SEQ ID NO: 1310843 - RNA, 22 nt, Human
gggcagcccuggccagcuggcc

SEQ ID NO: 1310844 - RNA, 24 nt, Human
gggcagcccuggccagcuggccug

SEQ ID NO: 1310845 - RNA, 21 nt, Human
gguaggcuuuucucgagggcc

SEQ ID NO: 1310846 - RNA, 20 nt, Human
gugacaggagggcuuuggcg

SEQ ID NO: 1310847 - RNA, 21 nt, Human
gugcaugggcuggugcggugc

SEQ ID NO: 1310848 - RNA, 18 nt, Human
gugggauggagcugggga

SEQ ID NO: 1310849 - RNA, 19 nt, Human
guggggaugguucagggcu

SEQ ID NO: 1310850 - RNA, 20 nt, Human
gugugcggcaggcaugugcg

SEQ ID NO: 1310851 - RNA, 22 nt, Human
gugugcggcaggcaugugcgug

SEQ ID NO: 1310852 - RNA, 18 nt, Human
ucccagaggcuccuccug

SEQ ID NO: 1310853 - RNA, 20 nt, Human
uccccgcccccccgcagagg

SEQ ID NO: 1310854 - RNA, 22 nt, Human
uccccgcgccuccggcugacgu

SEQ ID NO: 1310855 - RNA, 25 nt, Human
ucccgaggcggccccggcucggccc

SEQ ID NO: 1310856 - RNA, 23 nt, Human
ucccgugacccugugcagggcug

SEQ ID NO: 1310857 - RNA, 21 nt, Human
uccgggguaggcuuuucucga

SEQ ID NO: 1310858 - RNA, 20 nt, Human
uccuccugcccucucuccca

SEQ ID NO: 1310859 - RNA, 18 nt, Human
uccuggacacaaggccuc

SEQ ID NO: 1310860 - RNA, 18 nt, Human
ucucgagggccaccugac

SEQ ID NO: 1310861 - RNA, 21 nt, Human
ugacaggagggcuuuggcguc

SEQ ID NO: 1310862 - RNA, 25 nt, Human
ugacaggagggcuuuggcgucuggg

SEQ ID NO: 1310863 - RNA, 24 nt, Human
ugacguccgggcgcccagggucug

SEQ ID NO: 1310864 - RNA, 23 nt, Human
ugagcagguggccugcugcuuca

SEQ ID NO: 1310865 - RNA, 23 nt, Human
ugcgauccauccgggagcugcgc

SEQ ID NO: 1310866 - RNA, 22 nt, Human
uggaggcgagcgugugcauggg

SEQ ID NO: 1310867 - RNA, 19 nt, Human
uggccagcuggccuguggg

SEQ ID NO: 1310868 - RNA, 23 nt, Human
uggcccggacauugcugagccga

SEQ ID NO: 1310869 - RNA, 23 nt, Human
uggccugggcgggguccgaggag

SEQ ID NO: 1310870 - RNA, 21 nt, Human
uggccugugggagccaggcuc

SEQ ID NO: 1310871 - RNA, 18 nt, Human
uggcgucugggccccccu

SEQ ID NO: 1310872 - RNA, 20 nt, Human
ugggauggagcuggggaugc

SEQ ID NO: 1310873 - RNA, 22 nt, Human
ugggggcaccguugcuguccca

SEQ ID NO: 1310874 - RNA, 18 nt, Human
uggggguauucugcgggg

SEQ ID NO: 1310875 - RNA, 21 nt, Human
ugggugggguucuuccggggu

SEQ ID NO: 1310876 - RNA, 24 nt, Human
uggucucgggagugacugugggga

SEQ ID NO: 1310877 - RNA, 18 nt, Human
uggugcccacaucugucu

SEQ ID NO: 1310878 - RNA, 22 nt, Human
uggugcccacaucugucugguc

SEQ ID NO: 1310879 - RNA, 19 nt, Human
ugugcggcaggcaugugcg

SEQ ID NO: 1310880 - RNA, 23 nt, Human
uguggggaugguucagggcuggg

SEQ ID NO: 1310881 - RNA, 21 nt, Human
uugcugagccgaguggggcgc

SEQ ID NO: 1310882 - RNA, 21 nt, Human
aggcaguccgugguuuggagc

SEQ ID NO: 1310883 - RNA, 22 nt, Human
cgcagcgggcucuggccaucag

SEQ ID NO: 1310884 - RNA, 21 nt, Human
gagcuuccccaggaguuuggg

SEQ ID NO: 1310885 - RNA, 23 nt, Human
gggcucuggccaucaggcagucc

SEQ ID NO: 1310886 - RNA, 21 nt, Human
uccccaggaguuugggaacug

SEQ ID NO: 1310887 - RNA, 24 nt, Human
ucuggccaucaggcaguccguggu

SEQ ID NO: 1310888 - RNA, 21 nt, Human
ugguuuggagcuuccccagga

SEQ ID NO: 1310889 - RNA, 25 nt, Human
aaccgccuucugaugaauuaauuca

SEQ ID NO: 1310890 - RNA, 22 nt, Human
ccgccuucugaugaauuaauuc

SEQ ID NO: 1310891 - RNA, 21 nt, Human
cugaugaauuaauucacgugc

SEQ ID NO: 1310892 - RNA, 22 nt, Human
aaccuccuucuuucccccucug

SEQ ID NO: 1310893 - RNA, 21 nt, Human
accuccuucuuucccccucug

SEQ ID NO: 1310894 - RNA, 21 nt, Human
caucuugucuuucugcagcca

SEQ ID NO: 1310895 - RNA, 21 nt, Human
cccccucugcacucuugccac

SEQ ID NO: 1310896 - RNA, 22 nt, Human
ccccucugcacucuugccacaa

SEQ ID NO: 1310897 - RNA, 21 nt, Human
gugcuuucuccaucuccuccu

SEQ ID NO: 1310898 - RNA, 18 nt, Human
ucuguuuacugugcuuuc

SEQ ID NO: 1310899 - RNA, 24 nt, Human
ugcuuucuccaucuccuccuccca

SEQ ID NO: 1310900 - RNA, 22 nt, Human
uuucccccucugcacucuugcc

SEQ ID NO: 1310901 - RNA, 19 nt, Human
auccgaaucagccaauagg

SEQ ID NO: 1310902 - RNA, 22 nt, Human
cccuccauuucccaagagcaaa

SEQ ID NO: 1310903 - RNA, 18 nt, Human
ccgggcucagggcauucc

SEQ ID NO: 1310904 - RNA, 21 nt, Human
cgaaucagccaauaggaauuc

SEQ ID NO: 1310905 - RNA, 24 nt, Human
cgacccggaccacgcgggagccgg

SEQ ID NO: 1310906 - RNA, 18 nt, Human
cuccgcccgacccggacc

SEQ ID NO: 1310907 - RNA, 19 nt, Human
gacccggaccacgcgggag

SEQ ID NO: 1310908 - RNA, 19 nt, Human
gaggaacagguguucucug

SEQ ID NO: 1310909 - RNA, 20 nt, Human
guaaagcaucuuggaucccc

SEQ ID NO: 1310910 - RNA, 25 nt, Human
ugaggaacagguguucucugggugu

SEQ ID NO: 1310911 - RNA, 18 nt, Human
uucccggcuugggccucc

SEQ ID NO: 1310912 - RNA, 19 nt, Human
accugagugugcagagcca

SEQ ID NO: 1310913 - RNA, 21 nt, Human
auauuucuguaucuacuauca

SEQ ID NO: 1310914 - RNA, 23 nt, Human
cagagccaguuuaagaaugaggu

SEQ ID NO: 1310915 - RNA, 23 nt, Human
ccccagcgagucaucuguugcuu

SEQ ID NO: 1310916 - RNA, 20 nt, Human
gguucugugggcaguaagag

SEQ ID NO: 1310917 - RNA, 23 nt, Human
ucccaagaaccaacccuccugcc

SEQ ID NO: 1310918 - RNA, 21 nt, Human
uggcacauaccugagugugca

SEQ ID NO: 1310919 - RNA, 18 nt, Human
uucugugggcaguaagag

SEQ ID NO: 1310920 - RNA, 18 nt, Human
aaguugccgauguugaag

SEQ ID NO: 1310921 - RNA, 18 nt, Human
agacaccaaggagcuccc

SEQ ID NO: 1310922 - RNA, 22 nt, Human
agaggguccuuguucacaaagg

SEQ ID NO: 1310923 - RNA, 24 nt, Human
auccucuuccgguaugccucguca

SEQ ID NO: 1310924 - RNA, 20 nt, Human
cacauaagccuccagguugc

SEQ ID NO: 1310925 - RNA, 19 nt, Human
ccaccagguagcacagccu

SEQ ID NO: 1310926 - RNA, 24 nt, Human
ccagcuucuggugcagagccugua

SEQ ID NO: 1310927 - RNA, 18 nt, Human
ccccgcgcagggcugucc

SEQ ID NO: 1310928 - RNA, 19 nt, Human
cccgccgccgccgccgccg

SEQ ID NO: 1310929 - RNA, 20 nt, Human
ccgcccgaccgcccggcucc

SEQ ID NO: 1310930 - RNA, 20 nt, Human
ccgcccgccgccgccgccgc

SEQ ID NO: 1310931 - RNA, 18 nt, Human
ccgccgccgcccgaccgc

SEQ ID NO: 1310932 - RNA, 20 nt, Human
ccgccgccgcccgaccgccc

SEQ ID NO: 1310933 - RNA, 25 nt, Human
ccgccgccgccgcccgaccgcccgg

SEQ ID NO: 1310934 - RNA, 18 nt, Human
ccgccgccgccgccgccg

SEQ ID NO: 1310935 - RNA, 18 nt, Human
ccgccgccgccgccgccg

SEQ ID NO: 1310936 - RNA, 18 nt, Human
ccgccgccgccgccgccg

SEQ ID NO: 1310937 - RNA, 18 nt, Human
ccgccgccgccgccgccg

SEQ ID NO: 1310938 - RNA, 18 nt, Human
ccgccgccgccgccgccg

SEQ ID NO: 1310939 - RNA, 18 nt, Human
ccgccgccgccgccgccg

SEQ ID NO: 1310940 - RNA, 18 nt, Human
ccgccgccgccgccgccg

SEQ ID NO: 1310941 - RNA, 18 nt, Human
ccgccgccgccgccgccg

SEQ ID NO: 1310942 - RNA, 23 nt, Human
ccgccgccgccgccgccgcccga

SEQ ID NO: 1310943 - RNA, 24 nt, Human
ccgccgccgccgccgccgccgccc

SEQ ID NO: 1310944 - RNA, 24 nt, Human
ccgccgccgccgccgccgccgccg

SEQ ID NO: 1310945 - RNA, 24 nt, Human
ccgccgccgccgccgccgccgccg

SEQ ID NO: 1310946 - RNA, 24 nt, Human
ccgccgccgccgccgccgccgccg

SEQ ID NO: 1310947 - RNA, 24 nt, Human
ccgccgccgccgccgccgccgccg

SEQ ID NO: 1310948 - RNA, 24 nt, Human
ccgccgccgccgccgccgccgccg

SEQ ID NO: 1310949 - RNA, 24 nt, Human
ccgccgccgccgccgccgccgccg

SEQ ID NO: 1310950 - RNA, 18 nt, Human
ccgcggaccggggcgccg

SEQ ID NO: 1310951 - RNA, 24 nt, Human
cgccgcccgccgccgccgccgccg

SEQ ID NO: 1310952 - RNA, 24 nt, Human
cgccgcccgccgccgccgccgccg

SEQ ID NO: 1310953 - RNA, 19 nt, Human
cgccgccgccgccgccgcc

SEQ ID NO: 1310954 - RNA, 19 nt, Human
cgcgcagggcuguccugua

SEQ ID NO: 1310955 - RNA, 24 nt, Human
cggugggccgccccgcgcagggcu

SEQ ID NO: 1310956 - RNA, 19 nt, Human
cugggccaguguguagggg

SEQ ID NO: 1310957 - RNA, 20 nt, Human
cuucagccuggagacagggc

SEQ ID NO: 1310958 - RNA, 18 nt, Human
ggcccgaugugccgcagc

SEQ ID NO: 1310959 - RNA, 26 nt, Human
ggcugguggcuugguccccggagggc

SEQ ID NO: 1310960 - RNA, 20 nt, Human
ucacagggggcgaugcggcc

SEQ ID NO: 1310961 - RNA, 24 nt, Human
ucccuguggauggaggcugguggc

SEQ ID NO: 1310962 - RNA, 21 nt, Human
uggcccaggucuucuucagcc

SEQ ID NO: 1310963 - RNA, 21 nt, Human
uggcccaggucuucuucagcc

SEQ ID NO: 1310964 - RNA, 24 nt, Human
uggcccaggucuucuucagccugg

SEQ ID NO: 1310965 - RNA, 21 nt, Human
cgggugggcagcgucuugucc

SEQ ID NO: 1310966 - RNA, 18 nt, Human
gacacucgcgcugcgccu

SEQ ID NO: 1310967 - RNA, 18 nt, Human
gcccccaagggaggggac

SEQ ID NO: 1310968 - RNA, 20 nt, Human
uccuccccgcggcgggguuu

SEQ ID NO: 1310969 - RNA, 22 nt, Human
ucgcgggugggcagcgucuugu

SEQ ID NO: 1310970 - RNA, 22 nt, Human
ugagaggggccgggggaagggg

SEQ ID NO: 1310971 - RNA, 23 nt, Human
aagcaaauucuucucagcagcuc

SEQ ID NO: 1310972 - RNA, 19 nt, Human
aauucuucucagcagcucu

SEQ ID NO: 1310973 - RNA, 20 nt, Human
agaggugcgcgccaggagcc

SEQ ID NO: 1310974 - RNA, 21 nt, Human
agcaaauucuucucagcagcu

SEQ ID NO: 1310975 - RNA, 19 nt, Human
aggagaagggagcagaggu

SEQ ID NO: 1310976 - RNA, 22 nt, Human
aggcgcaggugugcgggcugcc

SEQ ID NO: 1310977 - RNA, 23 nt, Human
agggguccugagcagaaugccuc

SEQ ID NO: 1310978 - RNA, 18 nt, Human
agugggggagguggggag

SEQ ID NO: 1310979 - RNA, 18 nt, Human
caaccuccagauccuccc

SEQ ID NO: 1310980 - RNA, 23 nt, Human
cagaacauggucuagaagggcaa

SEQ ID NO: 1310981 - RNA, 23 nt, Human
cagagaacaaccuccagauccuc

SEQ ID NO: 1310982 - RNA, 24 nt, Human
caggauggcucucaacacccaggc

SEQ ID NO: 1310983 - RNA, 19 nt, Human
caguacagcugucccuggg

SEQ ID NO: 1310984 - RNA, 19 nt, Human
ccugagcagaaugccucca

SEQ ID NO: 1310985 - RNA, 21 nt, Human
cgcgccaggagccaggcuggu

SEQ ID NO: 1310986 - RNA, 20 nt, Human
cuccgugguccuaacguggg

SEQ ID NO: 1310987 - RNA, 24 nt, Human
cugcagagaacaaccuccagaucc

SEQ ID NO: 1310988 - RNA, 22 nt, Human
gaagccugacacgccaguccca

SEQ ID NO: 1310989 - RNA, 23 nt, Human
gcagugggggagguggggagggg

SEQ ID NO: 1310990 - RNA, 18 nt, Human
gcgcaggugugcgggcug

SEQ ID NO: 1310991 - RNA, 19 nt, Human
gcgcgccaggagccaggcu

SEQ ID NO: 1310992 - RNA, 21 nt, Human
ggcgcaggugugcgggcugcc

SEQ ID NO: 1310993 - RNA, 24 nt, Human
ggcgcaggugugcgggcugccucu

SEQ ID NO: 1310994 - RNA, 20 nt, Human
ggcugaauucggaaagcaaa

SEQ ID NO: 1310995 - RNA, 22 nt, Human
gggaagccugacacgccagucc

SEQ ID NO: 1310996 - RNA, 20 nt, Human
gggagcagaggugcgcgcca

SEQ ID NO: 1310997 - RNA, 20 nt, Human
gggcacugugagcugggaua

SEQ ID NO: 1310998 - RNA, 20 nt, Human
gggggucaggguggugguca

SEQ ID NO: 1310999 - RNA, 20 nt, Human
ggguagugaggagaagggag

SEQ ID NO: 1311000 - RNA, 18 nt, Human
gguccugagcagaaugcc

SEQ ID NO: 1311001 - RNA, 22 nt, Human
gguucucugcagagaacaaccu

SEQ ID NO: 1311002 - RNA, 22 nt, Human
uacugguggccaccccaggggc

SEQ ID NO: 1311003 - RNA, 19 nt, Human
uaguaguuuuuuucccggu

SEQ ID NO: 1311004 - RNA, 21 nt, Human
uauaauacugucauacuggug

SEQ ID NO: 1311005 - RNA, 21 nt, Human
ucagggugguggucagucucc

SEQ ID NO: 1311006 - RNA, 22 nt, Human
uccugagcagaaugccuccagc

SEQ ID NO: 1311007 - RNA, 25 nt, Human
uccuggaguaacgcgcaguggggga

SEQ ID NO: 1311008 - RNA, 22 nt, Human
ucucuuguuaaauauuuucgau

SEQ ID NO: 1311009 - RNA, 21 nt, Human
ucuguugaaaaagacuugcag

SEQ ID NO: 1311010 - RNA, 23 nt, Human
ugaaguucuguugaaaaagacuu

SEQ ID NO: 1311011 - RNA, 18 nt, Human
ugagauggaaacacagcc

SEQ ID NO: 1311012 - RNA, 22 nt, Human
ugaggagaagggagcagaggug

SEQ ID NO: 1311013 - RNA, 18 nt, Human
ugggauagggguccugag

SEQ ID NO: 1311014 - RNA, 18 nt, Human
uggggggucaggguggug

SEQ ID NO: 1311015 - RNA, 24 nt, Human
uuauacgugcacucggcauauccu

SEQ ID NO: 1311016 - RNA, 22 nt, Human
uuauuaucucuuguuaaauauu

SEQ ID NO: 1311017 - RNA, 18 nt, Human
uucuucucagcagcucua

SEQ ID NO: 1311018 - RNA, 20 nt, Human
aaggagccccugccaccugc

SEQ ID NO: 1311019 - RNA, 24 nt, Human
acagaagcgccacagccggggagc

SEQ ID NO: 1311020 - RNA, 26 nt, Human
agagucccugcaucugcucccugccu

SEQ ID NO: 1311021 - RNA, 18 nt, Human
agcuguguguggcggcug

SEQ ID NO: 1311022 - RNA, 18 nt, Human
aggaggaggaaaccugaa

SEQ ID NO: 1311023 - RNA, 19 nt, Human
aggcagagucccugcaucu

SEQ ID NO: 1311024 - RNA, 22 nt, Human
aggcagagucccugcaucugcu

SEQ ID NO: 1311025 - RNA, 20 nt, Human
aggguucccuaacuuuuccc

SEQ ID NO: 1311026 - RNA, 22 nt, Human
aggguucccuaacuuuucccuu

SEQ ID NO: 1311027 - RNA, 21 nt, Human
agucaucuagagagcaaauac

SEQ ID NO: 1311028 - RNA, 22 nt, Human
auccacagaagcgccacagccg

SEQ ID NO: 1311029 - RNA, 25 nt, Human
augaggcagagucccugcaucugcu

SEQ ID NO: 1311030 - RNA, 23 nt, Human
augauccaucuucagaguuucuc

SEQ ID NO: 1311031 - RNA, 23 nt, Human
caacacaccuguuuacaaaggca

SEQ ID NO: 1311032 - RNA, 18 nt, Human
cacugcaggucagaaucg

SEQ ID NO: 1311033 - RNA, 22 nt, Human
cagacuucucugacacaugagg

SEQ ID NO: 1311034 - RNA, 20 nt, Human
cagagcccaguuuucgaggc

SEQ ID NO: 1311035 - RNA, 23 nt, Human
cagcccgaggccagcuggcugca

SEQ ID NO: 1311036 - RNA, 27 nt, Human
cagggugcacacaucccugcaggucuc

SEQ ID NO: 1311037 - RNA, 20 nt, Human
caucauggcuggccgcuggg

SEQ ID NO: 1311038 - RNA, 19 nt, Human
ccacaguccccuccaaguc

SEQ ID NO: 1311039 - RNA, 26 nt, Human
ccaccgucaauuggaccgcacccgcc

SEQ ID NO: 1311040 - RNA, 21 nt, Human
cccacauccacagaagcgcca

SEQ ID NO: 1311041 - RNA, 20 nt, Human
ccccagcucaccucccugga

SEQ ID NO: 1311042 - RNA, 24 nt, Human
cccgccauguuugcagcccgaggc

SEQ ID NO: 1311043 - RNA, 21 nt, Human
ccggaagagcacucugagagg

SEQ ID NO: 1311044 - RNA, 18 nt, Human
ccugaaucggagccuggg

SEQ ID NO: 1311045 - RNA, 18 nt, Human
ccuggucugaagcugaga

SEQ ID NO: 1311046 - RNA, 21 nt, Human
cgaacacagggacccucagac

SEQ ID NO: 1311047 - RNA, 23 nt, Human
cgccauguuugcagcccgaggcc

SEQ ID NO: 1311048 - RNA, 22 nt, Human
cgggagcuggaggccaaggagc

SEQ ID NO: 1311049 - RNA, 21 nt, Human
cuccagggcccccagcucacc

SEQ ID NO: 1311050 - RNA, 26 nt, Human
cuccagggcccccagcucaccucccu

SEQ ID NO: 1311051 - RNA, 18 nt, Human
cuccucagucccacaguc

SEQ ID NO: 1311052 - RNA, 20 nt, Human
cucucugcucugcgcuccuc

SEQ ID NO: 1311053 - RNA, 22 nt, Human
cucuuggcuccuggucugaagc

SEQ ID NO: 1311054 - RNA, 23 nt, Human
cugaggaggaggaaaccugaagg

SEQ ID NO: 1311055 - RNA, 18 nt, Human
cugcucccugccuggccu

SEQ ID NO: 1311056 - RNA, 20 nt, Human
cuggucugaagcugagauug

SEQ ID NO: 1311057 - RNA, 19 nt, Human
cuucggagucaccgcacag

SEQ ID NO: 1311058 - RNA, 24 nt, Human
gaaccacgccaacuacaacguccc

SEQ ID NO: 1311059 - RNA, 21 nt, Human
gaaucucuggcacggaagcuu

SEQ ID NO: 1311060 - RNA, 18 nt, Human
gaccauauuuacucuacc

SEQ ID NO: 1311061 - RNA, 21 nt, Human
gacgccgggcaccugggcggg

SEQ ID NO: 1311062 - RNA, 22 nt, Human
gagcaaauacacaguaauuccc

SEQ ID NO: 1311063 - RNA, 20 nt, Human
gagcacucugagaggcuggg

SEQ ID NO: 1311064 - RNA, 25 nt, Human
gagcuccagcgucuguuuucuaguc

SEQ ID NO: 1311065 - RNA, 21 nt, Human
gaggcugaggaaagaccccga

SEQ ID NO: 1311066 - RNA, 19 nt, Human
gauccaucuucagaguuuc

SEQ ID NO: 1311067 - RNA, 19 nt, Human
gcggcuggugggccgggcu

SEQ ID NO: 1311068 - RNA, 18 nt, Human
gcucaccucccuggaugg

SEQ ID NO: 1311069 - RNA, 20 nt, Human
gggcacagcggaagggcugc

SEQ ID NO: 1311070 - RNA, 19 nt, Human
gggcaggucucuuggcucc

SEQ ID NO: 1311071 - RNA, 24 nt, Human
gggcagugggcaggcaaggucugc

SEQ ID NO: 1311072 - RNA, 21 nt, Human
gggguugacuguugggucacc

SEQ ID NO: 1311073 - RNA, 22 nt, Human
ggucaccuuuuaauuggaccau

SEQ ID NO: 1311074 - RNA, 23 nt, Human
gguuuugugaccgccuuuuucag

SEQ ID NO: 1311075 - RNA, 18 nt, Human
gucauggccaugauccau

SEQ ID NO: 1311076 - RNA, 24 nt, Human
gucccugcaucugcucccugccug

SEQ ID NO: 1311077 - RNA, 25 nt, Human
guucggugggacacgaacacagggg

SEQ ID NO: 1311078 - RNA, 21 nt, Human
uccagcgucuguuuucuaguc

SEQ ID NO: 1311079 - RNA, 19 nt, Human
ucccacaguccccuccaag

SEQ ID NO: 1311080 - RNA, 21 nt, Human
uccccuccaagucacgggagc

SEQ ID NO: 1311081 - RNA, 23 nt, Human
ucccucaccagaauucaaugagg

SEQ ID NO: 1311082 - RNA, 24 nt, Human
ucccugcaggucucggggcuccug

SEQ ID NO: 1311083 - RNA, 19 nt, Human
uccggaagagcacucugag

SEQ ID NO: 1311084 - RNA, 22 nt, Human
uccuggggguuuugugaccgcc

SEQ ID NO: 1311085 - RNA, 19 nt, Human
ucuccagggcccccagcuc

SEQ ID NO: 1311086 - RNA, 19 nt, Human
ucugaagcugagauuggag

SEQ ID NO: 1311087 - RNA, 19 nt, Human
ucugcucccugccuggccu

SEQ ID NO: 1311088 - RNA, 18 nt, Human
ucugcugugcggaggcug

SEQ ID NO: 1311089 - RNA, 20 nt, Human
ucuucagaguuucucuuucu

SEQ ID NO: 1311090 - RNA, 20 nt, Human
ugaccacacccucauguguu

SEQ ID NO: 1311091 - RNA, 23 nt, Human
ugaccacacccucauguguuuuc

SEQ ID NO: 1311092 - RNA, 19 nt, Human
ugagaggcugggccccauc

SEQ ID NO: 1311093 - RNA, 21 nt, Human
ugaggaaagaccccgagagcg

SEQ ID NO: 1311094 - RNA, 19 nt, Human
ugaggaggaggaaaccuga

SEQ ID NO: 1311095 - RNA, 22 nt, Human
ugcaccucucaggguucccuaa

SEQ ID NO: 1311096 - RNA, 18 nt, Human
ugcaggucucggggcucc

SEQ ID NO: 1311097 - RNA, 22 nt, Human
ugcggaggcugccggucgacgc

SEQ ID NO: 1311098 - RNA, 22 nt, Human
ugcucugcgcuccucaguccca

SEQ ID NO: 1311099 - RNA, 18 nt, Human
uggaagggacccagucuc

SEQ ID NO: 1311100 - RNA, 23 nt, Human
uggauggcgcuuucggggaucug

SEQ ID NO: 1311101 - RNA, 19 nt, Human
uggcggagguuggagauuc

SEQ ID NO: 1311102 - RNA, 21 nt, Human
uggcugcaggugcaggacuag

SEQ ID NO: 1311103 - RNA, 23 nt, Human
ugggcagugggcaggcaaggucu

SEQ ID NO: 1311104 - RNA, 21 nt, Human
uucaacacaccuguuuacaaa

SEQ ID NO: 1311105 - RNA, 23 nt, Human
uucucaggagagugaaaugaggg

SEQ ID NO: 1311106 - RNA, 24 nt, Human
uucucugacacaugagggcucuga

SEQ ID NO: 1311107 - RNA, 19 nt, Human
uugugaccgccuuuuucag

SEQ ID NO: 1311108 - RNA, 23 nt, Human
uuuacaaaggcauuccagagccc

SEQ ID NO: 1311109 - RNA, 19 nt, Human
uuuccuggcgcguuuccgg

SEQ ID NO: 1311110 - RNA, 18 nt, Human
uuucucuuucuuccccac

SEQ ID NO: 1311111 - RNA, 23 nt, Human
uuuuucagggguugacuguuggg

SEQ ID NO: 1311112 - RNA, 22 nt, Human
aaacccaccaggcuugcaggga

SEQ ID NO: 1311113 - RNA, 22 nt, Human
aacauucugucccacgggaucc

SEQ ID NO: 1311114 - RNA, 23 nt, Human
aagcaggaaucgggccagacagc

SEQ ID NO: 1311115 - RNA, 24 nt, Human
aagccaccagacaugaccuggaau

SEQ ID NO: 1311116 - RNA, 18 nt, Human
aagguguggaggcaagug

SEQ ID NO: 1311117 - RNA, 18 nt, Human
acaaggacucugugucag

SEQ ID NO: 1311118 - RNA, 18 nt, Human
acccacauagugucgagc

SEQ ID NO: 1311119 - RNA, 20 nt, Human
acccccaggccccuguucac

SEQ ID NO: 1311120 - RNA, 22 nt, Human
acccuggcgcagccugcucuuc

SEQ ID NO: 1311121 - RNA, 23 nt, Human
acucaauaaaguuugaaaagguc

SEQ ID NO: 1311122 - RNA, 21 nt, Human
acucuggugaaaacccugcua

SEQ ID NO: 1311123 - RNA, 24 nt, Human
agacuggagcccccccagcccguc

SEQ ID NO: 1311124 - RNA, 19 nt, Human
agagcuggaaggcagggug

SEQ ID NO: 1311125 - RNA, 24 nt, Human
agagcuggaaggcagggugugugc

SEQ ID NO: 1311126 - RNA, 25 nt, Human
agcacccuccugacaguuggcgcca

SEQ ID NO: 1311127 - RNA, 18 nt, Human
agcacucucccaagcucu

SEQ ID NO: 1311128 - RNA, 21 nt, Human
agcccucuuuguccuccgccc

SEQ ID NO: 1311129 - RNA, 21 nt, Human
agccgcgcggacccuggccuc

SEQ ID NO: 1311130 - RNA, 20 nt, Human
agccugcgggacaaacucgg

SEQ ID NO: 1311131 - RNA, 18 nt, Human
aggagaccugcagaagga

SEQ ID NO: 1311132 - RNA, 20 nt, Human
aggagccaccagggcugggu

SEQ ID NO: 1311133 - RNA, 23 nt, Human
aggcacuuccucugcacugagcu

SEQ ID NO: 1311134 - RNA, 28 nt, Human
aggcaugaagccaccagacaugaccugg

SEQ ID NO: 1311135 - RNA, 19 nt, Human
aggcuccccgcuucuucac

SEQ ID NO: 1311136 - RNA, 23 nt, Human
auaugccaggcagcaggcagagc

SEQ ID NO: 1311137 - RNA, 18 nt, Human
augaagcccaggaacacu

SEQ ID NO: 1311138 - RNA, 18 nt, Human
augggcccugaccagugc

SEQ ID NO: 1311139 - RNA, 21 nt, Human
caagcucugcggccugggcca

SEQ ID NO: 1311140 - RNA, 19 nt, Human
cacagucccccccaccccc

SEQ ID NO: 1311141 - RNA, 18 nt, Human
caccaacagaugcaucca

SEQ ID NO: 1311142 - RNA, 23 nt, Human
caccuggcaggugugcaccuggc

SEQ ID NO: 1311143 - RNA, 20 nt, Human
caccuggguccccucacugc

SEQ ID NO: 1311144 - RNA, 18 nt, Human
caccuuggaaaacgucgg

SEQ ID NO: 1311145 - RNA, 25 nt, Human
cacuccacaccuggguccccucacu

SEQ ID NO: 1311146 - RNA, 23 nt, Human
cacucugaaaagcaggaaucggg

SEQ ID NO: 1311147 - RNA, 18 nt, Human
cacugugcccaagccgcg

SEQ ID NO: 1311148 - RNA, 23 nt, Human
caggaacacuggucaaaugcugc

SEQ ID NO: 1311149 - RNA, 24 nt, Human
caggaaggucccugagccagggca

SEQ ID NO: 1311150 - RNA, 19 nt, Human
caggcagagcuggaaggca

SEQ ID NO: 1311151 - RNA, 19 nt, Human
cagucccccccacccccac

SEQ ID NO: 1311152 - RNA, 22 nt, Human
caucaagucuccacuccacacc

SEQ ID NO: 1311153 - RNA, 19 nt, Human
caucaggguauucccaagg

SEQ ID NO: 1311154 - RNA, 21 nt, Human
caugaagccaccagacaugac

SEQ ID NO: 1311155 - RNA, 20 nt, Human
ccaccagcucacagucuggc

SEQ ID NO: 1311156 - RNA, 18 nt, Human
ccacgcuccccugacccg

SEQ ID NO: 1311157 - RNA, 23 nt, Human
ccagacaaggacucugugucaga

SEQ ID NO: 1311158 - RNA, 21 nt, Human
ccaggcagcaggcagagcugg

SEQ ID NO: 1311159 - RNA, 18 nt, Human
ccaugucgcucacacacc

SEQ ID NO: 1311160 - RNA, 22 nt, Human
cccaagcucugcggccugggcc

SEQ ID NO: 1311161 - RNA, 24 nt, Human
cccacccccaccagcucacagucu

SEQ ID NO: 1311162 - RNA, 24 nt, Human
cccagcccguccacuccacccucu

SEQ ID NO: 1311163 - RNA, 23 nt, Human
cccaggucacagcugccuggcuu

SEQ ID NO: 1311164 - RNA, 25 nt, Human
cccagugaucgcuaaaaacauagcc

SEQ ID NO: 1311165 - RNA, 19 nt, Human
ccccacgcagucucucucc

SEQ ID NO: 1311166 - RNA, 21 nt, Human
ccccacgcagucucucucccg

SEQ ID NO: 1311167 - RNA, 18 nt, Human
ccccagcccguccacucc

SEQ ID NO: 1311168 - RNA, 24 nt, Human
ccccagcggcgacccucggugguc

SEQ ID NO: 1311169 - RNA, 22 nt, Human
cccccagcccguccacuccacc

SEQ ID NO: 1311170 - RNA, 23 nt, Human
cccccccacccccaccagcucac

SEQ ID NO: 1311171 - RNA, 21 nt, Human
cccccccagcccguccacucc

SEQ ID NO: 1311172 - RNA, 23 nt, Human
cccccggcacccccaggccccug

SEQ ID NO: 1311173 - RNA, 22 nt, Human
ccccggcacccccaggccccug

SEQ ID NO: 1311174 - RNA, 24 nt, Human
ccccgugugccccgcuccugccgg

SEQ ID NO: 1311175 - RNA, 21 nt, Human
ccccucgaggccucgccgccu

SEQ ID NO: 1311176 - RNA, 22 nt, Human
ccccugagguccccgugugccc

SEQ ID NO: 1311177 - RNA, 21 nt, Human
cccgcauugcuccugcuggcc

SEQ ID NO: 1311178 - RNA, 22 nt, Human
cccguuccucacaguggcuguc

SEQ ID NO: 1311179 - RNA, 19 nt, Human
cccuugggaaucuuggguc

SEQ ID NO: 1311180 - RNA, 19 nt, Human
cccuugggagaacuugggg

SEQ ID NO: 1311181 - RNA, 18 nt, Human
ccgcguggcggcuggggc

SEQ ID NO: 1311182 - RNA, 22 nt, Human
ccggcucuccccacgcagucuc

SEQ ID NO: 1311183 - RNA, 20 nt, Human
ccucacaguggcugucgguc

SEQ ID NO: 1311184 - RNA, 21 nt, Human
ccuccgggccacgcuccccug

SEQ ID NO: 1311185 - RNA, 20 nt, Human
ccucuaagcuaggggacaaa

SEQ ID NO: 1311186 - RNA, 20 nt, Human
ccucucggauagagaccaug

SEQ ID NO: 1311187 - RNA, 25 nt, Human
ccugaugcugggcccaugucgcucc

SEQ ID NO: 1311188 - RNA, 26 nt, Human
ccuggcucuggagucugcuuagaguc

SEQ ID NO: 1311189 - RNA, 21 nt, Human
ccugggccacccgcugaagag

SEQ ID NO: 1311190 - RNA, 21 nt, Human
ccuguaguuggggucuagaac

SEQ ID NO: 1311191 - RNA, 21 nt, Human
ccuguucacccuccucagccc

SEQ ID NO: 1311192 - RNA, 20 nt, Human
ccuucacaugggucccagac

SEQ ID NO: 1311193 - RNA, 21 nt, Human
cgcagccugcucuucuccuuc

SEQ ID NO: 1311194 - RNA, 19 nt, Human
cgccagcacccuccugacu

SEQ ID NO: 1311195 - RNA, 22 nt, Human
cggcucacagucccccccaccc

SEQ ID NO: 1311196 - RNA, 19 nt, Human
cgugggaacuuggcccugg

SEQ ID NO: 1311197 - RNA, 20 nt, Human
cucacagucccccccacccc

SEQ ID NO: 1311198 - RNA, 22 nt, Human
cucacagucccccccaccccca

SEQ ID NO: 1311199 - RNA, 21 nt, Human
cucaggcacuuccucugcacu

SEQ ID NO: 1311200 - RNA, 23 nt, Human
cucaucagcagcucuuggugcga

SEQ ID NO: 1311201 - RNA, 20 nt, Human
cuccacaccuggguccccuc

SEQ ID NO: 1311202 - RNA, 23 nt, Human
cuccacccucucggauagagacc

SEQ ID NO: 1311203 - RNA, 22 nt, Human
cuccccacuccccacagucagu

SEQ ID NO: 1311204 - RNA, 24 nt, Human
cucugcacugagcuucacuaacuc

SEQ ID NO: 1311205 - RNA, 21 nt, Human
cucugugcucggcgucucuuc

SEQ ID NO: 1311206 - RNA, 19 nt, Human
cucuuccuucugcucaucu

SEQ ID NO: 1311207 - RNA, 24 nt, Human
cugcaggagccaccagggcugggu

SEQ ID NO: 1311208 - RNA, 22 nt, Human
cugcgggacaaacucgggccag

SEQ ID NO: 1311209 - RNA, 21 nt, Human
cuggcaacucacacucauugc

SEQ ID NO: 1311210 - RNA, 21 nt, Human
cuggggcugcaggagccacca

SEQ ID NO: 1311211 - RNA, 19 nt, Human
cuuccgaagcagcuugggg

SEQ ID NO: 1311212 - RNA, 19 nt, Human
cuugauggucgguucacuu

SEQ ID NO: 1311213 - RNA, 25 nt, Human
cuuggggaacguucauggguguucu

SEQ ID NO: 1311214 - RNA, 20 nt, Human
gaaaaggucuuaugagccaa

SEQ ID NO: 1311215 - RNA, 22 nt, Human
gaccagcacucucccaagcucu

SEQ ID NO: 1311216 - RNA, 20 nt, Human
gacgcagacagcccaccugg

SEQ ID NO: 1311217 - RNA, 23 nt, Human
gacuugcuuuccucgcugagcac

SEQ ID NO: 1311218 - RNA, 19 nt, Human
gagacaccguggcugccuu

SEQ ID NO: 1311219 - RNA, 24 nt, Human
gagcccgcguggcggcuggggcgg

SEQ ID NO: 1311220 - RNA, 23 nt, Human
gagcuggaaggcagggugugugc

SEQ ID NO: 1311221 - RNA, 19 nt, Human
gagggcucggaagccccug

SEQ ID NO: 1311222 - RNA, 24 nt, Human
gcccguuccucacaguggcugucg

SEQ ID NO: 1311223 - RNA, 19 nt, Human
gcccugaguuuuuucuccg

SEQ ID NO: 1311224 - RNA, 22 nt, Human
gccuccuucccugcucucuucc

SEQ ID NO: 1311225 - RNA, 24 nt, Human
gccugaugcugggcccaugucgcu

SEQ ID NO: 1311226 - RNA, 18 nt, Human
gccugcuuugggcuccag

SEQ ID NO: 1311227 - RNA, 20 nt, Human
gcuaggcugccgugggaacu

SEQ ID NO: 1311228 - RNA, 24 nt, Human
gcucacagucccccccacccccac

SEQ ID NO: 1311229 - RNA, 21 nt, Human
gcugguuccaucccugcucca

SEQ ID NO: 1311230 - RNA, 23 nt, Human
gcugucggucucugcuggggaga

SEQ ID NO: 1311231 - RNA, 21 nt, Human
ggagacucacagggggucucg

SEQ ID NO: 1311232 - RNA, 19 nt, Human
ggagcccccccagcccguc

SEQ ID NO: 1311233 - RNA, 27 nt, Human
ggagcccccccagcccguccacuccac

SEQ ID NO: 1311234 - RNA, 24 nt, Human
ggagguguugggcaauucggaauu

SEQ ID NO: 1311235 - RNA, 18 nt, Human
ggcaagugggggugccca

SEQ ID NO: 1311236 - RNA, 20 nt, Human
ggccagacagcugggugggu

SEQ ID NO: 1311237 - RNA, 18 nt, Human
ggcccccggcacccccag

SEQ ID NO: 1311238 - RNA, 21 nt, Human
ggcccugaccagugcccucau

SEQ ID NO: 1311239 - RNA, 18 nt, Human
ggccugggccacccgcug

SEQ ID NO: 1311240 - RNA, 20 nt, Human
ggcucacagucccccccacc

SEQ ID NO: 1311241 - RNA, 22 nt, Human
gggacauccgaguggggcuggg

SEQ ID NO: 1311242 - RNA, 23 nt, Human
gggauccucggggcacucuggug

SEQ ID NO: 1311243 - RNA, 23 nt, Human
gggcacucuggugaaaacccugc

SEQ ID NO: 1311244 - RNA, 20 nt, Human
gggccagacagcuggguggg

SEQ ID NO: 1311245 - RNA, 21 nt, Human
gggccagacagcugggugggu

SEQ ID NO: 1311246 - RNA, 22 nt, Human
ggggcacucuggugaaaacccu

SEQ ID NO: 1311247 - RNA, 21 nt, Human
gguagguaccuaccgccuucc

SEQ ID NO: 1311248 - RNA, 19 nt, Human
ggucuuucaggguccccug

SEQ ID NO: 1311249 - RNA, 21 nt, Human
gguguggaggcaagugggggu

SEQ ID NO: 1311250 - RNA, 24 nt, Human
guaccuaccgccuuccuggguggc

SEQ ID NO: 1311251 - RNA, 18 nt, Human
guccacguagcuguagcu

SEQ ID NO: 1311252 - RNA, 22 nt, Human
guccccgugugccccgcuccug

SEQ ID NO: 1311253 - RNA, 22 nt, Human
gucccuucuucuucaugugacc

SEQ ID NO: 1311254 - RNA, 18 nt, Human
gucuagaaccauggcuuc

SEQ ID NO: 1311255 - RNA, 21 nt, Human
uaccugaagguagguaccuac

SEQ ID NO: 1311256 - RNA, 23 nt, Human
uagguaccuaccgccuuccuggg

SEQ ID NO: 1311257 - RNA, 18 nt, Human
ucacaacauucuguccca

SEQ ID NO: 1311258 - RNA, 18 nt, Human
ucacaugggucccagacu

SEQ ID NO: 1311259 - RNA, 23 nt, Human
ucacuagggugggcuuuuugggg

SEQ ID NO: 1311260 - RNA, 18 nt, Human
ucacucugcugggacagc

SEQ ID NO: 1311261 - RNA, 20 nt, Human
ucagaggcacuuucaaaggg

SEQ ID NO: 1311262 - RNA, 21 nt, Human
ucaggguauucccaaggugcu

SEQ ID NO: 1311263 - RNA, 19 nt, Human
ucagucgcaugcuccuggu

SEQ ID NO: 1311264 - RNA, 18 nt, Human
ucauaugccaggcagcag

SEQ ID NO: 1311265 - RNA, 25 nt, Human
ucauaugccaggcagcaggcagagc

SEQ ID NO: 1311266 - RNA, 24 nt, Human
ucauuuuuggccccuuccuucaca

SEQ ID NO: 1311267 - RNA, 23 nt, Human
uccacagcuacaaugaugagggc

SEQ ID NO: 1311268 - RNA, 23 nt, Human
uccacccucucggauagagacca

SEQ ID NO: 1311269 - RNA, 21 nt, Human
uccacuccacaccuggguccc

SEQ ID NO: 1311270 - RNA, 23 nt, Human
ucccaggaaggucccugagccag

SEQ ID NO: 1311271 - RNA, 18 nt, Human
ucccccaggagaccugca

SEQ ID NO: 1311272 - RNA, 26 nt, Human
ucccccccacccccaccagcucacag

SEQ ID NO: 1311273 - RNA, 18 nt, Human
uccccgugugccccgcuc

SEQ ID NO: 1311274 - RNA, 21 nt, Human
ucccgggggcuccucugugcu

SEQ ID NO: 1311275 - RNA, 19 nt, Human
ucccugaagcuugagcccc

SEQ ID NO: 1311276 - RNA, 21 nt, Human
ucccuguggaaggcuccccgc

SEQ ID NO: 1311277 - RNA, 25 nt, Human
uccgaagcagcuugggggaccagca

SEQ ID NO: 1311278 - RNA, 29 nt, Human
uccggcucuccccacgcagucucucuccc

SEQ ID NO: 1311279 - RNA, 19 nt, Human
uccucugcacugagcuuca

SEQ ID NO: 1311280 - RNA, 18 nt, Human
uccuggguucugcuuucu

SEQ ID NO: 1311281 - RNA, 18 nt, Human
uccuugcaggggggaggu

SEQ ID NO: 1311282 - RNA, 21 nt, Human
ucggaagccccuguccagggc

SEQ ID NO: 1311283 - RNA, 24 nt, Human
ucggggccugaagagccccagcgg

SEQ ID NO: 1311284 - RNA, 22 nt, Human
ucuagaacuauugacucaauaa

SEQ ID NO: 1311285 - RNA, 18 nt, Human
ucugcaggggaugugggg

SEQ ID NO: 1311286 - RNA, 24 nt, Human
ucugcaggggauguggggagcugg

SEQ ID NO: 1311287 - RNA, 21 nt, Human
ucugcccugcugcuuugcaga

SEQ ID NO: 1311288 - RNA, 21 nt, Human
ucugggcuuugcucugacuug

SEQ ID NO: 1311289 - RNA, 21 nt, Human
ugaccagugcccucaugugcc

SEQ ID NO: 1311290 - RNA, 21 nt, Human
ugagacaccguggcugccuug

SEQ ID NO: 1311291 - RNA, 22 nt, Human
ugagcacauacuuugaugugua

SEQ ID NO: 1311292 - RNA, 19 nt, Human
ugagccccggcucacaguc

SEQ ID NO: 1311293 - RNA, 21 nt, Human
ugagugcaggauuugaaaugg

SEQ ID NO: 1311294 - RNA, 24 nt, Human
ugcaccuggcucuggagucugcuu

SEQ ID NO: 1311295 - RNA, 21 nt, Human
ugcagggacccugcagauggg

SEQ ID NO: 1311296 - RNA, 22 nt, Human
ugcaugaagcccaggaacacug

SEQ ID NO: 1311297 - RNA, 21 nt, Human
ugcccaagccgcgcggacccu

SEQ ID NO: 1311298 - RNA, 21 nt, Human
ugccuugggguuccuggguuc

SEQ ID NO: 1311299 - RNA, 20 nt, Human
ugcggagcccgcguggcggc

SEQ ID NO: 1311300 - RNA, 21 nt, Human
ugcggagcccgcguggcggcu

SEQ ID NO: 1311301 - RNA, 26 nt, Human
ugcggagcccgcguggcggcuggggc

SEQ ID NO: 1311302 - RNA, 19 nt, Human
ugcuaggcugccgugggaa

SEQ ID NO: 1311303 - RNA, 23 nt, Human
ugcuuagagucuuuggcggcucu

SEQ ID NO: 1311304 - RNA, 20 nt, Human
ugcuucugugucucucucuc

SEQ ID NO: 1311305 - RNA, 25 nt, Human
uggacagaaaugccccagaggugcu

SEQ ID NO: 1311306 - RNA, 18 nt, Human
uggagaaacuaaacugga

SEQ ID NO: 1311307 - RNA, 24 nt, Human
uggaugcuggcuuuacuacccagg

SEQ ID NO: 1311308 - RNA, 20 nt, Human
uggcaggggacauccgagug

SEQ ID NO: 1311309 - RNA, 18 nt, Human
uggcgccagcacccuccu

SEQ ID NO: 1311310 - RNA, 18 nt, Human
uggcuccccacuccccac

SEQ ID NO: 1311311 - RNA, 18 nt, Human
uggcugcggagcuggcgc

SEQ ID NO: 1311312 - RNA, 21 nt, Human
uggcugcggagcuggcgccag

SEQ ID NO: 1311313 - RNA, 19 nt, Human
uggcuucuucggcugccuu

SEQ ID NO: 1311314 - RNA, 23 nt, Human
uggcuuguggacgcagacagccc

SEQ ID NO: 1311315 - RNA, 25 nt, Human
ugggacucaggggcuugggacccug

SEQ ID NO: 1311316 - RNA, 22 nt, Human
ugggccacccgcugaagagccc

SEQ ID NO: 1311317 - RNA, 18 nt, Human
uggggagccccucggggc

SEQ ID NO: 1311318 - RNA, 19 nt, Human
uggggcugcaggagccacc

SEQ ID NO: 1311319 - RNA, 20 nt, Human
uggggcugcaggagccacca

SEQ ID NO: 1311320 - RNA, 26 nt, Human
ugggucugcagggcgucccgggguuu

SEQ ID NO: 1311321 - RNA, 19 nt, Human
uggguuucccaagacagcc

SEQ ID NO: 1311322 - RNA, 19 nt, Human
ugguaggugacuugcuuuc

SEQ ID NO: 1311323 - RNA, 20 nt, Human
uggugcgaguugggugccuu

SEQ ID NO: 1311324 - RNA, 21 nt, Human
uguagcuuccaagagaaacca

SEQ ID NO: 1311325 - RNA, 24 nt, Human
uguccagggccuguauguaugucu

SEQ ID NO: 1311326 - RNA, 18 nt, Human
ugugcagccuccuuggag

SEQ ID NO: 1311327 - RNA, 22 nt, Human
ugugcagccuccuuggaggucc

SEQ ID NO: 1311328 - RNA, 22 nt, Human
uguugggcaauucggaauugga

SEQ ID NO: 1311329 - RNA, 24 nt, Human
uguuugcugguuccaucccugcuc

SEQ ID NO: 1311330 - RNA, 21 nt, Human
uguuuugagucucuuugcguu

SEQ ID NO: 1311331 - RNA, 22 nt, Human
uuccuggguucugcuuucuggg

SEQ ID NO: 1311332 - RNA, 23 nt, Human
uucgggggccuccuccgggccac

SEQ ID NO: 1311333 - RNA, 18 nt, Human
uugauggucgguucacuu

SEQ ID NO: 1311334 - RNA, 22 nt, Human
uugcugguuccaucccugcucc

SEQ ID NO: 1311335 - RNA, 21 nt, Human
uuggaagucugagcagcagcc

SEQ ID NO: 1311336 - RNA, 18 nt, Human
uugucccucuggcucccc

SEQ ID NO: 1311337 - RNA, 21 nt, Human
uuuccucgcugagcacauacu

SEQ ID NO: 1311338 - RNA, 19 nt, Human
uuucugcuccacagcuaca

SEQ ID NO: 1311339 - RNA, 23 nt, Human
uuugaagugucuauugcgcuuga

SEQ ID NO: 1311340 - RNA, 20 nt, Human
uuuuuucuccguuguuuuga

SEQ ID NO: 1311341 - RNA, 21 nt, Human
aaauguugauaagcaagagcu

SEQ ID NO: 1311342 - RNA, 21 nt, Human
ccucucuaaugacacucuucu

SEQ ID NO: 1311343 - RNA, 26 nt, Human
cuaaugacacucuucuccaguuuccc

SEQ ID NO: 1311344 - RNA, 22 nt, Human
ucccuuguucccaucuucuucu

SEQ ID NO: 1311345 - RNA, 22 nt, Human
ccuccguguagcaccucagccc

SEQ ID NO: 1311346 - RNA, 18 nt, Human
cguguagcaccucagccc

SEQ ID NO: 1311347 - RNA, 21 nt, Human
ucccccucggcggguggaggc

SEQ ID NO: 1311348 - RNA, 24 nt, Human
uguagcaccucagcccaugcuucu

SEQ ID NO: 1311349 - RNA, 25 nt, Human
aaaaggaagaaaguuccagguggag

SEQ ID NO: 1311350 - RNA, 21 nt, Human
aaaguuccagguggagucugg

SEQ ID NO: 1311351 - RNA, 23 nt, Human
aaaugccagggucacaauauacc

SEQ ID NO: 1311352 - RNA, 22 nt, Human
acacauuucuuucuuacuguuc

SEQ ID NO: 1311353 - RNA, 23 nt, Human
acuauacuccagccuggucacag

SEQ ID NO: 1311354 - RNA, 25 nt, Human
acuauacuccagccuggucacaggg

SEQ ID NO: 1311355 - RNA, 23 nt, Human
agcuauauggaggcugagguggg

SEQ ID NO: 1311356 - RNA, 24 nt, Human
aggaucgcuugagcccaggaguuu

SEQ ID NO: 1311357 - RNA, 24 nt, Human
aggcugaggugggaggaucgcuug

SEQ ID NO: 1311358 - RNA, 22 nt, Human
aggcuggcaaguccaagaucaa

SEQ ID NO: 1311359 - RNA, 23 nt, Human
aggcuggcaaguccaagaucaag

SEQ ID NO: 1311360 - RNA, 23 nt, Human
aggugggaggaucgcuugagccc

SEQ ID NO: 1311361 - RNA, 23 nt, Human
auacuccagccuggucacagggg

SEQ ID NO: 1311362 - RNA, 24 nt, Human
aucaugccacuauacuccagccug

SEQ ID NO: 1311363 - RNA, 20 nt, Human
aucgcuugagcccaggaguu

SEQ ID NO: 1311364 - RNA, 22 nt, Human
augccacuauacuccagccugg

SEQ ID NO: 1311365 - RNA, 23 nt, Human
cacuauacuccagccuggucaca

SEQ ID NO: 1311366 - RNA, 19 nt, Human
cagcaugugcacguggcaa

SEQ ID NO: 1311367 - RNA, 19 nt, Human
ccacuauacuccagccugg

SEQ ID NO: 1311368 - RNA, 19 nt, Human
ccacuauacuccagccugg

SEQ ID NO: 1311369 - RNA, 20 nt, Human
ccacuauacuccagccuggu

SEQ ID NO: 1311370 - RNA, 22 nt, Human
ccaggaguuugaggcugcagug

SEQ ID NO: 1311371 - RNA, 24 nt, Human
ccaucugcaagcuggagaaucaga

SEQ ID NO: 1311372 - RNA, 18 nt, Human
cccaccagcuauauggag

SEQ ID NO: 1311373 - RNA, 21 nt, Human
ccgguggcauggaaguccaag

SEQ ID NO: 1311374 - RNA, 23 nt, Human
cgaaaaggaagaaaguuccaggu

SEQ ID NO: 1311375 - RNA, 20 nt, Human
cuggagaaucagagaagccg

SEQ ID NO: 1311376 - RNA, 18 nt, Human
gagcccaggaguuugagg

SEQ ID NO: 1311377 - RNA, 21 nt, Human
gagccggcagcugagggccga

SEQ ID NO: 1311378 - RNA, 24 nt, Human
gaucgcuugagcccaggaguuuga

SEQ ID NO: 1311379 - RNA, 23 nt, Human
gcaggcacaucuggugucugaug

SEQ ID NO: 1311380 - RNA, 21 nt, Human
ggaggcugaggugggaggauc

SEQ ID NO: 1311381 - RNA, 22 nt, Human
ggaucgcuugagcccaggaguu

SEQ ID NO: 1311382 - RNA, 20 nt, Human
ggccgagcagggguuaggcc

SEQ ID NO: 1311383 - RNA, 18 nt, Human
ggccgaggccgagcaggg

SEQ ID NO: 1311384 - RNA, 23 nt, Human
gggccgaggccgagcagggguua

SEQ ID NO: 1311385 - RNA, 22 nt, Human
ggucacaggggucugggaaaga

SEQ ID NO: 1311386 - RNA, 27 nt, Human
gucacaauauaccaucugcaagcugga

SEQ ID NO: 1311387 - RNA, 24 nt, Human
uaaacaacacacauuucuuucuua

SEQ ID NO: 1311388 - RNA, 18 nt, Human
uaccaucugcaagcugga

SEQ ID NO: 1311389 - RNA, 22 nt, Human
uacuccagccuggucacagggg

SEQ ID NO: 1311390 - RNA, 21 nt, Human
ucaauccacagaggaagaaaa

SEQ ID NO: 1311391 - RNA, 24 nt, Human
ucacaggggucugggaaagacaga

SEQ ID NO: 1311392 - RNA, 21 nt, Human
uccccaccagcuauauggagg

SEQ ID NO: 1311393 - RNA, 19 nt, Human
ucgcuugagcccaggaguu

SEQ ID NO: 1311394 - RNA, 24 nt, Human
ucgcuugagcccaggaguuugagg

SEQ ID NO: 1311395 - RNA, 21 nt, Human
ucggaugguuugcaugugcuc

SEQ ID NO: 1311396 - RNA, 20 nt, Human
ucuuacuguucugaaggcuu

SEQ ID NO: 1311397 - RNA, 22 nt, Human
ugagcccaggaguuugaggcug

SEQ ID NO: 1311398 - RNA, 18 nt, Human
ugaggucgaggacgugcc

SEQ ID NO: 1311399 - RNA, 18 nt, Human
ugaggugggaggaucgcu

SEQ ID NO: 1311400 - RNA, 20 nt, Human
ugaggugggaggaucgcuug

SEQ ID NO: 1311401 - RNA, 23 nt, Human
ugaggugggaggaucgcuugagc

SEQ ID NO: 1311402 - RNA, 24 nt, Human
ugaggugggaggaucgcuugagcc

SEQ ID NO: 1311403 - RNA, 23 nt, Human
ugcaagcuggagaaucagagaag

SEQ ID NO: 1311404 - RNA, 21 nt, Human
ugcacaagaaguuuauuguca

SEQ ID NO: 1311405 - RNA, 19 nt, Human
uggcagagagcaagcucuu

SEQ ID NO: 1311406 - RNA, 20 nt, Human
ugggaaagacagaggcuuug

SEQ ID NO: 1311407 - RNA, 18 nt, Human
uucaaguacaaauaguaa

SEQ ID NO: 1311408 - RNA, 20 nt, Human
uucauguguuagaaacuugg

SEQ ID NO: 1311409 - RNA, 21 nt, Human
uuccagguggagucuggugga

SEQ ID NO: 1311410 - RNA, 22 nt, Human
uuugcugaggacagucuucuug

SEQ ID NO: 1311411 - RNA, 18 nt, Human
uuuuuaccucacaacagu

SEQ ID NO: 1311412 - RNA, 20 nt, Human
aaaaccugagauugugaaga

SEQ ID NO: 1311413 - RNA, 24 nt, Human
aaagugcugggauuacagguguga

SEQ ID NO: 1311414 - RNA, 27 nt, Human
aaccucuuuaagacucugucuuuguca

SEQ ID NO: 1311415 - RNA, 23 nt, Human
aagcagucuucccgucucagacu

SEQ ID NO: 1311416 - RNA, 19 nt, Human
aagcauccuacaaugcccc

SEQ ID NO: 1311417 - RNA, 25 nt, Human
aagugauccucccaccucagccucc

SEQ ID NO: 1311418 - RNA, 18 nt, Human
aagugcugggauuacagg

SEQ ID NO: 1311419 - RNA, 19 nt, Human
aagugcugggauuacaggu

SEQ ID NO: 1311420 - RNA, 18 nt, Human
accacaccuggcuaauuu

SEQ ID NO: 1311421 - RNA, 19 nt, Human
acggagcaguaaguacaga

SEQ ID NO: 1311422 - RNA, 19 nt, Human
acguugcccaggcuggucu

SEQ ID NO: 1311423 - RNA, 19 nt, Human
acguugcccaggcuggucu

SEQ ID NO: 1311424 - RNA, 24 nt, Human
acuaguccccaacggcaugugugc

SEQ ID NO: 1311425 - RNA, 24 nt, Human
acucuauccagccucaacuguuuu

SEQ ID NO: 1311426 - RNA, 19 nt, Human
acugcagccucuaccuccu

SEQ ID NO: 1311427 - RNA, 22 nt, Human
agcaucuguugcucuaggcaac

SEQ ID NO: 1311428 - RNA, 18 nt, Human
aggcaaggucuugcuacg

SEQ ID NO: 1311429 - RNA, 23 nt, Human
aggcaaggucuugcuacguugcc

SEQ ID NO: 1311430 - RNA, 23 nt, Human
aggcuggugcaggagacacauug

SEQ ID NO: 1311431 - RNA, 21 nt, Human
aggguucagggggacugcggg

SEQ ID NO: 1311432 - RNA, 22 nt, Human
aguacagaguucuggagaggga

SEQ ID NO: 1311433 - RNA, 23 nt, Human
aguagcugagaccacaggcaugu

SEQ ID NO: 1311434 - RNA, 20 nt, Human
agugacggagcaguaaguac

SEQ ID NO: 1311435 - RNA, 20 nt, Human
agugcaguggugcgaucccg

SEQ ID NO: 1311436 - RNA, 23 nt, Human
agugcaguggugcgaucccggcu

SEQ ID NO: 1311437 - RNA, 24 nt, Human
agugcaguggugcgaucccggcuc

SEQ ID NO: 1311438 - RNA, 21 nt, Human
aguggggcugggagguggcug

SEQ ID NO: 1311439 - RNA, 24 nt, Human
aucacuuugcaauaaaaccugagg

SEQ ID NO: 1311440 - RNA, 24 nt, Human
caaagugcugggauuacaggugug

SEQ ID NO: 1311441 - RNA, 24 nt, Human
caaggucuugcuacguugcccagg

SEQ ID NO: 1311442 - RNA, 20 nt, Human
caagugauccucccaccuca

SEQ ID NO: 1311443 - RNA, 27 nt, Human
caagugauccucccaccucagccuccc

SEQ ID NO: 1311444 - RNA, 19 nt, Human
caaucucugguuucuuugc

SEQ ID NO: 1311445 - RNA, 21 nt, Human
cacauguggucagcaaaucca

SEQ ID NO: 1311446 - RNA, 24 nt, Human
caccucagccucccgaguagcuga

SEQ ID NO: 1311447 - RNA, 26 nt, Human
caccuguagcugucaccucugugcca

SEQ ID NO: 1311448 - RNA, 23 nt, Human
cacugcagccucuaccuccuggg

SEQ ID NO: 1311449 - RNA, 22 nt, Human
cacuggccauuccccacccuga

SEQ ID NO: 1311450 - RNA, 21 nt, Human
cacuuugcaauaaaaccugag

SEQ ID NO: 1311451 - RNA, 23 nt, Human
cagccucuaccuccuggguucaa

SEQ ID NO: 1311452 - RNA, 18 nt, Human
cagccuuucuucuaucgc

SEQ ID NO: 1311453 - RNA, 19 nt, Human
cagggcuuuucagccaggg

SEQ ID NO: 1311454 - RNA, 18 nt, Human
cagugcaccuguguuugg

SEQ ID NO: 1311455 - RNA, 18 nt, Human
caguguccuuccaccacc

SEQ ID NO: 1311456 - RNA, 24 nt, Human
cauuuucaauugauucauuggggg

SEQ ID NO: 1311457 - RNA, 20 nt, Human
ccaaaggagagacaaucuug

SEQ ID NO: 1311458 - RNA, 21 nt, Human
ccaaagugcugggauuacagg

SEQ ID NO: 1311459 - RNA, 21 nt, Human
ccaaagugcugggauuacagg

SEQ ID NO: 1311460 - RNA, 24 nt, Human
ccaaagugcugggauuacaggugu

SEQ ID NO: 1311461 - RNA, 22 nt, Human
ccauuccccacccugaucugga

SEQ ID NO: 1311462 - RNA, 21 nt, Human
cccaacggcaugugugccacu

SEQ ID NO: 1311463 - RNA, 23 nt, Human
cccaccucagccucccgaguagc

SEQ ID NO: 1311464 - RNA, 24 nt, Human
cccaccucagccucccgaguagcu

SEQ ID NO: 1311465 - RNA, 20 nt, Human
cccagccuggaugccagugu

SEQ ID NO: 1311466 - RNA, 19 nt, Human
cccaggcuggagugcagug

SEQ ID NO: 1311467 - RNA, 19 nt, Human
ccccaacggcaugugugcc

SEQ ID NO: 1311468 - RNA, 21 nt, Human
cccccagagaacacguggcca

SEQ ID NO: 1311469 - RNA, 22 nt, Human
cccccagagaacacguggccau

SEQ ID NO: 1311470 - RNA, 20 nt, Human
ccccccagagaacacguggc

SEQ ID NO: 1311471 - RNA, 18 nt, Human
cccuggagagcaggaugg

SEQ ID NO: 1311472 - RNA, 21 nt, Human
ccuacaaugccccggacaacu

SEQ ID NO: 1311473 - RNA, 24 nt, Human
ccucccaccucagccucccgagua

SEQ ID NO: 1311474 - RNA, 24 nt, Human
ccuccuggguucaagugauccucc

SEQ ID NO: 1311475 - RNA, 22 nt, Human
ccucuaccuccuggguucaagu

SEQ ID NO: 1311476 - RNA, 21 nt, Human
ccucugugcuauaguacugcu

SEQ ID NO: 1311477 - RNA, 22 nt, Human
ccuggguucaagugauccuccc

SEQ ID NO: 1311478 - RNA, 23 nt, Human
ccuggguucaagugauccuccca

SEQ ID NO: 1311479 - RNA, 19 nt, Human
cggcuggaggagguggugc

SEQ ID NO: 1311480 - RNA, 24 nt, Human
cggggaguggggcugggagguggc

SEQ ID NO: 1311481 - RNA, 24 nt, Human
cucacugcagccucuaccuccugg

SEQ ID NO: 1311482 - RNA, 19 nt, Human
cucagcaucuuuuaacuca

SEQ ID NO: 1311483 - RNA, 20 nt, Human
cucugugcuauaguacugcu

SEQ ID NO: 1311484 - RNA, 23 nt, Human
cugcagccucuaccuccuggguu

SEQ ID NO: 1311485 - RNA, 18 nt, Human
cugcccggaacauggcgg

SEQ ID NO: 1311486 - RNA, 20 nt, Human
cugcggggaguggggcuggg

SEQ ID NO: 1311487 - RNA, 25 nt, Human
cuucagggcuuuucagccagggggu

SEQ ID NO: 1311488 - RNA, 19 nt, Human
gaguaaucccaaagugcug

SEQ ID NO: 1311489 - RNA, 27 nt, Human
gaguagcugagaccacaggcauguauu

SEQ ID NO: 1311490 - RNA, 18 nt, Human
gauuacaggugugaguca

SEQ ID NO: 1311491 - RNA, 20 nt, Human
gauuacaggugugagucacu

SEQ ID NO: 1311492 - RNA, 24 nt, Human
gauuacaggugugagucacucuau

SEQ ID NO: 1311493 - RNA, 20 nt, Human
gauuuugccccccagagaac

SEQ ID NO: 1311494 - RNA, 20 nt, Human
gcacauguggucagcaaauc

SEQ ID NO: 1311495 - RNA, 20 nt, Human
gcagaaugagccgcucaccc

SEQ ID NO: 1311496 - RNA, 19 nt, Human
gcccaggcuggagugcagu

SEQ ID NO: 1311497 - RNA, 20 nt, Human
gcccaggcuggagugcagug

SEQ ID NO: 1311498 - RNA, 23 nt, Human
gcccaggcuggagugcaguggug

SEQ ID NO: 1311499 - RNA, 19 nt, Human
gcgcggggagggugagggg

SEQ ID NO: 1311500 - RNA, 21 nt, Human
gcuaauuuuuucccuuuuucu

SEQ ID NO: 1311501 - RNA, 21 nt, Human
gcucacugcagccucuaccuc

SEQ ID NO: 1311502 - RNA, 24 nt, Human
ggaaagcgcggggagggugagggg

SEQ ID NO: 1311503 - RNA, 20 nt, Human
ggaaauguguagucuuugag

SEQ ID NO: 1311504 - RNA, 23 nt, Human
ggacugcggggaguggggcuggg

SEQ ID NO: 1311505 - RNA, 19 nt, Human
ggagguggcuguuugcaca

SEQ ID NO: 1311506 - RNA, 21 nt, Human
ggagguggcuguuugcacaug

SEQ ID NO: 1311507 - RNA, 21 nt, Human
ggcaaggucuugcuacguugc

SEQ ID NO: 1311508 - RNA, 24 nt, Human
ggcuggaggagguggugcuacugg

SEQ ID NO: 1311509 - RNA, 20 nt, Human
ggcuggucuugaacuccuga

SEQ ID NO: 1311510 - RNA, 18 nt, Human
gggaguggggcugggagg

SEQ ID NO: 1311511 - RNA, 18 nt, Human
ggggaguggggcugggag

SEQ ID NO: 1311512 - RNA, 19 nt, Human
gucucaaucucugguuucu

SEQ ID NO: 1311513 - RNA, 24 nt, Human
gugauccucccaccucagccuccc

SEQ ID NO: 1311514 - RNA, 18 nt, Human
uaaucccaaagugcuggg

SEQ ID NO: 1311515 - RNA, 21 nt, Human
uacagaguucuggagagggaa

SEQ ID NO: 1311516 - RNA, 24 nt, Human
uaccuccuggguucaagugauccu

SEQ ID NO: 1311517 - RNA, 19 nt, Human
uacguugcccaggcugguc

SEQ ID NO: 1311518 - RNA, 23 nt, Human
uacguugcccaggcuggucuuga

SEQ ID NO: 1311519 - RNA, 24 nt, Human
uacguugcccaggcuggucuugaa

SEQ ID NO: 1311520 - RNA, 22 nt, Human
uagaggcaaggucuugcuacgu

SEQ ID NO: 1311521 - RNA, 18 nt, Human
uagcccaggcuggagugc

SEQ ID NO: 1311522 - RNA, 23 nt, Human
uaguacugcuuuuuuuuuuccuu

SEQ ID NO: 1311523 - RNA, 18 nt, Human
uaugucuuuacuucaggg

SEQ ID NO: 1311524 - RNA, 23 nt, Human
ucacugcagccucuaccuccugg

SEQ ID NO: 1311525 - RNA, 24 nt, Human
ucacugcagccucuaccuccuggg

SEQ ID NO: 1311526 - RNA, 18 nt, Human
ucagcagcguugucccug

SEQ ID NO: 1311527 - RNA, 23 nt, Human
ucagugcaccuguguuuggggcu

SEQ ID NO: 1311528 - RNA, 26 nt, Human
ucagugcaccuguguuuggggcuuug

SEQ ID NO: 1311529 - RNA, 23 nt, Human
ucccaaagugcugggauuacagg

SEQ ID NO: 1311530 - RNA, 24 nt, Human
ucccgaguagcugagaccacaggc

SEQ ID NO: 1311531 - RNA, 19 nt, Human
ucccuggagagcaggaugg

SEQ ID NO: 1311532 - RNA, 20 nt, Human
ucccuuuuucuagaggcaag

SEQ ID NO: 1311533 - RNA, 20 nt, Human
uccugaguucaagcagucuu

SEQ ID NO: 1311534 - RNA, 21 nt, Human
uccuggguucaagugauccuc

SEQ ID NO: 1311535 - RNA, 23 nt, Human
ucuccaaugauaguuccugauuu

SEQ ID NO: 1311536 - RNA, 23 nt, Human
ucucugguuucuuugcucagugc

SEQ ID NO: 1311537 - RNA, 19 nt, Human
ucuguagcccaggcuggag

SEQ ID NO: 1311538 - RNA, 20 nt, Human
ucuguagcccaggcuggagu

SEQ ID NO: 1311539 - RNA, 24 nt, Human
ucuguagcccaggcuggagugcag

SEQ ID NO: 1311540 - RNA, 22 nt, Human
ucuucuaucgcuccucuccaau

SEQ ID NO: 1311541 - RNA, 24 nt, Human
ucuugaacuccugaguucaagcag

SEQ ID NO: 1311542 - RNA, 23 nt, Human
ucuugcuacguugcccaggcugg

SEQ ID NO: 1311543 - RNA, 24 nt, Human
ucuugcuacguugcccaggcuggu

SEQ ID NO: 1311544 - RNA, 24 nt, Human
ugaacuccugaguucaagcagucu

SEQ ID NO: 1311545 - RNA, 23 nt, Human
ugacgggauuucuuuaguuucug

SEQ ID NO: 1311546 - RNA, 18 nt, Human
ugagaagcagauuagcca

SEQ ID NO: 1311547 - RNA, 24 nt, Human
ugagaccacaggcauguauuacca

SEQ ID NO: 1311548 - RNA, 23 nt, Human
ugagggaaugucauuuugucuca

SEQ ID NO: 1311549 - RNA, 21 nt, Human
ugaguucaagcagucuucccg

SEQ ID NO: 1311550 - RNA, 23 nt, Human
ugcacugugucagccuuucuucu

SEQ ID NO: 1311551 - RNA, 24 nt, Human
ugcccaggcuggucuugaacuccu

SEQ ID NO: 1311552 - RNA, 27 nt, Human
ugcccaggcuggucuugaacuccugag

SEQ ID NO: 1311553 - RNA, 22 nt, Human
ugcccggaacauggcgguaaga

SEQ ID NO: 1311554 - RNA, 19 nt, Human
ugcggggaguggggcuggg

SEQ ID NO: 1311555 - RNA, 27 nt, Human
ugcuacguugcccaggcuggucuugaa

SEQ ID NO: 1311556 - RNA, 18 nt, Human
ugcugggauuacaggugu

SEQ ID NO: 1311557 - RNA, 24 nt, Human
ugcugggauuacaggugugaguca

SEQ ID NO: 1311558 - RNA, 18 nt, Human
ugcuuuuagucuugguga

SEQ ID NO: 1311559 - RNA, 18 nt, Human
uggagacaauuuuggugg

SEQ ID NO: 1311560 - RNA, 24 nt, Human
uggagugcaguggugcgaucccgg

SEQ ID NO: 1311561 - RNA, 23 nt, Human
uggcuaauuuuuucccuuuuucu

SEQ ID NO: 1311562 - RNA, 21 nt, Human
uggcuguuugcacaugugguc

SEQ ID NO: 1311563 - RNA, 23 nt, Human
ugggagguggcuguuugcacaug

SEQ ID NO: 1311564 - RNA, 18 nt, Human
ugggauuacaggugugag

SEQ ID NO: 1311565 - RNA, 18 nt, Human
ugggauuacaggugugag

SEQ ID NO: 1311566 - RNA, 21 nt, Human
ugggauuacaggugugaguca

SEQ ID NO: 1311567 - RNA, 22 nt, Human
ugggauuacaggugugagucac

SEQ ID NO: 1311568 - RNA, 22 nt, Human
ugggauuacaggugugagucac

SEQ ID NO: 1311569 - RNA, 23 nt, Human
ugggauuacaggugugagucacu

SEQ ID NO: 1311570 - RNA, 25 nt, Human
ugggauuacaggugugagucacucu

SEQ ID NO: 1311571 - RNA, 23 nt, Human
uggguucaagugauccucccacc

SEQ ID NO: 1311572 - RNA, 24 nt, Human
uggguucaagugauccucccaccu

SEQ ID NO: 1311573 - RNA, 24 nt, Human
uggugcgaucccggcucacugcag

SEQ ID NO: 1311574 - RNA, 18 nt, Human
ugucccuggagagcagga

SEQ ID NO: 1311575 - RNA, 24 nt, Human
ugugccacuggccauuccccaccc

SEQ ID NO: 1311576 - RNA, 23 nt, Human
uucaagugauccucccaccucag

SEQ ID NO: 1311577 - RNA, 24 nt, Human
uucaagugauccucccaccucagc

SEQ ID NO: 1311578 - RNA, 18 nt, Human
uucauugucauuaccagu

SEQ ID NO: 1311579 - RNA, 21 nt, Human
uucuaucgcuccucuccaaug

SEQ ID NO: 1311580 - RNA, 21 nt, Human
uuggaaauguguagucuuuga

SEQ ID NO: 1311581 - RNA, 23 nt, Human
uuggugguugcggcuggaggagg

SEQ ID NO: 1311582 - RNA, 19 nt, Human
uugucccuggagagcagga

SEQ ID NO: 1311583 - RNA, 21 nt, Human
uuuccuuucucuuucuccacc

SEQ ID NO: 1311584 - RNA, 24 nt, Human
uuuucagccagggggugauuuugc

SEQ ID NO: 1311585 - RNA, 23 nt, Human
uuuuucagcagcguugucccugg

SEQ ID NO: 1311586 - RNA, 18 nt, Human
aagagggauccagaacca

SEQ ID NO: 1311587 - RNA, 22 nt, Human
aagcagugugcccacuuaggag

SEQ ID NO: 1311588 - RNA, 18 nt, Human
agcgaagagggauccaga

SEQ ID NO: 1311589 - RNA, 21 nt, Human
caacagaagcagugugcccac

SEQ ID NO: 1311590 - RNA, 27 nt, Human
cccgcggccguagcacagccggggucc

SEQ ID NO: 1311591 - RNA, 25 nt, Human
cgaagagggauccagaaccagggcc

SEQ ID NO: 1311592 - RNA, 20 nt, Human
cuggggugguggugaggccu

SEQ ID NO: 1311593 - RNA, 24 nt, Human
cuggggugguggugaggccuggac

SEQ ID NO: 1311594 - RNA, 20 nt, Human
cuugcccucggcucagcggg

SEQ ID NO: 1311595 - RNA, 21 nt, Human
gcaacaacagaagcagugugc

SEQ ID NO: 1311596 - RNA, 20 nt, Human
ggcccgcggccguagcacag

SEQ ID NO: 1311597 - RNA, 19 nt, Human
ggcgugggagcgaagaggg

SEQ ID NO: 1311598 - RNA, 18 nt, Human
gggagcgaagagggaucc

SEQ ID NO: 1311599 - RNA, 22 nt, Human
gguuacgagagcaacaacagaa

SEQ ID NO: 1311600 - RNA, 21 nt, Human
uggggugguggugaggccugg

SEQ ID NO: 1311601 - RNA, 20 nt, Human
uggugugcucccagacggcg

SEQ ID NO: 1311602 - RNA, 22 nt, Human
uuccugaggccgagaggguccu

SEQ ID NO: 1311603 - RNA, 24 nt, Human
aaaguguugggauuucaggcauga

SEQ ID NO: 1311604 - RNA, 23 nt, Human
aaguagagaugcacaccaccaca

SEQ ID NO: 1311605 - RNA, 23 nt, Human
agcuauuuuuuuuuuuuuuuuuu

SEQ ID NO: 1311606 - RNA, 24 nt, Human
agcuggucucaaacuccugggcuc

SEQ ID NO: 1311607 - RNA, 23 nt, Human
aggaagaaacagauagaaccucc

SEQ ID NO: 1311608 - RNA, 24 nt, Human
aggcgaucugcccaucuuggccuc

SEQ ID NO: 1311609 - RNA, 22 nt, Human
aguucucacuauguuguccagg

SEQ ID NO: 1311610 - RNA, 18 nt, Human
augggguuucaccauguu

SEQ ID NO: 1311611 - RNA, 19 nt, Human
augggguuucaccauguug

SEQ ID NO: 1311612 - RNA, 21 nt, Human
augggguuucaccauguugca

SEQ ID NO: 1311613 - RNA, 23 nt, Human
caaccuuugccucccaggcucaa

SEQ ID NO: 1311614 - RNA, 19 nt, Human
cacaccaccacacucagcu

SEQ ID NO: 1311615 - RNA, 24 nt, Human
caccauguugcacaagcuggucuc

SEQ ID NO: 1311616 - RNA, 27 nt, Human
caccauguugcacaagcuggucucaaa

SEQ ID NO: 1311617 - RNA, 24 nt, Human
caccucagccuccugaguggcugg

SEQ ID NO: 1311618 - RNA, 18 nt, Human
cacuauguuguccaggcu

SEQ ID NO: 1311619 - RNA, 18 nt, Human
cacugcaaccuuugccuc

SEQ ID NO: 1311620 - RNA, 21 nt, Human
cacugcaaccuuugccuccca

SEQ ID NO: 1311621 - RNA, 23 nt, Human
cagaguggcacaaucucagcuca

SEQ ID NO: 1311622 - RNA, 24 nt, Human
cauguugcacaagcuggucucaaa

SEQ ID NO: 1311623 - RNA, 19 nt, Human
ccaaaguguugggauuuca

SEQ ID NO: 1311624 - RNA, 24 nt, Human
ccaaaguguugggauuucaggcau

SEQ ID NO: 1311625 - RNA, 23 nt, Human
ccaccucagccuccugaguggcu

SEQ ID NO: 1311626 - RNA, 23 nt, Human
cccaccucagccuccugaguggc

SEQ ID NO: 1311627 - RNA, 18 nt, Human
cccaggcucaagccaucc

SEQ ID NO: 1311628 - RNA, 22 nt, Human
cccaucuuggccucccaaagug

SEQ ID NO: 1311629 - RNA, 19 nt, Human
ccgcgcccgccuucccugc

SEQ ID NO: 1311630 - RNA, 26 nt, Human
ccgcgcccgccuucccugcaccaagg

SEQ ID NO: 1311631 - RNA, 21 nt, Human
ccuccgcgcccgccuucccug

SEQ ID NO: 1311632 - RNA, 26 nt, Human
ccuccugaguggcuggaaguagagau

SEQ ID NO: 1311633 - RNA, 23 nt, Human
ccugcaccaagcaaacugcaaga

SEQ ID NO: 1311634 - RNA, 23 nt, Human
ccugggcucaggcgaucugccca

SEQ ID NO: 1311635 - RNA, 24 nt, Human
cgaucugcccaucuuggccuccca

SEQ ID NO: 1311636 - RNA, 24 nt, Human
cucaagccauccucccaccucagc

SEQ ID NO: 1311637 - RNA, 24 nt, Human
cucacugcaaccuuugccucccag

SEQ ID NO: 1311638 - RNA, 24 nt, Human
cucacugcaaccuuugccucccag

SEQ ID NO: 1311639 - RNA, 20 nt, Human
cucaggcgaucugcccaucu

SEQ ID NO: 1311640 - RNA, 25 nt, Human
cucccaggcucaagccauccuccca

SEQ ID NO: 1311641 - RNA, 22 nt, Human
cuccugaguggcuggaaguaga

SEQ ID NO: 1311642 - RNA, 20 nt, Human
cuccugggcucaggcgaucu

SEQ ID NO: 1311643 - RNA, 23 nt, Human
cugcaaccuuugccucccaggcu

SEQ ID NO: 1311644 - RNA, 18 nt, Human
gaaacagauagaaccucc

SEQ ID NO: 1311645 - RNA, 20 nt, Human
gagaugggguuucaccaugu

SEQ ID NO: 1311646 - RNA, 23 nt, Human
gagaugggguuucaccauguugc

SEQ ID NO: 1311647 - RNA, 19 nt, Human
gaggaagaaacagauagaa

SEQ ID NO: 1311648 - RNA, 22 nt, Human
gcaaccuuugccucccaggcuc

SEQ ID NO: 1311649 - RNA, 21 nt, Human
gguagagaugggguuucacca

SEQ ID NO: 1311650 - RNA, 22 nt, Human
guagagaugaguucucacuaug

SEQ ID NO: 1311651 - RNA, 19 nt, Human
guagagaugggguuucacc

SEQ ID NO: 1311652 - RNA, 21 nt, Human
guagagaugggguuucaccau

SEQ ID NO: 1311653 - RNA, 22 nt, Human
guagagaugggguuucaccaug

SEQ ID NO: 1311654 - RNA, 23 nt, Human
guagagaugggguuucaccaugu

SEQ ID NO: 1311655 - RNA, 24 nt, Human
guucucacuauguuguccaggcug

SEQ ID NO: 1311656 - RNA, 22 nt, Human
uagagaugggguuucaccaugu

SEQ ID NO: 1311657 - RNA, 24 nt, Human
uaugacugacaacuuacaucacaa

SEQ ID NO: 1311658 - RNA, 18 nt, Human
uauguuguccaggcugga

SEQ ID NO: 1311659 - RNA, 21 nt, Human
uauguuguccaggcuggagca

SEQ ID NO: 1311660 - RNA, 23 nt, Human
uauguuguccaggcuggagcaga

SEQ ID NO: 1311661 - RNA, 25 nt, Human
ucaagccauccucccaccucagccu

SEQ ID NO: 1311662 - RNA, 18 nt, Human
ucaauuuaaaauacauca

SEQ ID NO: 1311663 - RNA, 19 nt, Human
ucacugcaaccuuugccuc

SEQ ID NO: 1311664 - RNA, 24 nt, Human
ucacugcaaccuuugccucccagg

SEQ ID NO: 1311665 - RNA, 25 nt, Human
ucacugcaaccuuugccucccaggc

SEQ ID NO: 1311666 - RNA, 22 nt, Human
ucagccuccugaguggcuggaa

SEQ ID NO: 1311667 - RNA, 24 nt, Human
ucagcuauuuuuuuuuuuuuuuuu

SEQ ID NO: 1311668 - RNA, 27 nt, Human
ucagcucacugcaaccuuugccuccca

SEQ ID NO: 1311669 - RNA, 21 nt, Human
ucaggcaugacccaccacgcc

SEQ ID NO: 1311670 - RNA, 21 nt, Human
uccaggcuggagcagaguggc

SEQ ID NO: 1311671 - RNA, 24 nt, Human
ucccaaaguguugggauuucaggc

SEQ ID NO: 1311672 - RNA, 18 nt, Human
ucccaggcucaagccauc

SEQ ID NO: 1311673 - RNA, 26 nt, Human
uccucccaccucagccuccugagugg

SEQ ID NO: 1311674 - RNA, 20 nt, Human
ucucaaacuccugggcucag

SEQ ID NO: 1311675 - RNA, 22 nt, Human
ucucacuauguuguccaggcug

SEQ ID NO: 1311676 - RNA, 23 nt, Human
ucucacuauguuguccaggcugg

SEQ ID NO: 1311677 - RNA, 24 nt, Human
ucucacuauguuguccaggcugga

SEQ ID NO: 1311678 - RNA, 24 nt, Human
ugccucccaggcucaagccauccu

SEQ ID NO: 1311679 - RNA, 24 nt, Human
uggcacaaucucagcucacugcaa

SEQ ID NO: 1311680 - RNA, 24 nt, Human
ugggauuucaggcaugacccacca

SEQ ID NO: 1311681 - RNA, 18 nt, Human
ugggguuucaccauguug

SEQ ID NO: 1311682 - RNA, 24 nt, Human
ugguagagaugggguuucaccaug

SEQ ID NO: 1311683 - RNA, 24 nt, Human
uguccaggcuggagcagaguggca

SEQ ID NO: 1311684 - RNA, 24 nt, Human
uugguagagaugggguuucaccau

SEQ ID NO: 1311685 - RNA, 24 nt, Human
uuguagagaugaguucucacuaug

SEQ ID NO: 1311686 - RNA, 24 nt, Human
uuuguagagaugaguucucacuau

SEQ ID NO: 1311687 - RNA, 24 nt, Human
uuuuugguagagaugggguuucac

SEQ ID NO: 1311688 - RNA, 23 nt, Human
uuuuuugguagagaugggguuuc

SEQ ID NO: 1311689 - RNA, 24 nt, Human
uuuuuuuuuuuuuuugguagagau

SEQ ID NO: 1311690 - RNA, 20 nt, Human
uuuuuuuuuuuuuuuuuggu

SEQ ID NO: 1311691 - RNA, 22 nt, Human
uuuuuuuuuuuuuuuuugguag

SEQ ID NO: 1311692 - RNA, 28 nt, Human
uuuuuuuuuuuuuuuuuuuuuuuggggg

SEQ ID NO: 1311693 - RNA, 23 nt, Human
aaaaaaaaaaaaaaaaaaaagag

SEQ ID NO: 1311694 - RNA, 27 nt, Human
aaaaaaaaaaaaaacaggaaaacuauu

SEQ ID NO: 1311695 - RNA, 23 nt, Human
aaaaaaaacaggaaaacuauuca

SEQ ID NO: 1311696 - RNA, 20 nt, Human
aaaaaaaaccacugcagucu

SEQ ID NO: 1311697 - RNA, 22 nt, Human
aaaaaccacugcagucuaagcc

SEQ ID NO: 1311698 - RNA, 24 nt, Human
aaaaaggagacauuacaaguguua

SEQ ID NO: 1311699 - RNA, 25 nt, Human
aaaaaggagacauuacaaguguuaa

SEQ ID NO: 1311700 - RNA, 26 nt, Human
aaaaauacucuacccagcaaagcuau

SEQ ID NO: 1311701 - RNA, 21 nt, Human
aaaacaaacaccaauucuucu

SEQ ID NO: 1311702 - RNA, 23 nt, Human
aaaaccuaugggauacagcaaaa

SEQ ID NO: 1311703 - RNA, 19 nt, Human
aaaaggacaaacaagguca

SEQ ID NO: 1311704 - RNA, 21 nt, Human
aaacaaacaccaauucuucuc

SEQ ID NO: 1311705 - RNA, 21 nt, Human
aaacaaccacagaccaagggc

SEQ ID NO: 1311706 - RNA, 18 nt, Human
aaacaaggucauuauaug

SEQ ID NO: 1311707 - RNA, 25 nt, Human
aaacagaaaacgugaacugacccaa

SEQ ID NO: 1311708 - RNA, 27 nt, Human
aaacagaaaacgugaacugacccaaaa

SEQ ID NO: 1311709 - RNA, 21 nt, Human
aaacagaaaucaaaaauaauc

SEQ ID NO: 1311710 - RNA, 25 nt, Human
aaacagaaaucaaaaauaaucagga

SEQ ID NO: 1311711 - RNA, 24 nt, Human
aaacagcaagagaaaggcaucaag

SEQ ID NO: 1311712 - RNA, 23 nt, Human
aaagaaccaaacacaaauccugg

SEQ ID NO: 1311713 - RNA, 24 nt, Human
aaagaagccaccuggagucccagg

SEQ ID NO: 1311714 - RNA, 21 nt, Human
aaagacauaccugacugagac

SEQ ID NO: 1311715 - RNA, 22 nt, Human
aaagccucaccacagccuccaa

SEQ ID NO: 1311716 - RNA, 24 nt, Human
aacaaacaccaauucuucucaaac

SEQ ID NO: 1311717 - RNA, 24 nt, Human
aacaaguuccucauuuccaucuga

SEQ ID NO: 1311718 - RNA, 22 nt, Human
aacacaagcgcauccagagaca

SEQ ID NO: 1311719 - RNA, 19 nt, Human
aacauggugaaacccgucu

SEQ ID NO: 1311720 - RNA, 20 nt, Human
aacauggugaaacccgucuc

SEQ ID NO: 1311721 - RNA, 23 nt, Human
aaccaaaaaaaaaaaaaaaaaaa

SEQ ID NO: 1311722 - RNA, 21 nt, Human
aaccaaagaagccaccuggag

SEQ ID NO: 1311723 - RNA, 21 nt, Human
aaccaaaugcaacagagacaa

SEQ ID NO: 1311724 - RNA, 24 nt, Human
aaccaccaaaaaaaaccacugcag

SEQ ID NO: 1311725 - RNA, 20 nt, Human
aaccuaaugaugcaccucaa

SEQ ID NO: 1311726 - RNA, 21 nt, Human
aaccucaauuuuugacuucug

SEQ ID NO: 1311727 - RNA, 18 nt, Human
aaccucugccuguuuccc

SEQ ID NO: 1311728 - RNA, 26 nt, Human
aacuacuucccauugggucccuccca

SEQ ID NO: 1311729 - RNA, 25 nt, Human
aacuucaauauccuacucucagcau

SEQ ID NO: 1311730 - RNA, 19 nt, Human
aagaaagaaaaaagaauga

SEQ ID NO: 1311731 - RNA, 20 nt, Human
aagaagaagaaauuuggaaa

SEQ ID NO: 1311732 - RNA, 21 nt, Human
aagaagccaccuggaguccca

SEQ ID NO: 1311733 - RNA, 22 nt, Human
aagcaagaacaaaucaaacaca

SEQ ID NO: 1311734 - RNA, 22 nt, Human
aagcaagucaugucucacaugg

SEQ ID NO: 1311735 - RNA, 19 nt, Human
aaggagccuggcacagugg

SEQ ID NO: 1311736 - RNA, 24 nt, Human
aagugugguggcucacgccuguaa

SEQ ID NO: 1311737 - RNA, 21 nt, Human
aaucauaugcuaacaaauugg

SEQ ID NO: 1311738 - RNA, 23 nt, Human
aaucuaggcagcaguucccaaac

SEQ ID NO: 1311739 - RNA, 20 nt, Human
acaaacaaggucauuauaug

SEQ ID NO: 1311740 - RNA, 22 nt, Human
acaaaguauaacaauuccaaau

SEQ ID NO: 1311741 - RNA, 25 nt, Human
acaauuccaaauaugcaugcaacca

SEQ ID NO: 1311742 - RNA, 21 nt, Human
acacacaccacccaggagccc

SEQ ID NO: 1311743 - RNA, 25 nt, Human
acagagugagacuccauugcuaaaa

SEQ ID NO: 1311744 - RNA, 23 nt, Human
acaggacccaugcaagcccaaaa

SEQ ID NO: 1311745 - RNA, 19 nt, Human
accaaaaaaaaaaaaaaaa

SEQ ID NO: 1311746 - RNA, 30 nt, Human
accaaaaaaguagaaagauuucaaauaaag

SEQ ID NO: 1311747 - RNA, 22 nt, Human
accauaucaaaaggauauacaa

SEQ ID NO: 1311748 - RNA, 18 nt, Human
acccagaaucaaagccaa

SEQ ID NO: 1311749 - RNA, 22 nt, Human
acccaugcaagcccaaaaucca

SEQ ID NO: 1311750 - RNA, 19 nt, Human
accccacauuucccuucug

SEQ ID NO: 1311751 - RNA, 25 nt, Human
acuacuucccauugggucccuccca

SEQ ID NO: 1311752 - RNA, 21 nt, Human
acucaaggcugaggcaggagg

SEQ ID NO: 1311753 - RNA, 24 nt, Human
acuccagccugggugacagaguga

SEQ ID NO: 1311754 - RNA, 23 nt, Human
acugcacuccagccuggugacag

SEQ ID NO: 1311755 - RNA, 25 nt, Human
acugcacuccagccuggugacagag

SEQ ID NO: 1311756 - RNA, 24 nt, Human
acuguacuccagccugggugacag

SEQ ID NO: 1311757 - RNA, 26 nt, Human
acuguacuccagccugggugacagag

SEQ ID NO: 1311758 - RNA, 23 nt, Human
acuuacuacugagaggccugagg

SEQ ID NO: 1311759 - RNA, 23 nt, Human
agaaaaccaccaaacugcaacca

SEQ ID NO: 1311760 - RNA, 20 nt, Human
agaaaacgugaacugaccca

SEQ ID NO: 1311761 - RNA, 20 nt, Human
agaaagauuucaaauaaaca

SEQ ID NO: 1311762 - RNA, 21 nt, Human
agaaucacguuggaaggcaag

SEQ ID NO: 1311763 - RNA, 22 nt, Human
agaauugguugaacacgggagg

SEQ ID NO: 1311764 - RNA, 23 nt, Human
agacaaaaagaaagaaaagggac

SEQ ID NO: 1311765 - RNA, 19 nt, Human
agacaacauaacaaagaac

SEQ ID NO: 1311766 - RNA, 19 nt, Human
agacauuacaaguguuacc

SEQ ID NO: 1311767 - RNA, 18 nt, Human
agagacaaaaaaaaugca

SEQ ID NO: 1311768 - RNA, 22 nt, Human
agaggauacagugagcugagau

SEQ ID NO: 1311769 - RNA, 24 nt, Human
agaggauacagugagcugagauug

SEQ ID NO: 1311770 - RNA, 19 nt, Human
agcaagaacaaaucaaaca

SEQ ID NO: 1311771 - RNA, 24 nt, Human
agcagcagaauauacaaucaucuc

SEQ ID NO: 1311772 - RNA, 25 nt, Human
agccacugaaugacucacaggcacc

SEQ ID NO: 1311773 - RNA, 20 nt, Human
agccugccacacacaccacc

SEQ ID NO: 1311774 - RNA, 22 nt, Human
agccuggccaacauggugaaac

SEQ ID NO: 1311775 - RNA, 24 nt, Human
agccuggccaacauggugaaaccc

SEQ ID NO: 1311776 - RNA, 24 nt, Human
agccugggugacagagugagacuc

SEQ ID NO: 1311777 - RNA, 21 nt, Human
agccuggugacagagcuagac

SEQ ID NO: 1311778 - RNA, 18 nt, Human
aggaagaaacagaaaacg

SEQ ID NO: 1311779 - RNA, 21 nt, Human
aggacccaugcaagcccaaaa

SEQ ID NO: 1311780 - RNA, 19 nt, Human
aggcaaagagagagcuuga

SEQ ID NO: 1311781 - RNA, 23 nt, Human
aggcaccacccaugccaauuaca

SEQ ID NO: 1311782 - RNA, 20 nt, Human
aggcagaggauacagugagc

SEQ ID NO: 1311783 - RNA, 24 nt, Human
aggcagaggauacagugagcugag

SEQ ID NO: 1311784 - RNA, 24 nt, Human
aggcaggagaauugguugaacacg

SEQ ID NO: 1311785 - RNA, 18 nt, Human
aggcaggaggaccauuug

SEQ ID NO: 1311786 - RNA, 19 nt, Human
aggccacagcuccacuccu

SEQ ID NO: 1311787 - RNA, 24 nt, Human
aggcggguagaucacgaggucagg

SEQ ID NO: 1311788 - RNA, 20 nt, Human
aggcugaggcaggagaauug

SEQ ID NO: 1311789 - RNA, 24 nt, Human
aggcugaggcaggaggaccauuug

SEQ ID NO: 1311790 - RNA, 18 nt, Human
aggucaccuggagaacua

SEQ ID NO: 1311791 - RNA, 21 nt, Human
agugaggcuaaccaaaaaaaa

SEQ ID NO: 1311792 - RNA, 24 nt, Human
auaaaccacuagugaggcuaacca

SEQ ID NO: 1311793 - RNA, 26 nt, Human
auauucagguaucuuuuagcaacacc

SEQ ID NO: 1311794 - RNA, 19 nt, Human
aucacgaggucaggaguuc

SEQ ID NO: 1311795 - RNA, 21 nt, Human
aucagauacccuaaaucucaa

SEQ ID NO: 1311796 - RNA, 23 nt, Human
aucaguuacccuaaaucucucaa

SEQ ID NO: 1311797 - RNA, 24 nt, Human
aucaugccacuguacuccagccug

SEQ ID NO: 1311798 - RNA, 27 nt, Human
aucucaacaaccaccaaaaaaaaccac

SEQ ID NO: 1311799 - RNA, 21 nt, Human
augaaauaccugaaaaaaauu

SEQ ID NO: 1311800 - RNA, 23 nt, Human
augagaucugaguggggacacag

SEQ ID NO: 1311801 - RNA, 25 nt, Human
augcaaccaacacaagcgcauccag

SEQ ID NO: 1311802 - RNA, 22 nt, Human
augccacuguacuccagccugg

SEQ ID NO: 1311803 - RNA, 21 nt, Human
augccgaggcggguagaucac

SEQ ID NO: 1311804 - RNA, 21 nt, Human
auucuggggucuggaggaugg

SEQ ID NO: 1311805 - RNA, 23 nt, Human
auugccaaacaaaggggcuacag

SEQ ID NO: 1311806 - RNA, 24 nt, Human
auugugccacugcacuccagccug

SEQ ID NO: 1311807 - RNA, 20 nt, Human
auuuauccauugucuacaua

SEQ ID NO: 1311808 - RNA, 30 nt, Human; identical to SEQ ID NO: 1243708

SEQ ID NO: 1311809 - RNA, 21 nt, Human
caaaacaaagaauuucugaac

SEQ ID NO: 1311810 - RNA, 22 nt, Human
caaaacaaagaauuucugaacc

SEQ ID NO: 1311811 - RNA, 23 nt, Human
caaaaccaaaccauaucauucug

SEQ ID NO: 1311812 - RNA, 21 nt, Human
caaaagacaaagagaaaaugc

SEQ ID NO: 1311813 - RNA, 19 nt, Human
caaaauugauaaaccacua

SEQ ID NO: 1311814 - RNA, 24 nt, Human
caaacacacaauuaguagaaagaa

SEQ ID NO: 1311815 - RNA, 23 nt, Human
caaaccauaucauucugccccug

SEQ ID NO: 1311816 - RNA, 21 nt, Human
caaagagaaaaugcuaaaaac

SEQ ID NO: 1311817 - RNA, 23 nt, Human
caacaaccaccaaaaaaaaccac

SEQ ID NO: 1311818 - RNA, 23 nt, Human
caacauggugaaacccgucucua

SEQ ID NO: 1311819 - RNA, 22 nt, Human
cacaacacaugggaauucaaga

SEQ ID NO: 1311820 - RNA, 26 nt, Human
cacaacacaugggaauucaagaugag

SEQ ID NO: 1311821 - RNA, 20 nt, Human
cacagcuccacuccuguggc

SEQ ID NO: 1311822 - RNA, 23 nt, Human
caccaaaaaaguagaaagauuuc

SEQ ID NO: 1311823 - RNA, 19 nt, Human
caccacagccuccaauaac

SEQ ID NO: 1311824 - RNA, 21 nt, Human
caccacagccuccaauaacaa

SEQ ID NO: 1311825 - RNA, 18 nt, Human
caccuggagucccaggga

SEQ ID NO: 1311826 - RNA, 19 nt, Human
caccuggagucccagggau

SEQ ID NO: 1311827 - RNA, 24 nt, Human
cacgccuguaaucccagcacuuug

SEQ ID NO: 1311828 - RNA, 22 nt, Human
cacuccagccuggugacagagc

SEQ ID NO: 1311829 - RNA, 18 nt, Human
cacugcacuccagccugg

SEQ ID NO: 1311830 - RNA, 18 nt, Human
cacugcacuccagccugg

SEQ ID NO: 1311831 - RNA, 18 nt, Human
cacugcacuccagccugg

SEQ ID NO: 1311832 - RNA, 23 nt, Human
cacugcacuccagccuggugaca

SEQ ID NO: 1311833 - RNA, 24 nt, Human
cacugcacuccagccuggugacag

SEQ ID NO: 1311834 - RNA, 18 nt, Human
cacugccagcaaccaaag

SEQ ID NO: 1311835 - RNA, 19 nt, Human
cacuguacuccagccuggg

SEQ ID NO: 1311836 - RNA, 19 nt, Human
cacuguacuccagccuggg

SEQ ID NO: 1311837 - RNA, 19 nt, Human
cacuguacuccagccuggg

SEQ ID NO: 1311838 - RNA, 22 nt, Human
cacuguacuccagccuggguga

SEQ ID NO: 1311839 - RNA, 23 nt, Human
cacuguacuccagccugggugac

SEQ ID NO: 1311840 - RNA, 24 nt, Human
cacuguacuccagccugggugaca

SEQ ID NO: 1311841 - RNA, 25 nt, Human
cacuguacuccagccugggugacag

SEQ ID NO: 1311842 - RNA, 24 nt, Human
cagaaaauggaaacacaucaugca

SEQ ID NO: 1311843 - RNA, 23 nt, Human
cagagacucaaggcugaggcagg

SEQ ID NO: 1311844 - RNA, 21 nt, Human
cagagcuggugcucacacuua

SEQ ID NO: 1311845 - RNA, 22 nt, Human
cagauaaaacagacuuuaaguc

SEQ ID NO: 1311846 - RNA, 25 nt, Human
cagcaaaagcaguacuaggaggaaa

SEQ ID NO: 1311847 - RNA, 19 nt, Human
cagcaaacuccugccuggg

SEQ ID NO: 1311848 - RNA, 24 nt, Human
cagcacuuugagaugccgaggcgg

SEQ ID NO: 1311849 - RNA, 21 nt, Human
cagcaggggcaaaaagccacc

SEQ ID NO: 1311850 - RNA, 21 nt, Human
cagcaguucccaaaccucaau

SEQ ID NO: 1311851 - RNA, 27 nt, Human
cagcaugggaaagaccugcccccauga

SEQ ID NO: 1311852 - RNA, 24 nt, Human
cagcuacucaggaggcugaggcag

SEQ ID NO: 1311853 - RNA, 21 nt, Human
caggacccaugcaagcccaaa

SEQ ID NO: 1311854 - RNA, 20 nt, Human
caggaguucgagagcagccu

SEQ ID NO: 1311855 - RNA, 21 nt, Human
caggggcaaaaagccaccagu

SEQ ID NO: 1311856 - RNA, 25 nt, Human
caggucccucccacaacauguggga

SEQ ID NO: 1311857 - RNA, 23 nt, Human
cauaacaaagaaccaaacacaaa

SEQ ID NO: 1311858 - RNA, 27 nt, Human
cauauucagguaucuuuuagcaacacc

SEQ ID NO: 1311859 - RNA, 22 nt, Human
caucaccacuaaagaaaaccac

SEQ ID NO: 1311860 - RNA, 23 nt, Human
caugacucaauuacuucccacca

SEQ ID NO: 1311861 - RNA, 25 nt, Human
caugcaggucauacugauguaugac

SEQ ID NO: 1311862 - RNA, 18 nt, Human
cauggccuugggagaaaa

SEQ ID NO: 1311863 - RNA, 24 nt, Human
cauguuauccuacccccccucacc

SEQ ID NO: 1311864 - RNA, 25 nt, Human
cauucugccccuggcccuucccaaa

SEQ ID NO: 1311865 - RNA, 18 nt, Human
cauugcggaagucaagga

SEQ ID NO: 1311866 - RNA, 21 nt, Human
cauuugaucccaggaguucaa

SEQ ID NO: 1311867 - RNA, 22 nt, Human
ccaaaaaaaaaaaaaaaaaaaa

SEQ ID NO: 1311868 - RNA, 23 nt, Human
ccaaaaaaaaaaaaaaaaaaaaa

SEQ ID NO: 1311869 - RNA, 21 nt, Human
ccaaaccauaucaaaaggaua

SEQ ID NO: 1311870 - RNA, 20 nt, Human
ccaaaccauaucauucugcc

SEQ ID NO: 1311871 - RNA, 20 nt, Human
ccaaaccauaucauucugcc

SEQ ID NO: 1311872 - RNA, 20 nt, Human
ccaaacugcaaccauaaaua

SEQ ID NO: 1311873 - RNA, 23 nt, Human
ccaaagaagccaccuggaguccc

SEQ ID NO: 1311874 - RNA, 22 nt, Human
ccaacacaagcgcauccagaga

SEQ ID NO: 1311875 - RNA, 26 nt, Human
ccaauaacaacugcagucuggccaag

SEQ ID NO: 1311876 - RNA, 21 nt, Human
ccaccaaaaaaaaccacugca

SEQ ID NO: 1311877 - RNA, 18 nt, Human
ccacccagaaucaaagcc

SEQ ID NO: 1311878 - RNA, 21 nt, Human
ccacuaaagaaaaccaccaaa

SEQ ID NO: 1311879 - RNA, 22 nt, Human
ccacugaaugacucacaggcac

SEQ ID NO: 1311880 - RNA, 18 nt, Human
ccacugcacuccagccug

SEQ ID NO: 1311881 - RNA, 19 nt, Human
ccacugcacuccagccugg

SEQ ID NO: 1311882 - RNA, 19 nt, Human
ccacugcacuccagccugg

SEQ ID NO: 1311883 - RNA, 20 nt, Human
ccacugcacuccagccuggu

SEQ ID NO: 1311884 - RNA, 23 nt, Human
ccacugcacuccagccuggugac

SEQ ID NO: 1311885 - RNA, 20 nt, Human
ccacuguacuccagccuggg

SEQ ID NO: 1311886 - RNA, 20 nt, Human
ccacuguacuccagccuggg

SEQ ID NO: 1311887 - RNA, 21 nt, Human
ccacuguacuccagccugggu

SEQ ID NO: 1311888 - RNA, 21 nt, Human
ccacuguacuccagccugggu

SEQ ID NO: 1311889 - RNA, 23 nt, Human
ccacuguacuccagccuggguga

SEQ ID NO: 1311890 - RNA, 24 nt, Human
ccacuguacuccagccugggugac

SEQ ID NO: 1311891 - RNA, 22 nt, Human
ccauaaauaaugagagaaaaaa

SEQ ID NO: 1311892 - RNA, 20 nt, Human
cccaaaaugaauagcagguu

SEQ ID NO: 1311893 - RNA, 18 nt, Human
cccaaaggagaaaagccc

SEQ ID NO: 1311894 - RNA, 22 nt, Human
cccaugcaagcccaaaauccag

SEQ ID NO: 1311895 - RNA, 22 nt, Human
cccgucucuacuaaaaauacaa

SEQ ID NO: 1311896 - RNA, 24 nt, Human
cccuaguauugacacaccuggucc

SEQ ID NO: 1311897 - RNA, 22 nt, Human
ccuacauugggaagugaaagaa

SEQ ID NO: 1311898 - RNA, 21 nt, Human
ccuaguagaguuucuccauga

SEQ ID NO: 1311899 - RNA, 21 nt, Human
ccuauagucccagcuacucag

SEQ ID NO: 1311900 - RNA, 21 nt, Human
ccuccuggcuccuuucacggg

SEQ ID NO: 1311901 - RNA, 23 nt, Human
ccuccuggcuccuuucacggguu

SEQ ID NO: 1311902 - RNA, 22 nt, Human
ccuggccaacauggugaaaccc

SEQ ID NO: 1311903 - RNA, 23 nt, Human
ccuggccaacauggugaaacccg

SEQ ID NO: 1311904 - RNA, 22 nt, Human
ccugggugacagagugagacuc

SEQ ID NO: 1311905 - RNA, 18 nt, Human
cgaccccacauuucccuu

SEQ ID NO: 1311906 - RNA, 24 nt, Human
cgagagcagccuggccaacauggu

SEQ ID NO: 1311907 - RNA, 24 nt, Human
cgaggcggguagaucacgagguca

SEQ ID NO: 1311908 - RNA, 18 nt, Human
cgccuguaaucccagcac

SEQ ID NO: 1311909 - RNA, 25 nt, Human
cgcugcccauggucccuaguauuga

SEQ ID NO: 1311910 - RNA, 23 nt, Human
cuaaacaaccacagaccaagggc

SEQ ID NO: 1311911 - RNA, 21 nt, Human
cuagagaucagccugccacac

SEQ ID NO: 1311912 - RNA, 25 nt, Human
cuagagaucagccugccacacacac

SEQ ID NO: 1311913 - RNA, 21 nt, Human
cucaaaaguccacaguccaaa

SEQ ID NO: 1311914 - RNA, 18 nt, Human
cucaaagcuccacuaggu

SEQ ID NO: 1311915 - RNA, 20 nt, Human
cucaaggcugaggcaggagg

SEQ ID NO: 1311916 - RNA, 22 nt, Human
cucacgccuguaaucccagcac

SEQ ID NO: 1311917 - RNA, 24 nt, Human
cucacgccuguaaucccagcacuu

SEQ ID NO: 1311918 - RNA, 22 nt, Human
cuccaucaggcuaacagggaau

SEQ ID NO: 1311919 - RNA, 23 nt, Human
cuggugccugaauguaccauccg

SEQ ID NO: 1311920 - RNA, 23 nt, Human
cugugcacccacaggcucaacac

SEQ ID NO: 1311921 - RNA, 18 nt, Human
cuguuccaaccucugccu

SEQ ID NO: 1311922 - RNA, 23 nt, Human
cuucugagcccuccaaacuguuc

SEQ ID NO: 1311923 - RNA, 22 nt, Human
cuuuuaaaaccaucagaucuca

SEQ ID NO: 1311924 - RNA, 23 nt, Human
gaaaaaauauaaauaacauagca

SEQ ID NO: 1311925 - RNA, 23 nt, Human
gaaaaaggagacauuacaagugu

SEQ ID NO: 1311926 - RNA, 19 nt, Human
gaaaaccaccaaacugcaa

SEQ ID NO: 1311927 - RNA, 18 nt, Human
gaaagggauaaauuccca

SEQ ID NO: 1311928 - RNA, 27 nt, Human
gaaaucucuuccaaauuuucccacauu

SEQ ID NO: 1311929 - RNA, 19 nt, Human
gaacaaucauaugcuaaca

SEQ ID NO: 1311930 - RNA, 21 nt, Human
gaacuaggaagaaacagaaaa

SEQ ID NO: 1311931 - RNA, 25 nt, Human
gacagagugagacuccauugcuaaa

SEQ ID NO: 1311932 - RNA, 18 nt, Human
gacucaaggcugaggcag

SEQ ID NO: 1311933 - RNA, 23 nt, Human
gagaauugguugaacacgggagg

SEQ ID NO: 1311934 - RNA, 23 nt, Human
gagacaaaaaaaaugcaaagaau

SEQ ID NO: 1311935 - RNA, 23 nt, Human
gagaugccgaggcggguagauca

SEQ ID NO: 1311936 - RNA, 22 nt, Human
gagcagggaaacuccuccuuuu

SEQ ID NO: 1311937 - RNA, 18 nt, Human
gagcccuccaaacuguuc

SEQ ID NO: 1311938 - RNA, 22 nt, Human
gaucacgaggucaggaguucga

SEQ ID NO: 1311939 - RNA, 24 nt, Human
gaucacgaggucaggaguucgaga

SEQ ID NO: 1311940 - RNA, 21 nt, Human
gcaaacuauaccacuguaccc

SEQ ID NO: 1311941 - RNA, 20 nt, Human
gcaaagcuauccuucacaaa

SEQ ID NO: 1311942 - RNA, 23 nt, Human
gcacuccagccuggugacagagc

SEQ ID NO: 1311943 - RNA, 18 nt, Human
gcaggagaauugguugaa

SEQ ID NO: 1311944 - RNA, 25 nt, Human
gccacacacaccacccaggagccca

SEQ ID NO: 1311945 - RNA, 19 nt, Human
gccacuguacuccagccug

SEQ ID NO: 1311946 - RNA, 24 nt, Human
gccacuguacuccagccuggguga

SEQ ID NO: 1311947 - RNA, 21 nt, Human
gccucaccacagccuccaaua

SEQ ID NO: 1311948 - RNA, 24 nt, Human
gccugccuacccaccaccagaacc

SEQ ID NO: 1311949 - RNA, 19 nt, Human
gccuggcacaguggcucac

SEQ ID NO: 1311950 - RNA, 21 nt, Human
ggaggcagaggauacagugag

SEQ ID NO: 1311951 - RNA, 19 nt, Human
ggaguucuggauggagaug

SEQ ID NO: 1311952 - RNA, 24 nt, Human
ggccaacauggugaaacccgucuc

SEQ ID NO: 1311953 - RNA, 20 nt, Human
ggccuugggagaaaaaaggc

SEQ ID NO: 1311954 - RNA, 21 nt, Human
ggcucacgccuguaaucccag

SEQ ID NO: 1311955 - RNA, 23 nt, Human
gguagaucacgaggucaggaguu

SEQ ID NO: 1311956 - RNA, 21 nt, Human
ggucccucccacaacacaugg

SEQ ID NO: 1311957 - RNA, 24 nt, Human
gguggcucacgccuguaaucccag

SEQ ID NO: 1311958 - RNA, 24 nt, Human
gguugcacgugccuauagucccag

SEQ ID NO: 1311959 - RNA, 23 nt, Human
gguuuaaccccccuccuggcucc

SEQ ID NO: 1311960 - RNA, 18 nt, Human
gguuuaauggacuuacac

SEQ ID NO: 1311961 - RNA, 21 nt, Human
guaaauacaacucaaaauggu

SEQ ID NO: 1311962 - RNA, 24 nt, Human
guacuccagccugggugacagagu

SEQ ID NO: 1311963 - RNA, 20 nt, Human
gugaagggauggaaaaagau

SEQ ID NO: 1311964 - RNA, 24 nt, Human
uaaaaaaauguaagccaaaaauac

SEQ ID NO: 1311965 - RNA, 21 nt, Human
uaaaaaggacaaacaagguca

SEQ ID NO: 1311966 - RNA, 19 nt, Human
uaaaacauaacaggaguca

SEQ ID NO: 1311967 - RNA, 25 nt, Human
uaaacagaaaauggaaacagggacc

SEQ ID NO: 1311968 - RNA, 19 nt, Human
uaaaccacuagugaggcua

SEQ ID NO: 1311969 - RNA, 24 nt, Human
uaaaucucucaaguucaaaauucc

SEQ ID NO: 1311970 - RNA, 23 nt, Human
uaaguucagcauuaacucaaaag

SEQ ID NO: 1311971 - RNA, 24 nt, Human
uaauaaagggaucaauucagcaac

SEQ ID NO: 1311972 - RNA, 22 nt, Human
uaauaacugaaaacuuccugaa

SEQ ID NO: 1311973 - RNA, 24 nt, Human
uaauuuacuguauuaguccauuuu

SEQ ID NO: 1311974 - RNA, 22 nt, Human
uacaaaagaaagaggcuuaaug

SEQ ID NO: 1311975 - RNA, 19 nt, Human
uacaaucagaaaugaaaaa

SEQ ID NO: 1311976 - RNA, 24 nt, Human
uacaggacccaugcaagcccaaag

SEQ ID NO: 1311977 - RNA, 19 nt, Human
uacaucagauaaaacagac

SEQ ID NO: 1311978 - RNA, 23 nt, Human
uacccaccaccagaaccuguaua

SEQ ID NO: 1311979 - RNA, 19 nt, Human
uacccacccagaaucaaag

SEQ ID NO: 1311980 - RNA, 25 nt, Human
uacccuaaaucucucaaguucaaaa

SEQ ID NO: 1311981 - RNA, 20 nt, Human
uaccugaaaaaaauucagaa

SEQ ID NO: 1311982 - RNA, 22 nt, Human
uacuccagccugggugacagag

SEQ ID NO: 1311983 - RNA, 24 nt, Human
uacuccagccugggugacagagug

SEQ ID NO: 1311984 - RNA, 23 nt, Human
uacuucccaccaggucccuccca

SEQ ID NO: 1311985 - RNA, 22 nt, Human
uagaucacgaggucaggaguuc

SEQ ID NO: 1311986 - RNA, 21 nt, Human
uagcaacaccccacuucuggu

SEQ ID NO: 1311987 - RNA, 25 nt, Human
uagcaacaccccacuucugguacua

SEQ ID NO: 1311988 - RNA, 19 nt, Human
uagcagaaccaaaugcaac

SEQ ID NO: 1311989 - RNA, 24 nt, Human
uagcagguuugaaucaguaacaaa

SEQ ID NO: 1311990 - RNA, 22 nt, Human
uaguccauuuucacacagcuga

SEQ ID NO: 1311991 - RNA, 21 nt, Human
uauaaagaaaaacaaacacca

SEQ ID NO: 1311992 - RNA, 20 nt, Human
uauaacaaucagcauuuugg

SEQ ID NO: 1311993 - RNA, 18 nt, Human
uauccaaugaacacugua

SEQ ID NO: 1311994 - RNA, 22 nt, Human
uauccuucacaaaugaaggagc

SEQ ID NO: 1311995 - RNA, 24 nt, Human
uaugaaauaccugaaaaaaauuca

SEQ ID NO: 1311996 - RNA, 20 nt, Human
uauuaaagaaacucagggag

SEQ ID NO: 1311997 - RNA, 20 nt, Human
ucaaagauagagcuucugca

SEQ ID NO: 1311998 - RNA, 20 nt, Human
ucaaagauagagcuucugcu

SEQ ID NO: 1311999 - RNA, 21 nt, Human
ucaacaaccaccaaaaaaaac

SEQ ID NO: 1312000 - RNA, 19 nt, Human
ucacaggcaccacccaugc

SEQ ID NO: 1312001 - RNA, 18 nt, Human
ucacgaggucaggaguuc

SEQ ID NO: 1312002 - RNA, 24 nt, Human
ucacgaggucaggaguucgagagc

SEQ ID NO: 1312003 - RNA, 21 nt, Human
ucagacaaaaagaaagaaaaa

SEQ ID NO: 1312004 - RNA, 20 nt, Human
ucagcagaaaccuuacuggc

SEQ ID NO: 1312005 - RNA, 23 nt, Human
ucaguaacaaaaugucucccaaa

SEQ ID NO: 1312006 - RNA, 19 nt, Human
ucagugcccacaaacgcug

SEQ ID NO: 1312007 - RNA, 19 nt, Human
ucauaugcuaacaaauugg

SEQ ID NO: 1312008 - RNA, 23 nt, Human
ucaugccacuguacuccagccug

SEQ ID NO: 1312009 - RNA, 21 nt, Human
uccacaguccaaagucucauu

SEQ ID NO: 1312010 - RNA, 21 nt, Human
uccacauagcugaggaagcug

SEQ ID NO: 1312011 - RNA, 22 nt, Human
uccagagacucaaggcugaggc

SEQ ID NO: 1312012 - RNA, 23 nt, Human
uccagccugggugacagagugag

SEQ ID NO: 1312013 - RNA, 24 nt, Human
uccagccugggugacagagugaga

SEQ ID NO: 1312014 - RNA, 23 nt, Human
uccagucagacaaaaagaaagaa

SEQ ID NO: 1312015 - RNA, 22 nt, Human
uccauucugacuguucuacuga

SEQ ID NO: 1312016 - RNA, 22 nt, Human
ucccacauuuuccugucuccuu

SEQ ID NO: 1312017 - RNA, 18 nt, Human
ucccaccaggucccuccc

SEQ ID NO: 1312018 - RNA, 19 nt, Human
ucccagacauacacagccu

SEQ ID NO: 1312019 - RNA, 21 nt, Human
ucccagacauacacagccuac

SEQ ID NO: 1312020 - RNA, 20 nt, Human
ucccagcacuuugagaugcc

SEQ ID NO: 1312021 - RNA, 18 nt, Human
ucccaggaguucaaggcu

SEQ ID NO: 1312022 - RNA, 18 nt, Human
ucccauauaaaagccaau

SEQ ID NO: 1312023 - RNA, 19 nt, Human
uccuguggcuuuguauggu

SEQ ID NO: 1312024 - RNA, 22 nt, Human
ucgagagcagccuggccaacau

SEQ ID NO: 1312025 - RNA, 23 nt, Human
ucgagagcagccuggccaacaug

SEQ ID NO: 1312026 - RNA, 23 nt, Human
ucuaagccacugaaugacucaca

SEQ ID NO: 1312027 - RNA, 18 nt, Human
ucucaaacuauucccaaa

SEQ ID NO: 1312028 - RNA, 19 nt, Human
ucucaaguucaaauacccu

SEQ ID NO: 1312029 - RNA, 22 nt, Human
ucucuacuaaaaauacaaaauu

SEQ ID NO: 1312030 - RNA, 24 nt, Human
ucugccccuggcccuucccaaauc

SEQ ID NO: 1312031 - RNA, 18 nt, Human
ucuggccaaguguggugg

SEQ ID NO: 1312032 - RNA, 24 nt, Human
ucuggccaagugugguggcucacg

SEQ ID NO: 1312033 - RNA, 21 nt, Human
ucugggaguucuggauggaga

SEQ ID NO: 1312034 - RNA, 25 nt, Human
ucuuuuagcaacaccccacuucugg

SEQ ID NO: 1312035 - RNA, 22 nt, Human
ugaaaccaaucaugccuuccca

SEQ ID NO: 1312036 - RNA, 22 nt, Human
ugaacuaauaacugaaaacuuc

SEQ ID NO: 1312037 - RNA, 23 nt, Human
ugaauagcagguuugaaucagua

SEQ ID NO: 1312038 - RNA, 19 nt, Human
ugaauguaccauccgggga

SEQ ID NO: 1312039 - RNA, 20 nt, Human
ugaccaaaaacugaaauucu

SEQ ID NO: 1312040 - RNA, 20 nt, Human
ugacccaaaaugaauagcag

SEQ ID NO: 1312041 - RNA, 18 nt, Human
ugacuccaugucugacau

SEQ ID NO: 1312042 - RNA, 18 nt, Human
ugagacuuggguggggac

SEQ ID NO: 1312043 - RNA, 24 nt, Human
ugagaggccugaggaaacgccugc

SEQ ID NO: 1312044 - RNA, 24 nt, Human
ugagauugugccacugcacuccag

SEQ ID NO: 1312045 - RNA, 19 nt, Human
ugagcaauuuacaaaagaa

SEQ ID NO: 1312046 - RNA, 22 nt, Human
ugagcugagauugugccacugc

SEQ ID NO: 1312047 - RNA, 21 nt, Human
ugaggaagccuaagaaucacg

SEQ ID NO: 1312048 - RNA, 20 nt, Human
ugaggcaggaggaccauuug

SEQ ID NO: 1312049 - RNA, 24 nt, Human
ugcaagaaauaugaaaaaggaaac

SEQ ID NO: 1312050 - RNA, 24 nt, Human
ugccuauagucccagcuacucagg

SEQ ID NO: 1312051 - RNA, 20 nt, Human
uggaaacuguacaaauauau

SEQ ID NO: 1312052 - RNA, 19 nt, Human
uggcagcaggcaaagagag

SEQ ID NO: 1312053 - RNA, 23 nt, Human
uggccaacauggugaaacccguc

SEQ ID NO: 1312054 - RNA, 22 nt, Human
uggcucacaucugcaauuccag

SEQ ID NO: 1312055 - RNA, 22 nt, Human
uggcucacgccuguaaucccag

SEQ ID NO: 1312056 - RNA, 24 nt, Human
uggcucacgccuguaaucccagca

SEQ ID NO: 1312057 - RNA, 18 nt, Human
ugggaaagaccugccccc

SEQ ID NO: 1312058 - RNA, 22 nt, Human
ugggacacauaugugaccaaaa

SEQ ID NO: 1312059 - RNA, 23 nt, Human
ugggaguucuggauggagaugag

SEQ ID NO: 1312060 - RNA, 18 nt, Human
uggguggggacaaaacca

SEQ ID NO: 1312061 - RNA, 24 nt, Human
ugguggcucacgccuguaauccca

SEQ ID NO: 1312062 - RNA, 24 nt, Human
ugguuuaaccccccuccuggcucc

SEQ ID NO: 1312063 - RNA, 24 nt, Human
ugucuccuucugagcccuccaaac

SEQ ID NO: 1312064 - RNA, 18 nt, Human
ugugcacccacaggcuca

SEQ ID NO: 1312065 - RNA, 18 nt, Human
ugugccaguuccuaacaa

SEQ ID NO: 1312066 - RNA, 23 nt, Human
uguuaccaaagaaauaaaaagga

SEQ ID NO: 1312067 - RNA, 21 nt, Human
uuaccaaagaaauaaaaagga

SEQ ID NO: 1312068 - RNA, 18 nt, Human
uuacuggaauaaaaccag

SEQ ID NO: 1312069 - RNA, 18 nt, Human
uuagcugggcaugguugc

SEQ ID NO: 1312070 - RNA, 21 nt, Human
uuagcugggcaugguugcacg

SEQ ID NO: 1312071 - RNA, 19 nt, Human
uuauagcaauaaaugccua

SEQ ID NO: 1312072 - RNA, 18 nt, Human
uucaaaaccaucagaccu

SEQ ID NO: 1312073 - RNA, 22 nt, Human
uuccaggcacacagugcaagcu

SEQ ID NO: 1312074 - RNA, 19 nt, Human
uucccagauaagcaaaaga

SEQ ID NO: 1312075 - RNA, 24 nt, Human
uucccauauaaaagccaauccaua

SEQ ID NO: 1312076 - RNA, 22 nt, Human
uuccucauuuccaucugagaca

SEQ ID NO: 1312077 - RNA, 24 nt, Human
uuccugaaugcuuccaaaugcagg

SEQ ID NO: 1312078 - RNA, 23 nt, Human
uucuccagcaacagauccaauga

SEQ ID NO: 1312079 - RNA, 22 nt, Human
uucuucucaaacuauucccaaa

SEQ ID NO: 1312080 - RNA, 22 nt, Human
uuuaugcugauuucuacccaau

SEQ ID NO: 1312081 - RNA, 21 nt, Human
uuucagaauauuucauccagc

SEQ ID NO: 1312082 - RNA, 23 nt, Human
uuucccaguuccaaagucacuuc

SEQ ID NO: 1312083 - RNA, 20 nt, Human
uuuccugucuccuucugagc

SEQ ID NO: 1312084 - RNA, 19 nt, Human
uuuuuugaaaaguuaaaca

SEQ ID NO: 1312085 - RNA, 24 nt, Human
aagcaagugaccacgaaggccagg

SEQ ID NO: 1312086 - RNA, 23 nt, Human
aagugaccacgaaggccagguug

SEQ ID NO: 1312087 - RNA, 19 nt, Human
agagccgggugucaguggc

SEQ ID NO: 1312088 - RNA, 19 nt, Human
agcaagugaccacgaaggc

SEQ ID NO: 1312089 - RNA, 18 nt, Human
aggccagguuggcaagga

SEQ ID NO: 1312090 - RNA, 18 nt, Human
auggugguggaggugaag

SEQ ID NO: 1312091 - RNA, 23 nt, Human
caaggaaaaagcgcacgagcaca

SEQ ID NO: 1312092 - RNA, 24 nt, Human
ugaagcaagugaccacgaaggcca

SEQ ID NO: 1312093 - RNA, 20 nt, Human
aaauucuccuuuuucuuuuc

SEQ ID NO: 1312094 - RNA, 20 nt, Human
accacagcugccucccacca

SEQ ID NO: 1312095 - RNA, 18 nt, Human
agacagcagcaggaacuc

SEQ ID NO: 1312096 - RNA, 20 nt, Human
caccacagcugccucccacc

SEQ ID NO: 1312097 - RNA, 19 nt, Human
cagcuccugcaccacagcu

SEQ ID NO: 1312098 - RNA, 26 nt, Human
ccaaagguaauccucucagugcaagc

SEQ ID NO: 1312099 - RNA, 18 nt, Human
ccucccaccacuuccaga

SEQ ID NO: 1312100 - RNA, 25 nt, Human
ccucccaccacuuccagaccaccaa

SEQ ID NO: 1312101 - RNA, 24 nt, Human
cucaauguggauucuguuugaaga

SEQ ID NO: 1312102 - RNA, 18 nt, Human
cugccucccaccacuucc

SEQ ID NO: 1312103 - RNA, 23 nt, Human
cugccucccaccacuuccagacc

SEQ ID NO: 1312104 - RNA, 20 nt, Human
uggcaacaccauuccaaggg

SEQ ID NO: 1312105 - RNA, 19 nt, Human
acccacacccccaccuacc

SEQ ID NO: 1312106 - RNA, 18 nt, Human
acccagcaccagggagcc

SEQ ID NO: 1312107 - RNA, 22 nt, Human
accucccuucaccuccucaaga

SEQ ID NO: 1312108 - RNA, 19 nt, Human
agaggaagaaaaauuagag

SEQ ID NO: 1312109 - RNA, 20 nt, Human
agaggaagaaaaauuagagg

SEQ ID NO: 1312110 - RNA, 18 nt, Human
agcaaggugucugggguc

SEQ ID NO: 1312111 - RNA, 18 nt, Human
aggccagaaacccagcac

SEQ ID NO: 1312112 - RNA, 25 nt, Human
caccaaaggccagaaacccagcacc

SEQ ID NO: 1312113 - RNA, 19 nt, Human
cacccauguauagcagagc

SEQ ID NO: 1312114 - RNA, 23 nt, Human
cagcaccagggagccacaggaga

SEQ ID NO: 1312115 - RNA, 21 nt, Human
ccaaaagagaggccucaagga

SEQ ID NO: 1312116 - RNA, 21 nt, Human
cccaaaagagaggccucaagg

SEQ ID NO: 1312117 - RNA, 22 nt, Human
cccacacccccaccuaccuccc

SEQ ID NO: 1312118 - RNA, 21 nt, Human
cccaccuaccucccuucaccu

SEQ ID NO: 1312119 - RNA, 20 nt, Human
ccccaccuaccucccuucac

SEQ ID NO: 1312120 - RNA, 27 nt, Human
ccccaccuaccucccuucaccuccuca

SEQ ID NO: 1312121 - RNA, 22 nt, Human
cccgcgggcagccagaacugga

SEQ ID NO: 1312122 - RNA, 22 nt, Human
cccucaucacccacacccccac

SEQ ID NO: 1312123 - RNA, 21 nt, Human
cccuucaccuccucaagauca

SEQ ID NO: 1312124 - RNA, 21 nt, Human
ccuaccucccuucaccuccuc

SEQ ID NO: 1312125 - RNA, 24 nt, Human
ccuccacucccacccauguauagc

SEQ ID NO: 1312126 - RNA, 19 nt, Human
ccuugcucugugaggccug

SEQ ID NO: 1312127 - RNA, 18 nt, Human
cucacaguuccagguggg

SEQ ID NO: 1312128 - RNA, 23 nt, Human
cucacaguuccaggugggguggc

SEQ ID NO: 1312129 - RNA, 21 nt, Human
cucaucacccacacccccacc

SEQ ID NO: 1312130 - RNA, 23 nt, Human
cucaucacccacacccccaccua

SEQ ID NO: 1312131 - RNA, 18 nt, Human
gccuccacucccacccau

SEQ ID NO: 1312132 - RNA, 21 nt, Human
gggaugccuugcucugugagg

SEQ ID NO: 1312133 - RNA, 18 nt, Human
gggcagccagaacuggag

SEQ ID NO: 1312134 - RNA, 21 nt, Human
guccuguaguguccucucuca

SEQ ID NO: 1312135 - RNA, 24 nt, Human
uaggaugucaccaaaggccagaaa

SEQ ID NO: 1312136 - RNA, 19 nt, Human
uccccaaaagagaggccuc

SEQ ID NO: 1312137 - RNA, 22 nt, Human
ugccuugcucugugaggccugg

SEQ ID NO: 1312138 - RNA, 18 nt, Human
uggaaagaggcccgcggg

SEQ ID NO: 1312139 - RNA, 19 nt, Human
uggaaagaggcccgcgggc

SEQ ID NO: 1312140 - RNA, 18 nt, Human
uggcggccuccacuccca

SEQ ID NO: 1312141 - RNA, 23 nt, Human
uggcugguuggaaagaggcccgc

SEQ ID NO: 1312142 - RNA, 23 nt, Human
ugggagagggagcaaggugucug

SEQ ID NO: 1312143 - RNA, 18 nt, Human
ugucuggggucccugcuu

SEQ ID NO: 1312144 - RNA, 18 nt, Human
uugggguuuggccucccu

SEQ ID NO: 1312145 - RNA, 20 nt, Human
aaacacacacaaccccagug

SEQ ID NO: 1312146 - RNA, 22 nt, Human
aaacacacacaaccccagugug

SEQ ID NO: 1312147 - RNA, 21 nt, Human
aaacaggaucugugugaugug

SEQ ID NO: 1312148 - RNA, 24 nt, Human
aaacugaguacaaggacgaucuua

SEQ ID NO: 1312149 - RNA, 21 nt, Human
aaaggaaacacacacaacccc

SEQ ID NO: 1312150 - RNA, 24 nt, Human
aaauacaagaggcugcuaggagcc

SEQ ID NO: 1312151 - RNA, 24 nt, Human
aacauaugugguuugauccucagc

SEQ ID NO: 1312152 - RNA, 22 nt, Human
aaggaaacacacacaaccccag

SEQ ID NO: 1312153 - RNA, 23 nt, Human
acaggacaaccccaaauuccaca

SEQ ID NO: 1312154 - RNA, 25 nt, Human
accccugagacguccguaagguagg

SEQ ID NO: 1312155 - RNA, 20 nt, Human
acugaguacaaggacgaucu

SEQ ID NO: 1312156 - RNA, 24 nt, Human
agaagccuaaacugaguacaagga

SEQ ID NO: 1312157 - RNA, 23 nt, Human
agaggcaggcugugucugguucc

SEQ ID NO: 1312158 - RNA, 21 nt, Human
agcagaagaugcaagggugug

SEQ ID NO: 1312159 - RNA, 22 nt, Human
agccuaaacugaguacaaggac

SEQ ID NO: 1312160 - RNA, 21 nt, Human
aggacaaccccaaauuccaca

SEQ ID NO: 1312161 - RNA, 24 nt, Human
agggccugcaggggacagcauagg

SEQ ID NO: 1312162 - RNA, 23 nt, Human
aggggacagcauaggcccaaagc

SEQ ID NO: 1312163 - RNA, 24 nt, Human
agguaggaaugccaaacaggaucu

SEQ ID NO: 1312164 - RNA, 20 nt, Human
caaacaggaucugugugaug

SEQ ID NO: 1312165 - RNA, 25 nt, Human
caaugggcuuuaccucuggauaaac

SEQ ID NO: 1312166 - RNA, 19 nt, Human
caccuggaagggggguuuu

SEQ ID NO: 1312167 - RNA, 20 nt, Human
cagaagaugcaagggugugu

SEQ ID NO: 1312168 - RNA, 20 nt, Human
cagcuggcuggccucagagc

SEQ ID NO: 1312169 - RNA, 25 nt, Human
caggaucugugugaugugucaacuc

SEQ ID NO: 1312170 - RNA, 22 nt, Human
ccaaagcuagaggaagcuugga

SEQ ID NO: 1312171 - RNA, 19 nt, Human
cccaaagcuagaggaagcc

SEQ ID NO: 1312172 - RNA, 20 nt, Human
cccccagcugaggauugaga

SEQ ID NO: 1312173 - RNA, 23 nt, Human
cccccagcugaggauugagaggc

SEQ ID NO: 1312174 - RNA, 19 nt, Human
ccucuggauaaacuuagaa

SEQ ID NO: 1312175 - RNA, 19 nt, Human
ccugucaccccugagacgu

SEQ ID NO: 1312176 - RNA, 18 nt, Human
cgaaaagcagucuguagc

SEQ ID NO: 1312177 - RNA, 24 nt, Human
cgcuggguccugcggggcucugca

SEQ ID NO: 1312178 - RNA, 18 nt, Human
cguuuuucucuucugccu

SEQ ID NO: 1312179 - RNA, 21 nt, Human
cuacaagaucccagcccucca

SEQ ID NO: 1312180 - RNA, 22 nt, Human
cuuagaaacuuuccauccaaac

SEQ ID NO: 1312181 - RNA, 24 nt, Human
cuucguuuuucucuucugccuuca

SEQ ID NO: 1312182 - RNA, 18 nt, Human
gaacccucgaugcugcuc

SEQ ID NO: 1312183 - RNA, 23 nt, Human
gaugcugcuccauacugggggca

SEQ ID NO: 1312184 - RNA, 21 nt, Human
gcaggcugugucugguuccau

SEQ ID NO: 1312185 - RNA, 23 nt, Human
gcccccagcugaggauugagagg

SEQ ID NO: 1312186 - RNA, 21 nt, Human
gcccuacaagaucccagcccu

SEQ ID NO: 1312187 - RNA, 19 nt, Human
gccuaaacugaguacaagg

SEQ ID NO: 1312188 - RNA, 19 nt, Human
ggacaaccccaaauuccac

SEQ ID NO: 1312189 - RNA, 19 nt, Human
ggacagcauaggcccaaag

SEQ ID NO: 1312190 - RNA, 18 nt, Human
ggccagguggcugaggag

SEQ ID NO: 1312191 - RNA, 18 nt, Human
gggcucagaaaggagcaa

SEQ ID NO: 1312192 - RNA, 18 nt, Human
gggguuuugggaaacggg

SEQ ID NO: 1312193 - RNA, 22 nt, Human
uaccaaaggaaacacacacaac

SEQ ID NO: 1312194 - RNA, 25 nt, Human
uacugcaggccaccauggcgcuagc

SEQ ID NO: 1312195 - RNA, 22 nt, Human
uagcagcgucugcuauggcaac

SEQ ID NO: 1312196 - RNA, 21 nt, Human
uaggagcccccagcugaggau

SEQ ID NO: 1312197 - RNA, 18 nt, Human
uaggcccaaagcuagagg

SEQ ID NO: 1312198 - RNA, 21 nt, Human
uagguggcuguuccguuaccc

SEQ ID NO: 1312199 - RNA, 21 nt, Human
uauguugccaagaagccuaaa

SEQ ID NO: 1312200 - RNA, 19 nt, Human
uccaacacggacaccugga

SEQ ID NO: 1312201 - RNA, 22 nt, Human
uccagaauauaccaaaggaaac

SEQ ID NO: 1312202 - RNA, 21 nt, Human
uccaggagaagacagcuggcu

SEQ ID NO: 1312203 - RNA, 23 nt, Human
uccguuacccaggcuaugcuguc

SEQ ID NO: 1312204 - RNA, 22 nt, Human
uccucagccaggacgcacaggc

SEQ ID NO: 1312205 - RNA, 20 nt, Human
ucguuuuucucuucugccuu

SEQ ID NO: 1312206 - RNA, 18 nt, Human
ucucauccaggagaagac

SEQ ID NO: 1312207 - RNA, 22 nt, Human
ucugcauacugcaggccaccau

SEQ ID NO: 1312208 - RNA, 23 nt, Human
ucugcuauggcaacacccauuag

SEQ ID NO: 1312209 - RNA, 19 nt, Human
ucuguauguugccaagaag

SEQ ID NO: 1312210 - RNA, 19 nt, Human
ugacugcagccuugucugu

SEQ ID NO: 1312211 - RNA, 22 nt, Human
ugcuaggagcccccagcugagg

SEQ ID NO: 1312212 - RNA, 19 nt, Human
ugcugucucaguggccagg

SEQ ID NO: 1312213 - RNA, 27 nt, Human
uggacccucccauuugacugcagccuu

SEQ ID NO: 1312214 - RNA, 19 nt, Human
uggccagguggcugaggag

SEQ ID NO: 1312215 - RNA, 21 nt, Human
ugguuugauccucagccagga

SEQ ID NO: 1312216 - RNA, 20 nt, Human
ugugaugugucaacucugag

SEQ ID NO: 1312217 - RNA, 23 nt, Human
uuagaaacuuuccauccaaacga

SEQ ID NO: 1312218 - RNA, 24 nt, Human
aaaccccaagguggacacugcccc

SEQ ID NO: 1312219 - RNA, 19 nt, Human
aacaaaccccaagguggac

SEQ ID NO: 1312220 - RNA, 23 nt, Human
acugccccggcgccccuuccccc

SEQ ID NO: 1312221 - RNA, 27 nt, Human
caaaccccaagguggacacugccccgg

SEQ ID NO: 1312222 - RNA, 21 nt, Human
caacaaaccccaagguggaca

SEQ ID NO: 1312223 - RNA, 22 nt, Human
caacaaaccccaagguggacac

SEQ ID NO: 1312224 - RNA, 22 nt, Human
caaccggauuguagaccugcca

SEQ ID NO: 1312225 - RNA, 18 nt, Human
caagguggacacugcccc

SEQ ID NO: 1312226 - RNA, 24 nt, Human
cacccugaaucacccacugcgagc

SEQ ID NO: 1312227 - RNA, 22 nt, Human
caccggagcgcagugucucggg

SEQ ID NO: 1312228 - RNA, 18 nt, Human
caccucccccaacagggc

SEQ ID NO: 1312229 - RNA, 23 nt, Human
caccucccccaacagggccuuuc

SEQ ID NO: 1312230 - RNA, 20 nt, Human
cagcuccgggcccaccuccc

SEQ ID NO: 1312231 - RNA, 22 nt, Human
cagcuccgggcccaccuccccc

SEQ ID NO: 1312232 - RNA, 21 nt, Human
ccagcuccgggcccaccuccc

SEQ ID NO: 1312233 - RNA, 19 nt, Human
cccaagguggacacugccc

SEQ ID NO: 1312234 - RNA, 18 nt, Human
cccacugcgagcccuucc

SEQ ID NO: 1312235 - RNA, 18 nt, Human
cccagagccaacaaaccc

SEQ ID NO: 1312236 - RNA, 19 nt, Human
ccccuuccccccggacccc

SEQ ID NO: 1312237 - RNA, 24 nt, Human
cccugaaucacccacugcgagccc

SEQ ID NO: 1312238 - RNA, 20 nt, Human
ccugaaucacccacugcgag

SEQ ID NO: 1312239 - RNA, 20 nt, Human
cggcggcccacugccugccc

SEQ ID NO: 1312240 - RNA, 19 nt, Human
cugcccagagccaacaaac

SEQ ID NO: 1312241 - RNA, 21 nt, Human
cugcccagagccaacaaaccc

SEQ ID NO: 1312242 - RNA, 25 nt, Human
gaccugccagcuccgggcccaccuc

SEQ ID NO: 1312243 - RNA, 22 nt, Human
gcccagagccaacaaaccccaa

SEQ ID NO: 1312244 - RNA, 26 nt, Human
gccccggcgccccuuccccccggacc

SEQ ID NO: 1312245 - RNA, 20 nt, Human
gccccuuccccccggacccc

SEQ ID NO: 1312246 - RNA, 24 nt, Human
gccccuuccccccggaccccgcag

SEQ ID NO: 1312247 - RNA, 20 nt, Human
ggcguccgcucgccggccuc

SEQ ID NO: 1312248 - RNA, 23 nt, Human
ucccgcucggcggcccacugccu

SEQ ID NO: 1312249 - RNA, 21 nt, Human
ugaaucacccacugcgagccc

SEQ ID NO: 1312250 - RNA, 24 nt, Human
ugccccggcgccccuuccccccgg

SEQ ID NO: 1312251 - RNA, 23 nt, Human
uggacacugccccggcgccccuu

SEQ ID NO: 1312252 - RNA, 19 nt, Human
uguaaaucugauaauauug

SEQ ID NO: 1312253 - RNA, 33 nt, Human
aaaaaaaaaaaaaaaauugcuuggcaaaaagga

SEQ ID NO: 1312254 - RNA, 19 nt, Human
aacauggugaaaccccguc

SEQ ID NO: 1312255 - RNA, 20 nt, Human
aacauggugaaaccccgucu

SEQ ID NO: 1312256 - RNA, 21 nt, Human
aacauggugaaaccccgucuc

SEQ ID NO: 1312257 - RNA, 24 nt, Human
acagagcgacgcuccgucucaaaa

SEQ ID NO: 1312258 - RNA, 24 nt, Human
accccgucucuacuaaaaauacaa

SEQ ID NO: 1312259 - RNA, 24 nt, Human
accugaggucaggaguucgagacc

SEQ ID NO: 1312260 - RNA, 24 nt, Human
acucaggaggcggagguugcagug

SEQ ID NO: 1312261 - RNA, 19 nt, Human
agaauaaaguccagauucc

SEQ ID NO: 1312262 - RNA, 21 nt, Human
agagucauguugugaaaugcc

SEQ ID NO: 1312263 - RNA, 21 nt, Human
agccgcaggcugcacagccuc

SEQ ID NO: 1312264 - RNA, 22 nt, Human
agccuggccaacauggugaaac

SEQ ID NO: 1312265 - RNA, 24 nt, Human
agccuggccaacauggugaaaccc

SEQ ID NO: 1312266 - RNA, 21 nt, Human
aggcaggagaaucgcuugaac

SEQ ID NO: 1312267 - RNA, 23 nt, Human
aggcaggagaaucgcuugaacuc

SEQ ID NO: 1312268 - RNA, 25 nt, Human
aggccggacccaaccagucagggaa

SEQ ID NO: 1312269 - RNA, 19 nt, Human
aggccucggaggccggacc

SEQ ID NO: 1312270 - RNA, 22 nt, Human
aggccucggaggccggacccaa

SEQ ID NO: 1312271 - RNA, 21 nt, Human
aggcggagguugcagugagcc

SEQ ID NO: 1312272 - RNA, 24 nt, Human
aggcggagguugcagugagccgag

SEQ ID NO: 1312273 - RNA, 20 nt, Human
aggcugaggcaggagaaucg

SEQ ID NO: 1312274 - RNA, 24 nt, Human
aggcugaggcaggagaaucgcuug

SEQ ID NO: 1312275 - RNA, 23 nt, Human
aucucuuaguccaccuuuuaaaa

SEQ ID NO: 1312276 - RNA, 24 nt, Human
auuccacuccagccagggcgacag

SEQ ID NO: 1312277 - RNA, 24 nt, Human
caacauggugaaaccccgucucua

SEQ ID NO: 1312278 - RNA, 18 nt, Human
caccugaggucaggaguu

SEQ ID NO: 1312279 - RNA, 19 nt, Human
caccugaggucaggaguuc

SEQ ID NO: 1312280 - RNA, 21 nt, Human
caccugaggucaggaguucga

SEQ ID NO: 1312281 - RNA, 21 nt, Human
caccugaggucaggaguucga

SEQ ID NO: 1312282 - RNA, 23 nt, Human
caccugaggucaggaguucgaga

SEQ ID NO: 1312283 - RNA, 23 nt, Human
cacuccagccagggcgacagagc

SEQ ID NO: 1312284 - RNA, 21 nt, Human
cacuuaaaacucccuccaaaa

SEQ ID NO: 1312285 - RNA, 20 nt, Human
cagccagggcgacagagcga

SEQ ID NO: 1312286 - RNA, 19 nt, Human
cagggguucuccaaggccc

SEQ ID NO: 1312287 - RNA, 18 nt, Human
cauuccacuccagccagg

SEQ ID NO: 1312288 - RNA, 22 nt, Human
cauuccacuccagccagggcga

SEQ ID NO: 1312289 - RNA, 23 nt, Human
cauuccacuccagccagggcgac

SEQ ID NO: 1312290 - RNA, 24 nt, Human
cauuccacuccagccagggcgaca

SEQ ID NO: 1312291 - RNA, 21 nt, Human
ccacaugcuucauuuccaaaa

SEQ ID NO: 1312292 - RNA, 22 nt, Human
ccugaggucaggaguucgagac

SEQ ID NO: 1312293 - RNA, 23 nt, Human
ccuggccaacauggugaaacccc

SEQ ID NO: 1312294 - RNA, 24 nt, Human
ccuggccaacauggugaaaccccg

SEQ ID NO: 1312295 - RNA, 22 nt, Human
ccuguaaucccagcuacuaggg

SEQ ID NO: 1312296 - RNA, 23 nt, Human
cgacgcuccgucucaaaaaaaaa

SEQ ID NO: 1312297 - RNA, 24 nt, Human
cgagaccagccuggccaacauggu

SEQ ID NO: 1312298 - RNA, 23 nt, Human
cgccuguaaucccagcuacuagg

SEQ ID NO: 1312299 - RNA, 24 nt, Human
cgcuccacaugcuucauuuccaaa

SEQ ID NO: 1312300 - RNA, 21 nt, Human
cggaaaaggcgggguacaggc

SEQ ID NO: 1312301 - RNA, 24 nt, Human
cggcggcccuggggcucggucucu

SEQ ID NO: 1312302 - RNA, 18 nt, Human
cucaaaaaaaaaaaaaaa

SEQ ID NO: 1312303 - RNA, 22 nt, Human
cucacaaccgcccagagggcac

SEQ ID NO: 1312304 - RNA, 25 nt, Human
cucagcaaaacuccgcgggagaccc

SEQ ID NO: 1312305 - RNA, 19 nt, Human
cuccgucucaaaaaaaaaa

SEQ ID NO: 1312306 - RNA, 18 nt, Human
cuggggcucggucucuuc

SEQ ID NO: 1312307 - RNA, 24 nt, Human
gacagagcgacgcuccgucucaaa

SEQ ID NO: 1312308 - RNA, 23 nt, Human
gagaaucgcuugaacucaggagg

SEQ ID NO: 1312309 - RNA, 22 nt, Human
gagguugcagugagccgagauc

SEQ ID NO: 1312310 - RNA, 23 nt, Human
gcagggguucuccaaggcccuca

SEQ ID NO: 1312311 - RNA, 24 nt, Human
gccaacauggugaaaccccgucuc

SEQ ID NO: 1312312 - RNA, 22 nt, Human
ggaggcggagguugcagugagc

SEQ ID NO: 1312313 - RNA, 18 nt, Human
ggagguugcagugagccg

SEQ ID NO: 1312314 - RNA, 20 nt, Human
ggagguugcagugagccgag

SEQ ID NO: 1312315 - RNA, 22 nt, Human
ggagguugcagugagccgagau

SEQ ID NO: 1312316 - RNA, 23 nt, Human
ggagguugcagugagccgagauc

SEQ ID NO: 1312317 - RNA, 24 nt, Human
ggagguugcagugagccgagauca

SEQ ID NO: 1312318 - RNA, 21 nt, Human
ggcgcgcgccuguaaucccag

SEQ ID NO: 1312319 - RNA, 22 nt, Human
gggaggcugaggcaggagaauc

SEQ ID NO: 1312320 - RNA, 24 nt, Human
gguggcgcgcgccuguaaucccag

SEQ ID NO: 1312321 - RNA, 19 nt, Human
guugcagugagccgagauc

SEQ ID NO: 1312322 - RNA, 18 nt, Human
uacuagggaggcugaggc

SEQ ID NO: 1312323 - RNA, 19 nt, Human
uacuagggaggcugaggca

SEQ ID NO: 1312324 - RNA, 20 nt, Human
uaguccaccuuuuaaaaaac

SEQ ID NO: 1312325 - RNA, 20 nt, Human
ucagaauaaaguccagauuu

SEQ ID NO: 1312326 - RNA, 22 nt, Human
ucaggaggcggagguugcagug

SEQ ID NO: 1312327 - RNA, 18 nt, Human
ucccuccaaaagugaagg

SEQ ID NO: 1312328 - RNA, 23 nt, Human
uccgucucaaaaaaaaaaaaaaa

SEQ ID NO: 1312329 - RNA, 25 nt, Human
uccgucucaaaaaaaaaaaaaaaaa

SEQ ID NO: 1312330 - RNA, 24 nt, Human
ucgcuugaacucaggaggcggagg

SEQ ID NO: 1312331 - RNA, 20 nt, Human
ucggaggccggacccaaccg

SEQ ID NO: 1312332 - RNA, 22 nt, Human
ucucuacuaaaaauacaaaaaa

SEQ ID NO: 1312333 - RNA, 20 nt, Human
ugaggcaggagaaucgcuug

SEQ ID NO: 1312334 - RNA, 23 nt, Human
ugaggcaggagaaucgcuugaac

SEQ ID NO: 1312335 - RNA, 23 nt, Human
ugaggcaggagaaucgcuugaac

SEQ ID NO: 1312336 - RNA, 25 nt, Human
ugaggcaggagaaucgcuugaacuc

SEQ ID NO: 1312337 - RNA, 21 nt, Human
ugcacagccucacaaccgccc

SEQ ID NO: 1312338 - RNA, 18 nt, Human
ugcagggguucuccaagg

SEQ ID NO: 1312339 - RNA, 24 nt, Human
uggccaacauggugaaaccccguc

SEQ ID NO: 1312340 - RNA, 21 nt, Human
uggcgcgcgccuguaauccca

SEQ ID NO: 1312341 - RNA, 22 nt, Human
uggcgcgcgccuguaaucccag

SEQ ID NO: 1312342 - RNA, 24 nt, Human
ugguggcgcgcgccuguaauccca

SEQ ID NO: 1312343 - RNA, 24 nt, Human
uugaacucaggaggcggagguugc

SEQ ID NO: 1312344 - RNA, 18 nt, Human
uugcagugagccgagauc

SEQ ID NO: 1312345 - RNA, 20 nt, Human
uugcagugagccgagaucac

SEQ ID NO: 1312346 - RNA, 21 nt, Human
uugcagugagccgagaucacg

SEQ ID NO: 1312347 - RNA, 20 nt, Human
accuggcccaggaucucaug

SEQ ID NO: 1312348 - RNA, 21 nt, Human
accuguuuugguccugggagc

SEQ ID NO: 1312349 - RNA, 23 nt, Human
agggcacugcccagggcagccuu

SEQ ID NO: 1312350 - RNA, 24 nt, Human
agggcacugcccagggcagccuuu

SEQ ID NO: 1312351 - RNA, 22 nt, Human
auccucucaagaccugaggcug

SEQ ID NO: 1312352 - RNA, 26 nt, Human
cauccggaaguccuccuccuuucccc

SEQ ID NO: 1312353 - RNA, 25 nt, Human
ccaccuggauggccagccugguugu

SEQ ID NO: 1312354 - RNA, 21 nt, Human
ccugggcuggcuucccggagc

SEQ ID NO: 1312355 - RNA, 21 nt, Human
ccugguugucagcucuuccau

SEQ ID NO: 1312356 - RNA, 22 nt, Human
cgcagggcacugcccagggcag

SEQ ID NO: 1312357 - RNA, 22 nt, Human
cggagagcugggcaaaggaugg

SEQ ID NO: 1312358 - RNA, 22 nt, Human
cucagacagagucuuauccucc

SEQ ID NO: 1312359 - RNA, 22 nt, Human
gaccuguuuugguccugggagc

SEQ ID NO: 1312360 - RNA, 20 nt, Human
gcacugcccagggcagccuu

SEQ ID NO: 1312361 - RNA, 21 nt, Human
gcagaccuguuuugguccugg

SEQ ID NO: 1312362 - RNA, 21 nt, Human
ggcagaccuguuuugguccug

SEQ ID NO: 1312363 - RNA, 20 nt, Human
gggcaaaggauggguccuuc

SEQ ID NO: 1312364 - RNA, 23 nt, Human
gggcacugcccagggcagccuuu

SEQ ID NO: 1312365 - RNA, 20 nt, Human
gggcagaccuguuuuggucc

SEQ ID NO: 1312366 - RNA, 23 nt, Human
gggcagccuuuagcauuucauuc

SEQ ID NO: 1312367 - RNA, 25 nt, Human
uacauccggaaguccuccuccuuuc

SEQ ID NO: 1312368 - RNA, 19 nt, Human
uccuccuccuuuccccgca

SEQ ID NO: 1312369 - RNA, 19 nt, Human
uccuccuuuccccgcaggg

SEQ ID NO: 1312370 - RNA, 18 nt, Human
ugagcuggcugcccuggg

SEQ ID NO: 1312371 - RNA, 23 nt, Human
ugcaggaagacacuuuucaccug

SEQ ID NO: 1312372 - RNA, 21 nt, Human
ugcccagggcagccuuuagca

SEQ ID NO: 1312373 - RNA, 20 nt, Human
ugccgcagggccugcaggaa

SEQ ID NO: 1312374 - RNA, 24 nt, Human
uggccagccugguugucagcucuu

SEQ ID NO: 1312375 - RNA, 22 nt, Human
uucugguagaagugguugagcu

SEQ ID NO: 1312376 - RNA, 23 nt, Human
uugugccuguuguuagagguggg

SEQ ID NO: 1312377 - RNA, 21 nt, Human
uuuagcauuucauucuccucc

SEQ ID NO: 1312378 - RNA, 20 nt, Human
agccuauccggaagaaguuc

SEQ ID NO: 1312379 - RNA, 26 nt, Human
uaagucccaacacgaacagccaggaa

SEQ ID NO: 1312380 - RNA, 25 nt, Human
ucccaacacgaacagccaggguacc

SEQ ID NO: 1312381 - RNA, 21 nt, Human
ucugaacaagccuauccggaa

SEQ ID NO: 1312382 - RNA, 25 nt, Human
ugguaagucccaacacgaacagcca

SEQ ID NO: 1312383 - RNA, 22 nt, Human
acucccucgucuuccagaaccu

SEQ ID NO: 1312384 - RNA, 19 nt, Human
cacuccugguucuacuccc

SEQ ID NO: 1312385 - RNA, 23 nt, Human
gccacucagcccacacuccuggg

SEQ ID NO: 1312386 - RNA, 20 nt, Human
gcccagcgccacucagccca

SEQ ID NO: 1312387 - RNA, 22 nt, Human
ucuacucccucgucuuccagaa

SEQ ID NO: 1312388 - RNA, 19 nt, Human
aaaaagaaauuccuagccc

SEQ ID NO: 1312389 - RNA, 20 nt, Human
aaaagaaauuccuagcccuu

SEQ ID NO: 1312390 - RNA, 23 nt, Human
aaacugggaaggacaacaggaga

SEQ ID NO: 1312391 - RNA, 21 nt, Human
aaagucuuucccuucucuagc

SEQ ID NO: 1312392 - RNA, 18 nt, Human
aacauuaagggaauuagc

SEQ ID NO: 1312393 - RNA, 18 nt, Human
acuuguggaccuccccuc

SEQ ID NO: 1312394 - RNA, 19 nt, Human
acuuuggcaucucugugaa

SEQ ID NO: 1312395 - RNA, 22 nt, Human
agaggguuuaacccuguccuau

SEQ ID NO: 1312396 - RNA, 23 nt, Human
aggagcuggaucaguagacacca

SEQ ID NO: 1312397 - RNA, 22 nt, Human
aggaggcauagacagggaaacc

SEQ ID NO: 1312398 - RNA, 19 nt, Human
aggcauagacagggaaacc

SEQ ID NO: 1312399 - RNA, 22 nt, Human
agggaaaaggggagguugggga

SEQ ID NO: 1312400 - RNA, 21 nt, Human
agggguuggcuucucucuucu

SEQ ID NO: 1312401 - RNA, 22 nt, Human
agguuuccggcgcugcagguuu

SEQ ID NO: 1312402 - RNA, 18 nt, Human
aguugcuagcuugggccu

SEQ ID NO: 1312403 - RNA, 25 nt, Human
aucacuagcaauacaccuacaauga

SEQ ID NO: 1312404 - RNA, 19 nt, Human
auugucuuuguugugcugu

SEQ ID NO: 1312405 - RNA, 23 nt, Human
caaacuccuucagcuacuagcaa

SEQ ID NO: 1312406 - RNA, 23 nt, Human
caaagcuaaaacagucaaagcuc

SEQ ID NO: 1312407 - RNA, 22 nt, Human
caaauaaagacucaggauuaaa

SEQ ID NO: 1312408 - RNA, 21 nt, Human
cacucgaucaccucuacacuu

SEQ ID NO: 1312409 - RNA, 24 nt, Human
caggacgacagucugggguccuuu

SEQ ID NO: 1312410 - RNA, 22 nt, Human
caggagcuggaucaguagacac

SEQ ID NO: 1312411 - RNA, 19 nt, Human
cagggccaggugguggcgc

SEQ ID NO: 1312412 - RNA, 21 nt, Human
ccaggugguggcgccaaaguc

SEQ ID NO: 1312413 - RNA, 21 nt, Human
ccauaagcuuguaugccgggu

SEQ ID NO: 1312414 - RNA, 23 nt, Human
ccccagggcuacacguucucccu

SEQ ID NO: 1312415 - RNA, 24 nt, Human
ccccuguggcaggcccauaauacu

SEQ ID NO: 1312416 - RNA, 18 nt, Human
cccuguccuauugauccc

SEQ ID NO: 1312417 - RNA, 19 nt, Human
ccuacaaugaggguuuuaa

SEQ ID NO: 1312418 - RNA, 20 nt, Human
cgagcucccugaaaaagaaa

SEQ ID NO: 1312419 - RNA, 21 nt, Human
cgcauacauaacaagaaguag

SEQ ID NO: 1312420 - RNA, 18 nt, Human
cggcggcccaggaggggu

SEQ ID NO: 1312421 - RNA, 20 nt, Human
cgugccaaaccucuacaggc

SEQ ID NO: 1312422 - RNA, 23 nt, Human
cuccauaagcuuguaugccgggu

SEQ ID NO: 1312423 - RNA, 22 nt, Human
cucccagguuuccggcgcugca

SEQ ID NO: 1312424 - RNA, 19 nt, Human
cuuaagagccgagcucccu

SEQ ID NO: 1312425 - RNA, 22 nt, Human
cuugugccccuguggcaggccc

SEQ ID NO: 1312426 - RNA, 19 nt, Human
gaaguuuucugaugaacca

SEQ ID NO: 1312427 - RNA, 22 nt, Human
gagccgagcucccugaaaaaga

SEQ ID NO: 1312428 - RNA, 23 nt, Human
gccacucauuaucuuuccaguuu

SEQ ID NO: 1312429 - RNA, 24 nt, Human
ggacgacagucugggguccuuucc

SEQ ID NO: 1312430 - RNA, 21 nt, Human
gggaaaaggggagguugggga

SEQ ID NO: 1312431 - RNA, 18 nt, Human
gggagguuggggagaaac

SEQ ID NO: 1312432 - RNA, 21 nt, Human
gggagguuggggagaaacugg

SEQ ID NO: 1312433 - RNA, 20 nt, Human
ggguugucugggcuuggucu

SEQ ID NO: 1312434 - RNA, 21 nt, Human
gucuuuuucagaaguucuggu

SEQ ID NO: 1312435 - RNA, 23 nt, Human
uaauugucuuuguugugcuguua

SEQ ID NO: 1312436 - RNA, 25 nt, Human
uacacguucucccuuuuuccaaagg

SEQ ID NO: 1312437 - RNA, 23 nt, Human
uacuucuguuuuuuccagcuuuu

SEQ ID NO: 1312438 - RNA, 24 nt, Human
uagcaauacaccuacaaugagggu

SEQ ID NO: 1312439 - RNA, 24 nt, Human
ucacuagcaauacaccuacaauga

SEQ ID NO: 1312440 - RNA, 21 nt, Human
ucagcuacuagcaaguagucu

SEQ ID NO: 1312441 - RNA, 21 nt, Human
uccacaaacuccuucagcuac

SEQ ID NO: 1312442 - RNA, 24 nt, Human
uccacaaacuccuucagcuacuag

SEQ ID NO: 1312443 - RNA, 19 nt, Human
uccacaguggacacaaaga

SEQ ID NO: 1312444 - RNA, 21 nt, Human
uccacaguggacacaaagagg

SEQ ID NO: 1312445 - RNA, 21 nt, Human
ucccugaaaaagaaauuccua

SEQ ID NO: 1312446 - RNA, 26 nt, Human
ucccugaaaaagaaauuccuagcccu

SEQ ID NO: 1312447 - RNA, 19 nt, Human
ucccuuuuuccaaagggga

SEQ ID NO: 1312448 - RNA, 21 nt, Human
uccuucagcuacuagcaagua

SEQ ID NO: 1312449 - RNA, 20 nt, Human
uccuugaucauuuauuugua

SEQ ID NO: 1312450 - RNA, 23 nt, Human
ucucauaccauauuuccccccuu

SEQ ID NO: 1312451 - RNA, 24 nt, Human
ucugaugaaccaaaguagcaacaa

SEQ ID NO: 1312452 - RNA, 19 nt, Human
ugaaccaaaguagcaacaa

SEQ ID NO: 1312453 - RNA, 23 nt, Human
ugaaugauccuuucagggggcca

SEQ ID NO: 1312454 - RNA, 21 nt, Human
ugacuauguuuuuaaccaccu

SEQ ID NO: 1312455 - RNA, 19 nt, Human
ugcaugagccuaagcaguu

SEQ ID NO: 1312456 - RNA, 19 nt, Human
ugcucaggacgacagucug

SEQ ID NO: 1312457 - RNA, 22 nt, Human
uggaaaccauuuuucaaauaaa

SEQ ID NO: 1312458 - RNA, 22 nt, Human
uggacccugccucgcauuaugc

SEQ ID NO: 1312459 - RNA, 18 nt, Human
uguggaccuccccucuaa

SEQ ID NO: 1312460 - RNA, 19 nt, Human
uguuauacaacuucugucc

SEQ ID NO: 1312461 - RNA, 21 nt, Human
uguuuugggagagcacuugug

SEQ ID NO: 1312462 - RNA, 18 nt, Human
uuaaccaccuguccuuga

SEQ ID NO: 1312463 - RNA, 25 nt, Human
uuacuaaauggauucuuuucagugu

SEQ ID NO: 1312464 - RNA, 23 nt, Human
uuacuucuguuuuuuccagcuuu

SEQ ID NO: 1312465 - RNA, 21 nt, Human
uuccggcgcugcagguuuuac

SEQ ID NO: 1312466 - RNA, 18 nt, Human
uucuacgugaaaaaguca

SEQ ID NO: 1312467 - RNA, 20 nt, Human
uugcuuucucccuuuuuugc

SEQ ID NO: 1312468 - RNA, 18 nt, Human
uuguaggcagcaguuggu

SEQ ID NO: 1312469 - RNA, 23 nt, Human
uugucuuuuucagaaguucuggu

SEQ ID NO: 1312470 - RNA, 22 nt, Human
uuuacaaaccccugacucauga

SEQ ID NO: 1312471 - RNA, 25 nt, Human
uuuagugggaguucucacucucauc

SEQ ID NO: 1312472 - RNA, 18 nt, Human
uuuuaagggcugacaacu

SEQ ID NO: 1312473 - RNA, 24 nt, Human
uuuuacacagcuguggugguucca

SEQ ID NO: 1312474 - RNA, 23 nt, Human
uuuucagaaguucugguguuggc

SEQ ID NO: 1312475 - RNA, 19 nt, Human
uuuuccacaaacuccuuca

SEQ ID NO: 1312476 - RNA, 27 nt, Human
uuuuccacaaacuccuucagcuacuag

SEQ ID NO: 1312477 - RNA, 19 nt, Human
uuuuuagugggaguucuca

SEQ ID NO: 1312478 - RNA, 20 nt, Human
aaaaccugagauugugaaga

SEQ ID NO: 1312479 - RNA, 24 nt, Human
aaagugcugggauuacagguguga

SEQ ID NO: 1312480 - RNA, 23 nt, Human
aagcagucuucccgucucagacu

SEQ ID NO: 1312481 - RNA, 25 nt, Human
aagugauccucccaccucagccucc

SEQ ID NO: 1312482 - RNA, 18 nt, Human
aagugcugggauuacagg

SEQ ID NO: 1312483 - RNA, 19 nt, Human
aagugcugggauuacaggu

SEQ ID NO: 1312484 - RNA, 27 nt, Human
aauggaaagcggggggagggugagggg

SEQ ID NO: 1312485 - RNA, 18 nt, Human
accacaccuggcuaauuu

SEQ ID NO: 1312486 - RNA, 19 nt, Human
acggagcaguaaguacaga

SEQ ID NO: 1312487 - RNA, 24 nt, Human
acuaguccccaacggcaugugugc

SEQ ID NO: 1312488 - RNA, 24 nt, Human
acucuauccagccucaacuguuuu

SEQ ID NO: 1312489 - RNA, 19 nt, Human
acugcagccucuaccuccu

SEQ ID NO: 1312490 - RNA, 22 nt, Human
agcaucuguugcucuaggcaac

SEQ ID NO: 1312491 - RNA, 18 nt, Human
aggcaaggucuugcuacg

SEQ ID NO: 1312492 - RNA, 23 nt, Human
aggcaaggucuugcuacguugcc

SEQ ID NO: 1312493 - RNA, 23 nt, Human
aggcuggugcaggagacacauug

SEQ ID NO: 1312494 - RNA, 21 nt, Human
aggguucagggggacugcggg

SEQ ID NO: 1312495 - RNA, 22 nt, Human
aguacagaguucuggagaggga

SEQ ID NO: 1312496 - RNA, 23 nt, Human
aguagcugagaccacaggcaugu

SEQ ID NO: 1312497 - RNA, 25 nt, Human
aguagcugagaccacaggcauguau

SEQ ID NO: 1312498 - RNA, 20 nt, Human
agugacggagcaguaaguac

SEQ ID NO: 1312499 - RNA, 20 nt, Human
agugcaguggugcgaucccg

SEQ ID NO: 1312500 - RNA, 23 nt, Human
agugcaguggugcgaucccggcu

SEQ ID NO: 1312501 - RNA, 24 nt, Human
agugcaguggugcgaucccggcuc

SEQ ID NO: 1312502 - RNA, 20 nt, Human
agugcugggauuacaggugu

SEQ ID NO: 1312503 - RNA, 21 nt, Human
aguggggcugggagguggcug

SEQ ID NO: 1312504 - RNA, 24 nt, Human
aucacuuugcaauaaaaccugagg

SEQ ID NO: 1312505 - RNA, 26 nt, Human
auggaaagcggggggagggugagggg

SEQ ID NO: 1312506 - RNA, 24 nt, Human
caaagugcugggauuacaggugug

SEQ ID NO: 1312507 - RNA, 24 nt, Human
caaggucuugcuacguugcccagg

SEQ ID NO: 1312508 - RNA, 27 nt, Human
caagugauccucccaccucagccuccc

SEQ ID NO: 1312509 - RNA, 19 nt, Human
caaucucugguuucuuugc

SEQ ID NO: 1312510 - RNA, 21 nt, Human
cacauguggucagcaaaucca

SEQ ID NO: 1312511 - RNA, 24 nt, Human
caccucagccucccgaguagcuga

SEQ ID NO: 1312512 - RNA, 26 nt, Human
caccuguagcugucaccucugugcca

SEQ ID NO: 1312513 - RNA, 23 nt, Human
cacugcagccucuaccuccuggg

SEQ ID NO: 1312514 - RNA, 22 nt, Human
cacuggccauuccccacccuga

SEQ ID NO: 1312515 - RNA, 21 nt, Human
cacuuugcaauaaaaccugag

SEQ ID NO: 1312516 - RNA, 23 nt, Human
cagccucuaccuccuggguucaa

SEQ ID NO: 1312517 - RNA, 18 nt, Human
cagccuuucuucuaucgc

SEQ ID NO: 1312518 - RNA, 19 nt, Human
cagggcuuuucagccaggg

SEQ ID NO: 1312519 - RNA, 18 nt, Human
cagugcaccuguguuugg

SEQ ID NO: 1312520 - RNA, 18 nt, Human
caguguccuuccaccacc

SEQ ID NO: 1312521 - RNA, 21 nt, Human
cauuccccacccugaucugga

SEQ ID NO: 1312522 - RNA, 24 nt, Human
cauuuucaauugauucauuggggg

SEQ ID NO: 1312523 - RNA, 20 nt, Human
ccaaaggagagacaaucuug

SEQ ID NO: 1312524 - RNA, 21 nt, Human
ccaaagugcugggauuacagg

SEQ ID NO: 1312525 - RNA, 21 nt, Human
ccaaagugcugggauuacagg

SEQ ID NO: 1312526 - RNA, 24 nt, Human
ccaaagugcugggauuacaggugu

SEQ ID NO: 1312527 - RNA, 21 nt, Human
cccaacggcaugugugccacu

SEQ ID NO: 1312528 - RNA, 23 nt, Human
cccaccucagccucccgaguagc

SEQ ID NO: 1312529 - RNA, 24 nt, Human
cccaccucagccucccgaguagcu

SEQ ID NO: 1312530 - RNA, 20 nt, Human
cccagccuggaugccagugu

SEQ ID NO: 1312531 - RNA, 19 nt, Human
cccaggcuggagugcagug

SEQ ID NO: 1312532 - RNA, 19 nt, Human
ccccaacggcaugugugcc

SEQ ID NO: 1312533 - RNA, 21 nt, Human
cccccagagaacacguggcca

SEQ ID NO: 1312534 - RNA, 22 nt, Human
cccccagagaacacguggccau

SEQ ID NO: 1312535 - RNA, 20 nt, Human
ccccccagagaacacguggc

SEQ ID NO: 1312536 - RNA, 18 nt, Human
cccuggagagcaggaugg

SEQ ID NO: 1312537 - RNA, 19 nt, Human
cccuuuuucuagaggcaag

SEQ ID NO: 1312538 - RNA, 21 nt, Human
ccuacaaugccccggacaacu

SEQ ID NO: 1312539 - RNA, 24 nt, Human
ccuccuggguucaagugauccucc

SEQ ID NO: 1312540 - RNA, 22 nt, Human
ccucuaccuccuggguucaagu

SEQ ID NO: 1312541 - RNA, 21 nt, Human
ccucugugcuauaguacugcu

SEQ ID NO: 1312542 - RNA, 25 nt, Human
ccucuuuaagacucugucuuuguca

SEQ ID NO: 1312543 - RNA, 22 nt, Human
ccuggguucaagugauccuccc

SEQ ID NO: 1312544 - RNA, 19 nt, Human
cggcuggaggagguggugc

SEQ ID NO: 1312545 - RNA, 24 nt, Human
cggggaguggggcugggagguggc

SEQ ID NO: 1312546 - RNA, 23 nt, Human
cuaagcauccuacaaugccccuc

SEQ ID NO: 1312547 - RNA, 24 nt, Human
cucacugcagccucuaccuccugg

SEQ ID NO: 1312548 - RNA, 20 nt, Human
cucugugcuauaguacugcu

SEQ ID NO: 1312549 - RNA, 23 nt, Human
cugcagccucuaccuccuggguu

SEQ ID NO: 1312550 - RNA, 18 nt, Human
cugcccggaacauggcgg

SEQ ID NO: 1312551 - RNA, 20 nt, Human
cugcggggaguggggcuggg

SEQ ID NO: 1312552 - RNA, 25 nt, Human
cuucagggcuuuucagccagggggu

SEQ ID NO: 1312553 - RNA, 19 nt, Human
gaguaaucccaaagugcug

SEQ ID NO: 1312554 - RNA, 22 nt, Human
gauauaauuuuaggaccuggau

SEQ ID NO: 1312555 - RNA, 18 nt, Human
gauuacaggugugaguca

SEQ ID NO: 1312556 - RNA, 20 nt, Human
gauuacaggugugagucacu

SEQ ID NO: 1312557 - RNA, 24 nt, Human
gauuacaggugugagucacucuau

SEQ ID NO: 1312558 - RNA, 20 nt, Human
gcagaaugagccgcucaccc

SEQ ID NO: 1312559 - RNA, 19 nt, Human
gcccaggcuggagugcagu

SEQ ID NO: 1312560 - RNA, 20 nt, Human
gcccaggcuggagugcagug

SEQ ID NO: 1312561 - RNA, 23 nt, Human
gcccaggcuggagugcaguggug

SEQ ID NO: 1312562 - RNA, 21 nt, Human
gcuaauuuuuucccuuuuucu

SEQ ID NO: 1312563 - RNA, 24 nt, Human
gcuacguugcccaggcuggucuug

SEQ ID NO: 1312564 - RNA, 21 nt, Human
gcucacugcagccucuaccuc

SEQ ID NO: 1312565 - RNA, 23 nt, Human
gcuggaggagguggugcuacugg

SEQ ID NO: 1312566 - RNA, 19 nt, Human
gcuguuugcacaugugguc

SEQ ID NO: 1312567 - RNA, 19 nt, Human
ggaaauguguagucuuuga

SEQ ID NO: 1312568 - RNA, 23 nt, Human
ggacugcggggaguggggcuggg

SEQ ID NO: 1312569 - RNA, 19 nt, Human
ggagguggcuguuugcaca

SEQ ID NO: 1312570 - RNA, 21 nt, Human
ggagguggcuguuugcacaug

SEQ ID NO: 1312571 - RNA, 21 nt, Human
ggcaaggucuugcuacguugc

SEQ ID NO: 1312572 - RNA, 20 nt, Human
ggcuggucuugaacuccuga

SEQ ID NO: 1312573 - RNA, 18 nt, Human
gggaguggggcugggagg

SEQ ID NO: 1312574 - RNA, 18 nt, Human
ggggaguggggcugggag

SEQ ID NO: 1312575 - RNA, 24 nt, Human
gggggagggugaggggucauucug

SEQ ID NO: 1312576 - RNA, 19 nt, Human
gucucaaucucugguuucu

SEQ ID NO: 1312577 - RNA, 24 nt, Human
gugauccucccaccucagccuccc

SEQ ID NO: 1312578 - RNA, 21 nt, Human
uacagaguucuggagagggaa

SEQ ID NO: 1312579 - RNA, 24 nt, Human
uaccuccuggguucaagugauccu

SEQ ID NO: 1312580 - RNA, 23 nt, Human
uacguugcccaggcuggucuuga

SEQ ID NO: 1312581 - RNA, 24 nt, Human
uacguugcccaggcuggucuugaa

SEQ ID NO: 1312582 - RNA, 22 nt, Human
uagaggcaaggucuugcuacgu

SEQ ID NO: 1312583 - RNA, 18 nt, Human
uagcccaggcuggagugc

SEQ ID NO: 1312584 - RNA, 23 nt, Human
uaguacugcuuuuuuuuuuccuu

SEQ ID NO: 1312585 - RNA, 18 nt, Human
uaugucuuuacuucaggg

SEQ ID NO: 1312586 - RNA, 24 nt, Human
ucacugcagccucuaccuccuggg

SEQ ID NO: 1312587 - RNA, 25 nt, Human
ucacugcagccucuaccuccugggu

SEQ ID NO: 1312588 - RNA, 18 nt, Human
ucagcagcguugucccug

SEQ ID NO: 1312589 - RNA, 18 nt, Human
ucagcaucuuuuaacuca

SEQ ID NO: 1312590 - RNA, 23 nt, Human
ucagugcaccuguguuuggggcu

SEQ ID NO: 1312591 - RNA, 26 nt, Human
ucagugcaccuguguuuggggcuuug

SEQ ID NO: 1312592 - RNA, 23 nt, Human
ucccaaagugcugggauuacagg

SEQ ID NO: 1312593 - RNA, 24 nt, Human
ucccgaguagcugagaccacaggc

SEQ ID NO: 1312594 - RNA, 19 nt, Human
ucccuggagagcaggaugg

SEQ ID NO: 1312595 - RNA, 26 nt, Human
uccucccaccucagccucccgaguag

SEQ ID NO: 1312596 - RNA, 20 nt, Human
uccugaguucaagcagucuu

SEQ ID NO: 1312597 - RNA, 21 nt, Human
uccuggguucaagugauccuc

SEQ ID NO: 1312598 - RNA, 24 nt, Human
uccuggguucaagugauccuccca

SEQ ID NO: 1312599 - RNA, 23 nt, Human
ucuccaaugauaguuccugauuu

SEQ ID NO: 1312600 - RNA, 23 nt, Human
ucucugguuucuuugcucagugc

SEQ ID NO: 1312601 - RNA, 19 nt, Human
ucuguagcccaggcuggag

SEQ ID NO: 1312602 - RNA, 20 nt, Human
ucuguagcccaggcuggagu

SEQ ID NO: 1312603 - RNA, 24 nt, Human
ucuguagcccaggcuggagugcag

SEQ ID NO: 1312604 - RNA, 22 nt, Human
ucuucuaucgcuccucuccaau

SEQ ID NO: 1312605 - RNA, 24 nt, Human
ucuugaacuccugaguucaagcag

SEQ ID NO: 1312606 - RNA, 23 nt, Human
ucuugcuacguugcccaggcugg

SEQ ID NO: 1312607 - RNA, 24 nt, Human
ucuugcuacguugcccaggcuggu

SEQ ID NO: 1312608 - RNA, 24 nt, Human
ugaacuccugaguucaagcagucu

SEQ ID NO: 1312609 - RNA, 23 nt, Human
ugacgggauuucuuuaguuucug

SEQ ID NO: 1312610 - RNA, 18 nt, Human
ugagaagcagauuagcca

SEQ ID NO: 1312611 - RNA, 24 nt, Human
ugagaccacaggcauguauuacca

SEQ ID NO: 1312612 - RNA, 23 nt, Human
ugagggaaugucauuuugucuca

SEQ ID NO: 1312613 - RNA, 21 nt, Human
ugaguucaagcagucuucccg

SEQ ID NO: 1312614 - RNA, 23 nt, Human
ugcacugugucagccuuucuucu

SEQ ID NO: 1312615 - RNA, 24 nt, Human
ugcccaggcuggucuugaacuccu

SEQ ID NO: 1312616 - RNA, 27 nt, Human
ugcccaggcuggucuugaacuccugag

SEQ ID NO: 1312617 - RNA, 22 nt, Human
ugcccggaacauggcgguaaga

SEQ ID NO: 1312618 - RNA, 19 nt, Human
ugcggggaguggggcuggg

SEQ ID NO: 1312619 - RNA, 24 nt, Human
ugcuacguugcccaggcuggucuu

SEQ ID NO: 1312620 - RNA, 27 nt, Human
ugcuacguugcccaggcuggucuugaa

SEQ ID NO: 1312621 - RNA, 24 nt, Human
ugcugggauuacaggugugaguca

SEQ ID NO: 1312622 - RNA, 18 nt, Human
ugcuuuuagucuugguga

SEQ ID NO: 1312623 - RNA, 18 nt, Human
uggagacaauuuuggugg

SEQ ID NO: 1312624 - RNA, 24 nt, Human
uggagugcaguggugcgaucccgg

SEQ ID NO: 1312625 - RNA, 23 nt, Human
uggcuaauuuuuucccuuuuucu

SEQ ID NO: 1312626 - RNA, 23 nt, Human
ugggagguggcuguuugcacaug

SEQ ID NO: 1312627 - RNA, 18 nt, Human
ugggauuacaggugugag

SEQ ID NO: 1312628 - RNA, 18 nt, Human
ugggauuacaggugugag

SEQ ID NO: 1312629 - RNA, 21 nt, Human
ugggauuacaggugugaguca

SEQ ID NO: 1312630 - RNA, 22 nt, Human
ugggauuacaggugugagucac

SEQ ID NO: 1312631 - RNA, 22 nt, Human
ugggauuacaggugugagucac

SEQ ID NO: 1312632 - RNA, 23 nt, Human
ugggauuacaggugugagucacu

SEQ ID NO: 1312633 - RNA, 25 nt, Human
ugggauuacaggugugagucacucu

SEQ ID NO: 1312634 - RNA, 23 nt, Human
uggguucaagugauccucccacc

SEQ ID NO: 1312635 - RNA, 24 nt, Human
uggguucaagugauccucccaccu

SEQ ID NO: 1312636 - RNA, 24 nt, Human
uggugcgaucccggcucacugcag

SEQ ID NO: 1312637 - RNA, 19 nt, Human
ugguugcggcuggaggagg

SEQ ID NO: 1312638 - RNA, 18 nt, Human
ugucccuggagagcagga

SEQ ID NO: 1312639 - RNA, 24 nt, Human
ugugccacuggccauuccccaccc

SEQ ID NO: 1312640 - RNA, 23 nt, Human
uucaagugauccucccaccucag

SEQ ID NO: 1312641 - RNA, 24 nt, Human
uucaagugauccucccaccucagc

SEQ ID NO: 1312642 - RNA, 18 nt, Human
uucauugucauuaccagu

SEQ ID NO: 1312643 - RNA, 21 nt, Human
uucuaucgcuccucuccaaug

SEQ ID NO: 1312644 - RNA, 22 nt, Human
uugcacauguggucagcaaauc

SEQ ID NO: 1312645 - RNA, 21 nt, Human
uuggaaauguguagucuuuga

SEQ ID NO: 1312646 - RNA, 23 nt, Human
uuggugguugcggcuggaggagg

SEQ ID NO: 1312647 - RNA, 19 nt, Human
uugucccuggagagcagga

SEQ ID NO: 1312648 - RNA, 24 nt, Human
uuuucagccagggggugauuuugc

SEQ ID NO: 1312649 - RNA, 23 nt, Human
uuuuucagcagcguugucccugg

SEQ ID NO: 1312650 - RNA, 21 nt, Human
aagaggaaagaaauuucccag

SEQ ID NO: 1312651 - RNA, 18 nt, Human
acuuauguuuguuaguaa

SEQ ID NO: 1312652 - RNA, 18 nt, Human
agaaggaagugggcuuga

SEQ ID NO: 1312653 - RNA, 20 nt, Human
agaaggaagugggcuugagc

SEQ ID NO: 1312654 - RNA, 23 nt, Human
agcccgcagcccugggcagcccc

SEQ ID NO: 1312655 - RNA, 24 nt, Human
aggaagaggaaagaaauuucccag

SEQ ID NO: 1312656 - RNA, 21 nt, Human
agggagcucccuccacaggga

SEQ ID NO: 1312657 - RNA, 23 nt, Human
agggaggcacaggaaaaggagga

SEQ ID NO: 1312658 - RNA, 21 nt, Human
aguggcugcagcuggagccug

SEQ ID NO: 1312659 - RNA, 20 nt, Human
auggaggaaacuuuaucuuc

SEQ ID NO: 1312660 - RNA, 22 nt, Human
cacuaaacuccucuaaagccca

SEQ ID NO: 1312661 - RNA, 18 nt, Human
cagcccugggcagccccg

SEQ ID NO: 1312662 - RNA, 18 nt, Human
cccgcagcccugggcagc

SEQ ID NO: 1312663 - RNA, 22 nt, Human
ccgcagcccugggcagccccgg

SEQ ID NO: 1312664 - RNA, 18 nt, Human
ccuggagcccgcagcccu

SEQ ID NO: 1312665 - RNA, 19 nt, Human
cgggugcugagcgccgggc

SEQ ID NO: 1312666 - RNA, 19 nt, Human
cuccacagggaggcacagg

SEQ ID NO: 1312667 - RNA, 22 nt, Human
cuggugcaggacugaacuggga

SEQ ID NO: 1312668 - RNA, 20 nt, Human
cuucaaaguggcugcagcug

SEQ ID NO: 1312669 - RNA, 18 nt, Human
gaggcacaggaaaaggag

SEQ ID NO: 1312670 - RNA, 18 nt, Human
gagguggcuggcgggugc

SEQ ID NO: 1312671 - RNA, 22 nt, Human
gcagcgcucugggugccuggag

SEQ ID NO: 1312672 - RNA, 20 nt, Human
gcccauugucucugaaugac

SEQ ID NO: 1312673 - RNA, 18 nt, Human
gccuggagcccgcagccc

SEQ ID NO: 1312674 - RNA, 18 nt, Human
gcucugggugccuggagc

SEQ ID NO: 1312675 - RNA, 20 nt, Human
ggagguggcuggcgggugcu

SEQ ID NO: 1312676 - RNA, 21 nt, Human
ggcacaggaaaaggagaagga

SEQ ID NO: 1312677 - RNA, 23 nt, Human
ggcgggugcugagcgccgggccu

SEQ ID NO: 1312678 - RNA, 20 nt, Human
gggaaaaggaacuggugcag

SEQ ID NO: 1312679 - RNA, 20 nt, Human
gucgcagcgcucugggugcc

SEQ ID NO: 1312680 - RNA, 18 nt, Human
uacaagguacuuauguuu

SEQ ID NO: 1312681 - RNA, 22 nt, Human
uccacagggaggcacaggaaaa

SEQ ID NO: 1312682 - RNA, 23 nt, Human
ucucugggcuuuucauguuucag

SEQ ID NO: 1312683 - RNA, 24 nt, Human
ucucugggcuuuucauguuucagu

SEQ ID NO: 1312684 - RNA, 22 nt, Human
ugaaugacuguuugcugaagca

SEQ ID NO: 1312685 - RNA, 24 nt, Human
ugccuggagcccgcagcccugggc

SEQ ID NO: 1312686 - RNA, 21 nt, Human
uggcgggugcugagcgccggg

SEQ ID NO: 1312687 - RNA, 24 nt, Human
uguggucgcagcgcucugggugcc

SEQ ID NO: 1312688 - RNA, 18 nt, Human
uucaaaguggcugcagcu

SEQ ID NO: 1312689 - RNA, 21 nt, Human
uuucucaccucaaacacuugg

SEQ ID NO: 1312690 - RNA, 21 nt, Human
aaaaaaccccaaacaccucca

SEQ ID NO: 1312691 - RNA, 21 nt, Human
aaaacaccauggagucaaaga

SEQ ID NO: 1312692 - RNA, 24 nt, Human
aaacagaaacugucuuuuauaauc

SEQ ID NO: 1312693 - RNA, 21 nt, Human
aaacagccggcaacggaaacg

SEQ ID NO: 1312694 - RNA, 22 nt, Human
aaacagccggcaacggaaacga

SEQ ID NO: 1312695 - RNA, 28 nt, Human
aaacagccggcaacggaaacgacggaac

SEQ ID NO: 1312696 - RNA, 21 nt, Human
aaauacugaagaugagaaaau

SEQ ID NO: 1312697 - RNA, 23 nt, Human
aacaaagaaaaccauaaagaaac

SEQ ID NO: 1312698 - RNA, 24 nt, Human
aacaucuauuuacuuuuuugaugc

SEQ ID NO: 1312699 - RNA, 21 nt, Human
aaccuucauuaaaaauugcuu

SEQ ID NO: 1312700 - RNA, 21 nt, Human
aagaaaaccauaaagaaacac

SEQ ID NO: 1312701 - RNA, 23 nt, Human
aagagcuuugaaaaagauaccaa

SEQ ID NO: 1312702 - RNA, 21 nt, Human
aagaggaaaagaaacagcagc

SEQ ID NO: 1312703 - RNA, 24 nt, Human
aauaaaacuauauaaaaugcacag

SEQ ID NO: 1312704 - RNA, 26 nt, Human
aauacugucauucucucaucaguuau

SEQ ID NO: 1312705 - RNA, 19 nt, Human
aaucaagccaucuaguccg

SEQ ID NO: 1312706 - RNA, 18 nt, Human
acagaaaaaaaccccaaa

SEQ ID NO: 1312707 - RNA, 22 nt, Human
accaaauuuuuaaaauaauuuu

SEQ ID NO: 1312708 - RNA, 23 nt, Human
acuggcacacucucuucaaccug

SEQ ID NO: 1312709 - RNA, 24 nt, Human
agaaaaaaaccccaaacaccucca

SEQ ID NO: 1312710 - RNA, 22 nt, Human
agaaaucauucccauaaaaauc

SEQ ID NO: 1312711 - RNA, 20 nt, Human
agacaaaaaucccaauuccu

SEQ ID NO: 1312712 - RNA, 22 nt, Human
agacaaaauuaaaaacagccau

SEQ ID NO: 1312713 - RNA, 20 nt, Human
agaggggaucuuuggaagga

SEQ ID NO: 1312714 - RNA, 19 nt, Human
aggaaaagaaacagcagcc

SEQ ID NO: 1312715 - RNA, 21 nt, Human
aggagaacuuaaacuuugcug

SEQ ID NO: 1312716 - RNA, 18 nt, Human
agggggagcaggagcugc

SEQ ID NO: 1312717 - RNA, 22 nt, Human
aguccgcgcucauuaggacaaa

SEQ ID NO: 1312718 - RNA, 24 nt, Human
auaaaaaucagacaaaauuaaaaa

SEQ ID NO: 1312719 - RNA, 21 nt, Human
auaaauaugaaaauggaaagu

SEQ ID NO: 1312720 - RNA, 24 nt, Human
auggugccaguaagacacugauuu

SEQ ID NO: 1312721 - RNA, 21 nt, Human
auugagcaagcucuauaauga

SEQ ID NO: 1312722 - RNA, 25 nt, Human
caaaagaugaacagaauugcuuucc

SEQ ID NO: 1312723 - RNA, 22 nt, Human
caaaauuaaaaacagccauuuc

SEQ ID NO: 1312724 - RNA, 24 nt, Human
caaacaaagaaaaccauaaagaaa

SEQ ID NO: 1312725 - RNA, 20 nt, Human
caaacaccuccagucaucau

SEQ ID NO: 1312726 - RNA, 20 nt, Human
caaacagccggcaacggaaa

SEQ ID NO: 1312727 - RNA, 18 nt, Human
caaaguagacaaaaaucc

SEQ ID NO: 1312728 - RNA, 22 nt, Human
caagaggaaaagaaacagcagc

SEQ ID NO: 1312729 - RNA, 24 nt, Human
cacagaaacccaaaaggaggcccu

SEQ ID NO: 1312730 - RNA, 20 nt, Human
caccgaggcauccggggcaa

SEQ ID NO: 1312731 - RNA, 20 nt, Human
caccuccagucaucauuccu

SEQ ID NO: 1312732 - RNA, 23 nt, Human
cacguagaaaaaauacauacaaa

SEQ ID NO: 1312733 - RNA, 25 nt, Human
cacugauuguccacuagcuuucuua

SEQ ID NO: 1312734 - RNA, 22 nt, Human
cacuguggcauuuuaaagugug

SEQ ID NO: 1312735 - RNA, 20 nt, Human
cagaaaaaaaccccaaacac

SEQ ID NO: 1312736 - RNA, 25 nt, Human
cagaaacccaaaaggaggcccuaau

SEQ ID NO: 1312737 - RNA, 22 nt, Human
cagccggcaacggaaacgacgg

SEQ ID NO: 1312738 - RNA, 19 nt, Human
cauacauagguagagaaga

SEQ ID NO: 1312739 - RNA, 24 nt, Human
cauagguagagaagaaaacacuaa

SEQ ID NO: 1312740 - RNA, 20 nt, Human
caucuuauuuuccaauugga

SEQ ID NO: 1312741 - RNA, 27 nt, Human
ccauuuccaaacuaaaaaccaaaaaaa

SEQ ID NO: 1312742 - RNA, 27 nt, Human
cccacugcaaacagccggcaacggaaa

SEQ ID NO: 1312743 - RNA, 20 nt, Human
cccagggcucugggcgucuc

SEQ ID NO: 1312744 - RNA, 19 nt, Human
ccccacugcaaacagccgg

SEQ ID NO: 1312745 - RNA, 21 nt, Human
ccccagggcucugggcgucuc

SEQ ID NO: 1312746 - RNA, 21 nt, Human
ccccggguucccgcagaaccc

SEQ ID NO: 1312747 - RNA, 20 nt, Human
cccgccggcccaggcgcccc

SEQ ID NO: 1312748 - RNA, 23 nt, Human
cccgcgcgcucucagugcagccg

SEQ ID NO: 1312749 - RNA, 25 nt, Human
cccgcgcgcucucagugcagccgca

SEQ ID NO: 1312750 - RNA, 20 nt, Human
cccucgcgcgccgcccgcgg

SEQ ID NO: 1312751 - RNA, 18 nt, Human
ccgaccccccucgcgcgc

SEQ ID NO: 1312752 - RNA, 23 nt, Human
ccggggcaagaggaaaagaaaca

SEQ ID NO: 1312753 - RNA, 23 nt, Human
cgcacaaagacccgccggcccag

SEQ ID NO: 1312754 - RNA, 21 nt, Human
cgccugagcaccccagggcuc

SEQ ID NO: 1312755 - RNA, 26 nt, Human
cgccugagcaccccagggcucugggc

SEQ ID NO: 1312756 - RNA, 21 nt, Human
cggggcaagaggaaaagaaac

SEQ ID NO: 1312757 - RNA, 18 nt, Human
cucaggucuugcucuauc

SEQ ID NO: 1312758 - RNA, 20 nt, Human
cucauguugcauucuaauuu

SEQ ID NO: 1312759 - RNA, 19 nt, Human
cucugcgccgaccccccuc

SEQ ID NO: 1312760 - RNA, 30 nt, Human
cugaaaagcuaaauugccacuauuguaauu

SEQ ID NO: 1312761 - RNA, 19 nt, Human
cuucaagcuauuuuaguau

SEQ ID NO: 1312762 - RNA, 18 nt, Human
gaaaaaaaccccaaacac

SEQ ID NO: 1312763 - RNA, 27 nt, Human
gaaaaagauuguuuucuaaacuguaaa

SEQ ID NO: 1312764 - RNA, 21 nt, Human
gaaaagaaacagcagccaccu

SEQ ID NO: 1312765 - RNA, 25 nt, Human
gaaagaggucugucaacagacacgg

SEQ ID NO: 1312766 - RNA, 18 nt, Human
gaacaaaagugaagagua

SEQ ID NO: 1312767 - RNA, 19 nt, Human
gaagguagacacaauuaua

SEQ ID NO: 1312768 - RNA, 19 nt, Human
gacaaaagcgcagaacugc

SEQ ID NO: 1312769 - RNA, 21 nt, Human
gacaguuugcuuggcuucuag

SEQ ID NO: 1312770 - RNA, 22 nt, Human
gagcuuugaaaaagauaccaac

SEQ ID NO: 1312771 - RNA, 19 nt, Human
gcaaacagccggcaacgga

SEQ ID NO: 1312772 - RNA, 20 nt, Human
gccgaccccccucgcgcgcc

SEQ ID NO: 1312773 - RNA, 23 nt, Human
gccgcaccgaggcauccggggca

SEQ ID NO: 1312774 - RNA, 22 nt, Human
gccgcccgcgaaugggagggca

SEQ ID NO: 1312775 - RNA, 21 nt, Human
gcucugggcgucucugcgccg

SEQ ID NO: 1312776 - RNA, 18 nt, Human
ggagguggauuuaaagaa

SEQ ID NO: 1312777 - RNA, 22 nt, Human
ggagguggauuuaaagaacaua

SEQ ID NO: 1312778 - RNA, 24 nt, Human
ggcucugggcgucucugcgccgac

SEQ ID NO: 1312779 - RNA, 19 nt, Human
gggagcaggagcugccucg

SEQ ID NO: 1312780 - RNA, 19 nt, Human
guagaaauagaagauacag

SEQ ID NO: 1312781 - RNA, 26 nt, Human
uaaaaacaaaaaagcuagucaccaau

SEQ ID NO: 1312782 - RNA, 25 nt, Human
uaaaaagcaaauacugaagaugaga

SEQ ID NO: 1312783 - RNA, 29 nt, Human
uaaaaaucagacaaaauuaaaaacagcca

SEQ ID NO: 1312784 - RNA, 27 nt, Human
uaaaauuuuccccuucuuuacuuaaag

SEQ ID NO: 1312785 - RNA, 22 nt, Human
uaaagaacauauuauugagcaa

SEQ ID NO: 1312786 - RNA, 23 nt, Human
uaaauucuguugaaugugcaaaa

SEQ ID NO: 1312787 - RNA, 21 nt, Human
uaacauuccaaacaaaaugac

SEQ ID NO: 1312788 - RNA, 18 nt, Human
uaagcaaaaacagaauga

SEQ ID NO: 1312789 - RNA, 20 nt, Human
uacaacugauaaaaagcaaa

SEQ ID NO: 1312790 - RNA, 19 nt, Human
uacaucaccauauuuaugu

SEQ ID NO: 1312791 - RNA, 18 nt, Human
uacccccaauuucuccca

SEQ ID NO: 1312792 - RNA, 24 nt, Human
uacuuuuacaccaacgggcuaagu

SEQ ID NO: 1312793 - RNA, 18 nt, Human
uagaauuucugaaauauu

SEQ ID NO: 1312794 - RNA, 24 nt, Human
uaguaguugggucuaaccuguacc

SEQ ID NO: 1312795 - RNA, 21 nt, Human
uaucugaaaugguugcagauu

SEQ ID NO: 1312796 - RNA, 27 nt, Human
uauguaaaauuccaacuacauauguca

SEQ ID NO: 1312797 - RNA, 20 nt, Human
ucaaaacacaaagauaagca

SEQ ID NO: 1312798 - RNA, 21 nt, Human
ucaagccaucuaguccgcgcu

SEQ ID NO: 1312799 - RNA, 22 nt, Human
ucaauaaucacagaaacccaaa

SEQ ID NO: 1312800 - RNA, 18 nt, Human
ucacagaaacccaaaagg

SEQ ID NO: 1312801 - RNA, 21 nt, Human
ucacuuaacauuccaaacaaa

SEQ ID NO: 1312802 - RNA, 25 nt, Human
ucagugcagccgcaccgaggcaucc

SEQ ID NO: 1312803 - RNA, 20 nt, Human
ucauauguagguagagcggu

SEQ ID NO: 1312804 - RNA, 19 nt, Human
uccaaaguagacaaaaauc

SEQ ID NO: 1312805 - RNA, 20 nt, Human
uccggggcaagaggaaaaga

SEQ ID NO: 1312806 - RNA, 20 nt, Human
ucgcacaaagacccgccggc

SEQ ID NO: 1312807 - RNA, 18 nt, Human
ucucucugcuguaucucu

SEQ ID NO: 1312808 - RNA, 20 nt, Human
ucucugcgccgaccccccuc

SEQ ID NO: 1312809 - RNA, 18 nt, Human
ugaaaugguugcagauua

SEQ ID NO: 1312810 - RNA, 23 nt, Human
ugaauacagaaaaaaaccccaaa

SEQ ID NO: 1312811 - RNA, 21 nt, Human
ugagauguccccuacaagaaa

SEQ ID NO: 1312812 - RNA, 19 nt, Human
ugagcaccccagggcucug

SEQ ID NO: 1312813 - RNA, 24 nt, Human
ugaugaaguuguauuucacugaau

SEQ ID NO: 1312814 - RNA, 19 nt, Human
ugcagaaagagcgcauagc

SEQ ID NO: 1312815 - RNA, 25 nt, Human
ugcauucuaauuuaccuggcuaacc

SEQ ID NO: 1312816 - RNA, 19 nt, Human
uggaaaguaagccuccccu

SEQ ID NO: 1312817 - RNA, 23 nt, Human
uggaagaucaaaacacaaagaua

SEQ ID NO: 1312818 - RNA, 26 nt, Human
uggaagaucaaaacacaaagauaagc

SEQ ID NO: 1312819 - RNA, 22 nt, Human
uggaaggauaagguaccuuugg

SEQ ID NO: 1312820 - RNA, 25 nt, Human
uggagguggauuuaaagaacauauu

SEQ ID NO: 1312821 - RNA, 21 nt, Human
uggcuucuagacucaaacccu

SEQ ID NO: 1312822 - RNA, 18 nt, Human
uguaaaacgcaccaagaa

SEQ ID NO: 1312823 - RNA, 22 nt, Human
uguaaaacgcaccaagaagaaa

SEQ ID NO: 1312824 - RNA, 22 nt, Human
uguguaaaacgcaccaagaaga

SEQ ID NO: 1312825 - RNA, 23 nt, Human
uuaaaaaaugaauacagaaaaaa

SEQ ID NO: 1312826 - RNA, 23 nt, Human
uuaaaaacaaaaaagcuagucac

SEQ ID NO: 1312827 - RNA, 27 nt, Human
uuaaaaacagccauuuccaaacuaaaa

SEQ ID NO: 1312828 - RNA, 28 nt, Human
uuaaaauuuuccccuucuuuacuuaaag

SEQ ID NO: 1312829 - RNA, 21 nt, Human
uuaaacacuugauauauaccc

SEQ ID NO: 1312830 - RNA, 19 nt, Human
uucaacacaaacaucaaaa

SEQ ID NO: 1312831 - RNA, 23 nt, Human
uucccauaaaaaucucaucacua

SEQ ID NO: 1312832 - RNA, 18 nt, Human
uuccuagaagggaaaaaa

SEQ ID NO: 1312833 - RNA, 19 nt, Human
uuccucuggacuagggccu

SEQ ID NO: 1312834 - RNA, 23 nt, Human
uuccucuggacuagggccugagg

SEQ ID NO: 1312835 - RNA, 20 nt, Human
uucucaaaggggagaaagag

SEQ ID NO: 1312836 - RNA, 18 nt, Human
uugaauacuuuaacagaa

SEQ ID NO: 1312837 - RNA, 26 nt, Human
uugccacuauuguaauaaagugaacc

SEQ ID NO: 1312838 - RNA, 22 nt, Human
uugguauagguucacugauacc

SEQ ID NO: 1312839 - RNA, 25 nt, Human
uuuaauacaaauaccugauuuauac

SEQ ID NO: 1312840 - RNA, 21 nt, Human
uuuccccacugcaaacagccg

SEQ ID NO: 1312841 - RNA, 24 nt, Human
uuugagcaaaucuuugaugaaguu

SEQ ID NO: 1312842 - RNA, 21 nt, Human
aaacacauuaugguagguagc

SEQ ID NO: 1312843 - RNA, 24 nt, Human
aacacauuaugguagguagcagca

SEQ ID NO: 1312844 - RNA, 19 nt, Human
acaggaaugaggaaagaau

SEQ ID NO: 1312845 - RNA, 22 nt, Human
acaggaaugaggaaagaaugac

SEQ ID NO: 1312846 - RNA, 22 nt, Human
agagcacacaucccuuccauuc

SEQ ID NO: 1312847 - RNA, 22 nt, Human
agcccaauuuccuuugaguacc

SEQ ID NO: 1312848 - RNA, 25 nt, Human
agggagaguuaaggaauuccuuugg

SEQ ID NO: 1312849 - RNA, 29 nt, Human
agguaggaagguagguaaaguccgcuuug

SEQ ID NO: 1312850 - RNA, 22 nt, Human
cagaaucuuaacugaguaugac

SEQ ID NO: 1312851 - RNA, 18 nt, Human
caggcuacuguaugggga

SEQ ID NO: 1312852 - RNA, 24 nt, Human
ccacaccaaaauggaauaaaaaag

SEQ ID NO: 1312853 - RNA, 21 nt, Human
cguccacaccaaaauggaaua

SEQ ID NO: 1312854 - RNA, 22 nt, Human
cguccacaccaaaauggaauaa

SEQ ID NO: 1312855 - RNA, 22 nt, Human
cuucuugcugugucaucucucu

SEQ ID NO: 1312856 - RNA, 21 nt, Human
cuugcugugucaucucucuuc

SEQ ID NO: 1312857 - RNA, 21 nt, Human
gcaggagggagacacaguucu

SEQ ID NO: 1312858 - RNA, 21 nt, Human
ggucacaggaaugaggaaaga

SEQ ID NO: 1312859 - RNA, 18 nt, Human
guccacaccaaaauggaa

SEQ ID NO: 1312860 - RNA, 23 nt, Human
uaaaaaaguaauccagucaaaga

SEQ ID NO: 1312861 - RNA, 24 nt, Human
ucaaagaaagguugagauccugua

SEQ ID NO: 1312862 - RNA, 24 nt, Human
ucaacgguugcaucuguuuuuuuu

SEQ ID NO: 1312863 - RNA, 24 nt, Human
ucacaggaaugaggaaagaaugac

SEQ ID NO: 1312864 - RNA, 21 nt, Human
ucacuccaggcuacuguaugg

SEQ ID NO: 1312865 - RNA, 18 nt, Human
ucaucucucuucucaggg

SEQ ID NO: 1312866 - RNA, 18 nt, Human
uccacaccaaaauggaau

SEQ ID NO: 1312867 - RNA, 20 nt, Human
uggaauaaaaaaguaaucca

SEQ ID NO: 1312868 - RNA, 22 nt, Human
uggauucuuggcauccacguuc

SEQ ID NO: 1312869 - RNA, 20 nt, Human
uggcauccacguucuugugg

SEQ ID NO: 1312870 - RNA, 22 nt, Human
ugguagguagguaggaagguag

SEQ ID NO: 1312871 - RNA, 21 nt, Human
uguccaguacaaaucagccca

SEQ ID NO: 1312872 - RNA, 24 nt, Human
uuucucgcagauggucacaggaau

SEQ ID NO: 1312873 - RNA, 20 nt, Human
acaggccugugccaccgcgc

SEQ ID NO: 1312874 - RNA, 19 nt, Human
acugcagccucaaacuccu

SEQ ID NO: 1312875 - RNA, 22 nt, Human
acugcagccucaaacuccuggg

SEQ ID NO: 1312876 - RNA, 18 nt, Human
agacagggucucaauaug

SEQ ID NO: 1312877 - RNA, 23 nt, Human
aguacagugacacgaucauagcu

SEQ ID NO: 1312878 - RNA, 18 nt, Human
auagcuuacugcagccuc

SEQ ID NO: 1312879 - RNA, 20 nt, Human
auccucccgccucagccucc

SEQ ID NO: 1312880 - RNA, 23 nt, Human
caaacuccugggcccacgccauc

SEQ ID NO: 1312881 - RNA, 20 nt, Human
cagccucaaacuccugggcc

SEQ ID NO: 1312882 - RNA, 20 nt, Human
cagccuccugaguagcuggg

SEQ ID NO: 1312883 - RNA, 24 nt, Human
caggaucuugcucuguugcccagg

SEQ ID NO: 1312884 - RNA, 19 nt, Human
cccaggcuggaguacagug

SEQ ID NO: 1312885 - RNA, 23 nt, Human
cccgccucagccuccugaguagc

SEQ ID NO: 1312886 - RNA, 23 nt, Human
ccgccucagccuccugaguagcu

SEQ ID NO: 1312887 - RNA, 22 nt, Human
ccgguggggcguagacccuucc

SEQ ID NO: 1312888 - RNA, 19 nt, Human
ccucaaacuccugggccca

SEQ ID NO: 1312889 - RNA, 23 nt, Human
ccuuccagauggcuggcucugcc

SEQ ID NO: 1312890 - RNA, 24 nt, Human
cgccucagccuccugaguagcugg

SEQ ID NO: 1312891 - RNA, 23 nt, Human
cggucuucaagcuuaucuccccu

SEQ ID NO: 1312892 - RNA, 24 nt, Human
cucagccuccugaguagcugggac

SEQ ID NO: 1312893 - RNA, 24 nt, Human
cuccugaguagcugggaccacagg

SEQ ID NO: 1312894 - RNA, 20 nt, Human
cuccugggcccacgccaucu

SEQ ID NO: 1312895 - RNA, 23 nt, Human
cugcagccucaaacuccugggcc

SEQ ID NO: 1312896 - RNA, 21 nt, Human
cuuacugcagccucaaacucc

SEQ ID NO: 1312897 - RNA, 21 nt, Human
cuugcucuguugcccaggcug

SEQ ID NO: 1312898 - RNA, 25 nt, Human
gaguagcugggaccacaggccugug

SEQ ID NO: 1312899 - RNA, 19 nt, Human
gaucauagcuuacugcagc

SEQ ID NO: 1312900 - RNA, 20 nt, Human
gcccaggcuggaguacagug

SEQ ID NO: 1312901 - RNA, 25 nt, Human
gcucuguugcccaggcuggaguaca

SEQ ID NO: 1312902 - RNA, 20 nt, Human
ggaguacagugacacgauca

SEQ ID NO: 1312903 - RNA, 23 nt, Human
gggggacagugcaguuggagcuu

SEQ ID NO: 1312904 - RNA, 20 nt, Human
uaaccagcgaccgguggggc

SEQ ID NO: 1312905 - RNA, 21 nt, Human
uaagacaggaucuugcucugu

SEQ ID NO: 1312906 - RNA, 22 nt, Human
uaagacaggaucuugcucuguu

SEQ ID NO: 1312907 - RNA, 22 nt, Human
uagagacagggucucaauaugu

SEQ ID NO: 1312908 - RNA, 24 nt, Human
uagcuuacugcagccucaaacucc

SEQ ID NO: 1312909 - RNA, 23 nt, Human
ucagccuccugaguagcugggac

SEQ ID NO: 1312910 - RNA, 18 nt, Human
uccacggucuucaagcuu

SEQ ID NO: 1312911 - RNA, 25 nt, Human
uccacggucuucaagcuuaucuccc

SEQ ID NO: 1312912 - RNA, 19 nt, Human
uccccuuguucucuccgca

SEQ ID NO: 1312913 - RNA, 26 nt, Human
uccucccgccucagccuccugaguag

SEQ ID NO: 1312914 - RNA, 24 nt, Human
uccugaguagcugggaccacaggc

SEQ ID NO: 1312915 - RNA, 18 nt, Human
ucuguugcccaggcugga

SEQ ID NO: 1312916 - RNA, 23 nt, Human
ucuugcucuguugcccaggcugg

SEQ ID NO: 1312917 - RNA, 24 nt, Human
ucuugcucuguugcccaggcugga

SEQ ID NO: 1312918 - RNA, 18 nt, Human
ucuuugggggacagugca

SEQ ID NO: 1312919 - RNA, 21 nt, Human
ugcccaggcuggaguacagug

SEQ ID NO: 1312920 - RNA, 24 nt, Human
ugcccaggcuggaguacagugaca

SEQ ID NO: 1312921 - RNA, 22 nt, Human
ugcucuguugcccaggcuggag

SEQ ID NO: 1312922 - RNA, 22 nt, Human
ugcugguccacggucuucaagc

SEQ ID NO: 1312923 - RNA, 18 nt, Human
uggcuuguuguuuuguag

SEQ ID NO: 1312924 - RNA, 23 nt, Human
ugggaccacaggccugugccacc

SEQ ID NO: 1312925 - RNA, 24 nt, Human
ugggaccacaggccugugccaccg

SEQ ID NO: 1312926 - RNA, 23 nt, Human
uggggcguagacccuuccagaug

SEQ ID NO: 1312927 - RNA, 24 nt, Human
uguagagacagggucucaauaugu

SEQ ID NO: 1312928 - RNA, 24 nt, Human
uuacugcagccucaaacuccuggg

SEQ ID NO: 1312929 - RNA, 24 nt, Human
uugcucuguugcccaggcuggagu

SEQ ID NO: 1312930 - RNA, 22 nt, Human
uuguagagacagggucucaaua

SEQ ID NO: 1312931 - RNA, 18 nt, Human
uuuguagagacagggucu

SEQ ID NO: 1312932 - RNA, 24 nt, Human
uuuguagagacagggucucaauau

SEQ ID NO: 1312933 - RNA, 18 nt, Human
uuuuuuuuuuaagacagg

SEQ ID NO: 1312934 - RNA, 24 nt, Human
uuuuuuuuuuuuaagacaggaucu

SEQ ID NO: 1312935 - RNA, 25 nt, Human
uuuuuuuuuuuuuuuuuuuuuaagg

SEQ ID NO: 1312936 - RNA, 22 nt, Human
agcucugagcccagaguuuccc

SEQ ID NO: 1312937 - RNA, 27 nt, Human
aggggcaggccccaggaucccccaagg

SEQ ID NO: 1312938 - RNA, 19 nt, Human
cacgggaagacagauccca

SEQ ID NO: 1312939 - RNA, 23 nt, Human
cagcagccaugugggggcacccc

SEQ ID NO: 1312940 - RNA, 22 nt, Human
cagccucccuggugagggugac

SEQ ID NO: 1312941 - RNA, 21 nt, Human
caggccccaggauccugaaga

SEQ ID NO: 1312942 - RNA, 21 nt, Human
ccccuguggcggccaaaaccu

SEQ ID NO: 1312943 - RNA, 21 nt, Human
cccucagcccauugcugaagu

SEQ ID NO: 1312944 - RNA, 21 nt, Human
cuucuguccugugaccaaagg

SEQ ID NO: 1312945 - RNA, 22 nt, Human
cuuggcccagcuucuguccugu

SEQ ID NO: 1312946 - RNA, 21 nt, Human
gccccaggauccugaagacac

SEQ ID NO: 1312947 - RNA, 19 nt, Human
ggguuuggggcaaggagug

SEQ ID NO: 1312948 - RNA, 24 nt, Human
gugcagcagccaugugggggcacc

SEQ ID NO: 1312949 - RNA, 22 nt, Human
uaaauucccguccuggcauuca

SEQ ID NO: 1312950 - RNA, 23 nt, Human
uccugaagacacacgggaagaca

SEQ ID NO: 1312951 - RNA, 22 nt, Human
uccuuacuuccucaggcuucug

SEQ ID NO: 1312952 - RNA, 23 nt, Human
ugaggccuuccucaagaggaagc

SEQ ID NO: 1312953 - RNA, 18 nt, Human
ugcugaaguugaauuaga

SEQ ID NO: 1312954 - RNA, 19 nt, Human
uguccugugaccaaaggcg

SEQ ID NO: 1312955 - RNA, 22 nt, Human
ugugaccaaaggcgggucuucu

SEQ ID NO: 1312956 - RNA, 20 nt, Human
uuccgggccucgguuuucuc

SEQ ID NO: 1312957 - RNA, 23 nt, Human
uuccucaagaggaagccaggagg

SEQ ID NO: 1312958 - RNA, 23 nt, Human
uuccucaggcuucuggguuuggg

SEQ ID NO: 1312959 - RNA, 23 nt, Human
uuccucaggcuucuggguuuggg

SEQ ID NO: 1312960 - RNA, 19 nt, Human
uucuggguuuggggcaagg

SEQ ID NO: 1312961 - RNA, 20 nt, Human
aaaaggacccaggagcgggg

SEQ ID NO: 1312962 - RNA, 18 nt, Human
aaggacccaggagcgggg

SEQ ID NO: 1312963 - RNA, 26 nt, Human
acccuggcacccccggcgcguucucc

SEQ ID NO: 1312964 - RNA, 25 nt, Human
acuccagugugcgggacccuggcac

SEQ ID NO: 1312965 - RNA, 25 nt, Human
acuggacugagugcccgggagugcc

SEQ ID NO: 1312966 - RNA, 19 nt, Human
agaggcccggggagaucag

SEQ ID NO: 1312967 - RNA, 24 nt, Human
agaucuaauauguuguggaaauaa

SEQ ID NO: 1312968 - RNA, 22 nt, Human
agccagucccaaaaaggaccca

SEQ ID NO: 1312969 - RNA, 25 nt, Human
auuaagcaguggaaaaugugcucaa

SEQ ID NO: 1312970 - RNA, 26 nt, Human
caccacggggaggcgccgccacucca

SEQ ID NO: 1312971 - RNA, 25 nt, Human
cagagacaaggccguccaacccguc

SEQ ID NO: 1312972 - RNA, 19 nt, Human
caggcccucugucuaccag

SEQ ID NO: 1312973 - RNA, 18 nt, Human
cagguggcucgcaaggag

SEQ ID NO: 1312974 - RNA, 26 nt, Human
ccaaaaaggacccaggagcggggaca

SEQ ID NO: 1312975 - RNA, 20 nt, Human
cccaggagcggggacaccac

SEQ ID NO: 1312976 - RNA, 20 nt, Human
cccuuucccucucuuuaccc

SEQ ID NO: 1312977 - RNA, 18 nt, Human
ccuucuuccuuuuuuugc

SEQ ID NO: 1312978 - RNA, 21 nt, Human
cgugcuuguaaaauugaguuc

SEQ ID NO: 1312979 - RNA, 18 nt, Human
cuccagugugcgggaccc

SEQ ID NO: 1312980 - RNA, 18 nt, Human
cuuuccuucuuccuuuuu

SEQ ID NO: 1312981 - RNA, 18 nt, Human
gagaaaacagaggcccgg

SEQ ID NO: 1312982 - RNA, 21 nt, Human
ggaggcgccgccacuccagug

SEQ ID NO: 1312983 - RNA, 28 nt, Human
gguccaucuuuccuucuucccucugaag

SEQ ID NO: 1312984 - RNA, 22 nt, Human
gugccagagccagucccaaaaa

SEQ ID NO: 1312985 - RNA, 24 nt, Human
uaacucuacuaaagcagaaugaga

SEQ ID NO: 1312986 - RNA, 19 nt, Human
uaauauguuguggaaauaa

SEQ ID NO: 1312987 - RNA, 21 nt, Human
uacuggacugagugcccggga

SEQ ID NO: 1312988 - RNA, 22 nt, Human
uagaccccugacccugcccccg

SEQ ID NO: 1312989 - RNA, 22 nt, Human
uauacagacuauuucacagacc

SEQ ID NO: 1312990 - RNA, 21 nt, Human
uaugugggccuucccagauuu

SEQ ID NO: 1312991 - RNA, 19 nt, Human
ucaaggcuucauauuuuua

SEQ ID NO: 1312992 - RNA, 21 nt, Human
uccaucuuuccuucuuccuuu

SEQ ID NO: 1312993 - RNA, 23 nt, Human
uccuccaucgccagaugcuccug

SEQ ID NO: 1312994 - RNA, 22 nt, Human
ucucuugucuucucauccucca

SEQ ID NO: 1312995 - RNA, 22 nt, Human
ugacccugcccccgucauucuc

SEQ ID NO: 1312996 - RNA, 20 nt, Human
ugcgucaggcccucugucua

SEQ ID NO: 1312997 - RNA, 19 nt, Human
uggaagaggugacuuaaua

SEQ ID NO: 1312998 - RNA, 23 nt, Human
ugucuucucauccuccaucgcca

SEQ ID NO: 1312999 - RNA, 19 nt, Human
uucacagaugagaaaacag

SEQ ID NO: 1313000 - RNA, 20 nt, Human
uucacagaugagaaaacaga

SEQ ID NO: 1313001 - RNA, 24 nt, Human
uucacagaugagaaaacagaggcc

SEQ ID NO: 1313002 - RNA, 24 nt, Human
uuccuucuuccuuuuuuugcacau

SEQ ID NO: 1313003 - RNA, 24 nt, Human
uuugcacauuugcauuuauaucuu

SEQ ID NO: 1313004 - RNA, 18 nt, Human
uuugugaggcccuuuccc

SEQ ID NO: 1313005 - RNA, 24 nt, Human
aaacagaaacaaaauuaaagccca

SEQ ID NO: 1313006 - RNA, 20 nt, Human
aaaccuaaaguaagccaaua

SEQ ID NO: 1313007 - RNA, 25 nt, Human
aaaguaagccaauacuguacuuagg

SEQ ID NO: 1313008 - RNA, 22 nt, Human
aacaaaacaaaacaaacuaccc

SEQ ID NO: 1313009 - RNA, 26 nt, Human
aacaaguacauuuugcuguagucaga

SEQ ID NO: 1313010 - RNA, 18 nt, Human
aacaugauucaucuccuc

SEQ ID NO: 1313011 - RNA, 23 nt, Human
aagaaaccuaaaguaagccaaua

SEQ ID NO: 1313012 - RNA, 21 nt, Human
aagagucagauuggaggcuuu

SEQ ID NO: 1313013 - RNA, 24 nt, Human
aagcaaaaauaugcucgaaagcaa

SEQ ID NO: 1313014 - RNA, 19 nt, Human
aaggaaagaaaacacggua

SEQ ID NO: 1313015 - RNA, 20 nt, Human
aaguuuaaaggcuacauucc

SEQ ID NO: 1313016 - RNA, 22 nt, Human
aauaugcucgaaagcaaacacc

SEQ ID NO: 1313017 - RNA, 18 nt, Human
acccacagggacgcggcc

SEQ ID NO: 1313018 - RNA, 19 nt, Human
acuaguuuuaucagaucuc

SEQ ID NO: 1313019 - RNA, 18 nt, Human
acuuuccacaacaaaaca

SEQ ID NO: 1313020 - RNA, 19 nt, Human
agaaaaucuaaauugagaa

SEQ ID NO: 1313021 - RNA, 25 nt, Human
agaaaccuaaaguaagccaauacug

SEQ ID NO: 1313022 - RNA, 22 nt, Human
augccaaaacuaaagcaaaaca

SEQ ID NO: 1313023 - RNA, 27 nt, Human
caaaacaaacuacccuaacucuaauau

SEQ ID NO: 1313024 - RNA, 19 nt, Human
caaaacuaaagcaaaacaa

SEQ ID NO: 1313025 - RNA, 26 nt, Human
caaacagaaacaaaauuaaagcccau

SEQ ID NO: 1313026 - RNA, 18 nt, Human
caacaaaacaaaacaaac

SEQ ID NO: 1313027 - RNA, 21 nt, Human
caacaaaacaaaacaaacuac

SEQ ID NO: 1313028 - RNA, 24 nt, Human
caagaaguaaacuauaaguacaaa

SEQ ID NO: 1313029 - RNA, 20 nt, Human
cacaacaaaacaaaacaaac

SEQ ID NO: 1313030 - RNA, 21 nt, Human
caccaaauaaucagcggucac

SEQ ID NO: 1313031 - RNA, 26 nt, Human
cacuuccauuucuaaucgcuuagagg

SEQ ID NO: 1313032 - RNA, 24 nt, Human
cacuuuccacaacaaaacaaaaca

SEQ ID NO: 1313033 - RNA, 23 nt, Human
caucuuuaaacagaaguuauucc

SEQ ID NO: 1313034 - RNA, 23 nt, Human
cccaaacagaaacaaaauuaaag

SEQ ID NO: 1313035 - RNA, 19 nt, Human
ccgcugccggcagcugcgc

SEQ ID NO: 1313036 - RNA, 19 nt, Human
ccuccuccucguccuccuc

SEQ ID NO: 1313037 - RNA, 20 nt, Human
ccucguccuccuccucgucc

SEQ ID NO: 1313038 - RNA, 18 nt, Human
ccuguucgagaugugaga

SEQ ID NO: 1313039 - RNA, 18 nt, Human
cuaaagcaaaacaaaaua

SEQ ID NO: 1313040 - RNA, 19 nt, Human
cuaaggcuuaucugaaaac

SEQ ID NO: 1313041 - RNA, 25 nt, Human
cugcgcgccggggagguccuccucc

SEQ ID NO: 1313042 - RNA, 19 nt, Human
gaaagcaaacaccaacaaa

SEQ ID NO: 1313043 - RNA, 20 nt, Human
gcaaaacaaaauauccuguu

SEQ ID NO: 1313044 - RNA, 22 nt, Human
uaaaaguuacaaaacaacuucu

SEQ ID NO: 1313045 - RNA, 20 nt, Human
uaaagcaaaacaaaauaucc

SEQ ID NO: 1313046 - RNA, 21 nt, Human
uaaauaaagagucagauugga

SEQ ID NO: 1313047 - RNA, 23 nt, Human
uaauaucaugguagccaauaucu

SEQ ID NO: 1313048 - RNA, 23 nt, Human
uacagaugccaaaacuaaagcaa

SEQ ID NO: 1313049 - RNA, 24 nt, Human
uacagaugccaaaacuaaagcaaa

SEQ ID NO: 1313050 - RNA, 21 nt, Human
uacuguacuuaggacuguauu

SEQ ID NO: 1313051 - RNA, 24 nt, Human
uagcaaaguggaauaagaaacaag

SEQ ID NO: 1313052 - RNA, 20 nt, Human
ucacuuuccgguuuguagcu

SEQ ID NO: 1313053 - RNA, 19 nt, Human
uccauacuuugagugaagu

SEQ ID NO: 1313054 - RNA, 19 nt, Human
uccccaaacagaaacaaaa

SEQ ID NO: 1313055 - RNA, 21 nt, Human
ucgaaagcaaacaccaacaaa

SEQ ID NO: 1313056 - RNA, 23 nt, Human
ucugucuuuagaggaggcaaacu

SEQ ID NO: 1313057 - RNA, 23 nt, Human
ucuuucaaauaaaaacagaacaa

SEQ ID NO: 1313058 - RNA, 23 nt, Human
ugaacauguacauucaaaauuuc

SEQ ID NO: 1313059 - RNA, 20 nt, Human
ugauucaucuccucuguauu

SEQ ID NO: 1313060 - RNA, 22 nt, Human
ugccaaaacuaaagcaaaacaa

SEQ ID NO: 1313061 - RNA, 21 nt, Human
uggaauaagaaacaaguacau

SEQ ID NO: 1313062 - RNA, 21 nt, Human
uggcaugauuaucuguucugg

SEQ ID NO: 1313063 - RNA, 20 nt, Human
uggugaaugucaacauuugc

SEQ ID NO: 1313064 - RNA, 22 nt, Human
uguacagaugccaaaacuaaag

SEQ ID NO: 1313065 - RNA, 23 nt, Human
uucaagcuuuuacauuauagacu

SEQ ID NO: 1313066 - RNA, 24 nt, Human
uuucagaagggucuaugacacuuc

SEQ ID NO: 1313067 - RNA, 23 nt, Human
agccagccugcgccgcuggcccc

SEQ ID NO: 1313068 - RNA, 21 nt, Human
aggcacgggcagaaaccaggg

SEQ ID NO: 1313069 - RNA, 20 nt, Human
aggggccuagcaccugggcc

SEQ ID NO: 1313070 - RNA, 22 nt, Human
ccacuggaaaccaggcuggggu

SEQ ID NO: 1313071 - RNA, 20 nt, Human
cgaguuccaggugggcaugg

SEQ ID NO: 1313072 - RNA, 22 nt, Human
cgcugcacuaugggagccccuc

SEQ ID NO: 1313073 - RNA, 24 nt, Human
cuagcaccugggccagcagccaga

SEQ ID NO: 1313074 - RNA, 20 nt, Human
cugcgccgcuggccccaggc

SEQ ID NO: 1313075 - RNA, 19 nt, Human
cuggccccaggcagugagg

SEQ ID NO: 1313076 - RNA, 24 nt, Human
cuggccccaggcagugaggggccu

SEQ ID NO: 1313077 - RNA, 24 nt, Human
gagaggcacgggcagaaaccaggg

SEQ ID NO: 1313078 - RNA, 23 nt, Human
uauacccauccucucaucugaaa

SEQ ID NO: 1313079 - RNA, 19 nt, Human
ucagagccagcucccucug

SEQ ID NO: 1313080 - RNA, 19 nt, Human
ucccucugcuugcagggag

SEQ ID NO: 1313081 - RNA, 20 nt, Human
ucccucugcuugcagggagg

SEQ ID NO: 1313082 - RNA, 22 nt, Human
ugaggggccuagcaccugggcc

SEQ ID NO: 1313083 - RNA, 19 nt, Human
ugcagggaggugugaugga

SEQ ID NO: 1313084 - RNA, 20 nt, Human
ugcagggaggugugauggag

SEQ ID NO: 1313085 - RNA, 18 nt, Human
uggcaggcccugcacuca

SEQ ID NO: 1313086 - RNA, 19 nt, Human
aaaacucccaggcaggcac

SEQ ID NO: 1313087 - RNA, 19 nt, Human
aaaagaugaauacaaaacu

SEQ ID NO: 1313088 - RNA, 22 nt, Human
aaauaccccagagaaaugcauc

SEQ ID NO: 1313089 - RNA, 19 nt, Human
aagagucuaacaggcagag

SEQ ID NO: 1313090 - RNA, 24 nt, Human
aaguaagagucuaacaggcagagc

SEQ ID NO: 1313091 - RNA, 21 nt, Human
acaaaaaagaacccauauuaa

SEQ ID NO: 1313092 - RNA, 23 nt, Human
acaacuauacaaaagaugaauac

SEQ ID NO: 1313093 - RNA, 22 nt, Human
acaaugaaaauagguacccaaa

SEQ ID NO: 1313094 - RNA, 19 nt, Human
acacaaaaaagaacccaua

SEQ ID NO: 1313095 - RNA, 24 nt, Human
agagaaaugcauccagaacuuaaa

SEQ ID NO: 1313096 - RNA, 19 nt, Human
agagucuaacaggcagagc

SEQ ID NO: 1313097 - RNA, 21 nt, Human
agcgagggaaaauagaaaaga

SEQ ID NO: 1313098 - RNA, 18 nt, Human
aggcaggcacaggcaggg

SEQ ID NO: 1313099 - RNA, 20 nt, Human
aggcugggucagcagcaggg

SEQ ID NO: 1313100 - RNA, 29 nt, Human
auacaaaagaugaauacaaaagggacccc

SEQ ID NO: 1313101 - RNA, 23 nt, Human
caaaaaagaacccauauuaaaau

SEQ ID NO: 1313102 - RNA, 19 nt, Human
caccgugccaccuuggucc

SEQ ID NO: 1313103 - RNA, 21 nt, Human
caccgugccaccuuggucccc

SEQ ID NO: 1313104 - RNA, 24 nt, Human
caccgugccaccuugguccccuca

SEQ ID NO: 1313105 - RNA, 20 nt, Human
caccuugguccccucaaccc

SEQ ID NO: 1313106 - RNA, 22 nt, Human
cagcagggcggcggccggggga

SEQ ID NO: 1313107 - RNA, 21 nt, Human
ccagagaaaugcauccagaaa

SEQ ID NO: 1313108 - RNA, 21 nt, Human
cccaaauaccccagagaaaug

SEQ ID NO: 1313109 - RNA, 18 nt, Human
ccccaguaccaccgugcc

SEQ ID NO: 1313110 - RNA, 19 nt, Human
cccccaguaccaccgugcc

SEQ ID NO: 1313111 - RNA, 21 nt, Human
cccccaguaccaccgugccac

SEQ ID NO: 1313112 - RNA, 21 nt, Human
ccccucaacccuggggguagg

SEQ ID NO: 1313113 - RNA, 26 nt, Human
cucgacuuuaaugguucagauaguuu

SEQ ID NO: 1313114 - RNA, 18 nt, Human
gccaucgucccguggacc

SEQ ID NO: 1313115 - RNA, 19 nt, Human
gccgggggaccucgggggc

SEQ ID NO: 1313116 - RNA, 21 nt, Human
ggacaaggcccaccgucuccc

SEQ ID NO: 1313117 - RNA, 22 nt, Human
ggcccaccgucucccacgcucu

SEQ ID NO: 1313118 - RNA, 20 nt, Human
gggucagcagcagggcggcg

SEQ ID NO: 1313119 - RNA, 19 nt, Human
guguggucgggugucccug

SEQ ID NO: 1313120 - RNA, 23 nt, Human
uaaaaauaagccccaaauacccc

SEQ ID NO: 1313121 - RNA, 22 nt, Human
uaaaucacacaaaaaagaaccc

SEQ ID NO: 1313122 - RNA, 19 nt, Human
uaagccccaaauaccccag

SEQ ID NO: 1313123 - RNA, 22 nt, Human
uaagccccaaauaccccagaga

SEQ ID NO: 1313124 - RNA, 21 nt, Human
uaccaccgugccaccuugguc

SEQ ID NO: 1313125 - RNA, 25 nt, Human
uaccccagagaaaugcauccagaag

SEQ ID NO: 1313126 - RNA, 21 nt, Human
uaggagggcacugccccagcg

SEQ ID NO: 1313127 - RNA, 24 nt, Human
uccacaacuauacaaaagaugaau

SEQ ID NO: 1313128 - RNA, 18 nt, Human
ugaaaauagguacccaaa

SEQ ID NO: 1313129 - RNA, 19 nt, Human
ugaaaauagguacccaaag

SEQ ID NO: 1313130 - RNA, 18 nt, Human
uggggguaggagggcacu

SEQ ID NO: 1313131 - RNA, 20 nt, Human
uguggucgggugucccugcc

SEQ ID NO: 1313132 - RNA, 21 nt, Human
uguggucgggugucccugccc

SEQ ID NO: 1313133 - RNA, 25 nt, Human
uguggucgggugucccugccgcacc

SEQ ID NO: 1313134 - RNA, 24 nt, Human
cacucagaaugcuuuauuuuacua

SEQ ID NO: 1313135 - RNA, 22 nt, Human
uaccugcuccuggccagcuuua

SEQ ID NO: 1313136 - RNA, 20 nt, Human
caccaaggccacuacaguca

SEQ ID NO: 1313137 - RNA, 22 nt, Human
caccuuuucucuucucucauca

SEQ ID NO: 1313138 - RNA, 22 nt, Human
cagucacagggcucuuucccag

SEQ ID NO: 1313139 - RNA, 20 nt, Human
ccaccuuuucucuucucuca

SEQ ID NO: 1313140 - RNA, 20 nt, Human
cccaccuuuucucuucucuc

SEQ ID NO: 1313141 - RNA, 24 nt, Human
cucuuucccagauauauaugaacg

SEQ ID NO: 1313142 - RNA, 21 nt, Human
uauaugaacgguuuuccugau

SEQ ID NO: 1313143 - RNA, 20 nt, Human
uuccugauuucaccagauug

SEQ ID NO: 1313144 - RNA, 24 nt, Human
uuuccugauuucaccagauugucc

SEQ ID NO: 1313145 - RNA, 22 nt, Human
aaaaaaaaaaucaguaauagga

SEQ ID NO: 1313146 - RNA, 22 nt, Human
aaaaaacuggucucacagcuua

SEQ ID NO: 1313147 - RNA, 19 nt, Human
aaaaagggacacaacuggg

SEQ ID NO: 1313148 - RNA, 24 nt, Human
aaacauuucaaagcaauggaauuc

SEQ ID NO: 1313149 - RNA, 22 nt, Human
aaaugaggcugcaaacuacccc

SEQ ID NO: 1313150 - RNA, 18 nt, Human
aaaugcacaggacaacac

SEQ ID NO: 1313151 - RNA, 20 nt, Human
aacuaccccugaauggccac

SEQ ID NO: 1313152 - RNA, 18 nt, Human
aagcaauggaauucaaaa

SEQ ID NO: 1313153 - RNA, 26 nt, Human
caaggaaaguuaaaaaaaaaaaucag

SEQ ID NO: 1313154 - RNA, 20 nt, Human
caggcucaagggcagccucc

SEQ ID NO: 1313155 - RNA, 18 nt, Human
cauuguagcugcuucugc

SEQ ID NO: 1313156 - RNA, 30 nt, Human; identical to SEQ ID NO: 1154252

SEQ ID NO: 1313157 - RNA, 20 nt, Human
ccccugacggccauuguagc

SEQ ID NO: 1313158 - RNA, 18 nt, Human
ccuccugcuguaaggaau

SEQ ID NO: 1313159 - RNA, 22 nt, Human
ccugacggccauuguagcugcu

SEQ ID NO: 1313160 - RNA, 18 nt, Human
cuuggcccuggcuauagc

SEQ ID NO: 1313161 - RNA, 27 nt, Human
gccccugacggccauuguagcugcuuc

SEQ ID NO: 1313162 - RNA, 22 nt, Human
ggcuauagcaggacccacaacc

SEQ ID NO: 1313163 - RNA, 24 nt, Human
uaaaaaaaaaaaucaguaauagga

SEQ ID NO: 1313164 - RNA, 28 nt, Human
uacaaaugaggcugcaaacuaccccuga

SEQ ID NO: 1313165 - RNA, 18 nt, Human
uaccauggguacugggua

SEQ ID NO: 1313166 - RNA, 22 nt, Human
uaccccugaauggccacgauuu

SEQ ID NO: 1313167 - RNA, 18 nt, Human
uccuggagcuuggcccug

SEQ ID NO: 1313168 - RNA, 21 nt, Human
ugcaaacuaccccugaauggc

SEQ ID NO: 1313169 - RNA, 23 nt, Human
ugcacaggacaacacaauaaugu

SEQ ID NO: 1313170 - RNA, 19 nt, Human
uguaaggaaucaaagcuua

SEQ ID NO: 1313171 - RNA, 23 nt, Human
uucaaagcaauggaauucaaaaa

SEQ ID NO: 1313172 - RNA, 23 nt, Human
aagcugccaaucucuccuggagc

SEQ ID NO: 1313173 - RNA, 18 nt, Human
aguucugucaucagagga

SEQ ID NO: 1313174 - RNA, 22 nt, Human
cacugcccacagaaaaggccaa

SEQ ID NO: 1313175 - RNA, 22 nt, Human
cagaaaaggccaauccuugaua

SEQ ID NO: 1313176 - RNA, 20 nt, Human
ccgggagcugggggguuguu

SEQ ID NO: 1313177 - RNA, 22 nt, Human
gagcgggugggacuaaggaggg

SEQ ID NO: 1313178 - RNA, 23 nt, Human
gagggccccgggagcuggggggu

SEQ ID NO: 1313179 - RNA, 22 nt, Human
ggagcgggugggacuaaggagg

SEQ ID NO: 1313180 - RNA, 19 nt, Human
ggugggacuaaggagggcc

SEQ ID NO: 1313181 - RNA, 23 nt, Human
uagggccgcgugugagagacaaa

SEQ ID NO: 1313182 - RNA, 18 nt, Human
ucuggcgcaggugcgaga

SEQ ID NO: 1313183 - RNA, 22 nt, Human
ugcccacagaaaaggccaaucc

SEQ ID NO: 1313184 - RNA, 22 nt, Human
uugauaguucauuuucacugaa

SEQ ID NO: 1313185 - RNA, 18 nt, Human
aaaugcaccuugguggca

SEQ ID NO: 1313186 - RNA, 19 nt, Human
aagaggggggcuggugaac

SEQ ID NO: 1313187 - RNA, 23 nt, Human
aagaggggggcuggugaacaaaa

SEQ ID NO: 1313188 - RNA, 19 nt, Human
aagccucaggcccccucug

SEQ ID NO: 1313189 - RNA, 18 nt, Human
aagggccccagcuucuuc

SEQ ID NO: 1313190 - RNA, 18 nt, Human
acauuucauccuggcucu

SEQ ID NO: 1313191 - RNA, 18 nt, Human
agagagcagccuuuuugg

SEQ ID NO: 1313192 - RNA, 23 nt, Human
agcugaagccugcagcuccacgg

SEQ ID NO: 1313193 - RNA, 22 nt, Human
aggcaaaacuggugaaggccug

SEQ ID NO: 1313194 - RNA, 19 nt, Human
aggcagcugaagccugcag

SEQ ID NO: 1313195 - RNA, 21 nt, Human
aggcggcccagauagaaggcg

SEQ ID NO: 1313196 - RNA, 20 nt, Human
agggaauagguggguggagg

SEQ ID NO: 1313197 - RNA, 22 nt, Human
agggagccauguggucaggccu

SEQ ID NO: 1313198 - RNA, 25 nt, Human
aggggggcuggugaacaaaagaagg

SEQ ID NO: 1313199 - RNA, 20 nt, Human
aggugggcagacagguaagc

SEQ ID NO: 1313200 - RNA, 18 nt, Human
agguguggaagggaaaau

SEQ ID NO: 1313201 - RNA, 21 nt, Human
augagaacugccccucacuga

SEQ ID NO: 1313202 - RNA, 18 nt, Human
caaaagcaggcgaagggc

SEQ ID NO: 1313203 - RNA, 21 nt, Human
cacagccuggcucagccaccc

SEQ ID NO: 1313204 - RNA, 27 nt, Human
cacgcaguugccaaacccgugguuguc

SEQ ID NO: 1313205 - RNA, 21 nt, Human
cagccaugagaacugccccuc

SEQ ID NO: 1313206 - RNA, 21 nt, Human
caggcgcuccgugcacagccu

SEQ ID NO: 1313207 - RNA, 19 nt, Human
cagggcaggcgagggagcc

SEQ ID NO: 1313208 - RNA, 21 nt, Human
caggugggcagacagguaagc

SEQ ID NO: 1313209 - RNA, 23 nt, Human
ccaaaggcaaaacuggugaaggc

SEQ ID NO: 1313210 - RNA, 19 nt, Human
ccacuggcgguguccucuc

SEQ ID NO: 1313211 - RNA, 18 nt, Human
ccagccaugagaacugcc

SEQ ID NO: 1313212 - RNA, 18 nt, Human
cccacagggucugggcca

SEQ ID NO: 1313213 - RNA, 19 nt, Human
cccagaacuuccagagagu

SEQ ID NO: 1313214 - RNA, 22 nt, Human
ccccucuggucucuccaggguc

SEQ ID NO: 1313215 - RNA, 25 nt, Human
ccucaggacccugggccccaccggg

SEQ ID NO: 1313216 - RNA, 19 nt, Human
ccucaggcccccucugguc

SEQ ID NO: 1313217 - RNA, 23 nt, Human
ccucugacauuucauccuggcuc

SEQ ID NO: 1313218 - RNA, 20 nt, Human
ccuggaccaugaaggugacc

SEQ ID NO: 1313219 - RNA, 21 nt, Human
ccuggaucaucugaauuuccc

SEQ ID NO: 1313220 - RNA, 23 nt, Human
ccuggcccuuguuccagacaggu

SEQ ID NO: 1313221 - RNA, 18 nt, Human
ccuggcucagccacccgg

SEQ ID NO: 1313222 - RNA, 23 nt, Human
ccuucgccaucuaauugaagccc

SEQ ID NO: 1313223 - RNA, 19 nt, Human
cggcccagauagaaggcga

SEQ ID NO: 1313224 - RNA, 23 nt, Human
cguugguggucuccaggcggccc

SEQ ID NO: 1313225 - RNA, 18 nt, Human
cucugacauuucauccug

SEQ ID NO: 1313226 - RNA, 21 nt, Human
cuggaccaugaaggugaccag

SEQ ID NO: 1313227 - RNA, 22 nt, Human
cugggcugguggacaaaagagg

SEQ ID NO: 1313228 - RNA, 21 nt, Human
cuggugaacaaaagaaggagg

SEQ ID NO: 1313229 - RNA, 21 nt, Human
cugguggacaaaagagggggg

SEQ ID NO: 1313230 - RNA, 22 nt, Human
gacucccagcuguaugaucuua

SEQ ID NO: 1313231 - RNA, 20 nt, Human
gagcugggugagggagcggg

SEQ ID NO: 1313232 - RNA, 18 nt, Human
gaggagcugggugaggga

SEQ ID NO: 1313233 - RNA, 24 nt, Human
gagugaguaaucaguguguccagg

SEQ ID NO: 1313234 - RNA, 22 nt, Human
gaucaucugaauuucccuuuga

SEQ ID NO: 1313235 - RNA, 22 nt, Human
gcacagccuggcucagccaccc

SEQ ID NO: 1313236 - RNA, 21 nt, Human
gccuggugcuccccuguggcc

SEQ ID NO: 1313237 - RNA, 18 nt, Human
gcgcuggucguuccaguu

SEQ ID NO: 1313238 - RNA, 19 nt, Human
gcugguggacaaaagaggg

SEQ ID NO: 1313239 - RNA, 18 nt, Human
gcuuguuucucaggcugg

SEQ ID NO: 1313240 - RNA, 22 nt, Human
ggacaaaagaggggggcuggug

SEQ ID NO: 1313241 - RNA, 19 nt, Human
ggccagcaccccgccuuuc

SEQ ID NO: 1313242 - RNA, 25 nt, Human
ggccgcugcagugaagccucaggcc

SEQ ID NO: 1313243 - RNA, 21 nt, Human
gggcagacagguaagcagagc

SEQ ID NO: 1313244 - RNA, 22 nt, Human
gggcugguggacaaaagagggg

SEQ ID NO: 1313245 - RNA, 18 nt, Human
gguguccucuccuucgcc

SEQ ID NO: 1313246 - RNA, 21 nt, Human
guuccuggucucgaagucacu

SEQ ID NO: 1313247 - RNA, 23 nt, Human
guugguggucuccaggcggccca

SEQ ID NO: 1313248 - RNA, 22 nt, Human
uaacacucacucccuggcccuc

SEQ ID NO: 1313249 - RNA, 24 nt, Human
uacccugccugccugggccccagc

SEQ ID NO: 1313250 - RNA, 23 nt, Human
uaggugagcccgauccagaaguu

SEQ ID NO: 1313251 - RNA, 21 nt, Human
ucacuggccucccugccucuc

SEQ ID NO: 1313252 - RNA, 22 nt, Human
ucacuggccucccugccucucu

SEQ ID NO: 1313253 - RNA, 19 nt, Human
uccacgcaguugccaaacc

SEQ ID NO: 1313254 - RNA, 23 nt, Human
uccacgcaguugccaaacccgug

SEQ ID NO: 1313255 - RNA, 24 nt, Human
ucccagcuguaugaucuuaugcaa

SEQ ID NO: 1313256 - RNA, 24 nt, Human
uccgugcacagccuggcucagcca

SEQ ID NO: 1313257 - RNA, 21 nt, Human
uccucugacauuucauccugg

SEQ ID NO: 1313258 - RNA, 19 nt, Human
ucggguuuugcagcgcugg

SEQ ID NO: 1313259 - RNA, 20 nt, Human
ucuuggggagacccagaacu

SEQ ID NO: 1313260 - RNA, 22 nt, Human
ugaagacaccaugaagcagucu

SEQ ID NO: 1313261 - RNA, 20 nt, Human
ugaaggcagcugaagccugg

SEQ ID NO: 1313262 - RNA, 20 nt, Human
ugaaggugaccaggaaaggg

SEQ ID NO: 1313263 - RNA, 20 nt, Human
ugaggagcugggugagggaa

SEQ ID NO: 1313264 - RNA, 23 nt, Human
ugauaaccccuugugggugaugu

SEQ ID NO: 1313265 - RNA, 21 nt, Human
ugcaaguuacucaaucucucu

SEQ ID NO: 1313266 - RNA, 23 nt, Human
uggaagagagcagccuuuuugga

SEQ ID NO: 1313267 - RNA, 19 nt, Human
uggacaaaagaggggggcu

SEQ ID NO: 1313268 - RNA, 20 nt, Human
uggcccagcggaaggagucc

SEQ ID NO: 1313269 - RNA, 22 nt, Human
ugggugaugucugaggagcugg

SEQ ID NO: 1313270 - RNA, 21 nt, Human
uggguggaggccgcugcagug

SEQ ID NO: 1313271 - RNA, 20 nt, Human
uggucaggccucaggacccu

SEQ ID NO: 1313272 - RNA, 19 nt, Human
ugguggacaaaagaggggg

SEQ ID NO: 1313273 - RNA, 30 nt, Human
uguaauaggugucugccucugaagacaccc

SEQ ID NO: 1313274 - RNA, 18 nt, Human
ugucugaggagcugggug

SEQ ID NO: 1313275 - RNA, 20 nt, Human
ugucugaggagcugggugag

SEQ ID NO: 1313276 - RNA, 19 nt, Human
uguggucaggccucaggac

SEQ ID NO: 1313277 - RNA, 19 nt, Human
uguggucaggccucaggac

SEQ ID NO: 1313278 - RNA, 18 nt, Human
uucauaauuuaauacccc

SEQ ID NO: 1313279 - RNA, 22 nt, Human
uuccuggucucgaagucacugu

SEQ ID NO: 1313280 - RNA, 20 nt, Human
uuucggguuuugcagcgcug

SEQ ID NO: 1313281 - RNA, 23 nt, Human
aaauggcccagaugcacaaaagc

SEQ ID NO: 1313282 - RNA, 24 nt, Human
auaacaacaguagauuaaugacca

SEQ ID NO: 1313283 - RNA, 22 nt, Human
caaaagcucuagcacucuuguu

SEQ ID NO: 1313284 - RNA, 21 nt, Human
caggucacuuccaccuugcag

SEQ ID NO: 1313285 - RNA, 23 nt, Human
ccuugcagguucuuagauucuuc

SEQ ID NO: 1313286 - RNA, 20 nt, Human
gcccagaugcacaaaagcuc

SEQ ID NO: 1313287 - RNA, 18 nt, Human
gcuacaucugcuuuugac

SEQ ID NO: 1313288 - RNA, 22 nt, Human
uaguaguccucccacugagcuu

SEQ ID NO: 1313289 - RNA, 23 nt, Human
uaguaguccucccacugagcuuu

SEQ ID NO: 1313290 - RNA, 21 nt, Human
ugcacaaaagcucuagcacuc

SEQ ID NO: 1313291 - RNA, 20 nt, Human
uugcagguucuuagauucuu

SEQ ID NO: 1313292 - RNA, 23 nt, Human
aaagagauggaccuccuggacca

SEQ ID NO: 1313293 - RNA, 25 nt, Human
aaagagauggaccuccuggaccaag

SEQ ID NO: 1313294 - RNA, 21 nt, Human
aggagagcaugucccuccucc

SEQ ID NO: 1313295 - RNA, 29 nt, Human
caaagagauggaccuccuggaccaacugg

SEQ ID NO: 1313296 - RNA, 23 nt, Human
caaggacaaagagcacaaucugg

SEQ ID NO: 1313297 - RNA, 21 nt, Human
caccguagugacuccccgaca

SEQ ID NO: 1313298 - RNA, 22 nt, Human
cccgacagcucugucccugccc

SEQ ID NO: 1313299 - RNA, 23 nt, Human
cccugcccggcucagacucuccu

SEQ ID NO: 1313300 - RNA, 21 nt, Human
ccuggaccaaggacaaagagc

SEQ ID NO: 1313301 - RNA, 22 nt, Human
cuccuaugcagcuaggaguaag

SEQ ID NO: 1313302 - RNA, 19 nt, Human
cuccuggaccaaggacaaa

SEQ ID NO: 1313303 - RNA, 21 nt, Human
gaccaaggacaaagagcacaa

SEQ ID NO: 1313304 - RNA, 19 nt, Human
uagugacuccccgacagcu

SEQ ID NO: 1313305 - RNA, 23 nt, Human
uccccgacagcucugucccuggc

SEQ ID NO: 1313306 - RNA, 20 nt, Human
ucuccuaugcagcuaggagu

SEQ ID NO: 1313307 - RNA, 21 nt, Human
uuagaggaaacugaugcucaa

SEQ ID NO: 1313308 - RNA, 22 nt, Human
acuggccucccugccuggcccc

SEQ ID NO: 1313309 - RNA, 25 nt, Human
agagcaggcgccacuucuggaaccu

SEQ ID NO: 1313310 - RNA, 19 nt, Human
agagugaccucaagucacu

SEQ ID NO: 1313311 - RNA, 22 nt, Human
aggaagagugaccucaagucac

SEQ ID NO: 1313312 - RNA, 23 nt, Human
augcacccuccuccagcauccaa

SEQ ID NO: 1313313 - RNA, 18 nt, Human
caacucauggguccaccu

SEQ ID NO: 1313314 - RNA, 24 nt, Human
cacaccaccagcuuucccggggcu

SEQ ID NO: 1313315 - RNA, 24 nt, Human
cacucgugugaccacgcgggguug

SEQ ID NO: 1313316 - RNA, 20 nt, Human
cagcucccgggugcugcccu

SEQ ID NO: 1313317 - RNA, 24 nt, Human
ccauggcccucugcaccgccuccu

SEQ ID NO: 1313318 - RNA, 19 nt, Human
cccgggugcugcccucagg

SEQ ID NO: 1313319 - RNA, 18 nt, Human
cccuggggcugauguggg

SEQ ID NO: 1313320 - RNA, 21 nt, Human
ccugccuggccccuuccaugc

SEQ ID NO: 1313321 - RNA, 21 nt, Human
ccugugaaaacccacgucaga

SEQ ID NO: 1313322 - RNA, 23 nt, Human
ccugugaaaacccacgucagacc

SEQ ID NO: 1313323 - RNA, 22 nt, Human
ccuuccaugcacccuccuccag

SEQ ID NO: 1313324 - RNA, 18 nt, Human
cgucagaccauggcccuc

SEQ ID NO: 1313325 - RNA, 19 nt, Human
cugcaccgccuccugcaag

SEQ ID NO: 1313326 - RNA, 24 nt, Human
cugcaccgccuccugcaaggcaug

SEQ ID NO: 1313327 - RNA, 22 nt, Human
cuucucugaaggaccccaacuc

SEQ ID NO: 1313328 - RNA, 20 nt, Human
cuucuggaaccuuccccacc

SEQ ID NO: 1313329 - RNA, 21 nt, Human
cuucuggaaccuuccccacca

SEQ ID NO: 1313330 - RNA, 22 nt, Human
gcacccuccuccagcauccaag

SEQ ID NO: 1313331 - RNA, 18 nt, Human
gcagcugcugcucacugg

SEQ ID NO: 1313332 - RNA, 23 nt, Human
gcaugcaguggaggaagagugac

SEQ ID NO: 1313333 - RNA, 22 nt, Human
gcuugcacuggagccacaccac

SEQ ID NO: 1313334 - RNA, 19 nt, Human
ggagcagggauguagguuu

SEQ ID NO: 1313335 - RNA, 20 nt, Human
uccaagucccaucacacuuu

SEQ ID NO: 1313336 - RNA, 20 nt, Human
ucucugaaggaccccaacuc

SEQ ID NO: 1313337 - RNA, 25 nt, Human
ugaaggaccccaacucaugggucca

SEQ ID NO: 1313338 - RNA, 19 nt, Human
ugaccacgcgggguugccc

SEQ ID NO: 1313339 - RNA, 20 nt, Human
ugcaguggaggaagagugac

SEQ ID NO: 1313340 - RNA, 22 nt, Human
uggccccuuccaugcacccucc

SEQ ID NO: 1313341 - RNA, 20 nt, Human
uggggcugauguggggggca

SEQ ID NO: 1313342 - RNA, 20 nt, Human
ugugaaaacccacgucagac

SEQ ID NO: 1313343 - RNA, 18 nt, Human
uuccaugcacccuccucc

SEQ ID NO: 1313344 - RNA, 20 nt, Human
cagcgcggggacaccggcag

SEQ ID NO: 1313345 - RNA, 20 nt, Human
ccccgggaccagcagcgcgg

SEQ ID NO: 1313346 - RNA, 21 nt, Human
aagccaugauguaaugaacaa

SEQ ID NO: 1313347 - RNA, 20 nt, Human
aagggcccaaaagccaugau

SEQ ID NO: 1313348 - RNA, 19 nt, Human
acaaugugggcaccagaac

SEQ ID NO: 1313349 - RNA, 22 nt, Human
caucacaauuuuucugaaccaa

SEQ ID NO: 1313350 - RNA, 18 nt, Human
cccaaagggcccaaaagc

SEQ ID NO: 1313351 - RNA, 21 nt, Human
cuccagagggcuuccuuuagg

SEQ ID NO: 1313352 - RNA, 22 nt, Human
gaggcucagcuccagagggcuu

SEQ ID NO: 1313353 - RNA, 22 nt, Human
gaggucccaaagggcccaaaag

SEQ ID NO: 1313354 - RNA, 21 nt, Human
ucccaaagggcccaaaagcca

SEQ ID NO: 1313355 - RNA, 23 nt, Human
cgaggccaggugucuugcacuca

SEQ ID NO: 1313356 - RNA, 20 nt, Human
cgcuggagacgaggccaggu

SEQ ID NO: 1313357 - RNA, 18 nt, Human
cuggggggggacaggggc

SEQ ID NO: 1313358 - RNA, 20 nt, Human
gcgugcucuggggggggaca

SEQ ID NO: 1313359 - RNA, 23 nt, Human
ggacaggggcugggucagggcag

SEQ ID NO: 1313360 - RNA, 22 nt, Human
gggcaggcgucugaccaugaag

SEQ ID NO: 1313361 - RNA, 22 nt, Human
ugcucuggggggggacaggggc

SEQ ID NO: 1313362 - RNA, 18 nt, Human
uggagacgaggccaggug

SEQ ID NO: 1313363 - RNA, 19 nt, Human
uggggggggacaggggcug

SEQ ID NO: 1313364 - RNA, 19 nt, Human
uggggggggacaggggcug

SEQ ID NO: 1313365 - RNA, 21 nt, Human
uggggggggacaggggcuggg

SEQ ID NO: 1313366 - RNA, 20 nt, Human
aagacccugacccugcuccg

SEQ ID NO: 1313367 - RNA, 23 nt, Human
aagcccagcaggcccaggaguga

SEQ ID NO: 1313368 - RNA, 23 nt, Human
acaagcagcaccgccagcuuagc

SEQ ID NO: 1313369 - RNA, 29 nt, Human
accccaaagggcggcugccacacagaggg

SEQ ID NO: 1313370 - RNA, 19 nt, Human
agagcuggggggaucugga

SEQ ID NO: 1313371 - RNA, 20 nt, Human
agcaggugcaccccugcucc

SEQ ID NO: 1313372 - RNA, 21 nt, Human
agccacaagcccagcaggccc

SEQ ID NO: 1313373 - RNA, 19 nt, Human
aggcccaggagugaggcga

SEQ ID NO: 1313374 - RNA, 19 nt, Human
agugguagauggugaagau

SEQ ID NO: 1313375 - RNA, 18 nt, Human
caccccugcuccagccac

SEQ ID NO: 1313376 - RNA, 23 nt, Human
caccccugcuccagccacgaggg

SEQ ID NO: 1313377 - RNA, 19 nt, Human
cagaaaaagaggaugaagg

SEQ ID NO: 1313378 - RNA, 23 nt, Human
ccacacagaggauccagcugugu

SEQ ID NO: 1313379 - RNA, 21 nt, Human
ccaccagcgucacaagcagca

SEQ ID NO: 1313380 - RNA, 21 nt, Human
ccagccccaccgagcacacgc

SEQ ID NO: 1313381 - RNA, 18 nt, Human
ccccaaagggcggcugcc

SEQ ID NO: 1313382 - RNA, 23 nt, Human
ccgccgcagcuucugcugcaucc

SEQ ID NO: 1313383 - RNA, 23 nt, Human
ccuugugcuggggccgcgggaug

SEQ ID NO: 1313384 - RNA, 21 nt, Human
cgcuccagccccaccgagcac

SEQ ID NO: 1313385 - RNA, 18 nt, Human
cggcgcuggggcgccugc

SEQ ID NO: 1313386 - RNA, 19 nt, Human
cggcgcuggggcgccugcu

SEQ ID NO: 1313387 - RNA, 26 nt, Human
cggcggacccuggggauaggaggugc

SEQ ID NO: 1313388 - RNA, 22 nt, Human
cucggcggacccuggggauagg

SEQ ID NO: 1313389 - RNA, 24 nt, Human
cugcugcauccgcagguaggagac

SEQ ID NO: 1313390 - RNA, 18 nt, Human
cuguaaaaaaucguggcu

SEQ ID NO: 1313391 - RNA, 18 nt, Human
gaagauggccacagccug

SEQ ID NO: 1313392 - RNA, 25 nt, Human
gaaggugagcagcaggugcaccccc

SEQ ID NO: 1313393 - RNA, 20 nt, Human
gacacaggggcccagaaaaa

SEQ ID NO: 1313394 - RNA, 21 nt, Human
gagagcuggggggaucuggag

SEQ ID NO: 1313395 - RNA, 22 nt, Human
gagcggggccgggucgcaagaa

SEQ ID NO: 1313396 - RNA, 23 nt, Human
gagcggggccgggucgcaagaag

SEQ ID NO: 1313397 - RNA, 18 nt, Human
gcucucggcggacccugg

SEQ ID NO: 1313398 - RNA, 19 nt, Human
ggagaccgcggcggccacc

SEQ ID NO: 1313399 - RNA, 19 nt, Human
ggggccgcgggaugcaggg

SEQ ID NO: 1313400 - RNA, 23 nt, Human
gguccgaggccgagagcuggggg

SEQ ID NO: 1313401 - RNA, 25 nt, Human
gguccgaggccgagagcugggggga

SEQ ID NO: 1313402 - RNA, 21 nt, Human
ggugaagauggccacagccug

SEQ ID NO: 1313403 - RNA, 18 nt, Human
guccaguuuuguucaggg

SEQ ID NO: 1313404 - RNA, 20 nt, Human
gugaggcgacugaggcgucc

SEQ ID NO: 1313405 - RNA, 22 nt, Human
gugcaccccugcuccagccacg

SEQ ID NO: 1313406 - RNA, 18 nt, Human
guggcucucggcggaccc

SEQ ID NO: 1313407 - RNA, 21 nt, Human
uaagccagccgcuccagcccc

SEQ ID NO: 1313408 - RNA, 22 nt, Human
uaggagaccgcggcggccacca

SEQ ID NO: 1313409 - RNA, 24 nt, Human
ucagggugcugcccacaccccaaa

SEQ ID NO: 1313410 - RNA, 18 nt, Human
uccagccccaccgagcac

SEQ ID NO: 1313411 - RNA, 22 nt, Human
uccgaggccgagagcugggggg

SEQ ID NO: 1313412 - RNA, 21 nt, Human
uccgcagguaggagaccgcgg

SEQ ID NO: 1313413 - RNA, 22 nt, Human
ucucguccgaguuguccuccuc

SEQ ID NO: 1313414 - RNA, 24 nt, Human
ucucguccgaguuguccuccucca

SEQ ID NO: 1313415 - RNA, 21 nt, Human
ucuucguacaagauucccagg

SEQ ID NO: 1313416 - RNA, 19 nt, Human
ugaagauggccacagccug

SEQ ID NO: 1313417 - RNA, 18 nt, Human
ugagcagcaggugcaccc

SEQ ID NO: 1313418 - RNA, 24 nt, Human
ugaguccaguuuuguucagggugc

SEQ ID NO: 1313419 - RNA, 22 nt, Human
ugcugcccacaccccaaagggc

SEQ ID NO: 1313420 - RNA, 22 nt, Human
uggcgcggggccacgccccgcc

SEQ ID NO: 1313421 - RNA, 23 nt, Human
aaacauuuagaacuaguggaaua

SEQ ID NO: 1313422 - RNA, 20 nt, Human
agacucaagauauucaacag

SEQ ID NO: 1313423 - RNA, 19 nt, Human
agugcccagauugcucuuc

SEQ ID NO: 1313424 - RNA, 20 nt, Human
auaaaucucugcaacaggaa

SEQ ID NO: 1313425 - RNA, 18 nt, Human
cacugagagaggcacagg

SEQ ID NO: 1313426 - RNA, 23 nt, Human
cagaaccuccagauuuaugccac

SEQ ID NO: 1313427 - RNA, 23 nt, Human
ccagaucagccugaauacuucac

SEQ ID NO: 1313428 - RNA, 19 nt, Human
ccagugguaacagugccca

SEQ ID NO: 1313429 - RNA, 24 nt, Human
cugcaacaggaauuucuaaagccu

SEQ ID NO: 1313430 - RNA, 21 nt, Human
uaucccuuuugauucucaggg

SEQ ID NO: 1313431 - RNA, 19 nt, Human
ucacugagagaggcacagg

SEQ ID NO: 1313432 - RNA, 23 nt, Human
ucacuggaaacauacaauguugu

SEQ ID NO: 1313433 - RNA, 19 nt, Human
ucagauuauuucugcuuca

SEQ ID NO: 1313434 - RNA, 23 nt, Human
ucauuuguaugccucucaagccu

SEQ ID NO: 1313435 - RNA, 23 nt, Human
ucugcaacaggaauuucuaaagc

SEQ ID NO: 1313436 - RNA, 23 nt, Human
uguaugccucucaagccugucuu

SEQ ID NO: 1313437 - RNA, 21 nt, Human
uucaaaaugcagaaggaaggg

SEQ ID NO: 1313438 - RNA, 22 nt, Human
uucauuauuucaucauucucca

SEQ ID NO: 1313439 - RNA, 23 nt, Human
uuugcagaaccuccagauuuaug

SEQ ID NO: 1313440 - RNA, 19 nt, Human
acaaccgcacaaggccaaa

SEQ ID NO: 1313441 - RNA, 26 nt, Human
agaaguucugcuguuuuugauguccc

SEQ ID NO: 1313442 - RNA, 21 nt, Human
agagaacgagcuggacguugg

SEQ ID NO: 1313443 - RNA, 19 nt, Human
cucuguggugagaaggccc

SEQ ID NO: 1313444 - RNA, 20 nt, Human
ugagaaggcccagagaacgg

SEQ ID NO: 1313445 - RNA, 18 nt, Human
ugagagaugacccagagg

SEQ ID NO: 1313446 - RNA, 22 nt, Human
aaguauaugauggcauugaagg

SEQ ID NO: 1313447 - RNA, 21 nt, Human
cauaggaugaagcuugacuga

SEQ ID NO: 1313448 - RNA, 19 nt, Human
cucuccuguaugaauucua

SEQ ID NO: 1313449 - RNA, 23 nt, Human
gaacaugaaguaaaggcuuugcc

SEQ ID NO: 1313450 - RNA, 24 nt, Human
gaaguauaugauggcauugaaggg

SEQ ID NO: 1313451 - RNA, 18 nt, Human
gaccacagagugaagacc

SEQ ID NO: 1313452 - RNA, 22 nt, Human
uccaguaugaguucacugagga

SEQ ID NO: 1313453 - RNA, 18 nt, Human
ugaaguaaaggcuuugcc

SEQ ID NO: 1313454 - RNA, 20 nt, Human
ugcauggaaugaccacagag

SEQ ID NO: 1313455 - RNA, 18 nt, Human
ugucacagucaugauauu

SEQ ID NO: 1313456 - RNA, 22 nt, Human
ugucacauucuucacauuugua

SEQ ID NO: 1313457 - RNA, 21 nt, Human
ugugagguuucucuccuguau

SEQ ID NO: 1313458 - RNA, 19 nt, Human
uuuguaagguuucucucca

SEQ ID NO: 1313459 - RNA, 19 nt, Human
uuuguaagguuucucucca

SEQ ID NO: 1313460 - RNA, 19 nt, Human
aaaaaccuugccacauuca

SEQ ID NO: 1313461 - RNA, 19 nt, Human
aaaaaccuugccacauuca

SEQ ID NO: 1313462 - RNA, 21 nt, Human
aaacaaaaaacagacugggaa

SEQ ID NO: 1313463 - RNA, 23 nt, Human
aaacagacugggaaaggugcuca

SEQ ID NO: 1313464 - RNA, 24 nt, Human
aaagugcugggauuacagguguga

SEQ ID NO: 1313465 - RNA, 21 nt, Human
aaccaagcagggaaaauagaa

SEQ ID NO: 1313466 - RNA, 30 nt, Human; identical to SEQ ID NO: 596555

SEQ ID NO: 1313467 - RNA, 24 nt, Human
aagugaucuaccugucuuggccuc

SEQ ID NO: 1313468 - RNA, 18 nt, Human
aagugcugggauuacagg

SEQ ID NO: 1313469 - RNA, 19 nt, Human
aagugcugggauuacaggu

SEQ ID NO: 1313470 - RNA, 26 nt, Human
aagugcugggauuacaggugugagcc

SEQ ID NO: 1313471 - RNA, 23 nt, Human
aauuuugaacaaaggucuugcca

SEQ ID NO: 1313472 - RNA, 23 nt, Human
acaauacaauaucagcaccaaaa

SEQ ID NO: 1313473 - RNA, 21 nt, Human
acauucauuacacuuguaaca

SEQ ID NO: 1313474 - RNA, 23 nt, Human
accugucuuggccucccaaagug

SEQ ID NO: 1313475 - RNA, 18 nt, Human
acugaggacuuugugaca

SEQ ID NO: 1313476 - RNA, 19 nt, Human
agaaauauggguuuuagga

SEQ ID NO: 1313477 - RNA, 22 nt, Human
agaaggaaauuuaccucaccaa

SEQ ID NO: 1313478 - RNA, 22 nt, Human
agcaaugaacuagcaaaagaaa

SEQ ID NO: 1313479 - RNA, 18 nt, Human
agccaccgcaccuggccu

SEQ ID NO: 1313480 - RNA, 20 nt, Human
aguaaaguuucccuaugaca

SEQ ID NO: 1313481 - RNA, 19 nt, Human
agugccauuuacuucuggc

SEQ ID NO: 1313482 - RNA, 20 nt, Human
auauaccacuugaacagaau

SEQ ID NO: 1313483 - RNA, 18 nt, Human
auaugacuuuuguaagau

SEQ ID NO: 1313484 - RNA, 24 nt, Human
caaagugcugggauuacaggugug

SEQ ID NO: 1313485 - RNA, 26 nt, Human
caaccaaaauacuacugugacuaaua

SEQ ID NO: 1313486 - RNA, 25 nt, Human
caacucaaacugaacucaaugcuga

SEQ ID NO: 1313487 - RNA, 22 nt, Human
caagugaucuaccugucuuggc

SEQ ID NO: 1313488 - RNA, 22 nt, Human
caauagaaagaccauugaugaa

SEQ ID NO: 1313489 - RNA, 18 nt, Human
caaugguuguagcauuac

SEQ ID NO: 1313490 - RNA, 24 nt, Human
cacauucauuacacuuguaacauu

SEQ ID NO: 1313491 - RNA, 23 nt, Human
caccaaaaauucguugaauuuuc

SEQ ID NO: 1313492 - RNA, 18 nt, Human
cacccgaaugccuuguca

SEQ ID NO: 1313493 - RNA, 18 nt, Human
caccuggccuaauccucu

SEQ ID NO: 1313494 - RNA, 24 nt, Human
cagacuaaagaucuugccacacau

SEQ ID NO: 1313495 - RNA, 21 nt, Human
cagagcaaugaacuagcaaaa

SEQ ID NO: 1313496 - RNA, 24 nt, Human
cagugugaauucuaguauguugug

SEQ ID NO: 1313497 - RNA, 25 nt, Human
caugaaccugaaauaaaggcuuuga

SEQ ID NO: 1313498 - RNA, 21 nt, Human
ccaaagugcugggauuacagg

SEQ ID NO: 1313499 - RNA, 21 nt, Human
ccaaagugcugggauuacagg

SEQ ID NO: 1313500 - RNA, 24 nt, Human
ccaaagugcugggauuacaggugu

SEQ ID NO: 1313501 - RNA, 24 nt, Human
ccacacauaugacuuuuguaagau

SEQ ID NO: 1313502 - RNA, 25 nt, Human
ccgcaccuggccuaauccucuuaac

SEQ ID NO: 1313503 - RNA, 24 nt, Human
ccucuuaacauaaacacuuuaauc

SEQ ID NO: 1313504 - RNA, 21 nt, Human
ccugaucucaagugaucuacc

SEQ ID NO: 1313505 - RNA, 23 nt, Human
ccugaucucaagugaucuaccug

SEQ ID NO: 1313506 - RNA, 24 nt, Human
cucaaaaucagaaaaaguaaaauu

SEQ ID NO: 1313507 - RNA, 23 nt, Human
cucaagugaucuaccugucuugg

SEQ ID NO: 1313508 - RNA, 20 nt, Human
cucuccagugugaauucuag

SEQ ID NO: 1313509 - RNA, 18 nt, Human
cugaccacugaaggcucu

SEQ ID NO: 1313510 - RNA, 22 nt, Human
cugggaaaggugcucaccucug

SEQ ID NO: 1313511 - RNA, 23 nt, Human
cugggaaaggugcucaccucugu

SEQ ID NO: 1313512 - RNA, 23 nt, Human
cugucuuggccucccaaagugcu

SEQ ID NO: 1313513 - RNA, 20 nt, Human
cuugacugaagaccuugcca

SEQ ID NO: 1313514 - RNA, 19 nt, Human
cuugcacgguuucucucca

SEQ ID NO: 1313515 - RNA, 19 nt, Human
cuuguaacauuucucucca

SEQ ID NO: 1313516 - RNA, 19 nt, Human
cuuguaagguuucucucca

SEQ ID NO: 1313517 - RNA, 19 nt, Human
gaaaauagaauccuuuucc

SEQ ID NO: 1313518 - RNA, 22 nt, Human
gaccucagacuaaagaucuugc

SEQ ID NO: 1313519 - RNA, 20 nt, Human
gagaaggaaauuuaccucac

SEQ ID NO: 1313520 - RNA, 18 nt, Human
gauuacaggugugagcca

SEQ ID NO: 1313521 - RNA, 22 nt, Human
gauuacaggugugagccaccgc

SEQ ID NO: 1313522 - RNA, 23 nt, Human
gauuacaggugugagccaccgca

SEQ ID NO: 1313523 - RNA, 21 nt, Human
gcaaaagaaaugaaaugccuc

SEQ ID NO: 1313524 - RNA, 20 nt, Human
gcaaugaacuagcaaaagaa

SEQ ID NO: 1313525 - RNA, 22 nt, Human
gucuuggccucccaaagugcug

SEQ ID NO: 1313526 - RNA, 21 nt, Human
uaaacaaaauagauggagaag

SEQ ID NO: 1313527 - RNA, 18 nt, Human
uaaaugauuacauaaccc

SEQ ID NO: 1313528 - RNA, 18 nt, Human
uacacuuguaacauuucu

SEQ ID NO: 1313529 - RNA, 22 nt, Human
uacaggugugagccaccgcacc

SEQ ID NO: 1313530 - RNA, 23 nt, Human
uacaggugugagccaccgcaccu

SEQ ID NO: 1313531 - RNA, 23 nt, Human
uaccucaaaaaugaauuuccuga

SEQ ID NO: 1313532 - RNA, 23 nt, Human
uaccugucuuggccucccaaagu

SEQ ID NO: 1313533 - RNA, 21 nt, Human
uagccagagcaaugaacuagc

SEQ ID NO: 1313534 - RNA, 23 nt, Human
uagccagagcaaugaacuagcaa

SEQ ID NO: 1313535 - RNA, 18 nt, Human
ucaacacaauacccauaa

SEQ ID NO: 1313536 - RNA, 25 nt, Human
ucaauuaaaaaccuugccacauuca

SEQ ID NO: 1313537 - RNA, 22 nt, Human
ucagcaucugaucaucauagaa

SEQ ID NO: 1313538 - RNA, 23 nt, Human
ucccaaagugcugggauuacagg

SEQ ID NO: 1313539 - RNA, 18 nt, Human
ucccauacuuauuagaaa

SEQ ID NO: 1313540 - RNA, 21 nt, Human
ucccuaugacauggauugcuu

SEQ ID NO: 1313541 - RNA, 21 nt, Human
ucuaugguuucucuccaguau

SEQ ID NO: 1313542 - RNA, 20 nt, Human
ucuuggccucccaaagugcu

SEQ ID NO: 1313543 - RNA, 19 nt, Human
ugaagaaacaaaaaacaga

SEQ ID NO: 1313544 - RNA, 21 nt, Human
ugaaugaccuuaugcauuaca

SEQ ID NO: 1313545 - RNA, 19 nt, Human
ugaauuuugaacaaagguc

SEQ ID NO: 1313546 - RNA, 24 nt, Human
ugacacaaucaucacccuugugag

SEQ ID NO: 1313547 - RNA, 19 nt, Human
ugacaugaucuucugugua

SEQ ID NO: 1313548 - RNA, 20 nt, Human
ugacauggauugcuugaugg

SEQ ID NO: 1313549 - RNA, 21 nt, Human
ugacugaccacugaaggcucu

SEQ ID NO: 1313550 - RNA, 18 nt, Human
ugagaaauucauacauug

SEQ ID NO: 1313551 - RNA, 18 nt, Human
ugaggcaugaaccugaaa

SEQ ID NO: 1313552 - RNA, 22 nt, Human
ugauauaccacuugaacagaau

SEQ ID NO: 1313553 - RNA, 24 nt, Human
ugaucucaagugaucuaccugucu

SEQ ID NO: 1313554 - RNA, 24 nt, Human
ugcugggauuacaggugugagcca

SEQ ID NO: 1313555 - RNA, 18 nt, Human
uggaaaaauuaauacugu

SEQ ID NO: 1313556 - RNA, 24 nt, Human
uggccaggcugcucucaaacuccu

SEQ ID NO: 1313557 - RNA, 18 nt, Human
ugggauuacaggugugag

SEQ ID NO: 1313558 - RNA, 19 nt, Human
ugggauuacaggugugagc

SEQ ID NO: 1313559 - RNA, 21 nt, Human
ugggauuacaggugugagcca

SEQ ID NO: 1313560 - RNA, 22 nt, Human
ugggauuacaggugugagccac

SEQ ID NO: 1313561 - RNA, 23 nt, Human
ugggauuacaggugugagccacc

SEQ ID NO: 1313562 - RNA, 24 nt, Human
ugggauuacaggugugagccaccg

SEQ ID NO: 1313563 - RNA, 18 nt, Human
uguaagguuucucuccgg

SEQ ID NO: 1313564 - RNA, 18 nt, Human
uguaagguuuuucuccga

SEQ ID NO: 1313565 - RNA, 19 nt, Human
ugucacacucaucacacuu

SEQ ID NO: 1313566 - RNA, 22 nt, Human
ugucacauucuucacauuugua

SEQ ID NO: 1313567 - RNA, 21 nt, Human
ugugagguuucuuucuuguau

SEQ ID NO: 1313568 - RNA, 23 nt, Human
uguguaaugaggcaugaaccuga

SEQ ID NO: 1313569 - RNA, 21 nt, Human
uguguagaaaaucacaaagag

SEQ ID NO: 1313570 - RNA, 23 nt, Human
uuaagucaacucaaacugaacuc

SEQ ID NO: 1313571 - RNA, 21 nt, Human
uuacugaggacuuugugacaa

SEQ ID NO: 1313572 - RNA, 21 nt, Human
uuccuguaggaucucacauga

SEQ ID NO: 1313573 - RNA, 18 nt, Human
uucuccuaugucuuucaa

SEQ ID NO: 1313574 - RNA, 23 nt, Human
uuuccuguaggaucucacaugau

SEQ ID NO: 1313575 - RNA, 19 nt, Human
uuucuuguaugaauucacc

SEQ ID NO: 1313576 - RNA, 24 nt, Human
uuugcacaauacaauaucagcacc

SEQ ID NO: 1313577 - RNA, 19 nt, Human
uuuguaagguuucucucca

SEQ ID NO: 1313578 - RNA, 19 nt, Human
uuuguacgguuucucucca

SEQ ID NO: 1313579 - RNA, 24 nt, Human
uuuguugaagaaacaaaaaacaga

SEQ ID NO: 1313580 - RNA, 21 nt, Human
augugcagagcacggaagacc

SEQ ID NO: 1313581 - RNA, 19 nt, Human
ggccaaacuggguccuggu

SEQ ID NO: 1313582 - RNA, 21 nt, Human
agggcaggagaggacaggggu

SEQ ID NO: 1313583 - RNA, 20 nt, Human
cccuaagggcaggagaggac

SEQ ID NO: 1313584 - RNA, 20 nt, Human
gggcaggagaggacaggggu

SEQ ID NO: 1313585 - RNA, 24 nt, Human
aaaaaugacuccugauucuguuaa

SEQ ID NO: 1313586 - RNA, 24 nt, Human
agguaguaauuguacuccuaauug

SEQ ID NO: 1313587 - RNA, 22 nt, Human
agucgcuggugaugagugucuu

SEQ ID NO: 1313588 - RNA, 19 nt, Human
aguuaauauuguaaacggc

SEQ ID NO: 1313589 - RNA, 22 nt, Human
auaguaauggcaaaugagugcc

SEQ ID NO: 1313590 - RNA, 23 nt, Human
auuuuuauuucuaaugcugaaga

SEQ ID NO: 1313591 - RNA, 22 nt, Human
ccuccaaggccuaguugaugaa

SEQ ID NO: 1313592 - RNA, 23 nt, Human
cucaucaugaacacuguaguuga

SEQ ID NO: 1313593 - RNA, 23 nt, Human
cugaagagaaaugcauuguucac

SEQ ID NO: 1313594 - RNA, 23 nt, Human
cugccccaaguugacugguaaaa

SEQ ID NO: 1313595 - RNA, 20 nt, Human
gcugccccaaguugacuggu

SEQ ID NO: 1313596 - RNA, 24 nt, Human
guacagcagucgcuggugaugagu

SEQ ID NO: 1313597 - RNA, 21 nt, Human
uaaauggacccccugagguaa

SEQ ID NO: 1313598 - RNA, 23 nt, Human
ugagugccauugcucaucaugaa

SEQ ID NO: 1313599 - RNA, 20 nt, Human
uguacuacuaauuuuuuagg

SEQ ID NO: 1313600 - RNA, 18 nt, Human
aaccagugaucacaucuc

SEQ ID NO: 1313601 - RNA, 18 nt, Human
aagcagcccgcgccuccc

SEQ ID NO: 1313602 - RNA, 20 nt, Human
aagcagcccgcgccucccaa

SEQ ID NO: 1313603 - RNA, 19 nt, Human
aauaccuaccuucucuggc

SEQ ID NO: 1313604 - RNA, 21 nt, Human
aaugaaagagcucugaaagua

SEQ ID NO: 1313605 - RNA, 20 nt, Human
aaugagaggagcaacugaaa

SEQ ID NO: 1313606 - RNA, 18 nt, Human
aaugugagggcagaagga

SEQ ID NO: 1313607 - RNA, 19 nt, Human
accuucucuggccauuguc

SEQ ID NO: 1313608 - RNA, 23 nt, Human
acucucagccucaguuuccccau

SEQ ID NO: 1313609 - RNA, 24 nt, Human
agagaaauaaaagguggggggccu

SEQ ID NO: 1313610 - RNA, 24 nt, Human
agagauaauucggggcuccuucag

SEQ ID NO: 1313611 - RNA, 24 nt, Human
agcagcccgcgccucccaagcagc

SEQ ID NO: 1313612 - RNA, 20 nt, Human
agccugggggaaggggcugg

SEQ ID NO: 1313613 - RNA, 23 nt, Human
agccugggggaaggggcuggcuc

SEQ ID NO: 1313614 - RNA, 23 nt, Human
aggcuuaaaccaggucagccugg

SEQ ID NO: 1313615 - RNA, 18 nt, Human
agguagacagugaggagg

SEQ ID NO: 1313616 - RNA, 22 nt, Human
auuccaccaggccuugggugaa

SEQ ID NO: 1313617 - RNA, 22 nt, Human
caacgcggccggcagcgccgag

SEQ ID NO: 1313618 - RNA, 19 nt, Human
caagaggaagcaugaacag

SEQ ID NO: 1313619 - RNA, 21 nt, Human
caauggcuugagaagcccccc

SEQ ID NO: 1313620 - RNA, 23 nt, Human
cacgcuccuacccuucucuuuuc

SEQ ID NO: 1313621 - RNA, 20 nt, Human
cagcaacuccaagccagugu

SEQ ID NO: 1313622 - RNA, 19 nt, Human
cagccucaguuuccccauc

SEQ ID NO: 1313623 - RNA, 19 nt, Human
caggucagccugggggaag

SEQ ID NO: 1313624 - RNA, 19 nt, Human
caucagagauuguuauucu

SEQ ID NO: 1313625 - RNA, 20 nt, Human
caucuggggugcuggugacc

SEQ ID NO: 1313626 - RNA, 18 nt, Human
cccacuccuuuuccagcc

SEQ ID NO: 1313627 - RNA, 21 nt, Human
ccccaagcagcccgcgccucc

SEQ ID NO: 1313628 - RNA, 23 nt, Human
ccccacuccuccuugggaccacc

SEQ ID NO: 1313629 - RNA, 20 nt, Human
ccccaucucuaaaauaaggc

SEQ ID NO: 1313630 - RNA, 19 nt, Human
ccccgccgcgccgcccccc

SEQ ID NO: 1313631 - RNA, 21 nt, Human
ccccgccgcgccgccccccaa

SEQ ID NO: 1313632 - RNA, 23 nt, Human
ccccgccgcgccgccccccaagc

SEQ ID NO: 1313633 - RNA, 23 nt, Human
ccccuagaucccuggcggugaca

SEQ ID NO: 1313634 - RNA, 19 nt, Human
cccgccgcgccgcccccca

SEQ ID NO: 1313635 - RNA, 18 nt, Human
cccgcgggccccgccgcg

SEQ ID NO: 1313636 - RNA, 24 nt, Human
ccgccccccaagcagcccgcgccu

SEQ ID NO: 1313637 - RNA, 20 nt, Human
ccgccgcgccgccccccaag

SEQ ID NO: 1313638 - RNA, 20 nt, Human
ccgccuggcuuggguuucca

SEQ ID NO: 1313639 - RNA, 25 nt, Human
ccgccuggcuuggguuuccagcugc

SEQ ID NO: 1313640 - RNA, 23 nt, Human
ccgcgccccccacccuguuuagg

SEQ ID NO: 1313641 - RNA, 18 nt, Human
ccgcgccgccccccaagc

SEQ ID NO: 1313642 - RNA, 18 nt, Human
ccgcgccgccccccaagc

SEQ ID NO: 1313643 - RNA, 18 nt, Human
ccuacccuucucuuuucc

SEQ ID NO: 1313644 - RNA, 21 nt, Human
ccuggaaguguagggaggggu

SEQ ID NO: 1313645 - RNA, 21 nt, Human
cgccgccccccaagcagcccg

SEQ ID NO: 1313646 - RNA, 22 nt, Human
cgccuggcuuggguuuccagcu

SEQ ID NO: 1313647 - RNA, 21 nt, Human
cuaaaaccuguaggggugccc

SEQ ID NO: 1313648 - RNA, 22 nt, Human
cuaaaaccuguaggggugcccc

SEQ ID NO: 1313649 - RNA, 27 nt, Human
cucucagccucaguuuccccaucuccu

SEQ ID NO: 1313650 - RNA, 22 nt, Human
cugaaagucucaaauucaggcu

SEQ ID NO: 1313651 - RNA, 22 nt, Human
cugcguccgcgccccccacccu

SEQ ID NO: 1313652 - RNA, 22 nt, Human
cuggcuuggguuuccagcugca

SEQ ID NO: 1313653 - RNA, 19 nt, Human
cuuuccgcaaccccccacu

SEQ ID NO: 1313654 - RNA, 22 nt, Human
gagauaauucggggcuccuuca

SEQ ID NO: 1313655 - RNA, 20 nt, Human
gagcagcccgcgggccccgc

SEQ ID NO: 1313656 - RNA, 26 nt, Human
gaggaagcaugaacagcuggucccau

SEQ ID NO: 1313657 - RNA, 19 nt, Human
gaggagagaaauaaaaggu

SEQ ID NO: 1313658 - RNA, 20 nt, Human
gcagcccaaggaccaaggca

SEQ ID NO: 1313659 - RNA, 19 nt, Human
gcagcccgcgggccccgcc

SEQ ID NO: 1313660 - RNA, 24 nt, Human
gccaggacagcaacuccaagccag

SEQ ID NO: 1313661 - RNA, 20 nt, Human
gcuccuacccuucucuuuuc

SEQ ID NO: 1313662 - RNA, 20 nt, Human
gcucugaaugugagggcaga

SEQ ID NO: 1313663 - RNA, 21 nt, Human
gcuuacuuaccuacucucagc

SEQ ID NO: 1313664 - RNA, 18 nt, Human
gcuuuauuccaccaggcc

SEQ ID NO: 1313665 - RNA, 25 nt, Human
ggaggaggaugcugucaggggaggg

SEQ ID NO: 1313666 - RNA, 21 nt, Human
ggcuggcuccuuccagggucu

SEQ ID NO: 1313667 - RNA, 28 nt, Human
gggcaacgcggccggcagccgggccccc

SEQ ID NO: 1313668 - RNA, 23 nt, Human
uaaaauaaggcuaccaauaccua

SEQ ID NO: 1313669 - RNA, 23 nt, Human
uaccaauaccuaccuucucuggc

SEQ ID NO: 1313670 - RNA, 18 nt, Human
uaccuaccuucucuggcc

SEQ ID NO: 1313671 - RNA, 20 nt, Human
uagaucccuggcggugacag

SEQ ID NO: 1313672 - RNA, 25 nt, Human
uagcugagugcccuuggacagcuua

SEQ ID NO: 1313673 - RNA, 23 nt, Human
uauagaugggaccccagcccccc

SEQ ID NO: 1313674 - RNA, 24 nt, Human
uauagaugggaccccagccccccc

SEQ ID NO: 1313675 - RNA, 20 nt, Human
ucagagauuguuauucucca

SEQ ID NO: 1313676 - RNA, 23 nt, Human
ucaguuggggauccccacaaauu

SEQ ID NO: 1313677 - RNA, 22 nt, Human
uccauaggugcccccauucuaa

SEQ ID NO: 1313678 - RNA, 22 nt, Human
uccgcaaccccccacuccuccu

SEQ ID NO: 1313679 - RNA, 20 nt, Human
uccuuccagggucuuccucc

SEQ ID NO: 1313680 - RNA, 18 nt, Human
uccuugggaccaccuugg

SEQ ID NO: 1313681 - RNA, 18 nt, Human
uccuugggaccaccuugg

SEQ ID NO: 1313682 - RNA, 21 nt, Human
uccuuggucaggccacgaaac

SEQ ID NO: 1313683 - RNA, 23 nt, Human
uccuuuuccagccuuguggcugg

SEQ ID NO: 1313684 - RNA, 20 nt, Human
ucucacagaaguaguucugg

SEQ ID NO: 1313685 - RNA, 20 nt, Human
ucucuuuuccucucacagaa

SEQ ID NO: 1313686 - RNA, 22 nt, Human
ucucuuuuccucucacagaagu

SEQ ID NO: 1313687 - RNA, 22 nt, Human
ugaccuggccuagagauaauuc

SEQ ID NO: 1313688 - RNA, 23 nt, Human
ugagaggagcaacugaaagucuc

SEQ ID NO: 1313689 - RNA, 24 nt, Human
ugagaggagcaacugaaagucuca

SEQ ID NO: 1313690 - RNA, 22 nt, Human
ugagaugggcaguggagggcca

SEQ ID NO: 1313691 - RNA, 23 nt, Human
ugagaugggcaguggagggcccc

SEQ ID NO: 1313692 - RNA, 19 nt, Human
ugagggcagaaggaggagg

SEQ ID NO: 1313693 - RNA, 22 nt, Human
ugcccacuccuuuuccagccuu

SEQ ID NO: 1313694 - RNA, 18 nt, Human
ugcccuggaaguguaggg

SEQ ID NO: 1313695 - RNA, 20 nt, Human
uggccuagagauaauucggg

SEQ ID NO: 1313696 - RNA, 18 nt, Human
uggcuccugaccuggccu

SEQ ID NO: 1313697 - RNA, 18 nt, Human
uggcuggcucucauccuc

SEQ ID NO: 1313698 - RNA, 19 nt, Human
uggcuggcucucauccucc

SEQ ID NO: 1313699 - RNA, 20 nt, Human
ugggacagguggcggggguc

SEQ ID NO: 1313700 - RNA, 18 nt, Human
ugggaccccagcccccca

SEQ ID NO: 1313701 - RNA, 26 nt, Human
uggguuuccagcugcagggcacgcuc

SEQ ID NO: 1313702 - RNA, 21 nt, Human
uguggcuggcucucauccucc

SEQ ID NO: 1313703 - RNA, 19 nt, Human
uguuagcugagugcccuug

SEQ ID NO: 1313704 - RNA, 22 nt, Human
uuaggaguuccuguuuggagau

SEQ ID NO: 1313705 - RNA, 18 nt, Human
uuccagggucuuccucca

SEQ ID NO: 1313706 - RNA, 24 nt, Human
uuccgcaaccccccacuccuccuu

SEQ ID NO: 1313707 - RNA, 22 nt, Human
uucugggcaagaggaagcauga

SEQ ID NO: 1313708 - RNA, 19 nt, Human
uuuggagguagacagugag

SEQ ID NO: 1313709 - RNA, 23 nt, Human
aaaugucuuuauaaguacauacc

SEQ ID NO: 1313710 - RNA, 24 nt, Human
uauauauauggagauauauauaca

SEQ ID NO: 1313711 - RNA, 20 nt, Human
ucaaaaaaaauauagaaaca

SEQ ID NO: 1313712 - RNA, 18 nt, Human
ucaaaauuauacagccau

SEQ ID NO: 1313713 - RNA, 23 nt, Human
ugaagucuacauuucccuugucu

SEQ ID NO: 1313714 - RNA, 25 nt, Human
uguuuaugaagucuacauuucccuu

SEQ ID NO: 1313715 - RNA, 19 nt, Human
uuaaggguaaucauugggu

SEQ ID NO: 1313716 - RNA, 23 nt, Human
ccaugcggggcagguccugucgg

SEQ ID NO: 1313717 - RNA, 24 nt, Human
uauauauauggagauauauauaca

SEQ ID NO: 1313718 - RNA, 23 nt, Human
ugaagucuacauuucccuugucu

SEQ ID NO: 1313719 - RNA, 25 nt, Human
uguuuaugaagucuacauuucccuu

SEQ ID NO: 1313720 - RNA, 19 nt, Human
uuaaggguaaucauugggu

SEQ ID NO: 1313721 - RNA, 23 nt, Human
aguauugaugaaacugguuuucu

SEQ ID NO: 1313722 - RNA, 25 nt, Human
augguauagauauguuauucaaaac

SEQ ID NO: 1313723 - RNA, 19 nt, Human
gaaacugguuuucagacaa

SEQ ID NO: 1313724 - RNA, 24 nt, Human
uagaauggcaauuucacuuaaaau

SEQ ID NO: 1313725 - RNA, 22 nt, Human
ucccuugcuuuagggaggagag

SEQ ID NO: 1313726 - RNA, 24 nt, Human
aacccaauuuuauuuagaaaccag

SEQ ID NO: 1313727 - RNA, 18 nt, Human
aacuccuguuccguuccc

SEQ ID NO: 1313728 - RNA, 19 nt, Human
aaggguuccggaacaucug

SEQ ID NO: 1313729 - RNA, 23 nt, Human
aagguguuaagagucgccauggg

SEQ ID NO: 1313730 - RNA, 18 nt, Human
acaaaaccuccugccucu

SEQ ID NO: 1313731 - RNA, 23 nt, Human
acacacacacgcgcacacacaca

SEQ ID NO: 1313732 - RNA, 18 nt, Human
accauguccacaaaaccu

SEQ ID NO: 1313733 - RNA, 24 nt, Human
accuccugccucugcuccccaggc

SEQ ID NO: 1313734 - RNA, 24 nt, Human
accugaguacaagggcgcagucug

SEQ ID NO: 1313735 - RNA, 24 nt, Human
acgagguuuggagaaucgaaacug

SEQ ID NO: 1313736 - RNA, 20 nt, Human
acuccuguuccguucccugu

SEQ ID NO: 1313737 - RNA, 24 nt, Human
agagcuccaccagcccuguccaca

SEQ ID NO: 1313738 - RNA, 25 nt, Human
agagcuccaccagcccuguccacaa

SEQ ID NO: 1313739 - RNA, 21 nt, Human
agagucgccauggggguggcu

SEQ ID NO: 1313740 - RNA, 19 nt, Human
agcuccaccagcccugucc

SEQ ID NO: 1313741 - RNA, 19 nt, Human
agcuccaccagcccugucc

SEQ ID NO: 1313742 - RNA, 18 nt, Human
aggaccucagagacagac

SEQ ID NO: 1313743 - RNA, 20 nt, Human
aggaggauguagggacccuc

SEQ ID NO: 1313744 - RNA, 19 nt, Human
agggagggaaggaggagga

SEQ ID NO: 1313745 - RNA, 18 nt, Human
agguggagcugccuugag

SEQ ID NO: 1313746 - RNA, 20 nt, Human
auaaaauauccuaccgcccc

SEQ ID NO: 1313747 - RNA, 22 nt, Human
aucagcagccuugaccugugug

SEQ ID NO: 1313748 - RNA, 21 nt, Human
aucaggaagggagggaaggag

SEQ ID NO: 1313749 - RNA, 21 nt, Human
auccuccuggaagaagggguc

SEQ ID NO: 1313750 - RNA, 24 nt, Human
cacacacacacgcuccuccuuccc

SEQ ID NO: 1313751 - RNA, 23 nt, Human
cacgcgcacacacacacacgcuc

SEQ ID NO: 1313752 - RNA, 19 nt, Human
cacuucugggcgggcuccu

SEQ ID NO: 1313753 - RNA, 19 nt, Human
cagcauuuggcucuguggc

SEQ ID NO: 1313754 - RNA, 22 nt, Human
cagcugguaggaccucagagac

SEQ ID NO: 1313755 - RNA, 25 nt, Human
caggacaaauggucauaccugagua

SEQ ID NO: 1313756 - RNA, 21 nt, Human
ccccaucagcagccuugaccu

SEQ ID NO: 1313757 - RNA, 18 nt, Human
cccccagagcuccaccag

SEQ ID NO: 1313758 - RNA, 24 nt, Human
cccccaggagugaccacgugagga

SEQ ID NO: 1313759 - RNA, 21 nt, Human
ccccgcagagcuccaccagcc

SEQ ID NO: 1313760 - RNA, 21 nt, Human
ccccgcagagguccaucaacc

SEQ ID NO: 1313761 - RNA, 19 nt, Human
ccuccugccucugcucccc

SEQ ID NO: 1313762 - RNA, 19 nt, Human
ccuccugccucugcucccc

SEQ ID NO: 1313763 - RNA, 22 nt, Human
ccuccugccucugcucccccca

SEQ ID NO: 1313764 - RNA, 19 nt, Human
ccuccuuccccagccucuu

SEQ ID NO: 1313765 - RNA, 21 nt, Human
ccuccuuccccagccucuuac

SEQ ID NO: 1313766 - RNA, 23 nt, Human
ccuccuugcugccgagucaggga

SEQ ID NO: 1313767 - RNA, 22 nt, Human
ccucugcuccccccagagcucc

SEQ ID NO: 1313768 - RNA, 18 nt, Human
ccuggcccuggggaucac

SEQ ID NO: 1313769 - RNA, 18 nt, Human
ccuggcccuggggaucac

SEQ ID NO: 1313770 - RNA, 21 nt, Human
ccuggggaucacgucucuagu

SEQ ID NO: 1313771 - RNA, 26 nt, Human
ccuguacacacacacgcgcacacagu

SEQ ID NO: 1313772 - RNA, 24 nt, Human
ccuguacacacacacgcgcacagg

SEQ ID NO: 1313773 - RNA, 25 nt, Human
ccuguacugcgggguuuuacaaggg

SEQ ID NO: 1313774 - RNA, 19 nt, Human
ccuguuccguucccuguuc

SEQ ID NO: 1313775 - RNA, 21 nt, Human
cuaguuuacggaggaaguggc

SEQ ID NO: 1313776 - RNA, 23 nt, Human
cuccugccucugcuccccaggcc

SEQ ID NO: 1313777 - RNA, 23 nt, Human
cuccugccucugcuccccccaga

SEQ ID NO: 1313778 - RNA, 24 nt, Human
cugaauucuuccuugucugggaaa

SEQ ID NO: 1313779 - RNA, 21 nt, Human
cugagcaccuacuuugcagca

SEQ ID NO: 1313780 - RNA, 24 nt, Human
cugagcccaagaggugagugcuga

SEQ ID NO: 1313781 - RNA, 19 nt, Human
cugcagcauuuggcucugu

SEQ ID NO: 1313782 - RNA, 18 nt, Human
cugcagugaugucugcag

SEQ ID NO: 1313783 - RNA, 18 nt, Human
cugcagugaugucugcag

SEQ ID NO: 1313784 - RNA, 18 nt, Human
cugcagugaugucugcag

SEQ ID NO: 1313785 - RNA, 21 nt, Human
cuggaguuuucaggacccugc

SEQ ID NO: 1313786 - RNA, 19 nt, Human
cuggggcugaugagccucu

SEQ ID NO: 1313787 - RNA, 23 nt, Human
cuggggcugaugagccucugucc

SEQ ID NO: 1313788 - RNA, 22 nt, Human
gaaaaguuggaaggugcuacau

SEQ ID NO: 1313789 - RNA, 24 nt, Human
gacuuuagagagagaauugcaucc

SEQ ID NO: 1313790 - RNA, 24 nt, Human
gagccucuguccccuaggaauuuu

SEQ ID NO: 1313791 - RNA, 20 nt, Human
gagcuccaccagcccugucc

SEQ ID NO: 1313792 - RNA, 18 nt, Human
gagugcugagugguggcg

SEQ ID NO: 1313793 - RNA, 19 nt, Human
gagugcugccucugcucag

SEQ ID NO: 1313794 - RNA, 27 nt, Human
gcagagcuccaccagcccuguccacaa

SEQ ID NO: 1313795 - RNA, 21 nt, Human
gcccgagugcugccucugcuc

SEQ ID NO: 1313796 - RNA, 21 nt, Human
gccuucccugcuuuuccacuc

SEQ ID NO: 1313797 - RNA, 24 nt, Human
ggaaaaguuggaaggugcuacauu

SEQ ID NO: 1313798 - RNA, 27 nt, Human
ggaggaggauguagggacccucuaggg

SEQ ID NO: 1313799 - RNA, 21 nt, Human
ggaguuuucaggacccugcuu

SEQ ID NO: 1313800 - RNA, 18 nt, Human
ggcaucaggaagggaggg

SEQ ID NO: 1313801 - RNA, 23 nt, Human
gggaaggaggaggauguagggac

SEQ ID NO: 1313802 - RNA, 19 nt, Human
gggcaugggggucggcugg

SEQ ID NO: 1313803 - RNA, 26 nt, Human
guacacacacacgcgcacacacacac

SEQ ID NO: 1313804 - RNA, 23 nt, Human
guuugccuucccugcuuuuccac

SEQ ID NO: 1313805 - RNA, 20 nt, Human
uaaaauauccuaccgccccc

SEQ ID NO: 1313806 - RNA, 18 nt, Human
uaagguguuuucucuuua

SEQ ID NO: 1313807 - RNA, 24 nt, Human
uacacacacacgcgcacacacaca

SEQ ID NO: 1313808 - RNA, 24 nt, Human
ucagagacagaccuggcccugggg

SEQ ID NO: 1313809 - RNA, 21 nt, Human
ucagcagccuugaccugugug

SEQ ID NO: 1313810 - RNA, 18 nt, Human
uccacaaaaucuccuccg

SEQ ID NO: 1313811 - RNA, 19 nt, Human
ucccagaggaggcuccugg

SEQ ID NO: 1313812 - RNA, 21 nt, Human
ucccagaggaggcuccugggg

SEQ ID NO: 1313813 - RNA, 18 nt, Human
ucccagcugguaggaccu

SEQ ID NO: 1313814 - RNA, 18 nt, Human
uccccagccucuuaccug

SEQ ID NO: 1313815 - RNA, 21 nt, Human
ucccugagcaccuacuuugca

SEQ ID NO: 1313816 - RNA, 22 nt, Human
ucccuguacugcgggguuuuac

SEQ ID NO: 1313817 - RNA, 23 nt, Human
ucccuguuccccucggguccucc

SEQ ID NO: 1313818 - RNA, 20 nt, Human
uccuccgucuucuccccgca

SEQ ID NO: 1313819 - RNA, 20 nt, Human
uccugccucugcucccccca

SEQ ID NO: 1313820 - RNA, 24 nt, Human
uccugggggcaccagccccucagc

SEQ ID NO: 1313821 - RNA, 27 nt, Human
ucuggaguuuucaggacccugcuuuua

SEQ ID NO: 1313822 - RNA, 18 nt, Human
ucugggcgggcuccuggg

SEQ ID NO: 1313823 - RNA, 22 nt, Human
ucuguggcucuucugcccugaa

SEQ ID NO: 1313824 - RNA, 23 nt, Human
ugaagggggugccgggcaugggg

SEQ ID NO: 1313825 - RNA, 24 nt, Human
ugagcaccuacuuugcagcaggcu

SEQ ID NO: 1313826 - RNA, 18 nt, Human
ugagccucuguccccuag

SEQ ID NO: 1313827 - RNA, 20 nt, Human
ugccucugcuccccaggcca

SEQ ID NO: 1313828 - RNA, 18 nt, Human
ugccugcugggccggcca

SEQ ID NO: 1313829 - RNA, 23 nt, Human
ugccuggggcugaugagccucug

SEQ ID NO: 1313830 - RNA, 21 nt, Human
uggcucuguggcucuucugcc

SEQ ID NO: 1313831 - RNA, 25 nt, Human
uguacacacacacgcgcacacacac

SEQ ID NO: 1313832 - RNA, 25 nt, Human
uguacacacacacgcgcacacacag

SEQ ID NO: 1313833 - RNA, 20 nt, Human
uguacauaaaugcccaggaa

SEQ ID NO: 1313834 - RNA, 19 nt, Human
ugucucaggaaguugccug

SEQ ID NO: 1313835 - RNA, 19 nt, Human
ugucugcucugagcauguc

SEQ ID NO: 1313836 - RNA, 25 nt, Human
ugucugggaaagccacaucucucug

SEQ ID NO: 1313837 - RNA, 22 nt, Human
uuaaauggauauucccugagca

SEQ ID NO: 1313838 - RNA, 21 nt, Human
uuccauccucccuccugaauu

SEQ ID NO: 1313839 - RNA, 25 nt, Human
uucccagaggaggcuccugggggca

SEQ ID NO: 1313840 - RNA, 27 nt, Human
uuggagaaucgaaacuggcuccguggg

SEQ ID NO: 1313841 - RNA, 23 nt, Human
uuggcucuguggcucuucugccc

SEQ ID NO: 1313842 - RNA, 18 nt, Human
uuguucccucaucaguuu

SEQ ID NO: 1313843 - RNA, 18 nt, Human
uuucaggacccugcuuuu

SEQ ID NO: 1313844 - RNA, 24 nt, Human
aacaaauacugggccccaguucuu

SEQ ID NO: 1313845 - RNA, 23 nt, Human
aagaacacugggagugaagagaa

SEQ ID NO: 1313846 - RNA, 18 nt, Human
aagagaaggcgcagugaa

SEQ ID NO: 1313847 - RNA, 18 nt, Human
acuaauggucaucaaugg

SEQ ID NO: 1313848 - RNA, 24 nt, Human
agagaaaacaaaaauagcacacua

SEQ ID NO: 1313849 - RNA, 21 nt, Human
aggcgcccaucaucccuguuu

SEQ ID NO: 1313850 - RNA, 23 nt, Human
agggcacauuuucuguauccaaa

SEQ ID NO: 1313851 - RNA, 19 nt, Human
aggguaauugggcaggagg

SEQ ID NO: 1313852 - RNA, 19 nt, Human
aggugcacggggagaaggg

SEQ ID NO: 1313853 - RNA, 21 nt, Human
cagaacacugaaaggucaacc

SEQ ID NO: 1313854 - RNA, 21 nt, Human
cauccccaccacguggcccuc

SEQ ID NO: 1313855 - RNA, 20 nt, Human
ccaugccuguguuccauccc

SEQ ID NO: 1313856 - RNA, 20 nt, Human
ccccaccacguggcccuccc

SEQ ID NO: 1313857 - RNA, 25 nt, Human
cgccugggcagguuagugacugccc

SEQ ID NO: 1313858 - RNA, 20 nt, Human
cucuguggcaguccuggagg

SEQ ID NO: 1313859 - RNA, 20 nt, Human
cucuguggcaguccuggagg

SEQ ID NO: 1313860 - RNA, 20 nt, Human
cuugcucuguggcaguccug

SEQ ID NO: 1313861 - RNA, 21 nt, Human
gagaugaauccaaaaugaauc

SEQ ID NO: 1313862 - RNA, 21 nt, Human
uaauuuucuucuucauagaga

SEQ ID NO: 1313863 - RNA, 21 nt, Human
uacguacuguccaugccugug

SEQ ID NO: 1313864 - RNA, 20 nt, Human
uagcacacuaauggucauca

SEQ ID NO: 1313865 - RNA, 25 nt, Human
uccaaaaugaaucagacagcggcuc

SEQ ID NO: 1313866 - RNA, 20 nt, Human
uccaugccuguguuccaucc

SEQ ID NO: 1313867 - RNA, 18 nt, Human
ucuguauccaaaacagcc

SEQ ID NO: 1313868 - RNA, 21 nt, Human
ucuugcucuguggcaguccug

SEQ ID NO: 1313869 - RNA, 23 nt, Human
ucuugcucuguggcaguccugga

SEQ ID NO: 1313870 - RNA, 18 nt, Human
ugaaucagacagcggcuc

SEQ ID NO: 1313871 - RNA, 24 nt, Human
ugcaaagaacacugggagugaaga

SEQ ID NO: 1313872 - RNA, 20 nt, Human
ugcacagugcacgagaugaa

SEQ ID NO: 1313873 - RNA, 22 nt, Human
ugggagugcagaacacugaaag

SEQ ID NO: 1313874 - RNA, 23 nt, Human
ugggcaggagggaaacucgccug

SEQ ID NO: 1313875 - RNA, 25 nt, Human
uguguuccauccccaccacguggcc

SEQ ID NO: 1313876 - RNA, 21 nt, Human
uguuuauuucuuuguuuacgu

SEQ ID NO: 1313877 - RNA, 21 nt, Human
aaaggaacuuuuuacuuucua

SEQ ID NO: 1313878 - RNA, 23 nt, Human
aagaagggaaacuuugaaaagga

SEQ ID NO: 1313879 - RNA, 21 nt, Human
agaggaccucuugcccuuuuc

SEQ ID NO: 1313880 - RNA, 24 nt, Human
agcugguuuuugcucuggggaagu

SEQ ID NO: 1313881 - RNA, 25 nt, Human
cacuucaucucugcugggacccugu

SEQ ID NO: 1313882 - RNA, 19 nt, Human
ccaugugucucauguccug

SEQ ID NO: 1313883 - RNA, 21 nt, Human
cccacauguucuagccuggcc

SEQ ID NO: 1313884 - RNA, 18 nt, Human
ccccauaggcuuaccuga

SEQ ID NO: 1313885 - RNA, 18 nt, Human
cccuuuucuuucaugacc

SEQ ID NO: 1313886 - RNA, 20 nt, Human
ccucuugcccuuuucuuuca

SEQ ID NO: 1313887 - RNA, 20 nt, Human
ccuucuggguucuggcccca

SEQ ID NO: 1313888 - RNA, 24 nt, Human
cuaacacuuaugauuuauucuuua

SEQ ID NO: 1313889 - RNA, 21 nt, Human
cucacagauagcacugugcgu

SEQ ID NO: 1313890 - RNA, 19 nt, Human
cuccugggugaagcugguu

SEQ ID NO: 1313891 - RNA, 21 nt, Human
cugaugaauuggcugggcuga

SEQ ID NO: 1313892 - RNA, 19 nt, Human
cugggagguccucagugca

SEQ ID NO: 1313893 - RNA, 23 nt, Human
cugguucacuucaucucugcugg

SEQ ID NO: 1313894 - RNA, 21 nt, Human
gaaccugggagguccucagug

SEQ ID NO: 1313895 - RNA, 18 nt, Human
ggcccagagcuuggaacc

SEQ ID NO: 1313896 - RNA, 26 nt, Human
ggcccagagcuuggaaccugggaggu

SEQ ID NO: 1313897 - RNA, 25 nt, Human
ucaguguccggcucaccuccagguu

SEQ ID NO: 1313898 - RNA, 22 nt, Human
ucaugaacacagaacugcucac

SEQ ID NO: 1313899 - RNA, 18 nt, Human
ucuagccuggcccagagc

SEQ ID NO: 1313900 - RNA, 24 nt, Human
ucugcugggacccuguggccccca

SEQ ID NO: 1313901 - RNA, 24 nt, Human
ugaacacagaacugcucacagaua

SEQ ID NO: 1313902 - RNA, 22 nt, Human
ugcucuggggaagucuccaucc

SEQ ID NO: 1313903 - RNA, 23 nt, Human
uguggcccccauaggcuuaccug

SEQ ID NO: 1313904 - RNA, 21 nt, Human
uguucuagccuggcccagagc

SEQ ID NO: 1313905 - RNA, 18 nt, Human
uucucccagcaucuucag

SEQ ID NO: 1313906 - RNA, 19 nt, Human
uuucaccauugugcaugau

SEQ ID NO: 1313907 - RNA, 21 nt, Human
uuuugcucuggggaagucucc

SEQ ID NO: 1313908 - RNA, 18 nt, Human
ucgauuggaucucucuga

SEQ ID NO: 1313909 - RNA, 25 nt, Human
uuuuuuauucuucugagauguucca

SEQ ID NO: 1313910 - RNA, 18 nt, Human
ucugcgugguuaaggaag

SEQ ID NO: 1313911 - RNA, 18 nt, Human
ugcgugguuaaggaaggu

SEQ ID NO: 1313912 - RNA, 22 nt, Human
aaaccgaauuucuaggcugcaa

SEQ ID NO: 1313913 - RNA, 19 nt, Human
aaagugcugggauuacaga

SEQ ID NO: 1313914 - RNA, 24 nt, Human
aaagugcugggauuacagauguga

SEQ ID NO: 1313915 - RNA, 20 nt, Human
aagaaauuccaagacuguca

SEQ ID NO: 1313916 - RNA, 18 nt, Human
aagugcugggauuacaga

SEQ ID NO: 1313917 - RNA, 26 nt, Human
aagugcugggauuacagaugugagcc

SEQ ID NO: 1313918 - RNA, 24 nt, Human
acacauuccgccuuccaaguuucu

SEQ ID NO: 1313919 - RNA, 22 nt, Human
acagcaaugguuugccucaugc

SEQ ID NO: 1313920 - RNA, 18 nt, Human
acaggguuucaccaugug

SEQ ID NO: 1313921 - RNA, 19 nt, Human
acaggguuucaccaugugg

SEQ ID NO: 1313922 - RNA, 24 nt, Human
acaggguuucaccaugugggccag

SEQ ID NO: 1313923 - RNA, 24 nt, Human
accaugugggccaggcuggucucg

SEQ ID NO: 1313924 - RNA, 19 nt, Human
acccaggcuggagugcagu

SEQ ID NO: 1313925 - RNA, 21 nt, Human
acccuccgucuccccacaggc

SEQ ID NO: 1313926 - RNA, 23 nt, Human
accucugccucccaaagugcugg

SEQ ID NO: 1313927 - RNA, 18 nt, Human
acucugucacccaggcug

SEQ ID NO: 1313928 - RNA, 24 nt, Human
acucugucacccaggcuggagugc

SEQ ID NO: 1313929 - RNA, 20 nt, Human
agacaggguuucaccaugug

SEQ ID NO: 1313930 - RNA, 22 nt, Human
agagacaggguuucaccaugug

SEQ ID NO: 1313931 - RNA, 23 nt, Human
agcagcugggauuacaggcgugu

SEQ ID NO: 1313932 - RNA, 19 nt, Human
agccaccacaccuggucug

SEQ ID NO: 1313933 - RNA, 24 nt, Human
aggaagacugugcuccaaauuauu

SEQ ID NO: 1313934 - RNA, 24 nt, Human
aggcgauccgcccaccucugccuc

SEQ ID NO: 1313935 - RNA, 25 nt, Human
aggcuggagugcaguggcgugaucu

SEQ ID NO: 1313936 - RNA, 22 nt, Human
aguagagacaggguuucaccau

SEQ ID NO: 1313937 - RNA, 19 nt, Human
agugcaguggcgugaucuc

SEQ ID NO: 1313938 - RNA, 20 nt, Human
agugcaguggcgugaucucg

SEQ ID NO: 1313939 - RNA, 23 nt, Human
agugcaguggcgugaucucggcu

SEQ ID NO: 1313940 - RNA, 24 nt, Human
agugcaguggcgugaucucggcuc

SEQ ID NO: 1313941 - RNA, 24 nt, Human
auuuuuguauuuuuaguagagaca

SEQ ID NO: 1313942 - RNA, 22 nt, Human
caaaaucaggcuaaaccuccag

SEQ ID NO: 1313943 - RNA, 24 nt, Human
caaagugcugggauuacagaugug

SEQ ID NO: 1313944 - RNA, 21 nt, Human
caccaugugggccaggcuggu

SEQ ID NO: 1313945 - RNA, 24 nt, Human
caccaugugggccaggcuggucuc

SEQ ID NO: 1313946 - RNA, 27 nt, Human
cacccaugugccaccaucacugggcac

SEQ ID NO: 1313947 - RNA, 18 nt, Human
cacgaaaacacauuccgc

SEQ ID NO: 1313948 - RNA, 24 nt, Human
cacuacgcccggcuaauuuuugua

SEQ ID NO: 1313949 - RNA, 22 nt, Human
cacucugucacccaggcuggag

SEQ ID NO: 1313950 - RNA, 23 nt, Human
cacucugucacccaggcuggagu

SEQ ID NO: 1313951 - RNA, 21 nt, Human
cacugcaaccuccgccucccg

SEQ ID NO: 1313952 - RNA, 23 nt, Human
cacugcaaccuccgccucccggg

SEQ ID NO: 1313953 - RNA, 18 nt, Human
caggguuucaccaugugg

SEQ ID NO: 1313954 - RNA, 24 nt, Human
caggguuucaccaugugggccagg

SEQ ID NO: 1313955 - RNA, 21 nt, Human
caugucuaggcaccaggaaga

SEQ ID NO: 1313956 - RNA, 21 nt, Human
ccaaagugcugggauuacaga

SEQ ID NO: 1313957 - RNA, 22 nt, Human
ccaaagugcugggauuacagau

SEQ ID NO: 1313958 - RNA, 24 nt, Human
ccaaagugcugggauuacagaugu

SEQ ID NO: 1313959 - RNA, 19 nt, Human
ccacaggcucuggggugac

SEQ ID NO: 1313960 - RNA, 22 nt, Human
ccagaaacaccugcguuuugaa

SEQ ID NO: 1313961 - RNA, 21 nt, Human
cccaggcuggagugcaguggc

SEQ ID NO: 1313962 - RNA, 19 nt, Human
ccccacaggcucuggggug

SEQ ID NO: 1313963 - RNA, 19 nt, Human
cccgagcagcugggauuac

SEQ ID NO: 1313964 - RNA, 24 nt, Human
cccgagcagcugggauuacaggcg

SEQ ID NO: 1313965 - RNA, 23 nt, Human
cccucugucgcccaggcuggagu

SEQ ID NO: 1313966 - RNA, 24 nt, Human
cccucugucgcccaggcuggagug

SEQ ID NO: 1313967 - RNA, 22 nt, Human
ccgagcagcugggauuacaggc

SEQ ID NO: 1313968 - RNA, 24 nt, Human
ccgagcagcugggauuacaggcgu

SEQ ID NO: 1313969 - RNA, 18 nt, Human
ccguccccacccaugugc

SEQ ID NO: 1313970 - RNA, 21 nt, Human
ccuaccaauggucacugcuau

SEQ ID NO: 1313971 - RNA, 19 nt, Human
ccuccgccucccggguuca

SEQ ID NO: 1313972 - RNA, 19 nt, Human
ccucugccucccgagcagc

SEQ ID NO: 1313973 - RNA, 21 nt, Human
ccucugucgcccaggcuggag

SEQ ID NO: 1313974 - RNA, 24 nt, Human
ccugaucucaggcgauccgcccac

SEQ ID NO: 1313975 - RNA, 24 nt, Human
cgauccgcccaccucugccuccca

SEQ ID NO: 1313976 - RNA, 21 nt, Human
cgcccaugcugcccuucaagg

SEQ ID NO: 1313977 - RNA, 19 nt, Human
cgccucccggguucacgcc

SEQ ID NO: 1313978 - RNA, 22 nt, Human
cuaggagaaagagaacaagaaa

SEQ ID NO: 1313979 - RNA, 23 nt, Human
cuaggcaccaggaagacugugcu

SEQ ID NO: 1313980 - RNA, 24 nt, Human
cucacucugucacccaggcuggag

SEQ ID NO: 1313981 - RNA, 24 nt, Human
cucacugcaaccuccgccucccgg

SEQ ID NO: 1313982 - RNA, 21 nt, Human
cucaggcgauccgcccaccuc

SEQ ID NO: 1313983 - RNA, 24 nt, Human
cucaggcgauccgcccaccucugc

SEQ ID NO: 1313984 - RNA, 21 nt, Human
cucccggguucacgccauucu

SEQ ID NO: 1313985 - RNA, 19 nt, Human
cucugucgcccaggcugga

SEQ ID NO: 1313986 - RNA, 21 nt, Human
cucuguucuuaaauacucuuc

SEQ ID NO: 1313987 - RNA, 23 nt, Human
cugcaaccuccgccucccggguu

SEQ ID NO: 1313988 - RNA, 24 nt, Human
cugcaaccuccgccucccggguuc

SEQ ID NO: 1313989 - RNA, 23 nt, Human
cugccucccgagcagcugggauu

SEQ ID NO: 1313990 - RNA, 19 nt, Human
cugucacccaggcuggagu

SEQ ID NO: 1313991 - RNA, 24 nt, Human
cuugcucuguuacccaggcuggag

SEQ ID NO: 1313992 - RNA, 22 nt, Human
gaaacaccugcguuuugaaaca

SEQ ID NO: 1313993 - RNA, 22 nt, Human
gagaacccuaggagaaagagaa

SEQ ID NO: 1313994 - RNA, 23 nt, Human
gagaacgagaacccuaggagaaa

SEQ ID NO: 1313995 - RNA, 24 nt, Human
gagacaggguuucaccaugugggc

SEQ ID NO: 1313996 - RNA, 27 nt, Human
gagcagcugggauuacaggcguguguc

SEQ ID NO: 1313997 - RNA, 18 nt, Human
gagugcagugguacaauc

SEQ ID NO: 1313998 - RNA, 18 nt, Human
gauuacagaugugagcca

SEQ ID NO: 1313999 - RNA, 21 nt, Human
gauuacagaugugagccacca

SEQ ID NO: 1314000 - RNA, 19 nt, Human
gauuacaggcgugugucac

SEQ ID NO: 1314001 - RNA, 18 nt, Human
gcagcugggauuacaggc

SEQ ID NO: 1314002 - RNA, 22 nt, Human
gcccggcuaauuuuuguauuuu

SEQ ID NO: 1314003 - RNA, 25 nt, Human
gcucuguuacccaggcuggagugca

SEQ ID NO: 1314004 - RNA, 19 nt, Human
gcuggagugcaguggcgug

SEQ ID NO: 1314005 - RNA, 21 nt, Human
gcugggauuacagaugugagc

SEQ ID NO: 1314006 - RNA, 19 nt, Human
ggcuaaaccuccagaaacc

SEQ ID NO: 1314007 - RNA, 22 nt, Human
ggcuggagugcaguggcgugau

SEQ ID NO: 1314008 - RNA, 24 nt, Human
ggcuggucucgaacuccugaucuc

SEQ ID NO: 1314009 - RNA, 24 nt, Human
gggccaggcuggucucgaacuccu

SEQ ID NO: 1314010 - RNA, 22 nt, Human
gucagguacuaaacggagaggg

SEQ ID NO: 1314011 - RNA, 18 nt, Human
guggcuccguccccaccc

SEQ ID NO: 1314012 - RNA, 21 nt, Human
uaaaccagaaacaccugcguu

SEQ ID NO: 1314013 - RNA, 24 nt, Human
uaauuuuuguauuuuuaguagaga

SEQ ID NO: 1314014 - RNA, 22 nt, Human
uacagaugugagccaccacacc

SEQ ID NO: 1314015 - RNA, 21 nt, Human
uacccaggcuggagugcagug

SEQ ID NO: 1314016 - RNA, 24 nt, Human
uacccaggcuggagugcaguggcg

SEQ ID NO: 1314017 - RNA, 22 nt, Human
uagagacagggucucacucugu

SEQ ID NO: 1314018 - RNA, 22 nt, Human
uagagacaggguuucaccaugu

SEQ ID NO: 1314019 - RNA, 24 nt, Human
uaguagagacaggguuucaccaug

SEQ ID NO: 1314020 - RNA, 25 nt, Human
uaguagagacaggguuucaccaugu

SEQ ID NO: 1314021 - RNA, 22 nt, Human
ucacccaggcuggagugcagug

SEQ ID NO: 1314022 - RNA, 24 nt, Human
ucacccucugucgcccaggcugga

SEQ ID NO: 1314023 - RNA, 23 nt, Human
ucacugcaaccuccgccucccgg

SEQ ID NO: 1314024 - RNA, 24 nt, Human
ucacugcaaccuccgccucccggg

SEQ ID NO: 1314025 - RNA, 25 nt, Human
ucacugcaaccuccgccucccgggu

SEQ ID NO: 1314026 - RNA, 26 nt, Human
ucacugcaaccuccgccucccggguu

SEQ ID NO: 1314027 - RNA, 18 nt, Human
ucccaaagugcugggauu

SEQ ID NO: 1314028 - RNA, 23 nt, Human
ucccaaagugcugggauuacaga

SEQ ID NO: 1314029 - RNA, 21 nt, Human
ucccacagcaaugguuugccu

SEQ ID NO: 1314030 - RNA, 24 nt, Human
ucccgagcagcugggauuacaggc

SEQ ID NO: 1314031 - RNA, 19 nt, Human
ucccggccaccauggcccu

SEQ ID NO: 1314032 - RNA, 21 nt, Human
ucccggguucacgccauucuc

SEQ ID NO: 1314033 - RNA, 24 nt, Human
ucccggguucacgccauucuccug

SEQ ID NO: 1314034 - RNA, 18 nt, Human
ucgcccaggcuggagugc

SEQ ID NO: 1314035 - RNA, 22 nt, Human
ucucacucugucacccaggcug

SEQ ID NO: 1314036 - RNA, 23 nt, Human
ucucacucugucacccaggcugg

SEQ ID NO: 1314037 - RNA, 24 nt, Human
ucucacucugucacccaggcugga

SEQ ID NO: 1314038 - RNA, 26 nt, Human
ucucacucugucacccaggcuggagu

SEQ ID NO: 1314039 - RNA, 27 nt, Human
ucucacucugucacccaggcuggagug

SEQ ID NO: 1314040 - RNA, 23 nt, Human
ucuccugccucugccucccgagc

SEQ ID NO: 1314041 - RNA, 23 nt, Human
ucucgaacuccugaucucaggcg

SEQ ID NO: 1314042 - RNA, 25 nt, Human
ucugcagcuccaacaacagcucacc

SEQ ID NO: 1314043 - RNA, 24 nt, Human
ucugucacccaggcuggagugcag

SEQ ID NO: 1314044 - RNA, 24 nt, Human
ucuguuacccaggcuggagugcag

SEQ ID NO: 1314045 - RNA, 18 nt, Human
ucuguucuuaaauacucu

SEQ ID NO: 1314046 - RNA, 23 nt, Human
ucuugcucuguuacccaggcugg

SEQ ID NO: 1314047 - RNA, 24 nt, Human
ucuugcucuguuacccaggcugga

SEQ ID NO: 1314048 - RNA, 20 nt, Human
ugaaacagguggucagguac

SEQ ID NO: 1314049 - RNA, 18 nt, Human
ugagacagagucuugcuc

SEQ ID NO: 1314050 - RNA, 22 nt, Human
ugagacagagucuugcucuguu

SEQ ID NO: 1314051 - RNA, 18 nt, Human
ugaucucaggcgauccgc

SEQ ID NO: 1314052 - RNA, 24 nt, Human
ugccucugccucccgagcagcugg

SEQ ID NO: 1314053 - RNA, 24 nt, Human
ugcucuguuacccaggcuggagug

SEQ ID NO: 1314054 - RNA, 18 nt, Human
ugcugggauuacagaugu

SEQ ID NO: 1314055 - RNA, 24 nt, Human
ugcugggauuacagaugugagcca

SEQ ID NO: 1314056 - RNA, 19 nt, Human
uggagugcaguggcgugau

SEQ ID NO: 1314057 - RNA, 23 nt, Human
uggagugcaguggcgugaucucg

SEQ ID NO: 1314058 - RNA, 24 nt, Human
uggagugcaguggcgugaucucgg

SEQ ID NO: 1314059 - RNA, 18 nt, Human
uggagugcagugguacaa

SEQ ID NO: 1314060 - RNA, 19 nt, Human
uggagugcagugguacaau

SEQ ID NO: 1314061 - RNA, 20 nt, Human
uggcgugaucucggcucacu

SEQ ID NO: 1314062 - RNA, 18 nt, Human
uggcuccguccccaccca

SEQ ID NO: 1314063 - RNA, 18 nt, Human
ugggauuacagaugugag

SEQ ID NO: 1314064 - RNA, 19 nt, Human
ugggauuacagaugugagc

SEQ ID NO: 1314065 - RNA, 22 nt, Human
ugggauuacagaugugagccac

SEQ ID NO: 1314066 - RNA, 24 nt, Human
ugggauuacagaugugagccacca

SEQ ID NO: 1314067 - RNA, 18 nt, Human
ugggauuacaggcgugug

SEQ ID NO: 1314068 - RNA, 21 nt, Human
ugggauuacaggcguguguca

SEQ ID NO: 1314069 - RNA, 22 nt, Human
ugggauuacaggcgugugucac

SEQ ID NO: 1314070 - RNA, 22 nt, Human
ugggauuacaggcgugugucac

SEQ ID NO: 1314071 - RNA, 24 nt, Human
ugggauuacaggcgugugucacua

SEQ ID NO: 1314072 - RNA, 22 nt, Human
uguaccacgugggaggggccuu

SEQ ID NO: 1314073 - RNA, 24 nt, Human
uuacccaggcuggagugcaguggc

SEQ ID NO: 1314074 - RNA, 24 nt, Human
uuaguagagacaggguuucaccau

SEQ ID NO: 1314075 - RNA, 19 nt, Human
uuauuuuuuugagacagag

SEQ ID NO: 1314076 - RNA, 28 nt, Human
uucuuuuuuuuuuuuuuagagacagggg

SEQ ID NO: 1314077 - RNA, 24 nt, Human
uugcucuguuacccaggcuggagu

SEQ ID NO: 1314078 - RNA, 24 nt, Human
uuucaccaugugggccaggcuggu

SEQ ID NO: 1314079 - RNA, 21 nt, Human
uuuucuuuuuuuugaggaguc

SEQ ID NO: 1314080 - RNA, 24 nt, Human
uuuuuaguagagacaggguuucac

SEQ ID NO: 1314081 - RNA, 20 nt, Human
uuuuuguauuuuuaguagag

SEQ ID NO: 1314082 - RNA, 27 nt, Human
uuuuuuuuuuuuagagacagggucuca

SEQ ID NO: 1314083 - RNA, 21 nt, Human
cgcccgcgggggaggccgccu

SEQ ID NO: 1314084 - RNA, 19 nt, Human
cgccuccucccggcagccc

SEQ ID NO: 1314085 - RNA, 20 nt, Human
ggcagcccgcccccuccggg

SEQ ID NO: 1314086 - RNA, 23 nt, Human
ucccggcagcccgcccccuccgg

SEQ ID NO: 1314087 - RNA, 21 nt, Human
uccggggccacccaggaccaa

SEQ ID NO: 1314088 - RNA, 24 nt, Human
uccggggccacccaggaccaagag

SEQ ID NO: 1314089 - RNA, 21 nt, Human
aaucuguuucuucccacucug

SEQ ID NO: 1314090 - RNA, 23 nt, Human
gccagaauccaaaggccagaacu

SEQ ID NO: 1314091 - RNA, 19 nt, Human
ucaccaguuuugauguucu

SEQ ID NO: 1314092 - RNA, 20 nt, Human
ucagaacagaaggggaucaa

SEQ ID NO: 1314093 - RNA, 24 nt, Human
uccaaaggccagaacuugcggacc

SEQ ID NO: 1314094 - RNA, 21 nt, Human
ucuguuucuucccacucugug

SEQ ID NO: 1314095 - RNA, 22 nt, Human
ugacaggugugacuaccagguc

SEQ ID NO: 1314096 - RNA, 19 nt, Human
ugccuuagcaguauugaag

SEQ ID NO: 1314097 - RNA, 19 nt, Human
acagacgaggaacguugcg

SEQ ID NO: 1314098 - RNA, 18 nt, Human
aggaagucuggaguccag

SEQ ID NO: 1314099 - RNA, 23 nt, Human
aggagcgugcacagcucccgugc

SEQ ID NO: 1314100 - RNA, 20 nt, Human
aggaggcggugagcguccug

SEQ ID NO: 1314101 - RNA, 21 nt, Human
cacccgaacauaaagcucccg

SEQ ID NO: 1314102 - RNA, 18 nt, Human
ccaagcagcacccgaaca

SEQ ID NO: 1314103 - RNA, 18 nt, Human
ccccaagcagcacccgaa

SEQ ID NO: 1314104 - RNA, 20 nt, Human
ccccaagcagcacccgaaca

SEQ ID NO: 1314105 - RNA, 20 nt, Human
ccucaucugugaaguggagc

SEQ ID NO: 1314106 - RNA, 20 nt, Human
ccuccacacucuccacugca

SEQ ID NO: 1314107 - RNA, 18 nt, Human
ccuggcugccuuccagag

SEQ ID NO: 1314108 - RNA, 18 nt, Human
cgaggaacguugcggggg

SEQ ID NO: 1314109 - RNA, 22 nt, Human
cuguccccaagcagcacccgaa

SEQ ID NO: 1314110 - RNA, 23 nt, Human
gagcagcagccccugaugugccc

SEQ ID NO: 1314111 - RNA, 24 nt, Human
gcagcagccccugaugugcccucu

SEQ ID NO: 1314112 - RNA, 18 nt, Human
gcuguccccaagcagcac

SEQ ID NO: 1314113 - RNA, 21 nt, Human
gugaaguggagcagcagcccc

SEQ ID NO: 1314114 - RNA, 21 nt, Human
uaggaagagcuguccccaagc

SEQ ID NO: 1314115 - RNA, 20 nt, Human
uccccaagcagcacccgaac

SEQ ID NO: 1314116 - RNA, 19 nt, Human
ugaaguggagcagcagccc

SEQ ID NO: 1314117 - RNA, 22 nt, Human
ugaaguggagcagcagccccug

SEQ ID NO: 1314118 - RNA, 21 nt, Human
ugaggagcgugcacagcuccc

SEQ ID NO: 1314119 - RNA, 19 nt, Human
ugagguggccgugcuucag

SEQ ID NO: 1314120 - RNA, 24 nt, Human
ugcacagcucccgugcagcgacca

SEQ ID NO: 1314121 - RNA, 18 nt, Human
ugcccgaagaggaggcgg

SEQ ID NO: 1314122 - RNA, 20 nt, Human
ugcccgaagaggaggcggug

SEQ ID NO: 1314123 - RNA, 18 nt, Human
ugcuucaguccuggcugc

SEQ ID NO: 1314124 - RNA, 21 nt, Human
uugaaccuucuugaccucucu

SEQ ID NO: 1314125 - RNA, 21 nt, Human
aagggagaagaaaucagagag

SEQ ID NO: 1314126 - RNA, 23 nt, Human
agacaccaaaaggcucugcagcc

SEQ ID NO: 1314127 - RNA, 26 nt, Human
aggaacacacagggaggcauucagac

SEQ ID NO: 1314128 - RNA, 19 nt, Human
aggaaggaacacacaggga

SEQ ID NO: 1314129 - RNA, 20 nt, Human
aggaaggaacacacagggaa

SEQ ID NO: 1314130 - RNA, 23 nt, Human
caaucugucauucacggaucccu

SEQ ID NO: 1314131 - RNA, 19 nt, Human
caccaaaaggcucugcagc

SEQ ID NO: 1314132 - RNA, 20 nt, Human
ccaaccaugccuuggccccc

SEQ ID NO: 1314133 - RNA, 20 nt, Human
ccccaaccaugccuuggccc

SEQ ID NO: 1314134 - RNA, 21 nt, Human
cccccaaccaugccuuggccc

SEQ ID NO: 1314135 - RNA, 24 nt, Human
cggaucccugaggaaggaacacac

SEQ ID NO: 1314136 - RNA, 21 nt, Human
gaagggagaagaaaucagaga

SEQ ID NO: 1314137 - RNA, 22 nt, Human
gaagggagaagaaaucagagag

SEQ ID NO: 1314138 - RNA, 20 nt, Human
gccccagggcugagccccca

SEQ ID NO: 1314139 - RNA, 27 nt, Human
ggcgaagggagaagaaaagggagggcc

SEQ ID NO: 1314140 - RNA, 22 nt, Human
gggcugagcccccagcccagcc

SEQ ID NO: 1314141 - RNA, 20 nt, Human
ggugcugugggcgaagggag

SEQ ID NO: 1314142 - RNA, 23 nt, Human
ucccccaaccaugccuuggcccc

SEQ ID NO: 1314143 - RNA, 18 nt, Human
ucugcagcccagguuggc

SEQ ID NO: 1314144 - RNA, 18 nt, Human
ugagcccccagcccagcc

SEQ ID NO: 1314145 - RNA, 25 nt, Human
ugcagcccagguuggcccugcuucu

SEQ ID NO: 1314146 - RNA, 21 nt, Human
ugggugcugugggcgaaggga

SEQ ID NO: 1314147 - RNA, 21 nt, Human
ugugggcgaagggagaagaaa

SEQ ID NO: 1314148 - RNA, 19 nt, Human
uugggauagcagcuccccc

SEQ ID NO: 1314149 - RNA, 22 nt, Human
aaggguuuggcuuuauuguugc

SEQ ID NO: 1314150 - RNA, 21 nt, Human
acagagcccccaaagggugcc

SEQ ID NO: 1314151 - RNA, 22 nt, Human
agagccagaccaagggccccug

SEQ ID NO: 1314152 - RNA, 19 nt, Human
agccuggaguaugccagcu

SEQ ID NO: 1314153 - RNA, 19 nt, Human
aggcggcggggcagggcug

SEQ ID NO: 1314154 - RNA, 20 nt, Human
aggcggcggggcagggcugg

SEQ ID NO: 1314155 - RNA, 20 nt, Human
cagagcccccaaagggugcc

SEQ ID NO: 1314156 - RNA, 19 nt, Human
caggcccagcccuggaggc

SEQ ID NO: 1314157 - RNA, 23 nt, Human
ccaguguuuuuucaguggguggc

SEQ ID NO: 1314158 - RNA, 19 nt, Human
cccagcggagucccaggag

SEQ ID NO: 1314159 - RNA, 18 nt, Human
cccaugcuugcugugggg

SEQ ID NO: 1314160 - RNA, 21 nt, Human
cccccaaagggugccuggucc

SEQ ID NO: 1314161 - RNA, 20 nt, Human
ccucaguuuccccagcugga

SEQ ID NO: 1314162 - RNA, 21 nt, Human
ccugccaggucgaggcugcgc

SEQ ID NO: 1314163 - RNA, 25 nt, Human
ccuggaggcccaggagagccagacc

SEQ ID NO: 1314164 - RNA, 19 nt, Human
cgcggccacgugguugugg

SEQ ID NO: 1314165 - RNA, 24 nt, Human
cuauaucugucacccaguguuuuu

SEQ ID NO: 1314166 - RNA, 21 nt, Human
gagccucaguuuccccagcug

SEQ ID NO: 1314167 - RNA, 19 nt, Human
gaguuugggguagggugug

SEQ ID NO: 1314168 - RNA, 19 nt, Human
gcccaggagagccagacca

SEQ ID NO: 1314169 - RNA, 20 nt, Human
gccucaguuuccccagcugg

SEQ ID NO: 1314170 - RNA, 21 nt, Human
gcgcggccacgugguuguggg

SEQ ID NO: 1314171 - RNA, 24 nt, Human
gcggcggggcagggcuggaggcac

SEQ ID NO: 1314172 - RNA, 21 nt, Human
ggcccaggagagccagaccaa

SEQ ID NO: 1314173 - RNA, 23 nt, Human
ggccccuggugggcguugucucc

SEQ ID NO: 1314174 - RNA, 22 nt, Human
ggcguugucuccucaguccacg

SEQ ID NO: 1314175 - RNA, 21 nt, Human
gggcagggcuggaggcacgcg

SEQ ID NO: 1314176 - RNA, 22 nt, Human
gguuguggggaggaguccgugg

SEQ ID NO: 1314177 - RNA, 19 nt, Human
guugcugccuccaucugug

SEQ ID NO: 1314178 - RNA, 24 nt, Human
ucacccaguguuuuuucagugggu

SEQ ID NO: 1314179 - RNA, 23 nt, Human
ucaggcccgguguggcgaccagg

SEQ ID NO: 1314180 - RNA, 28 nt, Human
ucaggcccgguguggcgaccaggucacg

SEQ ID NO: 1314181 - RNA, 19 nt, Human
ucccaggagucugagcugc

SEQ ID NO: 1314182 - RNA, 22 nt, Human
ucccugcaaucacacguggcuu

SEQ ID NO: 1314183 - RNA, 22 nt, Human
uccgugcugagugcuggaaggg

SEQ ID NO: 1314184 - RNA, 18 nt, Human
uccguggacagagccccc

SEQ ID NO: 1314185 - RNA, 23 nt, Human
ucugagcugcucugcugggccuc

SEQ ID NO: 1314186 - RNA, 25 nt, Human
ugagggucccuauaucugucaccca

SEQ ID NO: 1314187 - RNA, 19 nt, Human
ugccucugugucucggcca

SEQ ID NO: 1314188 - RNA, 19 nt, Human
ugcugagugcuggaagggu

SEQ ID NO: 1314189 - RNA, 19 nt, Human
uggacagagcccccaaagg

SEQ ID NO: 1314190 - RNA, 22 nt, Human
uggggaggaguccguggacaga

SEQ ID NO: 1314191 - RNA, 19 nt, Human
ugugagggucccuauaucu

SEQ ID NO: 1314192 - RNA, 23 nt, Human
uguggcgaccaggucacgggcac

SEQ ID NO: 1314193 - RNA, 23 nt, Human
ugugugccucaagaccucaaaau

SEQ ID NO: 1314194 - RNA, 24 nt, Human
ugugugccucaagaccucaaaauu

SEQ ID NO: 1314195 - RNA, 23 nt, Human
uguuuggugaccccagugugugc

SEQ ID NO: 1314196 - RNA, 21 nt, Human
aaagcuugaaaauaaaaguuu

SEQ ID NO: 1314197 - RNA, 24 nt, Human
aagcugaggugggaggauuucuug

SEQ ID NO: 1314198 - RNA, 31 nt, Human
accacugcacucaaaaaaaaaaaaaaaaaaa

SEQ ID NO: 1314199 - RNA, 24 nt, Human
agcacuuugggaggccaagguggg

SEQ ID NO: 1314200 - RNA, 21 nt, Human
aggccaagguggguggaucac

SEQ ID NO: 1314201 - RNA, 24 nt, Human
caacaauggcaccacugcacucaa

SEQ ID NO: 1314202 - RNA, 21 nt, Human
caagguggguggaucacuuga

SEQ ID NO: 1314203 - RNA, 23 nt, Human
caagguggguggaucacuugagu

SEQ ID NO: 1314204 - RNA, 20 nt, Human
caauaacugcaauaaacuuu

SEQ ID NO: 1314205 - RNA, 24 nt, Human
caccuguagucccagcuacucugg

SEQ ID NO: 1314206 - RNA, 24 nt, Human
cacgccuguaaucccagcacuuug

SEQ ID NO: 1314207 - RNA, 20 nt, Human
cacugcacucaaaaaaaaaa

SEQ ID NO: 1314208 - RNA, 24 nt, Human
cagcacuuugggaggccaaggugg

SEQ ID NO: 1314209 - RNA, 22 nt, Human
ccuguaaucccagcacuuuggg

SEQ ID NO: 1314210 - RNA, 22 nt, Human
ccuguagucccagcuacucugg

SEQ ID NO: 1314211 - RNA, 23 nt, Human
ccuguagucccagcuacucugga

SEQ ID NO: 1314212 - RNA, 23 nt, Human
cgccuguaaucccagcacuuugg

SEQ ID NO: 1314213 - RNA, 22 nt, Human
cucacgccuguaaucccagcac

SEQ ID NO: 1314214 - RNA, 24 nt, Human
cucacgccuguaaucccagcacuu

SEQ ID NO: 1314215 - RNA, 20 nt, Human
cugcacucaaaaaaaaaaaa

SEQ ID NO: 1314216 - RNA, 23 nt, Human
cugcacucaaaaaaaaaaaaaaa

SEQ ID NO: 1314217 - RNA, 25 nt, Human
cugcacucaaaaaaaaaaaaaaaaa

SEQ ID NO: 1314218 - RNA, 18 nt, Human
gagcaacaauggcaccac

SEQ ID NO: 1314219 - RNA, 23 nt, Human
gaucacuugaguucaagaccaga

SEQ ID NO: 1314220 - RNA, 20 nt, Human
gauuucuugagccuggaaga

SEQ ID NO: 1314221 - RNA, 24 nt, Human
gccuggaagauugaggcugcagug

SEQ ID NO: 1314222 - RNA, 20 nt, Human
ggcugcagugagcaacaaug

SEQ ID NO: 1314223 - RNA, 24 nt, Human
gguggcucacgccuguaaucccag

SEQ ID NO: 1314224 - RNA, 23 nt, Human
gguuugguggcucacgccuguaa

SEQ ID NO: 1314225 - RNA, 22 nt, Human
guggcaugcaccuguaguccca

SEQ ID NO: 1314226 - RNA, 22 nt, Human
guggcuggguuugguggcucaa

SEQ ID NO: 1314227 - RNA, 22 nt, Human
uaccuaaaguaaaauugguggc

SEQ ID NO: 1314228 - RNA, 23 nt, Human
ugaaagacuuuaaaauuuauuuu

SEQ ID NO: 1314229 - RNA, 24 nt, Human
ugagccuggaagauugaggcugca

SEQ ID NO: 1314230 - RNA, 24 nt, Human
ugaggugggaggauuucuugagcc

SEQ ID NO: 1314231 - RNA, 25 nt, Human
ugcaccuguagucccagcuacucug

SEQ ID NO: 1314232 - RNA, 23 nt, Human
uggaagcugaggugggaggauuu

SEQ ID NO: 1314233 - RNA, 20 nt, Human
uggaucacuugaguucaaga

SEQ ID NO: 1314234 - RNA, 21 nt, Human
uggaucacuugaguucaagac

SEQ ID NO: 1314235 - RNA, 26 nt, Human
uggaucacuugaguucaagaccagac

SEQ ID NO: 1314236 - RNA, 22 nt, Human
uggcaugcaccuguagucccag

SEQ ID NO: 1314237 - RNA, 24 nt, Human
uggcucacgccuguaaucccagca

SEQ ID NO: 1314238 - RNA, 22 nt, Human
ugggaggauuucuugagccugg

SEQ ID NO: 1314239 - RNA, 23 nt, Human
ugggaggccaagguggguggauc

SEQ ID NO: 1314240 - RNA, 24 nt, Human
ugggaggccaagguggguggauca

SEQ ID NO: 1314241 - RNA, 25 nt, Human
uugguggcucacgccuguaauccca

SEQ ID NO: 1314242 - RNA, 18 nt, Human
aaguagccaucucugaag

SEQ ID NO: 1314243 - RNA, 22 nt, Human
aggcagaugagggccuuggggu

SEQ ID NO: 1314244 - RNA, 18 nt, Human
aggucuccucugccaucu

SEQ ID NO: 1314245 - RNA, 21 nt, Human
cagcucaagccgcagggggcc

SEQ ID NO: 1314246 - RNA, 21 nt, Human
ccagcaaacccuuuauggacu

SEQ ID NO: 1314247 - RNA, 23 nt, Human
ccagcacagagacgggauggcug

SEQ ID NO: 1314248 - RNA, 20 nt, Human
ccauccagcacagagacggg

SEQ ID NO: 1314249 - RNA, 19 nt, Human
ccaugugacaaaugaguug

SEQ ID NO: 1314250 - RNA, 20 nt, Human
ccccaucuaaaggucuccuc

SEQ ID NO: 1314251 - RNA, 21 nt, Human
ccgcagcucaagccgcagggg

SEQ ID NO: 1314252 - RNA, 22 nt, Human
ccuuuauggacugauuuucuca

SEQ ID NO: 1314253 - RNA, 21 nt, Human
cgaaguagccaucucugaagc

SEQ ID NO: 1314254 - RNA, 20 nt, Human
cgcagcucaagccgcagggg

SEQ ID NO: 1314255 - RNA, 18 nt, Human
cuacacucuaaaaguagg

SEQ ID NO: 1314256 - RNA, 21 nt, Human
cuggaggagacagcucuccuu

SEQ ID NO: 1314257 - RNA, 18 nt, Human
cugggugacagccaggcu

SEQ ID NO: 1314258 - RNA, 23 nt, Human
cuuaggcugguguuggccccagc

SEQ ID NO: 1314259 - RNA, 20 nt, Human
gcugggacaugugaccgccc

SEQ ID NO: 1314260 - RNA, 24 nt, Human
ggacaaaggcagaugagggccuug

SEQ ID NO: 1314261 - RNA, 24 nt, Human
ggauggcugggugacagccaggcu

SEQ ID NO: 1314262 - RNA, 18 nt, Human
uccaccagcuggaggaga

SEQ ID NO: 1314263 - RNA, 20 nt, Human
uccaggaggaggauaggaag

SEQ ID NO: 1314264 - RNA, 24 nt, Human
uccgcagcucaagccgcagggggc

SEQ ID NO: 1314265 - RNA, 23 nt, Human
ucuaaaggucuccucugccaucu

SEQ ID NO: 1314266 - RNA, 24 nt, Human
ucugccaucugcucugggaguugg

SEQ ID NO: 1314267 - RNA, 20 nt, Human
uggcugggugacagccaggc

SEQ ID NO: 1314268 - RNA, 22 nt, Human
ugggacaaaggcagaugagggc

SEQ ID NO: 1314269 - RNA, 20 nt, Human
ugggacaccacgaggacgaa

SEQ ID NO: 1314270 - RNA, 21 nt, Human
ugguguuggccccagcaaacc

SEQ ID NO: 1314271 - RNA, 18 nt, Human
uuggccagugugauccug

SEQ ID NO: 1314272 - RNA, 21 nt, Human
agauccuuggcaaggcuguuc

SEQ ID NO: 1314273 - RNA, 21 nt, Human
uccuuggcaaggcuguucuga

SEQ ID NO: 1314274 - RNA, 22 nt, Human
ccucuaagauuauaguuauuaa

SEQ ID NO: 1314275 - RNA, 21 nt, Human
accacagccuucagcagcgac

SEQ ID NO: 1314276 - RNA, 19 nt, Human
acugggauggggugaacgg

SEQ ID NO: 1314277 - RNA, 22 nt, Human
agacuugaaaagccguugggcg

SEQ ID NO: 1314278 - RNA, 18 nt, Human
auagagcccugggccguc

SEQ ID NO: 1314279 - RNA, 20 nt, Human
auagagcccugggccgucug

SEQ ID NO: 1314280 - RNA, 18 nt, Human
caagugcaucgcccgccc

SEQ ID NO: 1314281 - RNA, 19 nt, Human
caccacagccuucagcagc

SEQ ID NO: 1314282 - RNA, 21 nt, Human
caccacagccuucagcagcga

SEQ ID NO: 1314283 - RNA, 23 nt, Human
cagcagguuuucacccuggugcc

SEQ ID NO: 1314284 - RNA, 21 nt, Human
cagccuccgaccucucagacc

SEQ ID NO: 1314285 - RNA, 22 nt, Human
cagcgacacucgcagccuccga

SEQ ID NO: 1314286 - RNA, 19 nt, Human
caggcagcgcuccaccccc

SEQ ID NO: 1314287 - RNA, 20 nt, Human
cccgcggcgucgcccuugac

SEQ ID NO: 1314288 - RNA, 21 nt, Human
cccgcggcgucgcccuugaca

SEQ ID NO: 1314289 - RNA, 24 nt, Human
cccgguccaccacagccuucagca

SEQ ID NO: 1314290 - RNA, 19 nt, Human
cccguccuuuggccgccug

SEQ ID NO: 1314291 - RNA, 18 nt, Human
cccugggccgucuggccc

SEQ ID NO: 1314292 - RNA, 21 nt, Human
ccguggaaacugggauggggu

SEQ ID NO: 1314293 - RNA, 22 nt, Human
ccucagggucaagugcaucgcc

SEQ ID NO: 1314294 - RNA, 21 nt, Human
ccugggcucaagguccgcucc

SEQ ID NO: 1314295 - RNA, 19 nt, Human
cggcgucgcccuugacagg

SEQ ID NO: 1314296 - RNA, 19 nt, Human
cguugggcgcgcgccugca

SEQ ID NO: 1314297 - RNA, 18 nt, Human
cucaagguccgcuccucu

SEQ ID NO: 1314298 - RNA, 22 nt, Human
cucagggucaagugcaucgccc

SEQ ID NO: 1314299 - RNA, 21 nt, Human
cuccacaauccgcgauccagc

SEQ ID NO: 1314300 - RNA, 20 nt, Human
cugcacggcgguugcugccc

SEQ ID NO: 1314301 - RNA, 18 nt, Human
cugcagcuccgaugccgg

SEQ ID NO: 1314302 - RNA, 21 nt, Human
cugcgcgccaggcagcgcucc

SEQ ID NO: 1314303 - RNA, 18 nt, Human
cuuguacaucucucugga

SEQ ID NO: 1314304 - RNA, 19 nt, Human
gagcuggcgggccugguac

SEQ ID NO: 1314305 - RNA, 20 nt, Human
gcacucuguauccacacgga

SEQ ID NO: 1314306 - RNA, 22 nt, Human
gcccgcccacuugagggguugc

SEQ ID NO: 1314307 - RNA, 19 nt, Human
gcccugggccgucuggccc

SEQ ID NO: 1314308 - RNA, 22 nt, Human
gcugcagcuccgaugccggccu

SEQ ID NO: 1314309 - RNA, 23 nt, Human
gcugcagcuccgaugccggccug

SEQ ID NO: 1314310 - RNA, 22 nt, Human
uacacacugcaggucacuacuc

SEQ ID NO: 1314311 - RNA, 19 nt, Human
ucagaccgagugagacuug

SEQ ID NO: 1314312 - RNA, 20 nt, Human
uccacaauccgcgauccagc

SEQ ID NO: 1314313 - RNA, 22 nt, Human
ucccggaagccgcucccugggc

SEQ ID NO: 1314314 - RNA, 19 nt, Human
ucccugggcucaagguccg

SEQ ID NO: 1314315 - RNA, 25 nt, Human
ucccugggcucaagguccgcuccuc

SEQ ID NO: 1314316 - RNA, 20 nt, Human
uccgaccucucagaccgagu

SEQ ID NO: 1314317 - RNA, 19 nt, Human
uccgcgcuacacaucuaga

SEQ ID NO: 1314318 - RNA, 21 nt, Human
ugagacuugaaaagccguugg

SEQ ID NO: 1314319 - RNA, 22 nt, Human
ugagacuugaaaagccguuggg

SEQ ID NO: 1314320 - RNA, 21 nt, Human
uggauccugggcccuggcacu

SEQ ID NO: 1314321 - RNA, 22 nt, Human
uggauccugggcccuggcacug

SEQ ID NO: 1314322 - RNA, 22 nt, Human
ugggcccuggcacugggcacuc

SEQ ID NO: 1314323 - RNA, 22 nt, Human
ugggcucaagguccgcuccucu

SEQ ID NO: 1314324 - RNA, 24 nt, Human
ugguaaccgggaugguaucgagca

SEQ ID NO: 1314325 - RNA, 21 nt, Human
aagaagggccauucgccgaug

SEQ ID NO: 1314326 - RNA, 18 nt, Human
cagccuccagaaugggaa

SEQ ID NO: 1314327 - RNA, 22 nt, Human
caugaaagaaucaguauuaaca

SEQ ID NO: 1314328 - RNA, 21 nt, Human
ccgcagcaguuuugaggccug

SEQ ID NO: 1314329 - RNA, 22 nt, Human
ccgcagcaguuuugaggccugc

SEQ ID NO: 1314330 - RNA, 23 nt, Human
gucuugucaucucccacagccuc

SEQ ID NO: 1314331 - RNA, 21 nt, Human
ucaguauuaacaaaacauuaa

SEQ ID NO: 1314332 - RNA, 21 nt, Human
ucagugucuggacuuccaggu

SEQ ID NO: 1314333 - RNA, 22 nt, Human
ucaucucccacagccuccagaa

SEQ ID NO: 1314334 - RNA, 26 nt, Human
ugucuugucaucucccacagccucca

SEQ ID NO: 1314335 - RNA, 18 nt, Human
uucagugucuggacuucc

SEQ ID NO: 1314336 - RNA, 21 nt, Human
uucagugucuggacuuccagg

SEQ ID NO: 1314337 - RNA, 22 nt, Human
uugaggccugcguucagugucu

SEQ ID NO: 1314338 - RNA, 20 nt, Human
agaacagucaggagaauuag

SEQ ID NO: 1314339 - RNA, 19 nt, Human
aucuaaagugggcacagga

SEQ ID NO: 1314340 - RNA, 18 nt, Human
caaggacuucuuuuugau

SEQ ID NO: 1314341 - RNA, 18 nt, Human
caccagacccagcagcag

SEQ ID NO: 1314342 - RNA, 23 nt, Human
cagcagcagcagccacuucaugg

SEQ ID NO: 1314343 - RNA, 19 nt, Human
ccagacccagcagcagcag

SEQ ID NO: 1314344 - RNA, 33 nt, Human; identical to SEQ ID NO: 1260239

SEQ ID NO: 1314345 - RNA, 21 nt, Human
cuggcuggguugagguugugc

SEQ ID NO: 1314346 - RNA, 22 nt, Human
cuucaugguucuucccgggucc

SEQ ID NO: 1314347 - RNA, 21 nt, Human
gaccuccacacuccccuggga

SEQ ID NO: 1314348 - RNA, 21 nt, Human
gagguggcugaagagacuuag

SEQ ID NO: 1314349 - RNA, 20 nt, Human
gauacaucuaaagugggcac

SEQ ID NO: 1314350 - RNA, 30 nt, Human; identical to SEQ ID NO: 1260245

SEQ ID NO: 1314351 - RNA, 21 nt, Human
gccaccagacccagcagcagc

SEQ ID NO: 1314352 - RNA, 25 nt, Human
ggacagaggccagaucuuccuggga

SEQ ID NO: 1314353 - RNA, 18 nt, Human
ggacagggaacagggcca

SEQ ID NO: 1314354 - RNA, 25 nt, Human
uaaagugggcacaggacagaggcca

SEQ ID NO: 1314355 - RNA, 24 nt, Human
uacaugaugcacucagagagcgcc

SEQ ID NO: 1314356 - RNA, 20 nt, Human
uaccagggugggagccuccc

SEQ ID NO: 1314357 - RNA, 22 nt, Human
ucuucccgggucccaacucgag

SEQ ID NO: 1314358 - RNA, 19 nt, Human
ugggaagaacagucaggag

SEQ ID NO: 1314359 - RNA, 21 nt, Human
ugggcacaggacagaggccag

SEQ ID NO: 1314360 - RNA, 25 nt, Human
acuccuccagcuccaccccuugccg

SEQ ID NO: 1314361 - RNA, 27 nt, Human
acucugcauguauucuccucuuccccu

SEQ ID NO: 1314362 - RNA, 20 nt, Human
acuuggcaacauuucagccc

SEQ ID NO: 1314363 - RNA, 19 nt, Human
agggggaccggggcaagcc

SEQ ID NO: 1314364 - RNA, 21 nt, Human
caccccagccccagccaccau

SEQ ID NO: 1314365 - RNA, 19 nt, Human
caccccuugccggcuaccu

SEQ ID NO: 1314366 - RNA, 22 nt, Human
cagaaaaggaccugacuuggca

SEQ ID NO: 1314367 - RNA, 20 nt, Human
cagccaccaucagaaaagga

SEQ ID NO: 1314368 - RNA, 26 nt, Human
cagccaccaucagaaaaggaccugac

SEQ ID NO: 1314369 - RNA, 18 nt, Human
cagccuggacucguucac

SEQ ID NO: 1314370 - RNA, 21 nt, Human
cagccuggacucguucacaaa

SEQ ID NO: 1314371 - RNA, 19 nt, Human
caucagaaaaggaccugac

SEQ ID NO: 1314372 - RNA, 22 nt, Human
ccagccccagccaccaucagaa

SEQ ID NO: 1314373 - RNA, 20 nt, Human
ccccagccccagccaccauc

SEQ ID NO: 1314374 - RNA, 21 nt, Human
cccugagcucaccccagcccc

SEQ ID NO: 1314375 - RNA, 21 nt, Human
ccuccagcuccaccccuugcc

SEQ ID NO: 1314376 - RNA, 23 nt, Human
ccugagcucaccccagccccagc

SEQ ID NO: 1314377 - RNA, 21 nt, Human
ccuugccggcuaccuuuucuu

SEQ ID NO: 1314378 - RNA, 22 nt, Human
ccuugccggcuaccuuuucuug

SEQ ID NO: 1314379 - RNA, 18 nt, Human
cggggcaagccgguuggg

SEQ ID NO: 1314380 - RNA, 19 nt, Human
cucacaauuuucugcagcc

SEQ ID NO: 1314381 - RNA, 26 nt, Human
cucacaauuuucugcagccuggacuc

SEQ ID NO: 1314382 - RNA, 21 nt, Human
cucaccccagccccagccacc

SEQ ID NO: 1314383 - RNA, 19 nt, Human
cuccucuuccccucccuga

SEQ ID NO: 1314384 - RNA, 18 nt, Human
cucugcauguauucuccu

SEQ ID NO: 1314385 - RNA, 20 nt, Human
cuuggcaacauuucagcccu

SEQ ID NO: 1314386 - RNA, 21 nt, Human
gacuccuccagcuccaccccu

SEQ ID NO: 1314387 - RNA, 21 nt, Human
gagacuccuccagcuccaccc

SEQ ID NO: 1314388 - RNA, 22 nt, Human
gauuuccucaucgauaacgcuc

SEQ ID NO: 1314389 - RNA, 24 nt, Human
ggaccggggcaagccgguugggga

SEQ ID NO: 1314390 - RNA, 21 nt, Human
ugcauguauucuccucuuccc

SEQ ID NO: 1314391 - RNA, 23 nt, Human
uuggcaacauuucagcccuucuc

SEQ ID NO: 1314392 - RNA, 24 nt, Human
aaagauagccaauaagggcuuaag

SEQ ID NO: 1314393 - RNA, 22 nt, Human
acuuuaaauauuaaaagaagaa

SEQ ID NO: 1314394 - RNA, 24 nt, Human
agagcagaacuggugggacuugag

SEQ ID NO: 1314395 - RNA, 22 nt, Human
agauagccaauaagggcuuaag

SEQ ID NO: 1314396 - RNA, 18 nt, Human
agcagggugaggcucagg

SEQ ID NO: 1314397 - RNA, 21 nt, Human
agcagggugaggcucaggugg

SEQ ID NO: 1314398 - RNA, 23 nt, Human
agcuauaugaucucuccaagcag

SEQ ID NO: 1314399 - RNA, 18 nt, Human
aggggguggggagcacaa

SEQ ID NO: 1314400 - RNA, 21 nt, Human
aggggguggggagcacaaggg

SEQ ID NO: 1314401 - RNA, 22 nt, Human
agguaggggguggggagcacaa

SEQ ID NO: 1314402 - RNA, 24 nt, Human
agguaggggguggggagcacaagg

SEQ ID NO: 1314403 - RNA, 22 nt, Human
caauaagggcuuaagaaaggga

SEQ ID NO: 1314404 - RNA, 26 nt, Human
caggaggaguagaaauuucuuauggc

SEQ ID NO: 1314405 - RNA, 21 nt, Human
ccacucagggcucaacagcag

SEQ ID NO: 1314406 - RNA, 20 nt, Human
ccgccgccugggcuugcugc

SEQ ID NO: 1314407 - RNA, 23 nt, Human
cuccuuauucuuaaggagcaaag

SEQ ID NO: 1314408 - RNA, 19 nt, Human
cucugaaacaggcuggaag

SEQ ID NO: 1314409 - RNA, 22 nt, Human
cugccuaauucauuagcuauau

SEQ ID NO: 1314410 - RNA, 19 nt, Human
cuucaaaaaauagcucccc

SEQ ID NO: 1314411 - RNA, 18 nt, Human
gcaacaagauggccaggc

SEQ ID NO: 1314412 - RNA, 24 nt, Human
gccaauaagggcuuaagaaaggga

SEQ ID NO: 1314413 - RNA, 20 nt, Human
gcugcguucuccuucgcagu

SEQ ID NO: 1314414 - RNA, 22 nt, Human
gcuugcugcguucuccuucgca

SEQ ID NO: 1314415 - RNA, 19 nt, Human
ggccauggcaauccucuuc

SEQ ID NO: 1314416 - RNA, 19 nt, Human
gggcuacauucccccagua

SEQ ID NO: 1314417 - RNA, 19 nt, Human
guccuccagccuuuccacc

SEQ ID NO: 1314418 - RNA, 21 nt, Human
uaggggguggggagcacaagg

SEQ ID NO: 1314419 - RNA, 22 nt, Human
uaggggguggggagcacaaggg

SEQ ID NO: 1314420 - RNA, 23 nt, Human
uaggggguggggagcacaagggc

SEQ ID NO: 1314421 - RNA, 20 nt, Human
uaguggucucugaaacaggc

SEQ ID NO: 1314422 - RNA, 19 nt, Human
uccaagcagcaacaagagg

SEQ ID NO: 1314423 - RNA, 18 nt, Human
uccuccagccuuuccacc

SEQ ID NO: 1314424 - RNA, 24 nt, Human
uccuuauucuuaaggagcaaaggu

SEQ ID NO: 1314425 - RNA, 19 nt, Human
ucucugaaacaggcuggaa

SEQ ID NO: 1314426 - RNA, 18 nt, Human
ugaaagcauuacagucug

SEQ ID NO: 1314427 - RNA, 19 nt, Human
ugaucucuccaagcagcaa

SEQ ID NO: 1314428 - RNA, 22 nt, Human
ugaucucuccaagcagcaacaa

SEQ ID NO: 1314429 - RNA, 20 nt, Human
ugcugcguucuccuucgcag

SEQ ID NO: 1314430 - RNA, 18 nt, Human
uggagguagggggugggg

SEQ ID NO: 1314431 - RNA, 19 nt, Human
uggcaauccucuuccuauu

SEQ ID NO: 1314432 - RNA, 21 nt, Human
ugggacuugagggaagggucc

SEQ ID NO: 1314433 - RNA, 19 nt, Human
uggggagcacaagggcuac

SEQ ID NO: 1314434 - RNA, 21 nt, Human
uggugggacuugagggaaggg

SEQ ID NO: 1314435 - RNA, 24 nt, Human
uggugggacuugagggaagggucc

SEQ ID NO: 1314436 - RNA, 23 nt, Human
uuaaacaagcaugguuuaaaaau

SEQ ID NO: 1314437 - RNA, 21 nt, Human
uuccccuagccacucagggcu

SEQ ID NO: 1314438 - RNA, 21 nt, Human
uucgcaguccucauucuccuu

SEQ ID NO: 1314439 - RNA, 22 nt, Human
uugcugcguucuccuucgcagu

SEQ ID NO: 1314440 - RNA, 19 nt, Human
cccgccguggacccuccuu

SEQ ID NO: 1314441 - RNA, 20 nt, Human
cccgccguggacccuccuug

SEQ ID NO: 1314442 - RNA, 21 nt, Human
ccguggacccuccuuggguua

SEQ ID NO: 1314443 - RNA, 25 nt, Human
ccuuggguuauuucgagcugugggg

SEQ ID NO: 1314444 - RNA, 21 nt, Human
cuacccgccguggacccuccu

SEQ ID NO: 1314445 - RNA, 22 nt, Human
aaccauuuuaaagcucagcccc

SEQ ID NO: 1314446 - RNA, 23 nt, Human
aaugccagccacgugggcagcag

SEQ ID NO: 1314447 - RNA, 23 nt, Human
acccuccccagacacccauccug

SEQ ID NO: 1314448 - RNA, 23 nt, Human
agcccuugacccuccccagacac

SEQ ID NO: 1314449 - RNA, 23 nt, Human
auuuuaaagcucagccccagccc

SEQ ID NO: 1314450 - RNA, 22 nt, Human
cagcagccugugaugucccacu

SEQ ID NO: 1314451 - RNA, 19 nt, Human
ccagcccuugacccucccc

SEQ ID NO: 1314452 - RNA, 28 nt, Human
cucagccccagcccuugacccuccccag

SEQ ID NO: 1314453 - RNA, 21 nt, Human
cucagccccagcccuugaccu

SEQ ID NO: 1314454 - RNA, 23 nt, Human
gcucagccccagcccuugacccu

SEQ ID NO: 1314455 - RNA, 24 nt, Human
ggccauggagggcugagagaggga

SEQ ID NO: 1314456 - RNA, 21 nt, Human
uaaagcucagccccagcccuu

SEQ ID NO: 1314457 - RNA, 20 nt, Human
uccccagacacccauccugg

SEQ ID NO: 1314458 - RNA, 22 nt, Human
ugugaugucccacucugugaca

SEQ ID NO: 1314459 - RNA, 18 nt, Human
uuaaagcucagccccagc

SEQ ID NO: 1314460 - RNA, 18 nt, Human
aaaaacagaaaagagcac

SEQ ID NO: 1314461 - RNA, 25 nt, Human
aaaaacagaaaagagcaccgguacc

SEQ ID NO: 1314462 - RNA, 22 nt, Human
aaacagaaaagagcaccuucag

SEQ ID NO: 1314463 - RNA, 24 nt, Human
accuucagagauagaugugagagg

SEQ ID NO: 1314464 - RNA, 21 nt, Human
agaaaagagcaccuucagaga

SEQ ID NO: 1314465 - RNA, 24 nt, Human
aggagggcaggagggaggaaaugu

SEQ ID NO: 1314466 - RNA, 20 nt, Human
caggagggcaggagggagga

SEQ ID NO: 1314467 - RNA, 23 nt, Human
ccaggcgccuugcuaguugcugg

SEQ ID NO: 1314468 - RNA, 23 nt, Human
ccaugaugcaaaaacagaaaaga

SEQ ID NO: 1314469 - RNA, 18 nt, Human
cucccagcaaggaacaag

SEQ ID NO: 1314470 - RNA, 22 nt, Human
gaaaagagcaccuucagagaua

SEQ ID NO: 1314471 - RNA, 21 nt, Human
gagggcaggagggaggaaaug

SEQ ID NO: 1314472 - RNA, 21 nt, Human
gagggcaggagggaggaaaug

SEQ ID NO: 1314473 - RNA, 22 nt, Human
gcaaaaacagaaaagagcaccu

SEQ ID NO: 1314474 - RNA, 22 nt, Human
ggaaaggcucugcguugcaaug

SEQ ID NO: 1314475 - RNA, 25 nt, Human
guugcaauguaaaacgauuccaacc

SEQ ID NO: 1314476 - RNA, 19 nt, Human
uaauagaggacagaguccc

SEQ ID NO: 1314477 - RNA, 23 nt, Human
uaccaggcgccuugcuaguugcu

SEQ ID NO: 1314478 - RNA, 25 nt, Human
uaguugcuggggacucccagcaagg

SEQ ID NO: 1314479 - RNA, 21 nt, Human
ucacugaaugauuacagugua

SEQ ID NO: 1314480 - RNA, 21 nt, Human
ucccagcaaggaacaagaugg

SEQ ID NO: 1314481 - RNA, 19 nt, Human
ucugcguugcaauguaaaa

SEQ ID NO: 1314482 - RNA, 19 nt, Human
ugcaaaaacagaaaagagc

SEQ ID NO: 1314483 - RNA, 22 nt, Human
uggauucuaauaagaacaguuc

SEQ ID NO: 1314484 - RNA, 24 nt, Human
uugcuaguugcuggggacucccag

SEQ ID NO: 1314485 - RNA, 22 nt, Human
agugaacugauaagaugagcac

SEQ ID NO: 1314486 - RNA, 25 nt, Human
cacacacuaaguuggacccacaagu

SEQ ID NO: 1314487 - RNA, 19 nt, Human
cacuaaguuggaccuuccc

SEQ ID NO: 1314488 - RNA, 23 nt, Human
cguagauucucugcacacacuaa

SEQ ID NO: 1314489 - RNA, 22 nt, Human
gacuuuuaaccugucacaauuc

SEQ ID NO: 1314490 - RNA, 20 nt, Human
uuuacagagugaacugauaa

SEQ ID NO: 1314491 - RNA, 20 nt, Human
aaaauuacaacuguguacca

SEQ ID NO: 1314492 - RNA, 22 nt, Human
aaauagacuuccuucugaccca

SEQ ID NO: 1314493 - RNA, 23 nt, Human
aagcgugcagcuuuucccccugg

SEQ ID NO: 1314494 - RNA, 21 nt, Human
acccacucuucuccuaggccu

SEQ ID NO: 1314495 - RNA, 19 nt, Human
agacuuccuucugacccac

SEQ ID NO: 1314496 - RNA, 23 nt, Human
aggaguucauuguuaguucugga

SEQ ID NO: 1314497 - RNA, 18 nt, Human
aggauggaaggcaacacc

SEQ ID NO: 1314498 - RNA, 21 nt, Human
auagacuuccuucugacccac

SEQ ID NO: 1314499 - RNA, 19 nt, Human
auggaaggcaacacccaca

SEQ ID NO: 1314500 - RNA, 22 nt, Human
caaauagacuuccuucugaccc

SEQ ID NO: 1314501 - RNA, 23 nt, Human
caccaagcgugcagcuuuucccc

SEQ ID NO: 1314502 - RNA, 18 nt, Human
caguccggugguuggccu

SEQ ID NO: 1314503 - RNA, 22 nt, Human
cauccacaaaguccauggucaa

SEQ ID NO: 1314504 - RNA, 23 nt, Human
ccagaaaaaccugggucaccaaa

SEQ ID NO: 1314505 - RNA, 20 nt, Human
ccagugcaagucauugucuu

SEQ ID NO: 1314506 - RNA, 24 nt, Human
ccagugcaagucauugucuuucuc

SEQ ID NO: 1314507 - RNA, 18 nt, Human
cccacugacccacucuuc

SEQ ID NO: 1314508 - RNA, 19 nt, Human
cccccuggggcuuuggcug

SEQ ID NO: 1314509 - RNA, 18 nt, Human
ccuguauuucaaggaggg

SEQ ID NO: 1314510 - RNA, 22 nt, Human
cgacacugucagauauugucca

SEQ ID NO: 1314511 - RNA, 18 nt, Human
cggugguuggccuuucug

SEQ ID NO: 1314512 - RNA, 21 nt, Human
cugacccacucuucuccuagg

SEQ ID NO: 1314513 - RNA, 24 nt, Human
cugacccacucuucuccuaggccu

SEQ ID NO: 1314514 - RNA, 22 nt, Human
cugcgaugccccuguauuucaa

SEQ ID NO: 1314515 - RNA, 19 nt, Human
cugggucccugauugguuc

SEQ ID NO: 1314516 - RNA, 22 nt, Human
gagagaagaugagaauuggaaa

SEQ ID NO: 1314517 - RNA, 23 nt, Human
gauaaaagggagaagaggagaga

SEQ ID NO: 1314518 - RNA, 20 nt, Human
ggccgagagguagcaccaag

SEQ ID NO: 1314519 - RNA, 24 nt, Human
gggagaagaggagagaagaugaga

SEQ ID NO: 1314520 - RNA, 24 nt, Human
ggguuguaggugguagagguguuc

SEQ ID NO: 1314521 - RNA, 22 nt, Human
ggugguuggccuuucugggguu

SEQ ID NO: 1314522 - RNA, 18 nt, Human
gguucccagugcaaguca

SEQ ID NO: 1314523 - RNA, 20 nt, Human
uagacuuccuucugacccac

SEQ ID NO: 1314524 - RNA, 19 nt, Human
uauuucaaggaggguauca

SEQ ID NO: 1314525 - RNA, 20 nt, Human
uccacaaaguccauggucaa

SEQ ID NO: 1314526 - RNA, 19 nt, Human
uccauggucaaaauuacaa

SEQ ID NO: 1314527 - RNA, 26 nt, Human
uccuuugcuucaucgucugcacugac

SEQ ID NO: 1314528 - RNA, 25 nt, Human
ugaaagagacacaggauggaaggca

SEQ ID NO: 1314529 - RNA, 21 nt, Human
ugagaauuggaaaaagaggau

SEQ ID NO: 1314530 - RNA, 20 nt, Human
uggaaugaacacaucuccuc

SEQ ID NO: 1314531 - RNA, 24 nt, Human
uggaaugaacacaucuccucuggg

SEQ ID NO: 1314532 - RNA, 23 nt, Human
uggagguguacuggcagcuggug

SEQ ID NO: 1314533 - RNA, 18 nt, Human
uggcagcuggugcuauag

SEQ ID NO: 1314534 - RNA, 24 nt, Human
ugguagagguguucugagcucugu

SEQ ID NO: 1314535 - RNA, 18 nt, Human
ugucaguccggugguugg

SEQ ID NO: 1314536 - RNA, 18 nt, Human
ugucaguccggugguugg

SEQ ID NO: 1314537 - RNA, 24 nt, Human
uucaaggaggguaucacuguucau

SEQ ID NO: 1314538 - RNA, 19 nt, Human
uugguucccagugcaaguc

SEQ ID NO: 1314539 - RNA, 24 nt, Human
agacuccgccacccugaaccaaga

SEQ ID NO: 1314540 - RNA, 21 nt, Human
cuaaagacuccgccacccuga

SEQ ID NO: 1314541 - RNA, 19 nt, Human
gccacuaccagaccuauca

SEQ ID NO: 1314542 - RNA, 24 nt, Human
cagcaugagcgcauccuguccccu

SEQ ID NO: 1314543 - RNA, 21 nt, Human
ccuguccccugggcugcgugg

SEQ ID NO: 1314544 - RNA, 20 nt, Human
gaacacugucucaccacuga

SEQ ID NO: 1314545 - RNA, 27 nt, Human
uccaccaccacaugugugcacucgaac

SEQ ID NO: 1314546 - RNA, 22 nt, Human
ugcacucgaacacugucucacc

SEQ ID NO: 1314547 - RNA, 20 nt, Human
accccucccuccugcaucuc

SEQ ID NO: 1314548 - RNA, 25 nt, Human
accccucccuccugcaucuccccug

SEQ ID NO: 1314549 - RNA, 20 nt, Human
cccacccugugccuuccuug

SEQ ID NO: 1314550 - RNA, 20 nt, Human
ccccagaucuacaccccucc

SEQ ID NO: 1314551 - RNA, 24 nt, Human
cccccauucccacccugugccuuc

SEQ ID NO: 1314552 - RNA, 24 nt, Human
cuugcaagcugccaaaacaugaug

SEQ ID NO: 1314553 - RNA, 21 nt, Human
ggcagagagggagagaagggc

SEQ ID NO: 1314554 - RNA, 24 nt, Human
gggcagagagggagagaagggcuc

SEQ ID NO: 1314555 - RNA, 24 nt, Human
uacaccccucccuccugcaucucc

SEQ ID NO: 1314556 - RNA, 24 nt, Human
uccccagaucuacaccccucccuc

SEQ ID NO: 1314557 - RNA, 24 nt, Human
ugcgggcagagagggagagaaggg

SEQ ID NO: 1314558 - RNA, 25 nt, Human
ugcgggcagagagggagagaagggc

SEQ ID NO: 1314559 - RNA, 20 nt, Human
uggccucugguuguucuguu

SEQ ID NO: 1314560 - RNA, 24 nt, Human
caagaaugggcaauaggcucccaa

SEQ ID NO: 1314561 - RNA, 18 nt, Human
cugaaaggucuuugucaa

SEQ ID NO: 1314562 - RNA, 21 nt, Human
uguugcaaaaacaagaccauc

SEQ ID NO: 1314563 - RNA, 20 nt, Human
agggccgcccucccgccucg

SEQ ID NO: 1314564 - RNA, 18 nt, Human
caacagggccgcccuccc

SEQ ID NO: 1314565 - RNA, 19 nt, Human
ccccgcacagccgcccucc

SEQ ID NO: 1314566 - RNA, 22 nt, Human
cccgcgagcgccccgcacagcc

SEQ ID NO: 1314567 - RNA, 21 nt, Human
ccucccgccucgcugaagccc

SEQ ID NO: 1314568 - RNA, 22 nt, Human
ccucccgccucgcugaagcccg

SEQ ID NO: 1314569 - RNA, 23 nt, Human
cgagcgccccgcacagccgcccu

SEQ ID NO: 1314570 - RNA, 18 nt, Human
cgcgaugaaggccuagcg

SEQ ID NO: 1314571 - RNA, 22 nt, Human
cuucauggucaugucuuuuacc

SEQ ID NO: 1314572 - RNA, 20 nt, Human
ggcaacagggccgcccuccc

SEQ ID NO: 1314573 - RNA, 23 nt, Human
ggcagcagggaaagcgucuccag

SEQ ID NO: 1314574 - RNA, 20 nt, Human
ggccggcagcagggaaagcg

SEQ ID NO: 1314575 - RNA, 22 nt, Human
gucaugucuuuuaccagcuuuu

SEQ ID NO: 1314576 - RNA, 24 nt, Human
ucgcggccggcagcagggaaagcg

SEQ ID NO: 1314577 - RNA, 24 nt, Human
uggucaugucuuuuaccagcuuuu

SEQ ID NO: 1314578 - RNA, 19 nt, Human
acagagccugccaggugcu

SEQ ID NO: 1314579 - RNA, 26 nt, Human
augaguccaccuccucucccugcucc

SEQ ID NO: 1314580 - RNA, 23 nt, Human
cacuuuucuccgggacccagggg

SEQ ID NO: 1314581 - RNA, 21 nt, Human
ccuccucucccugcucuuccc

SEQ ID NO: 1314582 - RNA, 21 nt, Human
ccuuccccgccaggucucucc

SEQ ID NO: 1314583 - RNA, 22 nt, Human
cucccugcucuucccgcaggga

SEQ ID NO: 1314584 - RNA, 19 nt, Human
ucccugcucuucccgcagg

SEQ ID NO: 1314585 - RNA, 23 nt, Human
uccucucccugcucuucccgcag

SEQ ID NO: 1314586 - RNA, 19 nt, Human
ucgaugccccuuccccgcc

SEQ ID NO: 1314587 - RNA, 22 nt, Human
ucuccgggacccaggggacgug

SEQ ID NO: 1314588 - RNA, 22 nt, Human
ugccagaugaguccaccuccuu

SEQ ID NO: 1314589 - RNA, 20 nt, Human
acagaguccagccccaccuc

SEQ ID NO: 1314590 - RNA, 18 nt, Human
agccccaccucuuccaga

SEQ ID NO: 1314591 - RNA, 23 nt, Human
ccagacccugagcaggguaccgg

SEQ ID NO: 1314592 - RNA, 21 nt, Human
ucgagggugauggcgacagag

SEQ ID NO: 1314593 - RNA, 18 nt, Human
agggauuaaaucauauau

SEQ ID NO: 1314594 - RNA, 20 nt, Human
agggauuaaaucauauauuu

SEQ ID NO: 1314595 - RNA, 19 nt, Human
cacugcuugugaaagauuc

SEQ ID NO: 1314596 - RNA, 19 nt, Human
ccaauagugauauguugca

SEQ ID NO: 1314597 - RNA, 23 nt, Human
ccucccggagcagaggcuggagu

SEQ ID NO: 1314598 - RNA, 23 nt, Human
cuugccauucuucaggaauguua

SEQ ID NO: 1314599 - RNA, 22 nt, Human
gagggccucccggagcagaggc

SEQ ID NO: 1314600 - RNA, 19 nt, Human
gccagucucuggagaugga

SEQ ID NO: 1314601 - RNA, 22 nt, Human
uaacacauuggcauggccaaca

SEQ ID NO: 1314602 - RNA, 23 nt, Human
ucucuggagauggauauuggucu

SEQ ID NO: 1314603 - RNA, 22 nt, Human
ucuuuuaucuaaaucuacauuu

SEQ ID NO: 1314604 - RNA, 20 nt, Human
ugcaaaagcuguaaaaauuc

SEQ ID NO: 1314605 - RNA, 23 nt, Human
uguugcaaaagcuguaaaaauuc

SEQ ID NO: 1314606 - RNA, 18 nt, Human
uucaucuuuugccagcuc

SEQ ID NO: 1314607 - RNA, 19 nt, Human
uugcagggugaugcacagu

SEQ ID NO: 1314608 - RNA, 20 nt, Human
uugccagcucaauuuucuuc

SEQ ID NO: 1314609 - RNA, 28 nt, Human
uuucauuaucaucacugcuugugaaaga

SEQ ID NO: 1314610 - RNA, 18 nt, Human
aguaaauggauaacaaua

SEQ ID NO: 1314611 - RNA, 21 nt, Human
ggaacaaacucuucaaccucc

SEQ ID NO: 1314612 - RNA, 26 nt, Human
uaaauggauaacaauauuuugucauu

SEQ ID NO: 1314613 - RNA, 22 nt, Human
accaccgggccuucccuuugga

SEQ ID NO: 1314614 - RNA, 21 nt, Human
agcacuggauccuggaccacc

SEQ ID NO: 1314615 - RNA, 19 nt, Human
auccuggaccaccgggccu

SEQ ID NO: 1314616 - RNA, 20 nt, Human
cacagcccggucuagccgcu

SEQ ID NO: 1314617 - RNA, 21 nt, Human
cacagcccggucuagccgcua

SEQ ID NO: 1314618 - RNA, 26 nt, Human
cacagcccggucuagccgcuacgccc

SEQ ID NO: 1314619 - RNA, 23 nt, Human
caccgggccuucccuuuggacuc

SEQ ID NO: 1314620 - RNA, 22 nt, Human
ccugagaggacccggcaggcca

SEQ ID NO: 1314621 - RNA, 27 nt, Human
cgcccgagcucaagucugacucgaaac

SEQ ID NO: 1314622 - RNA, 22 nt, Human
uccuggaccaccgggccuuccc

SEQ ID NO: 1314623 - RNA, 21 nt, Human
ugggugccugagaggacccgg

SEQ ID NO: 1314624 - RNA, 18 nt, Human
aaucuagggaucuuccuc

SEQ ID NO: 1314625 - RNA, 21 nt, Human
uaacuguauauucgugucuug

SEQ ID NO: 1314626 - RNA, 21 nt, Human
ugauggaaacaaaucuaggga

SEQ ID NO: 1314627 - RNA, 20 nt, Human
ugcuacugcuccaaccacgc

SEQ ID NO: 1314628 - RNA, 21 nt, Human
uugcuacugcuccaaccacgc

SEQ ID NO: 1314629 - RNA, 20 nt, Human
uuucaucauuuucucuggga

SEQ ID NO: 1314630 - RNA, 21 nt, Human
ccagaacagcagcugggaaga

SEQ ID NO: 1314631 - RNA, 24 nt, Human
aaagaaaaacuguauccuguagca

SEQ ID NO: 1314632 - RNA, 21 nt, Human
acgcugggcuuuacuuggacu

SEQ ID NO: 1314633 - RNA, 18 nt, Human
aggaaagaaaaagaaaaa

SEQ ID NO: 1314634 - RNA, 20 nt, Human
agugcugucuucaaaaaugg

SEQ ID NO: 1314635 - RNA, 19 nt, Human
caaagaugacaacaucaau

SEQ ID NO: 1314636 - RNA, 18 nt, Human
caacaucaauauucuccu

SEQ ID NO: 1314637 - RNA, 24 nt, Human
caucaaggaaagaaaaagaaaaac

SEQ ID NO: 1314638 - RNA, 24 nt, Human
cuccucuacagugcugucuucaaa

SEQ ID NO: 1314639 - RNA, 18 nt, Human
gggcuuuacuuggacuuu

SEQ ID NO: 1314640 - RNA, 22 nt, Human
uacuucauuguuaguaaccuug

SEQ ID NO: 1314641 - RNA, 30 nt, Human
ucagaccaucaaggaaagaaaaagaaaaaa

SEQ ID NO: 1314642 - RNA, 22 nt, Human
ugaacuccuucacgcugggcuu

SEQ ID NO: 1314643 - RNA, 20 nt, Human
ugacaacaucaauauucucc

SEQ ID NO: 1314644 - RNA, 25 nt, Human
uuacuuggacuuuuccagaaauuau

SEQ ID NO: 1314645 - RNA, 26 nt, Human
uuacuuggacuuuuccagaaauuaug

SEQ ID NO: 1314646 - RNA, 18 nt, Human
aacauggcugcucuccuc

SEQ ID NO: 1314647 - RNA, 24 nt, Human
aaccaaaccaugugcuugcccuag

SEQ ID NO: 1314648 - RNA, 20 nt, Human
agcaagaaagaagcugcagg

SEQ ID NO: 1314649 - RNA, 25 nt, Human
cacuccacucuucagcugcuauccc

SEQ ID NO: 1314650 - RNA, 21 nt, Human
cauggagagaaaacauggcug

SEQ ID NO: 1314651 - RNA, 23 nt, Human
ccaaucccauccagcaaacugcu

SEQ ID NO: 1314652 - RNA, 19 nt, Human
ccuucaauaagcccuggag

SEQ ID NO: 1314653 - RNA, 19 nt, Human
ccuuugugggaauaaaccc

SEQ ID NO: 1314654 - RNA, 21 nt, Human
cugcaggcuaagaagcugcau

SEQ ID NO: 1314655 - RNA, 19 nt, Human
cuuuauaugaccugccccu

SEQ ID NO: 1314656 - RNA, 18 nt, Human
gaaucaauuuaaaccaaa

SEQ ID NO: 1314657 - RNA, 19 nt, Human
gcccagggccccuccucac

SEQ ID NO: 1314658 - RNA, 23 nt, Human
gcccagggccccuccucacgugc

SEQ ID NO: 1314659 - RNA, 18 nt, Human
ggaauaaacccuuuagac

SEQ ID NO: 1314660 - RNA, 27 nt, Human
ucaucucccaucuuggagccaauccca

SEQ ID NO: 1314661 - RNA, 18 nt, Human
ucauggagagaaaacaug

SEQ ID NO: 1314662 - RNA, 27 nt, Human
uccacucuucagcugcuauccccaaaa

SEQ ID NO: 1314663 - RNA, 18 nt, Human
ucuucuggugcugcaagg

SEQ ID NO: 1314664 - RNA, 24 nt, Human
ugagaacgggugacaggccuucaa

SEQ ID NO: 1314665 - RNA, 23 nt, Human
ugcccacccucaauugaguucug

SEQ ID NO: 1314666 - RNA, 19 nt, Human
uggagagaaaacauggcug

SEQ ID NO: 1314667 - RNA, 20 nt, Human
uguuccaugcaucucacucc

SEQ ID NO: 1314668 - RNA, 20 nt, Human
uucuucuggugcugcaagga

SEQ ID NO: 1314669 - RNA, 24 nt, Human
uugaguucugagaaaaccuaagaa

SEQ ID NO: 1314670 - RNA, 21 nt, Human
acucugaggcuuggggauggg

SEQ ID NO: 1314671 - RNA, 18 nt, Human
aggagaaggcuggcccgg

SEQ ID NO: 1314672 - RNA, 24 nt, Human
cacgcagacuggaggcauucagac

SEQ ID NO: 1314673 - RNA, 19 nt, Human
ccccggagcugcagacuga

SEQ ID NO: 1314674 - RNA, 18 nt, Human
cccgggcugcuccacucc

SEQ ID NO: 1314675 - RNA, 19 nt, Human
cccgggcugcuccacuccc

SEQ ID NO: 1314676 - RNA, 20 nt, Human
cccgggcugcuccacucccc

SEQ ID NO: 1314677 - RNA, 18 nt, Human
ccugcgcgacggccacac

SEQ ID NO: 1314678 - RNA, 18 nt, Human
cuggagauccuuccgucc

SEQ ID NO: 1314679 - RNA, 23 nt, Human
cuggcccgggcugcuccacuccc

SEQ ID NO: 1314680 - RNA, 18 nt, Human
gcuccacuccccggagcu

SEQ ID NO: 1314681 - RNA, 21 nt, Human
ggcccgggcugcuccacuccc

SEQ ID NO: 1314682 - RNA, 19 nt, Human
ggggaugggucggaaggaa

SEQ ID NO: 1314683 - RNA, 23 nt, Human
uagucgaugugccugcgaagccc

SEQ ID NO: 1314684 - RNA, 21 nt, Human
uccgucccuacaggagaaggc

SEQ ID NO: 1314685 - RNA, 21 nt, Human
ugcuccacuccccggagcugc

SEQ ID NO: 1314686 - RNA, 24 nt, Human
uguagucgaugugccugcgaagcc

SEQ ID NO: 1314687 - RNA, 22 nt, Human
ugugccugcgaagcccaggcuc

SEQ ID NO: 1314688 - RNA, 21 nt, Human
uuccuucccuucuggaguucc

SEQ ID NO: 1314689 - RNA, 20 nt, Human
uuccuugaguaugaguuaua

SEQ ID NO: 1314690 - RNA, 20 nt, Human
accacagaguagcugcaaga

SEQ ID NO: 1314691 - RNA, 23 nt, Human
aggaggggcaggagacagagcuc

SEQ ID NO: 1314692 - RNA, 24 nt, Human
aggccccgagcugacacccccugg

SEQ ID NO: 1314693 - RNA, 20 nt, Human
aggccggaccaauccagaga

SEQ ID NO: 1314694 - RNA, 20 nt, Human
cacagcaggaggggcaggag

SEQ ID NO: 1314695 - RNA, 21 nt, Human
cacccccugggcccccauucc

SEQ ID NO: 1314696 - RNA, 18 nt, Human
ccaauccagagacggugc

SEQ ID NO: 1314697 - RNA, 20 nt, Human
ccacagcaggaggggcagga

SEQ ID NO: 1314698 - RNA, 24 nt, Human
ccccgagcugacacccccugggcc

SEQ ID NO: 1314699 - RNA, 26 nt, Human
ccccgagcugacacccccugggcccc

SEQ ID NO: 1314700 - RNA, 21 nt, Human
cugaccacagaguagcugcaa

SEQ ID NO: 1314701 - RNA, 20 nt, Human
gaaggccggaccaauccaga

SEQ ID NO: 1314702 - RNA, 21 nt, Human
gaggcugucguuuauugcaga

SEQ ID NO: 1314703 - RNA, 20 nt, Human
gccggaccaauccagagacg

SEQ ID NO: 1314704 - RNA, 22 nt, Human
gcugugggcucugugcucagca

SEQ ID NO: 1314705 - RNA, 21 nt, Human
ggcaggagacagagcucagga

SEQ ID NO: 1314706 - RNA, 22 nt, Human
gggcaggagacagagcucagga

SEQ ID NO: 1314707 - RNA, 24 nt, Human
uagcugcaagaggcaaggccccga

SEQ ID NO: 1314708 - RNA, 20 nt, Human
ucagggaggugaagaggcag

SEQ ID NO: 1314709 - RNA, 22 nt, Human
uccgcgggaugacggcuccaga

SEQ ID NO: 1314710 - RNA, 21 nt, Human
ucggcuccgcgccgcagaccg

SEQ ID NO: 1314711 - RNA, 19 nt, Human
uggaggacccggccugacc

SEQ ID NO: 1314712 - RNA, 21 nt, Human
ugggcugugggcucugugcuc

SEQ ID NO: 1314713 - RNA, 20 nt, Human
uuccugaugguggaggaccc

SEQ ID NO: 1314714 - RNA, 21 nt, Human
cagagcucagcuggcagcugc

SEQ ID NO: 1314715 - RNA, 19 nt, Human
cagcaccugcuccuccugu

SEQ ID NO: 1314716 - RNA, 20 nt, Human
ggaguaccccuggugacaga

SEQ ID NO: 1314717 - RNA, 20 nt, Human
ugggguccagggaccugaaa

SEQ ID NO: 1314718 - RNA, 24 nt, Human
uguccgcccacagaaacuccuuca

SEQ ID NO: 1314719 - RNA, 22 nt, Human
agacagaaauaggacaaccgcc

SEQ ID NO: 1314720 - RNA, 24 nt, Human
cccugucuucuagccuugggcugg

SEQ ID NO: 1314721 - RNA, 18 nt, Human
ccgccccagcagcguagu

SEQ ID NO: 1314722 - RNA, 22 nt, Human
cugggcauccgaggggcgcuga

SEQ ID NO: 1314723 - RNA, 26 nt, Human
gcccagcacaccacacugggcauccg

SEQ ID NO: 1314724 - RNA, 18 nt, Human
gccuugugaugcugaugg

SEQ ID NO: 1314725 - RNA, 19 nt, Human
ggacaaccgccccagcagc

SEQ ID NO: 1314726 - RNA, 20 nt, Human
gggcauccgaggggcgcuga

SEQ ID NO: 1314727 - RNA, 24 nt, Human
uccgaggggcgcugacagcuugga

SEQ ID NO: 1314728 - RNA, 19 nt, Human
ucuucuagccuugggcugg

SEQ ID NO: 1314729 - RNA, 19 nt, Human
ugggcuggauucagggaag

SEQ ID NO: 1314730 - RNA, 24 nt, Human
aaaccccugagcucaagugauccu

SEQ ID NO: 1314731 - RNA, 20 nt, Human
aacauccucucacucuuugc

SEQ ID NO: 1314732 - RNA, 24 nt, Human
aaggugcuuggauuauaggcauga

SEQ ID NO: 1314733 - RNA, 24 nt, Human
acuguguugcccaggcuggucuga

SEQ ID NO: 1314734 - RNA, 20 nt, Human
agcucaagugauccuccuac

SEQ ID NO: 1314735 - RNA, 20 nt, Human
aggcaugagccaccaugucc

SEQ ID NO: 1314736 - RNA, 21 nt, Human
aggcaugagccaccauguccg

SEQ ID NO: 1314737 - RNA, 19 nt, Human
aucacuguguugcccaggc

SEQ ID NO: 1314738 - RNA, 19 nt, Human
auccucucacucuuugcua

SEQ ID NO: 1314739 - RNA, 19 nt, Human
caagugauccuccuaccuu

SEQ ID NO: 1314740 - RNA, 27 nt, Human
caagugauccuccuaccuuggccuccu

SEQ ID NO: 1314741 - RNA, 19 nt, Human
cacuguguugcccaggcug

SEQ ID NO: 1314742 - RNA, 21 nt, Human
cacuguguugcccaggcuggu

SEQ ID NO: 1314743 - RNA, 22 nt, Human
cacuguguugcccaggcugguc

SEQ ID NO: 1314744 - RNA, 25 nt, Human
caugagccaccauguccggccuugu

SEQ ID NO: 1314745 - RNA, 21 nt, Human
ccacuuagcaauguauauugg

SEQ ID NO: 1314746 - RNA, 18 nt, Human
ccuccuaccuuggccucc

SEQ ID NO: 1314747 - RNA, 20 nt, Human
ccugagcucaagugauccuc

SEQ ID NO: 1314748 - RNA, 24 nt, Human
cucaagugauccuccuaccuuggc

SEQ ID NO: 1314749 - RNA, 23 nt, Human
cuguagguggaaucacuggguca

SEQ ID NO: 1314750 - RNA, 20 nt, Human
cuuggauuauaggcaugagc

SEQ ID NO: 1314751 - RNA, 22 nt, Human
gagcucaagugauccuccuacc

SEQ ID NO: 1314752 - RNA, 21 nt, Human
gauuauaggcaugagccacca

SEQ ID NO: 1314753 - RNA, 24 nt, Human
gauuauaggcaugagccaccaugu

SEQ ID NO: 1314754 - RNA, 27 nt, Human
gcccaggcuggucugaaaccccugagc

SEQ ID NO: 1314755 - RNA, 23 nt, Human
gcuggucugaaaccccugagcuc

SEQ ID NO: 1314756 - RNA, 20 nt, Human
ggaaauaaacauuugaaaac

SEQ ID NO: 1314757 - RNA, 22 nt, Human
ggauuauaggcaugagccacca

SEQ ID NO: 1314758 - RNA, 24 nt, Human
ggauuauaggcaugagccaccaug

SEQ ID NO: 1314759 - RNA, 21 nt, Human
gugcuuggauuauaggcauga

SEQ ID NO: 1314760 - RNA, 21 nt, Human
guuauauauauauuuauauau

SEQ ID NO: 1314761 - RNA, 20 nt, Human
uaaaaauaagacuauaauaa

SEQ ID NO: 1314762 - RNA, 22 nt, Human
uagccucuuagcuuucuuuccu

SEQ ID NO: 1314763 - RNA, 20 nt, Human
uauauauuuauauauauaua

SEQ ID NO: 1314764 - RNA, 19 nt, Human
uauggcugcaaagaaagua

SEQ ID NO: 1314765 - RNA, 24 nt, Human
ucaagugauccuccuaccuuggcc

SEQ ID NO: 1314766 - RNA, 20 nt, Human
ucacaugguucaaaauugaa

SEQ ID NO: 1314767 - RNA, 23 nt, Human
ucugcagaagaaguuuauggauu

SEQ ID NO: 1314768 - RNA, 18 nt, Human
ugagcucaagugauccuc

SEQ ID NO: 1314769 - RNA, 22 nt, Human
ugcuaucacuguguugcccagg

SEQ ID NO: 1314770 - RNA, 23 nt, Human
uggauuauaggcaugagccacca

SEQ ID NO: 1314771 - RNA, 19 nt, Human
uguguuauauauauauuua

SEQ ID NO: 1314772 - RNA, 23 nt, Human
uguguuauauauauauuuauaua

SEQ ID NO: 1314773 - RNA, 22 nt, Human
uguguugcccaggcuggucuga

SEQ ID NO: 1314774 - RNA, 23 nt, Human
uguguugcccaggcuggucugaa

SEQ ID NO: 1314775 - RNA, 18 nt, Human
uuaacauccucucacucu

SEQ ID NO: 1314776 - RNA, 25 nt, Human
uugaaaacaacaauacauuugguga

SEQ ID NO: 1314777 - RNA, 18 nt, Human
uuggauuauaggcaugag

SEQ ID NO: 1314778 - RNA, 24 nt, Human
uuggauuauaggcaugagccacca

SEQ ID NO: 1314779 - RNA, 21 nt, Human
uuguguaucucugcagaagaa

SEQ ID NO: 1314780 - RNA, 25 nt, Human
uuugaccccuagccucuuagcuuuc

SEQ ID NO: 1314781 - RNA, 28 nt, Human
uuugucaccuuuuuuccacuuagcaaug

SEQ ID NO: 1314782 - RNA, 19 nt, Human
cacuggguggcaggggcca

SEQ ID NO: 1314783 - RNA, 24 nt, Human
ccacuggguggcaggggccaguuu

SEQ ID NO: 1314784 - RNA, 21 nt, Human
ccgcacuccaguaugaccaag

SEQ ID NO: 1314785 - RNA, 23 nt, Human
ccgcacuccaguaugaccaagag

SEQ ID NO: 1314786 - RNA, 20 nt, Human
cuggguggcaggggccaguu

SEQ ID NO: 1314787 - RNA, 22 nt, Human
gccgcacuccaguaugaccaag

SEQ ID NO: 1314788 - RNA, 21 nt, Human
gcugcgugcccugccgcacuc

SEQ ID NO: 1314789 - RNA, 27 nt, Human
ugcccugccgcacuccaguaugaccaa

SEQ ID NO: 1314790 - RNA, 21 nt, Human
uggcaggggccaguuucagca

SEQ ID NO: 1314791 - RNA, 18 nt, Human
uggguggcaggggccagu

SEQ ID NO: 1314792 - RNA, 19 nt, Human
aagcaagccagcaggcaga

SEQ ID NO: 1314793 - RNA, 23 nt, Human
acccuaugcucaaaaacccacug

SEQ ID NO: 1314794 - RNA, 26 nt, Human
aggagccgaaggucgagaggggaacu

SEQ ID NO: 1314795 - RNA, 23 nt, Human
aggcagacacacaacacacccaa

SEQ ID NO: 1314796 - RNA, 18 nt, Human
aggccaggguuccccuuc

SEQ ID NO: 1314797 - RNA, 20 nt, Human
aggcuccccgccaacuccuc

SEQ ID NO: 1314798 - RNA, 22 nt, Human
caagggcacccuaugcucaaaa

SEQ ID NO: 1314799 - RNA, 22 nt, Human
cacacaacacacccaagggcac

SEQ ID NO: 1314800 - RNA, 24 nt, Human
cacacaacacacccaagggcaccc

SEQ ID NO: 1314801 - RNA, 24 nt, Human
cacccaagggcacccuaugcucaa

SEQ ID NO: 1314802 - RNA, 22 nt, Human
cagcaggcagacacacaacaca

SEQ ID NO: 1314803 - RNA, 23 nt, Human
cagcaggcagacacacaacacac

SEQ ID NO: 1314804 - RNA, 19 nt, Human
caggguuccccuuccuuuc

SEQ ID NO: 1314805 - RNA, 25 nt, Human
caugccuguguccccucucccacuc

SEQ ID NO: 1314806 - RNA, 22 nt, Human
ccagcaggcagacacacaacac

SEQ ID NO: 1314807 - RNA, 23 nt, Human
ccaggguuccccuuccuuuccuc

SEQ ID NO: 1314808 - RNA, 21 nt, Human
ccaugccuguguccccucucc

SEQ ID NO: 1314809 - RNA, 22 nt, Human
ccaugccuguguccccucuccc

SEQ ID NO: 1314810 - RNA, 22 nt, Human
cccaaggccaggguuccccuuc

SEQ ID NO: 1314811 - RNA, 24 nt, Human
ccccagaaguagcuggagggaccc

SEQ ID NO: 1314812 - RNA, 20 nt, Human
cccccagaaguagcuggagg

SEQ ID NO: 1314813 - RNA, 22 nt, Human
cccccgaaugccuggagacaga

SEQ ID NO: 1314814 - RNA, 20 nt, Human
ccccuuccuuuccucugucc

SEQ ID NO: 1314815 - RNA, 19 nt, Human
ccgaaggucgagaggggaa

SEQ ID NO: 1314816 - RNA, 23 nt, Human
ccugggacgucuuauggcccagc

SEQ ID NO: 1314817 - RNA, 21 nt, Human
ccuguguccccucucccacuc

SEQ ID NO: 1314818 - RNA, 19 nt, Human
ccuuuccucuguccaauuc

SEQ ID NO: 1314819 - RNA, 22 nt, Human
cuggagggaccucaggcccccg

SEQ ID NO: 1314820 - RNA, 24 nt, Human
cuuauggcccagcugggggacaag

SEQ ID NO: 1314821 - RNA, 23 nt, Human
gaaaguggcugacagagcccccc

SEQ ID NO: 1314822 - RNA, 18 nt, Human
gacaagaagggguccuga

SEQ ID NO: 1314823 - RNA, 19 nt, Human
gcaggcagacacacaacac

SEQ ID NO: 1314824 - RNA, 24 nt, Human
gcaggcagacacacaacacaccca

SEQ ID NO: 1314825 - RNA, 19 nt, Human
gcugacagagcccccccag

SEQ ID NO: 1314826 - RNA, 18 nt, Human
gguccugaggagccgaag

SEQ ID NO: 1314827 - RNA, 20 nt, Human
gugguccugaggagccgaag

SEQ ID NO: 1314828 - RNA, 20 nt, Human
uaacuuaagcaagccagcag

SEQ ID NO: 1314829 - RNA, 23 nt, Human
uaagcaagccagcaggcagacac

SEQ ID NO: 1314830 - RNA, 22 nt, Human
uauggcccagcugggggacaag

SEQ ID NO: 1314831 - RNA, 18 nt, Human
ucccugagaaaguggcug

SEQ ID NO: 1314832 - RNA, 22 nt, Human
ucugugaugaaaaucccaaggc

SEQ ID NO: 1314833 - RNA, 20 nt, Human
ugaggccagaucggggaaag

SEQ ID NO: 1314834 - RNA, 23 nt, Human
ugaugaaaaucccaaggccaggg

SEQ ID NO: 1314835 - RNA, 19 nt, Human
ugccuguguccccucuccc

SEQ ID NO: 1314836 - RNA, 24 nt, Human
ugccuguguccccucucccacucc

SEQ ID NO: 1314837 - RNA, 19 nt, Human
uggagacagaggggucccc

SEQ ID NO: 1314838 - RNA, 23 nt, Human
uggagacagaggggucccccagu

SEQ ID NO: 1314839 - RNA, 23 nt, Human
uggcugacagagcccccccagaa

SEQ ID NO: 1314840 - RNA, 22 nt, Human
uggcugggaaauccggcugagg

SEQ ID NO: 1314841 - RNA, 19 nt, Human
uguccccucucccacuccu

SEQ ID NO: 1314842 - RNA, 21 nt, Human
aaaaacaaaaacaaaaccccc

SEQ ID NO: 1314843 - RNA, 23 nt, Human
aaaacaaaaacaaaacccccagu

SEQ ID NO: 1314844 - RNA, 20 nt, Human
aacccccaguauuauuccca

SEQ ID NO: 1314845 - RNA, 21 nt, Human
aagcaggcucuguagaggucu

SEQ ID NO: 1314846 - RNA, 23 nt, Human
acaagcaggcucuguagaggucu

SEQ ID NO: 1314847 - RNA, 23 nt, Human
agacaguucaaaaacaaaaacaa

SEQ ID NO: 1314848 - RNA, 22 nt, Human
agggggcuuaugcaauccugga

SEQ ID NO: 1314849 - RNA, 22 nt, Human
aucuucuucuggaucuuuacug

SEQ ID NO: 1314850 - RNA, 26 nt, Human
augguacacaaaauaagagcagucac

SEQ ID NO: 1314851 - RNA, 23 nt, Human
caaaaacaaaaacaaaaccccca

SEQ ID NO: 1314852 - RNA, 24 nt, Human
caaaaacaaaaacaaaacccccag

SEQ ID NO: 1314853 - RNA, 18 nt, Human
cacagucagccggucauc

SEQ ID NO: 1314854 - RNA, 21 nt, Human
cacuggaaguggggagaaaau

SEQ ID NO: 1314855 - RNA, 21 nt, Human
cagaaaacaaagggucacucc

SEQ ID NO: 1314856 - RNA, 19 nt, Human
cagccggucaucugagauc

SEQ ID NO: 1314857 - RNA, 21 nt, Human
cagcgguuguuggcuuauggu

SEQ ID NO: 1314858 - RNA, 23 nt, Human
cagggggcuuaugcaauccugga

SEQ ID NO: 1314859 - RNA, 20 nt, Human
cauaagcaggaccaauguua

SEQ ID NO: 1314860 - RNA, 20 nt, Human
ccaaaaguccaaauuugggg

SEQ ID NO: 1314861 - RNA, 23 nt, Human
ccaaauuugggguaaucuucuuc

SEQ ID NO: 1314862 - RNA, 19 nt, Human
cuagaauauaccgauagcc

SEQ ID NO: 1314863 - RNA, 18 nt, Human
cuccaaccacagucagcc

SEQ ID NO: 1314864 - RNA, 19 nt, Human
cuggaucuuuacugccugg

SEQ ID NO: 1314865 - RNA, 24 nt, Human
cuguguuuuuagcaucuuugggag

SEQ ID NO: 1314866 - RNA, 28 nt, Human
gaaaauggugaaaggcaggccgguaccc

SEQ ID NO: 1314867 - RNA, 24 nt, Human
gaacauuugagacaguucaaaaac

SEQ ID NO: 1314868 - RNA, 18 nt, Human
gaauagguuuuccugccc

SEQ ID NO: 1314869 - RNA, 25 nt, Human
ggaauagguuuuccugcccagcagu

SEQ ID NO: 1314870 - RNA, 18 nt, Human
gggaaggcgcugagcaga

SEQ ID NO: 1314871 - RNA, 23 nt, Human
ggguaugcaguacagcaccgauu

SEQ ID NO: 1314872 - RNA, 24 nt, Human
guguuccaauggguagccaugagg

SEQ ID NO: 1314873 - RNA, 18 nt, Human
guuugcgcuuggcuccuc

SEQ ID NO: 1314874 - RNA, 22 nt, Human
uaacaaaacccguucauacaag

SEQ ID NO: 1314875 - RNA, 23 nt, Human
uagaggucuccaggaauagguuu

SEQ ID NO: 1314876 - RNA, 18 nt, Human
uagccaucuuuguuaaac

SEQ ID NO: 1314877 - RNA, 19 nt, Human
uagggcuaacaaaacccgu

SEQ ID NO: 1314878 - RNA, 18 nt, Human
ucaaugcccacagaagga

SEQ ID NO: 1314879 - RNA, 19 nt, Human
uccaaauuugggguaaucu

SEQ ID NO: 1314880 - RNA, 20 nt, Human
uccaaauuugggguaaucuu

SEQ ID NO: 1314881 - RNA, 22 nt, Human
ucccuguggucccuccauccug

SEQ ID NO: 1314882 - RNA, 24 nt, Human
uccugcuguuugcgcuuggcuccu

SEQ ID NO: 1314883 - RNA, 18 nt, Human
uccuuuuccgcugcuucc

SEQ ID NO: 1314884 - RNA, 19 nt, Human
ucuggaucuuuacugccug

SEQ ID NO: 1314885 - RNA, 19 nt, Human
ucuugguggucccuguggu

SEQ ID NO: 1314886 - RNA, 21 nt, Human
ugaaaggcaggcagucucccg

SEQ ID NO: 1314887 - RNA, 23 nt, Human
ugagacaguucaaaaacaaaaac

SEQ ID NO: 1314888 - RNA, 24 nt, Human
uggguagccaugagggggaaggcg

SEQ ID NO: 1314889 - RNA, 24 nt, Human
uguguuuuuagcaucuuugggaga

SEQ ID NO: 1314890 - RNA, 19 nt, Human
uguuccuuuaccaagaaua

SEQ ID NO: 1314891 - RNA, 20 nt, Human
uuaccauuuccuuggaaaac

SEQ ID NO: 1314892 - RNA, 22 nt, Human
uucaaaaacaaaaacaaaaccc

SEQ ID NO: 1314893 - RNA, 19 nt, Human
uuccgcugcuuccugcugc

SEQ ID NO: 1314894 - RNA, 21 nt, Human
uugauuucagguguucucaga

SEQ ID NO: 1314895 - RNA, 26 nt, Human
aagacaguuaugacauugacacaugc

SEQ ID NO: 1314896 - RNA, 21 nt, Human
caauguacuccuucuucccca

SEQ ID NO: 1314897 - RNA, 22 nt, Human
cacaugcaugagcuauuauaca

SEQ ID NO: 1314898 - RNA, 24 nt, Human
ccagagugcagaagcguauaaaga

SEQ ID NO: 1314899 - RNA, 25 nt, Human
cccccuucaauguacuccuucuucc

SEQ ID NO: 1314900 - RNA, 21 nt, Human
ccccucguagcuggugggaau

SEQ ID NO: 1314901 - RNA, 24 nt, Human
cccgugccucaggaccugccccuc

SEQ ID NO: 1314902 - RNA, 23 nt, Human
ggccacugggugccaaucccccu

SEQ ID NO: 1314903 - RNA, 23 nt, Human
uaugacauugacacaugcauggu

SEQ ID NO: 1314904 - RNA, 18 nt, Human
ucccgugccucaggaccu

SEQ ID NO: 1314905 - RNA, 24 nt, Human
ugacacaugcaugagcuauuauac

SEQ ID NO: 1314906 - RNA, 24 nt, Human
ugauucugucaucaccacaucuug

SEQ ID NO: 1314907 - RNA, 23 nt, Human
ugcacgguggggaggacagggau

SEQ ID NO: 1314908 - RNA, 22 nt, Human
ugccguccauguuauaaugcac

SEQ ID NO: 1314909 - RNA, 22 nt, Human
uggugggaaugccguccauguu

SEQ ID NO: 1314910 - RNA, 22 nt, Human
gcucugaaaagagccuuugggu

SEQ ID NO: 1314911 - RNA, 21 nt, Human
ugaguggcucugaaaagagcc

SEQ ID NO: 1314912 - RNA, 27 nt, Human
ccuuugguuccuuuggggggcuccggc

SEQ ID NO: 1314913 - RNA, 26 nt, Human
ugaguugcugcaaacuaauccaggcu

SEQ ID NO: 1314914 - RNA, 20 nt, Human
ugaaaagagccuuuggggug

SEQ ID NO: 1314915 - RNA, 18 nt, Human
uaaaaagggccuuuuguu

SEQ ID NO: 1314916 - RNA, 22 nt, Human
uaaaaagggccuuuuguugaua

SEQ ID NO: 1314917 - RNA, 23 nt, Human
ugggggcccuaaaaagggccuuu

SEQ ID NO: 1314918 - RNA, 24 nt, Human
ugggggcccuaaaaagggccuuuu

SEQ ID NO: 1314919 - RNA, 20 nt, Human
aagagcugagcgaaccagcg

SEQ ID NO: 1314920 - RNA, 18 nt, Human
acacggagccaagaccag

SEQ ID NO: 1314921 - RNA, 22 nt, Human
agccaagaccagagccggcgca

SEQ ID NO: 1314922 - RNA, 24 nt, Human
caccagcaccuuugcagcuuugcc

SEQ ID NO: 1314923 - RNA, 19 nt, Human
cacggagccaagaccagag

SEQ ID NO: 1314924 - RNA, 23 nt, Human
ccucggggcacuugccgccgccc

SEQ ID NO: 1314925 - RNA, 21 nt, Human
ccuguggcagaagcaccagca

SEQ ID NO: 1314926 - RNA, 24 nt, Human
cgccuugacugaggguggccgggc

SEQ ID NO: 1314927 - RNA, 20 nt, Human
cggggcacuugccgccgccc

SEQ ID NO: 1314928 - RNA, 21 nt, Human
cggggcacuugccgccgcccu

SEQ ID NO: 1314929 - RNA, 18 nt, Human
gagccaagaccagagccg

SEQ ID NO: 1314930 - RNA, 18 nt, Human
gcacuugccgccgcccug

SEQ ID NO: 1314931 - RNA, 19 nt, Human
gcagaagcaccagcaccug

SEQ ID NO: 1314932 - RNA, 18 nt, Human
gccgccgcccugcaggcg

SEQ ID NO: 1314933 - RNA, 22 nt, Human
ggagccaagaccagagccggcg

SEQ ID NO: 1314934 - RNA, 19 nt, Human
ggcgucgggggcggugcag

SEQ ID NO: 1314935 - RNA, 21 nt, Human
ggggcacuugccgccgcccug

SEQ ID NO: 1314936 - RNA, 18 nt, Human
ugcagcuuugcccagcac

SEQ ID NO: 1314937 - RNA, 23 nt, Human
uggcagaagcaccagcaccuggg

SEQ ID NO: 1314938 - RNA, 23 nt, Human
uggcagggagcaagagcugagcg

SEQ ID NO: 1314939 - RNA, 24 nt, Human
uggcagggagcaagagcugagcga

SEQ ID NO: 1314940 - RNA, 25 nt, Human
uggcagggagcaagagcugagcgaa

SEQ ID NO: 1314941 - RNA, 21 nt, Human
uggggugccugcuauccugug

SEQ ID NO: 1314942 - RNA, 23 nt, Human
ugucgugcuggggcacacggagc

SEQ ID NO: 1314943 - RNA, 21 nt, Human
uguggcagaagcaccagcacc

SEQ ID NO: 1314944 - RNA, 19 nt, Human
aacucccuuucuacuaggc

SEQ ID NO: 1314945 - RNA, 26 nt, Human
ccccuuauguauuauauaauaagaac

SEQ ID NO: 1314946 - RNA, 22 nt, Human
aacugcuagaagagaauaagcu

SEQ ID NO: 1314947 - RNA, 21 nt, Human
agccuuuggggcuuuguugcg

SEQ ID NO: 1314948 - RNA, 25 nt, Human
cuuuggggcuuuguugcgguuuuca

SEQ ID NO: 1314949 - RNA, 27 nt, Human
cuuuggggcuuuguugcgguuuucaca

SEQ ID NO: 1314950 - RNA, 18 nt, Human
gcuuuguugcgguuuuca

SEQ ID NO: 1314951 - RNA, 22 nt, Human
ggcaagaaacugcuagaagaga

SEQ ID NO: 1314952 - RNA, 24 nt, Human
ggcuuuguugcgguuuucacacgc

SEQ ID NO: 1314953 - RNA, 19 nt, Human
uggcaagaaacugcuagaa

SEQ ID NO: 1314954 - RNA, 24 nt, Human
uggcaagaaacugcuagaagagaa

SEQ ID NO: 1314955 - RNA, 21 nt, Human
uggguggcucugaaaagagcc

SEQ ID NO: 1314956 - RNA, 21 nt, Human
uguugcgguuuucacacgcca

SEQ ID NO: 1314957 - RNA, 18 nt, Human
aggggcucugaaaagagc

SEQ ID NO: 1314958 - RNA, 21 nt, Human
cuucuugggcugauaggaaua

SEQ ID NO: 1314959 - RNA, 20 nt, Human
gcucugaaaagagccuuuug

SEQ ID NO: 1314960 - RNA, 18 nt, Human
guuggacagacuucuugg

SEQ ID NO: 1314961 - RNA, 20 nt, Human
ugaaaagagccuuuuggggu

SEQ ID NO: 1314962 - RNA, 20 nt, Human
ugaaaagagccuuuuggggu

SEQ ID NO: 1314963 - RNA, 18 nt, Human
aaacccaagauagagcag

SEQ ID NO: 1314964 - RNA, 22 nt, Human
aaacccaagauagagcagggga

SEQ ID NO: 1314965 - RNA, 20 nt, Human
aagaaacccaagauagagca

SEQ ID NO: 1314966 - RNA, 25 nt, Human
agccuuuggaagcuuggaagcaauu

SEQ ID NO: 1314967 - RNA, 24 nt, Human
gaaaagagccuuuggaagcuugga

SEQ ID NO: 1314968 - RNA, 23 nt, Human
gcaauuaagaaacccaagauaga

SEQ ID NO: 1314969 - RNA, 19 nt, Human
uuggaagcuuggaagcaau

SEQ ID NO: 1314970 - RNA, 22 nt, Human
uacuaagucgccuuuucccaag

SEQ ID NO: 1314971 - RNA, 24 nt, Human
aaaaagcacuccaugcacaaaaca

SEQ ID NO: 1314972 - RNA, 22 nt, Human
aaagcacuccaugcacaaaaca

SEQ ID NO: 1314973 - RNA, 22 nt, Human
acagcggccuccugcgcucccu

SEQ ID NO: 1314974 - RNA, 30 nt, Human
agaaagaaaagauauuuauuauaaaaugcu

SEQ ID NO: 1314975 - RNA, 24 nt, Human
caaaaagcacuccaugcacaaaac

SEQ ID NO: 1314976 - RNA, 25 nt, Human
caaaaagcacuccaugcacaaaaca

SEQ ID NO: 1314977 - RNA, 25 nt, Human
caccccugccccaggcaaucagucc

SEQ ID NO: 1314978 - RNA, 22 nt, Human
cccaaaaagcacuccaugcaca

SEQ ID NO: 1314979 - RNA, 28 nt, Human
cccaaaaagcacuccaugcacaaaacac

SEQ ID NO: 1314980 - RNA, 21 nt, Human
cccaagcuuagcgcccaagag

SEQ ID NO: 1314981 - RNA, 24 nt, Human
ccccggcggccucgacugccaccc

SEQ ID NO: 1314982 - RNA, 22 nt, Human
cccggagagcugcagccucacc

SEQ ID NO: 1314983 - RNA, 23 nt, Human
ccuccccagcgcuaccgccgccc

SEQ ID NO: 1314984 - RNA, 22 nt, Human
ccuccugcgcucccucccaagc

SEQ ID NO: 1314985 - RNA, 22 nt, Human
ccucgacugccaccccugcccc

SEQ ID NO: 1314986 - RNA, 18 nt, Human
cgacugccaccccugccc

SEQ ID NO: 1314987 - RNA, 21 nt, Human
cgacugccaccccugccccag

SEQ ID NO: 1314988 - RNA, 22 nt, Human
cuccugcgcucccucccaagcu

SEQ ID NO: 1314989 - RNA, 20 nt, Human
cugcagccucaccucggccc

SEQ ID NO: 1314990 - RNA, 19 nt, Human
gagcugcagccucaccucg

SEQ ID NO: 1314991 - RNA, 19 nt, Human
ggccucgacugccaccccu

SEQ ID NO: 1314992 - RNA, 21 nt, Human
ggugacgugaaccggaaagga

SEQ ID NO: 1314993 - RNA, 18 nt, Human
uaaaaugcaauacugcgc

SEQ ID NO: 1314994 - RNA, 24 nt, Human
uaaauaaacacacuguuuaaacca

SEQ ID NO: 1314995 - RNA, 22 nt, Human
uauaaaaugcaauacugcgcau

SEQ ID NO: 1314996 - RNA, 24 nt, Human
uauaucgaugaucucugugaauac

SEQ ID NO: 1314997 - RNA, 20 nt, Human
ucccaaaaagcacuccaugc

SEQ ID NO: 1314998 - RNA, 19 nt, Human
ucccaagcuuagcgcccaa

SEQ ID NO: 1314999 - RNA, 25 nt, Human
ucgaugaucucugugaauacuuccc

SEQ ID NO: 1315000 - RNA, 22 nt, Human
ucuccuccuccuccccagcgcu

SEQ ID NO: 1315001 - RNA, 18 nt, Human
ugacccagggaaggacac

SEQ ID NO: 1315002 - RNA, 24 nt, Human
ugacgugaaccggaaaggaaggac

SEQ ID NO: 1315003 - RNA, 19 nt, Human
ugcagguggagcaacagag

SEQ ID NO: 1315004 - RNA, 23 nt, Human
uggcugcagguggagcaacagag

SEQ ID NO: 1315005 - RNA, 24 nt, Human
uggcugcagguggagcaacagagg

SEQ ID NO: 1315006 - RNA, 23 nt, Human
uuuaaaccacccuccccccauuu

SEQ ID NO: 1315007 - RNA, 18 nt, Human
uuugaaaagaaagaaaag

SEQ ID NO: 1315008 - RNA, 27 nt, Human
aaaacaaacagacaugacacacacaaa

SEQ ID NO: 1315009 - RNA, 20 nt, Human
aaacagacaugacacacacu

SEQ ID NO: 1315010 - RNA, 20 nt, Human
aacagacaugacacacacaa

SEQ ID NO: 1315011 - RNA, 23 nt, Human
agccagcaaccccagaaaacccu

SEQ ID NO: 1315012 - RNA, 18 nt, Human
aucugccuaaugcuuucc

SEQ ID NO: 1315013 - RNA, 20 nt, Human
aucugccuaaugcuuuccuc

SEQ ID NO: 1315014 - RNA, 18 nt, Human
augaaguggcugccuuug

SEQ ID NO: 1315015 - RNA, 20 nt, Human
cauuucuuagcaagcaaggu

SEQ ID NO: 1315016 - RNA, 19 nt, Human
cccuuuuccuuuuccucuc

SEQ ID NO: 1315017 - RNA, 19 nt, Human
ccuucccuuuuccuuuucc

SEQ ID NO: 1315018 - RNA, 19 nt, Human
ccuuuuccucucagaaaag

SEQ ID NO: 1315019 - RNA, 24 nt, Human
cucaaccucucuccuuuucucuuu

SEQ ID NO: 1315020 - RNA, 25 nt, Human
cucaaccucucuccuuuucucuuuu

SEQ ID NO: 1315021 - RNA, 23 nt, Human
cucgcucgcucaaccucucuccu

SEQ ID NO: 1315022 - RNA, 25 nt, Human
cucuccuuuucucuuuuaccauuaa

SEQ ID NO: 1315023 - RNA, 18 nt, Human
cucuccuuuuucucuccc

SEQ ID NO: 1315024 - RNA, 18 nt, Human
cuggugguacagugccuu

SEQ ID NO: 1315025 - RNA, 19 nt, Human
cugucuccucauccucaca

SEQ ID NO: 1315026 - RNA, 22 nt, Human
cuguggguucuucucaggcaca

SEQ ID NO: 1315027 - RNA, 21 nt, Human
gaaaaacaaacagacaugaca

SEQ ID NO: 1315028 - RNA, 19 nt, Human
gaaauacaacccccaugaa

SEQ ID NO: 1315029 - RNA, 21 nt, Human
gagaagcacauuuaaucuuua

SEQ ID NO: 1315030 - RNA, 20 nt, Human
gaggcucuccuuuuucucuc

SEQ ID NO: 1315031 - RNA, 19 nt, Human
gauggaaagggcuacuugu

SEQ ID NO: 1315032 - RNA, 21 nt, Human
gcuagucugucaucaucacac

SEQ ID NO: 1315033 - RNA, 22 nt, Human
uaauaauaauaauggcccuuuc

SEQ ID NO: 1315034 - RNA, 19 nt, Human
uagucugucaucaucacac

SEQ ID NO: 1315035 - RNA, 23 nt, Human
ucacauguacauuccaucugccu

SEQ ID NO: 1315036 - RNA, 22 nt, Human
uccucauccucacauguacauu

SEQ ID NO: 1315037 - RNA, 19 nt, Human
ucucgcucgcucaaccucu

SEQ ID NO: 1315038 - RNA, 21 nt, Human
ugaaaaacaaacagacaugac

SEQ ID NO: 1315039 - RNA, 26 nt, Human
ugaaaaacaaacagacaugacacaca

SEQ ID NO: 1315040 - RNA, 20 nt, Human
ugaaauacaacccccaugaa

SEQ ID NO: 1315041 - RNA, 20 nt, Human
ugagcucagaggcucuccuu

SEQ ID NO: 1315042 - RNA, 20 nt, Human
ugagcucagaggcucuccuu

SEQ ID NO: 1315043 - RNA, 25 nt, Human
ugccuuggaaagagaaaucaggagu

SEQ ID NO: 1315044 - RNA, 27 nt, Human
ugccuuggaaagagaaaucaggaguga

SEQ ID NO: 1315045 - RNA, 20 nt, Human
ugccuugguccucaaggagg

SEQ ID NO: 1315046 - RNA, 20 nt, Human
ugcuuuccucucuuaauuga

SEQ ID NO: 1315047 - RNA, 20 nt, Human
uggaaagagaaaucaggagu

SEQ ID NO: 1315048 - RNA, 22 nt, Human
uuaaucuuuacuggcuccccua

SEQ ID NO: 1315049 - RNA, 26 nt, Human
uucccuuuuccuuuuccucucagaaa

SEQ ID NO: 1315050 - RNA, 21 nt, Human
uugaaaaacaaacagacauga

SEQ ID NO: 1315051 - RNA, 23 nt, Human
uugccccauuucuuagcaagcaa

SEQ ID NO: 1315052 - RNA, 22 nt, Human
aaaacccacaacccacaggaug

SEQ ID NO: 1315053 - RNA, 21 nt, Human
aaacaaaaaacccacaaccca

SEQ ID NO: 1315054 - RNA, 22 nt, Human
aaacccacaacccacaggaugg

SEQ ID NO: 1315055 - RNA, 19 nt, Human
caaaaaacccacaacccac

SEQ ID NO: 1315056 - RNA, 22 nt, Human
caaaaaacccacaacccacagg

SEQ ID NO: 1315057 - RNA, 23 nt, Human
caaaaaacccacaacccacagga

SEQ ID NO: 1315058 - RNA, 22 nt, Human
gagaaaacaaaaaacccacaac

SEQ ID NO: 1315059 - RNA, 18 nt, Human
ggagaaaacaaaaaaccc

SEQ ID NO: 1315060 - RNA, 31 nt, Human
ggagaaaacaaaaaacccacaacccacaggg

SEQ ID NO: 1315061 - RNA, 18 nt, Human
uacaucaagacaucuccc

SEQ ID NO: 1315062 - RNA, 21 nt, Human
uacaucaagacaucucccagg

SEQ ID NO: 1315063 - RNA, 22 nt, Human
uucauggaagauaaucuucucc

SEQ ID NO: 1315064 - RNA, 23 nt, Human
aaccuggccaaguuuggcuucag

SEQ ID NO: 1315065 - RNA, 22 nt, Human
aggagucacagugcugacccca

SEQ ID NO: 1315066 - RNA, 18 nt, Human
auggagcccuggauuucc

SEQ ID NO: 1315067 - RNA, 19 nt, Human
auggagcccuggauuucca

SEQ ID NO: 1315068 - RNA, 19 nt, Human
caagauggagcccuggauu

SEQ ID NO: 1315069 - RNA, 19 nt, Human
cacacacuuugcagcaaca

SEQ ID NO: 1315070 - RNA, 21 nt, Human
cacuucuuccagugagcccca

SEQ ID NO: 1315071 - RNA, 24 nt, Human
ccaacccugcucagacucuuccuc

SEQ ID NO: 1315072 - RNA, 21 nt, Human
cccugcucagacucuuccucc

SEQ ID NO: 1315073 - RNA, 23 nt, Human
cccugcucagacucuuccuccaa

SEQ ID NO: 1315074 - RNA, 22 nt, Human
cccuggauuuccaagucuuucc

SEQ ID NO: 1315075 - RNA, 19 nt, Human
ccugcucagacucuuccuc

SEQ ID NO: 1315076 - RNA, 24 nt, Human
cucaggccauagugaccaggccag

SEQ ID NO: 1315077 - RNA, 18 nt, Human
ggcuaccguccugcccag

SEQ ID NO: 1315078 - RNA, 18 nt, Human
ucaggccauagugaccag

SEQ ID NO: 1315079 - RNA, 30 nt, Human
uccaagucuuuccaacccugcucagacucu

SEQ ID NO: 1315080 - RNA, 23 nt, Human
ugagccccagugucugagcuuug

SEQ ID NO: 1315081 - RNA, 23 nt, Human
ugcagaauaccagacaauggcua

SEQ ID NO: 1315082 - RNA, 20 nt, Human
uggagcccuggauuuccaag

SEQ ID NO: 1315083 - RNA, 18 nt, Human
uucacuucuuccagugag

SEQ ID NO: 1315084 - RNA, 24 nt, Human
uuccaagucuuuccaacccugcuc

SEQ ID NO: 1315085 - RNA, 18 nt, Human
uucuuccagugagcccca

SEQ ID NO: 1315086 - RNA, 18 nt, Human
cccucauccagauucaac

SEQ ID NO: 1315087 - RNA, 18 nt, Human
cccugcgcgccccggccg

SEQ ID NO: 1315088 - RNA, 27 nt, Human
ccgcugggcaacguggagcgcucccug

SEQ ID NO: 1315089 - RNA, 21 nt, Human
cggagccgcugggcaacgugg

SEQ ID NO: 1315090 - RNA, 22 nt, Human
ggccgagcuccugcccgaugcc

SEQ ID NO: 1315091 - RNA, 23 nt, Human
guggagcgcucccugcgcgcccc

SEQ ID NO: 1315092 - RNA, 30 nt, Human
uauuaugaaaauuucaaauuuacauagaag

SEQ ID NO: 1315093 - RNA, 19 nt, Human
ucccugcgcgccccggccg

SEQ ID NO: 1315094 - RNA, 22 nt, Human
ucgaacagaaguugaguuuucc

SEQ ID NO: 1315095 - RNA, 23 nt, Human
ugagugugaagauccacaagucg

SEQ ID NO: 1315096 - RNA, 26 nt, Human
ugcccgcggcuucgugcccgcggccu

SEQ ID NO: 1315097 - RNA, 18 nt, Human
uuuguuucugagugugaa

SEQ ID NO: 1315098 - RNA, 23 nt, Human
aaaaaaacaaacaaccccaucaa

SEQ ID NO: 1315099 - RNA, 25 nt, Human
aaaaaaacaaacaaccccaucaaaa

SEQ ID NO: 1315100 - RNA, 27 nt, Human
aaaaaacacaugaaaaaaugcucauca

SEQ ID NO: 1315101 - RNA, 19 nt, Human
aaacaaccccaucaaaaag

SEQ ID NO: 1315102 - RNA, 27 nt, Human
aaacuaccaucagagugaacaggcaag

SEQ ID NO: 1315103 - RNA, 26 nt, Human
aaagagaacgcaaaagaaacuaccau

SEQ ID NO: 1315104 - RNA, 21 nt, Human
aaccuacaaaaugggagaaaa

SEQ ID NO: 1315105 - RNA, 24 nt, Human
aacgcaaaagaaacuaccaucaga

SEQ ID NO: 1315106 - RNA, 26 nt, Human
aagaaaaaaacaaacaaccccaucaa

SEQ ID NO: 1315107 - RNA, 19 nt, Human
aauucacaagaaaaaaaca

SEQ ID NO: 1315108 - RNA, 20 nt, Human
acaagaaaaaaacaaacaac

SEQ ID NO: 1315109 - RNA, 22 nt, Human
agacauuuaugcagccaaaaaa

SEQ ID NO: 1315110 - RNA, 23 nt, Human
augcagccaaaaaacacaugaaa

SEQ ID NO: 1315111 - RNA, 24 nt, Human
caaaaagugggcgaaggacaugaa

SEQ ID NO: 1315112 - RNA, 21 nt, Human
caaacaaccccaucaaaaagu

SEQ ID NO: 1315113 - RNA, 27 nt, Human
caaacaaccccaucaaaaagugggcga

SEQ ID NO: 1315114 - RNA, 26 nt, Human
caaccccaucaaaaagugggcgaagg

SEQ ID NO: 1315115 - RNA, 22 nt, Human
cacaagaaaaaaacaaacaacc

SEQ ID NO: 1315116 - RNA, 26 nt, Human
cagagugaacaggcaaccuacaaaau

SEQ ID NO: 1315117 - RNA, 21 nt, Human
cagcauaguugcuugcagaac

SEQ ID NO: 1315118 - RNA, 20 nt, Human
caucaagagagagcagcaua

SEQ ID NO: 1315119 - RNA, 21 nt, Human
caugaacagacacuucucaaa

SEQ ID NO: 1315120 - RNA, 18 nt, Human
ccaucaagagagagcagc

SEQ ID NO: 1315121 - RNA, 18 nt, Human
cugaacuuggaagcugga

SEQ ID NO: 1315122 - RNA, 26 nt, Human
gaaaaaaacaaacaaccccaucaaaa

SEQ ID NO: 1315123 - RNA, 23 nt, Human
gaaacuaccaucagagugaacag

SEQ ID NO: 1315124 - RNA, 24 nt, Human
gagaacgcaaaagaaaccgguacc

SEQ ID NO: 1315125 - RNA, 21 nt, Human
gccaaaaaacacaugaaaaaa

SEQ ID NO: 1315126 - RNA, 23 nt, Human
gccaaaaaacacaugaaaaaaug

SEQ ID NO: 1315127 - RNA, 21 nt, Human
ggaaagagaacgcaaaagaaa

SEQ ID NO: 1315128 - RNA, 24 nt, Human
ggagaaaagcacaggauguagagg

SEQ ID NO: 1315129 - RNA, 23 nt, Human
gggaaagagaacgcaaaagaaac

SEQ ID NO: 1315130 - RNA, 20 nt, Human
uauccagaaucuacaacgaa

SEQ ID NO: 1315131 - RNA, 24 nt, Human
uauucggcauaaucuucucccuca

SEQ ID NO: 1315132 - RNA, 25 nt, Human
ucauuuucaucuucaccaucaagag

SEQ ID NO: 1315133 - RNA, 23 nt, Human
uccaggguggagagaaacuagga

SEQ ID NO: 1315134 - RNA, 24 nt, Human
ucugacaaagggcuaauauccaga

SEQ ID NO: 1315135 - RNA, 21 nt, Human
ucuggauagagguuuugauuu

SEQ ID NO: 1315136 - RNA, 24 nt, Human
ucuucuguaacaucauaggguagg

SEQ ID NO: 1315137 - RNA, 22 nt, Human
ugaacaggcaaccuacaaaaug

SEQ ID NO: 1315138 - RNA, 19 nt, Human
ugacaaagggcuaauaucc

SEQ ID NO: 1315139 - RNA, 20 nt, Human
ugaguuuuauuuugucuugu

SEQ ID NO: 1315140 - RNA, 25 nt, Human
ugcagccaaaaaacacaugaaaaaa

SEQ ID NO: 1315141 - RNA, 19 nt, Human
ugcucucgaauguuccagg

SEQ ID NO: 1315142 - RNA, 18 nt, Human
uggaagcuggauuuuccu

SEQ ID NO: 1315143 - RNA, 22 nt, Human
ugggagaaaauuuucgcaaccu

SEQ ID NO: 1315144 - RNA, 18 nt, Human
ugucuugucuggauagag

SEQ ID NO: 1315145 - RNA, 22 nt, Human
uucacaagaaaaaaacaaacaa

SEQ ID NO: 1315146 - RNA, 22 nt, Human
uucgcaaccuacucaucugacc

SEQ ID NO: 1315147 - RNA, 18 nt, Human
uucuguaacaucauaggg

SEQ ID NO: 1315148 - RNA, 22 nt, Human
uuugcucucgaauguuccaggg

SEQ ID NO: 1315149 - RNA, 23 nt, Human
cacgcauccguggaguccagagc

SEQ ID NO: 1315150 - RNA, 26 nt, Human
cauagcccacauuccucugcccacgc

SEQ ID NO: 1315151 - RNA, 19 nt, Human
ggaguccagagcccagaaa

SEQ ID NO: 1315152 - RNA, 20 nt, Human
ggcugaucagcucaugcaga

SEQ ID NO: 1315153 - RNA, 21 nt, Human
guccagagcccagaaagccuc

SEQ ID NO: 1315154 - RNA, 20 nt, Human
uauuaugacuacauagccca

SEQ ID NO: 1315155 - RNA, 22 nt, Human
ucaagagcgaaguguggcacaa

SEQ ID NO: 1315156 - RNA, 23 nt, Human
ucaagagcgaaguguggcacaga

SEQ ID NO: 1315157 - RNA, 30 nt, Human
aaaaauauucucaaguacaaaaaccaaaag

SEQ ID NO: 1315158 - RNA, 26 nt, Human
aaaaggaagauauaagggaaaaagga

SEQ ID NO: 1315159 - RNA, 22 nt, Human
aaaauacaaccaauguacucug

SEQ ID NO: 1315160 - RNA, 21 nt, Human
aaacaaaaggccuagaccaca

SEQ ID NO: 1315161 - RNA, 24 nt, Human
aaacaaaaggccuagaccacaaau

SEQ ID NO: 1315162 - RNA, 22 nt, Human
aaacagaagggaauuuuuaagg

SEQ ID NO: 1315163 - RNA, 19 nt, Human
aaaggccuagaccacaaau

SEQ ID NO: 1315164 - RNA, 21 nt, Human
aaauaaacaaacacaagauag

SEQ ID NO: 1315165 - RNA, 20 nt, Human
aaccaauguacucugacuug

SEQ ID NO: 1315166 - RNA, 23 nt, Human
aagcaaauaaacaaacacaagau

SEQ ID NO: 1315167 - RNA, 23 nt, Human
aagcaaauaaacaaacacaaggg

SEQ ID NO: 1315168 - RNA, 24 nt, Human
aaguuauuguauucuacuuggaau

SEQ ID NO: 1315169 - RNA, 24 nt, Human
aauacauuucaaaaucaaauauaa

SEQ ID NO: 1315170 - RNA, 21 nt, Human
acaaaaggccuagaccacaaa

SEQ ID NO: 1315171 - RNA, 19 nt, Human
accacaaauuacccaguua

SEQ ID NO: 1315172 - RNA, 18 nt, Human
agaaaacaaaaggccuag

SEQ ID NO: 1315173 - RNA, 21 nt, Human
agaaauuuaauauuuggacaa

SEQ ID NO: 1315174 - RNA, 23 nt, Human
agaaauuuaauauuuggacaaaa

SEQ ID NO: 1315175 - RNA, 22 nt, Human
agaccagaucagagcagccagg

SEQ ID NO: 1315176 - RNA, 21 nt, Human
agcaaauaaacaaacacaaga

SEQ ID NO: 1315177 - RNA, 20 nt, Human
agcagccaggugccagagac

SEQ ID NO: 1315178 - RNA, 21 nt, Human
agcagccaggugccagagacu

SEQ ID NO: 1315179 - RNA, 18 nt, Human
agcuccuaacagcagauu

SEQ ID NO: 1315180 - RNA, 22 nt, Human
aggaagauauaagggaaaaagg

SEQ ID NO: 1315181 - RNA, 22 nt, Human
aggaccccaaaaugcaauccaa

SEQ ID NO: 1315182 - RNA, 24 nt, Human
aggagaacgcagguuuccaaugaa

SEQ ID NO: 1315183 - RNA, 18 nt, Human
aggugccagagacugggc

SEQ ID NO: 1315184 - RNA, 22 nt, Human
auucaaaauacaaccuuuuaaa

SEQ ID NO: 1315185 - RNA, 18 nt, Human
caaaaugcaauccaauau

SEQ ID NO: 1315186 - RNA, 20 nt, Human
cagagcagccaggugccaga

SEQ ID NO: 1315187 - RNA, 19 nt, Human
cagcagaauccucauucau

SEQ ID NO: 1315188 - RNA, 21 nt, Human
cauauggaugauauucaaaau

SEQ ID NO: 1315189 - RNA, 23 nt, Human
cauguaagaaacagaagggaauu

SEQ ID NO: 1315190 - RNA, 24 nt, Human
cauucaucucguccaugaagacca

SEQ ID NO: 1315191 - RNA, 24 nt, Human
cucacuacaacaaaguaauucacc

SEQ ID NO: 1315192 - RNA, 20 nt, Human
cuccgcgcugagaccagauc

SEQ ID NO: 1315193 - RNA, 20 nt, Human
cuuuagucuaccacauuugu

SEQ ID NO: 1315194 - RNA, 22 nt, Human
cuuuaugguuaucugccaugcu

SEQ ID NO: 1315195 - RNA, 18 nt, Human
gagcaauuucagacguag

SEQ ID NO: 1315196 - RNA, 22 nt, Human
gcgaccggguagaacggacgcc

SEQ ID NO: 1315197 - RNA, 24 nt, Human
ggggaaauuucuuagguuuuuucc

SEQ ID NO: 1315198 - RNA, 21 nt, Human
guuuacuuuuuagugaaguuu

SEQ ID NO: 1315199 - RNA, 20 nt, Human
guuuuaagccucaagaaaau

SEQ ID NO: 1315200 - RNA, 23 nt, Human
uaaaauuaccuuuuaaacuaaca

SEQ ID NO: 1315201 - RNA, 18 nt, Human
uaaacaaacacaagauag

SEQ ID NO: 1315202 - RNA, 21 nt, Human
uacaaccaauguacucugacu

SEQ ID NO: 1315203 - RNA, 21 nt, Human
uagaccacaaauuacccaguu

SEQ ID NO: 1315204 - RNA, 23 nt, Human
uagaguaauuacagucauuccag

SEQ ID NO: 1315205 - RNA, 22 nt, Human
uauauuacuaugauguuuuaaa

SEQ ID NO: 1315206 - RNA, 24 nt, Human
uauuuccauuuuuuaaaaaaaggg

SEQ ID NO: 1315207 - RNA, 23 nt, Human
ucaccaaaaauauucucaaguac

SEQ ID NO: 1315208 - RNA, 26 nt, Human
ucacuacaacaaaguaauucaccaaa

SEQ ID NO: 1315209 - RNA, 19 nt, Human
uccaaugaacucccucagg

SEQ ID NO: 1315210 - RNA, 22 nt, Human
uccauuaucucaaaauugagcu

SEQ ID NO: 1315211 - RNA, 20 nt, Human
ucccucagggcagcagaauc

SEQ ID NO: 1315212 - RNA, 24 nt, Human
uccgcgcugagaccagaucagagc

SEQ ID NO: 1315213 - RNA, 18 nt, Human
ucucguccaugaagacca

SEQ ID NO: 1315214 - RNA, 19 nt, Human
ucucguccaugaagaccaa

SEQ ID NO: 1315215 - RNA, 19 nt, Human
ugaaaaaaaaccauacuau

SEQ ID NO: 1315216 - RNA, 24 nt, Human
ugaaaaaacuguuuuaugaaagca

SEQ ID NO: 1315217 - RNA, 20 nt, Human
ugaaauagaaauuuaauauu

SEQ ID NO: 1315218 - RNA, 25 nt, Human
ugaaguacuaaauugaacaaggcca

SEQ ID NO: 1315219 - RNA, 22 nt, Human
ugagaccagaucagagcagcca

SEQ ID NO: 1315220 - RNA, 18 nt, Human
uggccugauagucuacau

SEQ ID NO: 1315221 - RNA, 21 nt, Human
uggccugauagucuacauuug

SEQ ID NO: 1315222 - RNA, 22 nt, Human
uggccugauagucuacauuuga

SEQ ID NO: 1315223 - RNA, 22 nt, Human
uuaaaagcaaauaaacaaacac

SEQ ID NO: 1315224 - RNA, 22 nt, Human
uuaaaagcaaauaaacaaacac

SEQ ID NO: 1315225 - RNA, 19 nt, Human
uuagaaaacaaaaggccua

SEQ ID NO: 1315226 - RNA, 25 nt, Human
uucaaauucuaaaauagcagcuuuu

SEQ ID NO: 1315227 - RNA, 24 nt, Human
uucuacaaaaauacaauauaggag

SEQ ID NO: 1315228 - RNA, 22 nt, Human
uuuugcauccuaauuuaaccuu

SEQ ID NO: 1315229 - RNA, 20 nt, Human
aacuucagcuucuuuaacac

SEQ ID NO: 1315230 - RNA, 18 nt, Human
aaggcaacauuuauuuga

SEQ ID NO: 1315231 - RNA, 22 nt, Human
acacaaauuuccuaacaccuau

SEQ ID NO: 1315232 - RNA, 20 nt, Human
acagagccuauuaaucguga

SEQ ID NO: 1315233 - RNA, 26 nt, Human
acagcaauaccuuggccaccuccaau

SEQ ID NO: 1315234 - RNA, 18 nt, Human
acccaaagcaauggcucc

SEQ ID NO: 1315235 - RNA, 22 nt, Human
accucgacgccuuaauucauca

SEQ ID NO: 1315236 - RNA, 24 nt, Human
auagagggaucacauacagauaca

SEQ ID NO: 1315237 - RNA, 19 nt, Human
auccaaacucuucucaaca

SEQ ID NO: 1315238 - RNA, 26 nt, Human
augauagagggaucacauacagauac

SEQ ID NO: 1315239 - RNA, 25 nt, Human
augaucaaugcauuuuuguaucacc

SEQ ID NO: 1315240 - RNA, 20 nt, Human
cacacgcaaaccaacaugcc

SEQ ID NO: 1315241 - RNA, 22 nt, Human
cacaguggacugaaaaccagaa

SEQ ID NO: 1315242 - RNA, 22 nt, Human
caccauggcuugaacaaacuca

SEQ ID NO: 1315243 - RNA, 21 nt, Human
cagcaauaccuuggccaccuc

SEQ ID NO: 1315244 - RNA, 23 nt, Human
cagcaauaccuuggccaccucca

SEQ ID NO: 1315245 - RNA, 26 nt, Human
caugaucaaugcauuuuuguaucacc

SEQ ID NO: 1315246 - RNA, 18 nt, Human
ccaaguagaauaagagug

SEQ ID NO: 1315247 - RNA, 19 nt, Human
ccaccucgacgccuuaauu

SEQ ID NO: 1315248 - RNA, 23 nt, Human
ccagauccucccagugggugacc

SEQ ID NO: 1315249 - RNA, 24 nt, Human
cccaaagcaauggcuccuccauuc

SEQ ID NO: 1315250 - RNA, 23 nt, Human
ccuaacaccuauucacaguggac

SEQ ID NO: 1315251 - RNA, 23 nt, Human
cgccuuaauucaucaaccaaucc

SEQ ID NO: 1315252 - RNA, 20 nt, Human
cguacuucuagcaugggcuc

SEQ ID NO: 1315253 - RNA, 20 nt, Human
cuaaggcagaaguggugguu

SEQ ID NO: 1315254 - RNA, 18 nt, Human
cuccaaugcaagcugagg

SEQ ID NO: 1315255 - RNA, 20 nt, Human
cuccaaugcaagcugaucca

SEQ ID NO: 1315256 - RNA, 20 nt, Human
cugcuuucuucagugcccca

SEQ ID NO: 1315257 - RNA, 21 nt, Human
gagcucacuggucucuucagg

SEQ ID NO: 1315258 - RNA, 21 nt, Human
gcagaaguggugguuacuugg

SEQ ID NO: 1315259 - RNA, 18 nt, Human
gccaguuguggcagcugc

SEQ ID NO: 1315260 - RNA, 22 nt, Human
gccuuaauucaucaaccaaucc

SEQ ID NO: 1315261 - RNA, 25 nt, Human
gcuucauucaccucuaccaaaucca

SEQ ID NO: 1315262 - RNA, 20 nt, Human
guucagaaauacauauuuca

SEQ ID NO: 1315263 - RNA, 18 nt, Human
uacuggggagcaaaagcu

SEQ ID NO: 1315264 - RNA, 18 nt, Human
uacuuggcaagaauacaa

SEQ ID NO: 1315265 - RNA, 25 nt, Human
uacuuggcaagaauacaauuucuuu

SEQ ID NO: 1315266 - RNA, 26 nt, Human
uagcaaggacaggaccaauacccaug

SEQ ID NO: 1315267 - RNA, 27 nt, Human
ucaagauccaaacucuucucaacagcc

SEQ ID NO: 1315268 - RNA, 27 nt, Human
ucagaaauacauauuucacugguacaa

SEQ ID NO: 1315269 - RNA, 22 nt, Human
ucagcuauccccgaugcauucc

SEQ ID NO: 1315270 - RNA, 21 nt, Human
uccaaugcaagcugauccaac

SEQ ID NO: 1315271 - RNA, 24 nt, Human
ucuucaggcugugcucugaaugau

SEQ ID NO: 1315272 - RNA, 25 nt, Human
ucuuuaacacaaauuuccuaacacc

SEQ ID NO: 1315273 - RNA, 22 nt, Human
ugaaaaccagaaccacagagcc

SEQ ID NO: 1315274 - RNA, 19 nt, Human
ugaaugaugacagcaauac

SEQ ID NO: 1315275 - RNA, 19 nt, Human
ugauagcaaggacaggacc

SEQ ID NO: 1315276 - RNA, 19 nt, Human
ugcauucccugcagugaca

SEQ ID NO: 1315277 - RNA, 18 nt, Human
uggcaagaauacaauuuc

SEQ ID NO: 1315278 - RNA, 18 nt, Human
uggcaagaauacaauuuc

SEQ ID NO: 1315279 - RNA, 19 nt, Human
uggcagcugcucugaaggu

SEQ ID NO: 1315280 - RNA, 20 nt, Human
uggccaguuguggcagcugc

SEQ ID NO: 1315281 - RNA, 24 nt, Human
uguggcagcugcucugaaggucaa

SEQ ID NO: 1315282 - RNA, 25 nt, Human
uguggcagcugcucugaaggucacu

SEQ ID NO: 1315283 - RNA, 19 nt, Human
uucacaguggacugaaaaa

SEQ ID NO: 1315284 - RNA, 19 nt, Human
uucaccucuaccaaaucca

SEQ ID NO: 1315285 - RNA, 19 nt, Human
uucaugaucaaugcauuuu

SEQ ID NO: 1315286 - RNA, 24 nt, Human
uuccuccgcauaaaacaacuucag

SEQ ID NO: 1315287 - RNA, 18 nt, Human
uucuuaacagcaucuuca

SEQ ID NO: 1315288 - RNA, 19 nt, Human
uuucuucagugccccacug

SEQ ID NO: 1315289 - RNA, 30 nt, Human
acucugaggaaacgccaauuucagagaaag

SEQ ID NO: 1315290 - RNA, 19 nt, Human
gagaaaauggaguauggcc

SEQ ID NO: 1315291 - RNA, 19 nt, Human
cgccggaccacgcuggggg

SEQ ID NO: 1315292 - RNA, 21 nt, Human
uauuuucauccgcaucuguca

SEQ ID NO: 1315293 - RNA, 30 nt, Human
uauuuucauccgcaucugucacuucugauu

SEQ ID NO: 1315294 - RNA, 18 nt, Human
ucgccggaccacgcuggg

SEQ ID NO: 1315295 - RNA, 23 nt, Human
ucgccggaccacgcugggggcuu

SEQ ID NO: 1315296 - RNA, 22 nt, Human
ucugcaaggcucgccggaccac

SEQ ID NO: 1315297 - RNA, 22 nt, Human
ugggggcuuuguccugacuggu

SEQ ID NO: 1315298 - RNA, 22 nt, Human
ccgcagcaguucucgaacuggc

SEQ ID NO: 1315299 - RNA, 22 nt, Human
cuuggcccgggcggcacucggc

SEQ ID NO: 1315300 - RNA, 24 nt, Human
gcagcaguucucgaacuggccucc

SEQ ID NO: 1315301 - RNA, 19 nt, Human
ggccucuccgcagcaguuc

SEQ ID NO: 1315302 - RNA, 24 nt, Human
ucuccgcagcaguucucgaacugg

SEQ ID NO: 1315303 - RNA, 19 nt, Human
uggcccgggcggcacucgg

SEQ ID NO: 1315304 - RNA, 21 nt, Human
uggcccgggcggcacucggcc

SEQ ID NO: 1315305 - RNA, 25 nt, Human
aaaaugagaagcguaacaguuucca

SEQ ID NO: 1315306 - RNA, 23 nt, Human
aaacaagccacaaaacaguuuua

SEQ ID NO: 1315307 - RNA, 24 nt, Human
aaacacagaaucaugcuaccccuu

SEQ ID NO: 1315308 - RNA, 23 nt, Human
aagcagagggggaggaggucaaa

SEQ ID NO: 1315309 - RNA, 19 nt, Human
acaaaacaguuuuagaaaa

SEQ ID NO: 1315310 - RNA, 22 nt, Human
auuucacagcugaaacaucacu

SEQ ID NO: 1315311 - RNA, 20 nt, Human
cacugcuuuaaaacacagaa

SEQ ID NO: 1315312 - RNA, 21 nt, Human
cagcccgggcagucguugcgg

SEQ ID NO: 1315313 - RNA, 18 nt, Human
cauuucacagcugaaaca

SEQ ID NO: 1315314 - RNA, 19 nt, Human
ccccucccgcagcccgggc

SEQ ID NO: 1315315 - RNA, 25 nt, Human
ccccuucauaagcagagggggagga

SEQ ID NO: 1315316 - RNA, 22 nt, Human
ccuccccucccgcagcccgggc

SEQ ID NO: 1315317 - RNA, 19 nt, Human
cuccuccccucccgcagcc

SEQ ID NO: 1315318 - RNA, 19 nt, Human
cucuccuccccucccgcag

SEQ ID NO: 1315319 - RNA, 21 nt, Human
gagaagcguaacaguuuccau

SEQ ID NO: 1315320 - RNA, 19 nt, Human
gggggaggaggucaaacag

SEQ ID NO: 1315321 - RNA, 25 nt, Human
uaaaaugagaagcguaacaguuucc

SEQ ID NO: 1315322 - RNA, 20 nt, Human
uaagcagagggggaggaggu

SEQ ID NO: 1315323 - RNA, 22 nt, Human
uacaaaacaagccacaaaacag

SEQ ID NO: 1315324 - RNA, 23 nt, Human
uacaaaacaagccacaaaacagu

SEQ ID NO: 1315325 - RNA, 21 nt, Human
uccaugcacucagccuagagc

SEQ ID NO: 1315326 - RNA, 22 nt, Human
ucccgcagcccgggcagucguu

SEQ ID NO: 1315327 - RNA, 24 nt, Human
ugccaaacguuugcuuuaucuucu

SEQ ID NO: 1315328 - RNA, 20 nt, Human
ugcuacauaccaauuaggag

SEQ ID NO: 1315329 - RNA, 20 nt, Human
uuugccaaacguuugcuuua

SEQ ID NO: 1315330 - RNA, 22 nt, Human
uuugcuacauaccaauuaggag

SEQ ID NO: 1315331 - RNA, 22 nt, Human
aagcaggagaaucgcuugaacc

SEQ ID NO: 1315332 - RNA, 24 nt, Human
aagcaggagaaucgcuugaaccug

SEQ ID NO: 1315333 - RNA, 25 nt, Human
aagcaggagaaucgcuugaaccugg

SEQ ID NO: 1315334 - RNA, 18 nt, Human
aaucgcuugaaccuggga

SEQ ID NO: 1315335 - RNA, 24 nt, Human
aaucgcuugaaccugggaggcaga

SEQ ID NO: 1315336 - RNA, 23 nt, Human
acagagcgagacuccgucuaaaa

SEQ ID NO: 1315337 - RNA, 23 nt, Human
acugcccuccagccuggcaacag

SEQ ID NO: 1315338 - RNA, 23 nt, Human
acugcccuccagccuggcaacag

SEQ ID NO: 1315339 - RNA, 19 nt, Human
agaguuuuccucagucuaa

SEQ ID NO: 1315340 - RNA, 21 nt, Human
agccuggcaacagagcgagac

SEQ ID NO: 1315341 - RNA, 23 nt, Human
agccuggcaacagagcgagacuc

SEQ ID NO: 1315342 - RNA, 23 nt, Human
agcugggcaugguggcaugcgcc

SEQ ID NO: 1315343 - RNA, 24 nt, Human
aggcagagguugcagaaagccaag

SEQ ID NO: 1315344 - RNA, 24 nt, Human
aggcugaagcaggagaaucgcuug

SEQ ID NO: 1315345 - RNA, 22 nt, Human
agguaaucaaaaguaccaaagc

SEQ ID NO: 1315346 - RNA, 18 nt, Human
auaacaaugagugaagau

SEQ ID NO: 1315347 - RNA, 21 nt, Human
auccuuuauggcuuuuugcug

SEQ ID NO: 1315348 - RNA, 24 nt, Human
aucgugccacugcccuccagccug

SEQ ID NO: 1315349 - RNA, 19 nt, Human
augaaaggcacacauaaua

SEQ ID NO: 1315350 - RNA, 21 nt, Human
cagcuuccgcggcccccgccc

SEQ ID NO: 1315351 - RNA, 23 nt, Human
cauaauagccaguuuuaaagagc

SEQ ID NO: 1315352 - RNA, 25 nt, Human
ccaaagcacugauaaugagucacca

SEQ ID NO: 1315353 - RNA, 19 nt, Human
ccacugcccuccagccugg

SEQ ID NO: 1315354 - RNA, 19 nt, Human
ccacugcccuccagccugg

SEQ ID NO: 1315355 - RNA, 20 nt, Human
ccacugcccuccagccuggc

SEQ ID NO: 1315356 - RNA, 21 nt, Human
ccuggcaacagagcgagacuc

SEQ ID NO: 1315357 - RNA, 23 nt, Human
ccuggcaacagagcgagacuccg

SEQ ID NO: 1315358 - RNA, 23 nt, Human
ccugggaggcagagguugcagaa

SEQ ID NO: 1315359 - RNA, 21 nt, Human
ccuguagucccagcuacucag

SEQ ID NO: 1315360 - RNA, 19 nt, Human
cgccuguagucccagcuac

SEQ ID NO: 1315361 - RNA, 24 nt, Human
cgccuguagucccagcuacucaga

SEQ ID NO: 1315362 - RNA, 20 nt, Human
cgucuaaaaaaaaaaaaaaa

SEQ ID NO: 1315363 - RNA, 19 nt, Human
cgugccacugcccuccagc

SEQ ID NO: 1315364 - RNA, 20 nt, Human
cugaaguacuaaagugacac

SEQ ID NO: 1315365 - RNA, 18 nt, Human
cuguaucacuuauucgaa

SEQ ID NO: 1315366 - RNA, 24 nt, Human
cuucuugucaguugcugcuaugac

SEQ ID NO: 1315367 - RNA, 25 nt, Human
cuuuauggcuuuuugcuguaucacu

SEQ ID NO: 1315368 - RNA, 23 nt, Human
gaaacacagguaaucaaaaguac

SEQ ID NO: 1315369 - RNA, 23 nt, Human
gagaaucgcuugaaccugggagg

SEQ ID NO: 1315370 - RNA, 20 nt, Human
gaggcagagguugcagaaag

SEQ ID NO: 1315371 - RNA, 22 nt, Human
ggagaguuuuccucagucuaag

SEQ ID NO: 1315372 - RNA, 24 nt, Human
gggcaugguggcaugcgccuguag

SEQ ID NO: 1315373 - RNA, 24 nt, Human
gguggcaugcgccuguagucccag

SEQ ID NO: 1315374 - RNA, 18 nt, Human
gucgggcggcagcucggg

SEQ ID NO: 1315375 - RNA, 24 nt, Human
gugcaagagaacaaaguccacaca

SEQ ID NO: 1315376 - RNA, 22 nt, Human
uaaagugacacuaauacugaaa

SEQ ID NO: 1315377 - RNA, 25 nt, Human
uaagucccauaacaaugagugaaga

SEQ ID NO: 1315378 - RNA, 19 nt, Human
uacucagaaggcugaagca

SEQ ID NO: 1315379 - RNA, 20 nt, Human
uagcugggcaugguggcaug

SEQ ID NO: 1315380 - RNA, 20 nt, Human
uaucugguuuaacaaaaagu

SEQ ID NO: 1315381 - RNA, 24 nt, Human
ucaaaacaucuauaauuucuuaca

SEQ ID NO: 1315382 - RNA, 20 nt, Human
ucaaaaguaccaaagcacug

SEQ ID NO: 1315383 - RNA, 22 nt, Human
uccagccuggcaacagagcgag

SEQ ID NO: 1315384 - RNA, 23 nt, Human
uccagccuggcaacagagcgaga

SEQ ID NO: 1315385 - RNA, 22 nt, Human
uccgucuaaaaaaaaaaaaaaa

SEQ ID NO: 1315386 - RNA, 25 nt, Human
uccgucuaaaaaaaaaaaaaaaaaa

SEQ ID NO: 1315387 - RNA, 18 nt, Human
ucgcagcuuccgcggccc

SEQ ID NO: 1315388 - RNA, 18 nt, Human
ucgcuugaaccugggagg

SEQ ID NO: 1315389 - RNA, 20 nt, Human
ucgugccacugcccuccagc

SEQ ID NO: 1315390 - RNA, 23 nt, Human
ucgugccacugcccuccagccug

SEQ ID NO: 1315391 - RNA, 21 nt, Human
ucuaaaaaaaaaaaaaaaaaa

SEQ ID NO: 1315392 - RNA, 22 nt, Human
ugaaaggcacacauaauagcca

SEQ ID NO: 1315393 - RNA, 24 nt, Human
ugaaccugggaggcagagguugca

SEQ ID NO: 1315394 - RNA, 22 nt, Human
ugaacuaaaaauauaaccacaa

SEQ ID NO: 1315395 - RNA, 20 nt, Human
ugaagcaggagaaucgcuug

SEQ ID NO: 1315396 - RNA, 24 nt, Human
ugaagcaggagaaucgcuugaacc

SEQ ID NO: 1315397 - RNA, 21 nt, Human
ugaaguacuaaagugacacua

SEQ ID NO: 1315398 - RNA, 20 nt, Human
ugagaacaaugaacuaaaaa

SEQ ID NO: 1315399 - RNA, 19 nt, Human
ugagucaccaucaucaaga

SEQ ID NO: 1315400 - RNA, 21 nt, Human
uggcaugcgccuguaguccca

SEQ ID NO: 1315401 - RNA, 24 nt, Human
ugguggcaugcgccuguaguccca

SEQ ID NO: 1315402 - RNA, 24 nt, Human
uuagcauuaaaugagaacaaugaa

SEQ ID NO: 1315403 - RNA, 22 nt, Human
uuagcugggcaugguggcaugc

SEQ ID NO: 1315404 - RNA, 24 nt, Human
uugaaccugggaggcagagguugc

SEQ ID NO: 1315405 - RNA, 24 nt, Human
aaaccggucauagggccaucacac

SEQ ID NO: 1315406 - RNA, 20 nt, Human
aacaagacaacagaacuaga

SEQ ID NO: 1315407 - RNA, 21 nt, Human
aacaagacaacagaacuagaa

SEQ ID NO: 1315408 - RNA, 22 nt, Human
aacagaacuagaaagccacaga

SEQ ID NO: 1315409 - RNA, 21 nt, Human
acaagacaacagaacuagaaa

SEQ ID NO: 1315410 - RNA, 19 nt, Human
acagguuggagaggaagaa

SEQ ID NO: 1315411 - RNA, 21 nt, Human
agacaacaagacaacagaacu

SEQ ID NO: 1315412 - RNA, 21 nt, Human
agacaacagaacuagaaagcc

SEQ ID NO: 1315413 - RNA, 21 nt, Human
agacaacagaacuagaaagcc

SEQ ID NO: 1315414 - RNA, 23 nt, Human
agacaacagaacuagaaagccac

SEQ ID NO: 1315415 - RNA, 21 nt, Human
agaggaagaaguacauggggg

SEQ ID NO: 1315416 - RNA, 23 nt, Human
agaggaagaaguacaugggggug

SEQ ID NO: 1315417 - RNA, 25 nt, Human
aggaagaaguacaugggggugugga

SEQ ID NO: 1315418 - RNA, 20 nt, Human
agguaauuugcaaggcaauc

SEQ ID NO: 1315419 - RNA, 22 nt, Human
aggugggcgccgggccggcggg

SEQ ID NO: 1315420 - RNA, 21 nt, Human
caacagaacuagaaagccaca

SEQ ID NO: 1315421 - RNA, 21 nt, Human
caaggacagguuggagaggaa

SEQ ID NO: 1315422 - RNA, 19 nt, Human
cagcccgcauaggagauga

SEQ ID NO: 1315423 - RNA, 18 nt, Human
cauggguucaugauggcu

SEQ ID NO: 1315424 - RNA, 26 nt, Human
caugucuuucuuccaugccuccaaaa

SEQ ID NO: 1315425 - RNA, 19 nt, Human
cccgcggcugggaggaggg

SEQ ID NO: 1315426 - RNA, 23 nt, Human
ccuccaaaaauggcaaaaagaga

SEQ ID NO: 1315427 - RNA, 18 nt, Human
ccugccccgcggcuggga

SEQ ID NO: 1315428 - RNA, 18 nt, Human
cuccaaaaauggcaaaaa

SEQ ID NO: 1315429 - RNA, 19 nt, Human
cuccaaaaauggcaaaaag

SEQ ID NO: 1315430 - RNA, 20 nt, Human
gcaaaaagagacaucugagu

SEQ ID NO: 1315431 - RNA, 19 nt, Human
gcggcccaaguuugacccg

SEQ ID NO: 1315432 - RNA, 19 nt, Human
ggcaaaaagagacaucuga

SEQ ID NO: 1315433 - RNA, 20 nt, Human
gggggcgcgcgcagcggcgg

SEQ ID NO: 1315434 - RNA, 22 nt, Human
ggucauagggccaucacacuca

SEQ ID NO: 1315435 - RNA, 26 nt, Human
uaaaagacugagacaacaagacaaca

SEQ ID NO: 1315436 - RNA, 21 nt, Human
uacauggggguguggaggugg

SEQ ID NO: 1315437 - RNA, 23 nt, Human
uccaaaaauggcaaaaagagaca

SEQ ID NO: 1315438 - RNA, 18 nt, Human
ucuggcguuuccgcagac

SEQ ID NO: 1315439 - RNA, 20 nt, Human
ugacccgacuuuucuggcgu

SEQ ID NO: 1315440 - RNA, 21 nt, Human
ugacccgacuuuucuggcguu

SEQ ID NO: 1315441 - RNA, 21 nt, Human
ugagacaacaagacaacagaa

SEQ ID NO: 1315442 - RNA, 23 nt, Human
ugccuccaaaaauggcaaaaaga

SEQ ID NO: 1315443 - RNA, 18 nt, Human
uggauguccacaaucauc

SEQ ID NO: 1315444 - RNA, 18 nt, Human
uggggguguggagguggg

SEQ ID NO: 1315445 - RNA, 26 nt, Human
ugugcagcugggagucuaaaagacug

SEQ ID NO: 1315446 - RNA, 20 nt, Human
agaagaaggaacauggcucg

SEQ ID NO: 1315447 - RNA, 23 nt, Human
agugagaagcaccagaagaagga

SEQ ID NO: 1315448 - RNA, 23 nt, Human
cccaccaaguccagugagaagca

SEQ ID NO: 1315449 - RNA, 19 nt, Human
cccgacagcauucccccuu

SEQ ID NO: 1315450 - RNA, 20 nt, Human
ccugcucagucccgacagca

SEQ ID NO: 1315451 - RNA, 20 nt, Human
ugcucagucccgacagcauu

SEQ ID NO: 1315452 - RNA, 22 nt, Human
ugcucagucccgacagcauucc

SEQ ID NO: 1315453 - RNA, 22 nt, Human
uggcucgcugucuuagagcccu

SEQ ID NO: 1315454 - RNA, 23 nt, Human
aaccccgucucuacuacaaauac

SEQ ID NO: 1315455 - RNA, 20 nt, Human
aagauggugaaaccccgucu

SEQ ID NO: 1315456 - RNA, 21 nt, Human
aagauggugaaaccccgucuc

SEQ ID NO: 1315457 - RNA, 23 nt, Human
aggaguucaaaacuauccuggcc

SEQ ID NO: 1315458 - RNA, 24 nt, Human
caagauggugaaaccccgucucua

SEQ ID NO: 1315459 - RNA, 20 nt, Human
cacuuuauuaaaagcagggu

SEQ ID NO: 1315460 - RNA, 23 nt, Human
ccuggccaagauggugaaacccc

SEQ ID NO: 1315461 - RNA, 24 nt, Human
ccuggccaagauggugaaaccccg

SEQ ID NO: 1315462 - RNA, 19 nt, Human
gcaggguuuuggccgggcg

SEQ ID NO: 1315463 - RNA, 24 nt, Human
gccaagauggugaaaccccgucuc

SEQ ID NO: 1315464 - RNA, 18 nt, Human
ggccaagauggugaaacc

SEQ ID NO: 1315465 - RNA, 24 nt, Human
gggcgcgguggcucacgucugugg

SEQ ID NO: 1315466 - RNA, 22 nt, Human
uauccuggccaagauggugaaa

SEQ ID NO: 1315467 - RNA, 19 nt, Human
uuuauuaaaagcaggguuu

SEQ ID NO: 1315468 - RNA, 24 nt, Human
uuuggccgggcgcgguggcucacg

SEQ ID NO: 1315469 - RNA, 21 nt, Human
caccgaacuaccuccuuucgc

SEQ ID NO: 1315470 - RNA, 18 nt, Human
ccacuggcuccuucccuc

SEQ ID NO: 1315471 - RNA, 25 nt, Human
cccgcgagcaccuugccuuugagga

SEQ ID NO: 1315472 - RNA, 20 nt, Human
ccgaacuaccuccuuucgcc

SEQ ID NO: 1315473 - RNA, 22 nt, Human
ccgauguccacuggcuccuucc

SEQ ID NO: 1315474 - RNA, 21 nt, Human
cgagcaccuugccuuugagga

SEQ ID NO: 1315475 - RNA, 24 nt, Human
gcaccgaacuaccuccuuucgccu

SEQ ID NO: 1315476 - RNA, 18 nt, Human
uaacuugcaggcagcccc

SEQ ID NO: 1315477 - RNA, 18 nt, Human
uaauguauccgaugucca

SEQ ID NO: 1315478 - RNA, 24 nt, Human
uccaccgcaccgaacuaccuccuu

SEQ ID NO: 1315479 - RNA, 25 nt, Human
ucgccuacaaaacguagguggggac

SEQ ID NO: 1315480 - RNA, 20 nt, Human
ccaacuccccaacugcacac

SEQ ID NO: 1315481 - RNA, 19 nt, Human
ccuucucuccccaacuccc

SEQ ID NO: 1315482 - RNA, 23 nt, Human
ucugccuucucuccccaacuccc

SEQ ID NO: 1315483 - RNA, 18 nt, Human
ugcauggggggagugcca

SEQ ID NO: 1315484 - RNA, 24 nt, Human
aaagagcugggauuacagguguga

SEQ ID NO: 1315485 - RNA, 21 nt, Human
aagagcugggauuacaggugu

SEQ ID NO: 1315486 - RNA, 24 nt, Human
aagugauccgccugccucggccuc

SEQ ID NO: 1315487 - RNA, 23 nt, Human
accauguuggucaggcuggucuc

SEQ ID NO: 1315488 - RNA, 24 nt, Human
agagcugggauuacaggugugagc

SEQ ID NO: 1315489 - RNA, 21 nt, Human
aguagcugggauuacaggcau

SEQ ID NO: 1315490 - RNA, 20 nt, Human
agugcaguggugccaucuug

SEQ ID NO: 1315491 - RNA, 23 nt, Human
aguggugccaucuugacucacug

SEQ ID NO: 1315492 - RNA, 18 nt, Human
auggagugcaguggugcc

SEQ ID NO: 1315493 - RNA, 21 nt, Human
auggaguuucaccauguuggu

SEQ ID NO: 1315494 - RNA, 24 nt, Human
auggaguuucaccauguuggucag

SEQ ID NO: 1315495 - RNA, 19 nt, Human
augucauuuauuuauuuau

SEQ ID NO: 1315496 - RNA, 22 nt, Human
augucuaagccucccgaguagc

SEQ ID NO: 1315497 - RNA, 23 nt, Human
augucuaagccucccgaguagcu

SEQ ID NO: 1315498 - RNA, 22 nt, Human
auugcugugacaaauuucaaac

SEQ ID NO: 1315499 - RNA, 19 nt, Human
auuuauuugccugcaugau

SEQ ID NO: 1315500 - RNA, 24 nt, Human
auuuuuauauuuuuaguagagaug

SEQ ID NO: 1315501 - RNA, 24 nt, Human
caaagagcugggauuacaggugug

SEQ ID NO: 1315502 - RNA, 23 nt, Human
caaccuccaccuccuggguucaa

SEQ ID NO: 1315503 - RNA, 22 nt, Human
caagugauccgccugccucggc

SEQ ID NO: 1315504 - RNA, 20 nt, Human
caagugauucucaugucuaa

SEQ ID NO: 1315505 - RNA, 21 nt, Human
caccauguuggucaggcuggu

SEQ ID NO: 1315506 - RNA, 24 nt, Human
caccauguuggucaggcuggucuc

SEQ ID NO: 1315507 - RNA, 24 nt, Human
cacccaggauggagugcaguggug

SEQ ID NO: 1315508 - RNA, 21 nt, Human
cacugcaaccuccaccuccug

SEQ ID NO: 1315509 - RNA, 23 nt, Human
cacugcaaccuccaccuccuggg

SEQ ID NO: 1315510 - RNA, 25 nt, Human
caggauggagugcaguggugccauc

SEQ ID NO: 1315511 - RNA, 23 nt, Human
caugcaucaccaugcccggcuaa

SEQ ID NO: 1315512 - RNA, 20 nt, Human
ccaaagagcugggauuacag

SEQ ID NO: 1315513 - RNA, 21 nt, Human
ccaaagagcugggauuacagg

SEQ ID NO: 1315514 - RNA, 21 nt, Human
ccaaagagcugggauuacagg

SEQ ID NO: 1315515 - RNA, 24 nt, Human
ccaaagagcugggauuacaggugu

SEQ ID NO: 1315516 - RNA, 24 nt, Human
ccaccuccuggguucaagugauuc

SEQ ID NO: 1315517 - RNA, 18 nt, Human
ccccuuuucaaauuuuuc

SEQ ID NO: 1315518 - RNA, 23 nt, Human
cccgaguagcugggauuacaggc

SEQ ID NO: 1315519 - RNA, 24 nt, Human
cccgaguagcugggauuacaggca

SEQ ID NO: 1315520 - RNA, 23 nt, Human
ccgaguagcugggauuacaggca

SEQ ID NO: 1315521 - RNA, 24 nt, Human
ccgaguagcugggauuacaggcau

SEQ ID NO: 1315522 - RNA, 22 nt, Human
ccuccaccuccuggguucaagu

SEQ ID NO: 1315523 - RNA, 18 nt, Human
ccugaccucaagugaucc

SEQ ID NO: 1315524 - RNA, 21 nt, Human
ccugaccucaagugauccgcc

SEQ ID NO: 1315525 - RNA, 23 nt, Human
ccugaccucaagugauccgccug

SEQ ID NO: 1315526 - RNA, 23 nt, Human
ccuggguucaagugauucucaug

SEQ ID NO: 1315527 - RNA, 19 nt, Human
cggccuccaaagagcuggg

SEQ ID NO: 1315528 - RNA, 24 nt, Human
cuaagccucccgaguagcugggau

SEQ ID NO: 1315529 - RNA, 23 nt, Human
cucaagugauccgccugccucgg

SEQ ID NO: 1315530 - RNA, 24 nt, Human
cucacugcaaccuccaccuccugg

SEQ ID NO: 1315531 - RNA, 26 nt, Human
cucacugcaaccuccaccuccugggu

SEQ ID NO: 1315532 - RNA, 26 nt, Human
cuccugaccucaagugauccgccugc

SEQ ID NO: 1315533 - RNA, 20 nt, Human
cuccuggguucaagugauuc

SEQ ID NO: 1315534 - RNA, 21 nt, Human
cuccuggguucaagugauucu

SEQ ID NO: 1315535 - RNA, 18 nt, Human
cugcaacauuucucuucu

SEQ ID NO: 1315536 - RNA, 19 nt, Human
cugcaacauuucucuucuc

SEQ ID NO: 1315537 - RNA, 25 nt, Human
cugcaacauuucucuucuuuguuuu

SEQ ID NO: 1315538 - RNA, 18 nt, Human
cugcaaccuccaccuccu

SEQ ID NO: 1315539 - RNA, 23 nt, Human
cugcaaccuccaccuccuggguu

SEQ ID NO: 1315540 - RNA, 24 nt, Human
cugcaaccuccaccuccuggguuc

SEQ ID NO: 1315541 - RNA, 24 nt, Human
gaccucaagugauccgccugccuc

SEQ ID NO: 1315542 - RNA, 24 nt, Human
gagauggaguuucaccauguuggu

SEQ ID NO: 1315543 - RNA, 24 nt, Human
gaguagcugggauuacaggcaugc

SEQ ID NO: 1315544 - RNA, 22 nt, Human
gauuacaggcaugcaucaccau

SEQ ID NO: 1315545 - RNA, 18 nt, Human
gauuacaggugugagcca

SEQ ID NO: 1315546 - RNA, 22 nt, Human
gauuacaggugugagccacagc

SEQ ID NO: 1315547 - RNA, 20 nt, Human
gccucggccuccaaagagcu

SEQ ID NO: 1315548 - RNA, 19 nt, Human
gcucugucacccaggaugg

SEQ ID NO: 1315549 - RNA, 23 nt, Human
gcuggucucaaacuccugaccuc

SEQ ID NO: 1315550 - RNA, 22 nt, Human
ggaguuucaccauguuggucag

SEQ ID NO: 1315551 - RNA, 24 nt, Human
ggauuacaggcaugcaucaccaug

SEQ ID NO: 1315552 - RNA, 24 nt, Human
ggcuggucucaaacuccugaccuc

SEQ ID NO: 1315553 - RNA, 20 nt, Human
guagcugggauuacaggcau

SEQ ID NO: 1315554 - RNA, 24 nt, Human
uaauuuuuauauuuuuaguagaga

SEQ ID NO: 1315555 - RNA, 23 nt, Human
uacaggcaugcaucaccaugccc

SEQ ID NO: 1315556 - RNA, 23 nt, Human
uacaggugugagccacagcgucu

SEQ ID NO: 1315557 - RNA, 22 nt, Human
uacuuuugcuucuuauuccuug

SEQ ID NO: 1315558 - RNA, 22 nt, Human
uagagauggaguuucaccaugu

SEQ ID NO: 1315559 - RNA, 24 nt, Human
uaguagagauggaguuucaccaug

SEQ ID NO: 1315560 - RNA, 26 nt, Human
uaguagagauggaguuucaccauguu

SEQ ID NO: 1315561 - RNA, 29 nt, Human
ucaaacauuccaauuauuacagucacuaa

SEQ ID NO: 1315562 - RNA, 22 nt, Human
ucaaauacuacuuuugcuucuu

SEQ ID NO: 1315563 - RNA, 21 nt, Human
ucaagugauccgccugccucg

SEQ ID NO: 1315564 - RNA, 23 nt, Human
ucacugcaaccuccaccuccugg

SEQ ID NO: 1315565 - RNA, 24 nt, Human
ucacugcaaccuccaccuccuggg

SEQ ID NO: 1315566 - RNA, 25 nt, Human
ucacugcaaccuccaccuccugggu

SEQ ID NO: 1315567 - RNA, 27 nt, Human
ucacugcaaccuccaccuccuggguuc

SEQ ID NO: 1315568 - RNA, 22 nt, Human
uccaaagagcugggauuacagg

SEQ ID NO: 1315569 - RNA, 24 nt, Human
uccaaagagcugggauuacaggug

SEQ ID NO: 1315570 - RNA, 24 nt, Human
ucccgaguagcugggauuacaggc

SEQ ID NO: 1315571 - RNA, 21 nt, Human
uccuggguucaagugauucuc

SEQ ID NO: 1315572 - RNA, 24 nt, Human
uccuggguucaagugauucucaug

SEQ ID NO: 1315573 - RNA, 24 nt, Human
ucugucacccaggauggagugcag

SEQ ID NO: 1315574 - RNA, 20 nt, Human
ucuugcucugucacccagga

SEQ ID NO: 1315575 - RNA, 24 nt, Human
ucuugcucugucacccaggaugga

SEQ ID NO: 1315576 - RNA, 18 nt, Human
ugaccucaagugauccgc

SEQ ID NO: 1315577 - RNA, 24 nt, Human
ugaccucaagugauccgccugccu

SEQ ID NO: 1315578 - RNA, 19 nt, Human
ugauaaagcaaacauggua

SEQ ID NO: 1315579 - RNA, 24 nt, Human
ugcccggcuaauuuuuauauuuuu

SEQ ID NO: 1315580 - RNA, 24 nt, Human
ugcucugucacccaggauggagug

SEQ ID NO: 1315581 - RNA, 18 nt, Human
uggagugcaguggugcca

SEQ ID NO: 1315582 - RNA, 28 nt, Human
uggagugcaguggugccauccuagcacg

SEQ ID NO: 1315583 - RNA, 23 nt, Human
uggagugcaguggugccaucuug

SEQ ID NO: 1315584 - RNA, 28 nt, Human
uggagugcaguggugccauggcucuagc

SEQ ID NO: 1315585 - RNA, 24 nt, Human
uggaguuucaccauguuggucagg

SEQ ID NO: 1315586 - RNA, 21 nt, Human
ugggauuacaggcaugcauca

SEQ ID NO: 1315587 - RNA, 24 nt, Human
ugggauuacaggcaugcaucacca

SEQ ID NO: 1315588 - RNA, 18 nt, Human
ugggauuacaggugugag

SEQ ID NO: 1315589 - RNA, 19 nt, Human
ugggauuacaggugugagc

SEQ ID NO: 1315590 - RNA, 21 nt, Human
ugggauuacaggugugagcca

SEQ ID NO: 1315591 - RNA, 22 nt, Human
ugggauuacaggugugagccac

SEQ ID NO: 1315592 - RNA, 22 nt, Human
ugggauuacaggugugagccac

SEQ ID NO: 1315593 - RNA, 23 nt, Human
ugggauuacaggugugagccaca

SEQ ID NO: 1315594 - RNA, 24 nt, Human
ugggauuacaggugugagccacag

SEQ ID NO: 1315595 - RNA, 27 nt, Human
ugggauuacaggugugagccacagcgu

SEQ ID NO: 1315596 - RNA, 23 nt, Human
uggguucaagugauucucauguc

SEQ ID NO: 1315597 - RNA, 24 nt, Human
uggguucaagugauucucaugucu

SEQ ID NO: 1315598 - RNA, 24 nt, Human
uggucaggcuggucucaaacuccu

SEQ ID NO: 1315599 - RNA, 21 nt, Human
ugucacccaggauggagugca

SEQ ID NO: 1315600 - RNA, 18 nt, Human
uuaguagagauggaguuu

SEQ ID NO: 1315601 - RNA, 24 nt, Human
uuaguagagauggaguuucaccau

SEQ ID NO: 1315602 - RNA, 24 nt, Human
uuucaccauguuggucaggcuggu

SEQ ID NO: 1315603 - RNA, 26 nt, Human
uuucuuauuuauuuauuuauuuuuug

SEQ ID NO: 1315604 - RNA, 24 nt, Human
uuuuuaguagagauggaguuucac

SEQ ID NO: 1315605 - RNA, 20 nt, Human
uuuuuauauuuuuaguagag

SEQ ID NO: 1315606 - RNA, 24 nt, Human
aaacggccacacccuuucuagagc

SEQ ID NO: 1315607 - RNA, 18 nt, Human
accaccaacuccucagca

SEQ ID NO: 1315608 - RNA, 19 nt, Human
aggaaugugaggaaaacag

SEQ ID NO: 1315609 - RNA, 18 nt, Human
caacuccucagcaccucc

SEQ ID NO: 1315610 - RNA, 19 nt, Human
caacuccucagcaccuccu

SEQ ID NO: 1315611 - RNA, 26 nt, Human
cagccaauguaaaacggccacacccu

SEQ ID NO: 1315612 - RNA, 20 nt, Human
gaaugugaggaaaacagcca

SEQ ID NO: 1315613 - RNA, 27 nt, Human
uaaaacggccacacccuuucuagagcc

SEQ ID NO: 1315614 - RNA, 25 nt, Human
ucccuugucugcugcuaccaccaac

SEQ ID NO: 1315615 - RNA, 22 nt, Human
uccuuucagcuucaacuucagc

SEQ ID NO: 1315616 - RNA, 24 nt, Human
ugaggaaugugaggaaaacagcca

SEQ ID NO: 1315617 - RNA, 18 nt, Human
ugauucuauccauuucuc

SEQ ID NO: 1315618 - RNA, 21 nt, Human
ugauucuauccauuucuccuc

SEQ ID NO: 1315619 - RNA, 18 nt, Human
ugcuugaggaaugugagg

SEQ ID NO: 1315620 - RNA, 19 nt, Human
uucucuaugaauccuuuca

SEQ ID NO: 1315621 - RNA, 27 nt, Human
uugacaauaaccaugauucuauccauu

SEQ ID NO: 1315622 - RNA, 22 nt, Human
acuccaguggucuggagguaag

SEQ ID NO: 1315623 - RNA, 21 nt, Human
acuccuccccuucucucuccc

SEQ ID NO: 1315624 - RNA, 21 nt, Human
agccauggcucuagggcaagu

SEQ ID NO: 1315625 - RNA, 21 nt, Human
agcccucggcgguggcggcgg

SEQ ID NO: 1315626 - RNA, 18 nt, Human
cauggcucuagggcaagu

SEQ ID NO: 1315627 - RNA, 24 nt, Human
cccacucauuacugccuggucucc

SEQ ID NO: 1315628 - RNA, 20 nt, Human
cccuacuccuccccuucucu

SEQ ID NO: 1315629 - RNA, 20 nt, Human
cccucccacccuacuccucc

SEQ ID NO: 1315630 - RNA, 18 nt, Human
cccucggcgguggcggcg

SEQ ID NO: 1315631 - RNA, 23 nt, Human
ccgcggcggugguggcuccgggc

SEQ ID NO: 1315632 - RNA, 24 nt, Human
ccggcaggggcgugugccccuucu

SEQ ID NO: 1315633 - RNA, 18 nt, Human
ccucccacccuacuccuc

SEQ ID NO: 1315634 - RNA, 20 nt, Human
ccuccccuucucucucccca

SEQ ID NO: 1315635 - RNA, 21 nt, Human
cggcgagcuccagcccucggc

SEQ ID NO: 1315636 - RNA, 19 nt, Human
cuacuccuccccuucucuc

SEQ ID NO: 1315637 - RNA, 21 nt, Human
cuccccuucucucuccccacu

SEQ ID NO: 1315638 - RNA, 18 nt, Human
cuccgggcuggggucgcc

SEQ ID NO: 1315639 - RNA, 21 nt, Human
cucggcgguggcggcggccgu

SEQ ID NO: 1315640 - RNA, 19 nt, Human
cugcgggccgugggggaug

SEQ ID NO: 1315641 - RNA, 18 nt, Human
gccgugggggaugggggc

SEQ ID NO: 1315642 - RNA, 18 nt, Human
gccguggugagugugagg

SEQ ID NO: 1315643 - RNA, 21 nt, Human
gcggcggugguggcuccgggc

SEQ ID NO: 1315644 - RNA, 18 nt, Human
gcggugguggcuccgggc

SEQ ID NO: 1315645 - RNA, 22 nt, Human
gcggugguggcuccgggcuggg

SEQ ID NO: 1315646 - RNA, 20 nt, Human
ggcggugguggcuccgggcu

SEQ ID NO: 1315647 - RNA, 21 nt, Human
ggcggugguggcuccgggcug

SEQ ID NO: 1315648 - RNA, 18 nt, Human
ggggaugggggcggcgag

SEQ ID NO: 1315649 - RNA, 24 nt, Human
ggucucgcccuuccaccuuuuccc

SEQ ID NO: 1315650 - RNA, 20 nt, Human
gucucugucguucccuccca

SEQ ID NO: 1315651 - RNA, 23 nt, Human
gugccccuucuggagcgucucug

SEQ ID NO: 1315652 - RNA, 19 nt, Human
guggcuccgggcugggguc

SEQ ID NO: 1315653 - RNA, 21 nt, Human
guggcuccgggcuggggucgc

SEQ ID NO: 1315654 - RNA, 19 nt, Human
uccaggguccggcaggggc

SEQ ID NO: 1315655 - RNA, 19 nt, Human
ucccacccuacuccucccc

SEQ ID NO: 1315656 - RNA, 22 nt, Human
uccccuucucucuccccacuca

SEQ ID NO: 1315657 - RNA, 24 nt, Human
ucggccgcggcggugguggcuccu

SEQ ID NO: 1315658 - RNA, 23 nt, Human
ucggcgguggcggcggccguagg

SEQ ID NO: 1315659 - RNA, 22 nt, Human
ugccccuucuggagcgucucug

SEQ ID NO: 1315660 - RNA, 26 nt, Human
ugccccuucuggagcgucucugucgu

SEQ ID NO: 1315661 - RNA, 19 nt, Human
ugccuggucucgcccuucc

SEQ ID NO: 1315662 - RNA, 21 nt, Human
uggcggcggccguaggugugg

SEQ ID NO: 1315663 - RNA, 21 nt, Human
ugguggcuccgggcugggguc

SEQ ID NO: 1315664 - RNA, 20 nt, Human
uuucccagccauggcucuag

SEQ ID NO: 1315665 - RNA, 19 nt, Human
cugcuguuuuuaucugucu

SEQ ID NO: 1315666 - RNA, 20 nt, Human
uacacugagcucuaugggau

SEQ ID NO: 1315667 - RNA, 25 nt, Human
caagaggaaaucuguccacacagug

SEQ ID NO: 1315668 - RNA, 21 nt, Human
caccuggaauccauugggcuc

SEQ ID NO: 1315669 - RNA, 21 nt, Human
gaugaaaugucuuugcugugg

SEQ ID NO: 1315670 - RNA, 23 nt, Human
ggaaacaaagguggugguggugg

SEQ ID NO: 1315671 - RNA, 23 nt, Human
uccacacagugggcugaugaaau

SEQ ID NO: 1315672 - RNA, 21 nt, Human
ugaugaaaugucuuugcugug

SEQ ID NO: 1315673 - RNA, 20 nt, Human
uuacauuuuagaacaccugg

SEQ ID NO: 1315674 - RNA, 26 nt, Human
aacacaacuuuuccuaaugauaucag

SEQ ID NO: 1315675 - RNA, 20 nt, Human
aagccaaagccaacacaacu

SEQ ID NO: 1315676 - RNA, 18 nt, Human
auucucagaauaaccugg

SEQ ID NO: 1315677 - RNA, 26 nt, Human
caaagaguugcaagccaaagccaaca

SEQ ID NO: 1315678 - RNA, 28 nt, Human
caagccaaagccaacacaacuuuuccua

SEQ ID NO: 1315679 - RNA, 21 nt, Human
cagagauucucauuggguggg

SEQ ID NO: 1315680 - RNA, 23 nt, Human
ccaaagaguugcaagccaaagcc

SEQ ID NO: 1315681 - RNA, 18 nt, Human
cucgcugaauuccugcca

SEQ ID NO: 1315682 - RNA, 23 nt, Human
cuguaaauucucucgcugaauuc

SEQ ID NO: 1315683 - RNA, 22 nt, Human
cuugcugacaugaaagaauaaa

SEQ ID NO: 1315684 - RNA, 24 nt, Human
cuuucuguaaauucucucgcugaa

SEQ ID NO: 1315685 - RNA, 18 nt, Human
uacacugacacuacugcc

SEQ ID NO: 1315686 - RNA, 23 nt, Human
ucgcugaauuccugccaaagagu

SEQ ID NO: 1315687 - RNA, 22 nt, Human
ucucagaauaaccuggagcuuu

SEQ ID NO: 1315688 - RNA, 22 nt, Human
ugccaaagaguugcaagccaag

SEQ ID NO: 1315689 - RNA, 21 nt, Human
ugcgugcuuuuuuagcaaaua

SEQ ID NO: 1315690 - RNA, 21 nt, Human
uucagcuguagugcaauuugc

SEQ ID NO: 1315691 - RNA, 21 nt, Human
uuucacagguacucauuuaau

SEQ ID NO: 1315692 - RNA, 22 nt, Human
aaagaaagaagccccuaaacaa

SEQ ID NO: 1315693 - RNA, 20 nt, Human
aaagugcugggauuauaggc

SEQ ID NO: 1315694 - RNA, 23 nt, Human
aaagugcugggauuauaggcgua

SEQ ID NO: 1315695 - RNA, 23 nt, Human
aaauuaccgaagaugcccgaagc

SEQ ID NO: 1315696 - RNA, 19 nt, Human
aagaaagaagccccuaaac

SEQ ID NO: 1315697 - RNA, 20 nt, Human
aagaagccccuaaacaauua

SEQ ID NO: 1315698 - RNA, 22 nt, Human
aagccccuaaacaauuaauauu

SEQ ID NO: 1315699 - RNA, 24 nt, Human
aagugauccgcccgccucggccuc

SEQ ID NO: 1315700 - RNA, 19 nt, Human
aagugcugggauuauaggc

SEQ ID NO: 1315701 - RNA, 19 nt, Human
aagugcugggauuauaggc

SEQ ID NO: 1315702 - RNA, 26 nt, Human
aagugcugggauuauaggcguaagcc

SEQ ID NO: 1315703 - RNA, 24 nt, Human
aauuuguuuguauuuuuaguagag

SEQ ID NO: 1315704 - RNA, 18 nt, Human
accagccccccgccccuc

SEQ ID NO: 1315705 - RNA, 24 nt, Human
acccaggcuguagugcaauggcgu

SEQ ID NO: 1315706 - RNA, 19 nt, Human
accgaccugaaggccgcac

SEQ ID NO: 1315707 - RNA, 23 nt, Human
acgccaccacgcccggcuaauuu

SEQ ID NO: 1315708 - RNA, 18 nt, Human
acgggguuucaccauauu

SEQ ID NO: 1315709 - RNA, 20 nt, Human
acgggguuucaccauauugg

SEQ ID NO: 1315710 - RNA, 24 nt, Human
acgggguuucaccauauuggccag

SEQ ID NO: 1315711 - RNA, 19 nt, Human
acguucgaagggcguuggc

SEQ ID NO: 1315712 - RNA, 23 nt, Human
acuggucuccaacuccugaccuc

SEQ ID NO: 1315713 - RNA, 26 nt, Human
agaacuuucccagaaucuugccacau

SEQ ID NO: 1315714 - RNA, 21 nt, Human
agcagcgaggccuagccaaga

SEQ ID NO: 1315715 - RNA, 18 nt, Human
agccccccgccccucccc

SEQ ID NO: 1315716 - RNA, 24 nt, Human
agcgauucuccugccucagccucc

SEQ ID NO: 1315717 - RNA, 20 nt, Human
aggcguaagccaccgcgccc

SEQ ID NO: 1315718 - RNA, 20 nt, Human
aggcguacgccaccacgccc

SEQ ID NO: 1315719 - RNA, 22 nt, Human
aguagagacgggguuucaccau

SEQ ID NO: 1315720 - RNA, 19 nt, Human
aguagcugggacuauaggc

SEQ ID NO: 1315721 - RNA, 19 nt, Human
agugcaauggcgugaucuc

SEQ ID NO: 1315722 - RNA, 24 nt, Human
auuuguuuguauuuuuaguagaga

SEQ ID NO: 1315723 - RNA, 24 nt, Human
caaagugcugggauuauaggcgua

SEQ ID NO: 1315724 - RNA, 20 nt, Human
caagcgauucuccugccuca

SEQ ID NO: 1315725 - RNA, 22 nt, Human
caagcgauucuccugccucagc

SEQ ID NO: 1315726 - RNA, 21 nt, Human
caccauauuggccagacuggu

SEQ ID NO: 1315727 - RNA, 24 nt, Human
caccauauuggccagacuggucuc

SEQ ID NO: 1315728 - RNA, 27 nt, Human
caccauauuggccagacuggucuccaa

SEQ ID NO: 1315729 - RNA, 18 nt, Human
cagccccccgccccuccc

SEQ ID NO: 1315730 - RNA, 24 nt, Human
cauauuggccagacuggucuccaa

SEQ ID NO: 1315731 - RNA, 22 nt, Human
ccaaagugcugggauuauaggc

SEQ ID NO: 1315732 - RNA, 24 nt, Human
ccaaagugcugggauuauaggcgu

SEQ ID NO: 1315733 - RNA, 20 nt, Human
ccagacuggucuccaacucc

SEQ ID NO: 1315734 - RNA, 18 nt, Human
ccccccgccccuccccaa

SEQ ID NO: 1315735 - RNA, 23 nt, Human
ccccccgccccuccccaaaaaaa

SEQ ID NO: 1315736 - RNA, 21 nt, Human
ccccuccccaaaaaaagccua

SEQ ID NO: 1315737 - RNA, 19 nt, Human
cccgaguagcugggacuau

SEQ ID NO: 1315738 - RNA, 24 nt, Human
cccgaguagcugggacuauaggcg

SEQ ID NO: 1315739 - RNA, 20 nt, Human
ccgcaccagccccccgcccc

SEQ ID NO: 1315740 - RNA, 18 nt, Human
ccgccagcgcgagccucu

SEQ ID NO: 1315741 - RNA, 21 nt, Human
ccgccccuccccaaaaaaagc

SEQ ID NO: 1315742 - RNA, 18 nt, Human
ccugaccucaagugaucc

SEQ ID NO: 1315743 - RNA, 19 nt, Human
ccugaccucaagugauccg

SEQ ID NO: 1315744 - RNA, 22 nt, Human
ccugaccucaagugauccgccc

SEQ ID NO: 1315745 - RNA, 23 nt, Human
ccugccucagccucccgaguagc

SEQ ID NO: 1315746 - RNA, 23 nt, Human
ccuggguucaagcgauucuccug

SEQ ID NO: 1315747 - RNA, 18 nt, Human
cgcaguauccgggcucgg

SEQ ID NO: 1315748 - RNA, 24 nt, Human
cgccucggccucccaaagugcugg

SEQ ID NO: 1315749 - RNA, 22 nt, Human
cggagcaaggaagaacuuuccc

SEQ ID NO: 1315750 - RNA, 20 nt, Human
cggcguugcuggggugucgg

SEQ ID NO: 1315751 - RNA, 23 nt, Human
cgggguuucaccauauuggccag

SEQ ID NO: 1315752 - RNA, 18 nt, Human
cucaaacucaaguucagc

SEQ ID NO: 1315753 - RNA, 24 nt, Human
cucagccucccgaguagcugggac

SEQ ID NO: 1315754 - RNA, 19 nt, Human
cuccccaaaaaaagccuaa

SEQ ID NO: 1315755 - RNA, 26 nt, Human
cuccugaccucaagugauccgcccgc

SEQ ID NO: 1315756 - RNA, 29 nt, Human
cucugucacccaggcuguagugcaauggg

SEQ ID NO: 1315757 - RNA, 23 nt, Human
cugccucagccucccgaguagcu

SEQ ID NO: 1315758 - RNA, 24 nt, Human
cugcgggugaccgaccugaaggcc

SEQ ID NO: 1315759 - RNA, 23 nt, Human
cuggacgggaagccucuucaggc

SEQ ID NO: 1315760 - RNA, 24 nt, Human
cuuccuggguucaagcgauucucc

SEQ ID NO: 1315761 - RNA, 22 nt, Human
gaagccucuucaggcgcugcgg

SEQ ID NO: 1315762 - RNA, 24 nt, Human
gaccucaagugauccgcccgccuc

SEQ ID NO: 1315763 - RNA, 18 nt, Human
gacucuggacgggaagcc

SEQ ID NO: 1315764 - RNA, 21 nt, Human
gagacggagucuugcucuguc

SEQ ID NO: 1315765 - RNA, 24 nt, Human
gagacgggguuucaccauauuggc

SEQ ID NO: 1315766 - RNA, 21 nt, Human
gaggccuagccaagagcgggc

SEQ ID NO: 1315767 - RNA, 22 nt, Human
gaugcuucuugcgcacccccac

SEQ ID NO: 1315768 - RNA, 18 nt, Human
gauuauaggcguaagcca

SEQ ID NO: 1315769 - RNA, 22 nt, Human
gauuauaggcguaagccaccgc

SEQ ID NO: 1315770 - RNA, 19 nt, Human
gcaacggaaagaucagcca

SEQ ID NO: 1315771 - RNA, 21 nt, Human
gcaaggaagaacuuucccaga

SEQ ID NO: 1315772 - RNA, 24 nt, Human
gcgauucuccugccucagccuccc

SEQ ID NO: 1315773 - RNA, 21 nt, Human
gcgcacggugguugaugaggu

SEQ ID NO: 1315774 - RNA, 21 nt, Human
gcguuggcggaaauuaccgaa

SEQ ID NO: 1315775 - RNA, 24 nt, Human
gcucaggccgccagcgcgagccuc

SEQ ID NO: 1315776 - RNA, 19 nt, Human
ggacuauaggcguacgcca

SEQ ID NO: 1315777 - RNA, 22 nt, Human
ggauuauaggcguaagccaccg

SEQ ID NO: 1315778 - RNA, 18 nt, Human
guagugacaaagaaagaa

SEQ ID NO: 1315779 - RNA, 24 nt, Human
gugauccgcccgccucggccuccc

SEQ ID NO: 1315780 - RNA, 24 nt, Human
uaacggcagcagcgcgagcccaaa

SEQ ID NO: 1315781 - RNA, 21 nt, Human
uaacguaucucuuaaaucucu

SEQ ID NO: 1315782 - RNA, 18 nt, Human
uacaggaagcaguuccuc

SEQ ID NO: 1315783 - RNA, 24 nt, Human
uacuguuuguguuucuucugcauc

SEQ ID NO: 1315784 - RNA, 21 nt, Human
uagccaagagcgggcagaaga

SEQ ID NO: 1315785 - RNA, 23 nt, Human
uaguagagacgggguuucaccau

SEQ ID NO: 1315786 - RNA, 25 nt, Human
uaguagagacgggguuucaccauau

SEQ ID NO: 1315787 - RNA, 19 nt, Human
ucaagcgauucuccugccu

SEQ ID NO: 1315788 - RNA, 23 nt, Human
ucagccucccgaguagcugggac

SEQ ID NO: 1315789 - RNA, 24 nt, Human
uccaaggcaaacucaaacucaagu

SEQ ID NO: 1315790 - RNA, 24 nt, Human
ucccaaagugcugggauuauaggc

SEQ ID NO: 1315791 - RNA, 24 nt, Human
ucccgaguagcugggacuauaggc

SEQ ID NO: 1315792 - RNA, 23 nt, Human
uccgcaccagccccccgccccuc

SEQ ID NO: 1315793 - RNA, 20 nt, Human
uccuggguucaagcgauucu

SEQ ID NO: 1315794 - RNA, 21 nt, Human
uccuggguucaagcgauucuc

SEQ ID NO: 1315795 - RNA, 24 nt, Human
uccuggguucaagcgauucuccug

SEQ ID NO: 1315796 - RNA, 18 nt, Human
ucggccucccaaagugcu

SEQ ID NO: 1315797 - RNA, 24 nt, Human
ucuccugccucagccucccgagua

SEQ ID NO: 1315798 - RNA, 24 nt, Human
ucugucacccaggcuguagugcaa

SEQ ID NO: 1315799 - RNA, 19 nt, Human
ucuugcucugucacccagg

SEQ ID NO: 1315800 - RNA, 22 nt, Human
ucuugcucugucacccaggcug

SEQ ID NO: 1315801 - RNA, 27 nt, Human
ucuugcucugucacccaggcuguagug

SEQ ID NO: 1315802 - RNA, 19 nt, Human
ugaaggccgcacuggagca

SEQ ID NO: 1315803 - RNA, 20 nt, Human
ugaaugcaacggaaagauca

SEQ ID NO: 1315804 - RNA, 21 nt, Human
ugaccuauuuuacuguuugug

SEQ ID NO: 1315805 - RNA, 18 nt, Human
ugaccucaagugauccgc

SEQ ID NO: 1315806 - RNA, 24 nt, Human
ugaccucaagugauccgcccgccu

SEQ ID NO: 1315807 - RNA, 21 nt, Human
ugaggagucggcguugcuggg

SEQ ID NO: 1315808 - RNA, 21 nt, Human
ugcacuacucuccaggagugu

SEQ ID NO: 1315809 - RNA, 21 nt, Human
ugcccgaagccgucgggacgg

SEQ ID NO: 1315810 - RNA, 24 nt, Human
ugccucagccucccgaguagcugg

SEQ ID NO: 1315811 - RNA, 24 nt, Human
ugcucugucacccaggcuguagug

SEQ ID NO: 1315812 - RNA, 24 nt, Human
uggccagacuggucuccaacuccu

SEQ ID NO: 1315813 - RNA, 18 nt, Human
uggcuuccaaggcaaacu

SEQ ID NO: 1315814 - RNA, 22 nt, Human
ugggacuauaggcguacgccac

SEQ ID NO: 1315815 - RNA, 24 nt, Human
ugggacuauaggcguacgccacca

SEQ ID NO: 1315816 - RNA, 18 nt, Human
ugggauuauaggcguaag

SEQ ID NO: 1315817 - RNA, 19 nt, Human
ugggauuauaggcguaagc

SEQ ID NO: 1315818 - RNA, 21 nt, Human
ugggauuauaggcguaagcca

SEQ ID NO: 1315819 - RNA, 22 nt, Human
ugggauuauaggcguaagccac

SEQ ID NO: 1315820 - RNA, 23 nt, Human
ugggauuauaggcguaagccacc

SEQ ID NO: 1315821 - RNA, 24 nt, Human
ugggauuauaggcguaagccaccg

SEQ ID NO: 1315822 - RNA, 23 nt, Human
uggguucaagcgauucuccugcc

SEQ ID NO: 1315823 - RNA, 24 nt, Human
uggguucaagcgauucuccugccu

SEQ ID NO: 1315824 - RNA, 19 nt, Human
uguagugcaauggcgugau

SEQ ID NO: 1315825 - RNA, 23 nt, Human
uguagugcaauggcgugaucuca

SEQ ID NO: 1315826 - RNA, 18 nt, Human
uuaguagagacgggguuu

SEQ ID NO: 1315827 - RNA, 22 nt, Human
uuaguagagacgggguuucacc

SEQ ID NO: 1315828 - RNA, 24 nt, Human
uuaguagagacgggguuucaccau

SEQ ID NO: 1315829 - RNA, 21 nt, Human
uucaagcgauucuccugccuc

SEQ ID NO: 1315830 - RNA, 23 nt, Human
uucaagcgauucuccugccucag

SEQ ID NO: 1315831 - RNA, 24 nt, Human
uucaagcgauucuccugccucagc

SEQ ID NO: 1315832 - RNA, 20 nt, Human
uucagggcgcuugcauuuuc

SEQ ID NO: 1315833 - RNA, 22 nt, Human
uugccacugauuuugcaucaug

SEQ ID NO: 1315834 - RNA, 23 nt, Human
uuguauuuuuaguagagacgggg

SEQ ID NO: 1315835 - RNA, 21 nt, Human
uuucaccauauuggccagacu

SEQ ID NO: 1315836 - RNA, 19 nt, Human
uuuguauuuuuaguagaga

SEQ ID NO: 1315837 - RNA, 20 nt, Human
uuuguauuuuuaguagagac

SEQ ID NO: 1315838 - RNA, 24 nt, Human
uuuuuaguagagacgggguuucac

SEQ ID NO: 1315839 - RNA, 19 nt, Human
aaagguagcagucauuaaa

SEQ ID NO: 1315840 - RNA, 20 nt, Human
aaugguaccagcgaggggcc

SEQ ID NO: 1315841 - RNA, 21 nt, Human
agaucccuggccccacaacag

SEQ ID NO: 1315842 - RNA, 24 nt, Human
agaucccuggccccacaacagcuc

SEQ ID NO: 1315843 - RNA, 23 nt, Human
agcccagcccacugccaguacag

SEQ ID NO: 1315844 - RNA, 21 nt, Human
agcgagggugauugggucgag

SEQ ID NO: 1315845 - RNA, 24 nt, Human
auggaaauagcaccugccagugcc

SEQ ID NO: 1315846 - RNA, 21 nt, Human
augucacuguggcugaggcug

SEQ ID NO: 1315847 - RNA, 21 nt, Human
caacagcuccucugcagcgcu

SEQ ID NO: 1315848 - RNA, 23 nt, Human
caacucgcacauacaggagaaaa

SEQ ID NO: 1315849 - RNA, 20 nt, Human
cacauaugcacaguaaacac

SEQ ID NO: 1315850 - RNA, 20 nt, Human
cacugcuagaacagccugga

SEQ ID NO: 1315851 - RNA, 19 nt, Human
cagccaggggacuuccaca

SEQ ID NO: 1315852 - RNA, 22 nt, Human
cagcuagcccuucuugcuguuc

SEQ ID NO: 1315853 - RNA, 24 nt, Human
cagcuuccucccucugcagugucu

SEQ ID NO: 1315854 - RNA, 23 nt, Human
caguguuuuggaccccaggccca

SEQ ID NO: 1315855 - RNA, 27 nt, Human
ccagcagucucgcuugggcagcuuccu

SEQ ID NO: 1315856 - RNA, 20 nt, Human
cccacauguggucaccaagc

SEQ ID NO: 1315857 - RNA, 18 nt, Human
ccccacagucugucuucu

SEQ ID NO: 1315858 - RNA, 22 nt, Human
ccccagagaguguccuggaggc

SEQ ID NO: 1315859 - RNA, 23 nt, Human
ccccaggcccaucuggcuggacc

SEQ ID NO: 1315860 - RNA, 25 nt, Human
ccccaggcccaucuggcuggaccag

SEQ ID NO: 1315861 - RNA, 22 nt, Human
cccucucaucccuucucccuca

SEQ ID NO: 1315862 - RNA, 20 nt, Human
cccucugcagugucucccca

SEQ ID NO: 1315863 - RNA, 20 nt, Human
cccuucucccucaggauccc

SEQ ID NO: 1315864 - RNA, 20 nt, Human
ccucccagugcgaggacaga

SEQ ID NO: 1315865 - RNA, 21 nt, Human
ccucucaucccuucucccuca

SEQ ID NO: 1315866 - RNA, 24 nt, Human
ccuggccccacaacagcuccucug

SEQ ID NO: 1315867 - RNA, 21 nt, Human
ccuucuugcuguuccuucccc

SEQ ID NO: 1315868 - RNA, 25 nt, Human
ccuucuugcuguuccuuccccagag

SEQ ID NO: 1315869 - RNA, 26 nt, Human
cgccaaagccuccaguacugcuucag

SEQ ID NO: 1315870 - RNA, 20 nt, Human
cuagugguaauugaugggcc

SEQ ID NO: 1315871 - RNA, 27 nt, Human
cucaucccuucucccucaggaucccaa

SEQ ID NO: 1315872 - RNA, 19 nt, Human
cuccuccaugauacacuuc

SEQ ID NO: 1315873 - RNA, 26 nt, Human
cuccucugcagcuucccuguggccua

SEQ ID NO: 1315874 - RNA, 20 nt, Human
cucgccaaagccuccaguac

SEQ ID NO: 1315875 - RNA, 21 nt, Human
cucucagcucaggagucucau

SEQ ID NO: 1315876 - RNA, 18 nt, Human
cugaggcuggggcuggug

SEQ ID NO: 1315877 - RNA, 21 nt, Human
cuggccccacaacagcuccuc

SEQ ID NO: 1315878 - RNA, 22 nt, Human
gagaguguccuggaggcccagc

SEQ ID NO: 1315879 - RNA, 26 nt, Human
gagccagucccacauguggucaccaa

SEQ ID NO: 1315880 - RNA, 25 nt, Human
gcuaagggcuuguacaugcggcagc

SEQ ID NO: 1315881 - RNA, 22 nt, Human
gcucgggaucccccucucaucc

SEQ ID NO: 1315882 - RNA, 19 nt, Human
gcuggggcuggugagaugu

SEQ ID NO: 1315883 - RNA, 18 nt, Human
ggccauggaaauagcacc

SEQ ID NO: 1315884 - RNA, 21 nt, Human
ggccugucuucugaguccagc

SEQ ID NO: 1315885 - RNA, 20 nt, Human
gugccgccuuugcucgccaa

SEQ ID NO: 1315886 - RNA, 21 nt, Human
uacaggagaaaaucaguguuu

SEQ ID NO: 1315887 - RNA, 18 nt, Human
uagcaccugccagugccg

SEQ ID NO: 1315888 - RNA, 19 nt, Human
uagcaccugccagugccgc

SEQ ID NO: 1315889 - RNA, 23 nt, Human
ucaggagucucauucugcucccc

SEQ ID NO: 1315890 - RNA, 24 nt, Human
ucaucccuucucccucaggauccc

SEQ ID NO: 1315891 - RNA, 24 nt, Human
uccccagacagcguggcaauacug

SEQ ID NO: 1315892 - RNA, 21 nt, Human
ucccuggccccacaacagcuc

SEQ ID NO: 1315893 - RNA, 26 nt, Human
ucccuguggccuaagauccugucucu

SEQ ID NO: 1315894 - RNA, 21 nt, Human
ucucgacucagaagcaggggu

SEQ ID NO: 1315895 - RNA, 24 nt, Human
ucugcagcgcugugguugaccugg

SEQ ID NO: 1315896 - RNA, 18 nt, Human
ucuggagagucagaguca

SEQ ID NO: 1315897 - RNA, 21 nt, Human
ucugucuucuccucugcagcu

SEQ ID NO: 1315898 - RNA, 18 nt, Human
ucuucugaguccagcugg

SEQ ID NO: 1315899 - RNA, 21 nt, Human
ugcggccagggcucgggaucc

SEQ ID NO: 1315900 - RNA, 23 nt, Human
uggauucguagggguugaggauc

SEQ ID NO: 1315901 - RNA, 21 nt, Human
uggcagcccagcccacugcca

SEQ ID NO: 1315902 - RNA, 19 nt, Human
uguccuggaggcccagcua

SEQ ID NO: 1315903 - RNA, 24 nt, Human
uuccacauaugcacaguaaacacc

SEQ ID NO: 1315904 - RNA, 21 nt, Human
uuccccagagaguguccugga

SEQ ID NO: 1315905 - RNA, 22 nt, Human
uugcuggguugugugguaaagu

SEQ ID NO: 1315906 - RNA, 19 nt, Human
uuggcagccaggggacuuc

SEQ ID NO: 1315907 - RNA, 21 nt, Human
uuugcaaaccgucccgauugc

SEQ ID NO: 1315908 - RNA, 23 nt, Human
aaagauaaacaaauuagaggcca

SEQ ID NO: 1315909 - RNA, 19 nt, Human
aaaguuaggcuaggaaagg

SEQ ID NO: 1315910 - RNA, 23 nt, Human
aagaaagagucagccaggaggca

SEQ ID NO: 1315911 - RNA, 24 nt, Human
aagaagcaugagcugggccuggug

SEQ ID NO: 1315912 - RNA, 21 nt, Human
aagaagucuguggccuacaga

SEQ ID NO: 1315913 - RNA, 23 nt, Human
aagcagcaaacgcuaggccugga

SEQ ID NO: 1315914 - RNA, 18 nt, Human
aagccuuugggaggaaga

SEQ ID NO: 1315915 - RNA, 20 nt, Human
aagcggccgagaggcaggag

SEQ ID NO: 1315916 - RNA, 21 nt, Human
aagcggccgagaggcaggagc

SEQ ID NO: 1315917 - RNA, 24 nt, Human
aagcuuguuuuccugcaacuggau

SEQ ID NO: 1315918 - RNA, 19 nt, Human
aaguggugggccuggaggg

SEQ ID NO: 1315919 - RNA, 19 nt, Human
aaguuaggcaaaaggcuga

SEQ ID NO: 1315920 - RNA, 22 nt, Human
aaucaucaucccuucuucagcc

SEQ ID NO: 1315921 - RNA, 19 nt, Human
aaugagccaugauaggacc

SEQ ID NO: 1315922 - RNA, 21 nt, Human
acaacagagggagacccugaa

SEQ ID NO: 1315923 - RNA, 24 nt, Human
accaagaugcaggagcugggccug

SEQ ID NO: 1315924 - RNA, 25 nt, Human
accacaaauggaagaaaggccauga

SEQ ID NO: 1315925 - RNA, 22 nt, Human
acccggagaggccgccaagagg

SEQ ID NO: 1315926 - RNA, 18 nt, Human
acgggaggcagaggcugg

SEQ ID NO: 1315927 - RNA, 19 nt, Human
acgggccuguagacgcacu

SEQ ID NO: 1315928 - RNA, 18 nt, Human
acuacacuccagccuugg

SEQ ID NO: 1315929 - RNA, 18 nt, Human
acuacacuccagccuugg

SEQ ID NO: 1315930 - RNA, 19 nt, Human
acuacacuccagccuugga

SEQ ID NO: 1315931 - RNA, 25 nt, Human
acuacacuccagccuuggacaacag

SEQ ID NO: 1315932 - RNA, 19 nt, Human
acuacacuccagccuuggg

SEQ ID NO: 1315933 - RNA, 21 nt, Human
acuggauugugagggccagag

SEQ ID NO: 1315934 - RNA, 18 nt, Human
agaaaguucagggccugg

SEQ ID NO: 1315935 - RNA, 21 nt, Human
agaacgacuugggccugcaga

SEQ ID NO: 1315936 - RNA, 23 nt, Human
agaaguuaggcaaaaggcugauu

SEQ ID NO: 1315937 - RNA, 26 nt, Human
agacagaaguuaggcaaaagggaccc

SEQ ID NO: 1315938 - RNA, 19 nt, Human
agacgggccuguagacgca

SEQ ID NO: 1315939 - RNA, 21 nt, Human
agagcagggccugcagaggcu

SEQ ID NO: 1315940 - RNA, 24 nt, Human
agaggccagugugaggcaagaccu

SEQ ID NO: 1315941 - RNA, 20 nt, Human
agaggcugccagcagcucag

SEQ ID NO: 1315942 - RNA, 23 nt, Human
agauaaacaaauuagaggccaag

SEQ ID NO: 1315943 - RNA, 24 nt, Human
agaugggagaaucacuucagccug

SEQ ID NO: 1315944 - RNA, 24 nt, Human
agcaccuguagucucagccacgug

SEQ ID NO: 1315945 - RNA, 20 nt, Human
agcagcaaacgcuaggccug

SEQ ID NO: 1315946 - RNA, 20 nt, Human
agcgccccagugacguagcc

SEQ ID NO: 1315947 - RNA, 18 nt, Human
agcugggcccggagaagc

SEQ ID NO: 1315948 - RNA, 20 nt, Human
agcugggccuguucaugcca

SEQ ID NO: 1315949 - RNA, 22 nt, Human
agcugugccuguggaggcuguu

SEQ ID NO: 1315950 - RNA, 22 nt, Human
aggcaaaaggcugauuugagga

SEQ ID NO: 1315951 - RNA, 19 nt, Human
aggcacuaggccuggaaau

SEQ ID NO: 1315952 - RNA, 18 nt, Human
aggcagcaguugugccug

SEQ ID NO: 1315953 - RNA, 22 nt, Human
aggcaggaagaaauuuggccug

SEQ ID NO: 1315954 - RNA, 23 nt, Human
aggcaggaagaaauuuggccugg

SEQ ID NO: 1315955 - RNA, 18 nt, Human
aggcaggagacgggccug

SEQ ID NO: 1315956 - RNA, 20 nt, Human
aggcaggagacgggccugua

SEQ ID NO: 1315957 - RNA, 23 nt, Human
aggcaggagcugggccugcagag

SEQ ID NO: 1315958 - RNA, 22 nt, Human
aggcaggagcuucgccugagga

SEQ ID NO: 1315959 - RNA, 25 nt, Human
aggcaggagcuucgccugaggaugc

SEQ ID NO: 1315960 - RNA, 19 nt, Human
aggcaggaggagcugggcc

SEQ ID NO: 1315961 - RNA, 21 nt, Human
aggcaggaggagcugggccug

SEQ ID NO: 1315962 - RNA, 19 nt, Human
aggcaggaggccgggccuu

SEQ ID NO: 1315963 - RNA, 20 nt, Human
aggcaugagcugggcugggc

SEQ ID NO: 1315964 - RNA, 22 nt, Human
aggccggagcugggccugggga

SEQ ID NO: 1315965 - RNA, 23 nt, Human
aggccggagcugggccuggggaa

SEQ ID NO: 1315966 - RNA, 19 nt, Human
aggggccaccaagaugcag

SEQ ID NO: 1315967 - RNA, 21 nt, Human
aggugggucugagccuggcag

SEQ ID NO: 1315968 - RNA, 19 nt, Human
aguucugggccuggagagg

SEQ ID NO: 1315969 - RNA, 19 nt, Human
aucugggucuggagggucc

SEQ ID NO: 1315970 - RNA, 19 nt, Human
augaacuggacaggaacug

SEQ ID NO: 1315971 - RNA, 20 nt, Human
auggagcugugccuguggag

SEQ ID NO: 1315972 - RNA, 21 nt, Human
augggccugaagaggccacug

SEQ ID NO: 1315973 - RNA, 20 nt, Human
caaagcagcaaacgcuaggc

SEQ ID NO: 1315974 - RNA, 18 nt, Human
caacagagggagacccug

SEQ ID NO: 1315975 - RNA, 18 nt, Human
caacuggauggucccacg

SEQ ID NO: 1315976 - RNA, 24 nt, Human
caagagcugggcuuggaaaagccc

SEQ ID NO: 1315977 - RNA, 21 nt, Human
caccaggaagcagaagguggg

SEQ ID NO: 1315978 - RNA, 21 nt, Human
caccaggaggcagcaguuggg

SEQ ID NO: 1315979 - RNA, 19 nt, Human
caccuggcaugaggugugc

SEQ ID NO: 1315980 - RNA, 23 nt, Human
caccuguagucucagccacgugg

SEQ ID NO: 1315981 - RNA, 24 nt, Human
caccuguagucucagccacguggg

SEQ ID NO: 1315982 - RNA, 22 nt, Human
cacuggguggcaggagcugggu

SEQ ID NO: 1315983 - RNA, 25 nt, Human
cacuggguggcaggagcugggugug

SEQ ID NO: 1315984 - RNA, 18 nt, Human
cagaugaguuucgucucc

SEQ ID NO: 1315985 - RNA, 22 nt, Human
cagcaguugggacuagagaggc

SEQ ID NO: 1315986 - RNA, 23 nt, Human
cagccuuggacaacagagggaga

SEQ ID NO: 1315987 - RNA, 22 nt, Human
cagcuguagucccagcuacugg

SEQ ID NO: 1315988 - RNA, 23 nt, Human
cagcuguagucccagcuacuggg

SEQ ID NO: 1315989 - RNA, 20 nt, Human
caggaagcagaaggugggcc

SEQ ID NO: 1315990 - RNA, 18 nt, Human
caggcugcaaaaggcaaa

SEQ ID NO: 1315991 - RNA, 24 nt, Human
cagggccuggagaggaugcaaagc

SEQ ID NO: 1315992 - RNA, 21 nt, Human
cagugugaggcaagaccuggg

SEQ ID NO: 1315993 - RNA, 21 nt, Human
ccaccgaaagucaaaagcggg

SEQ ID NO: 1315994 - RNA, 19 nt, Human
ccaccgugaggcaaaugcu

SEQ ID NO: 1315995 - RNA, 19 nt, Human
ccacugaacuccauccuga

SEQ ID NO: 1315996 - RNA, 18 nt, Human
ccacugugaggcagaggc

SEQ ID NO: 1315997 - RNA, 19 nt, Human
ccagcacugggaaacuagg

SEQ ID NO: 1315998 - RNA, 23 nt, Human
cccagugacguagccgagguacc

SEQ ID NO: 1315999 - RNA, 18 nt, Human
ccccaugggccugaagag

SEQ ID NO: 1316000 - RNA, 22 nt, Human
cccggagaagcccccaugaggc

SEQ ID NO: 1316001 - RNA, 21 nt, Human
cccucauuuuccauuccccag

SEQ ID NO: 1316002 - RNA, 19 nt, Human
cccuugugaagcaugagcu

SEQ ID NO: 1316003 - RNA, 21 nt, Human
ccgaaaggcaggagcuucgcc

SEQ ID NO: 1316004 - RNA, 24 nt, Human
ccuggcaugaggugugcccagagg

SEQ ID NO: 1316005 - RNA, 25 nt, Human
ccuggccuauggguacugaguggga

SEQ ID NO: 1316006 - RNA, 19 nt, Human
cgacaugaggcaggagcug

SEQ ID NO: 1316007 - RNA, 22 nt, Human
cgagaagacugcccagcuccag

SEQ ID NO: 1316008 - RNA, 19 nt, Human
cgcaagaaccacaaaugga

SEQ ID NO: 1316009 - RNA, 24 nt, Human
cgccccagugacguagccgaacac

SEQ ID NO: 1316010 - RNA, 20 nt, Human
cgccgggaggcaggagcugg

SEQ ID NO: 1316011 - RNA, 20 nt, Human
cgccgggaggcaugagcugg

SEQ ID NO: 1316012 - RNA, 21 nt, Human
cggcaacacacaggaccuggc

SEQ ID NO: 1316013 - RNA, 22 nt, Human
cgggagcugggccugccgaagc

SEQ ID NO: 1316014 - RNA, 19 nt, Human
cgggaggcagaggcugggc

SEQ ID NO: 1316015 - RNA, 23 nt, Human
cgggaggcagaggcugggccugg

SEQ ID NO: 1316016 - RNA, 22 nt, Human
cgggaggcaugagcugggcugg

SEQ ID NO: 1316017 - RNA, 24 nt, Human
cgggaggcaugagcugggcugggc

SEQ ID NO: 1316018 - RNA, 22 nt, Human
cuacuacacuccagccuuggac

SEQ ID NO: 1316019 - RNA, 19 nt, Human
cucaagggaaucuucagcu

SEQ ID NO: 1316020 - RNA, 21 nt, Human
cuccaggaaccguagcgcccc

SEQ ID NO: 1316021 - RNA, 18 nt, Human
cugaagaggccacuggca

SEQ ID NO: 1316022 - RNA, 18 nt, Human
cugccaggaggcaagagc

SEQ ID NO: 1316023 - RNA, 23 nt, Human
cuggaagguugaggcugcaguca

SEQ ID NO: 1316024 - RNA, 21 nt, Human
cuggcaugaggugugcccaga

SEQ ID NO: 1316025 - RNA, 20 nt, Human
cugggccaaaaaaggcuguu

SEQ ID NO: 1316026 - RNA, 19 nt, Human
cugggccucaagaaucugc

SEQ ID NO: 1316027 - RNA, 18 nt, Human
cugggccuggaggggcca

SEQ ID NO: 1316028 - RNA, 20 nt, Human
cuggggcagcugccaugagg

SEQ ID NO: 1316029 - RNA, 19 nt, Human
gaaaguucugggccuggag

SEQ ID NO: 1316030 - RNA, 24 nt, Human
gaacuggacaggaacugggccaaa

SEQ ID NO: 1316031 - RNA, 19 nt, Human
gaacugggccaaaaaaggc

SEQ ID NO: 1316032 - RNA, 19 nt, Human
gacaggaggcaggagcugg

SEQ ID NO: 1316033 - RNA, 21 nt, Human
gacaugaggcaggagcugagu

SEQ ID NO: 1316034 - RNA, 25 nt, Human
gacuucagaaaguucagggccugga

SEQ ID NO: 1316035 - RNA, 19 nt, Human
gaggcaggaggagcugggc

SEQ ID NO: 1316036 - RNA, 18 nt, Human
gaggcuguugugaggcag

SEQ ID NO: 1316037 - RNA, 21 nt, Human
gagugacagggcaagguccug

SEQ ID NO: 1316038 - RNA, 21 nt, Human
gaguuucgucuccuccacugg

SEQ ID NO: 1316039 - RNA, 18 nt, Human
gauugcuugagccuggga

SEQ ID NO: 1316040 - RNA, 22 nt, Human
gauugcuugagccugggaguuu

SEQ ID NO: 1316041 - RNA, 27 nt, Human
gcaaagcagcaaacgcuaggccuggaa

SEQ ID NO: 1316042 - RNA, 21 nt, Human
gcaagagcagggccugcagag

SEQ ID NO: 1316043 - RNA, 18 nt, Human
gcagauucguggccuggg

SEQ ID NO: 1316044 - RNA, 21 nt, Human
gcaggagcugggccugcagag

SEQ ID NO: 1316045 - RNA, 22 nt, Human
gcaguaggcucaucugcggaga

SEQ ID NO: 1316046 - RNA, 21 nt, Human
gcccagcuccaggaaccguag

SEQ ID NO: 1316047 - RNA, 24 nt, Human
gccgaaaggcaggagcuucgccug

SEQ ID NO: 1316048 - RNA, 21 nt, Human
gccgggagaggucaacuugag

SEQ ID NO: 1316049 - RNA, 22 nt, Human
gccgggagaggucaacuugagg

SEQ ID NO: 1316050 - RNA, 24 nt, Human
gccugcagaagccuuuggcgacug

SEQ ID NO: 1316051 - RNA, 19 nt, Human
gccuggacaggcugcaaaa

SEQ ID NO: 1316052 - RNA, 19 nt, Human
gccuggagaggaugcaaag

SEQ ID NO: 1316053 - RNA, 22 nt, Human
gccuggagaguaugaccugagg

SEQ ID NO: 1316054 - RNA, 18 nt, Human
gcgggagcugggccugcc

SEQ ID NO: 1316055 - RNA, 19 nt, Human
gcugaaaggcaggagcuug

SEQ ID NO: 1316056 - RNA, 20 nt, Human
gcugcagucagcugugauag

SEQ ID NO: 1316057 - RNA, 20 nt, Human
gcugcugggagacacgcagg

SEQ ID NO: 1316058 - RNA, 24 nt, Human
gcuguagucccagcuacugggaag

SEQ ID NO: 1316059 - RNA, 18 nt, Human
ggaaggccgccgggaggc

SEQ ID NO: 1316060 - RNA, 20 nt, Human
ggaaggcugacaugguagga

SEQ ID NO: 1316061 - RNA, 18 nt, Human
ggacuguagaggccgacg

SEQ ID NO: 1316062 - RNA, 21 nt, Human
ggagaggccgacuggaggaag

SEQ ID NO: 1316063 - RNA, 21 nt, Human
ggaggaaguccagggccugga

SEQ ID NO: 1316064 - RNA, 23 nt, Human
ggaggauaagcucguccuggaga

SEQ ID NO: 1316065 - RNA, 18 nt, Human
ggaggcagaggcugggcc

SEQ ID NO: 1316066 - RNA, 26 nt, Human
ggaggcaggagcugggccucccaagg

SEQ ID NO: 1316067 - RNA, 26 nt, Human
ggaggcaggcacuaggccucccaagg

SEQ ID NO: 1316068 - RNA, 18 nt, Human
ggaguuugaggcuauaau

SEQ ID NO: 1316069 - RNA, 19 nt, Human
ggcaggagcugggccugca

SEQ ID NO: 1316070 - RNA, 22 nt, Human
ggcaugguggcaagcaccugua

SEQ ID NO: 1316071 - RNA, 20 nt, Human
ggccuggagaggcugccggg

SEQ ID NO: 1316072 - RNA, 21 nt, Human
ggccuggagaguaugaccuga

SEQ ID NO: 1316073 - RNA, 19 nt, Human
ggccuggggaagccgacuu

SEQ ID NO: 1316074 - RNA, 18 nt, Human
ggccuggggaggccaccg

SEQ ID NO: 1316075 - RNA, 20 nt, Human
ggcugggaggcaggagcugg

SEQ ID NO: 1316076 - RNA, 19 nt, Human
gggaggaagagcuuggccu

SEQ ID NO: 1316077 - RNA, 20 nt, Human
gggaggcaugagcugggcug

SEQ ID NO: 1316078 - RNA, 23 nt, Human
gggaggcaugagcugggcugggc

SEQ ID NO: 1316079 - RNA, 19 nt, Human
gggcaugguggcaagcacc

SEQ ID NO: 1316080 - RNA, 18 nt, Human
gggccuggagggucuacu

SEQ ID NO: 1316081 - RNA, 19 nt, Human
gggcugggccgaaagaggc

SEQ ID NO: 1316082 - RNA, 20 nt, Human
gggcuucaagaaagagucag

SEQ ID NO: 1316083 - RNA, 18 nt, Human
gguaggauugcuugagcc

SEQ ID NO: 1316084 - RNA, 21 nt, Human
gguggcugugguggcucguug

SEQ ID NO: 1316085 - RNA, 23 nt, Human
ggugugcccagagggacagaggc

SEQ ID NO: 1316086 - RNA, 19 nt, Human
guaugcgucaaaaagcaaa

SEQ ID NO: 1316087 - RNA, 23 nt, Human
gucuacugugugguaagagucug

SEQ ID NO: 1316088 - RNA, 18 nt, Human
gugaggcagaggcuggcc

SEQ ID NO: 1316089 - RNA, 19 nt, Human
gugaggcagaggcugggcc

SEQ ID NO: 1316090 - RNA, 24 nt, Human
guuuucggaggaugccaugaggca

SEQ ID NO: 1316091 - RNA, 21 nt, Human
uaaacaaauuagaggccaaga

SEQ ID NO: 1316092 - RNA, 22 nt, Human
uacaaaggcaauugcgaggcag

SEQ ID NO: 1316093 - RNA, 25 nt, Human
uacuacacuccagccuuggacaaca

SEQ ID NO: 1316094 - RNA, 20 nt, Human
uagaggcugccgaaaggcag

SEQ ID NO: 1316095 - RNA, 20 nt, Human
uagaggcugcugaaaggcag

SEQ ID NO: 1316096 - RNA, 20 nt, Human
uagcacuacuacacuccagc

SEQ ID NO: 1316097 - RNA, 22 nt, Human
uaggaagagcugggcccggaga

SEQ ID NO: 1316098 - RNA, 18 nt, Human
uaggguuuauccaucuug

SEQ ID NO: 1316099 - RNA, 25 nt, Human
ucaaagcugggccuguucaugccac

SEQ ID NO: 1316100 - RNA, 19 nt, Human
ucagaaaguucagggccug

SEQ ID NO: 1316101 - RNA, 21 nt, Human
ucauuuuccauuccccagcau

SEQ ID NO: 1316102 - RNA, 22 nt, Human
uccaaauauuaguugggcaugg

SEQ ID NO: 1316103 - RNA, 24 nt, Human
uccacagugaggcagaugcugggc

SEQ ID NO: 1316104 - RNA, 20 nt, Human
uccgcugugaggcagaggcu

SEQ ID NO: 1316105 - RNA, 18 nt, Human
uccugcaacuggaugguc

SEQ ID NO: 1316106 - RNA, 19 nt, Human
ucuuuuagcaugagcuggg

SEQ ID NO: 1316107 - RNA, 18 nt, Human
ugaaaccacaggacagua

SEQ ID NO: 1316108 - RNA, 19 nt, Human
ugaaaggcaggagcuuggc

SEQ ID NO: 1316109 - RNA, 20 nt, Human
ugaaagguugggagcuuggc

SEQ ID NO: 1316110 - RNA, 22 nt, Human
ugaaagguugggagcuuggcuu

SEQ ID NO: 1316111 - RNA, 20 nt, Human
ugacaggaggcaggagcugg

SEQ ID NO: 1316112 - RNA, 21 nt, Human
ugacaggaggcaggagcuggg

SEQ ID NO: 1316113 - RNA, 21 nt, Human
ugacagggcaagguccuguuu

SEQ ID NO: 1316114 - RNA, 18 nt, Human
ugacaugguaggauugcu

SEQ ID NO: 1316115 - RNA, 22 nt, Human
ugacgagaagacugcccagcuc

SEQ ID NO: 1316116 - RNA, 18 nt, Human
ugagaacgacuugggccu

SEQ ID NO: 1316117 - RNA, 21 nt, Human
ugagaugggagaaucacuuca

SEQ ID NO: 1316118 - RNA, 21 nt, Human
ugagaugggagaaucacuuca

SEQ ID NO: 1316119 - RNA, 22 nt, Human
ugagaugggagaaucacuucag

SEQ ID NO: 1316120 - RNA, 22 nt, Human
ugagccugggaguuugaggcua

SEQ ID NO: 1316121 - RNA, 22 nt, Human
ugagcuggauguagagaggcca

SEQ ID NO: 1316122 - RNA, 19 nt, Human
ugagcugggccuggugagg

SEQ ID NO: 1316123 - RNA, 23 nt, Human
ugagcuuggucuguagaggcuga

SEQ ID NO: 1316124 - RNA, 25 nt, Human
ugaggaugccacagugagacaccau

SEQ ID NO: 1316125 - RNA, 18 nt, Human
ugaggcaagaccugggcc

SEQ ID NO: 1316126 - RNA, 22 nt, Human
ugaggcaagaccugggccuguc

SEQ ID NO: 1316127 - RNA, 18 nt, Human
ugaggcagaggcugggcc

SEQ ID NO: 1316128 - RNA, 18 nt, Human
ugaggcagaggcugggcc

SEQ ID NO: 1316129 - RNA, 18 nt, Human
ugaggcagaugcugggcc

SEQ ID NO: 1316130 - RNA, 18 nt, Human
ugaggcaggagacgggcc

SEQ ID NO: 1316131 - RNA, 20 nt, Human
ugaggcaggagacgggccuc

SEQ ID NO: 1316132 - RNA, 20 nt, Human
ugaggcaggagacgggccug

SEQ ID NO: 1316133 - RNA, 18 nt, Human
ugaggcaggagcugaguu

SEQ ID NO: 1316134 - RNA, 20 nt, Human
ugaggcaguaggcucaucug

SEQ ID NO: 1316135 - RNA, 24 nt, Human
ugaggcugcugggaggccgaaggu

SEQ ID NO: 1316136 - RNA, 21 nt, Human
ugagguccccaugccuggccu

SEQ ID NO: 1316137 - RNA, 23 nt, Human
ugauggagcugugccuguggagg

SEQ ID NO: 1316138 - RNA, 24 nt, Human
ugccaccaggaagcagaagguggg

SEQ ID NO: 1316139 - RNA, 20 nt, Human
ugcccagagggacagaggca

SEQ ID NO: 1316140 - RNA, 21 nt, Human
ugcccagucaguuucucuucc

SEQ ID NO: 1316141 - RNA, 23 nt, Human
ugccuggagaggucaccgugagg

SEQ ID NO: 1316142 - RNA, 23 nt, Human
ugccuguagacucagccaauagg

SEQ ID NO: 1316143 - RNA, 19 nt, Human
ugcugggagacacgcagga

SEQ ID NO: 1316144 - RNA, 20 nt, Human
ugcugggaggccgaaggugg

SEQ ID NO: 1316145 - RNA, 24 nt, Human
uggaaaagccccugggaggcaaga

SEQ ID NO: 1316146 - RNA, 23 nt, Human
uggaagaaaggccaugaaaccac

SEQ ID NO: 1316147 - RNA, 19 nt, Human
uggaagguugaggcugcag

SEQ ID NO: 1316148 - RNA, 22 nt, Human
uggaagguugaggcugcaguca

SEQ ID NO: 1316149 - RNA, 20 nt, Human
uggagaggccgacuggaggg

SEQ ID NO: 1316150 - RNA, 20 nt, Human
uggagaggcugacucgagga

SEQ ID NO: 1316151 - RNA, 18 nt, Human
uggagaggucaccgugag

SEQ ID NO: 1316152 - RNA, 18 nt, Human
uggaggaaguccagggcc

SEQ ID NO: 1316153 - RNA, 21 nt, Human
uggaggaaguccagggccugg

SEQ ID NO: 1316154 - RNA, 23 nt, Human
uggaggaaguuuugggacuggag

SEQ ID NO: 1316155 - RNA, 22 nt, Human
uggcaagcaccuguagucucag

SEQ ID NO: 1316156 - RNA, 22 nt, Human
uggcagcuuucuccaacuuugg

SEQ ID NO: 1316157 - RNA, 21 nt, Human
uggcaggagcuggguguguag

SEQ ID NO: 1316158 - RNA, 22 nt, Human
uggcaggcgggagcugggccug

SEQ ID NO: 1316159 - RNA, 24 nt, Human
uggccuggggcagcugccaugagg

SEQ ID NO: 1316160 - RNA, 22 nt, Human
ugggaggaagagcuuggccugg

SEQ ID NO: 1316161 - RNA, 18 nt, Human
ugggaggcaggagcuggg

SEQ ID NO: 1316162 - RNA, 20 nt, Human
ugggaggcaggaggagcugg

SEQ ID NO: 1316163 - RNA, 21 nt, Human
ugggaggcaggaggagcuggg

SEQ ID NO: 1316164 - RNA, 20 nt, Human
ugggaggccgaagguggcug

SEQ ID NO: 1316165 - RNA, 18 nt, Human
ugggagguugagauggga

SEQ ID NO: 1316166 - RNA, 24 nt, Human
ugggagguugagaugggagaauca

SEQ ID NO: 1316167 - RNA, 20 nt, Human
ugggccaaaaaaggcuguug

SEQ ID NO: 1316168 - RNA, 22 nt, Human
ugggccgggagaggucaacuug

SEQ ID NO: 1316169 - RNA, 20 nt, Human
ugggccuaaagagaccauug

SEQ ID NO: 1316170 - RNA, 21 nt, Human
ugggccugcagagggugacuu

SEQ ID NO: 1316171 - RNA, 24 nt, Human
ugggccuggaaaggcccuugugac

SEQ ID NO: 1316172 - RNA, 18 nt, Human
ugggccuggaaaggcugu

SEQ ID NO: 1316173 - RNA, 20 nt, Human
ugggccuggaaaggcuguug

SEQ ID NO: 1316174 - RNA, 18 nt, Human
ugggccuggagaggcugc

SEQ ID NO: 1316175 - RNA, 18 nt, Human
ugggccuggagaggcugc

SEQ ID NO: 1316176 - RNA, 24 nt, Human
ugggccuggugaggucgacuucag

SEQ ID NO: 1316177 - RNA, 18 nt, Human
uggggaggccaccgugag

SEQ ID NO: 1316178 - RNA, 23 nt, Human
ugggggguccacagugaggcaga

SEQ ID NO: 1316179 - RNA, 18 nt, Human
uggguggcaggagcuggg

SEQ ID NO: 1316180 - RNA, 22 nt, Human
uggguggcaggagcugggugug

SEQ ID NO: 1316181 - RNA, 22 nt, Human
uggucuuugucucuuagaaggu

SEQ ID NO: 1316182 - RNA, 23 nt, Human
ugguggcaagcaccuguagucuc

SEQ ID NO: 1316183 - RNA, 24 nt, Human
ugguggcaagcaccuguagucuca

SEQ ID NO: 1316184 - RNA, 21 nt, Human
uguagacucagccaauaggaa

SEQ ID NO: 1316185 - RNA, 18 nt, Human
ugugaggcagaggcuggg

SEQ ID NO: 1316186 - RNA, 18 nt, Human
ugugccuguagacucagc

SEQ ID NO: 1316187 - RNA, 21 nt, Human
uguugagguccccaugccugg

SEQ ID NO: 1316188 - RNA, 27 nt, Human
uguugugaggaaugagccccaugggag

SEQ ID NO: 1316189 - RNA, 25 nt, Human
uuaaggacauucugggccuggacag

SEQ ID NO: 1316190 - RNA, 18 nt, Human
uuaguugggcaugguggc

SEQ ID NO: 1316191 - RNA, 20 nt, Human
uucagaaaguucagggccug

SEQ ID NO: 1316192 - RNA, 22 nt, Human
uucagggccuggagagaaggcu

SEQ ID NO: 1316193 - RNA, 18 nt, Human
uucaugccaccaggaagc

SEQ ID NO: 1316194 - RNA, 24 nt, Human
uuccccagcauuggcggguucugg

SEQ ID NO: 1316195 - RNA, 24 nt, Human
uugcuugagccugggaguuugagg

SEQ ID NO: 1316196 - RNA, 21 nt, Human
uuuaagaagucuguggccuac

SEQ ID NO: 1316197 - RNA, 24 nt, Human
uuuaagaagucuguggccuacaga

SEQ ID NO: 1316198 - RNA, 23 nt, Human
aggaaagguaauaucuaugaugu

SEQ ID NO: 1316199 - RNA, 23 nt, Human
aguaauacagcagcaagaaaaga

SEQ ID NO: 1316200 - RNA, 25 nt, Human
caagaaaagacugcccuugacagua

SEQ ID NO: 1316201 - RNA, 20 nt, Human
cacgggugccaacauucggg

SEQ ID NO: 1316202 - RNA, 21 nt, Human
cagcagcaagaaaagacugcc

SEQ ID NO: 1316203 - RNA, 25 nt, Human
ccuccaguaucuuuaaaguaaucau

SEQ ID NO: 1316204 - RNA, 19 nt, Human
gauucuugaccaucuccuc

SEQ ID NO: 1316205 - RNA, 21 nt, Human
gccacgggugccaacauucgg

SEQ ID NO: 1316206 - RNA, 18 nt, Human
guacagguuuaaggggag

SEQ ID NO: 1316207 - RNA, 18 nt, Human
guuccagaaaacccaugg

SEQ ID NO: 1316208 - RNA, 18 nt, Human
uacccaaugucuucauca

SEQ ID NO: 1316209 - RNA, 21 nt, Human
uagguuccagaaaacccaugg

SEQ ID NO: 1316210 - RNA, 19 nt, Human
uccaacuuccuuaaacagc

SEQ ID NO: 1316211 - RNA, 19 nt, Human
ucuagguuccagaaaaccc

SEQ ID NO: 1316212 - RNA, 18 nt, Human
ugacaagugacgggaagg

SEQ ID NO: 1316213 - RNA, 24 nt, Human
ugacaagugacgggaaggcuaaua

SEQ ID NO: 1316214 - RNA, 22 nt, Human
aacauaaugacacuaaaaacug

SEQ ID NO: 1316215 - RNA, 20 nt, Human
agcauuuucaaacaguucug

SEQ ID NO: 1316216 - RNA, 28 nt, Human
auacaagggccgggcgcgguggcucaug

SEQ ID NO: 1316217 - RNA, 19 nt, Human
augccuguaaucccagcac

SEQ ID NO: 1316218 - RNA, 20 nt, Human
caaauauguagcagcaacau

SEQ ID NO: 1316219 - RNA, 18 nt, Human
cagcacuuggagaggcgg

SEQ ID NO: 1316220 - RNA, 20 nt, Human
caugccuguaaucccagcac

SEQ ID NO: 1316221 - RNA, 23 nt, Human
caugccuguaaucccagcacuug

SEQ ID NO: 1316222 - RNA, 24 nt, Human
ccaaauauguagcagcaacauaau

SEQ ID NO: 1316223 - RNA, 24 nt, Human
cucaugccuguaaucccagcacuu

SEQ ID NO: 1316224 - RNA, 25 nt, Human
gccaacucuguggcucuuucaucau

SEQ ID NO: 1316225 - RNA, 21 nt, Human
gccccguugccugggcugcag

SEQ ID NO: 1316226 - RNA, 23 nt, Human
ggccgggcgcgguggcucaugcc

SEQ ID NO: 1316227 - RNA, 23 nt, Human
ggcgcgguggcucaugccuguaa

SEQ ID NO: 1316228 - RNA, 23 nt, Human
gguggcucaugccuguaauccca

SEQ ID NO: 1316229 - RNA, 24 nt, Human
gguggcucaugccuguaaucccag

SEQ ID NO: 1316230 - RNA, 18 nt, Human
gucuccauaaagucaaag

SEQ ID NO: 1316231 - RNA, 22 nt, Human
uaaaaaagaauccuccuuuguc

SEQ ID NO: 1316232 - RNA, 24 nt, Human
uaagaugaguaaaaaagaauccuc

SEQ ID NO: 1316233 - RNA, 26 nt, Human
ucagcaaacgaugguguucgucuccu

SEQ ID NO: 1316234 - RNA, 22 nt, Human
ucaugccuguaaucccagcacu

SEQ ID NO: 1316235 - RNA, 23 nt, Human
uccgcagccccguugccugggcu

SEQ ID NO: 1316236 - RNA, 24 nt, Human
ugccugggcugcagguccacugac

SEQ ID NO: 1316237 - RNA, 22 nt, Human
ugccuguaaucccagcacuugg

SEQ ID NO: 1316238 - RNA, 22 nt, Human
uggcucaugccuguaaucccag

SEQ ID NO: 1316239 - RNA, 24 nt, Human
uggcucaugccuguaaucccagca

SEQ ID NO: 1316240 - RNA, 24 nt, Human
cuccagugacuucuccagcuucgc

SEQ ID NO: 1316241 - RNA, 22 nt, Human
gagaugcuccagugacuucucc

SEQ ID NO: 1316242 - RNA, 24 nt, Human
gaugcuccagugacuucuccagcu

SEQ ID NO: 1316243 - RNA, 24 nt, Human
accaagaugcaggagcugggccug

SEQ ID NO: 1316244 - RNA, 19 nt, Human
aggggccaccaagaugcag

SEQ ID NO: 1316245 - RNA, 18 nt, Human
ccacugugaggcagaggc

SEQ ID NO: 1316246 - RNA, 19 nt, Human
cgggaggcagaggcugggc

SEQ ID NO: 1316247 - RNA, 23 nt, Human
cgggaggcagaggcugggccugg

SEQ ID NO: 1316248 - RNA, 18 nt, Human
cugggccuggaggggcca

SEQ ID NO: 1316249 - RNA, 22 nt, Human
cugugaggcagaggcugggcgu

SEQ ID NO: 1316250 - RNA, 19 nt, Human
gacgggaggcagaggcugg

SEQ ID NO: 1316251 - RNA, 18 nt, Human
ggacuguagaggccgacg

SEQ ID NO: 1316252 - RNA, 18 nt, Human
ggaggcagaggcugggcc

SEQ ID NO: 1316253 - RNA, 20 nt, Human
gggcgugaagaaucugcugu

SEQ ID NO: 1316254 - RNA, 19 nt, Human
gugaggcagaggcugggcg

SEQ ID NO: 1316255 - RNA, 20 nt, Human
uccacugugaggcagaggcu

SEQ ID NO: 1316256 - RNA, 20 nt, Human
ugaggcagaggcugggcgug

SEQ ID NO: 1316257 - RNA, 18 nt, Human
ugugaggcagaggcuggg

SEQ ID NO: 1316258 - RNA, 22 nt, Human
ugugaggcagaggcugggcgug

SEQ ID NO: 1316259 - RNA, 19 nt, Human
aagaggcccugcagcuggc

SEQ ID NO: 1316260 - RNA, 20 nt, Human
acggcaacaggacagcgugc

SEQ ID NO: 1316261 - RNA, 22 nt, Human
aggggccucugagaugaugggc

SEQ ID NO: 1316262 - RNA, 18 nt, Human
caacacgcccagcccauc

SEQ ID NO: 1316263 - RNA, 21 nt, Human
cacgcccagcccaucagcucu

SEQ ID NO: 1316264 - RNA, 21 nt, Human
cagcccaucauccuggagaug

SEQ ID NO: 1316265 - RNA, 20 nt, Human
cagcucaguuccacagccga

SEQ ID NO: 1316266 - RNA, 20 nt, Human
cagcuggcuggcuggcugga

SEQ ID NO: 1316267 - RNA, 22 nt, Human
caggacagcgugcugggcagaa

SEQ ID NO: 1316268 - RNA, 27 nt, Human
caggggccucugagaugaugggcucug

SEQ ID NO: 1316269 - RNA, 21 nt, Human
cccagcccaucagcucuucuu

SEQ ID NO: 1316270 - RNA, 25 nt, Human
ccucugagaugaugggcucugguuc

SEQ ID NO: 1316271 - RNA, 24 nt, Human
ccugcacagguucugcguccgcag

SEQ ID NO: 1316272 - RNA, 20 nt, Human
ccugcagcuggcuggcuggc

SEQ ID NO: 1316273 - RNA, 21 nt, Human
cggcaagaggcccugcagcug

SEQ ID NO: 1316274 - RNA, 20 nt, Human
cugggcucugaggguccugg

SEQ ID NO: 1316275 - RNA, 20 nt, Human
cuucgaaggacauccagggg

SEQ ID NO: 1316276 - RNA, 18 nt, Human
gcaaggcuggcucuucuu

SEQ ID NO: 1316277 - RNA, 20 nt, Human
gcagcuggcuggcuggcugg

SEQ ID NO: 1316278 - RNA, 18 nt, Human
gcccugcagcuggcuggc

SEQ ID NO: 1316279 - RNA, 19 nt, Human
gcuggcagcccaucauccu

SEQ ID NO: 1316280 - RNA, 20 nt, Human
ggagauguaaacccuccugc

SEQ ID NO: 1316281 - RNA, 18 nt, Human
ggcucugaggguccuggu

SEQ ID NO: 1316282 - RNA, 21 nt, Human
ggcugcauccucugcaguugc

SEQ ID NO: 1316283 - RNA, 22 nt, Human
gugagccaacacgcccagccca

SEQ ID NO: 1316284 - RNA, 24 nt, Human
guuccuggccuguguuaccguguc

SEQ ID NO: 1316285 - RNA, 24 nt, Human
uaagcagguggcugcauccucugc

SEQ ID NO: 1316286 - RNA, 27 nt, Human
ucagugaccaggagcguuccccgggac

SEQ ID NO: 1316287 - RNA, 19 nt, Human
ugaugggcucugguuccug

SEQ ID NO: 1316288 - RNA, 19 nt, Human
ugcaaggcuggcucuucuu

SEQ ID NO: 1316289 - RNA, 18 nt, Human
uggcagcccaucauccug

SEQ ID NO: 1316290 - RNA, 20 nt, Human
uggcuggcuggcuggacagc

SEQ ID NO: 1316291 - RNA, 20 nt, Human
ugggugugaugaagaugaug

SEQ ID NO: 1316292 - RNA, 19 nt, Human
ugugaugaagaugaugaca

SEQ ID NO: 1316293 - RNA, 24 nt, Human
aaggcccugugguccuucugcccc

SEQ ID NO: 1316294 - RNA, 20 nt, Human
agaaaaacccccgcgaggcu

SEQ ID NO: 1316295 - RNA, 24 nt, Human
caaagcagggccaaacccugaacc

SEQ ID NO: 1316296 - RNA, 22 nt, Human
cagcccggggcaaagcagggcc

SEQ ID NO: 1316297 - RNA, 20 nt, Human
caggaucaggccgccgccuc

SEQ ID NO: 1316298 - RNA, 25 nt, Human
ccagugacaucaaagucagcuuucc

SEQ ID NO: 1316299 - RNA, 18 nt, Human
cccagugacaucaaaguc

SEQ ID NO: 1316300 - RNA, 19 nt, Human
cccugaaccgcuauagccc

SEQ ID NO: 1316301 - RNA, 26 nt, Human
cccugaaccgcuauagcccacgcccu

SEQ ID NO: 1316302 - RNA, 21 nt, Human
ccucuagugccagcccggggc

SEQ ID NO: 1316303 - RNA, 21 nt, Human
ccuucugccccaggaucaggc

SEQ ID NO: 1316304 - RNA, 23 nt, Human
cgggacaagcgaacguugugggg

SEQ ID NO: 1316305 - RNA, 18 nt, Human
cuagugccagcccggggc

SEQ ID NO: 1316306 - RNA, 21 nt, Human
cuauagcccacgcccucuugc

SEQ ID NO: 1316307 - RNA, 19 nt, Human
gcaaagcagggccaaaccc

SEQ ID NO: 1316308 - RNA, 21 nt, Human
gcccacgcccucuugccaaua

SEQ ID NO: 1316309 - RNA, 19 nt, Human
ggcacaggcucuuguccug

SEQ ID NO: 1316310 - RNA, 18 nt, Human
ggcucuuguccuguuugg

SEQ ID NO: 1316311 - RNA, 20 nt, Human
gggcacaggcucuuguccug

SEQ ID NO: 1316312 - RNA, 20 nt, Human
gguuggggcaagauggggcc

SEQ ID NO: 1316313 - RNA, 22 nt, Human
gguuggggcaagauggggccuc

SEQ ID NO: 1316314 - RNA, 18 nt, Human
uagcccacgcccucuugc

SEQ ID NO: 1316315 - RNA, 21 nt, Human
ucuugcauugcaggaaggccc

SEQ ID NO: 1316316 - RNA, 21 nt, Human
ucuuggucgggacaagcgaac

SEQ ID NO: 1316317 - RNA, 21 nt, Human
ugagaaaaacccccgcgaggc

SEQ ID NO: 1316318 - RNA, 19 nt, Human
uggucgggacaagcgaacg

SEQ ID NO: 1316319 - RNA, 24 nt, Human
ugguugguuggggcaagauggggc

SEQ ID NO: 1316320 - RNA, 19 nt, Human
uugugugggcacaggcucu

SEQ ID NO: 1316321 - RNA, 20 nt, Human
caaaaaguugccaugaccca

SEQ ID NO: 1316322 - RNA, 24 nt, Human
caagaaggagcaagucacaucuua

SEQ ID NO: 1316323 - RNA, 22 nt, Human
gggagcuccucuuuuuaaaacc

SEQ ID NO: 1316324 - RNA, 18 nt, Human
ucacagucaugauggaag

SEQ ID NO: 1316325 - RNA, 18 nt, Human
uggaaggcaagaaggagc

SEQ ID NO: 1316326 - RNA, 22 nt, Human
uucauugugccaaaaaguugcc

SEQ ID NO: 1316327 - RNA, 22 nt, Human
ccagauuuccuauuuacaugac

SEQ ID NO: 1316328 - RNA, 18 nt, Human
ccauaccugaagggcugu

SEQ ID NO: 1316329 - RNA, 20 nt, Human
aaaaacaucuuucaaucucc

SEQ ID NO: 1316330 - RNA, 23 nt, Human
aaaaagaaaaucgcugcacucau

SEQ ID NO: 1316331 - RNA, 21 nt, Human
aaaagauguguuuagacagaa

SEQ ID NO: 1316332 - RNA, 29 nt, Human
aaacuccuuuuuuuuuuuuuuuuuuuuuu

SEQ ID NO: 1316333 - RNA, 27 nt, Human
aagcaaacuccuuuuuuuuuuuuuuuu

SEQ ID NO: 1316334 - RNA, 19 nt, Human
aaucucccgacaaaagcaa

SEQ ID NO: 1316335 - RNA, 20 nt, Human
acaaaaagaaaaucgcugca

SEQ ID NO: 1316336 - RNA, 18 nt, Human
acaaagaaagaaacaaaa

SEQ ID NO: 1316337 - RNA, 21 nt, Human
acucuucugucuucuuguccu

SEQ ID NO: 1316338 - RNA, 21 nt, Human
agcaaacuccuuuuuuuuuuu

SEQ ID NO: 1316339 - RNA, 18 nt, Human
agucuguagucaccacag

SEQ ID NO: 1316340 - RNA, 22 nt, Human
aucagcuggaacagcucuuucu

SEQ ID NO: 1316341 - RNA, 22 nt, Human
aucucccgacaaaagcaaacuc

SEQ ID NO: 1316342 - RNA, 19 nt, Human
augacugauuacaaaaaua

SEQ ID NO: 1316343 - RNA, 20 nt, Human
caaagaaagaaacaaaaaca

SEQ ID NO: 1316344 - RNA, 21 nt, Human
caaucucccgacaaaagcaaa

SEQ ID NO: 1316345 - RNA, 19 nt, Human
cacucuagggcaguaugcu

SEQ ID NO: 1316346 - RNA, 19 nt, Human
ccuacaaaaagaaaaucgc

SEQ ID NO: 1316347 - RNA, 18 nt, Human
cgaccugaagaauggcug

SEQ ID NO: 1316348 - RNA, 19 nt, Human
cuaaccaaauguaacugca

SEQ ID NO: 1316349 - RNA, 19 nt, Human
cuagaucagcuggaacagc

SEQ ID NO: 1316350 - RNA, 20 nt, Human
cucacuagagcauuccucua

SEQ ID NO: 1316351 - RNA, 19 nt, Human
cucagagcaggauagagaa

SEQ ID NO: 1316352 - RNA, 18 nt, Human
cugugguccugacguggg

SEQ ID NO: 1316353 - RNA, 22 nt, Human
cuuucuggcagugacauuuuga

SEQ ID NO: 1316354 - RNA, 23 nt, Human
gaguggguacuacuugaagugga

SEQ ID NO: 1316355 - RNA, 18 nt, Human
gccuggggggucuguggu

SEQ ID NO: 1316356 - RNA, 19 nt, Human
gcugggccuggggggucug

SEQ ID NO: 1316357 - RNA, 20 nt, Human
gggccuggggggucuguggu

SEQ ID NO: 1316358 - RNA, 24 nt, Human
gggggucugugguccugacguggg

SEQ ID NO: 1316359 - RNA, 24 nt, Human
uaagaagccaaugacugauuacaa

SEQ ID NO: 1316360 - RNA, 19 nt, Human
uacaaagaaagaaacaaaa

SEQ ID NO: 1316361 - RNA, 23 nt, Human
uacaaagaaagaaacaaaaacau

SEQ ID NO: 1316362 - RNA, 23 nt, Human
uacacuggacgucagcaaacacc

SEQ ID NO: 1316363 - RNA, 26 nt, Human
uagccugugcacuucuguucagauga

SEQ ID NO: 1316364 - RNA, 20 nt, Human
ucaaucucccgacaaaagca

SEQ ID NO: 1316365 - RNA, 21 nt, Human
ucaauuucuacaagaaaucaa

SEQ ID NO: 1316366 - RNA, 24 nt, Human
ucagagcaggauagagaaauuuau

SEQ ID NO: 1316367 - RNA, 18 nt, Human
uccuuuuuuuuuuuuuuu

SEQ ID NO: 1316368 - RNA, 21 nt, Human
ucuagggcaguaugcucuaga

SEQ ID NO: 1316369 - RNA, 21 nt, Human
ucuguacaaguagccugugca

SEQ ID NO: 1316370 - RNA, 22 nt, Human
ucuguagucaccacagagaaga

SEQ ID NO: 1316371 - RNA, 18 nt, Human
ugcugggccugggggguc

SEQ ID NO: 1316372 - RNA, 24 nt, Human
uggcagugacauuuugauuugaac

SEQ ID NO: 1316373 - RNA, 18 nt, Human
uguuauauuucacacaca

SEQ ID NO: 1316374 - RNA, 23 nt, Human
uuaaauuucacauuccuuuaaaa

SEQ ID NO: 1316375 - RNA, 23 nt, Human
uuagccucagagcaggauagaga

SEQ ID NO: 1316376 - RNA, 21 nt, Human
uuguccuacaaaaagaaaauc

SEQ ID NO: 1316377 - RNA, 24 nt, Human
uuuugcuccaaaugcuacgaccug

SEQ ID NO: 1316378 - RNA, 20 nt, Human
uuuuuuuuuuuuuugcucca

SEQ ID NO: 1316379 - RNA, 23 nt, Human
uuuuuuuuuuuuuuuugcuccaa

SEQ ID NO: 1316380 - RNA, 20 nt, Human
uuuuuuuuuuuuuuuuugcu

SEQ ID NO: 1316381 - RNA, 27 nt, Human
uuuuuuuuuuuuuuuuuuuuuuugggg

SEQ ID NO: 1316382 - RNA, 18 nt, Human
acaaagguuccaagggac

SEQ ID NO: 1316383 - RNA, 24 nt, Human
agauaggaagcggcgggcucgggg

SEQ ID NO: 1316384 - RNA, 19 nt, Human
aggaagcggcgggcucggg

SEQ ID NO: 1316385 - RNA, 24 nt, Human
cgcggcggacgggaagccgaugcc

SEQ ID NO: 1316386 - RNA, 21 nt, Human
cgcugagauaggaagcggcgg

SEQ ID NO: 1316387 - RNA, 23 nt, Human
cggcagggcgcugagauaggaag

SEQ ID NO: 1316388 - RNA, 20 nt, Human
gcggacgggaagccgaugcc

SEQ ID NO: 1316389 - RNA, 20 nt, Human
gcggcggcggcggcagggcg

SEQ ID NO: 1316390 - RNA, 23 nt, Human
gcugggccgcggcggcggcggca

SEQ ID NO: 1316391 - RNA, 20 nt, Human
uuuuuuuuuuugagcaaagc

SEQ ID NO: 1316392 - RNA, 18 nt, Human
uuuuuuuuuuuuuuuuug

SEQ ID NO: 1316393 - RNA, 25 nt, Human
aagugaagagucccccucccacccu

SEQ ID NO: 1316394 - RNA, 24 nt, Human
caaucaccaaugucccucccuagc

SEQ ID NO: 1316395 - RNA, 23 nt, Human
ccucgggcugcaacacuuagccc

SEQ ID NO: 1316396 - RNA, 23 nt, Human
cugccagccagagaggugaaagu

SEQ ID NO: 1316397 - RNA, 22 nt, Human
cuuggccugucugggcuggaug

SEQ ID NO: 1316398 - RNA, 20 nt, Human
gucugggcuggaugggagcc

SEQ ID NO: 1316399 - RNA, 21 nt, Human
ugcaacacuuagcccaggacu

SEQ ID NO: 1316400 - RNA, 18 nt, Human
ugccaaucaccaaugucc

SEQ ID NO: 1316401 - RNA, 23 nt, Human
uguggcacuccaggucucuggac

SEQ ID NO: 1316402 - RNA, 19 nt, Human
aaacaaggaucuccggaac

SEQ ID NO: 1316403 - RNA, 22 nt, Human
aaacaucuuccagaucaucacc

SEQ ID NO: 1316404 - RNA, 22 nt, Human
aacaucuuccagaucaucacca

SEQ ID NO: 1316405 - RNA, 18 nt, Human
caccccuuuuggcugcug

SEQ ID NO: 1316406 - RNA, 21 nt, Human
caggacaacauugggcauggg

SEQ ID NO: 1316407 - RNA, 19 nt, Human
caucaccagccucgcuguc

SEQ ID NO: 1316408 - RNA, 23 nt, Human
caucuuccagaucaucaccagcc

SEQ ID NO: 1316409 - RNA, 18 nt, Human
cauugggcaugggucucu

SEQ ID NO: 1316410 - RNA, 22 nt, Human
ccucugguguuguaccuggcuu

SEQ ID NO: 1316411 - RNA, 21 nt, Human
ccuuuucuuacuuccugccuc

SEQ ID NO: 1316412 - RNA, 20 nt, Human
cggcaccaggaucuguguuu

SEQ ID NO: 1316413 - RNA, 20 nt, Human
cucugguguuguaccuggcu

SEQ ID NO: 1316414 - RNA, 24 nt, Human
cugccucuggcucuguccaccccu

SEQ ID NO: 1316415 - RNA, 22 nt, Human
cugguggacccagguuuccucu

SEQ ID NO: 1316416 - RNA, 23 nt, Human
cuuccugccucuggcucugucca

SEQ ID NO: 1316417 - RNA, 21 nt, Human
ggcaugggucucugucucugc

SEQ ID NO: 1316418 - RNA, 26 nt, Human
ggcucuguccaccccuuuuggcugcu

SEQ ID NO: 1316419 - RNA, 18 nt, Human
guaccuggcuuugccagc

SEQ ID NO: 1316420 - RNA, 19 nt, Human
guggacccagguuuccucu

SEQ ID NO: 1316421 - RNA, 20 nt, Human
uaccuggcuuugccagcaac

SEQ ID NO: 1316422 - RNA, 22 nt, Human
ucuguccaccccuuuuggcugc

SEQ ID NO: 1316423 - RNA, 21 nt, Human
ucuguguuuuccuuuucuuac

SEQ ID NO: 1316424 - RNA, 23 nt, Human
ugguggacccagguuuccucugg

SEQ ID NO: 1316425 - RNA, 18 nt, Human
ugguguuguaccuggcuu

SEQ ID NO: 1316426 - RNA, 19 nt, Human
ugucucugcugucugagca

SEQ ID NO: 1316427 - RNA, 21 nt, Human
ugucugagcacaccgaaaauu

SEQ ID NO: 1316428 - RNA, 23 nt, Human
uuccagaucaucaccagccucgc

SEQ ID NO: 1316429 - RNA, 21 nt, Human
uuccucugguguuguaccugg

SEQ ID NO: 1316430 - RNA, 26 nt, Human
aaaagauaaacaaauuagaggccaag

SEQ ID NO: 1316431 - RNA, 23 nt, Human
aaagauaaacaaauuagaggcca

SEQ ID NO: 1316432 - RNA, 23 nt, Human
aaauaaauuaccuaccaaaauau

SEQ ID NO: 1316433 - RNA, 20 nt, Human
aagcggccgagaggcaggag

SEQ ID NO: 1316434 - RNA, 21 nt, Human
aagcggccgagaggcaggagc

SEQ ID NO: 1316435 - RNA, 21 nt, Human
aaguggccgaaaggcaggagc

SEQ ID NO: 1316436 - RNA, 20 nt, Human
agaggcaggaggccgggccc

SEQ ID NO: 1316437 - RNA, 18 nt, Human
aggcaggaggccgggccu

SEQ ID NO: 1316438 - RNA, 22 nt, Human
aggcaggaggccgggccugcaa

SEQ ID NO: 1316439 - RNA, 24 nt, Human
aggcaggaggccgggccugcaaag

SEQ ID NO: 1316440 - RNA, 26 nt, Human
auaauaaggaaaauaaaauaaaaaau

SEQ ID NO: 1316441 - RNA, 23 nt, Human
auggugcagaaacucacuccaaa

SEQ ID NO: 1316442 - RNA, 20 nt, Human
caaaaaguugccaugaccca

SEQ ID NO: 1316443 - RNA, 21 nt, Human
caggcaggagcuggaccuggu

SEQ ID NO: 1316444 - RNA, 18 nt, Human
cccgugcaggccuuugag

SEQ ID NO: 1316445 - RNA, 22 nt, Human
cgggagcugggccugccgaagc

SEQ ID NO: 1316446 - RNA, 18 nt, Human
cuaaagaggccacuggca

SEQ ID NO: 1316447 - RNA, 18 nt, Human
cugaagaggccacuggca

SEQ ID NO: 1316448 - RNA, 18 nt, Human
cugggccuaaagaggcca

SEQ ID NO: 1316449 - RNA, 25 nt, Human
gccgaaaggcaggagcuuuggacug

SEQ ID NO: 1316450 - RNA, 18 nt, Human
gcgggagcugggccugcc

SEQ ID NO: 1316451 - RNA, 21 nt, Human
ggaagggaaaaacggggccug

SEQ ID NO: 1316452 - RNA, 20 nt, Human
ggaggccgggccugcaaagg

SEQ ID NO: 1316453 - RNA, 19 nt, Human
gugaggcagaggcugggcc

SEQ ID NO: 1316454 - RNA, 21 nt, Human
uaaacaaauuagaggccaaga

SEQ ID NO: 1316455 - RNA, 20 nt, Human
uaaauaauaaggaaaauaaa

SEQ ID NO: 1316456 - RNA, 20 nt, Human
uccgcugugaggcagaggcu

SEQ ID NO: 1316457 - RNA, 19 nt, Human
ugaaguggccgaaaggcag

SEQ ID NO: 1316458 - RNA, 18 nt, Human
ugagaggcaggaggccgg

SEQ ID NO: 1316459 - RNA, 18 nt, Human
ugaggcagaggcugggcc

SEQ ID NO: 1316460 - RNA, 18 nt, Human
ugaggcagaggcugggcc

SEQ ID NO: 1316461 - RNA, 25 nt, Human
ugccggaagggaaaaacggggccug

SEQ ID NO: 1316462 - RNA, 22 nt, Human
uggcaggcaggagcuggaccug

SEQ ID NO: 1316463 - RNA, 22 nt, Human
uggcaggcgggagcugggccug

SEQ ID NO: 1316464 - RNA, 21 nt, Human
uggcauggugcagaaacucac

SEQ ID NO: 1316465 - RNA, 20 nt, Human
ugggccuaaagaggccacug

SEQ ID NO: 1316466 - RNA, 18 nt, Human
uggggaggccacagugag

SEQ ID NO: 1316467 - RNA, 18 nt, Human
ugugaggaaugagcuggg

SEQ ID NO: 1316468 - RNA, 18 nt, Human
ugugaggcagaggcuggg

SEQ ID NO: 1316469 - RNA, 22 nt, Human
uucacugugccaaaaaguugcc

SEQ ID NO: 1316470 - RNA, 18 nt, Human
uugugaggaaugagcugg

SEQ ID NO: 1316471 - RNA, 20 nt, Human
aaaagaagaaaauaugucag

SEQ ID NO: 1316472 - RNA, 19 nt, Human
aaaaucaagauacuggcca

SEQ ID NO: 1316473 - RNA, 22 nt, Human
aaacagcuggaccacaagucgu

SEQ ID NO: 1316474 - RNA, 18 nt, Human
aaagacuagagaagaggc

SEQ ID NO: 1316475 - RNA, 23 nt, Human
aacuacaucccuuuucugcucuc

SEQ ID NO: 1316476 - RNA, 20 nt, Human
aagcagccaugcccuucagg

SEQ ID NO: 1316477 - RNA, 19 nt, Human
acaauggcaacuacauccc

SEQ ID NO: 1316478 - RNA, 21 nt, Human
acaugacagugcauauacaua

SEQ ID NO: 1316479 - RNA, 22 nt, Human
acucauuucguucuucuuuucu

SEQ ID NO: 1316480 - RNA, 26 nt, Human
agaaauccaaaaucaagauacuggcc

SEQ ID NO: 1316481 - RNA, 18 nt, Human
agagcagcuguccuauug

SEQ ID NO: 1316482 - RNA, 22 nt, Human
agccggaacuugauaagacacc

SEQ ID NO: 1316483 - RNA, 24 nt, Human
auagcaacugcccagcgugaacaa

SEQ ID NO: 1316484 - RNA, 20 nt, Human
aucacaaucuccaauuuauc

SEQ ID NO: 1316485 - RNA, 19 nt, Human
auccuuggcaaucccaugg

SEQ ID NO: 1316486 - RNA, 23 nt, Human
aucuguuuauggaagagcagcug

SEQ ID NO: 1316487 - RNA, 22 nt, Human
caaacaauugaaaagaagaaaa

SEQ ID NO: 1316488 - RNA, 28 nt, Human
cacacagccggaacuugauaagacaccc

SEQ ID NO: 1316489 - RNA, 20 nt, Human
cacugucaccuucacagagg

SEQ ID NO: 1316490 - RNA, 20 nt, Human
cacugucaccuucacagagg

SEQ ID NO: 1316491 - RNA, 25 nt, Human
cagaacccucucuuccaugccagcc

SEQ ID NO: 1316492 - RNA, 19 nt, Human
cagaauagcaacugcccag

SEQ ID NO: 1316493 - RNA, 24 nt, Human
cagaauagccaaaggcuuaggagc

SEQ ID NO: 1316494 - RNA, 21 nt, Human
cagccggaacuugauaagaca

SEQ ID NO: 1316495 - RNA, 22 nt, Human
cauccaauacuuaaccacagcc

SEQ ID NO: 1316496 - RNA, 21 nt, Human
cauuuucauuucuagagaggg

SEQ ID NO: 1316497 - RNA, 20 nt, Human
ccaaaggcuuaggagcagcc

SEQ ID NO: 1316498 - RNA, 22 nt, Human
ccaauacuuaaccacagccaaa

SEQ ID NO: 1316499 - RNA, 18 nt, Human
cccagaaagaagauaaug

SEQ ID NO: 1316500 - RNA, 19 nt, Human
cccaugcugcacacagccg

SEQ ID NO: 1316501 - RNA, 22 nt, Human
cccaugcugcacacagccggaa

SEQ ID NO: 1316502 - RNA, 23 nt, Human
ccccaaagaauugugauacuacc

SEQ ID NO: 1316503 - RNA, 20 nt, Human
ccggaacuugauaagacacc

SEQ ID NO: 1316504 - RNA, 26 nt, Human
cucaauuucuuaaaguggagccccaa

SEQ ID NO: 1316505 - RNA, 24 nt, Human
cucuucaaagauauuucaugauga

SEQ ID NO: 1316506 - RNA, 21 nt, Human
cucuuuccugaggcuuccuag

SEQ ID NO: 1316507 - RNA, 24 nt, Human
cuucagggugaaucaaacaauuga

SEQ ID NO: 1316508 - RNA, 20 nt, Human
cuucccuugucuuuucucuc

SEQ ID NO: 1316509 - RNA, 19 nt, Human
gauaagacacccagaaaga

SEQ ID NO: 1316510 - RNA, 23 nt, Human
gcacaaaacccagaauuacugca

SEQ ID NO: 1316511 - RNA, 21 nt, Human
gccccauccccauuccucaug

SEQ ID NO: 1316512 - RNA, 18 nt, Human
gcugcuaucaagcugucu

SEQ ID NO: 1316513 - RNA, 19 nt, Human
gucaccuucacagagggca

SEQ ID NO: 1316514 - RNA, 22 nt, Human
uaaaguggagccccaaagaauu

SEQ ID NO: 1316515 - RNA, 18 nt, Human
uaacgcaggauggagucu

SEQ ID NO: 1316516 - RNA, 18 nt, Human
uaagguagguaggucuca

SEQ ID NO: 1316517 - RNA, 21 nt, Human
uaaucauauccagucacagga

SEQ ID NO: 1316518 - RNA, 18 nt, Human
uagacaaggaugcaugua

SEQ ID NO: 1316519 - RNA, 22 nt, Human
uauaggcaagcccgguauuccu

SEQ ID NO: 1316520 - RNA, 22 nt, Human
uaucacccaugcugcacacagc

SEQ ID NO: 1316521 - RNA, 21 nt, Human
uaucccacaagggucccacca

SEQ ID NO: 1316522 - RNA, 21 nt, Human
ucacaaucuccaauuuaucca

SEQ ID NO: 1316523 - RNA, 26 nt, Human
ucaucacaaucuccaauuuauccagg

SEQ ID NO: 1316524 - RNA, 21 nt, Human
uccaauacuuaaccacagcca

SEQ ID NO: 1316525 - RNA, 24 nt, Human
uccagucacaggaugugcuuaaaa

SEQ ID NO: 1316526 - RNA, 24 nt, Human
ucccuugucuuuucucucuucaaa

SEQ ID NO: 1316527 - RNA, 22 nt, Human
ucccuuuucugcucucuuggga

SEQ ID NO: 1316528 - RNA, 23 nt, Human
ucucuuuccugaggcuuccuagg

SEQ ID NO: 1316529 - RNA, 22 nt, Human
ugaaucaaacaauugaaaagaa

SEQ ID NO: 1316530 - RNA, 20 nt, Human
ugagaaauccaaaaucaaga

SEQ ID NO: 1316531 - RNA, 18 nt, Human
ugcaauaaacagcuggac

SEQ ID NO: 1316532 - RNA, 22 nt, Human
ugcacaaaacccagaauuacug

SEQ ID NO: 1316533 - RNA, 22 nt, Human
ugcacugaacagaauagccaaa

SEQ ID NO: 1316534 - RNA, 21 nt, Human
ugccagccccauccccauucc

SEQ ID NO: 1316535 - RNA, 22 nt, Human
ugcggucagucaucuucccacc

SEQ ID NO: 1316536 - RNA, 18 nt, Human
uggaagauuugaaagcug

SEQ ID NO: 1316537 - RNA, 19 nt, Human
uggaagauuugaaagcugg

SEQ ID NO: 1316538 - RNA, 20 nt, Human
uggcuguugcugaacagcag

SEQ ID NO: 1316539 - RNA, 18 nt, Human
ugggaggacguuguaaug

SEQ ID NO: 1316540 - RNA, 27 nt, Human
ugucauuguucucguuucuuuugagcc

SEQ ID NO: 1316541 - RNA, 24 nt, Human
uguggauguuacuuuccugucuuu

SEQ ID NO: 1316542 - RNA, 23 nt, Human
uguuuugcauuucaugaaaucuc

SEQ ID NO: 1316543 - RNA, 22 nt, Human
uucaugaaaucucagagucaga

SEQ ID NO: 1316544 - RNA, 19 nt, Human
uucucaguucugagagauu

SEQ ID NO: 1316545 - RNA, 19 nt, Human
uuggaagauuugaaagcug

SEQ ID NO: 1316546 - RNA, 21 nt, Human
uuuaaaauaugcacaaaaccc

SEQ ID NO: 1316547 - RNA, 20 nt, Human
uuuaucuguccaccuaucuu

SEQ ID NO: 1316548 - RNA, 18 nt, Human
uuucacugaggcuuacac

SEQ ID NO: 1316549 - RNA, 23 nt, Human
uuuugcauuucaugaaaucucag

SEQ ID NO: 1316550 - RNA, 19 nt, Human
agcagcaucaccagauggc

SEQ ID NO: 1316551 - RNA, 24 nt, Human
auccugguggguauggguaccugg

SEQ ID NO: 1316552 - RNA, 18 nt, Human
cacagcacagggcagggc

SEQ ID NO: 1316553 - RNA, 22 nt, Human
cacagcacagggcagggcugga

SEQ ID NO: 1316554 - RNA, 21 nt, Human
cagcaggcucagggguggcgc

SEQ ID NO: 1316555 - RNA, 24 nt, Human
cagggcuggacccaagcuuagguu

SEQ ID NO: 1316556 - RNA, 23 nt, Human
gaccaugggucaucaagcucuuu

SEQ ID NO: 1316557 - RNA, 19 nt, Human
gcacagggcagggcuggac

SEQ ID NO: 1316558 - RNA, 23 nt, Human
gccagagggcaggaacaggguca

SEQ ID NO: 1316559 - RNA, 21 nt, Human
gcccuguggaccauggguccc

SEQ ID NO: 1316560 - RNA, 22 nt, Human
gcucagggguggcgcacugggg

SEQ ID NO: 1316561 - RNA, 23 nt, Human
gggcuggacccaagcuuagguuc

SEQ ID NO: 1316562 - RNA, 28 nt, Human
ggggggcuggaucccaggcuuuugggag

SEQ ID NO: 1316563 - RNA, 19 nt, Human
guggccagagggcaggaac

SEQ ID NO: 1316564 - RNA, 21 nt, Human
uaccugcggagagucagcagc

SEQ ID NO: 1316565 - RNA, 21 nt, Human
uauggguaccugcggagaguc

SEQ ID NO: 1316566 - RNA, 21 nt, Human
ucagggguggcgcacuggggc

SEQ ID NO: 1316567 - RNA, 19 nt, Human
uggcagagagccuagugcc

SEQ ID NO: 1316568 - RNA, 21 nt, Human
uggccagagggcaggaacagg

SEQ ID NO: 1316569 - RNA, 20 nt, Human
uggcgggggggcuggauccc

SEQ ID NO: 1316570 - RNA, 19 nt, Human
uggguaccugcggagaguc

SEQ ID NO: 1316571 - RNA, 21 nt, Human
uggguaccugcggagagucag

SEQ ID NO: 1316572 - RNA, 25 nt, Human
ugguagcgucuguagcuuaggcagg

SEQ ID NO: 1316573 - RNA, 19 nt, Human
cagcugcagccgggggacg

SEQ ID NO: 1316574 - RNA, 19 nt, Human
gcagcugcagccgggggac

SEQ ID NO: 1316575 - RNA, 22 nt, Human
acaggcaagaaccugggugggu

SEQ ID NO: 1316576 - RNA, 19 nt, Human
agaugagccccccaccccc

SEQ ID NO: 1316577 - RNA, 28 nt, Human
auggcgcaccaggagaugagccccccac

SEQ ID NO: 1316578 - RNA, 22 nt, Human
caacaggcaagaaccugggugg

SEQ ID NO: 1316579 - RNA, 18 nt, Human
caaggcuccuuccacugg

SEQ ID NO: 1316580 - RNA, 18 nt, Human
cacuggaguugccuuugc

SEQ ID NO: 1316581 - RNA, 19 nt, Human
cagaaggaugcagauggcg

SEQ ID NO: 1316582 - RNA, 18 nt, Human
cagcccagaaggaugcag

SEQ ID NO: 1316583 - RNA, 26 nt, Human
cauccuucagcccuggaggugcgccc

SEQ ID NO: 1316584 - RNA, 23 nt, Human
ccccaggcuauccaaggcuccuu

SEQ ID NO: 1316585 - RNA, 23 nt, Human
ccccccaccccccaggcuaucca

SEQ ID NO: 1316586 - RNA, 18 nt, Human
ccuuccacuggaguugcc

SEQ ID NO: 1316587 - RNA, 30 nt, Human
cgcaccaggagaugagccccccaccccccu

SEQ ID NO: 1316588 - RNA, 23 nt, Human
gaaggaugcagauggcgcaccag

SEQ ID NO: 1316589 - RNA, 19 nt, Human
gcccuggaggugcgcccug

SEQ ID NO: 1316590 - RNA, 18 nt, Human
ucccagcccagaaggaug

SEQ ID NO: 1316591 - RNA, 19 nt, Human
ugagccccccaccccccag

SEQ ID NO: 1316592 - RNA, 19 nt, Human
ugagccccccaccccccag

SEQ ID NO: 1316593 - RNA, 22 nt, Human
ugggugggugcccggcccugca

SEQ ID NO: 1316594 - RNA, 21 nt, Human
aaacgccccuguccuggacca

SEQ ID NO: 1316595 - RNA, 26 nt, Human
aaaugccggaagucccgccccaagcu

SEQ ID NO: 1316596 - RNA, 19 nt, Human
agcuagguccagcuggccc

SEQ ID NO: 1316597 - RNA, 25 nt, Human
caacccacaggaaacgccccugucc

SEQ ID NO: 1316598 - RNA, 19 nt, Human
cccgccccaagcuucgcaa

SEQ ID NO: 1316599 - RNA, 23 nt, Human
cgcaacccacaggaaacgccccu

SEQ ID NO: 1316600 - RNA, 24 nt, Human
cuuguaguuaauguaguuuuucuc

SEQ ID NO: 1316601 - RNA, 22 nt, Human
gccccagggcccgccgucgcac

SEQ ID NO: 1316602 - RNA, 23 nt, Human
uagguccagcuggccccacuccu

SEQ ID NO: 1316603 - RNA, 28 nt, Human
ucacagacacgucccauccaaaugccgg

SEQ ID NO: 1316604 - RNA, 21 nt, Human
uccuggaccaucauuggcccc

SEQ ID NO: 1316605 - RNA, 19 nt, Human
uggaccaucauuggcccca

SEQ ID NO: 1316606 - RNA, 21 nt, Human
aagcuccaggagcugauaugg

SEQ ID NO: 1316607 - RNA, 21 nt, Human
agcugauaugggcaccaggcc

SEQ ID NO: 1316608 - RNA, 18 nt, Human
aggcgcggcaccgagggc

SEQ ID NO: 1316609 - RNA, 18 nt, Human
caggagcugauaugggca

SEQ ID NO: 1316610 - RNA, 19 nt, Human
ccccggaagcugcugcugc

SEQ ID NO: 1316611 - RNA, 20 nt, Human
ccccggaagcugcugcugcc

SEQ ID NO: 1316612 - RNA, 22 nt, Human
cggggaugcggggggcagcggg

SEQ ID NO: 1316613 - RNA, 21 nt, Human
gagcggggaugcggggggcag

SEQ ID NO: 1316614 - RNA, 20 nt, Human
gcuccgagcguuggagcgga

SEQ ID NO: 1316615 - RNA, 20 nt, Human
ggaagcugcugcugccgccc

SEQ ID NO: 1316616 - RNA, 20 nt, Human
ggagcggggaugcggggggc

SEQ ID NO: 1316617 - RNA, 19 nt, Human
ggaugcggggggcagcggg

SEQ ID NO: 1316618 - RNA, 22 nt, Human
ggccaccccggaagcugcugcu

SEQ ID NO: 1316619 - RNA, 22 nt, Human
ugcccaggccaccccggaagcu

SEQ ID NO: 1316620 - RNA, 19 nt, Human
ugcggggggcagcgggcug

SEQ ID NO: 1316621 - RNA, 21 nt, Human
ugcggggggcagcgggcuggg

SEQ ID NO: 1316622 - RNA, 19 nt, Human
uuggagcggagcggggaug

SEQ ID NO: 1316623 - RNA, 21 nt, Human
uuggagcggagcggggaugcg

SEQ ID NO: 1316624 - RNA, 26 nt, Human
agaagcagcaggaggaaccauguggc

SEQ ID NO: 1316625 - RNA, 20 nt, Human
aggucuucuuagcuccaccu

SEQ ID NO: 1316626 - RNA, 20 nt, Human
cagcaggaggaaccaugugg

SEQ ID NO: 1316627 - RNA, 24 nt, Human
caggcauccuucgugugaccaaaa

SEQ ID NO: 1316628 - RNA, 28 nt, Human
caggcauccuucgugugaccaaaauucu

SEQ ID NO: 1316629 - RNA, 25 nt, Human
ccaaaauucuccgaccuuggauguu

SEQ ID NO: 1316630 - RNA, 18 nt, Human
cccgcaucacaucacacc

SEQ ID NO: 1316631 - RNA, 19 nt, Human
cccgcaucacaucacacca

SEQ ID NO: 1316632 - RNA, 20 nt, Human
cccgcaucacaucacaccac

SEQ ID NO: 1316633 - RNA, 21 nt, Human
cccgcaucacaucacaccaca

SEQ ID NO: 1316634 - RNA, 21 nt, Human
cgacuuuccuccccgaucccc

SEQ ID NO: 1316635 - RNA, 18 nt, Human
cgcaucacaucacaccac

SEQ ID NO: 1316636 - RNA, 22 nt, Human
cgcaucacaucacaccacaucu

SEQ ID NO: 1316637 - RNA, 22 nt, Human
cucuguuuugcgcucuccucug

SEQ ID NO: 1316638 - RNA, 24 nt, Human
gauguuucugaggucuucuuagcu

SEQ ID NO: 1316639 - RNA, 21 nt, Human
gcaucacaucacaccacaucu

SEQ ID NO: 1316640 - RNA, 19 nt, Human
ucccagcaccacgcucucc

SEQ ID NO: 1316641 - RNA, 21 nt, Human
uccgccggcuucccccugccc

SEQ ID NO: 1316642 - RNA, 21 nt, Human
ucugagcuugagucuuuugcc

SEQ ID NO: 1316643 - RNA, 21 nt, Human
ugugaccaaaauucuccgacc

SEQ ID NO: 1316644 - RNA, 25 nt, Human
uuccuccccgauccccuuuccgccg

SEQ ID NO: 1316645 - RNA, 22 nt, Human
agcaccgguuccuccaccaccc

SEQ ID NO: 1316646 - RNA, 18 nt, Human
agggcuggccaggcagag

SEQ ID NO: 1316647 - RNA, 19 nt, Human
cacgguguggcccgagggc

SEQ ID NO: 1316648 - RNA, 21 nt, Human
cugagcaccgguuccuccacc

SEQ ID NO: 1316649 - RNA, 22 nt, Human
gaagggacagagggucacggug

SEQ ID NO: 1316650 - RNA, 20 nt, Human
gcccugggucccagccuggu

SEQ ID NO: 1316651 - RNA, 19 nt, Human
gucacgguguggcccgagg

SEQ ID NO: 1316652 - RNA, 22 nt, Human
uccaccacccacauauggugau

SEQ ID NO: 1316653 - RNA, 18 nt, Human
uggccaggcagagcgggu

SEQ ID NO: 1316654 - RNA, 19 nt, Human
uggcccugggucccagccu

SEQ ID NO: 1316655 - RNA, 18 nt, Human
ugguacccagcaccuuca

SEQ ID NO: 1316656 - RNA, 22 nt, Human
uggugaugcauagacacguugu

SEQ ID NO: 1316657 - RNA, 19 nt, Human
uuacugcacuugacggaga

SEQ ID NO: 1316658 - RNA, 27 nt, Human
uugaagaguugccagcgggccaggagg

SEQ ID NO: 1316659 - RNA, 18 nt, Human
ccagggcuaggggggggg

SEQ ID NO: 1316660 - RNA, 23 nt, Human
cuagggggggggcccagcagggc

SEQ ID NO: 1316661 - RNA, 18 nt, Human
gcaaagccuucucagaag

SEQ ID NO: 1316662 - RNA, 18 nt, Human
gccucggcagguacgagg

SEQ ID NO: 1316663 - RNA, 22 nt, Human
ggggcccagcagggccuggggc

SEQ ID NO: 1316664 - RNA, 20 nt, Human
uaccuccagcaacuuaguca

SEQ ID NO: 1316665 - RNA, 19 nt, Human
uccagggcuaggggggggg

SEQ ID NO: 1316666 - RNA, 21 nt, Human
cgaagggcuugccugcccaca

SEQ ID NO: 1316667 - RNA, 21 nt, Human
cugacacgaggggaggggucu

SEQ ID NO: 1316668 - RNA, 18 nt, Human
gagcugccugagcugaca

SEQ ID NO: 1316669 - RNA, 24 nt, Human
uaaggaagcgguacgaacuccacg

SEQ ID NO: 1316670 - RNA, 24 nt, Human
uagccuguggccaccccggagaug

SEQ ID NO: 1316671 - RNA, 25 nt, Human
uagccuguggccaccccggagauga

SEQ ID NO: 1316672 - RNA, 21 nt, Human
uagcgagucuuaucauugucc

SEQ ID NO: 1316673 - RNA, 23 nt, Human
ucacaugacucuagacacuuggu

SEQ ID NO: 1316674 - RNA, 21 nt, Human
ucccggagcucuagggccuca

SEQ ID NO: 1316675 - RNA, 18 nt, Human
ucgggggccucgagcucc

SEQ ID NO: 1316676 - RNA, 18 nt, Human
ucuagacacuugguggaa

SEQ ID NO: 1316677 - RNA, 24 nt, Human
ugacacgaggggaggggucugugu

SEQ ID NO: 1316678 - RNA, 24 nt, Human
ugacuugggccaauuacacgacug

SEQ ID NO: 1316679 - RNA, 19 nt, Human
ugagcugacacgaggggag

SEQ ID NO: 1316680 - RNA, 24 nt, Human
ugaggcgagaaaaacaaugacuug

SEQ ID NO: 1316681 - RNA, 21 nt, Human
uggccaccccggagaugacac

SEQ ID NO: 1316682 - RNA, 25 nt, Human
aaacaucaccuccucaaugaaguuu

SEQ ID NO: 1316683 - RNA, 26 nt, Human
aaagaauggaagaauagacagaggga

SEQ ID NO: 1316684 - RNA, 18 nt, Human
aaauauuggaagccuaca

SEQ ID NO: 1316685 - RNA, 21 nt, Human
aacccaaaagcaaacguuugg

SEQ ID NO: 1316686 - RNA, 21 nt, Human
aagaaggccagugggcagugc

SEQ ID NO: 1316687 - RNA, 23 nt, Human
aagcagaugugggagcagcccac

SEQ ID NO: 1316688 - RNA, 26 nt, Human
aagcauugggauuacagguguaagcc

SEQ ID NO: 1316689 - RNA, 18 nt, Human
aauccagucaccauguug

SEQ ID NO: 1316690 - RNA, 23 nt, Human
accacuucccuauggagccccua

SEQ ID NO: 1316691 - RNA, 23 nt, Human
acuucccuauggagccccuacug

SEQ ID NO: 1316692 - RNA, 18 nt, Human
acuuggcucugucuauaa

SEQ ID NO: 1316693 - RNA, 26 nt, Human
agacaggaauaaguaaaucaacccaa

SEQ ID NO: 1316694 - RNA, 21 nt, Human
agccagcaccaacgcuggaca

SEQ ID NO: 1316695 - RNA, 26 nt, Human
aggaauagcaggaggaccuacuucag

SEQ ID NO: 1316696 - RNA, 18 nt, Human
aggcacugaaggaagacc

SEQ ID NO: 1316697 - RNA, 21 nt, Human
aggucaucgaaacgauacagc

SEQ ID NO: 1316698 - RNA, 21 nt, Human
agucucgcuauguugcccagg

SEQ ID NO: 1316699 - RNA, 18 nt, Human
auguugcccaggcugguc

SEQ ID NO: 1316700 - RNA, 24 nt, Human
caaagcauugggauuacaggugua

SEQ ID NO: 1316701 - RNA, 22 nt, Human
caagaacuucuuucuagguaga

SEQ ID NO: 1316702 - RNA, 24 nt, Human
cacagucucgcuauguugcccagg

SEQ ID NO: 1316703 - RNA, 23 nt, Human
cacuucccuauggagccccuacu

SEQ ID NO: 1316704 - RNA, 19 nt, Human
cagaggaaauaaaagaagg

SEQ ID NO: 1316705 - RNA, 25 nt, Human
cagccuucagccccagacugagccu

SEQ ID NO: 1316706 - RNA, 22 nt, Human
cagucucgcuauguugcccagg

SEQ ID NO: 1316707 - RNA, 22 nt, Human
caguggauggauggauguuugg

SEQ ID NO: 1316708 - RNA, 20 nt, Human
caugugaacaaacacgugcg

SEQ ID NO: 1316709 - RNA, 21 nt, Human
ccaaagcauugggauuacagg

SEQ ID NO: 1316710 - RNA, 24 nt, Human
ccaaagcauugggauuacaggugu

SEQ ID NO: 1316711 - RNA, 21 nt, Human
ccagcaccaacgcuggacaug

SEQ ID NO: 1316712 - RNA, 23 nt, Human
cccacauggagaggaacugaggu

SEQ ID NO: 1316713 - RNA, 33 nt, Human
cccagccuucagccccagacugagccucaaccg

SEQ ID NO: 1316714 - RNA, 27 nt, Human
ccccagccuucagccccagacugagcc

SEQ ID NO: 1316715 - RNA, 21 nt, Human
ccuaaugccugcccucuugga

SEQ ID NO: 1316716 - RNA, 21 nt, Human
ccucucacugacagauggggc

SEQ ID NO: 1316717 - RNA, 22 nt, Human
ccugcacacaguacuuucuaag

SEQ ID NO: 1316718 - RNA, 31 nt, Human
cgcuauguugcccaggcuggucaugaacucc

SEQ ID NO: 1316719 - RNA, 20 nt, Human
cuagagccacagaaucugug

SEQ ID NO: 1316720 - RNA, 19 nt, Human
cugacagauggggcacagg

SEQ ID NO: 1316721 - RNA, 28 nt, Human
cuuccagucuggucagggaaggaaaacc

SEQ ID NO: 1316722 - RNA, 23 nt, Human
cuuucuaaguucacucaaugcca

SEQ ID NO: 1316723 - RNA, 20 nt, Human
gaaauaaaagaaggccagug

SEQ ID NO: 1316724 - RNA, 18 nt, Human
gaagccuacauauuuuuc

SEQ ID NO: 1316725 - RNA, 22 nt, Human
gaggaauagcaggaggaccuac

SEQ ID NO: 1316726 - RNA, 18 nt, Human
gaggggaaguacgugaag

SEQ ID NO: 1316727 - RNA, 21 nt, Human
gauggauggauguuuggaugg

SEQ ID NO: 1316728 - RNA, 21 nt, Human
gauggauguuuggauggaugg

SEQ ID NO: 1316729 - RNA, 30 nt, Human
gaugugggagcagcccacauggagaggaaa

SEQ ID NO: 1316730 - RNA, 18 nt, Human
gauuacagguguaagcca

SEQ ID NO: 1316731 - RNA, 21 nt, Human
gauuacagguguaagccacug

SEQ ID NO: 1316732 - RNA, 24 nt, Human
gauuacagguguaagccacugugc

SEQ ID NO: 1316733 - RNA, 20 nt, Human
gccccagacugagccucaac

SEQ ID NO: 1316734 - RNA, 18 nt, Human
gccgaagcagauguggga

SEQ ID NO: 1316735 - RNA, 23 nt, Human
ggaaauaaaagaaggccaguggg

SEQ ID NO: 1316736 - RNA, 24 nt, Human
ggaaugagguucuucaggagagga

SEQ ID NO: 1316737 - RNA, 20 nt, Human
ggagaggaauagcaggagga

SEQ ID NO: 1316738 - RNA, 18 nt, Human
ggauggaagguuguaugg

SEQ ID NO: 1316739 - RNA, 18 nt, Human
ggauggguggaugaaugg

SEQ ID NO: 1316740 - RNA, 24 nt, Human
ggauuacagguguaagccacugug

SEQ ID NO: 1316741 - RNA, 25 nt, Human
gggaaugagguucuucaggagagga

SEQ ID NO: 1316742 - RNA, 21 nt, Human
gguaggcucugggguaggcac

SEQ ID NO: 1316743 - RNA, 18 nt, Human
gguauucccuaggggugu

SEQ ID NO: 1316744 - RNA, 19 nt, Human
gguggaugaauggaggaag

SEQ ID NO: 1316745 - RNA, 22 nt, Human
gugcgcccugagaggacuucag

SEQ ID NO: 1316746 - RNA, 20 nt, Human
guggauggauggauguuugg

SEQ ID NO: 1316747 - RNA, 21 nt, Human
gugggccagguaggcucuggg

SEQ ID NO: 1316748 - RNA, 23 nt, Human
uaaaagaaggccagugggcagug

SEQ ID NO: 1316749 - RNA, 22 nt, Human
uaaagcucucaccucggucucc

SEQ ID NO: 1316750 - RNA, 26 nt, Human
uaaagcucucaccucggucucccaaa

SEQ ID NO: 1316751 - RNA, 21 nt, Human
uaaguaaaucaacccaaaagc

SEQ ID NO: 1316752 - RNA, 24 nt, Human
uaaguaaaucaacccaaaagcaaa

SEQ ID NO: 1316753 - RNA, 27 nt, Human
uaaguaaaucaacccaaaagcaaacgu

SEQ ID NO: 1316754 - RNA, 24 nt, Human
uacagguguaagccacugugccca

SEQ ID NO: 1316755 - RNA, 27 nt, Human
uagaagaguauauaaaaguguuaaaaa

SEQ ID NO: 1316756 - RNA, 18 nt, Human
uaggacaaaacuuuugac

SEQ ID NO: 1316757 - RNA, 25 nt, Human
uaugauggacauuccucucacugac

SEQ ID NO: 1316758 - RNA, 19 nt, Human
uauguugcccaggcugguc

SEQ ID NO: 1316759 - RNA, 23 nt, Human
uauguugcccaggcuggucauga

SEQ ID NO: 1316760 - RNA, 24 nt, Human
uauguugcccaggcuggucaugaa

SEQ ID NO: 1316761 - RNA, 19 nt, Human
ucaacccaaaagcaaacgu

SEQ ID NO: 1316762 - RNA, 22 nt, Human
ucaaugaaguuuacccaaaacc

SEQ ID NO: 1316763 - RNA, 25 nt, Human
ucaggagaggaauagcaggaggacc

SEQ ID NO: 1316764 - RNA, 18 nt, Human
ucagggagacaggaauaa

SEQ ID NO: 1316765 - RNA, 23 nt, Human
ucccaaagcauugggauuacagg

SEQ ID NO: 1316766 - RNA, 21 nt, Human
ucucacucucuauacucgccc

SEQ ID NO: 1316767 - RNA, 19 nt, Human
ucucgcuauguugcccagg

SEQ ID NO: 1316768 - RNA, 23 nt, Human
ucucgcuauguugcccaggcugg

SEQ ID NO: 1316769 - RNA, 24 nt, Human
ucucgcuauguugcccaggcuggu

SEQ ID NO: 1316770 - RNA, 26 nt, Human
ucucgcuauguugcccaggcugguca

SEQ ID NO: 1316771 - RNA, 27 nt, Human
ucucgcuauguugcccaggcuggucau

SEQ ID NO: 1316772 - RNA, 18 nt, Human
ugaaguuuacccaaaacc

SEQ ID NO: 1316773 - RNA, 19 nt, Human
ugaauggaggaagggcaga

SEQ ID NO: 1316774 - RNA, 24 nt, Human
ugaggucagaugacagccagcacc

SEQ ID NO: 1316775 - RNA, 18 nt, Human
ugauccuuacaauaacau

SEQ ID NO: 1316776 - RNA, 21 nt, Human
ugccauggauuuguucagugg

SEQ ID NO: 1316777 - RNA, 22 nt, Human
ugccugcccucuuggagcuucc

SEQ ID NO: 1316778 - RNA, 26 nt, Human
uggaagaauagacagagggaugggug

SEQ ID NO: 1316779 - RNA, 19 nt, Human
uggagaggaacugagguca

SEQ ID NO: 1316780 - RNA, 21 nt, Human
ugggauuacagguguaagcca

SEQ ID NO: 1316781 - RNA, 22 nt, Human
ugggauuacagguguaagccac

SEQ ID NO: 1316782 - RNA, 22 nt, Human
ugggauuacagguguaagccac

SEQ ID NO: 1316783 - RNA, 22 nt, Human
ugggauuacagguguaagccac

SEQ ID NO: 1316784 - RNA, 24 nt, Human
ugggauuacagguguaagccacug

SEQ ID NO: 1316785 - RNA, 25 nt, Human
ugucaggcugugucucuccagggau

SEQ ID NO: 1316786 - RNA, 19 nt, Human
uguuacauagccauagaaa

SEQ ID NO: 1316787 - RNA, 23 nt, Human
uucagccccagacugagccucaa

SEQ ID NO: 1316788 - RNA, 24 nt, Human
uucaggagaggaauagcaggagga

SEQ ID NO: 1316789 - RNA, 18 nt, Human
uuccagucuggucaggga

SEQ ID NO: 1316790 - RNA, 23 nt, Human
uucccuauggagccccuacugug

SEQ ID NO: 1316791 - RNA, 21 nt, Human
uugggauuacagguguaagcc

SEQ ID NO: 1316792 - RNA, 23 nt, Human
uuuacaguaugauggacauuccu

SEQ ID NO: 1316793 - RNA, 19 nt, Human
uuugggguaguuuguuaca

SEQ ID NO: 1316794 - RNA, 20 nt, Human
uuuguuacauagccauagaa

SEQ ID NO: 1316795 - RNA, 19 nt, Human
uuuguucaguggauggaug

SEQ ID NO: 1316796 - RNA, 26 nt, Human
aagagccccggcggcggcggcggcgg

SEQ ID NO: 1316797 - RNA, 21 nt, Human
agucccuggccgugcggcucc

SEQ ID NO: 1316798 - RNA, 22 nt, Human
cgcagcgccggguccuucgccc

SEQ ID NO: 1316799 - RNA, 21 nt, Human
cgcagcuccgcgggggaccuc

SEQ ID NO: 1316800 - RNA, 20 nt, Human
cgccggguccuucgcccggc

SEQ ID NO: 1316801 - RNA, 22 nt, Human
cggcuccuggcacgcgacuccc

SEQ ID NO: 1316802 - RNA, 20 nt, Human
gaaagcugcaagcccggcgc

SEQ ID NO: 1316803 - RNA, 18 nt, Human
gccaagagccccggcggc

SEQ ID NO: 1316804 - RNA, 20 nt, Human
gccccggcggcggcggcggc

SEQ ID NO: 1316805 - RNA, 19 nt, Human
gccugugccgggaaucucc

SEQ ID NO: 1316806 - RNA, 24 nt, Human
gcgcagcuccgcggggggggaacc

SEQ ID NO: 1316807 - RNA, 25 nt, Human
gcgcagcuccgcggggggggaacgc

SEQ ID NO: 1316808 - RNA, 19 nt, Human
gcggcggcggcggcggccc

SEQ ID NO: 1316809 - RNA, 23 nt, Human
gcggcggcggcggcggcccgccc

SEQ ID NO: 1316810 - RNA, 22 nt, Human
gcuccuggcacgcgacucccag

SEQ ID NO: 1316811 - RNA, 23 nt, Human
guggugcgugucugucugucagu

SEQ ID NO: 1316812 - RNA, 24 nt, Human
guuugccaagagccccggcggcgg

SEQ ID NO: 1316813 - RNA, 22 nt, Human
ucagcguugcugugacuuuggc

SEQ ID NO: 1316814 - RNA, 21 nt, Human
ucccuggccgugcggcuccug

SEQ ID NO: 1316815 - RNA, 19 nt, Human
uccgcgcagcugcgagcgc

SEQ ID NO: 1316816 - RNA, 18 nt, Human
uccgcgggggaccucugc

SEQ ID NO: 1316817 - RNA, 21 nt, Human
ugucugucagucagucccugg

SEQ ID NO: 1316818 - RNA, 23 nt, Human
uugcugugacuuuggccugugcc

SEQ ID NO: 1316819 - RNA, 18 nt, Human
aaacuuccagcuucccca

SEQ ID NO: 1316820 - RNA, 22 nt, Human
aaaggccuuugucccuagcuug

SEQ ID NO: 1316821 - RNA, 22 nt, Human
aagacccagagggcucacccag

SEQ ID NO: 1316822 - RNA, 20 nt, Human
agacccagagggcucaccca

SEQ ID NO: 1316823 - RNA, 20 nt, Human
caaaacucugccgucuuccc

SEQ ID NO: 1316824 - RNA, 21 nt, Human
caacauguuucaauccugccu

SEQ ID NO: 1316825 - RNA, 20 nt, Human
caccaucaggcuggcagaau

SEQ ID NO: 1316826 - RNA, 24 nt, Human
cagagucgaggcucaaggacagcu

SEQ ID NO: 1316827 - RNA, 21 nt, Human
cagcagaaaacauagacccuu

SEQ ID NO: 1316828 - RNA, 23 nt, Human
cagcagcaggugccagcugauag

SEQ ID NO: 1316829 - RNA, 20 nt, Human
ccagagucgaggcucaagga

SEQ ID NO: 1316830 - RNA, 22 nt, Human
cccagagucgaggcucaaggac

SEQ ID NO: 1316831 - RNA, 20 nt, Human
ccccagaaauuaugggcaga

SEQ ID NO: 1316832 - RNA, 24 nt, Human
ccuccucuuccugcccagcuccag

SEQ ID NO: 1316833 - RNA, 22 nt, Human
ccugaccuuccggagccggugu

SEQ ID NO: 1316834 - RNA, 19 nt, Human
cucacccagagucgaggcu

SEQ ID NO: 1316835 - RNA, 19 nt, Human
cucagcggcuccaucccuc

SEQ ID NO: 1316836 - RNA, 18 nt, Human
cuccugcuggucacuggg

SEQ ID NO: 1316837 - RNA, 21 nt, Human
cucuacuuccugaguguucag

SEQ ID NO: 1316838 - RNA, 22 nt, Human
cucuacuuccugaguguucagg

SEQ ID NO: 1316839 - RNA, 22 nt, Human
cugcuagcaggagacacacgaa

SEQ ID NO: 1316840 - RNA, 21 nt, Human
cuuccugcccagcuccaggga

SEQ ID NO: 1316841 - RNA, 24 nt, Human
ggguucuagcagggcucucaggcc

SEQ ID NO: 1316842 - RNA, 18 nt, Human
uagcagggcucucaggcc

SEQ ID NO: 1316843 - RNA, 21 nt, Human
ucaaaacucugccgucuuccc

SEQ ID NO: 1316844 - RNA, 18 nt, Human
ucagcggcuccaucccuc

SEQ ID NO: 1316845 - RNA, 19 nt, Human
ucagcggcuccaucccucc

SEQ ID NO: 1316846 - RNA, 20 nt, Human
uccagcuuccccagaaauua

SEQ ID NO: 1316847 - RNA, 21 nt, Human
ucccugaccuuccggagccgg

SEQ ID NO: 1316848 - RNA, 23 nt, Human
ucucagcggcuccaucccuccuc

SEQ ID NO: 1316849 - RNA, 22 nt, Human
ugauagaugacaacuacaacau

SEQ ID NO: 1316850 - RNA, 22 nt, Human
ugccagcugauagaugacaacu

SEQ ID NO: 1316851 - RNA, 21 nt, Human
uuccggagccgguguuugugg

SEQ ID NO: 1316852 - RNA, 19 nt, Human
uuguguccagaguguauac

SEQ ID NO: 1316853 - RNA, 21 nt, Human
caaaaacgagacgccaaaucc

SEQ ID NO: 1316854 - RNA, 23 nt, Human
caaaaacgagacgccaaauccca

SEQ ID NO: 1316855 - RNA, 23 nt, Human
ccaccagcacaguucucaggagu

SEQ ID NO: 1316856 - RNA, 18 nt, Human
cccagugcuguucuaagg

SEQ ID NO: 1316857 - RNA, 20 nt, Human
ccugcuggucucccagugcu

SEQ ID NO: 1316858 - RNA, 21 nt, Human
ccuucgcucucaggucagagg

SEQ ID NO: 1316859 - RNA, 24 nt, Human
cucccagugcuguucuaagggucc

SEQ ID NO: 1316860 - RNA, 26 nt, Human
cucccagugcuguucuaaggguccac

SEQ ID NO: 1316861 - RNA, 23 nt, Human
guucucaggaguccugcuggucu

SEQ ID NO: 1316862 - RNA, 21 nt, Human
uagccaaaaacgagacgccaa

SEQ ID NO: 1316863 - RNA, 22 nt, Human
uagccaaaaacgagacgccaaa

SEQ ID NO: 1316864 - RNA, 22 nt, Human
uagcguuuuacaggagagugaa

SEQ ID NO: 1316865 - RNA, 24 nt, Human
uauggaaaaagccaaugacaauca

SEQ ID NO: 1316866 - RNA, 19 nt, Human
uggucucccagugcuguuc

SEQ ID NO: 1316867 - RNA, 22 nt, Human
aacuguaaacauuuauugaaca

SEQ ID NO: 1316868 - RNA, 23 nt, Human
accagcuccccgcucacauacac

SEQ ID NO: 1316869 - RNA, 21 nt, Human
agaguuggcgugggugagggg

SEQ ID NO: 1316870 - RNA, 22 nt, Human
agccccagcagcggcaacagcc

SEQ ID NO: 1316871 - RNA, 20 nt, Human
auacaccugcaccuugauca

SEQ ID NO: 1316872 - RNA, 24 nt, Human
cagccccagcucugcgccgcgccu

SEQ ID NO: 1316873 - RNA, 23 nt, Human
cagccgcgcgaggacgcuggggc

SEQ ID NO: 1316874 - RNA, 21 nt, Human
cagcggcaacagccgcgcgag

SEQ ID NO: 1316875 - RNA, 20 nt, Human
ccccagcucugcgccgcgcc

SEQ ID NO: 1316876 - RNA, 19 nt, Human
ccccgcucacauacaccug

SEQ ID NO: 1316877 - RNA, 19 nt, Human
cccgccuggucccgcucgc

SEQ ID NO: 1316878 - RNA, 22 nt, Human
cccggccccgcgcagccccagc

SEQ ID NO: 1316879 - RNA, 19 nt, Human
ccugcgggcuggggggcuc

SEQ ID NO: 1316880 - RNA, 22 nt, Human
cgcccggccccgcgcagcccca

SEQ ID NO: 1316881 - RNA, 24 nt, Human
cucugcgccgcgccucgcagcucc

SEQ ID NO: 1316882 - RNA, 25 nt, Human
gaaggaagaagaguuggcgugggug

SEQ ID NO: 1316883 - RNA, 19 nt, Human
gagcagcagccccagcagc

SEQ ID NO: 1316884 - RNA, 21 nt, Human
gagcagcagccccagcagcgg

SEQ ID NO: 1316885 - RNA, 19 nt, Human
gaggcccgggccaggggca

SEQ ID NO: 1316886 - RNA, 23 nt, Human
gcccggccccgcgcagccccagc

SEQ ID NO: 1316887 - RNA, 18 nt, Human
gcuggggggcuccggcgg

SEQ ID NO: 1316888 - RNA, 19 nt, Human
ggcuggggggcuccggcgg

SEQ ID NO: 1316889 - RNA, 21 nt, Human
ggggggcuccggcggcgacuu

SEQ ID NO: 1316890 - RNA, 23 nt, Human
gggugagggggagccuuaccggg

SEQ ID NO: 1316891 - RNA, 21 nt, Human
ggucucuacaccuaggucagg

SEQ ID NO: 1316892 - RNA, 21 nt, Human
ucaggaucuccugcgggcugg

SEQ ID NO: 1316893 - RNA, 18 nt, Human
uccauggcucccgccugg

SEQ ID NO: 1316894 - RNA, 18 nt, Human
ucccgcucgcccggcccc

SEQ ID NO: 1316895 - RNA, 21 nt, Human
ucgcccggccccgcgcagccc

SEQ ID NO: 1316896 - RNA, 20 nt, Human
ucuccugcgggcuggggggc

SEQ ID NO: 1316897 - RNA, 18 nt, Human
ugacuugcccaaggacac

SEQ ID NO: 1316898 - RNA, 22 nt, Human
ugacuugcccaaggacacccag

SEQ ID NO: 1316899 - RNA, 21 nt, Human
ugagggggagccuuaccggga

SEQ ID NO: 1316900 - RNA, 23 nt, Human
ugcgccgcgccucgcagcuccgg

SEQ ID NO: 1316901 - RNA, 22 nt, Human
uguaaacauuuauugaacaccu

SEQ ID NO: 1316902 - RNA, 20 nt, Human
uguacuguguuuuuucacuu

SEQ ID NO: 1316903 - RNA, 25 nt, Human
agggggcagagaggagaaagaggcu

SEQ ID NO: 1316904 - RNA, 24 nt, Human
auugaaacacuuggccaguggggg

SEQ ID NO: 1316905 - RNA, 19 nt, Human
ccagugggggaugggggaa

SEQ ID NO: 1316906 - RNA, 23 nt, Human
cccagucagacagguccccuaca

SEQ ID NO: 1316907 - RNA, 24 nt, Human
ccucccucucggaacucccuuccc

SEQ ID NO: 1316908 - RNA, 22 nt, Human
cuucugcuggguccuaguagag

SEQ ID NO: 1316909 - RNA, 22 nt, Human
gaaacacuuggccaguggggga

SEQ ID NO: 1316910 - RNA, 23 nt, Human
gggcagagaggagaaagaggcuu

SEQ ID NO: 1316911 - RNA, 18 nt, Human
gggcagggggcagagagg

SEQ ID NO: 1316912 - RNA, 18 nt, Human
ggggaugggggaagggau

SEQ ID NO: 1316913 - RNA, 19 nt, Human
uagaggcagacagcagggg

SEQ ID NO: 1316914 - RNA, 21 nt, Human
ucccagucagacagguccccu

SEQ ID NO: 1316915 - RNA, 19 nt, Human
ucccucucggaacucccuu

SEQ ID NO: 1316916 - RNA, 19 nt, Human
ugccagaagggaguggcuc

SEQ ID NO: 1316917 - RNA, 19 nt, Human
ugccagaagggaguggcuc

SEQ ID NO: 1316918 - RNA, 24 nt, Human
ugccagaagggaguggcucacacu

SEQ ID NO: 1316919 - RNA, 18 nt, Human
ugggggaugggggaaggg

SEQ ID NO: 1316920 - RNA, 19 nt, Human
uguggggggcagggggcag

SEQ ID NO: 1316921 - RNA, 22 nt, Human
aaagcauuaaauccuuuacuga

SEQ ID NO: 1316922 - RNA, 24 nt, Human
aagagaccagaauggcgaucuugc

SEQ ID NO: 1316923 - RNA, 21 nt, Human
auuaccaucagauuauuuacu

SEQ ID NO: 1316924 - RNA, 22 nt, Human
auuauuuugccccuggcuuuca

SEQ ID NO: 1316925 - RNA, 20 nt, Human
cacaagagaccagaauggcg

SEQ ID NO: 1316926 - RNA, 23 nt, Human
cacucugcauuuaaauccaucuc

SEQ ID NO: 1316927 - RNA, 21 nt, Human
cagaagcugagaucagcauug

SEQ ID NO: 1316928 - RNA, 23 nt, Human
ccagaauggcgaucuugccuucc

SEQ ID NO: 1316929 - RNA, 20 nt, Human
ccuaaaaacccaggcccaag

SEQ ID NO: 1316930 - RNA, 20 nt, Human
cugguaucuucauguuagaa

SEQ ID NO: 1316931 - RNA, 22 nt, Human
uaaguccucccucaggaaugaa

SEQ ID NO: 1316932 - RNA, 20 nt, Human
uauuuugccccuggcuuuca

SEQ ID NO: 1316933 - RNA, 22 nt, Human
ugccuaaaaacccaggcccaag

SEQ ID NO: 1316934 - RNA, 25 nt, Human
uucauacacucugcauuuaaaucca

SEQ ID NO: 1316935 - RNA, 24 nt, Human
uucauuagugccuaaaaacccagg

SEQ ID NO: 1316936 - RNA, 25 nt, Human
aagucucuuaacagguauucaguuc

SEQ ID NO: 1316937 - RNA, 19 nt, Human
agaagagcaguuuucugag

SEQ ID NO: 1316938 - RNA, 21 nt, Human
agacacugaacgggguugcug

SEQ ID NO: 1316939 - RNA, 22 nt, Human
agacaggagggagaaaaguggg

SEQ ID NO: 1316940 - RNA, 19 nt, Human
agcagagggcuccccacaa

SEQ ID NO: 1316941 - RNA, 21 nt, Human
agccacuuucucuuaaccagu

SEQ ID NO: 1316942 - RNA, 19 nt, Human
aggagggagaaaagugggu

SEQ ID NO: 1316943 - RNA, 22 nt, Human
aggggucccgagggucccaucu

SEQ ID NO: 1316944 - RNA, 22 nt, Human
aggucaucuuucucagcagccu

SEQ ID NO: 1316945 - RNA, 18 nt, Human
aucugaaguccaugcauc

SEQ ID NO: 1316946 - RNA, 27 nt, Human
cagagggcuccccacaaaagcagacac

SEQ ID NO: 1316947 - RNA, 18 nt, Human
cagcagccugcuuggcug

SEQ ID NO: 1316948 - RNA, 20 nt, Human
cccaagucucuuaacaggua

SEQ ID NO: 1316949 - RNA, 23 nt, Human
cccaucucgucagcacccagggg

SEQ ID NO: 1316950 - RNA, 22 nt, Human
ccccacaaaagcagacacugaa

SEQ ID NO: 1316951 - RNA, 20 nt, Human
cggcuaguggucagcacugc

SEQ ID NO: 1316952 - RNA, 21 nt, Human
cugcgaguccuccaggggucc

SEQ ID NO: 1316953 - RNA, 18 nt, Human
gaagagcaguuuucugag

SEQ ID NO: 1316954 - RNA, 24 nt, Human
ggaaagaagaaggguggcccagag

SEQ ID NO: 1316955 - RNA, 21 nt, Human
ggcaaguuacaguuaugucau

SEQ ID NO: 1316956 - RNA, 23 nt, Human
gucucuuaacagguauucaguuc

SEQ ID NO: 1316957 - RNA, 18 nt, Human
guggcccagagacaggag

SEQ ID NO: 1316958 - RNA, 24 nt, Human
ucagcacugcgaguccuccagggg

SEQ ID NO: 1316959 - RNA, 19 nt, Human
ucccgagggucccaucucg

SEQ ID NO: 1316960 - RNA, 19 nt, Human
ugccaagaagagcaguuuu

SEQ ID NO: 1316961 - RNA, 20 nt, Human
ugucaugaacaaacuauagc

SEQ ID NO: 1316962 - RNA, 22 nt, Human
uugcuguaucagccacuuucuc

SEQ ID NO: 1316963 - RNA, 18 nt, Human
uuugaccccccaagucuc

SEQ ID NO: 1316964 - RNA, 24 nt, Human
aagccgcaccacacuuggacuucu

SEQ ID NO: 1316965 - RNA, 21 nt, Human
aagaaaucccccaauccacag

SEQ ID NO: 1316966 - RNA, 20 nt, Human
acaggucaguggaaacaaga

SEQ ID NO: 1316967 - RNA, 25 nt, Human
acauucauuacauucauaagguuuu

SEQ ID NO: 1316968 - RNA, 19 nt, Human
agcagcagaaaaauuuucc

SEQ ID NO: 1316969 - RNA, 23 nt, Human
aggauuucuccauucaugacauc

SEQ ID NO: 1316970 - RNA, 26 nt, Human
aggcgaggccggacagugccggagga

SEQ ID NO: 1316971 - RNA, 19 nt, Human
aucuguaaggucucucccc

SEQ ID NO: 1316972 - RNA, 24 nt, Human
augaagggcuaauuuuucacugaa

SEQ ID NO: 1316973 - RNA, 18 nt, Human
auucauaggguuuucccu

SEQ ID NO: 1316974 - RNA, 20 nt, Human
cauagggcuucuccccugug

SEQ ID NO: 1316975 - RNA, 24 nt, Human
caucacagaaacauuuuccaccuu

SEQ ID NO: 1316976 - RNA, 21 nt, Human
caugcauagcauucauagggc

SEQ ID NO: 1316977 - RNA, 21 nt, Human
cauucauuacauccaaaaggu

SEQ ID NO: 1316978 - RNA, 20 nt, Human
cauucauuacauccauaggg

SEQ ID NO: 1316979 - RNA, 23 nt, Human
cauucauuacauccauaggguug

SEQ ID NO: 1316980 - RNA, 21 nt, Human
cauucauuacauucauaaggu

SEQ ID NO: 1316981 - RNA, 19 nt, Human
ccacagccacgaugacuuc

SEQ ID NO: 1316982 - RNA, 23 nt, Human
ccacauucauuguauucaaaagg

SEQ ID NO: 1316983 - RNA, 22 nt, Human
cccuccacgugcgcggccucac

SEQ ID NO: 1316984 - RNA, 21 nt, Human
ccgucuggaaaugcccacugc

SEQ ID NO: 1316985 - RNA, 19 nt, Human
ccguuuccgcacgguccug

SEQ ID NO: 1316986 - RNA, 19 nt, Human
ccucaaagauacuuucucc

SEQ ID NO: 1316987 - RNA, 22 nt, Human
cuccuacaucuuccugucacuu

SEQ ID NO: 1316988 - RNA, 24 nt, Human
cugagcaggguccagaugaugcca

SEQ ID NO: 1316989 - RNA, 18 nt, Human
cugucacuuuagccacaa

SEQ ID NO: 1316990 - RNA, 19 nt, Human
gacccggggugccucccuc

SEQ ID NO: 1316991 - RNA, 21 nt, Human
gaggacccggggugccucccu

SEQ ID NO: 1316992 - RNA, 22 nt, Human
gcagcagaaaaauuuuccacau

SEQ ID NO: 1316993 - RNA, 24 nt, Human
gcucuacaaaguucugacuucacc

SEQ ID NO: 1316994 - RNA, 23 nt, Human
ggaaggagacagcgagauucuga

SEQ ID NO: 1316995 - RNA, 19 nt, Human
ggaaugcaauacccuacug

SEQ ID NO: 1316996 - RNA, 24 nt, Human
guauucaaaagguugcucccaauu

SEQ ID NO: 1316997 - RNA, 18 nt, Human
gucacaucccuaaaugac

SEQ ID NO: 1316998 - RNA, 21 nt, Human
gucucuccccugugugaauuc

SEQ ID NO: 1316999 - RNA, 21 nt, Human
uaauucuuuaaauuccaucug

SEQ ID NO: 1317000 - RNA, 19 nt, Human
uagcagcagaaaaauuuuc

SEQ ID NO: 1317001 - RNA, 22 nt, Human
uagucacaucccuaaaugacac

SEQ ID NO: 1317002 - RNA, 19 nt, Human
uauuugcauguuuucuguc

SEQ ID NO: 1317003 - RNA, 21 nt, Human
ucacccagaugacucuggcuu

SEQ ID NO: 1317004 - RNA, 22 nt, Human
ucacccagaugacucuggcuuc

SEQ ID NO: 1317005 - RNA, 19 nt, Human
uccacauucauuacaucca

SEQ ID NO: 1317006 - RNA, 24 nt, Human
ucccacauucauuacauccaaaag

SEQ ID NO: 1317007 - RNA, 23 nt, Human
ucccuaaaugacacugaucccug

SEQ ID NO: 1317008 - RNA, 22 nt, Human
uccucaaagauacuuucuccac

SEQ ID NO: 1317009 - RNA, 26 nt, Human
ucucugaugucuugugugggcugacu

SEQ ID NO: 1317010 - RNA, 24 nt, Human
ucuggaaaugcccacugcuacuag

SEQ ID NO: 1317011 - RNA, 25 nt, Human
ugaagcccauagucacaucccuaaa

SEQ ID NO: 1317012 - RNA, 20 nt, Human
ugacucuggcuucgaaauuu

SEQ ID NO: 1317013 - RNA, 18 nt, Human
ugaguaauaaaaaaugac

SEQ ID NO: 1317014 - RNA, 21 nt, Human
ugcaauacccuacugagacaa

SEQ ID NO: 1317015 - RNA, 22 nt, Human
ugcaauacccuacugagacaag

SEQ ID NO: 1317016 - RNA, 19 nt, Human
ugccucccuccacgugcgc

SEQ ID NO: 1317017 - RNA, 23 nt, Human
ugccucccuccacgugcgcggcc

SEQ ID NO: 1317018 - RNA, 19 nt, Human
ugccugucuccaauuugag

SEQ ID NO: 1317019 - RNA, 20 nt, Human
uggauguguuugcugaugag

SEQ ID NO: 1317020 - RNA, 19 nt, Human
uguaaggucucuccccugu

SEQ ID NO: 1317021 - RNA, 19 nt, Human
ugucuccaauuugaggauc

SEQ ID NO: 1317022 - RNA, 24 nt, Human
ugugugucuucucagauguucugu

SEQ ID NO: 1317023 - RNA, 21 nt, Human
uguguguucuuagauguuuag

SEQ ID NO: 1317024 - RNA, 20 nt, Human
uucacugaaggauuucucca

SEQ ID NO: 1317025 - RNA, 21 nt, Human
uucucagggaaagcuuuccca

SEQ ID NO: 1317026 - RNA, 19 nt, Human
uuuuccacaaacauuacau

SEQ ID NO: 1317027 - RNA, 19 nt, Human
aaaucugcccacaucuagc

SEQ ID NO: 1317028 - RNA, 20 nt, Human
acaucuagcucugauugcuu

SEQ ID NO: 1317029 - RNA, 19 nt, Human
auccagaauuuugagaaaa

SEQ ID NO: 1317030 - RNA, 19 nt, Human
caacacugcuuacaucuug

SEQ ID NO: 1317031 - RNA, 20 nt, Human
cacacagccuucaugaccgc

SEQ ID NO: 1317032 - RNA, 23 nt, Human
cacacagccuucaugaccgccag

SEQ ID NO: 1317033 - RNA, 22 nt, Human
cacugcuuauugauugccccuc

SEQ ID NO: 1317034 - RNA, 19 nt, Human
cagccuucaugaccgccag

SEQ ID NO: 1317035 - RNA, 24 nt, Human
ccaucuacaaguuaaggagagagg

SEQ ID NO: 1317036 - RNA, 18 nt, Human
ccuauuucuuugcauguc

SEQ ID NO: 1317037 - RNA, 20 nt, Human
ccuucaugaccgccaggguu

SEQ ID NO: 1317038 - RNA, 22 nt, Human
ccuugcacugcacacagccuuc

SEQ ID NO: 1317039 - RNA, 19 nt, Human
cuagguacagccuugcacu

SEQ ID NO: 1317040 - RNA, 22 nt, Human
cugcccuuuguggauuauuccg

SEQ ID NO: 1317041 - RNA, 18 nt, Human
cuuggauuuuucuucucc

SEQ ID NO: 1317042 - RNA, 18 nt, Human
ggagagagggcucaaaag

SEQ ID NO: 1317043 - RNA, 23 nt, Human
guggagggagguggccaucuaca

SEQ ID NO: 1317044 - RNA, 23 nt, Human
gugguuuagugguguuuucaaau

SEQ ID NO: 1317045 - RNA, 19 nt, Human
uacagggacuuucaggcug

SEQ ID NO: 1317046 - RNA, 23 nt, Human
uagacuucuagcauccagaauuu

SEQ ID NO: 1317047 - RNA, 23 nt, Human
uagcauccagaauuuugagaaaa

SEQ ID NO: 1317048 - RNA, 23 nt, Human
uagcuuggauuuuucuucuccca

SEQ ID NO: 1317049 - RNA, 23 nt, Human
uauugauugccccuccuccaccc

SEQ ID NO: 1317050 - RNA, 23 nt, Human
ucaaaagaaaccaacacugcuua

SEQ ID NO: 1317051 - RNA, 21 nt, Human
ucaaaucugcccacaucuagc

SEQ ID NO: 1317052 - RNA, 19 nt, Human
ucacuggucauagauugug

SEQ ID NO: 1317053 - RNA, 24 nt, Human
ucuggagaaggcacagucuugggu

SEQ ID NO: 1317054 - RNA, 19 nt, Human
ugacuuaaacucuauuucc

SEQ ID NO: 1317055 - RNA, 20 nt, Human
ugcacacagccuucaugacc

SEQ ID NO: 1317056 - RNA, 18 nt, Human
ugcaugucuuguaauugu

SEQ ID NO: 1317057 - RNA, 18 nt, Human
ugccccuccuccacccca

SEQ ID NO: 1317058 - RNA, 20 nt, Human
ugccccuccuccaccccagg

SEQ ID NO: 1317059 - RNA, 22 nt, Human
uguagagauuucuccgggucag

SEQ ID NO: 1317060 - RNA, 28 nt, Human
ugugcagccucguguuuauaucuuugag

SEQ ID NO: 1317061 - RNA, 20 nt, Human
uguguuuguggcuuggaggc

SEQ ID NO: 1317062 - RNA, 20 nt, Human
uuagugguguuuucaaaucu

SEQ ID NO: 1317063 - RNA, 18 nt, Human
uugauugccccuccucca

SEQ ID NO: 1317064 - RNA, 21 nt, Human
uugccccuccuccaccccagg

SEQ ID NO: 1317065 - RNA, 26 nt, Human
aggcgaggccggacagugccggagga

SEQ ID NO: 1317066 - RNA, 22 nt, Human
cccuccacgugcgcggccucac

SEQ ID NO: 1317067 - RNA, 21 nt, Human
ccgucuggaaaugcccacugc

SEQ ID NO: 1317068 - RNA, 21 nt, Human
cucagggaagagaaaauccaa

SEQ ID NO: 1317069 - RNA, 22 nt, Human
cuccuacaucuuccugucacuu

SEQ ID NO: 1317070 - RNA, 18 nt, Human
cugucacuuuagccacaa

SEQ ID NO: 1317071 - RNA, 19 nt, Human
gacccggggugccucccuc

SEQ ID NO: 1317072 - RNA, 20 nt, Human
gaggacccggggugccuccc

SEQ ID NO: 1317073 - RNA, 20 nt, Human
gugccucccuccacgugcgc

SEQ ID NO: 1317074 - RNA, 22 nt, Human
uccaagacugaaagcuccuaca

SEQ ID NO: 1317075 - RNA, 24 nt, Human
ucuggaaaugcccacugcuacuag

SEQ ID NO: 1317076 - RNA, 23 nt, Human
ugccucccuccacgugcgcggcc

SEQ ID NO: 1317077 - RNA, 18 nt, Human
aggcggcgguuggguccg

SEQ ID NO: 1317078 - RNA, 22 nt, Human
aggcggcgguuggguccguggc

SEQ ID NO: 1317079 - RNA, 24 nt, Human
caguugugaacagguuuggugccg

SEQ ID NO: 1317080 - RNA, 18 nt, Human
ccaggcggcggucccuuu

SEQ ID NO: 1317081 - RNA, 23 nt, Human
ggcgguuggguccguggcucugg

SEQ ID NO: 1317082 - RNA, 20 nt, Human
uauguugcccagauuggucu

SEQ ID NO: 1317083 - RNA, 24 nt, Human
uauguugcccagauuggucuugaa

SEQ ID NO: 1317084 - RNA, 22 nt, Human
ucgcaguugugaacagguuugg

SEQ ID NO: 1317085 - RNA, 24 nt, Human
ugcccagauuggucuugaacuccu

SEQ ID NO: 1317086 - RNA, 18 nt, Human
uuauuuauuuauuuauuu

SEQ ID NO: 1317087 - RNA, 18 nt, Human
uuauuuauuuauuuauuu

SEQ ID NO: 1317088 - RNA, 19 nt, Human
uuauuuauuuauuuauuua

SEQ ID NO: 1317089 - RNA, 19 nt, Human
uuauuuauuuauuuauuua

SEQ ID NO: 1317090 - RNA, 19 nt, Human
uuauuuauuuauuuauuua

SEQ ID NO: 1317091 - RNA, 19 nt, Human
uuauuuauuuauuuauuua

SEQ ID NO: 1317092 - RNA, 25 nt, Human
uuauuuauuuauuuauuuauuuauu

SEQ ID NO: 1317093 - RNA, 25 nt, Human
uuauuuauuuauuuauuuauuuauu

SEQ ID NO: 1317094 - RNA, 25 nt, Human
uuauuuauuuauuuauuuauuuauu

SEQ ID NO: 1317095 - RNA, 25 nt, Human
uuauuuauuuauuuauuuauuuauu

SEQ ID NO: 1317096 - RNA, 30 nt, Human
uuauuuauuuauuuauuuauuuauuuuuug

SEQ ID NO: 1317097 - RNA, 18 nt, Human
uugcccagauuggucuug

SEQ ID NO: 1317098 - RNA, 22 nt, Human
uuuauuuauuuauuuauuuauu

SEQ ID NO: 1317099 - RNA, 22 nt, Human
uuuauuuauuuauuuauuuauu

SEQ ID NO: 1317100 - RNA, 22 nt, Human
uuuauuuauuuauuuauuuauu

SEQ ID NO: 1317101 - RNA, 23 nt, Human
uuuuauuuauuuauuuauuuauu

SEQ ID NO: 1317102 - RNA, 21 nt, Human
cggaaucuccugccauuaugg

SEQ ID NO: 1317103 - RNA, 22 nt, Human
ucuuggaacgcaaacaaaccuu

SEQ ID NO: 1317104 - RNA, 21 nt, Human
uggaacgcaaacaaaccuucc

SEQ ID NO: 1317105 - RNA, 18 nt, Human
agacccaggacgcugcag

SEQ ID NO: 1317106 - RNA, 22 nt, Human
auucaaaauccaugucaacccc

SEQ ID NO: 1317107 - RNA, 21 nt, Human
caaugggcacccucacuguuc

SEQ ID NO: 1317108 - RNA, 23 nt, Human
cagaaaucucauguaacuuuaau

SEQ ID NO: 1317109 - RNA, 20 nt, Human
cagguuaaaggccaaggcac

SEQ ID NO: 1317110 - RNA, 21 nt, Human
ccaugucaaccccaaucaugu

SEQ ID NO: 1317111 - RNA, 19 nt, Human
ccccgacggcugcgggccc

SEQ ID NO: 1317112 - RNA, 21 nt, Human
ccucacgacuggcugggccaa

SEQ ID NO: 1317113 - RNA, 19 nt, Human
cgccccggggagcccuucc

SEQ ID NO: 1317114 - RNA, 23 nt, Human
cuuccgggccccgacggcugcgg

SEQ ID NO: 1317115 - RNA, 21 nt, Human
ggagcccuuccgggccccgac

SEQ ID NO: 1317116 - RNA, 21 nt, Human
ggcagcauccugggccacagu

SEQ ID NO: 1317117 - RNA, 20 nt, Human
uagcuggauuccaguccaca

SEQ ID NO: 1317118 - RNA, 24 nt, Human
aaccacaacaccaaggugaagccc

SEQ ID NO: 1317119 - RNA, 29 nt, Human
aaggacgccaccuuuaaucugcugcuccc

SEQ ID NO: 1317120 - RNA, 23 nt, Human
aggagcauuuccaguggucuuca

SEQ ID NO: 1317121 - RNA, 20 nt, Human
aggagcgagacuugggagug

SEQ ID NO: 1317122 - RNA, 22 nt, Human
cacaacaccaaggugaagcccu

SEQ ID NO: 1317123 - RNA, 22 nt, Human
cagcccacagcuucuccgcgaa

SEQ ID NO: 1317124 - RNA, 24 nt, Human
cagcccacagcuucuccgcgaaau

SEQ ID NO: 1317125 - RNA, 21 nt, Human
cccauucuccagcccacagcu

SEQ ID NO: 1317126 - RNA, 19 nt, Human
cucaagacugaaaaugagg

SEQ ID NO: 1317127 - RNA, 20 nt, Human
gaagcauuucucuuuuuccu

SEQ ID NO: 1317128 - RNA, 18 nt, Human
gauaugcagaauuguaac

SEQ ID NO: 1317129 - RNA, 26 nt, Human
uaccuucuccaccuucccauucucca

SEQ ID NO: 1317130 - RNA, 23 nt, Human
uaggugggguugacucaucuccc

SEQ ID NO: 1317131 - RNA, 23 nt, Human
uccagcccacagcuucuccgcga

SEQ ID NO: 1317132 - RNA, 22 nt, Human
ugaaaaugaggagcgagacuug

SEQ ID NO: 1317133 - RNA, 23 nt, Human
ugagggaaggguuccuaaaaagg

SEQ ID NO: 1317134 - RNA, 20 nt, Human
ugcuuuauaaucauuugggu

SEQ ID NO: 1317135 - RNA, 21 nt, Human
uugcugcugaaggacgccacc

SEQ ID NO: 1317136 - RNA, 22 nt, Human
uugugauugucaucaauuucug

SEQ ID NO: 1317137 - RNA, 19 nt, Human
uuucugagggaaggguucc

SEQ ID NO: 1317138 - RNA, 18 nt, Human
uuucuugugauugucauc

SEQ ID NO: 1317139 - RNA, 19 nt, Human
cacucagccucucccuggc

SEQ ID NO: 1317140 - RNA, 24 nt, Human
cuugggcccgugcacucagccucu

SEQ ID NO: 1317141 - RNA, 21 nt, Human
ugcacucagccucucccuggc

SEQ ID NO: 1317142 - RNA, 23 nt, Human
ugcacucagccucucccuggcuu

SEQ ID NO: 1317143 - RNA, 19 nt, Human
aacauuuaauaaacugugg

SEQ ID NO: 1317144 - RNA, 24 nt, Human
aggguggggagcacgaagccuggg

SEQ ID NO: 1317145 - RNA, 27 nt, Human
ccaaaugguggccucacagucuucucc

SEQ ID NO: 1317146 - RNA, 18 nt, Human
ccuauggcaggggcugga

SEQ ID NO: 1317147 - RNA, 24 nt, Human
gcauuauagaaccaugaaaaacaa

SEQ ID NO: 1317148 - RNA, 19 nt, Human
ggcuggggguggggagaac

SEQ ID NO: 1317149 - RNA, 23 nt, Human
ggcuggggguggggagaacuugc

SEQ ID NO: 1317150 - RNA, 22 nt, Human
gggagaacuugccaaggguggg

SEQ ID NO: 1317151 - RNA, 18 nt, Human
ggggcuggggguggggag

SEQ ID NO: 1317152 - RNA, 18 nt, Human
uagaaccaugaaaaacaa

SEQ ID NO: 1317153 - RNA, 24 nt, Human
uagaaccaugaaaaacaauuucuc

SEQ ID NO: 1317154 - RNA, 22 nt, Human
ucaguguggcccaaaugguggc

SEQ ID NO: 1317155 - RNA, 24 nt, Human
ucaguguggcccaaaugguggccu

SEQ ID NO: 1317156 - RNA, 19 nt, Human
ugaaaaacaauuucucagc

SEQ ID NO: 1317157 - RNA, 18 nt, Human
ugcauuauagaaccauga

SEQ ID NO: 1317158 - RNA, 18 nt, Human
uggcaggggcuggacuug

SEQ ID NO: 1317159 - RNA, 21 nt, Human
ugggccuauggcaggggcugg

SEQ ID NO: 1317160 - RNA, 18 nt, Human
uggggagcacgaagccug

SEQ ID NO: 1317161 - RNA, 23 nt, Human
uggggcuggggguggggagaacu

SEQ ID NO: 1317162 - RNA, 18 nt, Human
aggagagauaaaugcaaa

SEQ ID NO: 1317163 - RNA, 22 nt, Human
cacaauauuccacaaaugccac

SEQ ID NO: 1317164 - RNA, 24 nt, Human
cacacaauauuccacaaaugccac

SEQ ID NO: 1317165 - RNA, 20 nt, Human
caugaaaauccuaaaaagug

SEQ ID NO: 1317166 - RNA, 18 nt, Human
ccuuuggugucucauugc

SEQ ID NO: 1317167 - RNA, 19 nt, Human
guacuagaauguuucugga

SEQ ID NO: 1317168 - RNA, 21 nt, Human
guuuuauuaucucuuuuuccu

SEQ ID NO: 1317169 - RNA, 20 nt, Human
uaggaagaauaauuuuagug

SEQ ID NO: 1317170 - RNA, 25 nt, Human
uaucucuuuuuccugaaaagucuuc

SEQ ID NO: 1317171 - RNA, 19 nt, Human
ucuaguccuuuggugucuc

SEQ ID NO: 1317172 - RNA, 18 nt, Human
ugaggcaauauauuuuuu

SEQ ID NO: 1317173 - RNA, 18 nt, Human
ugcauuuuauuucuguuu

SEQ ID NO: 1317174 - RNA, 18 nt, Human
uggagaaaccagugaggc

SEQ ID NO: 1317175 - RNA, 23 nt, Human
uggcacacaauauuccacaaaug

SEQ ID NO: 1317176 - RNA, 23 nt, Human
uguacuagaauguuucuggaaag

SEQ ID NO: 1317177 - RNA, 19 nt, Human
uuauuaucucuuuuuccug

SEQ ID NO: 1317178 - RNA, 19 nt, Human
uuccacaaaugccacaaag

SEQ ID NO: 1317179 - RNA, 18 nt, Human
uucuaguccuuugguguc

SEQ ID NO: 1317180 - RNA, 23 nt, Human
cagugccuugcauuguaugcgga

SEQ ID NO: 1317181 - RNA, 24 nt, Human
gacgugcugcuuggggccagccug

SEQ ID NO: 1317182 - RNA, 26 nt, Human
gaggggaacaggagcaaaccacaggc

SEQ ID NO: 1317183 - RNA, 21 nt, Human
ggccagccugguguggccagu

SEQ ID NO: 1317184 - RNA, 21 nt, Human
ugcuuggggccagccuggugu

SEQ ID NO: 1317185 - RNA, 22 nt, Human
gggaauaugugggagaaaugga

SEQ ID NO: 1317186 - RNA, 18 nt, Human
uaugugggagaaauggaa

SEQ ID NO: 1317187 - RNA, 20 nt, Human
uaugugggagaaauggaagc

SEQ ID NO: 1317188 - RNA, 23 nt, Human
uaugugggagaaauggaagcagu

SEQ ID NO: 1317189 - RNA, 23 nt, Human
aagccacuaaucccuaaaacugg

SEQ ID NO: 1317190 - RNA, 19 nt, Human
uccacaaagccacuaaucc

SEQ ID NO: 1317191 - RNA, 18 nt, Human
uccuccacaaagccacua

SEQ ID NO: 1317192 - RNA, 20 nt, Human
acuuugaggacauuacugag

SEQ ID NO: 1317193 - RNA, 24 nt, Human
caagcaaagcacuuagcagggucc

SEQ ID NO: 1317194 - RNA, 18 nt, Human
caccugcugggugacugg

SEQ ID NO: 1317195 - RNA, 22 nt, Human
cacgaugcccgagacgccacuc

SEQ ID NO: 1317196 - RNA, 25 nt, Human
caucucugcucuugcacuuugagga

SEQ ID NO: 1317197 - RNA, 19 nt, Human
ccaaauugccagcaucucu

SEQ ID NO: 1317198 - RNA, 18 nt, Human
cccgagacgccacuccgg

SEQ ID NO: 1317199 - RNA, 18 nt, Human
cccuggacaaagggagga

SEQ ID NO: 1317200 - RNA, 18 nt, Human
cggaacauggacgguuac

SEQ ID NO: 1317201 - RNA, 19 nt, Human
gaacauggacgguuacacc

SEQ ID NO: 1317202 - RNA, 21 nt, Human
gcugcaccaagaugcccagca

SEQ ID NO: 1317203 - RNA, 20 nt, Human
ggguccuuggcacacaacag

SEQ ID NO: 1317204 - RNA, 20 nt, Human
gguacccuggacaaagggag

SEQ ID NO: 1317205 - RNA, 19 nt, Human
ggugguguagacagcacgg

SEQ ID NO: 1317206 - RNA, 20 nt, Human
guggaagggcagcccaucca

SEQ ID NO: 1317207 - RNA, 21 nt, Human
uagcaggguccuuggcacaca

SEQ ID NO: 1317208 - RNA, 23 nt, Human
uccaugcccacgaugcccgagac

SEQ ID NO: 1317209 - RNA, 24 nt, Human
ucugaucaccugcugggugacugg

SEQ ID NO: 1317210 - RNA, 20 nt, Human
ugagauuucaucacgauauu

SEQ ID NO: 1317211 - RNA, 21 nt, Human
ugcaauaccaugacagucgau

SEQ ID NO: 1317212 - RNA, 18 nt, Human
ugcaccaagaugcccagc

SEQ ID NO: 1317213 - RNA, 20 nt, Human
ugcccgagacgccacuccgg

SEQ ID NO: 1317214 - RNA, 20 nt, Human
ugcugggugacuggcaggcg

SEQ ID NO: 1317215 - RNA, 19 nt, Human
uggcaggcgggugguguag

SEQ ID NO: 1317216 - RNA, 23 nt, Human
uucaagcaaagcacuuagcaggg

SEQ ID NO: 1317217 - RNA, 23 nt, Human
uucuggaucaucucggcgugggu

SEQ ID NO: 1317218 - RNA, 18 nt, Human
augcuugagacuuggcag

SEQ ID NO: 1317219 - RNA, 27 nt, Human
cacucccuuccuuaugcgguagccuua

SEQ ID NO: 1317220 - RNA, 22 nt, Human
cucccuuccuuaugcgguagcc

SEQ ID NO: 1317221 - RNA, 19 nt, Human
aaccacgcugggcagcggc

SEQ ID NO: 1317222 - RNA, 19 nt, Human
aaccaggugauguuugggg

SEQ ID NO: 1317223 - RNA, 23 nt, Human
aaccccuccaggcauucguccac

SEQ ID NO: 1317224 - RNA, 24 nt, Human
aaccuggccauccuccuggaccug

SEQ ID NO: 1317225 - RNA, 27 nt, Human
aaccuggccauccuccuggaccugcag

SEQ ID NO: 1317226 - RNA, 21 nt, Human
aacuuccucucugcccuccca

SEQ ID NO: 1317227 - RNA, 24 nt, Human
aaggucacugaggcauuuuccagu

SEQ ID NO: 1317228 - RNA, 21 nt, Human
aaggugaaguuccuguccgcc

SEQ ID NO: 1317229 - RNA, 20 nt, Human
aaguguagaugcccucgucc

SEQ ID NO: 1317230 - RNA, 19 nt, Human
aaguuccuccgugccuccc

SEQ ID NO: 1317231 - RNA, 18 nt, Human
aaguucuucaccagcaac

SEQ ID NO: 1317232 - RNA, 18 nt, Human
aaucuguagguucccccc

SEQ ID NO: 1317233 - RNA, 21 nt, Human
acacagcgguagcucccagca

SEQ ID NO: 1317234 - RNA, 19 nt, Human
acacaggagcugcacuagg

SEQ ID NO: 1317235 - RNA, 20 nt, Human
acacugaaguuccuccgugc

SEQ ID NO: 1317236 - RNA, 24 nt, Human
acacugaaguuccuccgugccucc

SEQ ID NO: 1317237 - RNA, 21 nt, Human
acagguuccaccagguaggag

SEQ ID NO: 1317238 - RNA, 23 nt, Human
accagcugggcugaaggccacgc

SEQ ID NO: 1317239 - RNA, 19 nt, Human
accauggucaccagcuccc

SEQ ID NO: 1317240 - RNA, 18 nt, Human
acccggaagcucuucuca

SEQ ID NO: 1317241 - RNA, 22 nt, Human
acccugagggugaagagcuucu

SEQ ID NO: 1317242 - RNA, 20 nt, Human
acccuguccuuccgccagcu

SEQ ID NO: 1317243 - RNA, 19 nt, Human
accgcagcucugugcuacc

SEQ ID NO: 1317244 - RNA, 20 nt, Human
accucccggcguucucugcc

SEQ ID NO: 1317245 - RNA, 24 nt, Human
accuccuccaaguccucguucuca

SEQ ID NO: 1317246 - RNA, 25 nt, Human
accuccuucacgccgaccuccgcca

SEQ ID NO: 1317247 - RNA, 24 nt, Human
accucgccugucucguuggagccg

SEQ ID NO: 1317248 - RNA, 22 nt, Human
accucuuccaccagcuccuuca

SEQ ID NO: 1317249 - RNA, 19 nt, Human
accugguagagccuguggg

SEQ ID NO: 1317250 - RNA, 20 nt, Human
accugugugggggccagugg

SEQ ID NO: 1317251 - RNA, 18 nt, Human
acgcaggaguaccuccca

SEQ ID NO: 1317252 - RNA, 18 nt, Human
acgggguuucccagggcc

SEQ ID NO: 1317253 - RNA, 19 nt, Human
acuccauccuggaccacag

SEQ ID NO: 1317254 - RNA, 21 nt, Human
acugccggugauccugagaac

SEQ ID NO: 1317255 - RNA, 26 nt, Human
agacaaguguacagcccagcaucccu

SEQ ID NO: 1317256 - RNA, 21 nt, Human
agcacaaguguagaugcccuc

SEQ ID NO: 1317257 - RNA, 19 nt, Human
agcaccagggagccgccgu

SEQ ID NO: 1317258 - RNA, 21 nt, Human
agcacccguguggcucugcug

SEQ ID NO: 1317259 - RNA, 21 nt, Human
agcacugcuaccacgaagucc

SEQ ID NO: 1317260 - RNA, 21 nt, Human
agccaccuggcucacugucuc

SEQ ID NO: 1317261 - RNA, 18 nt, Human
agccagcucacguggaug

SEQ ID NO: 1317262 - RNA, 18 nt, Human
agccaguccucgcccacc

SEQ ID NO: 1317263 - RNA, 23 nt, Human
agccgugggcucggggagaaagg

SEQ ID NO: 1317264 - RNA, 21 nt, Human
agcugcaacugccgaccgccc

SEQ ID NO: 1317265 - RNA, 19 nt, Human
agcugguuguagugacagu

SEQ ID NO: 1317266 - RNA, 24 nt, Human
aggaaccagcaccuccacacugaa

SEQ ID NO: 1317267 - RNA, 23 nt, Human
aggaagaccucuucacccaggga

SEQ ID NO: 1317268 - RNA, 22 nt, Human
aggaagacgugcuugugggcua

SEQ ID NO: 1317269 - RNA, 22 nt, Human
aggaccaggggcugcccauccu

SEQ ID NO: 1317270 - RNA, 22 nt, Human
aggaguagagcccagaaucacc

SEQ ID NO: 1317271 - RNA, 21 nt, Human
aggaucaccacuuucuucgcc

SEQ ID NO: 1317272 - RNA, 18 nt, Human
aggcagcccauucuggag

SEQ ID NO: 1317273 - RNA, 18 nt, Human
aggcagggcaggcugggg

SEQ ID NO: 1317274 - RNA, 23 nt, Human
aggcaggguggugaacacaggca

SEQ ID NO: 1317275 - RNA, 23 nt, Human
aggccagcccccuccccggggag

SEQ ID NO: 1317276 - RNA, 22 nt, Human
aggcugcaggaaaggagcugug

SEQ ID NO: 1317277 - RNA, 24 nt, Human
aggcuggggugugggcggucaggg

SEQ ID NO: 1317278 - RNA, 20 nt, Human
agggcaggcuggggcccugc

SEQ ID NO: 1317279 - RNA, 21 nt, Human
agggccucccggaaggacagg

SEQ ID NO: 1317280 - RNA, 21 nt, Human
agggguggggcugccccgggc

SEQ ID NO: 1317281 - RNA, 23 nt, Human
agggucagguuggaggggcuggg

SEQ ID NO: 1317282 - RNA, 23 nt, Human
agguacaacagccuccccacagc

SEQ ID NO: 1317283 - RNA, 19 nt, Human
agguaccgccccgagucug

SEQ ID NO: 1317284 - RNA, 18 nt, Human
aggucacaguuggcucag

SEQ ID NO: 1317285 - RNA, 21 nt, Human
aggugcacgcggcggcgggcc

SEQ ID NO: 1317286 - RNA, 18 nt, Human
aggugccugcauccccag

SEQ ID NO: 1317287 - RNA, 18 nt, Human
agguguccuccccggggc

SEQ ID NO: 1317288 - RNA, 23 nt, Human
agguucucggccacacagcugua

SEQ ID NO: 1317289 - RNA, 23 nt, Human
aguaccaggauggugaggugcac

SEQ ID NO: 1317290 - RNA, 19 nt, Human
agucuccacguucuccagc

SEQ ID NO: 1317291 - RNA, 18 nt, Human
aucauggucacggugaag

SEQ ID NO: 1317292 - RNA, 19 nt, Human
auccagccaccugccagca

SEQ ID NO: 1317293 - RNA, 22 nt, Human
auccgguaaccccuggggcagc

SEQ ID NO: 1317294 - RNA, 24 nt, Human
aucggccucacaguccagccgcaa

SEQ ID NO: 1317295 - RNA, 20 nt, Human
augaacucggagcuggaagu

SEQ ID NO: 1317296 - RNA, 24 nt, Human
augcugcugaccccggagugugcc

SEQ ID NO: 1317297 - RNA, 19 nt, Human
auugcucaccacgcauuca

SEQ ID NO: 1317298 - RNA, 20 nt, Human
caaacggggccccguccuuc

SEQ ID NO: 1317299 - RNA, 21 nt, Human
caaacuuccucucugcccucc

SEQ ID NO: 1317300 - RNA, 22 nt, Human
caacaaggguuccccauccuuc

SEQ ID NO: 1317301 - RNA, 21 nt, Human
caacagccuccccacagccga

SEQ ID NO: 1317302 - RNA, 21 nt, Human
caacaggacacugagcuggaa

SEQ ID NO: 1317303 - RNA, 21 nt, Human
caacugccgaccgccccuagu

SEQ ID NO: 1317304 - RNA, 22 nt, Human
caagacuugcccguccuccagg

SEQ ID NO: 1317305 - RNA, 19 nt, Human
caaguccaggccuugaacc

SEQ ID NO: 1317306 - RNA, 22 nt, Human
caaguguagaugcccucguccc

SEQ ID NO: 1317307 - RNA, 20 nt, Human
caaguucuucaccagcaacu

SEQ ID NO: 1317308 - RNA, 19 nt, Human
caauccgcagcuguccgcc

SEQ ID NO: 1317309 - RNA, 26 nt, Human
cacagccacgcaggaguaccucccag

SEQ ID NO: 1317310 - RNA, 22 nt, Human
cacagcccagcucucacacucc

SEQ ID NO: 1317311 - RNA, 21 nt, Human
cacagccgacacgugcuggag

SEQ ID NO: 1317312 - RNA, 18 nt, Human
cacagccggccccaucag

SEQ ID NO: 1317313 - RNA, 19 nt, Human
cacagcgguagcucccagc

SEQ ID NO: 1317314 - RNA, 19 nt, Human
cacaggcauccuguccuuc

SEQ ID NO: 1317315 - RNA, 23 nt, Human
cacagucuagcugaaugcugccu

SEQ ID NO: 1317316 - RNA, 23 nt, Human
caccaggaccgcauccuggggac

SEQ ID NO: 1317317 - RNA, 20 nt, Human
caccaggguccccgagccgu

SEQ ID NO: 1317318 - RNA, 22 nt, Human
caccccaaaucugcagccuggg

SEQ ID NO: 1317319 - RNA, 23 nt, Human
caccccagccagcuccucggcug

SEQ ID NO: 1317320 - RNA, 21 nt, Human
cacccgcaucagaggccccac

SEQ ID NO: 1317321 - RNA, 22 nt, Human
cacccuccuggauccuggggaa

SEQ ID NO: 1317322 - RNA, 20 nt, Human
caccggagcacucugcagga

SEQ ID NO: 1317323 - RNA, 18 nt, Human
caccgugcaccgcgcugc

SEQ ID NO: 1317324 - RNA, 19 nt, Human
caccuccuucacgccgacc

SEQ ID NO: 1317325 - RNA, 22 nt, Human
caccucggccccggcagugccc

SEQ ID NO: 1317326 - RNA, 20 nt, Human
caccuggaacaccggagcac

SEQ ID NO: 1317327 - RNA, 21 nt, Human
caccugucccaagccuucagc

SEQ ID NO: 1317328 - RNA, 19 nt, Human
cacgacacgagaggcaggg

SEQ ID NO: 1317329 - RNA, 23 nt, Human
cacgcccgaagccagacacucca

SEQ ID NO: 1317330 - RNA, 20 nt, Human
cacgccgaccuccgccaagg

SEQ ID NO: 1317331 - RNA, 19 nt, Human
cacgggcuggccgucccgc

SEQ ID NO: 1317332 - RNA, 22 nt, Human
cacggucaccuccucaucugca

SEQ ID NO: 1317333 - RNA, 21 nt, Human
cacggucggagcugguauacc

SEQ ID NO: 1317334 - RNA, 18 nt, Human
cacgugaccucgggguuu

SEQ ID NO: 1317335 - RNA, 20 nt, Human
cacguggaugggcggggagc

SEQ ID NO: 1317336 - RNA, 21 nt, Human
cacuccaaggucaaggugcug

SEQ ID NO: 1317337 - RNA, 19 nt, Human
cacugaaguuccuccgugc

SEQ ID NO: 1317338 - RNA, 23 nt, Human
cacugagcugcaccagcuucugg

SEQ ID NO: 1317339 - RNA, 21 nt, Human
cacugcuaccacgaaguccuu

SEQ ID NO: 1317340 - RNA, 19 nt, Human
cacuggacagguuugccug

SEQ ID NO: 1317341 - RNA, 20 nt, Human
cacuggauaguggguacugg

SEQ ID NO: 1317342 - RNA, 22 nt, Human
cagagagaugggguuguugaca

SEQ ID NO: 1317343 - RNA, 22 nt, Human
cagagaguggccauucagggcu

SEQ ID NO: 1317344 - RNA, 24 nt, Human
cagcacaaguguagaaggcugacc

SEQ ID NO: 1317345 - RNA, 20 nt, Human
cagcacaggagggggcaugg

SEQ ID NO: 1317346 - RNA, 28 nt, Human
cagcacauucaccgugugcagccuggcc

SEQ ID NO: 1317347 - RNA, 20 nt, Human
cagcaccuccuccucugcca

SEQ ID NO: 1317348 - RNA, 22 nt, Human
cagcagguagguguccuccccg

SEQ ID NO: 1317349 - RNA, 21 nt, Human
cagccacacgaucucagggac

SEQ ID NO: 1317350 - RNA, 20 nt, Human
cagccaccaggagcuguggg

SEQ ID NO: 1317351 - RNA, 24 nt, Human
cagccagacaaguguacagcccag

SEQ ID NO: 1317352 - RNA, 18 nt, Human
cagccucagcacacuccc

SEQ ID NO: 1317353 - RNA, 24 nt, Human
cagccucagcacacucccgucugu

SEQ ID NO: 1317354 - RNA, 21 nt, Human
cagccugguggccuucucugc

SEQ ID NO: 1317355 - RNA, 24 nt, Human
cagcgaagccacagccugucccca

SEQ ID NO: 1317356 - RNA, 23 nt, Human
cagcgccacaggccucccagcca

SEQ ID NO: 1317357 - RNA, 28 nt, Human
cagcggcuucaccaccggggaggcuugc

SEQ ID NO: 1317358 - RNA, 18 nt, Human
cagcuccucggcugggcg

SEQ ID NO: 1317359 - RNA, 21 nt, Human
cagcuccucggcugggcggcc

SEQ ID NO: 1317360 - RNA, 21 nt, Human
cagcuggauguuccuggaggc

SEQ ID NO: 1317361 - RNA, 22 nt, Human
cagcugggccugucccagguac

SEQ ID NO: 1317362 - RNA, 21 nt, Human
cagcugggcugaaggccacgc

SEQ ID NO: 1317363 - RNA, 24 nt, Human
cagcugggcuugcggccacacagg

SEQ ID NO: 1317364 - RNA, 19 nt, Human
cagcuucuguccguccuuc

SEQ ID NO: 1317365 - RNA, 25 nt, Human
caggaaaggagcugugauguucuca

SEQ ID NO: 1317366 - RNA, 25 nt, Human
caggacaacauccuggcgguccucg

SEQ ID NO: 1317367 - RNA, 21 nt, Human
caggaccagcugcccuggggc

SEQ ID NO: 1317368 - RNA, 20 nt, Human
caggaccugcagccgugggc

SEQ ID NO: 1317369 - RNA, 23 nt, Human
caggagccgguaggcgcccugcu

SEQ ID NO: 1317370 - RNA, 19 nt, Human
caggcugcgguccccaggc

SEQ ID NO: 1317371 - RNA, 21 nt, Human
cagggagccacgaaccaccac

SEQ ID NO: 1317372 - RNA, 20 nt, Human
cagggcagcaaggcuggggu

SEQ ID NO: 1317373 - RNA, 21 nt, Human
cagggcccaguagaugggggc

SEQ ID NO: 1317374 - RNA, 19 nt, Human
cagggggacccuguccuuc

SEQ ID NO: 1317375 - RNA, 19 nt, Human
cagggucagguuggagggg

SEQ ID NO: 1317376 - RNA, 20 nt, Human
cagguacaacagccucccca

SEQ ID NO: 1317377 - RNA, 23 nt, Human
cagguagguguccuccccggggc

SEQ ID NO: 1317378 - RNA, 19 nt, Human
cagguccuggcugcuguuc

SEQ ID NO: 1317379 - RNA, 19 nt, Human
cagguuggaggggcugggg

SEQ ID NO: 1317380 - RNA, 19 nt, Human
cagucaugcugccccagcu

SEQ ID NO: 1317381 - RNA, 23 nt, Human
cagucgcccuucacccaggaccu

SEQ ID NO: 1317382 - RNA, 22 nt, Human
cagucuccacguucuccagcca

SEQ ID NO: 1317383 - RNA, 24 nt, Human
caucagaaagcugggcuugcucaa

SEQ ID NO: 1317384 - RNA, 18 nt, Human
cauccuggcgguccucgc

SEQ ID NO: 1317385 - RNA, 21 nt, Human
caugcacagacaccuccaccu

SEQ ID NO: 1317386 - RNA, 19 nt, Human
cauggcacugcccgcacug

SEQ ID NO: 1317387 - RNA, 25 nt, Human
cauguagcuggcggcgucggccacc

SEQ ID NO: 1317388 - RNA, 22 nt, Human
ccacacagcuguacaggccacu

SEQ ID NO: 1317389 - RNA, 24 nt, Human
ccacagccuguccccaaggcgcag

SEQ ID NO: 1317390 - RNA, 25 nt, Human
ccacaucuucacagccggccccauc

SEQ ID NO: 1317391 - RNA, 21 nt, Human
ccaccgcgcucacagccacgc

SEQ ID NO: 1317392 - RNA, 18 nt, Human
ccacgacacgagaggcag

SEQ ID NO: 1317393 - RNA, 23 nt, Human
ccacgcaccacacagucuagcug

SEQ ID NO: 1317394 - RNA, 18 nt, Human
ccacgcacuccagcgcca

SEQ ID NO: 1317395 - RNA, 22 nt, Human
ccacgcacuccagcgccacagg

SEQ ID NO: 1317396 - RNA, 23 nt, Human
ccacgcacuccagcgccacaggc

SEQ ID NO: 1317397 - RNA, 22 nt, Human
ccacgcaggaguaccucccaga

SEQ ID NO: 1317398 - RNA, 23 nt, Human
ccacgucugcaccggccaauccu

SEQ ID NO: 1317399 - RNA, 19 nt, Human
ccacgugaucuugggcgcu

SEQ ID NO: 1317400 - RNA, 21 nt, Human
ccacguucuccagccacaggc

SEQ ID NO: 1317401 - RNA, 20 nt, Human
ccacucucucuggccagggc

SEQ ID NO: 1317402 - RNA, 21 nt, Human
ccacugccuccagcugcaggc

SEQ ID NO: 1317403 - RNA, 23 nt, Human
ccacugccuccagcugcaggcug

SEQ ID NO: 1317404 - RNA, 21 nt, Human
ccagaacacugagcugcacca

SEQ ID NO: 1317405 - RNA, 22 nt, Human
ccagacacuccaaggucacuga

SEQ ID NO: 1317406 - RNA, 18 nt, Human
ccagcagguagguguccu

SEQ ID NO: 1317407 - RNA, 21 nt, Human
ccagcucagcacaggaggggg

SEQ ID NO: 1317408 - RNA, 24 nt, Human
ccaggauggugggagccaacagga

SEQ ID NO: 1317409 - RNA, 21 nt, Human
ccaggcauucguccacaucuu

SEQ ID NO: 1317410 - RNA, 22 nt, Human
ccaggccgaccacaaagcgggg

SEQ ID NO: 1317411 - RNA, 18 nt, Human
ccaguggccagggucacc

SEQ ID NO: 1317412 - RNA, 23 nt, Human
ccaguggccagggucaccccaaa

SEQ ID NO: 1317413 - RNA, 26 nt, Human
ccaucaaggaccuugaucaccuccuc

SEQ ID NO: 1317414 - RNA, 21 nt, Human
ccauccuuccaccaacggagg

SEQ ID NO: 1317415 - RNA, 18 nt, Human
ccauggcacugcccgcac

SEQ ID NO: 1317416 - RNA, 20 nt, Human
cccacagcauugcuggccuu

SEQ ID NO: 1317417 - RNA, 20 nt, Human
cccacagcauugcuggccuu

SEQ ID NO: 1317418 - RNA, 21 nt, Human
cccacagcauugcuggccuug

SEQ ID NO: 1317419 - RNA, 25 nt, Human
cccacagccgacacgugcuggaggc

SEQ ID NO: 1317420 - RNA, 22 nt, Human
cccacagucggggaggcagccg

SEQ ID NO: 1317421 - RNA, 21 nt, Human
cccaccacguugcugcauuca

SEQ ID NO: 1317422 - RNA, 22 nt, Human
cccaccacguugcugcauucac

SEQ ID NO: 1317423 - RNA, 23 nt, Human
cccaccacguugcugcauucaca

SEQ ID NO: 1317424 - RNA, 19 nt, Human
cccaccucauugcucacca

SEQ ID NO: 1317425 - RNA, 22 nt, Human
cccagaaucacccuccuggauc

SEQ ID NO: 1317426 - RNA, 23 nt, Human
cccagaucucacugucauguccu

SEQ ID NO: 1317427 - RNA, 19 nt, Human
cccagcugcaacugccgac

SEQ ID NO: 1317428 - RNA, 20 nt, Human
cccaggugauguugggcuca

SEQ ID NO: 1317429 - RNA, 19 nt, Human
ccccaaaggcugccagggc

SEQ ID NO: 1317430 - RNA, 25 nt, Human
ccccacagccgacacgugcuggagg

SEQ ID NO: 1317431 - RNA, 23 nt, Human
ccccagccagcuccucggcuggg

SEQ ID NO: 1317432 - RNA, 23 nt, Human
ccccaggccugcucaccaggguc

SEQ ID NO: 1317433 - RNA, 18 nt, Human
ccccaucagccacccgga

SEQ ID NO: 1317434 - RNA, 20 nt, Human
cccccacagcauugcuggcc

SEQ ID NO: 1317435 - RNA, 20 nt, Human
cccccagggaagaccugcag

SEQ ID NO: 1317436 - RNA, 20 nt, Human
cccccgagcuccuagcuggg

SEQ ID NO: 1317437 - RNA, 24 nt, Human
cccccgggagaccacaccgugcac

SEQ ID NO: 1317438 - RNA, 23 nt, Human
cccccgggcucuccagccucagc

SEQ ID NO: 1317439 - RNA, 18 nt, Human
ccccgcacagggcacacc

SEQ ID NO: 1317440 - RNA, 18 nt, Human
ccccgggcucuccagccu

SEQ ID NO: 1317441 - RNA, 22 nt, Human
ccccucccaggauggugggagc

SEQ ID NO: 1317442 - RNA, 18 nt, Human
ccccugagguccaacacu

SEQ ID NO: 1317443 - RNA, 18 nt, Human
ccccuggggcuccccucu

SEQ ID NO: 1317444 - RNA, 19 nt, Human
ccccuuguaggacaggagc

SEQ ID NO: 1317445 - RNA, 19 nt, Human
cccgcagagccuggguccg

SEQ ID NO: 1317446 - RNA, 22 nt, Human
cccggaagcucuucucaauugc

SEQ ID NO: 1317447 - RNA, 24 nt, Human
cccggcccacggcguucucagccg

SEQ ID NO: 1317448 - RNA, 21 nt, Human
cccgugcugugacaugugagg

SEQ ID NO: 1317449 - RNA, 22 nt, Human
cccucaggcagaauuucaaacc

SEQ ID NO: 1317450 - RNA, 23 nt, Human
cccucaggcagaauuucaaaccc

SEQ ID NO: 1317451 - RNA, 22 nt, Human
cccucggcgcccgacacaggcu

SEQ ID NO: 1317452 - RNA, 20 nt, Human
cccuggggcuccccucucac

SEQ ID NO: 1317453 - RNA, 23 nt, Human
cccuuguaggacaggagccuccu

SEQ ID NO: 1317454 - RNA, 23 nt, Human
ccgcacggccuccccagccacgu

SEQ ID NO: 1317455 - RNA, 18 nt, Human
ccgcagagccuggguccg

SEQ ID NO: 1317456 - RNA, 21 nt, Human
ccgcaucgucccuccaaggug

SEQ ID NO: 1317457 - RNA, 22 nt, Human
ccgcccagcagacauagguccc

SEQ ID NO: 1317458 - RNA, 20 nt, Human
ccgccccgggccuccuccuc

SEQ ID NO: 1317459 - RNA, 18 nt, Human
ccgcccguccuuccacca

SEQ ID NO: 1317460 - RNA, 19 nt, Human
ccgccuugccucaguccug

SEQ ID NO: 1317461 - RNA, 20 nt, Human
ccgcgcugcucuccacaggc

SEQ ID NO: 1317462 - RNA, 19 nt, Human
ccggaggugggggcccaug

SEQ ID NO: 1317463 - RNA, 24 nt, Human
ccggccccaucagccacccggaag

SEQ ID NO: 1317464 - RNA, 21 nt, Human
ccgugcaccgcgcugcucucc

SEQ ID NO: 1317465 - RNA, 20 nt, Human
ccuacagguuccaccaggua

SEQ ID NO: 1317466 - RNA, 20 nt, Human
ccuagcaccuccugagcggc

SEQ ID NO: 1317467 - RNA, 18 nt, Human
ccuccacggaguacugca

SEQ ID NO: 1317468 - RNA, 23 nt, Human
ccuccagcugcaggcugggcccc

SEQ ID NO: 1317469 - RNA, 22 nt, Human
ccuccaggaccugcagccgugg

SEQ ID NO: 1317470 - RNA, 23 nt, Human
ccuccaugacggccaccucgccu

SEQ ID NO: 1317471 - RNA, 19 nt, Human
ccuccccagccucguugcu

SEQ ID NO: 1317472 - RNA, 23 nt, Human
ccucccggaaggacaggcugccu

SEQ ID NO: 1317473 - RNA, 25 nt, Human
ccucccgggacaggaucucgaaggc

SEQ ID NO: 1317474 - RNA, 18 nt, Human
ccuccucugccacugccc

SEQ ID NO: 1317475 - RNA, 20 nt, Human
ccuccucugccacugcccga

SEQ ID NO: 1317476 - RNA, 22 nt, Human
ccuccucugccacugcccgaaa

SEQ ID NO: 1317477 - RNA, 21 nt, Human
ccucgcccaccgcgcucacag

SEQ ID NO: 1317478 - RNA, 26 nt, Human
ccucucacgaccaggaacgcccgggc

SEQ ID NO: 1317479 - RNA, 20 nt, Human
ccucugccacugcccgaacc

SEQ ID NO: 1317480 - RNA, 20 nt, Human
ccucuggccacgcacuccag

SEQ ID NO: 1317481 - RNA, 25 nt, Human
ccucugggcggugccagccugguuc

SEQ ID NO: 1317482 - RNA, 20 nt, Human
ccucugggcuggcaugggca

SEQ ID NO: 1317483 - RNA, 20 nt, Human
ccugcaagacuugcccgucc

SEQ ID NO: 1317484 - RNA, 25 nt, Human
ccugcaccccagccagcuccucggc

SEQ ID NO: 1317485 - RNA, 25 nt, Human
ccugcagcuggaggaaccugccccg

SEQ ID NO: 1317486 - RNA, 24 nt, Human
ccugcauccgguaaccccuggggc

SEQ ID NO: 1317487 - RNA, 22 nt, Human
ccugccggaaccugcccccagu

SEQ ID NO: 1317488 - RNA, 21 nt, Human
ccugcugaccagcugggcuga

SEQ ID NO: 1317489 - RNA, 20 nt, Human
ccuggcucgauguugggggg

SEQ ID NO: 1317490 - RNA, 22 nt, Human
ccugggcccgcuccacaugcag

SEQ ID NO: 1317491 - RNA, 19 nt, Human
ccugggggccgggggccgu

SEQ ID NO: 1317492 - RNA, 21 nt, Human
ccuguggcguugcacuccaga

SEQ ID NO: 1317493 - RNA, 19 nt, Human
ccuuccuucugccagguga

SEQ ID NO: 1317494 - RNA, 21 nt, Human
ccuuguaccacgugaccuccu

SEQ ID NO: 1317495 - RNA, 18 nt, Human
ccuuguugacugggccug

SEQ ID NO: 1317496 - RNA, 23 nt, Human
cgaagccagacacuccaagguca

SEQ ID NO: 1317497 - RNA, 21 nt, Human
cgaccaggaacgcccgggcug

SEQ ID NO: 1317498 - RNA, 23 nt, Human
cgagggguggggcugccccgggc

SEQ ID NO: 1317499 - RNA, 23 nt, Human
cgcaucgucccuccaaggugcca

SEQ ID NO: 1317500 - RNA, 19 nt, Human
cgccccgggccuccuccuc

SEQ ID NO: 1317501 - RNA, 22 nt, Human
cgcccguccuuccaccagcuca

SEQ ID NO: 1317502 - RNA, 21 nt, Human
cgcccugcugcaggcggaagu

SEQ ID NO: 1317503 - RNA, 20 nt, Human
cgcccuucacccaggaccug

SEQ ID NO: 1317504 - RNA, 18 nt, Human
cgccugggccgguugcag

SEQ ID NO: 1317505 - RNA, 19 nt, Human
cgcugggagagcgggaggg

SEQ ID NO: 1317506 - RNA, 19 nt, Human
cggauggugggcgggggca

SEQ ID NO: 1317507 - RNA, 19 nt, Human
cggcaggaguagagcccag

SEQ ID NO: 1317508 - RNA, 21 nt, Human
cggcccccccgggagaccaca

SEQ ID NO: 1317509 - RNA, 23 nt, Human
cggcugcccaucggccucacagu

SEQ ID NO: 1317510 - RNA, 22 nt, Human
cggggaggcagcgguaggaccc

SEQ ID NO: 1317511 - RNA, 22 nt, Human
cguccuggcccuccaaguucuu

SEQ ID NO: 1317512 - RNA, 24 nt, Human
cgugacuccgccccgggccuccuu

SEQ ID NO: 1317513 - RNA, 20 nt, Human
cguugaaguccuggucgucc

SEQ ID NO: 1317514 - RNA, 19 nt, Human
cguugcacuccagaguggc

SEQ ID NO: 1317515 - RNA, 22 nt, Human
cuagcaccuccugagcggcccc

SEQ ID NO: 1317516 - RNA, 24 nt, Human
cuaugcacuggagggucacaggcu

SEQ ID NO: 1317517 - RNA, 19 nt, Human
cucaaacuuccucucugcc

SEQ ID NO: 1317518 - RNA, 24 nt, Human
cucacacuccaaggucaaggugcu

SEQ ID NO: 1317519 - RNA, 24 nt, Human
cucaugcacagacaccuccaccuc

SEQ ID NO: 1317520 - RNA, 23 nt, Human
cuccaccucggccccggcagugc

SEQ ID NO: 1317521 - RNA, 18 nt, Human
cuccagccucugcccacc

SEQ ID NO: 1317522 - RNA, 18 nt, Human
cuccagccuggucagggc

SEQ ID NO: 1317523 - RNA, 24 nt, Human
cuccagcugcaggcugggccccug

SEQ ID NO: 1317524 - RNA, 22 nt, Human
cuccccgagcucauuggugacc

SEQ ID NO: 1317525 - RNA, 22 nt, Human
cuccccuggggcuccccucuca

SEQ ID NO: 1317526 - RNA, 19 nt, Human
cuccccuguagcaaacucc

SEQ ID NO: 1317527 - RNA, 24 nt, Human
cucccggcguucucugcccgcacc

SEQ ID NO: 1317528 - RNA, 24 nt, Human
cucccgggacaggaucucgaaggc

SEQ ID NO: 1317529 - RNA, 22 nt, Human
cuccgccccgggccuccuccuc

SEQ ID NO: 1317530 - RNA, 23 nt, Human
cuccgggaauugugugugggcgu

SEQ ID NO: 1317531 - RNA, 21 nt, Human
cuccucaucugcacuguccuc

SEQ ID NO: 1317532 - RNA, 20 nt, Human
cuccuccucugccacugccc

SEQ ID NO: 1317533 - RNA, 23 nt, Human
cuccuggaccugcaggugagggc

SEQ ID NO: 1317534 - RNA, 18 nt, Human
cucgcagcucaggacagc

SEQ ID NO: 1317535 - RNA, 25 nt, Human
cucggccggcagcauugagggcuuc

SEQ ID NO: 1317536 - RNA, 22 nt, Human
cucuccagccucagcacacucc

SEQ ID NO: 1317537 - RNA, 21 nt, Human
cugacuuuacagcuguauaaa

SEQ ID NO: 1317538 - RNA, 22 nt, Human
cugcaacugccgaccgccccua

SEQ ID NO: 1317539 - RNA, 18 nt, Human
cugcagcugcaggcccag

SEQ ID NO: 1317540 - RNA, 24 nt, Human
cugcaggcggaaguccagcuucug

SEQ ID NO: 1317541 - RNA, 22 nt, Human
cugccggaaccugcccccaguc

SEQ ID NO: 1317542 - RNA, 24 nt, Human
cugcucgaggcucugggacaacaa

SEQ ID NO: 1317543 - RNA, 27 nt, Human
cugcugcaggcggaaguccagcuucug

SEQ ID NO: 1317544 - RNA, 19 nt, Human
cugcuggccacacagcugu

SEQ ID NO: 1317545 - RNA, 20 nt, Human
cuggacagguuugccuggag

SEQ ID NO: 1317546 - RNA, 22 nt, Human
cuggaggugggauccccauggc

SEQ ID NO: 1317547 - RNA, 20 nt, Human
cuggccugcugaccagcugg

SEQ ID NO: 1317548 - RNA, 24 nt, Human
cugggccccugcucgaggcucugg

SEQ ID NO: 1317549 - RNA, 26 nt, Human
cugggccccugcucgaggcucuggga

SEQ ID NO: 1317550 - RNA, 18 nt, Human
cuggggcuccaccuggaa

SEQ ID NO: 1317551 - RNA, 24 nt, Human
cugguggccuucucugcggccccc

SEQ ID NO: 1317552 - RNA, 27 nt, Human
cugguuguagugacagucguccaaccc

SEQ ID NO: 1317553 - RNA, 24 nt, Human
cuguagcguccagugugggcagcc

SEQ ID NO: 1317554 - RNA, 22 nt, Human
cugucauguccuggggcuccac

SEQ ID NO: 1317555 - RNA, 22 nt, Human
cugucccagguacaacagccuc

SEQ ID NO: 1317556 - RNA, 18 nt, Human
cugugcuaccugccacau

SEQ ID NO: 1317557 - RNA, 23 nt, Human
cuucagccacaucaguguggggc

SEQ ID NO: 1317558 - RNA, 19 nt, Human
cuucagccaggccacgucc

SEQ ID NO: 1317559 - RNA, 19 nt, Human
cuugcccguccuccaggac

SEQ ID NO: 1317560 - RNA, 22 nt, Human
cuuggucuucaccuccuucacg

SEQ ID NO: 1317561 - RNA, 22 nt, Human
gaacacaggcaguaccaggaug

SEQ ID NO: 1317562 - RNA, 20 nt, Human
gaagccacagccugucccca

SEQ ID NO: 1317563 - RNA, 19 nt, Human
gaaggccgggggaaccaga

SEQ ID NO: 1317564 - RNA, 20 nt, Human
gaaguuccuccgugccuccc

SEQ ID NO: 1317565 - RNA, 20 nt, Human
gaccacgagcacccgcauca

SEQ ID NO: 1317566 - RNA, 20 nt, Human
gaccaggaacgcccgggcug

SEQ ID NO: 1317567 - RNA, 23 nt, Human
gacccuguccuuccgccagcuca

SEQ ID NO: 1317568 - RNA, 24 nt, Human
gacccuguccuuccgccagcucac

SEQ ID NO: 1317569 - RNA, 25 nt, Human
gacugucaccucuuccaccagcucc

SEQ ID NO: 1317570 - RNA, 29 nt, Human
gagaacucucccauccacugaggcacucc

SEQ ID NO: 1317571 - RNA, 19 nt, Human
gagaccugugugggcugga

SEQ ID NO: 1317572 - RNA, 21 nt, Human
gagcagcuggauguuccugga

SEQ ID NO: 1317573 - RNA, 23 nt, Human
gagcagcuggauguuccuggagg

SEQ ID NO: 1317574 - RNA, 20 nt, Human
gagcccuuccuucugccagg

SEQ ID NO: 1317575 - RNA, 22 nt, Human
gagccugaggccuggcagggaa

SEQ ID NO: 1317576 - RNA, 18 nt, Human
gagcuccuagcugggcgc

SEQ ID NO: 1317577 - RNA, 21 nt, Human
gagcucugggcccuccccagc

SEQ ID NO: 1317578 - RNA, 19 nt, Human
gagcugcaccagcuucugg

SEQ ID NO: 1317579 - RNA, 21 nt, Human
gagcugugauguucucacccc

SEQ ID NO: 1317580 - RNA, 23 nt, Human
gaggcagcgguaggacccgagca

SEQ ID NO: 1317581 - RNA, 21 nt, Human
gaggccauucucgaucacugg

SEQ ID NO: 1317582 - RNA, 22 nt, Human
gagggccuggcuguccuuguac

SEQ ID NO: 1317583 - RNA, 21 nt, Human
gagguggcugccccgcagugg

SEQ ID NO: 1317584 - RNA, 23 nt, Human
gagugugccuccugcaucacgcu

SEQ ID NO: 1317585 - RNA, 18 nt, Human
gaugccaggcagagguag

SEQ ID NO: 1317586 - RNA, 20 nt, Human
gcaagaaggcgugggagccu

SEQ ID NO: 1317587 - RNA, 20 nt, Human
gcacaaguguagaugcccuc

SEQ ID NO: 1317588 - RNA, 21 nt, Human
gcaccaaaacuuucagcgcca

SEQ ID NO: 1317589 - RNA, 21 nt, Human
gcacccguguggcucugcugu

SEQ ID NO: 1317590 - RNA, 20 nt, Human
gcacugcuaccacgaagucc

SEQ ID NO: 1317591 - RNA, 20 nt, Human
gcacuggagggucacaggcu

SEQ ID NO: 1317592 - RNA, 18 nt, Human
gcacugguaucgucccuc

SEQ ID NO: 1317593 - RNA, 24 nt, Human
gcacugguaucgucccucaucccc

SEQ ID NO: 1317594 - RNA, 22 nt, Human
gcagcacaaguguagaugcccu

SEQ ID NO: 1317595 - RNA, 18 nt, Human
gcagcugcaggcccaguu

SEQ ID NO: 1317596 - RNA, 23 nt, Human
gcagcuggauguuccuggaggcc

SEQ ID NO: 1317597 - RNA, 20 nt, Human
gcaggcggaaguccagcuuc

SEQ ID NO: 1317598 - RNA, 18 nt, Human
gcagggcagcagcaccuc

SEQ ID NO: 1317599 - RNA, 23 nt, Human
gcaguggaaggccaucuuugauc

SEQ ID NO: 1317600 - RNA, 27 nt, Human
gccagccugguucucugcccggcagaa

SEQ ID NO: 1317601 - RNA, 18 nt, Human
gcccagcaucccuaaccu

SEQ ID NO: 1317602 - RNA, 23 nt, Human
gcccaguucagcccccacgggcu

SEQ ID NO: 1317603 - RNA, 23 nt, Human
gccccgcacagggcacaccaugg

SEQ ID NO: 1317604 - RNA, 18 nt, Human
gcccgggcuguggcagag

SEQ ID NO: 1317605 - RNA, 20 nt, Human
gcccgggcuguggcagagcc

SEQ ID NO: 1317606 - RNA, 21 nt, Human
gcccucgucccucagguccac

SEQ ID NO: 1317607 - RNA, 22 nt, Human
gcccuggggcuccugggauccc

SEQ ID NO: 1317608 - RNA, 19 nt, Human
gccucgcacgggaguucca

SEQ ID NO: 1317609 - RNA, 22 nt, Human
gccucgcccaccucauugcuca

SEQ ID NO: 1317610 - RNA, 21 nt, Human
gccugguaggaccuggguacu

SEQ ID NO: 1317611 - RNA, 23 nt, Human
gccuucggugguggacaggucug

SEQ ID NO: 1317612 - RNA, 25 nt, Human
gccuugcaaggcaagaaggcguggg

SEQ ID NO: 1317613 - RNA, 21 nt, Human
gcgagcugggggucacgggcu

SEQ ID NO: 1317614 - RNA, 19 nt, Human
gcggcugcccaucggccuc

SEQ ID NO: 1317615 - RNA, 22 nt, Human
gcgguggccgcccaccuuagga

SEQ ID NO: 1317616 - RNA, 23 nt, Human
gcucacagccacgcaggaguacc

SEQ ID NO: 1317617 - RNA, 27 nt, Human
gcugcaaugcaggaguaguggccaguc

SEQ ID NO: 1317618 - RNA, 21 nt, Human
gcugccuccuacagguuccac

SEQ ID NO: 1317619 - RNA, 18 nt, Human
gcuucccccgccucgcuc

SEQ ID NO: 1317620 - RNA, 19 nt, Human
ggaacaccggagcacucug

SEQ ID NO: 1317621 - RNA, 19 nt, Human
ggaccacaggugccaucau

SEQ ID NO: 1317622 - RNA, 22 nt, Human
ggaccugcagccgugggcucgg

SEQ ID NO: 1317623 - RNA, 20 nt, Human
ggagcagcuggauguuccug

SEQ ID NO: 1317624 - RNA, 20 nt, Human
ggagccaacaggacacugag

SEQ ID NO: 1317625 - RNA, 21 nt, Human
ggaggcacauggacggucacc

SEQ ID NO: 1317626 - RNA, 18 nt, Human
ggaggcggcccccccggg

SEQ ID NO: 1317627 - RNA, 19 nt, Human
ggaggggcugggggcgaug

SEQ ID NO: 1317628 - RNA, 20 nt, Human
ggaggugggggcccaugucc

SEQ ID NO: 1317629 - RNA, 19 nt, Human
ggcaggcuggguggcagug

SEQ ID NO: 1317630 - RNA, 18 nt, Human
ggcauggcguggcucugg

SEQ ID NO: 1317631 - RNA, 22 nt, Human
ggccacgcacuccagcgccaca

SEQ ID NO: 1317632 - RNA, 23 nt, Human
ggccgggggaugccugaggccuc

SEQ ID NO: 1317633 - RNA, 18 nt, Human
ggccuggcaccgcagggc

SEQ ID NO: 1317634 - RNA, 19 nt, Human
ggccuugacgaucggagcc

SEQ ID NO: 1317635 - RNA, 21 nt, Human
ggcgauggugaccacgagcac

SEQ ID NO: 1317636 - RNA, 23 nt, Human
ggcgcaggcugcgguccccaggc

SEQ ID NO: 1317637 - RNA, 24 nt, Human
ggcuggggcccugcauccgguaac

SEQ ID NO: 1317638 - RNA, 18 nt, Human
ggcugggggcaccggugg

SEQ ID NO: 1317639 - RNA, 18 nt, Human
gggaagaccugcaggcca

SEQ ID NO: 1317640 - RNA, 21 nt, Human
gggcagcaaggcuggggugug

SEQ ID NO: 1317641 - RNA, 19 nt, Human
gggcaggagccgguaggcg

SEQ ID NO: 1317642 - RNA, 21 nt, Human
gggcauggcguggcucuggca

SEQ ID NO: 1317643 - RNA, 20 nt, Human
gggccgggggccgugaggag

SEQ ID NO: 1317644 - RNA, 20 nt, Human
gggcgauggugaccacgagc

SEQ ID NO: 1317645 - RNA, 20 nt, Human
gggcguggggaccccugagg

SEQ ID NO: 1317646 - RNA, 24 nt, Human
gggcugcacagcgaagccacagcc

SEQ ID NO: 1317647 - RNA, 18 nt, Human
ggggagccugaggccugg

SEQ ID NO: 1317648 - RNA, 23 nt, Human
ggggcaccugcaccugcaaggug

SEQ ID NO: 1317649 - RNA, 20 nt, Human
ggggcauggcguggcucugg

SEQ ID NO: 1317650 - RNA, 22 nt, Human
gggggaaccagaacacugagcu

SEQ ID NO: 1317651 - RNA, 21 nt, Human
gggggaacgugcaccuccagc

SEQ ID NO: 1317652 - RNA, 22 nt, Human
gggggcgauggugaccacgagc

SEQ ID NO: 1317653 - RNA, 20 nt, Human
gggugugggcggucaggguc

SEQ ID NO: 1317654 - RNA, 21 nt, Human
ggucagggucagguuggaggg

SEQ ID NO: 1317655 - RNA, 24 nt, Human
ggugauccugagaaccuggccauc

SEQ ID NO: 1317656 - RNA, 21 nt, Human
ggugauguuuggggugggcac

SEQ ID NO: 1317657 - RNA, 20 nt, Human
gguggcauugcaggucagcc

SEQ ID NO: 1317658 - RNA, 18 nt, Human
gguggggcugccccgggc

SEQ ID NO: 1317659 - RNA, 19 nt, Human
guagcucccagcaucagaa

SEQ ID NO: 1317660 - RNA, 19 nt, Human
guaggagaaagccuccccu

SEQ ID NO: 1317661 - RNA, 20 nt, Human
guaggugggacauaaacauc

SEQ ID NO: 1317662 - RNA, 27 nt, Human
gucacacuccagcgucaggacaucggg

SEQ ID NO: 1317663 - RNA, 21 nt, Human
gucauguccuggggcuccacc

SEQ ID NO: 1317664 - RNA, 22 nt, Human
gucugggaggccauucucgauc

SEQ ID NO: 1317665 - RNA, 18 nt, Human
gugaacuuccccucggcg

SEQ ID NO: 1317666 - RNA, 18 nt, Human
gugcugugacaugugagg

SEQ ID NO: 1317667 - RNA, 18 nt, Human
gugcuugugggcuacgcc

SEQ ID NO: 1317668 - RNA, 23 nt, Human
guggaugcugcugaccccggagu

SEQ ID NO: 1317669 - RNA, 19 nt, Human
gugggggccaguggccagg

SEQ ID NO: 1317670 - RNA, 18 nt, Human
gugguccuccaugacggc

SEQ ID NO: 1317671 - RNA, 23 nt, Human
guguccuccccggggcugacagg

SEQ ID NO: 1317672 - RNA, 20 nt, Human
guucuccagccuggucaggg

SEQ ID NO: 1317673 - RNA, 19 nt, Human
uaagaugggcagucugucc

SEQ ID NO: 1317674 - RNA, 23 nt, Human
uaagaugggcagucuguccauca

SEQ ID NO: 1317675 - RNA, 22 nt, Human
uacagcccagcaucccuaaccu

SEQ ID NO: 1317676 - RNA, 24 nt, Human
uaccacgaaguccuugcgggccuc

SEQ ID NO: 1317677 - RNA, 21 nt, Human
uaccucccggcguucucugcc

SEQ ID NO: 1317678 - RNA, 23 nt, Human
uaccugggcuuccuggaucucca

SEQ ID NO: 1317679 - RNA, 19 nt, Human
uacgccggcagaguugcgg

SEQ ID NO: 1317680 - RNA, 18 nt, Human
uagcguccagugugggca

SEQ ID NO: 1317681 - RNA, 20 nt, Human
uagcguccagugugggcagc

SEQ ID NO: 1317682 - RNA, 18 nt, Human
uagcucccagcaucagaa

SEQ ID NO: 1317683 - RNA, 18 nt, Human
uagcugaaugcugccucc

SEQ ID NO: 1317684 - RNA, 27 nt, Human
uaguggguacuggggagccugaggccu

SEQ ID NO: 1317685 - RNA, 20 nt, Human
uauggucuuccaccggcgcc

SEQ ID NO: 1317686 - RNA, 19 nt, Human
ucaaucuguagguuccccc

SEQ ID NO: 1317687 - RNA, 19 nt, Human
ucaccaggguccccgagcc

SEQ ID NO: 1317688 - RNA, 25 nt, Human
ucacccagggagagggccuggcugu

SEQ ID NO: 1317689 - RNA, 18 nt, Human
ucaccuccucaucugcac

SEQ ID NO: 1317690 - RNA, 21 nt, Human
ucacugagacguucacugcag

SEQ ID NO: 1317691 - RNA, 18 nt, Human
ucacugucucugucuugg

SEQ ID NO: 1317692 - RNA, 22 nt, Human
ucagaggccccacguuugcugg

SEQ ID NO: 1317693 - RNA, 21 nt, Human
ucagguuggaggggcuggggg

SEQ ID NO: 1317694 - RNA, 20 nt, Human
ucauuggccacaacggacac

SEQ ID NO: 1317695 - RNA, 18 nt, Human
uccaaguucuucaccagc

SEQ ID NO: 1317696 - RNA, 19 nt, Human
uccaccagaccaccagggg

SEQ ID NO: 1317697 - RNA, 21 nt, Human
uccaccagcucagcacaggag

SEQ ID NO: 1317698 - RNA, 24 nt, Human
uccaccgaacacuccaggaccagc

SEQ ID NO: 1317699 - RNA, 25 nt, Human
uccacgacacgagaggcaggggaac

SEQ ID NO: 1317700 - RNA, 19 nt, Human
uccacggaguacugcagga

SEQ ID NO: 1317701 - RNA, 19 nt, Human
uccagcgucagggacugcc

SEQ ID NO: 1317702 - RNA, 21 nt, Human
uccauccuucagccacaucag

SEQ ID NO: 1317703 - RNA, 18 nt, Human
ucccacgaugguggucac

SEQ ID NO: 1317704 - RNA, 18 nt, Human
ucccagagucggaggccu

SEQ ID NO: 1317705 - RNA, 18 nt, Human
ucccagccacagccuuca

SEQ ID NO: 1317706 - RNA, 19 nt, Human
ucccagguacaacagccuc

SEQ ID NO: 1317707 - RNA, 18 nt, Human
ucccaucgggcagggucc

SEQ ID NO: 1317708 - RNA, 21 nt, Human
uccccagaaggcuggauggug

SEQ ID NO: 1317709 - RNA, 22 nt, Human
uccccaggcaggguggugaaca

SEQ ID NO: 1317710 - RNA, 18 nt, Human
uccccauccuucauccac

SEQ ID NO: 1317711 - RNA, 24 nt, Human
uccccauggcacugcccgcacugu

SEQ ID NO: 1317712 - RNA, 22 nt, Human
uccccgagccgucugcucccug

SEQ ID NO: 1317713 - RNA, 18 nt, Human
uccccgagucaccagcuc

SEQ ID NO: 1317714 - RNA, 21 nt, Human
uccccgagucaccagcuccca

SEQ ID NO: 1317715 - RNA, 20 nt, Human
uccccuaugcacuggagggu

SEQ ID NO: 1317716 - RNA, 19 nt, Human
ucccggaaggacaggcugc

SEQ ID NO: 1317717 - RNA, 20 nt, Human
ucccggaaggacaggcugcc

SEQ ID NO: 1317718 - RNA, 21 nt, Human
ucccggaguccgacagccgug

SEQ ID NO: 1317719 - RNA, 18 nt, Human
ucccggcguucucugccc

SEQ ID NO: 1317720 - RNA, 19 nt, Human
ucccucagguccaccuucu

SEQ ID NO: 1317721 - RNA, 22 nt, Human
ucccuccaaggugccaggcccc

SEQ ID NO: 1317722 - RNA, 22 nt, Human
ucccucugggcggugccagccu

SEQ ID NO: 1317723 - RNA, 23 nt, Human
ucccucugggcggugccagccug

SEQ ID NO: 1317724 - RNA, 19 nt, Human
ucccucuugcucuccccag

SEQ ID NO: 1317725 - RNA, 24 nt, Human
ucccuguauuccgugacuccgccc

SEQ ID NO: 1317726 - RNA, 22 nt, Human
uccgacagccgugcucucccca

SEQ ID NO: 1317727 - RNA, 21 nt, Human
uccgcacggccuccccagcca

SEQ ID NO: 1317728 - RNA, 23 nt, Human
uccgcacggccuccccagccacg

SEQ ID NO: 1317729 - RNA, 24 nt, Human
uccgggaauugugugugggcgucc

SEQ ID NO: 1317730 - RNA, 23 nt, Human
uccucaaugugagggggcuccau

SEQ ID NO: 1317731 - RNA, 18 nt, Human
uccugagccagcugggcc

SEQ ID NO: 1317732 - RNA, 19 nt, Human
uccugagcggccccggcuc

SEQ ID NO: 1317733 - RNA, 25 nt, Human
uccuggaccugcaggugagggccuc

SEQ ID NO: 1317734 - RNA, 18 nt, Human
uccuggauccuggggaag

SEQ ID NO: 1317735 - RNA, 23 nt, Human
uccuggaucuccagccucugccc

SEQ ID NO: 1317736 - RNA, 24 nt, Human
uccuggggaccucugggagccugc

SEQ ID NO: 1317737 - RNA, 21 nt, Human
uccuggggcuccaccuggaac

SEQ ID NO: 1317738 - RNA, 21 nt, Human
uccuucagccaagugaccgug

SEQ ID NO: 1317739 - RNA, 24 nt, Human
ucgcauguguacaucccggagucc

SEQ ID NO: 1317740 - RNA, 20 nt, Human
ucggccacacacauguagcu

SEQ ID NO: 1317741 - RNA, 23 nt, Human
ucguggugccaggagaggguggg

SEQ ID NO: 1317742 - RNA, 23 nt, Human
ucucaaucuguagguucccccca

SEQ ID NO: 1317743 - RNA, 23 nt, Human
ucuccagccgcgacucguugcuc

SEQ ID NO: 1317744 - RNA, 21 nt, Human
ucuccagccucugcccacccc

SEQ ID NO: 1317745 - RNA, 18 nt, Human
ucucggccacacagcugu

SEQ ID NO: 1317746 - RNA, 23 nt, Human
ucucugaguggccggccugguuc

SEQ ID NO: 1317747 - RNA, 19 nt, Human
ucugagggggaacgugcac

SEQ ID NO: 1317748 - RNA, 19 nt, Human
ucugcagcccguggguacc

SEQ ID NO: 1317749 - RNA, 19 nt, Human
ucugcagcugcaggcccag

SEQ ID NO: 1317750 - RNA, 19 nt, Human
ucugcagcugcaggcccag

SEQ ID NO: 1317751 - RNA, 21 nt, Human
ucugcccgcaccagggggauc

SEQ ID NO: 1317752 - RNA, 19 nt, Human
ucugcccucccagccaggu

SEQ ID NO: 1317753 - RNA, 24 nt, Human
ucuugcucuccccagccagguugg

SEQ ID NO: 1317754 - RNA, 20 nt, Human
ugaagagacagguugguggc

SEQ ID NO: 1317755 - RNA, 22 nt, Human
ugacaggcuccuccccucggaa

SEQ ID NO: 1317756 - RNA, 21 nt, Human
ugacagucacggucaccuccu

SEQ ID NO: 1317757 - RNA, 20 nt, Human
ugaccaacacagggccuggc

SEQ ID NO: 1317758 - RNA, 19 nt, Human
ugacuccgccccgggccuc

SEQ ID NO: 1317759 - RNA, 18 nt, Human
ugagacguucacugcagg

SEQ ID NO: 1317760 - RNA, 22 nt, Human
ugagcuugggcuguggguggcc

SEQ ID NO: 1317761 - RNA, 18 nt, Human
ugagggcuucgcaugugu

SEQ ID NO: 1317762 - RNA, 19 nt, Human
ugaguccugggggccgggg

SEQ ID NO: 1317763 - RNA, 22 nt, Human
ugauccaguggauguccggcac

SEQ ID NO: 1317764 - RNA, 20 nt, Human
ugcaccugcagggcuuucag

SEQ ID NO: 1317765 - RNA, 21 nt, Human
ugcacuggagggucacaggcu

SEQ ID NO: 1317766 - RNA, 23 nt, Human
ugcacuguccucggccccuccca

SEQ ID NO: 1317767 - RNA, 22 nt, Human
ugcagagauaguuuccagcauc

SEQ ID NO: 1317768 - RNA, 22 nt, Human
ugcagccacuggauagugggua

SEQ ID NO: 1317769 - RNA, 25 nt, Human
ugcagcggugaccgccugggguguu

SEQ ID NO: 1317770 - RNA, 22 nt, Human
ugcaggcucugacccugguucu

SEQ ID NO: 1317771 - RNA, 25 nt, Human
ugccacacagcgguagcucccagca

SEQ ID NO: 1317772 - RNA, 22 nt, Human
ugccagcgucugccaauugcac

SEQ ID NO: 1317773 - RNA, 21 nt, Human
ugccaggugauguugggcugg

SEQ ID NO: 1317774 - RNA, 24 nt, Human
ugccuccagcugcaggcugggccc

SEQ ID NO: 1317775 - RNA, 22 nt, Human
ugccugcauccccagucuccac

SEQ ID NO: 1317776 - RNA, 18 nt, Human
ugccuggaggaccugcag

SEQ ID NO: 1317777 - RNA, 20 nt, Human
ugccuggaggaccugcagga

SEQ ID NO: 1317778 - RNA, 18 nt, Human
ugccuugcuccaggacac

SEQ ID NO: 1317779 - RNA, 21 nt, Human
ugccuugcuccaggacacggu

SEQ ID NO: 1317780 - RNA, 25 nt, Human
ugccuugcuccaggacacggucgga

SEQ ID NO: 1317781 - RNA, 18 nt, Human
ugcgagggguggggcugc

SEQ ID NO: 1317782 - RNA, 23 nt, Human
ugcgcugggagagcgggaggggc

SEQ ID NO: 1317783 - RNA, 18 nt, Human
ugcugcuguggaugcugc

SEQ ID NO: 1317784 - RNA, 19 nt, Human
ugcugguggggagcagggc

SEQ ID NO: 1317785 - RNA, 19 nt, Human
uggacaggucugggaggcc

SEQ ID NO: 1317786 - RNA, 18 nt, Human
uggagauggaagggggga

SEQ ID NO: 1317787 - RNA, 24 nt, Human
uggaggagggugcgcugggagagc

SEQ ID NO: 1317788 - RNA, 21 nt, Human
uggaugccucccccgggcucu

SEQ ID NO: 1317789 - RNA, 21 nt, Human
uggauguccggcacugggucu

SEQ ID NO: 1317790 - RNA, 19 nt, Human
uggcaggcgaagaggccug

SEQ ID NO: 1317791 - RNA, 18 nt, Human
uggcaggcuggguggcag

SEQ ID NO: 1317792 - RNA, 20 nt, Human
uggcaggcuggguggcagug

SEQ ID NO: 1317793 - RNA, 23 nt, Human
uggcaugggcaauccgcagcugu

SEQ ID NO: 1317794 - RNA, 18 nt, Human
uggccagagccguggagg

SEQ ID NO: 1317795 - RNA, 21 nt, Human
uggcccagcgggcugccgucc

SEQ ID NO: 1317796 - RNA, 18 nt, Human
uggccggccugguucagu

SEQ ID NO: 1317797 - RNA, 23 nt, Human
uggcguggcucuggcacuccagg

SEQ ID NO: 1317798 - RNA, 21 nt, Human
uggcuggauucucagggaacc

SEQ ID NO: 1317799 - RNA, 25 nt, Human
ugggagcagcuggauguuccuggag

SEQ ID NO: 1317800 - RNA, 21 nt, Human
ugggaggaaccagcaccucca

SEQ ID NO: 1317801 - RNA, 19 nt, Human
ugggcugaguccugggggc

SEQ ID NO: 1317802 - RNA, 19 nt, Human
ugggcuggaucuggagcag

SEQ ID NO: 1317803 - RNA, 23 nt, Human
ugggcuguggguggccugugacg

SEQ ID NO: 1317804 - RNA, 21 nt, Human
uggggaaguggagggacuggc

SEQ ID NO: 1317805 - RNA, 22 nt, Human
uggggagauguggugagcaucu

SEQ ID NO: 1317806 - RNA, 20 nt, Human
uggggccaggccgaccacaa

SEQ ID NO: 1317807 - RNA, 21 nt, Human
uggggcuccugggauccaggg

SEQ ID NO: 1317808 - RNA, 18 nt, Human
ugggggaagggaaggcca

SEQ ID NO: 1317809 - RNA, 18 nt, Human
ugggggcaccgguggcau

SEQ ID NO: 1317810 - RNA, 21 nt, Human
ugggggccgggggccgugagg

SEQ ID NO: 1317811 - RNA, 21 nt, Human
ugggguguucucgcagagcug

SEQ ID NO: 1317812 - RNA, 21 nt, Human
ugggguucucaaauguugggg

SEQ ID NO: 1317813 - RNA, 25 nt, Human
ugggucuccacgcaccacacagucu

SEQ ID NO: 1317814 - RNA, 22 nt, Human
ugggugccaggcaggaggaaga

SEQ ID NO: 1317815 - RNA, 23 nt, Human
uggucggccgggggaugccugag

SEQ ID NO: 1317816 - RNA, 19 nt, Human
uggugaggugcacgcggcg

SEQ ID NO: 1317817 - RNA, 19 nt, Human
ugguucugcagcugcaggc

SEQ ID NO: 1317818 - RNA, 20 nt, Human
ugucccaggugauguugggc

SEQ ID NO: 1317819 - RNA, 21 nt, Human
uguccuccccggggcugacag

SEQ ID NO: 1317820 - RNA, 23 nt, Human
ugugcagcuguagucgccgcugu

SEQ ID NO: 1317821 - RNA, 18 nt, Human
ugugccuccugcaucacg

SEQ ID NO: 1317822 - RNA, 21 nt, Human
ugugggcguccuccugcagca

SEQ ID NO: 1317823 - RNA, 19 nt, Human
ugugggcucuccaguggcc

SEQ ID NO: 1317824 - RNA, 22 nt, Human
uguuguucuccagccuggucag

SEQ ID NO: 1317825 - RNA, 21 nt, Human
uucacugagacguucacugca

SEQ ID NO: 1317826 - RNA, 20 nt, Human
uucagccaccaggagcugug

SEQ ID NO: 1317827 - RNA, 23 nt, Human
uuccaccagaccaccaggggcuu

SEQ ID NO: 1317828 - RNA, 22 nt, Human
uuccaccagcuccuucagcacc

SEQ ID NO: 1317829 - RNA, 21 nt, Human
uuccuccgugccuccccagcc

SEQ ID NO: 1317830 - RNA, 19 nt, Human
uuccuggaucuccagccuc

SEQ ID NO: 1317831 - RNA, 22 nt, Human
uuccuucugggcauucaggauc

SEQ ID NO: 1317832 - RNA, 26 nt, Human
uucucagccacgcacguguaggugcc

SEQ ID NO: 1317833 - RNA, 20 nt, Human
uucuccagccacaggcuccc

SEQ ID NO: 1317834 - RNA, 19 nt, Human
uucuccagccuggucaggg

SEQ ID NO: 1317835 - RNA, 19 nt, Human
uucucgaucacugguggga

SEQ ID NO: 1317836 - RNA, 23 nt, Human
uucucggccacacacauguagcu

SEQ ID NO: 1317837 - RNA, 24 nt, Human
uucuggaacauggggggcaccugg

SEQ ID NO: 1317838 - RNA, 19 nt, Human
uugaaccaggugauguuug

SEQ ID NO: 1317839 - RNA, 20 nt, Human
uugaaccaggugauguuugg

SEQ ID NO: 1317840 - RNA, 21 nt, Human
uugaaccaugugagcuugggc

SEQ ID NO: 1317841 - RNA, 21 nt, Human
uugcugacuuuacagcuguau

SEQ ID NO: 1317842 - RNA, 24 nt, Human
uuuccggccauuuaucaccccagu

SEQ ID NO: 1317843 - RNA, 18 nt, Human
uuuggagauggaaggggg

SEQ ID NO: 1317844 - RNA, 24 nt, Human
agugacacauguuucuucccuccu

SEQ ID NO: 1317845 - RNA, 18 nt, Human
gagugacacauguuucuu

SEQ ID NO: 1317846 - RNA, 18 nt, Human
accuuaaaaagaucagaa

SEQ ID NO: 1317847 - RNA, 20 nt, Human
aggucugcagccgcccgcag

SEQ ID NO: 1317848 - RNA, 23 nt, Human
aggucugcagccgcccgcagccu

SEQ ID NO: 1317849 - RNA, 19 nt, Human
auuccgguccccucccgcc

SEQ ID NO: 1317850 - RNA, 21 nt, Human
cacaggcuauaaauaugaagc

SEQ ID NO: 1317851 - RNA, 25 nt, Human
ccagugaaccuuaaaaagaucagaa

SEQ ID NO: 1317852 - RNA, 23 nt, Human
ccgccgcgugccucucgccgucc

SEQ ID NO: 1317853 - RNA, 23 nt, Human
cgccgcgugccucucgccguccc

SEQ ID NO: 1317854 - RNA, 22 nt, Human
cggcgggccggucuccgcuccc

SEQ ID NO: 1317855 - RNA, 19 nt, Human
cggcgucgggggcggcggg

SEQ ID NO: 1317856 - RNA, 22 nt, Human
cgggccggucuccgcucccagg

SEQ ID NO: 1317857 - RNA, 18 nt, Human
cuccgagccccggcugcg

SEQ ID NO: 1317858 - RNA, 21 nt, Human
cugcggauuccgguccccucc

SEQ ID NO: 1317859 - RNA, 22 nt, Human
gcggcgucgggggcggcgggcc

SEQ ID NO: 1317860 - RNA, 22 nt, Human
ggcggcgggccggucuccgcuc

SEQ ID NO: 1317861 - RNA, 22 nt, Human
gugaaccuuaaaaagaucagaa

SEQ ID NO: 1317862 - RNA, 25 nt, Human
uaccacaggcuauaaauaugaagca

SEQ ID NO: 1317863 - RNA, 20 nt, Human
ucgccgcccgucguucugcc

SEQ ID NO: 1317864 - RNA, 23 nt, Human
ucgggggcggcgggccggucucc

SEQ ID NO: 1317865 - RNA, 21 nt, Human
ugaagcaauauuucagcaaga

SEQ ID NO: 1317866 - RNA, 21 nt, Human
ugaugguaaaaacuaaaaacc

SEQ ID NO: 1317867 - RNA, 20 nt, Human
ugguuaauacaccagugaac

SEQ ID NO: 1317868 - RNA, 20 nt, Human
aaaguuuuaguagauuuucc

SEQ ID NO: 1317869 - RNA, 24 nt, Human
acgaggaaccacacuucgugagcc

SEQ ID NO: 1317870 - RNA, 23 nt, Human
agaccuauguucauucucucugg

SEQ ID NO: 1317871 - RNA, 19 nt, Human
caacacugagaagaucaaa

SEQ ID NO: 1317872 - RNA, 21 nt, Human
caacacugagaagaucaaaua

SEQ ID NO: 1317873 - RNA, 18 nt, Human
cacugagaagaucaaaua

SEQ ID NO: 1317874 - RNA, 21 nt, Human
cucucuggauuaauggugaaa

SEQ ID NO: 1317875 - RNA, 27 nt, Human
gaaccacacuucgugaggugcccuagc

SEQ ID NO: 1317876 - RNA, 24 nt, Human
ucucucuggauuaauggugaaagu

SEQ ID NO: 1317877 - RNA, 20 nt, Human
ucugagaccuauguucauuc

SEQ ID NO: 1317878 - RNA, 28 nt, Human
uggaaaaagugcugacacuaugcucauu

SEQ ID NO: 1317879 - RNA, 22 nt, Human
uuaguagauuuuccaacacuga

SEQ ID NO: 1317880 - RNA, 22 nt, Human
uuccugagcaaugaacugaaua

SEQ ID NO: 1317881 - RNA, 23 nt, Human
accccgaagagcaggcugaagag

SEQ ID NO: 1317882 - RNA, 18 nt, Human
agcgggccuuccgcgagg

SEQ ID NO: 1317883 - RNA, 19 nt, Human
cacgaagaccccgaagagc

SEQ ID NO: 1317884 - RNA, 20 nt, Human
ccagcugguagacacgaaga

SEQ ID NO: 1317885 - RNA, 21 nt, Human
cgaagagcaggcugaagagca

SEQ ID NO: 1317886 - RNA, 22 nt, Human
cgagcgggccuuccgcgaggcc

SEQ ID NO: 1317887 - RNA, 23 nt, Human
cgagcgggccuuccgcgaggccu

SEQ ID NO: 1317888 - RNA, 18 nt, Human
gaagaccccgaagagcag

SEQ ID NO: 1317889 - RNA, 21 nt, Human
gaagagcaccagcgagcgggc

SEQ ID NO: 1317890 - RNA, 25 nt, Human
gaccccgaagagcaggcugaagagc

SEQ ID NO: 1317891 - RNA, 22 nt, Human
uagacacgaagaccccgaagag

SEQ ID NO: 1317892 - RNA, 20 nt, Human
uccgcgaggccuccucagcc

SEQ ID NO: 1317893 - RNA, 20 nt, Human
aggcacuucuugaggacagc

SEQ ID NO: 1317894 - RNA, 23 nt, Human
cuuaaggcacuucuugaggacag

SEQ ID NO: 1317895 - RNA, 18 nt, Human
ugagauuacaagagaguu

SEQ ID NO: 1317896 - RNA, 20 nt, Human
ugaggacagcugagauuaca

SEQ ID NO: 1317897 - RNA, 22 nt, Human
aaacaaucagaaaaagagggac

SEQ ID NO: 1317898 - RNA, 19 nt, Human
aacaaucagaaaaagaggg

SEQ ID NO: 1317899 - RNA, 19 nt, Human
acauuguccucauaaaucc

SEQ ID NO: 1317900 - RNA, 19 nt, Human
accaaaaccaugaucgagu

SEQ ID NO: 1317901 - RNA, 20 nt, Human
cacauuguccucauaaaucc

SEQ ID NO: 1317902 - RNA, 21 nt, Human
ccagcaucauccugauaccaa

SEQ ID NO: 1317903 - RNA, 22 nt, Human
ccauuccuucugaaacuauucc

SEQ ID NO: 1317904 - RNA, 18 nt, Human
cccugggaugcaaggcug

SEQ ID NO: 1317905 - RNA, 24 nt, Human
cugauaccaaaaccaugaucgagu

SEQ ID NO: 1317906 - RNA, 20 nt, Human
gagguacaaagaggagcugg

SEQ ID NO: 1317907 - RNA, 20 nt, Human
gccugaguccaucacuuucc

SEQ ID NO: 1317908 - RNA, 22 nt, Human
gcuauaagccugaguccaucac

SEQ ID NO: 1317909 - RNA, 24 nt, Human
ggagcagaaaauucaggcccugug

SEQ ID NO: 1317910 - RNA, 22 nt, Human
guauuccaucacaucaacagaa

SEQ ID NO: 1317911 - RNA, 23 nt, Human
uauuccaaacaaucagaaaaaga

SEQ ID NO: 1317912 - RNA, 19 nt, Human
ucccugggaugcaaggcug

SEQ ID NO: 1317913 - RNA, 21 nt, Human
ugcaccagagguacaaagagg

SEQ ID NO: 1317914 - RNA, 21 nt, Human
ugccuaugcuauaagccugag

SEQ ID NO: 1317915 - RNA, 24 nt, Human
uucaacauacacaaaucaguaaac

SEQ ID NO: 1317916 - RNA, 23 nt, Human
uugcaccagagguacaaagagga

SEQ ID NO: 1317917 - RNA, 22 nt, Human
uuuaauaguugagcuguggagu

SEQ ID NO: 1317918 - RNA, 25 nt, Human
uuuaugaggccagcaucauccugau

SEQ ID NO: 1317919 - RNA, 26 nt, Human
aacagaauuaaaacucccaagggucu

SEQ ID NO: 1317920 - RNA, 21 nt, Human
aagcaguggaggccccacagg

SEQ ID NO: 1317921 - RNA, 22 nt, Human
agcaguggaggccccacagggc

SEQ ID NO: 1317922 - RNA, 18 nt, Human
cacagggcaaguacaaaa

SEQ ID NO: 1317923 - RNA, 19 nt, Human
cacagggcaaguacaaaac

SEQ ID NO: 1317924 - RNA, 21 nt, Human
cacagggcaaguacaaaacag

SEQ ID NO: 1317925 - RNA, 26 nt, Human
gucucccauagaaaagcaguggaggc

SEQ ID NO: 1317926 - RNA, 18 nt, Human
ccacuggugcugcauccu

SEQ ID NO: 1317927 - RNA, 22 nt, Human
cugcauccuuugcugggggccu

SEQ ID NO: 1317928 - RNA, 21 nt, Human
uuggucacagugauuauucuu

SEQ ID NO: 1317929 - RNA, 21 nt, Human
aaaaacaucaaaacuauaagc

SEQ ID NO: 1317930 - RNA, 20 nt, Human
aaaauggacaaauguuagaa

SEQ ID NO: 1317931 - RNA, 22 nt, Human
aacagacacauuuuacuaaaau

SEQ ID NO: 1317932 - RNA, 18 nt, Human
aaccugccucccauucua

SEQ ID NO: 1317933 - RNA, 23 nt, Human
aacuaaaaucaauuaguaagaca

SEQ ID NO: 1317934 - RNA, 19 nt, Human
aacuguuaccccauccuuu

SEQ ID NO: 1317935 - RNA, 25 nt, Human
aagcgauucuccugccucagccucc

SEQ ID NO: 1317936 - RNA, 24 nt, Human
aaggugcugggauuauagguuuga

SEQ ID NO: 1317937 - RNA, 23 nt, Human
acagugcccggccuacaucugcu

SEQ ID NO: 1317938 - RNA, 22 nt, Human
accauguuggagguuggucucg

SEQ ID NO: 1317939 - RNA, 19 nt, Human
acccugguaaauauuaugg

SEQ ID NO: 1317940 - RNA, 19 nt, Human
acgggguuucaccauguug

SEQ ID NO: 1317941 - RNA, 20 nt, Human
acgggguuucaccauguugg

SEQ ID NO: 1317942 - RNA, 22 nt, Human
acgggguuucaccauguuggag

SEQ ID NO: 1317943 - RNA, 24 nt, Human
acgggguuucaccauguuggaggu

SEQ ID NO: 1317944 - RNA, 19 nt, Human
acuacaggugugugccacu

SEQ ID NO: 1317945 - RNA, 23 nt, Human
acugugcuauugcauagcaacag

SEQ ID NO: 1317946 - RNA, 18 nt, Human
agaaaaccugagaugaug

SEQ ID NO: 1317947 - RNA, 19 nt, Human
agaaaacuauuuaucuauu

SEQ ID NO: 1317948 - RNA, 19 nt, Human
agaaaugcauuuucgucuu

SEQ ID NO: 1317949 - RNA, 18 nt, Human
agacagaaucuugcuaug

SEQ ID NO: 1317950 - RNA, 21 nt, Human
agagacagaaucuugcuaugu

SEQ ID NO: 1317951 - RNA, 23 nt, Human
agcacaaucucagcucacugcaa

SEQ ID NO: 1317952 - RNA, 21 nt, Human
agcaccaucuuguaaaaugau

SEQ ID NO: 1317953 - RNA, 23 nt, Human
agcagcugggacuacaggugugu

SEQ ID NO: 1317954 - RNA, 24 nt, Human
agcgauucuccugccucagccucc

SEQ ID NO: 1317955 - RNA, 23 nt, Human
aggagaucauaaaaacaucaaaa

SEQ ID NO: 1317956 - RNA, 18 nt, Human
agggcaaaccugccuccc

SEQ ID NO: 1317957 - RNA, 24 nt, Human
aggugauccacccaccuuggccuc

SEQ ID NO: 1317958 - RNA, 26 nt, Human
aggugcugggauuauagguuugagcu

SEQ ID NO: 1317959 - RNA, 25 nt, Human
agguuggagugcagcagcacaaucu

SEQ ID NO: 1317960 - RNA, 23 nt, Human
agguuugagcuacagugcccggc

SEQ ID NO: 1317961 - RNA, 23 nt, Human
aguaacugggacugcaggcgcac

SEQ ID NO: 1317962 - RNA, 23 nt, Human
agugcaacuguuugucucucauc

SEQ ID NO: 1317963 - RNA, 24 nt, Human
agugcagcagcacaaucucagcuc

SEQ ID NO: 1317964 - RNA, 19 nt, Human
aucaaguguugcagguuua

SEQ ID NO: 1317965 - RNA, 22 nt, Human
caaaaccacugugcuauugcau

SEQ ID NO: 1317966 - RNA, 22 nt, Human
caagcgauucuccugccucagc

SEQ ID NO: 1317967 - RNA, 18 nt, Human
caaggugcugggauuaua

SEQ ID NO: 1317968 - RNA, 22 nt, Human
caagugaucuuccugccucagc

SEQ ID NO: 1317969 - RNA, 24 nt, Human
cacaccaccaugcccagcuaauuu

SEQ ID NO: 1317970 - RNA, 24 nt, Human
caccaugcccagcuaauuuuugua

SEQ ID NO: 1317971 - RNA, 22 nt, Human
caccauguuggagguuggucuc

SEQ ID NO: 1317972 - RNA, 18 nt, Human
cacugcaaccuuugccuc

SEQ ID NO: 1317973 - RNA, 21 nt, Human
cacugcaaccuuugccuccca

SEQ ID NO: 1317974 - RNA, 23 nt, Human
cacugcagauuugaacuccuggg

SEQ ID NO: 1317975 - RNA, 18 nt, Human
cagcagcacaaucucagc

SEQ ID NO: 1317976 - RNA, 23 nt, Human
cagccucccaaguaacugggacu

SEQ ID NO: 1317977 - RNA, 26 nt, Human
caguguaagauaacaccuucagauua

SEQ ID NO: 1317978 - RNA, 24 nt, Human
caucugcuuuuuauacucucuccu

SEQ ID NO: 1317979 - RNA, 18 nt, Human
caugugcagcuuuacaug

SEQ ID NO: 1317980 - RNA, 19 nt, Human
cauuccaugugggccugcg

SEQ ID NO: 1317981 - RNA, 21 nt, Human
cauuccaugugggccugcgcu

SEQ ID NO: 1317982 - RNA, 19 nt, Human
cauuuucgucuucauggaa

SEQ ID NO: 1317983 - RNA, 18 nt, Human
ccaaggugcugggauuau

SEQ ID NO: 1317984 - RNA, 22 nt, Human
ccaaggugcugggauuauaggu

SEQ ID NO: 1317985 - RNA, 24 nt, Human
cccaaggugcugggauuauagguu

SEQ ID NO: 1317986 - RNA, 24 nt, Human
cccaaguaacugggacugcaggcg

SEQ ID NO: 1317987 - RNA, 20 nt, Human
cccagguucaagcgauucuc

SEQ ID NO: 1317988 - RNA, 23 nt, Human
cccagguucaagcgauucuccug

SEQ ID NO: 1317989 - RNA, 24 nt, Human
cccauuaaaagugaaccccagaca

SEQ ID NO: 1317990 - RNA, 21 nt, Human
ccccagaaauagacucuuacu

SEQ ID NO: 1317991 - RNA, 20 nt, Human
ccccgcuaccagucuuccuc

SEQ ID NO: 1317992 - RNA, 19 nt, Human
ccucagccucaggagcagc

SEQ ID NO: 1317993 - RNA, 24 nt, Human
ccucccagguucaagcgauucucc

SEQ ID NO: 1317994 - RNA, 24 nt, Human
ccucccuuugcuucaaauuguccc

SEQ ID NO: 1317995 - RNA, 24 nt, Human
ccugaccucaggugauccacccac

SEQ ID NO: 1317996 - RNA, 18 nt, Human
ccugcgcuacuuuucugu

SEQ ID NO: 1317997 - RNA, 18 nt, Human
ccuggaagcccccucccc

SEQ ID NO: 1317998 - RNA, 22 nt, Human
ccuggguucaagugaucuuccu

SEQ ID NO: 1317999 - RNA, 23 nt, Human
ccuggguucaagugaucuuccug

SEQ ID NO: 1318000 - RNA, 22 nt, Human
ccugguaaauauuauggaaaag

SEQ ID NO: 1318001 - RNA, 23 nt, Human
cgcacaccaccaugcccagcuaa

SEQ ID NO: 1318002 - RNA, 20 nt, Human
cggauguguguccucaaccu

SEQ ID NO: 1318003 - RNA, 20 nt, Human
cgugacugaggcauuuggac

SEQ ID NO: 1318004 - RNA, 19 nt, Human
cuaaacccauuaaaaguga

SEQ ID NO: 1318005 - RNA, 18 nt, Human
cuaaaguuauggccaggu

SEQ ID NO: 1318006 - RNA, 26 nt, Human
cuaagauaaaugcagaucugacuguc

SEQ ID NO: 1318007 - RNA, 24 nt, Human
cucacugcaaccuuugccucccag

SEQ ID NO: 1318008 - RNA, 24 nt, Human
cucacugcaaccuuugccucccag

SEQ ID NO: 1318009 - RNA, 24 nt, Human
cucaggugauccacccaccuuggc

SEQ ID NO: 1318010 - RNA, 23 nt, Human
cuccugccucagccucccaagua

SEQ ID NO: 1318011 - RNA, 23 nt, Human
cugcaaccuuugccucccagguu

SEQ ID NO: 1318012 - RNA, 24 nt, Human
cugcaaccuuugccucccagguuc

SEQ ID NO: 1318013 - RNA, 24 nt, Human
cugcuuagggcaaaccugccuccc

SEQ ID NO: 1318014 - RNA, 19 nt, Human
cuggaagcccccuccccgc

SEQ ID NO: 1318015 - RNA, 27 nt, Human
cuggcucuucccaugugggggacgauc

SEQ ID NO: 1318016 - RNA, 21 nt, Human
gaaacugcuuagggcaaaccu

SEQ ID NO: 1318017 - RNA, 20 nt, Human
gaaccccagacaaacuaaaa

SEQ ID NO: 1318018 - RNA, 24 nt, Human
gacacgaaauagccagguaaacac

SEQ ID NO: 1318019 - RNA, 24 nt, Human
gaccucaggugauccacccaccuu

SEQ ID NO: 1318020 - RNA, 21 nt, Human
gacuacaggugugugccacug

SEQ ID NO: 1318021 - RNA, 24 nt, Human
gacuacaggugugugccacugugc

SEQ ID NO: 1318022 - RNA, 24 nt, Human
gacugcaggcgcacaccaccaugc

SEQ ID NO: 1318023 - RNA, 21 nt, Human
gagauggagucuugcucuguc

SEQ ID NO: 1318024 - RNA, 20 nt, Human
gagcagcugggacuacaggu

SEQ ID NO: 1318025 - RNA, 26 nt, Human
gagcagcugggacuacaggugugugc

SEQ ID NO: 1318026 - RNA, 22 nt, Human
gcaaccuuugccucccagguuc

SEQ ID NO: 1318027 - RNA, 24 nt, Human
gcacugcagauuugaacuccuggg

SEQ ID NO: 1318028 - RNA, 19 nt, Human
gcagcugggacuacaggug

SEQ ID NO: 1318029 - RNA, 22 nt, Human
gcccagcuaauuuuuguauuuu

SEQ ID NO: 1318030 - RNA, 24 nt, Human
gcgauucuccugccucagccuccc

SEQ ID NO: 1318031 - RNA, 20 nt, Human
gcuauugaaggacucuagau

SEQ ID NO: 1318032 - RNA, 19 nt, Human
gcucugucgcccagguugg

SEQ ID NO: 1318033 - RNA, 22 nt, Human
ggacgcugaucaucucauuuuu

SEQ ID NO: 1318034 - RNA, 20 nt, Human
ggacuacaggugugugccac

SEQ ID NO: 1318035 - RNA, 23 nt, Human
ggagucuugcucugucgcccagg

SEQ ID NO: 1318036 - RNA, 19 nt, Human
gguacgggguuucaccaug

SEQ ID NO: 1318037 - RNA, 23 nt, Human
gguagagagacaaaacuuaugug

SEQ ID NO: 1318038 - RNA, 19 nt, Human
ggucucgaacuccugaccu

SEQ ID NO: 1318039 - RNA, 24 nt, Human
ggugcugggauuauagguuugagc

SEQ ID NO: 1318040 - RNA, 24 nt, Human
gguuggucucgaacuccugaccuc

SEQ ID NO: 1318041 - RNA, 24 nt, Human
gugauccacccaccuuggccuccc

SEQ ID NO: 1318042 - RNA, 21 nt, Human
gugaucuuccugccucagccu

SEQ ID NO: 1318043 - RNA, 19 nt, Human
guuuggacaccaaucauuc

SEQ ID NO: 1318044 - RNA, 23 nt, Human
uaaaaacaucaaaacuauaagcc

SEQ ID NO: 1318045 - RNA, 18 nt, Human
uaaaagaaguuacuguuu

SEQ ID NO: 1318046 - RNA, 19 nt, Human
uaacugggacugcaggcgc

SEQ ID NO: 1318047 - RNA, 23 nt, Human
uaacuguaaaauuucugucuccu

SEQ ID NO: 1318048 - RNA, 19 nt, Human
uaagauaaaugcagaucug

SEQ ID NO: 1318049 - RNA, 21 nt, Human
uaauuuuuguauuuuuauuag

SEQ ID NO: 1318050 - RNA, 23 nt, Human
uaccccauccuuuuuauguuucu

SEQ ID NO: 1318051 - RNA, 21 nt, Human
uacucauguaagaaaaucaca

SEQ ID NO: 1318052 - RNA, 21 nt, Human
uagcaauuacagauguacuca

SEQ ID NO: 1318053 - RNA, 20 nt, Human
uagguacgggguuucaccau

SEQ ID NO: 1318054 - RNA, 21 nt, Human
uagguacgggguuucaccaug

SEQ ID NO: 1318055 - RNA, 19 nt, Human
uaguaagacaaagcacauc

SEQ ID NO: 1318056 - RNA, 19 nt, Human
uaucagcuagcugggcucu

SEQ ID NO: 1318057 - RNA, 18 nt, Human
uauguuacccagauugga

SEQ ID NO: 1318058 - RNA, 24 nt, Human
uauuagguacgggguuucaccaug

SEQ ID NO: 1318059 - RNA, 19 nt, Human
ucaagugaucuuccugccu

SEQ ID NO: 1318060 - RNA, 19 nt, Human
ucacugcaaccuuugccuc

SEQ ID NO: 1318061 - RNA, 24 nt, Human
ucacugcaaccuuugccucccagg

SEQ ID NO: 1318062 - RNA, 25 nt, Human
ucacugcaaccuuugccucccaggu

SEQ ID NO: 1318063 - RNA, 27 nt, Human
ucagcucacugcaaccuuugccuccca

SEQ ID NO: 1318064 - RNA, 19 nt, Human
ucaucuaucugugaccugg

SEQ ID NO: 1318065 - RNA, 23 nt, Human
ucccaaggugcugggauuauagg

SEQ ID NO: 1318066 - RNA, 24 nt, Human
ucccaaguaacugggacugcaggc

SEQ ID NO: 1318067 - RNA, 21 nt, Human
ucccagguucaagcgauucuc

SEQ ID NO: 1318068 - RNA, 24 nt, Human
ucccagguucaagcgauucuccug

SEQ ID NO: 1318069 - RNA, 22 nt, Human
ucccuaaaauguauaaaaccaa

SEQ ID NO: 1318070 - RNA, 21 nt, Human
uccugccucagccucaggagc

SEQ ID NO: 1318071 - RNA, 20 nt, Human
uccuggguucaagugaucuu

SEQ ID NO: 1318072 - RNA, 24 nt, Human
uccuggguucaagugaucuuccug

SEQ ID NO: 1318073 - RNA, 18 nt, Human
ucgcccagguuggagugc

SEQ ID NO: 1318074 - RNA, 20 nt, Human
ucucacuucgaucucuucca

SEQ ID NO: 1318075 - RNA, 23 nt, Human
ucucgaacuccugaccucaggug

SEQ ID NO: 1318076 - RNA, 20 nt, Human
ucugguaaguauugugaaag

SEQ ID NO: 1318077 - RNA, 24 nt, Human
ucugucgcccagguuggagugcag

SEQ ID NO: 1318078 - RNA, 19 nt, Human
ucugugaucuggcucuucc

SEQ ID NO: 1318079 - RNA, 23 nt, Human
ucugugaucuggcucuucccaug

SEQ ID NO: 1318080 - RNA, 23 nt, Human
ucuugcuauguuacccagauugg

SEQ ID NO: 1318081 - RNA, 24 nt, Human
ucuugcuauguuacccagauugga

SEQ ID NO: 1318082 - RNA, 23 nt, Human
ucuugcucugucgcccagguugg

SEQ ID NO: 1318083 - RNA, 24 nt, Human
ucuugcucugucgcccagguugga

SEQ ID NO: 1318084 - RNA, 21 nt, Human
ucuugggccuccaaaaucacu

SEQ ID NO: 1318085 - RNA, 21 nt, Human
ugaccucaggugauccaccca

SEQ ID NO: 1318086 - RNA, 24 nt, Human
ugaccucaggugauccacccaccu

SEQ ID NO: 1318087 - RNA, 18 nt, Human
ugaccuggaagcccccuc

SEQ ID NO: 1318088 - RNA, 19 nt, Human
ugagagcuccagagacuug

SEQ ID NO: 1318089 - RNA, 24 nt, Human
ugauccacccaccuuggccuccca

SEQ ID NO: 1318090 - RNA, 23 nt, Human
ugauuuacaguguaagauaacac

SEQ ID NO: 1318091 - RNA, 21 nt, Human
ugccucagccucaggagcagc

SEQ ID NO: 1318092 - RNA, 24 nt, Human
ugccucagccucaggagcagcugg

SEQ ID NO: 1318093 - RNA, 24 nt, Human
ugccucagccucccaaguaacugg

SEQ ID NO: 1318094 - RNA, 21 nt, Human
ugcuauugaaggacucuagau

SEQ ID NO: 1318095 - RNA, 24 nt, Human
ugcucugucgcccagguuggagug

SEQ ID NO: 1318096 - RNA, 25 nt, Human
ugcucuuguuuccuuucuaguucuc

SEQ ID NO: 1318097 - RNA, 20 nt, Human
uggaauuugggguauuaaga

SEQ ID NO: 1318098 - RNA, 22 nt, Human
uggagguuggucucgaacuccu

SEQ ID NO: 1318099 - RNA, 23 nt, Human
uggagucuugcucugucgcccag

SEQ ID NO: 1318100 - RNA, 24 nt, Human
uggagucuugcucugucgcccagg

SEQ ID NO: 1318101 - RNA, 21 nt, Human
ugggacuacaggugugugcca

SEQ ID NO: 1318102 - RNA, 22 nt, Human
ugggacuacaggugugugccac

SEQ ID NO: 1318103 - RNA, 22 nt, Human
ugggacuacaggugugugccac

SEQ ID NO: 1318104 - RNA, 22 nt, Human
ugggacuacaggugugugccac

SEQ ID NO: 1318105 - RNA, 24 nt, Human
ugggacuacaggugugugccacug

SEQ ID NO: 1318106 - RNA, 22 nt, Human
ugggacugcaggcgcacaccac

SEQ ID NO: 1318107 - RNA, 18 nt, Human
ugggauuauagguuugag

SEQ ID NO: 1318108 - RNA, 19 nt, Human
ugggauuauagguuugagc

SEQ ID NO: 1318109 - RNA, 22 nt, Human
ugggauuauagguuugagcuac

SEQ ID NO: 1318110 - RNA, 22 nt, Human
ugggauuauagguuugagcuac

SEQ ID NO: 1318111 - RNA, 23 nt, Human
uggguucaagugaucuuccugcc

SEQ ID NO: 1318112 - RNA, 24 nt, Human
uggguucaagugaucuuccugccu

SEQ ID NO: 1318113 - RNA, 24 nt, Human
uuaaaaugugucaguuugguuaca

SEQ ID NO: 1318114 - RNA, 18 nt, Human
uuaacaaaggaguaaucu

SEQ ID NO: 1318115 - RNA, 23 nt, Human
uuaaccauuuacagacguauuua

SEQ ID NO: 1318116 - RNA, 21 nt, Human
uuaggacacgaaauagccagg

SEQ ID NO: 1318117 - RNA, 24 nt, Human
uuauuagguacgggguuucaccau

SEQ ID NO: 1318118 - RNA, 21 nt, Human
uucaagcgauucuccugccuc

SEQ ID NO: 1318119 - RNA, 23 nt, Human
uucaagcgauucuccugccucag

SEQ ID NO: 1318120 - RNA, 24 nt, Human
uucaagcgauucuccugccucagc

SEQ ID NO: 1318121 - RNA, 21 nt, Human
uucaagugaucuuccugccuc

SEQ ID NO: 1318122 - RNA, 23 nt, Human
uucaagugaucuuccugccucag

SEQ ID NO: 1318123 - RNA, 24 nt, Human
uucaagugaucuuccugccucagc

SEQ ID NO: 1318124 - RNA, 22 nt, Human
uuccugccucagccucaggagc

SEQ ID NO: 1318125 - RNA, 18 nt, Human
uuggccucccaaggugcu

SEQ ID NO: 1318126 - RNA, 20 nt, Human
uugggguauuaagaauagaa

SEQ ID NO: 1318127 - RNA, 23 nt, Human
uuuaaaaacaacaauauacacaa

SEQ ID NO: 1318128 - RNA, 21 nt, Human
uuuaacauucauuucccauua

SEQ ID NO: 1318129 - RNA, 21 nt, Human
uuucagaaaaauaaaaccuaa

SEQ ID NO: 1318130 - RNA, 24 nt, Human
uuugagagguagugaggaaagaaa

SEQ ID NO: 1318131 - RNA, 20 nt, Human
uuuuauggauuuuguaauuu

SEQ ID NO: 1318132 - RNA, 24 nt, Human
uuuuuauuagguacgggguuucac

SEQ ID NO: 1318133 - RNA, 18 nt, Human
uuuuuguauuuuuauuag

SEQ ID NO: 1318134 - RNA, 22 nt, Human
cagucugcagacccaggcucac

SEQ ID NO: 1318135 - RNA, 27 nt, Human
ccgccgucguccccgcgcggugguccg

SEQ ID NO: 1318136 - RNA, 20 nt, Human
cgucaaaaacgcgcccuacu

SEQ ID NO: 1318137 - RNA, 19 nt, Human
gagcagccugcggcgggcg

SEQ ID NO: 1318138 - RNA, 19 nt, Human
gcgcggugguccggcaggu

SEQ ID NO: 1318139 - RNA, 19 nt, Human
gggcggggaacagucugca

SEQ ID NO: 1318140 - RNA, 20 nt, Human
gucugcagacccaggcucac

SEQ ID NO: 1318141 - RNA, 24 nt, Human
ucagcuggggcagagggcggggaa

SEQ ID NO: 1318142 - RNA, 18 nt, Human
uccggauuccgaccgucc

SEQ ID NO: 1318143 - RNA, 18 nt, Human
ucugcagacccaggcuca

SEQ ID NO: 1318144 - RNA, 18 nt, Human
ucuuccggauuccgaccg

SEQ ID NO: 1318145 - RNA, 18 nt, Human
agcuuggugggcggcugc

SEQ ID NO: 1318146 - RNA, 18 nt, Human
aggaagacggucccuucc

SEQ ID NO: 1318147 - RNA, 18 nt, Human
ccacgaaaaaauauuccc

SEQ ID NO: 1318148 - RNA, 22 nt, Human
cccaaccacuagccuguacaau

SEQ ID NO: 1318149 - RNA, 23 nt, Human
ccugugguaacacuucuccauga

SEQ ID NO: 1318150 - RNA, 26 nt, Human
ccuuaggcuccgaagagaugggcccc

SEQ ID NO: 1318151 - RNA, 19 nt, Human
ccuuguccauggccugugg

SEQ ID NO: 1318152 - RNA, 23 nt, Human
cugcgcagggcuggaccugggcu

SEQ ID NO: 1318153 - RNA, 19 nt, Human
cuggcggacagaugucagg

SEQ ID NO: 1318154 - RNA, 21 nt, Human
gaaaaaauauuccccaaccac

SEQ ID NO: 1318155 - RNA, 22 nt, Human
gaccugggcuggauccuuaggc

SEQ ID NO: 1318156 - RNA, 21 nt, Human
gcagggcuggaccugggcugg

SEQ ID NO: 1318157 - RNA, 18 nt, Human
gcggugcuggcggacaga

SEQ ID NO: 1318158 - RNA, 18 nt, Human
gcuaaggaagacgguccc

SEQ ID NO: 1318159 - RNA, 21 nt, Human
gcucgucuucuggcagcuugg

SEQ ID NO: 1318160 - RNA, 21 nt, Human
ggccuuguccauggccugugg

SEQ ID NO: 1318161 - RNA, 21 nt, Human
gggcggcugcgcagggcugga

SEQ ID NO: 1318162 - RNA, 22 nt, Human
gggcggugcuggcggacagaug

SEQ ID NO: 1318163 - RNA, 20 nt, Human
ggugggcggcugcgcagggc

SEQ ID NO: 1318164 - RNA, 23 nt, Human
uaaggaagacggucccuuccacg

SEQ ID NO: 1318165 - RNA, 24 nt, Human
uggaccugggcuggauccuuaggc

SEQ ID NO: 1318166 - RNA, 22 nt, Human
aaucucgcucuugccgcucugg

SEQ ID NO: 1318167 - RNA, 22 nt, Human
aggcacacaggagaagggcugg

SEQ ID NO: 1318168 - RNA, 21 nt, Human
aggcaggcacacaggagaagg

SEQ ID NO: 1318169 - RNA, 23 nt, Human
agguaggccagcuccuccuugag

SEQ ID NO: 1318170 - RNA, 24 nt, Human
caacaggcuccucuguuuccguuc

SEQ ID NO: 1318171 - RNA, 19 nt, Human
cacaccuggggcagcgccc

SEQ ID NO: 1318172 - RNA, 19 nt, Human
cagccccuggaucugggac

SEQ ID NO: 1318173 - RNA, 20 nt, Human
cagcugcaugcaguagcggu

SEQ ID NO: 1318174 - RNA, 22 nt, Human
caggaugaggcucagguccaca

SEQ ID NO: 1318175 - RNA, 23 nt, Human
cagggucagcucauccagcaccc

SEQ ID NO: 1318176 - RNA, 24 nt, Human
ccgcacugccgaucagccccugga

SEQ ID NO: 1318177 - RNA, 25 nt, Human
ccgccagguugcccuccagggaugc

SEQ ID NO: 1318178 - RNA, 22 nt, Human
ccgggguucacaggcuuccuuu

SEQ ID NO: 1318179 - RNA, 18 nt, Human
ccucugucuugcugaaga

SEQ ID NO: 1318180 - RNA, 25 nt, Human
cucgugguucuucuucagguaggcc

SEQ ID NO: 1318181 - RNA, 19 nt, Human
cucuguuuccguuccccug

SEQ ID NO: 1318182 - RNA, 21 nt, Human
cuggaucugggacagcugcau

SEQ ID NO: 1318183 - RNA, 19 nt, Human
cuguuuccguuccccuggg

SEQ ID NO: 1318184 - RNA, 21 nt, Human
gaagaggggccccaaguagug

SEQ ID NO: 1318185 - RNA, 18 nt, Human
gccaucuucucauacugc

SEQ ID NO: 1318186 - RNA, 22 nt, Human
gguucagcuccucugucuugcu

SEQ ID NO: 1318187 - RNA, 24 nt, Human
guggcggcggcaggaggcaggcac

SEQ ID NO: 1318188 - RNA, 20 nt, Human
uaguguagggcugccggggu

SEQ ID NO: 1318189 - RNA, 20 nt, Human
ucaccgcccaccuggccucg

SEQ ID NO: 1318190 - RNA, 23 nt, Human
ucaccgcccaccuggccucgcgg

SEQ ID NO: 1318191 - RNA, 18 nt, Human
ucagguccacaccugggg

SEQ ID NO: 1318192 - RNA, 26 nt, Human
uccacaccuggggcagcgcccaucuc

SEQ ID NO: 1318193 - RNA, 23 nt, Human
uccucuguuuccguuccccuggg

SEQ ID NO: 1318194 - RNA, 23 nt, Human
ucggcauccuugcgguucuucuu

SEQ ID NO: 1318195 - RNA, 24 nt, Human
ucguucaggaugaggcucaggucc

SEQ ID NO: 1318196 - RNA, 20 nt, Human
ucuccacauugaucucaccg

SEQ ID NO: 1318197 - RNA, 21 nt, Human
ucucgcucuugccgcucugga

SEQ ID NO: 1318198 - RNA, 21 nt, Human
ugcaguagcgguucucugucu

SEQ ID NO: 1318199 - RNA, 19 nt, Human
uggaaagaagaggggcccc

SEQ ID NO: 1318200 - RNA, 23 nt, Human
uggaaagaagaggggccccaagu

SEQ ID NO: 1318201 - RNA, 20 nt, Human
ugggacagcugcaugcagua

SEQ ID NO: 1318202 - RNA, 23 nt, Human
uguuuccguuccccugggcuuuc

SEQ ID NO: 1318203 - RNA, 23 nt, Human
uucucauacugcucacguaucuc

SEQ ID NO: 1318204 - RNA, 24 nt, Human
uugcgguucuucuuugccaucuuc

SEQ ID NO: 1318205 - RNA, 26 nt, Human
cagagcccggaucuucgcgcggagcc

SEQ ID NO: 1318206 - RNA, 19 nt, Human
ccgcuggauacgaggaccc

SEQ ID NO: 1318207 - RNA, 18 nt, Human
cgcccgcuggauacgagg

SEQ ID NO: 1318208 - RNA, 18 nt, Human
cgcuggauacgaggaccc

SEQ ID NO: 1318209 - RNA, 24 nt, Human
cuucgcgcggagcccgccagaguc

SEQ ID NO: 1318210 - RNA, 21 nt, Human
aaacaaguguccccggacccg

SEQ ID NO: 1318211 - RNA, 22 nt, Human
aaaccccgucucuacuaaaaaa

SEQ ID NO: 1318212 - RNA, 20 nt, Human
aacacggugaaaccccgucu

SEQ ID NO: 1318213 - RNA, 21 nt, Human
aacacggugaaaccccgucuc

SEQ ID NO: 1318214 - RNA, 23 nt, Human
aaccucagugaaguaggagauau

SEQ ID NO: 1318215 - RNA, 21 nt, Human
aagaaaaaaaacaacccugca

SEQ ID NO: 1318216 - RNA, 18 nt, Human
aagcagaguuugcagaga

SEQ ID NO: 1318217 - RNA, 24 nt, Human
aaugaugugaacccaggaagcaga

SEQ ID NO: 1318218 - RNA, 20 nt, Human
acagagcgagacuccgucuc

SEQ ID NO: 1318219 - RNA, 24 nt, Human
acagagcgagacuccgucucaaga

SEQ ID NO: 1318220 - RNA, 18 nt, Human
accccgucucuacuaaaa

SEQ ID NO: 1318221 - RNA, 24 nt, Human
acgccacgcaugucuaggaccagc

SEQ ID NO: 1318222 - RNA, 24 nt, Human
acuccgucucaagaaaaaaaacaa

SEQ ID NO: 1318223 - RNA, 18 nt, Human
acugcacuccagccugag

SEQ ID NO: 1318224 - RNA, 24 nt, Human
acugcacuccagccugaguuacag

SEQ ID NO: 1318225 - RNA, 22 nt, Human
agaucgcgccacugcacuccag

SEQ ID NO: 1318226 - RNA, 24 nt, Human
agcacuuugggaggccgaggcagg

SEQ ID NO: 1318227 - RNA, 24 nt, Human
agcagaguuugcagagagcccaga

SEQ ID NO: 1318228 - RNA, 24 nt, Human
aggcagaucacgaggucaggagau

SEQ ID NO: 1318229 - RNA, 21 nt, Human
aggcaggagaaugaugugaac

SEQ ID NO: 1318230 - RNA, 24 nt, Human
aggcaggagaaugaugugaaccca

SEQ ID NO: 1318231 - RNA, 26 nt, Human
aggcaggcagaucacgaggucaggag

SEQ ID NO: 1318232 - RNA, 23 nt, Human
aggccgaggcaggcagaucacga

SEQ ID NO: 1318233 - RNA, 19 nt, Human
aggcugaggcaggagaaug

SEQ ID NO: 1318234 - RNA, 24 nt, Human
aucgcgccacugcacuccagccug

SEQ ID NO: 1318235 - RNA, 22 nt, Human
augagaugggccagggacaugg

SEQ ID NO: 1318236 - RNA, 24 nt, Human
cacgccuguaaucccagcacuuug

SEQ ID NO: 1318237 - RNA, 23 nt, Human
cacuccagccugaguuacagagc

SEQ ID NO: 1318238 - RNA, 24 nt, Human
cacuccagccugaguuacagagcg

SEQ ID NO: 1318239 - RNA, 18 nt, Human
cacugcacuccagccuga

SEQ ID NO: 1318240 - RNA, 19 nt, Human
cacugcacuccagccugag

SEQ ID NO: 1318241 - RNA, 19 nt, Human
cacugcacuccagccugag

SEQ ID NO: 1318242 - RNA, 24 nt, Human
cacugcacuccagccugaguuaca

SEQ ID NO: 1318243 - RNA, 23 nt, Human
cacugucccugggcaucugggag

SEQ ID NO: 1318244 - RNA, 24 nt, Human
cagcacuuugggaggccgaggcag

SEQ ID NO: 1318245 - RNA, 25 nt, Human
cagcacuuugggaggccgaggcagg

SEQ ID NO: 1318246 - RNA, 19 nt, Human
cagccucaagccccuuccu

SEQ ID NO: 1318247 - RNA, 24 nt, Human
cagcuacucgggaggcugaggcag

SEQ ID NO: 1318248 - RNA, 22 nt, Human
caggcagaucacgaggucagga

SEQ ID NO: 1318249 - RNA, 26 nt, Human
cagucaauuauugcuuuaaauggcac

SEQ ID NO: 1318250 - RNA, 19 nt, Human
ccacagccccgacgccacg

SEQ ID NO: 1318251 - RNA, 20 nt, Human
ccacugcacuccagccugag

SEQ ID NO: 1318252 - RNA, 20 nt, Human
ccacugcacuccagccugag

SEQ ID NO: 1318253 - RNA, 21 nt, Human
ccacugcacuccagccugagu

SEQ ID NO: 1318254 - RNA, 20 nt, Human
ccagaucacugucccugggc

SEQ ID NO: 1318255 - RNA, 23 nt, Human
ccaggaagcagaguuugcagaga

SEQ ID NO: 1318256 - RNA, 20 nt, Human
ccccgacgccacgcaugucu

SEQ ID NO: 1318257 - RNA, 21 nt, Human
ccccgacgccacgcaugucua

SEQ ID NO: 1318258 - RNA, 24 nt, Human
ccccuccugcugcaugucugaaag

SEQ ID NO: 1318259 - RNA, 23 nt, Human
cccgaccgugccacagccccgac

SEQ ID NO: 1318260 - RNA, 23 nt, Human
cccgucucuacuaaaaaaauaca

SEQ ID NO: 1318261 - RNA, 21 nt, Human
cccugcagucaauuauugcuu

SEQ ID NO: 1318262 - RNA, 23 nt, Human
ccuggcuaacacggugaaacccc

SEQ ID NO: 1318263 - RNA, 24 nt, Human
ccuggcuaacacggugaaaccccg

SEQ ID NO: 1318264 - RNA, 21 nt, Human
ccuguagucccagcuacucgg

SEQ ID NO: 1318265 - RNA, 24 nt, Human
cgagacuauccuggcuaacacggu

SEQ ID NO: 1318266 - RNA, 24 nt, Human
cgaggcaggcagaucacgagguca

SEQ ID NO: 1318267 - RNA, 26 nt, Human
cgccacugcacuccagccugaguuac

SEQ ID NO: 1318268 - RNA, 24 nt, Human
cgccuguaaucccagcacuuuggg

SEQ ID NO: 1318269 - RNA, 23 nt, Human
cgccuguagucccagcuacucgg

SEQ ID NO: 1318270 - RNA, 24 nt, Human
cgccuguagucccagcuacucggg

SEQ ID NO: 1318271 - RNA, 25 nt, Human
cuaaaaaaauacaaaaaaaucagcc

SEQ ID NO: 1318272 - RNA, 20 nt, Human
cuacuaaaaaaauacaaaaa

SEQ ID NO: 1318273 - RNA, 23 nt, Human
cucaagccccuuccuuccagauc

SEQ ID NO: 1318274 - RNA, 22 nt, Human
cucacgccuguaaucccagcac

SEQ ID NO: 1318275 - RNA, 24 nt, Human
cucacgccuguaaucccagcacuu

SEQ ID NO: 1318276 - RNA, 18 nt, Human
cuggcuaacacggugaaa

SEQ ID NO: 1318277 - RNA, 20 nt, Human
gaguucuaggaaaacagccu

SEQ ID NO: 1318278 - RNA, 23 nt, Human
gaucuccaguccucacaaaccuc

SEQ ID NO: 1318279 - RNA, 24 nt, Human
gcacuccagccugaguuacagagc

SEQ ID NO: 1318280 - RNA, 18 nt, Human
gcagaugucuguaagugg

SEQ ID NO: 1318281 - RNA, 22 nt, Human
gcaggagaaugaugugaaccca

SEQ ID NO: 1318282 - RNA, 19 nt, Human
gcaucugggaggaggcaga

SEQ ID NO: 1318283 - RNA, 21 nt, Human
gccacugcacuccagccugag

SEQ ID NO: 1318284 - RNA, 19 nt, Human
gcccagaucgcgccacugc

SEQ ID NO: 1318285 - RNA, 24 nt, Human
gcuaacacggugaaaccccgucuc

SEQ ID NO: 1318286 - RNA, 22 nt, Human
ggcaccuucccccuccugcugc

SEQ ID NO: 1318287 - RNA, 19 nt, Human
gggcguggucgugggcgcc

SEQ ID NO: 1318288 - RNA, 24 nt, Human
gggcguggucgugggcgccuguag

SEQ ID NO: 1318289 - RNA, 24 nt, Human
ggucgugggcgccuguagucccag

SEQ ID NO: 1318290 - RNA, 22 nt, Human
gucucaagaaaaaaaacaaccc

SEQ ID NO: 1318291 - RNA, 23 nt, Human
guggcucacgccuguaaucccag

SEQ ID NO: 1318292 - RNA, 19 nt, Human
gugggcgccuguaguccca

SEQ ID NO: 1318293 - RNA, 22 nt, Human
uaacacggugaaaccccgucuc

SEQ ID NO: 1318294 - RNA, 24 nt, Human
uaacacggugaaaccccgucucua

SEQ ID NO: 1318295 - RNA, 24 nt, Human
uacagagcgagacuccgucucaag

SEQ ID NO: 1318296 - RNA, 18 nt, Human
uacauguucgaucuccag

SEQ ID NO: 1318297 - RNA, 18 nt, Human
uaggaaaacagccucaag

SEQ ID NO: 1318298 - RNA, 19 nt, Human
uaggagauaucauucccau

SEQ ID NO: 1318299 - RNA, 18 nt, Human
ucacgaggucaggagauc

SEQ ID NO: 1318300 - RNA, 23 nt, Human
ucacgaggucaggagaucgagac

SEQ ID NO: 1318301 - RNA, 24 nt, Human
ucacgaggucaggagaucgagacu

SEQ ID NO: 1318302 - RNA, 23 nt, Human
uccagccugaguuacagagcgag

SEQ ID NO: 1318303 - RNA, 24 nt, Human
uccagccugaguuacagagcgaga

SEQ ID NO: 1318304 - RNA, 23 nt, Human
ucgcgccacugcacuccagccug

SEQ ID NO: 1318305 - RNA, 24 nt, Human
ugaggcaggagaaugaugugaacc

SEQ ID NO: 1318306 - RNA, 25 nt, Human
ugaggcaggagaaugaugugaaccc

SEQ ID NO: 1318307 - RNA, 23 nt, Human
ugcagucaauuauugcuuuaaau

SEQ ID NO: 1318308 - RNA, 24 nt, Human
uggcucacgccuguaaucccagca

SEQ ID NO: 1318309 - RNA, 20 nt, Human
ugggaggccgaggcaggcag

SEQ ID NO: 1318310 - RNA, 24 nt, Human
ugggaggccgaggcaggcagauca

SEQ ID NO: 1318311 - RNA, 24 nt, Human
uggucgugggcgccuguaguccca

SEQ ID NO: 1318312 - RNA, 21 nt, Human
ugugauccagugccugauucc

SEQ ID NO: 1318313 - RNA, 19 nt, Human
ugugaugugcugcagccaa

SEQ ID NO: 1318314 - RNA, 25 nt, Human
uugggaggccgaggcaggcagauca

SEQ ID NO: 1318315 - RNA, 23 nt, Human
aaagccaguacagacaaugaguu

SEQ ID NO: 1318316 - RNA, 18 nt, Human
aaaugugccuugcuuugu

SEQ ID NO: 1318317 - RNA, 24 nt, Human
aagaaacugaauguaaaguccauu

SEQ ID NO: 1318318 - RNA, 19 nt, Human
aauccuguccccuucauca

SEQ ID NO: 1318319 - RNA, 19 nt, Human
acauggagcuugggcaaca

SEQ ID NO: 1318320 - RNA, 21 nt, Human
acuuguuuuacagcucccugu

SEQ ID NO: 1318321 - RNA, 18 nt, Human
agaaggugggucuugacc

SEQ ID NO: 1318322 - RNA, 19 nt, Human
aguagcucaucuagaaucc

SEQ ID NO: 1318323 - RNA, 18 nt, Human
aguugcgguauuucuugg

SEQ ID NO: 1318324 - RNA, 25 nt, Human
caaugaguuccacauuuagaaauuu

SEQ ID NO: 1318325 - RNA, 24 nt, Human
cacacugccagcuccccacacacu

SEQ ID NO: 1318326 - RNA, 24 nt, Human
cagaaagaauaagccucuugggua

SEQ ID NO: 1318327 - RNA, 21 nt, Human
cagaauacccagggcacauac

SEQ ID NO: 1318328 - RNA, 20 nt, Human
cagaguggaguagcucaucu

SEQ ID NO: 1318329 - RNA, 22 nt, Human
cagggucagcucauccccaucc

SEQ ID NO: 1318330 - RNA, 20 nt, Human
caucacacugccagcucccc

SEQ ID NO: 1318331 - RNA, 18 nt, Human
cauccaauuucuuuagag

SEQ ID NO: 1318332 - RNA, 25 nt, Human
cauuuuacagaugcagagccagagg

SEQ ID NO: 1318333 - RNA, 19 nt, Human
ccagcuccccacacacugc

SEQ ID NO: 1318334 - RNA, 23 nt, Human
ccagggcacauacgcuuaugcaa

SEQ ID NO: 1318335 - RNA, 19 nt, Human
ccagggucagcucaucccc

SEQ ID NO: 1318336 - RNA, 18 nt, Human
ccucaaagccaguacagc

SEQ ID NO: 1318337 - RNA, 19 nt, Human
cgugaugaggucaagaagg

SEQ ID NO: 1318338 - RNA, 20 nt, Human
cucuagcuucuccccauuuc

SEQ ID NO: 1318339 - RNA, 27 nt, Human
cuuccaacuaauuugguaacauauuug

SEQ ID NO: 1318340 - RNA, 24 nt, Human
cuuucagcgaccgugaugagguca

SEQ ID NO: 1318341 - RNA, 18 nt, Human
cuuuucaacucugccugu

SEQ ID NO: 1318342 - RNA, 20 nt, Human
gccugucaucucagccggga

SEQ ID NO: 1318343 - RNA, 20 nt, Human
gcugugagacuugauggcag

SEQ ID NO: 1318344 - RNA, 21 nt, Human
ggguguucagguagucaucca

SEQ ID NO: 1318345 - RNA, 19 nt, Human
gucagcucauccccaucca

SEQ ID NO: 1318346 - RNA, 21 nt, Human
guccuuaaaccauucaaacua

SEQ ID NO: 1318347 - RNA, 19 nt, Human
gugcagcuagaagugcugg

SEQ ID NO: 1318348 - RNA, 19 nt, Human
uaugcaagcacacacauag

SEQ ID NO: 1318349 - RNA, 20 nt, Human
uaugcaagcacacacauagc

SEQ ID NO: 1318350 - RNA, 27 nt, Human
ucaaagccaguacagacaaugaguucc

SEQ ID NO: 1318351 - RNA, 18 nt, Human
ucaacucugccuguacua

SEQ ID NO: 1318352 - RNA, 20 nt, Human
ucaacugcuauggucuuccu

SEQ ID NO: 1318353 - RNA, 23 nt, Human
ucaagaaggaguuuucucugaaa

SEQ ID NO: 1318354 - RNA, 21 nt, Human
ucuucuuucucuagcuucucc

SEQ ID NO: 1318355 - RNA, 22 nt, Human
ucuuggccacaaucuuaggaag

SEQ ID NO: 1318356 - RNA, 20 nt, Human
ucuuuggguugaaauccuag

SEQ ID NO: 1318357 - RNA, 30 nt, Human
ugaaagaguaaaagggccuuuauucaaacu

SEQ ID NO: 1318358 - RNA, 18 nt, Human
ugagaaggugggucuuga

SEQ ID NO: 1318359 - RNA, 20 nt, Human
ugaguagaggggcaaccaug

SEQ ID NO: 1318360 - RNA, 18 nt, Human
ugaugaggucaagaagga

SEQ ID NO: 1318361 - RNA, 20 nt, Human
ugcacauaugauaagaaggc

SEQ ID NO: 1318362 - RNA, 27 nt, Human
ugcgccgggaccccuugucuuccccaa

SEQ ID NO: 1318363 - RNA, 22 nt, Human
ugcuaccagugcuugauuucag

SEQ ID NO: 1318364 - RNA, 18 nt, Human
ugcugggauucaaaccca

SEQ ID NO: 1318365 - RNA, 23 nt, Human
uggaguagcucaucuagaauccu

SEQ ID NO: 1318366 - RNA, 22 nt, Human
uggcaugaaagaguaaaagggc

SEQ ID NO: 1318367 - RNA, 23 nt, Human
ugggauucaaacccaggccggga

SEQ ID NO: 1318368 - RNA, 22 nt, Human
ugggucuugaccacauggagcu

SEQ ID NO: 1318369 - RNA, 21 nt, Human
ugucacacgggcugugugaca

SEQ ID NO: 1318370 - RNA, 19 nt, Human
ugugcagcuagaagugcug

SEQ ID NO: 1318371 - RNA, 24 nt, Human
uucaacaaaaagaaagcugugaga

SEQ ID NO: 1318372 - RNA, 21 nt, Human
uucaucacacugccagcuccc

SEQ ID NO: 1318373 - RNA, 24 nt, Human
uugcugagacaugaugugcugcac

SEQ ID NO: 1318374 - RNA, 18 nt, Human
aagcaacaggagaacauc

SEQ ID NO: 1318375 - RNA, 28 nt, Human
acccccucccucccacuucucucuccag

SEQ ID NO: 1318376 - RNA, 24 nt, Human
agcauuaaggccaguggcuacagu

SEQ ID NO: 1318377 - RNA, 18 nt, Human
cacccccucccucccacu

SEQ ID NO: 1318378 - RNA, 20 nt, Human
cauuaaggccaguggcuaca

SEQ ID NO: 1318379 - RNA, 24 nt, Human
cccccucccucccacuucucucuc

SEQ ID NO: 1318380 - RNA, 24 nt, Human
ccccucccucccacuucucucucc

SEQ ID NO: 1318381 - RNA, 21 nt, Human
ccucccucccacuucucucuc

SEQ ID NO: 1318382 - RNA, 18 nt, Human
ccuggucuccgccuccau

SEQ ID NO: 1318383 - RNA, 21 nt, Human
cucgaaguggggaagcaacag

SEQ ID NO: 1318384 - RNA, 26 nt, Human
cucgaaguggggaagcaacaggagaa

SEQ ID NO: 1318385 - RNA, 21 nt, Human
cuugucacccccucccuccca

SEQ ID NO: 1318386 - RNA, 26 nt, Human
gcuugucacccccucccucccacuuc

SEQ ID NO: 1318387 - RNA, 25 nt, Human
gggaagcaacaggagaacaucuugc

SEQ ID NO: 1318388 - RNA, 21 nt, Human
ugaagcagcaaccucucgaag

SEQ ID NO: 1318389 - RNA, 19 nt, Human
ugcccaggacuaggggcag

SEQ ID NO: 1318390 - RNA, 26 nt, Human
ugcuugucacccccucccucccacuu

SEQ ID NO: 1318391 - RNA, 18 nt, Human
uggcuggggcugugcuug

SEQ ID NO: 1318392 - RNA, 25 nt, Human
ugugcuugucacccccucccuccca

SEQ ID NO: 1318393 - RNA, 21 nt, Human
accaacacaaucucaguggau

SEQ ID NO: 1318394 - RNA, 20 nt, Human
agagcgcgaagccuccaagc

SEQ ID NO: 1318395 - RNA, 20 nt, Human
caccugcagcauggcuguuc

SEQ ID NO: 1318396 - RNA, 25 nt, Human
cacuuuauaaacacauuugauuauc

SEQ ID NO: 1318397 - RNA, 19 nt, Human
cagccacccacuccucgcc

SEQ ID NO: 1318398 - RNA, 24 nt, Human
ccacccacuccucgccguagcuga

SEQ ID NO: 1318399 - RNA, 25 nt, Human
cgcgaagccuccaagccugcugcag

SEQ ID NO: 1318400 - RNA, 22 nt, Human
cugcugcaggccccgccuccuu

SEQ ID NO: 1318401 - RNA, 19 nt, Human
cuucagccacccacuccuc

SEQ ID NO: 1318402 - RNA, 21 nt, Human
gggaaagggcacuggguggug

SEQ ID NO: 1318403 - RNA, 22 nt, Human
uagcacaacacauauggacuuu

SEQ ID NO: 1318404 - RNA, 27 nt, Human
uaggcuccguaacaaccaacacaaucu

SEQ ID NO: 1318405 - RNA, 23 nt, Human
uccaaagccucguucucauuucc

SEQ ID NO: 1318406 - RNA, 24 nt, Human
uccaacacuuuauaaacacauuug

SEQ ID NO: 1318407 - RNA, 22 nt, Human
uccaaugcugugcuccaaagcc

SEQ ID NO: 1318408 - RNA, 19 nt, Human
uccucucauguuacuggca

SEQ ID NO: 1318409 - RNA, 23 nt, Human
ucucagcugccgcugcugccggg

SEQ ID NO: 1318410 - RNA, 22 nt, Human
uggcuguucauugugacagagg

SEQ ID NO: 1318411 - RNA, 21 nt, Human
uggcuucagccacccacuccu

SEQ ID NO: 1318412 - RNA, 19 nt, Human
uuuguuugcucucucauga

SEQ ID NO: 1318413 - RNA, 20 nt, Human
acaaagaugucuuccuaaau

SEQ ID NO: 1318414 - RNA, 19 nt, Human
ccuggagguccaccuggac

SEQ ID NO: 1318415 - RNA, 22 nt, Human
ccuugcggcugcugugcuccuc

SEQ ID NO: 1318416 - RNA, 23 nt, Human
cuugcuguccugcuucagcaagg

SEQ ID NO: 1318417 - RNA, 21 nt, Human
ugaaaaaagacaaagaugucu

SEQ ID NO: 1318418 - RNA, 18 nt, Human
ugcuguuguggccacugc

SEQ ID NO: 1318419 - RNA, 24 nt, Human
ugguggauuccuccuguucagccu

SEQ ID NO: 1318420 - RNA, 19 nt, Human
ugugcuguuguggccacug

SEQ ID NO: 1318421 - RNA, 23 nt, Human
uguggccacugccgggacuggug

SEQ ID NO: 1318422 - RNA, 19 nt, Human
uuccuugcggcugcugugc

SEQ ID NO: 1318423 - RNA, 21 nt, Human
aagagcccagggggcugguac

SEQ ID NO: 1318424 - RNA, 25 nt, Human
agagcccagggggcugggaccaaag

SEQ ID NO: 1318425 - RNA, 19 nt, Human
agcuggagacgcaagagcc

SEQ ID NO: 1318426 - RNA, 21 nt, Human
agcuggagacgcaagagccca

SEQ ID NO: 1318427 - RNA, 23 nt, Human
aggccgggguccagggcccuucc

SEQ ID NO: 1318428 - RNA, 20 nt, Human
aggcucuguggcugcaaucu

SEQ ID NO: 1318429 - RNA, 24 nt, Human
ccagagcguggaguugcggaggca

SEQ ID NO: 1318430 - RNA, 20 nt, Human
ccagggcccuucccugcagc

SEQ ID NO: 1318431 - RNA, 22 nt, Human
ccaguacaagaagagguucucg

SEQ ID NO: 1318432 - RNA, 21 nt, Human
ccgggguccagggcccuuccc

SEQ ID NO: 1318433 - RNA, 26 nt, Human
ccugcagcuggagcaggcucuguggc

SEQ ID NO: 1318434 - RNA, 18 nt, Human
cucggagcuggagcagcu

SEQ ID NO: 1318435 - RNA, 21 nt, Human
cugcagcuggagcaggcucug

SEQ ID NO: 1318436 - RNA, 18 nt, Human
gagcuggagacgcaagag

SEQ ID NO: 1318437 - RNA, 22 nt, Human
ggcugcaaucuggugagcugga

SEQ ID NO: 1318438 - RNA, 24 nt, Human
guccagggcccuucccugcagcug

SEQ ID NO: 1318439 - RNA, 20 nt, Human
uacaagaagagguucucgga

SEQ ID NO: 1318440 - RNA, 23 nt, Human
uacaagaagagguucucggagcu

SEQ ID NO: 1318441 - RNA, 19 nt, Human
ucagcucccaauccccaga

SEQ ID NO: 1318442 - RNA, 21 nt, Human
ucuguggcugcaaucugguga

SEQ ID NO: 1318443 - RNA, 19 nt, Human
ugcccggguugucgcgggc

SEQ ID NO: 1318444 - RNA, 21 nt, Human
uguuggagagauccggagagc

SEQ ID NO: 1318445 - RNA, 21 nt, Human
uucccugcagcuggagcaggc

SEQ ID NO: 1318446 - RNA, 21 nt, Human
aagagcccagggggcugguac

SEQ ID NO: 1318447 - RNA, 19 nt, Human
agcuggagacgcaagagcc

SEQ ID NO: 1318448 - RNA, 23 nt, Human
aggccgggguccagggcccuucc

SEQ ID NO: 1318449 - RNA, 20 nt, Human
aggcucuguggcugcaaucu

SEQ ID NO: 1318450 - RNA, 24 nt, Human
ccagagcguggaguugcggaggca

SEQ ID NO: 1318451 - RNA, 20 nt, Human
ccagggcccuucccugcagc

SEQ ID NO: 1318452 - RNA, 22 nt, Human
ccaguacaagaagagguucucg

SEQ ID NO: 1318453 - RNA, 21 nt, Human
ccgggguccagggcccuuccc

SEQ ID NO: 1318454 - RNA, 26 nt, Human
ccugcagcuggagcaggcucuguggc

SEQ ID NO: 1318455 - RNA, 18 nt, Human
cucggagcuggagcagcu

SEQ ID NO: 1318456 - RNA, 21 nt, Human
cugcagcuggagcaggcucug

SEQ ID NO: 1318457 - RNA, 23 nt, Human
gagcccagggggcugggaccaag

SEQ ID NO: 1318458 - RNA, 18 nt, Human
gagcuggagacgcaagag

SEQ ID NO: 1318459 - RNA, 22 nt, Human
gagcuggagacgcaagagccca

SEQ ID NO: 1318460 - RNA, 22 nt, Human
ggcugcaaucuggugagcugga

SEQ ID NO: 1318461 - RNA, 24 nt, Human
guccagggcccuucccugcagcug

SEQ ID NO: 1318462 - RNA, 20 nt, Human
uacaagaagagguucucgga

SEQ ID NO: 1318463 - RNA, 23 nt, Human
uacaagaagagguucucggagcu

SEQ ID NO: 1318464 - RNA, 19 nt, Human
ucagcucccaauccccaga

SEQ ID NO: 1318465 - RNA, 21 nt, Human
ucuguggcugcaaucugguga

SEQ ID NO: 1318466 - RNA, 19 nt, Human
ugcccggguugucgcgggc

SEQ ID NO: 1318467 - RNA, 21 nt, Human
uguuggagagauccggagagc

SEQ ID NO: 1318468 - RNA, 21 nt, Human
uucccugcagcuggagcaggc

SEQ ID NO: 1318469 - RNA, 26 nt, Human
aaaccaaagcauuaaucccaggucug

SEQ ID NO: 1318470 - RNA, 24 nt, Human
aaccaaagcauuaaucccaggucu

SEQ ID NO: 1318471 - RNA, 24 nt, Human
aagcccccaacugcuuagcaaacu

SEQ ID NO: 1318472 - RNA, 25 nt, Human
aagccccucccuaagccagaugauc

SEQ ID NO: 1318473 - RNA, 19 nt, Human
aauuccuaucccuucaccc

SEQ ID NO: 1318474 - RNA, 26 nt, Human
acaucuggacccaagcccccaacugc

SEQ ID NO: 1318475 - RNA, 23 nt, Human
acccaggaaccccucccccuccu

SEQ ID NO: 1318476 - RNA, 24 nt, Human
accucaagccccucccuaagccag

SEQ ID NO: 1318477 - RNA, 28 nt, Human
caacaggguucucccaggcucgaggcuu

SEQ ID NO: 1318478 - RNA, 21 nt, Human
caggaagccccugcaccucaa

SEQ ID NO: 1318479 - RNA, 18 nt, Human
ccaaagcauuaaucccag

SEQ ID NO: 1318480 - RNA, 19 nt, Human
cccaggcucgaggcuuccu

SEQ ID NO: 1318481 - RNA, 21 nt, Human
ccccugcaccucaagccccuc

SEQ ID NO: 1318482 - RNA, 22 nt, Human
ccuaucccuucacccaggaacc

SEQ ID NO: 1318483 - RNA, 21 nt, Human
ccugaggucucccaaaccaaa

SEQ ID NO: 1318484 - RNA, 19 nt, Human
cugcaccucaagccccucc

SEQ ID NO: 1318485 - RNA, 23 nt, Human
gcaccucaagccccucccuaagc

SEQ ID NO: 1318486 - RNA, 23 nt, Human
ggaagccccugcaccucaagccc

SEQ ID NO: 1318487 - RNA, 23 nt, Human
uagcaaacuuugccucuggacuu

SEQ ID NO: 1318488 - RNA, 21 nt, Human
ucccaggcucgaggcuuccug

SEQ ID NO: 1318489 - RNA, 18 nt, Human
uccuaucccuucacccag

SEQ ID NO: 1318490 - RNA, 21 nt, Human
uccuaucccuucacccaggaa

SEQ ID NO: 1318491 - RNA, 23 nt, Human
ucggcucaggaagccccugcacc

SEQ ID NO: 1318492 - RNA, 22 nt, Human
ucucccaggcucgaggcuuccu

SEQ ID NO: 1318493 - RNA, 23 nt, Human
ugccucuggacuugagagaauuc

SEQ ID NO: 1318494 - RNA, 18 nt, Human
uggggacaucuggaccca

SEQ ID NO: 1318495 - RNA, 21 nt, Human
caaaaucuuggagugcccaaa

SEQ ID NO: 1318496 - RNA, 21 nt, Human
gagaggucucucccaaaaucu

SEQ ID NO: 1318497 - RNA, 21 nt, Human
gagaggucucucccaaaaucu

SEQ ID NO: 1318498 - RNA, 21 nt, Human
uagugggucccugcuccucuu

SEQ ID NO: 1318499 - RNA, 19 nt, Human
aaacagguaacuaaguccu

SEQ ID NO: 1318500 - RNA, 23 nt, Human
aaacggacacuggaguugaugcu

SEQ ID NO: 1318501 - RNA, 22 nt, Human
acaaaaccagagaaaacggaca

SEQ ID NO: 1318502 - RNA, 18 nt, Human
auaaaacaguuggcaaug

SEQ ID NO: 1318503 - RNA, 18 nt, Human
caguugacuuuagaugac

SEQ ID NO: 1318504 - RNA, 19 nt, Human
caguugacuuuagaugaca

SEQ ID NO: 1318505 - RNA, 22 nt, Human
ucaucugggcuccugauuugga

SEQ ID NO: 1318506 - RNA, 19 nt, Human
ugaaaaacuaagaauccca

SEQ ID NO: 1318507 - RNA, 23 nt, Human
ugaaaggaauaaaacaguuggca

SEQ ID NO: 1318508 - RNA, 21 nt, Human
ugaugaagagagagucuuuuu

SEQ ID NO: 1318509 - RNA, 21 nt, Human
uuagaugacacugaaacaggu

SEQ ID NO: 1318510 - RNA, 25 nt, Human
uucuuuaaguucaucugggcuccug

SEQ ID NO: 1318511 - RNA, 21 nt, Human
uugaaaaacuaagaaucccau

SEQ ID NO: 1318512 - RNA, 22 nt, Human
uuggcaauggcaucucgcuucu

SEQ ID NO: 1318513 - RNA, 20 nt, Human
aaggggcucuauguugguug

SEQ ID NO: 1318514 - RNA, 26 nt, Human
aaggugcccuugccacauguuuccgg

SEQ ID NO: 1318515 - RNA, 22 nt, Human
agaaauguuggaggccuaaguc

SEQ ID NO: 1318516 - RNA, 20 nt, Human
caagcaguggcuacuagaga

SEQ ID NO: 1318517 - RNA, 18 nt, Human
cagcaugacagacauugg

SEQ ID NO: 1318518 - RNA, 23 nt, Human
cagcaugacagacauuggugaug

SEQ ID NO: 1318519 - RNA, 22 nt, Human
ccgaugaauugaauuucugugc

SEQ ID NO: 1318520 - RNA, 18 nt, Human
cucuccucccagcuaugg

SEQ ID NO: 1318521 - RNA, 18 nt, Human
gaggccuaaguucugggc

SEQ ID NO: 1318522 - RNA, 20 nt, Human
uaacaggugcaagaaugccu

SEQ ID NO: 1318523 - RNA, 21 nt, Human
uccucccagcuauggcuccag

SEQ ID NO: 1318524 - RNA, 30 nt, Human
ucucccgcaagcaguggcuacuagagaaau

SEQ ID NO: 1318525 - RNA, 20 nt, Human
ugacuugagucacaaagaug

SEQ ID NO: 1318526 - RNA, 21 nt, Human
ugacuugagucacaaagaugg

SEQ ID NO: 1318527 - RNA, 21 nt, Human
uggaaaggggcucuauguugg

SEQ ID NO: 1318528 - RNA, 22 nt, Human
uggaaaggggcucuauguuggu

SEQ ID NO: 1318529 - RNA, 20 nt, Human
ugguguuggccuugauguuc

SEQ ID NO: 1318530 - RNA, 24 nt, Human
ugguuggugaaccacauccaaaga

SEQ ID NO: 1318531 - RNA, 22 nt, Human
aacauauuggcuuuucauccuc

SEQ ID NO: 1318532 - RNA, 22 nt, Human
acaguagagcauuucauuggcc

SEQ ID NO: 1318533 - RNA, 23 nt, Human
auuggcuuuucauccucauguuu

SEQ ID NO: 1318534 - RNA, 19 nt, Human
caacuauaaugagcagagc

SEQ ID NO: 1318535 - RNA, 23 nt, Human
cacaguagagcauuucauuggcc

SEQ ID NO: 1318536 - RNA, 18 nt, Human
cccccaguucccgcugcu

SEQ ID NO: 1318537 - RNA, 23 nt, Human
gaagcucuucccgcuuuucacuu

SEQ ID NO: 1318538 - RNA, 24 nt, Human
uaauucgaaauauguuugcacuua

SEQ ID NO: 1318539 - RNA, 21 nt, Human
uaauuuagggaaacaugcaau

SEQ ID NO: 1318540 - RNA, 18 nt, Human
ugacuggaggccgugggc

SEQ ID NO: 1318541 - RNA, 21 nt, Human
uucaaggaaaaaagagaguca

SEQ ID NO: 1318542 - RNA, 25 nt, Human
aaaaugagcaacugugauaacaaau

SEQ ID NO: 1318543 - RNA, 19 nt, Human
aaggagacagagcuaccag

SEQ ID NO: 1318544 - RNA, 23 nt, Human
aaguaugaaacaacuuugauaga

SEQ ID NO: 1318545 - RNA, 27 nt, Human
aauccacugccacuucugcugaaacaa

SEQ ID NO: 1318546 - RNA, 20 nt, Human
cacacauuaacauccacacu

SEQ ID NO: 1318547 - RNA, 22 nt, Human
cacauuaacauccacacugugc

SEQ ID NO: 1318548 - RNA, 22 nt, Human
cacuucugcugaaacaaaaguc

SEQ ID NO: 1318549 - RNA, 19 nt, Human
cucucucaauccuauuaaa

SEQ ID NO: 1318550 - RNA, 21 nt, Human
cugaaacaaaagucaacugau

SEQ ID NO: 1318551 - RNA, 19 nt, Human
cugccacuucugcugaaac

SEQ ID NO: 1318552 - RNA, 25 nt, Human
gauaacaaauaaaacuuggagagaa

SEQ ID NO: 1318553 - RNA, 18 nt, Human
gcuauuuccuuauucaag

SEQ ID NO: 1318554 - RNA, 24 nt, Human
uaagucugagggaaauuacccaaa

SEQ ID NO: 1318555 - RNA, 24 nt, Human
uaauguuuucuucuugcucaguuu

SEQ ID NO: 1318556 - RNA, 21 nt, Human
uagauagagacuaaaauggcu

SEQ ID NO: 1318557 - RNA, 20 nt, Human
ugagggaaauuacccaaaau

SEQ ID NO: 1318558 - RNA, 23 nt, Human
uggagagaaaaaaguuggcuauu

SEQ ID NO: 1318559 - RNA, 20 nt, Human
uucaaauagcucucucaauc

SEQ ID NO: 1318560 - RNA, 20 nt, Human
uucaaggagacagagcuacc

SEQ ID NO: 1318561 - RNA, 18 nt, Human
aacuuuuauuuuagguuu

SEQ ID NO: 1318562 - RNA, 23 nt, Human
aacuuuuauuuuagguuugggga

SEQ ID NO: 1318563 - RNA, 21 nt, Human
uuaacuuuuauuuuagguuug

SEQ ID NO: 1318564 - RNA, 23 nt, Human
aaacuucugaccucaggcaaucc

SEQ ID NO: 1318565 - RNA, 24 nt, Human
aaagugcugggauuacaggcauga

SEQ ID NO: 1318566 - RNA, 21 nt, Human
aaaucucccuuaucucuaccu

SEQ ID NO: 1318567 - RNA, 18 nt, Human
aaaucuccuucagaggcc

SEQ ID NO: 1318568 - RNA, 19 nt, Human
aacauggcaaaacccaucu

SEQ ID NO: 1318569 - RNA, 21 nt, Human
aaccaaagaguaguaagacag

SEQ ID NO: 1318570 - RNA, 20 nt, Human
aaccuccuucaggaagcuaa

SEQ ID NO: 1318571 - RNA, 23 nt, Human
aagauuaaaaguuacacaaaucu

SEQ ID NO: 1318572 - RNA, 26 nt, Human
aagcacuaggauuacaguugugagcc

SEQ ID NO: 1318573 - RNA, 22 nt, Human
aaguagcugagauuacaggcau

SEQ ID NO: 1318574 - RNA, 25 nt, Human
aaguagcugagauuacaggcauucg

SEQ ID NO: 1318575 - RNA, 19 nt, Human
aagugcugggauuacaggc

SEQ ID NO: 1318576 - RNA, 21 nt, Human
aagugcugggauuacaggcau

SEQ ID NO: 1318577 - RNA, 26 nt, Human
aagugcugggauuacaggcaugagcc

SEQ ID NO: 1318578 - RNA, 24 nt, Human
acagagcaagaccuugucucaaaa

SEQ ID NO: 1318579 - RNA, 24 nt, Human
acagagggagacuccaucucaaaa

SEQ ID NO: 1318580 - RNA, 18 nt, Human
accaacaagaggucuugc

SEQ ID NO: 1318581 - RNA, 18 nt, Human
accacgccuggcuaauuu

SEQ ID NO: 1318582 - RNA, 18 nt, Human
accauguuggccaggcug

SEQ ID NO: 1318583 - RNA, 24 nt, Human
accggaggucaggaguucaagacc

SEQ ID NO: 1318584 - RNA, 28 nt, Human
accuugucucaaaaaaaaaaaaaaaaaa

SEQ ID NO: 1318585 - RNA, 25 nt, Human
acucugucucccaggcuggaaagca

SEQ ID NO: 1318586 - RNA, 26 nt, Human
acugcacucuagaaccugggcaacag

SEQ ID NO: 1318587 - RNA, 18 nt, Human
acugcagccuugaccucc

SEQ ID NO: 1318588 - RNA, 18 nt, Human
acuuguuuuccaggcugg

SEQ ID NO: 1318589 - RNA, 21 nt, Human
acuuguuuuccaggcuggagu

SEQ ID NO: 1318590 - RNA, 24 nt, Human
acuuugggaggcagaggugggcag

SEQ ID NO: 1318591 - RNA, 22 nt, Human
agauucuccugucucagccucc

SEQ ID NO: 1318592 - RNA, 24 nt, Human
agcacuuugggaggcagagguggg

SEQ ID NO: 1318593 - RNA, 24 nt, Human
agcacuuugggaggccgagguggg

SEQ ID NO: 1318594 - RNA, 19 nt, Human
agccaggugugguggugau

SEQ ID NO: 1318595 - RNA, 20 nt, Human
agccuccugccucgaccucc

SEQ ID NO: 1318596 - RNA, 23 nt, Human
agcuccuugggaggcugagacag

SEQ ID NO: 1318597 - RNA, 19 nt, Human
aggaggaugagagagcccu

SEQ ID NO: 1318598 - RNA, 24 nt, Human
aggcaauccgcccguguuggccuc

SEQ ID NO: 1318599 - RNA, 24 nt, Human
aggcacgguggcucacaccuauaa

SEQ ID NO: 1318600 - RNA, 21 nt, Human
aggcagaggugggcagaucac

SEQ ID NO: 1318601 - RNA, 21 nt, Human
aggccgaggugggagaaucac

SEQ ID NO: 1318602 - RNA, 24 nt, Human
aggccgaggugggagaaucacuug

SEQ ID NO: 1318603 - RNA, 20 nt, Human
aggcggagguugcagugagc

SEQ ID NO: 1318604 - RNA, 24 nt, Human
aggcggagguugcagugagcugag

SEQ ID NO: 1318605 - RNA, 18 nt, Human
aggugggagaaucacuug

SEQ ID NO: 1318606 - RNA, 23 nt, Human
aggugggagaaucacuuggaccc

SEQ ID NO: 1318607 - RNA, 22 nt, Human
aggugggcagaucaccggaggu

SEQ ID NO: 1318608 - RNA, 24 nt, Human
aggugugguggugaucgccuguaa

SEQ ID NO: 1318609 - RNA, 21 nt, Human
agugcaauggcgcgauuucag

SEQ ID NO: 1318610 - RNA, 18 nt, Human
agugcugggauuacaggc

SEQ ID NO: 1318611 - RNA, 22 nt, Human
auaaaucuccuucagaggccag

SEQ ID NO: 1318612 - RNA, 25 nt, Human
auaauaauaacuuccuaaguaugcc

SEQ ID NO: 1318613 - RNA, 18 nt, Human
auacugaaaaaugucaga

SEQ ID NO: 1318614 - RNA, 20 nt, Human
auccucccgccucagccuuc

SEQ ID NO: 1318615 - RNA, 18 nt, Human
augggguuucaccauguu

SEQ ID NO: 1318616 - RNA, 22 nt, Human
augggguuucaccauguuggcc

SEQ ID NO: 1318617 - RNA, 24 nt, Human
caaagcacuaggauuacaguugug

SEQ ID NO: 1318618 - RNA, 24 nt, Human
caaagugcugggauuacaggcaug

SEQ ID NO: 1318619 - RNA, 20 nt, Human
caacaaacuuauuuuugauu

SEQ ID NO: 1318620 - RNA, 20 nt, Human
caaccucugccucccggguu

SEQ ID NO: 1318621 - RNA, 22 nt, Human
caagagauucuccugucucagc

SEQ ID NO: 1318622 - RNA, 26 nt, Human
cacaccuauaaucccccagcacuuug

SEQ ID NO: 1318623 - RNA, 22 nt, Human
cacacuuguuuuccaggcugga

SEQ ID NO: 1318624 - RNA, 26 nt, Human
caccacugcacucuagaaccugggca

SEQ ID NO: 1318625 - RNA, 24 nt, Human
caccaugcccagcuaauuuuugua

SEQ ID NO: 1318626 - RNA, 21 nt, Human
caccauguuggccaggcuggu

SEQ ID NO: 1318627 - RNA, 24 nt, Human
caccauguuggccaggcuggucuc

SEQ ID NO: 1318628 - RNA, 23 nt, Human
caccggaggucaggaguucaaga

SEQ ID NO: 1318629 - RNA, 25 nt, Human
caccuauaaucccccagcacuuugg

SEQ ID NO: 1318630 - RNA, 23 nt, Human
cacucugucucccaggcuggaaa

SEQ ID NO: 1318631 - RNA, 24 nt, Human
cacucugucucccaggcuggaaag

SEQ ID NO: 1318632 - RNA, 21 nt, Human
cacugcaaccucugccucccg

SEQ ID NO: 1318633 - RNA, 23 nt, Human
cacugcaaccucugccucccggg

SEQ ID NO: 1318634 - RNA, 20 nt, Human
cacugcacucuagaaccugg

SEQ ID NO: 1318635 - RNA, 21 nt, Human
cacugcacucuagaaccuggg

SEQ ID NO: 1318636 - RNA, 25 nt, Human
cacugcacucuagaaccugggcaac

SEQ ID NO: 1318637 - RNA, 26 nt, Human
cacugcacucuagaaccugggcaaca

SEQ ID NO: 1318638 - RNA, 19 nt, Human
cacugcagccuugaccucc

SEQ ID NO: 1318639 - RNA, 18 nt, Human
cacuuguuuuccaggcug

SEQ ID NO: 1318640 - RNA, 24 nt, Human
cagaucaccggaggucaggaguuc

SEQ ID NO: 1318641 - RNA, 24 nt, Human
cagcacuuugggaggcagaggugg

SEQ ID NO: 1318642 - RNA, 24 nt, Human
cagcacuuugggaggccgaggugg

SEQ ID NO: 1318643 - RNA, 22 nt, Human
cagcagaauugcuucagcccag

SEQ ID NO: 1318644 - RNA, 24 nt, Human
cagccuugaccuccuaggcucaaa

SEQ ID NO: 1318645 - RNA, 20 nt, Human
caggcauucgccaccaugcc

SEQ ID NO: 1318646 - RNA, 23 nt, Human
caguugugagccaccacauccag

SEQ ID NO: 1318647 - RNA, 24 nt, Human
cauaccuguaguaacagcacuuug

SEQ ID NO: 1318648 - RNA, 24 nt, Human
cauguuggccaggcuggucucaaa

SEQ ID NO: 1318649 - RNA, 23 nt, Human
ccaaagugcugggauuacaggca

SEQ ID NO: 1318650 - RNA, 24 nt, Human
ccaaagugcugggauuacaggcau

SEQ ID NO: 1318651 - RNA, 23 nt, Human
ccaaguagcugagauuacaggca

SEQ ID NO: 1318652 - RNA, 24 nt, Human
ccaaguagcugagauuacaggcau

SEQ ID NO: 1318653 - RNA, 22 nt, Human
ccacugcacucuagaaccuggg

SEQ ID NO: 1318654 - RNA, 22 nt, Human
ccacugcacucuagaaccuggg

SEQ ID NO: 1318655 - RNA, 23 nt, Human
ccacugcacucuagaaccugggc

SEQ ID NO: 1318656 - RNA, 26 nt, Human
ccacugcacucuagaaccugggcaac

SEQ ID NO: 1318657 - RNA, 22 nt, Human
ccagaccaacaagaggucuugc

SEQ ID NO: 1318658 - RNA, 18 nt, Human
ccaggcuggagugcaaug

SEQ ID NO: 1318659 - RNA, 24 nt, Human
cccaaagugcugggauuacaggca

SEQ ID NO: 1318660 - RNA, 19 nt, Human
cccaaguagcugagauuac

SEQ ID NO: 1318661 - RNA, 24 nt, Human
cccaaguagcugagauuacaggca

SEQ ID NO: 1318662 - RNA, 19 nt, Human
cccaggaggcggagguugc

SEQ ID NO: 1318663 - RNA, 21 nt, Human
ccccacccagucccagggacu

SEQ ID NO: 1318664 - RNA, 21 nt, Human
cccccacccagucccagggac

SEQ ID NO: 1318665 - RNA, 20 nt, Human
cccccagcacuuugggaggc

SEQ ID NO: 1318666 - RNA, 24 nt, Human
cccgccucagccuucugaguagcu

SEQ ID NO: 1318667 - RNA, 23 nt, Human
cccggguucaagagauucuccug

SEQ ID NO: 1318668 - RNA, 22 nt, Human
cccguguuggccucccaaagug

SEQ ID NO: 1318669 - RNA, 20 nt, Human
ccucccaaagcacuaggauu

SEQ ID NO: 1318670 - RNA, 24 nt, Human
ccucccgccucagccuucugagua

SEQ ID NO: 1318671 - RNA, 24 nt, Human
ccucccggguucaagagauucucc

SEQ ID NO: 1318672 - RNA, 22 nt, Human
ccuccugccucgaccucccaaa

SEQ ID NO: 1318673 - RNA, 24 nt, Human
ccuccugccucgaccucccaaagc

SEQ ID NO: 1318674 - RNA, 21 nt, Human
ccugccucgaccucccaaagc

SEQ ID NO: 1318675 - RNA, 21 nt, Human
ccuggucucaagggagccucc

SEQ ID NO: 1318676 - RNA, 18 nt, Human
ccuguaaccccagcuccu

SEQ ID NO: 1318677 - RNA, 19 nt, Human
ccuguaaccccagcuccuu

SEQ ID NO: 1318678 - RNA, 24 nt, Human
ccugucucagccucccaaguagcu

SEQ ID NO: 1318679 - RNA, 19 nt, Human
ccuugaccuccuaggcuca

SEQ ID NO: 1318680 - RNA, 20 nt, Human
ccuugaccuccuaggcucaa

SEQ ID NO: 1318681 - RNA, 24 nt, Human
ccuugucucaaaaaaaaaaaaaaa

SEQ ID NO: 1318682 - RNA, 22 nt, Human
cgaggugggagaaucacuugga

SEQ ID NO: 1318683 - RNA, 20 nt, Human
cgccgccccccacccagucc

SEQ ID NO: 1318684 - RNA, 23 nt, Human
cgccucagccuucugaguagcuu

SEQ ID NO: 1318685 - RNA, 24 nt, Human
cgccuguaaccccagcuccuuggg

SEQ ID NO: 1318686 - RNA, 18 nt, Human
cucaaaaaaaaaaaaaaa

SEQ ID NO: 1318687 - RNA, 26 nt, Human
cucaaaaaaaaaaaaaaaaaaaaaaa

SEQ ID NO: 1318688 - RNA, 24 nt, Human
cucaaacaauccucccgccucagc

SEQ ID NO: 1318689 - RNA, 24 nt, Human
cucacaccuauaaucccccagcac

SEQ ID NO: 1318690 - RNA, 24 nt, Human
cucacugcaaccucugccucccgg

SEQ ID NO: 1318691 - RNA, 21 nt, Human
cucacugcagccuugaccucc

SEQ ID NO: 1318692 - RNA, 23 nt, Human
cucauuagagauuugaagccaga

SEQ ID NO: 1318693 - RNA, 21 nt, Human
cucccaaguagcugagauuac

SEQ ID NO: 1318694 - RNA, 25 nt, Human
cuccuaggcucaaacaauccucccg

SEQ ID NO: 1318695 - RNA, 25 nt, Human
cuccugucucagccucccaaguagc

SEQ ID NO: 1318696 - RNA, 20 nt, Human
cugaaaaaugucagaaugua

SEQ ID NO: 1318697 - RNA, 21 nt, Human
cugaccucaggcaauccgccc

SEQ ID NO: 1318698 - RNA, 19 nt, Human
cugcaaccucugccucccg

SEQ ID NO: 1318699 - RNA, 24 nt, Human
cugcaaccucugccucccggguuc

SEQ ID NO: 1318700 - RNA, 22 nt, Human
cugcagccuugaccuccuaggc

SEQ ID NO: 1318701 - RNA, 23 nt, Human
cugcagccuugaccuccuaggcu

SEQ ID NO: 1318702 - RNA, 21 nt, Human
cuggucucaaacuccuggucu

SEQ ID NO: 1318703 - RNA, 23 nt, Human
cuucugaccucaggcaauccgcc

SEQ ID NO: 1318704 - RNA, 26 nt, Human
cuucugaccucaggcaauccgcccgu

SEQ ID NO: 1318705 - RNA, 22 nt, Human
cuuugcaguuccgccgcccccc

SEQ ID NO: 1318706 - RNA, 24 nt, Human
cuuuuaguagaaaugggguuucac

SEQ ID NO: 1318707 - RNA, 18 nt, Human
gaacacuaaucggauugg

SEQ ID NO: 1318708 - RNA, 21 nt, Human
gaggcggagguugcagugagc

SEQ ID NO: 1318709 - RNA, 25 nt, Human
gaggugggcagaucaccggagguca

SEQ ID NO: 1318710 - RNA, 23 nt, Human
gagguugcagugagcugagaucg

SEQ ID NO: 1318711 - RNA, 21 nt, Human
gaucaaugaagauuaaaaguu

SEQ ID NO: 1318712 - RNA, 23 nt, Human
gaucaccggaggucaggaguuca

SEQ ID NO: 1318713 - RNA, 24 nt, Human
gaucaccggaggucaggaguucaa

SEQ ID NO: 1318714 - RNA, 20 nt, Human
gauuaagccaaaucucccuu

SEQ ID NO: 1318715 - RNA, 18 nt, Human
gauuacaggcaugagcca

SEQ ID NO: 1318716 - RNA, 22 nt, Human
gauuacaggcaugagccacugc

SEQ ID NO: 1318717 - RNA, 23 nt, Human
gauuacaggcaugagccacugca

SEQ ID NO: 1318718 - RNA, 24 nt, Human
gauuacaggcauucgccaccaugc

SEQ ID NO: 1318719 - RNA, 18 nt, Human
gauuacaguugugagcca

SEQ ID NO: 1318720 - RNA, 21 nt, Human
gauuacaguugugagccacca

SEQ ID NO: 1318721 - RNA, 22 nt, Human
gcaguuccgccgccccccaccc

SEQ ID NO: 1318722 - RNA, 23 nt, Human
gccacugcacccggccaacaaac

SEQ ID NO: 1318723 - RNA, 24 nt, Human
gcccaggaggcggagguugcagug

SEQ ID NO: 1318724 - RNA, 19 nt, Human
gccucagccuucugaguag

SEQ ID NO: 1318725 - RNA, 23 nt, Human
gccucgaccucccaaagcacuag

SEQ ID NO: 1318726 - RNA, 19 nt, Human
gccuugaccuccuaggcuc

SEQ ID NO: 1318727 - RNA, 21 nt, Human
gcucacugcagccuugaccuc

SEQ ID NO: 1318728 - RNA, 19 nt, Human
gcuggagugcaauggcgcg

SEQ ID NO: 1318729 - RNA, 22 nt, Human
ggagguugcagugagcugagau

SEQ ID NO: 1318730 - RNA, 24 nt, Human
ggagguugcagugagcugagaucg

SEQ ID NO: 1318731 - RNA, 22 nt, Human
ggauuacaggcaugagccacug

SEQ ID NO: 1318732 - RNA, 22 nt, Human
ggauuacaguugugagccacca

SEQ ID NO: 1318733 - RNA, 25 nt, Human
ggcagaucaccggaggucaggaguu

SEQ ID NO: 1318734 - RNA, 21 nt, Human
ggccaggcacgguggcucaca

SEQ ID NO: 1318735 - RNA, 24 nt, Human
ggcuggucucaaacuccuggucuc

SEQ ID NO: 1318736 - RNA, 24 nt, Human
ggcuggucucaaacuucugaccuc

SEQ ID NO: 1318737 - RNA, 24 nt, Human
gggggucuuguuacguugcccagg

SEQ ID NO: 1318738 - RNA, 22 nt, Human
gggguuucaccauguuggccag

SEQ ID NO: 1318739 - RNA, 18 nt, Human
ggguuucaccauguuggc

SEQ ID NO: 1318740 - RNA, 22 nt, Human
ggguuucaccauguuggccagg

SEQ ID NO: 1318741 - RNA, 19 nt, Human
ggucucaaacuucugaccu

SEQ ID NO: 1318742 - RNA, 21 nt, Human
guguuggccucccaaagugcu

SEQ ID NO: 1318743 - RNA, 22 nt, Human
guugcagugagcugagaucguc

SEQ ID NO: 1318744 - RNA, 20 nt, Human
uaaaaauacaaaauuuagcc

SEQ ID NO: 1318745 - RNA, 21 nt, Human
uaaaaauacaaaauuuagcca

SEQ ID NO: 1318746 - RNA, 19 nt, Human
uaauaccauacguuaauau

SEQ ID NO: 1318747 - RNA, 22 nt, Human
uaauuuuuguacuuuuaguaga

SEQ ID NO: 1318748 - RNA, 22 nt, Human
uacaggcacgugcuaccacgcc

SEQ ID NO: 1318749 - RNA, 23 nt, Human
uacaggcaugagccacugcaccc

SEQ ID NO: 1318750 - RNA, 24 nt, Human
uacaggcauucgccaccaugccca

SEQ ID NO: 1318751 - RNA, 24 nt, Human
uacaguugugagccaccacaucca

SEQ ID NO: 1318752 - RNA, 24 nt, Human
uaccacgccuggcuaauuuuuaau

SEQ ID NO: 1318753 - RNA, 23 nt, Human
uacguugcccaggcuggucucaa

SEQ ID NO: 1318754 - RNA, 24 nt, Human
uacguugcccaggcuggucucaaa

SEQ ID NO: 1318755 - RNA, 22 nt, Human
uacucuauucacuugguauuua

SEQ ID NO: 1318756 - RNA, 22 nt, Human
uagaaaugggguuucaccaugu

SEQ ID NO: 1318757 - RNA, 20 nt, Human
uagccaaauauuuuuaguua

SEQ ID NO: 1318758 - RNA, 22 nt, Human
uaggauuacaguugugagccac

SEQ ID NO: 1318759 - RNA, 24 nt, Human
uaggauuacaguugugagccacca

SEQ ID NO: 1318760 - RNA, 26 nt, Human
uaguaagacagugaaauuuaggagga

SEQ ID NO: 1318761 - RNA, 24 nt, Human
uaguagaaaugggguuucaccaug

SEQ ID NO: 1318762 - RNA, 26 nt, Human
uaguagaaaugggguuucaccauguu

SEQ ID NO: 1318763 - RNA, 22 nt, Human
ucaaaaaaaaaaaaaaaaaaaa

SEQ ID NO: 1318764 - RNA, 23 nt, Human
ucaaaaaaaaaaaaaaaaaaaaa

SEQ ID NO: 1318765 - RNA, 23 nt, Human
ucacacuuguuuuccaggcugga

SEQ ID NO: 1318766 - RNA, 23 nt, Human
ucaccggaggucaggaguucaag

SEQ ID NO: 1318767 - RNA, 24 nt, Human
ucacugcaaccucugccucccggg

SEQ ID NO: 1318768 - RNA, 25 nt, Human
ucacugcaaccucugccucccgggu

SEQ ID NO: 1318769 - RNA, 19 nt, Human
ucacugcagccuugaccuc

SEQ ID NO: 1318770 - RNA, 23 nt, Human
ucacugcagccuugaccuccuag

SEQ ID NO: 1318771 - RNA, 24 nt, Human
ucacugcagccuugaccuccuagg

SEQ ID NO: 1318772 - RNA, 21 nt, Human
ucagccucccaaguagcugag

SEQ ID NO: 1318773 - RNA, 23 nt, Human
ucagccuucugaguagcuugggc

SEQ ID NO: 1318774 - RNA, 18 nt, Human
ucaggaagcuaagccaug

SEQ ID NO: 1318775 - RNA, 23 nt, Human
ucaugcaccacugcacucuagaa

SEQ ID NO: 1318776 - RNA, 19 nt, Human
uccagcuuggugacagagg

SEQ ID NO: 1318777 - RNA, 24 nt, Human
ucccaaagugcugggauuacaggc

SEQ ID NO: 1318778 - RNA, 24 nt, Human
ucccaaguagcugagauuacaggc

SEQ ID NO: 1318779 - RNA, 21 nt, Human
ucccggguucaagagauucuc

SEQ ID NO: 1318780 - RNA, 24 nt, Human
ucccggguucaagagauucuccug

SEQ ID NO: 1318781 - RNA, 20 nt, Human
uccugccucgaccucccaaa

SEQ ID NO: 1318782 - RNA, 19 nt, Human
uccuucaggaagcuaagcc

SEQ ID NO: 1318783 - RNA, 19 nt, Human
ucucaaaaaaaaaaaaaaa

SEQ ID NO: 1318784 - RNA, 21 nt, Human
ucucacucugucucccaggcu

SEQ ID NO: 1318785 - RNA, 23 nt, Human
ucucacucugucucccaggcugg

SEQ ID NO: 1318786 - RNA, 24 nt, Human
ucucacucugucucccaggcugga

SEQ ID NO: 1318787 - RNA, 20 nt, Human
ucucuacuaaaaauacaaaa

SEQ ID NO: 1318788 - RNA, 23 nt, Human
ucugaguagcuugggcuacaggc

SEQ ID NO: 1318789 - RNA, 24 nt, Human
ucugaguagcuugggcuacaggca

SEQ ID NO: 1318790 - RNA, 20 nt, Human
ucuuacacacucuaaaagac

SEQ ID NO: 1318791 - RNA, 23 nt, Human
ucuuguuacguugcccaggcugg

SEQ ID NO: 1318792 - RNA, 24 nt, Human
ucuuguuacguugcccaggcuggu

SEQ ID NO: 1318793 - RNA, 21 nt, Human
ugaccucaggcaauccgcccg

SEQ ID NO: 1318794 - RNA, 24 nt, Human
ugaccuccuaggcucaaacaaucc

SEQ ID NO: 1318795 - RNA, 25 nt, Human
ugaccuccuaggcucaaacaauccu

SEQ ID NO: 1318796 - RNA, 20 nt, Human
ugagacagggucucacucug

SEQ ID NO: 1318797 - RNA, 22 nt, Human
ugagacagggucucacucuguc

SEQ ID NO: 1318798 - RNA, 19 nt, Human
ugagauuacaggcauucgc

SEQ ID NO: 1318799 - RNA, 21 nt, Human
ugagauuacaggcauucgcca

SEQ ID NO: 1318800 - RNA, 22 nt, Human
ugagauuacaggcauucgccac

SEQ ID NO: 1318801 - RNA, 24 nt, Human
ugagauuacaggcauucgccacca

SEQ ID NO: 1318802 - RNA, 24 nt, Human
ugcaaugagccgugaucaugcacc

SEQ ID NO: 1318803 - RNA, 24 nt, Human
ugcccaggcuggucucaaacuccu

SEQ ID NO: 1318804 - RNA, 23 nt, Human
ugccucgaccucccaaagcacua

SEQ ID NO: 1318805 - RNA, 24 nt, Human
ugccucgaccucccaaagcacuag

SEQ ID NO: 1318806 - RNA, 24 nt, Human
uggaaagcaauggcacaauauugg

SEQ ID NO: 1318807 - RNA, 23 nt, Human
uggagugcaauggcgcgauuuca

SEQ ID NO: 1318808 - RNA, 24 nt, Human
uggagugcaauggcgcgauuucag

SEQ ID NO: 1318809 - RNA, 23 nt, Human
uggcacaauauuggcucacugca

SEQ ID NO: 1318810 - RNA, 24 nt, Human
uggccaggcuggucucaaacuucu

SEQ ID NO: 1318811 - RNA, 24 nt, Human
uggcgcgauuucagcucacugcaa

SEQ ID NO: 1318812 - RNA, 20 nt, Human
uggcucacaccuauaauccc

SEQ ID NO: 1318813 - RNA, 24 nt, Human
uggcucacugcagccuugaccucc

SEQ ID NO: 1318814 - RNA, 18 nt, Human
ugggaggcagaggugggc

SEQ ID NO: 1318815 - RNA, 20 nt, Human
ugggaggcagaggugggcag

SEQ ID NO: 1318816 - RNA, 24 nt, Human
ugggaggcagaggugggcagauca

SEQ ID NO: 1318817 - RNA, 19 nt, Human
ugggaggccgaggugggag

SEQ ID NO: 1318818 - RNA, 24 nt, Human
ugggaggccgaggugggagaauca

SEQ ID NO: 1318819 - RNA, 18 nt, Human
ugggaggcugagacagca

SEQ ID NO: 1318820 - RNA, 20 nt, Human
ugggaggcugagacagcaga

SEQ ID NO: 1318821 - RNA, 18 nt, Human
ugggauuacaggcaugag

SEQ ID NO: 1318822 - RNA, 19 nt, Human
ugggauuacaggcaugagc

SEQ ID NO: 1318823 - RNA, 21 nt, Human
ugggauuacaggcaugagcca

SEQ ID NO: 1318824 - RNA, 22 nt, Human
ugggauuacaggcaugagccac

SEQ ID NO: 1318825 - RNA, 22 nt, Human
ugggauuacaggcaugagccac

SEQ ID NO: 1318826 - RNA, 24 nt, Human
ugggauuacaggcaugagccacug

SEQ ID NO: 1318827 - RNA, 24 nt, Human
ugggauuacaggcaugagccacug

SEQ ID NO: 1318828 - RNA, 26 nt, Human
ugggauuacaggcaugagccacugca

SEQ ID NO: 1318829 - RNA, 24 nt, Human
ugggcagaucaccggaggucagga

SEQ ID NO: 1318830 - RNA, 23 nt, Human
ugggcuacaggcacgugcuacca

SEQ ID NO: 1318831 - RNA, 24 nt, Human
ugggguuucaccauguuggccagg

SEQ ID NO: 1318832 - RNA, 24 nt, Human
ugucucagccucccaaguagcuga

SEQ ID NO: 1318833 - RNA, 21 nt, Human
uguguacaacuaugaagauca

SEQ ID NO: 1318834 - RNA, 24 nt, Human
uguuacguugcccaggcuggucuc

SEQ ID NO: 1318835 - RNA, 27 nt, Human
uguuacguugcccaggcuggucucaaa

SEQ ID NO: 1318836 - RNA, 26 nt, Human
uguucuacuuauauaaaucuccuuca

SEQ ID NO: 1318837 - RNA, 18 nt, Human
uguucuuguucuugguca

SEQ ID NO: 1318838 - RNA, 18 nt, Human
uuaguagaaaugggguuu

SEQ ID NO: 1318839 - RNA, 22 nt, Human
uuaguagaaaugggguuucacc

SEQ ID NO: 1318840 - RNA, 24 nt, Human
uuaguagaaaugggguuucaccau

SEQ ID NO: 1318841 - RNA, 23 nt, Human
uuccaggcuggagugcaauggcg

SEQ ID NO: 1318842 - RNA, 21 nt, Human
uucuuguucuuggucauuuca

SEQ ID NO: 1318843 - RNA, 21 nt, Human
uugaaaaauacuuugcaguuc

SEQ ID NO: 1318844 - RNA, 22 nt, Human
uugagacagggucucacucugu

SEQ ID NO: 1318845 - RNA, 19 nt, Human
uugcagugagcugagaucg

SEQ ID NO: 1318846 - RNA, 20 nt, Human
uugcagugagcugagaucgu

SEQ ID NO: 1318847 - RNA, 22 nt, Human
uugcagugagcugagaucgucc

SEQ ID NO: 1318848 - RNA, 21 nt, Human
uugcucuuucccucaauugcc

SEQ ID NO: 1318849 - RNA, 24 nt, Human
uugcuucagcccaggaggcggagg

SEQ ID NO: 1318850 - RNA, 19 nt, Human
uugggaggcagaggugggc

SEQ ID NO: 1318851 - RNA, 25 nt, Human
uugggaggccgaggugggagaauca

SEQ ID NO: 1318852 - RNA, 23 nt, Human
uugggaggcugagacagcagaau

SEQ ID NO: 1318853 - RNA, 23 nt, Human
uuguuuuccaggcuggagugcaa

SEQ ID NO: 1318854 - RNA, 21 nt, Human
uuuacauugguauuuuggcca

SEQ ID NO: 1318855 - RNA, 18 nt, Human
uuuagccagguguggugg

SEQ ID NO: 1318856 - RNA, 23 nt, Human
uuucacacuuguuuuccaggcug

SEQ ID NO: 1318857 - RNA, 24 nt, Human
uuucaccauguuggccaggcuggu

SEQ ID NO: 1318858 - RNA, 25 nt, Human
uuuguuguuguugagacagggucuc

SEQ ID NO: 1318859 - RNA, 22 nt, Human
uuuuuucuacacuauauuugag

SEQ ID NO: 1318860 - RNA, 19 nt, Human
aaacuagaagggaaaggug

SEQ ID NO: 1318861 - RNA, 19 nt, Human
aaacuguacagucaccaga

SEQ ID NO: 1318862 - RNA, 21 nt, Human
aagggaaagguguuuuccuca

SEQ ID NO: 1318863 - RNA, 19 nt, Human
caagaggaagucucucaaa

SEQ ID NO: 1318864 - RNA, 21 nt, Human
cagaugucucggcucaaggga

SEQ ID NO: 1318865 - RNA, 26 nt, Human
cagaugucucggcucaagggaguuuc

SEQ ID NO: 1318866 - RNA, 21 nt, Human
ccaagguggccauguguguca

SEQ ID NO: 1318867 - RNA, 21 nt, Human
ccacaaggcuuuugugccaag

SEQ ID NO: 1318868 - RNA, 26 nt, Human
cccuccuccugggagccaagaggaag

SEQ ID NO: 1318869 - RNA, 20 nt, Human
ccuucccccaaaaacaacaa

SEQ ID NO: 1318870 - RNA, 20 nt, Human
cugggggucaggucccaaca

SEQ ID NO: 1318871 - RNA, 24 nt, Human
cuguuagugacaugugccccuucc

SEQ ID NO: 1318872 - RNA, 18 nt, Human
cuuuugugccaagguggc

SEQ ID NO: 1318873 - RNA, 23 nt, Human
gccccuucccccaaaaacaacaa

SEQ ID NO: 1318874 - RNA, 19 nt, Human
ggaaagguguuuuccucac

SEQ ID NO: 1318875 - RNA, 22 nt, Human
gugccccuucccccaaaaacaa

SEQ ID NO: 1318876 - RNA, 26 nt, Human
uaacaacauagcuuaaaaaaaaaaaa

SEQ ID NO: 1318877 - RNA, 18 nt, Human
uagcuuaaaaaaaaaaaa

SEQ ID NO: 1318878 - RNA, 25 nt, Human
ucccaacagaugucucggcucaagg

SEQ ID NO: 1318879 - RNA, 23 nt, Human
ucccccaaaaacaacaaugaagu

SEQ ID NO: 1318880 - RNA, 18 nt, Human
uccucacauaaauccagc

SEQ ID NO: 1318881 - RNA, 21 nt, Human
ucucaaaacuagaagggaaag

SEQ ID NO: 1318882 - RNA, 19 nt, Human
ugacaugugccccuucccc

SEQ ID NO: 1318883 - RNA, 18 nt, Human
ugccaagguggccaugug

SEQ ID NO: 1318884 - RNA, 26 nt, Human
ugccaagguggccaugugugucagag

SEQ ID NO: 1318885 - RNA, 19 nt, Human
ugccccuucccccaaaaac

SEQ ID NO: 1318886 - RNA, 19 nt, Human
uguucugugugcuaacaac

SEQ ID NO: 1318887 - RNA, 19 nt, Human
uuccucacauaaauccagc

SEQ ID NO: 1318888 - RNA, 18 nt, Human
uuucuauaccacaaggcu

SEQ ID NO: 1318889 - RNA, 27 nt, Human
aaaauauccucccucaugccccaaccg

SEQ ID NO: 1318890 - RNA, 20 nt, Human
aaaccuaauccacacccuug

SEQ ID NO: 1318891 - RNA, 23 nt, Human
aagcagcaccagcugauaagaac

SEQ ID NO: 1318892 - RNA, 18 nt, Human
accaauagcugccuccaa

SEQ ID NO: 1318893 - RNA, 24 nt, Human
agccaagaaagggguacagcuuga

SEQ ID NO: 1318894 - RNA, 22 nt, Human
agccacuccuaacaagggccua

SEQ ID NO: 1318895 - RNA, 23 nt, Human
aggaaacuguauccaagguuaca

SEQ ID NO: 1318896 - RNA, 22 nt, Human
aggaagcagcaccagcuccagu

SEQ ID NO: 1318897 - RNA, 20 nt, Human
aggugguggugaucagcaca

SEQ ID NO: 1318898 - RNA, 21 nt, Human
aggugguggugaucagcacag

SEQ ID NO: 1318899 - RNA, 19 nt, Human
caaagcagcucuguuuggc

SEQ ID NO: 1318900 - RNA, 20 nt, Human
caacuggagcaagcaggugg

SEQ ID NO: 1318901 - RNA, 21 nt, Human
caaucccaggcuccuucccaa

SEQ ID NO: 1318902 - RNA, 22 nt, Human
cacccugccagguucuccuccu

SEQ ID NO: 1318903 - RNA, 25 nt, Human
cacccuugggcugacuuagaugggg

SEQ ID NO: 1318904 - RNA, 21 nt, Human
cacggaaacacaucuuaccac

SEQ ID NO: 1318905 - RNA, 24 nt, Human
cagcacugacaugcacggaaacac

SEQ ID NO: 1318906 - RNA, 21 nt, Human
cagcaggcacccacccugcca

SEQ ID NO: 1318907 - RNA, 23 nt, Human
cauauggcucaggaagcagcacc

SEQ ID NO: 1318908 - RNA, 26 nt, Human
caucuuuacagcuggagagcugagag

SEQ ID NO: 1318909 - RNA, 23 nt, Human
ccaacuccagaaacaacuggagc

SEQ ID NO: 1318910 - RNA, 19 nt, Human
ccaccccuggaauuccccu

SEQ ID NO: 1318911 - RNA, 22 nt, Human
ccagaaacaacuggagcaagca

SEQ ID NO: 1318912 - RNA, 19 nt, Human
ccagcugugucccaccccu

SEQ ID NO: 1318913 - RNA, 18 nt, Human
cccugccagguucuccuc

SEQ ID NO: 1318914 - RNA, 23 nt, Human
cccugcccuggucuggacucccc

SEQ ID NO: 1318915 - RNA, 21 nt, Human
ccuucccaacuacagcaggcu

SEQ ID NO: 1318916 - RNA, 23 nt, Human
cgcuuagaauccaauagccacuc

SEQ ID NO: 1318917 - RNA, 19 nt, Human
cuaauccacacccuugggc

SEQ ID NO: 1318918 - RNA, 19 nt, Human
cuacagcaggcucuaacug

SEQ ID NO: 1318919 - RNA, 23 nt, Human
cucauaauggaaagagccaaaaa

SEQ ID NO: 1318920 - RNA, 22 nt, Human
cugccuccaacuccagaaacaa

SEQ ID NO: 1318921 - RNA, 24 nt, Human
cugccuccaacuccagaaacaacu

SEQ ID NO: 1318922 - RNA, 19 nt, Human
cugggagagacagagggaa

SEQ ID NO: 1318923 - RNA, 24 nt, Human
cuggucuggacucccccagcugug

SEQ ID NO: 1318924 - RNA, 20 nt, Human
gaaaggcccugauauaagga

SEQ ID NO: 1318925 - RNA, 21 nt, Human
gagggcugaagaacagcugag

SEQ ID NO: 1318926 - RNA, 23 nt, Human
gcaaccaauagcugccuccaacu

SEQ ID NO: 1318927 - RNA, 21 nt, Human
gccaccgcgcucccuagucuc

SEQ ID NO: 1318928 - RNA, 22 nt, Human
gcucauaauggaaagagccaaa

SEQ ID NO: 1318929 - RNA, 19 nt, Human
ggagcaagcaggugguggu

SEQ ID NO: 1318930 - RNA, 21 nt, Human
ggaggagguuguuucacugag

SEQ ID NO: 1318931 - RNA, 21 nt, Human
ggugguggugaucagcacagg

SEQ ID NO: 1318932 - RNA, 20 nt, Human
gucuggacucccccagcugu

SEQ ID NO: 1318933 - RNA, 19 nt, Human
uaaagaaaagugcuguuuu

SEQ ID NO: 1318934 - RNA, 25 nt, Human
uacagcaggcucuaacuggugcagg

SEQ ID NO: 1318935 - RNA, 21 nt, Human
uagcaaacaggcuaaaaccuc

SEQ ID NO: 1318936 - RNA, 23 nt, Human
uagcagcacugacaugcacggaa

SEQ ID NO: 1318937 - RNA, 25 nt, Human
uagccacuccuaacaagggccuagg

SEQ ID NO: 1318938 - RNA, 21 nt, Human
uauaaggagucaugcugacuc

SEQ ID NO: 1318939 - RNA, 27 nt, Human
ucacugaggguugguggggcgguuccg

SEQ ID NO: 1318940 - RNA, 24 nt, Human
uccacacccuugggcugacuuaga

SEQ ID NO: 1318941 - RNA, 25 nt, Human
uccccaaagcagcucuguuuggcuu

SEQ ID NO: 1318942 - RNA, 20 nt, Human
uccgaauguuaucagcagca

SEQ ID NO: 1318943 - RNA, 22 nt, Human
uccuucccaacuacagcaggcu

SEQ ID NO: 1318944 - RNA, 18 nt, Human
ugccagguucuccuccug

SEQ ID NO: 1318945 - RNA, 22 nt, Human
ugcccuggucuggacuccccca

SEQ ID NO: 1318946 - RNA, 25 nt, Human
ugccuccaacuccagaaacaacugg

SEQ ID NO: 1318947 - RNA, 22 nt, Human
ugcggagaggucaagacagcug

SEQ ID NO: 1318948 - RNA, 24 nt, Human
uggaaagagccaaaaauuuuggug

SEQ ID NO: 1318949 - RNA, 20 nt, Human
uggcuugugagucuccuuuc

SEQ ID NO: 1318950 - RNA, 21 nt, Human
uggugaggagcugcccaccag

SEQ ID NO: 1318951 - RNA, 21 nt, Human
ugguggugaucagcacaggug

SEQ ID NO: 1318952 - RNA, 23 nt, Human
uugugagucuccuuucccugccc

SEQ ID NO: 1318953 - RNA, 21 nt, Human
uuuaaaauauccucccucaug

SEQ ID NO: 1318954 - RNA, 20 nt, Human
aaacagggaaaccgacgugg

SEQ ID NO: 1318955 - RNA, 23 nt, Human
aaacgagcacauaggagggcguu

SEQ ID NO: 1318956 - RNA, 20 nt, Human
aaagucugggauugggugug

SEQ ID NO: 1318957 - RNA, 21 nt, Human
aaagucugggauugggugugu

SEQ ID NO: 1318958 - RNA, 24 nt, Human
aaagugcugggauuacaggcguga

SEQ ID NO: 1318959 - RNA, 19 nt, Human
aacagcuggagcccugagc

SEQ ID NO: 1318960 - RNA, 23 nt, Human
aacccgccucugcagcguuccug

SEQ ID NO: 1318961 - RNA, 22 nt, Human
aagagccccuugcccccacuga

SEQ ID NO: 1318962 - RNA, 19 nt, Human
aagcaggcccuacacagug

SEQ ID NO: 1318963 - RNA, 24 nt, Human
aagugaucuacccgcuucagccuc

SEQ ID NO: 1318964 - RNA, 19 nt, Human
aagugcugggauuacaggc

SEQ ID NO: 1318965 - RNA, 19 nt, Human
aagugcugggauuacaggc

SEQ ID NO: 1318966 - RNA, 26 nt, Human
aagugcugggauuacaggcgugagcc

SEQ ID NO: 1318967 - RNA, 18 nt, Human
acaggguuucaccauguu

SEQ ID NO: 1318968 - RNA, 23 nt, Human
acaggguuucaccauguuggcca

SEQ ID NO: 1318969 - RNA, 24 nt, Human
acaggguuucaccauguuggccag

SEQ ID NO: 1318970 - RNA, 18 nt, Human
accauguuggccaggcug

SEQ ID NO: 1318971 - RNA, 21 nt, Human
agacaacagcuggagcccuga

SEQ ID NO: 1318972 - RNA, 22 nt, Human
agagggaacuucaaggaagugu

SEQ ID NO: 1318973 - RNA, 29 nt, Human
agcaaggugcauggggacagugguauguu

SEQ ID NO: 1318974 - RNA, 21 nt, Human
agcagcuguacccccaaaaag

SEQ ID NO: 1318975 - RNA, 18 nt, Human
agcgagacacuaagagac

SEQ ID NO: 1318976 - RNA, 18 nt, Human
aggcagcaggccaggccu

SEQ ID NO: 1318977 - RNA, 20 nt, Human
aucaaacagggaaaccgacg

SEQ ID NO: 1318978 - RNA, 24 nt, Human
auuucuguauuuuugguagagaca

SEQ ID NO: 1318979 - RNA, 24 nt, Human
caaagugcugggauuacaggcgug

SEQ ID NO: 1318980 - RNA, 20 nt, Human
caagaugaugcccaggcaga

SEQ ID NO: 1318981 - RNA, 22 nt, Human
caagcaggucauaaagagcaag

SEQ ID NO: 1318982 - RNA, 21 nt, Human
caccauguuggccaggcuggu

SEQ ID NO: 1318983 - RNA, 22 nt, Human
caccauguuggccaggcugguc

SEQ ID NO: 1318984 - RNA, 27 nt, Human
caccauguuggccaggcuggucugaaa

SEQ ID NO: 1318985 - RNA, 19 nt, Human
cagagggaacuucaaggaa

SEQ ID NO: 1318986 - RNA, 20 nt, Human
cagcuccuucacagcagcgg

SEQ ID NO: 1318987 - RNA, 21 nt, Human
caggcagcagagacgcaccuu

SEQ ID NO: 1318988 - RNA, 21 nt, Human
caggccaccuccagagccaaa

SEQ ID NO: 1318989 - RNA, 24 nt, Human
caggguuucaccauguuggccagg

SEQ ID NO: 1318990 - RNA, 18 nt, Human
caggucauaaagagcaag

SEQ ID NO: 1318991 - RNA, 26 nt, Human
cauaaagagcaagaugaugcccaggc

SEQ ID NO: 1318992 - RNA, 22 nt, Human
caucuucaucaucaaacaggga

SEQ ID NO: 1318993 - RNA, 27 nt, Human
cauucugaaauucccaaagauuugagg

SEQ ID NO: 1318994 - RNA, 20 nt, Human
ccaaagugcugggauuacag

SEQ ID NO: 1318995 - RNA, 22 nt, Human
ccaaagugcugggauuacaggc

SEQ ID NO: 1318996 - RNA, 22 nt, Human
ccaaagugcugggauuacaggc

SEQ ID NO: 1318997 - RNA, 24 nt, Human
ccaaagugcugggauuacaggcgu

SEQ ID NO: 1318998 - RNA, 22 nt, Human
ccaccacaccguggaacuccag

SEQ ID NO: 1318999 - RNA, 22 nt, Human
ccagcuuccuccgccccaaccu

SEQ ID NO: 1319000 - RNA, 28 nt, Human
cccacagcgccuacgucgaaggcuccca

SEQ ID NO: 1319001 - RNA, 22 nt, Human
ccccaaaaagauuauccucuuc

SEQ ID NO: 1319002 - RNA, 23 nt, Human
ccccaaaaagauuauccucuuca

SEQ ID NO: 1319003 - RNA, 26 nt, Human
cccccacugaacaggccaccuccaga

SEQ ID NO: 1319004 - RNA, 23 nt, Human
ccccgcccaacccgccucugcag

SEQ ID NO: 1319005 - RNA, 21 nt, Human
cccuaggccaagcaccguggc

SEQ ID NO: 1319006 - RNA, 24 nt, Human
ccgcuucagccucccaaagugcug

SEQ ID NO: 1319007 - RNA, 21 nt, Human
ccuccgccccaaccuagggua

SEQ ID NO: 1319008 - RNA, 23 nt, Human
ccucgucaucuucugugaaucua

SEQ ID NO: 1319009 - RNA, 22 nt, Human
ccucuagaauuuuagaaacgag

SEQ ID NO: 1319010 - RNA, 20 nt, Human
ccugaccucaagugaucuac

SEQ ID NO: 1319011 - RNA, 22 nt, Human
ccugaccucaagugaucuaccc

SEQ ID NO: 1319012 - RNA, 20 nt, Human
cgccccccgcccaacccgcc

SEQ ID NO: 1319013 - RNA, 24 nt, Human
cgcuucagccucccaaagugcugg

SEQ ID NO: 1319014 - RNA, 20 nt, Human
cguggaacuccagaccaccc

SEQ ID NO: 1319015 - RNA, 22 nt, Human
cuggcgucagccccuauccucc

SEQ ID NO: 1319016 - RNA, 22 nt, Human
cuucacagcagcggauuuugcu

SEQ ID NO: 1319017 - RNA, 23 nt, Human
cuucuuagcagcuguacccccaa

SEQ ID NO: 1319018 - RNA, 20 nt, Human
cuugagguccccucucucca

SEQ ID NO: 1319019 - RNA, 24 nt, Human
gaccucaagugaucuacccgcuuc

SEQ ID NO: 1319020 - RNA, 22 nt, Human
gagaagaggcagcaggccaggc

SEQ ID NO: 1319021 - RNA, 18 nt, Human
gagacaaugucugcuucu

SEQ ID NO: 1319022 - RNA, 26 nt, Human
gauaacugaggugacuacaaaagaaa

SEQ ID NO: 1319023 - RNA, 18 nt, Human
gauuacaggcgugagcca

SEQ ID NO: 1319024 - RNA, 19 nt, Human
gauuacaggcgugagccac

SEQ ID NO: 1319025 - RNA, 22 nt, Human
gauuacaggcgugagccacugc

SEQ ID NO: 1319026 - RNA, 20 nt, Human
gcccaacccgccucugcagc

SEQ ID NO: 1319027 - RNA, 18 nt, Human
gcccugagcugggagagu

SEQ ID NO: 1319028 - RNA, 21 nt, Human
gcccugagcugggagagugga

SEQ ID NO: 1319029 - RNA, 21 nt, Human
gcucacccuaggccaagcacc

SEQ ID NO: 1319030 - RNA, 23 nt, Human
gcuggucugaaacuccugaccuc

SEQ ID NO: 1319031 - RNA, 22 nt, Human
gcuuucucuugucuuugagcuu

SEQ ID NO: 1319032 - RNA, 21 nt, Human
ggaaagcucagaaaaguuaaa

SEQ ID NO: 1319033 - RNA, 19 nt, Human
ggagacccuuccgcuagcc

SEQ ID NO: 1319034 - RNA, 22 nt, Human
ggcacacaugacuggaaagaaa

SEQ ID NO: 1319035 - RNA, 19 nt, Human
ggccaagcaccguggcacc

SEQ ID NO: 1319036 - RNA, 24 nt, Human
ggcuggucugaaacuccugaccuc

SEQ ID NO: 1319037 - RNA, 22 nt, Human
ggguuucaccauguuggccagg

SEQ ID NO: 1319038 - RNA, 21 nt, Human
gguagagacaggguuucacca

SEQ ID NO: 1319039 - RNA, 21 nt, Human
guagagacaggguuucaccau

SEQ ID NO: 1319040 - RNA, 22 nt, Human
guagagacaggguuucaccaug

SEQ ID NO: 1319041 - RNA, 19 nt, Human
gucggucagcuuggggggu

SEQ ID NO: 1319042 - RNA, 24 nt, Human
gugaucuacccgcuucagccuccc

SEQ ID NO: 1319043 - RNA, 20 nt, Human
guggaacuccagaccacccc

SEQ ID NO: 1319044 - RNA, 20 nt, Human
guucuagguugaaggcucac

SEQ ID NO: 1319045 - RNA, 20 nt, Human
uaagcaggcccuacacagug

SEQ ID NO: 1319046 - RNA, 24 nt, Human
uaauuucuguauuuuugguagaga

SEQ ID NO: 1319047 - RNA, 19 nt, Human
uacaauaucauaacuuuaa

SEQ ID NO: 1319048 - RNA, 21 nt, Human
uacaggcgugagccacugcgc

SEQ ID NO: 1319049 - RNA, 22 nt, Human
uacaggcgugagccacugcgcu

SEQ ID NO: 1319050 - RNA, 23 nt, Human
uagaauuuuagaaacgagcacau

SEQ ID NO: 1319051 - RNA, 22 nt, Human
uagagacaggguuucaccaugu

SEQ ID NO: 1319052 - RNA, 27 nt, Human
uagcucgggccgaaccccgccagcgag

SEQ ID NO: 1319053 - RNA, 21 nt, Human
uaggccaagcaccguggcacc

SEQ ID NO: 1319054 - RNA, 19 nt, Human
uauccucuucaucuucauc

SEQ ID NO: 1319055 - RNA, 24 nt, Human
uauguagcuucguuuuacugagga

SEQ ID NO: 1319056 - RNA, 20 nt, Human
ucacugcugaacaacagggc

SEQ ID NO: 1319057 - RNA, 20 nt, Human
ucacuuaagcuguacuuggg

SEQ ID NO: 1319058 - RNA, 21 nt, Human
uccagagccaaauggcgagaa

SEQ ID NO: 1319059 - RNA, 23 nt, Human
uccagagccaaauggcgagaagu

SEQ ID NO: 1319060 - RNA, 24 nt, Human
ucccaaagugcugggauuacaggc

SEQ ID NO: 1319061 - RNA, 23 nt, Human
uccccucucuccagacccgccga

SEQ ID NO: 1319062 - RNA, 24 nt, Human
ucccgcgccgcugccucgggccuu

SEQ ID NO: 1319063 - RNA, 20 nt, Human
uccgccuaccagcuccuuca

SEQ ID NO: 1319064 - RNA, 19 nt, Human
uccuccagcuuccuccgcc

SEQ ID NO: 1319065 - RNA, 18 nt, Human
ucgaaggcucccaggcug

SEQ ID NO: 1319066 - RNA, 21 nt, Human
ucgggccuugggcggcagcgc

SEQ ID NO: 1319067 - RNA, 21 nt, Human
ucuacccgcuucagccuccca

SEQ ID NO: 1319068 - RNA, 18 nt, Human
ugaacaggccaccuccag

SEQ ID NO: 1319069 - RNA, 20 nt, Human
ugaccucaagugaucuaccc

SEQ ID NO: 1319070 - RNA, 22 nt, Human
ugaccucaagugaucuacccgc

SEQ ID NO: 1319071 - RNA, 24 nt, Human
ugaccucaagugaucuacccgcuu

SEQ ID NO: 1319072 - RNA, 24 nt, Human
ugaggugauaacugaggucggaac

SEQ ID NO: 1319073 - RNA, 19 nt, Human
ugaugcccaggcagaucag

SEQ ID NO: 1319074 - RNA, 20 nt, Human
ugcugaacaacagggcagau

SEQ ID NO: 1319075 - RNA, 24 nt, Human
ugcugggauuacaggcgugagcca

SEQ ID NO: 1319076 - RNA, 19 nt, Human
uggaacuccagaccacccc

SEQ ID NO: 1319077 - RNA, 23 nt, Human
uggagcccugagcugggagagug

SEQ ID NO: 1319078 - RNA, 19 nt, Human
uggcagccaagcaggucau

SEQ ID NO: 1319079 - RNA, 24 nt, Human
uggccaggcuggucugaaacuccu

SEQ ID NO: 1319080 - RNA, 18 nt, Human
ugggauuacaggcgugag

SEQ ID NO: 1319081 - RNA, 19 nt, Human
ugggauuacaggcgugagc

SEQ ID NO: 1319082 - RNA, 21 nt, Human
ugggauuacaggcgugagcca

SEQ ID NO: 1319083 - RNA, 22 nt, Human
ugggauuacaggcgugagccac

SEQ ID NO: 1319084 - RNA, 22 nt, Human
ugggauuacaggcgugagccac

SEQ ID NO: 1319085 - RNA, 24 nt, Human
ugggauuacaggcgugagccacug

SEQ ID NO: 1319086 - RNA, 24 nt, Human
ugggauuacaggcgugagccacug

SEQ ID NO: 1319087 - RNA, 24 nt, Human
ugguagagacaggguuucaccaug

SEQ ID NO: 1319088 - RNA, 22 nt, Human
uguuauguacaaucuaucacaa

SEQ ID NO: 1319089 - RNA, 20 nt, Human
uuagaaacgagcacauagga

SEQ ID NO: 1319090 - RNA, 23 nt, Human
uucugugaaucuacuagcaaaca

SEQ ID NO: 1319091 - RNA, 23 nt, Human
uugagguccccucucuccagacc

SEQ ID NO: 1319092 - RNA, 23 nt, Human
uugcugcaagagaagaggcagca

SEQ ID NO: 1319093 - RNA, 24 nt, Human
uuggaggcuuuugcuuucucuugu

SEQ ID NO: 1319094 - RNA, 24 nt, Human
uugguagagacaggguuucaccau

SEQ ID NO: 1319095 - RNA, 24 nt, Human
uuucaccauguuggccaggcuggu

SEQ ID NO: 1319096 - RNA, 20 nt, Human
uuucuguauuuuugguagag

SEQ ID NO: 1319097 - RNA, 22 nt, Human
uuuuugguagagacaggguuuc

SEQ ID NO: 1319098 - RNA, 24 nt, Human
uuuuugguagagacaggguuucac

SEQ ID NO: 1319099 - RNA, 19 nt, Human
ccgcgagcucugcgggggc

SEQ ID NO: 1319100 - RNA, 20 nt, Human
cgcgagcucugcgggggccg

SEQ ID NO: 1319101 - RNA, 20 nt, Human
gccucugucuagaacccugg

SEQ ID NO: 1319102 - RNA, 19 nt, Human
gggccgacacggggcggcg

SEQ ID NO: 1319103 - RNA, 19 nt, Human
ugcgggggccgacacgggg

SEQ ID NO: 1319104 - RNA, 24 nt, Human
uggccaagacuggccucugucuag

SEQ ID NO: 1319105 - RNA, 26 nt, Human
aaaagcaaagcaaaaagguuacagaa

SEQ ID NO: 1319106 - RNA, 19 nt, Human
aaacagguauauauuuucu

SEQ ID NO: 1319107 - RNA, 19 nt, Human
aaagcaaaaagguuacaga

SEQ ID NO: 1319108 - RNA, 20 nt, Human
aaguuaugaucccuucagaa

SEQ ID NO: 1319109 - RNA, 21 nt, Human
acacacacacacucacacaca

SEQ ID NO: 1319110 - RNA, 18 nt, Human
acacacucacacacacuc

SEQ ID NO: 1319111 - RNA, 20 nt, Human
agaaaaagaauugauuucac

SEQ ID NO: 1319112 - RNA, 19 nt, Human
agaaggaggaggaggagga

SEQ ID NO: 1319113 - RNA, 20 nt, Human
agaaggaggaggaggaggac

SEQ ID NO: 1319114 - RNA, 18 nt, Human
agaggagaaggaggagga

SEQ ID NO: 1319115 - RNA, 21 nt, Human
agcaaagcaaaaagguuacag

SEQ ID NO: 1319116 - RNA, 19 nt, Human
agcuccuuugcuuucugcu

SEQ ID NO: 1319117 - RNA, 19 nt, Human
aggacucaagaccaaaagc

SEQ ID NO: 1319118 - RNA, 22 nt, Human
aggaggaagaagaggagaagga

SEQ ID NO: 1319119 - RNA, 23 nt, Human
aggaggaggaggaccuggcucca

SEQ ID NO: 1319120 - RNA, 21 nt, Human
agguauauauuuucuugccaa

SEQ ID NO: 1319121 - RNA, 22 nt, Human
augaaacagguauauauuuucu

SEQ ID NO: 1319122 - RNA, 23 nt, Human
augaaacagguauauauuuucuu

SEQ ID NO: 1319123 - RNA, 24 nt, Human
auucuuuuuuguauaauuuucccu

SEQ ID NO: 1319124 - RNA, 22 nt, Human
caaagcaaaaagguuacagaaa

SEQ ID NO: 1319125 - RNA, 28 nt, Human
cacacacacacucacacacacucaugca

SEQ ID NO: 1319126 - RNA, 20 nt, Human
cacacacacucacacacacu

SEQ ID NO: 1319127 - RNA, 21 nt, Human
cacacacacucaugcacacuc

SEQ ID NO: 1319128 - RNA, 18 nt, Human
cacccuuuucuagcuccu

SEQ ID NO: 1319129 - RNA, 21 nt, Human
cacuccuuucucuuccuuugc

SEQ ID NO: 1319130 - RNA, 19 nt, Human
ccacuccuuucucuuccuu

SEQ ID NO: 1319131 - RNA, 24 nt, Human
cccauggccucuccugaaucuucu

SEQ ID NO: 1319132 - RNA, 19 nt, Human
ccccauggccucuccugaa

SEQ ID NO: 1319133 - RNA, 19 nt, Human
ccuccccauggccucuccu

SEQ ID NO: 1319134 - RNA, 23 nt, Human
cucaagaccaaaagccuuaagaa

SEQ ID NO: 1319135 - RNA, 21 nt, Human
cucaugcacacucuccacucc

SEQ ID NO: 1319136 - RNA, 21 nt, Human
cuccagcugcccacacucucc

SEQ ID NO: 1319137 - RNA, 21 nt, Human
cugcaauaggcagguggagga

SEQ ID NO: 1319138 - RNA, 23 nt, Human
cuuaagaacuuaauaaaagcaaa

SEQ ID NO: 1319139 - RNA, 19 nt, Human
cuuucugcugcucugcaau

SEQ ID NO: 1319140 - RNA, 23 nt, Human
gaaggaggaggaggaggaccugg

SEQ ID NO: 1319141 - RNA, 21 nt, Human
gacaguccuucuuuccaguuu

SEQ ID NO: 1319142 - RNA, 18 nt, Human
gaggaagaagaggagaag

SEQ ID NO: 1319143 - RNA, 18 nt, Human
gaggaagaagaggagaag

SEQ ID NO: 1319144 - RNA, 22 nt, Human
gaggaggaggaccuggcuccag

SEQ ID NO: 1319145 - RNA, 20 nt, Human
gaggaggaggaggaccuggc

SEQ ID NO: 1319146 - RNA, 22 nt, Human
gaggaggaggaggaccuggcuc

SEQ ID NO: 1319147 - RNA, 22 nt, Human
gcaaagcaaaaagguuacagaa

SEQ ID NO: 1319148 - RNA, 21 nt, Human
ggagaaggaggaggaggagga

SEQ ID NO: 1319149 - RNA, 20 nt, Human
ggaggaggaggaggaccugg

SEQ ID NO: 1319150 - RNA, 23 nt, Human
ggaggaggaggaggaccuggcuc

SEQ ID NO: 1319151 - RNA, 18 nt, Human
gguuacagaaaaagaauu

SEQ ID NO: 1319152 - RNA, 19 nt, Human
uaaccagugaagaugaaac

SEQ ID NO: 1319153 - RNA, 21 nt, Human
uacagaaaaagaauugauuuc

SEQ ID NO: 1319154 - RNA, 19 nt, Human
uagcaugauaaauuuuuau

SEQ ID NO: 1319155 - RNA, 24 nt, Human
uaggcagguggaggaggaaaggaa

SEQ ID NO: 1319156 - RNA, 21 nt, Human
ucaugcacacucuccacuccu

SEQ ID NO: 1319157 - RNA, 18 nt, Human
uccuuugcuuucugcugc

SEQ ID NO: 1319158 - RNA, 24 nt, Human
ucuaggacucaagaccaaaagccu

SEQ ID NO: 1319159 - RNA, 18 nt, Human
ugcaucuuaucuaggacu

SEQ ID NO: 1319160 - RNA, 18 nt, Human
uggaggaggaaaggaaga

SEQ ID NO: 1319161 - RNA, 19 nt, Human
uuugccuccccauggccuc

SEQ ID NO: 1319162 - RNA, 21 nt, Human
aaacgaacaggacacaucccc

SEQ ID NO: 1319163 - RNA, 21 nt, Human
accacucaaacgaacaggaca

SEQ ID NO: 1319164 - RNA, 23 nt, Human
agcucgaugucguugugcccggc

SEQ ID NO: 1319165 - RNA, 19 nt, Human
aggcggcgucgaugucggc

SEQ ID NO: 1319166 - RNA, 21 nt, Human
agguuccuggugcgcagggcc

SEQ ID NO: 1319167 - RNA, 18 nt, Human
auccccaguggaggcccu

SEQ ID NO: 1319168 - RNA, 22 nt, Human
augcagccccuggggggccggc

SEQ ID NO: 1319169 - RNA, 21 nt, Human
caaacgaacaggacacauccc

SEQ ID NO: 1319170 - RNA, 21 nt, Human
cacaugcagccccuggggggc

SEQ ID NO: 1319171 - RNA, 20 nt, Human
caccgccuuggggcagcgcu

SEQ ID NO: 1319172 - RNA, 21 nt, Human
cagcucugggccuagguuccu

SEQ ID NO: 1319173 - RNA, 18 nt, Human
ccacaugcagccccuggg

SEQ ID NO: 1319174 - RNA, 26 nt, Human
ccacucaaacgaacaggacacauccc

SEQ ID NO: 1319175 - RNA, 18 nt, Human
ccaguggaggcccugggc

SEQ ID NO: 1319176 - RNA, 23 nt, Human
cccccagcugccaccuggauguc

SEQ ID NO: 1319177 - RNA, 23 nt, Human
cccccgggccgcccggggggucc

SEQ ID NO: 1319178 - RNA, 19 nt, Human
ccccuggggggccggcgcg

SEQ ID NO: 1319179 - RNA, 21 nt, Human
cccgggccgcccggggggucc

SEQ ID NO: 1319180 - RNA, 21 nt, Human
cccugggcacgcucuggccuc

SEQ ID NO: 1319181 - RNA, 19 nt, Human
cccugggucggggcggggu

SEQ ID NO: 1319182 - RNA, 19 nt, Human
ccgcuaggcgcgcuggcug

SEQ ID NO: 1319183 - RNA, 26 nt, Human
ccggcgcccuccacccacagcggcuc

SEQ ID NO: 1319184 - RNA, 19 nt, Human
ccuccgugccguggaugau

SEQ ID NO: 1319185 - RNA, 25 nt, Human
ccugcuacaggcaggagcccccagc

SEQ ID NO: 1319186 - RNA, 19 nt, Human
cgacgcaggcgcuccaggu

SEQ ID NO: 1319187 - RNA, 25 nt, Human
cgcucuggccucccccucacagcuc

SEQ ID NO: 1319188 - RNA, 24 nt, Human
cggggcggggucccccgggccgcc

SEQ ID NO: 1319189 - RNA, 18 nt, Human
cgggggccgccuuauugc

SEQ ID NO: 1319190 - RNA, 23 nt, Human
cgggggccgccuuauugcugagg

SEQ ID NO: 1319191 - RNA, 23 nt, Human
cggggugagguccgggggccgcc

SEQ ID NO: 1319192 - RNA, 18 nt, Human
cucucggaaggccugccc

SEQ ID NO: 1319193 - RNA, 22 nt, Human
cugagguccggccgguuggggc

SEQ ID NO: 1319194 - RNA, 24 nt, Human
cugccaccuggaugucaccacuca

SEQ ID NO: 1319195 - RNA, 18 nt, Human
gagguccggccgguuggg

SEQ ID NO: 1319196 - RNA, 23 nt, Human
gcugagguccggccgguuggggc

SEQ ID NO: 1319197 - RNA, 20 nt, Human
gcuggcugggcagcuccugg

SEQ ID NO: 1319198 - RNA, 19 nt, Human
ggucggggcgggguccccc

SEQ ID NO: 1319199 - RNA, 23 nt, Human
gucguugugcccggcgcccucca

SEQ ID NO: 1319200 - RNA, 18 nt, Human
gugcgagaagucgaucac

SEQ ID NO: 1319201 - RNA, 23 nt, Human
uagagguuccucucggaaggccu

SEQ ID NO: 1319202 - RNA, 22 nt, Human
ucaccucguccuccgugccgug

SEQ ID NO: 1319203 - RNA, 23 nt, Human
ucaccugcuacaggcaggagcug

SEQ ID NO: 1319204 - RNA, 24 nt, Human
uccccaguggaggcccugggcacg

SEQ ID NO: 1319205 - RNA, 18 nt, Human
ucccccgggccgcccggg

SEQ ID NO: 1319206 - RNA, 19 nt, Human
ucggcauagagguuccucu

SEQ ID NO: 1319207 - RNA, 18 nt, Human
ugagguccgggggccgcc

SEQ ID NO: 1319208 - RNA, 23 nt, Human
uggaugaugagcacgggcgacgu

SEQ ID NO: 1319209 - RNA, 20 nt, Human
uggggcagcgcucguagagc

SEQ ID NO: 1319210 - RNA, 22 nt, Human
uggggggccggcgcggggugag

SEQ ID NO: 1319211 - RNA, 20 nt, Human
uucacguauuuucuucuugc

SEQ ID NO: 1319212 - RNA, 23 nt, Human
uuccucucggaaggccugcccga

SEQ ID NO: 1319213 - RNA, 18 nt, Human
uugugcccggcgcccucc

SEQ ID NO: 1319214 - RNA, 24 nt, Human
aacaaguccauuuucauuguuagu

SEQ ID NO: 1319215 - RNA, 24 nt, Human
acaccaagaauuaccaaggcagca

SEQ ID NO: 1319216 - RNA, 25 nt, Human
acagcaccagaggcugcauuccuac

SEQ ID NO: 1319217 - RNA, 22 nt, Human
agaaagaaaagccacaugaaga

SEQ ID NO: 1319218 - RNA, 20 nt, Human
agcagcgcacagccaggccu

SEQ ID NO: 1319219 - RNA, 21 nt, Human
cacaaugcgccuuuccagaac

SEQ ID NO: 1319220 - RNA, 19 nt, Human
cacagcagcgcacagccag

SEQ ID NO: 1319221 - RNA, 20 nt, Human
caccaccuuguaaccuugua

SEQ ID NO: 1319222 - RNA, 19 nt, Human
caccagaggcugcauuccu

SEQ ID NO: 1319223 - RNA, 22 nt, Human
cacugcuucagcccugcucaga

SEQ ID NO: 1319224 - RNA, 19 nt, Human
cagaacacagcagcgcaca

SEQ ID NO: 1319225 - RNA, 25 nt, Human
cagcaccagaggcugcauuccuacu

SEQ ID NO: 1319226 - RNA, 24 nt, Human
cagcagcgcacagccaggccuggg

SEQ ID NO: 1319227 - RNA, 23 nt, Human
cagcgcacagccaggccuggggc

SEQ ID NO: 1319228 - RNA, 27 nt, Human
cauuucugugcuucuggaagccaaaaa

SEQ ID NO: 1319229 - RNA, 21 nt, Human
ccagaacacagcagcgcacag

SEQ ID NO: 1319230 - RNA, 24 nt, Human
cugcacucuggcuuugccuuugag

SEQ ID NO: 1319231 - RNA, 20 nt, Human
cugcuucagcccugcucaga

SEQ ID NO: 1319232 - RNA, 22 nt, Human
gccuggggcagagggaucacuc

SEQ ID NO: 1319233 - RNA, 23 nt, Human
uaugcagagagaaaggccacacc

SEQ ID NO: 1319234 - RNA, 19 nt, Human
ucagaaugucuccaccacc

SEQ ID NO: 1319235 - RNA, 20 nt, Human
uccaagcugcacucuggcuu

SEQ ID NO: 1319236 - RNA, 21 nt, Human
ugagaugcuaugcagagagaa

SEQ ID NO: 1319237 - RNA, 26 nt, Human
ugcuccaagcugcacucuggcuuugc

SEQ ID NO: 1319238 - RNA, 19 nt, Human
uggagaaagaaaagccaca

SEQ ID NO: 1319239 - RNA, 20 nt, Human
uggggcagagggaucacuca

SEQ ID NO: 1319240 - RNA, 20 nt, Human
uucagcaucuuauugggcuc

SEQ ID NO: 1319241 - RNA, 25 nt, Human
uucuuugcuccaagcugcacucugg

SEQ ID NO: 1319242 - RNA, 18 nt, Human
uugcuccaagcugcacuc

SEQ ID NO: 1319243 - RNA, 18 nt, Human
uuguuaguuucuccuuca

SEQ ID NO: 1319244 - RNA, 18 nt, Human
aaaggaccugcugugaag

SEQ ID NO: 1319245 - RNA, 18 nt, Human
accucugccugaacuccc

SEQ ID NO: 1319246 - RNA, 21 nt, Human
aggugccggggauugcagagu

SEQ ID NO: 1319247 - RNA, 25 nt, Human
ccugcugugaaggguccugcugcuc

SEQ ID NO: 1319248 - RNA, 23 nt, Human
cucucucccugagagagcccuau

SEQ ID NO: 1319249 - RNA, 20 nt, Human
cucugccugaacuccccacu

SEQ ID NO: 1319250 - RNA, 18 nt, Human
gacaaggcauaccucccu

SEQ ID NO: 1319251 - RNA, 24 nt, Human
ugaacuccccacugcuggcagccu

SEQ ID NO: 1319252 - RNA, 19 nt, Human
ugccugaacuccccacugc

SEQ ID NO: 1319253 - RNA, 22 nt, Human
ugccugaacuccccacugcugg

SEQ ID NO: 1319254 - RNA, 21 nt, Human
ugugaaggguccugcugcucu

SEQ ID NO: 1319255 - RNA, 26 nt, Human
acacaggcccaggagagggggaacgc

SEQ ID NO: 1319256 - RNA, 19 nt, Human
agcccggugggcaggaugc

SEQ ID NO: 1319257 - RNA, 22 nt, Human
aggcccaggagagguggcagca

SEQ ID NO: 1319258 - RNA, 23 nt, Human
ccaggagagguggcagcaggggu

SEQ ID NO: 1319259 - RNA, 19 nt, Human
gcuggucucugcagaguga

SEQ ID NO: 1319260 - RNA, 19 nt, Human
uagccccuacgugugaccc

SEQ ID NO: 1319261 - RNA, 18 nt, Human
uauugcuccucuuggcuc

SEQ ID NO: 1319262 - RNA, 18 nt, Human
uccagaaaggacacaggc

SEQ ID NO: 1319263 - RNA, 22 nt, Human
ucuccaaguggagcccgguggg

SEQ ID NO: 1319264 - RNA, 25 nt, Human
ucuggagcacaccuucuuaauuucc

SEQ ID NO: 1319265 - RNA, 20 nt, Human
ugacccacaggccucccacg

SEQ ID NO: 1319266 - RNA, 23 nt, Human
uggcagcaggggucccacacugg

SEQ ID NO: 1319267 - RNA, 19 nt, Human
aacacagggguaggaaucu

SEQ ID NO: 1319268 - RNA, 24 nt, Human
aacacuuugggaggccgagguggg

SEQ ID NO: 1319269 - RNA, 19 nt, Human
aacauggugaaaccccguc

SEQ ID NO: 1319270 - RNA, 20 nt, Human
aacauggugaaaccccgucu

SEQ ID NO: 1319271 - RNA, 21 nt, Human
aacauggugaaaccccgucuc

SEQ ID NO: 1319272 - RNA, 21 nt, Human
aaccagaaaagaaucucuuua

SEQ ID NO: 1319273 - RNA, 24 nt, Human
aaccugcucuuuccuuaaauucug

SEQ ID NO: 1319274 - RNA, 18 nt, Human
aagcaacuucuuauggca

SEQ ID NO: 1319275 - RNA, 24 nt, Human
aagcugaggcaggagaauugcuug

SEQ ID NO: 1319276 - RNA, 18 nt, Human
aauuagccaggcauggug

SEQ ID NO: 1319277 - RNA, 23 nt, Human
aauugcuugacccgggaggugga

SEQ ID NO: 1319278 - RNA, 25 nt, Human
acagagcaagacucccaucucaaaa

SEQ ID NO: 1319279 - RNA, 21 nt, Human
acaugcaggucuccguggucc

SEQ ID NO: 1319280 - RNA, 26 nt, Human
acauggccccagcucacugagcuccu

SEQ ID NO: 1319281 - RNA, 24 nt, Human
accccgucucuacuaaaaauacaa

SEQ ID NO: 1319282 - RNA, 19 nt, Human
acccugaacugaggaagag

SEQ ID NO: 1319283 - RNA, 24 nt, Human
accucugcacuccagccugggcga

SEQ ID NO: 1319284 - RNA, 18 nt, Human
agaaauacaaacccacag

SEQ ID NO: 1319285 - RNA, 23 nt, Human
agcaaugggccaccccuagcccc

SEQ ID NO: 1319286 - RNA, 20 nt, Human
agccaggcaugguggugggc

SEQ ID NO: 1319287 - RNA, 25 nt, Human
agccauguaaccccuagugguaacu

SEQ ID NO: 1319288 - RNA, 22 nt, Human
agccuggccaacauggugaaac

SEQ ID NO: 1319289 - RNA, 24 nt, Human
agccuggccaacauggugaaaccc

SEQ ID NO: 1319290 - RNA, 24 nt, Human
agccugggcgacagagcaagacuc

SEQ ID NO: 1319291 - RNA, 19 nt, Human
agccuucuccacacuggcc

SEQ ID NO: 1319292 - RNA, 24 nt, Human
aggacgggagcugggcuggguccu

SEQ ID NO: 1319293 - RNA, 23 nt, Human
aggagacuccggggcucggggac

SEQ ID NO: 1319294 - RNA, 18 nt, Human
aggcaggagaauugcuug

SEQ ID NO: 1319295 - RNA, 23 nt, Human
aggcaggagaauugcuugacccg

SEQ ID NO: 1319296 - RNA, 24 nt, Human
aggcaggagaauugcuugacccgg

SEQ ID NO: 1319297 - RNA, 24 nt, Human
aggcaugguggugggcaccuguaa

SEQ ID NO: 1319298 - RNA, 23 nt, Human
aggccccugagcauccccugccc

SEQ ID NO: 1319299 - RNA, 20 nt, Human
aggccgaggugggcggauca

SEQ ID NO: 1319300 - RNA, 24 nt, Human
aggccucccugcacaugcaggucu

SEQ ID NO: 1319301 - RNA, 22 nt, Human
agggugaggcgggcagaaaagc

SEQ ID NO: 1319302 - RNA, 24 nt, Human
agguggagguugcagugagcugag

SEQ ID NO: 1319303 - RNA, 24 nt, Human
aucgcaccucugcacuccagccug

SEQ ID NO: 1319304 - RNA, 21 nt, Human
augagaaagcccuagucucag

SEQ ID NO: 1319305 - RNA, 20 nt, Human
auggccccagcucacugagc

SEQ ID NO: 1319306 - RNA, 18 nt, Human
auuccugccugcaacccc

SEQ ID NO: 1319307 - RNA, 21 nt, Human
caacacuuugggaggccgagg

SEQ ID NO: 1319308 - RNA, 24 nt, Human
caacacuuugggaggccgaggugg

SEQ ID NO: 1319309 - RNA, 21 nt, Human
caacaggccuggcaauuuauc

SEQ ID NO: 1319310 - RNA, 24 nt, Human
caacauggugaaaccccgucucua

SEQ ID NO: 1319311 - RNA, 24 nt, Human
caaccccagcuucacaggcaauuc

SEQ ID NO: 1319312 - RNA, 22 nt, Human
caagaaauacaaacccacaggg

SEQ ID NO: 1319313 - RNA, 24 nt, Human
caagaccagccuggccaacauggu

SEQ ID NO: 1319314 - RNA, 22 nt, Human
caagacucccaucucaaaaaaa

SEQ ID NO: 1319315 - RNA, 24 nt, Human
caagacucccaucucaaaaaaaag

SEQ ID NO: 1319316 - RNA, 22 nt, Human
caagagucaccugcuagaacac

SEQ ID NO: 1319317 - RNA, 23 nt, Human
caagcccuuugcaaaagagcuga

SEQ ID NO: 1319318 - RNA, 21 nt, Human
caaggacccccaggugaccgg

SEQ ID NO: 1319319 - RNA, 22 nt, Human
caaugggccaccccuagccccg

SEQ ID NO: 1319320 - RNA, 21 nt, Human
cacacaagcuugaugccacca

SEQ ID NO: 1319321 - RNA, 23 nt, Human
cacagggacauggccccagcuca

SEQ ID NO: 1319322 - RNA, 18 nt, Human
caccagaugggaugggcu

SEQ ID NO: 1319323 - RNA, 25 nt, Human
caccccuagccccggagcagcucag

SEQ ID NO: 1319324 - RNA, 23 nt, Human
caccuguaauuccagcuacucgg

SEQ ID NO: 1319325 - RNA, 24 nt, Human
caccuguaauuccagcuacucggg

SEQ ID NO: 1319326 - RNA, 24 nt, Human
cacgccuguaaucccaacacuuug

SEQ ID NO: 1319327 - RNA, 20 nt, Human
cacuccagccugggcgacag

SEQ ID NO: 1319328 - RNA, 23 nt, Human
cacuccagccugggcgacagagc

SEQ ID NO: 1319329 - RNA, 19 nt, Human
cagaugggaugggcugggg

SEQ ID NO: 1319330 - RNA, 18 nt, Human
cagcaaugggccaccccu

SEQ ID NO: 1319331 - RNA, 21 nt, Human
cagcccgaggcgaggaggcca

SEQ ID NO: 1319332 - RNA, 22 nt, Human
cagcccgaggcgaggaggccag

SEQ ID NO: 1319333 - RNA, 19 nt, Human
caggaaggccccugggcug

SEQ ID NO: 1319334 - RNA, 20 nt, Human
caggccccugagcauccccu

SEQ ID NO: 1319335 - RNA, 21 nt, Human
caggggcuccaugaauauucc

SEQ ID NO: 1319336 - RNA, 21 nt, Human
caguuccugggcccggggccu

SEQ ID NO: 1319337 - RNA, 27 nt, Human
cauccuuaccaaggacccccaggugac

SEQ ID NO: 1319338 - RNA, 23 nt, Human
caucucaaaaaaaagauugcaac

SEQ ID NO: 1319339 - RNA, 18 nt, Human
cauuugaggucagguguu

SEQ ID NO: 1319340 - RNA, 21 nt, Human
ccacagcagggguuucgagga

SEQ ID NO: 1319341 - RNA, 22 nt, Human
ccagaaauucuaaaggaagcaa

SEQ ID NO: 1319342 - RNA, 19 nt, Human
ccaggcccauucccuccug

SEQ ID NO: 1319343 - RNA, 22 nt, Human
ccaggccucccugcacaugcag

SEQ ID NO: 1319344 - RNA, 18 nt, Human
ccaggccuggcugcccau

SEQ ID NO: 1319345 - RNA, 18 nt, Human
ccaucggcaggcugccag

SEQ ID NO: 1319346 - RNA, 21 nt, Human
ccccagcucacugagcuccug

SEQ ID NO: 1319347 - RNA, 18 nt, Human
cccccccgcagccuugca

SEQ ID NO: 1319348 - RNA, 23 nt, Human
ccccgcgaagcccugccuagccc

SEQ ID NO: 1319349 - RNA, 19 nt, Human
ccccggagcagcucagccc

SEQ ID NO: 1319350 - RNA, 21 nt, Human
ccccggagcagcucagccccc

SEQ ID NO: 1319351 - RNA, 21 nt, Human
ccccuagccccggagcagcuc

SEQ ID NO: 1319352 - RNA, 23 nt, Human
cccgcgaagcccugccuagcccc

SEQ ID NO: 1319353 - RNA, 21 nt, Human
cccgggagguggagguugcag

SEQ ID NO: 1319354 - RNA, 18 nt, Human
cccggggccucugcaggc

SEQ ID NO: 1319355 - RNA, 24 nt, Human
cccuuugcaaaagagcugacuucc

SEQ ID NO: 1319356 - RNA, 18 nt, Human
ccuagccccuuggcgugg

SEQ ID NO: 1319357 - RNA, 21 nt, Human
ccuagcucugcugcccuggga

SEQ ID NO: 1319358 - RNA, 22 nt, Human
ccuccaccaccccaugcugccu

SEQ ID NO: 1319359 - RNA, 23 nt, Human
ccuccaccaccccaugcugccua

SEQ ID NO: 1319360 - RNA, 23 nt, Human
ccuccaccaccccaugcugccua

SEQ ID NO: 1319361 - RNA, 18 nt, Human
ccucccucaguagcuggg

SEQ ID NO: 1319362 - RNA, 21 nt, Human
ccuccugccagcugcaucucc

SEQ ID NO: 1319363 - RNA, 20 nt, Human
ccucugcacuccagccuggg

SEQ ID NO: 1319364 - RNA, 21 nt, Human
ccucugcacuccagccugggc

SEQ ID NO: 1319365 - RNA, 24 nt, Human
ccucugcacuccagccugggcgac

SEQ ID NO: 1319366 - RNA, 22 nt, Human
ccucugcaggccuccaccaccc

SEQ ID NO: 1319367 - RNA, 23 nt, Human
ccucugcaggccuccaccacccc

SEQ ID NO: 1319368 - RNA, 21 nt, Human
ccugcaaccccagcuucacag

SEQ ID NO: 1319369 - RNA, 18 nt, Human
ccuggaggccagggcagg

SEQ ID NO: 1319370 - RNA, 23 nt, Human
ccuggccaacauggugaaacccc

SEQ ID NO: 1319371 - RNA, 24 nt, Human
ccuggccaacauggugaaaccccg

SEQ ID NO: 1319372 - RNA, 19 nt, Human
ccuggcugcccauccucug

SEQ ID NO: 1319373 - RNA, 22 nt, Human
ccugggcgacagagcaagacuc

SEQ ID NO: 1319374 - RNA, 22 nt, Human
ccuguaaucccaacacuuuggg

SEQ ID NO: 1319375 - RNA, 21 nt, Human
ccuguaauuccagcuacucgg

SEQ ID NO: 1319376 - RNA, 21 nt, Human
cgaggcgaggaggccagguca

SEQ ID NO: 1319377 - RNA, 24 nt, Human
cgaggugggcggaucauuugaggu

SEQ ID NO: 1319378 - RNA, 26 nt, Human
cgaggugggcggaucauuugagguca

SEQ ID NO: 1319379 - RNA, 23 nt, Human
cgccuguaaucccaacacuuugg

SEQ ID NO: 1319380 - RNA, 24 nt, Human
cggaucauuugaggucagguguuc

SEQ ID NO: 1319381 - RNA, 29 nt, Human
cgggagguggagguugcagugacaacggu

SEQ ID NO: 1319382 - RNA, 24 nt, Human
cgggagguggagguugcagugagc

SEQ ID NO: 1319383 - RNA, 18 nt, Human
cggugucuguggcaaccc

SEQ ID NO: 1319384 - RNA, 21 nt, Human
cuagccccggagcagcucagc

SEQ ID NO: 1319385 - RNA, 22 nt, Human
cucacgccuguaaucccaacac

SEQ ID NO: 1319386 - RNA, 24 nt, Human
cucacgccuguaaucccaacacuu

SEQ ID NO: 1319387 - RNA, 20 nt, Human
cuccaccaccccaugcugcc

SEQ ID NO: 1319388 - RNA, 19 nt, Human
cuccugccagcugcaucuc

SEQ ID NO: 1319389 - RNA, 23 nt, Human
cucugugccuacaaccugcucuu

SEQ ID NO: 1319390 - RNA, 23 nt, Human
cugcacuccagccugggcgacag

SEQ ID NO: 1319391 - RNA, 25 nt, Human
cugcacuccagccugggcgacagag

SEQ ID NO: 1319392 - RNA, 23 nt, Human
cugcaggccccugagcauccccu

SEQ ID NO: 1319393 - RNA, 19 nt, Human
cugcuggagaccuugggcc

SEQ ID NO: 1319394 - RNA, 18 nt, Human
cugggacaguaaggggaa

SEQ ID NO: 1319395 - RNA, 21 nt, Human
cuguaauuccagcuacucggg

SEQ ID NO: 1319396 - RNA, 24 nt, Human
cugucaugagcagacauaagaccu

SEQ ID NO: 1319397 - RNA, 18 nt, Human
cuuggagaaugaggaagg

SEQ ID NO: 1319398 - RNA, 18 nt, Human
gagcaagacucccaucuc

SEQ ID NO: 1319399 - RNA, 20 nt, Human
gagcagacauaagaccucau

SEQ ID NO: 1319400 - RNA, 23 nt, Human
gagguugcagugagcugagaucg

SEQ ID NO: 1319401 - RNA, 18 nt, Human
gagucaccugcuagaaca

SEQ ID NO: 1319402 - RNA, 19 nt, Human
gaucauuugaggucaggug

SEQ ID NO: 1319403 - RNA, 24 nt, Human
gaucauuugaggucagguguucaa

SEQ ID NO: 1319404 - RNA, 24 nt, Human
gcacuccagccugggcgacagagc

SEQ ID NO: 1319405 - RNA, 24 nt, Human
gccaacauggugaaaccccgucuc

SEQ ID NO: 1319406 - RNA, 20 nt, Human
gcccagggcuuucuccgacc

SEQ ID NO: 1319407 - RNA, 18 nt, Human
gcccugaggagggaaggc

SEQ ID NO: 1319408 - RNA, 22 nt, Human
gcccugggccuggugcaagauu

SEQ ID NO: 1319409 - RNA, 21 nt, Human
gcucugcuggagaccuugggc

SEQ ID NO: 1319410 - RNA, 21 nt, Human
gcugccaggcagacaggguag

SEQ ID NO: 1319411 - RNA, 20 nt, Human
ggacgggagcugggcugggu

SEQ ID NO: 1319412 - RNA, 22 nt, Human
ggagguugcagugagcugagau

SEQ ID NO: 1319413 - RNA, 24 nt, Human
ggagguugcagugagcugagaucg

SEQ ID NO: 1319414 - RNA, 23 nt, Human
ggaucauuugaggucagguguuc

SEQ ID NO: 1319415 - RNA, 21 nt, Human
ggcaagaaauacaaacccaca

SEQ ID NO: 1319416 - RNA, 22 nt, Human
ggcaagaaauacaaacccacag

SEQ ID NO: 1319417 - RNA, 18 nt, Human
ggccaggccccgcgaagc

SEQ ID NO: 1319418 - RNA, 21 nt, Human
ggcccagggcuuucuccgacc

SEQ ID NO: 1319419 - RNA, 21 nt, Human
ggcggaucauuugaggucagg

SEQ ID NO: 1319420 - RNA, 20 nt, Human
ggcucacgccuguaauccca

SEQ ID NO: 1319421 - RNA, 18 nt, Human
gggagaccugcaggcccc

SEQ ID NO: 1319422 - RNA, 20 nt, Human
gggaggccgaggugggcgga

SEQ ID NO: 1319423 - RNA, 24 nt, Human
gggggugaccuuagggaggguaaa

SEQ ID NO: 1319424 - RNA, 18 nt, Human
ggguaggaaucuuaggug

SEQ ID NO: 1319425 - RNA, 22 nt, Human
gggugaccuuagggaggguaaa

SEQ ID NO: 1319426 - RNA, 19 nt, Human
ggguuucgaggagacuccg

SEQ ID NO: 1319427 - RNA, 23 nt, Human
ggugagguggcucacgccuguaa

SEQ ID NO: 1319428 - RNA, 19 nt, Human
gguggagguugcagugagc

SEQ ID NO: 1319429 - RNA, 23 nt, Human
gguggcucacgccuguaauccca

SEQ ID NO: 1319430 - RNA, 24 nt, Human
gguggugggcaccuguaauuccag

SEQ ID NO: 1319431 - RNA, 23 nt, Human
guccaugcuggcccucaggggcu

SEQ ID NO: 1319432 - RNA, 22 nt, Human
gugaccccuccugguccaugcu

SEQ ID NO: 1319433 - RNA, 18 nt, Human
gugcuugaacuuggggag

SEQ ID NO: 1319434 - RNA, 22 nt, Human
gugcuuuaaggcagcccgaggc

SEQ ID NO: 1319435 - RNA, 19 nt, Human
guugcagugagcugagauc

SEQ ID NO: 1319436 - RNA, 21 nt, Human
uaaaaauacaaaaauuagcca

SEQ ID NO: 1319437 - RNA, 23 nt, Human
uaaaagaggacccuagcucugcu

SEQ ID NO: 1319438 - RNA, 24 nt, Human
uagcggugcuuuaaggcagcccga

SEQ ID NO: 1319439 - RNA, 20 nt, Human
uagcgguguggcuuuggcuu

SEQ ID NO: 1319440 - RNA, 28 nt, Human
ucaccugcuagaacacagggguaggaau

SEQ ID NO: 1319441 - RNA, 21 nt, Human
ucacugagcuccugagugguc

SEQ ID NO: 1319442 - RNA, 18 nt, Human
ucaguaucaucuaucaaa

SEQ ID NO: 1319443 - RNA, 24 nt, Human
ucaguaucaucuaucaaauaggcc

SEQ ID NO: 1319444 - RNA, 26 nt, Human
uccaagaacccugaacugaggaagag

SEQ ID NO: 1319445 - RNA, 19 nt, Human
uccacacccugccgccggc

SEQ ID NO: 1319446 - RNA, 19 nt, Human
uccaccaccccaugcugcc

SEQ ID NO: 1319447 - RNA, 24 nt, Human
uccagccugggcgacagagcaaga

SEQ ID NO: 1319448 - RNA, 25 nt, Human
uccaugcugugacccacagcagggg

SEQ ID NO: 1319449 - RNA, 18 nt, Human
ucccgggacugcugugaa

SEQ ID NO: 1319450 - RNA, 22 nt, Human
ucccugcacaugcaggucuccg

SEQ ID NO: 1319451 - RNA, 20 nt, Human
ucccuggaggcccagggcuu

SEQ ID NO: 1319452 - RNA, 21 nt, Human
ucccuggaggcccagggcuuu

SEQ ID NO: 1319453 - RNA, 22 nt, Human
uccucugagaccuguugaugag

SEQ ID NO: 1319454 - RNA, 18 nt, Human
uccugggcccggggccuc

SEQ ID NO: 1319455 - RNA, 19 nt, Human
uccugggcccggggccucu

SEQ ID NO: 1319456 - RNA, 31 nt, Human
ucgcaccucugcacuccagccugggcgacaa

SEQ ID NO: 1319457 - RNA, 24 nt, Human
ucucacacaagcccuuugcaaaag

SEQ ID NO: 1319458 - RNA, 21 nt, Human
ucucuacuaaaaauacaaaaa

SEQ ID NO: 1319459 - RNA, 21 nt, Human
ucugccagcaaugggccaccc

SEQ ID NO: 1319460 - RNA, 21 nt, Human
ucugcuggagaccuugggcca

SEQ ID NO: 1319461 - RNA, 22 nt, Human
ugagaucgcaccucugcacucc

SEQ ID NO: 1319462 - RNA, 24 nt, Human
ugagaucgcaccucugcacuccag

SEQ ID NO: 1319463 - RNA, 23 nt, Human
ugagcaaauccaagaacccugaa

SEQ ID NO: 1319464 - RNA, 18 nt, Human
ugagcauccccugcccca

SEQ ID NO: 1319465 - RNA, 22 nt, Human
ugagcugagaucgcaccucugc

SEQ ID NO: 1319466 - RNA, 23 nt, Human
ugaggcaggagaauugcuugacc

SEQ ID NO: 1319467 - RNA, 24 nt, Human
ugaggcaggagaauugcuugaccc

SEQ ID NO: 1319468 - RNA, 22 nt, Human
ugaggucagguguucaagacca

SEQ ID NO: 1319469 - RNA, 24 nt, Human
ugauacaacugaaaacauaacccu

SEQ ID NO: 1319470 - RNA, 20 nt, Human
ugcacaugcaggucuccgug

SEQ ID NO: 1319471 - RNA, 20 nt, Human
ugcucuuuccuuaaauucug

SEQ ID NO: 1319472 - RNA, 18 nt, Human
ugcuugaacuuggggagg

SEQ ID NO: 1319473 - RNA, 21 nt, Human
uggagaaugaggaaggggacg

SEQ ID NO: 1319474 - RNA, 18 nt, Human
uggagguugcagugagcu

SEQ ID NO: 1319475 - RNA, 24 nt, Human
uggccaacauggugaaaccccguc

SEQ ID NO: 1319476 - RNA, 21 nt, Human
uggcucacgccuguaauccca

SEQ ID NO: 1319477 - RNA, 24 nt, Human
uggcucacgccuguaaucccaaca

SEQ ID NO: 1319478 - RNA, 19 nt, Human
ugggaacagaguggcacca

SEQ ID NO: 1319479 - RNA, 18 nt, Human
ugggaagggggugaccuu

SEQ ID NO: 1319480 - RNA, 19 nt, Human
ugggaggccgaggugggcg

SEQ ID NO: 1319481 - RNA, 24 nt, Human
ugggaggccgaggugggcggauca

SEQ ID NO: 1319482 - RNA, 20 nt, Human
ugggcugggggcuccagggc

SEQ ID NO: 1319483 - RNA, 21 nt, Human
ugggcugggggcuccagggca

SEQ ID NO: 1319484 - RNA, 22 nt, Human
uggugggcaccuguaauuccag

SEQ ID NO: 1319485 - RNA, 24 nt, Human
ugguggugggcaccuguaauucca

SEQ ID NO: 1319486 - RNA, 21 nt, Human
uguagaugggaagggggugac

SEQ ID NO: 1319487 - RNA, 23 nt, Human
uguaucuguuuauugcuuuuaag

SEQ ID NO: 1319488 - RNA, 19 nt, Human
ugucaugagcagacauaag

SEQ ID NO: 1319489 - RNA, 21 nt, Human
uguccccucccucaguagcug

SEQ ID NO: 1319490 - RNA, 19 nt, Human
ugugacccacagcaggggu

SEQ ID NO: 1319491 - RNA, 23 nt, Human
uguucaagaccagccuggccaac

SEQ ID NO: 1319492 - RNA, 24 nt, Human
uuagccaggcaugguggugggcac

SEQ ID NO: 1319493 - RNA, 23 nt, Human
uuagggcauuggaucuggaagga

SEQ ID NO: 1319494 - RNA, 24 nt, Human
uuccagcuacucgggaagcugagg

SEQ ID NO: 1319495 - RNA, 21 nt, Human
uuccugggcccggggccucug

SEQ ID NO: 1319496 - RNA, 22 nt, Human
uuccugggcccggggccucugc

SEQ ID NO: 1319497 - RNA, 23 nt, Human
uugacccgggagguggagguugc

SEQ ID NO: 1319498 - RNA, 19 nt, Human
uugcagugagcugagaucg

SEQ ID NO: 1319499 - RNA, 20 nt, Human
uugcagugagcugagaucgc

SEQ ID NO: 1319500 - RNA, 22 nt, Human
uugcagugagcugagaucgcac

SEQ ID NO: 1319501 - RNA, 23 nt, Human
uugcaguuacaacacaaguugaa

SEQ ID NO: 1319502 - RNA, 23 nt, Human
uugcuugacccgggagguggagg

SEQ ID NO: 1319503 - RNA, 25 nt, Human
uugggaggccgaggugggcggauca

SEQ ID NO: 1319504 - RNA, 23 nt, Human
uuugaggucagguguucaagacc

SEQ ID NO: 1319505 - RNA, 20 nt, Human
aaccagagccugcgugccuu

SEQ ID NO: 1319506 - RNA, 18 nt, Human
accaccuucauggaaacc

SEQ ID NO: 1319507 - RNA, 22 nt, Human
acuccaagacucugguguugaa

SEQ ID NO: 1319508 - RNA, 19 nt, Human
agaaccuucaccaccuuca

SEQ ID NO: 1319509 - RNA, 22 nt, Human
agccaugacagugacuauggcc

SEQ ID NO: 1319510 - RNA, 22 nt, Human
aggcaaccacuguuccugguga

SEQ ID NO: 1319511 - RNA, 19 nt, Human
aggcgcaucaugagugucu

SEQ ID NO: 1319512 - RNA, 22 nt, Human
auuaaccagaaaaagagccacc

SEQ ID NO: 1319513 - RNA, 20 nt, Human
cagaaaaagagccaccaaau

SEQ ID NO: 1319514 - RNA, 21 nt, Human
cagggaacuccucuucuaauu

SEQ ID NO: 1319515 - RNA, 24 nt, Human
cauggaaaccaaaaucgucagaga

SEQ ID NO: 1319516 - RNA, 21 nt, Human
cccuaccaugugcuucccuug

SEQ ID NO: 1319517 - RNA, 19 nt, Human
ccuccugccacugcucccc

SEQ ID NO: 1319518 - RNA, 24 nt, Human
ccuccugccacugcuccccagguc

SEQ ID NO: 1319519 - RNA, 25 nt, Human
ccuucauggaaaccaaaaugaggau

SEQ ID NO: 1319520 - RNA, 22 nt, Human
ccuugagcagggaacuccucuu

SEQ ID NO: 1319521 - RNA, 23 nt, Human
cuaugcaaaccagagccugcgug

SEQ ID NO: 1319522 - RNA, 18 nt, Human
cucagagggaugaagcgu

SEQ ID NO: 1319523 - RNA, 24 nt, Human
cugaaaguuuccuugucugacucc

SEQ ID NO: 1319524 - RNA, 21 nt, Human
cuucaaaguucauguuccaug

SEQ ID NO: 1319525 - RNA, 20 nt, Human
gaacacggucgcucaucuuc

SEQ ID NO: 1319526 - RNA, 23 nt, Human
gacuauggccaaaaggcgcauca

SEQ ID NO: 1319527 - RNA, 18 nt, Human
gccugcgugccuuuugug

SEQ ID NO: 1319528 - RNA, 22 nt, Human
gggaacuccucuucuaauuguc

SEQ ID NO: 1319529 - RNA, 21 nt, Human
guuggaguugcuuucuuagcc

SEQ ID NO: 1319530 - RNA, 22 nt, Human
uaaccagaaaaagagccaccaa

SEQ ID NO: 1319531 - RNA, 23 nt, Human
uagaggcaaccacuguuccuggu

SEQ ID NO: 1319532 - RNA, 24 nt, Human
uauuggaaaugcuuuuauuuggag

SEQ ID NO: 1319533 - RNA, 22 nt, Human
ucaggaacggcaugaucuucca

SEQ ID NO: 1319534 - RNA, 21 nt, Human
ucuccuccugccacugcuccc

SEQ ID NO: 1319535 - RNA, 24 nt, Human
ucuccuccugccacugcuccccag

SEQ ID NO: 1319536 - RNA, 20 nt, Human
ucuuccaguugacauccugg

SEQ ID NO: 1319537 - RNA, 26 nt, Human
ugacuccacacauugccuucugauau

SEQ ID NO: 1319538 - RNA, 18 nt, Human
ugagugucuccuccugcc

SEQ ID NO: 1319539 - RNA, 22 nt, Human
ugagugucuccuccugccacug

SEQ ID NO: 1319540 - RNA, 21 nt, Human
uggguuggaguugcuuucuua

SEQ ID NO: 1319541 - RNA, 23 nt, Human
uggugagugcuaaggaccuucuu

SEQ ID NO: 1319542 - RNA, 25 nt, Human
uguagcauuaacccuaccaugugcu

SEQ ID NO: 1319543 - RNA, 20 nt, Human
ugucugacuccaagacucug

SEQ ID NO: 1319544 - RNA, 19 nt, Human
uucauuaggaagucauuug

SEQ ID NO: 1319545 - RNA, 21 nt, Human
uugaagauagaauuugccuua

SEQ ID NO: 1319546 - RNA, 22 nt, Human
acugcuugagcuaucugcucca

SEQ ID NO: 1319547 - RNA, 19 nt, Human
uaacuaguaguauuaaaau

SEQ ID NO: 1319548 - RNA, 26 nt, Human
uagugaauuacucauaguuaagaucu

SEQ ID NO: 1319549 - RNA, 19 nt, Human
agacaucucagcuccuucc

SEQ ID NO: 1319550 - RNA, 20 nt, Human
caaaccauucugugcauaau

SEQ ID NO: 1319551 - RNA, 23 nt, Human
ccccaucuucugaaauucccagc

SEQ ID NO: 1319552 - RNA, 18 nt, Human
ccgccgccgcacgcaccc

SEQ ID NO: 1319553 - RNA, 19 nt, Human
ccugcccucccuuguagaa

SEQ ID NO: 1319554 - RNA, 23 nt, Human
cuuguagaaguucucccccaucu

SEQ ID NO: 1319555 - RNA, 25 nt, Human
uagcaguacaauuaacauuggcuau

SEQ ID NO: 1319556 - RNA, 23 nt, Human
ucucucgcaaccgccgccgcacu

SEQ ID NO: 1319557 - RNA, 23 nt, Human
ucuuuuauuuauauauacuuuuu

SEQ ID NO: 1319558 - RNA, 24 nt, Human
ugacuuuagacaucucagcuccuu

SEQ ID NO: 1319559 - RNA, 21 nt, Human
ugcaccaaaccauucugugca

SEQ ID NO: 1319560 - RNA, 21 nt, Human
uuaaagcaaauauauagcgcc

SEQ ID NO: 1319561 - RNA, 24 nt, Human
uuaaagcaaauauauagcgccuca

SEQ ID NO: 1319562 - RNA, 23 nt, Human
aacacuuuccuguuuggccacca

SEQ ID NO: 1319563 - RNA, 19 nt, Human
aauccugagcuuagacgca

SEQ ID NO: 1319564 - RNA, 21 nt, Human
aaucugcuucuucuucuccuc

SEQ ID NO: 1319565 - RNA, 18 nt, Human
acccuugggguccugggg

SEQ ID NO: 1319566 - RNA, 19 nt, Human
accgccccgucccgacccc

SEQ ID NO: 1319567 - RNA, 22 nt, Human
accuccuccagccgccgccggu

SEQ ID NO: 1319568 - RNA, 19 nt, Human
acgccgcaggacggagcca

SEQ ID NO: 1319569 - RNA, 21 nt, Human
agcaggugaaugggcccuggg

SEQ ID NO: 1319570 - RNA, 24 nt, Human
agcauucuggcgcucacugaugcc

SEQ ID NO: 1319571 - RNA, 19 nt, Human
agcugcucggccuccuccu

SEQ ID NO: 1319572 - RNA, 19 nt, Human
agcuggcacuggguguggu

SEQ ID NO: 1319573 - RNA, 24 nt, Human
agcuucucuacacuguccuugcug

SEQ ID NO: 1319574 - RNA, 18 nt, Human
aggcgucgggagcucagc

SEQ ID NO: 1319575 - RNA, 22 nt, Human
agggagcucacugugauggacu

SEQ ID NO: 1319576 - RNA, 22 nt, Human
aggggugggugaagaaggugca

SEQ ID NO: 1319577 - RNA, 18 nt, Human
caccugagccuacgugcc

SEQ ID NO: 1319578 - RNA, 18 nt, Human
cacugugugcagaaaggu

SEQ ID NO: 1319579 - RNA, 18 nt, Human
cagaugaugcggccagag

SEQ ID NO: 1319580 - RNA, 22 nt, Human
cagcaccuugcggaggcguucc

SEQ ID NO: 1319581 - RNA, 18 nt, Human
cagcauucuggcgcucac

SEQ ID NO: 1319582 - RNA, 19 nt, Human
cagcauucuggcgcucacu

SEQ ID NO: 1319583 - RNA, 21 nt, Human
cagcuggcugcuccgagacuu

SEQ ID NO: 1319584 - RNA, 23 nt, Human
caggaugggagccagcacccgcu

SEQ ID NO: 1319585 - RNA, 18 nt, Human
caggggugggugaagaag

SEQ ID NO: 1319586 - RNA, 23 nt, Human
cagguaacugugacagaugaugc

SEQ ID NO: 1319587 - RNA, 21 nt, Human
caggugaaugggcccuggggc

SEQ ID NO: 1319588 - RNA, 22 nt, Human
cccgccauggagaaucuggaaa

SEQ ID NO: 1319589 - RNA, 22 nt, Human
cccugggagguuggagcugugg

SEQ ID NO: 1319590 - RNA, 24 nt, Human
ccgcaccgauugagaguccgugcg

SEQ ID NO: 1319591 - RNA, 18 nt, Human
ccgccccgucccgacccc

SEQ ID NO: 1319592 - RNA, 22 nt, Human
ccgccgcuccugcucccgcugc

SEQ ID NO: 1319593 - RNA, 22 nt, Human
ccgccgcuccugcucccgcugc

SEQ ID NO: 1319594 - RNA, 25 nt, Human
ccgccgcuccugcucccgcugcucc

SEQ ID NO: 1319595 - RNA, 22 nt, Human
ccgccgcuccugcucgcgccgc

SEQ ID NO: 1319596 - RNA, 24 nt, Human
ccgccgcuccugcucgcgccgcuc

SEQ ID NO: 1319597 - RNA, 19 nt, Human
ccgcggcagcugcagccgc

SEQ ID NO: 1319598 - RNA, 22 nt, Human
ccgcuccugcucccgccgcucc

SEQ ID NO: 1319599 - RNA, 22 nt, Human
ccgcuccugcucccgccgcucc

SEQ ID NO: 1319600 - RNA, 26 nt, Human
ccgcuccugcucccgccgcuccuccc

SEQ ID NO: 1319601 - RNA, 20 nt, Human
ccgcuccugcuccucuuccu

SEQ ID NO: 1319602 - RNA, 22 nt, Human
ccgcuccugcucgcgccgcucc

SEQ ID NO: 1319603 - RNA, 22 nt, Human
ccgcuccugcucgcgccgcucc

SEQ ID NO: 1319604 - RNA, 23 nt, Human
ccgcuccugcucgcgccgcuccu

SEQ ID NO: 1319605 - RNA, 20 nt, Human
ccgcugcucugccagccgcc

SEQ ID NO: 1319606 - RNA, 23 nt, Human
ccuccaggugcugcuccucgucc

SEQ ID NO: 1319607 - RNA, 18 nt, Human
ccuccucuuccugcuucc

SEQ ID NO: 1319608 - RNA, 24 nt, Human
ccuccugcugcagccaccugagcc

SEQ ID NO: 1319609 - RNA, 21 nt, Human
ccugcagcaccuugcggaggc

SEQ ID NO: 1319610 - RNA, 18 nt, Human
ccugcgcaauccugagcu

SEQ ID NO: 1319611 - RNA, 20 nt, Human
ccuucucagucuucucgucg

SEQ ID NO: 1319612 - RNA, 23 nt, Human
ccuugacccuugggguccugggg

SEQ ID NO: 1319613 - RNA, 22 nt, Human
cgcaauccugagcuuagacgca

SEQ ID NO: 1319614 - RNA, 25 nt, Human
cgcaggacggagccguucuccccga

SEQ ID NO: 1319615 - RNA, 18 nt, Human
cgguggacaugagcuggg

SEQ ID NO: 1319616 - RNA, 21 nt, Human
cucacgcuucagcuucaccuc

SEQ ID NO: 1319617 - RNA, 25 nt, Human
cuccaggcgcugccgcuccuucucc

SEQ ID NO: 1319618 - RNA, 23 nt, Human
cuccaguauccuggccuucgacu

SEQ ID NO: 1319619 - RNA, 22 nt, Human
cuccccgaccacuguagccagc

SEQ ID NO: 1319620 - RNA, 20 nt, Human
cuccuccagccgccgccgcu

SEQ ID NO: 1319621 - RNA, 19 nt, Human
cuccuccaucuucuuggcc

SEQ ID NO: 1319622 - RNA, 19 nt, Human
cuccucugccagccgcucc

SEQ ID NO: 1319623 - RNA, 22 nt, Human
cuccugcucccgcugcucugcc

SEQ ID NO: 1319624 - RNA, 21 nt, Human
cuccugcugcagccaccugag

SEQ ID NO: 1319625 - RNA, 23 nt, Human
cucgcgccgcuccugcucgcgcc

SEQ ID NO: 1319626 - RNA, 18 nt, Human
cucugccagccgcuccuc

SEQ ID NO: 1319627 - RNA, 24 nt, Human
cucugccagccgcuuagccucggc

SEQ ID NO: 1319628 - RNA, 20 nt, Human
cugcagcaccuugcggaggc

SEQ ID NO: 1319629 - RNA, 19 nt, Human
cugcagcagcucuuggugc

SEQ ID NO: 1319630 - RNA, 19 nt, Human
cugcucaaucugcuucuuc

SEQ ID NO: 1319631 - RNA, 19 nt, Human
cugcucccgccgcuccugc

SEQ ID NO: 1319632 - RNA, 19 nt, Human
cugcucccgccgcuccugc

SEQ ID NO: 1319633 - RNA, 23 nt, Human
cugcucccgccgcuccugcucgc

SEQ ID NO: 1319634 - RNA, 23 nt, Human
cuggcugcuccgagacuuucugc

SEQ ID NO: 1319635 - RNA, 18 nt, Human
cuggcugggcagggugag

SEQ ID NO: 1319636 - RNA, 20 nt, Human
cugguuccucugcacugugu

SEQ ID NO: 1319637 - RNA, 18 nt, Human
cuugcggaggcguuccuc

SEQ ID NO: 1319638 - RNA, 28 nt, Human
cuuggccgccgccuuuuucuuggccuuc

SEQ ID NO: 1319639 - RNA, 19 nt, Human
gaaucuggaaaggcuggcg

SEQ ID NO: 1319640 - RNA, 22 nt, Human
gacuucuuagguguugauuccu

SEQ ID NO: 1319641 - RNA, 18 nt, Human
gagccagcacccgcuccc

SEQ ID NO: 1319642 - RNA, 23 nt, Human
gagcuguggcugaagcuggaguc

SEQ ID NO: 1319643 - RNA, 23 nt, Human
gauggacuccaguauccuggccu

SEQ ID NO: 1319644 - RNA, 21 nt, Human
gcagcacgggucacacgccgc

SEQ ID NO: 1319645 - RNA, 20 nt, Human
gcagcuccucauccuccagg

SEQ ID NO: 1319646 - RNA, 23 nt, Human
gcagcugcucggccuccuccuuc

SEQ ID NO: 1319647 - RNA, 23 nt, Human
gcauucuggcgcucacugaugcc

SEQ ID NO: 1319648 - RNA, 22 nt, Human
gccgccgccgcuuguccuccuc

SEQ ID NO: 1319649 - RNA, 20 nt, Human
gccgccgcuuguccuccucc

SEQ ID NO: 1319650 - RNA, 25 nt, Human
gcgcagcugcucggccuccuccuuc

SEQ ID NO: 1319651 - RNA, 25 nt, Human
gcggcagcugcagccgcagcacggg

SEQ ID NO: 1319652 - RNA, 21 nt, Human
gcucagcauucuggcgcucac

SEQ ID NO: 1319653 - RNA, 21 nt, Human
gcuccagcaggugaaugggcc

SEQ ID NO: 1319654 - RNA, 21 nt, Human
gcucccgccgcuccugcuccc

SEQ ID NO: 1319655 - RNA, 24 nt, Human
gcucccgccgcuccugcucgcgcc

SEQ ID NO: 1319656 - RNA, 20 nt, Human
gcuccgagacuuucugcggg

SEQ ID NO: 1319657 - RNA, 23 nt, Human
gcuccugcucccgcugcucugcc

SEQ ID NO: 1319658 - RNA, 21 nt, Human
gcuccuggggggcugcagcuc

SEQ ID NO: 1319659 - RNA, 28 nt, Human
gcucuggcucuuugcugaauucucugac

SEQ ID NO: 1319660 - RNA, 19 nt, Human
gcugcagccaccugagccu

SEQ ID NO: 1319661 - RNA, 19 nt, Human
gcuucagcuucaccuccuc

SEQ ID NO: 1319662 - RNA, 20 nt, Human
gcuucagcuucaccuccucc

SEQ ID NO: 1319663 - RNA, 23 nt, Human
ggacucggggaagacggggcgau

SEQ ID NO: 1319664 - RNA, 21 nt, Human
ggagcucagcuggcugcuccg

SEQ ID NO: 1319665 - RNA, 19 nt, Human
gggaagacggggcgaucgg

SEQ ID NO: 1319666 - RNA, 20 nt, Human
gggcagggugaggaaggggu

SEQ ID NO: 1319667 - RNA, 19 nt, Human
ggggucaugagcaucuggu

SEQ ID NO: 1319668 - RNA, 20 nt, Human
gucgggagcucagcuggcug

SEQ ID NO: 1319669 - RNA, 22 nt, Human
uaagaaauccgucucuucuucc

SEQ ID NO: 1319670 - RNA, 27 nt, Human
uagacgcagaccgccccgucccgaccc

SEQ ID NO: 1319671 - RNA, 18 nt, Human
uccaguauccuggccuuc

SEQ ID NO: 1319672 - RNA, 21 nt, Human
uccaguauccuggccuucgac

SEQ ID NO: 1319673 - RNA, 23 nt, Human
uccgagacuuucugcgggauaac

SEQ ID NO: 1319674 - RNA, 22 nt, Human
uccuccagccgccgccgcuugu

SEQ ID NO: 1319675 - RNA, 19 nt, Human
uccuccaucuucuuggccg

SEQ ID NO: 1319676 - RNA, 22 nt, Human
uccuccaucuucuuggccgccg

SEQ ID NO: 1319677 - RNA, 20 nt, Human
uccuccuccugcugcagcca

SEQ ID NO: 1319678 - RNA, 26 nt, Human
ucggcagucuucuuggcaagccuucu

SEQ ID NO: 1319679 - RNA, 24 nt, Human
ucggccgccuuccgcagccgcucc

SEQ ID NO: 1319680 - RNA, 22 nt, Human
ucggccuccucuuggauuuccu

SEQ ID NO: 1319681 - RNA, 21 nt, Human
ucucuucuuccgucgguucuu

SEQ ID NO: 1319682 - RNA, 19 nt, Human
ucugccugcgcagcugcuc

SEQ ID NO: 1319683 - RNA, 19 nt, Human
ucugggcuaagacuugggg

SEQ ID NO: 1319684 - RNA, 26 nt, Human
ugagaagguguuuugggcaucagcuc

SEQ ID NO: 1319685 - RNA, 23 nt, Human
ugagcuucuggucacauagcucc

SEQ ID NO: 1319686 - RNA, 19 nt, Human
ugccaugguagccgcggca

SEQ ID NO: 1319687 - RNA, 28 nt, Human
ugccaugguagccgcggcagcugcagcc

SEQ ID NO: 1319688 - RNA, 22 nt, Human
ugccgaucuccaccacaggcac

SEQ ID NO: 1319689 - RNA, 26 nt, Human
ugcgcucggccuccucuuggauuuuu

SEQ ID NO: 1319690 - RNA, 22 nt, Human
ugcucagcauucuggcgcucac

SEQ ID NO: 1319691 - RNA, 18 nt, Human
ugcuccucuuccuucuuc

SEQ ID NO: 1319692 - RNA, 18 nt, Human
ugcugcuccucguccagc

SEQ ID NO: 1319693 - RNA, 22 nt, Human
ugcuucuucuucuccuccuuca

SEQ ID NO: 1319694 - RNA, 19 nt, Human
uggaaaggcuggcgagucc

SEQ ID NO: 1319695 - RNA, 18 nt, Human
uggagucggggacagagu

SEQ ID NO: 1319696 - RNA, 23 nt, Human
uggcugggcagggugaggaaggg

SEQ ID NO: 1319697 - RNA, 19 nt, Human
uggcugggcagggugaggg

SEQ ID NO: 1319698 - RNA, 21 nt, Human
ugggcagggugaggaaggggu

SEQ ID NO: 1319699 - RNA, 18 nt, Human
ugggugaagaaggugcag

SEQ ID NO: 1319700 - RNA, 19 nt, Human
ugggugaagaaggugcagc

SEQ ID NO: 1319701 - RNA, 21 nt, Human
uggucacauagcuccagcagg

SEQ ID NO: 1319702 - RNA, 21 nt, Human
ugucgggaugcccugggaggu

SEQ ID NO: 1319703 - RNA, 20 nt, Human
uguuuggccaccagagagua

SEQ ID NO: 1319704 - RNA, 19 nt, Human
uuauccggcaggaugggag

SEQ ID NO: 1319705 - RNA, 25 nt, Human
uuccucaagccacaccaaguccuua

SEQ ID NO: 1319706 - RNA, 22 nt, Human
uuggccaccagagaguacuucu

SEQ ID NO: 1319707 - RNA, 24 nt, Human
uugggcaucagcucuggcucuuug

SEQ ID NO: 1319708 - RNA, 18 nt, Human
uuugcugaauucucuggu

SEQ ID NO: 1319709 - RNA, 23 nt, Human
uuugcugaauucucuggugaaca

SEQ ID NO: 1319710 - RNA, 21 nt, Human
cuguugaauggagccugucac

SEQ ID NO: 1319711 - RNA, 24 nt, Human
uugaauggagccugucaccuacug

SEQ ID NO: 1319712 - RNA, 18 nt, Human
cagcggcggcucggggag

SEQ ID NO: 1319713 - RNA, 21 nt, Human
caggaggggccggccgggagc

SEQ ID NO: 1319714 - RNA, 24 nt, Human
cccaggaggggccggccgggagcg

SEQ ID NO: 1319715 - RNA, 18 nt, Human
ccugagauggcggcggcg

SEQ ID NO: 1319716 - RNA, 24 nt, Human
cgcccagggccggcggagcggcgg

SEQ ID NO: 1319717 - RNA, 22 nt, Human
cggccgggagcgggcugagccc

SEQ ID NO: 1319718 - RNA, 19 nt, Human
cgggagcgggcugagcccc

SEQ ID NO: 1319719 - RNA, 21 nt, Human
cugagauggcggcggcggcuu

SEQ ID NO: 1319720 - RNA, 21 nt, Human
gagauggcggcggcggcacag

SEQ ID NO: 1319721 - RNA, 21 nt, Human
gauggcggcggcggcacagcg

SEQ ID NO: 1319722 - RNA, 22 nt, Human
gcccagggccggcggagcggcg

SEQ ID NO: 1319723 - RNA, 21 nt, Human
gccgggagcgggcugagcccc

SEQ ID NO: 1319724 - RNA, 19 nt, Human
ggggagcccaggaggggcc

SEQ ID NO: 1319725 - RNA, 26 nt, Human
ucgcccagggccggcggagcggcggg

SEQ ID NO: 1319726 - RNA, 22 nt, Human
ugagauggcggcggcggcacag

SEQ ID NO: 1319727 - RNA, 18 nt, Human
cacagcccgcccagcccc

SEQ ID NO: 1319728 - RNA, 20 nt, Human
ccccuaggcgccgcggcagg

SEQ ID NO: 1319729 - RNA, 26 nt, Human
ccccuaggcgccgcggcagguguccg

SEQ ID NO: 1319730 - RNA, 18 nt, Human
cccgcccgcgcccucccu

SEQ ID NO: 1319731 - RNA, 21 nt, Human
cccgcgcccucccucgcgguc

SEQ ID NO: 1319732 - RNA, 18 nt, Human
cccucccucgcggucccg

SEQ ID NO: 1319733 - RNA, 20 nt, Human
ccgccccuaggcgccgcggc

SEQ ID NO: 1319734 - RNA, 25 nt, Human
ccucgcggucccggccccacuccuc

SEQ ID NO: 1319735 - RNA, 23 nt, Human
cgcccgcccgcgcccucccucgc

SEQ ID NO: 1319736 - RNA, 19 nt, Human
cgcccgcgcccucccucgc

SEQ ID NO: 1319737 - RNA, 23 nt, Human
cgcggcagguguccgcggugacc

SEQ ID NO: 1319738 - RNA, 19 nt, Human
cggucccggccccacuccu

SEQ ID NO: 1319739 - RNA, 24 nt, Human
cucuccgccguguucugcaccgac

SEQ ID NO: 1319740 - RNA, 21 nt, Human
gaagcggaagccgaaucugcu

SEQ ID NO: 1319741 - RNA, 21 nt, Human
gccccggcgcccgcccgcgcc

SEQ ID NO: 1319742 - RNA, 22 nt, Human
gcggcagguguccgcggugacc

SEQ ID NO: 1319743 - RNA, 22 nt, Human
ggacacagcccgcccagccccg

SEQ ID NO: 1319744 - RNA, 24 nt, Human
ggcgcccgcccgcgcccucccucg

SEQ ID NO: 1319745 - RNA, 23 nt, Human
uccgcggugaccggcaggcagcu

SEQ ID NO: 1319746 - RNA, 22 nt, Human
ucgcggucccggccccacuccu

SEQ ID NO: 1319747 - RNA, 25 nt, Human
ucugcaccgacagggccaccagggg

SEQ ID NO: 1319748 - RNA, 18 nt, Human
ugaugcagcggacacagc

SEQ ID NO: 1319749 - RNA, 19 nt, Human
aaaauacagaaacagcucc

SEQ ID NO: 1319750 - RNA, 22 nt, Human
aaacaaauccucagaguccucc

SEQ ID NO: 1319751 - RNA, 20 nt, Human
aaacagggaaaccgacgugg

SEQ ID NO: 1319752 - RNA, 18 nt, Human
aaauagccccuugccgcc

SEQ ID NO: 1319753 - RNA, 18 nt, Human
aaucccuggguucuccuu

SEQ ID NO: 1319754 - RNA, 21 nt, Human
agaagaaaacaaauccucaga

SEQ ID NO: 1319755 - RNA, 22 nt, Human
agaagaaaacaaauccucagag

SEQ ID NO: 1319756 - RNA, 20 nt, Human
agaaucccuggguucuccuu

SEQ ID NO: 1319757 - RNA, 21 nt, Human
agcagcuguacccccaaaaag

SEQ ID NO: 1319758 - RNA, 19 nt, Human
agccccuugccgccacuga

SEQ ID NO: 1319759 - RNA, 21 nt, Human
aggaauauuccacugguccuc

SEQ ID NO: 1319760 - RNA, 23 nt, Human
aggaguucuccuuuccuucuucu

SEQ ID NO: 1319761 - RNA, 20 nt, Human
aggcagcagagaugcaccuu

SEQ ID NO: 1319762 - RNA, 22 nt, Human
aggggcuuuuccuuggaguggg

SEQ ID NO: 1319763 - RNA, 21 nt, Human
agugggagggggaccauaggg

SEQ ID NO: 1319764 - RNA, 21 nt, Human
aucaucaucaaagaggccagu

SEQ ID NO: 1319765 - RNA, 19 nt, Human
aucaucaucaucaaagagg

SEQ ID NO: 1319766 - RNA, 28 nt, Human
auggaacggaggcagcaccaaacacauc

SEQ ID NO: 1319767 - RNA, 20 nt, Human
cacagccaucaucauccucu

SEQ ID NO: 1319768 - RNA, 20 nt, Human
cacagccaucaucauccucu

SEQ ID NO: 1319769 - RNA, 22 nt, Human
cacaggccgaggaccgcagagc

SEQ ID NO: 1319770 - RNA, 22 nt, Human
caccaucaucaucaucaaagag

SEQ ID NO: 1319771 - RNA, 25 nt, Human
caccaucaucaucaucaaagaggcc

SEQ ID NO: 1319772 - RNA, 19 nt, Human
cacugcugaacaacagggc

SEQ ID NO: 1319773 - RNA, 27 nt, Human
cagaaucccuggguucuccccccgagg

SEQ ID NO: 1319774 - RNA, 22 nt, Human
cagaguccuccucaucugaaaa

SEQ ID NO: 1319775 - RNA, 24 nt, Human
cagcaccaaacacauccgugucuc

SEQ ID NO: 1319776 - RNA, 19 nt, Human
cagccuuggccuccuggcu

SEQ ID NO: 1319777 - RNA, 21 nt, Human
cagcucaucugcaaacgaugu

SEQ ID NO: 1319778 - RNA, 21 nt, Human
caggcagcagagaugcaccuu

SEQ ID NO: 1319779 - RNA, 21 nt, Human
caggccaccuccagagccaaa

SEQ ID NO: 1319780 - RNA, 24 nt, Human
caucaucaaacagggaaaccgacg

SEQ ID NO: 1319781 - RNA, 22 nt, Human
caucaucaucaucaaagaggcc

SEQ ID NO: 1319782 - RNA, 22 nt, Human
caucuucaucaucaaacaggga

SEQ ID NO: 1319783 - RNA, 24 nt, Human
ccagugggagggggaccauagggg

SEQ ID NO: 1319784 - RNA, 22 nt, Human
ccccaaaaagauuauccucuuc

SEQ ID NO: 1319785 - RNA, 23 nt, Human
ccccaaaaagauuauccucuuca

SEQ ID NO: 1319786 - RNA, 22 nt, Human
ccccggaagccuagccccagcc

SEQ ID NO: 1319787 - RNA, 19 nt, Human
ccucagaguccuccucauc

SEQ ID NO: 1319788 - RNA, 21 nt, Human
ccucaucugaaaauaagccuu

SEQ ID NO: 1319789 - RNA, 25 nt, Human
ccuccuccuucucagagucagcaaa

SEQ ID NO: 1319790 - RNA, 20 nt, Human
ccuccucuucuuucucuucc

SEQ ID NO: 1319791 - RNA, 20 nt, Human
cgacccauggcaucccccuu

SEQ ID NO: 1319792 - RNA, 21 nt, Human
cucagagucagcaaaaagguc

SEQ ID NO: 1319793 - RNA, 18 nt, Human
cuccuuuccuucuucucu

SEQ ID NO: 1319794 - RNA, 20 nt, Human
cucuucuuucucuuccucag

SEQ ID NO: 1319795 - RNA, 20 nt, Human
cugcucuugcuuuauuuuca

SEQ ID NO: 1319796 - RNA, 20 nt, Human
cugcugggauuuucuuucca

SEQ ID NO: 1319797 - RNA, 23 nt, Human
cuucuuagcagcuguacccccaa

SEQ ID NO: 1319798 - RNA, 20 nt, Human
gacuccuccuuaacagaggc

SEQ ID NO: 1319799 - RNA, 24 nt, Human
gagaagaaaacaaauccucagagu

SEQ ID NO: 1319800 - RNA, 18 nt, Human
gagacaaugucugcuucu

SEQ ID NO: 1319801 - RNA, 18 nt, Human
gagugggcugcucaggcu

SEQ ID NO: 1319802 - RNA, 18 nt, Human
gcuguggggugccgagaa

SEQ ID NO: 1319803 - RNA, 18 nt, Human
ggccuccuggcucuggag

SEQ ID NO: 1319804 - RNA, 24 nt, Human
ggugugcuaacugguuuuguucau

SEQ ID NO: 1319805 - RNA, 23 nt, Human
guggugugcuaacugguuuuguu

SEQ ID NO: 1319806 - RNA, 20 nt, Human
uaaaaauacagaaacagcuc

SEQ ID NO: 1319807 - RNA, 19 nt, Human
uauccucuucaucuucauc

SEQ ID NO: 1319808 - RNA, 19 nt, Human
uaucggcaguggauuggac

SEQ ID NO: 1319809 - RNA, 21 nt, Human
ucaccaaagauaucggcagug

SEQ ID NO: 1319810 - RNA, 19 nt, Human
ucacugugaugggcaaaau

SEQ ID NO: 1319811 - RNA, 23 nt, Human
ucagaguccuccucaucugaaaa

SEQ ID NO: 1319812 - RNA, 23 nt, Human
ucaucugaaaauaagccuuuuug

SEQ ID NO: 1319813 - RNA, 18 nt, Human
uccacugguccuccucau

SEQ ID NO: 1319814 - RNA, 23 nt, Human
uccagagccaaauggcgagaagu

SEQ ID NO: 1319815 - RNA, 21 nt, Human
uccgagguuuugcuucuccug

SEQ ID NO: 1319816 - RNA, 18 nt, Human
uccucuuccucaucacuc

SEQ ID NO: 1319817 - RNA, 23 nt, Human
uccuuaacagaggcuccagcuug

SEQ ID NO: 1319818 - RNA, 25 nt, Human
uccuucuucucuuugagugucuucc

SEQ ID NO: 1319819 - RNA, 19 nt, Human
ucuccuuuccuucuucucu

SEQ ID NO: 1319820 - RNA, 20 nt, Human
ucucucugagcuuguagaga

SEQ ID NO: 1319821 - RNA, 23 nt, Human
ucucugggucuucuuuuggcugu

SEQ ID NO: 1319822 - RNA, 25 nt, Human
ucugacuccuccucuucuuucucuu

SEQ ID NO: 1319823 - RNA, 18 nt, Human
ucuggcgaugcuacggcu

SEQ ID NO: 1319824 - RNA, 21 nt, Human
ucugggucuucuuuuggcugu

SEQ ID NO: 1319825 - RNA, 19 nt, Human
ucuuccuccuccuucucag

SEQ ID NO: 1319826 - RNA, 18 nt, Human
ugaacaggccaccuccag

SEQ ID NO: 1319827 - RNA, 19 nt, Human
ugagaagaaaacaaauccu

SEQ ID NO: 1319828 - RNA, 20 nt, Human
ugcugaacaacagggcagau

SEQ ID NO: 1319829 - RNA, 23 nt, Human
ugcuuuauuuucaucugucugac

SEQ ID NO: 1319830 - RNA, 19 nt, Human
uguccucaauaucuuccuc

SEQ ID NO: 1319831 - RNA, 22 nt, Human
uguucauugucacugugauggg

SEQ ID NO: 1319832 - RNA, 19 nt, Human
uucaauguccucaauaucu

SEQ ID NO: 1319833 - RNA, 21 nt, Human
uucacagccuuggccuccugg

SEQ ID NO: 1319834 - RNA, 18 nt, Human
uucauugucacugugaug

SEQ ID NO: 1319835 - RNA, 22 nt, Human
uuccuuggagugggcugcucag

SEQ ID NO: 1319836 - RNA, 20 nt, Human
uucuuuuggcuguccuuggc

SEQ ID NO: 1319837 - RNA, 23 nt, Human
uugagauuuuugcuguaagauaa

SEQ ID NO: 1319838 - RNA, 18 nt, Human
uugcaggaggaacagaug

SEQ ID NO: 1319839 - RNA, 20 nt, Human
uugcaggaggaacagaugug

SEQ ID NO: 1319840 - RNA, 23 nt, Human
uuggagugggcugcucaggcuuc

SEQ ID NO: 1319841 - RNA, 22 nt, Human
uuuugcuucuccugaggguaag

SEQ ID NO: 1319842 - RNA, 18 nt, Human
aaacugcauccccauaac

SEQ ID NO: 1319843 - RNA, 21 nt, Human
aaacugcauccccauaacccc

SEQ ID NO: 1319844 - RNA, 28 nt, Human
aaguacaauggagggagggccgguaccc

SEQ ID NO: 1319845 - RNA, 21 nt, Human
accaccgcaccgcgcccaagc

SEQ ID NO: 1319846 - RNA, 22 nt, Human
acccaccacccagacaguagau

SEQ ID NO: 1319847 - RNA, 20 nt, Human
acccagacaguagauagggc

SEQ ID NO: 1319848 - RNA, 22 nt, Human
aggggcuaagccuagcugucug

SEQ ID NO: 1319849 - RNA, 23 nt, Human
caccaccgcaccgcgcccaagca

SEQ ID NO: 1319850 - RNA, 19 nt, Human
caccgcaccgcgcccaagc

SEQ ID NO: 1319851 - RNA, 24 nt, Human
caccgcaccucugugccucggucc

SEQ ID NO: 1319852 - RNA, 23 nt, Human
cacgcgggggccgcgcugggccg

SEQ ID NO: 1319853 - RNA, 23 nt, Human
cauaacccaccacccagacagua

SEQ ID NO: 1319854 - RNA, 22 nt, Human
caucagagaacaaaaccaaaag

SEQ ID NO: 1319855 - RNA, 23 nt, Human
caucgggggugcggagccuggga

SEQ ID NO: 1319856 - RNA, 22 nt, Human
ccaaacugcauccccauaaccc

SEQ ID NO: 1319857 - RNA, 21 nt, Human
ccccauaacccaccacccaga

SEQ ID NO: 1319858 - RNA, 18 nt, Human
ccgcgcccaagcagcugc

SEQ ID NO: 1319859 - RNA, 21 nt, Human
ccggagcgggcucagcacccg

SEQ ID NO: 1319860 - RNA, 21 nt, Human
cgcccaagcagcugccgccac

SEQ ID NO: 1319861 - RNA, 23 nt, Human
cggagccugggaggcacgcgggg

SEQ ID NO: 1319862 - RNA, 18 nt, Human
cggccggagcgggcucag

SEQ ID NO: 1319863 - RNA, 19 nt, Human
cgucccggccggagcgggc

SEQ ID NO: 1319864 - RNA, 19 nt, Human
cuagauacugagacacauc

SEQ ID NO: 1319865 - RNA, 23 nt, Human
cuggaggcuaccuggaaccccgg

SEQ ID NO: 1319866 - RNA, 18 nt, Human
gaaguugauuuuuaauga

SEQ ID NO: 1319867 - RNA, 18 nt, Human
gaccuggcucagacauga

SEQ ID NO: 1319868 - RNA, 19 nt, Human
gaggcuaccuggaaccccg

SEQ ID NO: 1319869 - RNA, 19 nt, Human
gccugggaggcacgcgggg

SEQ ID NO: 1319870 - RNA, 22 nt, Human
gcgcagcaucgggggugcggag

SEQ ID NO: 1319871 - RNA, 21 nt, Human
gcucagacaugaaucaugugc

SEQ ID NO: 1319872 - RNA, 23 nt, Human
ggagccugggaggcacgcggggg

SEQ ID NO: 1319873 - RNA, 23 nt, Human
ggaggcacgcgggggccgcgcug

SEQ ID NO: 1319874 - RNA, 19 nt, Human
ggggugcuguggugguggu

SEQ ID NO: 1319875 - RNA, 25 nt, Human
uacaauggagggagggcagaggggc

SEQ ID NO: 1319876 - RNA, 20 nt, Human
ucagacaugaaucaugugcu

SEQ ID NO: 1319877 - RNA, 19 nt, Human
uccccauaacccaccaccc

SEQ ID NO: 1319878 - RNA, 18 nt, Human
ugccaaacugcaucccca

SEQ ID NO: 1319879 - RNA, 22 nt, Human
ugccaaacugcauccccauaac

SEQ ID NO: 1319880 - RNA, 19 nt, Human
ugccucgguccucagcugc

SEQ ID NO: 1319881 - RNA, 18 nt, Human
ugcggagccugggaggca

SEQ ID NO: 1319882 - RNA, 21 nt, Human
ugcuguggugguggugggcug

SEQ ID NO: 1319883 - RNA, 20 nt, Human
uuacugccaguuaaccugga

SEQ ID NO: 1319884 - RNA, 25 nt, Human
uuacugccaguuaaccuggaggcua

SEQ ID NO: 1319885 - RNA, 21 nt, Human
acaugcuguguuucuucuggc

SEQ ID NO: 1319886 - RNA, 18 nt, Human
agaaagagguugcugggg

SEQ ID NO: 1319887 - RNA, 21 nt, Human
agagguugcuggggucagugc

SEQ ID NO: 1319888 - RNA, 23 nt, Human
cagugcugcagggaccauacaga

SEQ ID NO: 1319889 - RNA, 23 nt, Human
cccuccuugaccaccuucuucuu

SEQ ID NO: 1319890 - RNA, 18 nt, Human
ccugcugcaggucugugu

SEQ ID NO: 1319891 - RNA, 24 nt, Human
cuccugcugcaggucuguguucag

SEQ ID NO: 1319892 - RNA, 20 nt, Human
gcaggucuguguucagcccu

SEQ ID NO: 1319893 - RNA, 19 nt, Human
gcuguguuucuucuggcug

SEQ ID NO: 1319894 - RNA, 22 nt, Human
uccucuccaggugcucccgcug

SEQ ID NO: 1319895 - RNA, 22 nt, Human
ucuccaggugcucccgcugccg

SEQ ID NO: 1319896 - RNA, 20 nt, Human
ugcuggggucagugcugcag

SEQ ID NO: 1319897 - RNA, 23 nt, Human
ugcuggggucagugcugcaggga

SEQ ID NO: 1319898 - RNA, 19 nt, Human
uggcuguggcuggagaugg

SEQ ID NO: 1319899 - RNA, 22 nt, Human
uggcuguggcuggagauggcuc

SEQ ID NO: 1319900 - RNA, 23 nt, Human
uugagaguggccagguuccucuc

SEQ ID NO: 1319901 - RNA, 19 nt, Human
aauuccacggccgauaaac

SEQ ID NO: 1319902 - RNA, 23 nt, Human
aggaaugcgggagagcucagaac

SEQ ID NO: 1319903 - RNA, 23 nt, Human
augcgggagagcucagaacauuc

SEQ ID NO: 1319904 - RNA, 23 nt, Human
ggaggccacuguuuguuuguuuu

SEQ ID NO: 1319905 - RNA, 18 nt, Human
ucccagagaaaaugaggg

SEQ ID NO: 1319906 - RNA, 18 nt, Human
ugcauguaggauguugca

SEQ ID NO: 1319907 - RNA, 19 nt, Human
ugcauguaggauguugcag

SEQ ID NO: 1319908 - RNA, 24 nt, Human
ugggaggaggaaugcgggagagcc

SEQ ID NO: 1319909 - RNA, 23 nt, Human
uguuuguuuuucuuggccaagug

SEQ ID NO: 1319910 - RNA, 19 nt, Human
uucccagagaaaaugaggg

SEQ ID NO: 1319911 - RNA, 24 nt, Human
accacgggggggugagucacuuug

SEQ ID NO: 1319912 - RNA, 18 nt, Human
agaagccaucgcugccca

SEQ ID NO: 1319913 - RNA, 22 nt, Human
aggauaaccccuaggcugucca

SEQ ID NO: 1319914 - RNA, 23 nt, Human
aggcuguccaccucacuggccuc

SEQ ID NO: 1319915 - RNA, 19 nt, Human
ccuaggcuguccaccucac

SEQ ID NO: 1319916 - RNA, 21 nt, Human
ccucugcuugcuccaguccuu

SEQ ID NO: 1319917 - RNA, 21 nt, Human
cucacuggccucgggcagagg

SEQ ID NO: 1319918 - RNA, 20 nt, Human
cuccaguccuucagggugcc

SEQ ID NO: 1319919 - RNA, 18 nt, Human
ggcacaugcauucugggc

SEQ ID NO: 1319920 - RNA, 20 nt, Human
ggcagggcuuucucucuccu

SEQ ID NO: 1319921 - RNA, 23 nt, Human
ggcggguggggcaugaggggcug

SEQ ID NO: 1319922 - RNA, 18 nt, Human
ggguggggcaugaggggc

SEQ ID NO: 1319923 - RNA, 21 nt, Human
uaaccccuaggcuguccaccu

SEQ ID NO: 1319924 - RNA, 23 nt, Human
ugcauucugggcuaucuccaauu

SEQ ID NO: 1319925 - RNA, 18 nt, Human
uggcggguggggcaugag

SEQ ID NO: 1319926 - RNA, 23 nt, Human
uggcggguggggcaugaggggcu

SEQ ID NO: 1319927 - RNA, 20 nt, Human
ugggcacaugcauucugggc

SEQ ID NO: 1319928 - RNA, 23 nt, Human
aggccguccagcuuggugacggg

SEQ ID NO: 1319929 - RNA, 25 nt, Human
cagugaauuccugauagggagacuu

SEQ ID NO: 1319930 - RNA, 24 nt, Human
ccccauccacggccgcgaccccgg

SEQ ID NO: 1319931 - RNA, 23 nt, Human
ccgcgaacuccgcggucuuggcc

SEQ ID NO: 1319932 - RNA, 18 nt, Human
ccgcggucuuggccccgg

SEQ ID NO: 1319933 - RNA, 22 nt, Human
ccuuauccugggccuugccucc

SEQ ID NO: 1319934 - RNA, 19 nt, Human
ccuuccagaaguccuucag

SEQ ID NO: 1319935 - RNA, 21 nt, Human
cuccgcggucuuggccccggc

SEQ ID NO: 1319936 - RNA, 18 nt, Human
cugauagggagacuuggu

SEQ ID NO: 1319937 - RNA, 24 nt, Human
cuggguccucugcacggagacucu

SEQ ID NO: 1319938 - RNA, 21 nt, Human
cuuggccaggccguccagcuu

SEQ ID NO: 1319939 - RNA, 24 nt, Human
gccuugccuccgcgaacuccgcgg

SEQ ID NO: 1319940 - RNA, 20 nt, Human
ggcgagguggucagugaauu

SEQ ID NO: 1319941 - RNA, 21 nt, Human
uaaaaacccuauguuguaguc

SEQ ID NO: 1319942 - RNA, 20 nt, Human
uccagaaguccuucagggga

SEQ ID NO: 1319943 - RNA, 22 nt, Human
uccgcggucuuggccccggccc

SEQ ID NO: 1319944 - RNA, 19 nt, Human
ucuuggccccggccccauc

SEQ ID NO: 1319945 - RNA, 25 nt, Human
ucuuggccccggccccauccacggc

SEQ ID NO: 1319946 - RNA, 20 nt, Human
uggguccucugcacggagac

SEQ ID NO: 1319947 - RNA, 18 nt, Human
uggucagugaauuccuga

SEQ ID NO: 1319948 - RNA, 20 nt, Human
uggugaauacagucuccuuc

SEQ ID NO: 1319949 - RNA, 23 nt, Human
uuggugacgggcauccgcuccuu

SEQ ID NO: 1319950 - RNA, 24 nt, Human
aaugcuccagaguccccgggcggc

SEQ ID NO: 1319951 - RNA, 18 nt, Human
acccgggccccaacccgg

SEQ ID NO: 1319952 - RNA, 21 nt, Human
acccgggccccaacccggcuc

SEQ ID NO: 1319953 - RNA, 21 nt, Human
aucccgcacgccucuccgcua

SEQ ID NO: 1319954 - RNA, 22 nt, Human
cagaguccccgggcggcccaac

SEQ ID NO: 1319955 - RNA, 25 nt, Human
cccaacccgggccccaacccggcuc

SEQ ID NO: 1319956 - RNA, 19 nt, Human
cccaaugcuccagaguccc

SEQ ID NO: 1319957 - RNA, 25 nt, Human
ccccgggcggcccaacccgggcccc

SEQ ID NO: 1319958 - RNA, 19 nt, Human
cccgcacgccucuccgcua

SEQ ID NO: 1319959 - RNA, 25 nt, Human
cccgcacgccucuccgcuacagccg

SEQ ID NO: 1319960 - RNA, 21 nt, Human
cucuccgcuacagccgccuac

SEQ ID NO: 1319961 - RNA, 19 nt, Human
gggccccaacccggcucag

SEQ ID NO: 1319962 - RNA, 19 nt, Human
uccccgggcggcccaaccc

SEQ ID NO: 1319963 - RNA, 24 nt, Human
uccccgggcggcccaacccgggcc

SEQ ID NO: 1319964 - RNA, 21 nt, Human
ucccgcacgccucuccgcuac

SEQ ID NO: 1319965 - RNA, 21 nt, Human
ucuccgcuacagccgccuacc

SEQ ID NO: 1319966 - RNA, 27 nt, Human
ucuccgcuacagccgccuacccagagg

SEQ ID NO: 1319967 - RNA, 22 nt, Human
aaaaaaaaaaagaaucucagag

SEQ ID NO: 1319968 - RNA, 20 nt, Human
aacagagcgagacuguaauc

SEQ ID NO: 1319969 - RNA, 23 nt, Human
aagaauugcuugaaccugggagg

SEQ ID NO: 1319970 - RNA, 22 nt, Human
aagagccuccuuuacagguuaa

SEQ ID NO: 1319971 - RNA, 24 nt, Human
aauugcuugaaccugggaggcgga

SEQ ID NO: 1319972 - RNA, 24 nt, Human
agacugaggcagaagaauugcuug

SEQ ID NO: 1319973 - RNA, 23 nt, Human
agagccuccuuuacagguuaaaa

SEQ ID NO: 1319974 - RNA, 24 nt, Human
agcacuuugggagacugagauggg

SEQ ID NO: 1319975 - RNA, 24 nt, Human
agccugggcaacauagggagaccc

SEQ ID NO: 1319976 - RNA, 22 nt, Human
aggcagaagaauugcuugaacc

SEQ ID NO: 1319977 - RNA, 24 nt, Human
aggcagaagaauugcuugaaccug

SEQ ID NO: 1319978 - RNA, 19 nt, Human
aggcggagcuugcaguaag

SEQ ID NO: 1319979 - RNA, 24 nt, Human
aggcggagcuugcaguaagccaag

SEQ ID NO: 1319980 - RNA, 24 nt, Human
cagcacuuugggagacugagaugg

SEQ ID NO: 1319981 - RNA, 24 nt, Human
cauugcuugagcccaggaguugga

SEQ ID NO: 1319982 - RNA, 27 nt, Human
cauugcuugagcccaggaguuggaguu

SEQ ID NO: 1319983 - RNA, 21 nt, Human
ccuauaaucccagcugcuugg

SEQ ID NO: 1319984 - RNA, 18 nt, Human
ccugcaaaaccuccucug

SEQ ID NO: 1319985 - RNA, 18 nt, Human
ccugcaaaaccuccucug

SEQ ID NO: 1319986 - RNA, 22 nt, Human
ccugcucccucccuugccuucu

SEQ ID NO: 1319987 - RNA, 24 nt, Human
ccugggcaacauagggagacccca

SEQ ID NO: 1319988 - RNA, 24 nt, Human
cgagacuguaaucucagcacuuug

SEQ ID NO: 1319989 - RNA, 23 nt, Human
cuguacuccagacugggcaacag

SEQ ID NO: 1319990 - RNA, 19 nt, Human
cuugaaccugggaggcgga

SEQ ID NO: 1319991 - RNA, 18 nt, Human
gagcuugcaguaagccaa

SEQ ID NO: 1319992 - RNA, 20 nt, Human
ggagcauugcuugagcccag

SEQ ID NO: 1319993 - RNA, 22 nt, Human
ggaguuggaguucagccugggc

SEQ ID NO: 1319994 - RNA, 24 nt, Human
ggccuauaaucccagcugcuuggg

SEQ ID NO: 1319995 - RNA, 19 nt, Human
gguuaaaaaaaaaaaaaaa

SEQ ID NO: 1319996 - RNA, 24 nt, Human
guacuccagacugggcaacagagc

SEQ ID NO: 1319997 - RNA, 22 nt, Human
guuaaaaaaaaaaaaaaagaau

SEQ ID NO: 1319998 - RNA, 24 nt, Human
guuaaaaaaaaaaaaaaagaaucc

SEQ ID NO: 1319999 - RNA, 23 nt, Human
uacuccagacugggcaacagagc

SEQ ID NO: 1320000 - RNA, 24 nt, Human
uacuccagacugggcaacagagcg

SEQ ID NO: 1320001 - RNA, 23 nt, Human
uaggcaaguccugcaaaaccucc

SEQ ID NO: 1320002 - RNA, 19 nt, Human
uaguuuccugccccacauc

SEQ ID NO: 1320003 - RNA, 20 nt, Human
uccucugguucugguuccug

SEQ ID NO: 1320004 - RNA, 20 nt, Human
uccugcaaaaccuccucugg

SEQ ID NO: 1320005 - RNA, 19 nt, Human
uccugccccacaucuaaga

SEQ ID NO: 1320006 - RNA, 25 nt, Human
ugagaugggagcauugcuugagccc

SEQ ID NO: 1320007 - RNA, 23 nt, Human
ugagcccaggaguuggaguucag

SEQ ID NO: 1320008 - RNA, 24 nt, Human
ugaggcagaagaauugcuugaacc

SEQ ID NO: 1320009 - RNA, 24 nt, Human
ugaggcagaagaauugcuugaacc

SEQ ID NO: 1320010 - RNA, 21 nt, Human
ugggagacugagaugggagca

SEQ ID NO: 1320011 - RNA, 26 nt, Human
ugggagacugaggcagaagaauugcu

SEQ ID NO: 1320012 - RNA, 19 nt, Human
ugggagcauugcuugagcc

SEQ ID NO: 1320013 - RNA, 29 nt, Human
ugggaggcggagcuugcaguaacaacggu

SEQ ID NO: 1320014 - RNA, 22 nt, Human
ugggcaacauagggagacccca

SEQ ID NO: 1320015 - RNA, 22 nt, Human
ugggcucacucugacgccugga

SEQ ID NO: 1320016 - RNA, 18 nt, Human
ugguucugguuccugcuc

SEQ ID NO: 1320017 - RNA, 22 nt, Human
uuaaaaaaaaaaaaaaagaauc

SEQ ID NO: 1320018 - RNA, 19 nt, Human
uugaaccugggaggcggag

SEQ ID NO: 1320019 - RNA, 18 nt, Human
uugcuugaaccugggagg

SEQ ID NO: 1320020 - RNA, 23 nt, Human
uugcuugaaccugggaggcggag

SEQ ID NO: 1320021 - RNA, 21 nt, Human
uugcuugagcccaggaguugg

SEQ ID NO: 1320022 - RNA, 21 nt, Human
uugggagacugagaugggagc

SEQ ID NO: 1320023 - RNA, 23 nt, Human
uugggagacugaggcagaagaau

SEQ ID NO: 1320024 - RNA, 25 nt, Human
caucuccauguccaacuguuggggg

SEQ ID NO: 1320025 - RNA, 19 nt, Human
gaaggaagugucuuacugc

SEQ ID NO: 1320026 - RNA, 21 nt, Human
guggguauuuucaucuccaug

SEQ ID NO: 1320027 - RNA, 18 nt, Human
uacugcuuucauuagucc

SEQ ID NO: 1320028 - RNA, 19 nt, Human
ucuuacugcuuucauuagu

SEQ ID NO: 1320029 - RNA, 23 nt, Human
uggguauuuucaucuccaugucc

SEQ ID NO: 1320030 - RNA, 22 nt, Human
uucaucuccauguccaacuguu

SEQ ID NO: 1320031 - RNA, 21 nt, Human
aaacacuauagauguagauca

SEQ ID NO: 1320032 - RNA, 19 nt, Human
aaccaaccaccuccccgug

SEQ ID NO: 1320033 - RNA, 24 nt, Human
aagaaucucauaguccccagaauu

SEQ ID NO: 1320034 - RNA, 25 nt, Human
aagauuaaaagucgcagggcaggcc

SEQ ID NO: 1320035 - RNA, 21 nt, Human
aagggcuccgcccccagguga

SEQ ID NO: 1320036 - RNA, 23 nt, Human
accaaccaccuccccguguucag

SEQ ID NO: 1320037 - RNA, 21 nt, Human
acugccccacucggguggaag

SEQ ID NO: 1320038 - RNA, 29 nt, Human
agacacaaggcgaagauagaagggacccc

SEQ ID NO: 1320039 - RNA, 20 nt, Human
agcagacaguagaggucaaa

SEQ ID NO: 1320040 - RNA, 19 nt, Human
agcccugggccaggucucc

SEQ ID NO: 1320041 - RNA, 20 nt, Human
agccuccagccacgucccag

SEQ ID NO: 1320042 - RNA, 21 nt, Human
aggccaaggcgggcgggucac

SEQ ID NO: 1320043 - RNA, 23 nt, Human
aggcgggcgggucaccugaggcc

SEQ ID NO: 1320044 - RNA, 24 nt, Human
aggugcaguggcucaugccuguaa

SEQ ID NO: 1320045 - RNA, 23 nt, Human
aguggcucaugccuguaauccca

SEQ ID NO: 1320046 - RNA, 24 nt, Human
aguggcucaugccuguaaucccag

SEQ ID NO: 1320047 - RNA, 19 nt, Human
augccuguaaucccagcac

SEQ ID NO: 1320048 - RNA, 27 nt, Human
caaaaccaaccaccuccccguguucag

SEQ ID NO: 1320049 - RNA, 21 nt, Human
caaagcggcuggauuuggcac

SEQ ID NO: 1320050 - RNA, 22 nt, Human
caacccaucugggcuguaccgg

SEQ ID NO: 1320051 - RNA, 19 nt, Human
caaggcgggcgggucaccu

SEQ ID NO: 1320052 - RNA, 26 nt, Human
caaggcgggcgggucaccugaggcca

SEQ ID NO: 1320053 - RNA, 21 nt, Human
caagggauaaacuuggguuuc

SEQ ID NO: 1320054 - RNA, 19 nt, Human
caccacucagcacuguccc

SEQ ID NO: 1320055 - RNA, 23 nt, Human
cacucagcacugucccgucccuc

SEQ ID NO: 1320056 - RNA, 20 nt, Human
cacugagagcugcucauugc

SEQ ID NO: 1320057 - RNA, 19 nt, Human
cacuguaccagccggcggu

SEQ ID NO: 1320058 - RNA, 21 nt, Human
cagcacagagaccagucuccu

SEQ ID NO: 1320059 - RNA, 24 nt, Human
cagcacuuugggaggccaaggcgg

SEQ ID NO: 1320060 - RNA, 19 nt, Human
cagccuccagccacguccc

SEQ ID NO: 1320061 - RNA, 27 nt, Human
cagcucagagccaagcccuucagcaag

SEQ ID NO: 1320062 - RNA, 23 nt, Human
caucaaugacaucagacacgauc

SEQ ID NO: 1320063 - RNA, 20 nt, Human
caugccuguaaucccagcac

SEQ ID NO: 1320064 - RNA, 20 nt, Human
ccaaaaccaaccaccucccc

SEQ ID NO: 1320065 - RNA, 23 nt, Human
ccaaaaccaaccaccuccccgug

SEQ ID NO: 1320066 - RNA, 23 nt, Human
ccaauggccagguacaacccauc

SEQ ID NO: 1320067 - RNA, 26 nt, Human
ccauccggaaggaacacaaagcaagg

SEQ ID NO: 1320068 - RNA, 20 nt, Human
cccacaggcagagcugccgg

SEQ ID NO: 1320069 - RNA, 19 nt, Human
cccaccagcagcucagagc

SEQ ID NO: 1320070 - RNA, 19 nt, Human
cccaguaaagaaucucaua

SEQ ID NO: 1320071 - RNA, 23 nt, Human
cccaguaaagaaucucauagucc

SEQ ID NO: 1320072 - RNA, 19 nt, Human
cccauacagcggccaaagc

SEQ ID NO: 1320073 - RNA, 22 nt, Human
ccccucagcaggcagcgggagu

SEQ ID NO: 1320074 - RNA, 24 nt, Human
ccccucugagucuccagugagaau

SEQ ID NO: 1320075 - RNA, 21 nt, Human
cccgcccgccaccacucagca

SEQ ID NO: 1320076 - RNA, 21 nt, Human
cccucagcaaugcauucuucg

SEQ ID NO: 1320077 - RNA, 28 nt, Human
ccuccggagacacaaggcgaagauagag

SEQ ID NO: 1320078 - RNA, 18 nt, Human
ccucugagucuccaguga

SEQ ID NO: 1320079 - RNA, 19 nt, Human
ccucugagucuccagugag

SEQ ID NO: 1320080 - RNA, 21 nt, Human
ccuggauuacaggggagaagc

SEQ ID NO: 1320081 - RNA, 20 nt, Human
ccuguaaucccagcacuuug

SEQ ID NO: 1320082 - RNA, 24 nt, Human
cggaaggaacacaaagcaagggau

SEQ ID NO: 1320083 - RNA, 21 nt, Human
cggccccgaagugcucgggaa

SEQ ID NO: 1320084 - RNA, 24 nt, Human
cgggcgggucaccugaggccagga

SEQ ID NO: 1320085 - RNA, 24 nt, Human
cgggucaccugaggccaggaguuu

SEQ ID NO: 1320086 - RNA, 25 nt, Human
cucagcacugucccgucccuccgga

SEQ ID NO: 1320087 - RNA, 20 nt, Human
cucauagcgauucuucagcu

SEQ ID NO: 1320088 - RNA, 23 nt, Human
cucaugccuguaaucccagcacu

SEQ ID NO: 1320089 - RNA, 24 nt, Human
cucaugccuguaaucccagcacuu

SEQ ID NO: 1320090 - RNA, 23 nt, Human
cuccagugagaaugucuccaucc

SEQ ID NO: 1320091 - RNA, 23 nt, Human
cucuuuggcgccaccccugccug

SEQ ID NO: 1320092 - RNA, 23 nt, Human
cugcuugcagccuccagccacgu

SEQ ID NO: 1320093 - RNA, 18 nt, Human
cuugcagccuccagccac

SEQ ID NO: 1320094 - RNA, 19 nt, Human
gacaguagaggucaaaggg

SEQ ID NO: 1320095 - RNA, 21 nt, Human
gacaugaugaaauucccaucc

SEQ ID NO: 1320096 - RNA, 23 nt, Human
gagaagcccugggccaggucucc

SEQ ID NO: 1320097 - RNA, 18 nt, Human
gagcugccggucguggcc

SEQ ID NO: 1320098 - RNA, 21 nt, Human
gagggccaccaacccgggccc

SEQ ID NO: 1320099 - RNA, 23 nt, Human
gauucuucagcugcuugcagccu

SEQ ID NO: 1320100 - RNA, 24 nt, Human
gcaggccaggugcaguggcucaug

SEQ ID NO: 1320101 - RNA, 23 nt, Human
gccuaggcuggggcugcccggcu

SEQ ID NO: 1320102 - RNA, 24 nt, Human
gccuaggcuggggcugcccggcuc

SEQ ID NO: 1320103 - RNA, 18 nt, Human
gcggccaaagcggcugga

SEQ ID NO: 1320104 - RNA, 20 nt, Human
gcucaucaguguggcccugg

SEQ ID NO: 1320105 - RNA, 18 nt, Human
ggcaccaucacuggaaac

SEQ ID NO: 1320106 - RNA, 21 nt, Human
ggcaggccaggugcaguggcu

SEQ ID NO: 1320107 - RNA, 23 nt, Human
ggcaggccaggugcaguggcuca

SEQ ID NO: 1320108 - RNA, 18 nt, Human
gggcccccacuguaccag

SEQ ID NO: 1320109 - RNA, 22 nt, Human
gggucaccugaggccaggaguu

SEQ ID NO: 1320110 - RNA, 23 nt, Human
ggguggaagucagcacagagacc

SEQ ID NO: 1320111 - RNA, 18 nt, Human
ggucaccugaggccagga

SEQ ID NO: 1320112 - RNA, 19 nt, Human
gugaggaagcgguucuggg

SEQ ID NO: 1320113 - RNA, 24 nt, Human
guucugguuuauugccccucagca

SEQ ID NO: 1320114 - RNA, 18 nt, Human
ucaccugaggccaggagu

SEQ ID NO: 1320115 - RNA, 21 nt, Human
ucagcugcuugcagccuccag

SEQ ID NO: 1320116 - RNA, 25 nt, Human
ucaguguggcccuggauuacagggg

SEQ ID NO: 1320117 - RNA, 21 nt, Human
ucaugggaaccaauggccagg

SEQ ID NO: 1320118 - RNA, 18 nt, Human
uccaaaaccaaccaccuc

SEQ ID NO: 1320119 - RNA, 19 nt, Human
ucccacaggcagagcugcc

SEQ ID NO: 1320120 - RNA, 22 nt, Human
ucccacaggcagagcugccggu

SEQ ID NO: 1320121 - RNA, 21 nt, Human
ucccaguaaagaaucucauag

SEQ ID NO: 1320122 - RNA, 19 nt, Human
uccccagaauuggacauga

SEQ ID NO: 1320123 - RNA, 18 nt, Human
uccccguguucaguccua

SEQ ID NO: 1320124 - RNA, 24 nt, Human
uccuacggccacaacugccccacu

SEQ ID NO: 1320125 - RNA, 20 nt, Human
ucuuggaaucugaagggcuc

SEQ ID NO: 1320126 - RNA, 21 nt, Human
ucuuguauuucuagugggagg

SEQ ID NO: 1320127 - RNA, 27 nt, Human
ucuuuggcgccaccccugccugggguc

SEQ ID NO: 1320128 - RNA, 20 nt, Human
ugagugaugaagcuggagug

SEQ ID NO: 1320129 - RNA, 21 nt, Human
ugagugaugaagcuggaguga

SEQ ID NO: 1320130 - RNA, 19 nt, Human
ugcagagcccccagagcuc

SEQ ID NO: 1320131 - RNA, 19 nt, Human
ugccccacucggguggaag

SEQ ID NO: 1320132 - RNA, 19 nt, Human
ugcccggcucagccagcgg

SEQ ID NO: 1320133 - RNA, 23 nt, Human
ugccuguaaucccagcacuuugg

SEQ ID NO: 1320134 - RNA, 24 nt, Human
ugccuguaaucccagcacuuuggg

SEQ ID NO: 1320135 - RNA, 18 nt, Human
uggagggccaccaacccg

SEQ ID NO: 1320136 - RNA, 22 nt, Human
uggcucaugccuguaaucccag

SEQ ID NO: 1320137 - RNA, 24 nt, Human
uggcucaugccuguaaucccagca

SEQ ID NO: 1320138 - RNA, 20 nt, Human
ugggaggccaaggcgggcgg

SEQ ID NO: 1320139 - RNA, 24 nt, Human
ugggaggccaaggcgggcggguca

SEQ ID NO: 1320140 - RNA, 18 nt, Human
ugggaggggagagcagac

SEQ ID NO: 1320141 - RNA, 19 nt, Human
uguccaaaaccaaccaccu

SEQ ID NO: 1320142 - RNA, 27 nt, Human
uguccaaaaccaaccacuaccauaggg

SEQ ID NO: 1320143 - RNA, 21 nt, Human
ugucccgucccuccggagaca

SEQ ID NO: 1320144 - RNA, 21 nt, Human
uguguccaaaaccaaccaccu

SEQ ID NO: 1320145 - RNA, 21 nt, Human
ugugugcagagcccccagagc

SEQ ID NO: 1320146 - RNA, 19 nt, Human
uuacaggggagaagcccug

SEQ ID NO: 1320147 - RNA, 22 nt, Human
uucuucagcugcuugcagccuc

SEQ ID NO: 1320148 - RNA, 21 nt, Human
cauucccacagccacguucug

SEQ ID NO: 1320149 - RNA, 18 nt, Human
ggagcuccucacauuccc

SEQ ID NO: 1320150 - RNA, 22 nt, Human
ucccuggcagauggaugagauc

SEQ ID NO: 1320151 - RNA, 20 nt, Human
uccucacauucccacagcca

SEQ ID NO: 1320152 - RNA, 22 nt, Human
uccucacauucccacagccacg

SEQ ID NO: 1320153 - RNA, 22 nt, Human
uguccugguggucacaacacau

SEQ ID NO: 1320154 - RNA, 23 nt, Human
agacaccaugccugguuucugcu

SEQ ID NO: 1320155 - RNA, 19 nt, Human
ccaguccugccuguggguc

SEQ ID NO: 1320156 - RNA, 20 nt, Human
ccugccugugggucuuccuc

SEQ ID NO: 1320157 - RNA, 20 nt, Human
ggccaguccugccugugggu

SEQ ID NO: 1320158 - RNA, 18 nt, Human
gugggucuuccucagucu

SEQ ID NO: 1320159 - RNA, 19 nt, Human
uaacuccucucugcuucuc

SEQ ID NO: 1320160 - RNA, 23 nt, Human
uccucagucucaucagugucuuc

SEQ ID NO: 1320161 - RNA, 21 nt, Human
ugccugugggucuuccucagu

SEQ ID NO: 1320162 - RNA, 23 nt, Human
uuuaacuccucucugcuucucaa

SEQ ID NO: 1320163 - RNA, 20 nt, Human
aagcaugggggcugggaaag

SEQ ID NO: 1320164 - RNA, 24 nt, Human
acucacccaaggccaguaugcaaa

SEQ ID NO: 1320165 - RNA, 19 nt, Human
aggaaggggccuagcugac

SEQ ID NO: 1320166 - RNA, 21 nt, Human
aggaggaaggggccuagcuga

SEQ ID NO: 1320167 - RNA, 25 nt, Human
aggaugaagacagaccgaaaaggga

SEQ ID NO: 1320168 - RNA, 20 nt, Human
aggcaggaugaagacagacc

SEQ ID NO: 1320169 - RNA, 23 nt, Human
aguagcuucaacacggucuugca

SEQ ID NO: 1320170 - RNA, 18 nt, Human
cacccaaggccaguaugc

SEQ ID NO: 1320171 - RNA, 20 nt, Human
caccgcaagcuaugcaggag

SEQ ID NO: 1320172 - RNA, 23 nt, Human
cagcuuccucuucagauccuugg

SEQ ID NO: 1320173 - RNA, 21 nt, Human
caguacaggccggagcacucu

SEQ ID NO: 1320174 - RNA, 18 nt, Human
ccaguaugcaagcaugac

SEQ ID NO: 1320175 - RNA, 18 nt, Human
ccauggggccugcaaggc

SEQ ID NO: 1320176 - RNA, 25 nt, Human
cccaagcaucaaacauagguagaca

SEQ ID NO: 1320177 - RNA, 23 nt, Human
ccgaagcugucccaugaccagca

SEQ ID NO: 1320178 - RNA, 22 nt, Human
cugcugaaccagcccagugcau

SEQ ID NO: 1320179 - RNA, 20 nt, Human
cuucagauccuuggaagcca

SEQ ID NO: 1320180 - RNA, 23 nt, Human
gagcagcugaucauuauagccaa

SEQ ID NO: 1320181 - RNA, 20 nt, Human
gcauccccacagagcuacag

SEQ ID NO: 1320182 - RNA, 20 nt, Human
gccaucaccucaccaccgca

SEQ ID NO: 1320183 - RNA, 18 nt, Human
ggagaagagauccaugcu

SEQ ID NO: 1320184 - RNA, 22 nt, Human
ggcugggaaaggggguccuggg

SEQ ID NO: 1320185 - RNA, 22 nt, Human
gggaaaggggguccugggggug

SEQ ID NO: 1320186 - RNA, 23 nt, Human
ggguccuggggguggaaacccgc

SEQ ID NO: 1320187 - RNA, 21 nt, Human
ggugaggggcuacaaggucag

SEQ ID NO: 1320188 - RNA, 25 nt, Human
ucaccucaccaccgcaagcuaugca

SEQ ID NO: 1320189 - RNA, 24 nt, Human
ucaguacaggccggagcacucuga

SEQ ID NO: 1320190 - RNA, 24 nt, Human
uccccacagagcuacaguggagac

SEQ ID NO: 1320191 - RNA, 21 nt, Human
ugagaagagaugccuugaaga

SEQ ID NO: 1320192 - RNA, 22 nt, Human
ugccaucaccucaccaccgcaa

SEQ ID NO: 1320193 - RNA, 18 nt, Human
uggggagagaaggugagg

SEQ ID NO: 1320194 - RNA, 23 nt, Human
ugggggcugggaaaggggguccu

SEQ ID NO: 1320195 - RNA, 24 nt, Human
uggggugucuucugagccacuggu

SEQ ID NO: 1320196 - RNA, 18 nt, Human
uggugauggucauuugca

SEQ ID NO: 1320197 - RNA, 22 nt, Human
ugucuucugagccacugguccc

SEQ ID NO: 1320198 - RNA, 20 nt, Human
uuggagaagagauccaugcu

SEQ ID NO: 1320199 - RNA, 22 nt, Human
uuucuagccccaagcaucaaac

SEQ ID NO: 1320200 - RNA, 20 nt, Human
aagcagcuucauuuuccucu

SEQ ID NO: 1320201 - RNA, 24 nt, Human
aggcagagaugaacuucaacaggg

SEQ ID NO: 1320202 - RNA, 20 nt, Human
caucucugcucucaggcagg

SEQ ID NO: 1320203 - RNA, 18 nt, Human
uaagugaagacuuugcca

SEQ ID NO: 1320204 - RNA, 21 nt, Human
ucagggaggagccucaggcag

SEQ ID NO: 1320205 - RNA, 24 nt, Human
ucucaggcagguguccuucaggga

SEQ ID NO: 1320206 - RNA, 19 nt, Human
aacugugucacagugccaa

SEQ ID NO: 1320207 - RNA, 23 nt, Human
ugucacagugccaaacugggaga

SEQ ID NO: 1320208 - RNA, 22 nt, Human
aagggaacaaggaaaacaugga

SEQ ID NO: 1320209 - RNA, 24 nt, Human
acaaggaaaacauggaacccaaaa

SEQ ID NO: 1320210 - RNA, 18 nt, Human
aggauacugugagcaaau

SEQ ID NO: 1320211 - RNA, 18 nt, Human
auggaacccaaagggaaa

SEQ ID NO: 1320212 - RNA, 26 nt, Human
cccaaagggaaaugcagugagagcac

SEQ ID NO: 1320213 - RNA, 19 nt, Human
gaacaaggaaaacauggaa

SEQ ID NO: 1320214 - RNA, 19 nt, Human
ggaaaacauggaacccaaa

SEQ ID NO: 1320215 - RNA, 19 nt, Human
gggaacaaggaaaacaugg

SEQ ID NO: 1320216 - RNA, 21 nt, Human
ggugguuaagauaaaacacaa

SEQ ID NO: 1320217 - RNA, 21 nt, Human
gucaaacuuauuagagggucc

SEQ ID NO: 1320218 - RNA, 19 nt, Human
uaagauaaaacacaaguca

SEQ ID NO: 1320219 - RNA, 25 nt, Human
ugagcaaaugggguggaggggugcu

SEQ ID NO: 1320220 - RNA, 19 nt, Human
uggaagggaacaaggaaaa

SEQ ID NO: 1320221 - RNA, 26 nt, Human
ugggguggaggggugcucucuugagc

SEQ ID NO: 1320222 - RNA, 18 nt, Human
auagaacacguauguaca

SEQ ID NO: 1320223 - RNA, 18 nt, Human
cgcuagcuggggacugcg

SEQ ID NO: 1320224 - RNA, 20 nt, Human
cgggagccgcgcuggacagg

SEQ ID NO: 1320225 - RNA, 21 nt, Human
ggcgggagccgcgcuggacag

SEQ ID NO: 1320226 - RNA, 21 nt, Human
uccaagcaacauuuauugagg

SEQ ID NO: 1320227 - RNA, 27 nt, Human
ugcccucggcguccagacgccaggcuc

SEQ ID NO: 1320228 - RNA, 20 nt, Human
aagucagcuuccagagcuga

SEQ ID NO: 1320229 - RNA, 19 nt, Human
acacagaggagccucucga

SEQ ID NO: 1320230 - RNA, 24 nt, Human
accagguacucuucgguggugacu

SEQ ID NO: 1320231 - RNA, 28 nt, Human
acuuuaagagaaaccagcauaacaggga

SEQ ID NO: 1320232 - RNA, 20 nt, Human
agagaaaccagcauaacagg

SEQ ID NO: 1320233 - RNA, 25 nt, Human
aggcagaagauaaucuugggaucug

SEQ ID NO: 1320234 - RNA, 19 nt, Human
aggcagucaucuucagaag

SEQ ID NO: 1320235 - RNA, 19 nt, Human
auugguaaggcagaagaua

SEQ ID NO: 1320236 - RNA, 22 nt, Human
caaaaggcaaagauucacaagu

SEQ ID NO: 1320237 - RNA, 20 nt, Human
caaacucagucccgccccuu

SEQ ID NO: 1320238 - RNA, 18 nt, Human
cacccggcagccucuccc

SEQ ID NO: 1320239 - RNA, 22 nt, Human
cagcuuccagagcugaggcaaa

SEQ ID NO: 1320240 - RNA, 20 nt, Human
caggguucaccagguacucu

SEQ ID NO: 1320241 - RNA, 23 nt, Human
ccaaaaccugaagguuuccuccc

SEQ ID NO: 1320242 - RNA, 25 nt, Human
ccggcagccucucccacuguccucu

SEQ ID NO: 1320243 - RNA, 20 nt, Human
ccuccagaacucuccuuggg

SEQ ID NO: 1320244 - RNA, 18 nt, Human
ccuccccugcaugcagcc

SEQ ID NO: 1320245 - RNA, 19 nt, Human
ccuccuggcccagccuuuc

SEQ ID NO: 1320246 - RNA, 21 nt, Human
ccucugggggaccgccgguuu

SEQ ID NO: 1320247 - RNA, 22 nt, Human
ccuucugcugugaaucucuaac

SEQ ID NO: 1320248 - RNA, 22 nt, Human
ccuucuuucauccuuugaaccc

SEQ ID NO: 1320249 - RNA, 20 nt, Human
cucguuaugcaaauaggacc

SEQ ID NO: 1320250 - RNA, 20 nt, Human
cugaggcaaacaaggcucac

SEQ ID NO: 1320251 - RNA, 21 nt, Human
cugaggcaaacaaggcucaca

SEQ ID NO: 1320252 - RNA, 22 nt, Human
cuggccaguauggauuuucucu

SEQ ID NO: 1320253 - RNA, 20 nt, Human
cuguggccuccuggcccagc

SEQ ID NO: 1320254 - RNA, 21 nt, Human
cuuccagagcugaggcaaaca

SEQ ID NO: 1320255 - RNA, 19 nt, Human
gaacccuccagaacucucc

SEQ ID NO: 1320256 - RNA, 23 nt, Human
gaggcagucaucuucagaaguca

SEQ ID NO: 1320257 - RNA, 20 nt, Human
gauguuaaaaaucacaggcu

SEQ ID NO: 1320258 - RNA, 23 nt, Human
gcagauuuucuuuucucaaacuc

SEQ ID NO: 1320259 - RNA, 18 nt, Human
uagaggcagauggugcug

SEQ ID NO: 1320260 - RNA, 23 nt, Human
uagaggcagauggugcugagggg

SEQ ID NO: 1320261 - RNA, 24 nt, Human
uauggauuuucucucuaagguugu

SEQ ID NO: 1320262 - RNA, 19 nt, Human
ucagucccgccccuuguuc

SEQ ID NO: 1320263 - RNA, 22 nt, Human
ucauuugcuucaauuaaauuuu

SEQ ID NO: 1320264 - RNA, 23 nt, Human
uccagagcugaggcaaacaaggc

SEQ ID NO: 1320265 - RNA, 28 nt, Human
ucccugcagagaccgcagggacaaaggu

SEQ ID NO: 1320266 - RNA, 21 nt, Human
ucgguggugacugucuugacu

SEQ ID NO: 1320267 - RNA, 23 nt, Human
ucugccacccggcagccucuccc

SEQ ID NO: 1320268 - RNA, 24 nt, Human
ugaggcaaacaaggcucacaugga

SEQ ID NO: 1320269 - RNA, 21 nt, Human
ugcaaauaggacccacuuuaa

SEQ ID NO: 1320270 - RNA, 23 nt, Human
ugcugaggggguugucccugcag

SEQ ID NO: 1320271 - RNA, 23 nt, Human
uggauuuucucucuaagguuguc

SEQ ID NO: 1320272 - RNA, 19 nt, Human
uggccuccuggcccagccu

SEQ ID NO: 1320273 - RNA, 21 nt, Human
ugggaucuguuguuuuggguu

SEQ ID NO: 1320274 - RNA, 19 nt, Human
uggugaccaaaaccugaag

SEQ ID NO: 1320275 - RNA, 20 nt, Human
uggugcugugggaugcagag

SEQ ID NO: 1320276 - RNA, 26 nt, Human
uggugcugugggaugcagaggggccu

SEQ ID NO: 1320277 - RNA, 25 nt, Human
uggugguugugucucugccacccgg

SEQ ID NO: 1320278 - RNA, 23 nt, Human
uuagaggcagauggugcugaggg

SEQ ID NO: 1320279 - RNA, 22 nt, Human
uuagggcccucuguggccuccu

SEQ ID NO: 1320280 - RNA, 19 nt, Human
uuggugguugugucucugc

SEQ ID NO: 1320281 - RNA, 23 nt, Human
uuuauaaaaagaccacgucucug

SEQ ID NO: 1320282 - RNA, 24 nt, Human
caguuuccucucccuuuucccuuc

SEQ ID NO: 1320283 - RNA, 24 nt, Human
cucucccuuuucccuucauuggca

SEQ ID NO: 1320284 - RNA, 27 nt, Human
guccaguuuccucucccuuuucccuuc

SEQ ID NO: 1320285 - RNA, 19 nt, Human
ucccuuuucccuucauugg

SEQ ID NO: 1320286 - RNA, 19 nt, Human
uccucucccuuuucccuuc

SEQ ID NO: 1320287 - RNA, 24 nt, Human
aacugaaccacauagcagccccag

SEQ ID NO: 1320288 - RNA, 19 nt, Human
cccaggaugcaggcugguu

SEQ ID NO: 1320289 - RNA, 21 nt, Human
gauaagauaacuccuggccuc

SEQ ID NO: 1320290 - RNA, 22 nt, Human
uaagauaacuccuggccuccca

SEQ ID NO: 1320291 - RNA, 22 nt, Human
uagcagccccaggaugcaggga

SEQ ID NO: 1320292 - RNA, 23 nt, Human
uccaggaugagauaagauaacuc

SEQ ID NO: 1320293 - RNA, 19 nt, Human
cccgcagggccuggggccg

SEQ ID NO: 1320294 - RNA, 21 nt, Human
cccguggcagccgcaggcccc

SEQ ID NO: 1320295 - RNA, 19 nt, Human
ccgcaggccccagucaccc

SEQ ID NO: 1320296 - RNA, 19 nt, Human
cggcguccguucucaaccc

SEQ ID NO: 1320297 - RNA, 19 nt, Human
uaagcugugagguggugga

SEQ ID NO: 1320298 - RNA, 22 nt, Human
uaucagagauaagcugugaggu

SEQ ID NO: 1320299 - RNA, 21 nt, Human
uccccguggcagccgcaggcc

SEQ ID NO: 1320300 - RNA, 24 nt, Human
uggaugcggcguccguucucaacc

SEQ ID NO: 1320301 - RNA, 22 nt, Human
uggggccgggccucggccucuu

SEQ ID NO: 1320302 - RNA, 25 nt, Human
aaaaaaccuccaucagauccucaau

SEQ ID NO: 1320303 - RNA, 26 nt, Human
aaacagucaagugaagaugauaaagc

SEQ ID NO: 1320304 - RNA, 21 nt, Human
aacagaaaauaaauacauaaa

SEQ ID NO: 1320305 - RNA, 23 nt, Human
aaccaaacaaugggcaaccuccc

SEQ ID NO: 1320306 - RNA, 26 nt, Human
aaggaacaccuggcccacccagccca

SEQ ID NO: 1320307 - RNA, 19 nt, Human
aaugacuugcaacaucuuc

SEQ ID NO: 1320308 - RNA, 19 nt, Human
acaaacaauagcaugagcc

SEQ ID NO: 1320309 - RNA, 24 nt, Human
acaaacaauagcaugagcgaucug

SEQ ID NO: 1320310 - RNA, 18 nt, Human
acaccuggcccacccagc

SEQ ID NO: 1320311 - RNA, 24 nt, Human
acagaaaauaaauacauaaaaaac

SEQ ID NO: 1320312 - RNA, 30 nt, Human; identical to SEQ ID NO: 487367

SEQ ID NO: 1320313 - RNA, 26 nt, Human
acaugcaccacagaccagccagcucc

SEQ ID NO: 1320314 - RNA, 19 nt, Human
acccugcaaggucaaagag

SEQ ID NO: 1320315 - RNA, 19 nt, Human
acccugcaaggucaaagag

SEQ ID NO: 1320316 - RNA, 21 nt, Human
acuugcaacaucuuccaacuc

SEQ ID NO: 1320317 - RNA, 24 nt, Human
agaaaaaggaaugacuugcaacau

SEQ ID NO: 1320318 - RNA, 22 nt, Human
agaagcagcuaucugucagggg

SEQ ID NO: 1320319 - RNA, 20 nt, Human
agacuaaauuuacaacagca

SEQ ID NO: 1320320 - RNA, 26 nt, Human
agucaagugaagaugauaaagccaaa

SEQ ID NO: 1320321 - RNA, 19 nt, Human
aguuaacuagcccaaccua

SEQ ID NO: 1320322 - RNA, 18 nt, Human
auaaacuggccccaaaac

SEQ ID NO: 1320323 - RNA, 22 nt, Human
auaaacuggccccaaaacuggc

SEQ ID NO: 1320324 - RNA, 25 nt, Human
aucuucuucacacccugcaagguca

SEQ ID NO: 1320325 - RNA, 18 nt, Human
augcaccacagaccagcc

SEQ ID NO: 1320326 - RNA, 25 nt, Human
caaaaucucugcagcacuguaacau

SEQ ID NO: 1320327 - RNA, 20 nt, Human
caacaguguuuaaauguggu

SEQ ID NO: 1320328 - RNA, 26 nt, Human
caaccaaacaaugggcaaccucccag

SEQ ID NO: 1320329 - RNA, 23 nt, Human
caaccucccaguucuucaguccc

SEQ ID NO: 1320330 - RNA, 23 nt, Human
caagcccccaaaauccagccaua

SEQ ID NO: 1320331 - RNA, 19 nt, Human
caagcugaacagaaaauaa

SEQ ID NO: 1320332 - RNA, 23 nt, Human
cacaaacaauagcaugagcgauc

SEQ ID NO: 1320333 - RNA, 20 nt, Human
cacaugcaccacagaccagg

SEQ ID NO: 1320334 - RNA, 24 nt, Human
caccuggcccacccagcccagagu

SEQ ID NO: 1320335 - RNA, 18 nt, Human
cagccagcucccugggua

SEQ ID NO: 1320336 - RNA, 19 nt, Human
cagccauaaacuggcccca

SEQ ID NO: 1320337 - RNA, 23 nt, Human
cagccauaaacuggccccaaaac

SEQ ID NO: 1320338 - RNA, 20 nt, Human
cagcgcugccagcagagggg

SEQ ID NO: 1320339 - RNA, 21 nt, Human
cagcggcgcggguccugcagc

SEQ ID NO: 1320340 - RNA, 24 nt, Human
cauuuuugucauucagcuugagag

SEQ ID NO: 1320341 - RNA, 18 nt, Human
cccaaccuaugccuuuaa

SEQ ID NO: 1320342 - RNA, 22 nt, Human
cccacccagcccagaguggaaa

SEQ ID NO: 1320343 - RNA, 21 nt, Human
ccccaaaacuggccauaaaca

SEQ ID NO: 1320344 - RNA, 18 nt, Human
cccuggguaccagagggc

SEQ ID NO: 1320345 - RNA, 19 nt, Human
cccuggguaccagagggcu

SEQ ID NO: 1320346 - RNA, 19 nt, Human
ccuucguuucccauaaggg

SEQ ID NO: 1320347 - RNA, 23 nt, Human
cuaaaggacagaaaaaggaauga

SEQ ID NO: 1320348 - RNA, 28 nt, Human
cugaaaccccaguggacauuuucuccau

SEQ ID NO: 1320349 - RNA, 20 nt, Human
cugaagucaguuucuccucc

SEQ ID NO: 1320350 - RNA, 22 nt, Human
cugagacuaaauuuacaacagc

SEQ ID NO: 1320351 - RNA, 19 nt, Human
cugcagcacuguaacaugu

SEQ ID NO: 1320352 - RNA, 23 nt, Human
cugugugugugucuuuaauuccu

SEQ ID NO: 1320353 - RNA, 21 nt, Human
cuuaagccacaaacaauagca

SEQ ID NO: 1320354 - RNA, 24 nt, Human
cuucaguucuggucacagguuuuu

SEQ ID NO: 1320355 - RNA, 21 nt, Human
gagaccccugauuucccacuu

SEQ ID NO: 1320356 - RNA, 19 nt, Human
gcaacaucuuccaacucug

SEQ ID NO: 1320357 - RNA, 19 nt, Human
gcaaccucccaguucuuca

SEQ ID NO: 1320358 - RNA, 18 nt, Human
gcauggaaggaaauauga

SEQ ID NO: 1320359 - RNA, 19 nt, Human
gccauaaacuggccccaaa

SEQ ID NO: 1320360 - RNA, 24 nt, Human
gccgcaguuaacuagcccaaccua

SEQ ID NO: 1320361 - RNA, 21 nt, Human
gcguggagcugcgcaucuucu

SEQ ID NO: 1320362 - RNA, 18 nt, Human
gggcaaggaacaccuggc

SEQ ID NO: 1320363 - RNA, 22 nt, Human
uaagccacaaacaauagcauga

SEQ ID NO: 1320364 - RNA, 22 nt, Human
uacaaacagucaagugaagaug

SEQ ID NO: 1320365 - RNA, 26 nt, Human
uacaguauuacaaacagucaagugaa

SEQ ID NO: 1320366 - RNA, 24 nt, Human
uacuacaguauuacaaacagucaa

SEQ ID NO: 1320367 - RNA, 23 nt, Human
uagcuucuuagguggaaagcaac

SEQ ID NO: 1320368 - RNA, 25 nt, Human
uagguggaaagcaacuaagucuuuu

SEQ ID NO: 1320369 - RNA, 19 nt, Human
uaugcugaaauaauguaca

SEQ ID NO: 1320370 - RNA, 22 nt, Human
ucagucccuaaaggacagaaaa

SEQ ID NO: 1320371 - RNA, 23 nt, Human
ucaguucuggucacagguuuuua

SEQ ID NO: 1320372 - RNA, 21 nt, Human
ucccuggguaccagagggcuu

SEQ ID NO: 1320373 - RNA, 20 nt, Human
uccuucaguucuggucacag

SEQ ID NO: 1320374 - RNA, 22 nt, Human
uccuucaguucuggucacaggu

SEQ ID NO: 1320375 - RNA, 25 nt, Human
ucucucagcucugaaggcugugaga

SEQ ID NO: 1320376 - RNA, 22 nt, Human
ucuuugagucauucuuuuuggg

SEQ ID NO: 1320377 - RNA, 18 nt, Human
ucuuugguggaagacaag

SEQ ID NO: 1320378 - RNA, 22 nt, Human
ugaaaccccaguggacauuuuc

SEQ ID NO: 1320379 - RNA, 20 nt, Human
ugacuugcaacaucuuccaa

SEQ ID NO: 1320380 - RNA, 24 nt, Human
ugacuugcaacaucuuccaacucu

SEQ ID NO: 1320381 - RNA, 21 nt, Human
ugauuucccacuuuacaccuc

SEQ ID NO: 1320382 - RNA, 23 nt, Human
ugcaguuuucaguuccuagaguc

SEQ ID NO: 1320383 - RNA, 18 nt, Human
uggaagacaagcagcuug

SEQ ID NO: 1320384 - RNA, 19 nt, Human
uggaagacaagcagcuugg

SEQ ID NO: 1320385 - RNA, 22 nt, Human
uggagagaagcagcuaucuguc

SEQ ID NO: 1320386 - RNA, 24 nt, Human
uggccccaaaacuggccauaaaca

SEQ ID NO: 1320387 - RNA, 22 nt, Human
uguucgggucucucagcucuga

SEQ ID NO: 1320388 - RNA, 21 nt, Human
uuaacuagcccaaccuaugcc

SEQ ID NO: 1320389 - RNA, 18 nt, Human
uuagggucucccugacug

SEQ ID NO: 1320390 - RNA, 21 nt, Human
uuguuuuguuuucaaauugug

SEQ ID NO: 1320391 - RNA, 24 nt, Human
uuuucaguuccuagagucuuccuu

SEQ ID NO: 1320392 - RNA, 19 nt, Human
uuuuccgcuuccuggaggc

SEQ ID NO: 1320393 - RNA, 25 nt, Human
aaagagccugaucauugcuuagcaa

SEQ ID NO: 1320394 - RNA, 18 nt, Human
aagagccugaucauugcu

SEQ ID NO: 1320395 - RNA, 18 nt, Human
ccugaaggugagccagag

SEQ ID NO: 1320396 - RNA, 23 nt, Human
ccuuugauauuucaggcugacug

SEQ ID NO: 1320397 - RNA, 19 nt, Human
cuguguggugccugaaggu

SEQ ID NO: 1320398 - RNA, 24 nt, Human
cuuaguggcuuaaaacaauuuauu

SEQ ID NO: 1320399 - RNA, 20 nt, Human
cuuccugacuguguggugcc

SEQ ID NO: 1320400 - RNA, 21 nt, Human
gacuguguggugccugaaggu

SEQ ID NO: 1320401 - RNA, 19 nt, Human
gagucucuuaaucagcuga

SEQ ID NO: 1320402 - RNA, 18 nt, Human
gauauuucaggcugacug

SEQ ID NO: 1320403 - RNA, 19 nt, Human
ugccugaaggugagccaga

SEQ ID NO: 1320404 - RNA, 21 nt, Human
ugccugaaggugagccagagg

SEQ ID NO: 1320405 - RNA, 20 nt, Human
ugcuuagcaagcccuuuugc

SEQ ID NO: 1320406 - RNA, 20 nt, Human
uggcuuaaaacaauuuauua

SEQ ID NO: 1320407 - RNA, 22 nt, Human
aaacaaaugccaccacauccuc

SEQ ID NO: 1320408 - RNA, 18 nt, Human
aaaugccaccacauccuc

SEQ ID NO: 1320409 - RNA, 18 nt, Human
agacaagaagcuaugagc

SEQ ID NO: 1320410 - RNA, 19 nt, Human
augguccaaaugaacagug

SEQ ID NO: 1320411 - RNA, 18 nt, Human
auuuacuacaauaaauaa

SEQ ID NO: 1320412 - RNA, 22 nt, Human
caaccuauaaaggacaauuucc

SEQ ID NO: 1320413 - RNA, 24 nt, Human
caaccuauaaaggacaauuuccua

SEQ ID NO: 1320414 - RNA, 25 nt, Human
ccucugcauuccagcaccaacuaag

SEQ ID NO: 1320415 - RNA, 23 nt, Human
gaaacaaaugccaccacauccuc

SEQ ID NO: 1320416 - RNA, 23 nt, Human
gcaucuuuguguacaaucacucc

SEQ ID NO: 1320417 - RNA, 24 nt, Human
uaugagcaucuuuguguacaaucc

SEQ ID NO: 1320418 - RNA, 20 nt, Human
ucagacaagaagcuaugagc

SEQ ID NO: 1320419 - RNA, 24 nt, Human
ugggaaacaaaugccaccacaucc

SEQ ID NO: 1320420 - RNA, 19 nt, Human
aacagguaggucugcaggc

SEQ ID NO: 1320421 - RNA, 18 nt, Human
aggggcaggaagcaguag

SEQ ID NO: 1320422 - RNA, 19 nt, Human
cagccagccacagcagguu

SEQ ID NO: 1320423 - RNA, 20 nt, Human
ccaccaggucuaggggcagg

SEQ ID NO: 1320424 - RNA, 23 nt, Human
ccaguaguucagagaugcucucu

SEQ ID NO: 1320425 - RNA, 20 nt, Human
ccaugagccccagaggugcc

SEQ ID NO: 1320426 - RNA, 25 nt, Human
ccucuucugugucuaacagggguug

SEQ ID NO: 1320427 - RNA, 24 nt, Human
cuuccauguacgccaguaguucag

SEQ ID NO: 1320428 - RNA, 19 nt, Human
gcaguagugcaccuccucu

SEQ ID NO: 1320429 - RNA, 19 nt, Human
ggcugggauauuuggccac

SEQ ID NO: 1320430 - RNA, 23 nt, Human
guagugcaccuccucuucugugu

SEQ ID NO: 1320431 - RNA, 19 nt, Human
uacacuuccauguacgcca

SEQ ID NO: 1320432 - RNA, 24 nt, Human
uagugcaccuccucuucugugucu

SEQ ID NO: 1320433 - RNA, 25 nt, Human
ugagccccagaggugccuuaucaug

SEQ ID NO: 1320434 - RNA, 22 nt, Human
ugcaccuccucuucugugucua

SEQ ID NO: 1320435 - RNA, 23 nt, Human
uuaauuggaaauucugaggguuu

SEQ ID NO: 1320436 - RNA, 21 nt, Human
aaagguuuggggagauugugc

SEQ ID NO: 1320437 - RNA, 24 nt, Human
aagcagcugacucagcuccucuuc

SEQ ID NO: 1320438 - RNA, 18 nt, Human
ggagaccaacugcugcca

SEQ ID NO: 1320439 - RNA, 31 nt, Human
ucauccaagaauuuagagauucucagucgcu

SEQ ID NO: 1320440 - RNA, 23 nt, Human
ucugcagaugaggcugcugacug

SEQ ID NO: 1320441 - RNA, 19 nt, Human
ugaaaaagcagcugacuca

SEQ ID NO: 1320442 - RNA, 23 nt, Human
ugcagaugaggcugcugacuguu

SEQ ID NO: 1320443 - RNA, 20 nt, Human
ugccaucauccaagaauuua

SEQ ID NO: 1320444 - RNA, 21 nt, Human
uuagagauucucagucgcugg

SEQ ID NO: 1320445 - RNA, 22 nt, Human
augaaauuagucucgggcuuga

SEQ ID NO: 1320446 - RNA, 24 nt, Human
caaaaagauucaucaaauuaugaa

SEQ ID NO: 1320447 - RNA, 24 nt, Human
cuccaguggcucaaugacauagcc

SEQ ID NO: 1320448 - RNA, 21 nt, Human
ucccaugacucuccaaaaaga

SEQ ID NO: 1320449 - RNA, 22 nt, Human
ucguguguaucaggaaacccaa

SEQ ID NO: 1320450 - RNA, 23 nt, Human
ucuccaguaaacaaugccagggc

SEQ ID NO: 1320451 - RNA, 21 nt, Human
uggccacaaauuguuuacauu

SEQ ID NO: 1320452 - RNA, 21 nt, Human
uggcucaaugacauagcccaa

SEQ ID NO: 1320453 - RNA, 19 nt, Human
uggggcuucgagacuuggc

SEQ ID NO: 1320454 - RNA, 18 nt, Human
uuccucccaugacucucc

SEQ ID NO: 1320455 - RNA, 21 nt, Human
uugagguacaggaucuuguca

SEQ ID NO: 1320456 - RNA, 20 nt, Human
acuguccccagguggacaga

SEQ ID NO: 1320457 - RNA, 18 nt, Human
agaggaggaggaaggggc

SEQ ID NO: 1320458 - RNA, 19 nt, Human
agcagcuuaaauaugaggc

SEQ ID NO: 1320459 - RNA, 21 nt, Human
agcaggaagaggaggaggaag

SEQ ID NO: 1320460 - RNA, 24 nt, Human
aggaggaggaaggggccgcagagc

SEQ ID NO: 1320461 - RNA, 25 nt, Human
agguccagcagggaggggaccagga

SEQ ID NO: 1320462 - RNA, 23 nt, Human
aguuggagcaggaagaggaggag

SEQ ID NO: 1320463 - RNA, 20 nt, Human
cagcagggaggggaccagga

SEQ ID NO: 1320464 - RNA, 21 nt, Human
cagcccagugggacuaggcag

SEQ ID NO: 1320465 - RNA, 21 nt, Human
ccccuuagacccaggccugag

SEQ ID NO: 1320466 - RNA, 20 nt, Human
gaagaggaggaggaaggggc

SEQ ID NO: 1320467 - RNA, 19 nt, Human
gacuaggcaggaagcucug

SEQ ID NO: 1320468 - RNA, 20 nt, Human
gagcaggaagaggaggagga

SEQ ID NO: 1320469 - RNA, 24 nt, Human
gagcaggaagaggaggaggaaggg

SEQ ID NO: 1320470 - RNA, 21 nt, Human
ggaaggacagaacgacgcagg

SEQ ID NO: 1320471 - RNA, 24 nt, Human
ggaccaggaucucuugcuccacgg

SEQ ID NO: 1320472 - RNA, 18 nt, Human
gggaccaggaucucuugc

SEQ ID NO: 1320473 - RNA, 20 nt, Human
gguccagcagggaggggacc

SEQ ID NO: 1320474 - RNA, 20 nt, Human
uaugaggcaagcagucaggg

SEQ ID NO: 1320475 - RNA, 19 nt, Human
uccccagguggacagaagu

SEQ ID NO: 1320476 - RNA, 19 nt, Human
ucggaaggacagaacgacg

SEQ ID NO: 1320477 - RNA, 18 nt, Human
ugagccucuggcaggggc

SEQ ID NO: 1320478 - RNA, 20 nt, Human
ugccuggggcuggguugggg

SEQ ID NO: 1320479 - RNA, 21 nt, Human
ugccuggggcuggguuggggu

SEQ ID NO: 1320480 - RNA, 22 nt, Human
ugccuggggcuggguugggguc

SEQ ID NO: 1320481 - RNA, 18 nt, Human
ugggucagaggccuggug

SEQ ID NO: 1320482 - RNA, 21 nt, Human
ugggucagaggccuggugggc

SEQ ID NO: 1320483 - RNA, 21 nt, Human
uggguggcagguccagcaggg

SEQ ID NO: 1320484 - RNA, 24 nt, Human
uucggaaggacagaacgacgcagg

SEQ ID NO: 1320485 - RNA, 20 nt, Human
uuggagcaggaagaggagga

SEQ ID NO: 1320486 - RNA, 19 nt, Human
uuggcagggcggucuuccc

SEQ ID NO: 1320487 - RNA, 21 nt, Human
ccucucuucuuuccuccaggg

SEQ ID NO: 1320488 - RNA, 25 nt, Human
cuacaguggcuuugcuucuggcuag

SEQ ID NO: 1320489 - RNA, 19 nt, Human
gacccucucuucuuuccuu

SEQ ID NO: 1320490 - RNA, 19 nt, Human
ggccuuuguauuugcuuuu

SEQ ID NO: 1320491 - RNA, 18 nt, Human
uacaguggcuuugcuucu

SEQ ID NO: 1320492 - RNA, 18 nt, Human
uccagggucacuggguuu

SEQ ID NO: 1320493 - RNA, 25 nt, Human
uccuccagggucacuggguuuuacu

SEQ ID NO: 1320494 - RNA, 18 nt, Human
ucgaaagucuucucaccc

SEQ ID NO: 1320495 - RNA, 22 nt, Human
ucgaaagucuucucacccuuga

SEQ ID NO: 1320496 - RNA, 18 nt, Human
ucgcagcgcugggagugc

SEQ ID NO: 1320497 - RNA, 22 nt, Human
ucuuguuuugaucucugggccu

SEQ ID NO: 1320498 - RNA, 20 nt, Human
ugggaauguucugcucgaaa

SEQ ID NO: 1320499 - RNA, 26 nt, Human
aaaaacugaucaaaacagagagacaa

SEQ ID NO: 1320500 - RNA, 26 nt, Human
aaaacaaaaacugaucaaaacagaga

SEQ ID NO: 1320501 - RNA, 18 nt, Human
aaacuguaaccaucauac

SEQ ID NO: 1320502 - RNA, 23 nt, Human
agagagacaacauuuaaaaauau

SEQ ID NO: 1320503 - RNA, 28 nt, Human
auaaaacaaaaacugaucaaaacagaga

SEQ ID NO: 1320504 - RNA, 19 nt, Human
cacaaaggucacaguccag

SEQ ID NO: 1320505 - RNA, 18 nt, Human
caggacauguauguggug

SEQ ID NO: 1320506 - RNA, 22 nt, Human
gaauaaaacaaaaacugaucaa

SEQ ID NO: 1320507 - RNA, 23 nt, Human
gucacaguccaguugcaaaggcu

SEQ ID NO: 1320508 - RNA, 19 nt, Human
uaaaacaaaaacugaucaa

SEQ ID NO: 1320509 - RNA, 22 nt, Human
uaaaacaaaaacugaucaaaac

SEQ ID NO: 1320510 - RNA, 22 nt, Human
uacaaagggaaagaacuuuaca

SEQ ID NO: 1320511 - RNA, 23 nt, Human
ucaaaacagagagacaacauuua

SEQ ID NO: 1320512 - RNA, 21 nt, Human
ucuuucuuucuuuuauuccuu

SEQ ID NO: 1320513 - RNA, 21 nt, Human
ucuuucuuuuauuccuuccuu

SEQ ID NO: 1320514 - RNA, 24 nt, Human
ugaauaaaacaaaaacugaucaaa

SEQ ID NO: 1320515 - RNA, 21 nt, Human
aaaucccaccccuuccaucuc

SEQ ID NO: 1320516 - RNA, 18 nt, Human
aagaagggagaggauggu

SEQ ID NO: 1320517 - RNA, 24 nt, Human
aaggaagguacaguuuggaugagg

SEQ ID NO: 1320518 - RNA, 22 nt, Human
aaggagcagaugacaccaucag

SEQ ID NO: 1320519 - RNA, 21 nt, Human
acagcacagaggcacgggcac

SEQ ID NO: 1320520 - RNA, 22 nt, Human
acagcacagaggcacgggcacc

SEQ ID NO: 1320521 - RNA, 25 nt, Human
accaugggagagggcagcacuccug

SEQ ID NO: 1320522 - RNA, 20 nt, Human
acugggcuucugggcugcuu

SEQ ID NO: 1320523 - RNA, 19 nt, Human
aggagaagccaccuuggug

SEQ ID NO: 1320524 - RNA, 23 nt, Human
aggagcaaaucccaccccuucca

SEQ ID NO: 1320525 - RNA, 23 nt, Human
aguuacugggcuucugggcugcu

SEQ ID NO: 1320526 - RNA, 26 nt, Human
aucccaccccuuccaucucucagcca

SEQ ID NO: 1320527 - RNA, 21 nt, Human
auuggccuggucccaaccauu

SEQ ID NO: 1320528 - RNA, 19 nt, Human
caaccauuauaguaagugg

SEQ ID NO: 1320529 - RNA, 23 nt, Human
cacauacacagcacagaggcacg

SEQ ID NO: 1320530 - RNA, 24 nt, Human
caccccuuccaucucucagccaag

SEQ ID NO: 1320531 - RNA, 23 nt, Human
cccuuccaucucucagccaagga

SEQ ID NO: 1320532 - RNA, 21 nt, Human
cugaggggaucuuggccucac

SEQ ID NO: 1320533 - RNA, 27 nt, Human
cuuagucccuggcuuggcaggaagggu

SEQ ID NO: 1320534 - RNA, 20 nt, Human
gaacccaggagcaaauccca

SEQ ID NO: 1320535 - RNA, 21 nt, Human
ggccacaggaaggagcagaug

SEQ ID NO: 1320536 - RNA, 20 nt, Human
gggaagggcaguuacugggc

SEQ ID NO: 1320537 - RNA, 23 nt, Human
gggcuucugggcugcuuaguccc

SEQ ID NO: 1320538 - RNA, 21 nt, Human
gguagggaagauggauggggc

SEQ ID NO: 1320539 - RNA, 18 nt, Human
uaagaagggagaggaugg

SEQ ID NO: 1320540 - RNA, 26 nt, Human
uccaucucucagccaaggagaagcca

SEQ ID NO: 1320541 - RNA, 18 nt, Human
ugaagauauaaacaguaa

SEQ ID NO: 1320542 - RNA, 24 nt, Human
ugaggggaucuuggccucacagug

SEQ ID NO: 1320543 - RNA, 23 nt, Human
uggcaggaaggguagggaagaug

SEQ ID NO: 1320544 - RNA, 23 nt, Human
uggccuggucccaaccauuacag

SEQ ID NO: 1320545 - RNA, 23 nt, Human
uuuggaugaggccacaggaagga

SEQ ID NO: 1320546 - RNA, 24 nt, Human
caucauuguuuuaauugcuggaaa

SEQ ID NO: 1320547 - RNA, 19 nt, Human
cuguacuguuguugagaag

SEQ ID NO: 1320548 - RNA, 23 nt, Human
gacuucuuuaggccacuauccuu

SEQ ID NO: 1320549 - RNA, 18 nt, Human
uaacagcauuaacaagag

SEQ ID NO: 1320550 - RNA, 22 nt, Human
ucccaucauuguuuuaauugcu

SEQ ID NO: 1320551 - RNA, 21 nt, Human
caaggcacauuuggcgggugc

SEQ ID NO: 1320552 - RNA, 22 nt, Human
ccauucagcuuuucuauuuguc

SEQ ID NO: 1320553 - RNA, 27 nt, Human
ccuccagagcagccucaggcuuagcuu

SEQ ID NO: 1320554 - RNA, 21 nt, Human
ccugcaacaagucuuccuggg

SEQ ID NO: 1320555 - RNA, 25 nt, Human
cgccuuccuuccucuucauuuuggc

SEQ ID NO: 1320556 - RNA, 21 nt, Human
cuucccgaauaucagcuccag

SEQ ID NO: 1320557 - RNA, 23 nt, Human
gaauuaaagagucauugucucca

SEQ ID NO: 1320558 - RNA, 23 nt, Human
ggccaucaguccuguccgggucc

SEQ ID NO: 1320559 - RNA, 18 nt, Human
gucccgagcccuugacuc

SEQ ID NO: 1320560 - RNA, 24 nt, Human
uaccugcaacaagucuuccuggga

SEQ ID NO: 1320561 - RNA, 18 nt, Human
ucaguccuguccgggucc

SEQ ID NO: 1320562 - RNA, 19 nt, Human
ucucugaggccaucagucc

SEQ ID NO: 1320563 - RNA, 21 nt, Human
ucugcugggcuccggagucgc

SEQ ID NO: 1320564 - RNA, 19 nt, Human
ugaagggcuaauagucuag

SEQ ID NO: 1320565 - RNA, 24 nt, Human
uggcaaggcacauuuggcgggugc

SEQ ID NO: 1320566 - RNA, 23 nt, Human
uggccgcucgcuucuccggcccu

SEQ ID NO: 1320567 - RNA, 19 nt, Human
ugucacugaaaauucaggc

SEQ ID NO: 1320568 - RNA, 22 nt, Human
uguccggguccguaguccuggc

SEQ ID NO: 1320569 - RNA, 18 nt, Human
aaccagucuuguccgaga

SEQ ID NO: 1320570 - RNA, 23 nt, Human
caaggaacaucucaccaauuuca

SEQ ID NO: 1320571 - RNA, 20 nt, Human
ccaaccagcccaaggaacau

SEQ ID NO: 1320572 - RNA, 20 nt, Human
ccaccuaugaccucaggucc

SEQ ID NO: 1320573 - RNA, 18 nt, Human
cccaaggaacaucucacc

SEQ ID NO: 1320574 - RNA, 23 nt, Human
gguaagcggucuuuucacucucu

SEQ ID NO: 1320575 - RNA, 22 nt, Human
uaaccagucuuguccgagacuc

SEQ ID NO: 1320576 - RNA, 20 nt, Human
uaguuucauuguagaacgau

SEQ ID NO: 1320577 - RNA, 19 nt, Human
uuuauuaguuucauuguag

SEQ ID NO: 1320578 - RNA, 22 nt, Human
aacauugggaacacagggacau

SEQ ID NO: 1320579 - RNA, 23 nt, Human
acuugauuucucuuguucucagc

SEQ ID NO: 1320580 - RNA, 26 nt, Human
agaggaagaagggaggaaggcaaggg

SEQ ID NO: 1320581 - RNA, 20 nt, Human
cacuacuugggugacaggau

SEQ ID NO: 1320582 - RNA, 25 nt, Human
cagaacuuggugggcuccccccgag

SEQ ID NO: 1320583 - RNA, 18 nt, Human
caggaacaauagacacug

SEQ ID NO: 1320584 - RNA, 18 nt, Human
caucaagacaggaacaau

SEQ ID NO: 1320585 - RNA, 20 nt, Human
ccaagaggaagaagggagga

SEQ ID NO: 1320586 - RNA, 23 nt, Human
cccagaacuuggugggcuccggc

SEQ ID NO: 1320587 - RNA, 21 nt, Human
ccccagaaaugaugacaccuc

SEQ ID NO: 1320588 - RNA, 20 nt, Human
cucuucugaaucagcucuaa

SEQ ID NO: 1320589 - RNA, 20 nt, Human
gaaucagcucuaaauuucgg

SEQ ID NO: 1320590 - RNA, 23 nt, Human
gacacuggggacuccaagaggaa

SEQ ID NO: 1320591 - RNA, 23 nt, Human
ggaaaugacugcuaacuuggacg

SEQ ID NO: 1320592 - RNA, 22 nt, Human
ggaacacagggacaucaagaca

SEQ ID NO: 1320593 - RNA, 19 nt, Human
ggaaggcaaggguugaaga

SEQ ID NO: 1320594 - RNA, 20 nt, Human
gggugacaggauugagcuuc

SEQ ID NO: 1320595 - RNA, 23 nt, Human
uaaacauugggaacacagggaca

SEQ ID NO: 1320596 - RNA, 26 nt, Human
uacuugggugacaggauugagcuucu

SEQ ID NO: 1320597 - RNA, 18 nt, Human
ucacuuguaggcaagagc

SEQ ID NO: 1320598 - RNA, 23 nt, Human
ucacuuguaggcaagagcuaaac

SEQ ID NO: 1320599 - RNA, 22 nt, Human
ucagcaccuguggguucccaga

SEQ ID NO: 1320600 - RNA, 26 nt, Human
ucagugccugacggcgacuauccagg

SEQ ID NO: 1320601 - RNA, 21 nt, Human
uccaagaggaagaagggagga

SEQ ID NO: 1320602 - RNA, 23 nt, Human
uggaaacuccgccuccuuccuuc

SEQ ID NO: 1320603 - RNA, 24 nt, Human
ugggaacacagggacaucaagaca

SEQ ID NO: 1320604 - RNA, 22 nt, Human
ugucucuucugaaucagcucua

SEQ ID NO: 1320605 - RNA, 21 nt, Human
cagcaguugcaccagcaccug

SEQ ID NO: 1320606 - RNA, 18 nt, Human
caggagccgcacaggcgc

SEQ ID NO: 1320607 - RNA, 23 nt, Human
caggagccuccucagggcgccca

SEQ ID NO: 1320608 - RNA, 21 nt, Human
ccagcgcugcacccacgagcc

SEQ ID NO: 1320609 - RNA, 23 nt, Human
cccagugcgcccaggagcgccgg

SEQ ID NO: 1320610 - RNA, 23 nt, Human
cccgaagcacccuucagcgccca

SEQ ID NO: 1320611 - RNA, 27 nt, Human
ccgaagcacccuucagcgcccacagca

SEQ ID NO: 1320612 - RNA, 23 nt, Human
ccuucgcccagugcgcccaggag

SEQ ID NO: 1320613 - RNA, 19 nt, Human
cgcccagcgcugcacccac

SEQ ID NO: 1320614 - RNA, 20 nt, Human
cgcccaggagcgccggcagc

SEQ ID NO: 1320615 - RNA, 18 nt, Human
cgcccggggccgcagcag

SEQ ID NO: 1320616 - RNA, 22 nt, Human
cgcccggggccgcagcaggagc

SEQ ID NO: 1320617 - RNA, 22 nt, Human
cguguggccgccagugccuggg

SEQ ID NO: 1320618 - RNA, 18 nt, Human
gagcacguguggccgcca

SEQ ID NO: 1320619 - RNA, 25 nt, Human
gcacguguggccgccagugccuggg

SEQ ID NO: 1320620 - RNA, 24 nt, Human
gccccgaagcacccuucagcgccc

SEQ ID NO: 1320621 - RNA, 20 nt, Human
gcugcacccacgagccgcgc

SEQ ID NO: 1320622 - RNA, 18 nt, Human
ggagcgccggcagcagcg

SEQ ID NO: 1320623 - RNA, 23 nt, Human
ggagggaggcgcggucccagcuc

SEQ ID NO: 1320624 - RNA, 19 nt, Human
ugcgcccaggagcgccggg

SEQ ID NO: 1320625 - RNA, 18 nt, Human
uggggcuccggccccgaa

SEQ ID NO: 1320626 - RNA, 22 nt, Human
uguggccgccagugccuggggc

SEQ ID NO: 1320627 - RNA, 23 nt, Human
aaccucagcuuccuugucaguac

SEQ ID NO: 1320628 - RNA, 23 nt, Human
aaguggccucugaggauuacagu

SEQ ID NO: 1320629 - RNA, 21 nt, Human
accaauuccucaacaugguuc

SEQ ID NO: 1320630 - RNA, 18 nt, Human
aucaaaucaugaauuggc

SEQ ID NO: 1320631 - RNA, 19 nt, Human
cacaccauuuccccaucuc

SEQ ID NO: 1320632 - RNA, 23 nt, Human
cacuccucuggauuucuauaaaa

SEQ ID NO: 1320633 - RNA, 24 nt, Human
caggucacaccauuuccccaucuc

SEQ ID NO: 1320634 - RNA, 19 nt, Human
ccaucucuucaauauuccg

SEQ ID NO: 1320635 - RNA, 20 nt, Human
ccucugaggauuacaguagg

SEQ ID NO: 1320636 - RNA, 20 nt, Human
cuuaaccuccaaaccucagc

SEQ ID NO: 1320637 - RNA, 24 nt, Human
cuuaaccuccaaaccucagcuucc

SEQ ID NO: 1320638 - RNA, 21 nt, Human
cuucacuccucuggauuucua

SEQ ID NO: 1320639 - RNA, 21 nt, Human
gaacaguccucuucacuccuc

SEQ ID NO: 1320640 - RNA, 21 nt, Human
gcuuaaccuccaaaccucagc

SEQ ID NO: 1320641 - RNA, 23 nt, Human
uaaccuccaaaccucagcuuccu

SEQ ID NO: 1320642 - RNA, 19 nt, Human
uacaguaggguuaaaugag

SEQ ID NO: 1320643 - RNA, 23 nt, Human
uccucuggauuucuauaaaaugg

SEQ ID NO: 1320644 - RNA, 25 nt, Human
uccucuggauuucuauaaaauggaa

SEQ ID NO: 1320645 - RNA, 22 nt, Human
ugaggaaauguggaccaauucc

SEQ ID NO: 1320646 - RNA, 19 nt, Human
uuccucaacaugguucugg

SEQ ID NO: 1320647 - RNA, 22 nt, Human
aacaguguuggaagguggggcc

SEQ ID NO: 1320648 - RNA, 24 nt, Human
accuucucucagaacaucuuauug

SEQ ID NO: 1320649 - RNA, 21 nt, Human
agaaaccuaaucccacugccg

SEQ ID NO: 1320650 - RNA, 23 nt, Human
auacacaaccuucucucagaaca

SEQ ID NO: 1320651 - RNA, 25 nt, Human
augaagacaaaauauuuagcaaaua

SEQ ID NO: 1320652 - RNA, 23 nt, Human
cacaaccuucucucagaacaucu

SEQ ID NO: 1320653 - RNA, 22 nt, Human
cuauggucugaaugugucuccc

SEQ ID NO: 1320654 - RNA, 18 nt, Human
cuuugcugcuauggucug

SEQ ID NO: 1320655 - RNA, 20 nt, Human
guuuauacagaucaguugau

SEQ ID NO: 1320656 - RNA, 19 nt, Human
uacagcuuugcugcuaugg

SEQ ID NO: 1320657 - RNA, 23 nt, Human
ugauaaugaagacaaaauauuua

SEQ ID NO: 1320658 - RNA, 21 nt, Human
uggaagguggggccuuugggg

SEQ ID NO: 1320659 - RNA, 24 nt, Human
uggggccuuuggggaggcauucag

SEQ ID NO: 1320660 - RNA, 22 nt, Human
ugugucucccaaaauucauaug

SEQ ID NO: 1320661 - RNA, 21 nt, Human
aacaguacccauucccuugau

SEQ ID NO: 1320662 - RNA, 18 nt, Human
acuuguggggcauuccuu

SEQ ID NO: 1320663 - RNA, 20 nt, Human
aucaccuuucuuauagauuc

SEQ ID NO: 1320664 - RNA, 23 nt, Human
cauaugucaggugccucuccucu

SEQ ID NO: 1320665 - RNA, 21 nt, Human
ccagagguccuuuauuuuucu

SEQ ID NO: 1320666 - RNA, 21 nt, Human
uacccauucccuugaugucua

SEQ ID NO: 1320667 - RNA, 18 nt, Human
ugaacaguacccauuccc

SEQ ID NO: 1320668 - RNA, 21 nt, Human
uggccaaaggagcaacuccau

SEQ ID NO: 1320669 - RNA, 19 nt, Human
aagcuggagggcuugucag

SEQ ID NO: 1320670 - RNA, 20 nt, Human
accccaacggcgccugcgcc

SEQ ID NO: 1320671 - RNA, 23 nt, Human
aucugcugcuuguaaccugcagg

SEQ ID NO: 1320672 - RNA, 21 nt, Human
caaggcgucuugcgcccaacu

SEQ ID NO: 1320673 - RNA, 21 nt, Human
cagccuugcaaaaugucacuc

SEQ ID NO: 1320674 - RNA, 20 nt, Human
ccaggaagugccacacagca

SEQ ID NO: 1320675 - RNA, 21 nt, Human
ccccaacggcgccugcgccua

SEQ ID NO: 1320676 - RNA, 21 nt, Human
cugcaauaucuguagucugau

SEQ ID NO: 1320677 - RNA, 20 nt, Human
cuugucagagccaggacuga

SEQ ID NO: 1320678 - RNA, 21 nt, Human
gagccaggacugaagguggga

SEQ ID NO: 1320679 - RNA, 20 nt, Human
guggcgugaagcuggagggc

SEQ ID NO: 1320680 - RNA, 23 nt, Human
uaaccuacuauucacaaugacau

SEQ ID NO: 1320681 - RNA, 25 nt, Human
uauaaccuacuauucacaaugacau

SEQ ID NO: 1320682 - RNA, 26 nt, Human
ucaaaaucugcaauaucuguagucug

SEQ ID NO: 1320683 - RNA, 18 nt, Human
ucagagccaggacugaag

SEQ ID NO: 1320684 - RNA, 22 nt, Human
ugcaaaaugucacucagcagag

SEQ ID NO: 1320685 - RNA, 21 nt, Human
uguucuuguucuucaaaaucu

SEQ ID NO: 1320686 - RNA, 27 nt, Human
uucacaaugacauguagaauucucucu

SEQ ID NO: 1320687 - RNA, 21 nt, Human
uuggagacuggcucaccgcca

SEQ ID NO: 1320688 - RNA, 20 nt, Human
accuuagagccccccacccc

SEQ ID NO: 1320689 - RNA, 23 nt, Human
agagccccccaccccacugcuuc

SEQ ID NO: 1320690 - RNA, 18 nt, Human
caccccacugcuuccugc

SEQ ID NO: 1320691 - RNA, 21 nt, Human
ccccuccuccgcccccaaccu

SEQ ID NO: 1320692 - RNA, 23 nt, Human
cccuccuccgcccccaaccuuag

SEQ ID NO: 1320693 - RNA, 19 nt, Human
ccuccuccgcccccaaccu

SEQ ID NO: 1320694 - RNA, 18 nt, Human
cuuagagccccccacccc

SEQ ID NO: 1320695 - RNA, 21 nt, Human
uuagagccccccaccccacug

SEQ ID NO: 1320696 - RNA, 21 nt, Human
acccccauuggcccccuccag

SEQ ID NO: 1320697 - RNA, 22 nt, Human
acugcuuuucugugauugcuuc

SEQ ID NO: 1320698 - RNA, 21 nt, Human
ccccuccaguugaggccccgc

SEQ ID NO: 1320699 - RNA, 19 nt, Human
cccgccccgcgagcugggc

SEQ ID NO: 1320700 - RNA, 22 nt, Human
cccucguuugggacgcuagagg

SEQ ID NO: 1320701 - RNA, 23 nt, Human
cugacccccauuggcccccucca

SEQ ID NO: 1320702 - RNA, 21 nt, Human
ggucugccacucgguuccgcc

SEQ ID NO: 1320703 - RNA, 19 nt, Human
uaggaaccacggggcggag

SEQ ID NO: 1320704 - RNA, 18 nt, Human
uaucccgcccaucauccc

SEQ ID NO: 1320705 - RNA, 19 nt, Human
uccgccgcgcugaccccca

SEQ ID NO: 1320706 - RNA, 18 nt, Human
ugcuucuuuaucccgccc

SEQ ID NO: 1320707 - RNA, 18 nt, Human
uugacuagguccgacugc

SEQ ID NO: 1320708 - RNA, 20 nt, Human
aaaaugcacaucagccacaa

SEQ ID NO: 1320709 - RNA, 24 nt, Human
aagaacccaacaucaacaaaaacg

SEQ ID NO: 1320710 - RNA, 22 nt, Human
aagcaccaaaaugcacaucagc

SEQ ID NO: 1320711 - RNA, 19 nt, Human
aagcucagagcaggugcag

SEQ ID NO: 1320712 - RNA, 18 nt, Human
agcaccaaaaugcacauc

SEQ ID NO: 1320713 - RNA, 24 nt, Human
aggcuggagcaggaggaucacuug

SEQ ID NO: 1320714 - RNA, 24 nt, Human
aggucgaggcugcagugagcuaug

SEQ ID NO: 1320715 - RNA, 23 nt, Human
aucaugcacuccagccuggguga

SEQ ID NO: 1320716 - RNA, 28 nt, Human
caaagcaccaaaaugcacaucagccaca

SEQ ID NO: 1320717 - RNA, 21 nt, Human
caacaaaaacguauaaucugg

SEQ ID NO: 1320718 - RNA, 18 nt, Human
cacuccagccugggugac

SEQ ID NO: 1320719 - RNA, 22 nt, Human
cacuccagccugggugacagaa

SEQ ID NO: 1320720 - RNA, 24 nt, Human
cacuccagccugggugacagaaug

SEQ ID NO: 1320721 - RNA, 18 nt, Human
caugcacuccagccuggg

SEQ ID NO: 1320722 - RNA, 18 nt, Human
caugcacuccagccuggg

SEQ ID NO: 1320723 - RNA, 19 nt, Human
caugcacuccagccugggu

SEQ ID NO: 1320724 - RNA, 21 nt, Human
caugcacuccagccuggguga

SEQ ID NO: 1320725 - RNA, 22 nt, Human
caugcacuccagccugggugac

SEQ ID NO: 1320726 - RNA, 23 nt, Human
caugcacuccagccugggugaca

SEQ ID NO: 1320727 - RNA, 24 nt, Human
caugcacuccagccugggugacag

SEQ ID NO: 1320728 - RNA, 20 nt, Human
ccaaaaugcacaucagccac

SEQ ID NO: 1320729 - RNA, 22 nt, Human
cgguguaaaugguguuucuuuc

SEQ ID NO: 1320730 - RNA, 22 nt, Human
cuaaaccaaaugaucaggccuc

SEQ ID NO: 1320731 - RNA, 25 nt, Human
cucagagcaggugcagcacugaaaa

SEQ ID NO: 1320732 - RNA, 26 nt, Human
cugggugacagaaugagauccucucu

SEQ ID NO: 1320733 - RNA, 19 nt, Human
cuguaguccuagcuacuug

SEQ ID NO: 1320734 - RNA, 19 nt, Human
gagauccucucucucagaa

SEQ ID NO: 1320735 - RNA, 18 nt, Human
gagcaggaggaucacuug

SEQ ID NO: 1320736 - RNA, 23 nt, Human
gaggaucacuugagcccaggagg

SEQ ID NO: 1320737 - RNA, 24 nt, Human
gaucacuugagcccaggaggucga

SEQ ID NO: 1320738 - RNA, 21 nt, Human
gcagcacugaaaacaggacac

SEQ ID NO: 1320739 - RNA, 24 nt, Human
gcccaggaggucgaggcugcagug

SEQ ID NO: 1320740 - RNA, 24 nt, Human
gcuaugaucaugcacuccagccug

SEQ ID NO: 1320741 - RNA, 22 nt, Human
uaaaccaaaugaucaggccucg

SEQ ID NO: 1320742 - RNA, 19 nt, Human
uaccuaaaccaaaugauca

SEQ ID NO: 1320743 - RNA, 24 nt, Human
ucagagcaggugcagcacugaaaa

SEQ ID NO: 1320744 - RNA, 20 nt, Human
ucaugcacuccagccugggu

SEQ ID NO: 1320745 - RNA, 23 nt, Human
ucaugcacuccagccugggugac

SEQ ID NO: 1320746 - RNA, 24 nt, Human
uccagccugggugacagaaugaga

SEQ ID NO: 1320747 - RNA, 18 nt, Human
ugagaagaacccaacauc

SEQ ID NO: 1320748 - RNA, 22 nt, Human
ugagaagaacccaacaucaaca

SEQ ID NO: 1320749 - RNA, 27 nt, Human
ugagaagaacccaacaucaacaaaaag

SEQ ID NO: 1320750 - RNA, 24 nt, Human
ugagaggcuggagcaggaggauca

SEQ ID NO: 1320751 - RNA, 19 nt, Human
ugcacuccagccuggguga

SEQ ID NO: 1320752 - RNA, 21 nt, Human
ugcacuccagccugggugaca

SEQ ID NO: 1320753 - RNA, 22 nt, Human
ugcacuccagccugggugacag

SEQ ID NO: 1320754 - RNA, 23 nt, Human
ugcauacaaagcaccaaaaugca

SEQ ID NO: 1320755 - RNA, 24 nt, Human
uuaaacuugcauacaaagcaccaa

SEQ ID NO: 1320756 - RNA, 19 nt, Human
uuuaggugacagccuacag

SEQ ID NO: 1320757 - RNA, 23 nt, Human
cagggagagcugagaacucggug

SEQ ID NO: 1320758 - RNA, 24 nt, Human
ccccguucccccagugagcuuccc

SEQ ID NO: 1320759 - RNA, 18 nt, Human
ccgucugcggcgcgugag

SEQ ID NO: 1320760 - RNA, 18 nt, Human
cgucugcggcgcgugagg

SEQ ID NO: 1320761 - RNA, 20 nt, Human
cugcggcgcgugagggcagc

SEQ ID NO: 1320762 - RNA, 18 nt, Human
cugggacugugcucuucu

SEQ ID NO: 1320763 - RNA, 21 nt, Human
cuggggagccaggcguggagg

SEQ ID NO: 1320764 - RNA, 22 nt, Human
gaggaggggaggggcagucagu

SEQ ID NO: 1320765 - RNA, 26 nt, Human
gcggcgcgugagggcagcggucccgg

SEQ ID NO: 1320766 - RNA, 19 nt, Human
ucccggagagccagacccc

SEQ ID NO: 1320767 - RNA, 18 nt, Human
ucggugcggggaggcugc

SEQ ID NO: 1320768 - RNA, 18 nt, Human
aucccuuuuuuguccguu

SEQ ID NO: 1320769 - RNA, 21 nt, Human
cuugggaucccuuuuuugucc

SEQ ID NO: 1320770 - RNA, 21 nt, Human
uccuuuuggaguugaaucaga

SEQ ID NO: 1320771 - RNA, 22 nt, Human
ugaaucagacaacuugggaucc

SEQ ID NO: 1320772 - RNA, 23 nt, Human
aauuuugucuuuuauuagugaag

SEQ ID NO: 1320773 - RNA, 24 nt, Human
agaggcuuuagcuugccucacugu

SEQ ID NO: 1320774 - RNA, 21 nt, Human
caaaacaaagguaaaacaucu

SEQ ID NO: 1320775 - RNA, 21 nt, Human
gugaggaaagaggcuuuagcu

SEQ ID NO: 1320776 - RNA, 21 nt, Human
uaaaagaauagacauaaauaa

SEQ ID NO: 1320777 - RNA, 22 nt, Human
uaaauaauaauauagcaaaaca

SEQ ID NO: 1320778 - RNA, 28 nt, Human
ugccucacuguuccugaaacuagcucua

SEQ ID NO: 1320779 - RNA, 21 nt, Human
uuggugaggaaagaggcuuua

SEQ ID NO: 1320780 - RNA, 24 nt, Human
agccacaggcccuucaggaagucc

SEQ ID NO: 1320781 - RNA, 22 nt, Human
aggccagcugccccccaggaag

SEQ ID NO: 1320782 - RNA, 22 nt, Human
ccacaggcccuucaggaagucc

SEQ ID NO: 1320783 - RNA, 18 nt, Human
cugcuguggggcugcugu

SEQ ID NO: 1320784 - RNA, 19 nt, Human
gcugcuguacugagcugga

SEQ ID NO: 1320785 - RNA, 24 nt, Human
gcugcuguacugagcuggauuauu

SEQ ID NO: 1320786 - RNA, 19 nt, Human
gggucuccguggcaggcca

SEQ ID NO: 1320787 - RNA, 18 nt, Human
uccaucaucaggaacagc

SEQ ID NO: 1320788 - RNA, 23 nt, Human
ucuccguggcaggccagcugccc

SEQ ID NO: 1320789 - RNA, 22 nt, Human
uggcaggccagcugccccccuc

SEQ ID NO: 1320790 - RNA, 21 nt, Human
ugguauuccuguccucuccgu

SEQ ID NO: 1320791 - RNA, 23 nt, Human
agagggaccgcgcugccgucccu

SEQ ID NO: 1320792 - RNA, 25 nt, Human
caccuucgcccugccagccuagagg

SEQ ID NO: 1320793 - RNA, 25 nt, Human
ccccgcccuccuucguucucuucuc

SEQ ID NO: 1320794 - RNA, 22 nt, Human
ccccugccugcccccgcccucc

SEQ ID NO: 1320795 - RNA, 19 nt, Human
cccuccuucguucucuucu

SEQ ID NO: 1320796 - RNA, 18 nt, Human
cccugccugcccccgccc

SEQ ID NO: 1320797 - RNA, 21 nt, Human
cccugccugcccccgcccucc

SEQ ID NO: 1320798 - RNA, 24 nt, Human
cccugccugcccccgcccuccuuc

SEQ ID NO: 1320799 - RNA, 21 nt, Human
ccgcgcugccgucccuucccg

SEQ ID NO: 1320800 - RNA, 21 nt, Human
ccugccagccuagagggaccg

SEQ ID NO: 1320801 - RNA, 24 nt, Human
ccuucccggguggccccugccugc

SEQ ID NO: 1320802 - RNA, 27 nt, Human
cugcccccgcccuccuucguucucuuc

SEQ ID NO: 1320803 - RNA, 28 nt, Human
cugcccccgcccuccuucguucucuucu

SEQ ID NO: 1320804 - RNA, 19 nt, Human
cuucgcccugccagccuag

SEQ ID NO: 1320805 - RNA, 18 nt, Human
ucccggguggccccugcc

SEQ ID NO: 1320806 - RNA, 22 nt, Human
ugccagccuagagggaccgcgc

SEQ ID NO: 1320807 - RNA, 20 nt, Human
ugccugcccccgcccuccuu

SEQ ID NO: 1320808 - RNA, 21 nt, Human
uucccggguggccccugccug

SEQ ID NO: 1320809 - RNA, 23 nt, Human
aaaaggagcaggcccaggggacu

SEQ ID NO: 1320810 - RNA, 22 nt, Human
aagaggcagaccuaugaccaaa

SEQ ID NO: 1320811 - RNA, 27 nt, Human
agaaaagaggcagaccuaugaccaaaa

SEQ ID NO: 1320812 - RNA, 18 nt, Human
agaaagaaaagaggcaga

SEQ ID NO: 1320813 - RNA, 21 nt, Human
agaccuaugaccaaaaaccug

SEQ ID NO: 1320814 - RNA, 21 nt, Human
aggagcaggcccaggggacuc

SEQ ID NO: 1320815 - RNA, 19 nt, Human
cacagagccaggaaauaag

SEQ ID NO: 1320816 - RNA, 25 nt, Human
cagucagaaagaaaagaggcagacc

SEQ ID NO: 1320817 - RNA, 24 nt, Human
cccguggucagagauggaaggaac

SEQ ID NO: 1320818 - RNA, 20 nt, Human
ccuaugaccaaaaaccugga

SEQ ID NO: 1320819 - RNA, 19 nt, Human
cuccgcccccucgagcuuc

SEQ ID NO: 1320820 - RNA, 20 nt, Human
cuuccugcugucccugccac

SEQ ID NO: 1320821 - RNA, 21 nt, Human
cuuccugcugucccugccaca

SEQ ID NO: 1320822 - RNA, 22 nt, Human
gagauggaaggaacccccaggg

SEQ ID NO: 1320823 - RNA, 20 nt, Human
gagcaggcccaggggacucc

SEQ ID NO: 1320824 - RNA, 21 nt, Human
gcccccucgagcuuccugcug

SEQ ID NO: 1320825 - RNA, 20 nt, Human
gccccguggucagagaugga

SEQ ID NO: 1320826 - RNA, 21 nt, Human
ucccugccacagagccaggaa

SEQ ID NO: 1320827 - RNA, 18 nt, Human
ugaccaaaaaccuggacc

SEQ ID NO: 1320828 - RNA, 23 nt, Human
ugccacagagccaggaaauaaga

SEQ ID NO: 1320829 - RNA, 25 nt, Human
agucccgccgucuaugucgcccucu

SEQ ID NO: 1320830 - RNA, 23 nt, Human
caccgcguggccgauuguggggc

SEQ ID NO: 1320831 - RNA, 19 nt, Human
cgccaccgcguggccgauu

SEQ ID NO: 1320832 - RNA, 21 nt, Human
cggcuggagucccgccgucua

SEQ ID NO: 1320833 - RNA, 20 nt, Human
cuuagcgccaccgcguggcc

SEQ ID NO: 1320834 - RNA, 21 nt, Human
gcuuagcgccaccgcguggcc

SEQ ID NO: 1320835 - RNA, 18 nt, Human
ggcuggagucccgccguc

SEQ ID NO: 1320836 - RNA, 20 nt, Human
gggcugcggcgggcgugcuu

SEQ ID NO: 1320837 - RNA, 20 nt, Human
ucccgccgucuaugucgccc

SEQ ID NO: 1320838 - RNA, 24 nt, Human
uuggcggcuggagucccgccgucu

SEQ ID NO: 1320839 - RNA, 21 nt, Human
aaagccaacaauguuucuaag

SEQ ID NO: 1320840 - RNA, 20 nt, Human
aauguuucuaagacaagaug

SEQ ID NO: 1320841 - RNA, 20 nt, Human
agacaagaugagguuacggg

SEQ ID NO: 1320842 - RNA, 22 nt, Human
augauucaaaaugucacaaagu

SEQ ID NO: 1320843 - RNA, 24 nt, Human
cuuaagauaucugcaaagccaaca

SEQ ID NO: 1320844 - RNA, 20 nt, Human
uaaauacugcaacuucaugu

SEQ ID NO: 1320845 - RNA, 20 nt, Human
uaagaaaaauaaaaaagcaa

SEQ ID NO: 1320846 - RNA, 22 nt, Human
uaauuuauuauuuggaacccac

SEQ ID NO: 1320847 - RNA, 24 nt, Human
uacugcaacuucauguuuuauaga

SEQ ID NO: 1320848 - RNA, 19 nt, Human
uaggcauuaauuuuuaaau

SEQ ID NO: 1320849 - RNA, 18 nt, Human
ucauguuuuauagaaacu

SEQ ID NO: 1320850 - RNA, 18 nt, Human
ugacaguuuugcuguuuu

SEQ ID NO: 1320851 - RNA, 20 nt, Human
guuuaacuucucugaggcuc

SEQ ID NO: 1320852 - RNA, 23 nt, Human
ugucaacauguacuucguacagc

SEQ ID NO: 1320853 - RNA, 20 nt, Human
uugacucuacccccugacau

SEQ ID NO: 1320854 - RNA, 24 nt, Human
cuccacccucaauccaccagaacc

SEQ ID NO: 1320855 - RNA, 19 nt, Human
cugcuccucuaccugcucc

SEQ ID NO: 1320856 - RNA, 20 nt, Human
ggcuccggcugugggggcug

SEQ ID NO: 1320857 - RNA, 20 nt, Human
ggcuccggcugugggggcug

SEQ ID NO: 1320858 - RNA, 27 nt, Human
gggggcuguggcuccggcugugggggc

SEQ ID NO: 1320859 - RNA, 24 nt, Human
uacacugcuccucuaccugcucca

SEQ ID NO: 1320860 - RNA, 20 nt, Human
ucuaccugcuccacccucaa

SEQ ID NO: 1320861 - RNA, 21 nt, Human
uggcuccggcugugggggcug

SEQ ID NO: 1320862 - RNA, 21 nt, Human
uggcuccggcugugggggcug

SEQ ID NO: 1320863 - RNA, 20 nt, Human
ugggcugcuguggcuguucc

SEQ ID NO: 1320864 - RNA, 24 nt, Human
aggcgcucggcacgcugggaaaug

SEQ ID NO: 1320865 - RNA, 20 nt, Human
aucaaaggcagcugguaaca

SEQ ID NO: 1320866 - RNA, 18 nt, Human
cagcugguaacaagucau

SEQ ID NO: 1320867 - RNA, 21 nt, Human
cccggguccccagcugccggg

SEQ ID NO: 1320868 - RNA, 20 nt, Human
cccuggaggcuaagggaaug

SEQ ID NO: 1320869 - RNA, 20 nt, Human
ggcaucaaaggcagcuggua

SEQ ID NO: 1320870 - RNA, 22 nt, Human
uaagcccggguccccagcugcc

SEQ ID NO: 1320871 - RNA, 22 nt, Human
ucaaaggcagcugguaacaagu

SEQ ID NO: 1320872 - RNA, 19 nt, Human
ugccugaguagaugugaag

SEQ ID NO: 1320873 - RNA, 19 nt, Human
ugccugaguagaugugaag

SEQ ID NO: 1320874 - RNA, 18 nt, Human
ugguuuccggguuguccc

SEQ ID NO: 1320875 - RNA, 24 nt, Human
aaggugcugagaucacagguguga

SEQ ID NO: 1320876 - RNA, 19 nt, Human
aaguagcugggaaugcagg

SEQ ID NO: 1320877 - RNA, 21 nt, Human
acaggugcccaccaccacacc

SEQ ID NO: 1320878 - RNA, 23 nt, Human
accaaucagguacuggaggugaa

SEQ ID NO: 1320879 - RNA, 22 nt, Human
accauagggaaaugucuucuca

SEQ ID NO: 1320880 - RNA, 18 nt, Human
accauguuggccaggcug

SEQ ID NO: 1320881 - RNA, 24 nt, Human
acucuguugcccaggcuggagugc

SEQ ID NO: 1320882 - RNA, 18 nt, Human
agaacucaaaggacagga

SEQ ID NO: 1320883 - RNA, 19 nt, Human
agaucacaggugugagcca

SEQ ID NO: 1320884 - RNA, 24 nt, Human
agcugggaaugcaggggcgcgcca

SEQ ID NO: 1320885 - RNA, 18 nt, Human
aggaaggagaugaguugg

SEQ ID NO: 1320886 - RNA, 21 nt, Human
aggaaggcagguuugggcugg

SEQ ID NO: 1320887 - RNA, 25 nt, Human
aggcuggagugcaguggcaugaucu

SEQ ID NO: 1320888 - RNA, 24 nt, Human
agggauucuccugccucagccucc

SEQ ID NO: 1320889 - RNA, 22 nt, Human
agguaauccgccugccucggcc

SEQ ID NO: 1320890 - RNA, 24 nt, Human
agguaauccgccugccucggccuc

SEQ ID NO: 1320891 - RNA, 26 nt, Human
aggugcugagaucacaggugugagcc

SEQ ID NO: 1320892 - RNA, 18 nt, Human
aguaggugggauuacagg

SEQ ID NO: 1320893 - RNA, 18 nt, Human
agugcaguggcaugaucu

SEQ ID NO: 1320894 - RNA, 19 nt, Human
agugcaguggcaugaucuc

SEQ ID NO: 1320895 - RNA, 21 nt, Human
agugcaguggcaugaucucug

SEQ ID NO: 1320896 - RNA, 18 nt, Human
augggguuucaccauguu

SEQ ID NO: 1320897 - RNA, 22 nt, Human
augggguuucaccauguuggcc

SEQ ID NO: 1320898 - RNA, 23 nt, Human
augggguuucaccauguuggcca

SEQ ID NO: 1320899 - RNA, 24 nt, Human
augggguuucaccauguuggccag

SEQ ID NO: 1320900 - RNA, 20 nt, Human
caaccuccacuuccugggcu

SEQ ID NO: 1320901 - RNA, 23 nt, Human
caaccuccacuuccugggcucaa

SEQ ID NO: 1320902 - RNA, 22 nt, Human
caagccccuccagagaagcaag

SEQ ID NO: 1320903 - RNA, 22 nt, Human
caagggauucuccugccucagc

SEQ ID NO: 1320904 - RNA, 24 nt, Human
caaggugcugagaucacaggugug

SEQ ID NO: 1320905 - RNA, 22 nt, Human
caagugauucuccugccucagc

SEQ ID NO: 1320906 - RNA, 19 nt, Human
cacagaacucaaaggacag

SEQ ID NO: 1320907 - RNA, 19 nt, Human
cacaggugugagccaccac

SEQ ID NO: 1320908 - RNA, 24 nt, Human
caccacaccuggcuaauuuuugua

SEQ ID NO: 1320909 - RNA, 21 nt, Human
caccauguuggccaggcuggu

SEQ ID NO: 1320910 - RNA, 24 nt, Human
caccauguuggccaggcuggucuc

SEQ ID NO: 1320911 - RNA, 27 nt, Human
caccauguuggccaggcuggucucaaa

SEQ ID NO: 1320912 - RNA, 23 nt, Human
cacugcaaccuccacuuccuggg

SEQ ID NO: 1320913 - RNA, 20 nt, Human
cacuggacauuucaagcccc

SEQ ID NO: 1320914 - RNA, 24 nt, Human
caggugcccaccaccacaccuggc

SEQ ID NO: 1320915 - RNA, 19 nt, Human
cagguucaagggauucucc

SEQ ID NO: 1320916 - RNA, 24 nt, Human
cauguuggccaggcuggucucaaa

SEQ ID NO: 1320917 - RNA, 20 nt, Human
cauuguaacacagacaaagc

SEQ ID NO: 1320918 - RNA, 21 nt, Human
ccaaggugcugagaucacagg

SEQ ID NO: 1320919 - RNA, 24 nt, Human
ccaaggugcugagaucacaggugu

SEQ ID NO: 1320920 - RNA, 24 nt, Human
ccaaguagcugggaaugcaggggc

SEQ ID NO: 1320921 - RNA, 21 nt, Human
ccagggggcaacgugugccag

SEQ ID NO: 1320922 - RNA, 23 nt, Human
cccaaguagcugggaaugcaggg

SEQ ID NO: 1320923 - RNA, 23 nt, Human
cccgaguaggugggauuacaggu

SEQ ID NO: 1320924 - RNA, 18 nt, Human
ccgcaggguuggcaggcc

SEQ ID NO: 1320925 - RNA, 22 nt, Human
ccuccacuuccugggcucaagu

SEQ ID NO: 1320926 - RNA, 23 nt, Human
ccugaccuaagguaauccgccug

SEQ ID NO: 1320927 - RNA, 23 nt, Human
ccugccucagccucccaaguagc

SEQ ID NO: 1320928 - RNA, 24 nt, Human
ccugccucagccucccgaguaggu

SEQ ID NO: 1320929 - RNA, 23 nt, Human
ccugggcucaagugauucuccuc

SEQ ID NO: 1320930 - RNA, 23 nt, Human
ccugggcucaagugauucuccug

SEQ ID NO: 1320931 - RNA, 21 nt, Human
cgacagagaggggcaggguac

SEQ ID NO: 1320932 - RNA, 23 nt, Human
cuaauuuuuguauuuuuaguaga

SEQ ID NO: 1320933 - RNA, 23 nt, Human
cucaagugauucuccugccucag

SEQ ID NO: 1320934 - RNA, 24 nt, Human
cucaagugauucuccugccucagc

SEQ ID NO: 1320935 - RNA, 24 nt, Human
cucacugcaaccuccacuuccugg

SEQ ID NO: 1320936 - RNA, 21 nt, Human
cucccaaggugcugagaucac

SEQ ID NO: 1320937 - RNA, 26 nt, Human
cuccugaccuaagguaauccgccugc

SEQ ID NO: 1320938 - RNA, 24 nt, Human
cugcaaccuccacuuccugggcuc

SEQ ID NO: 1320939 - RNA, 23 nt, Human
cugccucagccucccaaguagcu

SEQ ID NO: 1320940 - RNA, 23 nt, Human
cugccucggccucccaaggugcu

SEQ ID NO: 1320941 - RNA, 24 nt, Human
cuggggaacccacuucccagguuc

SEQ ID NO: 1320942 - RNA, 26 nt, Human
cuuacugugcugggaguacuugugga

SEQ ID NO: 1320943 - RNA, 24 nt, Human
cuucccagguucaagggauucucc

SEQ ID NO: 1320944 - RNA, 24 nt, Human
cuuccugggcucaagugauucucc

SEQ ID NO: 1320945 - RNA, 19 nt, Human
cuuguggagugcgggcugu

SEQ ID NO: 1320946 - RNA, 20 nt, Human
cuuguggagugcgggcugug

SEQ ID NO: 1320947 - RNA, 20 nt, Human
cuuuuguauuuuuaguggag

SEQ ID NO: 1320948 - RNA, 19 nt, Human
gacacagaacucaaaggac

SEQ ID NO: 1320949 - RNA, 21 nt, Human
gacaggaaggagaugaguugg

SEQ ID NO: 1320950 - RNA, 24 nt, Human
gacaggggucccugccagggaugc

SEQ ID NO: 1320951 - RNA, 19 nt, Human
gacagugucaggcaaggac

SEQ ID NO: 1320952 - RNA, 24 nt, Human
gaccuaagguaauccgccugccuc

SEQ ID NO: 1320953 - RNA, 20 nt, Human
gagaugaguuggaggcuggg

SEQ ID NO: 1320954 - RNA, 18 nt, Human
gagaugggguuucaccau

SEQ ID NO: 1320955 - RNA, 24 nt, Human
gagaugggguuucaccauguuggc

SEQ ID NO: 1320956 - RNA, 23 nt, Human
gagcuaggaaggcagguuugggc

SEQ ID NO: 1320957 - RNA, 20 nt, Human
gaggcugggacagggguccc

SEQ ID NO: 1320958 - RNA, 19 nt, Human
gaguuggaggcugggacag

SEQ ID NO: 1320959 - RNA, 18 nt, Human
gaucacaggugugagcca

SEQ ID NO: 1320960 - RNA, 21 nt, Human
gauucuccugccucagccucc

SEQ ID NO: 1320961 - RNA, 20 nt, Human
gcccaggcuggagugcagug

SEQ ID NO: 1320962 - RNA, 24 nt, Human
gcccaggcuggagugcaguggcau

SEQ ID NO: 1320963 - RNA, 21 nt, Human
gccugguuuggggaauguucg

SEQ ID NO: 1320964 - RNA, 25 nt, Human
gcuggagugcaguggcaugaucucu

SEQ ID NO: 1320965 - RNA, 24 nt, Human
gggauucuccugccucagccuccc

SEQ ID NO: 1320966 - RNA, 22 nt, Human
gggcucaagugauucuccugcc

SEQ ID NO: 1320967 - RNA, 22 nt, Human
gggguuucaccauguuggccag

SEQ ID NO: 1320968 - RNA, 22 nt, Human
ggguuucaccauguuggccagg

SEQ ID NO: 1320969 - RNA, 23 nt, Human
guagagaugggguuucaccaugu

SEQ ID NO: 1320970 - RNA, 24 nt, Human
gugauucuccugccucagccuccc

SEQ ID NO: 1320971 - RNA, 21 nt, Human
gugcugagaucacagguguga

SEQ ID NO: 1320972 - RNA, 21 nt, Human
gugugagccaccacgcugggc

SEQ ID NO: 1320973 - RNA, 22 nt, Human
uaacuuuuguauuuuuagugga

SEQ ID NO: 1320974 - RNA, 24 nt, Human
uaauuuuuguauuuuuaguagaga

SEQ ID NO: 1320975 - RNA, 22 nt, Human
uacaggugcccaccaccacacc

SEQ ID NO: 1320976 - RNA, 24 nt, Human
uacucuguugcccaggcuggagug

SEQ ID NO: 1320977 - RNA, 22 nt, Human
uagagaugggguuucaccaugu

SEQ ID NO: 1320978 - RNA, 18 nt, Human
uagcauuguaacacagac

SEQ ID NO: 1320979 - RNA, 22 nt, Human
uagcuacgacagagaggggcag

SEQ ID NO: 1320980 - RNA, 25 nt, Human
uaggaaggcagguuugggcuggaga

SEQ ID NO: 1320981 - RNA, 24 nt, Human
uaguagagaugggguuucaccaug

SEQ ID NO: 1320982 - RNA, 26 nt, Human
uaguagagaugggguuucaccauguu

SEQ ID NO: 1320983 - RNA, 19 nt, Human
uauguguuucucaguugga

SEQ ID NO: 1320984 - RNA, 20 nt, Human
uauguuccaaaggacugacg

SEQ ID NO: 1320985 - RNA, 24 nt, Human
ucacugcaaccuccacuuccuggg

SEQ ID NO: 1320986 - RNA, 25 nt, Human
ucacugcaaccuccacuuccugggc

SEQ ID NO: 1320987 - RNA, 27 nt, Human
ucacugcaaccuccacuuccugggcuc

SEQ ID NO: 1320988 - RNA, 18 nt, Human
ucagccucccaaguagcu

SEQ ID NO: 1320989 - RNA, 20 nt, Human
ucagccucccaaguagcugg

SEQ ID NO: 1320990 - RNA, 19 nt, Human
uccaaaggacugacggacc

SEQ ID NO: 1320991 - RNA, 22 nt, Human
uccagagaagcaagucuuacug

SEQ ID NO: 1320992 - RNA, 23 nt, Human
ucccaaggugcugagaucacagg

SEQ ID NO: 1320993 - RNA, 24 nt, Human
ucccagguagacagugguugaggc

SEQ ID NO: 1320994 - RNA, 21 nt, Human
ucccagguucaagggauucuc

SEQ ID NO: 1320995 - RNA, 24 nt, Human
ucccagguucaagggauucuccug

SEQ ID NO: 1320996 - RNA, 23 nt, Human
ucccgaguaggugggauuacagg

SEQ ID NO: 1320997 - RNA, 24 nt, Human
ucccgaguaggugggauuacaggu

SEQ ID NO: 1320998 - RNA, 19 nt, Human
uccugggcucaagugauuc

SEQ ID NO: 1320999 - RNA, 20 nt, Human
uccugggcucaagugauucu

SEQ ID NO: 1321000 - RNA, 21 nt, Human
uccugggcucaagugauucuc

SEQ ID NO: 1321001 - RNA, 22 nt, Human
uccugggcucaagugauucucc

SEQ ID NO: 1321002 - RNA, 24 nt, Human
uccugggcucaagugauucuccug

SEQ ID NO: 1321003 - RNA, 18 nt, Human
ucggccucccaaggugcu

SEQ ID NO: 1321004 - RNA, 22 nt, Human
ucuagacuccauccuccauccc

SEQ ID NO: 1321005 - RNA, 19 nt, Human
ucuccugccucagccuccc

SEQ ID NO: 1321006 - RNA, 26 nt, Human
ucuccugccucagccucccaaguagc

SEQ ID NO: 1321007 - RNA, 18 nt, Human
ucuguugcccaggcugga

SEQ ID NO: 1321008 - RNA, 24 nt, Human
ucuguugcccaggcuggagugcag

SEQ ID NO: 1321009 - RNA, 23 nt, Human
ucuuacucuguugcccaggcugg

SEQ ID NO: 1321010 - RNA, 24 nt, Human
ucuuacucuguugcccaggcugga

SEQ ID NO: 1321011 - RNA, 19 nt, Human
ugacacagaacucaaagga

SEQ ID NO: 1321012 - RNA, 22 nt, Human
ugaccgugauugccugggauga

SEQ ID NO: 1321013 - RNA, 18 nt, Human
ugacguuggacucauugg

SEQ ID NO: 1321014 - RNA, 22 nt, Human
ugagaucacaggugugagccac

SEQ ID NO: 1321015 - RNA, 24 nt, Human
ugagaucacaggugugagccacca

SEQ ID NO: 1321016 - RNA, 23 nt, Human
ugaucucugcucacugcaaccuc

SEQ ID NO: 1321017 - RNA, 20 nt, Human
ugauucuccugccucagccu

SEQ ID NO: 1321018 - RNA, 25 nt, Human
ugcaaccuccacuuccugggcucaa

SEQ ID NO: 1321019 - RNA, 18 nt, Human
ugcccaggcuggagugca

SEQ ID NO: 1321020 - RNA, 21 nt, Human
ugcccaggcuggagugcagug

SEQ ID NO: 1321021 - RNA, 22 nt, Human
ugcccaggcuggagugcagugg

SEQ ID NO: 1321022 - RNA, 24 nt, Human
ugcccaggcuggagugcaguggca

SEQ ID NO: 1321023 - RNA, 21 nt, Human
ugcccugggcuuuaauuauuu

SEQ ID NO: 1321024 - RNA, 24 nt, Human
ugccucagccucccaaguagcugg

SEQ ID NO: 1321025 - RNA, 24 nt, Human
ugccucagccucccgaguaggugg

SEQ ID NO: 1321026 - RNA, 21 nt, Human
ugccucggccucccaaggugc

SEQ ID NO: 1321027 - RNA, 24 nt, Human
ugccucggccucccaaggugcuga

SEQ ID NO: 1321028 - RNA, 22 nt, Human
ugccugggaugagaguggagac

SEQ ID NO: 1321029 - RNA, 21 nt, Human
ugccugguuuggggaauguuc

SEQ ID NO: 1321030 - RNA, 24 nt, Human
ugcugagaucacaggugugagcca

SEQ ID NO: 1321031 - RNA, 27 nt, Human
uggagacucgggcuugggaggcauccc

SEQ ID NO: 1321032 - RNA, 24 nt, Human
uggagucuuacucuguugcccagg

SEQ ID NO: 1321033 - RNA, 19 nt, Human
uggagugcaguggcaugau

SEQ ID NO: 1321034 - RNA, 22 nt, Human
uggagugcaguggcaugaucuc

SEQ ID NO: 1321035 - RNA, 23 nt, Human
uggagugcaguggcaugaucucu

SEQ ID NO: 1321036 - RNA, 24 nt, Human
uggagugcaguggcaugaucucug

SEQ ID NO: 1321037 - RNA, 24 nt, Human
uggccaggcuggucucaaacuccu

SEQ ID NO: 1321038 - RNA, 24 nt, Human
ugggaaugcaggggcgcgccacca

SEQ ID NO: 1321039 - RNA, 20 nt, Human
ugggaugagaguggagacgg

SEQ ID NO: 1321040 - RNA, 21 nt, Human
ugggauuacaggugcccacca

SEQ ID NO: 1321041 - RNA, 24 nt, Human
ugggauuacaggugcccaccacca

SEQ ID NO: 1321042 - RNA, 18 nt, Human
ugggcucaagugauucuc

SEQ ID NO: 1321043 - RNA, 24 nt, Human
ugggcucaagugauucuccugccu

SEQ ID NO: 1321044 - RNA, 20 nt, Human
ugggcuggagacucgggcuu

SEQ ID NO: 1321045 - RNA, 24 nt, Human
ugggguuucaccauguuggccagg

SEQ ID NO: 1321046 - RNA, 20 nt, Human
ugggucuggagcuaggaagg

SEQ ID NO: 1321047 - RNA, 21 nt, Human
uguauuuuuaguagagauggg

SEQ ID NO: 1321048 - RNA, 22 nt, Human
ugugacacagaacucaaaggac

SEQ ID NO: 1321049 - RNA, 21 nt, Human
uguuuuuuaaagauggagucu

SEQ ID NO: 1321050 - RNA, 24 nt, Human
uuacucuguugcccaggcuggagu

SEQ ID NO: 1321051 - RNA, 18 nt, Human
uuaguagagaugggguuu

SEQ ID NO: 1321052 - RNA, 22 nt, Human
uuaguagagaugggguuucacc

SEQ ID NO: 1321053 - RNA, 24 nt, Human
uuaguagagaugggguuucaccau

SEQ ID NO: 1321054 - RNA, 23 nt, Human
uucaagggauucuccugccucag

SEQ ID NO: 1321055 - RNA, 18 nt, Human
uucuucuuguggccucug

SEQ ID NO: 1321056 - RNA, 19 nt, Human
uugauauguguuucucagu

SEQ ID NO: 1321057 - RNA, 19 nt, Human
uugcuugggacccaggggg

SEQ ID NO: 1321058 - RNA, 20 nt, Human
uuggaggcugggacaggggu

SEQ ID NO: 1321059 - RNA, 21 nt, Human
uugggaggcaucccagguaga

SEQ ID NO: 1321060 - RNA, 23 nt, Human
uuguauuuuuaguagagaugggg

SEQ ID NO: 1321061 - RNA, 22 nt, Human
uuuaaagauggagucuuacucu

SEQ ID NO: 1321062 - RNA, 24 nt, Human
uuucaccauguuggccaggcuggu

SEQ ID NO: 1321063 - RNA, 20 nt, Human
uuuuguauuuuuaguagaga

SEQ ID NO: 1321064 - RNA, 24 nt, Human
uuuuuaguagagaugggguuucac

SEQ ID NO: 1321065 - RNA, 21 nt, Human
uuuuucuucuuguggccucug

SEQ ID NO: 1321066 - RNA, 20 nt, Human
uuuuuguauuuuuaguagag

SEQ ID NO: 1321067 - RNA, 19 nt, Human
aaacacagccaaaagcucc

SEQ ID NO: 1321068 - RNA, 21 nt, Human
aaaggagcuuuguucugauua

SEQ ID NO: 1321069 - RNA, 18 nt, Human
aacacagccaaaagcucc

SEQ ID NO: 1321070 - RNA, 21 nt, Human
aagcuccacuuccaagaugau

SEQ ID NO: 1321071 - RNA, 18 nt, Human
aagcuugcagcuuacaag

SEQ ID NO: 1321072 - RNA, 25 nt, Human
acaaaagaaaauuauucuucucuca

SEQ ID NO: 1321073 - RNA, 21 nt, Human
acacagugaaacaaaagaaaa

SEQ ID NO: 1321074 - RNA, 21 nt, Human
accacuaugcuuucuaaccuu

SEQ ID NO: 1321075 - RNA, 19 nt, Human
agaaaauuauucuucucuc

SEQ ID NO: 1321076 - RNA, 23 nt, Human
aguacacagugaaacaaaagaaa

SEQ ID NO: 1321077 - RNA, 20 nt, Human
augcuuucaauauuuucagc

SEQ ID NO: 1321078 - RNA, 20 nt, Human
cacguacauaaugcccuaug

SEQ ID NO: 1321079 - RNA, 19 nt, Human
ccaaaagcuccacuuccaa

SEQ ID NO: 1321080 - RNA, 22 nt, Human
cuaaccuuguaaacacagccaa

SEQ ID NO: 1321081 - RNA, 23 nt, Human
cuuccaagaugauccaaaauugc

SEQ ID NO: 1321082 - RNA, 23 nt, Human
guaaacacagccaaaagcuccac

SEQ ID NO: 1321083 - RNA, 19 nt, Human
uaaccuuguaaacacagcc

SEQ ID NO: 1321084 - RNA, 18 nt, Human
ucuaaccuuguaaacaca

SEQ ID NO: 1321085 - RNA, 18 nt, Human
uguaaacacagccaaaag

SEQ ID NO: 1321086 - RNA, 24 nt, Human
aaagugcugagauuauaggcguga

SEQ ID NO: 1321087 - RNA, 24 nt, Human
aagcaacacagaccacaauuucua

SEQ ID NO: 1321088 - RNA, 21 nt, Human
acagaaaaaaacuugucaaca

SEQ ID NO: 1321089 - RNA, 18 nt, Human
accauguuggccaggcug

SEQ ID NO: 1321090 - RNA, 19 nt, Human
acccuguaagaagggcuga

SEQ ID NO: 1321091 - RNA, 18 nt, Human
acgggguuucaccauguu

SEQ ID NO: 1321092 - RNA, 23 nt, Human
acgggguuucaccauguuggcca

SEQ ID NO: 1321093 - RNA, 24 nt, Human
acgggguuucaccauguuggccag

SEQ ID NO: 1321094 - RNA, 26 nt, Human
acuuuguaauuaacuucauggccagu

SEQ ID NO: 1321095 - RNA, 23 nt, Human
agaaaagaaucuccccgcaugaa

SEQ ID NO: 1321096 - RNA, 18 nt, Human
agaccgccaccacgcccg

SEQ ID NO: 1321097 - RNA, 26 nt, Human
agcgaaaaaaaagagaaaaaaaaucu

SEQ ID NO: 1321098 - RNA, 18 nt, Human
aggcgugagucaccgcgc

SEQ ID NO: 1321099 - RNA, 18 nt, Human
aguagcugggauuacaga

SEQ ID NO: 1321100 - RNA, 18 nt, Human
auuauuuucacagacuuc

SEQ ID NO: 1321101 - RNA, 24 nt, Human
caaagugcugagauuauaggcgug

SEQ ID NO: 1321102 - RNA, 21 nt, Human
caacacaggaaaaagcuaaac

SEQ ID NO: 1321103 - RNA, 28 nt, Human
caagcgauucuugugccucagccuccug

SEQ ID NO: 1321104 - RNA, 20 nt, Human
cacaggaaaaagcuaaacag

SEQ ID NO: 1321105 - RNA, 21 nt, Human
caccauguuggccaggcuggu

SEQ ID NO: 1321106 - RNA, 22 nt, Human
caccauguuggccaggcugguc

SEQ ID NO: 1321107 - RNA, 27 nt, Human
caccauguuggccaggcuggucuagaa

SEQ ID NO: 1321108 - RNA, 25 nt, Human
cagaaaaagagcgaaaaaaaagaga

SEQ ID NO: 1321109 - RNA, 20 nt, Human
cagccuccugaguagcuggg

SEQ ID NO: 1321110 - RNA, 24 nt, Human
cauguuggccaggcuggucuagaa

SEQ ID NO: 1321111 - RNA, 19 nt, Human
cauuuuguugucaaguauc

SEQ ID NO: 1321112 - RNA, 22 nt, Human
ccaaagugcugagauuauaggc

SEQ ID NO: 1321113 - RNA, 22 nt, Human
ccaaagugcugagauuauaggc

SEQ ID NO: 1321114 - RNA, 24 nt, Human
ccaaagugcugagauuauaggcgu

SEQ ID NO: 1321115 - RNA, 22 nt, Human
ccaaauucuuccaguuuccuca

SEQ ID NO: 1321116 - RNA, 19 nt, Human
ccaagcaacacagaccaca

SEQ ID NO: 1321117 - RNA, 23 nt, Human
ccauaaauuuaaauaucucuaau

SEQ ID NO: 1321118 - RNA, 20 nt, Human
cccggguucaagcgauucuu

SEQ ID NO: 1321119 - RNA, 23 nt, Human
cccguggcggcugggccuuuccu

SEQ ID NO: 1321120 - RNA, 24 nt, Human
ccgccucccggguucaagcgauuc

SEQ ID NO: 1321121 - RNA, 24 nt, Human
ccgccucugccucccaaagugcug

SEQ ID NO: 1321122 - RNA, 19 nt, Human
ccggcgcgcgggcggccgc

SEQ ID NO: 1321123 - RNA, 22 nt, Human
ccucccggguucaagcgauucu

SEQ ID NO: 1321124 - RNA, 19 nt, Human
ccugaguagcugggauuac

SEQ ID NO: 1321125 - RNA, 20 nt, Human
cgauucuugugccucagccu

SEQ ID NO: 1321126 - RNA, 20 nt, Human
cgcgcgggcggccgcgaccg

SEQ ID NO: 1321127 - RNA, 19 nt, Human
cggcacagaaaauaugugc

SEQ ID NO: 1321128 - RNA, 24 nt, Human
cggggucuggcucugucgcccagg

SEQ ID NO: 1321129 - RNA, 18 nt, Human
cuagaacuccgccucugc

SEQ ID NO: 1321130 - RNA, 24 nt, Human
cucagccuccugaguagcugggau

SEQ ID NO: 1321131 - RNA, 19 nt, Human
cugaauucuacaugccgac

SEQ ID NO: 1321132 - RNA, 19 nt, Human
cugggauuacagagaccgc

SEQ ID NO: 1321133 - RNA, 22 nt, Human
cuucagaaaaagagcgaaaaaa

SEQ ID NO: 1321134 - RNA, 25 nt, Human
cuugugccucagccuccugaguagc

SEQ ID NO: 1321135 - RNA, 25 nt, Human
gaguagcugggauuacagagaccgc

SEQ ID NO: 1321136 - RNA, 22 nt, Human
gauuauaggcgugagucaccgc

SEQ ID NO: 1321137 - RNA, 21 nt, Human
gauucuugugccucagccucc

SEQ ID NO: 1321138 - RNA, 23 nt, Human
gcaacacagaccacaauuucuac

SEQ ID NO: 1321139 - RNA, 23 nt, Human
gcccggcuaauuuuuuguauuuu

SEQ ID NO: 1321140 - RNA, 20 nt, Human
gccgccggcgcgcgggcggc

SEQ ID NO: 1321141 - RNA, 23 nt, Human
gccucugccucccaaagugcuga

SEQ ID NO: 1321142 - RNA, 23 nt, Human
gcgauucuugugccucagccucc

SEQ ID NO: 1321143 - RNA, 30 nt, Human
gcucugucgcccaggcuggagggcaauggg

SEQ ID NO: 1321144 - RNA, 18 nt, Human
ggaggcggggcccagggg

SEQ ID NO: 1321145 - RNA, 24 nt, Human
ggaggcggggcccaggggcggguc

SEQ ID NO: 1321146 - RNA, 19 nt, Human
ggcucugucgcccaggcug

SEQ ID NO: 1321147 - RNA, 19 nt, Human
gggccgccggcgcgcgggc

SEQ ID NO: 1321148 - RNA, 21 nt, Human
gggcgggucgagggcggcccg

SEQ ID NO: 1321149 - RNA, 23 nt, Human
gggguuucaccauguuggccagg

SEQ ID NO: 1321150 - RNA, 23 nt, Human
ggguacuucgggaguuaaaaaca

SEQ ID NO: 1321151 - RNA, 22 nt, Human
ggguuucaccauguuggccagg

SEQ ID NO: 1321152 - RNA, 23 nt, Human
guagcugggauuacagagaccgc

SEQ ID NO: 1321153 - RNA, 23 nt, Human
gucaaguauccagcuggguacuu

SEQ ID NO: 1321154 - RNA, 22 nt, Human
gugccucagccuccugaguagc

SEQ ID NO: 1321155 - RNA, 26 nt, Human
uaaaauucaaagaaaagaaucucccc

SEQ ID NO: 1321156 - RNA, 21 nt, Human
uaagaagggcugaauucuaca

SEQ ID NO: 1321157 - RNA, 22 nt, Human
uaauuuuuuguauuuuuaguag

SEQ ID NO: 1321158 - RNA, 23 nt, Human
uaauuuuuuguauuuuuaguaga

SEQ ID NO: 1321159 - RNA, 22 nt, Human
uacagagaccgccaccacgccc

SEQ ID NO: 1321160 - RNA, 22 nt, Human
uagaaacgggguuucaccaugu

SEQ ID NO: 1321161 - RNA, 24 nt, Human
uaguagaaacgggguuucaccaug

SEQ ID NO: 1321162 - RNA, 25 nt, Human
uaguagaaacgggguuucaccaugu

SEQ ID NO: 1321163 - RNA, 21 nt, Human
ucaaguauccagcuggguacu

SEQ ID NO: 1321164 - RNA, 20 nt, Human
ucagccuccugaguagcugg

SEQ ID NO: 1321165 - RNA, 24 nt, Human
ucccaaagugcugagauuauaggc

SEQ ID NO: 1321166 - RNA, 20 nt, Human
ucccggguucaagcgauucu

SEQ ID NO: 1321167 - RNA, 20 nt, Human
ucccggguucaagcgauucu

SEQ ID NO: 1321168 - RNA, 22 nt, Human
ucccggguucaagcgauucuug

SEQ ID NO: 1321169 - RNA, 24 nt, Human
uccggcaaccgcgcggccccgccu

SEQ ID NO: 1321170 - RNA, 18 nt, Human
uccugaguagcugggauu

SEQ ID NO: 1321171 - RNA, 18 nt, Human
ucgcccaggcuggagggc

SEQ ID NO: 1321172 - RNA, 23 nt, Human
ucguucugaguguuuacaaagaa

SEQ ID NO: 1321173 - RNA, 24 nt, Human
ucucugcaaacuccgccucccggg

SEQ ID NO: 1321174 - RNA, 18 nt, Human
ucugaucacuuguuuucu

SEQ ID NO: 1321175 - RNA, 19 nt, Human
ucuggcucugucgcccagg

SEQ ID NO: 1321176 - RNA, 23 nt, Human
ucuggcucugucgcccaggcugg

SEQ ID NO: 1321177 - RNA, 24 nt, Human
ucuggcucugucgcccaggcugga

SEQ ID NO: 1321178 - RNA, 20 nt, Human
ugacguagaacaaaaucugc

SEQ ID NO: 1321179 - RNA, 22 nt, Human
ugacguagaacaaaaucugcgg

SEQ ID NO: 1321180 - RNA, 22 nt, Human
ugagacggggucuggcucuguc

SEQ ID NO: 1321181 - RNA, 18 nt, Human
ugagauuauaggcgugag

SEQ ID NO: 1321182 - RNA, 21 nt, Human
ugagauuauaggcgugaguca

SEQ ID NO: 1321183 - RNA, 22 nt, Human
ugagauuauaggcgugagucac

SEQ ID NO: 1321184 - RNA, 23 nt, Human
ugagauuauaggcgugagucacc

SEQ ID NO: 1321185 - RNA, 24 nt, Human
ugagauuauaggcgugagucaccg

SEQ ID NO: 1321186 - RNA, 21 nt, Human
ugcaacacaggaaaaagcuaa

SEQ ID NO: 1321187 - RNA, 30 nt, Human
ugcccaagcaacacagaccacaauuucuag

SEQ ID NO: 1321188 - RNA, 24 nt, Human
ugccucagccuccugaguagcugg

SEQ ID NO: 1321189 - RNA, 20 nt, Human
ugcgggugugugugugugug

SEQ ID NO: 1321190 - RNA, 21 nt, Human
uggccaggcuggucuagaacu

SEQ ID NO: 1321191 - RNA, 19 nt, Human
uggcgcgaucucagcucuc

SEQ ID NO: 1321192 - RNA, 24 nt, Human
uggcgcgaucucagcucucugcaa

SEQ ID NO: 1321193 - RNA, 20 nt, Human
ugggauuacagagaccgcca

SEQ ID NO: 1321194 - RNA, 21 nt, Human
ugggauuacagagaccgccac

SEQ ID NO: 1321195 - RNA, 23 nt, Human
ugggauuacagagaccgccacca

SEQ ID NO: 1321196 - RNA, 21 nt, Human
uguauuuuuaguagaaacggg

SEQ ID NO: 1321197 - RNA, 24 nt, Human
ugugccucagccuccugaguagcu

SEQ ID NO: 1321198 - RNA, 25 nt, Human
ugugcugcagcaugacugaucuggc

SEQ ID NO: 1321199 - RNA, 19 nt, Human
uuacagagaccgccaccac

SEQ ID NO: 1321200 - RNA, 20 nt, Human
uuacuaucuggacuuuacag

SEQ ID NO: 1321201 - RNA, 24 nt, Human
uuaguagaaacgggguuucaccau

SEQ ID NO: 1321202 - RNA, 30 nt, Human
uuauuuauuuauuuugagacggggucuggg

SEQ ID NO: 1321203 - RNA, 19 nt, Human
uucaaagaaaagaaucucc

SEQ ID NO: 1321204 - RNA, 23 nt, Human
uucaagcgauucuugugccucag

SEQ ID NO: 1321205 - RNA, 24 nt, Human
uucauacauuucuccugcauuucc

SEQ ID NO: 1321206 - RNA, 20 nt, Human
uuccucaacuuugcgccugu

SEQ ID NO: 1321207 - RNA, 19 nt, Human
uugcugggccgccggcgcg

SEQ ID NO: 1321208 - RNA, 27 nt, Human
uugcugggccgccggcgcgcgggcggc

SEQ ID NO: 1321209 - RNA, 23 nt, Human
uuguauuuuuaguagaaacgggg

SEQ ID NO: 1321210 - RNA, 19 nt, Human
uuuacuggaauacugucaa

SEQ ID NO: 1321211 - RNA, 23 nt, Human
uuuauuuauuuugagacgggguc

SEQ ID NO: 1321212 - RNA, 24 nt, Human
uuucaccauguuggccaggcuggu

SEQ ID NO: 1321213 - RNA, 19 nt, Human
uuuguugucaaguauccag

SEQ ID NO: 1321214 - RNA, 24 nt, Human
uuuuuaguagaaacgggguuucac

SEQ ID NO: 1321215 - RNA, 19 nt, Human
uuuuuguauuuuuaguaga

SEQ ID NO: 1321216 - RNA, 18 nt, Human
uuuuuuguauuuuuagua

SEQ ID NO: 1321217 - RNA, 24 nt, Human
cccgcgccagucccgccgccgccc

SEQ ID NO: 1321218 - RNA, 22 nt, Human
cccggaacuggcggcccagcuc

SEQ ID NO: 1321219 - RNA, 23 nt, Human
ccgcgccagucccgccgccgccc

SEQ ID NO: 1321220 - RNA, 24 nt, Human
ccgcgccagucccgccgccgcccu

SEQ ID NO: 1321221 - RNA, 23 nt, Human
ccgcugcccgcgccagucccgcc

SEQ ID NO: 1321222 - RNA, 21 nt, Human
cuugccuuucucgccggcugc

SEQ ID NO: 1321223 - RNA, 21 nt, Human
gaacuugccuuucucgccggc

SEQ ID NO: 1321224 - RNA, 25 nt, Human
gagcgcacccagaacuggaacuugc

SEQ ID NO: 1321225 - RNA, 19 nt, Human
ggggcugugcuuccggcug

SEQ ID NO: 1321226 - RNA, 22 nt, Human
ucccggaacuggcggcccagcu

SEQ ID NO: 1321227 - RNA, 24 nt, Human
ugaaacaaaaccagggggcugugc

SEQ ID NO: 1321228 - RNA, 24 nt, Human
ugcccaggcggaagcccuuggagc

SEQ ID NO: 1321229 - RNA, 21 nt, Human
ugcugcgugucaccgucuugg

SEQ ID NO: 1321230 - RNA, 18 nt, Human
uggguucccggccgcugc

SEQ ID NO: 1321231 - RNA, 18 nt, Human
aaaaggcuguauaaucua

SEQ ID NO: 1321232 - RNA, 21 nt, Human
agaagaaaacauguuuauuaa

SEQ ID NO: 1321233 - RNA, 19 nt, Human
agagcugaacuaguagcag

SEQ ID NO: 1321234 - RNA, 23 nt, Human
caauaagagcugaacuaguagca

SEQ ID NO: 1321235 - RNA, 20 nt, Human
caguggaauuaaacuucaau

SEQ ID NO: 1321236 - RNA, 21 nt, Human
cuaguagcaguggaaugguuu

SEQ ID NO: 1321237 - RNA, 21 nt, Human
ugagaagauacuugugcagug

SEQ ID NO: 1321238 - RNA, 20 nt, Human
ugugcaguggaauuaaacuu

SEQ ID NO: 1321239 - RNA, 20 nt, Human
agagccuggcauggaggagg

SEQ ID NO: 1321240 - RNA, 21 nt, Human
aggccgugggggccuccgagc

SEQ ID NO: 1321241 - RNA, 20 nt, Human
ccagagccuggcauggaggg

SEQ ID NO: 1321242 - RNA, 19 nt, Human
ccgugggggccuccgagcu

SEQ ID NO: 1321243 - RNA, 21 nt, Human
cggcccagagccuggcaugga

SEQ ID NO: 1321244 - RNA, 20 nt, Human
gcucccagaggccguggggg

SEQ ID NO: 1321245 - RNA, 23 nt, Human
ggcauggaggaggugagagcugu

SEQ ID NO: 1321246 - RNA, 18 nt, Human
ggaaggggccgguggggg

SEQ ID NO: 1321247 - RNA, 18 nt, Human
gggccggugggggacgag

SEQ ID NO: 1321248 - RNA, 21 nt, Human
ugguggcagccaaggaagggg

SEQ ID NO: 1321249 - RNA, 25 nt, Human
ugugguggcagccaaggaaggggcc

SEQ ID NO: 1321250 - RNA, 21 nt, Human
aaacgcuccggccgcugaucc

SEQ ID NO: 1321251 - RNA, 19 nt, Human
aaccccuccugcauuccgu

SEQ ID NO: 1321252 - RNA, 22 nt, Human
acacccagccgcacaagaaccc

SEQ ID NO: 1321253 - RNA, 21 nt, Human
acuguccugcuugguuaggaa

SEQ ID NO: 1321254 - RNA, 23 nt, Human
aggacggaaugcaggagggguuc

SEQ ID NO: 1321255 - RNA, 23 nt, Human
aggacggaaugcaggagggguuc

SEQ ID NO: 1321256 - RNA, 18 nt, Human
agugacacuguugaugug

SEQ ID NO: 1321257 - RNA, 23 nt, Human
augacccuccucccuggcaguga

SEQ ID NO: 1321258 - RNA, 20 nt, Human
cacaacuuuacguuucccuu

SEQ ID NO: 1321259 - RNA, 18 nt, Human
cacagcccaugcuggcac

SEQ ID NO: 1321260 - RNA, 20 nt, Human
caccacucucacauccauca

SEQ ID NO: 1321261 - RNA, 21 nt, Human
cagaguccgccaaacgcuccg

SEQ ID NO: 1321262 - RNA, 18 nt, Human
cagcaugggcuguggcaa

SEQ ID NO: 1321263 - RNA, 20 nt, Human
cagcuucucccucuccccuc

SEQ ID NO: 1321264 - RNA, 21 nt, Human
cagcuucucccucuccccucc

SEQ ID NO: 1321265 - RNA, 19 nt, Human
ccagcagaagaggcacccc

SEQ ID NO: 1321266 - RNA, 18 nt, Human
ccagcaggagguucccgc

SEQ ID NO: 1321267 - RNA, 18 nt, Human
ccagcaggagguucccgc

SEQ ID NO: 1321268 - RNA, 22 nt, Human
cccacacccagccgcacaagaa

SEQ ID NO: 1321269 - RNA, 23 nt, Human
cccacagcugugcagcgggaacc

SEQ ID NO: 1321270 - RNA, 18 nt, Human
cccagccgcacaagaacc

SEQ ID NO: 1321271 - RNA, 18 nt, Human
cccagcuucucccucucc

SEQ ID NO: 1321272 - RNA, 21 nt, Human
ccccaaaaaaacgcagaaugu

SEQ ID NO: 1321273 - RNA, 20 nt, Human
ccccacagcugugcagcggg

SEQ ID NO: 1321274 - RNA, 22 nt, Human
ccgcacaagaaccccuccugca

SEQ ID NO: 1321275 - RNA, 19 nt, Human
ccgccaaacgcuccggccg

SEQ ID NO: 1321276 - RNA, 20 nt, Human
ccucacacgcaggccugucc

SEQ ID NO: 1321277 - RNA, 23 nt, Human
ccucuucugcuggcaagagugug

SEQ ID NO: 1321278 - RNA, 23 nt, Human
ccucuucugcuggcaagagugug

SEQ ID NO: 1321279 - RNA, 21 nt, Human
ccucuucugcuggcaagaguu

SEQ ID NO: 1321280 - RNA, 21 nt, Human
ccucuucugcuggcaagaguu

SEQ ID NO: 1321281 - RNA, 22 nt, Human
cgaagggagaacacaaugacau

SEQ ID NO: 1321282 - RNA, 18 nt, Human
cgcugcacagcugugggg

SEQ ID NO: 1321283 - RNA, 23 nt, Human
cuccaaguccacgcagaguccgc

SEQ ID NO: 1321284 - RNA, 21 nt, Human
cucccagaaacucagacccaa

SEQ ID NO: 1321285 - RNA, 21 nt, Human
cucccuggcagugacacuguu

SEQ ID NO: 1321286 - RNA, 21 nt, Human
gaaguccucuacaucaucccu

SEQ ID NO: 1321287 - RNA, 19 nt, Human
gacauggcuagcaugaccc

SEQ ID NO: 1321288 - RNA, 19 nt, Human
gcagaagaggcaccccaca

SEQ ID NO: 1321289 - RNA, 18 nt, Human
gcggcuggguguggggcc

SEQ ID NO: 1321290 - RNA, 27 nt, Human
ggccucuucugcuggcaagaguguggu

SEQ ID NO: 1321291 - RNA, 27 nt, Human
ggccucuucugcuggcaagaguguggu

SEQ ID NO: 1321292 - RNA, 19 nt, Human
gggaaccguggagaaaugg

SEQ ID NO: 1321293 - RNA, 19 nt, Human
gggaaccguggagaaaugg

SEQ ID NO: 1321294 - RNA, 24 nt, Human
gucaugugggcuaguagauuggcc

SEQ ID NO: 1321295 - RNA, 21 nt, Human
gugaggauagacuggguggug

SEQ ID NO: 1321296 - RNA, 21 nt, Human
gugaggauagacuggguggug

SEQ ID NO: 1321297 - RNA, 23 nt, Human
uacguuucccuuuccuggccauu

SEQ ID NO: 1321298 - RNA, 21 nt, Human
uaguagauuggccagggcuuc

SEQ ID NO: 1321299 - RNA, 19 nt, Human
ucacacucuugccagcaga

SEQ ID NO: 1321300 - RNA, 20 nt, Human
ucccagaaacucagacccaa

SEQ ID NO: 1321301 - RNA, 21 nt, Human
ucccgcagggcuucaccacuc

SEQ ID NO: 1321302 - RNA, 22 nt, Human
ucuccacgguucccgugagggc

SEQ ID NO: 1321303 - RNA, 23 nt, Human
ugacacuguugaugugaacccca

SEQ ID NO: 1321304 - RNA, 20 nt, Human
ugacaugagugacuguccug

SEQ ID NO: 1321305 - RNA, 23 nt, Human
ugaggacggaaugcaggaggggu

SEQ ID NO: 1321306 - RNA, 23 nt, Human
ugaggacggaaugcaggaggggu

SEQ ID NO: 1321307 - RNA, 20 nt, Human
ugagggccccacacccagcc

SEQ ID NO: 1321308 - RNA, 21 nt, Human
ugagggccccacacccagccg

SEQ ID NO: 1321309 - RNA, 22 nt, Human
uggacaggccugcgugugagga

SEQ ID NO: 1321310 - RNA, 22 nt, Human
uggacaggccugcgugugagga

SEQ ID NO: 1321311 - RNA, 19 nt, Human
uggcuagcaugacccuccu

SEQ ID NO: 1321312 - RNA, 23 nt, Human
uggugaggagcugccccuugggu

SEQ ID NO: 1321313 - RNA, 26 nt, Human
uguccuguccucugaauccgcuuuca

SEQ ID NO: 1321314 - RNA, 23 nt, Human
ugugaggacggaaugcaggaggg

SEQ ID NO: 1321315 - RNA, 23 nt, Human
ugugaggacggaaugcaggaggg

SEQ ID NO: 1321316 - RNA, 19 nt, Human
ugugcggcugggugugggg

SEQ ID NO: 1321317 - RNA, 20 nt, Human
uguggaauucuguugaugau

SEQ ID NO: 1321318 - RNA, 24 nt, Human
uucgaagggagaacacaaugacau

SEQ ID NO: 1321319 - RNA, 20 nt, Human
aaaauguacccagaauccuc

SEQ ID NO: 1321320 - RNA, 23 nt, Human
aacccaucuuacccucugguccc

SEQ ID NO: 1321321 - RNA, 23 nt, Human
aacugaccucacucccugacccc

SEQ ID NO: 1321322 - RNA, 19 nt, Human
aagugaguccccaccuccc

SEQ ID NO: 1321323 - RNA, 19 nt, Human
acccagaagcccccauuau

SEQ ID NO: 1321324 - RNA, 22 nt, Human
acccagaagcccccauuauccc

SEQ ID NO: 1321325 - RNA, 23 nt, Human
accccugucugucauuccugggc

SEQ ID NO: 1321326 - RNA, 18 nt, Human
acuccaagccucccugaa

SEQ ID NO: 1321327 - RNA, 23 nt, Human
agaagcccccauuaucccugcuu

SEQ ID NO: 1321328 - RNA, 18 nt, Human
agaauccuccaaacuacc

SEQ ID NO: 1321329 - RNA, 19 nt, Human
aggcauagagccgcugucc

SEQ ID NO: 1321330 - RNA, 18 nt, Human
aucaagaaacccagaagc

SEQ ID NO: 1321331 - RNA, 18 nt, Human
auggccucuggguccagc

SEQ ID NO: 1321332 - RNA, 18 nt, Human
caacucuaccccugucug

SEQ ID NO: 1321333 - RNA, 19 nt, Human
caagaaacccagaagcccc

SEQ ID NO: 1321334 - RNA, 27 nt, Human
cacucccugaccccaugccacuaguuc

SEQ ID NO: 1321335 - RNA, 19 nt, Human
cacugaacucccugagccu

SEQ ID NO: 1321336 - RNA, 25 nt, Human
cagaauccuccaaacuaccccuaga

SEQ ID NO: 1321337 - RNA, 24 nt, Human
caucaagaaacccagaagccccca

SEQ ID NO: 1321338 - RNA, 23 nt, Human
ccaccucccugagaugccaaccc

SEQ ID NO: 1321339 - RNA, 22 nt, Human
ccagaauccuccaaacuacccc

SEQ ID NO: 1321340 - RNA, 20 nt, Human
cccaaaagugaguccccacc

SEQ ID NO: 1321341 - RNA, 21 nt, Human
cccagaauccuccaaacuacc

SEQ ID NO: 1321342 - RNA, 23 nt, Human
ccccaaagccuugccuagaaccc

SEQ ID NO: 1321343 - RNA, 21 nt, Human
ccccaccucccugagaugcca

SEQ ID NO: 1321344 - RNA, 31 nt, Human
ccccacugaacucccugagccuacccuuccu

SEQ ID NO: 1321345 - RNA, 18 nt, Human
ccccagauccuccugagc

SEQ ID NO: 1321346 - RNA, 23 nt, Human
ccccauuaucccugcuuggucug

SEQ ID NO: 1321347 - RNA, 26 nt, Human
cccccaaagccuugccuagaaccugc

SEQ ID NO: 1321348 - RNA, 21 nt, Human
cccuagagcagccauuccugc

SEQ ID NO: 1321349 - RNA, 22 nt, Human
cccucugaugcuacccaauauc

SEQ ID NO: 1321350 - RNA, 21 nt, Human
ccuacccuucugccucccaaa

SEQ ID NO: 1321351 - RNA, 22 nt, Human
ccuacccuucugccucccaaaa

SEQ ID NO: 1321352 - RNA, 21 nt, Human
ccucuauaacugaccucacuc

SEQ ID NO: 1321353 - RNA, 21 nt, Human
ccugaccugugacccauggcc

SEQ ID NO: 1321354 - RNA, 23 nt, Human
ccuuccacugcccccuugccauc

SEQ ID NO: 1321355 - RNA, 22 nt, Human
ccuucugccucccaaaagugag

SEQ ID NO: 1321356 - RNA, 24 nt, Human
cuaguucccccaaagccuugccua

SEQ ID NO: 1321357 - RNA, 23 nt, Human
cucacucccugaccccaugccac

SEQ ID NO: 1321358 - RNA, 22 nt, Human
cucauguccuauuccagccagu

SEQ ID NO: 1321359 - RNA, 18 nt, Human
cuccaagccucccugaac

SEQ ID NO: 1321360 - RNA, 24 nt, Human
cuccaagccucccugaaccaucuc

SEQ ID NO: 1321361 - RNA, 19 nt, Human
cugaaccaucuccauaacc

SEQ ID NO: 1321362 - RNA, 18 nt, Human
cuguccccacugaacucc

SEQ ID NO: 1321363 - RNA, 21 nt, Human
gaccccaugccacuaguuccc

SEQ ID NO: 1321364 - RNA, 20 nt, Human
gccagcaacucuaccccugu

SEQ ID NO: 1321365 - RNA, 18 nt, Human
ggcuuuauggccucuggg

SEQ ID NO: 1321366 - RNA, 19 nt, Human
uacccaauauccugaccug

SEQ ID NO: 1321367 - RNA, 19 nt, Human
uacccagaauccuccaaac

SEQ ID NO: 1321368 - RNA, 21 nt, Human
uaguucccccaaagccuugcc

SEQ ID NO: 1321369 - RNA, 18 nt, Human
uauccagacccuagagca

SEQ ID NO: 1321370 - RNA, 21 nt, Human
uaucccugcuuggucuggaga

SEQ ID NO: 1321371 - RNA, 18 nt, Human
ucccaaaagugagucccc

SEQ ID NO: 1321372 - RNA, 19 nt, Human
ucccaaaagugagucccca

SEQ ID NO: 1321373 - RNA, 22 nt, Human
ucccugagccuacccuucugcc

SEQ ID NO: 1321374 - RNA, 18 nt, Human
uccugggccugcuuucca

SEQ ID NO: 1321375 - RNA, 22 nt, Human
ucucaccuuccacugcccccuu

SEQ ID NO: 1321376 - RNA, 25 nt, Human
ugagccuacccuucugccucccaaa

SEQ ID NO: 1321377 - RNA, 21 nt, Human
ugccacuaguucccccaaagc

SEQ ID NO: 1321378 - RNA, 19 nt, Human
uggccucuggguccagccu

SEQ ID NO: 1321379 - RNA, 18 nt, Human
uguccagauccugaccug

SEQ ID NO: 1321380 - RNA, 18 nt, Human
uuccugggccugcuuucc

SEQ ID NO: 1321381 - RNA, 21 nt, Human
aaaagagagagcuucaauaug

SEQ ID NO: 1321382 - RNA, 23 nt, Human
acucugaauguacaaaagagaga

SEQ ID NO: 1321383 - RNA, 20 nt, Human
acugcgggaauccuggagaa

SEQ ID NO: 1321384 - RNA, 22 nt, Human
agaaacgagacugagaccuagg

SEQ ID NO: 1321385 - RNA, 19 nt, Human
cacccuuggaaaccuguaa

SEQ ID NO: 1321386 - RNA, 22 nt, Human
caccgugacccccucgcccccg

SEQ ID NO: 1321387 - RNA, 20 nt, Human
cacgcccguguccgucucca

SEQ ID NO: 1321388 - RNA, 23 nt, Human
caugcaaacuccgggcauacaau

SEQ ID NO: 1321389 - RNA, 18 nt, Human
ccacccuuggaaaccugu

SEQ ID NO: 1321390 - RNA, 22 nt, Human
ccacgcccguguccgucucccc

SEQ ID NO: 1321391 - RNA, 19 nt, Human
ccagguguggaaugcucac

SEQ ID NO: 1321392 - RNA, 21 nt, Human
cccagggucaacccccgggcu

SEQ ID NO: 1321393 - RNA, 23 nt, Human
cccccucgcccccggcacgccca

SEQ ID NO: 1321394 - RNA, 18 nt, Human
ccccucugggaggaacgc

SEQ ID NO: 1321395 - RNA, 21 nt, Human
cccuauugcugcuacucagaa

SEQ ID NO: 1321396 - RNA, 26 nt, Human
cccugcuccaggccgggacgccccuc

SEQ ID NO: 1321397 - RNA, 18 nt, Human
cggccacccuuggaaacc

SEQ ID NO: 1321398 - RNA, 21 nt, Human
ggccacccuuggaaaccugua

SEQ ID NO: 1321399 - RNA, 18 nt, Human
guccagguguggaaugcu

SEQ ID NO: 1321400 - RNA, 24 nt, Human
uaggugaugacacaaaugccuuga

SEQ ID NO: 1321401 - RNA, 21 nt, Human
uaugaaacaguaauccucuga

SEQ ID NO: 1321402 - RNA, 21 nt, Human
ucaaacucugaauguacaaaa

SEQ ID NO: 1321403 - RNA, 21 nt, Human
ucccguuccugcuuccccaca

SEQ ID NO: 1321404 - RNA, 19 nt, Human
ucccugcuccaggccggga

SEQ ID NO: 1321405 - RNA, 19 nt, Human
ugagaaaaaaucucaugca

SEQ ID NO: 1321406 - RNA, 21 nt, Human
ugccggugcccgcugggccgu

SEQ ID NO: 1321407 - RNA, 23 nt, Human
ugcuacucagaaacgagacugag

SEQ ID NO: 1321408 - RNA, 21 nt, Human
uggaaugcucacaguugucac

SEQ ID NO: 1321409 - RNA, 25 nt, Human
uuccucaacacugcgggaauccugg

SEQ ID NO: 1321410 - RNA, 19 nt, Human
uuuucagaaaaguuuucgc

SEQ ID NO: 1321411 - RNA, 23 nt, Human
aaacagauacaaagcaaagagac

SEQ ID NO: 1321412 - RNA, 19 nt, Human
aaagauggcgucagggugg

SEQ ID NO: 1321413 - RNA, 29 nt, Human
aacucacaaacagauacaaagggaaaguc

SEQ ID NO: 1321414 - RNA, 18 nt, Human
acaaagcaaagagacaga

SEQ ID NO: 1321415 - RNA, 19 nt, Human
acaaagcaaagagacagag

SEQ ID NO: 1321416 - RNA, 19 nt, Human
acccuuccaccccuucccc

SEQ ID NO: 1321417 - RNA, 19 nt, Human
accuccacccuuccacccc

SEQ ID NO: 1321418 - RNA, 22 nt, Human
acuagaacagagagagaagcca

SEQ ID NO: 1321419 - RNA, 25 nt, Human
agaagccaggaucaacucacaaaca

SEQ ID NO: 1321420 - RNA, 21 nt, Human
aggcggcccuguccggccagc

SEQ ID NO: 1321421 - RNA, 24 nt, Human
aggucuccaggagcggcgcaauuu

SEQ ID NO: 1321422 - RNA, 19 nt, Human
caacucacaaacagauaca

SEQ ID NO: 1321423 - RNA, 21 nt, Human
cacgcccccgugccaccccug

SEQ ID NO: 1321424 - RNA, 18 nt, Human
cagcccggcgacaggcgg

SEQ ID NO: 1321425 - RNA, 22 nt, Human
cagucuccgccaccgccgcggc

SEQ ID NO: 1321426 - RNA, 24 nt, Human
ccaccccuuccccgcgccaggacc

SEQ ID NO: 1321427 - RNA, 23 nt, Human
ccccgugccacugcucuccugac

SEQ ID NO: 1321428 - RNA, 23 nt, Human
ccccuaaauggauggaaccaagu

SEQ ID NO: 1321429 - RNA, 18 nt, Human
cccgugccacugcucucc

SEQ ID NO: 1321430 - RNA, 20 nt, Human
cccgugccacugcucuccug

SEQ ID NO: 1321431 - RNA, 21 nt, Human
cccgugccacugcucuccuga

SEQ ID NO: 1321432 - RNA, 23 nt, Human
ccgccaugcggucaaggaucugu

SEQ ID NO: 1321433 - RNA, 18 nt, Human
ccuccacccuuccacccc

SEQ ID NO: 1321434 - RNA, 18 nt, Human
ccuuaccaaggugggcug

SEQ ID NO: 1321435 - RNA, 19 nt, Human
cgacaggcggcccuguccg

SEQ ID NO: 1321436 - RNA, 19 nt, Human
cgcaacggcgaagcgcggc

SEQ ID NO: 1321437 - RNA, 22 nt, Human
cuaccuccacccuuccaccccu

SEQ ID NO: 1321438 - RNA, 26 nt, Human
cuaccuccacccuuccaccccuuccc

SEQ ID NO: 1321439 - RNA, 22 nt, Human
cuuccaccccuuccccgcgcca

SEQ ID NO: 1321440 - RNA, 18 nt, Human
cuuucccucuuccucacg

SEQ ID NO: 1321441 - RNA, 24 nt, Human
cuuuuguuguuuuguuuucagcca

SEQ ID NO: 1321442 - RNA, 19 nt, Human
gccccggauggcaaggccc

SEQ ID NO: 1321443 - RNA, 23 nt, Human
gcgcggcccggcuggggcucggg

SEQ ID NO: 1321444 - RNA, 19 nt, Human
gcucuuaaagccacagucu

SEQ ID NO: 1321445 - RNA, 21 nt, Human
ggagcggcgcaauuuuguucc

SEQ ID NO: 1321446 - RNA, 20 nt, Human
ggcacgcucuuaaagccaca

SEQ ID NO: 1321447 - RNA, 18 nt, Human
gggcccuggggcccuuac

SEQ ID NO: 1321448 - RNA, 21 nt, Human
ggguggguguggcaggcucca

SEQ ID NO: 1321449 - RNA, 20 nt, Human
ggugaacucuggggcagccc

SEQ ID NO: 1321450 - RNA, 23 nt, Human
guggggcuuggcuccgcuggggu

SEQ ID NO: 1321451 - RNA, 19 nt, Human
gugguuuggcagcgggugg

SEQ ID NO: 1321452 - RNA, 26 nt, Human
uacaaagcaaagagacagagagacag

SEQ ID NO: 1321453 - RNA, 21 nt, Human
uagaacagagagagaagccag

SEQ ID NO: 1321454 - RNA, 23 nt, Human
uagaacagagagagaagccagga

SEQ ID NO: 1321455 - RNA, 21 nt, Human
uagaggccggucaccagaaag

SEQ ID NO: 1321456 - RNA, 20 nt, Human
ucagccaaaacuagaacaga

SEQ ID NO: 1321457 - RNA, 23 nt, Human
ucagggugggaggaugccccgga

SEQ ID NO: 1321458 - RNA, 20 nt, Human
ucagucacucucucacgcuu

SEQ ID NO: 1321459 - RNA, 18 nt, Human
uccgccaccgccgcggcc

SEQ ID NO: 1321460 - RNA, 21 nt, Human
ucucagcagcccggcgacagg

SEQ ID NO: 1321461 - RNA, 21 nt, Human
ucuccgccaccgccgcggccg

SEQ ID NO: 1321462 - RNA, 19 nt, Human
uggcagcgggugggugugg

SEQ ID NO: 1321463 - RNA, 19 nt, Human
uggcaggcuccacacacug

SEQ ID NO: 1321464 - RNA, 22 nt, Human
ugggaggaugccccggauggca

SEQ ID NO: 1321465 - RNA, 23 nt, Human
uggggcagcccacgaggcacucc

SEQ ID NO: 1321466 - RNA, 18 nt, Human
uguccggccagcgugggg

SEQ ID NO: 1321467 - RNA, 21 nt, Human
uuaaagccacagucuccgccc

SEQ ID NO: 1321468 - RNA, 23 nt, Human
uuccccuuucccucuuccucacg

SEQ ID NO: 1321469 - RNA, 22 nt, Human
cgagcccgggaacagaaggaag

SEQ ID NO: 1321470 - RNA, 19 nt, Human
guggugugggcaauguccc

SEQ ID NO: 1321471 - RNA, 20 nt, Human
ugugggcaaugucccugagg

SEQ ID NO: 1321472 - RNA, 21 nt, Human
acccugguaccccauaguagc

SEQ ID NO: 1321473 - RNA, 24 nt, Human
acccugguaccccauaguagcugg

SEQ ID NO: 1321474 - RNA, 21 nt, Human
aggaaccccagaaaagaccuu

SEQ ID NO: 1321475 - RNA, 22 nt, Human
cacagcaggaaccccagaaaag

SEQ ID NO: 1321476 - RNA, 25 nt, Human
cauaguagcugcacacagcaggaac

SEQ ID NO: 1321477 - RNA, 25 nt, Human
ccccagaaaagaccuugccccuucu

SEQ ID NO: 1321478 - RNA, 26 nt, Human
cuggcugguaauugcugacucuccuu

SEQ ID NO: 1321479 - RNA, 18 nt, Human
gcacacagcaggaacccc

SEQ ID NO: 1321480 - RNA, 22 nt, Human
gcacacagcaggaaccccagga

SEQ ID NO: 1321481 - RNA, 21 nt, Human
gcagugggcucucccuuacuc

SEQ ID NO: 1321482 - RNA, 20 nt, Human
gccuuuuuuagcagugggcu

SEQ ID NO: 1321483 - RNA, 20 nt, Human
gggcaucccccacccuggua

SEQ ID NO: 1321484 - RNA, 22 nt, Human
gggcaucccccacccugguacc

SEQ ID NO: 1321485 - RNA, 18 nt, Human
ucacuggaggauucagaa

SEQ ID NO: 1321486 - RNA, 23 nt, Human
ucagggcaucccccacccuggua

SEQ ID NO: 1321487 - RNA, 22 nt, Human
uccaggaccuuggcuggcuggu

SEQ ID NO: 1321488 - RNA, 22 nt, Human
ucccacggccggcaggucugcc

SEQ ID NO: 1321489 - RNA, 19 nt, Human
uccgcggcucccacggccg

SEQ ID NO: 1321490 - RNA, 23 nt, Human
ugaggauuugacuaggccuuuuu

SEQ ID NO: 1321491 - RNA, 19 nt, Human
uggagaaggcaguaaaugg

SEQ ID NO: 1321492 - RNA, 22 nt, Human
uguuuccggccucugccucuug

SEQ ID NO: 1321493 - RNA, 23 nt, Human
uuccuggagaaggcaguaaaugg

SEQ ID NO: 1321494 - RNA, 24 nt, Human
uuccuggagaaggcaguaaauggg

SEQ ID NO: 1321495 - RNA, 21 nt, Human
uugcugacucuccuuguuucc

SEQ ID NO: 1321496 - RNA, 19 nt, Human
uuuagcagugggcucuccc

SEQ ID NO: 1321497 - RNA, 24 nt, Human
uuuccugucauucauuuauuugac

SEQ ID NO: 1321498 - RNA, 24 nt, Human
aaagugcugggaucacaggcguga

SEQ ID NO: 1321499 - RNA, 21 nt, Human
aagcgaacacgggcuccucca

SEQ ID NO: 1321500 - RNA, 19 nt, Human
aaguagcugggacuaaggc

SEQ ID NO: 1321501 - RNA, 26 nt, Human
aagugcugggaucacaggcgugagcc

SEQ ID NO: 1321502 - RNA, 26 nt, Human
acagaacuccagcaaaaagggaacgc

SEQ ID NO: 1321503 - RNA, 18 nt, Human
acgggguuucaccacguu

SEQ ID NO: 1321504 - RNA, 20 nt, Human
acgggguuucaccacguugg

SEQ ID NO: 1321505 - RNA, 24 nt, Human
acgggguuucaccacguuggccag

SEQ ID NO: 1321506 - RNA, 20 nt, Human
acugcaagcuccgccucccg

SEQ ID NO: 1321507 - RNA, 23 nt, Human
acuugcucugucgccaggcugga

SEQ ID NO: 1321508 - RNA, 22 nt, Human
agaaagagcuuggcuccuggug

SEQ ID NO: 1321509 - RNA, 22 nt, Human
agccuucugucguccugagcaa

SEQ ID NO: 1321510 - RNA, 20 nt, Human
aggaaggaugaugggcauau

SEQ ID NO: 1321511 - RNA, 24 nt, Human
aggcuggagugcaguggcagaucu

SEQ ID NO: 1321512 - RNA, 24 nt, Human
agugauuccccugccucagccucc

SEQ ID NO: 1321513 - RNA, 22 nt, Human
agugcaguggcagaucucgguu

SEQ ID NO: 1321514 - RNA, 23 nt, Human
agugcaguggcagaucucgguuc

SEQ ID NO: 1321515 - RNA, 18 nt, Human
augaaguggaaaaaguga

SEQ ID NO: 1321516 - RNA, 24 nt, Human
auuuuaguagagacgggguuucac

SEQ ID NO: 1321517 - RNA, 24 nt, Human
auuuuuuguauuuuaguagagacg

SEQ ID NO: 1321518 - RNA, 23 nt, Human
caaaaguugauuugaauccugau

SEQ ID NO: 1321519 - RNA, 22 nt, Human
caaaguaucauuuaacaugcaa

SEQ ID NO: 1321520 - RNA, 24 nt, Human
caaagugcugggaucacaggcgug

SEQ ID NO: 1321521 - RNA, 19 nt, Human
caacaugaaaaucauuaac

SEQ ID NO: 1321522 - RNA, 22 nt, Human
caagugauuccccugccucagc

SEQ ID NO: 1321523 - RNA, 27 nt, Human
caagugauuccccugccucagccuccc

SEQ ID NO: 1321524 - RNA, 25 nt, Human
caauucagacuaaccauaaugccga

SEQ ID NO: 1321525 - RNA, 23 nt, Human
cacaggcgugagccaccgcgccc

SEQ ID NO: 1321526 - RNA, 18 nt, Human
caccacguuggccaggau

SEQ ID NO: 1321527 - RNA, 22 nt, Human
caccacguuggccaggaugguc

SEQ ID NO: 1321528 - RNA, 24 nt, Human
caccacguuggccaggauggucuc

SEQ ID NO: 1321529 - RNA, 22 nt, Human
caccauccaauuccuaaucaaa

SEQ ID NO: 1321530 - RNA, 19 nt, Human
cacgauguuuucugcgcug

SEQ ID NO: 1321531 - RNA, 19 nt, Human
cagaaagagcuuggcuccu

SEQ ID NO: 1321532 - RNA, 19 nt, Human
ccaaaggagccaugaagug

SEQ ID NO: 1321533 - RNA, 22 nt, Human
ccaaagugcugggaucacaggc

SEQ ID NO: 1321534 - RNA, 24 nt, Human
ccaaagugcugggaucacaggcgu

SEQ ID NO: 1321535 - RNA, 24 nt, Human
ccaacucaccauccaauuccuaau

SEQ ID NO: 1321536 - RNA, 21 nt, Human
ccaaguagcugggacuaaggc

SEQ ID NO: 1321537 - RNA, 20 nt, Human
ccaccacgcccggcuaauuu

SEQ ID NO: 1321538 - RNA, 18 nt, Human
ccaccgcgcccggccugc

SEQ ID NO: 1321539 - RNA, 18 nt, Human
ccaccgcgcccggccugc

SEQ ID NO: 1321540 - RNA, 20 nt, Human
ccaccgcgcccggccugcuu

SEQ ID NO: 1321541 - RNA, 24 nt, Human
ccagcaaaaagcuaaggacugggg

SEQ ID NO: 1321542 - RNA, 19 nt, Human
cccaaguagcugggacuaa

SEQ ID NO: 1321543 - RNA, 21 nt, Human
cccggguucaagugauucccc

SEQ ID NO: 1321544 - RNA, 23 nt, Human
cccggguucaagugauuccccug

SEQ ID NO: 1321545 - RNA, 24 nt, Human
ccgccucccggguucaagugauuc

SEQ ID NO: 1321546 - RNA, 19 nt, Human
ccgcgcccggccugcuuug

SEQ ID NO: 1321547 - RNA, 21 nt, Human
ccucccggguucaagugauuc

SEQ ID NO: 1321548 - RNA, 22 nt, Human
ccucccggguucaagugauucc

SEQ ID NO: 1321549 - RNA, 23 nt, Human
ccugccucagccucccaaguagc

SEQ ID NO: 1321550 - RNA, 24 nt, Human
ccugccucagccucccaaguagcu

SEQ ID NO: 1321551 - RNA, 24 nt, Human
cgccucggccucccaaagugcugg

SEQ ID NO: 1321552 - RNA, 28 nt, Human
cgcuuugguuguuuuuuuuuuuuucuuu

SEQ ID NO: 1321553 - RNA, 24 nt, Human
cgggguuucaccacguuggccagg

SEQ ID NO: 1321554 - RNA, 24 nt, Human
cucagccucccaaguagcugggac

SEQ ID NO: 1321555 - RNA, 22 nt, Human
cucagucugaaacugaaauaaa

SEQ ID NO: 1321556 - RNA, 24 nt, Human
cuccugaccucgugaugcgcccgc

SEQ ID NO: 1321557 - RNA, 19 nt, Human
cucugucgccaggcuggag

SEQ ID NO: 1321558 - RNA, 23 nt, Human
cugcaagccuucugucguccuga

SEQ ID NO: 1321559 - RNA, 24 nt, Human
cuggagugcaguggcagaucucgg

SEQ ID NO: 1321560 - RNA, 20 nt, Human
cuugcucugucgccaggcug

SEQ ID NO: 1321561 - RNA, 22 nt, Human
cuugcucugucgccaggcugga

SEQ ID NO: 1321562 - RNA, 18 nt, Human
gaaaacauuuuuugagaa

SEQ ID NO: 1321563 - RNA, 19 nt, Human
gaauccugauagauuccac

SEQ ID NO: 1321564 - RNA, 24 nt, Human
gagacgggguuucaccacguuggc

SEQ ID NO: 1321565 - RNA, 18 nt, Human
gaucacaggcgugagcca

SEQ ID NO: 1321566 - RNA, 21 nt, Human
gaucacaggcgugagccaccg

SEQ ID NO: 1321567 - RNA, 23 nt, Human
gcccggcuaauuuuuuguauuuu

SEQ ID NO: 1321568 - RNA, 24 nt, Human
gccugcuuugguauuuuuuaagag

SEQ ID NO: 1321569 - RNA, 19 nt, Human
gcucugucgccaggcugga

SEQ ID NO: 1321570 - RNA, 20 nt, Human
ggaugaauccauuauauuua

SEQ ID NO: 1321571 - RNA, 24 nt, Human
ggauggucucgaucuccugaccuc

SEQ ID NO: 1321572 - RNA, 22 nt, Human
ggcuccguccucgccugcuuca

SEQ ID NO: 1321573 - RNA, 24 nt, Human
gggcuucuuagcagaccucagucu

SEQ ID NO: 1321574 - RNA, 23 nt, Human
gggguuucaccacguuggccagg

SEQ ID NO: 1321575 - RNA, 24 nt, Human
gugaugcgcccgccucggccuccc

SEQ ID NO: 1321576 - RNA, 24 nt, Human
gugauuccccugccucagccuccc

SEQ ID NO: 1321577 - RNA, 23 nt, Human
gugcaguggcagaucucgguuca

SEQ ID NO: 1321578 - RNA, 26 nt, Human
uaaauaaaccaaaagaaauggccugu

SEQ ID NO: 1321579 - RNA, 24 nt, Human
uaaggacugggggaucccaacuca

SEQ ID NO: 1321580 - RNA, 22 nt, Human
uaaggcgugcgccaccacgccc

SEQ ID NO: 1321581 - RNA, 23 nt, Human
uaauuuuuuguauuuuaguagag

SEQ ID NO: 1321582 - RNA, 24 nt, Human
uaauuuuuuguauuuuaguagaga

SEQ ID NO: 1321583 - RNA, 24 nt, Human
uacagaacuccagcaaaaggacau

SEQ ID NO: 1321584 - RNA, 20 nt, Human
uacccugguccaaaggagcc

SEQ ID NO: 1321585 - RNA, 22 nt, Human
uagagacgggguuucaccacgu

SEQ ID NO: 1321586 - RNA, 22 nt, Human
uagagcagcacgccggcaccuu

SEQ ID NO: 1321587 - RNA, 24 nt, Human
uaguagagacgggguuucaccacg

SEQ ID NO: 1321588 - RNA, 26 nt, Human
uaguagagacgggguuucaccacguu

SEQ ID NO: 1321589 - RNA, 24 nt, Human
ucaccacguuggccaggauggucu

SEQ ID NO: 1321590 - RNA, 18 nt, Human
ucacugcaagcuccgccu

SEQ ID NO: 1321591 - RNA, 19 nt, Human
ucacugcaagcuccgccuc

SEQ ID NO: 1321592 - RNA, 24 nt, Human
ucacugcaagcuccgccucccggg

SEQ ID NO: 1321593 - RNA, 18 nt, Human
ucagccucccaaguagcu

SEQ ID NO: 1321594 - RNA, 20 nt, Human
ucagccucccaaguagcugg

SEQ ID NO: 1321595 - RNA, 20 nt, Human
uccacuaacuuuuuugucuu

SEQ ID NO: 1321596 - RNA, 24 nt, Human
ucccaaagugcugggaucacaggc

SEQ ID NO: 1321597 - RNA, 23 nt, Human
ucccaaguagcugggacuaaggc

SEQ ID NO: 1321598 - RNA, 26 nt, Human
uccccugccucagccucccaaguagc

SEQ ID NO: 1321599 - RNA, 19 nt, Human
ucccggguucaagugauuc

SEQ ID NO: 1321600 - RNA, 24 nt, Human
ucccggguucaagugauuccccug

SEQ ID NO: 1321601 - RNA, 19 nt, Human
uccuuggaugaauccauua

SEQ ID NO: 1321602 - RNA, 18 nt, Human
ucggccucccaaagugcu

SEQ ID NO: 1321603 - RNA, 18 nt, Human
ucugucgccaggcuggag

SEQ ID NO: 1321604 - RNA, 21 nt, Human
ucugucgccaggcuggagugc

SEQ ID NO: 1321605 - RNA, 23 nt, Human
ucugucgccaggcuggagugcag

SEQ ID NO: 1321606 - RNA, 20 nt, Human
ugaaacugaaauaaaccugg

SEQ ID NO: 1321607 - RNA, 23 nt, Human
ugaaacugaaauaaaccuggacg

SEQ ID NO: 1321608 - RNA, 22 nt, Human
ugaagcgaacacgggcuccucc

SEQ ID NO: 1321609 - RNA, 21 nt, Human
ugacauuuugagauuuacaga

SEQ ID NO: 1321610 - RNA, 19 nt, Human
ugaugggcauauugcuugc

SEQ ID NO: 1321611 - RNA, 24 nt, Human
ugccucagccucccaaguagcugg

SEQ ID NO: 1321612 - RNA, 22 nt, Human
ugcgcugucuuuaaauuccagu

SEQ ID NO: 1321613 - RNA, 24 nt, Human
ugcugggaucacaggcgugagcca

SEQ ID NO: 1321614 - RNA, 21 nt, Human
ugcuucauuauuccagaaaga

SEQ ID NO: 1321615 - RNA, 21 nt, Human
uggagugcaguggcagaucuc

SEQ ID NO: 1321616 - RNA, 23 nt, Human
uggagugcaguggcagaucucgg

SEQ ID NO: 1321617 - RNA, 25 nt, Human
uggcaucgcuauuuuuauacccuuc

SEQ ID NO: 1321618 - RNA, 24 nt, Human
uggccaggauggucucgaucuccu

SEQ ID NO: 1321619 - RNA, 23 nt, Human
ugggacuaaggcgugcgccacca

SEQ ID NO: 1321620 - RNA, 19 nt, Human
ugggaucacaggcgugagc

SEQ ID NO: 1321621 - RNA, 21 nt, Human
ugggaucacaggcgugagcca

SEQ ID NO: 1321622 - RNA, 22 nt, Human
ugggaucacaggcgugagccac

SEQ ID NO: 1321623 - RNA, 23 nt, Human
ugggaucacaggcgugagccacc

SEQ ID NO: 1321624 - RNA, 24 nt, Human
ugggaucacaggcgugagccaccg

SEQ ID NO: 1321625 - RNA, 24 nt, Human
ugguaaauggaggcauuauaugga

SEQ ID NO: 1321626 - RNA, 22 nt, Human
ugguuguuuuuuuuuuuuucuu

SEQ ID NO: 1321627 - RNA, 18 nt, Human
uuaguagagacgggguuu

SEQ ID NO: 1321628 - RNA, 22 nt, Human
uuaguagagacgggguuucacc

SEQ ID NO: 1321629 - RNA, 24 nt, Human
uuaguagagacgggguuucaccac

SEQ ID NO: 1321630 - RNA, 25 nt, Human
uuaguagagacgggguuucaccacg

SEQ ID NO: 1321631 - RNA, 21 nt, Human
uucaagugauuccccugccuc

SEQ ID NO: 1321632 - RNA, 23 nt, Human
uucaagugauuccccugccucag

SEQ ID NO: 1321633 - RNA, 24 nt, Human
uucaagugauuccccugccucagc

SEQ ID NO: 1321634 - RNA, 21 nt, Human
uuccagaaagagcuuggcucc

SEQ ID NO: 1321635 - RNA, 19 nt, Human
uuccccugccucagccucc

SEQ ID NO: 1321636 - RNA, 22 nt, Human
uuccuuggaugaauccauuaua

SEQ ID NO: 1321637 - RNA, 21 nt, Human
uugucuuuuuuuuuggcugcc

SEQ ID NO: 1321638 - RNA, 19 nt, Human
uuucaccacguuggccagg

SEQ ID NO: 1321639 - RNA, 20 nt, Human
uuuuuguauuuuaguagaga

SEQ ID NO: 1321640 - RNA, 20 nt, Human
uagagaaacagaauuucaua

SEQ ID NO: 1321641 - RNA, 19 nt, Human
uguagagaaacagaauuuc

SEQ ID NO: 1321642 - RNA, 26 nt, Human
aacaguuuuuuuuuuuugcugugggg

SEQ ID NO: 1321643 - RNA, 18 nt, Human
aaguacaagacaaaaaug

SEQ ID NO: 1321644 - RNA, 20 nt, Human
aauuuucuuucugaugauac

SEQ ID NO: 1321645 - RNA, 24 nt, Human
acaagacaaaaaugcuuccucuca

SEQ ID NO: 1321646 - RNA, 21 nt, Human
acuccuucgccuucugacccc

SEQ ID NO: 1321647 - RNA, 18 nt, Human
agaauccucacauuacuc

SEQ ID NO: 1321648 - RNA, 18 nt, Human
aggaauaaaagaauggcc

SEQ ID NO: 1321649 - RNA, 21 nt, Human
caagacaaaaaugcuuccucu

SEQ ID NO: 1321650 - RNA, 22 nt, Human
cagcuguuucaaguacaagaca

SEQ ID NO: 1321651 - RNA, 24 nt, Human
gauggcaggugcugcagccaggaa

SEQ ID NO: 1321652 - RNA, 18 nt, Human
gggcccagcagcuguuuc

SEQ ID NO: 1321653 - RNA, 24 nt, Human
guaggauguuuagcagccucucuu

SEQ ID NO: 1321654 - RNA, 20 nt, Human
guuuuucuuaauuuucuuuc

SEQ ID NO: 1321655 - RNA, 21 nt, Human
guuuuuuuuuuuugcuguggg

SEQ ID NO: 1321656 - RNA, 25 nt, Human
uacaagacaaaaaugcuuccucuca

SEQ ID NO: 1321657 - RNA, 23 nt, Human
uaggauguuuagcagccucucuu

SEQ ID NO: 1321658 - RNA, 22 nt, Human
uccauaggcagaggagccucua

SEQ ID NO: 1321659 - RNA, 19 nt, Human
ucucaagauuucuucuguc

SEQ ID NO: 1321660 - RNA, 20 nt, Human
ucuuccguagcacaggaauu

SEQ ID NO: 1321661 - RNA, 20 nt, Human
ucuucugucacuacuuuggc

SEQ ID NO: 1321662 - RNA, 19 nt, Human
ugaugauacucucgauuuu

SEQ ID NO: 1321663 - RNA, 21 nt, Human
aggcugcugucucucaaacuu

SEQ ID NO: 1321664 - RNA, 19 nt, Human
acaacuagcuuccuugacc

SEQ ID NO: 1321665 - RNA, 21 nt, Human
agacguggaagacgcgcgcag

SEQ ID NO: 1321666 - RNA, 20 nt, Human
aggaacaguccacccauagc

SEQ ID NO: 1321667 - RNA, 24 nt, Human
aucaauuucagacuaggagauaug

SEQ ID NO: 1321668 - RNA, 21 nt, Human
aucagcuccacggaagagugg

SEQ ID NO: 1321669 - RNA, 22 nt, Human
caaaacuccuccauuaccaacc

SEQ ID NO: 1321670 - RNA, 25 nt, Human
cagccccaaagagcaaaggggacau

SEQ ID NO: 1321671 - RNA, 18 nt, Human
cagcggugcuuccgacga

SEQ ID NO: 1321672 - RNA, 23 nt, Human
caucucguaacugaaauagaagu

SEQ ID NO: 1321673 - RNA, 20 nt, Human
cauuccgugccuccuggagg

SEQ ID NO: 1321674 - RNA, 25 nt, Human
cauuccgugccuccuggagguauca

SEQ ID NO: 1321675 - RNA, 22 nt, Human
ccagcccagccccaaagagcaa

SEQ ID NO: 1321676 - RNA, 23 nt, Human
ccagcccagccccaaagagcaaa

SEQ ID NO: 1321677 - RNA, 24 nt, Human
ccagcccagccccaaagagcaaag

SEQ ID NO: 1321678 - RNA, 20 nt, Human
ccagccccaaagagcaaagg

SEQ ID NO: 1321679 - RNA, 22 nt, Human
cccaaagagcaaaggggacauu

SEQ ID NO: 1321680 - RNA, 22 nt, Human
cccauagcaaagacagaaggac

SEQ ID NO: 1321681 - RNA, 19 nt, Human
cccguccauaucaauuuca

SEQ ID NO: 1321682 - RNA, 22 nt, Human
cccguccauaucaauuucagac

SEQ ID NO: 1321683 - RNA, 27 nt, Human
cgagcaacucuugcaccgaagcgggac

SEQ ID NO: 1321684 - RNA, 23 nt, Human
cgcgagcaacucuugcaccgaag

SEQ ID NO: 1321685 - RNA, 24 nt, Human
cuccauaucaaaggaacaguccac

SEQ ID NO: 1321686 - RNA, 22 nt, Human
cuccuccauuaccaaccaccac

SEQ ID NO: 1321687 - RNA, 21 nt, Human
gagaauagaagcagcauaaga

SEQ ID NO: 1321688 - RNA, 24 nt, Human
gcaaagacagaaggacacggcccu

SEQ ID NO: 1321689 - RNA, 23 nt, Human
gcgccgagagaauagaagcagca

SEQ ID NO: 1321690 - RNA, 25 nt, Human
gcuccuggcagacgucacuagauuc

SEQ ID NO: 1321691 - RNA, 21 nt, Human
gggcaaauugccaaaagcaac

SEQ ID NO: 1321692 - RNA, 19 nt, Human
gucuuauucuucaaaacuc

SEQ ID NO: 1321693 - RNA, 22 nt, Human
uaaauuccguuuuaaucaucuc

SEQ ID NO: 1321694 - RNA, 23 nt, Human
uaagauauccggucagauucgac

SEQ ID NO: 1321695 - RNA, 20 nt, Human
uacuggauucgaccacugcu

SEQ ID NO: 1321696 - RNA, 22 nt, Human
uagagguucugucuucuggcuc

SEQ ID NO: 1321697 - RNA, 21 nt, Human
uagcaaagacagaaggacacg

SEQ ID NO: 1321698 - RNA, 23 nt, Human
uagcuuccuugaccaguuuucua

SEQ ID NO: 1321699 - RNA, 23 nt, Human
uauucccacaacuccacuugcau

SEQ ID NO: 1321700 - RNA, 18 nt, Human
ucaaaggaacaguccacc

SEQ ID NO: 1321701 - RNA, 25 nt, Human
ucuccuaaugucuuauucuucaaaa

SEQ ID NO: 1321702 - RNA, 21 nt, Human
ucugucuucuggcuccuggca

SEQ ID NO: 1321703 - RNA, 19 nt, Human
ugccucgaucgcgagcaac

SEQ ID NO: 1321704 - RNA, 25 nt, Human
ugucuuauucuucaaaacuccucca

SEQ ID NO: 1321705 - RNA, 20 nt, Human
uucaaaacuccuccauuacc

SEQ ID NO: 1321706 - RNA, 18 nt, Human
uugcaccgaagcgggaca

SEQ ID NO: 1321707 - RNA, 20 nt, Human
aaaaaaaaaaggagacucaa

SEQ ID NO: 1321708 - RNA, 22 nt, Human
aaaaaagcguugcucugccucc

SEQ ID NO: 1321709 - RNA, 24 nt, Human
aaaaaggagacucaaguuugaaaa

SEQ ID NO: 1321710 - RNA, 24 nt, Human
aaaaggagacucaaguuugaaaaa

SEQ ID NO: 1321711 - RNA, 19 nt, Human
aaaauuauagaaagccaga

SEQ ID NO: 1321712 - RNA, 21 nt, Human
acuuaaguuauaaacacacag

SEQ ID NO: 1321713 - RNA, 19 nt, Human
agaacccugcccuggccac

SEQ ID NO: 1321714 - RNA, 23 nt, Human
agagggaacuaaucacuucagug

SEQ ID NO: 1321715 - RNA, 22 nt, Human
aggccguuccgcgggggcggcg

SEQ ID NO: 1321716 - RNA, 21 nt, Human
agggaacuaaucacuucagug

SEQ ID NO: 1321717 - RNA, 19 nt, Human
agggggccgagggccgcgg

SEQ ID NO: 1321718 - RNA, 18 nt, Human
auagagaauauguaagac

SEQ ID NO: 1321719 - RNA, 19 nt, Human
auagagcccuggcagaacc

SEQ ID NO: 1321720 - RNA, 19 nt, Human
auauauauagcacuuaagu

SEQ ID NO: 1321721 - RNA, 24 nt, Human
aucacuuaaacagcaaccauauuu

SEQ ID NO: 1321722 - RNA, 22 nt, Human
caccaccuacaaaagugaugag

SEQ ID NO: 1321723 - RNA, 20 nt, Human
cagagcgagggagccgggga

SEQ ID NO: 1321724 - RNA, 22 nt, Human
caggccgggcauggcgggcgcc

SEQ ID NO: 1321725 - RNA, 20 nt, Human
cagguagaacuaccuaguua

SEQ ID NO: 1321726 - RNA, 22 nt, Human
cagugcgggcgaggaauccgcc

SEQ ID NO: 1321727 - RNA, 19 nt, Human
cccgcggcacacgcaccug

SEQ ID NO: 1321728 - RNA, 22 nt, Human
ccggcgcccagcggcgcccgca

SEQ ID NO: 1321729 - RNA, 21 nt, Human
ccuccuccgccgccgccgccg

SEQ ID NO: 1321730 - RNA, 20 nt, Human
ccugcccuggccacggcgaa

SEQ ID NO: 1321731 - RNA, 20 nt, Human
ccuggccacggcgaaaaaaa

SEQ ID NO: 1321732 - RNA, 19 nt, Human
cgaaagcagcucccgccgc

SEQ ID NO: 1321733 - RNA, 22 nt, Human
cgagcgggucuuggugcgggcc

SEQ ID NO: 1321734 - RNA, 23 nt, Human
cgagggggccgagggccgcggcg

SEQ ID NO: 1321735 - RNA, 19 nt, Human
cgccauggguccugccgag

SEQ ID NO: 1321736 - RNA, 21 nt, Human
cgccgccucuuccucuucaca

SEQ ID NO: 1321737 - RNA, 18 nt, Human
cgcggcgcgcgggggccg

SEQ ID NO: 1321738 - RNA, 24 nt, Human
cggcgcgcgggggccgccuucccg

SEQ ID NO: 1321739 - RNA, 18 nt, Human
cguccugccugccccggg

SEQ ID NO: 1321740 - RNA, 24 nt, Human
cucccgccgcggccugccgguacc

SEQ ID NO: 1321741 - RNA, 21 nt, Human
cuccuccgccgccgccgccgc

SEQ ID NO: 1321742 - RNA, 18 nt, Human
cuccucggacucggagcc

SEQ ID NO: 1321743 - RNA, 20 nt, Human
cugccgaggccgccgggucg

SEQ ID NO: 1321744 - RNA, 24 nt, Human
gaagccgaggcggggagccgcagg

SEQ ID NO: 1321745 - RNA, 21 nt, Human
gacagcucggccuccucggac

SEQ ID NO: 1321746 - RNA, 21 nt, Human
gaggaauccgccauggguccu

SEQ ID NO: 1321747 - RNA, 21 nt, Human
gaggaauccgccauggguccu

SEQ ID NO: 1321748 - RNA, 18 nt, Human
gagggagccggggagcgc

SEQ ID NO: 1321749 - RNA, 21 nt, Human
gcaggccgggcauggcgggcg

SEQ ID NO: 1321750 - RNA, 20 nt, Human
gccccagguggaccccugcu

SEQ ID NO: 1321751 - RNA, 20 nt, Human
gcggcacacgcaccugcaag

SEQ ID NO: 1321752 - RNA, 18 nt, Human
gcggcggcggcgaggggg

SEQ ID NO: 1321753 - RNA, 19 nt, Human
ggaagccgaggcggggagc

SEQ ID NO: 1321754 - RNA, 22 nt, Human
ggacgggaagccgaggcgggga

SEQ ID NO: 1321755 - RNA, 21 nt, Human
ggcgccuccuccuccuccgcc

SEQ ID NO: 1321756 - RNA, 19 nt, Human
gggccgagggccgcggcgc

SEQ ID NO: 1321757 - RNA, 22 nt, Human
guuaaaaaaaaaaaggagacuc

SEQ ID NO: 1321758 - RNA, 23 nt, Human
uaagagagggcuaucugcaggcg

SEQ ID NO: 1321759 - RNA, 23 nt, Human
uaagauggacacuauaggaaucc

SEQ ID NO: 1321760 - RNA, 23 nt, Human
uagcacuuaaguuauaaacacac

SEQ ID NO: 1321761 - RNA, 22 nt, Human
uccgccgccgccgccgccucuu

SEQ ID NO: 1321762 - RNA, 18 nt, Human
uccgcgggggcggcggac

SEQ ID NO: 1321763 - RNA, 21 nt, Human
uccuaggccccagguggaccc

SEQ ID NO: 1321764 - RNA, 22 nt, Human
uccuaggccccagguggacccc

SEQ ID NO: 1321765 - RNA, 24 nt, Human
uccuaggccccagguggaccccug

SEQ ID NO: 1321766 - RNA, 23 nt, Human
uccuccgccgccgccgccgccuc

SEQ ID NO: 1321767 - RNA, 22 nt, Human
uccuccuccgccgccgccgcua

SEQ ID NO: 1321768 - RNA, 22 nt, Human
uccuuuauugauuccccagcag

SEQ ID NO: 1321769 - RNA, 19 nt, Human
ucgaugacgccggcgccca

SEQ ID NO: 1321770 - RNA, 18 nt, Human
ucuaaaaacuaacaccac

SEQ ID NO: 1321771 - RNA, 22 nt, Human
ucugccuccuuuauugauuccc

SEQ ID NO: 1321772 - RNA, 18 nt, Human
ugagcuuuaggcuacaac

SEQ ID NO: 1321773 - RNA, 24 nt, Human
ugauuccccagcaggagccagcuu

SEQ ID NO: 1321774 - RNA, 20 nt, Human
ugccgguaccgggaagaccc

SEQ ID NO: 1321775 - RNA, 27 nt, Human
ugcucugccuccuuuauugauucccca

SEQ ID NO: 1321776 - RNA, 22 nt, Human
uggccacggcgaaaaaaaaaaa

SEQ ID NO: 1321777 - RNA, 20 nt, Human
uuacaaaauagcagacaaaa

SEQ ID NO: 1321778 - RNA, 19 nt, Human
uucagugcaacugcagcag

SEQ ID NO: 1321779 - RNA, 21 nt, Human
uuggugcgggccaggcucagc

SEQ ID NO: 1321780 - RNA, 24 nt, Human
uuuaagauggacacuauaggaauc

SEQ ID NO: 1321781 - RNA, 25 nt, Human
aagcaauucuccugccucagccucc

SEQ ID NO: 1321782 - RNA, 24 nt, Human
aaggugcugagaacacagguguga

SEQ ID NO: 1321783 - RNA, 19 nt, Human
aaguagcugggaaugcagg

SEQ ID NO: 1321784 - RNA, 21 nt, Human
aagugauucuccugccucagc

SEQ ID NO: 1321785 - RNA, 21 nt, Human
aaugcaggugcaugccaccau

SEQ ID NO: 1321786 - RNA, 20 nt, Human
acaggauggggguuuugcuc

SEQ ID NO: 1321787 - RNA, 23 nt, Human
acaggugcccaccaccacacccg

SEQ ID NO: 1321788 - RNA, 22 nt, Human
accauagggaaaugucuucuca

SEQ ID NO: 1321789 - RNA, 23 nt, Human
accuaucagguacuggaggugaa

SEQ ID NO: 1321790 - RNA, 21 nt, Human
acucuguugcccaggcuggag

SEQ ID NO: 1321791 - RNA, 25 nt, Human
acucuguugcccaggcuggagugca

SEQ ID NO: 1321792 - RNA, 22 nt, Human
agaacacaggugugagccacca

SEQ ID NO: 1321793 - RNA, 18 nt, Human
agaacucaagggacagga

SEQ ID NO: 1321794 - RNA, 18 nt, Human
agacaggauggggguuuu

SEQ ID NO: 1321795 - RNA, 25 nt, Human
agacaggauggggguuuugcucuaa

SEQ ID NO: 1321796 - RNA, 18 nt, Human
aggaaggagaugaguugg

SEQ ID NO: 1321797 - RNA, 25 nt, Human
aggcaucccggguagacagugguug

SEQ ID NO: 1321798 - RNA, 25 nt, Human
aggcuggagugcaguggcaagaucu

SEQ ID NO: 1321799 - RNA, 24 nt, Human
aggugauccgccugccucggccuc

SEQ ID NO: 1321800 - RNA, 18 nt, Human
aguagcugggauuacagg

SEQ ID NO: 1321801 - RNA, 20 nt, Human
augggguuucaccacauugg

SEQ ID NO: 1321802 - RNA, 24 nt, Human
augggguuucaccacauuggccag

SEQ ID NO: 1321803 - RNA, 18 nt, Human
auucuccugccucagccu

SEQ ID NO: 1321804 - RNA, 24 nt, Human
caaccuccaccuccugggcugaag

SEQ ID NO: 1321805 - RNA, 22 nt, Human
caagcaauucuccugccucagc

SEQ ID NO: 1321806 - RNA, 22 nt, Human
caagccccuccagagaagcaag

SEQ ID NO: 1321807 - RNA, 24 nt, Human
caaggugcugagaacacaggugug

SEQ ID NO: 1321808 - RNA, 19 nt, Human
cacagaacucaagggacag

SEQ ID NO: 1321809 - RNA, 19 nt, Human
cacaggugugagccaccac

SEQ ID NO: 1321810 - RNA, 24 nt, Human
cacauuggccaggcugaucucaaa

SEQ ID NO: 1321811 - RNA, 24 nt, Human
caccacacccggcuaauuuuugua

SEQ ID NO: 1321812 - RNA, 27 nt, Human
caccacauuggccaggcugaucucaaa

SEQ ID NO: 1321813 - RNA, 21 nt, Human
cacugcaaccuccaccuccug

SEQ ID NO: 1321814 - RNA, 23 nt, Human
cacugcaaccuccaccuccuggg

SEQ ID NO: 1321815 - RNA, 24 nt, Human
cagagucuuacucuguugcccagg

SEQ ID NO: 1321816 - RNA, 21 nt, Human
caggcugaucucaaacuccug

SEQ ID NO: 1321817 - RNA, 21 nt, Human
caggugcccaccaccacaccc

SEQ ID NO: 1321818 - RNA, 24 nt, Human
caggugcccaccaccacacccggc

SEQ ID NO: 1321819 - RNA, 21 nt, Human
ccaaggugcugagaacacagg

SEQ ID NO: 1321820 - RNA, 24 nt, Human
ccaaggugcugagaacacaggugu

SEQ ID NO: 1321821 - RNA, 27 nt, Human
ccaccucccagguucaagcaauucuuu

SEQ ID NO: 1321822 - RNA, 24 nt, Human
ccaccuccugggcugaagugauuc

SEQ ID NO: 1321823 - RNA, 21 nt, Human
ccagggggcaacgugugccag

SEQ ID NO: 1321824 - RNA, 23 nt, Human
cccaaguagcugggaaugcaggu

SEQ ID NO: 1321825 - RNA, 23 nt, Human
cccagguucaagcaauucuccug

SEQ ID NO: 1321826 - RNA, 23 nt, Human
cccgaguagcugggauuacaggu

SEQ ID NO: 1321827 - RNA, 24 nt, Human
cccgaguagcugggauuacaggug

SEQ ID NO: 1321828 - RNA, 21 nt, Human
ccgaguagcugggauuacagg

SEQ ID NO: 1321829 - RNA, 22 nt, Human
ccuccaccuccugggcugaagu

SEQ ID NO: 1321830 - RNA, 24 nt, Human
ccuccaccuccugggcugaaguga

SEQ ID NO: 1321831 - RNA, 24 nt, Human
ccucccagguucaagcaauucucc

SEQ ID NO: 1321832 - RNA, 24 nt, Human
ccuccugggcugaagugauucucc

SEQ ID NO: 1321833 - RNA, 21 nt, Human
ccugaccuaaggugauccgcc

SEQ ID NO: 1321834 - RNA, 23 nt, Human
ccugaccuaaggugauccgccug

SEQ ID NO: 1321835 - RNA, 23 nt, Human
ccugccucagccucccaaguagc

SEQ ID NO: 1321836 - RNA, 23 nt, Human
ccugccucagccucccgaguagc

SEQ ID NO: 1321837 - RNA, 24 nt, Human
ccugccucagccucccgaguagcu

SEQ ID NO: 1321838 - RNA, 24 nt, Human
ccugccucggccucccaaggugcu

SEQ ID NO: 1321839 - RNA, 23 nt, Human
cuaaggugauccgccugccucgg

SEQ ID NO: 1321840 - RNA, 24 nt, Human
cucacugcaaccuccaccuccugg

SEQ ID NO: 1321841 - RNA, 27 nt, Human
cucacugcaaccuccaccuccugggcu

SEQ ID NO: 1321842 - RNA, 23 nt, Human
cucagccucccgaguagcuggga

SEQ ID NO: 1321843 - RNA, 26 nt, Human
cuccugaccuaaggugauccgccugc

SEQ ID NO: 1321844 - RNA, 25 nt, Human
cuccugggcugaagugauucuccug

SEQ ID NO: 1321845 - RNA, 18 nt, Human
cugcaaccuccaccuccu

SEQ ID NO: 1321846 - RNA, 23 nt, Human
cugcaaccuccaccuccugggcu

SEQ ID NO: 1321847 - RNA, 23 nt, Human
cugccucagccucccaaguagcu

SEQ ID NO: 1321848 - RNA, 24 nt, Human
cuggggaacccaccucccagguuc

SEQ ID NO: 1321849 - RNA, 26 nt, Human
cuuacugugcugggaguacuugugga

SEQ ID NO: 1321850 - RNA, 19 nt, Human
cuuguggagugggggcugu

SEQ ID NO: 1321851 - RNA, 21 nt, Human
cuuguggagugggggcugugu

SEQ ID NO: 1321852 - RNA, 20 nt, Human
cuuucguauuuuuaguagag

SEQ ID NO: 1321853 - RNA, 18 nt, Human
gaacacaggugugagcca

SEQ ID NO: 1321854 - RNA, 19 nt, Human
gacacagaacucaagggac

SEQ ID NO: 1321855 - RNA, 21 nt, Human
gacaggaaggagaugaguugg

SEQ ID NO: 1321856 - RNA, 24 nt, Human
gaccuaaggugauccgccugccuc

SEQ ID NO: 1321857 - RNA, 18 nt, Human
gacuccauccugcauccc

SEQ ID NO: 1321858 - RNA, 20 nt, Human
gagaugaguuggaggcuggg

SEQ ID NO: 1321859 - RNA, 20 nt, Human
gagaugggguuucaccacau

SEQ ID NO: 1321860 - RNA, 24 nt, Human
gagaugggguuucaccacauuggc

SEQ ID NO: 1321861 - RNA, 21 nt, Human
gaguuggaggcugggucagug

SEQ ID NO: 1321862 - RNA, 21 nt, Human
gauucuccugccucagccucc

SEQ ID NO: 1321863 - RNA, 20 nt, Human
gcaaccuccaccuccugggc

SEQ ID NO: 1321864 - RNA, 19 nt, Human
gcccaggcuggagugcagu

SEQ ID NO: 1321865 - RNA, 21 nt, Human
gccugguuuggggaauguucg

SEQ ID NO: 1321866 - RNA, 24 nt, Human
gcuggagugcaguggcaagaucuc

SEQ ID NO: 1321867 - RNA, 20 nt, Human
ggagacagacaggauggggg

SEQ ID NO: 1321868 - RNA, 22 nt, Human
gggguuucaccacauuggccag

SEQ ID NO: 1321869 - RNA, 19 nt, Human
gugauccgccugccucggc

SEQ ID NO: 1321870 - RNA, 24 nt, Human
gugauucuccugccucagccuccc

SEQ ID NO: 1321871 - RNA, 18 nt, Human
gugcugagaacacaggug

SEQ ID NO: 1321872 - RNA, 18 nt, Human
gugcugagaacacaggug

SEQ ID NO: 1321873 - RNA, 21 nt, Human
gugcugagaacacagguguga

SEQ ID NO: 1321874 - RNA, 25 nt, Human
guggucccugccagugaugcuggug

SEQ ID NO: 1321875 - RNA, 21 nt, Human
gugugagccaccacgcugggc

SEQ ID NO: 1321876 - RNA, 18 nt, Human
uaagacagagucuuacuc

SEQ ID NO: 1321877 - RNA, 22 nt, Human
uaagacagagucuuacucuguu

SEQ ID NO: 1321878 - RNA, 24 nt, Human
uaauuuuuguauucuuaguagaga

SEQ ID NO: 1321879 - RNA, 23 nt, Human
uacaggugcccaccaccacaccc

SEQ ID NO: 1321880 - RNA, 18 nt, Human
uagcauuguaacacagac

SEQ ID NO: 1321881 - RNA, 22 nt, Human
uagcuacgacagagaggggcag

SEQ ID NO: 1321882 - RNA, 19 nt, Human
uagcugggaaugcaggugc

SEQ ID NO: 1321883 - RNA, 24 nt, Human
uaggaaguugacguuggacucauu

SEQ ID NO: 1321884 - RNA, 19 nt, Human
uaguagagaugggguuuca

SEQ ID NO: 1321885 - RNA, 23 nt, Human
uaguagagaugggguuucaccac

SEQ ID NO: 1321886 - RNA, 25 nt, Human
uaguagagaugggguuucaccacau

SEQ ID NO: 1321887 - RNA, 19 nt, Human
uauguguuucucaguugga

SEQ ID NO: 1321888 - RNA, 23 nt, Human
ucacugcaaccuccaccuccugg

SEQ ID NO: 1321889 - RNA, 24 nt, Human
ucacugcaaccuccaccuccuggg

SEQ ID NO: 1321890 - RNA, 25 nt, Human
ucacugcaaccuccaccuccugggc

SEQ ID NO: 1321891 - RNA, 27 nt, Human
ucacugcaaccuccaccuccugggcug

SEQ ID NO: 1321892 - RNA, 20 nt, Human
ucagccucccaaguagcugg

SEQ ID NO: 1321893 - RNA, 20 nt, Human
ucagccucccgaguagcugg

SEQ ID NO: 1321894 - RNA, 22 nt, Human
uccagagaagcaagucuuacug

SEQ ID NO: 1321895 - RNA, 23 nt, Human
ucccaaggugcugagaacacagg

SEQ ID NO: 1321896 - RNA, 24 nt, Human
ucccaaguagcugggaaugcaggu

SEQ ID NO: 1321897 - RNA, 21 nt, Human
ucccagguucaagcaauucuc

SEQ ID NO: 1321898 - RNA, 24 nt, Human
ucccagguucaagcaauucuccug

SEQ ID NO: 1321899 - RNA, 23 nt, Human
ucccgaguagcugggauuacagg

SEQ ID NO: 1321900 - RNA, 24 nt, Human
ucccgaguagcugggauuacaggu

SEQ ID NO: 1321901 - RNA, 24 nt, Human
uccugggcugaagugauucuccug

SEQ ID NO: 1321902 - RNA, 18 nt, Human
ucggccucccaaggugcu

SEQ ID NO: 1321903 - RNA, 23 nt, Human
ucuagacuccauccugcaucccc

SEQ ID NO: 1321904 - RNA, 26 nt, Human
ucuccugccucagccucccaaguagc

SEQ ID NO: 1321905 - RNA, 24 nt, Human
ucuccugccucagccucccgagua

SEQ ID NO: 1321906 - RNA, 18 nt, Human
ucuguugcccaggcugga

SEQ ID NO: 1321907 - RNA, 22 nt, Human
ucuuacucuguugcccaggcug

SEQ ID NO: 1321908 - RNA, 23 nt, Human
ucuuacucuguugcccaggcugg

SEQ ID NO: 1321909 - RNA, 24 nt, Human
ucuuacucuguugcccaggcugga

SEQ ID NO: 1321910 - RNA, 19 nt, Human
ugacacagaacucaaggga

SEQ ID NO: 1321911 - RNA, 18 nt, Human
ugaccuaaggugauccgc

SEQ ID NO: 1321912 - RNA, 24 nt, Human
ugaccuaaggugauccgccugccu

SEQ ID NO: 1321913 - RNA, 18 nt, Human
ugacguuggacucauugg

SEQ ID NO: 1321914 - RNA, 22 nt, Human
ugagaacacaggugugagccac

SEQ ID NO: 1321915 - RNA, 24 nt, Human
ugagaacacaggugugagccacca

SEQ ID NO: 1321916 - RNA, 20 nt, Human
ugcacuggacauuucaagcc

SEQ ID NO: 1321917 - RNA, 22 nt, Human
ugcacuggacauuucaagcccc

SEQ ID NO: 1321918 - RNA, 21 nt, Human
ugcccaccaccacacccggcu

SEQ ID NO: 1321919 - RNA, 18 nt, Human
ugcccaggcuggagugca

SEQ ID NO: 1321920 - RNA, 21 nt, Human
ugcccaggcuggagugcagug

SEQ ID NO: 1321921 - RNA, 22 nt, Human
ugcccaggcuggagugcagugg

SEQ ID NO: 1321922 - RNA, 24 nt, Human
ugcccaggcuggagugcaguggca

SEQ ID NO: 1321923 - RNA, 21 nt, Human
ugcccugggcuuuaauuauuu

SEQ ID NO: 1321924 - RNA, 24 nt, Human
ugccucagccucccaaguagcugg

SEQ ID NO: 1321925 - RNA, 24 nt, Human
ugccucagccucccgaguagcugg

SEQ ID NO: 1321926 - RNA, 21 nt, Human
ugccucggccucccaaggugc

SEQ ID NO: 1321927 - RNA, 24 nt, Human
ugccucggccucccaaggugcuga

SEQ ID NO: 1321928 - RNA, 22 nt, Human
ugccugggaugagaguggagac

SEQ ID NO: 1321929 - RNA, 21 nt, Human
ugccugguuuggggaauguuc

SEQ ID NO: 1321930 - RNA, 18 nt, Human
uggaggcugggucagugg

SEQ ID NO: 1321931 - RNA, 22 nt, Human
uggagugcaguggcaagaucuc

SEQ ID NO: 1321932 - RNA, 24 nt, Human
uggccaggcugaucucaaacuccu

SEQ ID NO: 1321933 - RNA, 22 nt, Human
ugggaaugcaggugcaugccac

SEQ ID NO: 1321934 - RNA, 24 nt, Human
ugggaaugcaggugcaugccacca

SEQ ID NO: 1321935 - RNA, 20 nt, Human
ugggaugagaguggagacag

SEQ ID NO: 1321936 - RNA, 21 nt, Human
ugggauuacaggugcccacca

SEQ ID NO: 1321937 - RNA, 24 nt, Human
ugggauuacaggugcccaccacca

SEQ ID NO: 1321938 - RNA, 24 nt, Human
ugggguuucaccacauuggccagg

SEQ ID NO: 1321939 - RNA, 21 nt, Human
uggugacucacaugacgaugu

SEQ ID NO: 1321940 - RNA, 22 nt, Human
ugugacacagaacucaagggac

SEQ ID NO: 1321941 - RNA, 21 nt, Human
uguugcccaggcuggagugca

SEQ ID NO: 1321942 - RNA, 24 nt, Human
uuacucuguugcccaggcuggagu

SEQ ID NO: 1321943 - RNA, 18 nt, Human
uuaguagagaugggguuu

SEQ ID NO: 1321944 - RNA, 22 nt, Human
uuaguagagaugggguuucacc

SEQ ID NO: 1321945 - RNA, 25 nt, Human
uuaguagagaugggguuucaccaca

SEQ ID NO: 1321946 - RNA, 21 nt, Human
uucaagcaauucuccugccuc

SEQ ID NO: 1321947 - RNA, 24 nt, Human
uucaagcaauucuccugccucagc

SEQ ID NO: 1321948 - RNA, 24 nt, Human
uucuuaguagagaugggguuucac

SEQ ID NO: 1321949 - RNA, 19 nt, Human
uugauauguguuucucagu

SEQ ID NO: 1321950 - RNA, 24 nt, Human
uugcccaggcuggagugcaguggc

SEQ ID NO: 1321951 - RNA, 19 nt, Human
uugcuugggacccaggggg

SEQ ID NO: 1321952 - RNA, 20 nt, Human
uuuuguauucuuaguagaga

SEQ ID NO: 1321953 - RNA, 20 nt, Human
uuuuuguauucuuaguagag

SEQ ID NO: 1321954 - RNA, 19 nt, Human
uuuuuuuuuuaagacagag

SEQ ID NO: 1321955 - RNA, 24 nt, Human
uuuuuuuuuuuuaagacagagucu

SEQ ID NO: 1321956 - RNA, 26 nt, Human
aaaaggugucaaaguauuuacaaggg

SEQ ID NO: 1321957 - RNA, 21 nt, Human
aaacacacacaaacgcacaca

SEQ ID NO: 1321958 - RNA, 22 nt, Human
aacagcaucacccaaagacgag

SEQ ID NO: 1321959 - RNA, 20 nt, Human
acacaaacacacacaaacgc

SEQ ID NO: 1321960 - RNA, 22 nt, Human
agaacacacagacacacaaaca

SEQ ID NO: 1321961 - RNA, 23 nt, Human
agacacacaaacacacacaaacg

SEQ ID NO: 1321962 - RNA, 21 nt, Human
agacgagaugauaacaaugug

SEQ ID NO: 1321963 - RNA, 24 nt, Human
aggcaauuagcagcaaaauaugcc

SEQ ID NO: 1321964 - RNA, 21 nt, Human
aguauccucucggcuucaucc

SEQ ID NO: 1321965 - RNA, 18 nt, Human
augauaacaaugugccuu

SEQ ID NO: 1321966 - RNA, 20 nt, Human
caaacgcacacauacacaca

SEQ ID NO: 1321967 - RNA, 28 nt, Human
cacaaacacacacaaacgcacacauaca

SEQ ID NO: 1321968 - RNA, 19 nt, Human
cacacaaaauccugcacac

SEQ ID NO: 1321969 - RNA, 28 nt, Human
cacacaaacacacacaaacgcacacaua

SEQ ID NO: 1321970 - RNA, 22 nt, Human
cacacacaaacgcacacauaca

SEQ ID NO: 1321971 - RNA, 25 nt, Human
cacacagacacacaaacacacacaa

SEQ ID NO: 1321972 - RNA, 20 nt, Human
cagaacacacagacacacaa

SEQ ID NO: 1321973 - RNA, 22 nt, Human
cagaacacacagacacacaaac

SEQ ID NO: 1321974 - RNA, 23 nt, Human
cagaacacacagacacacaaaca

SEQ ID NO: 1321975 - RNA, 19 nt, Human
cagugaggaacagcaucac

SEQ ID NO: 1321976 - RNA, 24 nt, Human
ccagagaccucugcaguauccucu

SEQ ID NO: 1321977 - RNA, 19 nt, Human
cucucggcuucauccucgc

SEQ ID NO: 1321978 - RNA, 25 nt, Human
cucucggcuucauccucgccucacu

SEQ ID NO: 1321979 - RNA, 18 nt, Human
cugcaguauccucucggc

SEQ ID NO: 1321980 - RNA, 22 nt, Human
gcacacauacacacaugcacca

SEQ ID NO: 1321981 - RNA, 22 nt, Human
gcacacggauguauacagcagc

SEQ ID NO: 1321982 - RNA, 22 nt, Human
gugaggaacagcaucacccaaa

SEQ ID NO: 1321983 - RNA, 19 nt, Human
uaaaaggaaaauuauccau

SEQ ID NO: 1321984 - RNA, 18 nt, Human
uaauugcccaaaccugau

SEQ ID NO: 1321985 - RNA, 20 nt, Human
uaauugcccaaaccugauuu

SEQ ID NO: 1321986 - RNA, 22 nt, Human
uaugaaauuccuuaggauuuaa

SEQ ID NO: 1321987 - RNA, 18 nt, Human
caccuucaggccuuguag

SEQ ID NO: 1321988 - RNA, 25 nt, Human
caccuucaggccuuguagggggucu

SEQ ID NO: 1321989 - RNA, 22 nt, Human
gaggaacggcaccuucaggccu

SEQ ID NO: 1321990 - RNA, 19 nt, Human
gucugccccuccaccagcc

SEQ ID NO: 1321991 - RNA, 21 nt, Human
guuucucgugggcaucgcagc

SEQ ID NO: 1321992 - RNA, 23 nt, Human
ucuccucuggccacaagaggagc

SEQ ID NO: 1321993 - RNA, 19 nt, Human
ugucccucuccucuggcca

SEQ ID NO: 1321994 - RNA, 19 nt, Human
uucucgugggcaucgcagc

SEQ ID NO: 1321995 - RNA, 20 nt, Human
uucucgugggcaucgcagcu

SEQ ID NO: 1321996 - RNA, 18 nt, Human
agcaggugcaccccugcu

SEQ ID NO: 1321997 - RNA, 21 nt, Human
agccacaggcccagcaggccc

SEQ ID NO: 1321998 - RNA, 23 nt, Human
aggcccagcaggcccaggaguga

SEQ ID NO: 1321999 - RNA, 19 nt, Human
aggcccaggagugaggcgg

SEQ ID NO: 1322000 - RNA, 23 nt, Human
caccccugcugcagccacgaggg

SEQ ID NO: 1322001 - RNA, 19 nt, Human
cagaaaaagaggaugaagg

SEQ ID NO: 1322002 - RNA, 25 nt, Human
cagccacaggcccagcaggcccagg

SEQ ID NO: 1322003 - RNA, 23 nt, Human
ccacacagaggauccagcugugu

SEQ ID NO: 1322004 - RNA, 21 nt, Human
ccagccccaccgagcacacgc

SEQ ID NO: 1322005 - RNA, 18 nt, Human
ccccaaagggcagcugcc

SEQ ID NO: 1322006 - RNA, 22 nt, Human
ccccugcugcagccacgagggg

SEQ ID NO: 1322007 - RNA, 26 nt, Human
ccggggcuggggcgcgugcuaggggc

SEQ ID NO: 1322008 - RNA, 20 nt, Human
ccugucucuccuugucuucu

SEQ ID NO: 1322009 - RNA, 25 nt, Human
cgcccaggcuguaagccacgaagac

SEQ ID NO: 1322010 - RNA, 21 nt, Human
cgcuccagccccaccgagcac

SEQ ID NO: 1322011 - RNA, 26 nt, Human
cggcggacccuggggauaggaggugc

SEQ ID NO: 1322012 - RNA, 22 nt, Human
cucggcggacccuggggauagg

SEQ ID NO: 1322013 - RNA, 25 nt, Human
gaaggugagcagcaggugcaccccc

SEQ ID NO: 1322014 - RNA, 18 nt, Human
gacccugcuccggggcug

SEQ ID NO: 1322015 - RNA, 22 nt, Human
gagcggggccgggucgcaagaa

SEQ ID NO: 1322016 - RNA, 21 nt, Human
gcacugggcguggcagccaca

SEQ ID NO: 1322017 - RNA, 18 nt, Human
gcucucggcggacccugg

SEQ ID NO: 1322018 - RNA, 25 nt, Human
ggagcggggccgggucgcaagaaga

SEQ ID NO: 1322019 - RNA, 20 nt, Human
ggcacaggggcccagaaaaa

SEQ ID NO: 1322020 - RNA, 23 nt, Human
gguccgcggccgagagcuggggg

SEQ ID NO: 1322021 - RNA, 24 nt, Human
guccugucucuccuugucuucuua

SEQ ID NO: 1322022 - RNA, 18 nt, Human
guggcucucggcggaccc

SEQ ID NO: 1322023 - RNA, 19 nt, Human
guggggcuagcgcggggcc

SEQ ID NO: 1322024 - RNA, 21 nt, Human
uaagccagccgcuccagcccc

SEQ ID NO: 1322025 - RNA, 22 nt, Human
uagcgcggggccaugccccgcc

SEQ ID NO: 1322026 - RNA, 22 nt, Human
uaggagaccgcggccgccacca

SEQ ID NO: 1322027 - RNA, 18 nt, Human
uccagccccaccgagcac

SEQ ID NO: 1322028 - RNA, 21 nt, Human
uccgcagguaggagaccgcgg

SEQ ID NO: 1322029 - RNA, 22 nt, Human
ucucguccgaguuguccuccuc

SEQ ID NO: 1322030 - RNA, 24 nt, Human
ucucguccgaguuguccuccucca

SEQ ID NO: 1322031 - RNA, 23 nt, Human
ucucuccuugucuucuuacaaga

SEQ ID NO: 1322032 - RNA, 18 nt, Human
ugagcagcaggugcaccc

SEQ ID NO: 1322033 - RNA, 24 nt, Human
ugaguucagucuuguucagggugc

SEQ ID NO: 1322034 - RNA, 19 nt, Human
ugcaccccugcugcagcca

SEQ ID NO: 1322035 - RNA, 21 nt, Human
ugcaccccugcugcagccacg

SEQ ID NO: 1322036 - RNA, 19 nt, Human
ugcaggacccgaggcacag

SEQ ID NO: 1322037 - RNA, 22 nt, Human
ugcugcccacgccccaaagggc

SEQ ID NO: 1322038 - RNA, 19 nt, Human
ugcuggggccgcgggaugu

SEQ ID NO: 1322039 - RNA, 20 nt, Human
uggcagccacaggcccagca

SEQ ID NO: 1322040 - RNA, 19 nt, Human
uggggcuagcgcggggcca

SEQ ID NO: 1322041 - RNA, 21 nt, Human
uggggggucuggagcggggcc

SEQ ID NO: 1322042 - RNA, 20 nt, Human
uguggggcuagcgcggggcc

SEQ ID NO: 1322043 - RNA, 22 nt, Human
uuuucuguaaaaaaucguggcu

SEQ ID NO: 1322044 - RNA, 24 nt, Human
aauuaaaaaaaaaucucauagucc

SEQ ID NO: 1322045 - RNA, 24 nt, Human
aucagccaccuccuauucuuccag

SEQ ID NO: 1322046 - RNA, 24 nt, Human
cuucuccauccuccuucucagcug

SEQ ID NO: 1322047 - RNA, 24 nt, Human
gauucugucaccuccuucuccauc

SEQ ID NO: 1322048 - RNA, 24 nt, Human
gccaccuccuauucuuccagauuc

SEQ ID NO: 1322049 - RNA, 19 nt, Human
ucucuaauaaaugacugca

SEQ ID NO: 1322050 - RNA, 22 nt, Human
ucuuccagauucugucaccucc

SEQ ID NO: 1322051 - RNA, 18 nt, Human
aaggaugaacccacugga

SEQ ID NO: 1322052 - RNA, 22 nt, Human
accaugaagggggcuuccugga

SEQ ID NO: 1322053 - RNA, 19 nt, Human
aggaggacgggaaaggacu

SEQ ID NO: 1322054 - RNA, 23 nt, Human
agggggcuuccuggaggagggug

SEQ ID NO: 1322055 - RNA, 19 nt, Human
aggugcaggaggcugugcu

SEQ ID NO: 1322056 - RNA, 20 nt, Human
cagauagaccaggaaggcag

SEQ ID NO: 1322057 - RNA, 21 nt, Human
caggauacagaagauguucug

SEQ ID NO: 1322058 - RNA, 22 nt, Human
caggauacagaagauguucuga

SEQ ID NO: 1322059 - RNA, 24 nt, Human
cugagggguggauugguugggggu

SEQ ID NO: 1322060 - RNA, 18 nt, Human
gacugagggguggauugg

SEQ ID NO: 1322061 - RNA, 21 nt, Human
gaugaggaggacgggaaagga

SEQ ID NO: 1322062 - RNA, 25 nt, Human
ggaaaggacuugaggacauugcaga

SEQ ID NO: 1322063 - RNA, 19 nt, Human
ggacauugcagauagacca

SEQ ID NO: 1322064 - RNA, 23 nt, Human
ggcaggcugggaggugaggaggu

SEQ ID NO: 1322065 - RNA, 18 nt, Human
ucuccuugagacaggggu

SEQ ID NO: 1322066 - RNA, 22 nt, Human
ugaacccagaccaugaaggggg

SEQ ID NO: 1322067 - RNA, 22 nt, Human
ugagaggaaggcugcccugugu

SEQ ID NO: 1322068 - RNA, 18 nt, Human
uggaggagggugagguga

SEQ ID NO: 1322069 - RNA, 23 nt, Human
uggaggagggugaggugaggcag

SEQ ID NO: 1322070 - RNA, 20 nt, Human
uggaguuuggaugaggagga

SEQ ID NO: 1322071 - RNA, 26 nt, Human
ugggaggugaggaggugcaggaggcu

SEQ ID NO: 1322072 - RNA, 20 nt, Human
ugguugggggugugcugagg

SEQ ID NO: 1322073 - RNA, 22 nt, Human
ugugcugaggaaggauggugag

SEQ ID NO: 1322074 - RNA, 25 nt, Human
aggcuaaaaaagaauuugugacuga

SEQ ID NO: 1322075 - RNA, 20 nt, Human
agugaauuuuuucuugggga

SEQ ID NO: 1322076 - RNA, 22 nt, Human
uaaaaaaccauauauauugugg

SEQ ID NO: 1322077 - RNA, 21 nt, Human
uaaaugauccaacauuuucuu

SEQ ID NO: 1322078 - RNA, 23 nt, Human
ugagagaaaauauuuuuucucua

SEQ ID NO: 1322079 - RNA, 20 nt, Human
aaguaacuuucucaugguca

SEQ ID NO: 1322080 - RNA, 19 nt, Human
acgaggcuaaaagaggccc

SEQ ID NO: 1322081 - RNA, 21 nt, Human
agcgggcgccucccgccuccu

SEQ ID NO: 1322082 - RNA, 18 nt, Human
aggcccggggcucggcga

SEQ ID NO: 1322083 - RNA, 19 nt, Human
caagaccagaaaacgucca

SEQ ID NO: 1322084 - RNA, 23 nt, Human
caagaccagaaaacguccagcug

SEQ ID NO: 1322085 - RNA, 21 nt, Human
caccuuccugaagcaagacca

SEQ ID NO: 1322086 - RNA, 19 nt, Human
cagcgggcgccucccgccu

SEQ ID NO: 1322087 - RNA, 22 nt, Human
cagcgggcgccucccgccuccu

SEQ ID NO: 1322088 - RNA, 18 nt, Human
cagcuagcaaguuguggc

SEQ ID NO: 1322089 - RNA, 23 nt, Human
ccagaaaacguccagcagaggca

SEQ ID NO: 1322090 - RNA, 21 nt, Human
ccccgcgaggggagaggcgga

SEQ ID NO: 1322091 - RNA, 20 nt, Human
ccucccucucuggggacgag

SEQ ID NO: 1322092 - RNA, 20 nt, Human
cgagagccagcccggucccu

SEQ ID NO: 1322093 - RNA, 21 nt, Human
gagagcagcgguugccggggc

SEQ ID NO: 1322094 - RNA, 25 nt, Human
gcgccucccgccuccuggaaggcca

SEQ ID NO: 1322095 - RNA, 22 nt, Human
ggcugugccgggcaccggcucc

SEQ ID NO: 1322096 - RNA, 21 nt, Human
ggggagaggcggagagcagcg

SEQ ID NO: 1322097 - RNA, 22 nt, Human
guugccggggcucagcugccuc

SEQ ID NO: 1322098 - RNA, 23 nt, Human
uaaaagaggcccggggcucggcg

SEQ ID NO: 1322099 - RNA, 23 nt, Human
uaaaugucuucuuuugagaaagg

SEQ ID NO: 1322100 - RNA, 19 nt, Human
ucgacagcgggcgccuccc

SEQ ID NO: 1322101 - RNA, 22 nt, Human
ugaagcaagaccagaaaacguc

SEQ ID NO: 1322102 - RNA, 18 nt, Human
ugagaaaggcgaaguaac

SEQ ID NO: 1322103 - RNA, 24 nt, Human
ugagaaaggcgaaguaacuuucuc

SEQ ID NO: 1322104 - RNA, 21 nt, Human
ugccggggcucagcugccucg

SEQ ID NO: 1322105 - RNA, 24 nt, Human
ugguggcgcguggggagcuucuag

SEQ ID NO: 1322106 - RNA, 22 nt, Human
uuccugaagcaagaccagaaaa

SEQ ID NO: 1322107 - RNA, 23 nt, Human
uuggcggcauaaaugucuucuuu

SEQ ID NO: 1322108 - RNA, 18 nt, Human
agaggacuugggcuccag

SEQ ID NO: 1322109 - RNA, 21 nt, Human
aggacccaguaacgcagcccu

SEQ ID NO: 1322110 - RNA, 20 nt, Human
ggacaccagaggacuugggc

SEQ ID NO: 1322111 - RNA, 19 nt, Human
aaaaucccauccauuugcu

SEQ ID NO: 1322112 - RNA, 26 nt, Human
aaacauccuccuguagcgucauuucc

SEQ ID NO: 1322113 - RNA, 23 nt, Human
aaacuuucaacauauaaacgucu

SEQ ID NO: 1322114 - RNA, 22 nt, Human
aacuucgaguuauaagccaaaa

SEQ ID NO: 1322115 - RNA, 18 nt, Human
aagcagaaagagcaacaa

SEQ ID NO: 1322116 - RNA, 27 nt, Human
aagcagaacacagaaaaagccuuucgg

SEQ ID NO: 1322117 - RNA, 24 nt, Human
aagcagaacacagaaaacauaaag

SEQ ID NO: 1322118 - RNA, 24 nt, Human
agaaaaagaaaaaucugguauaaa

SEQ ID NO: 1322119 - RNA, 21 nt, Human
agaaaacauaaagaaauaagg

SEQ ID NO: 1322120 - RNA, 24 nt, Human
agaaauaagguauuggggccuaaa

SEQ ID NO: 1322121 - RNA, 19 nt, Human
agaugugcuugcaaaaugu

SEQ ID NO: 1322122 - RNA, 18 nt, Human
aguacaauuuucaaauau

SEQ ID NO: 1322123 - RNA, 18 nt, Human
agugcacucacaacuacc

SEQ ID NO: 1322124 - RNA, 25 nt, Human
auuucuggaucugaauucaauggaa

SEQ ID NO: 1322125 - RNA, 21 nt, Human
caaaauguguaaugcuguagu

SEQ ID NO: 1322126 - RNA, 20 nt, Human
caacaaauaaugcccuucaa

SEQ ID NO: 1322127 - RNA, 24 nt, Human
caacugaacuaaaaguaaacacuc

SEQ ID NO: 1322128 - RNA, 19 nt, Human
caccuugucucuugccuuc

SEQ ID NO: 1322129 - RNA, 22 nt, Human
cagaaacuuaagaaaacuucga

SEQ ID NO: 1322130 - RNA, 22 nt, Human
cagaaagagcaacaacauuuua

SEQ ID NO: 1322131 - RNA, 25 nt, Human
cagaacacagaaaacauaaagaaau

SEQ ID NO: 1322132 - RNA, 26 nt, Human
cauuuaaaaaucccauccauuugcuc

SEQ ID NO: 1322133 - RNA, 30 nt, Human
ccuaaaaauuucauuuaaaaaucccauccu

SEQ ID NO: 1322134 - RNA, 20 nt, Human
cugaauucaauggaauuuca

SEQ ID NO: 1322135 - RNA, 19 nt, Human
cuuuuugcaaaggaaacug

SEQ ID NO: 1322136 - RNA, 30 nt, Human
gccaaaaugucaucagaaaaagaaaaaucc

SEQ ID NO: 1322137 - RNA, 20 nt, Human
ggccuugaucuucagaaacu

SEQ ID NO: 1322138 - RNA, 20 nt, Human
gugauucuuuugagacuuuu

SEQ ID NO: 1322139 - RNA, 23 nt, Human
uaagauggacuauagauuacaaa

SEQ ID NO: 1322140 - RNA, 22 nt, Human
uaagcagaaagagcaacaacau

SEQ ID NO: 1322141 - RNA, 20 nt, Human
uaagguauuggggccuaaaa

SEQ ID NO: 1322142 - RNA, 21 nt, Human
uaggccuugaucuucagaaac

SEQ ID NO: 1322143 - RNA, 22 nt, Human
uauucuccuguguauuucugga

SEQ ID NO: 1322144 - RNA, 24 nt, Human
uauuuuccacaauagcauuuugaa

SEQ ID NO: 1322145 - RNA, 18 nt, Human
ucagaaaaagaaaaaucu

SEQ ID NO: 1322146 - RNA, 20 nt, Human
ucaucagaaaaagaaaaauc

SEQ ID NO: 1322147 - RNA, 22 nt, Human
uccuguagcgucauuuccauuu

SEQ ID NO: 1322148 - RNA, 19 nt, Human
ucucuaugaaaccaugcuc

SEQ ID NO: 1322149 - RNA, 25 nt, Human
ucucuugccuucuuauaauaugaaa

SEQ ID NO: 1322150 - RNA, 21 nt, Human
ucugaauucaauggaauuuca

SEQ ID NO: 1322151 - RNA, 27 nt, Human
ugacaaaaagagagagaugcucccaaa

SEQ ID NO: 1322152 - RNA, 23 nt, Human
ugcccugagggaaaaauaagaug

SEQ ID NO: 1322153 - RNA, 21 nt, Human
uggaaaaaaacugaaugaaca

SEQ ID NO: 1322154 - RNA, 25 nt, Human
uggaaaaaaacugaaugaacauauu

SEQ ID NO: 1322155 - RNA, 20 nt, Human
uggaaaagagcaaauaguug

SEQ ID NO: 1322156 - RNA, 25 nt, Human
ugguauaaaauuuucuaccauaagg

SEQ ID NO: 1322157 - RNA, 20 nt, Human
uggugaaguucucucuauga

SEQ ID NO: 1322158 - RNA, 20 nt, Human
ugucagauuuuuaaaaagcc

SEQ ID NO: 1322159 - RNA, 22 nt, Human
ugucaucagaaaaagaaaaauc

SEQ ID NO: 1322160 - RNA, 20 nt, Human
uuuaaaaaucccauccauuu

SEQ ID NO: 1322161 - RNA, 21 nt, Human
aaccucugucucccaggugcc

SEQ ID NO: 1322162 - RNA, 24 nt, Human
aacgauucuccugccucagccucc

SEQ ID NO: 1322163 - RNA, 22 nt, Human
acugcaaccucugucucccagg

SEQ ID NO: 1322164 - RNA, 24 nt, Human
aguacaguggugcgaucucggcug

SEQ ID NO: 1322165 - RNA, 22 nt, Human
caaacgauucuccugccucagc

SEQ ID NO: 1322166 - RNA, 27 nt, Human
caaacgauucuccugccucagccuccc

SEQ ID NO: 1322167 - RNA, 20 nt, Human
caguuggggaagaaggaccc

SEQ ID NO: 1322168 - RNA, 21 nt, Human
ccucugucucccaggugcaaa

SEQ ID NO: 1322169 - RNA, 30 nt, Human
ccugcaguuggggaagaaggacccggagcc

SEQ ID NO: 1322170 - RNA, 23 nt, Human
ccugccucagccucccaaguagc

SEQ ID NO: 1322171 - RNA, 24 nt, Human
ccugccucagccucccaaguagcu

SEQ ID NO: 1322172 - RNA, 19 nt, Human
cugcaaccucugucuccca

SEQ ID NO: 1322173 - RNA, 22 nt, Human
cugcaaccucugucucccaggu

SEQ ID NO: 1322174 - RNA, 18 nt, Human
cugcaguuggggaagaag

SEQ ID NO: 1322175 - RNA, 20 nt, Human
cugccugcaguuggggaaga

SEQ ID NO: 1322176 - RNA, 20 nt, Human
gagcggccucucggcggagc

SEQ ID NO: 1322177 - RNA, 18 nt, Human
ucagccucccaaguagcu

SEQ ID NO: 1322178 - RNA, 20 nt, Human
ucagccucccaaguagcugg

SEQ ID NO: 1322179 - RNA, 21 nt, Human
ucccaggugcaaacgauucuc

SEQ ID NO: 1322180 - RNA, 24 nt, Human
ucccaggugcaaacgauucuccug

SEQ ID NO: 1322181 - RNA, 24 nt, Human
ucucccaggugcaaacgauucucc

SEQ ID NO: 1322182 - RNA, 26 nt, Human
ucuccugccucagccucccaaguagc

SEQ ID NO: 1322183 - RNA, 24 nt, Human
ugaaguacaguggugcgaucucgg

SEQ ID NO: 1322184 - RNA, 19 nt, Human
ugacugcaaccucugucuc

SEQ ID NO: 1322185 - RNA, 24 nt, Human
ugacugcaaccucugucucccagg

SEQ ID NO: 1322186 - RNA, 26 nt, Human
ugcaguuggggaagaaggacccggag

SEQ ID NO: 1322187 - RNA, 24 nt, Human
ugccucagccucccaaguagcugg

SEQ ID NO: 1322188 - RNA, 21 nt, Human
aaacgagaaagagacgacuua

SEQ ID NO: 1322189 - RNA, 24 nt, Human
aaggcgccuuucaugcacgguccu

SEQ ID NO: 1322190 - RNA, 19 nt, Human
acaggaaugaggaaagaau

SEQ ID NO: 1322191 - RNA, 22 nt, Human
acaggaaugaggaaagaaugac

SEQ ID NO: 1322192 - RNA, 23 nt, Human
agaaaaauaaauucaaacucuag

SEQ ID NO: 1322193 - RNA, 23 nt, Human
agaaagagacgacuuaaggggaa

SEQ ID NO: 1322194 - RNA, 21 nt, Human
agaagauccacagggucagag

SEQ ID NO: 1322195 - RNA, 21 nt, Human
aggagggagacauaguucugg

SEQ ID NO: 1322196 - RNA, 18 nt, Human
agggggaagggaguagag

SEQ ID NO: 1322197 - RNA, 29 nt, Human
agguaggaagguagguaaaguccgcuuug

SEQ ID NO: 1322198 - RNA, 18 nt, Human
cagaagauccacaggguc

SEQ ID NO: 1322199 - RNA, 22 nt, Human
cagaaucuuaacugaguaugac

SEQ ID NO: 1322200 - RNA, 20 nt, Human
cuucuugcugugucaucucu

SEQ ID NO: 1322201 - RNA, 22 nt, Human
cuugcugugucaucucucuucu

SEQ ID NO: 1322202 - RNA, 24 nt, Human
gaagauccacagggucagagacac

SEQ ID NO: 1322203 - RNA, 18 nt, Human
gcugugucaucucucuuc

SEQ ID NO: 1322204 - RNA, 24 nt, Human
ggggaagggaguagagcuugacua

SEQ ID NO: 1322205 - RNA, 21 nt, Human
ggucacaggaaugaggaaaga

SEQ ID NO: 1322206 - RNA, 24 nt, Human
guugaguuuauuuggguuugugua

SEQ ID NO: 1322207 - RNA, 19 nt, Human
uaggagcucucugucuuug

SEQ ID NO: 1322208 - RNA, 23 nt, Human
uauccaaacgagaaagagacgac

SEQ ID NO: 1322209 - RNA, 18 nt, Human
ucaucucucuucucaggg

SEQ ID NO: 1322210 - RNA, 21 nt, Human
ucuagggggaagggaguagag

SEQ ID NO: 1322211 - RNA, 22 nt, Human
ucucgcagauggucacaggaau

SEQ ID NO: 1322212 - RNA, 18 nt, Human
ugaggaaagaaugacucu

SEQ ID NO: 1322213 - RNA, 20 nt, Human
ugcaagaaauuccgggaauu

SEQ ID NO: 1322214 - RNA, 22 nt, Human
ugguagguagguaggaagguag

SEQ ID NO: 1322215 - RNA, 19 nt, Human
uguccagaagauccacagg

SEQ ID NO: 1322216 - RNA, 21 nt, Human
cccccggacgcccgcgccccg

SEQ ID NO: 1322217 - RNA, 18 nt, Human
ccccggacgcccgcgccc

SEQ ID NO: 1322218 - RNA, 22 nt, Human
ccccggacgcccgcgccccgcc

SEQ ID NO: 1322219 - RNA, 21 nt, Human
ccccgggggcuucgguccgcc

SEQ ID NO: 1322220 - RNA, 21 nt, Human
ccgcgccccgccccgccccgg

SEQ ID NO: 1322221 - RNA, 21 nt, Human
ccgcggcgcccccggacgccc

SEQ ID NO: 1322222 - RNA, 23 nt, Human
ccgcugagggggcgcggcgcagg

SEQ ID NO: 1322223 - RNA, 19 nt, Human
ccucgggaacugcgcggac

SEQ ID NO: 1322224 - RNA, 19 nt, Human
cgaggagggggcgcggucc

SEQ ID NO: 1322225 - RNA, 22 nt, Human
cgccccgccccgccccgggggc

SEQ ID NO: 1322226 - RNA, 18 nt, Human
cgccccggaccgaccucg

SEQ ID NO: 1322227 - RNA, 19 nt, Human
cggcgcagggaacagggcc

SEQ ID NO: 1322228 - RNA, 18 nt, Human
gcgcggcgcagggaacag

SEQ ID NO: 1322229 - RNA, 19 nt, Human
gcgcggggaccgaggaggg

SEQ ID NO: 1322230 - RNA, 19 nt, Human
gcggggcgcggggaccgag

SEQ ID NO: 1322231 - RNA, 20 nt, Human
ggcugggcccgcggcgcccc

SEQ ID NO: 1322232 - RNA, 19 nt, Human
gggcgcggggaccgaggag

SEQ ID NO: 1322233 - RNA, 19 nt, Human
gugaugcgagcacggcccg

SEQ ID NO: 1322234 - RNA, 18 nt, Human
ugcgagcacggcccgcug

SEQ ID NO: 1322235 - RNA, 24 nt, Human
ugcgagcacggcccgcugaggggg

SEQ ID NO: 1322236 - RNA, 18 nt, Human
agccauauuauccuuguu

SEQ ID NO: 1322237 - RNA, 27 nt, Human
aucuuuuuauccuccucaaguuuuuca

SEQ ID NO: 1322238 - RNA, 18 nt, Human
cuguauugcccuuucauc

SEQ ID NO: 1322239 - RNA, 21 nt, Human
uaaauggauuucuucuaauuu

SEQ ID NO: 1322240 - RNA, 25 nt, Human
uauugugcuuguaacuguaaaugga

SEQ ID NO: 1322241 - RNA, 18 nt, Human
uccacaucuuuaagugug

SEQ ID NO: 1322242 - RNA, 18 nt, Human
uccuuuauuugcugcugu

SEQ ID NO: 1322243 - RNA, 20 nt, Human
aggcggugaaggccuuaggg

SEQ ID NO: 1322244 - RNA, 21 nt, Human
cagcccagggucacggaguca

SEQ ID NO: 1322245 - RNA, 21 nt, Human
cagcugacuccagacauguug

SEQ ID NO: 1322246 - RNA, 22 nt, Human
ggcggugaaggccuuaggguac

SEQ ID NO: 1322247 - RNA, 19 nt, Human
ugaaggccuuaggguacgc

SEQ ID NO: 1322248 - RNA, 21 nt, Human
uagcuguggcuuuaacuuugg

SEQ ID NO: 1322249 - RNA, 20 nt, Human
uccuauggggguagcugugg

SEQ ID NO: 1322250 - RNA, 22 nt, Human
aucuccuuugagguccgcuggu

SEQ ID NO: 1322251 - RNA, 20 nt, Human
ccgcugggggccccaguccu

SEQ ID NO: 1322252 - RNA, 21 nt, Human
ucugcaacugccugaucuccu

SEQ ID NO: 1322253 - RNA, 23 nt, Human
auaguaagaaaaaggaccauuac

SEQ ID NO: 1322254 - RNA, 23 nt, Human
auugccacaggacuugggcucug

SEQ ID NO: 1322255 - RNA, 20 nt, Human
guaagaaaaaggaccauuac

SEQ ID NO: 1322256 - RNA, 24 nt, Human
ucacccgugugacaccaauuccau

SEQ ID NO: 1322257 - RNA, 18 nt, Human
uccauaguaagaaaaagg

SEQ ID NO: 1322258 - RNA, 19 nt, Human
uccauaguaagaaaaagga

SEQ ID NO: 1322259 - RNA, 22 nt, Human
ugccacaggacuugggcucugc

SEQ ID NO: 1322260 - RNA, 19 nt, Human
agaaggaaauaacaagcac

SEQ ID NO: 1322261 - RNA, 23 nt, Human
caagaagauuguuucuccagggg

SEQ ID NO: 1322262 - RNA, 23 nt, Human
cagaauauagcuuauaaucuguu

SEQ ID NO: 1322263 - RNA, 23 nt, Human
cauggaaagccacugggaagaca

SEQ ID NO: 1322264 - RNA, 20 nt, Human
ccacugggaagacaagaaga

SEQ ID NO: 1322265 - RNA, 24 nt, Human
ccguauuuugugaaucucccagaa

SEQ ID NO: 1322266 - RNA, 22 nt, Human
gaagacaagaagauuguuucuc

SEQ ID NO: 1322267 - RNA, 19 nt, Human
gcagccuccucuuaguuaa

SEQ ID NO: 1322268 - RNA, 25 nt, Human
ucugaagaaaauaagcaaagucauu

SEQ ID NO: 1322269 - RNA, 21 nt, Human
ugaagaaaauaagcaaaguca

SEQ ID NO: 1322270 - RNA, 24 nt, Human
ugaaucucccagaauauagcuuau

SEQ ID NO: 1322271 - RNA, 18 nt, Human
ugagaaggaaauaacaag

SEQ ID NO: 1322272 - RNA, 21 nt, Human
ugagcgucugcagcuccuuuc

SEQ ID NO: 1322273 - RNA, 19 nt, Human
ugggaagacaagaagauug

SEQ ID NO: 1322274 - RNA, 19 nt, Human
ugucugaagaaaauaagca

SEQ ID NO: 1322275 - RNA, 20 nt, Human
uucacugagaaggaaauaac

SEQ ID NO: 1322276 - RNA, 18 nt, Human
uugucugaagaaaauaag

SEQ ID NO: 1322277 - RNA, 23 nt, Human
caaaaugcaguaaacgauuccua

SEQ ID NO: 1322278 - RNA, 19 nt, Human
caccugaaauucauaaaaa

SEQ ID NO: 1322279 - RNA, 21 nt, Human
ccugaaauucauaaaaauaaa

SEQ ID NO: 1322280 - RNA, 19 nt, Human
ccugggauucacuuagcac

SEQ ID NO: 1322281 - RNA, 23 nt, Human
cugaaaacuggaaacuccuaaca

SEQ ID NO: 1322282 - RNA, 18 nt, Human
gcaguaaacgauuccuag

SEQ ID NO: 1322283 - RNA, 18 nt, Human
uaaaaauaaagcuaugaa

SEQ ID NO: 1322284 - RNA, 23 nt, Human
uguagaaucacaagugcauuuca

SEQ ID NO: 1322285 - RNA, 21 nt, Human
uguguguguagaaucacaagu

SEQ ID NO: 1322286 - RNA, 22 nt, Human
uucuguuaacugaaaacuggaa

SEQ ID NO: 1322287 - RNA, 24 nt, Human
aggcuucccugccccgcagccuug

SEQ ID NO: 1322288 - RNA, 21 nt, Human
cagccuuggccuuccugguuu

SEQ ID NO: 1322289 - RNA, 20 nt, Human
cagcggcucuuccucugccc

SEQ ID NO: 1322290 - RNA, 26 nt, Human
caggcgccuuccucuugccaggcuuc

SEQ ID NO: 1322291 - RNA, 25 nt, Human
ccagcggcucuuccucugccccucu

SEQ ID NO: 1322292 - RNA, 19 nt, Human
cccugccccgcagccuugg

SEQ ID NO: 1322293 - RNA, 18 nt, Human
ccugccccgcagccuugg

SEQ ID NO: 1322294 - RNA, 18 nt, Human
cugccccucugggaugcc

SEQ ID NO: 1322295 - RNA, 23 nt, Human
gccccgcagccuuggccuuccug

SEQ ID NO: 1322296 - RNA, 22 nt, Human
gcggcucuuccucugccccucu

SEQ ID NO: 1322297 - RNA, 24 nt, Human
uccucugccccucugggaugccua

SEQ ID NO: 1322298 - RNA, 20 nt, Human
ucgcagccagcggcucuucc

SEQ ID NO: 1322299 - RNA, 20 nt, Human
ucugccccucugggaugccu

SEQ ID NO: 1322300 - RNA, 23 nt, Human
ucuuccucugccccucugggaug

SEQ ID NO: 1322301 - RNA, 21 nt, Human
ucuugccaggcuucccugccc

SEQ ID NO: 1322302 - RNA, 19 nt, Human
ugaccccaggcgccuuccu

SEQ ID NO: 1322303 - RNA, 20 nt, Human
ugaccccaggcgccuuccuc

SEQ ID NO: 1322304 - RNA, 20 nt, Human
ugccccgcagccuuggccuu

SEQ ID NO: 1322305 - RNA, 19 nt, Human
uggcucugagcuugacccc

SEQ ID NO: 1322306 - RNA, 22 nt, Human
uucgcagccagcggcucuuccu

SEQ ID NO: 1322307 - RNA, 21 nt, Human
aaagaaaaaaagagcccugag

SEQ ID NO: 1322308 - RNA, 20 nt, Human
aacauuuuaagcuugcuuua

SEQ ID NO: 1322309 - RNA, 19 nt, Human
aauuucuauccaugugcuc

SEQ ID NO: 1322310 - RNA, 18 nt, Human
acuacaauauaguacauu

SEQ ID NO: 1322311 - RNA, 23 nt, Human
acuucaaagguaguucaaagggg

SEQ ID NO: 1322312 - RNA, 21 nt, Human
aggaaaccugcaagaccuauu

SEQ ID NO: 1322313 - RNA, 18 nt, Human
cauagaaaauaagacuuu

SEQ ID NO: 1322314 - RNA, 24 nt, Human
caugaaagacugcauucauucugc

SEQ ID NO: 1322315 - RNA, 23 nt, Human
ccaauacauucacugaaugcaga

SEQ ID NO: 1322316 - RNA, 19 nt, Human
ccagacuaacucauuagca

SEQ ID NO: 1322317 - RNA, 19 nt, Human
gauacacaaacauauauau

SEQ ID NO: 1322318 - RNA, 24 nt, Human
gauuuaaaugagugcaucucauuu

SEQ ID NO: 1322319 - RNA, 23 nt, Human
gcaaaaagaaaaaaagagcccug

SEQ ID NO: 1322320 - RNA, 25 nt, Human
gggaauaaagaagguagccgguacc

SEQ ID NO: 1322321 - RNA, 18 nt, Human
guauguauacauaaacau

SEQ ID NO: 1322322 - RNA, 21 nt, Human
uaaaaugacuacaauauagua

SEQ ID NO: 1322323 - RNA, 25 nt, Human
uaaacaaguaaauaaaagcaguuua

SEQ ID NO: 1322324 - RNA, 20 nt, Human
uaaauaaaagcaguuuagua

SEQ ID NO: 1322325 - RNA, 24 nt, Human
uaaauuucuauccaugugcucaua

SEQ ID NO: 1322326 - RNA, 26 nt, Human
uaagaugaaugaucuaugcaaaacca

SEQ ID NO: 1322327 - RNA, 21 nt, Human
uagcaugaaagacugcauuca

SEQ ID NO: 1322328 - RNA, 26 nt, Human
uaugcaaaaagaaaaaaagagccuua

SEQ ID NO: 1322329 - RNA, 21 nt, Human
ucaaaaggaaaccugcaagac

SEQ ID NO: 1322330 - RNA, 21 nt, Human
ucaaagggggaauaaagaagg

SEQ ID NO: 1322331 - RNA, 19 nt, Human
ucaaagguaguucaaaggg

SEQ ID NO: 1322332 - RNA, 21 nt, Human
ugagugcaucucauuuugauu

SEQ ID NO: 1322333 - RNA, 24 nt, Human
uuagcaugaaagacugcauucauu

SEQ ID NO: 1322334 - RNA, 23 nt, Human
aaccugcgcccucccuuccucua

SEQ ID NO: 1322335 - RNA, 19 nt, Human
ccugcgcccucccuuccuc

SEQ ID NO: 1322336 - RNA, 23 nt, Human
uggaccugacuccaaccugcgcc

SEQ ID NO: 1322337 - RNA, 21 nt, Human
uguuuggaccugacuccaacc

SEQ ID NO: 1322338 - RNA, 20 nt, Human
uuccucuaugacccuccugc

SEQ ID NO: 1322339 - RNA, 21 nt, Human
augcggaggaugcccugacug

SEQ ID NO: 1322340 - RNA, 20 nt, Human
cgcggaccaguaacggcugg

SEQ ID NO: 1322341 - RNA, 22 nt, Human
gaggaugcccugacugcgcgga

SEQ ID NO: 1322342 - RNA, 24 nt, Human
uauuccuuuauuuuaacauuugag

SEQ ID NO: 1322343 - RNA, 25 nt, Human
uccauacuacaguacauuuuuugag

SEQ ID NO: 1322344 - RNA, 22 nt, Human
ugaguuaaaaacaaacauuaaa

SEQ ID NO: 1322345 - RNA, 23 nt, Human
ugcggaggaugcccugacugcgc

SEQ ID NO: 1322346 - RNA, 22 nt, Human
uuuuuugaguuaaaaacaaaca

SEQ ID NO: 1322347 - RNA, 24 nt, Human
aaaucaaguuuuagggggagccag

SEQ ID NO: 1322348 - RNA, 20 nt, Human
aaaaaagacagggagauaua

SEQ ID NO: 1322349 - RNA, 26 nt, Human
aaaaauuagcaagaacauugaaaacc

SEQ ID NO: 1322350 - RNA, 21 nt, Human
aaacacaggagcaaacaaaga

SEQ ID NO: 1322351 - RNA, 22 nt, Human
aaacuuacuacuuuaaccccag

SEQ ID NO: 1322352 - RNA, 23 nt, Human
aaacuuacuacuuuaaccccaga

SEQ ID NO: 1322353 - RNA, 23 nt, Human
aaauguguggaguauacauucua

SEQ ID NO: 1322354 - RNA, 19 nt, Human
aaauuaagaaaacacacca

SEQ ID NO: 1322355 - RNA, 23 nt, Human
aacucccaagauccaauagaaaa

SEQ ID NO: 1322356 - RNA, 22 nt, Human
aagaaacaaaauuaagaaaaca

SEQ ID NO: 1322357 - RNA, 24 nt, Human
aagaacauugaaaaccaaccaccu

SEQ ID NO: 1322358 - RNA, 18 nt, Human
aagcccagcaaggugaaa

SEQ ID NO: 1322359 - RNA, 24 nt, Human
aauugccgagccagucacucaggu

SEQ ID NO: 1322360 - RNA, 18 nt, Human
acacgaauaugcauaaga

SEQ ID NO: 1322361 - RNA, 20 nt, Human
acagaagcuucuucaagcag

SEQ ID NO: 1322362 - RNA, 19 nt, Human
acaggagcaaacaaagaaa

SEQ ID NO: 1322363 - RNA, 18 nt, Human
acggguucuccaaacacc

SEQ ID NO: 1322364 - RNA, 19 nt, Human
acucuggagauggggaacc

SEQ ID NO: 1322365 - RNA, 22 nt, Human
agaaaaaaaauuagcaagaaca

SEQ ID NO: 1322366 - RNA, 23 nt, Human
agacacauacacagacauauaau

SEQ ID NO: 1322367 - RNA, 24 nt, Human
agacacauacacagacauauaauu

SEQ ID NO: 1322368 - RNA, 23 nt, Human
agagggucacuaugauaauagag

SEQ ID NO: 1322369 - RNA, 20 nt, Human
agcaaacaaagaaaacuccc

SEQ ID NO: 1322370 - RNA, 20 nt, Human
aggaaaagacaucuaaaugu

SEQ ID NO: 1322371 - RNA, 21 nt, Human
aucuuuccaaacccuuaauua

SEQ ID NO: 1322372 - RNA, 19 nt, Human
augaacaagauuacuacug

SEQ ID NO: 1322373 - RNA, 20 nt, Human
augaaucuuuccaaacccuu

SEQ ID NO: 1322374 - RNA, 27 nt, Human
caaaaaagacagggagauauacagugg

SEQ ID NO: 1322375 - RNA, 21 nt, Human
caaaacaaaaaguuucaaaga

SEQ ID NO: 1322376 - RNA, 20 nt, Human
caaagcuuaacaacaauuuu

SEQ ID NO: 1322377 - RNA, 25 nt, Human
caagaacauugaaaaccaaccaccu

SEQ ID NO: 1322378 - RNA, 20 nt, Human
cagagggucacuaugauaau

SEQ ID NO: 1322379 - RNA, 22 nt, Human
caggaaaagacaucuaaauggu

SEQ ID NO: 1322380 - RNA, 24 nt, Human
cauguauacacgaauaugcauagu

SEQ ID NO: 1322381 - RNA, 19 nt, Human
cauuucgccacaagaaaca

SEQ ID NO: 1322382 - RNA, 19 nt, Human
ccagcaaggugaaaguuuc

SEQ ID NO: 1322383 - RNA, 18 nt, Human
ccagcgguaagggugaca

SEQ ID NO: 1322384 - RNA, 22 nt, Human
ccugaauuucuucucugucuca

SEQ ID NO: 1322385 - RNA, 24 nt, Human
cgccacaagaaacaaaauuaagaa

SEQ ID NO: 1322386 - RNA, 19 nt, Human
cuacagcaugaagauuuua

SEQ ID NO: 1322387 - RNA, 19 nt, Human
cuuacuacuuuaaccccag

SEQ ID NO: 1322388 - RNA, 26 nt, Human
cuucucugucucaaaaaagacaggga

SEQ ID NO: 1322389 - RNA, 21 nt, Human
cuugcuagauucaguugccca

SEQ ID NO: 1322390 - RNA, 22 nt, Human
cuuuccaacagagaaacucugg

SEQ ID NO: 1322391 - RNA, 21 nt, Human
gauaauagagaaguucaggaa

SEQ ID NO: 1322392 - RNA, 21 nt, Human
gauccagcgguaagggugaca

SEQ ID NO: 1322393 - RNA, 24 nt, Human
gccacauuucgccacaagaaacaa

SEQ ID NO: 1322394 - RNA, 20 nt, Human
gcuccaacuuugggaauaag

SEQ ID NO: 1322395 - RNA, 19 nt, Human
gggcaaugcauuucugcag

SEQ ID NO: 1322396 - RNA, 24 nt, Human
gguuuuuguuugcgccugguuuua

SEQ ID NO: 1322397 - RNA, 18 nt, Human
guuuggguaaaugucuag

SEQ ID NO: 1322398 - RNA, 22 nt, Human
uaaacagaacuguaaaaggaaa

SEQ ID NO: 1322399 - RNA, 23 nt, Human
uaaacagaacuguaaaaggaaac

SEQ ID NO: 1322400 - RNA, 24 nt, Human
uaacaacaauuuuuuaaaggcuuc

SEQ ID NO: 1322401 - RNA, 22 nt, Human
uacugcuuuccaacagagaaac

SEQ ID NO: 1322402 - RNA, 18 nt, Human
uacuuuauugaguagaga

SEQ ID NO: 1322403 - RNA, 22 nt, Human
uagcaagaacauugaaaaccaa

SEQ ID NO: 1322404 - RNA, 18 nt, Human
uagcugaagcucauaaac

SEQ ID NO: 1322405 - RNA, 18 nt, Human
uauacagugcaaguugag

SEQ ID NO: 1322406 - RNA, 18 nt, Human
ucaaagaagaaaagguca

SEQ ID NO: 1322407 - RNA, 22 nt, Human
ucagcagcuuuacggguucucc

SEQ ID NO: 1322408 - RNA, 23 nt, Human
uccugaauuucuucucugucuca

SEQ ID NO: 1322409 - RNA, 23 nt, Human
uccugguugcaaaccucucucag

SEQ ID NO: 1322410 - RNA, 19 nt, Human
ucucaaaaaagacagggag

SEQ ID NO: 1322411 - RNA, 24 nt, Human
ucuugauacugcuuuccaacagag

SEQ ID NO: 1322412 - RNA, 22 nt, Human
ugaaagccacauuucgccacaa

SEQ ID NO: 1322413 - RNA, 24 nt, Human
ugaaagccacauuucgccacaaga

SEQ ID NO: 1322414 - RNA, 26 nt, Human
ugaaucuuuccaaacccuuaauuaua

SEQ ID NO: 1322415 - RNA, 18 nt, Human
ugagacuucuuuguaucu

SEQ ID NO: 1322416 - RNA, 18 nt, Human
uggcauaaaaugugugga

SEQ ID NO: 1322417 - RNA, 21 nt, Human
uguaaaaggaaacuuugcuaa

SEQ ID NO: 1322418 - RNA, 25 nt, Human
uuaaaggcuucuugauacugcuuuc

SEQ ID NO: 1322419 - RNA, 18 nt, Human
uucaaagaagaaaagguc

SEQ ID NO: 1322420 - RNA, 19 nt, Human
uucaaagaagaaaagguca

SEQ ID NO: 1322421 - RNA, 21 nt, Human
uucaaagaagaaaaggucauu

SEQ ID NO: 1322422 - RNA, 22 nt, Human
uucccauucagauuuuuucuug

SEQ ID NO: 1322423 - RNA, 20 nt, Human
uuccucaaccaaacuuacua

SEQ ID NO: 1322424 - RNA, 23 nt, Human
uugaacuagaguuuggguaaaug

SEQ ID NO: 1322425 - RNA, 20 nt, Human
uuucaaagaagaaaagguca

SEQ ID NO: 1322426 - RNA, 20 nt, Human
uuucaaagaagaaaagguca

SEQ ID NO: 1322427 - RNA, 19 nt, Human
uuugcuaaagcccagcaag

SEQ ID NO: 1322428 - RNA, 23 nt, Human
uuuuaaaggcuucuugauacugc

SEQ ID NO: 1322429 - RNA, 21 nt, Human
aaagaaagaaaaaaaaaagga

SEQ ID NO: 1322430 - RNA, 20 nt, Human
aagaaagaaaaaaaaaagga

SEQ ID NO: 1322431 - RNA, 19 nt, Human
aaggaacacauggcugaag

SEQ ID NO: 1322432 - RNA, 22 nt, Human
accgggagguccugggaggcca

SEQ ID NO: 1322433 - RNA, 20 nt, Human
agaaaaaaaaaaggaacaca

SEQ ID NO: 1322434 - RNA, 18 nt, Human
agcauagccagguucccc

SEQ ID NO: 1322435 - RNA, 25 nt, Human
aggcuggccuuuuccaccaggaggu

SEQ ID NO: 1322436 - RNA, 22 nt, Human
agggccagggaucccaggaagu

SEQ ID NO: 1322437 - RNA, 20 nt, Human
agucuucuggcuuuccagag

SEQ ID NO: 1322438 - RNA, 26 nt, Human
aucuccccuuucuccuuugaauccag

SEQ ID NO: 1322439 - RNA, 21 nt, Human
auggcugaagucuuucaagac

SEQ ID NO: 1322440 - RNA, 27 nt, Human
caaaaagcaaacgauaaaagaaagaaa

SEQ ID NO: 1322441 - RNA, 27 nt, Human
caagaaaauaaaacaaaaagcaaacga

SEQ ID NO: 1322442 - RNA, 24 nt, Human
cagcaaggcuggcgaaguaggcac

SEQ ID NO: 1322443 - RNA, 20 nt, Human
cagcugguccugucuccccu

SEQ ID NO: 1322444 - RNA, 19 nt, Human
caggcucuccaggcuuccc

SEQ ID NO: 1322445 - RNA, 24 nt, Human
cagggaucccaggaaguccaucuu

SEQ ID NO: 1322446 - RNA, 20 nt, Human
ccccuuucuccuuugaaucc

SEQ ID NO: 1322447 - RNA, 19 nt, Human
ccugggacuccuuucucuc

SEQ ID NO: 1322448 - RNA, 23 nt, Human
ccugggacuccuuucucuccugg

SEQ ID NO: 1322449 - RNA, 22 nt, Human
ccugggauuccaggguccccag

SEQ ID NO: 1322450 - RNA, 22 nt, Human
ccuugccugggacuccuuucuc

SEQ ID NO: 1322451 - RNA, 24 nt, Human
ccuuugaucccaggaucuccccuu

SEQ ID NO: 1322452 - RNA, 28 nt, Human
cgggcagcaaggcuggcgaaguaggcac

SEQ ID NO: 1322453 - RNA, 20 nt, Human
cucuccaggcuucccaggga

SEQ ID NO: 1322454 - RNA, 24 nt, Human
cucugaguucaaguuucagaaauc

SEQ ID NO: 1322455 - RNA, 20 nt, Human
cugcagucuucuggcuuucc

SEQ ID NO: 1322456 - RNA, 18 nt, Human
cuggccuuuuccaccagg

SEQ ID NO: 1322457 - RNA, 18 nt, Human
cuucacauuacccggccg

SEQ ID NO: 1322458 - RNA, 23 nt, Human
cuugccugggacuccuuucucuc

SEQ ID NO: 1322459 - RNA, 20 nt, Human
gagguccugggaggccagga

SEQ ID NO: 1322460 - RNA, 23 nt, Human
gccgggcagcaaggcuggcgaag

SEQ ID NO: 1322461 - RNA, 19 nt, Human
ggccuguguggccuuugug

SEQ ID NO: 1322462 - RNA, 21 nt, Human
ggcgaaguaggcacacuggga

SEQ ID NO: 1322463 - RNA, 20 nt, Human
ggggaccgggagguccuggg

SEQ ID NO: 1322464 - RNA, 23 nt, Human
uaaaagaaagaaaaaaaaaagga

SEQ ID NO: 1322465 - RNA, 25 nt, Human
ucagaaauccacugcagucuucugg

SEQ ID NO: 1322466 - RNA, 23 nt, Human
uccagcugguccugucuccccuu

SEQ ID NO: 1322467 - RNA, 18 nt, Human
ucccaggaaguccaucuu

SEQ ID NO: 1322468 - RNA, 23 nt, Human
ucccaggaucuccccuuucuccu

SEQ ID NO: 1322469 - RNA, 21 nt, Human
uccccaggcuggccuuuucca

SEQ ID NO: 1322470 - RNA, 18 nt, Human
uccccggguugaccuggg

SEQ ID NO: 1322471 - RNA, 22 nt, Human
uccccggguugaccugggauuc

SEQ ID NO: 1322472 - RNA, 18 nt, Human
ugaccugggauuccaggg

SEQ ID NO: 1322473 - RNA, 19 nt, Human
ugaucccaggaucuccccu

SEQ ID NO: 1322474 - RNA, 19 nt, Human
ugggaagggucacauuggc

SEQ ID NO: 1322475 - RNA, 18 nt, Human
uuucucuccugguucucc

SEQ ID NO: 1322476 - RNA, 21 nt, Human
uuugaucccaggaucuccccu

SEQ ID NO: 1322477 - RNA, 20 nt, Human
ccacuuugagagaacccugg

SEQ ID NO: 1322478 - RNA, 23 nt, Human
aaaaaagucagaggaaggucuag

SEQ ID NO: 1322479 - RNA, 22 nt, Human
aaaacccacucuggacuaagcc

SEQ ID NO: 1322480 - RNA, 21 nt, Human
aaacaccugacugucugcaau

SEQ ID NO: 1322481 - RNA, 22 nt, Human
aaagaaguuuccauucaccuuu

SEQ ID NO: 1322482 - RNA, 21 nt, Human
aaaggcagcaaagauccagag

SEQ ID NO: 1322483 - RNA, 19 nt, Human
aauuuuauacucucccacu

SEQ ID NO: 1322484 - RNA, 21 nt, Human
acuaaguuguccaaacaagac

SEQ ID NO: 1322485 - RNA, 18 nt, Human
agagcccuggacuugaaa

SEQ ID NO: 1322486 - RNA, 19 nt, Human
aguaaaaaagucagaggaa

SEQ ID NO: 1322487 - RNA, 21 nt, Human
auccuccuugggcuggauggu

SEQ ID NO: 1322488 - RNA, 18 nt, Human
aucucauuuccgucacca

SEQ ID NO: 1322489 - RNA, 19 nt, Human
cacugaauuucccaaggcc

SEQ ID NO: 1322490 - RNA, 26 nt, Human
cauaucaagauugaaaaauaggaaac

SEQ ID NO: 1322491 - RNA, 21 nt, Human
ccuccgagaaaccugaaguuc

SEQ ID NO: 1322492 - RNA, 20 nt, Human
cucuggacuaagccucuguc

SEQ ID NO: 1322493 - RNA, 23 nt, Human
gaaaacccacugaauuucccaag

SEQ ID NO: 1322494 - RNA, 20 nt, Human
gagacgaaccaggaacucug

SEQ ID NO: 1322495 - RNA, 20 nt, Human
ggcacaagaaggagguuagc

SEQ ID NO: 1322496 - RNA, 21 nt, Human
ggcuggaugguuucuucuggg

SEQ ID NO: 1322497 - RNA, 19 nt, Human
uaaaaaagucagaggaagg

SEQ ID NO: 1322498 - RNA, 22 nt, Human
uaaauuuucagucuugcugcaa

SEQ ID NO: 1322499 - RNA, 19 nt, Human
uaaguaaaaaagucagagg

SEQ ID NO: 1322500 - RNA, 21 nt, Human
uaguagguagagcccuggacu

SEQ ID NO: 1322501 - RNA, 18 nt, Human
uauacucucccacuaaca

SEQ ID NO: 1322502 - RNA, 23 nt, Human
uauuaugaacucaauuaccaggg

SEQ ID NO: 1322503 - RNA, 19 nt, Human
ucagaccugggacuuuggg

SEQ ID NO: 1322504 - RNA, 21 nt, Human
uccagaggacuucaaccuccg

SEQ ID NO: 1322505 - RNA, 24 nt, Human
uccuugggcuggaugguuucuucc

SEQ ID NO: 1322506 - RNA, 21 nt, Human
ucuaugguucagaccugggac

SEQ ID NO: 1322507 - RNA, 23 nt, Human
ucucccacuaacagaaacacagu

SEQ ID NO: 1322508 - RNA, 18 nt, Human
ugaaaaauaggaaaccau

SEQ ID NO: 1322509 - RNA, 19 nt, Human
ugaacucaauuaccaggga

SEQ ID NO: 1322510 - RNA, 21 nt, Human
ugaaguuccgaccucuugucu

SEQ ID NO: 1322511 - RNA, 19 nt, Human
ugaugucauaaaggcagca

SEQ ID NO: 1322512 - RNA, 21 nt, Human
uggaagcggccuugaucucau

SEQ ID NO: 1322513 - RNA, 20 nt, Human
uuaggaugucacccuccuug

SEQ ID NO: 1322514 - RNA, 20 nt, Human
uuccauucaccuuucaguca

SEQ ID NO: 1322515 - RNA, 22 nt, Human
uucuucuggggacuuggggaug

SEQ ID NO: 1322516 - RNA, 18 nt, Human
uugggcucauagacaucu

SEQ ID NO: 1322517 - RNA, 18 nt, Human
uugggcuggaugguuucu

SEQ ID NO: 1322518 - RNA, 21 nt, Human
uugggcuggaugguuucuucu

SEQ ID NO: 1322519 - RNA, 21 nt, Human
uugggugggauggcuuccucu

SEQ ID NO: 1322520 - RNA, 18 nt, Human
uugugagcguagauuaua

SEQ ID NO: 1322521 - RNA, 22 nt, Human
aaaaaaaaaaaagcaagcaaga

SEQ ID NO: 1322522 - RNA, 24 nt, Human
aaaaaaaaaaagcaagcaagaaaa

SEQ ID NO: 1322523 - RNA, 23 nt, Human
aaaaaaaaaagcaagcaagaaaa

SEQ ID NO: 1322524 - RNA, 27 nt, Human
aaaaaaaaaagcaagcaagaaaaagga

SEQ ID NO: 1322525 - RNA, 18 nt, Human
aaaaaaaagcaagcaaga

SEQ ID NO: 1322526 - RNA, 25 nt, Human
aaaaaaaagcaagcaagaaaaagga

SEQ ID NO: 1322527 - RNA, 25 nt, Human
aaaagaaaagauggaggaaaaaaga

SEQ ID NO: 1322528 - RNA, 23 nt, Human
aagaaaagaaaagaaaagaugga

SEQ ID NO: 1322529 - RNA, 22 nt, Human
aagcuaggcucuuagccuagcu

SEQ ID NO: 1322530 - RNA, 23 nt, Human
agaaaagaaaagaaaagauggag

SEQ ID NO: 1322531 - RNA, 20 nt, Human
agaaaagaaaagauggagga

SEQ ID NO: 1322532 - RNA, 22 nt, Human
agaaaagauggaggaaaaaaga

SEQ ID NO: 1322533 - RNA, 21 nt, Human
agaaagaaaaaaaaugaucag

SEQ ID NO: 1322534 - RNA, 19 nt, Human
agaaagaaaagaaaagaaa

SEQ ID NO: 1322535 - RNA, 21 nt, Human
agccaggccagaagcuaggcu

SEQ ID NO: 1322536 - RNA, 18 nt, Human
aggaagaaagaaaagaaa

SEQ ID NO: 1322537 - RNA, 21 nt, Human
aggaaggaagaaagaaaagaa

SEQ ID NO: 1322538 - RNA, 27 nt, Human
aggcaaucuuuucacauccugagcuuc

SEQ ID NO: 1322539 - RNA, 23 nt, Human
cacauccugagcuacaauccguc

SEQ ID NO: 1322540 - RNA, 25 nt, Human
cagcagaggcacagaguggggguuu

SEQ ID NO: 1322541 - RNA, 22 nt, Human
ccuauagcauccuauagcaauc

SEQ ID NO: 1322542 - RNA, 18 nt, Human
cguaaaagccaggccaga

SEQ ID NO: 1322543 - RNA, 18 nt, Human
cuccccucucaguuuccc

SEQ ID NO: 1322544 - RNA, 21 nt, Human
gcaagcaagaaaaaggaagga

SEQ ID NO: 1322545 - RNA, 18 nt, Human
ggaggaaaaaagaaagaa

SEQ ID NO: 1322546 - RNA, 23 nt, Human
uacagcccuggauucucagcaga

SEQ ID NO: 1322547 - RNA, 21 nt, Human
uagguuuucucagugccuuuc

SEQ ID NO: 1322548 - RNA, 19 nt, Human
ucagcagaggcacagagug

SEQ ID NO: 1322549 - RNA, 20 nt, Human
uccccucucaguuucccaca

SEQ ID NO: 1322550 - RNA, 22 nt, Human
ugcuugauucucucuccccucu

SEQ ID NO: 1322551 - RNA, 18 nt, Human
uggaggaaaaaagaaaga

SEQ ID NO: 1322552 - RNA, 19 nt, Human
uucccacaccuuaugcaga

SEQ ID NO: 1322553 - RNA, 18 nt, Human
uuucucagugccuuucug

SEQ ID NO: 1322554 - RNA, 19 nt, Human
aggcgacgcccagaacucc

SEQ ID NO: 1322555 - RNA, 22 nt, Human
cgacgcccagaacuccaggaga

SEQ ID NO: 1322556 - RNA, 19 nt, Human
cgcccagaacuccaggaga

SEQ ID NO: 1322557 - RNA, 21 nt, Human
ccccggauccagcucuggcuc

SEQ ID NO: 1322558 - RNA, 19 nt, Human
ccgccgcggacucuggcuc

SEQ ID NO: 1322559 - RNA, 23 nt, Human
ccgcggacucuggcucagguuuc

SEQ ID NO: 1322560 - RNA, 21 nt, Human
ccugcccacuucuccccaccu

SEQ ID NO: 1322561 - RNA, 18 nt, Human
cggauccagcucuggcuc

SEQ ID NO: 1322562 - RNA, 22 nt, Human
cggauccagcucuggcucuggc

SEQ ID NO: 1322563 - RNA, 19 nt, Human
cggcuggggccccggaucc

SEQ ID NO: 1322564 - RNA, 22 nt, Human
cucuccugcccacuucucccca

SEQ ID NO: 1322565 - RNA, 18 nt, Human
cugcgucugcggcucgug

SEQ ID NO: 1322566 - RNA, 18 nt, Human
ggcuccggcuggggcccc

SEQ ID NO: 1322567 - RNA, 24 nt, Human
gggcagcgcugcgucugcggcucg

SEQ ID NO: 1322568 - RNA, 21 nt, Human
uccugcccacuucuccccacc

SEQ ID NO: 1322569 - RNA, 18 nt, Human
ugggcuccgggcucgccc

SEQ ID NO: 1322570 - RNA, 18 nt, Human
aagcagcaagcucacagc

SEQ ID NO: 1322571 - RNA, 22 nt, Human
agcaagcucacagcaaaugcgu

SEQ ID NO: 1322572 - RNA, 21 nt, Human
aggaaacuugaggcucgggga

SEQ ID NO: 1322573 - RNA, 21 nt, Human
caugcgcccugcgguuuaacc

SEQ ID NO: 1322574 - RNA, 21 nt, Human
cccugcgguuuaaccuuccca

SEQ ID NO: 1322575 - RNA, 22 nt, Human
cccugugggacuuuggccaagu

SEQ ID NO: 1322576 - RNA, 22 nt, Human
ccugucagaaccucaguuucca

SEQ ID NO: 1322577 - RNA, 19 nt, Human
ccuucccaaccacucuagg

SEQ ID NO: 1322578 - RNA, 24 nt, Human
ccuucucugucaggcagggcugaa

SEQ ID NO: 1322579 - RNA, 19 nt, Human
gaggaaacuugaggcucgg

SEQ ID NO: 1322580 - RNA, 18 nt, Human
gaggucauuauuguccca

SEQ ID NO: 1322581 - RNA, 24 nt, Human
gccugagugaguggugagcgggag

SEQ ID NO: 1322582 - RNA, 19 nt, Human
ggaagcagcaagcucacag

SEQ ID NO: 1322583 - RNA, 19 nt, Human
gggauguuuagcgacuugc

SEQ ID NO: 1322584 - RNA, 24 nt, Human
uaccucacaggugguggugaggau

SEQ ID NO: 1322585 - RNA, 18 nt, Human
ucagaaccucaguuucca

SEQ ID NO: 1322586 - RNA, 18 nt, Human
ucugucaggcagggcuga

SEQ ID NO: 1322587 - RNA, 21 nt, Human
ugaggcugaaccuucucuguc

SEQ ID NO: 1322588 - RNA, 23 nt, Human
ugggcauccaucauggcaguucc

SEQ ID NO: 1322589 - RNA, 20 nt, Human
ugucccauuuugcagaugag

SEQ ID NO: 1322590 - RNA, 23 nt, Human
uuuggccaaguuacuuuuccugu

SEQ ID NO: 1322591 - RNA, 19 nt, Human
accuccaaucucuugaaga

SEQ ID NO: 1322592 - RNA, 23 nt, Human
uccuccagaccuccaaucucuug

SEQ ID NO: 1322593 - RNA, 21 nt, Human
ucucuugaagaugaccacucu

SEQ ID NO: 1322594 - RNA, 24 nt, Human
ugcuuaggcuuccuuucuccucca

SEQ ID NO: 1322595 - RNA, 22 nt, Human
aaacacacaucuccccauuuuc

SEQ ID NO: 1322596 - RNA, 20 nt, Human
agggcuguuuagagaagucc

SEQ ID NO: 1322597 - RNA, 26 nt, Human
cauguuaccgaagcugaaugaccaaa

SEQ ID NO: 1322598 - RNA, 23 nt, Human
gagaagucccuugcucuugccaa

SEQ ID NO: 1322599 - RNA, 24 nt, Human
uaaggaaguguagccuucuccaug

SEQ ID NO: 1322600 - RNA, 23 nt, Human
uccaaacacacaucuccccauuu

SEQ ID NO: 1322601 - RNA, 20 nt, Human
auaggccuugguaaaggcuu

SEQ ID NO: 1322602 - RNA, 19 nt, Human
gaggggcuuauaggccuug

SEQ ID NO: 1322603 - RNA, 20 nt, Human
caaaacaggaaacugggagc

SEQ ID NO: 1322604 - RNA, 25 nt, Human
cucgggcaaaacaggaaacugggag

SEQ ID NO: 1322605 - RNA, 24 nt, Human
cugggagcgugacaagucccuccu

SEQ ID NO: 1322606 - RNA, 20 nt, Human
gcuggugcaggcauugcugg

SEQ ID NO: 1322607 - RNA, 18 nt, Human
uaggaggaacccaauaaa

SEQ ID NO: 1322608 - RNA, 20 nt, Human
uaggaggaacccaauaaaua

SEQ ID NO: 1322609 - RNA, 20 nt, Human
uaggaggaacccaauaaaua

SEQ ID NO: 1322610 - RNA, 18 nt, Human
ucucgggcaaaacaggaa

SEQ ID NO: 1322611 - RNA, 19 nt, Human
ugacaagucccuccucccu

SEQ ID NO: 1322612 - RNA, 19 nt, Human
ugcaggcauugcugguguc

SEQ ID NO: 1322613 - RNA, 26 nt, Human
uggcaagaauaggaggaacccaauaa

SEQ ID NO: 1322614 - RNA, 18 nt, Human
aucacagcccugaaucug

SEQ ID NO: 1322615 - RNA, 19 nt, Human
aucacagcccugaaucugc

SEQ ID NO: 1322616 - RNA, 19 nt, Human
caguuucucaucacagccc

SEQ ID NO: 1322617 - RNA, 18 nt, Human
guauagucguguaaguga

SEQ ID NO: 1322618 - RNA, 20 nt, Human
ucaaaggccuucuguugcag

SEQ ID NO: 1322619 - RNA, 22 nt, Human
cacaauuaaaaaaccuuuacac

SEQ ID NO: 1322620 - RNA, 20 nt, Human
gaauaacaauuuauugacuu

SEQ ID NO: 1322621 - RNA, 22 nt, Human
ugucuaaugcuacauauacaca

SEQ ID NO: 1322622 - RNA, 23 nt, Human
cuguccggugguggacucuucug

SEQ ID NO: 1322623 - RNA, 22 nt, Human
aagagagacuguaggauuagca

SEQ ID NO: 1322624 - RNA, 21 nt, Human
aagagguuguaaaugucgcuc

SEQ ID NO: 1322625 - RNA, 24 nt, Human
aaguggcccugcccaagaucagga

SEQ ID NO: 1322626 - RNA, 19 nt, Human
acacugccccauggaaggc

SEQ ID NO: 1322627 - RNA, 24 nt, Human
accccauuccacuggcucucacaa

SEQ ID NO: 1322628 - RNA, 24 nt, Human
acccgggcugagguuccugggggc

SEQ ID NO: 1322629 - RNA, 18 nt, Human
accucuccuuccuccagg

SEQ ID NO: 1322630 - RNA, 18 nt, Human
acucaacaucugcuuugc

SEQ ID NO: 1322631 - RNA, 19 nt, Human
agcaggcuggcgccauagg

SEQ ID NO: 1322632 - RNA, 19 nt, Human
agcagucauuucugcgcuu

SEQ ID NO: 1322633 - RNA, 22 nt, Human
agguucccccacaccccccacc

SEQ ID NO: 1322634 - RNA, 20 nt, Human
aucguucugagagggaggca

SEQ ID NO: 1322635 - RNA, 21 nt, Human
cacaguuagacugcauccucu

SEQ ID NO: 1322636 - RNA, 20 nt, Human
caccacucugccuaccccuc

SEQ ID NO: 1322637 - RNA, 20 nt, Human
cacccgggcugagguuccug

SEQ ID NO: 1322638 - RNA, 21 nt, Human
cacggauaugagucucagggg

SEQ ID NO: 1322639 - RNA, 24 nt, Human
cacucuuccaucugggcccaucuc

SEQ ID NO: 1322640 - RNA, 20 nt, Human
cagaggccgcuaugcuccuc

SEQ ID NO: 1322641 - RNA, 22 nt, Human
cagcacccgggcugagguuccu

SEQ ID NO: 1322642 - RNA, 25 nt, Human
cagcagauacaaagcccuccucacg

SEQ ID NO: 1322643 - RNA, 21 nt, Human
cagcgaugcgccugcuucuga

SEQ ID NO: 1322644 - RNA, 24 nt, Human
caguagcugagguucccccacacc

SEQ ID NO: 1322645 - RNA, 22 nt, Human
cagugccuaaguggcccugccc

SEQ ID NO: 1322646 - RNA, 25 nt, Human
caguggguuucuccacccaacuauc

SEQ ID NO: 1322647 - RNA, 24 nt, Human
cauuucugcgcuuugcuuugaggg

SEQ ID NO: 1322648 - RNA, 23 nt, Human
ccacaccccccaccaagcagcuc

SEQ ID NO: 1322649 - RNA, 18 nt, Human
ccacgaacacugccccau

SEQ ID NO: 1322650 - RNA, 19 nt, Human
ccagccuggaacgucccuu

SEQ ID NO: 1322651 - RNA, 21 nt, Human
ccauaccaggcagcuugagag

SEQ ID NO: 1322652 - RNA, 21 nt, Human
ccauagguccgacuugccauc

SEQ ID NO: 1322653 - RNA, 18 nt, Human
cccacgaacacugcccca

SEQ ID NO: 1322654 - RNA, 22 nt, Human
cccacgaacacugccccaugga

SEQ ID NO: 1322655 - RNA, 22 nt, Human
cccaugcuuucccggucuuuuu

SEQ ID NO: 1322656 - RNA, 18 nt, Human
ccccacaccccccaccaa

SEQ ID NO: 1322657 - RNA, 19 nt, Human
ccccccaccaagcagcucc

SEQ ID NO: 1322658 - RNA, 21 nt, Human
ccccccgcccccgcaggaaua

SEQ ID NO: 1322659 - RNA, 18 nt, Human
ccccgcauccugcgccug

SEQ ID NO: 1322660 - RNA, 21 nt, Human
ccccucguccccuccagccug

SEQ ID NO: 1322661 - RNA, 25 nt, Human
cccggaagcccgggccagucacagg

SEQ ID NO: 1322662 - RNA, 24 nt, Human
ccgaccuaacuuccuccuggcugc

SEQ ID NO: 1322663 - RNA, 23 nt, Human
ccucagagaccucuccuuccucc

SEQ ID NO: 1322664 - RNA, 22 nt, Human
ccugaucucaaagaaguggcac

SEQ ID NO: 1322665 - RNA, 23 nt, Human
ccugaucucaaagaaguggcaca

SEQ ID NO: 1322666 - RNA, 24 nt, Human
ccuguccccgugucugcgccuggg

SEQ ID NO: 1322667 - RNA, 19 nt, Human
ccugugggccugucucugg

SEQ ID NO: 1322668 - RNA, 20 nt, Human
cgcaggaauaacaaugaccu

SEQ ID NO: 1322669 - RNA, 23 nt, Human
cgcaggaauaacaaugaccucca

SEQ ID NO: 1322670 - RNA, 21 nt, Human
cgccauagguccgacuugcca

SEQ ID NO: 1322671 - RNA, 21 nt, Human
cggaagcccgggccagucaca

SEQ ID NO: 1322672 - RNA, 18 nt, Human
cgggcugagguuccuggg

SEQ ID NO: 1322673 - RNA, 22 nt, Human
cggucacucuuccaucugggcc

SEQ ID NO: 1322674 - RNA, 22 nt, Human
cgucccuuccagggguuaaaga

SEQ ID NO: 1322675 - RNA, 22 nt, Human
cgucuccuuccuagcacgaccc

SEQ ID NO: 1322676 - RNA, 23 nt, Human
cguggccccgcauccugcgccug

SEQ ID NO: 1322677 - RNA, 22 nt, Human
cucagagaccucuccuuccucc

SEQ ID NO: 1322678 - RNA, 22 nt, Human
cuccacgggcugggcaugccca

SEQ ID NO: 1322679 - RNA, 18 nt, Human
cuccuugggcuuuccgag

SEQ ID NO: 1322680 - RNA, 23 nt, Human
cucugccuaccccucuccggugu

SEQ ID NO: 1322681 - RNA, 23 nt, Human
cucuggagguagcugccacugcu

SEQ ID NO: 1322682 - RNA, 19 nt, Human
cucuugggauuuccaacac

SEQ ID NO: 1322683 - RNA, 21 nt, Human
cugaucucaaagaaguggcac

SEQ ID NO: 1322684 - RNA, 25 nt, Human
cugaucucaaagaaguggcacagaa

SEQ ID NO: 1322685 - RNA, 18 nt, Human
cugcgccugccugcuuca

SEQ ID NO: 1322686 - RNA, 18 nt, Human
cugcgccuggggguccua

SEQ ID NO: 1322687 - RNA, 19 nt, Human
cuggcugcucuugaacacc

SEQ ID NO: 1322688 - RNA, 18 nt, Human
cuuccuagcacgaccugu

SEQ ID NO: 1322689 - RNA, 24 nt, Human
cuucugaggggcaggccaccuugg

SEQ ID NO: 1322690 - RNA, 18 nt, Human
cuuugccggucacucuuc

SEQ ID NO: 1322691 - RNA, 22 nt, Human
gaacaccgcaaugcgccagugu

SEQ ID NO: 1322692 - RNA, 20 nt, Human
gacaguagcugagguucccc

SEQ ID NO: 1322693 - RNA, 22 nt, Human
gacaguagcugagguuccccca

SEQ ID NO: 1322694 - RNA, 20 nt, Human
gaccgugacagucagcauca

SEQ ID NO: 1322695 - RNA, 20 nt, Human
gagcaggcuggcgccauagg

SEQ ID NO: 1322696 - RNA, 22 nt, Human
gagcagucauuucugcgcuuug

SEQ ID NO: 1322697 - RNA, 23 nt, Human
gagguucccccacaccccccacc

SEQ ID NO: 1322698 - RNA, 26 nt, Human
gagguucccccacaccccccaccaag

SEQ ID NO: 1322699 - RNA, 19 nt, Human
gcccuggauuccuggaauc

SEQ ID NO: 1322700 - RNA, 20 nt, Human
gccuaaguggcccugcccaa

SEQ ID NO: 1322701 - RNA, 19 nt, Human
ggagagacaguagcugagg

SEQ ID NO: 1322702 - RNA, 19 nt, Human
ggaggccaguccacccccc

SEQ ID NO: 1322703 - RNA, 23 nt, Human
ggaggccaguccaccccccgccc

SEQ ID NO: 1322704 - RNA, 23 nt, Human
ggcagagguugcugggauuccuu

SEQ ID NO: 1322705 - RNA, 22 nt, Human
ggcaggccaccuuggcugucuc

SEQ ID NO: 1322706 - RNA, 19 nt, Human
gggaauagguuccagcagc

SEQ ID NO: 1322707 - RNA, 19 nt, Human
gggcauggugcaguuggag

SEQ ID NO: 1322708 - RNA, 23 nt, Human
gggccagucacagggguccgggg

SEQ ID NO: 1322709 - RNA, 22 nt, Human
ggggaccugaguccgaccuaac

SEQ ID NO: 1322710 - RNA, 18 nt, Human
gguuggaaggagagaaga

SEQ ID NO: 1322711 - RNA, 20 nt, Human
gguugggucagagagaagag

SEQ ID NO: 1322712 - RNA, 24 nt, Human
guauccccucguccccuccagccu

SEQ ID NO: 1322713 - RNA, 24 nt, Human
guccugcgcauccucgacagauca

SEQ ID NO: 1322714 - RNA, 18 nt, Human
guggagcaggcuggcgcc

SEQ ID NO: 1322715 - RNA, 18 nt, Human
guggagcaggcuggcgcc

SEQ ID NO: 1322716 - RNA, 23 nt, Human
guugcugggauuccuucucucca

SEQ ID NO: 1322717 - RNA, 22 nt, Human
uauuaugacaugaagcauaggg

SEQ ID NO: 1322718 - RNA, 19 nt, Human
ucaaagaaguggcacagaa

SEQ ID NO: 1322719 - RNA, 18 nt, Human
ucacagggguccggggca

SEQ ID NO: 1322720 - RNA, 21 nt, Human
ucacagggguccggggcagca

SEQ ID NO: 1322721 - RNA, 23 nt, Human
ucagcagauacaaagcccuccuc

SEQ ID NO: 1322722 - RNA, 24 nt, Human
ucagcagauacaaagcccuccuca

SEQ ID NO: 1322723 - RNA, 19 nt, Human
ucagcaucagcgaugcgcc

SEQ ID NO: 1322724 - RNA, 21 nt, Human
uccacaggaggugggagaggg

SEQ ID NO: 1322725 - RNA, 23 nt, Human
uccagcagcccagaccccauucc

SEQ ID NO: 1322726 - RNA, 22 nt, Human
uccaggaggccaguccaccccc

SEQ ID NO: 1322727 - RNA, 20 nt, Human
ucccccacaccccccaccaa

SEQ ID NO: 1322728 - RNA, 23 nt, Human
uccccgugucugcgccugggggu

SEQ ID NO: 1322729 - RNA, 18 nt, Human
ucccggaagcccgggcca

SEQ ID NO: 1322730 - RNA, 18 nt, Human
ucccggaagcccgggcca

SEQ ID NO: 1322731 - RNA, 19 nt, Human
uccggagagacaguagcug

SEQ ID NO: 1322732 - RNA, 26 nt, Human
uccucagagaccucuccuuccuccag

SEQ ID NO: 1322733 - RNA, 27 nt, Human
uccucuagagaguacagccucaauugc

SEQ ID NO: 1322734 - RNA, 22 nt, Human
uccugcgaggccaacucuuggg

SEQ ID NO: 1322735 - RNA, 19 nt, Human
ucuagagaguacagccuca

SEQ ID NO: 1322736 - RNA, 21 nt, Human
ucucccacgaacacugcccca

SEQ ID NO: 1322737 - RNA, 22 nt, Human
ucucuagcaccacacaccgggc

SEQ ID NO: 1322738 - RNA, 18 nt, Human
ucugcugauguucaaguc

SEQ ID NO: 1322739 - RNA, 22 nt, Human
ucuuuuuccagggccauuuuua

SEQ ID NO: 1322740 - RNA, 23 nt, Human
ugagauccuccagagguaucccc

SEQ ID NO: 1322741 - RNA, 22 nt, Human
ugccaggguagcucccggaagc

SEQ ID NO: 1322742 - RNA, 20 nt, Human
ugcccagagcuugcuggcag

SEQ ID NO: 1322743 - RNA, 22 nt, Human
ugcccuguccucuccuugggcu

SEQ ID NO: 1322744 - RNA, 21 nt, Human
ugcgccagugucccaugcuuu

SEQ ID NO: 1322745 - RNA, 20 nt, Human
ugcugauguucaagucuggg

SEQ ID NO: 1322746 - RNA, 22 nt, Human
uggaacgucccuuccagggguu

SEQ ID NO: 1322747 - RNA, 21 nt, Human
uggaaggcccuggauuccugg

SEQ ID NO: 1322748 - RNA, 24 nt, Human
ugggacuugaacaccgcaaugcgc

SEQ ID NO: 1322749 - RNA, 20 nt, Human
uguagauggaacucgccuga

SEQ ID NO: 1322750 - RNA, 25 nt, Human
ugugggccugucucuggagguagcu

SEQ ID NO: 1322751 - RNA, 19 nt, Human
uguggguggucagcagaua

SEQ ID NO: 1322752 - RNA, 18 nt, Human
uuccugcuuccaggguuc

SEQ ID NO: 1322753 - RNA, 20 nt, Human
uuccuggaauccugaucuca

SEQ ID NO: 1322754 - RNA, 19 nt, Human
uucuuuguuugcagcaccc

SEQ ID NO: 1322755 - RNA, 26 nt, Human
aaagagccugucccaguugggaaggc

SEQ ID NO: 1322756 - RNA, 26 nt, Human
aaaucccagaggcccggcccugagcc

SEQ ID NO: 1322757 - RNA, 19 nt, Human
acacagcuccagcccuggc

SEQ ID NO: 1322758 - RNA, 18 nt, Human
acccugaugaaauccugg

SEQ ID NO: 1322759 - RNA, 18 nt, Human
acucagcuggaggggcgg

SEQ ID NO: 1322760 - RNA, 18 nt, Human
acuccauuccucucucca

SEQ ID NO: 1322761 - RNA, 23 nt, Human
agaagagacuccucccauucaga

SEQ ID NO: 1322762 - RNA, 20 nt, Human
agaauuacuucuguacugag

SEQ ID NO: 1322763 - RNA, 18 nt, Human
agagacuccucccauuca

SEQ ID NO: 1322764 - RNA, 21 nt, Human
agccugucccaguugggaagg

SEQ ID NO: 1322765 - RNA, 24 nt, Human
aggcagguggaacacuaagcuggg

SEQ ID NO: 1322766 - RNA, 20 nt, Human
aggcagguggaacacuaagg

SEQ ID NO: 1322767 - RNA, 19 nt, Human
aggcaugacaccccugucc

SEQ ID NO: 1322768 - RNA, 22 nt, Human
caacauaucuaagccuccccca

SEQ ID NO: 1322769 - RNA, 26 nt, Human
caacccgucaccuuggggacuaucuc

SEQ ID NO: 1322770 - RNA, 19 nt, Human
caagaagggcuaauaugaa

SEQ ID NO: 1322771 - RNA, 23 nt, Human
cacacagcuccagcccuggccac

SEQ ID NO: 1322772 - RNA, 21 nt, Human
cacuguucuuucuuaugcacg

SEQ ID NO: 1322773 - RNA, 19 nt, Human
cagaagagacuccucccau

SEQ ID NO: 1322774 - RNA, 21 nt, Human
cagaggcccggcccugagccu

SEQ ID NO: 1322775 - RNA, 21 nt, Human
cagaggcccggcccugagccu

SEQ ID NO: 1322776 - RNA, 18 nt, Human
cagcccacccuccaugcc

SEQ ID NO: 1322777 - RNA, 20 nt, Human
caugaacacucaggugaccu

SEQ ID NO: 1322778 - RNA, 21 nt, Human
caugggacagggccaagccaa

SEQ ID NO: 1322779 - RNA, 19 nt, Human
cauuaagucaccaaaacuc

SEQ ID NO: 1322780 - RNA, 21 nt, Human
cauuccucucuccaaauccca

SEQ ID NO: 1322781 - RNA, 18 nt, Human
ccaaaucccagaggcccg

SEQ ID NO: 1322782 - RNA, 20 nt, Human
ccagaaggaagaauucagaa

SEQ ID NO: 1322783 - RNA, 18 nt, Human
ccagcccuggccacuaac

SEQ ID NO: 1322784 - RNA, 22 nt, Human
ccaggcaugacaccccuguccc

SEQ ID NO: 1322785 - RNA, 22 nt, Human
ccauccuguugccaugacaacc

SEQ ID NO: 1322786 - RNA, 18 nt, Human
cccaaaauagacacacuc

SEQ ID NO: 1322787 - RNA, 19 nt, Human
cccaaagagagaaaugaaa

SEQ ID NO: 1322788 - RNA, 27 nt, Human
cccacuggggauccuuccacuccccaa

SEQ ID NO: 1322789 - RNA, 21 nt, Human
cccagaggcccggcccugagc

SEQ ID NO: 1322790 - RNA, 22 nt, Human
cccauccuguugccaugacaac

SEQ ID NO: 1322791 - RNA, 18 nt, Human
ccccacuggggauccuuc

SEQ ID NO: 1322792 - RNA, 19 nt, Human
cccccagaauuacuucugu

SEQ ID NO: 1322793 - RNA, 23 nt, Human
cccggcccugagccuccagcaag

SEQ ID NO: 1322794 - RNA, 21 nt, Human
cccggcccugagccuccagcc

SEQ ID NO: 1322795 - RNA, 18 nt, Human
cccugccuccaaccgggc

SEQ ID NO: 1322796 - RNA, 22 nt, Human
ccucaacccgucaccuugggga

SEQ ID NO: 1322797 - RNA, 24 nt, Human
ccuccagcaauggggagagccugc

SEQ ID NO: 1322798 - RNA, 24 nt, Human
ccucccccagugcauuccccacug

SEQ ID NO: 1322799 - RNA, 18 nt, Human
ccucugcugggcaaaggu

SEQ ID NO: 1322800 - RNA, 22 nt, Human
ccucugcugggcaaagguggag

SEQ ID NO: 1322801 - RNA, 22 nt, Human
ccucuuucuucccugugcccca

SEQ ID NO: 1322802 - RNA, 20 nt, Human
ccuggcacagggcugggcca

SEQ ID NO: 1322803 - RNA, 20 nt, Human
ccuguugccaugacaaccaa

SEQ ID NO: 1322804 - RNA, 21 nt, Human
ccuuaggccucuuucuucccu

SEQ ID NO: 1322805 - RNA, 24 nt, Human
cuccauuccucucuccaaauccca

SEQ ID NO: 1322806 - RNA, 24 nt, Human
cucccagcccacccuccaugccca

SEQ ID NO: 1322807 - RNA, 19 nt, Human
cucucuccaaaucccagag

SEQ ID NO: 1322808 - RNA, 20 nt, Human
cugcccguaugucucugucu

SEQ ID NO: 1322809 - RNA, 24 nt, Human
cugggcaaagguggagggggcuug

SEQ ID NO: 1322810 - RNA, 20 nt, Human
gaaaauguacuccauuccuc

SEQ ID NO: 1322811 - RNA, 21 nt, Human
gacaugaggcacugagggucu

SEQ ID NO: 1322812 - RNA, 23 nt, Human
gagacuccucccauucagggcac

SEQ ID NO: 1322813 - RNA, 18 nt, Human
gagccuccagcaagucuc

SEQ ID NO: 1322814 - RNA, 18 nt, Human
gaggcaugcacccugaug

SEQ ID NO: 1322815 - RNA, 21 nt, Human
gccaugagacuggggcugggg

SEQ ID NO: 1322816 - RNA, 23 nt, Human
gcccugagccuccagcaagucuc

SEQ ID NO: 1322817 - RNA, 18 nt, Human
gccuggcacagggcuggg

SEQ ID NO: 1322818 - RNA, 21 nt, Human
gcgcugguccccuuccuucuc

SEQ ID NO: 1322819 - RNA, 20 nt, Human
gcuccuuaggccucuuucuu

SEQ ID NO: 1322820 - RNA, 22 nt, Human
guacuugggcucaauccucuag

SEQ ID NO: 1322821 - RNA, 19 nt, Human
guccuugaugguggaggag

SEQ ID NO: 1322822 - RNA, 18 nt, Human
gucugcuuaggacuucca

SEQ ID NO: 1322823 - RNA, 18 nt, Human
guggagggggcuugcucu

SEQ ID NO: 1322824 - RNA, 21 nt, Human
guggagggggcuugcucuuau

SEQ ID NO: 1322825 - RNA, 18 nt, Human
uaaagcccagaaggaaga

SEQ ID NO: 1322826 - RNA, 23 nt, Human
uaaagcccagaaggaagaauuca

SEQ ID NO: 1322827 - RNA, 22 nt, Human
uaacuccaggcaugacaccccu

SEQ ID NO: 1322828 - RNA, 22 nt, Human
uaagucaccaaaacucugcuga

SEQ ID NO: 1322829 - RNA, 18 nt, Human
uacagucgagauuugcuc

SEQ ID NO: 1322830 - RNA, 21 nt, Human
uaguaacuccaggcaugacac

SEQ ID NO: 1322831 - RNA, 23 nt, Human
ucaacauaucuaagccuccccca

SEQ ID NO: 1322832 - RNA, 20 nt, Human
ucagagccuuuccaguuccc

SEQ ID NO: 1322833 - RNA, 18 nt, Human
ucagcuggaggggcggag

SEQ ID NO: 1322834 - RNA, 25 nt, Human
ucccaaacuucauuaagucaccaaa

SEQ ID NO: 1322835 - RNA, 24 nt, Human
ucuguacugagcaugcccaaaaua

SEQ ID NO: 1322836 - RNA, 18 nt, Human
ucuucauccaaaugaauc

SEQ ID NO: 1322837 - RNA, 22 nt, Human
ucuucccugugccccacaagaa

SEQ ID NO: 1322838 - RNA, 24 nt, Human
ugaaaauguacuccauuccucucu

SEQ ID NO: 1322839 - RNA, 18 nt, Human
ugaaagaaaggaagggaa

SEQ ID NO: 1322840 - RNA, 20 nt, Human
ugaacugaaagaaaggaagg

SEQ ID NO: 1322841 - RNA, 20 nt, Human
ugagacuggggcugggggcc

SEQ ID NO: 1322842 - RNA, 22 nt, Human
ugagacuggggcugggggcuga

SEQ ID NO: 1322843 - RNA, 18 nt, Human
ugagccacucccacuccc

SEQ ID NO: 1322844 - RNA, 19 nt, Human
ugagggucuuccucaaccc

SEQ ID NO: 1322845 - RNA, 20 nt, Human
ugccaugagacuggggcugg

SEQ ID NO: 1322846 - RNA, 23 nt, Human
ugccaugagacuggggcuggggg

SEQ ID NO: 1322847 - RNA, 19 nt, Human
ugcccugagccacucccac

SEQ ID NO: 1322848 - RNA, 24 nt, Human
ugcccugccuccaaccgggcuuca

SEQ ID NO: 1322849 - RNA, 19 nt, Human
ugccuggcacagggcuggg

SEQ ID NO: 1322850 - RNA, 20 nt, Human
ugcugggcaaagguggaggg

SEQ ID NO: 1322851 - RNA, 23 nt, Human
uggaggggcggagaggcuuccuc

SEQ ID NO: 1322852 - RNA, 23 nt, Human
uggcacagggcugggccauggga

SEQ ID NO: 1322853 - RNA, 21 nt, Human
ugggaagagccuccagcaaug

SEQ ID NO: 1322854 - RNA, 20 nt, Human
ugggaaggcugcagagggca

SEQ ID NO: 1322855 - RNA, 18 nt, Human
ugggcgucaggcaacugc

SEQ ID NO: 1322856 - RNA, 21 nt, Human
uggggacuaucucccagccca

SEQ ID NO: 1322857 - RNA, 21 nt, Human
uggucugguaaagcccagaag

SEQ ID NO: 1322858 - RNA, 21 nt, Human
uguacuccauuccucucucca

SEQ ID NO: 1322859 - RNA, 18 nt, Human
uguggggaggucugcuua

SEQ ID NO: 1322860 - RNA, 23 nt, Human
uucagaagagacuccucccauuc

SEQ ID NO: 1322861 - RNA, 19 nt, Human
uucaugaacacucagguga

SEQ ID NO: 1322862 - RNA, 19 nt, Human
uucuguacugagcaugccc

SEQ ID NO: 1322863 - RNA, 19 nt, Human
uugcuaguaacuccaggca

SEQ ID NO: 1322864 - RNA, 18 nt, Human
ggggagaaggagacggua

SEQ ID NO: 1322865 - RNA, 19 nt, Human
gucacaggggagaaggaga

SEQ ID NO: 1322866 - RNA, 19 nt, Human
ucacaggggagaaggagac

SEQ ID NO: 1322867 - RNA, 23 nt, Human
ugacuaagugaggaggucacagg

SEQ ID NO: 1322868 - RNA, 24 nt, Human
ugaggaggucacaggggagaagga

SEQ ID NO: 1322869 - RNA, 22 nt, Human
acagcaaacagcuggcucugga

SEQ ID NO: 1322870 - RNA, 18 nt, Human
aaaaaaccaucauacaaa

SEQ ID NO: 1322871 - RNA, 18 nt, Human
aaagugccaaaagaccca

SEQ ID NO: 1322872 - RNA, 21 nt, Human
agugaggcucauaguguccuc

SEQ ID NO: 1322873 - RNA, 22 nt, Human
caaaagacccacugaucgaacc

SEQ ID NO: 1322874 - RNA, 19 nt, Human
caaagugccaaaagaccca

SEQ ID NO: 1322875 - RNA, 22 nt, Human
cagaaacuucccucucaggccu

SEQ ID NO: 1322876 - RNA, 23 nt, Human
ccgaugccauaguucaccaccug

SEQ ID NO: 1322877 - RNA, 18 nt, Human
ccuccacuccccccuccu

SEQ ID NO: 1322878 - RNA, 21 nt, Human
ccucucaggccuccacucccc

SEQ ID NO: 1322879 - RNA, 23 nt, Human
ccugcagguguccucauugccac

SEQ ID NO: 1322880 - RNA, 22 nt, Human
cuagccccuccugcaggugucc

SEQ ID NO: 1322881 - RNA, 26 nt, Human
cugcagauacucugcauagggaggag

SEQ ID NO: 1322882 - RNA, 23 nt, Human
cuucuuggucccuguggucaagg

SEQ ID NO: 1322883 - RNA, 21 nt, Human
cuuuguacugugcauccuacu

SEQ ID NO: 1322884 - RNA, 24 nt, Human
gagucaggcuagccccuccugcag

SEQ ID NO: 1322885 - RNA, 22 nt, Human
guugcaacucgguuuccugacu

SEQ ID NO: 1322886 - RNA, 25 nt, Human
uaaaaaaccaucauacaaaaagaaa

SEQ ID NO: 1322887 - RNA, 27 nt, Human
ucauacaaaaagaaaagaaaguuguuu

SEQ ID NO: 1322888 - RNA, 31 nt, Human
uccagaaacuucccucucaggccuccacucu

SEQ ID NO: 1322889 - RNA, 19 nt, Human
ucucaggccuccacucccc

SEQ ID NO: 1322890 - RNA, 22 nt, Human
ucucaggccuccacuccccccu

SEQ ID NO: 1322891 - RNA, 24 nt, Human
ucucaggccuccacuccccccucc

SEQ ID NO: 1322892 - RNA, 24 nt, Human
ucuuaaaguucugggagucaggcu

SEQ ID NO: 1322893 - RNA, 20 nt, Human
ugagauguccuguucccaac

SEQ ID NO: 1322894 - RNA, 22 nt, Human
uguggucaagguucaaagugcc

SEQ ID NO: 1322895 - RNA, 22 nt, Human
uguguuaaaaaaccaucauaca

SEQ ID NO: 1322896 - RNA, 19 nt, Human
uucaaagugccaaaagacc

SEQ ID NO: 1322897 - RNA, 22 nt, Human
aagggggagaggaagggggagg

SEQ ID NO: 1322898 - RNA, 25 nt, Human
aauccugggcuccuucaugucuucu

SEQ ID NO: 1322899 - RNA, 19 nt, Human
accccagagaggaaaaacc

SEQ ID NO: 1322900 - RNA, 21 nt, Human
agagaggaagggggagaggaa

SEQ ID NO: 1322901 - RNA, 21 nt, Human
agauugccagugcuccagcca

SEQ ID NO: 1322902 - RNA, 18 nt, Human
aggaagggggagaggaag

SEQ ID NO: 1322903 - RNA, 19 nt, Human
aggaagggggagaggaagg

SEQ ID NO: 1322904 - RNA, 21 nt, Human
caagaugugggucucaucuuc

SEQ ID NO: 1322905 - RNA, 25 nt, Human
cagaauccugggcuccuuccccgag

SEQ ID NO: 1322906 - RNA, 20 nt, Human
ccacacugucuucagaaucc

SEQ ID NO: 1322907 - RNA, 18 nt, Human
ccccagagaggaaaaacc

SEQ ID NO: 1322908 - RNA, 22 nt, Human
cuuacgaccugggcauuccacu

SEQ ID NO: 1322909 - RNA, 21 nt, Human
gcaggcaauccaagacuagca

SEQ ID NO: 1322910 - RNA, 20 nt, Human
ggaagggagagaggaagggg

SEQ ID NO: 1322911 - RNA, 22 nt, Human
ggagaggaagggggaggaaagg

SEQ ID NO: 1322912 - RNA, 25 nt, Human
gggagagaggaagggggagaggaag

SEQ ID NO: 1322913 - RNA, 23 nt, Human
gggcuccuucaugucuucuacuu

SEQ ID NO: 1322914 - RNA, 19 nt, Human
gguauuuaccccagagagg

SEQ ID NO: 1322915 - RNA, 21 nt, Human
uagcauauugacuccacacug

SEQ ID NO: 1322916 - RNA, 18 nt, Human
uaguucuaaucaggaaaa

SEQ ID NO: 1322917 - RNA, 21 nt, Human
uuccuagcagcuguaguucua

SEQ ID NO: 1322918 - RNA, 21 nt, Human
uuugcacagggauguuccuag

SEQ ID NO: 1322919 - RNA, 23 nt, Human
aagccgccaucauaaguccuggc

SEQ ID NO: 1322920 - RNA, 18 nt, Human
agccgcgccccgccccuc

SEQ ID NO: 1322921 - RNA, 21 nt, Human
aggagguggggcccagggggc

SEQ ID NO: 1322922 - RNA, 18 nt, Human
cacuguaggacagagcac

SEQ ID NO: 1322923 - RNA, 19 nt, Human
cagagcccggaccacggcu

SEQ ID NO: 1322924 - RNA, 22 nt, Human
caggcaaagaccgugacugaca

SEQ ID NO: 1322925 - RNA, 23 nt, Human
ccaggcaaagaccgugacugaca

SEQ ID NO: 1322926 - RNA, 20 nt, Human
ccccgcccacgcaacgcggc

SEQ ID NO: 1322927 - RNA, 25 nt, Human
ccccucgcaggccagcgcucagggc

SEQ ID NO: 1322928 - RNA, 21 nt, Human
cccgcaacuccgccccugccc

SEQ ID NO: 1322929 - RNA, 21 nt, Human
ccgcaggccuccgagagcggg

SEQ ID NO: 1322930 - RNA, 19 nt, Human
ccgcccgccgcgccugacc

SEQ ID NO: 1322931 - RNA, 19 nt, Human
ccgccggacagcccaggug

SEQ ID NO: 1322932 - RNA, 21 nt, Human
ccgcgccccgccccucgcagg

SEQ ID NO: 1322933 - RNA, 18 nt, Human
ccgcggccagagcccgga

SEQ ID NO: 1322934 - RNA, 18 nt, Human
ccuccgcgaagcagaagc

SEQ ID NO: 1322935 - RNA, 27 nt, Human
ccugacccgcggccucuccgcuccgac

SEQ ID NO: 1322936 - RNA, 20 nt, Human
cgagccccgggcucgcaacc

SEQ ID NO: 1322937 - RNA, 18 nt, Human
cgccccugccccgcccac

SEQ ID NO: 1322938 - RNA, 21 nt, Human
cgccgagaagggccgcgccgg

SEQ ID NO: 1322939 - RNA, 19 nt, Human
cgccgccgccgccucgccg

SEQ ID NO: 1322940 - RNA, 22 nt, Human
cgccggacagcccaggugucgg

SEQ ID NO: 1322941 - RNA, 19 nt, Human
cgcggcgaggccgccccgu

SEQ ID NO: 1322942 - RNA, 24 nt, Human
cgcucacacgcacgcacggaccca

SEQ ID NO: 1322943 - RNA, 20 nt, Human
cgcucacacgcacgcacggu

SEQ ID NO: 1322944 - RNA, 19 nt, Human
cgugaagccgcaggccucc

SEQ ID NO: 1322945 - RNA, 21 nt, Human
cuggaccugggccugccuccc

SEQ ID NO: 1322946 - RNA, 19 nt, Human
cuuccgcgccgccgccgcc

SEQ ID NO: 1322947 - RNA, 21 nt, Human
gacccgcggccucuccgcucc

SEQ ID NO: 1322948 - RNA, 20 nt, Human
gaccugggccugccucccuc

SEQ ID NO: 1322949 - RNA, 18 nt, Human
gagguggggcccaggggg

SEQ ID NO: 1322950 - RNA, 19 nt, Human
gcccagagccgcgccccgc

SEQ ID NO: 1322951 - RNA, 19 nt, Human
gcccaggcgccggagaaga

SEQ ID NO: 1322952 - RNA, 18 nt, Human
gccccgccccucgcaggc

SEQ ID NO: 1322953 - RNA, 22 nt, Human
gccccgccccucgcaggccagc

SEQ ID NO: 1322954 - RNA, 20 nt, Human
gccuccgagagcgggacgag

SEQ ID NO: 1322955 - RNA, 19 nt, Human
gcuccggggcggacagacu

SEQ ID NO: 1322956 - RNA, 19 nt, Human
ggagguggggcccaggggg

SEQ ID NO: 1322957 - RNA, 19 nt, Human
ggagguggggcccaggggg

SEQ ID NO: 1322958 - RNA, 21 nt, Human
ggagguggggcccagggggcu

SEQ ID NO: 1322959 - RNA, 24 nt, Human
ggggcccagggggcuccggggcgg

SEQ ID NO: 1322960 - RNA, 24 nt, Human
guggggcccagggggcuccggggc

SEQ ID NO: 1322961 - RNA, 20 nt, Human
uagcgguaacgggcuggggu

SEQ ID NO: 1322962 - RNA, 20 nt, Human
uccgcgccgccgccgccucg

SEQ ID NO: 1322963 - RNA, 23 nt, Human
uccgcgccgccgccgccucgccg

SEQ ID NO: 1322964 - RNA, 22 nt, Human
ugauugccgacaccgccuccgc

SEQ ID NO: 1322965 - RNA, 19 nt, Human
ugccccgcccacgcaacgc

SEQ ID NO: 1322966 - RNA, 21 nt, Human
ugcuuguaggcgaugcccagg

SEQ ID NO: 1322967 - RNA, 20 nt, Human
uggccgcccgccgcgccuga

SEQ ID NO: 1322968 - RNA, 20 nt, Human
uggggcccagggggcuccgg

SEQ ID NO: 1322969 - RNA, 21 nt, Human
uggggcccagggggcuccggg

SEQ ID NO: 1322970 - RNA, 22 nt, Human
uuccgcgccgccgccgccucgc

SEQ ID NO: 1322971 - RNA, 22 nt, Human
uugcccaggcgccggagaagag

SEQ ID NO: 1322972 - RNA, 24 nt, Human
uuuccaguauggccgcccgccgcg

SEQ ID NO: 1322973 - RNA, 23 nt, Human
aaacacaguuuggcacagaguca

SEQ ID NO: 1322974 - RNA, 19 nt, Human
aagaggccagaggcagggc

SEQ ID NO: 1322975 - RNA, 19 nt, Human
aagaggccagaggcagggc

SEQ ID NO: 1322976 - RNA, 23 nt, Human
acagagucacagagaucguuagc

SEQ ID NO: 1322977 - RNA, 21 nt, Human
acaguggcuuagacacugagg

SEQ ID NO: 1322978 - RNA, 18 nt, Human
aggcagggcaaguccagg

SEQ ID NO: 1322979 - RNA, 23 nt, Human
agggcagcccugauucaagggag

SEQ ID NO: 1322980 - RNA, 18 nt, Human
augacauuaccaaggacc

SEQ ID NO: 1322981 - RNA, 18 nt, Human
caccuugcuaccuucagc

SEQ ID NO: 1322982 - RNA, 21 nt, Human
cagaguaucucaauguuuggu

SEQ ID NO: 1322983 - RNA, 23 nt, Human
cuucuuaucuuuccaccuugcua

SEQ ID NO: 1322984 - RNA, 22 nt, Human
ggccagaggcagggcaagucca

SEQ ID NO: 1322985 - RNA, 20 nt, Human
gucacuaagggcagcccuga

SEQ ID NO: 1322986 - RNA, 19 nt, Human
guccugggauguuuucagc

SEQ ID NO: 1322987 - RNA, 20 nt, Human
uaacugaaaagccaacuaac

SEQ ID NO: 1322988 - RNA, 24 nt, Human
uaagcugucuccaccugccacaaa

SEQ ID NO: 1322989 - RNA, 18 nt, Human
uaagggcagcccugauuc

SEQ ID NO: 1322990 - RNA, 23 nt, Human
uaccaaggaccccucugcuucuu

SEQ ID NO: 1322991 - RNA, 24 nt, Human
uaucuuuccaccuugcuaccuuca

SEQ ID NO: 1322992 - RNA, 21 nt, Human
ugaugggagagaaacauugca

SEQ ID NO: 1322993 - RNA, 20 nt, Human
ugucacagaugccuuuggaa

SEQ ID NO: 1322994 - RNA, 25 nt, Human
uuucagcugcaaguaacugaaaagc

SEQ ID NO: 1322995 - RNA, 23 nt, Human
uuucauggcuccaugacauuacc

SEQ ID NO: 1322996 - RNA, 24 nt, Human
cacccuaaucuuaagcaaauggga

SEQ ID NO: 1322997 - RNA, 22 nt, Human
caucuugucugcuuuucuuacu

SEQ ID NO: 1322998 - RNA, 20 nt, Human
cccuugauaacgaagauaga

SEQ ID NO: 1322999 - RNA, 23 nt, Human
gcaaaugggauuuccaguugacg

SEQ ID NO: 1323000 - RNA, 24 nt, Human
uguacaugcgguugacaaagagga

SEQ ID NO: 1323001 - RNA, 22 nt, Human
aaauaagacuuaaggacuuccc

SEQ ID NO: 1323002 - RNA, 20 nt, Human
acagggauucaucuuucuca

SEQ ID NO: 1323003 - RNA, 21 nt, Human
agccaggagagggccccacaa

SEQ ID NO: 1323004 - RNA, 19 nt, Human
aggaagacagacacaggga

SEQ ID NO: 1323005 - RNA, 20 nt, Human
caggucccucucuucuuuca

SEQ ID NO: 1323006 - RNA, 24 nt, Human
ccucucuucuuucuucugcacaaa

SEQ ID NO: 1323007 - RNA, 22 nt, Human
ccugugcugcagcugcugcagg

SEQ ID NO: 1323008 - RNA, 19 nt, Human
cucccugcugaggcggagg

SEQ ID NO: 1323009 - RNA, 23 nt, Human
cugaggcggaggagauucucucu

SEQ ID NO: 1323010 - RNA, 18 nt, Human
cugcagccccuucgcagg

SEQ ID NO: 1323011 - RNA, 20 nt, Human
cugcauacuugagcugcacc

SEQ ID NO: 1323012 - RNA, 19 nt, Human
cugcuuccuccuggccugc

SEQ ID NO: 1323013 - RNA, 23 nt, Human
cuucugcacaaacugaguaaccc

SEQ ID NO: 1323014 - RNA, 20 nt, Human
gccaguuccaguuucaagga

SEQ ID NO: 1323015 - RNA, 20 nt, Human
gccuucagucgguucaccag

SEQ ID NO: 1323016 - RNA, 21 nt, Human
ggagauucucucuuucuucuu

SEQ ID NO: 1323017 - RNA, 19 nt, Human
gucacggagccaggagagg

SEQ ID NO: 1323018 - RNA, 21 nt, Human
uaacccaggccgguucuccag

SEQ ID NO: 1323019 - RNA, 24 nt, Human
uaacccaggccgguucuccagcag

SEQ ID NO: 1323020 - RNA, 23 nt, Human
ucaccaggucccucucuucuuuc

SEQ ID NO: 1323021 - RNA, 22 nt, Human
ucacggagccaggagagggccc

SEQ ID NO: 1323022 - RNA, 23 nt, Human
ucugcacaaacugaguaacccag

SEQ ID NO: 1323023 - RNA, 19 nt, Human
ugccucaggcgcuuggcug

SEQ ID NO: 1323024 - RNA, 23 nt, Human
uucaucuuucucaucauguaagg

SEQ ID NO: 1323025 - RNA, 25 nt, Human
uucaucuuucucaucauguaagggg

SEQ ID NO: 1323026 - RNA, 18 nt, Human
uuccaguuucaaggaguc

SEQ ID NO: 1323027 - RNA, 18 nt, Human
uucucucuuucuucuucu

SEQ ID NO: 1323028 - RNA, 20 nt, Human
cugccuggccguccugauug

SEQ ID NO: 1323029 - RNA, 19 nt, Human
gccuggccguccugauugc

SEQ ID NO: 1323030 - RNA, 19 nt, Human
ugcaaaugcugccuggccg

SEQ ID NO: 1323031 - RNA, 26 nt, Human
uguggaacacgaccuuuuucuuccga

SEQ ID NO: 1323032 - RNA, 19 nt, Human
aaaccagccaagaccugca

SEQ ID NO: 1323033 - RNA, 20 nt, Human
aaagcagcugccuccuagac

SEQ ID NO: 1323034 - RNA, 19 nt, Human
aaaggcagaggaggaugaa

SEQ ID NO: 1323035 - RNA, 21 nt, Human
aagaccugcagaagggaucaa

SEQ ID NO: 1323036 - RNA, 19 nt, Human
aagccagaggcagagagga

SEQ ID NO: 1323037 - RNA, 19 nt, Human
acugcaccuggagguaaca

SEQ ID NO: 1323038 - RNA, 23 nt, Human
agagccuuagcucccuggacagc

SEQ ID NO: 1323039 - RNA, 20 nt, Human
aggggaaaggcagaggagga

SEQ ID NO: 1323040 - RNA, 20 nt, Human
agguaacagcgauccgcgau

SEQ ID NO: 1323041 - RNA, 22 nt, Human
aggucaggagaaugggugggga

SEQ ID NO: 1323042 - RNA, 19 nt, Human
aucuccuucacccucgccg

SEQ ID NO: 1323043 - RNA, 22 nt, Human
augaaagagacauaaagccaga

SEQ ID NO: 1323044 - RNA, 20 nt, Human
auuuccuguagggauagccg

SEQ ID NO: 1323045 - RNA, 18 nt, Human
caagucucuaauuguagc

SEQ ID NO: 1323046 - RNA, 21 nt, Human
caggucaggagaauggguggg

SEQ ID NO: 1323047 - RNA, 18 nt, Human
ccaauccagagaacuacc

SEQ ID NO: 1323048 - RNA, 20 nt, Human
cccaaguaugaucuacaggu

SEQ ID NO: 1323049 - RNA, 22 nt, Human
ccccgcgaacacccuggggacc

SEQ ID NO: 1323050 - RNA, 21 nt, Human
cccgcagccgcucgcuggggc

SEQ ID NO: 1323051 - RNA, 19 nt, Human
ccgcagccgcucgcugggg

SEQ ID NO: 1323052 - RNA, 20 nt, Human
ccgcagccgcucgcuggggc

SEQ ID NO: 1323053 - RNA, 21 nt, Human
ccgcgaacacccuggggaccu

SEQ ID NO: 1323054 - RNA, 19 nt, Human
cgccgcguagcugcagggc

SEQ ID NO: 1323055 - RNA, 20 nt, Human
cgcguagcugcagggcccgg

SEQ ID NO: 1323056 - RNA, 22 nt, Human
cuaauuguagcuugguuucccu

SEQ ID NO: 1323057 - RNA, 25 nt, Human
cugaaaccagccaagaccugcagaa

SEQ ID NO: 1323058 - RNA, 26 nt, Human
cuggagguaacagcgauccgcgaucu

SEQ ID NO: 1323059 - RNA, 20 nt, Human
cuggggcuucccaccgccuc

SEQ ID NO: 1323060 - RNA, 22 nt, Human
gaaaaagcagcugccuccuaga

SEQ ID NO: 1323061 - RNA, 20 nt, Human
gaaagagacauaaagccaga

SEQ ID NO: 1323062 - RNA, 18 nt, Human
gaacguguccagggcccc

SEQ ID NO: 1323063 - RNA, 20 nt, Human
gaggagccacuggcuugaaa

SEQ ID NO: 1323064 - RNA, 18 nt, Human
gcagccgcucgcuggggc

SEQ ID NO: 1323065 - RNA, 23 nt, Human
gccacgcgccucgcgcgaguccu

SEQ ID NO: 1323066 - RNA, 19 nt, Human
ggaggagccacuggcuuga

SEQ ID NO: 1323067 - RNA, 21 nt, Human
gggcaggggaaaggcagagga

SEQ ID NO: 1323068 - RNA, 24 nt, Human
gucaucuuuuucauugcuguacuc

SEQ ID NO: 1323069 - RNA, 22 nt, Human
guccagggccccgcgaacaccc

SEQ ID NO: 1323070 - RNA, 20 nt, Human
guuuguuuggggagagccuu

SEQ ID NO: 1323071 - RNA, 18 nt, Human
uacaaagucugaacgugg

SEQ ID NO: 1323072 - RNA, 19 nt, Human
uagcucccuggacagcaac

SEQ ID NO: 1323073 - RNA, 20 nt, Human
uaggcugggcccuuaucacu

SEQ ID NO: 1323074 - RNA, 25 nt, Human
ucaagggcaggggaaaggcagagga

SEQ ID NO: 1323075 - RNA, 23 nt, Human
ucccaaguggauguaacaguuug

SEQ ID NO: 1323076 - RNA, 19 nt, Human
ucccccaucuccuucaccc

SEQ ID NO: 1323077 - RNA, 21 nt, Human
uccuagacuaggcugggcccu

SEQ ID NO: 1323078 - RNA, 21 nt, Human
ucucuaauuguagcuugguuu

SEQ ID NO: 1323079 - RNA, 22 nt, Human
ucucugcgugggcagaaucugu

SEQ ID NO: 1323080 - RNA, 24 nt, Human
ugaaagagacauaaagccagaggc

SEQ ID NO: 1323081 - RNA, 22 nt, Human
ugcagggcccggcucugcgcuu

SEQ ID NO: 1323082 - RNA, 24 nt, Human
uggacagcaaccacagggcugggc

SEQ ID NO: 1323083 - RNA, 23 nt, Human
ugggacccguuuccugaaaccag

SEQ ID NO: 1323084 - RNA, 23 nt, Human
ugggacucugaggccgcgccucg

SEQ ID NO: 1323085 - RNA, 27 nt, Human
uguacucccaaguggauguaacaguuu

SEQ ID NO: 1323086 - RNA, 24 nt, Human
uguccagggccccgcgaacacccu

SEQ ID NO: 1323087 - RNA, 18 nt, Human
aagcugcaggcgcccggc

SEQ ID NO: 1323088 - RNA, 18 nt, Human
acccucccacugcuggau

SEQ ID NO: 1323089 - RNA, 19 nt, Human
agagaacagccccaugcug

SEQ ID NO: 1323090 - RNA, 19 nt, Human
agccccccagcccccccag

SEQ ID NO: 1323091 - RNA, 22 nt, Human
agccgcaccuuggugaagccca

SEQ ID NO: 1323092 - RNA, 20 nt, Human
agccugucauccaccacgac

SEQ ID NO: 1323093 - RNA, 20 nt, Human
agcuggaaguggaagacgcc

SEQ ID NO: 1323094 - RNA, 28 nt, Human
aggaguggggcccagaacucauuccgcu

SEQ ID NO: 1323095 - RNA, 24 nt, Human
aggcaggcugcccgaauugccuca

SEQ ID NO: 1323096 - RNA, 20 nt, Human
auagccaagggcaucagggc

SEQ ID NO: 1323097 - RNA, 26 nt, Human
aucagcuuccccucacgcacgggcag

SEQ ID NO: 1323098 - RNA, 18 nt, Human
auccucgucauccuccuc

SEQ ID NO: 1323099 - RNA, 22 nt, Human
auccucgucauccuccucauca

SEQ ID NO: 1323100 - RNA, 24 nt, Human
caaggaaccagcaguuacccaggc

SEQ ID NO: 1323101 - RNA, 21 nt, Human
caccccgaucacucagggcag

SEQ ID NO: 1323102 - RNA, 23 nt, Human
cagaaggaccgugcacuugggcg

SEQ ID NO: 1323103 - RNA, 23 nt, Human
cagcacagaacuccugugggugg

SEQ ID NO: 1323104 - RNA, 18 nt, Human
cagccccccagccccccc

SEQ ID NO: 1323105 - RNA, 23 nt, Human
cagcccccccagggcccuuccuc

SEQ ID NO: 1323106 - RNA, 21 nt, Human
cagccgcagcagccgcaccuu

SEQ ID NO: 1323107 - RNA, 24 nt, Human
cagcggccaaacugccagagcugg

SEQ ID NO: 1323108 - RNA, 18 nt, Human
cagcuggucauagccaag

SEQ ID NO: 1323109 - RNA, 23 nt, Human
caggaacaccuugugugugcccg

SEQ ID NO: 1323110 - RNA, 21 nt, Human
caggagccggggauacagaaa

SEQ ID NO: 1323111 - RNA, 20 nt, Human
caggagccggggauacagag

SEQ ID NO: 1323112 - RNA, 20 nt, Human
caggagccggggauacagag

SEQ ID NO: 1323113 - RNA, 19 nt, Human
caggagggaccacccggcg

SEQ ID NO: 1323114 - RNA, 21 nt, Human
cagggcagagaacagccccau

SEQ ID NO: 1323115 - RNA, 27 nt, Human
ccaacggugagguaagugaggcccuuu

SEQ ID NO: 1323116 - RNA, 21 nt, Human
ccacgccgccugugaaaucca

SEQ ID NO: 1323117 - RNA, 19 nt, Human
ccagcggccaaacugccag

SEQ ID NO: 1323118 - RNA, 22 nt, Human
cccacgccgccugugaaaucca

SEQ ID NO: 1323119 - RNA, 25 nt, Human
ccccagcccccccagggcccuuccu

SEQ ID NO: 1323120 - RNA, 18 nt, Human
cccccagcccccccaggg

SEQ ID NO: 1323121 - RNA, 24 nt, Human
cccccagcccccccagggcccuuc

SEQ ID NO: 1323122 - RNA, 18 nt, Human
ccccccgcgcugggcccc

SEQ ID NO: 1323123 - RNA, 22 nt, Human
ccccgaaaaagcugcaggcgcc

SEQ ID NO: 1323124 - RNA, 23 nt, Human
ccccgaauccaggcaggcugccc

SEQ ID NO: 1323125 - RNA, 23 nt, Human
ccccgcgcugggccccgugcccc

SEQ ID NO: 1323126 - RNA, 19 nt, Human
ccccgugccccugcagccc

SEQ ID NO: 1323127 - RNA, 23 nt, Human
ccccugcagccccccagcccccc

SEQ ID NO: 1323128 - RNA, 22 nt, Human
cccggcuccgaccccagccucc

SEQ ID NO: 1323129 - RNA, 19 nt, Human
cccugcagccccccagccc

SEQ ID NO: 1323130 - RNA, 20 nt, Human
cccuuuaccaggcccucuuc

SEQ ID NO: 1323131 - RNA, 25 nt, Human
ccgcagccgcagcagccgcaccuug

SEQ ID NO: 1323132 - RNA, 26 nt, Human
ccgccugugaaauccacaaaagcugg

SEQ ID NO: 1323133 - RNA, 18 nt, Human
ccgugccccugcagcccc

SEQ ID NO: 1323134 - RNA, 23 nt, Human
ccucauccucgucauccuccuca

SEQ ID NO: 1323135 - RNA, 22 nt, Human
ccucgcccacgccgccugugaa

SEQ ID NO: 1323136 - RNA, 19 nt, Human
ccugugaaauccacaaaag

SEQ ID NO: 1323137 - RNA, 19 nt, Human
ccuugugugugcccgugau

SEQ ID NO: 1323138 - RNA, 24 nt, Human
cgccuuuggccuucuccgaguccu

SEQ ID NO: 1323139 - RNA, 18 nt, Human
cggccaaacugccagagc

SEQ ID NO: 1323140 - RNA, 23 nt, Human
cggccccagcuggucauagccaa

SEQ ID NO: 1323141 - RNA, 21 nt, Human
cggcccccccgcgcugggccc

SEQ ID NO: 1323142 - RNA, 27 nt, Human
cgugccccugcagccccccagcccccc

SEQ ID NO: 1323143 - RNA, 18 nt, Human
cucauccucgucauccuc

SEQ ID NO: 1323144 - RNA, 19 nt, Human
gcaccuuggugaagcccag

SEQ ID NO: 1323145 - RNA, 21 nt, Human
gcagagaacagccccaugcug

SEQ ID NO: 1323146 - RNA, 20 nt, Human
gcagggcagagaacagcccc

SEQ ID NO: 1323147 - RNA, 24 nt, Human
gcagggcagagaacagccccaugc

SEQ ID NO: 1323148 - RNA, 18 nt, Human
gcggcagcugcaaggaac

SEQ ID NO: 1323149 - RNA, 19 nt, Human
gcggccaaacugccagagc

SEQ ID NO: 1323150 - RNA, 18 nt, Human
ggaggcggcagcugcaag

SEQ ID NO: 1323151 - RNA, 20 nt, Human
ggcagagaacagccccaugc

SEQ ID NO: 1323152 - RNA, 20 nt, Human
ggccccgaaaaagcugcagg

SEQ ID NO: 1323153 - RNA, 20 nt, Human
ggcucucaggcgccgccggu

SEQ ID NO: 1323154 - RNA, 18 nt, Human
guaggccuucuccaggag

SEQ ID NO: 1323155 - RNA, 19 nt, Human
gucauccuccucaucaggc

SEQ ID NO: 1323156 - RNA, 19 nt, Human
gucccuuuaccaggccccu

SEQ ID NO: 1323157 - RNA, 19 nt, Human
uaagugaggcccuuggcuc

SEQ ID NO: 1323158 - RNA, 21 nt, Human
uccgaccccagccuccucauc

SEQ ID NO: 1323159 - RNA, 19 nt, Human
uccgcagccgcagcagccg

SEQ ID NO: 1323160 - RNA, 20 nt, Human
uccgcagccgcagcagccgc

SEQ ID NO: 1323161 - RNA, 21 nt, Human
uccgcagccgcagcagccgca

SEQ ID NO: 1323162 - RNA, 22 nt, Human
uccucauccucgucauccuccu

SEQ ID NO: 1323163 - RNA, 24 nt, Human
uccucauccucgucauccuccuca

SEQ ID NO: 1323164 - RNA, 26 nt, Human
uccuuggccagggcauggcgcagggc

SEQ ID NO: 1323165 - RNA, 18 nt, Human
ucucagauagagcaccuc

SEQ ID NO: 1323166 - RNA, 18 nt, Human
ugagguaagugaggcccu

SEQ ID NO: 1323167 - RNA, 23 nt, Human
ugcaggcgcccggcuccgacccc

SEQ ID NO: 1323168 - RNA, 23 nt, Human
ugcccgaauugccucauagcucu

SEQ ID NO: 1323169 - RNA, 20 nt, Human
uggcgcagggcagagaacag

SEQ ID NO: 1323170 - RNA, 21 nt, Human
uggcgcccacgagggacuccu

SEQ ID NO: 1323171 - RNA, 22 nt, Human
uggguggugggggauuccaggc

SEQ ID NO: 1323172 - RNA, 24 nt, Human
uggugggggauuccaggccucagc

SEQ ID NO: 1323173 - RNA, 18 nt, Human
ugucccuuuaccaggccc

SEQ ID NO: 1323174 - RNA, 25 nt, Human
uuccucauccucgucauccuccuca

SEQ ID NO: 1323175 - RNA, 21 nt, Human
agaguguggccggcuuccucc

SEQ ID NO: 1323176 - RNA, 20 nt, Human
agcugcaguggccagacugu

SEQ ID NO: 1323177 - RNA, 23 nt, Human
aggaaauggggaggcagccagga

SEQ ID NO: 1323178 - RNA, 22 nt, Human
aggcagccaggaggcugggaaa

SEQ ID NO: 1323179 - RNA, 24 nt, Human
aggcagccaggaggcugggaaagc

SEQ ID NO: 1323180 - RNA, 23 nt, Human
agggcuccuggugccugguucag

SEQ ID NO: 1323181 - RNA, 20 nt, Human
aucaccagugugggaggaaa

SEQ ID NO: 1323182 - RNA, 21 nt, Human
caagacaggaugaagggcagg

SEQ ID NO: 1323183 - RNA, 23 nt, Human
cagacgccaagacaggaugaagg

SEQ ID NO: 1323184 - RNA, 20 nt, Human
cagacucuaggcucaauccu

SEQ ID NO: 1323185 - RNA, 18 nt, Human
caggaaagucccuagaaa

SEQ ID NO: 1323186 - RNA, 23 nt, Human
ccccguguugccacaccugagcc

SEQ ID NO: 1323187 - RNA, 27 nt, Human
cgaggacacaaagcugguuugcggagg

SEQ ID NO: 1323188 - RNA, 22 nt, Human
cgcgaggcagacgccaagacag

SEQ ID NO: 1323189 - RNA, 19 nt, Human
cggagggcuggccuggggc

SEQ ID NO: 1323190 - RNA, 21 nt, Human
cucuagauaggauuccgagaa

SEQ ID NO: 1323191 - RNA, 20 nt, Human
gacaggaugaagggcaggag

SEQ ID NO: 1323192 - RNA, 21 nt, Human
gagaagugcuauuagccaugc

SEQ ID NO: 1323193 - RNA, 19 nt, Human
gaggaaauggggaggcagc

SEQ ID NO: 1323194 - RNA, 21 nt, Human
gaggcugaauguucuuggaga

SEQ ID NO: 1323195 - RNA, 22 nt, Human
gccggcuuccuccucucuccag

SEQ ID NO: 1323196 - RNA, 22 nt, Human
gccuggggcgcagggcuccugg

SEQ ID NO: 1323197 - RNA, 18 nt, Human
ggagaguguggccggcuu

SEQ ID NO: 1323198 - RNA, 23 nt, Human
guucagaggcggucacuaggcac

SEQ ID NO: 1323199 - RNA, 18 nt, Human
ucuccagacagcaagacc

SEQ ID NO: 1323200 - RNA, 23 nt, Human
uggagaguguggccggcuuccuc

SEQ ID NO: 1323201 - RNA, 21 nt, Human
uggccuggggcgcagggcucc

SEQ ID NO: 1323202 - RNA, 25 nt, Human
uggccuggggcgcagggcuccuggc

SEQ ID NO: 1323203 - RNA, 20 nt, Human
ugggaggaaauggggaggca

SEQ ID NO: 1323204 - RNA, 22 nt, Human
ugggaggaaauggggaggcagc

SEQ ID NO: 1323205 - RNA, 19 nt, Human
uucagagccuuucaacccc

SEQ ID NO: 1323206 - RNA, 21 nt, Human
uugccacaccugagccagugc

SEQ ID NO: 1323207 - RNA, 19 nt, Human
cagcuccucuggcgugcuc

SEQ ID NO: 1323208 - RNA, 22 nt, Human
cagcuccucuggcgugcucgug

SEQ ID NO: 1323209 - RNA, 19 nt, Human
ggcugcggcaccgcccucg

SEQ ID NO: 1323210 - RNA, 24 nt, Human
ggcugcgggaguuacugggggagg

SEQ ID NO: 1323211 - RNA, 20 nt, Human
guggcgcugcugcuguggcc

SEQ ID NO: 1323212 - RNA, 18 nt, Human
ucguggcgcugcugcugu

SEQ ID NO: 1323213 - RNA, 18 nt, Human
ugcugcuguggccggcca

SEQ ID NO: 1323214 - RNA, 18 nt, Human
ugcuguggccggccaggu

SEQ ID NO: 1323215 - RNA, 22 nt, Human
ccgccuccuggcagccgggcuu

SEQ ID NO: 1323216 - RNA, 24 nt, Human
ccuccuggcagccgggcuuggcuc

SEQ ID NO: 1323217 - RNA, 18 nt, Human
cggccucuggagaccccc

SEQ ID NO: 1323218 - RNA, 21 nt, Human
uggagacccccaccggcgcug

SEQ ID NO: 1323219 - RNA, 18 nt, Human
ugggccgccuccuggcag

SEQ ID NO: 1323220 - RNA, 18 nt, Human
cccggccugggugcgggg

SEQ ID NO: 1323221 - RNA, 20 nt, Human
guguguggggggacuccugg

SEQ ID NO: 1323222 - RNA, 18 nt, Human
ucuuuuuuuuuuuuuuuu

SEQ ID NO: 1323223 - RNA, 22 nt, Human
ucuuuuuuuuuuuuuuuuuucu

SEQ ID NO: 1323224 - RNA, 18 nt, Human
uguggggggacuccuggg

SEQ ID NO: 1323225 - RNA, 25 nt, Human
uuauuaaaaaaguguaaaaugggaa

SEQ ID NO: 1323226 - RNA, 27 nt, Human
uucuuuuucuuuuuuuuuuuuuuuuuu

SEQ ID NO: 1323227 - RNA, 27 nt, Human
uuucuuuuucuuuuuuuuuuuuuuuuu

SEQ ID NO: 1323228 - RNA, 27 nt, Human
uuuucuuuuucuuuuuuuuuuuuuuuu

SEQ ID NO: 1323229 - RNA, 25 nt, Human
uuuuucuuuuucuuuuucuuuuuuu

SEQ ID NO: 1323230 - RNA, 27 nt, Human
uuuuucuuuuucuuuuuuuuuuuuuuu

SEQ ID NO: 1323231 - RNA, 20 nt, Human
agagcucauguucucaccac

SEQ ID NO: 1323232 - RNA, 24 nt, Human
augcaaguuuauacuuaaaguuca

SEQ ID NO: 1323233 - RNA, 19 nt, Human
cacacagcuggugaaugac

SEQ ID NO: 1323234 - RNA, 21 nt, Human
cagagcucauguucucaccac

SEQ ID NO: 1323235 - RNA, 18 nt, Human
cagggagggacugagggg

SEQ ID NO: 1323236 - RNA, 18 nt, Human
cagguccccauuuuggcu

SEQ ID NO: 1323237 - RNA, 24 nt, Human
caugaaccuuaugaguugaugcca

SEQ ID NO: 1323238 - RNA, 21 nt, Human
cgcucccaaguccagacuccc

SEQ ID NO: 1323239 - RNA, 22 nt, Human
cuagcucaguccucaugaaccu

SEQ ID NO: 1323240 - RNA, 28 nt, Human
cucaccacuaagccuccacugucucaga

SEQ ID NO: 1323241 - RNA, 22 nt, Human
gcucgggugagaguucacgcuc

SEQ ID NO: 1323242 - RNA, 18 nt, Human
gggcugggcgggcuccag

SEQ ID NO: 1323243 - RNA, 20 nt, Human
gggcugggcgggcuccaguu

SEQ ID NO: 1323244 - RNA, 26 nt, Human
gggcugggcgggcuccaguuguaagg

SEQ ID NO: 1323245 - RNA, 22 nt, Human
gggcuucagggagggacugagg

SEQ ID NO: 1323246 - RNA, 19 nt, Human
ggggcugggcgggcuccag

SEQ ID NO: 1323247 - RNA, 20 nt, Human
uaaaguucagcagccuuugg

SEQ ID NO: 1323248 - RNA, 20 nt, Human
ucagcagccuuuggucuugg

SEQ ID NO: 1323249 - RNA, 27 nt, Human
ugacagguccccauuuuggcuuuuaug

SEQ ID NO: 1323250 - RNA, 22 nt, Human
uuccugagccaagccauaguuu

SEQ ID NO: 1323251 - RNA, 24 nt, Human
uuggcuaaaacauuuuugacaggu

SEQ ID NO: 1323252 - RNA, 19 nt, Human
uuggucuuggcaucuuccu

SEQ ID NO: 1323253 - RNA, 18 nt, Human
ccuugaaauccugacggg

SEQ ID NO: 1323254 - RNA, 20 nt, Human
cugcuuccuggauccuccug

SEQ ID NO: 1323255 - RNA, 19 nt, Human
ggauccuccugugagccac

SEQ ID NO: 1323256 - RNA, 20 nt, Human
ggucaauauuugcugcuucc

SEQ ID NO: 1323257 - RNA, 22 nt, Human
uggauccuccugugagccacug

SEQ ID NO: 1323258 - RNA, 22 nt, Human
ugugagccacugauccauuuuu

SEQ ID NO: 1323259 - RNA, 26 nt, Human
agcccccagcuuuccguggcuauugg

SEQ ID NO: 1323260 - RNA, 19 nt, Human
augggucuuaggccuguga

SEQ ID NO: 1323261 - RNA, 20 nt, Human
cagagcuccagccaggccgc

SEQ ID NO: 1323262 - RNA, 18 nt, Human
cagcacggccccucccuu

SEQ ID NO: 1323263 - RNA, 19 nt, Human
ccagcccccagcuuuccgu

SEQ ID NO: 1323264 - RNA, 19 nt, Human
ccccagagcuccagccagg

SEQ ID NO: 1323265 - RNA, 22 nt, Human
ccccagagcuccagccaggccg

SEQ ID NO: 1323266 - RNA, 22 nt, Human
ccccagauccccgggagagguc

SEQ ID NO: 1323267 - RNA, 18 nt, Human
cccccagauccccgggag

SEQ ID NO: 1323268 - RNA, 19 nt, Human
ccccgggaaggaguggguc

SEQ ID NO: 1323269 - RNA, 19 nt, Human
cccucgggacugucccucc

SEQ ID NO: 1323270 - RNA, 19 nt, Human
cccuggauccugaggcgcc

SEQ ID NO: 1323271 - RNA, 18 nt, Human
ccucgggacugucccucc

SEQ ID NO: 1323272 - RNA, 21 nt, Human
cgaauguagacggugaggcca

SEQ ID NO: 1323273 - RNA, 20 nt, Human
cgcggaugcugacgccgggc

SEQ ID NO: 1323274 - RNA, 23 nt, Human
cgggaaggagugggucugggucc

SEQ ID NO: 1323275 - RNA, 21 nt, Human
cugcugcccucgggacugucc

SEQ ID NO: 1323276 - RNA, 22 nt, Human
cugcugcccucgggacuguccc

SEQ ID NO: 1323277 - RNA, 18 nt, Human
gagggaccccagagcucc

SEQ ID NO: 1323278 - RNA, 25 nt, Human
gcccccagcuuuccguggcuauugg

SEQ ID NO: 1323279 - RNA, 18 nt, Human
ggaauaacuagguggaca

SEQ ID NO: 1323280 - RNA, 22 nt, Human
gggaaggagugggucugggucc

SEQ ID NO: 1323281 - RNA, 21 nt, Human
gggacugucccuccagccccc

SEQ ID NO: 1323282 - RNA, 24 nt, Human
gggugucacagagaccgaugcggg

SEQ ID NO: 1323283 - RNA, 23 nt, Human
uaacuagguggacaaaggccaaa

SEQ ID NO: 1323284 - RNA, 21 nt, Human
ucaugggucuuaggccuguga

SEQ ID NO: 1323285 - RNA, 23 nt, Human
ucccuugggugucacagagacug

SEQ ID NO: 1323286 - RNA, 20 nt, Human
uccgcaggauccccucgcgg

SEQ ID NO: 1323287 - RNA, 23 nt, Human
uccguggcuauugggcccccucu

SEQ ID NO: 1323288 - RNA, 19 nt, Human
ugaggccaaggacgcccug

SEQ ID NO: 1323289 - RNA, 21 nt, Human
ugauccucgcccccagauccc

SEQ ID NO: 1323290 - RNA, 19 nt, Human
ugggcccccucugcagagg

SEQ ID NO: 1323291 - RNA, 18 nt, Human
uggguccaguccgcagga

SEQ ID NO: 1323292 - RNA, 21 nt, Human
uguagacggugaggccaagga

SEQ ID NO: 1323293 - RNA, 18 nt, Human
uugggcccccucugcaga

SEQ ID NO: 1323294 - RNA, 20 nt, Human
uugggcccccucugcagagg

SEQ ID NO: 1323295 - RNA, 25 nt, Human
aaaaaaaggaaaaaugccccaagaa

SEQ ID NO: 1323296 - RNA, 23 nt, Human
aaaaaggaaaaaugccccaagaa

SEQ ID NO: 1323297 - RNA, 18 nt, Human
aaaaucucccgggaccac

SEQ ID NO: 1323298 - RNA, 19 nt, Human
aaccccccccuccgcccuc

SEQ ID NO: 1323299 - RNA, 19 nt, Human
aaccuggucgaugggcaga

SEQ ID NO: 1323300 - RNA, 21 nt, Human
aaccuggucgaugggcagacc

SEQ ID NO: 1323301 - RNA, 18 nt, Human
aacuccuuccucacucug

SEQ ID NO: 1323302 - RNA, 27 nt, Human
aagcguuacaagguuaaagacaaaacc

SEQ ID NO: 1323303 - RNA, 24 nt, Human
acaagguuaaagacaaaacccaag

SEQ ID NO: 1323304 - RNA, 24 nt, Human
acacaccugcuagccccuuccccu

SEQ ID NO: 1323305 - RNA, 28 nt, Human
accacuuccuaccccagaacuccccccg

SEQ ID NO: 1323306 - RNA, 21 nt, Human
accaugaaaacauuggagaau

SEQ ID NO: 1323307 - RNA, 19 nt, Human
acccagaagccucaggccu

SEQ ID NO: 1323308 - RNA, 27 nt, Human
accccagaacuccccccgcccagcccc

SEQ ID NO: 1323309 - RNA, 21 nt, Human
accccuccaaccgccagacuu

SEQ ID NO: 1323310 - RNA, 24 nt, Human
acccgccugaccucccuacucccc

SEQ ID NO: 1323311 - RNA, 24 nt, Human
acgcugcgggggccguggggacag

SEQ ID NO: 1323312 - RNA, 21 nt, Human
acgugguggucuccaggcugg

SEQ ID NO: 1323313 - RNA, 25 nt, Human
acucaggccgcaccaucugagcccc

SEQ ID NO: 1323314 - RNA, 20 nt, Human
acuccccccgcccagccccc

SEQ ID NO: 1323315 - RNA, 19 nt, Human
acugaagacauuggggacc

SEQ ID NO: 1323316 - RNA, 18 nt, Human
agaacuccccccgcccag

SEQ ID NO: 1323317 - RNA, 21 nt, Human
agaacuccccccgcccagccc

SEQ ID NO: 1323318 - RNA, 18 nt, Human
agacccugcccaaccccc

SEQ ID NO: 1323319 - RNA, 22 nt, Human
agcaacagggacagaugaaaaa

SEQ ID NO: 1323320 - RNA, 24 nt, Human
agcguuaaaggaguugaguugagu

SEQ ID NO: 1323321 - RNA, 26 nt, Human
aggaggcuccacccucaacucaaccc

SEQ ID NO: 1323322 - RNA, 20 nt, Human
aggagggguaaaaaaaaaaa

SEQ ID NO: 1323323 - RNA, 19 nt, Human
aggcacaggugacauucag

SEQ ID NO: 1323324 - RNA, 19 nt, Human
aggcagggugcugaggggc

SEQ ID NO: 1323325 - RNA, 20 nt, Human
aggcagggugcugaggggcg

SEQ ID NO: 1323326 - RNA, 19 nt, Human
aggcgccaaggaggccagc

SEQ ID NO: 1323327 - RNA, 21 nt, Human
aggcggccacccugccccagc

SEQ ID NO: 1323328 - RNA, 25 nt, Human
agggguaaaaaaaaaacaaaaaaaa

SEQ ID NO: 1323329 - RNA, 18 nt, Human
augaaauuuggggguucc

SEQ ID NO: 1323330 - RNA, 23 nt, Human
auggaacccucuguuuacacacc

SEQ ID NO: 1323331 - RNA, 25 nt, Human
augggauuuugccggaaauauuagg

SEQ ID NO: 1323332 - RNA, 18 nt, Human
caacccaagcaacaggga

SEQ ID NO: 1323333 - RNA, 20 nt, Human
caacucaacccaagcaacag

SEQ ID NO: 1323334 - RNA, 20 nt, Human
caagaaacaaagagggggaa

SEQ ID NO: 1323335 - RNA, 22 nt, Human
caagcaacagggacagaugaaa

SEQ ID NO: 1323336 - RNA, 21 nt, Human
cacacucaggccgcaccaucu

SEQ ID NO: 1323337 - RNA, 21 nt, Human
caccaggacccagaagccuca

SEQ ID NO: 1323338 - RNA, 18 nt, Human
caccccaccuugccccca

SEQ ID NO: 1323339 - RNA, 25 nt, Human
caccugaggagacccugcccaaccu

SEQ ID NO: 1323340 - RNA, 22 nt, Human
cacugccccccacccaccccuc

SEQ ID NO: 1323341 - RNA, 24 nt, Human
cagaacuccccccgcccagccccc

SEQ ID NO: 1323342 - RNA, 20 nt, Human
cagacagggccgaggggcag

SEQ ID NO: 1323343 - RNA, 24 nt, Human
cagccaggagcccccuccuguggc

SEQ ID NO: 1323344 - RNA, 18 nt, Human
cagcccccacugcccccc

SEQ ID NO: 1323345 - RNA, 22 nt, Human
cagcccccacugccccccaccc

SEQ ID NO: 1323346 - RNA, 21 nt, Human
caggccgcaccaucugagccc

SEQ ID NO: 1323347 - RNA, 20 nt, Human
caggugauggcagaggaggg

SEQ ID NO: 1323348 - RNA, 21 nt, Human
caguggccuucuccacucccc

SEQ ID NO: 1323349 - RNA, 21 nt, Human
ccaacacacaguaaguaaggu

SEQ ID NO: 1323350 - RNA, 22 nt, Human
ccaagcaacagggacagaugaa

SEQ ID NO: 1323351 - RNA, 20 nt, Human
ccaccccuccaaccgccaga

SEQ ID NO: 1323352 - RNA, 18 nt, Human
ccacugccccccacccac

SEQ ID NO: 1323353 - RNA, 20 nt, Human
ccacugccccccacccaccc

SEQ ID NO: 1323354 - RNA, 24 nt, Human
ccacugccccccacccaccccucc

SEQ ID NO: 1323355 - RNA, 18 nt, Human
ccagaacuccccccgccc

SEQ ID NO: 1323356 - RNA, 21 nt, Human
cccaagagggggccccccacu

SEQ ID NO: 1323357 - RNA, 22 nt, Human
cccacccaccccuccaaccgcc

SEQ ID NO: 1323358 - RNA, 19 nt, Human
cccagaagccucaggccuc

SEQ ID NO: 1323359 - RNA, 20 nt, Human
cccagaagccucaggccucu

SEQ ID NO: 1323360 - RNA, 26 nt, Human
cccagcccccacugccccccacccac

SEQ ID NO: 1323361 - RNA, 21 nt, Human
ccccaagaggucccacagaag

SEQ ID NO: 1323362 - RNA, 19 nt, Human
ccccacccaccccuccaac

SEQ ID NO: 1323363 - RNA, 24 nt, Human
ccccacccaccccuccaaccgcca

SEQ ID NO: 1323364 - RNA, 19 nt, Human
ccccagaacuccccccgcc

SEQ ID NO: 1323365 - RNA, 20 nt, Human
ccccagaagccaggccggac

SEQ ID NO: 1323366 - RNA, 22 nt, Human
cccccacccaccccuccaaccc

SEQ ID NO: 1323367 - RNA, 22 nt, Human
cccccacugccccccacccacc

SEQ ID NO: 1323368 - RNA, 24 nt, Human
cccccacugccccccacccacccc

SEQ ID NO: 1323369 - RNA, 26 nt, Human
cccccacugccccccacccaccccuc

SEQ ID NO: 1323370 - RNA, 26 nt, Human
cccccaggaggcuccacccucaacuc

SEQ ID NO: 1323371 - RNA, 25 nt, Human
ccccccacccaccccuccaaccgcc

SEQ ID NO: 1323372 - RNA, 21 nt, Human
ccccccaggaggcuccacccu

SEQ ID NO: 1323373 - RNA, 19 nt, Human
ccccccgcccagcccccac

SEQ ID NO: 1323374 - RNA, 20 nt, Human
ccccgcccacccuacggggg

SEQ ID NO: 1323375 - RNA, 26 nt, Human
ccccuguuacaugggggggggguuua

SEQ ID NO: 1323376 - RNA, 24 nt, Human
cccgggaccacuuccuaccccaga

SEQ ID NO: 1323377 - RNA, 21 nt, Human
cccgucaccaggacccagaag

SEQ ID NO: 1323378 - RNA, 22 nt, Human
cccgucaccaggacccagaagc

SEQ ID NO: 1323379 - RNA, 20 nt, Human
cccugcccaaccccccccuc

SEQ ID NO: 1323380 - RNA, 20 nt, Human
cccugccccagccugaugga

SEQ ID NO: 1323381 - RNA, 22 nt, Human
ccggccagccucaggccagcca

SEQ ID NO: 1323382 - RNA, 26 nt, Human
ccuacggguguaucccaaaugccgcc

SEQ ID NO: 1323383 - RNA, 22 nt, Human
ccucaggacuucuggggaccag

SEQ ID NO: 1323384 - RNA, 22 nt, Human
ccucaggccagccaggagcccc

SEQ ID NO: 1323385 - RNA, 22 nt, Human
ccucccagaggccgagucccug

SEQ ID NO: 1323386 - RNA, 21 nt, Human
ccuccuggagacaaggcaggg

SEQ ID NO: 1323387 - RNA, 19 nt, Human
ccugaccucccuacucccc

SEQ ID NO: 1323388 - RNA, 25 nt, Human
ccugaggagacccugcccaaccccc

SEQ ID NO: 1323389 - RNA, 22 nt, Human
ccugcccaaccccccccuccgc

SEQ ID NO: 1323390 - RNA, 24 nt, Human
ccugcccaaccccccccuccgccc

SEQ ID NO: 1323391 - RNA, 23 nt, Human
ccuuccccuccggccagccucag

SEQ ID NO: 1323392 - RNA, 25 nt, Human
cgccggccgcacacucaggccgcac

SEQ ID NO: 1323393 - RNA, 29 nt, Human
cgggaaugggugggguaugggggacugcc

SEQ ID NO: 1323394 - RNA, 19 nt, Human
cggggggcaggacguggug

SEQ ID NO: 1323395 - RNA, 23 nt, Human
cucacaagggcaucucugucaug

SEQ ID NO: 1323396 - RNA, 19 nt, Human
cucaccccaccuugccccc

SEQ ID NO: 1323397 - RNA, 18 nt, Human
cuccccccgcccagcccc

SEQ ID NO: 1323398 - RNA, 22 nt, Human
cuccccccgcccagcccccacu

SEQ ID NO: 1323399 - RNA, 25 nt, Human
cucccgggaccacuuccuaccccag

SEQ ID NO: 1323400 - RNA, 28 nt, Human
cugcccaaccccccccuccgcccucagg

SEQ ID NO: 1323401 - RNA, 19 nt, Human
cugccccccacccaccccu

SEQ ID NO: 1323402 - RNA, 22 nt, Human
cugcuauggcaucaccagaccc

SEQ ID NO: 1323403 - RNA, 21 nt, Human
cuuccuaccccagaacucccc

SEQ ID NO: 1323404 - RNA, 18 nt, Human
gacccagaagccucaggc

SEQ ID NO: 1323405 - RNA, 18 nt, Human
gacccgccugaccucccu

SEQ ID NO: 1323406 - RNA, 18 nt, Human
gagacccugcccaacccc

SEQ ID NO: 1323407 - RNA, 19 nt, Human
gagaggggaggguuccuca

SEQ ID NO: 1323408 - RNA, 18 nt, Human
gagcaucguggcucacgc

SEQ ID NO: 1323409 - RNA, 18 nt, Human
gaggccagccucacaagg

SEQ ID NO: 1323410 - RNA, 22 nt, Human
gagggguaaaaaaaaaacaaaa

SEQ ID NO: 1323411 - RNA, 24 nt, Human
gaugggcagaccuggcagcucucc

SEQ ID NO: 1323412 - RNA, 19 nt, Human
gccaaacuccuuccucacu

SEQ ID NO: 1323413 - RNA, 21 nt, Human
gccaaacuccuuccucacucu

SEQ ID NO: 1323414 - RNA, 19 nt, Human
gccagccucaggccagccg

SEQ ID NO: 1323415 - RNA, 21 nt, Human
gcccaaccccccccuccgccc

SEQ ID NO: 1323416 - RNA, 19 nt, Human
gccccccacccaccccucc

SEQ ID NO: 1323417 - RNA, 20 nt, Human
gccccccacccaccccucca

SEQ ID NO: 1323418 - RNA, 21 nt, Human
gcccucaggacuucuggggac

SEQ ID NO: 1323419 - RNA, 24 nt, Human
gccgcaagguggaccgaggcggca

SEQ ID NO: 1323420 - RNA, 19 nt, Human
gccgccggccgcacacuca

SEQ ID NO: 1323421 - RNA, 19 nt, Human
ggaaaaaugccccaagaaa

SEQ ID NO: 1323422 - RNA, 21 nt, Human
ggaaaaaugccccaagaaaca

SEQ ID NO: 1323423 - RNA, 19 nt, Human
ggagacccugcccaacccc

SEQ ID NO: 1323424 - RNA, 21 nt, Human
ggagcccccuccuguggccuu

SEQ ID NO: 1323425 - RNA, 18 nt, Human
ggcagggugcugaggggc

SEQ ID NO: 1323426 - RNA, 21 nt, Human
ggccgagucccugccgcagcc

SEQ ID NO: 1323427 - RNA, 20 nt, Human
ggcgauaaauggcggggggc

SEQ ID NO: 1323428 - RNA, 18 nt, Human
gggaaugggugggguaug

SEQ ID NO: 1323429 - RNA, 23 nt, Human
gggcgauaaauggcggggggcag

SEQ ID NO: 1323430 - RNA, 21 nt, Human
gggcucaguggccagugcccc

SEQ ID NO: 1323431 - RNA, 24 nt, Human
gggcugcgugcaggggggcugagc

SEQ ID NO: 1323432 - RNA, 20 nt, Human
gggggccguggggacaggcg

SEQ ID NO: 1323433 - RNA, 22 nt, Human
ggggggguccccaagaucuucc

SEQ ID NO: 1323434 - RNA, 19 nt, Human
gggguauggggagcaucgu

SEQ ID NO: 1323435 - RNA, 20 nt, Human
guggccuccgagcacccucc

SEQ ID NO: 1323436 - RNA, 18 nt, Human
guggccuucuccacuccc

SEQ ID NO: 1323437 - RNA, 22 nt, Human
guggccuucuccacuccccucu

SEQ ID NO: 1323438 - RNA, 20 nt, Human
uaccccagaacuccccccgc

SEQ ID NO: 1323439 - RNA, 19 nt, Human
uauggcaucaccagacccc

SEQ ID NO: 1323440 - RNA, 24 nt, Human
ucacgcugcgggggccguggggac

SEQ ID NO: 1323441 - RNA, 18 nt, Human
ucaggccucuagacugcu

SEQ ID NO: 1323442 - RNA, 21 nt, Human
ucagugcacggcccccgagga

SEQ ID NO: 1323443 - RNA, 20 nt, Human
uccaaaaucucccgggacca

SEQ ID NO: 1323444 - RNA, 24 nt, Human
uccaaaaucucccgggaccacuuc

SEQ ID NO: 1323445 - RNA, 21 nt, Human
uccaagggggcucaguggcca

SEQ ID NO: 1323446 - RNA, 18 nt, Human
ucccaaaugccgccggcc

SEQ ID NO: 1323447 - RNA, 22 nt, Human
ucccagaggccgagucccugcc

SEQ ID NO: 1323448 - RNA, 20 nt, Human
uccccaagaucuuccuucca

SEQ ID NO: 1323449 - RNA, 22 nt, Human
uccccgcaucagugcacggccc

SEQ ID NO: 1323450 - RNA, 23 nt, Human
ucccuacuccccggccucacccc

SEQ ID NO: 1323451 - RNA, 28 nt, Human
uccugacaccugaggagacccugcccaa

SEQ ID NO: 1323452 - RNA, 20 nt, Human
uccuuccucacucuggcugg

SEQ ID NO: 1323453 - RNA, 22 nt, Human
ugacuuuuccauccaaaaucuc

SEQ ID NO: 1323454 - RNA, 20 nt, Human
ugagcugggggcacaagugg

SEQ ID NO: 1323455 - RNA, 22 nt, Human
ugagcugggggcacaagugggg

SEQ ID NO: 1323456 - RNA, 24 nt, Human
ugagcugggggcacaagugggggc

SEQ ID NO: 1323457 - RNA, 19 nt, Human
ugauggcagaggaggggac

SEQ ID NO: 1323458 - RNA, 20 nt, Human
ugauggcagaggaggggacc

SEQ ID NO: 1323459 - RNA, 23 nt, Human
ugcaggggggcugagcugggggc

SEQ ID NO: 1323460 - RNA, 21 nt, Human
ugccccaagaaacaaagaggg

SEQ ID NO: 1323461 - RNA, 19 nt, Human
ugccccagccugauggaac

SEQ ID NO: 1323462 - RNA, 26 nt, Human
ugccgcagcccuaggcgccgcggugg

SEQ ID NO: 1323463 - RNA, 20 nt, Human
uggccuccgagcacccuccu

SEQ ID NO: 1323464 - RNA, 19 nt, Human
uggcggggggcaggacgug

SEQ ID NO: 1323465 - RNA, 22 nt, Human
ugggauuuugccggaaauauua

SEQ ID NO: 1323466 - RNA, 21 nt, Human
ugggggcacaagugggggcga

SEQ ID NO: 1323467 - RNA, 18 nt, Human
ugggggguccccaggaga

SEQ ID NO: 1323468 - RNA, 25 nt, Human
uuggagaaucuuagcgggacuuugg

SEQ ID NO: 1323469 - RNA, 24 nt, Human
uugucacugccccccuguuacaug

SEQ ID NO: 1323470 - RNA, 19 nt, Human
uuuacacaccugcuagccc

SEQ ID NO: 1323471 - RNA, 20 nt, Human
uuuccauccaaaaucucccg

SEQ ID NO: 1323472 - RNA, 19 nt, Human
uuugucacugccccccugu

SEQ ID NO: 1323473 - RNA, 24 nt, Human
aagcuuguuuuccugcaacuggau

SEQ ID NO: 1323474 - RNA, 19 nt, Human
aaugagccaugauaggacc

SEQ ID NO: 1323475 - RNA, 21 nt, Human
acaacagagggagacccugaa

SEQ ID NO: 1323476 - RNA, 25 nt, Human
accacaaauggaagaagggccauga

SEQ ID NO: 1323477 - RNA, 18 nt, Human
acuacacuccagccuugg

SEQ ID NO: 1323478 - RNA, 18 nt, Human
acuacacuccagccuugg

SEQ ID NO: 1323479 - RNA, 19 nt, Human
acuacacuccagccuugga

SEQ ID NO: 1323480 - RNA, 25 nt, Human
acuacacuccagccuuggacaacag

SEQ ID NO: 1323481 - RNA, 19 nt, Human
acuacacuccagccuuggg

SEQ ID NO: 1323482 - RNA, 21 nt, Human
acuggauugugagggccagag

SEQ ID NO: 1323483 - RNA, 23 nt, Human
agaaguugggcaaaaggcugauu

SEQ ID NO: 1323484 - RNA, 26 nt, Human
agacagaaguugggcaaaagggaccc

SEQ ID NO: 1323485 - RNA, 21 nt, Human
agaccgcccagcuccaggcac

SEQ ID NO: 1323486 - RNA, 24 nt, Human
agcaccuguagucucagccacgug

SEQ ID NO: 1323487 - RNA, 19 nt, Human
aggcacuaggccuggaaau

SEQ ID NO: 1323488 - RNA, 22 nt, Human
aggcaggagcuucaccugagga

SEQ ID NO: 1323489 - RNA, 25 nt, Human
aggcaggagcuucaccugaggaugc

SEQ ID NO: 1323490 - RNA, 19 nt, Human
aggcaggaggagcugggcc

SEQ ID NO: 1323491 - RNA, 21 nt, Human
aggcaggaggagcugggccug

SEQ ID NO: 1323492 - RNA, 20 nt, Human
agguugagaugggaggaucg

SEQ ID NO: 1323493 - RNA, 24 nt, Human
aguggcaagcaccuguagucucag

SEQ ID NO: 1323494 - RNA, 19 nt, Human
aucugggucuggagggucc

SEQ ID NO: 1323495 - RNA, 18 nt, Human
caacagagggagacccug

SEQ ID NO: 1323496 - RNA, 18 nt, Human
caacuggauggucccacg

SEQ ID NO: 1323497 - RNA, 23 nt, Human
caccuguagucucagccacgugg

SEQ ID NO: 1323498 - RNA, 24 nt, Human
caccuguagucucagccacguggg

SEQ ID NO: 1323499 - RNA, 21 nt, Human
cacuaggccuggaaauggccu

SEQ ID NO: 1323500 - RNA, 23 nt, Human
cagaagucuuucaugguaggucc

SEQ ID NO: 1323501 - RNA, 23 nt, Human
cagccuuggacaacagagggaga

SEQ ID NO: 1323502 - RNA, 22 nt, Human
cagcuguagucccagcuacugg

SEQ ID NO: 1323503 - RNA, 23 nt, Human
cagcuguagucccagcuacuggg

SEQ ID NO: 1323504 - RNA, 24 nt, Human
cagucagucucucuuccuggauuc

SEQ ID NO: 1323505 - RNA, 24 nt, Human
cagucaguuucucuuccuggauuc

SEQ ID NO: 1323506 - RNA, 24 nt, Human
cagugggcguguuaagcuuguuuu

SEQ ID NO: 1323507 - RNA, 19 nt, Human
ccacugaacuccauccuga

SEQ ID NO: 1323508 - RNA, 18 nt, Human
ccacugugaggcagaggc

SEQ ID NO: 1323509 - RNA, 19 nt, Human
ccagcacugggaaacuagg

SEQ ID NO: 1323510 - RNA, 21 nt, Human
cccagugacguaggcgaacac

SEQ ID NO: 1323511 - RNA, 21 nt, Human
cccucauuuuccguuccccag

SEQ ID NO: 1323512 - RNA, 24 nt, Human
ccuggcaugaggcgugcccagagg

SEQ ID NO: 1323513 - RNA, 22 nt, Human
cgagaagaccgcccagcuccag

SEQ ID NO: 1323514 - RNA, 19 nt, Human
cgcaagaaccacaaaugga

SEQ ID NO: 1323515 - RNA, 21 nt, Human
cggcaacacacaggaccuggc

SEQ ID NO: 1323516 - RNA, 22 nt, Human
cuacuacacuccagccuuggac

SEQ ID NO: 1323517 - RNA, 19 nt, Human
cucaagggaaucuucagcu

SEQ ID NO: 1323518 - RNA, 18 nt, Human
cucguuggucuuugucuc

SEQ ID NO: 1323519 - RNA, 23 nt, Human
cuggaagguugaggcugcaguca

SEQ ID NO: 1323520 - RNA, 21 nt, Human
cuggcaugaggcgugcccaga

SEQ ID NO: 1323521 - RNA, 19 nt, Human
gaauccacguauacaaaaa

SEQ ID NO: 1323522 - RNA, 25 nt, Human
gagaagaccgcccagcuccaggcac

SEQ ID NO: 1323523 - RNA, 19 nt, Human
gaggcaggaggagcugggc

SEQ ID NO: 1323524 - RNA, 21 nt, Human
gagugacagggcaagguccug

SEQ ID NO: 1323525 - RNA, 21 nt, Human
gaguuucgucuccuccacugg

SEQ ID NO: 1323526 - RNA, 18 nt, Human
gauugcuugagccuggga

SEQ ID NO: 1323527 - RNA, 22 nt, Human
gauugcuugagccugggaguuu

SEQ ID NO: 1323528 - RNA, 24 nt, Human
gccgaaaggcaggagcuucaccug

SEQ ID NO: 1323529 - RNA, 24 nt, Human
gcuguagucccagcuacugggaag

SEQ ID NO: 1323530 - RNA, 22 nt, Human
gcugucaccccucuggaaucca

SEQ ID NO: 1323531 - RNA, 20 nt, Human
ggaaggcugacaugguagga

SEQ ID NO: 1323532 - RNA, 18 nt, Human
ggaguuugaggcuauaau

SEQ ID NO: 1323533 - RNA, 22 nt, Human
ggcauaguggcaagcaccugua

SEQ ID NO: 1323534 - RNA, 23 nt, Human
ggcgugcccagagggacagaggc

SEQ ID NO: 1323535 - RNA, 18 nt, Human
gguaggauugcuugagcc

SEQ ID NO: 1323536 - RNA, 21 nt, Human
gguggcugugguggcucguug

SEQ ID NO: 1323537 - RNA, 18 nt, Human
gugaggcagaggcuggcc

SEQ ID NO: 1323538 - RNA, 25 nt, Human
uacuacacuccagccuuggacaaca

SEQ ID NO: 1323539 - RNA, 20 nt, Human
uagcacuacuacacuccagc

SEQ ID NO: 1323540 - RNA, 18 nt, Human
uaggguuuauccaucuug

SEQ ID NO: 1323541 - RNA, 23 nt, Human
uaguggcaagcaccuguagucuc

SEQ ID NO: 1323542 - RNA, 24 nt, Human
uaguggcaagcaccuguagucuca

SEQ ID NO: 1323543 - RNA, 20 nt, Human
uaguugggcauaguggcaag

SEQ ID NO: 1323544 - RNA, 21 nt, Human
ucauuuuccguuccccagcau

SEQ ID NO: 1323545 - RNA, 27 nt, Human
uccacguauacaaaaauuccaaauauu

SEQ ID NO: 1323546 - RNA, 20 nt, Human
uccacugugaggcagaggcu

SEQ ID NO: 1323547 - RNA, 21 nt, Human
ucuuagaagguggggaauaau

SEQ ID NO: 1323548 - RNA, 23 nt, Human
ugaacucccucauuuuccguucc

SEQ ID NO: 1323549 - RNA, 21 nt, Human
ugacagggcaagguccuguuu

SEQ ID NO: 1323550 - RNA, 18 nt, Human
ugacaugguaggauugcu

SEQ ID NO: 1323551 - RNA, 22 nt, Human
ugacgagaagaccgcccagcuc

SEQ ID NO: 1323552 - RNA, 21 nt, Human
ugagaugggaggaucgcuuca

SEQ ID NO: 1323553 - RNA, 22 nt, Human
ugagccugggaguuugaggcua

SEQ ID NO: 1323554 - RNA, 25 nt, Human
ugaggaugccacagugagacaccau

SEQ ID NO: 1323555 - RNA, 21 nt, Human
ugagguccccaugccuggacu

SEQ ID NO: 1323556 - RNA, 20 nt, Human
ugcccagagggacagaggca

SEQ ID NO: 1323557 - RNA, 21 nt, Human
ugcccagucaguuucucuucc

SEQ ID NO: 1323558 - RNA, 19 nt, Human
uggaagguugaggcugcag

SEQ ID NO: 1323559 - RNA, 22 nt, Human
uggaagguugaggcugcaguca

SEQ ID NO: 1323560 - RNA, 22 nt, Human
uggcagcuuucuccaacuuugg

SEQ ID NO: 1323561 - RNA, 20 nt, Human
ugggaggcaggaggagcugg

SEQ ID NO: 1323562 - RNA, 21 nt, Human
ugggaggcaggaggagcuggg

SEQ ID NO: 1323563 - RNA, 18 nt, Human
ugggagguugagauggga

SEQ ID NO: 1323564 - RNA, 23 nt, Human
ugggagguugagaugggaggauc

SEQ ID NO: 1323565 - RNA, 21 nt, Human
ugggcaaaaggcugauuugag

SEQ ID NO: 1323566 - RNA, 26 nt, Human
ugggcaaaaggcugauuugaggaagu

SEQ ID NO: 1323567 - RNA, 22 nt, Human
uggucuuugucucuuagaaggu

SEQ ID NO: 1323568 - RNA, 21 nt, Human
uguugagguccccaugccugg

SEQ ID NO: 1323569 - RNA, 18 nt, Human
uuaguugggcauaguggc

SEQ ID NO: 1323570 - RNA, 24 nt, Human
uuccccagcauuggcggguucugg

SEQ ID NO: 1323571 - RNA, 24 nt, Human
uugcuugagccugggaguuugagg

SEQ ID NO: 1323572 - RNA, 21 nt, Human
uuuuccugcaacuggaugguc

SEQ ID NO: 1323573 - RNA, 20 nt, Human
aaaaggagcuuccauugaaa

SEQ ID NO: 1323574 - RNA, 22 nt, Human
aaaaugccacaaagcauugcaa

SEQ ID NO: 1323575 - RNA, 22 nt, Human
aagcagcugucgaggagacuuc

SEQ ID NO: 1323576 - RNA, 20 nt, Human
aagcauugcaaggccacagu

SEQ ID NO: 1323577 - RNA, 23 nt, Human
aauuccuauucccuuucauccuc

SEQ ID NO: 1323578 - RNA, 23 nt, Human
aggcaaagcagcugucgaggaga

SEQ ID NO: 1323579 - RNA, 21 nt, Human
auugcaaggccacaguggaca

SEQ ID NO: 1323580 - RNA, 20 nt, Human
caaagcagcugucgaggaga

SEQ ID NO: 1323581 - RNA, 24 nt, Human
caagugagagcagaacaucccaug

SEQ ID NO: 1323582 - RNA, 19 nt, Human
caggaagagcaugcaggca

SEQ ID NO: 1323583 - RNA, 21 nt, Human
ccaggggucccuuauucuucc

SEQ ID NO: 1323584 - RNA, 22 nt, Human
cccaggcacgugaucgcagccg

SEQ ID NO: 1323585 - RNA, 20 nt, Human
ccccugaggucucagcuccu

SEQ ID NO: 1323586 - RNA, 20 nt, Human
cccuucuucucccccguucc

SEQ ID NO: 1323587 - RNA, 19 nt, Human
ccgcggugcccuucuucuc

SEQ ID NO: 1323588 - RNA, 20 nt, Human
ccgcggugcccuucuucucc

SEQ ID NO: 1323589 - RNA, 21 nt, Human
ccucccgccgcggugcccuuc

SEQ ID NO: 1323590 - RNA, 18 nt, Human
ccugcagcguagcucgcu

SEQ ID NO: 1323591 - RNA, 20 nt, Human
cgcagccggcugguaacugc

SEQ ID NO: 1323592 - RNA, 21 nt, Human
cuccccugaggucucagcucc

SEQ ID NO: 1323593 - RNA, 21 nt, Human
cuggcuucccuguucugucuu

SEQ ID NO: 1323594 - RNA, 24 nt, Human
cuuuuucuuccccugcuggcuucc

SEQ ID NO: 1323595 - RNA, 22 nt, Human
gcgcgccccuccccugaggucu

SEQ ID NO: 1323596 - RNA, 19 nt, Human
ggcagauuuguuccaaggg

SEQ ID NO: 1323597 - RNA, 21 nt, Human
ggcuugguagggacucuccag

SEQ ID NO: 1323598 - RNA, 18 nt, Human
uaccgcgcgccccucccc

SEQ ID NO: 1323599 - RNA, 23 nt, Human
ucaagagcagcagcaucuuuuuc

SEQ ID NO: 1323600 - RNA, 23 nt, Human
uccagguccagaagcugguuuuc

SEQ ID NO: 1323601 - RNA, 18 nt, Human
uccccugcuggcuucccu

SEQ ID NO: 1323602 - RNA, 21 nt, Human
ucgcagccggcugguaacugc

SEQ ID NO: 1323603 - RNA, 22 nt, Human
ucuccagguccagaagcugguu

SEQ ID NO: 1323604 - RNA, 21 nt, Human
ugaggcaaagcagcugucgag

SEQ ID NO: 1323605 - RNA, 22 nt, Human
ugaggcaucaagagcagcagca

SEQ ID NO: 1323606 - RNA, 26 nt, Human
ugccugaggcaaagcagccggggguc

SEQ ID NO: 1323607 - RNA, 18 nt, Human
ugcuaggggacccgggac

SEQ ID NO: 1323608 - RNA, 21 nt, Human
uggcuugguagggacucucca

SEQ ID NO: 1323609 - RNA, 20 nt, Human
ugucuuguacuucuggggca

SEQ ID NO: 1323610 - RNA, 21 nt, Human
uucccuuucauccucucucca

SEQ ID NO: 1323611 - RNA, 22 nt, Human
uuccucaguaguagaggacuuu

SEQ ID NO: 1323612 - RNA, 20 nt, Human
uuucuuccccugcuggcuuc

SEQ ID NO: 1323613 - RNA, 25 nt, Human
aaaggaaugaaugaauguuggagga

SEQ ID NO: 1323614 - RNA, 23 nt, Human
acagccuuugagagcuagagucu

SEQ ID NO: 1323615 - RNA, 18 nt, Human
agaauucuuucugugcuc

SEQ ID NO: 1323616 - RNA, 21 nt, Human
agaccaaaccaggauucaaaa

SEQ ID NO: 1323617 - RNA, 22 nt, Human
agagacaaggaggaaaaaaagc

SEQ ID NO: 1323618 - RNA, 19 nt, Human
agcauuuuuucauuuccuu

SEQ ID NO: 1323619 - RNA, 23 nt, Human
aggaaaaaaagcauaauucucaa

SEQ ID NO: 1323620 - RNA, 25 nt, Human
aggagaugaauacuguugaauucaa

SEQ ID NO: 1323621 - RNA, 26 nt, Human
caaggcucugguuucacaucaggcuc

SEQ ID NO: 1323622 - RNA, 19 nt, Human
caguaauuaacauucacac

SEQ ID NO: 1323623 - RNA, 26 nt, Human
caugacaaauauuggccaugaauucc

SEQ ID NO: 1323624 - RNA, 22 nt, Human
ccugagaagggaagggaggugu

SEQ ID NO: 1323625 - RNA, 23 nt, Human
ggaaaaaaagcauaauucucaag

SEQ ID NO: 1323626 - RNA, 24 nt, Human
guccacacaauaucacuugucuuc

SEQ ID NO: 1323627 - RNA, 19 nt, Human
uaacaaaugcaggaugaaa

SEQ ID NO: 1323628 - RNA, 21 nt, Human
uacccuuggaggaugacagcc

SEQ ID NO: 1323629 - RNA, 23 nt, Human
uagacauugcgcuguagcagucc

SEQ ID NO: 1323630 - RNA, 18 nt, Human
uagagaaauaggguuaua

SEQ ID NO: 1323631 - RNA, 23 nt, Human
ucugacagggaaagggagccuga

SEQ ID NO: 1323632 - RNA, 19 nt, Human
ucuucugggccuuccugga

SEQ ID NO: 1323633 - RNA, 18 nt, Human
ugaaugaauguuggagga

SEQ ID NO: 1323634 - RNA, 21 nt, Human
ugacaugacaaauauuggcca

SEQ ID NO: 1323635 - RNA, 22 nt, Human
ugagaagggaagggaggugucc

SEQ ID NO: 1323636 - RNA, 18 nt, Human
uggaggagaugaauacug

SEQ ID NO: 1323637 - RNA, 26 nt, Human
uggaugccuuuacucaucuuaauuuc

SEQ ID NO: 1323638 - RNA, 18 nt, Human
ugucuucugggccuuccu

SEQ ID NO: 1323639 - RNA, 19 nt, Human
ugugaaaaaauaagaacuu

SEQ ID NO: 1323640 - RNA, 20 nt, Human
ugugaaaaaauaagaacuuu

SEQ ID NO: 1323641 - RNA, 24 nt, Human
uuaaaugugcacuugugccuugug

SEQ ID NO: 1323642 - RNA, 22 nt, Human
uuaacauucacacucugcaaaa

SEQ ID NO: 1323643 - RNA, 24 nt, Human
uucucaaguccuucagaggaacau

SEQ ID NO: 1323644 - RNA, 21 nt, Human
uuuagagagacaaggaggaaa

SEQ ID NO: 1323645 - RNA, 20 nt, Human
aaguagaggguggagaaggg

SEQ ID NO: 1323646 - RNA, 21 nt, Human
agccacagggacugguggccc

SEQ ID NO: 1323647 - RNA, 27 nt, Human
agggggaaguggugcugggacccuagc

SEQ ID NO: 1323648 - RNA, 24 nt, Human
aguagaggguggagaagggggaag

SEQ ID NO: 1323649 - RNA, 21 nt, Human
aguggugcugggacccuagcc

SEQ ID NO: 1323650 - RNA, 22 nt, Human
cacaccuguucuccugccccuc

SEQ ID NO: 1323651 - RNA, 22 nt, Human
cagcagcagccacagggacugg

SEQ ID NO: 1323652 - RNA, 24 nt, Human
cucacaccuguucuccugccccuc

SEQ ID NO: 1323653 - RNA, 18 nt, Human
cucugcauacaggacaca

SEQ ID NO: 1323654 - RNA, 23 nt, Human
gagggagcuggccccugcccggc

SEQ ID NO: 1323655 - RNA, 22 nt, Human
gaggguuccagggggcaggaug

SEQ ID NO: 1323656 - RNA, 21 nt, Human
ggagaagggggaaguggugcu

SEQ ID NO: 1323657 - RNA, 23 nt, Human
uccagccccacugggcgggaagu

SEQ ID NO: 1323658 - RNA, 18 nt, Human
uggagaagggggaagugg

SEQ ID NO: 1323659 - RNA, 20 nt, Human
ugggagggagcuggccccug

SEQ ID NO: 1323660 - RNA, 22 nt, Human
ugucaagauggagacagcagca

SEQ ID NO: 1323661 - RNA, 20 nt, Human
accccgggcccuagacacac

SEQ ID NO: 1323662 - RNA, 25 nt, Human
accccgggcccuagacacacggcuc

SEQ ID NO: 1323663 - RNA, 24 nt, Human
ccccgggcccuagacacacggcuc

SEQ ID NO: 1323664 - RNA, 19 nt, Human
ccgcugccgcucacugugu

SEQ ID NO: 1323665 - RNA, 18 nt, Human
gggcccuagacacacggc

SEQ ID NO: 1323666 - RNA, 19 nt, Human
ucgccuggcuccugccggc

SEQ ID NO: 1323667 - RNA, 20 nt, Human
uggcuccugccggcugcccu

SEQ ID NO: 1323668 - RNA, 19 nt, Human
ugggagaggccacaaaaug

SEQ ID NO: 1323669 - RNA, 18 nt, Human
aaaaaugcucuaggucua

SEQ ID NO: 1323670 - RNA, 23 nt, Human
aaacaagaggcagaaugagggac

SEQ ID NO: 1323671 - RNA, 25 nt, Human
aaaccaucaagccacaaaucaacaa

SEQ ID NO: 1323672 - RNA, 23 nt, Human
aacaaaguugaaguaauauccau

SEQ ID NO: 1323673 - RNA, 22 nt, Human
aaccaccauguuuacuguaacc

SEQ ID NO: 1323674 - RNA, 21 nt, Human
aagcaaaguaacacaacagaa

SEQ ID NO: 1323675 - RNA, 19 nt, Human
aagccacaaaucaacaagc

SEQ ID NO: 1323676 - RNA, 19 nt, Human
aagcugguuuuuccucagu

SEQ ID NO: 1323677 - RNA, 18 nt, Human
acaaaaccagaaaacuaa

SEQ ID NO: 1323678 - RNA, 20 nt, Human
acaacagaaaaccaaacucu

SEQ ID NO: 1323679 - RNA, 23 nt, Human
acuguuguuuacacguggaagac

SEQ ID NO: 1323680 - RNA, 25 nt, Human
agagcuguggccggagcuguggccu

SEQ ID NO: 1323681 - RNA, 25 nt, Human
agcccaaacaauauuccaggacccc

SEQ ID NO: 1323682 - RNA, 20 nt, Human
aggaagaaggcgcucccccu

SEQ ID NO: 1323683 - RNA, 18 nt, Human
aggaccccacaaaaccag

SEQ ID NO: 1323684 - RNA, 18 nt, Human
agggacauggaugaagcu

SEQ ID NO: 1323685 - RNA, 19 nt, Human
agguauuaaaaauagcaac

SEQ ID NO: 1323686 - RNA, 24 nt, Human
augaguucaugucauuugcaggga

SEQ ID NO: 1323687 - RNA, 18 nt, Human
caagaaaaacuguuggag

SEQ ID NO: 1323688 - RNA, 21 nt, Human
caagcuuaaucacaaaaguuu

SEQ ID NO: 1323689 - RNA, 22 nt, Human
caauagcaaagacuuggaacca

SEQ ID NO: 1323690 - RNA, 19 nt, Human
caauauuccaggaccccac

SEQ ID NO: 1323691 - RNA, 24 nt, Human
caauauuccaggaccccacaaaac

SEQ ID NO: 1323692 - RNA, 25 nt, Human
cacaaaaccagaaaacuaacaggac

SEQ ID NO: 1323693 - RNA, 22 nt, Human
cacacgcggccgggcucucggc

SEQ ID NO: 1323694 - RNA, 21 nt, Human
cacauguauguuuauugcagu

SEQ ID NO: 1323695 - RNA, 20 nt, Human
caccgccaccgccguggcuc

SEQ ID NO: 1323696 - RNA, 22 nt, Human
cacugccacuccacucugggaa

SEQ ID NO: 1323697 - RNA, 18 nt, Human
caggagccagagcugugg

SEQ ID NO: 1323698 - RNA, 19 nt, Human
caggagccagagcuguggc

SEQ ID NO: 1323699 - RNA, 25 nt, Human
cauauacaccauggaauacuaugca

SEQ ID NO: 1323700 - RNA, 21 nt, Human
cauguuacauagguauacaua

SEQ ID NO: 1323701 - RNA, 30 nt, Human
ccaaacaauauuccaggaccccacaaaacc

SEQ ID NO: 1323702 - RNA, 21 nt, Human
ccacaaaaccagaaaacuaac

SEQ ID NO: 1323703 - RNA, 22 nt, Human
ccacaaaaccagaaaacuaaca

SEQ ID NO: 1323704 - RNA, 25 nt, Human
ccacaaaucaacaagcuuaaucaca

SEQ ID NO: 1323705 - RNA, 21 nt, Human
ccaccgccaccgccaccgcca

SEQ ID NO: 1323706 - RNA, 21 nt, Human
ccaccgccaccgccaccgcca

SEQ ID NO: 1323707 - RNA, 24 nt, Human
ccaccgccaccgccaccgccgugg

SEQ ID NO: 1323708 - RNA, 25 nt, Human
ccaccgccaccgccguggcugccgg

SEQ ID NO: 1323709 - RNA, 20 nt, Human
ccacugccacuccacucugg

SEQ ID NO: 1323710 - RNA, 25 nt, Human
ccagaacuuaaaguuaaaaaaaaaa

SEQ ID NO: 1323711 - RNA, 26 nt, Human
ccagaagugggggccgaggacaggcg

SEQ ID NO: 1323712 - RNA, 21 nt, Human
ccagagcuguggccggagcug

SEQ ID NO: 1323713 - RNA, 21 nt, Human
ccauauucacuugcugucuaa

SEQ ID NO: 1323714 - RNA, 25 nt, Human
cccaaacaauauuccaggaccccac

SEQ ID NO: 1323715 - RNA, 26 nt, Human
cccacaaaaccagaaaacuaacagga

SEQ ID NO: 1323716 - RNA, 18 nt, Human
cccagaaucccggaccca

SEQ ID NO: 1323717 - RNA, 23 nt, Human
ccgccaccgccaccgccaccgcc

SEQ ID NO: 1323718 - RNA, 23 nt, Human
ccgccaccgccaccgccaccgcc

SEQ ID NO: 1323719 - RNA, 23 nt, Human
ccgccaccgccaccgccaccgcc

SEQ ID NO: 1323720 - RNA, 18 nt, Human
ccgccgccaccgccaccg

SEQ ID NO: 1323721 - RNA, 21 nt, Human
ccgccgccaccgccaccgcca

SEQ ID NO: 1323722 - RNA, 23 nt, Human
ccgccgccgccaccgccaccgcc

SEQ ID NO: 1323723 - RNA, 18 nt, Human
ccgccgccgccgccaccg

SEQ ID NO: 1323724 - RNA, 18 nt, Human
ccgccgccgccgccgccg

SEQ ID NO: 1323725 - RNA, 20 nt, Human
ccgccugccgcugccgccgc

SEQ ID NO: 1323726 - RNA, 18 nt, Human
ccgcugccgccgccgccg

SEQ ID NO: 1323727 - RNA, 24 nt, Human
ccgcugccgccgccgccgccgccg

SEQ ID NO: 1323728 - RNA, 19 nt, Human
ccuccccggcuucguuacu

SEQ ID NO: 1323729 - RNA, 19 nt, Human
ccugccgcugccgccgccg

SEQ ID NO: 1323730 - RNA, 19 nt, Human
ccuguuaaacaagaggcag

SEQ ID NO: 1323731 - RNA, 22 nt, Human
cgaugagaacacauggacacag

SEQ ID NO: 1323732 - RNA, 23 nt, Human
cgccgccgccgccgccgccaccg

SEQ ID NO: 1323733 - RNA, 23 nt, Human
cgguguccgacuuuuccugccug

SEQ ID NO: 1323734 - RNA, 22 nt, Human
cuaaagcacacacuguuguuua

SEQ ID NO: 1323735 - RNA, 20 nt, Human
cucaacuuuguacauuugau

SEQ ID NO: 1323736 - RNA, 19 nt, Human
cucaggaauggaugaugcc

SEQ ID NO: 1323737 - RNA, 24 nt, Human
cucagugcugagccuugaaaucuc

SEQ ID NO: 1323738 - RNA, 19 nt, Human
cugccgcugccgccgccgc

SEQ ID NO: 1323739 - RNA, 19 nt, Human
cuguaaaccaucaagccac

SEQ ID NO: 1323740 - RNA, 19 nt, Human
cuuaaaaccuagaugacgg

SEQ ID NO: 1323741 - RNA, 20 nt, Human
gaaaguaggcgggacaggcc

SEQ ID NO: 1323742 - RNA, 20 nt, Human
gaacccggggccaccgcccc

SEQ ID NO: 1323743 - RNA, 24 nt, Human
gaagugggggccgaggacaggcgg

SEQ ID NO: 1323744 - RNA, 18 nt, Human
gacuaaagaaccucccaa

SEQ ID NO: 1323745 - RNA, 18 nt, Human
gagaaacucacaaaauac

SEQ ID NO: 1323746 - RNA, 18 nt, Human
gagcaggagccagagcug

SEQ ID NO: 1323747 - RNA, 22 nt, Human
gcaggcucauuccagaaguggg

SEQ ID NO: 1323748 - RNA, 19 nt, Human
gccaccgccguggcugccg

SEQ ID NO: 1323749 - RNA, 26 nt, Human
gccgccugccgcugccgccgccgccg

SEQ ID NO: 1323750 - RNA, 22 nt, Human
gccgcugccgccgccgccgccg

SEQ ID NO: 1323751 - RNA, 18 nt, Human
gccugucggggcgugggg

SEQ ID NO: 1323752 - RNA, 21 nt, Human
ggaggguacuuggaaaguagg

SEQ ID NO: 1323753 - RNA, 22 nt, Human
ggaggguacuuggaaaguagga

SEQ ID NO: 1323754 - RNA, 22 nt, Human
ggcgugggggaaaggggaggga

SEQ ID NO: 1323755 - RNA, 21 nt, Human
gggauccgccgcggagcagga

SEQ ID NO: 1323756 - RNA, 18 nt, Human
gggccaccgcccccuacc

SEQ ID NO: 1323757 - RNA, 24 nt, Human
gggccgaggacaggcgggcuagaa

SEQ ID NO: 1323758 - RNA, 19 nt, Human
ggggagggagagcauuagg

SEQ ID NO: 1323759 - RNA, 22 nt, Human
gguauacauaggcacauguaua

SEQ ID NO: 1323760 - RNA, 21 nt, Human
guaacacaacagaaaaccaaa

SEQ ID NO: 1323761 - RNA, 21 nt, Human
gucauuugcagggacauggaa

SEQ ID NO: 1323762 - RNA, 24 nt, Human
uaaagagauacucaacuuuguaca

SEQ ID NO: 1323763 - RNA, 23 nt, Human
uaacacaacagaaaaccaaacuc

SEQ ID NO: 1323764 - RNA, 21 nt, Human
uaaccaccauguuacauaggu

SEQ ID NO: 1323765 - RNA, 23 nt, Human
uaagcaagcaagcaagcaagcaa

SEQ ID NO: 1323766 - RNA, 20 nt, Human
uacaauagcaaagacuugga

SEQ ID NO: 1323767 - RNA, 23 nt, Human
uaggacaaauaucuaaugaaugc

SEQ ID NO: 1323768 - RNA, 18 nt, Human
uaucuaaugaaugcaggg

SEQ ID NO: 1323769 - RNA, 21 nt, Human
uaugaaaaaucuuguuccaca

SEQ ID NO: 1323770 - RNA, 21 nt, Human
ucaauacccggcuaucccugg

SEQ ID NO: 1323771 - RNA, 18 nt, Human
ucagugcugagccuugaa

SEQ ID NO: 1323772 - RNA, 19 nt, Human
ucauuugcagggacaugga

SEQ ID NO: 1323773 - RNA, 21 nt, Human
ucccagaaucccggacccacu

SEQ ID NO: 1323774 - RNA, 20 nt, Human
ucccggacccacugccacuc

SEQ ID NO: 1323775 - RNA, 20 nt, Human
uccgccgcggagcaggagcu

SEQ ID NO: 1323776 - RNA, 19 nt, Human
ucuaagcaaaguaacacaa

SEQ ID NO: 1323777 - RNA, 22 nt, Human
ucucaauaagcccaaacaauau

SEQ ID NO: 1323778 - RNA, 22 nt, Human
ugaaagagcagauguggaaaua

SEQ ID NO: 1323779 - RNA, 22 nt, Human
ugagcucaggaauggaugaugc

SEQ ID NO: 1323780 - RNA, 18 nt, Human
ugagggaacaaaguugaa

SEQ ID NO: 1323781 - RNA, 19 nt, Human
uggaaaguaggcgggacag

SEQ ID NO: 1323782 - RNA, 20 nt, Human
uggaaccaacccaaaugcca

SEQ ID NO: 1323783 - RNA, 20 nt, Human
uggaauacuaugcagccaua

SEQ ID NO: 1323784 - RNA, 22 nt, Human
uggaugaagcugggagccauca

SEQ ID NO: 1323785 - RNA, 23 nt, Human
uggccugagagucagggggcggg

SEQ ID NO: 1323786 - RNA, 21 nt, Human
ugggagccaucauucuaagca

SEQ ID NO: 1323787 - RNA, 21 nt, Human
ugggaggguacuuggaaagua

SEQ ID NO: 1323788 - RNA, 19 nt, Human
ugggaugccgccugccgcu

SEQ ID NO: 1323789 - RNA, 21 nt, Human
ugggggccgaggacaggcggg

SEQ ID NO: 1323790 - RNA, 22 nt, Human
uguaauuaugaaaaaucuuguu

SEQ ID NO: 1323791 - RNA, 20 nt, Human
uguccgacuuuuccugccug

SEQ ID NO: 1323792 - RNA, 18 nt, Human
uguggaaauaaauucugg

SEQ ID NO: 1323793 - RNA, 22 nt, Human
uguuaaacaagaggcagaauga

SEQ ID NO: 1323794 - RNA, 26 nt, Human
uguucugcacauguaucccagaacuu

SEQ ID NO: 1323795 - RNA, 21 nt, Human
uuaaaaaaaaaauaguaggau

SEQ ID NO: 1323796 - RNA, 20 nt, Human
uuaaaaauagcaacauguaa

SEQ ID NO: 1323797 - RNA, 18 nt, Human
uucagccuaucacccugg

SEQ ID NO: 1323798 - RNA, 19 nt, Human
uuccucaguuuccucaccu

SEQ ID NO: 1323799 - RNA, 19 nt, Human
uuggagaucuacuaugucc

SEQ ID NO: 1323800 - RNA, 19 nt, Human
uuggcagaggccuuuucuu

SEQ ID NO: 1323801 - RNA, 23 nt, Human
uugugggauccgccgcggagcag

SEQ ID NO: 1323802 - RNA, 22 nt, Human
uuuauugcagugcuauuuacaa

SEQ ID NO: 1323803 - RNA, 20 nt, Human
aagaugccuccuccccugag

SEQ ID NO: 1323804 - RNA, 21 nt, Human
acagugugugguccccuuggg

SEQ ID NO: 1323805 - RNA, 21 nt, Human
agggggcacugagagggcacu

SEQ ID NO: 1323806 - RNA, 22 nt, Human
aucgcaguucucagucauaccc

SEQ ID NO: 1323807 - RNA, 21 nt, Human
cuguuguccccuccagacagc

SEQ ID NO: 1323808 - RNA, 19 nt, Human
cuucuguuguccccuccag

SEQ ID NO: 1323809 - RNA, 24 nt, Human
cuuucauaucgcaguucucaguca

SEQ ID NO: 1323810 - RNA, 23 nt, Human
uaacagugugugguccccuuggg

SEQ ID NO: 1323811 - RNA, 20 nt, Human
ucagauaccuucucugcacc

SEQ ID NO: 1323812 - RNA, 23 nt, Human
ucauaacagugugugguccccuu

SEQ ID NO: 1323813 - RNA, 22 nt, Human
uccccugagccugaggaggcca

SEQ ID NO: 1323814 - RNA, 18 nt, Human
ucuaggaaagugacagac

SEQ ID NO: 1323815 - RNA, 22 nt, Human
ugaggaggccaucauaacagug

SEQ ID NO: 1323816 - RNA, 21 nt, Human
uggcuggggcaugcaucccug

SEQ ID NO: 1323817 - RNA, 18 nt, Human
ugugugguccccuugggg

SEQ ID NO: 1323818 - RNA, 25 nt, Human
uuugaucagauaccuucucugcacc

SEQ ID NO: 1323819 - RNA, 24 nt, Human
agguagguacccagcaccuucagc

SEQ ID NO: 1323820 - RNA, 20 nt, Human
cggccaccagagguagguac

SEQ ID NO: 1323821 - RNA, 20 nt, Human
gcccugggucccagccuggu

SEQ ID NO: 1323822 - RNA, 19 nt, Human
uggcccugggucccagccu

SEQ ID NO: 1323823 - RNA, 25 nt, Human
aaaaaacaacucaaaaagagcuaau

SEQ ID NO: 1323824 - RNA, 19 nt, Human
aacucaaaaagagcuaaua

SEQ ID NO: 1323825 - RNA, 18 nt, Human
auaaucaaauauauuacu

SEQ ID NO: 1323826 - RNA, 20 nt, Human
cacgcuaagaacuuaaaaaa

SEQ ID NO: 1323827 - RNA, 20 nt, Human
cauaaucaaauauauuacuu

SEQ ID NO: 1323828 - RNA, 22 nt, Human
uaaaaaacaacucaaaaagagc

SEQ ID NO: 1323829 - RNA, 25 nt, Human
uaaaaaacaacucaaaaagagcuaa

SEQ ID NO: 1323830 - RNA, 23 nt, Human
uaaaugaaaagagucaagaauuu

SEQ ID NO: 1323831 - RNA, 25 nt, Human
uacuguaagggaggagaauuauaaa

SEQ ID NO: 1323832 - RNA, 27 nt, Human
uauuuugcuuucauaaucaaauauauu

SEQ ID NO: 1323833 - RNA, 21 nt, Human
ugucauagagacuaacugaag

SEQ ID NO: 1323834 - RNA, 22 nt, Human
ugucauagagacuaacugaagu

SEQ ID NO: 1323835 - RNA, 22 nt, Human
uuucauaaucaaauauauuacu

SEQ ID NO: 1323836 - RNA, 22 nt, Human
acaggacaggagggaaccgaca

SEQ ID NO: 1323837 - RNA, 18 nt, Human
acccgccgccaccgccuc

SEQ ID NO: 1323838 - RNA, 24 nt, Human
acugcacuccagcccaggcaacag

SEQ ID NO: 1323839 - RNA, 18 nt, Human
agcaagacccucgccccg

SEQ ID NO: 1323840 - RNA, 23 nt, Human
agcuacucagaggcugggguggg

SEQ ID NO: 1323841 - RNA, 23 nt, Human
aucguggcacugcacuccagccc

SEQ ID NO: 1323842 - RNA, 19 nt, Human
cacugcacuccagcccagg

SEQ ID NO: 1323843 - RNA, 19 nt, Human
cacugcacuccagcccagg

SEQ ID NO: 1323844 - RNA, 20 nt, Human
cacugcacuccagcccaggc

SEQ ID NO: 1323845 - RNA, 21 nt, Human
cacugcacuccagcccaggca

SEQ ID NO: 1323846 - RNA, 22 nt, Human
cacugcacuccagcccaggcaa

SEQ ID NO: 1323847 - RNA, 23 nt, Human
cacugcacuccagcccaggcaac

SEQ ID NO: 1323848 - RNA, 27 nt, Human
cacugcacuccagcccaggcaacagag

SEQ ID NO: 1323849 - RNA, 19 nt, Human
cacuuguagucccagcuac

SEQ ID NO: 1323850 - RNA, 24 nt, Human
cacuuguagucccagcuacucaga

SEQ ID NO: 1323851 - RNA, 20 nt, Human
cagcccaggcaacagagcaa

SEQ ID NO: 1323852 - RNA, 21 nt, Human
caggagggaaccgacaccucg

SEQ ID NO: 1323853 - RNA, 27 nt, Human
ccagcccaggcaacagagcaagacccu

SEQ ID NO: 1323854 - RNA, 19 nt, Human
cccccaucccaggggcagg

SEQ ID NO: 1323855 - RNA, 23 nt, Human
cccgacccgccgccaccgccucu

SEQ ID NO: 1323856 - RNA, 21 nt, Human
ccgacccgccgccaccgccuc

SEQ ID NO: 1323857 - RNA, 18 nt, Human
cgccccgacccgccgcca

SEQ ID NO: 1323858 - RNA, 18 nt, Human
cggggaggggcaccgggc

SEQ ID NO: 1323859 - RNA, 24 nt, Human
cugcuugagcccaggaggucaagg

SEQ ID NO: 1323860 - RNA, 22 nt, Human
gacccgccgccaccgccucuuu

SEQ ID NO: 1323861 - RNA, 21 nt, Human
gcacugcacuccagcccaggc

SEQ ID NO: 1323862 - RNA, 22 nt, Human
gcccaggaggucaaggcugcag

SEQ ID NO: 1323863 - RNA, 22 nt, Human
ggggugggaggacugcuugagc

SEQ ID NO: 1323864 - RNA, 24 nt, Human
uggcacugcacuccagcccaggca

SEQ ID NO: 1323865 - RNA, 26 nt, Human
uggcacugcacuccagcccaggcaac

SEQ ID NO: 1323866 - RNA, 23 nt, Human
uggggugggaggacugcuugagc

SEQ ID NO: 1323867 - RNA, 24 nt, Human
uggggugggaggacugcuugagcc

SEQ ID NO: 1323868 - RNA, 24 nt, Human
agauccuggaaacuacuaagugcu

SEQ ID NO: 1323869 - RNA, 20 nt, Human
aguucuacuagcagcagccc

SEQ ID NO: 1323870 - RNA, 18 nt, Human
augcauccaaaaccacag

SEQ ID NO: 1323871 - RNA, 22 nt, Human
cagugguuuugacacuuuuuuu

SEQ ID NO: 1323872 - RNA, 18 nt, Human
ccuggaaacuacuaagug

SEQ ID NO: 1323873 - RNA, 19 nt, Human
cuuuugucccccuggucga

SEQ ID NO: 1323874 - RNA, 18 nt, Human
gaaauccucuaucaauca

SEQ ID NO: 1323875 - RNA, 21 nt, Human
gucgaagcugacucaccuaca

SEQ ID NO: 1323876 - RNA, 23 nt, Human
ucuccagguuguugcuuuugucc

SEQ ID NO: 1323877 - RNA, 26 nt, Human
ugccaagccuggaagauccuggaaac

SEQ ID NO: 1323878 - RNA, 18 nt, Human
uugcagcagugucagagc

SEQ ID NO: 1323879 - RNA, 21 nt, Human
uuugacacuuuuuuuguuucu

SEQ ID NO: 1323880 - RNA, 21 nt, Human
agcaggggagggcccacgggc

SEQ ID NO: 1323881 - RNA, 18 nt, Human
agccacacugcacagugc

SEQ ID NO: 1323882 - RNA, 21 nt, Human
augcuggagagccagccacac

SEQ ID NO: 1323883 - RNA, 23 nt, Human
caggcaauccccaguacuccuga

SEQ ID NO: 1323884 - RNA, 18 nt, Human
cccacgggcgcccagccc

SEQ ID NO: 1323885 - RNA, 21 nt, Human
ccgcaguggcagcaggggagg

SEQ ID NO: 1323886 - RNA, 24 nt, Human
ucaggcccggcuugcgugggccgc

SEQ ID NO: 1323887 - RNA, 19 nt, Human
uccccaguacuccugaugc

SEQ ID NO: 1323888 - RNA, 19 nt, Human
uggcagcaggggagggccc

SEQ ID NO: 1323889 - RNA, 23 nt, Human
uggcagcaggggagggcccacgg

SEQ ID NO: 1323890 - RNA, 18 nt, Human
ugggccgcaguggcagca

SEQ ID NO: 1323891 - RNA, 23 nt, Human
ugggccgcaguggcagcagggga

SEQ ID NO: 1323892 - RNA, 19 nt, Human
aggggccgggcgccgcggg

SEQ ID NO: 1323893 - RNA, 20 nt, Human
aggggccgggcgccgcgggg

SEQ ID NO: 1323894 - RNA, 22 nt, Human
gcggggaacgggggagcuggcg

SEQ ID NO: 1323895 - RNA, 27 nt, Human
gggccgggcgccgcggggaacggggga

SEQ ID NO: 1323896 - RNA, 23 nt, Human
aacaaaggaaagaauacugaaaa

SEQ ID NO: 1323897 - RNA, 20 nt, Human
aagguggcagaugaacauca

SEQ ID NO: 1323898 - RNA, 20 nt, Human
acaaaggaaagaauacugaa

SEQ ID NO: 1323899 - RNA, 28 nt, Human
accugcugcauccccaggcugugugaac

SEQ ID NO: 1323900 - RNA, 23 nt, Human
agaaacuauacaggaacagacaa

SEQ ID NO: 1323901 - RNA, 24 nt, Human
agcgccgaaaccucacaggaaaaa

SEQ ID NO: 1323902 - RNA, 18 nt, Human
aggaaagaauacugaaaa

SEQ ID NO: 1323903 - RNA, 18 nt, Human
aggcaguuauaaacaaga

SEQ ID NO: 1323904 - RNA, 20 nt, Human
aggcaguuauaaacaagaug

SEQ ID NO: 1323905 - RNA, 20 nt, Human
aggcuauuuuauuuucaaac

SEQ ID NO: 1323906 - RNA, 18 nt, Human
auggcaguggagcaggac

SEQ ID NO: 1323907 - RNA, 19 nt, Human
caagagguccucccaaccc

SEQ ID NO: 1323908 - RNA, 19 nt, Human
caaggagaaacuauacagg

SEQ ID NO: 1323909 - RNA, 20 nt, Human
caauugccagaacucacaga

SEQ ID NO: 1323910 - RNA, 25 nt, Human
caauugccagaacucacagaauagc

SEQ ID NO: 1323911 - RNA, 22 nt, Human
caccugcugcauccccaggcug

SEQ ID NO: 1323912 - RNA, 22 nt, Human
cagaacucacagaauagcagua

SEQ ID NO: 1323913 - RNA, 23 nt, Human
cagcuccugcgccaagagguccu

SEQ ID NO: 1323914 - RNA, 27 nt, Human
caucaggaaggaacauccaugagcuuc

SEQ ID NO: 1323915 - RNA, 19 nt, Human
cauggcaguggagcaggac

SEQ ID NO: 1323916 - RNA, 18 nt, Human
ccagcugggacaggguuc

SEQ ID NO: 1323917 - RNA, 23 nt, Human
ccgaaaccucacaggaaaaaugg

SEQ ID NO: 1323918 - RNA, 25 nt, Human
cgccgaaaccucacaggaaaaaugg

SEQ ID NO: 1323919 - RNA, 24 nt, Human
cucacagaauagcaguaucagcgc

SEQ ID NO: 1323920 - RNA, 20 nt, Human
cuguacaaaugcuuuauuuc

SEQ ID NO: 1323921 - RNA, 24 nt, Human
gcgccaagagguccucccaacccu

SEQ ID NO: 1323922 - RNA, 22 nt, Human
ggcagaugaacaucaggaagga

SEQ ID NO: 1323923 - RNA, 19 nt, Human
gugaucaagggccuggucu

SEQ ID NO: 1323924 - RNA, 26 nt, Human
ucacagaauagcaguaucagcgccga

SEQ ID NO: 1323925 - RNA, 22 nt, Human
ucacuggauuuaaccguauccc

SEQ ID NO: 1323926 - RNA, 19 nt, Human
ucagaacuucagcuccugc

SEQ ID NO: 1323927 - RNA, 22 nt, Human
ucagaacuucagcuccugcgcc

SEQ ID NO: 1323928 - RNA, 18 nt, Human
ucuauucaacauuuagaa

SEQ ID NO: 1323929 - RNA, 20 nt, Human
ucuauucaacauuuagaagg

SEQ ID NO: 1323930 - RNA, 19 nt, Human
ucuccccucaagacacggu

SEQ ID NO: 1323931 - RNA, 18 nt, Human
ucugugacaccugcugca

SEQ ID NO: 1323932 - RNA, 22 nt, Human
ugaacggacucaauugccagaa

SEQ ID NO: 1323933 - RNA, 18 nt, Human
ugacaccugcugcauccc

SEQ ID NO: 1323934 - RNA, 22 nt, Human
ugacaccugcugcauccccagg

SEQ ID NO: 1323935 - RNA, 18 nt, Human
ugccagaacucacagaau

SEQ ID NO: 1323936 - RNA, 19 nt, Human
uggcaguggagcaggacca

SEQ ID NO: 1323937 - RNA, 21 nt, Human
ugugaacggacucaauugcca

SEQ ID NO: 1323938 - RNA, 22 nt, Human
ugugaucaagggccuggucucc

SEQ ID NO: 1323939 - RNA, 23 nt, Human
uucaaacuggagaaagugaugga

SEQ ID NO: 1323940 - RNA, 19 nt, Human
uucaauagcaagguggcag

SEQ ID NO: 1323941 - RNA, 18 nt, Human
uuugucagcccccaugac

SEQ ID NO: 1323942 - RNA, 23 nt, Human
aacacaauauacucugcaguuac

SEQ ID NO: 1323943 - RNA, 19 nt, Human
aacagcaaaaugaacacaa

SEQ ID NO: 1323944 - RNA, 24 nt, Human
aaccaugaugcuugcuccaagcag

SEQ ID NO: 1323945 - RNA, 23 nt, Human
aagcagacaaagaaauuucuuac

SEQ ID NO: 1323946 - RNA, 23 nt, Human
aagcauauuacagcauuucacac

SEQ ID NO: 1323947 - RNA, 18 nt, Human
aaggagggggugcccuuc

SEQ ID NO: 1323948 - RNA, 21 nt, Human
acagcaucacaagcagacaaa

SEQ ID NO: 1323949 - RNA, 24 nt, Human
acuauccuauguuuuuaaauaaaa

SEQ ID NO: 1323950 - RNA, 18 nt, Human
acugcacuucagcacugg

SEQ ID NO: 1323951 - RNA, 18 nt, Human
acugcacuucagcacugg

SEQ ID NO: 1323952 - RNA, 19 nt, Human
acugcacuucagcacuggc

SEQ ID NO: 1323953 - RNA, 20 nt, Human
acugcacuucagcacuggca

SEQ ID NO: 1323954 - RNA, 22 nt, Human
acugcacuucagcacuggcaca

SEQ ID NO: 1323955 - RNA, 23 nt, Human
acugcacuucagcacuggcacag

SEQ ID NO: 1323956 - RNA, 23 nt, Human
agaaaaaaagcuauacaugaaua

SEQ ID NO: 1323957 - RNA, 18 nt, Human
aggaaaaaaaaaaagaga

SEQ ID NO: 1323958 - RNA, 25 nt, Human
auaaaaaugaaaguugacauauguc

SEQ ID NO: 1323959 - RNA, 18 nt, Human
augucauggguacaacua

SEQ ID NO: 1323960 - RNA, 24 nt, Human
auuacaaaaacauucuugaugugg

SEQ ID NO: 1323961 - RNA, 24 nt, Human
caacaugaacacauucgauuuauu

SEQ ID NO: 1323962 - RNA, 19 nt, Human
cacgcccuauguggagcag

SEQ ID NO: 1323963 - RNA, 23 nt, Human
cagcaaaaugaacacaauauacu

SEQ ID NO: 1323964 - RNA, 22 nt, Human
cagcacuggcacaggaaaaaaa

SEQ ID NO: 1323965 - RNA, 19 nt, Human
cagcaggccaucauuucaa

SEQ ID NO: 1323966 - RNA, 19 nt, Human
caggaaaaaaaaaaagaga

SEQ ID NO: 1323967 - RNA, 21 nt, Human
caucacaagcagacaaagaaa

SEQ ID NO: 1323968 - RNA, 20 nt, Human
ccagccugcguguguccucu

SEQ ID NO: 1323969 - RNA, 19 nt, Human
ccugaacuacucaaacagc

SEQ ID NO: 1323970 - RNA, 19 nt, Human
cucccuauaucuuauuucu

SEQ ID NO: 1323971 - RNA, 19 nt, Human
cugaacuacucaaacagca

SEQ ID NO: 1323972 - RNA, 18 nt, Human
cugaagggcuuucaacug

SEQ ID NO: 1323973 - RNA, 19 nt, Human
cugcacuucagcacuggca

SEQ ID NO: 1323974 - RNA, 23 nt, Human
cuuccaccaaaccucccauugug

SEQ ID NO: 1323975 - RNA, 24 nt, Human
cuucucacugcaguucuuuuuaau

SEQ ID NO: 1323976 - RNA, 23 nt, Human
cuuuaaaguguuucagaaaaaaa

SEQ ID NO: 1323977 - RNA, 19 nt, Human
cuuugaagaagcaaagaaa

SEQ ID NO: 1323978 - RNA, 22 nt, Human
gaaaaaaagcuauacaugaaua

SEQ ID NO: 1323979 - RNA, 23 nt, Human
gagggggcuuuacugcacuucag

SEQ ID NO: 1323980 - RNA, 20 nt, Human
gccagccugcguguguccuc

SEQ ID NO: 1323981 - RNA, 19 nt, Human
ggggugcccuucaguuuga

SEQ ID NO: 1323982 - RNA, 18 nt, Human
gggugcccuucaguuuga

SEQ ID NO: 1323983 - RNA, 22 nt, Human
gguguuugaaaggcaacuccuu

SEQ ID NO: 1323984 - RNA, 19 nt, Human
guaaaguguucucacgccc

SEQ ID NO: 1323985 - RNA, 18 nt, Human
guguuugaaaggcaacuc

SEQ ID NO: 1323986 - RNA, 24 nt, Human
uaaaaaguauucaaacauuuaaaa

SEQ ID NO: 1323987 - RNA, 22 nt, Human
uaaaguguuucagaaaaaaagc

SEQ ID NO: 1323988 - RNA, 18 nt, Human
uaacagcaucacaagcag

SEQ ID NO: 1323989 - RNA, 22 nt, Human
uaacagcaucacaagcagacaa

SEQ ID NO: 1323990 - RNA, 20 nt, Human
uaagaaaucuugaugugaua

SEQ ID NO: 1323991 - RNA, 24 nt, Human
uaauaugugcuuucuaaaauaguu

SEQ ID NO: 1323992 - RNA, 25 nt, Human
uagaauacgaugcaagaaguaaaaa

SEQ ID NO: 1323993 - RNA, 23 nt, Human
uaguuguuugguguuugaaaggc

SEQ ID NO: 1323994 - RNA, 23 nt, Human
uauucaaacauuuaaaacuccca

SEQ ID NO: 1323995 - RNA, 18 nt, Human
ucaaacagcaaaaugaac

SEQ ID NO: 1323996 - RNA, 23 nt, Human
ucauucugggagaaggagggggu

SEQ ID NO: 1323997 - RNA, 27 nt, Human
uccucuaucacugaagggcuuucaacu

SEQ ID NO: 1323998 - RNA, 20 nt, Human
uccugaacuacucaaacagc

SEQ ID NO: 1323999 - RNA, 18 nt, Human
ucugggagaaggaggggg

SEQ ID NO: 1324000 - RNA, 19 nt, Human
ucuuauuucuggcuuugaa

SEQ ID NO: 1324001 - RNA, 25 nt, Human
ugagggggcuuuacugcacuucagc

SEQ ID NO: 1324002 - RNA, 24 nt, Human
ugauaaagcaagaccagauuuacu

SEQ ID NO: 1324003 - RNA, 24 nt, Human
ugcuuacccaccaacaugaacaca

SEQ ID NO: 1324004 - RNA, 23 nt, Human
uggaagcaaugccauaggacagg

SEQ ID NO: 1324005 - RNA, 21 nt, Human
uggaaguugaaaugaaaaacu

SEQ ID NO: 1324006 - RNA, 20 nt, Human
uggagcacaguguugagcuc

SEQ ID NO: 1324007 - RNA, 22 nt, Human
uggcacaggaaaaaaaaaaaga

SEQ ID NO: 1324008 - RNA, 20 nt, Human
uggggaaaccaugaugcuug

SEQ ID NO: 1324009 - RNA, 22 nt, Human
uggggaaaccaugaugcuugcu

SEQ ID NO: 1324010 - RNA, 19 nt, Human
ugucucaagacugcagcaa

SEQ ID NO: 1324011 - RNA, 18 nt, Human
ugucuggaccacugggga

SEQ ID NO: 1324012 - RNA, 22 nt, Human
uuacaaaaacauucuugaugug

SEQ ID NO: 1324013 - RNA, 21 nt, Human
uuacugcacuucagcacuggc

SEQ ID NO: 1324014 - RNA, 23 nt, Human
uuagaguuaaaauaauguuuccc

SEQ ID NO: 1324015 - RNA, 21 nt, Human
uuuacugcacuucagcacugg

SEQ ID NO: 1324016 - RNA, 21 nt, Human
aaauaacuggaaccagggacc

SEQ ID NO: 1324017 - RNA, 20 nt, Human
aagaggggggggggcaguag

SEQ ID NO: 1324018 - RNA, 20 nt, Human
aaguuugauuuuuuuuucuu

SEQ ID NO: 1324019 - RNA, 21 nt, Human
accauauuuuagcaaaagcua

SEQ ID NO: 1324020 - RNA, 20 nt, Human
accccuacccuaaacccugg

SEQ ID NO: 1324021 - RNA, 19 nt, Human
acuggaaccagggacccua

SEQ ID NO: 1324022 - RNA, 18 nt, Human
agaggggggggggcagua

SEQ ID NO: 1324023 - RNA, 21 nt, Human
aggaaagaagagcucaucugg

SEQ ID NO: 1324024 - RNA, 22 nt, Human
aggacucaggucccagcugcug

SEQ ID NO: 1324025 - RNA, 21 nt, Human
aguaacuaacuacagucacag

SEQ ID NO: 1324026 - RNA, 22 nt, Human
agugccaaccauauuuuagcaa

SEQ ID NO: 1324027 - RNA, 24 nt, Human
augucugcugcuuagagucaacag

SEQ ID NO: 1324028 - RNA, 21 nt, Human
caaaguaacuaacuacaguca

SEQ ID NO: 1324029 - RNA, 21 nt, Human
caacagauuaaccccuacccu

SEQ ID NO: 1324030 - RNA, 19 nt, Human
cacguauaauccacaggau

SEQ ID NO: 1324031 - RNA, 20 nt, Human
cagauuaaccccuacccuaa

SEQ ID NO: 1324032 - RNA, 21 nt, Human
cagugccagaagggcagggag

SEQ ID NO: 1324033 - RNA, 23 nt, Human
cauauuuuagcaaaagcuaggag

SEQ ID NO: 1324034 - RNA, 25 nt, Human
caucagugauggccaauuaacggcc

SEQ ID NO: 1324035 - RNA, 24 nt, Human
cauucuuaaaaaaaagaggggggg

SEQ ID NO: 1324036 - RNA, 24 nt, Human
ccacccagacugauaauuuauaga

SEQ ID NO: 1324037 - RNA, 22 nt, Human
ccccaaggcccuucagugccag

SEQ ID NO: 1324038 - RNA, 20 nt, Human
cccuaaacccuggcauuccc

SEQ ID NO: 1324039 - RNA, 18 nt, Human
cccuacccuaaacccugg

SEQ ID NO: 1324040 - RNA, 23 nt, Human
cccuacccuaaacccuggcauuc

SEQ ID NO: 1324041 - RNA, 18 nt, Human
cugauuuccaucucuucc

SEQ ID NO: 1324042 - RNA, 22 nt, Human
cuggaaauuuucaguaucccaa

SEQ ID NO: 1324043 - RNA, 20 nt, Human
cugguuuuggaggagaggga

SEQ ID NO: 1324044 - RNA, 19 nt, Human
gaaaauaacuggaaccagg

SEQ ID NO: 1324045 - RNA, 20 nt, Human
gaaaauaacuggaaccaggg

SEQ ID NO: 1324046 - RNA, 22 nt, Human
gaaaauaacuggaaccagggac

SEQ ID NO: 1324047 - RNA, 24 nt, Human
gaaccagggacccuaagcaggaaa

SEQ ID NO: 1324048 - RNA, 25 nt, Human
gagcaaacuaccccaaggcccuuca

SEQ ID NO: 1324049 - RNA, 20 nt, Human
ggcagggagauguguggcuc

SEQ ID NO: 1324050 - RNA, 21 nt, Human
gggauuuucugauuuccaucu

SEQ ID NO: 1324051 - RNA, 21 nt, Human
gggcagggagauguguggcuc

SEQ ID NO: 1324052 - RNA, 19 nt, Human
ggggaauauggcaaaggga

SEQ ID NO: 1324053 - RNA, 22 nt, Human
ggggggggggcaguagguggag

SEQ ID NO: 1324054 - RNA, 19 nt, Human
gguaggacucaggucccag

SEQ ID NO: 1324055 - RNA, 24 nt, Human
uaaaaaaaaaaaggaaguaaauaa

SEQ ID NO: 1324056 - RNA, 19 nt, Human
uaaccccuacccuaaaccc

SEQ ID NO: 1324057 - RNA, 25 nt, Human
uaaccccuacccuaaacccuggcau

SEQ ID NO: 1324058 - RNA, 20 nt, Human
uaaggugggcugaacaggga

SEQ ID NO: 1324059 - RNA, 26 nt, Human
uaccauuucuucaggaugucugcugc

SEQ ID NO: 1324060 - RNA, 21 nt, Human
uagagauuccuuccucugucc

SEQ ID NO: 1324061 - RNA, 18 nt, Human
uaggggaauauggcaaag

SEQ ID NO: 1324062 - RNA, 20 nt, Human
uaucaaaguaacuaacuaca

SEQ ID NO: 1324063 - RNA, 18 nt, Human
ucaguaucccaaccugca

SEQ ID NO: 1324064 - RNA, 19 nt, Human
ucagugauggccaauuaac

SEQ ID NO: 1324065 - RNA, 19 nt, Human
ucaucuggaaauuuucagu

SEQ ID NO: 1324066 - RNA, 18 nt, Human
ucccuaauuaugaaaacu

SEQ ID NO: 1324067 - RNA, 21 nt, Human
ucuguccugauccuccaggga

SEQ ID NO: 1324068 - RNA, 23 nt, Human
ucuguccugauccuccagggaaa

SEQ ID NO: 1324069 - RNA, 22 nt, Human
ugacugcucugauucccugguu

SEQ ID NO: 1324070 - RNA, 20 nt, Human
ugauggccaauuaacggccu

SEQ ID NO: 1324071 - RNA, 22 nt, Human
ugcuggagugaugggauuuucu

SEQ ID NO: 1324072 - RNA, 19 nt, Human
uggaaccagggacccuaag

SEQ ID NO: 1324073 - RNA, 22 nt, Human
uggcaaagggaggaaaucuggg

SEQ ID NO: 1324074 - RNA, 21 nt, Human
uggccaaagaaaauuaucaaa

SEQ ID NO: 1324075 - RNA, 20 nt, Human
ugguagacccagugggugcc

SEQ ID NO: 1324076 - RNA, 24 nt, Human
uuaacggccucacuacuuauuucu

SEQ ID NO: 1324077 - RNA, 21 nt, Human
uucaggaugucugcugcuuag

SEQ ID NO: 1324078 - RNA, 22 nt, Human
uucugauuuccaucucuuccug

SEQ ID NO: 1324079 - RNA, 19 nt, Human
uucuucaggaugucugcug

SEQ ID NO: 1324080 - RNA, 19 nt, Human
cuucaaaggacaccaaccc

SEQ ID NO: 1324081 - RNA, 23 nt, Human
aaacaauuuauuauaacucuagu

SEQ ID NO: 1324082 - RNA, 23 nt, Human
aaauaaacacagaugccaacaaa

SEQ ID NO: 1324083 - RNA, 20 nt, Human
aacagaggcacuguaagaga

SEQ ID NO: 1324084 - RNA, 24 nt, Human
aagcagaaaacacuggcaccaaaa

SEQ ID NO: 1324085 - RNA, 21 nt, Human
aauaaaccaguuuauuacaga

SEQ ID NO: 1324086 - RNA, 19 nt, Human
acaaagcaaaugauuaagc

SEQ ID NO: 1324087 - RNA, 24 nt, Human
acaaagcaaaugauuaagcagaaa

SEQ ID NO: 1324088 - RNA, 20 nt, Human
acaauuacuuauccuugauc

SEQ ID NO: 1324089 - RNA, 18 nt, Human
acugcagcaccuuccacc

SEQ ID NO: 1324090 - RNA, 19 nt, Human
agacagaccaacagaggca

SEQ ID NO: 1324091 - RNA, 21 nt, Human
agacauccuaguuuccaauaa

SEQ ID NO: 1324092 - RNA, 22 nt, Human
agggaauuaucuauuuuucuca

SEQ ID NO: 1324093 - RNA, 20 nt, Human
auaaaauguacauguaaauc

SEQ ID NO: 1324094 - RNA, 22 nt, Human
auaaacacagaugccaacaaag

SEQ ID NO: 1324095 - RNA, 19 nt, Human
caaaauaaacaaaggcaag

SEQ ID NO: 1324096 - RNA, 23 nt, Human
caauucaguuugagacagaccaa

SEQ ID NO: 1324097 - RNA, 19 nt, Human
cauguaguuuucgauaaca

SEQ ID NO: 1324098 - RNA, 20 nt, Human
ccuaguuuccaauaauuuau

SEQ ID NO: 1324099 - RNA, 26 nt, Human
cuguuacccaugaaucaauauaaacc

SEQ ID NO: 1324100 - RNA, 22 nt, Human
gaacugcccuucuuugguucuu

SEQ ID NO: 1324101 - RNA, 19 nt, Human
gcagcaccuuccacccacc

SEQ ID NO: 1324102 - RNA, 18 nt, Human
gcucaguagacauuuacu

SEQ ID NO: 1324103 - RNA, 19 nt, Human
gggaaggaguaguuaagac

SEQ ID NO: 1324104 - RNA, 21 nt, Human
guaaauaaacacagaugccaa

SEQ ID NO: 1324105 - RNA, 21 nt, Human
uaaacaaaggcaagauuugcc

SEQ ID NO: 1324106 - RNA, 24 nt, Human
uaaauaaacacagaugccaacaaa

SEQ ID NO: 1324107 - RNA, 25 nt, Human
uaaauaaacacagaugccaacaaag

SEQ ID NO: 1324108 - RNA, 20 nt, Human
uaaccacacaauuacuuauc

SEQ ID NO: 1324109 - RNA, 23 nt, Human
uaagggaauuaucuauuuuucuc

SEQ ID NO: 1324110 - RNA, 18 nt, Human
uaaucuaauuauagcacc

SEQ ID NO: 1324111 - RNA, 23 nt, Human
uagcauguguuuggugaggcaga

SEQ ID NO: 1324112 - RNA, 24 nt, Human
uauuacagauuaaaucauuuuuuc

SEQ ID NO: 1324113 - RNA, 20 nt, Human
ucaauuacagaacauacuaa

SEQ ID NO: 1324114 - RNA, 24 nt, Human
ucagacauccuaguuuccaauaau

SEQ ID NO: 1324115 - RNA, 19 nt, Human
ucaguagacauuuacugaa

SEQ ID NO: 1324116 - RNA, 24 nt, Human
uccacccacccuuuggucgcuuga

SEQ ID NO: 1324117 - RNA, 24 nt, Human
uccuuuauaccuaaugcaaaguua

SEQ ID NO: 1324118 - RNA, 24 nt, Human
ucgcuugaacugcccuucuuuggu

SEQ ID NO: 1324119 - RNA, 23 nt, Human
ugaauaacacaccucaaacaaaa

SEQ ID NO: 1324120 - RNA, 23 nt, Human
ugacuaggaaagaggugagaaga

SEQ ID NO: 1324121 - RNA, 19 nt, Human
ugagaagagaugggcccuc

SEQ ID NO: 1324122 - RNA, 21 nt, Human
ugagacagaccaacagaggca

SEQ ID NO: 1324123 - RNA, 19 nt, Human
uguguuuggugaggcagag

SEQ ID NO: 1324124 - RNA, 18 nt, Human
uugaacugcccuucuuug

SEQ ID NO: 1324125 - RNA, 23 nt, Human
uuggaauuuaccugggaaggagu

SEQ ID NO: 1324126 - RNA, 21 nt, Human
uuggaccauaccuuuucccac

SEQ ID NO: 1324127 - RNA, 18 nt, Human
uuugcccacaguaagggc

SEQ ID NO: 1324128 - RNA, 20 nt, Human
accaggagcagggcagccca

SEQ ID NO: 1324129 - RNA, 18 nt, Human
acuagcagacugcgcaug

SEQ ID NO: 1324130 - RNA, 23 nt, Human
agacacacagaucugagcuugga

SEQ ID NO: 1324131 - RNA, 18 nt, Human
agcucugcaaagcgugug

SEQ ID NO: 1324132 - RNA, 18 nt, Human
agcuuggaugguggucac

SEQ ID NO: 1324133 - RNA, 20 nt, Human
cacacacacacuagcagacu

SEQ ID NO: 1324134 - RNA, 33 nt, Human
cacacacacacuagcagacugcgcaugcacagu

SEQ ID NO: 1324135 - RNA, 21 nt, Human
cagcccagccaccgacgcauc

SEQ ID NO: 1324136 - RNA, 24 nt, Human
ccugcguaugcugcacacacacag

SEQ ID NO: 1324137 - RNA, 23 nt, Human
cguagacacacagaucugagcuu

SEQ ID NO: 1324138 - RNA, 18 nt, Human
gggcuccggccugaccag

SEQ ID NO: 1324139 - RNA, 22 nt, Human
guaugcugcacacacacacuag

SEQ ID NO: 1324140 - RNA, 18 nt, Human
ucacuggauuaaagggag

SEQ ID NO: 1324141 - RNA, 25 nt, Human
ucacuggauuaaagggaguccacgu

SEQ ID NO: 1324142 - RNA, 19 nt, Human
ugaccaggagcagggcagc

SEQ ID NO: 1324143 - RNA, 19 nt, Human
ugagcguagacacacagau

SEQ ID NO: 1324144 - RNA, 20 nt, Human
ugaucgaccugacagucacu

SEQ ID NO: 1324145 - RNA, 30 nt, Human
ugcacacacacacuagcagacugcgcaugg

SEQ ID NO: 1324146 - RNA, 20 nt, Human
ugcgcaugcacagcucugca

SEQ ID NO: 1324147 - RNA, 18 nt, Human
aaccggccccgcagaagc

SEQ ID NO: 1324148 - RNA, 23 nt, Human
aggagggcgccucugccggggac

SEQ ID NO: 1324149 - RNA, 20 nt, Human
aggcuggcgcgcagcagcuc

SEQ ID NO: 1324150 - RNA, 20 nt, Human
caaagaaguuucagagagug

SEQ ID NO: 1324151 - RNA, 27 nt, Human
cacagcuccacggggucuggguggugg

SEQ ID NO: 1324152 - RNA, 23 nt, Human
cacucaccccgcgcuggugcucc

SEQ ID NO: 1324153 - RNA, 24 nt, Human
cagagaguggguggaucagggcuc

SEQ ID NO: 1324154 - RNA, 21 nt, Human
cagagugagccccuuccugcc

SEQ ID NO: 1324155 - RNA, 23 nt, Human
ccccgcagaagcucacucacccc

SEQ ID NO: 1324156 - RNA, 18 nt, Human
ccccuuccugccacaguc

SEQ ID NO: 1324157 - RNA, 22 nt, Human
cccgcagaagcucacucacccc

SEQ ID NO: 1324158 - RNA, 20 nt, Human
ccgcugccuccuccgcagcc

SEQ ID NO: 1324159 - RNA, 21 nt, Human
ccgcugccuccuccgcagccu

SEQ ID NO: 1324160 - RNA, 19 nt, Human
ccgggcccccgccgcugcc

SEQ ID NO: 1324161 - RNA, 23 nt, Human
ccugccacagucaccccaacuga

SEQ ID NO: 1324162 - RNA, 24 nt, Human
cuccugagucaaggagggcgccuc

SEQ ID NO: 1324163 - RNA, 19 nt, Human
cuggugcuccaggcuggcg

SEQ ID NO: 1324164 - RNA, 29 nt, Human
cuuccugccacagucaccccaacugaaau

SEQ ID NO: 1324165 - RNA, 21 nt, Human
gagaguggguggaucagggcu

SEQ ID NO: 1324166 - RNA, 18 nt, Human
gagccccuuccugccaca

SEQ ID NO: 1324167 - RNA, 18 nt, Human
gaggugacugacgaggag

SEQ ID NO: 1324168 - RNA, 21 nt, Human
gcagcagcucuagcucgcgcu

SEQ ID NO: 1324169 - RNA, 22 nt, Human
gcccgggcccccgccgcugccu

SEQ ID NO: 1324170 - RNA, 23 nt, Human
gcccgggcccccgccgcugccuc

SEQ ID NO: 1324171 - RNA, 22 nt, Human
gcgcagcagcucuagcucgcgc

SEQ ID NO: 1324172 - RNA, 21 nt, Human
gucugggugguggccucgcgu

SEQ ID NO: 1324173 - RNA, 24 nt, Human
guggggccagagugagccccuucc

SEQ ID NO: 1324174 - RNA, 24 nt, Human
uagcaggggacccuggacccuucu

SEQ ID NO: 1324175 - RNA, 20 nt, Human
uagguguagugagccagacg

SEQ ID NO: 1324176 - RNA, 20 nt, Human
ucggcacagcuccacggggu

SEQ ID NO: 1324177 - RNA, 24 nt, Human
ugccacagucaccccaacugaaau

SEQ ID NO: 1324178 - RNA, 20 nt, Human
ugcuccaggcuggcgcgcag

SEQ ID NO: 1324179 - RNA, 18 nt, Human
ugguggggccagagugag

SEQ ID NO: 1324180 - RNA, 22 nt, Human
aagcagauggaaagccccccuc

SEQ ID NO: 1324181 - RNA, 25 nt, Human
aagguauuccugucccaggucaucg

SEQ ID NO: 1324182 - RNA, 20 nt, Human
acaaggccacgcugcggcag

SEQ ID NO: 1324183 - RNA, 24 nt, Human
acggagccuugugcccugagcccu

SEQ ID NO: 1324184 - RNA, 19 nt, Human
agagcccuucacagcugcc

SEQ ID NO: 1324185 - RNA, 24 nt, Human
agaggaaacgggucuccucuucgg

SEQ ID NO: 1324186 - RNA, 23 nt, Human
agcagagcccuucacagcugccu

SEQ ID NO: 1324187 - RNA, 24 nt, Human
aggagaccccagcucacguucucc

SEQ ID NO: 1324188 - RNA, 21 nt, Human
aggaggagggaacagcagagc

SEQ ID NO: 1324189 - RNA, 18 nt, Human
aggccccaggacagcgug

SEQ ID NO: 1324190 - RNA, 18 nt, Human
agguggagcugaaagggc

SEQ ID NO: 1324191 - RNA, 19 nt, Human
agugaauuaaacaaaaaga

SEQ ID NO: 1324192 - RNA, 20 nt, Human
caccgccccgcgugucgcag

SEQ ID NO: 1324193 - RNA, 19 nt, Human
cacugaaccacacugccca

SEQ ID NO: 1324194 - RNA, 24 nt, Human
cacugaaccacacugcccaggggc

SEQ ID NO: 1324195 - RNA, 20 nt, Human
cagauggaaagccccccagc

SEQ ID NO: 1324196 - RNA, 20 nt, Human
cagccggguccucuuccccc

SEQ ID NO: 1324197 - RNA, 22 nt, Human
cagcgagccgcaggacgaacac

SEQ ID NO: 1324198 - RNA, 20 nt, Human
ccaaacagcugauggugggc

SEQ ID NO: 1324199 - RNA, 20 nt, Human
ccacacugcccaggggccuc

SEQ ID NO: 1324200 - RNA, 19 nt, Human
cccaggacagcgugcagga

SEQ ID NO: 1324201 - RNA, 18 nt, Human
cccaggucaucgagucgc

SEQ ID NO: 1324202 - RNA, 21 nt, Human
ccccagcucacguucuccucg

SEQ ID NO: 1324203 - RNA, 25 nt, Human
cccccgggugccgccuggcugugcg

SEQ ID NO: 1324204 - RNA, 22 nt, Human
cccugagcccuggacacagccc

SEQ ID NO: 1324205 - RNA, 20 nt, Human
cccugcuaggaugcugcugu

SEQ ID NO: 1324206 - RNA, 18 nt, Human
ccgcacugcugcaggcug

SEQ ID NO: 1324207 - RNA, 19 nt, Human
ccgcacugcugcaggcugu

SEQ ID NO: 1324208 - RNA, 22 nt, Human
ccggcaguccucccgccucucc

SEQ ID NO: 1324209 - RNA, 25 nt, Human
ccugagcccuggacacagcccuggc

SEQ ID NO: 1324210 - RNA, 24 nt, Human
ccuggacagucccgugggcuuccg

SEQ ID NO: 1324211 - RNA, 19 nt, Human
ccuguguucuuccgaggag

SEQ ID NO: 1324212 - RNA, 25 nt, Human
cgccagcgagccgcaggacgaacac

SEQ ID NO: 1324213 - RNA, 26 nt, Human
cggagugggcagcguggacaaggcca

SEQ ID NO: 1324214 - RNA, 23 nt, Human
cgugcaggacgugucugcgcggg

SEQ ID NO: 1324215 - RNA, 22 nt, Human
cguggaucacagaugcucucuc

SEQ ID NO: 1324216 - RNA, 24 nt, Human
cguuucucaccgcuggucaccgug

SEQ ID NO: 1324217 - RNA, 24 nt, Human
cucgcagcguucggccuguugaau

SEQ ID NO: 1324218 - RNA, 25 nt, Human
cugcccagcuaacggagccuugugc

SEQ ID NO: 1324219 - RNA, 19 nt, Human
cugccuguuugacuuguga

SEQ ID NO: 1324220 - RNA, 25 nt, Human
cugcugcccagcuaacggagccuug

SEQ ID NO: 1324221 - RNA, 21 nt, Human
cuguaguguauuucugcagcu

SEQ ID NO: 1324222 - RNA, 27 nt, Human
cuuccgggagcccggugucacaccgcc

SEQ ID NO: 1324223 - RNA, 22 nt, Human
gaaaacaggaggagggaacagc

SEQ ID NO: 1324224 - RNA, 21 nt, Human
gagaagugacacagagaaggc

SEQ ID NO: 1324225 - RNA, 19 nt, Human
gagcaguuggugaggagac

SEQ ID NO: 1324226 - RNA, 18 nt, Human
gagcccauagaacugcca

SEQ ID NO: 1324227 - RNA, 19 nt, Human
gagcccggugucacaccgc

SEQ ID NO: 1324228 - RNA, 19 nt, Human
gaugcugcuguuuggaggc

SEQ ID NO: 1324229 - RNA, 22 nt, Human
gaugugaaaacaggaggaggga

SEQ ID NO: 1324230 - RNA, 23 nt, Human
gcauggucaacuaugccagcacc

SEQ ID NO: 1324231 - RNA, 19 nt, Human
gcccaaugccacccgggug

SEQ ID NO: 1324232 - RNA, 24 nt, Human
gcccugagcccuggacacagcccu

SEQ ID NO: 1324233 - RNA, 21 nt, Human
gcgaagcagauggaaagcccc

SEQ ID NO: 1324234 - RNA, 18 nt, Human
gcugcaggcugugcgccg

SEQ ID NO: 1324235 - RNA, 21 nt, Human
gcugcugcccagcuaacggag

SEQ ID NO: 1324236 - RNA, 20 nt, Human
ggacagucccgugggcuucc

SEQ ID NO: 1324237 - RNA, 21 nt, Human
ggcaguccucccgccucuccg

SEQ ID NO: 1324238 - RNA, 21 nt, Human
ggccucagccuccucuccugg

SEQ ID NO: 1324239 - RNA, 24 nt, Human
gggaacagcagagcccuucacagc

SEQ ID NO: 1324240 - RNA, 18 nt, Human
gggcaaagagugaagggg

SEQ ID NO: 1324241 - RNA, 19 nt, Human
gggccagcugcugcccagc

SEQ ID NO: 1324242 - RNA, 20 nt, Human
ggggguugggguggggggag

SEQ ID NO: 1324243 - RNA, 20 nt, Human
gggguggggggagcaguugg

SEQ ID NO: 1324244 - RNA, 22 nt, Human
ggucaucguggugacagacggg

SEQ ID NO: 1324245 - RNA, 18 nt, Human
ggugacagacgggaggcc

SEQ ID NO: 1324246 - RNA, 19 nt, Human
gguggagcugaaagggcug

SEQ ID NO: 1324247 - RNA, 22 nt, Human
guggacaaggccacgcugcggc

SEQ ID NO: 1324248 - RNA, 22 nt, Human
guggagcugaaagggcuguuuc

SEQ ID NO: 1324249 - RNA, 22 nt, Human
guuccagguccccugacaucag

SEQ ID NO: 1324250 - RNA, 19 nt, Human
uaaggcagagaaauuuuua

SEQ ID NO: 1324251 - RNA, 18 nt, Human
ucagcaagguacgugcac

SEQ ID NO: 1324252 - RNA, 27 nt, Human
ucccuccgggcaucucagagcugccug

SEQ ID NO: 1324253 - RNA, 20 nt, Human
ucgcugcgggcucaugucuc

SEQ ID NO: 1324254 - RNA, 21 nt, Human
ucggccagccggguccucuuc

SEQ ID NO: 1324255 - RNA, 23 nt, Human
ucgugcauuuuuuuuuccuucug

SEQ ID NO: 1324256 - RNA, 24 nt, Human
ucucagucagaggaaacgggucuc

SEQ ID NO: 1324257 - RNA, 19 nt, Human
ugaauuaaacaaaaagauu

SEQ ID NO: 1324258 - RNA, 22 nt, Human
ugacaucagcaagguacgugca

SEQ ID NO: 1324259 - RNA, 18 nt, Human
ugacuugugagcaaccuu

SEQ ID NO: 1324260 - RNA, 21 nt, Human
ugauccugggagcacugggga

SEQ ID NO: 1324261 - RNA, 22 nt, Human
ugauccugggagcacuggggag

SEQ ID NO: 1324262 - RNA, 21 nt, Human
ugauggugggcaaagagugaa

SEQ ID NO: 1324263 - RNA, 19 nt, Human
ugcccugagcccuggacac

SEQ ID NO: 1324264 - RNA, 22 nt, Human
ugcccugagcccuggacacagc

SEQ ID NO: 1324265 - RNA, 24 nt, Human
ugcccugagcccuggacacagccc

SEQ ID NO: 1324266 - RNA, 23 nt, Human
ugccugcagacacuuugauuccc

SEQ ID NO: 1324267 - RNA, 22 nt, Human
ugcggcagaucgccagcgagcc

SEQ ID NO: 1324268 - RNA, 22 nt, Human
ugcugcuguuuggaggcucccg

SEQ ID NO: 1324269 - RNA, 19 nt, Human
ugcuucccacugaaccaca

SEQ ID NO: 1324270 - RNA, 19 nt, Human
ugggccagcugcugcccag

SEQ ID NO: 1324271 - RNA, 21 nt, Human
ugggguggggggagcaguugg

SEQ ID NO: 1324272 - RNA, 19 nt, Human
uggugaggagaccccagcu

SEQ ID NO: 1324273 - RNA, 21 nt, Human
uggugggcaaagagugaaggg

SEQ ID NO: 1324274 - RNA, 18 nt, Human
ugucgcagguggucaucg

SEQ ID NO: 1324275 - RNA, 18 nt, Human
uguuagcuaggucauugc

SEQ ID NO: 1324276 - RNA, 21 nt, Human
uuagagugaauuaaacaaaaa

SEQ ID NO: 1324277 - RNA, 23 nt, Human
uugggguggggggagcaguuggu

SEQ ID NO: 1324278 - RNA, 21 nt, Human
uuucaugggccagcugcugcc

SEQ ID NO: 1324279 - RNA, 18 nt, Human
aagacucuucccucuccc

SEQ ID NO: 1324280 - RNA, 20 nt, Human
aagacucuucccucucccua

SEQ ID NO: 1324281 - RNA, 22 nt, Human
acaguacugaaaagaaaaccac

SEQ ID NO: 1324282 - RNA, 22 nt, Human
caggccccagauucuuggaaaa

SEQ ID NO: 1324283 - RNA, 23 nt, Human
caggccccagauucuuggaaagg

SEQ ID NO: 1324284 - RNA, 18 nt, Human
caucccaggccccagauu

SEQ ID NO: 1324285 - RNA, 20 nt, Human
cccuauuguugccaaaauaa

SEQ ID NO: 1324286 - RNA, 21 nt, Human
ccucucccuauuguugccaaa

SEQ ID NO: 1324287 - RNA, 26 nt, Human
ccucucccuauuguugccaaaauaac

SEQ ID NO: 1324288 - RNA, 22 nt, Human
cgagugucuucagaaaagcuga

SEQ ID NO: 1324289 - RNA, 22 nt, Human
cuugaagacucuucccucuccc

SEQ ID NO: 1324290 - RNA, 20 nt, Human
gacucuucccucucccuauu

SEQ ID NO: 1324291 - RNA, 18 nt, Human
ucuucccucucccuauug

SEQ ID NO: 1324292 - RNA, 18 nt, Human
ugaaaagaaaaccaccac

SEQ ID NO: 1324293 - RNA, 26 nt, Human
ugaaaagaaaaccaccaccaaucuug

SEQ ID NO: 1324294 - RNA, 18 nt, Human
ugaagacucuucccucuc

SEQ ID NO: 1324295 - RNA, 21 nt, Human
ugccaaaauaacugccucuga

SEQ ID NO: 1324296 - RNA, 23 nt, Human
ugccaaaauaacugccucugauc

SEQ ID NO: 1324297 - RNA, 22 nt, Human
ugccucugaucuguuuuuguuu

SEQ ID NO: 1324298 - RNA, 18 nt, Human
uggaaaacaguacugaaa

SEQ ID NO: 1324299 - RNA, 24 nt, Human
uggaaaacaguacugaaaagaaaa

SEQ ID NO: 1324300 - RNA, 22 nt, Human
uuggaaaacaguacugaaaaga

SEQ ID NO: 1324301 - RNA, 18 nt, Human
uuuuuguuugcaucccag

SEQ ID NO: 1324302 - RNA, 21 nt, Human
aaggcuuuuaggggagugggg

SEQ ID NO: 1324303 - RNA, 18 nt, Human
agaagcaucuucagggag

SEQ ID NO: 1324304 - RNA, 19 nt, Human
agugggggcacagcuggag

SEQ ID NO: 1324305 - RNA, 24 nt, Human
caucuucagggagggagucgggga

SEQ ID NO: 1324306 - RNA, 25 nt, Human
ccugagaagcaucuucagggaggga

SEQ ID NO: 1324307 - RNA, 30 nt, Human
cugugguacgagagguacaggggagguguu

SEQ ID NO: 1324308 - RNA, 19 nt, Human
cuuuuaggggagugggggc

SEQ ID NO: 1324309 - RNA, 22 nt, Human
ggaauacaaggcuuuuagggga

SEQ ID NO: 1324310 - RNA, 22 nt, Human
ggaggugucuggacuucuggag

SEQ ID NO: 1324311 - RNA, 23 nt, Human
gggaauacaaggcuuuuagggga

SEQ ID NO: 1324312 - RNA, 20 nt, Human
ggggagugggggcacagcug

SEQ ID NO: 1324313 - RNA, 20 nt, Human
uacaaggcuuuuaggggagu

SEQ ID NO: 1324314 - RNA, 31 nt, Human
ucugugguacgagagguacaggggagguguu

SEQ ID NO: 1324315 - RNA, 21 nt, Human
ugggagccugagaagcaucuu

SEQ ID NO: 1324316 - RNA, 22 nt, Human
ugguggggccagagggaaccug

SEQ ID NO: 1324317 - RNA, 21 nt, Human
acaaaguaaaauccuuccuuc

SEQ ID NO: 1324318 - RNA, 18 nt, Human
agauuuugucauucacag

SEQ ID NO: 1324319 - RNA, 20 nt, Human
caacaaagccccaaggcaca

SEQ ID NO: 1324320 - RNA, 26 nt, Human
caacaaagccccaaggcacagcuuga

SEQ ID NO: 1324321 - RNA, 20 nt, Human
caccguagggaaaaccuugg

SEQ ID NO: 1324322 - RNA, 19 nt, Human
cacucuggcuuucuuaguc

SEQ ID NO: 1324323 - RNA, 25 nt, Human
cagugaaccuaucucuuguggcacc

SEQ ID NO: 1324324 - RNA, 26 nt, Human
ccagauucugcacucuggcuuucuua

SEQ ID NO: 1324325 - RNA, 21 nt, Human
cuucagcacuucuggccuacc

SEQ ID NO: 1324326 - RNA, 19 nt, Human
gacagggccuucugaugug

SEQ ID NO: 1324327 - RNA, 22 nt, Human
gagcacagugaaccuaucucuu

SEQ ID NO: 1324328 - RNA, 20 nt, Human
gcccuggagcacagugaacc

SEQ ID NO: 1324329 - RNA, 24 nt, Human
gugaaccuaucucuuguggcaccc

SEQ ID NO: 1324330 - RNA, 22 nt, Human
uaauguccccauugauuccaca

SEQ ID NO: 1324331 - RNA, 23 nt, Human
uccacagggucacugccugauuu

SEQ ID NO: 1324332 - RNA, 18 nt, Human
uccagauucugcacucug

SEQ ID NO: 1324333 - RNA, 18 nt, Human
uccagauucugcacucug

SEQ ID NO: 1324334 - RNA, 25 nt, Human
ucuccggaauaaccuuaacugaucu

SEQ ID NO: 1324335 - RNA, 21 nt, Human
ugacagggccuucugaugugg

SEQ ID NO: 1324336 - RNA, 19 nt, Human
uggagcacagugaaccuau

SEQ ID NO: 1324337 - RNA, 18 nt, Human
uggcacccugacucgccu

SEQ ID NO: 1324338 - RNA, 21 nt, Human
caccuuuauuguguccggggg

SEQ ID NO: 1324339 - RNA, 20 nt, Human
uccuggggccuggggucacc

SEQ ID NO: 1324340 - RNA, 19 nt, Human
ucgcucccuuuccuggggc

SEQ ID NO: 1324341 - RNA, 22 nt, Human
uggggucaccuccccucucugg

SEQ ID NO: 1324342 - RNA, 18 nt, Human
uguccucgcucccuuucc

SEQ ID NO: 1324343 - RNA, 22 nt, Human
accccaaggaggaccgguggag

SEQ ID NO: 1324344 - RNA, 23 nt, Human
ccgccgcgccccucccggaggcc

SEQ ID NO: 1324345 - RNA, 18 nt, Human
ccgcgccccucccggagg

SEQ ID NO: 1324346 - RNA, 20 nt, Human
cucggcggcgguggcguccu

SEQ ID NO: 1324347 - RNA, 19 nt, Human
gaccgguggagccugcggu

SEQ ID NO: 1324348 - RNA, 18 nt, Human
gcggccgccgcgccccuc

SEQ ID NO: 1324349 - RNA, 24 nt, Human
gcucuucgugauugggggcgccag

SEQ ID NO: 1324350 - RNA, 19 nt, Human
ggcgguggcguccugcgcg

SEQ ID NO: 1324351 - RNA, 21 nt, Human
gugagcucggcggcgguggcg

SEQ ID NO: 1324352 - RNA, 18 nt, Human
ucccggaggccgugagcu

SEQ ID NO: 1324353 - RNA, 21 nt, Human
ucggcggcgguggcguccugc

SEQ ID NO: 1324354 - RNA, 20 nt, Human
ugaccccaaggaggaccggg

SEQ ID NO: 1324355 - RNA, 22 nt, Human
agacuuuaagaauuuacuuggu

SEQ ID NO: 1324356 - RNA, 23 nt, Human
agaggcuuccccugaacaggggu

SEQ ID NO: 1324357 - RNA, 23 nt, Human
aggaaggacccggggucccaggg

SEQ ID NO: 1324358 - RNA, 23 nt, Human
aggcacagcuugcagggguuagc

SEQ ID NO: 1324359 - RNA, 19 nt, Human
caagaggcuuccccugaac

SEQ ID NO: 1324360 - RNA, 21 nt, Human
cagcuugcagggguuagcuga

SEQ ID NO: 1324361 - RNA, 21 nt, Human
caggaaggacccgggguccca

SEQ ID NO: 1324362 - RNA, 21 nt, Human
cccuucagcaacaccuccugg

SEQ ID NO: 1324363 - RNA, 21 nt, Human
cggcagggcgauggccgcaac

SEQ ID NO: 1324364 - RNA, 27 nt, Human
cucuaggucauuccaggcacagcuugc

SEQ ID NO: 1324365 - RNA, 27 nt, Human
cugaucuuaagaaaggaauggggcaca

SEQ ID NO: 1324366 - RNA, 20 nt, Human
cugcuauccccuucagcaac

SEQ ID NO: 1324367 - RNA, 20 nt, Human
uaagcagauauaagcugcga

SEQ ID NO: 1324368 - RNA, 22 nt, Human
uacugccuccuccucaggucuc

SEQ ID NO: 1324369 - RNA, 22 nt, Human
ucagaucccuaacuguucccag

SEQ ID NO: 1324370 - RNA, 24 nt, Human
ucagaucccuaacuguucccagac

SEQ ID NO: 1324371 - RNA, 21 nt, Human
ucagcccuuccacucacuguu

SEQ ID NO: 1324372 - RNA, 19 nt, Human
ugauuucugggguccuaca

SEQ ID NO: 1324373 - RNA, 25 nt, Human
ugccuccuccucaggucucugcuau

SEQ ID NO: 1324374 - RNA, 22 nt, Human
ugggguccuacaggaaggaccc

SEQ ID NO: 1324375 - RNA, 20 nt, Human
aagccacugaugauuuagga

SEQ ID NO: 1324376 - RNA, 24 nt, Human
aggcaaguaugaaccacuuugagg

SEQ ID NO: 1324377 - RNA, 26 nt, Human
auaaagccuugaaccauauucugcaa

SEQ ID NO: 1324378 - RNA, 22 nt, Human
cauggcagcccuucuugccuuu

SEQ ID NO: 1324379 - RNA, 19 nt, Human
cuggacauguggcauggcc

SEQ ID NO: 1324380 - RNA, 22 nt, Human
gcaaguaugaaccacuuugagg

SEQ ID NO: 1324381 - RNA, 21 nt, Human
ggugcgguaucaucuaagaga

SEQ ID NO: 1324382 - RNA, 18 nt, Human
guccuacaagaagaaaag

SEQ ID NO: 1324383 - RNA, 25 nt, Human
uaagcauuguacuuagaauaaucuu

SEQ ID NO: 1324384 - RNA, 18 nt, Human
uaagccacugaugauuua

SEQ ID NO: 1324385 - RNA, 20 nt, Human
uaccccauucgcaucaggau

SEQ ID NO: 1324386 - RNA, 19 nt, Human
ucuaaaaaacauggcagcc

SEQ ID NO: 1324387 - RNA, 21 nt, Human
ugccacuggcgcuaccgcugg

SEQ ID NO: 1324388 - RNA, 18 nt, Human
uggauuucugaggaacau

SEQ ID NO: 1324389 - RNA, 21 nt, Human
uggcagcccuucuugccuuug

SEQ ID NO: 1324390 - RNA, 26 nt, Human
uggcagcccuucuugccuuuguuuuu

SEQ ID NO: 1324391 - RNA, 23 nt, Human
uggcauggccuucuguaccaacu

SEQ ID NO: 1324392 - RNA, 24 nt, Human
ugggugcgguaucaucuaagagaa

SEQ ID NO: 1324393 - RNA, 22 nt, Human
uguggcauggccuucuguacca

SEQ ID NO: 1324394 - RNA, 21 nt, Human
uucuuuaagccacugaugauu

SEQ ID NO: 1324395 - RNA, 25 nt, Human
aaaaaaaaacuccaggauccccagc

SEQ ID NO: 1324396 - RNA, 21 nt, Human
aaaaacuccaggauccccgcc

SEQ ID NO: 1324397 - RNA, 24 nt, Human
aaacugcaacucucuucagcacca

SEQ ID NO: 1324398 - RNA, 20 nt, Human
aaccuccaucucccuggguc

SEQ ID NO: 1324399 - RNA, 23 nt, Human
aaugcagggcugagguuuccaag

SEQ ID NO: 1324400 - RNA, 23 nt, Human
aaugguggcauccugccugacac

SEQ ID NO: 1324401 - RNA, 18 nt, Human
acagauguaagccaccgu

SEQ ID NO: 1324402 - RNA, 24 nt, Human
acagcccagagguccacuccccca

SEQ ID NO: 1324403 - RNA, 21 nt, Human
acaggcacccgucaccaugcc

SEQ ID NO: 1324404 - RNA, 20 nt, Human
acaggguuucaccacguuag

SEQ ID NO: 1324405 - RNA, 22 nt, Human
acugcaauaucaagguccaggc

SEQ ID NO: 1324406 - RNA, 19 nt, Human
agaaagcagaucaagaucu

SEQ ID NO: 1324407 - RNA, 24 nt, Human
agagagaagccagagugaagagaa

SEQ ID NO: 1324408 - RNA, 22 nt, Human
agagcccagugccuguugggga

SEQ ID NO: 1324409 - RNA, 27 nt, Human
agagcugggauucgaaacaagggccga

SEQ ID NO: 1324410 - RNA, 21 nt, Human
agagugaagagaaaaaaaaac

SEQ ID NO: 1324411 - RNA, 19 nt, Human
agagugcugggauuacaga

SEQ ID NO: 1324412 - RNA, 23 nt, Human
agauguaagccaccgugcccggc

SEQ ID NO: 1324413 - RNA, 18 nt, Human
agcaugguggggagagaa

SEQ ID NO: 1324414 - RNA, 20 nt, Human
agcgaggaaugcagggcuga

SEQ ID NO: 1324415 - RNA, 19 nt, Human
aggcuggagugcaguggca

SEQ ID NO: 1324416 - RNA, 18 nt, Human
agggaguagggguggggg

SEQ ID NO: 1324417 - RNA, 19 nt, Human
aggggcagcagggagggca

SEQ ID NO: 1324418 - RNA, 18 nt, Human
aguagcugggauuacagg

SEQ ID NO: 1324419 - RNA, 25 nt, Human
aguagcugggauuacaggcacccgu

SEQ ID NO: 1324420 - RNA, 21 nt, Human
agugaagagaaaaaaaaacuc

SEQ ID NO: 1324421 - RNA, 23 nt, Human
agugcaguggcacgcucuuggcu

SEQ ID NO: 1324422 - RNA, 24 nt, Human
agugcaguggcacgcucuuggcuc

SEQ ID NO: 1324423 - RNA, 24 nt, Human
auuuuuguauuuuuaguagagaca

SEQ ID NO: 1324424 - RNA, 24 nt, Human
caaaucccgacauacagaaaccag

SEQ ID NO: 1324425 - RNA, 21 nt, Human
caaccuccaucucccuggguc

SEQ ID NO: 1324426 - RNA, 22 nt, Human
caagccauucuccugccucagc

SEQ ID NO: 1324427 - RNA, 27 nt, Human
caccacguuagccaggcugaucuugaa

SEQ ID NO: 1324428 - RNA, 24 nt, Human
caccaugcccggcuaauuuuugua

SEQ ID NO: 1324429 - RNA, 23 nt, Human
cacguuagccaggcugaucuuga

SEQ ID NO: 1324430 - RNA, 24 nt, Human
cacguuagccaggcugaucuugaa

SEQ ID NO: 1324431 - RNA, 24 nt, Human
cagagugcugggauuacagaugua

SEQ ID NO: 1324432 - RNA, 22 nt, Human
caggauccccagccaggacucc

SEQ ID NO: 1324433 - RNA, 19 nt, Human
caggcacccaucugagcuc

SEQ ID NO: 1324434 - RNA, 24 nt, Human
caggguuucaccacguuagccagg

SEQ ID NO: 1324435 - RNA, 20 nt, Human
cagguagaagcauggugggg

SEQ ID NO: 1324436 - RNA, 23 nt, Human
cagguagccuaaggagaaagccc

SEQ ID NO: 1324437 - RNA, 20 nt, Human
caucucccuggguccaagcc

SEQ ID NO: 1324438 - RNA, 25 nt, Human
ccaagccauucuccugccucagccu

SEQ ID NO: 1324439 - RNA, 18 nt, Human
ccacaguugcuggaggag

SEQ ID NO: 1324440 - RNA, 22 nt, Human
ccacucccccaggcccugcacc

SEQ ID NO: 1324441 - RNA, 20 nt, Human
ccagagcagcagcugguggg

SEQ ID NO: 1324442 - RNA, 21 nt, Human
ccagagugcugggauuacaga

SEQ ID NO: 1324443 - RNA, 22 nt, Human
ccagagugcugggauuacagau

SEQ ID NO: 1324444 - RNA, 24 nt, Human
ccagagugcugggauuacagaugu

SEQ ID NO: 1324445 - RNA, 20 nt, Human
ccagcaucugugggagacag

SEQ ID NO: 1324446 - RNA, 19 nt, Human
cccccaggcccugcaccug

SEQ ID NO: 1324447 - RNA, 23 nt, Human
ccccccugccucucuccuguccc

SEQ ID NO: 1324448 - RNA, 18 nt, Human
cccccugccucucuccug

SEQ ID NO: 1324449 - RNA, 19 nt, Human
ccccgcccagaccaucucc

SEQ ID NO: 1324450 - RNA, 19 nt, Human
ccccucacagcccagaggu

SEQ ID NO: 1324451 - RNA, 19 nt, Human
ccccucaccuuuguggagg

SEQ ID NO: 1324452 - RNA, 18 nt, Human
ccccuuggagcgaggaau

SEQ ID NO: 1324453 - RNA, 23 nt, Human
cccgaguagcugggauuacaggc

SEQ ID NO: 1324454 - RNA, 24 nt, Human
cccgaguagcugggauuacaggca

SEQ ID NO: 1324455 - RNA, 21 nt, Human
cccugcaaccuccaucucccu

SEQ ID NO: 1324456 - RNA, 19 nt, Human
cccugccucucuccugucc

SEQ ID NO: 1324457 - RNA, 20 nt, Human
cccuggagagagaagccaga

SEQ ID NO: 1324458 - RNA, 21 nt, Human
cccuggguccaagccauucuc

SEQ ID NO: 1324459 - RNA, 22 nt, Human
cccuuggggcccagcuccaccc

SEQ ID NO: 1324460 - RNA, 23 nt, Human
ccgaguagcugggauuacaggca

SEQ ID NO: 1324461 - RNA, 19 nt, Human
ccucacagcccagaggucc

SEQ ID NO: 1324462 - RNA, 23 nt, Human
ccuccacccugacucccuucaaa

SEQ ID NO: 1324463 - RNA, 18 nt, Human
ccugacuucaggugaucc

SEQ ID NO: 1324464 - RNA, 24 nt, Human
ccugccucagccucccgaguagcu

SEQ ID NO: 1324465 - RNA, 26 nt, Human
ccuuguccccucaccuuuguggaggu

SEQ ID NO: 1324466 - RNA, 24 nt, Human
cgggggacccuggggaccuccuca

SEQ ID NO: 1324467 - RNA, 21 nt, Human
cucacagcccagagguccacu

SEQ ID NO: 1324468 - RNA, 24 nt, Human
cucagccucccgaguagcugggau

SEQ ID NO: 1324469 - RNA, 21 nt, Human
cucauagccccccacaggcac

SEQ ID NO: 1324470 - RNA, 20 nt, Human
cuccacccccgcccagaccu

SEQ ID NO: 1324471 - RNA, 23 nt, Human
cuccagccccagcagggaugguu

SEQ ID NO: 1324472 - RNA, 24 nt, Human
cucucuccuguccccucacagccc

SEQ ID NO: 1324473 - RNA, 23 nt, Human
cucucuugucgaccaggcuggag

SEQ ID NO: 1324474 - RNA, 18 nt, Human
cugcaaccuccaucuccc

SEQ ID NO: 1324475 - RNA, 24 nt, Human
cugccgcggccucccagagugcug

SEQ ID NO: 1324476 - RNA, 18 nt, Human
cugccucucuccuguccc

SEQ ID NO: 1324477 - RNA, 19 nt, Human
cuucugccgcggccuccca

SEQ ID NO: 1324478 - RNA, 21 nt, Human
cuucugccgcggccucccaga

SEQ ID NO: 1324479 - RNA, 19 nt, Human
cuuggcucccugcaaccuc

SEQ ID NO: 1324480 - RNA, 19 nt, Human
cuuuaguuccccccugccu

SEQ ID NO: 1324481 - RNA, 19 nt, Human
gacacaggggcagcaggga

SEQ ID NO: 1324482 - RNA, 23 nt, Human
gacgggggacccuggggaccucc

SEQ ID NO: 1324483 - RNA, 22 nt, Human
gacuucaggugauccuucugcc

SEQ ID NO: 1324484 - RNA, 19 nt, Human
gagcagcagcuggugggga

SEQ ID NO: 1324485 - RNA, 19 nt, Human
gagcagcagcuggugggga

SEQ ID NO: 1324486 - RNA, 21 nt, Human
gagcagcagcugguggggaag

SEQ ID NO: 1324487 - RNA, 23 nt, Human
gagcagcagcugguggggaagca

SEQ ID NO: 1324488 - RNA, 19 nt, Human
gaguagggguggggguguu

SEQ ID NO: 1324489 - RNA, 18 nt, Human
gauuacagauguaagcca

SEQ ID NO: 1324490 - RNA, 20 nt, Human
gauuacagauguaagccacc

SEQ ID NO: 1324491 - RNA, 24 nt, Human
gauuacaggcacccgucaccaugc

SEQ ID NO: 1324492 - RNA, 19 nt, Human
gcaauaucaagguccaggc

SEQ ID NO: 1324493 - RNA, 20 nt, Human
gcagggcugagguuuccaag

SEQ ID NO: 1324494 - RNA, 22 nt, Human
gccaccgugcccggccuucuau

SEQ ID NO: 1324495 - RNA, 22 nt, Human
gcccggcuaauuuuuguauuuu

SEQ ID NO: 1324496 - RNA, 22 nt, Human
gcccuuguccccucaccuuugu

SEQ ID NO: 1324497 - RNA, 25 nt, Human
gcccuuguccccucaccuuugugga

SEQ ID NO: 1324498 - RNA, 20 nt, Human
gccucagccucccgaguagc

SEQ ID NO: 1324499 - RNA, 21 nt, Human
ggaggcuugaggaguggcagg

SEQ ID NO: 1324500 - RNA, 24 nt, Human
ggauuacagauguaagccaccgug

SEQ ID NO: 1324501 - RNA, 22 nt, Human
ggcagcagggagggcaggccag

SEQ ID NO: 1324502 - RNA, 22 nt, Human
ggccagcaucugugggagacag

SEQ ID NO: 1324503 - RNA, 24 nt, Human
ggcccgacgggggacccuggggac

SEQ ID NO: 1324504 - RNA, 24 nt, Human
ggcugaucuugaacuccugacuuc

SEQ ID NO: 1324505 - RNA, 18 nt, Human
gggaagcaaagagcccag

SEQ ID NO: 1324506 - RNA, 20 nt, Human
gggaagcaaagagcccagug

SEQ ID NO: 1324507 - RNA, 25 nt, Human
gggaccuccucauagccccccacag

SEQ ID NO: 1324508 - RNA, 24 nt, Human
gggaggcuugaggaguggcaggag

SEQ ID NO: 1324509 - RNA, 19 nt, Human
gggcagcagggagggcagg

SEQ ID NO: 1324510 - RNA, 22 nt, Human
gggccagagcugggauucgaaa

SEQ ID NO: 1324511 - RNA, 18 nt, Human
gggcccagcuccaccccc

SEQ ID NO: 1324512 - RNA, 20 nt, Human
gggggacccuggggaccucc

SEQ ID NO: 1324513 - RNA, 19 nt, Human
gguagaagcauggugggga

SEQ ID NO: 1324514 - RNA, 19 nt, Human
ggugguguggcagacacag

SEQ ID NO: 1324515 - RNA, 21 nt, Human
ggugguguggcagacacaggg

SEQ ID NO: 1324516 - RNA, 18 nt, Human
guagcugggauuacaggc

SEQ ID NO: 1324517 - RNA, 19 nt, Human
gucgaccaggcuggagugc

SEQ ID NO: 1324518 - RNA, 18 nt, Human
uaagggccagagcuggga

SEQ ID NO: 1324519 - RNA, 24 nt, Human
uaauuuuuguauuuuuaguagaga

SEQ ID NO: 1324520 - RNA, 23 nt, Human
uacagauguaagccaccgugccc

SEQ ID NO: 1324521 - RNA, 23 nt, Human
uacaggcacccgucaccaugccc

SEQ ID NO: 1324522 - RNA, 19 nt, Human
uagaagcaugguggggaga

SEQ ID NO: 1324523 - RNA, 22 nt, Human
uagagacaggguuucaccacgu

SEQ ID NO: 1324524 - RNA, 23 nt, Human
uagaucuccuccacccugacucc

SEQ ID NO: 1324525 - RNA, 24 nt, Human
uagccaggcugaucuugaacuccu

SEQ ID NO: 1324526 - RNA, 19 nt, Human
uaguagagacaggguuuca

SEQ ID NO: 1324527 - RNA, 26 nt, Human
uaguagagacaggguuucaccacguu

SEQ ID NO: 1324528 - RNA, 20 nt, Human
ucagccucccgaguagcugg

SEQ ID NO: 1324529 - RNA, 18 nt, Human
uccaagccauucuccugc

SEQ ID NO: 1324530 - RNA, 19 nt, Human
uccacaguugcuggaggag

SEQ ID NO: 1324531 - RNA, 18 nt, Human
ucccagagugcugggauu

SEQ ID NO: 1324532 - RNA, 23 nt, Human
ucccagagugcugggauuacaga

SEQ ID NO: 1324533 - RNA, 24 nt, Human
uccccucacagcccagagguccac

SEQ ID NO: 1324534 - RNA, 19 nt, Human
uccccucaccuuuguggag

SEQ ID NO: 1324535 - RNA, 20 nt, Human
ucccgacuccagccccagca

SEQ ID NO: 1324536 - RNA, 24 nt, Human
ucccgaguagcugggauuacaggc

SEQ ID NO: 1324537 - RNA, 22 nt, Human
ucccugcaaccuccaucucccu

SEQ ID NO: 1324538 - RNA, 25 nt, Human
ucccugcaaccuccaucucccuggg

SEQ ID NO: 1324539 - RNA, 22 nt, Human
ucccuggguccaagccauucuc

SEQ ID NO: 1324540 - RNA, 18 nt, Human
ucgaccaggcuggagugc

SEQ ID NO: 1324541 - RNA, 22 nt, Human
ucuagagcccuggcccuugucc

SEQ ID NO: 1324542 - RNA, 20 nt, Human
ucuauagaucuccuccaccc

SEQ ID NO: 1324543 - RNA, 24 nt, Human
ucuccugccucagccucccgagua

SEQ ID NO: 1324544 - RNA, 22 nt, Human
ucucucuugucgaccaggcugg

SEQ ID NO: 1324545 - RNA, 23 nt, Human
ucucucuugucgaccaggcugga

SEQ ID NO: 1324546 - RNA, 23 nt, Human
ucucuugucgaccaggcuggagu

SEQ ID NO: 1324547 - RNA, 18 nt, Human
ucugugggagacagguag

SEQ ID NO: 1324548 - RNA, 24 nt, Human
ucuucagcaccagagcagcagcug

SEQ ID NO: 1324549 - RNA, 23 nt, Human
ucuugaacuccugacuucaggug

SEQ ID NO: 1324550 - RNA, 18 nt, Human
ucuugucgaccaggcugg

SEQ ID NO: 1324551 - RNA, 23 nt, Human
ugacuucaggugauccuucugcc

SEQ ID NO: 1324552 - RNA, 19 nt, Human
ugaggacaacggcagggug

SEQ ID NO: 1324553 - RNA, 19 nt, Human
ugauaagggccagagcugg

SEQ ID NO: 1324554 - RNA, 22 nt, Human
ugcaguggcacgcucuuggcuc

SEQ ID NO: 1324555 - RNA, 24 nt, Human
ugcccggcuaauuuuuguauuuuu

SEQ ID NO: 1324556 - RNA, 24 nt, Human
ugccucagccucccgaguagcugg

SEQ ID NO: 1324557 - RNA, 18 nt, Human
ugcgcucagcaguggagc

SEQ ID NO: 1324558 - RNA, 18 nt, Human
ugcugggauuacagaugu

SEQ ID NO: 1324559 - RNA, 24 nt, Human
ugcugggauuacagauguaagcca

SEQ ID NO: 1324560 - RNA, 19 nt, Human
uggagggugggggcgggag

SEQ ID NO: 1324561 - RNA, 21 nt, Human
uggagggugggggcgggagcg

SEQ ID NO: 1324562 - RNA, 23 nt, Human
uggagugcaguggcacgcucuug

SEQ ID NO: 1324563 - RNA, 24 nt, Human
uggagugcaguggcacgcucuugg

SEQ ID NO: 1324564 - RNA, 19 nt, Human
uggcagacacaggggcagc

SEQ ID NO: 1324565 - RNA, 22 nt, Human
ugggagacagguagccuaagga

SEQ ID NO: 1324566 - RNA, 22 nt, Human
ugggaggcuugaggaguggcag

SEQ ID NO: 1324567 - RNA, 23 nt, Human
ugggaggcuugaggaguggcagg

SEQ ID NO: 1324568 - RNA, 21 nt, Human
ugggauuacagauguaagcca

SEQ ID NO: 1324569 - RNA, 22 nt, Human
ugggauuacagauguaagccac

SEQ ID NO: 1324570 - RNA, 23 nt, Human
ugggauuacagauguaagccacc

SEQ ID NO: 1324571 - RNA, 23 nt, Human
ugggauuacagauguaagccacc

SEQ ID NO: 1324572 - RNA, 24 nt, Human
ugggauuacagauguaagccaccg

SEQ ID NO: 1324573 - RNA, 22 nt, Human
ugggauuacaggcacccgucac

SEQ ID NO: 1324574 - RNA, 24 nt, Human
ugggauuacaggcacccgucacca

SEQ ID NO: 1324575 - RNA, 25 nt, Human
ugggauuacaggcacccgucaccau

SEQ ID NO: 1324576 - RNA, 23 nt, Human
ugggcuuuaguuccccccugccu

SEQ ID NO: 1324577 - RNA, 24 nt, Human
uggggguguucaguaccuccccuc

SEQ ID NO: 1324578 - RNA, 20 nt, Human
uggguccaagccauucuccu

SEQ ID NO: 1324579 - RNA, 19 nt, Human
ugguguggcagacacaggg

SEQ ID NO: 1324580 - RNA, 21 nt, Human
ugucgaccaggcuggagugca

SEQ ID NO: 1324581 - RNA, 24 nt, Human
uguggaggugggauuuagcuggag

SEQ ID NO: 1324582 - RNA, 19 nt, Human
uguucaguaccuccccucc

SEQ ID NO: 1324583 - RNA, 18 nt, Human
uuaguagagacaggguuu

SEQ ID NO: 1324584 - RNA, 24 nt, Human
uucagccuguccugucugccccuu

SEQ ID NO: 1324585 - RNA, 19 nt, Human
uucaggugauccuucugcc

SEQ ID NO: 1324586 - RNA, 23 nt, Human
uugcuauuuucagccuguccugu

SEQ ID NO: 1324587 - RNA, 21 nt, Human
uuggagggugggggcgggagc

SEQ ID NO: 1324588 - RNA, 24 nt, Human
uuuuuaguagagacaggguuucac

SEQ ID NO: 1324589 - RNA, 20 nt, Human
uuuuuguauuuuuaguagag

SEQ ID NO: 1324590 - RNA, 20 nt, Human
cauuuucuucugccacuugu

SEQ ID NO: 1324591 - RNA, 22 nt, Human
ucuucugccacuugucuuugac

SEQ ID NO: 1324592 - RNA, 23 nt, Human
ugucuuugacacgaugccuucag

SEQ ID NO: 1324593 - RNA, 21 nt, Human
agacaagccccgcccgccccc

SEQ ID NO: 1324594 - RNA, 21 nt, Human
ccccaccuuccucugccccuc

SEQ ID NO: 1324595 - RNA, 24 nt, Human
ccccgcccgcccccaccuuccucu

SEQ ID NO: 1324596 - RNA, 24 nt, Human
ccccgccucccccgccuuccuccu

SEQ ID NO: 1324597 - RNA, 19 nt, Human
ccccgccuuccuccucucc

SEQ ID NO: 1324598 - RNA, 20 nt, Human
ccccgccuuccuccucuccu

SEQ ID NO: 1324599 - RNA, 19 nt, Human
ccccucuggccccgccucc

SEQ ID NO: 1324600 - RNA, 22 nt, Human
cccucuggccccgccucccccg

SEQ ID NO: 1324601 - RNA, 21 nt, Human
ccgcagacaagccccgcccgc

SEQ ID NO: 1324602 - RNA, 25 nt, Human
ccgcagacaagccccgcccgccccc

SEQ ID NO: 1324603 - RNA, 19 nt, Human
ccucccccgccuuccuccu

SEQ ID NO: 1324604 - RNA, 26 nt, Human
ccugggccaucccgcagacaagcccc

SEQ ID NO: 1324605 - RNA, 18 nt, Human
ccuuccuccucuccuccc

SEQ ID NO: 1324606 - RNA, 20 nt, Human
cucuccucccucccgcgaag

SEQ ID NO: 1324607 - RNA, 21 nt, Human
gccccgccucccccgccuucc

SEQ ID NO: 1324608 - RNA, 18 nt, Human
gccucccccgccuuccuc

SEQ ID NO: 1324609 - RNA, 21 nt, Human
ggccccgccucccccgccuuc

SEQ ID NO: 1324610 - RNA, 26 nt, Human
ggccccgccucccccgccuuccuccc

SEQ ID NO: 1324611 - RNA, 18 nt, Human
ucccccgccuuccuccuc

SEQ ID NO: 1324612 - RNA, 22 nt, Human
uccuccucuccucccucccgcg

SEQ ID NO: 1324613 - RNA, 24 nt, Human
uggccccgccucccccgccuuccu

SEQ ID NO: 1324614 - RNA, 24 nt, Human
uuccuccucuccucccucccgcga

SEQ ID NO: 1324615 - RNA, 23 nt, Human
cacugaaguguugcucccucaaa

SEQ ID NO: 1324616 - RNA, 22 nt, Human
cucaaacuuccuguuccagcag

SEQ ID NO: 1324617 - RNA, 18 nt, Human
uugcucccucaaacuucc

SEQ ID NO: 1324618 - RNA, 24 nt, Human
uugcucccucaaacuuccuguucc

SEQ ID NO: 1324619 - RNA, 21 nt, Human
aaagcuuuuucagacccacuc

SEQ ID NO: 1324620 - RNA, 20 nt, Human
aagauauuuuuaucccugug

SEQ ID NO: 1324621 - RNA, 21 nt, Human
aagugagugagaggggucugg

SEQ ID NO: 1324622 - RNA, 22 nt, Human
aggagauuuuuuuuuuucucuc

SEQ ID NO: 1324623 - RNA, 18 nt, Human
aggggucuggauucuguu

SEQ ID NO: 1324624 - RNA, 21 nt, Human
cccacaaagcccaggggaccg

SEQ ID NO: 1324625 - RNA, 27 nt, Human
cccccuggggacaaggcucuaagaggc

SEQ ID NO: 1324626 - RNA, 20 nt, Human
ccccuggggacaaggcucua

SEQ ID NO: 1324627 - RNA, 23 nt, Human
ccccuggggacaaggcucuaaga

SEQ ID NO: 1324628 - RNA, 22 nt, Human
ccuguccucaaagcccccuggg

SEQ ID NO: 1324629 - RNA, 19 nt, Human
cugcaggcugaguccuguc

SEQ ID NO: 1324630 - RNA, 20 nt, Human
cuggauucuguuaggcgcug

SEQ ID NO: 1324631 - RNA, 22 nt, Human
cugugccccaaauucuguuuug

SEQ ID NO: 1324632 - RNA, 18 nt, Human
gagauuuuuuuuuuucuc

SEQ ID NO: 1324633 - RNA, 23 nt, Human
gccagucccugccccggggacac

SEQ ID NO: 1324634 - RNA, 24 nt, Human
gcccacaaagcccaggggaccgcc

SEQ ID NO: 1324635 - RNA, 21 nt, Human
gcucuaagaggcggaagugag

SEQ ID NO: 1324636 - RNA, 21 nt, Human
ggcaaaaacaugcagaaggaa

SEQ ID NO: 1324637 - RNA, 21 nt, Human
ggggacaaggcucuaagaggc

SEQ ID NO: 1324638 - RNA, 27 nt, Human
uaccaggggcccugcaggcugaguccu

SEQ ID NO: 1324639 - RNA, 19 nt, Human
uauuucaaccaugaucagu

SEQ ID NO: 1324640 - RNA, 19 nt, Human
uccaguuccuagggguaag

SEQ ID NO: 1324641 - RNA, 26 nt, Human
uccuagggguaagauauuucaacccc

SEQ ID NO: 1324642 - RNA, 24 nt, Human
ucuggauucuguuaggcgcugggg

SEQ ID NO: 1324643 - RNA, 19 nt, Human
ugaaaagaugcugugcccc

SEQ ID NO: 1324644 - RNA, 23 nt, Human
ugaaaauuucaauuccuuuggga

SEQ ID NO: 1324645 - RNA, 22 nt, Human
ugaguccuguccucaaagcccc

SEQ ID NO: 1324646 - RNA, 25 nt, Human
ugcagaaggaagucaacauaacugg

SEQ ID NO: 1324647 - RNA, 19 nt, Human
uggcaaaaacaugcagaag

SEQ ID NO: 1324648 - RNA, 22 nt, Human
uguuuuggcaaaaacaugcaga

SEQ ID NO: 1324649 - RNA, 23 nt, Human
uucaaaagauggcacuuuccagg

SEQ ID NO: 1324650 - RNA, 20 nt, Human
uucaaaaguaaaaagcuaau

SEQ ID NO: 1324651 - RNA, 18 nt, Human
uuggacccuauaaauacc

SEQ ID NO: 1324652 - RNA, 23 nt, Human
uuuuucagacccacucaggcaca

SEQ ID NO: 1324653 - RNA, 18 nt, Human
uuuuuucucucucaaagc

SEQ ID NO: 1324654 - RNA, 18 nt, Human
acagggcauccuucaaag

SEQ ID NO: 1324655 - RNA, 19 nt, Human
acucuaaaagaugacaaga

SEQ ID NO: 1324656 - RNA, 19 nt, Human
augacaagacagcuccccu

SEQ ID NO: 1324657 - RNA, 20 nt, Human
ccccucagugagacccuggc

SEQ ID NO: 1324658 - RNA, 22 nt, Human
ccccucagugagacccuggccu

SEQ ID NO: 1324659 - RNA, 22 nt, Human
uggcacugaaugaugaucuaca

SEQ ID NO: 1324660 - RNA, 22 nt, Human
aagcgccggaaucuccucagcu

SEQ ID NO: 1324661 - RNA, 24 nt, Human
caaacgagcacacaagcagcacca

SEQ ID NO: 1324662 - RNA, 25 nt, Human
ccagguccgcaccaaacgagcacac

SEQ ID NO: 1324663 - RNA, 19 nt, Human
cuggaguaaagaagcaggu

SEQ ID NO: 1324664 - RNA, 18 nt, Human
gaguaaagaagcagguuc

SEQ ID NO: 1324665 - RNA, 21 nt, Human
gggaagggggaaaugaaagac

SEQ ID NO: 1324666 - RNA, 21 nt, Human
ucagcugccguuucacaaaag

SEQ ID NO: 1324667 - RNA, 20 nt, Human
ucuggaguaaagaagcaggu

SEQ ID NO: 1324668 - RNA, 19 nt, Human
aagagaaauacaaggaguc

SEQ ID NO: 1324669 - RNA, 21 nt, Human
acaacccucaggacaugacug

SEQ ID NO: 1324670 - RNA, 20 nt, Human
acaaggagucauaagcagag

SEQ ID NO: 1324671 - RNA, 20 nt, Human
acaaggagucauaagcagag

SEQ ID NO: 1324672 - RNA, 20 nt, Human
acauagaaugacacacaaga

SEQ ID NO: 1324673 - RNA, 19 nt, Human
agggagcgccgcuuccacc

SEQ ID NO: 1324674 - RNA, 22 nt, Human
auuuagccaucacauuuuccag

SEQ ID NO: 1324675 - RNA, 19 nt, Human
cagagagugcagguaagca

SEQ ID NO: 1324676 - RNA, 20 nt, Human
cauacaacuucaauuccacc

SEQ ID NO: 1324677 - RNA, 19 nt, Human
cauuacagauggguuuuuc

SEQ ID NO: 1324678 - RNA, 19 nt, Human
ccaccguaaugucauugcc

SEQ ID NO: 1324679 - RNA, 26 nt, Human
cccucaggacaugacuguuuccucca

SEQ ID NO: 1324680 - RNA, 21 nt, Human
ccucagguuauugaagaacuc

SEQ ID NO: 1324681 - RNA, 23 nt, Human
cgccgcuuccacccucaggcuca

SEQ ID NO: 1324682 - RNA, 25 nt, Human
cgugcuuacucucuugcagugacca

SEQ ID NO: 1324683 - RNA, 20 nt, Human
cucuuuucuuccucuuuauu

SEQ ID NO: 1324684 - RNA, 25 nt, Human
cugcacugcccccuccugagacaua

SEQ ID NO: 1324685 - RNA, 22 nt, Human
cuuuucuuccucuuuauucucu

SEQ ID NO: 1324686 - RNA, 24 nt, Human
gcuccugaaucauuguuucugacu

SEQ ID NO: 1324687 - RNA, 19 nt, Human
uaaaugauuuucuccugca

SEQ ID NO: 1324688 - RNA, 21 nt, Human
uaagcagagggcuaguaagug

SEQ ID NO: 1324689 - RNA, 18 nt, Human
uauugaagaacucuucuu

SEQ ID NO: 1324690 - RNA, 20 nt, Human
uccucuuuauucucucucau

SEQ ID NO: 1324691 - RNA, 21 nt, Human
ucucacagauuuucccugaag

SEQ ID NO: 1324692 - RNA, 22 nt, Human
ugagacauagaaugacacacaa

SEQ ID NO: 1324693 - RNA, 23 nt, Human
ugagcguuaucaccuuucuuugu

SEQ ID NO: 1324694 - RNA, 24 nt, Human
ugcuccugaaucauuguuucugac

SEQ ID NO: 1324695 - RNA, 24 nt, Human
uggguuuuucacuuccaacagcuu

SEQ ID NO: 1324696 - RNA, 22 nt, Human
uuccuagggauccacacuucag

SEQ ID NO: 1324697 - RNA, 21 nt, Human
uucuccugcauacaacuucaa

SEQ ID NO: 1324698 - RNA, 19 nt, Human
uuucacuuccaacagcuug

SEQ ID NO: 1324699 - RNA, 23 nt, Human
uuuucuuccucuuuauucucucu

SEQ ID NO: 1324700 - RNA, 21 nt, Human
acugcagcugaacccccagcu

SEQ ID NO: 1324701 - RNA, 23 nt, Human
agaccagauccuguucauuuucc

SEQ ID NO: 1324702 - RNA, 21 nt, Human
caacugcagcugaacccccag

SEQ ID NO: 1324703 - RNA, 22 nt, Human
caacugcagcugaacccccagc

SEQ ID NO: 1324704 - RNA, 20 nt, Human
cagaugauacacccaagguc

SEQ ID NO: 1324705 - RNA, 20 nt, Human
cagcagccguggcugcuuca

SEQ ID NO: 1324706 - RNA, 23 nt, Human
cagcugaacccccagcuccgguu

SEQ ID NO: 1324707 - RNA, 21 nt, Human
ccauccaaguugaaaagguga

SEQ ID NO: 1324708 - RNA, 22 nt, Human
ccauccaaguugaaaaggugag

SEQ ID NO: 1324709 - RNA, 19 nt, Human
ccuguacucaggagcagag

SEQ ID NO: 1324710 - RNA, 22 nt, Human
ccuguacucaggagcagaggac

SEQ ID NO: 1324711 - RNA, 22 nt, Human
cucaccccacacgccaguuuac

SEQ ID NO: 1324712 - RNA, 19 nt, Human
gccgagacccuguacucag

SEQ ID NO: 1324713 - RNA, 19 nt, Human
gcugaacccccagcuccgg

SEQ ID NO: 1324714 - RNA, 19 nt, Human
gcugaacccccagcuccgg

SEQ ID NO: 1324715 - RNA, 21 nt, Human
gcuugagaccagauccuguuc

SEQ ID NO: 1324716 - RNA, 20 nt, Human
ggagacacagcaucccucgg

SEQ ID NO: 1324717 - RNA, 24 nt, Human
gucgagcuccaacugcagcugaac

SEQ ID NO: 1324718 - RNA, 24 nt, Human
uacucaggagcagaggacagcgug

SEQ ID NO: 1324719 - RNA, 21 nt, Human
ucagccagaggagcucucugu

SEQ ID NO: 1324720 - RNA, 23 nt, Human
uccgguuccucacagacucggca

SEQ ID NO: 1324721 - RNA, 23 nt, Human
ucgagcuccaacugcagcugaac

SEQ ID NO: 1324722 - RNA, 20 nt, Human
ucucuguggcugugcucacc

SEQ ID NO: 1324723 - RNA, 26 nt, Human
ugaacccccagcuccgguuccucaca

SEQ ID NO: 1324724 - RNA, 20 nt, Human
ugggguugagcccauccaag

SEQ ID NO: 1324725 - RNA, 24 nt, Human
ugggguugagcccauccaaguuga

SEQ ID NO: 1324726 - RNA, 20 nt, Human
ugguuggagcucaggaaggc

SEQ ID NO: 1324727 - RNA, 23 nt, Human
aaagugcccucuaccccagccua

SEQ ID NO: 1324728 - RNA, 19 nt, Human
aacccagacuaccugaaag

SEQ ID NO: 1324729 - RNA, 21 nt, Human
aaccccuuccccgcugcccca

SEQ ID NO: 1324730 - RNA, 23 nt, Human
aagugccuuccaaaagugccccc

SEQ ID NO: 1324731 - RNA, 22 nt, Human
acccggaauucccacaacgcac

SEQ ID NO: 1324732 - RNA, 21 nt, Human
agaaagacacagguugcagaa

SEQ ID NO: 1324733 - RNA, 21 nt, Human
agaaccccuuccccgcugccc

SEQ ID NO: 1324734 - RNA, 23 nt, Human
agacacagguugcagaaaaaaca

SEQ ID NO: 1324735 - RNA, 18 nt, Human
agaguucuucagaacccc

SEQ ID NO: 1324736 - RNA, 22 nt, Human
agccucggcacccccuccccaa

SEQ ID NO: 1324737 - RNA, 22 nt, Human
aggcaggagaagugccuuccaa

SEQ ID NO: 1324738 - RNA, 24 nt, Human
aggcaggagaagugccuuccaaaa

SEQ ID NO: 1324739 - RNA, 23 nt, Human
aggggaagggggaaacagcccag

SEQ ID NO: 1324740 - RNA, 25 nt, Human
aggggaagggggaaacagcccaggg

SEQ ID NO: 1324741 - RNA, 21 nt, Human
agguauuuggggguggaaaug

SEQ ID NO: 1324742 - RNA, 25 nt, Human
cacagcuaggcccaguuccccaccc

SEQ ID NO: 1324743 - RNA, 18 nt, Human
cacccccuccccaaagac

SEQ ID NO: 1324744 - RNA, 25 nt, Human
caccuguccaugcucugaguccugc

SEQ ID NO: 1324745 - RNA, 22 nt, Human
cagaguucuucagaaccccuuc

SEQ ID NO: 1324746 - RNA, 26 nt, Human
cagccuauuccuucagccaguaccca

SEQ ID NO: 1324747 - RNA, 21 nt, Human
cagccucuggcgccuccgccc

SEQ ID NO: 1324748 - RNA, 23 nt, Human
caggacucuuaacuaaaacauua

SEQ ID NO: 1324749 - RNA, 24 nt, Human
caggugccuccuggggagguauuu

SEQ ID NO: 1324750 - RNA, 24 nt, Human
ccaaagacccuccccaggggcugc

SEQ ID NO: 1324751 - RNA, 20 nt, Human
ccaugcucugaguccugcag

SEQ ID NO: 1324752 - RNA, 23 nt, Human
cccaagacccuaugcaagacgag

SEQ ID NO: 1324753 - RNA, 21 nt, Human
ccccaaagacccuccccaggg

SEQ ID NO: 1324754 - RNA, 24 nt, Human
ccccaagacccuaugcaagacgag

SEQ ID NO: 1324755 - RNA, 18 nt, Human
ccccgcugccccaagacc

SEQ ID NO: 1324756 - RNA, 22 nt, Human
cccuccccaaagacccucccca

SEQ ID NO: 1324757 - RNA, 19 nt, Human
ccuccaacccagacuaccu

SEQ ID NO: 1324758 - RNA, 22 nt, Human
ccuccaacccagacuaccugaa

SEQ ID NO: 1324759 - RNA, 18 nt, Human
ccuccaacccagacuacu

SEQ ID NO: 1324760 - RNA, 23 nt, Human
ccuuccaaaagugcccucuaccc

SEQ ID NO: 1324761 - RNA, 18 nt, Human
ccuuggucauggcucugc

SEQ ID NO: 1324762 - RNA, 19 nt, Human
cggaauucccacaacgcac

SEQ ID NO: 1324763 - RNA, 22 nt, Human
cggaauucccacaacgcacucc

SEQ ID NO: 1324764 - RNA, 26 nt, Human
cggcacccccuccccaaagacccucc

SEQ ID NO: 1324765 - RNA, 18 nt, Human
cuaggcccaguuccccac

SEQ ID NO: 1324766 - RNA, 20 nt, Human
cuccccaaagacccucccca

SEQ ID NO: 1324767 - RNA, 22 nt, Human
cuccccgcuuagucauuggaga

SEQ ID NO: 1324768 - RNA, 18 nt, Human
cucggcacccccucccca

SEQ ID NO: 1324769 - RNA, 19 nt, Human
cucggcacccccuccccaa

SEQ ID NO: 1324770 - RNA, 21 nt, Human
gaagugccuuccaaaagugcc

SEQ ID NO: 1324771 - RNA, 21 nt, Human
gacacgacuggcugcaccccc

SEQ ID NO: 1324772 - RNA, 18 nt, Human
gcacaaagggccuguggg

SEQ ID NO: 1324773 - RNA, 18 nt, Human
gcacccccuccccaaaga

SEQ ID NO: 1324774 - RNA, 22 nt, Human
gcccauggugccuggagagugu

SEQ ID NO: 1324775 - RNA, 20 nt, Human
gccucggcacccccucccca

SEQ ID NO: 1324776 - RNA, 20 nt, Human
ggaagggggaaacagcccag

SEQ ID NO: 1324777 - RNA, 18 nt, Human
ggaauucccacaacgcac

SEQ ID NO: 1324778 - RNA, 20 nt, Human
ggaauucccacaacgcacuc

SEQ ID NO: 1324779 - RNA, 19 nt, Human
ggagaguguacacggcccu

SEQ ID NO: 1324780 - RNA, 19 nt, Human
ggcccaguuccccaccccc

SEQ ID NO: 1324781 - RNA, 21 nt, Human
ggggaagggggaaacagccca

SEQ ID NO: 1324782 - RNA, 19 nt, Human
gggguggaaauggggcaca

SEQ ID NO: 1324783 - RNA, 19 nt, Human
guccucuuggccagaguuc

SEQ ID NO: 1324784 - RNA, 21 nt, Human
guucuucagaaccccuucccc

SEQ ID NO: 1324785 - RNA, 19 nt, Human
uacccagguccccuugguc

SEQ ID NO: 1324786 - RNA, 22 nt, Human
uaccccagccuauuccuucagc

SEQ ID NO: 1324787 - RNA, 26 nt, Human
uaggauguccgcaucuccccgcuuag

SEQ ID NO: 1324788 - RNA, 22 nt, Human
uaggcucccgggaggcaggaga

SEQ ID NO: 1324789 - RNA, 20 nt, Human
ucagaggugcaacggaggcc

SEQ ID NO: 1324790 - RNA, 24 nt, Human
uccccaaagacccuccccaggggc

SEQ ID NO: 1324791 - RNA, 22 nt, Human
uccgcaucuccccgcuuaguca

SEQ ID NO: 1324792 - RNA, 18 nt, Human
uccucguccucuuggcca

SEQ ID NO: 1324793 - RNA, 20 nt, Human
uccugcagccaacaggacuc

SEQ ID NO: 1324794 - RNA, 23 nt, Human
ucuuggccagaguucuucagaac

SEQ ID NO: 1324795 - RNA, 20 nt, Human
ugcacaaagggccugugggg

SEQ ID NO: 1324796 - RNA, 21 nt, Human
ugcacaaagggccuguggggg

SEQ ID NO: 1324797 - RNA, 24 nt, Human
ugcagaaaaaacauagcccuugcc

SEQ ID NO: 1324798 - RNA, 25 nt, Human
ugcccugagggucuccacccggaau

SEQ ID NO: 1324799 - RNA, 18 nt, Human
ugccuuggcguucaaggc

SEQ ID NO: 1324800 - RNA, 20 nt, Human
uggaggccugagaaggagcu

SEQ ID NO: 1324801 - RNA, 18 nt, Human
uggagugagaucuaggcu

SEQ ID NO: 1324802 - RNA, 19 nt, Human
uggagugagaucuaggcuc

SEQ ID NO: 1324803 - RNA, 23 nt, Human
uguccaugcucugaguccugcag

SEQ ID NO: 1324804 - RNA, 21 nt, Human
uuccccgcugccccaagaccc

SEQ ID NO: 1324805 - RNA, 23 nt, Human
uuggucauggcucugccuccucc

SEQ ID NO: 1324806 - RNA, 18 nt, Human
uuuaaggggaagggggaa

SEQ ID NO: 1324807 - RNA, 24 nt, Human
aagcuuugaauugcuuacaccgcc

SEQ ID NO: 1324808 - RNA, 20 nt, Human
acacaacugaauauugugcu

SEQ ID NO: 1324809 - RNA, 22 nt, Human
acaccgccaccaccaccaaacc

SEQ ID NO: 1324810 - RNA, 21 nt, Human
acacugcagcagacagagguu

SEQ ID NO: 1324811 - RNA, 18 nt, Human
caacucgcggccacccag

SEQ ID NO: 1324812 - RNA, 20 nt, Human
caaguugucuaucaaacacu

SEQ ID NO: 1324813 - RNA, 20 nt, Human
caccaaaccaagcagccccc

SEQ ID NO: 1324814 - RNA, 23 nt, Human
caccaaaccaagcagcccccgac

SEQ ID NO: 1324815 - RNA, 21 nt, Human
caccaccaaaccaagcagccc

SEQ ID NO: 1324816 - RNA, 22 nt, Human
caccaccaaaccaagcagcccc

SEQ ID NO: 1324817 - RNA, 23 nt, Human
caccaccaaaccaagcagccccc

SEQ ID NO: 1324818 - RNA, 18 nt, Human
caccaccaccaaaccaag

SEQ ID NO: 1324819 - RNA, 22 nt, Human
caccgccaccaccaccaaacca

SEQ ID NO: 1324820 - RNA, 23 nt, Human
caccgccaccaccaccaaaccaa

SEQ ID NO: 1324821 - RNA, 22 nt, Human
cagcgaguguaucucgcacucc

SEQ ID NO: 1324822 - RNA, 18 nt, Human
cccagcgccacgcgugac

SEQ ID NO: 1324823 - RNA, 23 nt, Human
cccgacggucgugcagucaggcc

SEQ ID NO: 1324824 - RNA, 19 nt, Human
ccgccaccaccaccaaacc

SEQ ID NO: 1324825 - RNA, 21 nt, Human
ccgccaccaccaccaaaccaa

SEQ ID NO: 1324826 - RNA, 23 nt, Human
ccgccaccaccaccaaaccaagc

SEQ ID NO: 1324827 - RNA, 22 nt, Human
ccucgguacugccuuguugcuc

SEQ ID NO: 1324828 - RNA, 18 nt, Human
cggggcgaccucggggcg

SEQ ID NO: 1324829 - RNA, 18 nt, Human
cucgcacuccuuccaaaa

SEQ ID NO: 1324830 - RNA, 23 nt, Human
gaauugcuuacaccgccaccacc

SEQ ID NO: 1324831 - RNA, 19 nt, Human
gaccucggggcggucuggc

SEQ ID NO: 1324832 - RNA, 18 nt, Human
gccuuuggagaacucugg

SEQ ID NO: 1324833 - RNA, 18 nt, Human
gccuuuggagaacucugg

SEQ ID NO: 1324834 - RNA, 19 nt, Human
gcucucugucagcucuuga

SEQ ID NO: 1324835 - RNA, 21 nt, Human
ggccuuuggagaacucuggcc

SEQ ID NO: 1324836 - RNA, 23 nt, Human
ggggcggucuggcacccgggaag

SEQ ID NO: 1324837 - RNA, 23 nt, Human
uacaccgccaccaccaccaaacc

SEQ ID NO: 1324838 - RNA, 27 nt, Human
uacaccgccaccaccaccaaaccaagc

SEQ ID NO: 1324839 - RNA, 18 nt, Human
uaucaaacacugcagcag

SEQ ID NO: 1324840 - RNA, 21 nt, Human
ucaaagcuuugaauugcuuac

SEQ ID NO: 1324841 - RNA, 18 nt, Human
ucaucagaaauggggccu

SEQ ID NO: 1324842 - RNA, 24 nt, Human
ugcagcgaguguaucucgcacucc

SEQ ID NO: 1324843 - RNA, 22 nt, Human
ugcagucaggcccgggagcgcc

SEQ ID NO: 1324844 - RNA, 26 nt, Human
ugccuuguugcucucugucagcucuu

SEQ ID NO: 1324845 - RNA, 22 nt, Human
uugcagcgaguguaucucgcac

SEQ ID NO: 1324846 - RNA, 19 nt, Human
agggugggcugggcugagg

SEQ ID NO: 1324847 - RNA, 24 nt, Human
ccucucagcaucgcuuuugcuggg

SEQ ID NO: 1324848 - RNA, 19 nt, Human
cuuuugcugggccgugauc

SEQ ID NO: 1324849 - RNA, 18 nt, Human
gagggugggcugggcuga

SEQ ID NO: 1324850 - RNA, 21 nt, Human
gaggugggacgugcuggugug

SEQ ID NO: 1324851 - RNA, 20 nt, Human
ggcuggaaaagcaggugagg

SEQ ID NO: 1324852 - RNA, 22 nt, Human
ggugagggugggcugggcugag

SEQ ID NO: 1324853 - RNA, 20 nt, Human
ggugggacgugcuggugugu

SEQ ID NO: 1324854 - RNA, 22 nt, Human
gugggcugggcugaggccauug

SEQ ID NO: 1324855 - RNA, 19 nt, Human
ugagggugggcugggcuga

SEQ ID NO: 1324856 - RNA, 25 nt, Human
uguaauaaaauccgugagcacgagg

SEQ ID NO: 1324857 - RNA, 23 nt, Human
uguguaauaaaauccgugagcac

SEQ ID NO: 1324858 - RNA, 21 nt, Human
aaaaaaaagcaaguuuuggga

SEQ ID NO: 1324859 - RNA, 24 nt, Human
aaaaaacuaaaaacucccacaacu

SEQ ID NO: 1324860 - RNA, 24 nt, Human
aaaaacaaaaugcuuaccaagccc

SEQ ID NO: 1324861 - RNA, 23 nt, Human
aaaaacuaaaaacucccacaacu

SEQ ID NO: 1324862 - RNA, 19 nt, Human
aaaaagaaauugagcagag

SEQ ID NO: 1324863 - RNA, 22 nt, Human
aaaaagaaauugagcagaggca

SEQ ID NO: 1324864 - RNA, 24 nt, Human
aaaauaaaaagaaauugagcagag

SEQ ID NO: 1324865 - RNA, 23 nt, Human
aaacaaaaaacuaaaaacuccca

SEQ ID NO: 1324866 - RNA, 24 nt, Human
aaacaaaaugcuuaccaagcccag

SEQ ID NO: 1324867 - RNA, 23 nt, Human
aaacacaccccuacacaaauccc

SEQ ID NO: 1324868 - RNA, 21 nt, Human
aaacagagauacacagaucua

SEQ ID NO: 1324869 - RNA, 19 nt, Human
aaaccauucacccuucccc

SEQ ID NO: 1324870 - RNA, 21 nt, Human
aaacuaccacaaagauuuuga

SEQ ID NO: 1324871 - RNA, 23 nt, Human
aaaugacccuuuugacaaauucu

SEQ ID NO: 1324872 - RNA, 22 nt, Human
aacaaaaaacuaaaaacuccca

SEQ ID NO: 1324873 - RNA, 22 nt, Human
aacacaccccuacacaaauccc

SEQ ID NO: 1324874 - RNA, 18 nt, Human
aacaucccacaucuccaa

SEQ ID NO: 1324875 - RNA, 21 nt, Human
aaccaaguaauccugagacaa

SEQ ID NO: 1324876 - RNA, 18 nt, Human
aacccaccuucucauacu

SEQ ID NO: 1324877 - RNA, 21 nt, Human
aacccaccuucucauacucca

SEQ ID NO: 1324878 - RNA, 22 nt, Human
aaccucccuauguucaaauuaa

SEQ ID NO: 1324879 - RNA, 24 nt, Human
aacuaccacaaagauuuugagcag

SEQ ID NO: 1324880 - RNA, 18 nt, Human
aagaacaucccacaucuc

SEQ ID NO: 1324881 - RNA, 18 nt, Human
aagacaaaggaaaggcua

SEQ ID NO: 1324882 - RNA, 22 nt, Human
aagauuuugagcagcucuauuc

SEQ ID NO: 1324883 - RNA, 25 nt, Human
aagcaccaaaaauuugauaaaaacu

SEQ ID NO: 1324884 - RNA, 18 nt, Human
aagcaggagaaucacuug

SEQ ID NO: 1324885 - RNA, 24 nt, Human
aagcaggagaaucacuugagccca

SEQ ID NO: 1324886 - RNA, 22 nt, Human
aaggggucacacuauguuccag

SEQ ID NO: 1324887 - RNA, 19 nt, Human
aaguauuagagauuauagu

SEQ ID NO: 1324888 - RNA, 25 nt, Human
aaucacuugagcccaggaguuggcg

SEQ ID NO: 1324889 - RNA, 28 nt, Human
aaucacuugagcccaggaguuggcgaga

SEQ ID NO: 1324890 - RNA, 26 nt, Human
aaugaaagucacauuaacaaagaaaa

SEQ ID NO: 1324891 - RNA, 26 nt, Human
acaaauucugcuuuaaaaaauucuga

SEQ ID NO: 1324892 - RNA, 24 nt, Human
acacaaacugaugguuucaaacau

SEQ ID NO: 1324893 - RNA, 20 nt, Human
acacacacaaacacaccccu

SEQ ID NO: 1324894 - RNA, 22 nt, Human
acacacacacaaacacaccccu

SEQ ID NO: 1324895 - RNA, 24 nt, Human
acacacacacacaaacacaccccu

SEQ ID NO: 1324896 - RNA, 23 nt, Human
acacacacacauucacacacaca

SEQ ID NO: 1324897 - RNA, 19 nt, Human
acacaccccuacacaaauc

SEQ ID NO: 1324898 - RNA, 23 nt, Human
acacagaucuaguuuuuccacca

SEQ ID NO: 1324899 - RNA, 21 nt, Human
acacugaaaagaacagagagc

SEQ ID NO: 1324900 - RNA, 23 nt, Human
acagaacccaugauuaucauacu

SEQ ID NO: 1324901 - RNA, 22 nt, Human
acagagaaaaaccauugcuaga

SEQ ID NO: 1324902 - RNA, 21 nt, Human
acagaguaugagaaauaaccc

SEQ ID NO: 1324903 - RNA, 21 nt, Human
acaggcucagccuguagcugg

SEQ ID NO: 1324904 - RNA, 19 nt, Human
acauagauccaagaaguga

SEQ ID NO: 1324905 - RNA, 20 nt, Human
accaaaacagagaaagaaaa

SEQ ID NO: 1324906 - RNA, 18 nt, Human
accauucacccuucccca

SEQ ID NO: 1324907 - RNA, 23 nt, Human
acugaauaaaugcaugccaaaac

SEQ ID NO: 1324908 - RNA, 23 nt, Human
acugcuaugcaaauuauucaaau

SEQ ID NO: 1324909 - RNA, 25 nt, Human
agaaaaaccaaguaauccugagggg

SEQ ID NO: 1324910 - RNA, 23 nt, Human
agaaaagcaaguucucgcuugag

SEQ ID NO: 1324911 - RNA, 24 nt, Human
agaaacauuacuucaaauaauuga

SEQ ID NO: 1324912 - RNA, 23 nt, Human
agaaggccucacugucauaaggg

SEQ ID NO: 1324913 - RNA, 20 nt, Human
agacaaaaaaaugacccuuu

SEQ ID NO: 1324914 - RNA, 19 nt, Human
agacaaauaucccuguucu

SEQ ID NO: 1324915 - RNA, 19 nt, Human
agagaaagaaaaaacaaaa

SEQ ID NO: 1324916 - RNA, 23 nt, Human
agagagccaggcgugguggcuca

SEQ ID NO: 1324917 - RNA, 19 nt, Human
agaucaagacaaaggaaag

SEQ ID NO: 1324918 - RNA, 20 nt, Human
agauuaaacucuaaccuauu

SEQ ID NO: 1324919 - RNA, 24 nt, Human
aggcgugguggcucaugccuguaa

SEQ ID NO: 1324920 - RNA, 22 nt, Human
aguuucuuauuaaaaagaaaca

SEQ ID NO: 1324921 - RNA, 23 nt, Human
auaauaagaaauuaaguaaauac

SEQ ID NO: 1324922 - RNA, 21 nt, Human
augaaaaaaauuuuaaauccu

SEQ ID NO: 1324923 - RNA, 21 nt, Human
augauaucuccaaaaacugag

SEQ ID NO: 1324924 - RNA, 19 nt, Human
augccuguaaucccagcac

SEQ ID NO: 1324925 - RNA, 19 nt, Human
augugcauauguauauaca

SEQ ID NO: 1324926 - RNA, 23 nt, Human
caaaaaacuaaaaacucccacaa

SEQ ID NO: 1324927 - RNA, 23 nt, Human
caaaacagagaaagaaaaaacaa

SEQ ID NO: 1324928 - RNA, 23 nt, Human
caaacacaccccuacacaaaucc

SEQ ID NO: 1324929 - RNA, 24 nt, Human
caaaguuucuuauuaaaaagaaac

SEQ ID NO: 1324930 - RNA, 22 nt, Human
caacacaacucuuuuaaaagac

SEQ ID NO: 1324931 - RNA, 20 nt, Human
caacagagaaaaaccauugc

SEQ ID NO: 1324932 - RNA, 21 nt, Human
caagugauccuccugccugua

SEQ ID NO: 1324933 - RNA, 18 nt, Human
caaguucucgcuugagga

SEQ ID NO: 1324934 - RNA, 25 nt, Human
cacaaacacaccccuacacaaaucc

SEQ ID NO: 1324935 - RNA, 21 nt, Human
cacacaaacacaccccuacac

SEQ ID NO: 1324936 - RNA, 26 nt, Human
cacacaaacacaccccuacacaaauc

SEQ ID NO: 1324937 - RNA, 23 nt, Human
cacacacacacacaaacacaccc

SEQ ID NO: 1324938 - RNA, 22 nt, Human
cacacacacauucacacacaca

SEQ ID NO: 1324939 - RNA, 24 nt, Human
cacacauucacacacacacacaaa

SEQ ID NO: 1324940 - RNA, 19 nt, Human
cacaccaccaugcccagca

SEQ ID NO: 1324941 - RNA, 20 nt, Human
cacaccccuacacaaauccc

SEQ ID NO: 1324942 - RNA, 24 nt, Human
cacaccgucucugcaccaagcacc

SEQ ID NO: 1324943 - RNA, 19 nt, Human
cacagaucuaguuuuucca

SEQ ID NO: 1324944 - RNA, 24 nt, Human
cacagaucuaguuuuuccaccauc

SEQ ID NO: 1324945 - RNA, 20 nt, Human
caccccuacacaaaucccug

SEQ ID NO: 1324946 - RNA, 21 nt, Human
cacccuuccccacaccgucuc

SEQ ID NO: 1324947 - RNA, 18 nt, Human
caccgucucugcaccaag

SEQ ID NO: 1324948 - RNA, 23 nt, Human
cacugcagccuugaacuccuggg

SEQ ID NO: 1324949 - RNA, 24 nt, Human
cagaacccaugauuaucauacuag

SEQ ID NO: 1324950 - RNA, 23 nt, Human
cagagaaaaaccauugcuagaag

SEQ ID NO: 1324951 - RNA, 22 nt, Human
cagccaaacugauccauuugaa

SEQ ID NO: 1324952 - RNA, 24 nt, Human
cagccuguagcugggacuacaggc

SEQ ID NO: 1324953 - RNA, 19 nt, Human
caucccacaucuccaaauc

SEQ ID NO: 1324954 - RNA, 20 nt, Human
cauugcuagaagauacugaa

SEQ ID NO: 1324955 - RNA, 19 nt, Human
ccaaaacagagaaagaaaa

SEQ ID NO: 1324956 - RNA, 23 nt, Human
ccaaaacagagaaagaaaaaaca

SEQ ID NO: 1324957 - RNA, 18 nt, Human
ccaaaacagagauacaca

SEQ ID NO: 1324958 - RNA, 21 nt, Human
ccaaaaccauucacccuuccc

SEQ ID NO: 1324959 - RNA, 22 nt, Human
ccaacacaaauacuguagaccu

SEQ ID NO: 1324960 - RNA, 25 nt, Human
ccaccauccugauauuuuuuaaucu

SEQ ID NO: 1324961 - RNA, 19 nt, Human
cccacaauauagcuuucaa

SEQ ID NO: 1324962 - RNA, 21 nt, Human
cccacaauauagcuuucaaga

SEQ ID NO: 1324963 - RNA, 20 nt, Human
cccaccuucucauacuccaa

SEQ ID NO: 1324964 - RNA, 21 nt, Human
cccaccuucucauacuccaaa

SEQ ID NO: 1324965 - RNA, 20 nt, Human
ccccacaccgucucugcacc

SEQ ID NO: 1324966 - RNA, 28 nt, Human
ccccacaccgucucugcaccaagcaccc

SEQ ID NO: 1324967 - RNA, 23 nt, Human
ccccuaaaaauaaaauaaaguaa

SEQ ID NO: 1324968 - RNA, 22 nt, Human
ccccuacacaaaucccugaaaa

SEQ ID NO: 1324969 - RNA, 24 nt, Human
ccuacaggcucagccuguagcugg

SEQ ID NO: 1324970 - RNA, 20 nt, Human
ccucuauaauucaaacagca

SEQ ID NO: 1324971 - RNA, 22 nt, Human
ccugggcucaagugauccuccu

SEQ ID NO: 1324972 - RNA, 23 nt, Human
ccugggcucaagugauccuccug

SEQ ID NO: 1324973 - RNA, 21 nt, Human
ccuguaaucccagcacugugg

SEQ ID NO: 1324974 - RNA, 21 nt, Human
ccuguagcugggacuacaggc

SEQ ID NO: 1324975 - RNA, 21 nt, Human
ccuguagcugggacuacaggc

SEQ ID NO: 1324976 - RNA, 22 nt, Human
ccuugaacuccugggcucaagu

SEQ ID NO: 1324977 - RNA, 23 nt, Human
ccuugaacuccugggcucaagug

SEQ ID NO: 1324978 - RNA, 22 nt, Human
cuaaaaacucccacaacuacau

SEQ ID NO: 1324979 - RNA, 24 nt, Human
cuaaaacagaacccaugauuaucu

SEQ ID NO: 1324980 - RNA, 25 nt, Human
cucaagugauccuccugccuguagc

SEQ ID NO: 1324981 - RNA, 18 nt, Human
cucagccuguagcuggga

SEQ ID NO: 1324982 - RNA, 22 nt, Human
cucagguuacaaaaacuaagga

SEQ ID NO: 1324983 - RNA, 21 nt, Human
cucaucaacuaaaacagaacc

SEQ ID NO: 1324984 - RNA, 23 nt, Human
cucaugccuguaaucccagcacu

SEQ ID NO: 1324985 - RNA, 20 nt, Human
cucauuaacagaucaagaca

SEQ ID NO: 1324986 - RNA, 21 nt, Human
cucauuaacagaucaagacaa

SEQ ID NO: 1324987 - RNA, 21 nt, Human
cucccacaacuacauacauga

SEQ ID NO: 1324988 - RNA, 19 nt, Human
cucccacuauaaaaccccu

SEQ ID NO: 1324989 - RNA, 23 nt, Human
cucccacuauaaaaccccucaaa

SEQ ID NO: 1324990 - RNA, 19 nt, Human
cuccugccuacaggcucag

SEQ ID NO: 1324991 - RNA, 23 nt, Human
cuccugggcucaagugauccucc

SEQ ID NO: 1324992 - RNA, 19 nt, Human
cucugcaccaagcaccaaa

SEQ ID NO: 1324993 - RNA, 23 nt, Human
cugcagccuugaacuccugggcu

SEQ ID NO: 1324994 - RNA, 23 nt, Human
cuguaaucccagcacugugggga

SEQ ID NO: 1324995 - RNA, 21 nt, Human
cuguagccuccugccuacagg

SEQ ID NO: 1324996 - RNA, 24 nt, Human
cuguagcugggacuacaggcgcac

SEQ ID NO: 1324997 - RNA, 24 nt, Human
gaaaaaagacugcuaauagucuug

SEQ ID NO: 1324998 - RNA, 23 nt, Human
gaaagucacauuaacaaagaaaa

SEQ ID NO: 1324999 - RNA, 23 nt, Human
gaaggggucacacuauguuccag

SEQ ID NO: 1325000 - RNA, 20 nt, Human
gaauucugcuuuuuaaacaa

SEQ ID NO: 1325001 - RNA, 23 nt, Human
gacaaaggaaaggcuaagaaaaa

SEQ ID NO: 1325002 - RNA, 21 nt, Human
gagaaagaaaaaacaaaaugc

SEQ ID NO: 1325003 - RNA, 24 nt, Human
gagagccaggcgugguggcucaug

SEQ ID NO: 1325004 - RNA, 24 nt, Human
gagccaggcgugguggcucaugcc

SEQ ID NO: 1325005 - RNA, 19 nt, Human
gaucauagcgcacugcagc

SEQ ID NO: 1325006 - RNA, 22 nt, Human
gcaaauagcuuaauauggacaa

SEQ ID NO: 1325007 - RNA, 24 nt, Human
gcacugcagccuugaacuccuggg

SEQ ID NO: 1325008 - RNA, 19 nt, Human
gcucaagugauccuccugc

SEQ ID NO: 1325009 - RNA, 20 nt, Human
ggaagcaggagaaucacuug

SEQ ID NO: 1325010 - RNA, 24 nt, Human
ggaagcaggagaaucacuugagcc

SEQ ID NO: 1325011 - RNA, 22 nt, Human
ggcacggagacacugaaaagaa

SEQ ID NO: 1325012 - RNA, 25 nt, Human
gggaacagaagagaaacugcaugac

SEQ ID NO: 1325013 - RNA, 22 nt, Human
gggcucaagugauccuccugcc

SEQ ID NO: 1325014 - RNA, 24 nt, Human
gguggcucaugccuguaaucccag

SEQ ID NO: 1325015 - RNA, 18 nt, Human
guauuuauguauauacac

SEQ ID NO: 1325016 - RNA, 26 nt, Human
uaaaaaaacaaaaaacuaaaaacucc

SEQ ID NO: 1325017 - RNA, 19 nt, Human
uaaaaaacugaaacucaca

SEQ ID NO: 1325018 - RNA, 20 nt, Human
uaaaaaaucugucaaaccau

SEQ ID NO: 1325019 - RNA, 21 nt, Human
uaaaaagaaauugagcagagg

SEQ ID NO: 1325020 - RNA, 20 nt, Human
uaaaaccccucaaacuaaga

SEQ ID NO: 1325021 - RNA, 23 nt, Human
uaaaauuugcucugaaaaaagac

SEQ ID NO: 1325022 - RNA, 21 nt, Human
uaacagaucaagacaaaggaa

SEQ ID NO: 1325023 - RNA, 23 nt, Human
uaacagaucaagacaaaggaaag

SEQ ID NO: 1325024 - RNA, 25 nt, Human
uaacccaccuucucauacuccaaau

SEQ ID NO: 1325025 - RNA, 18 nt, Human
uaaguaaauacacaguaa

SEQ ID NO: 1325026 - RNA, 26 nt, Human
uaauaagaaauuaaguaaauacacag

SEQ ID NO: 1325027 - RNA, 19 nt, Human
uaauuccuaacuuaaagua

SEQ ID NO: 1325028 - RNA, 21 nt, Human
uacaaaaacuaaggaaacuac

SEQ ID NO: 1325029 - RNA, 18 nt, Human
uacaacuuuagaagagug

SEQ ID NO: 1325030 - RNA, 24 nt, Human
uacacaaaucccugaaaaggauuc

SEQ ID NO: 1325031 - RNA, 20 nt, Human
uaccaaaacagagaaagaaa

SEQ ID NO: 1325032 - RNA, 21 nt, Human
uacgguagaucaacagagaaa

SEQ ID NO: 1325033 - RNA, 23 nt, Human
uacguggguacucaguaaugaaa

SEQ ID NO: 1325034 - RNA, 22 nt, Human
uagaagauacugaauaaaugca

SEQ ID NO: 1325035 - RNA, 25 nt, Human
uagaucaacagagaaaaagggaggc

SEQ ID NO: 1325036 - RNA, 22 nt, Human
uagcaguacacauuagguuuuc

SEQ ID NO: 1325037 - RNA, 22 nt, Human
uaggcaucuuucaauuaugacu

SEQ ID NO: 1325038 - RNA, 18 nt, Human
uauagugguacaaaaaac

SEQ ID NO: 1325039 - RNA, 26 nt, Human
uaucuacacacacacacauucacaca

SEQ ID NO: 1325040 - RNA, 23 nt, Human
uauguaaugugcauauguauaua

SEQ ID NO: 1325041 - RNA, 23 nt, Human
ucaaauuaaucacuggaauacag

SEQ ID NO: 1325042 - RNA, 24 nt, Human
ucaagacaaaggaaaggcuaagaa

SEQ ID NO: 1325043 - RNA, 19 nt, Human
ucacuggaauacagcaaag

SEQ ID NO: 1325044 - RNA, 19 nt, Human
uccccacaccgucucugca

SEQ ID NO: 1325045 - RNA, 19 nt, Human
ucccugaaaaggauucaaa

SEQ ID NO: 1325046 - RNA, 21 nt, Human
uccugggcucaagugauccuc

SEQ ID NO: 1325047 - RNA, 22 nt, Human
uccugggcucaagugauccucc

SEQ ID NO: 1325048 - RNA, 24 nt, Human
uccugggcucaagugauccuccug

SEQ ID NO: 1325049 - RNA, 21 nt, Human
ucuaagggauagguggggaaa

SEQ ID NO: 1325050 - RNA, 24 nt, Human
ucuauaauucaaacagcaaauagc

SEQ ID NO: 1325051 - RNA, 21 nt, Human
ucugaucaacaauugaagaaa

SEQ ID NO: 1325052 - RNA, 19 nt, Human
ucugcaccaagcaccaaaa

SEQ ID NO: 1325053 - RNA, 19 nt, Human
ugaaaaaagacugcuaauu

SEQ ID NO: 1325054 - RNA, 23 nt, Human
ugaaaagaacagagagccaggcg

SEQ ID NO: 1325055 - RNA, 22 nt, Human
ugaaacucacauuuucucuaag

SEQ ID NO: 1325056 - RNA, 25 nt, Human
ugaacuccugggcucaagugauccu

SEQ ID NO: 1325057 - RNA, 23 nt, Human
ugaauauauauacuuuguguaga

SEQ ID NO: 1325058 - RNA, 19 nt, Human
ugagaaaaaccaaguaauc

SEQ ID NO: 1325059 - RNA, 22 nt, Human
ugagaaaaaccaaguaauccug

SEQ ID NO: 1325060 - RNA, 24 nt, Human
ugagaaauaacccaccuucucaua

SEQ ID NO: 1325061 - RNA, 18 nt, Human
ugagcagaggcauucaua

SEQ ID NO: 1325062 - RNA, 20 nt, Human
ugagcagaggcauucauagg

SEQ ID NO: 1325063 - RNA, 20 nt, Human
ugauaaaggcaaaaguguaa

SEQ ID NO: 1325064 - RNA, 21 nt, Human
ugauaugcaauaaccccuauc

SEQ ID NO: 1325065 - RNA, 23 nt, Human
ugcacugaauuauucccaaaacc

SEQ ID NO: 1325066 - RNA, 24 nt, Human
ugccaaaacagagauacacagauc

SEQ ID NO: 1325067 - RNA, 21 nt, Human
ugccauaggcaucuuucaauu

SEQ ID NO: 1325068 - RNA, 23 nt, Human
ugccuguaaucccagcacugugg

SEQ ID NO: 1325069 - RNA, 24 nt, Human
ugccuguaaucccagcacuguggg

SEQ ID NO: 1325070 - RNA, 18 nt, Human
ugcuuuuuaaacaaucug

SEQ ID NO: 1325071 - RNA, 19 nt, Human
uggagccaaagaaggccuc

SEQ ID NO: 1325072 - RNA, 24 nt, Human
uggcucaugccuguaaucccagca

SEQ ID NO: 1325073 - RNA, 26 nt, Human
ugggaacagaagagaaacugcaugac

SEQ ID NO: 1325074 - RNA, 18 nt, Human
ugggacuacaggcgcaca

SEQ ID NO: 1325075 - RNA, 20 nt, Human
ugggcucaagugauccuccu

SEQ ID NO: 1325076 - RNA, 24 nt, Human
ugggcucaagugauccuccugccu

SEQ ID NO: 1325077 - RNA, 24 nt, Human
ugguggcucaugccuguaauccca

SEQ ID NO: 1325078 - RNA, 21 nt, Human
uguaaagaggccuacaggugu

SEQ ID NO: 1325079 - RNA, 20 nt, Human
uguaagcacugcugacugau

SEQ ID NO: 1325080 - RNA, 20 nt, Human
uguauguaaugugcauaugu

SEQ ID NO: 1325081 - RNA, 23 nt, Human
uguauguaaugugcauauguaua

SEQ ID NO: 1325082 - RNA, 20 nt, Human
ugucauaagggaacaggcag

SEQ ID NO: 1325083 - RNA, 21 nt, Human
ugugcaaucuaaauuguauuu

SEQ ID NO: 1325084 - RNA, 20 nt, Human
uguggaagggaaaaaaaagc

SEQ ID NO: 1325085 - RNA, 20 nt, Human
uuaaaguaaaugaaauaauc

SEQ ID NO: 1325086 - RNA, 22 nt, Human
uuaaauccuuaccaaaacagag

SEQ ID NO: 1325087 - RNA, 20 nt, Human
uuagucucaaauaggaagaa

SEQ ID NO: 1325088 - RNA, 21 nt, Human
uucaaauguucucucucagac

SEQ ID NO: 1325089 - RNA, 22 nt, Human
uucaaauguucucucucagacu

SEQ ID NO: 1325090 - RNA, 23 nt, Human
uucacacacacacacaaacacac

SEQ ID NO: 1325091 - RNA, 18 nt, Human
uuccuccuucauauaccc

SEQ ID NO: 1325092 - RNA, 18 nt, Human
uucuuugcuuggaugaau

SEQ ID NO: 1325093 - RNA, 22 nt, Human
uugcuuggaugaauaguuggug

SEQ ID NO: 1325094 - RNA, 19 nt, Human
uuggccuuguuaaaaaaaa

SEQ ID NO: 1325095 - RNA, 20 nt, Human
uuuaaaaauagcaguacaca

SEQ ID NO: 1325096 - RNA, 21 nt, Human
uuuauggcauucuguaagagc

SEQ ID NO: 1325097 - RNA, 23 nt, Human
uuuuccaccauccugauauuuuu

SEQ ID NO: 1325098 - RNA, 21 nt, Human
uuuucucccacuauaaaaccc

SEQ ID NO: 1325099 - RNA, 19 nt, Human
uuuugguaaaauuucuucu

SEQ ID NO: 1325100 - RNA, 20 nt, Human
aaacucuccacucaccccuc

SEQ ID NO: 1325101 - RNA, 23 nt, Human
acagcugggaucugaggccuaag

SEQ ID NO: 1325102 - RNA, 19 nt, Human
acuuacccacccagucaca

SEQ ID NO: 1325103 - RNA, 22 nt, Human
agcauugggaggggaggaggga

SEQ ID NO: 1325104 - RNA, 19 nt, Human
caaugaaagauuaugcauc

SEQ ID NO: 1325105 - RNA, 22 nt, Human
cagcauugggaggggaggaggg

SEQ ID NO: 1325106 - RNA, 18 nt, Human
cagccuuucccuaacagu

SEQ ID NO: 1325107 - RNA, 22 nt, Human
ccaccgaacuuacccacccagu

SEQ ID NO: 1325108 - RNA, 23 nt, Human
ccacucaccccucuaacaaacaa

SEQ ID NO: 1325109 - RNA, 21 nt, Human
ccagucacagacggaggcugg

SEQ ID NO: 1325110 - RNA, 20 nt, Human
ccucuaacaaacaaugaaag

SEQ ID NO: 1325111 - RNA, 18 nt, Human
gaggagggaggggacgcu

SEQ ID NO: 1325112 - RNA, 21 nt, Human
gaggggaggagggaggggacg

SEQ ID NO: 1325113 - RNA, 22 nt, Human
gaggggaggagggaggggacgc

SEQ ID NO: 1325114 - RNA, 20 nt, Human
gcacagcugggaucugaggc

SEQ ID NO: 1325115 - RNA, 22 nt, Human
ggaggggaggagggaggggacg

SEQ ID NO: 1325116 - RNA, 21 nt, Human
gugaagugacggcugccgagc

SEQ ID NO: 1325117 - RNA, 20 nt, Human
uaacaaacaaugaaagauua

SEQ ID NO: 1325118 - RNA, 18 nt, Human
ucagcauugggaggggag

SEQ ID NO: 1325119 - RNA, 25 nt, Human
uccacucaccccucuaacaaacaau

SEQ ID NO: 1325120 - RNA, 26 nt, Human
ugaaucaaaugucagguuccuaaugc

SEQ ID NO: 1325121 - RNA, 24 nt, Human
uggaacauggagagccaagucuug

SEQ ID NO: 1325122 - RNA, 20 nt, Human
ugggaggggaggagggaggg

SEQ ID NO: 1325123 - RNA, 21 nt, Human
uguuuuaaaggaccuaggcag

SEQ ID NO: 1325124 - RNA, 20 nt, Human
uuuaaacucuccacucaccc

SEQ ID NO: 1325125 - RNA, 20 nt, Human
acagaaccggggcagccgca

SEQ ID NO: 1325126 - RNA, 23 nt, Human
gccgcagggcuccugcaggaccu

SEQ ID NO: 1325127 - RNA, 22 nt, Human
gcuccugcaggaccucccggac

SEQ ID NO: 1325128 - RNA, 22 nt, Human
ucccuugagcggcuucuugggu

SEQ ID NO: 1325129 - RNA, 18 nt, Human
uccugcaggaccucccgg

SEQ ID NO: 1325130 - RNA, 19 nt, Human
aagcguuuucugcaagaac

SEQ ID NO: 1325131 - RNA, 20 nt, Human
aauugucaagagcaguuggu

SEQ ID NO: 1325132 - RNA, 18 nt, Human
acccagagauacaugguu

SEQ ID NO: 1325133 - RNA, 20 nt, Human
accuugaguagguauagaag

SEQ ID NO: 1325134 - RNA, 19 nt, Human
acuauaguuucauucaaau

SEQ ID NO: 1325135 - RNA, 19 nt, Human
agaguccugggugacaugc

SEQ ID NO: 1325136 - RNA, 23 nt, Human
agcaguuggugguucugaaauac

SEQ ID NO: 1325137 - RNA, 19 nt, Human
agccaacacugaagacaca

SEQ ID NO: 1325138 - RNA, 23 nt, Human
auagagccaugcccacugaccca

SEQ ID NO: 1325139 - RNA, 20 nt, Human
caaaaugaaaucccugagga

SEQ ID NO: 1325140 - RNA, 24 nt, Human
caagccaacacugaagacacaaau

SEQ ID NO: 1325141 - RNA, 21 nt, Human
cacaguuaugugaacguguca

SEQ ID NO: 1325142 - RNA, 21 nt, Human
caccggcagaguccuggguga

SEQ ID NO: 1325143 - RNA, 22 nt, Human
cagcagcucccugcugagccuc

SEQ ID NO: 1325144 - RNA, 19 nt, Human
cagccagcagcucccugcu

SEQ ID NO: 1325145 - RNA, 21 nt, Human
caugugcugcacaguuaugug

SEQ ID NO: 1325146 - RNA, 26 nt, Human
ccagcggcuccugacuccuguucucu

SEQ ID NO: 1325147 - RNA, 22 nt, Human
cccaaaauaucucuucuccuuu

SEQ ID NO: 1325148 - RNA, 19 nt, Human
ccucucggcuuaguaaggg

SEQ ID NO: 1325149 - RNA, 20 nt, Human
ccugcaagacuucaggcucu

SEQ ID NO: 1325150 - RNA, 24 nt, Human
cuauagguccugccugcaggaaug

SEQ ID NO: 1325151 - RNA, 20 nt, Human
cuguggucuuccuaaguacu

SEQ ID NO: 1325152 - RNA, 18 nt, Human
gauuaccuccuaugaaac

SEQ ID NO: 1325153 - RNA, 20 nt, Human
gcucugagaauaggaauaga

SEQ ID NO: 1325154 - RNA, 22 nt, Human
ggaauagagccaugcccacuga

SEQ ID NO: 1325155 - RNA, 25 nt, Human
ggauggaauugagaggagcagggcu

SEQ ID NO: 1325156 - RNA, 21 nt, Human
ggcacuucuguagggcuggca

SEQ ID NO: 1325157 - RNA, 26 nt, Human
ggcuaaggccucccaaugcuguuugu

SEQ ID NO: 1325158 - RNA, 25 nt, Human
gugguucugaaauacaauccucagc

SEQ ID NO: 1325159 - RNA, 22 nt, Human
uaaaacaagccaacacugaaga

SEQ ID NO: 1325160 - RNA, 24 nt, Human
uacagauggaucagcuaaaacaag

SEQ ID NO: 1325161 - RNA, 22 nt, Human
uagagccaugcccacugacccc

SEQ ID NO: 1325162 - RNA, 22 nt, Human
uagcuguggucuuccuaaguac

SEQ ID NO: 1325163 - RNA, 24 nt, Human
uagguucauugaaaccaggguaac

SEQ ID NO: 1325164 - RNA, 19 nt, Human
ucauucaaaucuucaggug

SEQ ID NO: 1325165 - RNA, 21 nt, Human
ucauugaaaccaggguaacac

SEQ ID NO: 1325166 - RNA, 18 nt, Human
ucccggcaugugcugcac

SEQ ID NO: 1325167 - RNA, 22 nt, Human
ucuccugccagcggcuccugac

SEQ ID NO: 1325168 - RNA, 21 nt, Human
ucuucaggugccuauaggucc

SEQ ID NO: 1325169 - RNA, 21 nt, Human
ugaaaccaggguaacaccuuu

SEQ ID NO: 1325170 - RNA, 20 nt, Human
ugaaauacaauccucagcca

SEQ ID NO: 1325171 - RNA, 18 nt, Human
ugacaugcugucuccugc

SEQ ID NO: 1325172 - RNA, 24 nt, Human
ugacaugcugucuccugccagcgg

SEQ ID NO: 1325173 - RNA, 19 nt, Human
ugagaggagcagggcuaag

SEQ ID NO: 1325174 - RNA, 22 nt, Human
ugaggaauuuuguagcuaccca

SEQ ID NO: 1325175 - RNA, 20 nt, Human
ugcugcacaguuaugugaac

SEQ ID NO: 1325176 - RNA, 21 nt, Human
ugucaagagcaguuggugguu

SEQ ID NO: 1325177 - RNA, 20 nt, Human
uuuuguugugugauuugugg

SEQ ID NO: 1325178 - RNA, 25 nt, Human
cucugcacuaccuuccugccacucc

SEQ ID NO: 1325179 - RNA, 18 nt, Human
uaccuuccugccacuccc

SEQ ID NO: 1325180 - RNA, 18 nt, Human
ucguugcuauccagacuc

SEQ ID NO: 1325181 - RNA, 23 nt, Human
ugucucguugcuauccagacucc

SEQ ID NO: 1325182 - RNA, 19 nt, Human
aggagacggcugugccggg

SEQ ID NO: 1325183 - RNA, 20 nt, Human
cagcuggcgguuccucccgc

SEQ ID NO: 1325184 - RNA, 24 nt, Human
ccagucgccgcccugggcuuuggg

SEQ ID NO: 1325185 - RNA, 20 nt, Human
cccagaacaacccauuugau

SEQ ID NO: 1325186 - RNA, 20 nt, Human
cccccuguccucuuaacaga

SEQ ID NO: 1325187 - RNA, 22 nt, Human
ccccgaauucccagaacaaccc

SEQ ID NO: 1325188 - RNA, 20 nt, Human
cccucccagcgccuccccgc

SEQ ID NO: 1325189 - RNA, 22 nt, Human
ccgaauucccagaacaacccau

SEQ ID NO: 1325190 - RNA, 25 nt, Human
ccugacagucgugccagucgccgcc

SEQ ID NO: 1325191 - RNA, 23 nt, Human
cgcccugggcuuuggggacgucc

SEQ ID NO: 1325192 - RNA, 18 nt, Human
cggggcgggacccccugu

SEQ ID NO: 1325193 - RNA, 18 nt, Human
gcagcuggcgguuccucc

SEQ ID NO: 1325194 - RNA, 18 nt, Human
gccgggccagggaggggc

SEQ ID NO: 1325195 - RNA, 26 nt, Human
gcucuuuccacacgucuccuccccca

SEQ ID NO: 1325196 - RNA, 23 nt, Human
ggcugccggaccggagaccccgg

SEQ ID NO: 1325197 - RNA, 22 nt, Human
gggcgugggguccguggggcgu

SEQ ID NO: 1325198 - RNA, 19 nt, Human
ggguccuggaggagacggc

SEQ ID NO: 1325199 - RNA, 18 nt, Human
gguucccggcacuguuac

SEQ ID NO: 1325200 - RNA, 22 nt, Human
uacuuccucuuuaucuucugcc

SEQ ID NO: 1325201 - RNA, 20 nt, Human
ucccagcgccuccccgcguc

SEQ ID NO: 1325202 - RNA, 19 nt, Human
uccgggcacacugcggaca

SEQ ID NO: 1325203 - RNA, 19 nt, Human
uccucuuuaucuucugccg

SEQ ID NO: 1325204 - RNA, 22 nt, Human
uggaaaccgcucugccagcccc

SEQ ID NO: 1325205 - RNA, 21 nt, Human
uuccucuuuaucuucugccgc

SEQ ID NO: 1325206 - RNA, 26 nt, Human
aaacagcagaugcaacuacacaagca

SEQ ID NO: 1325207 - RNA, 23 nt, Human
aacuugguuuccucuaaucuccu

SEQ ID NO: 1325208 - RNA, 22 nt, Human
acacaagcaucccaggaagcca

SEQ ID NO: 1325209 - RNA, 20 nt, Human
acaugagccacacuccgucu

SEQ ID NO: 1325210 - RNA, 18 nt, Human
acguggugaggagauugg

SEQ ID NO: 1325211 - RNA, 25 nt, Human
agaugcaacuacacaagcaucccag

SEQ ID NO: 1325212 - RNA, 18 nt, Human
aggaauuucagguauggu

SEQ ID NO: 1325213 - RNA, 18 nt, Human
auccugaaaaguaacuug

SEQ ID NO: 1325214 - RNA, 18 nt, Human
caaaacagcagaugcaac

SEQ ID NO: 1325215 - RNA, 22 nt, Human
caacagaauaagaaaaucugca

SEQ ID NO: 1325216 - RNA, 28 nt, Human
caaccgccucggccacucccguccaggc

SEQ ID NO: 1325217 - RNA, 18 nt, Human
caccaaaacagcagaugc

SEQ ID NO: 1325218 - RNA, 23 nt, Human
caccaaaacagcagaugcaacua

SEQ ID NO: 1325219 - RNA, 18 nt, Human
ccuccgcccaaccgccuc

SEQ ID NO: 1325220 - RNA, 22 nt, Human
cgccucggccacucccguccag

SEQ ID NO: 1325221 - RNA, 19 nt, Human
cucggccacucccguccag

SEQ ID NO: 1325222 - RNA, 21 nt, Human
cuggaggcacucugauucugg

SEQ ID NO: 1325223 - RNA, 22 nt, Human
cugucaccaaaacagcagaugc

SEQ ID NO: 1325224 - RNA, 20 nt, Human
gcgauaagaucacaugagcc

SEQ ID NO: 1325225 - RNA, 19 nt, Human
uaaccaggaauuucaggua

SEQ ID NO: 1325226 - RNA, 23 nt, Human
uaagaucacaugagccacacucc

SEQ ID NO: 1325227 - RNA, 21 nt, Human
ucugucaccaaaacagcagau

SEQ ID NO: 1325228 - RNA, 23 nt, Human
ucugucaccaaaacagcagaugc

SEQ ID NO: 1325229 - RNA, 21 nt, Human
ugaaugaaucaguugugugaa

SEQ ID NO: 1325230 - RNA, 21 nt, Human
aaaaugaaggcaaacaaagga

SEQ ID NO: 1325231 - RNA, 27 nt, Human
aaacacacacucucaauaucacuaugu

SEQ ID NO: 1325232 - RNA, 25 nt, Human
auuuggugaugccuacuacgagcuu

SEQ ID NO: 1325233 - RNA, 21 nt, Human
cugccguguauuucccacacu

SEQ ID NO: 1325234 - RNA, 22 nt, Human
uaaaaugaaggcaaacaaagga

SEQ ID NO: 1325235 - RNA, 20 nt, Human
uaaagcuauagucaucccug

SEQ ID NO: 1325236 - RNA, 20 nt, Human
uaacauagccauuaucaucu

SEQ ID NO: 1325237 - RNA, 21 nt, Human
uacgagcuuauauuuaguauu

SEQ ID NO: 1325238 - RNA, 23 nt, Human
uaugaaaacauuucuauuuugga

SEQ ID NO: 1325239 - RNA, 22 nt, Human
ugccaugugagaguacauagag

SEQ ID NO: 1325240 - RNA, 18 nt, Human
uucauucuuacaaaggau

SEQ ID NO: 1325241 - RNA, 20 nt, Human
uuugcuucaacgucuuuaac

SEQ ID NO: 1325242 - RNA, 18 nt, Human
aagaggcuugggauaauc

SEQ ID NO: 1325243 - RNA, 26 nt, Human
acaaguuauuuuguugaucaaaaagc

SEQ ID NO: 1325244 - RNA, 19 nt, Human
agaaggaucaccagugggg

SEQ ID NO: 1325245 - RNA, 22 nt, Human
aggccagaacuguuguaaagca

SEQ ID NO: 1325246 - RNA, 24 nt, Human
agggcgccgguggcgacccuggcg

SEQ ID NO: 1325247 - RNA, 24 nt, Human
aggggacaucguggcggcucgagg

SEQ ID NO: 1325248 - RNA, 21 nt, Human
auaaaaugauaccaaauaccc

SEQ ID NO: 1325249 - RNA, 21 nt, Human
caagagaaaaugagagacucg

SEQ ID NO: 1325250 - RNA, 21 nt, Human
caggaccagggagggaaaggu

SEQ ID NO: 1325251 - RNA, 22 nt, Human
caggaggcacaaagccaauuaa

SEQ ID NO: 1325252 - RNA, 22 nt, Human
caggggacaucguggcggcucg

SEQ ID NO: 1325253 - RNA, 19 nt, Human
cauggaaaauaacaaaaaa

SEQ ID NO: 1325254 - RNA, 25 nt, Human
ccaaauacccaauucuucugcaaaa

SEQ ID NO: 1325255 - RNA, 18 nt, Human
ccacuuucuggaaaugag

SEQ ID NO: 1325256 - RNA, 19 nt, Human
ccccaggcccgagggucuc

SEQ ID NO: 1325257 - RNA, 23 nt, Human
cccccagguuaccacaggacucu

SEQ ID NO: 1325258 - RNA, 26 nt, Human
cgccgguggcgacccuggcggcggcc

SEQ ID NO: 1325259 - RNA, 22 nt, Human
cgcggagggagggcgccggugg

SEQ ID NO: 1325260 - RNA, 23 nt, Human
cgcugaguuuagcugagcugcgc

SEQ ID NO: 1325261 - RNA, 23 nt, Human
cuauuccuggaacaaaggcaagc

SEQ ID NO: 1325262 - RNA, 18 nt, Human
cugcaaaauaaaaccccc

SEQ ID NO: 1325263 - RNA, 19 nt, Human
cugggcaaaacuaacuggu

SEQ ID NO: 1325264 - RNA, 18 nt, Human
gaccacauuuacaggacc

SEQ ID NO: 1325265 - RNA, 19 nt, Human
gagucaacaucagucacug

SEQ ID NO: 1325266 - RNA, 18 nt, Human
gcggagggagggcgccgg

SEQ ID NO: 1325267 - RNA, 19 nt, Human
ggacaucguggcggcucga

SEQ ID NO: 1325268 - RNA, 23 nt, Human
ggcaaaacuaacugguccacaag

SEQ ID NO: 1325269 - RNA, 21 nt, Human
ggggagggaggcgcggaggga

SEQ ID NO: 1325270 - RNA, 18 nt, Human
gggggagggaggcgcgga

SEQ ID NO: 1325271 - RNA, 22 nt, Human
guaaagcaggaggcacaaagcc

SEQ ID NO: 1325272 - RNA, 18 nt, Human
guccacaagagaaaauga

SEQ ID NO: 1325273 - RNA, 21 nt, Human
uaaaaugauaccaaauaccca

SEQ ID NO: 1325274 - RNA, 22 nt, Human
uaaagcaggaggcacaaagcca

SEQ ID NO: 1325275 - RNA, 26 nt, Human
uaccaaauacccaauucuucugcaaa

SEQ ID NO: 1325276 - RNA, 20 nt, Human
ucaaaaagcaccugagaaaa

SEQ ID NO: 1325277 - RNA, 19 nt, Human
ucaaccagguuuguaucua

SEQ ID NO: 1325278 - RNA, 19 nt, Human
ucagucacugaauggcagg

SEQ ID NO: 1325279 - RNA, 20 nt, Human
ucauuucugcauuucccccc

SEQ ID NO: 1325280 - RNA, 24 nt, Human
uccacaagagaaaaugagagacuc

SEQ ID NO: 1325281 - RNA, 20 nt, Human
ucccagagcaccggucccca

SEQ ID NO: 1325282 - RNA, 20 nt, Human
uccccaggcccgagggucuc

SEQ ID NO: 1325283 - RNA, 23 nt, Human
uccccaggcccgagggucucccg

SEQ ID NO: 1325284 - RNA, 26 nt, Human
ucccccagguuaccacaggacucuau

SEQ ID NO: 1325285 - RNA, 26 nt, Human
ucgagggggagggaggcgcggaggga

SEQ ID NO: 1325286 - RNA, 19 nt, Human
ucugcaaaauaaaaccccc

SEQ ID NO: 1325287 - RNA, 20 nt, Human
ugcuuuugaaaagcaccuau

SEQ ID NO: 1325288 - RNA, 21 nt, Human
ugggacagaaggaucaccagu

SEQ ID NO: 1325289 - RNA, 22 nt, Human
uguaaagcaggaggcacaaagc

SEQ ID NO: 1325290 - RNA, 25 nt, Human
uuaaugaucucauuucugcauuucc

SEQ ID NO: 1325291 - RNA, 18 nt, Human
uuccuggaacaaaggcaa

SEQ ID NO: 1325292 - RNA, 19 nt, Human
uucucaauagugucugaca

SEQ ID NO: 1325293 - RNA, 25 nt, Human
uugaaaagcaccuauauaauucugu

SEQ ID NO: 1325294 - RNA, 24 nt, Human
aaagaacugaagccuccuuggccg

SEQ ID NO: 1325295 - RNA, 22 nt, Human
aagaacugaagccuccuuggcc

SEQ ID NO: 1325296 - RNA, 19 nt, Human
aagaagaugccuaggcuuu

SEQ ID NO: 1325297 - RNA, 22 nt, Human
aagaauaaagcugucaaggaaa

SEQ ID NO: 1325298 - RNA, 21 nt, Human
aagacccuuucuacuccaccc

SEQ ID NO: 1325299 - RNA, 24 nt, Human
aagacccuuucuacuccaccccaa

SEQ ID NO: 1325300 - RNA, 23 nt, Human
aaggagcaaggacagaggucagg

SEQ ID NO: 1325301 - RNA, 18 nt, Human
aaggagcugcuucgcagg

SEQ ID NO: 1325302 - RNA, 22 nt, Human
aagucccacccccacccccacc

SEQ ID NO: 1325303 - RNA, 20 nt, Human
accacuuucacaaagaauaa

SEQ ID NO: 1325304 - RNA, 21 nt, Human
accacuuucacaaagaauaaa

SEQ ID NO: 1325305 - RNA, 23 nt, Human
accccaaaagauagccgcuuugu

SEQ ID NO: 1325306 - RNA, 26 nt, Human
accccaaaagauagccgcuuugugga

SEQ ID NO: 1325307 - RNA, 18 nt, Human
acccccacccccacccca

SEQ ID NO: 1325308 - RNA, 28 nt, Human
acccccacccccaccccaguuuucccac

SEQ ID NO: 1325309 - RNA, 19 nt, Human
acgaacucugaaacaagag

SEQ ID NO: 1325310 - RNA, 19 nt, Human
agaaaagcuuaaucugcag

SEQ ID NO: 1325311 - RNA, 21 nt, Human
agaagucccacccccaccccc

SEQ ID NO: 1325312 - RNA, 19 nt, Human
aggcuaucucccuccaaug

SEQ ID NO: 1325313 - RNA, 18 nt, Human
agguggcucugccuuccu

SEQ ID NO: 1325314 - RNA, 28 nt, Human
auccaagacccuuucuacuccaccccaa

SEQ ID NO: 1325315 - RNA, 24 nt, Human
caaucagcugcacagaauucaagu

SEQ ID NO: 1325316 - RNA, 23 nt, Human
cacagaaaacagacccguaggcu

SEQ ID NO: 1325317 - RNA, 24 nt, Human
cacccccaccccaguuuucccacu

SEQ ID NO: 1325318 - RNA, 24 nt, Human
cagaugcggcuuugauggccugug

SEQ ID NO: 1325319 - RNA, 22 nt, Human
cagccucugcaaccagugcccu

SEQ ID NO: 1325320 - RNA, 20 nt, Human
cagcuguggauuccgccuuc

SEQ ID NO: 1325321 - RNA, 25 nt, Human
ccagugcccuccgugagaaagcucc

SEQ ID NO: 1325322 - RNA, 24 nt, Human
cccacccccaccccaguuuuccca

SEQ ID NO: 1325323 - RNA, 25 nt, Human
cccacccccaccccaguuuucccaa

SEQ ID NO: 1325324 - RNA, 21 nt, Human
cccacccccacccccacccca

SEQ ID NO: 1325325 - RNA, 20 nt, Human
ccccaaaagauagccgcuuu

SEQ ID NO: 1325326 - RNA, 22 nt, Human
ccccacccccaccccaguuuuc

SEQ ID NO: 1325327 - RNA, 24 nt, Human
cccccacccccaccccaguuuucc

SEQ ID NO: 1325328 - RNA, 22 nt, Human
cccuuucuacuccaccccaaaa

SEQ ID NO: 1325329 - RNA, 22 nt, Human
ccgcuaagcgacccggggcugc

SEQ ID NO: 1325330 - RNA, 18 nt, Human
ccucugcaaccagugccc

SEQ ID NO: 1325331 - RNA, 23 nt, Human
ccuuccuaucucagcaggggacg

SEQ ID NO: 1325332 - RNA, 19 nt, Human
ccuucuggucuccgccuug

SEQ ID NO: 1325333 - RNA, 18 nt, Human
cgacccggggcugcccga

SEQ ID NO: 1325334 - RNA, 21 nt, Human
cggcaaagaacugaagccucc

SEQ ID NO: 1325335 - RNA, 22 nt, Human
cggcaaagaacugaagccuccu

SEQ ID NO: 1325336 - RNA, 24 nt, Human
cguaggcugcagggagaaggagca

SEQ ID NO: 1325337 - RNA, 20 nt, Human
cucugcaaccagugcccucc

SEQ ID NO: 1325338 - RNA, 22 nt, Human
cugaauauagguaaggguucac

SEQ ID NO: 1325339 - RNA, 22 nt, Human
cugguggacagcagaugcuccc

SEQ ID NO: 1325340 - RNA, 24 nt, Human
gaagucccacccccacccccaccc

SEQ ID NO: 1325341 - RNA, 20 nt, Human
gaggucaggcuaucucccuc

SEQ ID NO: 1325342 - RNA, 21 nt, Human
gcaguuagaagucccaccccc

SEQ ID NO: 1325343 - RNA, 23 nt, Human
ggcaaagaacugaagccuccuug

SEQ ID NO: 1325344 - RNA, 20 nt, Human
ggucuccgccuugcaggcgg

SEQ ID NO: 1325345 - RNA, 20 nt, Human
gucgccagcuguggauuccg

SEQ ID NO: 1325346 - RNA, 20 nt, Human
uaaauuauaccacuuucaca

SEQ ID NO: 1325347 - RNA, 18 nt, Human
uaaggcagccgcggcggc

SEQ ID NO: 1325348 - RNA, 18 nt, Human
uacuucacuuuuuguacc

SEQ ID NO: 1325349 - RNA, 19 nt, Human
uagggaaauaucacucauc

SEQ ID NO: 1325350 - RNA, 22 nt, Human
uagguauagggaaauaucacuc

SEQ ID NO: 1325351 - RNA, 24 nt, Human
uauaccacuuucacaaagaauaaa

SEQ ID NO: 1325352 - RNA, 23 nt, Human
uaucacucaucaaaggguugaca

SEQ ID NO: 1325353 - RNA, 25 nt, Human
uaucucagcaggggacgaacucuga

SEQ ID NO: 1325354 - RNA, 25 nt, Human
uccaagacccuuucuacuccacccc

SEQ ID NO: 1325355 - RNA, 22 nt, Human
uccgggguacggucaaccucug

SEQ ID NO: 1325356 - RNA, 21 nt, Human
uccuuggccgcuaagcgaccc

SEQ ID NO: 1325357 - RNA, 18 nt, Human
ugacauagaagcucacaa

SEQ ID NO: 1325358 - RNA, 18 nt, Human
ugauggccugugcuccgc

SEQ ID NO: 1325359 - RNA, 23 nt, Human
ugcaggcggcaaagaacugaagc

SEQ ID NO: 1325360 - RNA, 26 nt, Human
ugcccgaaggagcugcuucgcagggg

SEQ ID NO: 1325361 - RNA, 24 nt, Human
ugucaaggaaaugggcacacacag

SEQ ID NO: 1325362 - RNA, 25 nt, Human
uucaugcaguuagaagucccacccc

SEQ ID NO: 1325363 - RNA, 18 nt, Human
uuccuaucucagcagggg

SEQ ID NO: 1325364 - RNA, 31 nt, Human; identical to SEQ ID NO: 1208770

SEQ ID NO: 1325365 - RNA, 23 nt, Human
uuuggugaaaaaauacagauaga

SEQ ID NO: 1325366 - RNA, 20 nt, Human
agccagggggugcacacgug

SEQ ID NO: 1325367 - RNA, 19 nt, Human
gauggcaccagcugggggg

SEQ ID NO: 1325368 - RNA, 18 nt, Human
uggcaucagccagggggu

SEQ ID NO: 1325369 - RNA, 21 nt, Human
ugucacacccguggacgaugg

SEQ ID NO: 1325370 - RNA, 19 nt, Human
ugugccaccuucuucccgg

SEQ ID NO: 1325371 - RNA, 19 nt, Human
uguguaggucgugugcugg

SEQ ID NO: 1325372 - RNA, 21 nt, Human
uuugcacgucucugggucugg

SEQ ID NO: 1325373 - RNA, 21 nt, Human
aaagccugggcagccugaaac

SEQ ID NO: 1325374 - RNA, 24 nt, Human
aagcugccgccaccccggccuguc

SEQ ID NO: 1325375 - RNA, 21 nt, Human
accaggugccugguccccugc

SEQ ID NO: 1325376 - RNA, 18 nt, Human
accgcaacacccccgccc

SEQ ID NO: 1325377 - RNA, 21 nt, Human
acgagcagcaagcaggcagaa

SEQ ID NO: 1325378 - RNA, 18 nt, Human
acugcacuccagccuggg

SEQ ID NO: 1325379 - RNA, 18 nt, Human
acugcacuccagccuggg

SEQ ID NO: 1325380 - RNA, 24 nt, Human
acugcacuccagccugggugagag

SEQ ID NO: 1325381 - RNA, 24 nt, Human
acugugucacugcacuccagccug

SEQ ID NO: 1325382 - RNA, 19 nt, Human
agacagaucggccuguggu

SEQ ID NO: 1325383 - RNA, 23 nt, Human
agacggugcugguggcugaagca

SEQ ID NO: 1325384 - RNA, 21 nt, Human
agaggucguacuuguacacgu

SEQ ID NO: 1325385 - RNA, 22 nt, Human
agcaagcaggcagaaccaccac

SEQ ID NO: 1325386 - RNA, 23 nt, Human
agcaggaguggccgucaggccug

SEQ ID NO: 1325387 - RNA, 20 nt, Human
agccaccgcaacacccccgg

SEQ ID NO: 1325388 - RNA, 21 nt, Human
aggagcagaacccgaaacuca

SEQ ID NO: 1325389 - RNA, 20 nt, Human
aggaggagcagacggugcug

SEQ ID NO: 1325390 - RNA, 22 nt, Human
aggaguggccgucaggccuggc

SEQ ID NO: 1325391 - RNA, 21 nt, Human
aggcugaggcgggaggauugc

SEQ ID NO: 1325392 - RNA, 24 nt, Human
aggcugaggcgggaggauugcuug

SEQ ID NO: 1325393 - RNA, 23 nt, Human
agggcucagacagaucggccugu

SEQ ID NO: 1325394 - RNA, 20 nt, Human
aggggagggaaggacauggu

SEQ ID NO: 1325395 - RNA, 23 nt, Human
aggggcugaaggccuccgccguc

SEQ ID NO: 1325396 - RNA, 22 nt, Human
aggucgaggcugcagugagcug

SEQ ID NO: 1325397 - RNA, 23 nt, Human
aggugcugaaggucugcagaacc

SEQ ID NO: 1325398 - RNA, 25 nt, Human
augagcugcagggcccccgguggcu

SEQ ID NO: 1325399 - RNA, 22 nt, Human
augcccggggaacgagcagcaa

SEQ ID NO: 1325400 - RNA, 21 nt, Human
auggcgcccgaccagcugcau

SEQ ID NO: 1325401 - RNA, 19 nt, Human
auucugaggaggagcagac

SEQ ID NO: 1325402 - RNA, 19 nt, Human
auugcuugagcccaggagg

SEQ ID NO: 1325403 - RNA, 19 nt, Human
caagcaccacacggagcua

SEQ ID NO: 1325404 - RNA, 22 nt, Human
caagccacagucaccccccucc

SEQ ID NO: 1325405 - RNA, 19 nt, Human
caagugagacccaccccgc

SEQ ID NO: 1325406 - RNA, 19 nt, Human
caagugagacccaccccgc

SEQ ID NO: 1325407 - RNA, 21 nt, Human
cacaagccacagucacccccc

SEQ ID NO: 1325408 - RNA, 27 nt, Human
cacagcauccaugaacucgaaugcaga

SEQ ID NO: 1325409 - RNA, 23 nt, Human
caccacacggagcuaaacccagc

SEQ ID NO: 1325410 - RNA, 24 nt, Human
caccacgcaagugagacccacccc

SEQ ID NO: 1325411 - RNA, 23 nt, Human
caccccccucccgagggcgucca

SEQ ID NO: 1325412 - RNA, 19 nt, Human
cacgaucacggcccacgug

SEQ ID NO: 1325413 - RNA, 20 nt, Human
cacgugcuuggcgugcgggc

SEQ ID NO: 1325414 - RNA, 18 nt, Human
cacuccagccugggugag

SEQ ID NO: 1325415 - RNA, 22 nt, Human
cacuccagccugggugagagcg

SEQ ID NO: 1325416 - RNA, 19 nt, Human
cacugcacuccagccuggg

SEQ ID NO: 1325417 - RNA, 19 nt, Human
cacugcacuccagccuggg

SEQ ID NO: 1325418 - RNA, 19 nt, Human
cacugcacuccagccuggg

SEQ ID NO: 1325419 - RNA, 20 nt, Human
cacugcacuccagccugggu

SEQ ID NO: 1325420 - RNA, 22 nt, Human
cacugcacuccagccuggguga

SEQ ID NO: 1325421 - RNA, 22 nt, Human
cacugcacuccagccuggguga

SEQ ID NO: 1325422 - RNA, 23 nt, Human
cacugcacuccagccugggugag

SEQ ID NO: 1325423 - RNA, 24 nt, Human
cacugcacuccagccugggugaga

SEQ ID NO: 1325424 - RNA, 21 nt, Human
cagaaccaccacccagcgccu

SEQ ID NO: 1325425 - RNA, 24 nt, Human
cagaacccgaaacucagagcacag

SEQ ID NO: 1325426 - RNA, 19 nt, Human
cagaaccgggccaaauccu

SEQ ID NO: 1325427 - RNA, 18 nt, Human
cagaaccucagcaaagcc

SEQ ID NO: 1325428 - RNA, 22 nt, Human
cagagcacagcuugcccugaua

SEQ ID NO: 1325429 - RNA, 22 nt, Human
cagcaagcaggcagaaccacca

SEQ ID NO: 1325430 - RNA, 18 nt, Human
cagcagcaggaguggccg

SEQ ID NO: 1325431 - RNA, 22 nt, Human
cagcagcaggaguggccgucag

SEQ ID NO: 1325432 - RNA, 24 nt, Human
cagcccucuagaagaugugggaaa

SEQ ID NO: 1325433 - RNA, 28 nt, Human
cagcccucuagaagaugugggaaaugac

SEQ ID NO: 1325434 - RNA, 20 nt, Human
cagcgcucagguccucucgg

SEQ ID NO: 1325435 - RNA, 24 nt, Human
cagcuacucgggaggcugaggcgg

SEQ ID NO: 1325436 - RNA, 20 nt, Human
caggaguggccgucaggccu

SEQ ID NO: 1325437 - RNA, 23 nt, Human
caggccggagcccagcgcgugcu

SEQ ID NO: 1325438 - RNA, 19 nt, Human
caucccggcucagcgccuc

SEQ ID NO: 1325439 - RNA, 19 nt, Human
caugcacacagcauccaug

SEQ ID NO: 1325440 - RNA, 23 nt, Human
ccaccgcaacacccccgcccgag

SEQ ID NO: 1325441 - RNA, 18 nt, Human
ccacgcaugccccccgcu

SEQ ID NO: 1325442 - RNA, 22 nt, Human
ccacgccccccacucugccaga

SEQ ID NO: 1325443 - RNA, 23 nt, Human
ccacgugguccugcccgugcccc

SEQ ID NO: 1325444 - RNA, 18 nt, Human
cccaccccgcuuccacgu

SEQ ID NO: 1325445 - RNA, 19 nt, Human
cccacgcccccugcugccc

SEQ ID NO: 1325446 - RNA, 22 nt, Human
cccacgugguccugcccgugcc

SEQ ID NO: 1325447 - RNA, 18 nt, Human
cccaggacgucccucuuc

SEQ ID NO: 1325448 - RNA, 21 nt, Human
cccaggccgcagcaggcaaga

SEQ ID NO: 1325449 - RNA, 18 nt, Human
cccccgcccgagagccac

SEQ ID NO: 1325450 - RNA, 21 nt, Human
ccccuugcaggugcugaaggu

SEQ ID NO: 1325451 - RNA, 21 nt, Human
cccgcccgagagccacccgcc

SEQ ID NO: 1325452 - RNA, 21 nt, Human
cccgccgacccccagugggcc

SEQ ID NO: 1325453 - RNA, 21 nt, Human
cccuugggguccagcagggcc

SEQ ID NO: 1325454 - RNA, 27 nt, Human
ccgcaacacccccgcccgagagccacc

SEQ ID NO: 1325455 - RNA, 20 nt, Human
ccgccaccccggccugucca

SEQ ID NO: 1325456 - RNA, 24 nt, Human
ccucagagccaccgcaacaccccc

SEQ ID NO: 1325457 - RNA, 18 nt, Human
ccucuagaagauguggga

SEQ ID NO: 1325458 - RNA, 19 nt, Human
ccugguccccugcccacug

SEQ ID NO: 1325459 - RNA, 21 nt, Human
cgcaacacccccgcccgagag

SEQ ID NO: 1325460 - RNA, 21 nt, Human
cggcgggcgggccacggggga

SEQ ID NO: 1325461 - RNA, 22 nt, Human
cgggaggcugaggcgggaggau

SEQ ID NO: 1325462 - RNA, 20 nt, Human
cgggccaaauccuagggcuc

SEQ ID NO: 1325463 - RNA, 19 nt, Human
cgggugggaggcagggaca

SEQ ID NO: 1325464 - RNA, 21 nt, Human
cgggugggccacaggggaggg

SEQ ID NO: 1325465 - RNA, 21 nt, Human
cgucuuguagggguugaggau

SEQ ID NO: 1325466 - RNA, 23 nt, Human
cucagagccaccgcaacaccccc

SEQ ID NO: 1325467 - RNA, 19 nt, Human
cuccgcgcugacgcugccc

SEQ ID NO: 1325468 - RNA, 24 nt, Human
cugaagcagaaccgggccaaaucc

SEQ ID NO: 1325469 - RNA, 24 nt, Human
cugaagcccacuccgugcuccgcg

SEQ ID NO: 1325470 - RNA, 20 nt, Human
cugcccagggcagcugacga

SEQ ID NO: 1325471 - RNA, 22 nt, Human
cugcugcccggccguccacucg

SEQ ID NO: 1325472 - RNA, 20 nt, Human
gacccggcuccauucagcag

SEQ ID NO: 1325473 - RNA, 24 nt, Human
gaggcgggaggauugcuugagccc

SEQ ID NO: 1325474 - RNA, 18 nt, Human
gaggcgggcgcgcagguc

SEQ ID NO: 1325475 - RNA, 22 nt, Human
gcacuccagccugggugagagc

SEQ ID NO: 1325476 - RNA, 18 nt, Human
gcagcagcaggaguggcc

SEQ ID NO: 1325477 - RNA, 19 nt, Human
gcccacgcaugcccgggga

SEQ ID NO: 1325478 - RNA, 24 nt, Human
gcccaggaggucgaggcugcagug

SEQ ID NO: 1325479 - RNA, 19 nt, Human
gcgggccgaggcgggcgcg

SEQ ID NO: 1325480 - RNA, 21 nt, Human
ggaaaugacacauuccugucc

SEQ ID NO: 1325481 - RNA, 19 nt, Human
ggaggaggagggacacggc

SEQ ID NO: 1325482 - RNA, 19 nt, Human
ggccacaggggagggaagg

SEQ ID NO: 1325483 - RNA, 19 nt, Human
ggccacgggggagggaagg

SEQ ID NO: 1325484 - RNA, 19 nt, Human
ggccgaggcgggcgcgcag

SEQ ID NO: 1325485 - RNA, 19 nt, Human
ggccugagggacccggcuc

SEQ ID NO: 1325486 - RNA, 19 nt, Human
gggagggaaggacacggug

SEQ ID NO: 1325487 - RNA, 25 nt, Human
gggagggaaggacacggugggcggg

SEQ ID NO: 1325488 - RNA, 25 nt, Human
gggagggaaggacaugguggguggg

SEQ ID NO: 1325489 - RNA, 20 nt, Human
gggcagcugacgagcagaaa

SEQ ID NO: 1325490 - RNA, 21 nt, Human
gggcagcugacgagcagaaac

SEQ ID NO: 1325491 - RNA, 18 nt, Human
gggccgaggcgggcgcgc

SEQ ID NO: 1325492 - RNA, 18 nt, Human
gggcgggccguggaggag

SEQ ID NO: 1325493 - RNA, 20 nt, Human
ggggagggaaggacauggug

SEQ ID NO: 1325494 - RNA, 20 nt, Human
gggguccagcagggccuuga

SEQ ID NO: 1325495 - RNA, 25 nt, Human
gggguccagcagggccuugagcugc

SEQ ID NO: 1325496 - RNA, 24 nt, Human
gggugccugccacgccccccacuc

SEQ ID NO: 1325497 - RNA, 21 nt, Human
gggugggaggcagggacaugg

SEQ ID NO: 1325498 - RNA, 20 nt, Human
ggugggugggccacggggga

SEQ ID NO: 1325499 - RNA, 25 nt, Human
guaggagcagaacccgaaacucaga

SEQ ID NO: 1325500 - RNA, 24 nt, Human
gucacugcacuccagccuggguga

SEQ ID NO: 1325501 - RNA, 19 nt, Human
gugggcgggccguggagga

SEQ ID NO: 1325502 - RNA, 19 nt, Human
ucaccccccucccgagggc

SEQ ID NO: 1325503 - RNA, 20 nt, Human
ucacugcacuccagccuggg

SEQ ID NO: 1325504 - RNA, 21 nt, Human
ucacugcacuccagccugggu

SEQ ID NO: 1325505 - RNA, 23 nt, Human
ucacugcacuccagccuggguga

SEQ ID NO: 1325506 - RNA, 20 nt, Human
ucagagcacagcuugcccug

SEQ ID NO: 1325507 - RNA, 26 nt, Human
ucagcaaagccugggcagccugaaac

SEQ ID NO: 1325508 - RNA, 27 nt, Human
ucagcaaagccugggcagccugaaacg

SEQ ID NO: 1325509 - RNA, 21 nt, Human
ucaggccuggcugggcagcgu

SEQ ID NO: 1325510 - RNA, 23 nt, Human
ucagguccucucggcaacccacg

SEQ ID NO: 1325511 - RNA, 21 nt, Human
uccagccugggugagagcgag

SEQ ID NO: 1325512 - RNA, 22 nt, Human
uccagccugggugagagcgaga

SEQ ID NO: 1325513 - RNA, 22 nt, Human
ucccaucggucaccaggccgga

SEQ ID NO: 1325514 - RNA, 23 nt, Human
uccccagugcgggcucccagucc

SEQ ID NO: 1325515 - RNA, 25 nt, Human
ucgcccagcccauccgcugcccagg

SEQ ID NO: 1325516 - RNA, 20 nt, Human
ucgggaggcugaggcgggag

SEQ ID NO: 1325517 - RNA, 21 nt, Human
ucuccaagguggccauagccc

SEQ ID NO: 1325518 - RNA, 19 nt, Human
ucucuugcaccgggcuggc

SEQ ID NO: 1325519 - RNA, 20 nt, Human
ucugcagaaccucagcaaag

SEQ ID NO: 1325520 - RNA, 19 nt, Human
ugaggaggagcagacggug

SEQ ID NO: 1325521 - RNA, 22 nt, Human
ugaggcgggaggauugcuugag

SEQ ID NO: 1325522 - RNA, 24 nt, Human
ugaggcgggaggauugcuugagcc

SEQ ID NO: 1325523 - RNA, 21 nt, Human
ugcaugcacacagcauccaug

SEQ ID NO: 1325524 - RNA, 21 nt, Human
ugcccagggcagcugacgagc

SEQ ID NO: 1325525 - RNA, 21 nt, Human
ugcccuugggguccagcaggg

SEQ ID NO: 1325526 - RNA, 20 nt, Human
ugcuuggcgugcgggccgag

SEQ ID NO: 1325527 - RNA, 21 nt, Human
uggaggaggagggacacggcg

SEQ ID NO: 1325528 - RNA, 21 nt, Human
uggccagguggagauggcgcc

SEQ ID NO: 1325529 - RNA, 18 nt, Human
uggcugcagaggccccac

SEQ ID NO: 1325530 - RNA, 18 nt, Human
uggcugggcagcgucuug

SEQ ID NO: 1325531 - RNA, 22 nt, Human
uggcugggcagcgucuuguagg

SEQ ID NO: 1325532 - RNA, 20 nt, Human
ugggaggcagggacauggcg

SEQ ID NO: 1325533 - RNA, 22 nt, Human
ugggaggcagggacauggcggg

SEQ ID NO: 1325534 - RNA, 19 nt, Human
ugggaggcagggacauggg

SEQ ID NO: 1325535 - RNA, 19 nt, Human
ugggccuuggcagcagcag

SEQ ID NO: 1325536 - RNA, 21 nt, Human
ugggugggccacgggggaggg

SEQ ID NO: 1325537 - RNA, 19 nt, Human
uguagacucagcuacucgg

SEQ ID NO: 1325538 - RNA, 20 nt, Human
uuccccagugcgggcuccca

SEQ ID NO: 1325539 - RNA, 24 nt, Human
uuccuguccagacacaagccacag

SEQ ID NO: 1325540 - RNA, 21 nt, Human
uucgaacuuccauuguggaga

SEQ ID NO: 1325541 - RNA, 20 nt, Human
uugagcugcugcaugagcug

SEQ ID NO: 1325542 - RNA, 24 nt, Human
uugcuugagcccaggaggucgagg

SEQ ID NO: 1325543 - RNA, 22 nt, Human
aagaggcaucuccagauguacc

SEQ ID NO: 1325544 - RNA, 23 nt, Human
aagcuguuucuucuuuggugccu

SEQ ID NO: 1325545 - RNA, 18 nt, Human
accaaguauaacuaccaa

SEQ ID NO: 1325546 - RNA, 23 nt, Human
accaaguauaacuaccaaagcug

SEQ ID NO: 1325547 - RNA, 18 nt, Human
guauaacuaccaaagcug

SEQ ID NO: 1325548 - RNA, 21 nt, Human
gucugaccaaguauaacuacc

SEQ ID NO: 1325549 - RNA, 21 nt, Human
guggaagaggcaucuccagau

SEQ ID NO: 1325550 - RNA, 18 nt, Human
uaccugagggguggggag

SEQ ID NO: 1325551 - RNA, 23 nt, Human
uagguuuagaaaacaggauauga

SEQ ID NO: 1325552 - RNA, 22 nt, Human
ucuguugauguaccacccuaga

SEQ ID NO: 1325553 - RNA, 19 nt, Human
uggaagaggcaucuccaga

SEQ ID NO: 1325554 - RNA, 21 nt, Human
auuccaacugauuaccauuua

SEQ ID NO: 1325555 - RNA, 24 nt, Human
caacugauuaccauuuacagugau

SEQ ID NO: 1325556 - RNA, 21 nt, Human
cacacugccaagguccccacc

SEQ ID NO: 1325557 - RNA, 26 nt, Human
ccccagugcaccccagcuccggggca

SEQ ID NO: 1325558 - RNA, 23 nt, Human
ccucucgggggacugcagggaga

SEQ ID NO: 1325559 - RNA, 23 nt, Human
cucauguccacacugccaagguc

SEQ ID NO: 1325560 - RNA, 24 nt, Human
cugccgggaaagagcuccugaagu

SEQ ID NO: 1325561 - RNA, 24 nt, Human
gacugcagggagaggcgucuccag

SEQ ID NO: 1325562 - RNA, 25 nt, Human
gcucagaguuaucacugaacuucag

SEQ ID NO: 1325563 - RNA, 21 nt, Human
ggacaggggagagggcaggag

SEQ ID NO: 1325564 - RNA, 22 nt, Human
ggcagaagaggcagccugcaga

SEQ ID NO: 1325565 - RNA, 18 nt, Human
gggagagggcaggagacu

SEQ ID NO: 1325566 - RNA, 18 nt, Human
ucaggacaggggagaggg

SEQ ID NO: 1325567 - RNA, 20 nt, Human
ucaggacaggggagagggca

SEQ ID NO: 1325568 - RNA, 23 nt, Human
ucaggacaggggagagggcagga

SEQ ID NO: 1325569 - RNA, 22 nt, Human
uccaacugauuaccauuuacag

SEQ ID NO: 1325570 - RNA, 23 nt, Human
uccccagugcaccccagcuccgg

SEQ ID NO: 1325571 - RNA, 25 nt, Human
ucuccagugggcagccuuucccaag

SEQ ID NO: 1325572 - RNA, 22 nt, Human
ucugcucauguccacacugcca

SEQ ID NO: 1325573 - RNA, 20 nt, Human
ugaaguuguggggucugggg

SEQ ID NO: 1325574 - RNA, 18 nt, Human
cuguauauaaauucuccu

SEQ ID NO: 1325575 - RNA, 21 nt, Human
aaauccaucucuagcagcaag

SEQ ID NO: 1325576 - RNA, 24 nt, Human
gauggcgggaggacaagaggcagg

SEQ ID NO: 1325577 - RNA, 22 nt, Human
gcgggaggacaagaggcaggag

SEQ ID NO: 1325578 - RNA, 22 nt, Human
ggacaagaggcaggagcccaga

SEQ ID NO: 1325579 - RNA, 21 nt, Human
gggaggacaagaggcaggagc

SEQ ID NO: 1325580 - RNA, 18 nt, Human
ucuagcagcaaguuucag

SEQ ID NO: 1325581 - RNA, 22 nt, Human
aagaacaccaguaguugaggac

SEQ ID NO: 1325582 - RNA, 24 nt, Human
agauugcagauucccugaagaaca

SEQ ID NO: 1325583 - RNA, 25 nt, Human
cccugaagaacaccaguaguugagg

SEQ ID NO: 1325584 - RNA, 18 nt, Human
ccuucaaacuguagccua

SEQ ID NO: 1325585 - RNA, 21 nt, Human
cugaagaacaccaguaguuga

SEQ ID NO: 1325586 - RNA, 19 nt, Human
uagauugcagauucccuga

SEQ ID NO: 1325587 - RNA, 23 nt, Human
uccguuuuucaauggcuuccuuc

SEQ ID NO: 1325588 - RNA, 21 nt, Human
aaaggaaacaugggggcaagg

SEQ ID NO: 1325589 - RNA, 19 nt, Human
aagcgcaggaggggcgggg

SEQ ID NO: 1325590 - RNA, 24 nt, Human
aaggucugcaggguccuggucagc

SEQ ID NO: 1325591 - RNA, 19 nt, Human
agcagcaaagccgcuucug

SEQ ID NO: 1325592 - RNA, 19 nt, Human
aggaaacaugggggcaagg

SEQ ID NO: 1325593 - RNA, 21 nt, Human
caaggucugcaggguccuggu

SEQ ID NO: 1325594 - RNA, 19 nt, Human
cacuuccuagcagcaaagc

SEQ ID NO: 1325595 - RNA, 18 nt, Human
ccccgugccggggcgucc

SEQ ID NO: 1325596 - RNA, 21 nt, Human
ccuugggaccaucugucuggg

SEQ ID NO: 1325597 - RNA, 20 nt, Human
cuagcagcaaagccgcuucu

SEQ ID NO: 1325598 - RNA, 20 nt, Human
cuggcggccacgggucuccc

SEQ ID NO: 1325599 - RNA, 21 nt, Human
cuucauaaaggaaacaugggg

SEQ ID NO: 1325600 - RNA, 20 nt, Human
cuuugcgccuucuggaaagu

SEQ ID NO: 1325601 - RNA, 18 nt, Human
ggaacaauagggcaccug

SEQ ID NO: 1325602 - RNA, 18 nt, Human
ggaggggcggggguggga

SEQ ID NO: 1325603 - RNA, 21 nt, Human
gggccccgcgauguuuuccag

SEQ ID NO: 1325604 - RNA, 22 nt, Human
uagaugaggaacaauagggcac

SEQ ID NO: 1325605 - RNA, 22 nt, Human
ucagcagacaggugcacuuccu

SEQ ID NO: 1325606 - RNA, 22 nt, Human
ucuggguggggguggaacuggg

SEQ ID NO: 1325607 - RNA, 19 nt, Human
ugccggggcguccaccgga

SEQ ID NO: 1325608 - RNA, 20 nt, Human
ugccggggcguccaccggag

SEQ ID NO: 1325609 - RNA, 19 nt, Human
ugggaagaggagagcgaca

SEQ ID NO: 1325610 - RNA, 21 nt, Human
ugggacagucaggaucagagu

SEQ ID NO: 1325611 - RNA, 19 nt, Human
ugggaccaucugucugggu

SEQ ID NO: 1325612 - RNA, 18 nt, Human
ugggagaaacuuugcgcc

SEQ ID NO: 1325613 - RNA, 23 nt, Human
uucauaaaggaaacaugggggca

SEQ ID NO: 1325614 - RNA, 23 nt, Human
uugggaccaucugucuggguggg

SEQ ID NO: 1325615 - RNA, 20 nt, Human
aauaaaaccucagcauauga

SEQ ID NO: 1325616 - RNA, 18 nt, Human
acaucaccaacuccaucu

SEQ ID NO: 1325617 - RNA, 26 nt, Human
auccagaaccacaaacuaccauaggg

SEQ ID NO: 1325618 - RNA, 21 nt, Human
cagggaaacccuuugcaaaga

SEQ ID NO: 1325619 - RNA, 20 nt, Human
cagugaaguaagauauggug

SEQ ID NO: 1325620 - RNA, 18 nt, Human
ccuccucccuccucagau

SEQ ID NO: 1325621 - RNA, 28 nt, Human
cugcuggagucuaaaggcuuggugucuu

SEQ ID NO: 1325622 - RNA, 20 nt, Human
cuggacuaaauaaaaccuca

SEQ ID NO: 1325623 - RNA, 23 nt, Human
cugugaauugggaguagucguau

SEQ ID NO: 1325624 - RNA, 24 nt, Human
cuugaaaaugccagcucauuccca

SEQ ID NO: 1325625 - RNA, 21 nt, Human
gaacaagcaggugaccaaagu

SEQ ID NO: 1325626 - RNA, 18 nt, Human
gcaaagauuucauccaga

SEQ ID NO: 1325627 - RNA, 22 nt, Human
gcgaggcguuugauagcuuggg

SEQ ID NO: 1325628 - RNA, 20 nt, Human
guaaauauguacugaaaacc

SEQ ID NO: 1325629 - RNA, 24 nt, Human
uaaauauguacugaaaaccucuga

SEQ ID NO: 1325630 - RNA, 20 nt, Human
uacaucccaucccacccuuu

SEQ ID NO: 1325631 - RNA, 21 nt, Human
ucagugaaguaagauaugguu

SEQ ID NO: 1325632 - RNA, 21 nt, Human
uccaucuuccuugggcaccuc

SEQ ID NO: 1325633 - RNA, 23 nt, Human
uccuucagcaucuggacuaaaua

SEQ ID NO: 1325634 - RNA, 24 nt, Human
ucucuugguauccuccuccuccaa

SEQ ID NO: 1325635 - RNA, 20 nt, Human
ugaaugacugaugagucacu

SEQ ID NO: 1325636 - RNA, 22 nt, Human
ugacuucagugaaguaagauau

SEQ ID NO: 1325637 - RNA, 19 nt, Human
ugagugccagggaaacccu

SEQ ID NO: 1325638 - RNA, 22 nt, Human
ugcaaagauuucauccagaacc

SEQ ID NO: 1325639 - RNA, 19 nt, Human
ugcaggcuuugauuucuga

SEQ ID NO: 1325640 - RNA, 23 nt, Human
ugguggccugugaacaagcaggu

SEQ ID NO: 1325641 - RNA, 22 nt, Human
ugugaacaagcaggugaccaaa

SEQ ID NO: 1325642 - RNA, 21 nt, Human
uucuguuugagugccagggaa

SEQ ID NO: 1325643 - RNA, 22 nt, Human
uugccagccucaggcucucuuc

SEQ ID NO: 1325644 - RNA, 21 nt, Human
uuggagccuccucccuccuca

SEQ ID NO: 1325645 - RNA, 21 nt, Human
uuuucauccacccaguagcug

SEQ ID NO: 1325646 - RNA, 23 nt, Human
aaagauaaacaaauuagaggcca

SEQ ID NO: 1325647 - RNA, 20 nt, Human
aagcggccgagaggcaggag

SEQ ID NO: 1325648 - RNA, 20 nt, Human
agaggcaggaggccgggccc

SEQ ID NO: 1325649 - RNA, 23 nt, Human
agauaaacaaauuagaggccaag

SEQ ID NO: 1325650 - RNA, 22 nt, Human
aggcaggagcuggaccugcuga

SEQ ID NO: 1325651 - RNA, 18 nt, Human
aggcaggaggccgggccu

SEQ ID NO: 1325652 - RNA, 22 nt, Human
aggcaggaggccgggccugcaa

SEQ ID NO: 1325653 - RNA, 24 nt, Human
aggcaggaggccgggccugcaaag

SEQ ID NO: 1325654 - RNA, 18 nt, Human
cccgugcaggccuucgag

SEQ ID NO: 1325655 - RNA, 20 nt, Human
ccgggccugcaaaggcccac

SEQ ID NO: 1325656 - RNA, 18 nt, Human
cgagaggcaggaggccgg

SEQ ID NO: 1325657 - RNA, 22 nt, Human
cgggagcugggccugccgaagc

SEQ ID NO: 1325658 - RNA, 18 nt, Human
cugggccuaaagaggcca

SEQ ID NO: 1325659 - RNA, 22 nt, Human
cugggccugaagaggccgccaa

SEQ ID NO: 1325660 - RNA, 19 nt, Human
gaggcaggagcuggaccug

SEQ ID NO: 1325661 - RNA, 18 nt, Human
gcgggagcugggccugcc

SEQ ID NO: 1325662 - RNA, 21 nt, Human
ggaagggaaaaacggggccug

SEQ ID NO: 1325663 - RNA, 28 nt, Human
ggaggcaggagcuggaccucccaagggg

SEQ ID NO: 1325664 - RNA, 20 nt, Human
ggaggccgggccugcaaagg

SEQ ID NO: 1325665 - RNA, 18 nt, Human
ggccgagaggcaggaguu

SEQ ID NO: 1325666 - RNA, 20 nt, Human
ggccugaagaggccgccaaa

SEQ ID NO: 1325667 - RNA, 19 nt, Human
gugaggcagaggcugggcc

SEQ ID NO: 1325668 - RNA, 21 nt, Human
uaaacaaauuagaggccaaga

SEQ ID NO: 1325669 - RNA, 20 nt, Human
ucugcugugaggcagaggcu

SEQ ID NO: 1325670 - RNA, 18 nt, Human
ugaggcagaggcugggcc

SEQ ID NO: 1325671 - RNA, 23 nt, Human
ugccggaagggaaaaacggggcc

SEQ ID NO: 1325672 - RNA, 18 nt, Human
uggaggucaaguucuggg

SEQ ID NO: 1325673 - RNA, 22 nt, Human
uggcaggcgggagcugggccug

SEQ ID NO: 1325674 - RNA, 20 nt, Human
ugggccuaaagaggccacug

SEQ ID NO: 1325675 - RNA, 18 nt, Human
ugugaggaaugagcuggg

SEQ ID NO: 1325676 - RNA, 18 nt, Human
ugugaggccgaggccggg

SEQ ID NO: 1325677 - RNA, 23 nt, Human
aaaauagaaaaacaagggaaaga

SEQ ID NO: 1325678 - RNA, 23 nt, Human
aaacacuugaaacacugcuuuga

SEQ ID NO: 1325679 - RNA, 20 nt, Human
cagcucagcaagcauccucu

SEQ ID NO: 1325680 - RNA, 23 nt, Human
cuuugaaagauaaaauagaaaaa

SEQ ID NO: 1325681 - RNA, 23 nt, Human
uaaaauagaaaaacaagggaaag

SEQ ID NO: 1325682 - RNA, 22 nt, Human
uagaaaaacaagggaaagaaga

SEQ ID NO: 1325683 - RNA, 20 nt, Human
uagauuaguuuauaaacacu

SEQ ID NO: 1325684 - RNA, 21 nt, Human
aaacaucuggaaagacugugg

SEQ ID NO: 1325685 - RNA, 21 nt, Human
aagucaaccacacacaaccac

SEQ ID NO: 1325686 - RNA, 22 nt, Human
aaugaaaggagaaacaucugga

SEQ ID NO: 1325687 - RNA, 20 nt, Human
acccgggcuguuuucugucc

SEQ ID NO: 1325688 - RNA, 21 nt, Human
agacuccaucucaaacaaaag

SEQ ID NO: 1325689 - RNA, 24 nt, Human
agggaguucccaggacccaggaag

SEQ ID NO: 1325690 - RNA, 23 nt, Human
aggguugaagucgccacaggggu

SEQ ID NO: 1325691 - RNA, 25 nt, Human
aguagauggaaaaugaaaggagaaa

SEQ ID NO: 1325692 - RNA, 19 nt, Human
aucuggaaagacugugggg

SEQ ID NO: 1325693 - RNA, 21 nt, Human
caaaugccucaacacuaggcc

SEQ ID NO: 1325694 - RNA, 27 nt, Human
caaccaccaugcuccguuuuccagggc

SEQ ID NO: 1325695 - RNA, 19 nt, Human
cacacaaccaccaugcucc

SEQ ID NO: 1325696 - RNA, 20 nt, Human
cacacacaaccaccaugcuc

SEQ ID NO: 1325697 - RNA, 19 nt, Human
cagcuuucccccucagcuu

SEQ ID NO: 1325698 - RNA, 22 nt, Human
caggacccaggaagucaaccac

SEQ ID NO: 1325699 - RNA, 19 nt, Human
cagucaacugugggugaug

SEQ ID NO: 1325700 - RNA, 20 nt, Human
cauucucgcuccagcccagg

SEQ ID NO: 1325701 - RNA, 22 nt, Human
ccaccaugcuccguuuuccagg

SEQ ID NO: 1325702 - RNA, 20 nt, Human
ccagccagaaccuuccuagu

SEQ ID NO: 1325703 - RNA, 21 nt, Human
cccagcccugcugccccggga

SEQ ID NO: 1325704 - RNA, 19 nt, Human
cccaggaagucaaccacac

SEQ ID NO: 1325705 - RNA, 20 nt, Human
cccgggcuguuuucuguccc

SEQ ID NO: 1325706 - RNA, 20 nt, Human
cccugacucaugaagaaccc

SEQ ID NO: 1325707 - RNA, 18 nt, Human
ccguuuccagggccuugg

SEQ ID NO: 1325708 - RNA, 19 nt, Human
cguccccagcccugcugcc

SEQ ID NO: 1325709 - RNA, 21 nt, Human
cuccguuuuccagggccuugg

SEQ ID NO: 1325710 - RNA, 27 nt, Human
cucguccccagcccugcugccgguucc

SEQ ID NO: 1325711 - RNA, 18 nt, Human
gcccucguccccagcccu

SEQ ID NO: 1325712 - RNA, 23 nt, Human
uccagggccuuggacaaaugccu

SEQ ID NO: 1325713 - RNA, 19 nt, Human
ucccaggguugaagucgcc

SEQ ID NO: 1325714 - RNA, 20 nt, Human
uccugagccucgguuugcuc

SEQ ID NO: 1325715 - RNA, 21 nt, Human
ucugucccuucccuuccaggg

SEQ ID NO: 1325716 - RNA, 23 nt, Human
ugacucaugaagaacccuugccu

SEQ ID NO: 1325717 - RNA, 18 nt, Human
ugccuucuggaccauucc

SEQ ID NO: 1325718 - RNA, 18 nt, Human
uggaaaaugaaaggagaa

SEQ ID NO: 1325719 - RNA, 18 nt, Human
uggaaagacuguggggcc

SEQ ID NO: 1325720 - RNA, 22 nt, Human
ugggcaagacuccaucucaaac

SEQ ID NO: 1325721 - RNA, 18 nt, Human
uugcucaucuguaagaug

SEQ ID NO: 1325722 - RNA, 24 nt, Human
aaaccaaagaccacauccagaaga

SEQ ID NO: 1325723 - RNA, 21 nt, Human
aaagaccacauccagaagaaa

SEQ ID NO: 1325724 - RNA, 24 nt, Human
aaagaccacauccagaagaaaauc

SEQ ID NO: 1325725 - RNA, 18 nt, Human
aaccaaagaccacaucca

SEQ ID NO: 1325726 - RNA, 20 nt, Human
aagaaaaucaagauggccca

SEQ ID NO: 1325727 - RNA, 24 nt, Human
aagaaacgcgugccaaagagaaca

SEQ ID NO: 1325728 - RNA, 25 nt, Human
acagccgacaccauggagaacagua

SEQ ID NO: 1325729 - RNA, 22 nt, Human
accauggagaacaguaagaaac

SEQ ID NO: 1325730 - RNA, 22 nt, Human
agacagccgacaccauggagaa

SEQ ID NO: 1325731 - RNA, 23 nt, Human
caguaagaaacgcgugccaaaga

SEQ ID NO: 1325732 - RNA, 19 nt, Human
ccagaacuugucacagucu

SEQ ID NO: 1325733 - RNA, 18 nt, Human
cugaaaaccaaagaccac

SEQ ID NO: 1325734 - RNA, 18 nt, Human
gagaacaguaagaaacgc

SEQ ID NO: 1325735 - RNA, 25 nt, Human
gugccaaagagaacaagugaggauc

SEQ ID NO: 1325736 - RNA, 19 nt, Human
ucaguugcagguacugcuu

SEQ ID NO: 1325737 - RNA, 19 nt, Human
uccccgggaagaauccuca

SEQ ID NO: 1325738 - RNA, 24 nt, Human
uccccgggaagaauccucaguugc

SEQ ID NO: 1325739 - RNA, 18 nt, Human
aggaguguucaggaucug

SEQ ID NO: 1325740 - RNA, 19 nt, Human
aggaguguucaggaucugc

SEQ ID NO: 1325741 - RNA, 19 nt, Human
augcugccuugggagccca

SEQ ID NO: 1325742 - RNA, 20 nt, Human
augcugccuugggagcccau

SEQ ID NO: 1325743 - RNA, 21 nt, Human
augcugccuugggagcccaug

SEQ ID NO: 1325744 - RNA, 25 nt, Human
caaagugccaggccccuuuccuaug

SEQ ID NO: 1325745 - RNA, 23 nt, Human
cagccgccgggcagcuggggugg

SEQ ID NO: 1325746 - RNA, 18 nt, Human
ccuugggagcccaugcug

SEQ ID NO: 1325747 - RNA, 20 nt, Human
gcagcuggggugggguggga

SEQ ID NO: 1325748 - RNA, 19 nt, Human
uaacaggaaacacguggca

SEQ ID NO: 1325749 - RNA, 22 nt, Human
uggaaguguccccagagcccuc

SEQ ID NO: 1325750 - RNA, 19 nt, Human
ugggagagcagcuggggau

SEQ ID NO: 1325751 - RNA, 21 nt, Human
ugggguggggugggagagcag

SEQ ID NO: 1325752 - RNA, 18 nt, Human
aaauaucucuucgauauc

SEQ ID NO: 1325753 - RNA, 22 nt, Human
aaggcugaauaauauuccauua

SEQ ID NO: 1325754 - RNA, 18 nt, Human
agguucaucuauguugua

SEQ ID NO: 1325755 - RNA, 18 nt, Human
cacaacauccucaagguu

SEQ ID NO: 1325756 - RNA, 20 nt, Human
caguagggacugagcucgug

SEQ ID NO: 1325757 - RNA, 19 nt, Human
cauuccuaucagcauugca

SEQ ID NO: 1325758 - RNA, 21 nt, Human
cgcgcggaggauggauugcuc

SEQ ID NO: 1325759 - RNA, 20 nt, Human
cgcgugcgaacgugugugcg

SEQ ID NO: 1325760 - RNA, 26 nt, Human
gggauugcuggaucauaugguagcuu

SEQ ID NO: 1325761 - RNA, 22 nt, Human
uauccugcuuucaauucuuuug

SEQ ID NO: 1325762 - RNA, 18 nt, Human
uauugcacuuggcacaac

SEQ ID NO: 1325763 - RNA, 24 nt, Human
uauugugaauagugcugcaaugaa

SEQ ID NO: 1325764 - RNA, 21 nt, Human
uccagcgcgccggccgccgcg

SEQ ID NO: 1325765 - RNA, 24 nt, Human
ucuuggcuauugugaauagugcug

SEQ ID NO: 1325766 - RNA, 20 nt, Human
ugcauaguggugguaccauc

SEQ ID NO: 1325767 - RNA, 19 nt, Human
ugcuucaaccucuuggcua

SEQ ID NO: 1325768 - RNA, 18 nt, Human
uuugggcugcuucaaccu

SEQ ID NO: 1325769 - RNA, 21 nt, Human
aagaggcacccacccgaccca

SEQ ID NO: 1325770 - RNA, 24 nt, Human
accacauucgagcugcuuucaguc

SEQ ID NO: 1325771 - RNA, 19 nt, Human
accauuuggccagcaaagc

SEQ ID NO: 1325772 - RNA, 20 nt, Human
acccacccgacccaacccga

SEQ ID NO: 1325773 - RNA, 22 nt, Human
acccgagcccauauccaggccc

SEQ ID NO: 1325774 - RNA, 28 nt, Human
accugccuuccccggggcagaucuccau

SEQ ID NO: 1325775 - RNA, 22 nt, Human
acucaccugccuuccccggggc

SEQ ID NO: 1325776 - RNA, 22 nt, Human
acucugcagccacaauggcaga

SEQ ID NO: 1325777 - RNA, 21 nt, Human
agagcuugcccaccuccgcau

SEQ ID NO: 1325778 - RNA, 19 nt, Human
agaggaaggcagaggaggg

SEQ ID NO: 1325779 - RNA, 20 nt, Human
agcaaagccuaaaacacaua

SEQ ID NO: 1325780 - RNA, 21 nt, Human
agcacuuucucucuguucugu

SEQ ID NO: 1325781 - RNA, 24 nt, Human
agcaucuucccacccccagggggc

SEQ ID NO: 1325782 - RNA, 24 nt, Human
agccacaauggcagagcugaguag

SEQ ID NO: 1325783 - RNA, 26 nt, Human
agccugguggccugggaccagcccug

SEQ ID NO: 1325784 - RNA, 18 nt, Human
aggaaggcagaggaggga

SEQ ID NO: 1325785 - RNA, 20 nt, Human
aggagccacaccacgcagag

SEQ ID NO: 1325786 - RNA, 19 nt, Human
aggcagaggagggaggaac

SEQ ID NO: 1325787 - RNA, 22 nt, Human
aggcagaggagggaggaacugu

SEQ ID NO: 1325788 - RNA, 23 nt, Human
aggcagaggagggaggaacugug

SEQ ID NO: 1325789 - RNA, 24 nt, Human
aggucucuuuauccuccuuggcug

SEQ ID NO: 1325790 - RNA, 18 nt, Human
aucgcagcucacuuuuac

SEQ ID NO: 1325791 - RNA, 22 nt, Human
aucguugcuuaacuguuuuccu

SEQ ID NO: 1325792 - RNA, 20 nt, Human
augccaccuccucagcucuc

SEQ ID NO: 1325793 - RNA, 24 nt, Human
caagaaugccaccuccucagcucu

SEQ ID NO: 1325794 - RNA, 26 nt, Human
cacccaggccacagggggauggaggc

SEQ ID NO: 1325795 - RNA, 20 nt, Human
caccuccucagcucucuccc

SEQ ID NO: 1325796 - RNA, 21 nt, Human
caccuccucagcucucucccu

SEQ ID NO: 1325797 - RNA, 26 nt, Human
cacucugcagccacaauggcagagcu

SEQ ID NO: 1325798 - RNA, 18 nt, Human
cagccucagagcacgcag

SEQ ID NO: 1325799 - RNA, 18 nt, Human
cagcucucucccucaagg

SEQ ID NO: 1325800 - RNA, 25 nt, Human
cagcucucucccucaaggaggagcc

SEQ ID NO: 1325801 - RNA, 18 nt, Human
cagcuucucgcagcccuc

SEQ ID NO: 1325802 - RNA, 22 nt, Human
cauugagcaucuucccaccccc

SEQ ID NO: 1325803 - RNA, 18 nt, Human
cauugcacccagccuggu

SEQ ID NO: 1325804 - RNA, 21 nt, Human
cauugcacccagccugguggc

SEQ ID NO: 1325805 - RNA, 24 nt, Human
cauugcacccagccugguggccug

SEQ ID NO: 1325806 - RNA, 22 nt, Human
cauuuggccagcaaagccuaaa

SEQ ID NO: 1325807 - RNA, 19 nt, Human
ccaacccgacccgacccga

SEQ ID NO: 1325808 - RNA, 19 nt, Human
ccacaccacgcagaggaag

SEQ ID NO: 1325809 - RNA, 22 nt, Human
ccacaccacgcagaggaaggca

SEQ ID NO: 1325810 - RNA, 19 nt, Human
ccacguguggacgcugggg

SEQ ID NO: 1325811 - RNA, 25 nt, Human
ccagcaaagccuaaaacagcggacc

SEQ ID NO: 1325812 - RNA, 20 nt, Human
ccaggcccagugagcucugc

SEQ ID NO: 1325813 - RNA, 22 nt, Human
cccacccccagggggccuggaa

SEQ ID NO: 1325814 - RNA, 22 nt, Human
cccauggccucuguguucuucu

SEQ ID NO: 1325815 - RNA, 19 nt, Human
ccccacccagccaaggcua

SEQ ID NO: 1325816 - RNA, 23 nt, Human
cccccagggggccuggaagacuu

SEQ ID NO: 1325817 - RNA, 27 nt, Human
cccccgcugccuccacguguggacgcu

SEQ ID NO: 1325818 - RNA, 21 nt, Human
cccgacccgacccucgggagc

SEQ ID NO: 1325819 - RNA, 22 nt, Human
cccucgggagcccugcucucug

SEQ ID NO: 1325820 - RNA, 22 nt, Human
cccugcucucuggucaguuggc

SEQ ID NO: 1325821 - RNA, 21 nt, Human
cccuggaguccaucguugcuu

SEQ ID NO: 1325822 - RNA, 19 nt, Human
ccucaguuaggguaagagg

SEQ ID NO: 1325823 - RNA, 21 nt, Human
ccuccucagcucucucccuca

SEQ ID NO: 1325824 - RNA, 25 nt, Human
ccuugugucauggcugacaugcuug

SEQ ID NO: 1325825 - RNA, 19 nt, Human
cggcugcccccgcugccuc

SEQ ID NO: 1325826 - RNA, 22 nt, Human
cgggaaaagaaauaugucaagu

SEQ ID NO: 1325827 - RNA, 22 nt, Human
cuacacucaccugccuuccccg

SEQ ID NO: 1325828 - RNA, 26 nt, Human
cucacuuuuacggagcacuuucucuc

SEQ ID NO: 1325829 - RNA, 21 nt, Human
cucauucacuuucagaagguc

SEQ ID NO: 1325830 - RNA, 22 nt, Human
cucuguagcagaaugugcuacu

SEQ ID NO: 1325831 - RNA, 24 nt, Human
cugcgucgggggguugggggggca

SEQ ID NO: 1325832 - RNA, 18 nt, Human
cuguucuggagcucaggg

SEQ ID NO: 1325833 - RNA, 22 nt, Human
cuuccuggucagaucccucugg

SEQ ID NO: 1325834 - RNA, 19 nt, Human
gaaaucuuccuuuggguga

SEQ ID NO: 1325835 - RNA, 18 nt, Human
gaacacagucauacucau

SEQ ID NO: 1325836 - RNA, 23 nt, Human
gacccucgggagcccugcucucu

SEQ ID NO: 1325837 - RNA, 18 nt, Human
gagcucagggucgggcag

SEQ ID NO: 1325838 - RNA, 22 nt, Human
gagguggguggaggaaugaggu

SEQ ID NO: 1325839 - RNA, 22 nt, Human
gcagcccucccuccuuccuaca

SEQ ID NO: 1325840 - RNA, 22 nt, Human
gccugguggccugggaccagcc

SEQ ID NO: 1325841 - RNA, 23 nt, Human
gccugguggccugggaccagccc

SEQ ID NO: 1325842 - RNA, 21 nt, Human
ggaagcaagaaugccaccucc

SEQ ID NO: 1325843 - RNA, 23 nt, Human
ggagguggguggaggaaugaggu

SEQ ID NO: 1325844 - RNA, 20 nt, Human
ggauggaggcugcccccagc

SEQ ID NO: 1325845 - RNA, 21 nt, Human
ggauggaggcugcccccagcu

SEQ ID NO: 1325846 - RNA, 23 nt, Human
gggaaaagaaauaugucaaguau

SEQ ID NO: 1325847 - RNA, 22 nt, Human
gggaagcaagaaugccaccucc

SEQ ID NO: 1325848 - RNA, 18 nt, Human
gggggauggaggcugccc

SEQ ID NO: 1325849 - RNA, 19 nt, Human
gggguggggaggugggugg

SEQ ID NO: 1325850 - RNA, 18 nt, Human
gggguugggggggcacag

SEQ ID NO: 1325851 - RNA, 19 nt, Human
guccagggcagagccucag

SEQ ID NO: 1325852 - RNA, 27 nt, Human
uaagaggcacccacccgacccaacccg

SEQ ID NO: 1325853 - RNA, 21 nt, Human
uagaugagggcauuaucuccc

SEQ ID NO: 1325854 - RNA, 22 nt, Human
ucacucugcagccacaauggca

SEQ ID NO: 1325855 - RNA, 23 nt, Human
ucacugcugggccauguggacgg

SEQ ID NO: 1325856 - RNA, 22 nt, Human
ucauacucauucacuuucagaa

SEQ ID NO: 1325857 - RNA, 18 nt, Human
ucauggcugacaugcuug

SEQ ID NO: 1325858 - RNA, 21 nt, Human
ucauggggguggggagguggg

SEQ ID NO: 1325859 - RNA, 23 nt, Human
uccagcaucaaacuuuucacucc

SEQ ID NO: 1325860 - RNA, 20 nt, Human
uccccggggcagaucuccau

SEQ ID NO: 1325861 - RNA, 23 nt, Human
ucccucuggguugagagcucuuc

SEQ ID NO: 1325862 - RNA, 18 nt, Human
ucucccacugccccacca

SEQ ID NO: 1325863 - RNA, 24 nt, Human
ucuccgguuuucccccuggagucc

SEQ ID NO: 1325864 - RNA, 18 nt, Human
ucugcaggggcuuccugg

SEQ ID NO: 1325865 - RNA, 23 nt, Human
ucuguguucuucuuccuaauggg

SEQ ID NO: 1325866 - RNA, 18 nt, Human
ucuucuccgguuuucccc

SEQ ID NO: 1325867 - RNA, 20 nt, Human
ugacaugucccaccugucuc

SEQ ID NO: 1325868 - RNA, 18 nt, Human
ugagagcucuucccccuc

SEQ ID NO: 1325869 - RNA, 19 nt, Human
ugagcaucuucccaccccc

SEQ ID NO: 1325870 - RNA, 20 nt, Human
ugagcaucuucccacccccu

SEQ ID NO: 1325871 - RNA, 21 nt, Human
ugagucagggaagcaagaaug

SEQ ID NO: 1325872 - RNA, 21 nt, Human
ugcagaaggaagucacggcug

SEQ ID NO: 1325873 - RNA, 19 nt, Human
ugcagccacaauggcagag

SEQ ID NO: 1325874 - RNA, 22 nt, Human
ugcccccagcuucucgcagccc

SEQ ID NO: 1325875 - RNA, 19 nt, Human
ugccuggcgcuccuggagg

SEQ ID NO: 1325876 - RNA, 21 nt, Human
uggcaugcuuugacagcaagu

SEQ ID NO: 1325877 - RNA, 22 nt, Human
uggccucuguguucuucuuccu

SEQ ID NO: 1325878 - RNA, 21 nt, Human
uggcugacaugcuugucuccu

SEQ ID NO: 1325879 - RNA, 19 nt, Human
ugggaagcugcgucggggg

SEQ ID NO: 1325880 - RNA, 19 nt, Human
ugggaagcugcgucggggg

SEQ ID NO: 1325881 - RNA, 20 nt, Human
ugggaagcugcgucgggggg

SEQ ID NO: 1325882 - RNA, 20 nt, Human
uggggguggggaggugggug

SEQ ID NO: 1325883 - RNA, 20 nt, Human
uggguggaggaaugagguuu

SEQ ID NO: 1325884 - RNA, 21 nt, Human
ugguuccuccgcuccauucuc

SEQ ID NO: 1325885 - RNA, 24 nt, Human
ugucugcaggggcuuccugggugg

SEQ ID NO: 1325886 - RNA, 21 nt, Human
ugugaaaucuuccuuugggug

SEQ ID NO: 1325887 - RNA, 18 nt, Human
ugugcucccaguguggga

SEQ ID NO: 1325888 - RNA, 21 nt, Human
uguucugugccacccgagccc

SEQ ID NO: 1325889 - RNA, 18 nt, Human
uucauuccgcucuguagc

SEQ ID NO: 1325890 - RNA, 20 nt, Human
uuccccggggcagaucucca

SEQ ID NO: 1325891 - RNA, 19 nt, Human
uugcccaccuccgcaucgc

SEQ ID NO: 1325892 - RNA, 22 nt, Human
uugcccaccuccgcaucgcagc

SEQ ID NO: 1325893 - RNA, 21 nt, Human
uuucuucuucuccgguuuucc

SEQ ID NO: 1325894 - RNA, 26 nt, Human
cccucagcuuccacagcaucuucauc

SEQ ID NO: 1325895 - RNA, 24 nt, Human
cugccggguacaacggcuuucuuu

SEQ ID NO: 1325896 - RNA, 20 nt, Human
cuuuuuaccucaugccccuc

SEQ ID NO: 1325897 - RNA, 21 nt, Human
gacucuucuucuuccucuuca

SEQ ID NO: 1325898 - RNA, 18 nt, Human
guaaaacuaaagguccac

SEQ ID NO: 1325899 - RNA, 21 nt, Human
gucugugcugucaggcgaccc

SEQ ID NO: 1325900 - RNA, 18 nt, Human
uacaaccugcuuuucuug

SEQ ID NO: 1325901 - RNA, 18 nt, Human
uaccucaugccccucagc

SEQ ID NO: 1325902 - RNA, 22 nt, Human
ucacugagcaaacuucugauuc

SEQ ID NO: 1325903 - RNA, 22 nt, Human
uccacagcaucuucaucuggau

SEQ ID NO: 1325904 - RNA, 21 nt, Human
uccucuucuguacgugcugcc

SEQ ID NO: 1325905 - RNA, 23 nt, Human
ucuaccauaaccgaagaaauuuc

SEQ ID NO: 1325906 - RNA, 19 nt, Human
ugcugccggguacaacggc

SEQ ID NO: 1325907 - RNA, 21 nt, Human
ugcuucuguuucuucuaccau

SEQ ID NO: 1325908 - RNA, 23 nt, Human
ugcuuuucuuguaaaacuaaagg

SEQ ID NO: 1325909 - RNA, 18 nt, Human
ugucaggcgacccauuug

SEQ ID NO: 1325910 - RNA, 24 nt, Human
ugucaggcgacccauuuguuguca

SEQ ID NO: 1325911 - RNA, 20 nt, Human
uucgccuuuuuugucaaacg

SEQ ID NO: 1325912 - RNA, 18 nt, Human
uugaauggcuguuucucu

SEQ ID NO: 1325913 - RNA, 19 nt, Human
uugcugcaaauuuaccucu

SEQ ID NO: 1325914 - RNA, 19 nt, Human
uugcugcaaauuuaccucu

SEQ ID NO: 1325915 - RNA, 21 nt, Human
uuucuuguaaaacuaaagguu

SEQ ID NO: 1325916 - RNA, 18 nt, Human
uuuuuugucaaacgugag

SEQ ID NO: 1325917 - RNA, 22 nt, Human
acagggagcccccuguaccucc

SEQ ID NO: 1325918 - RNA, 19 nt, Human
agcuggaaguccaggcugg

SEQ ID NO: 1325919 - RNA, 21 nt, Human
aggcaggccagcagugcagac

SEQ ID NO: 1325920 - RNA, 19 nt, Human
agggaagcagggucuccca

SEQ ID NO: 1325921 - RNA, 22 nt, Human
aggggugccggcuguggggugc

SEQ ID NO: 1325922 - RNA, 21 nt, Human
caagggacacagccagcuggc

SEQ ID NO: 1325923 - RNA, 18 nt, Human
cagagcuuggccagaggc

SEQ ID NO: 1325924 - RNA, 20 nt, Human
ccaggcugggggacagggag

SEQ ID NO: 1325925 - RNA, 21 nt, Human
ccccuggguagggaagcaggg

SEQ ID NO: 1325926 - RNA, 20 nt, Human
ccccuguaccucccagggcc

SEQ ID NO: 1325927 - RNA, 23 nt, Human
cccugcaggucugugcccagggg

SEQ ID NO: 1325928 - RNA, 18 nt, Human
ccuuggcuugggucucug

SEQ ID NO: 1325929 - RNA, 28 nt, Human
cucuggucugggucaaggccggaaagcc

SEQ ID NO: 1325930 - RNA, 20 nt, Human
cuggauuucgggccugggaa

SEQ ID NO: 1325931 - RNA, 22 nt, Human
cuggugaucaugggcuuuccuu

SEQ ID NO: 1325932 - RNA, 22 nt, Human
cugugcccaggggugccggcug

SEQ ID NO: 1325933 - RNA, 24 nt, Human
gcagagcuuggccagaggcuugga

SEQ ID NO: 1325934 - RNA, 18 nt, Human
gcagcugauucuuccuuc

SEQ ID NO: 1325935 - RNA, 22 nt, Human
gcaggucugugcccaggggugc

SEQ ID NO: 1325936 - RNA, 22 nt, Human
gcccaggggugccggcuguggg

SEQ ID NO: 1325937 - RNA, 18 nt, Human
ggacacagccagcuggca

SEQ ID NO: 1325938 - RNA, 19 nt, Human
ggagcuggccugcagcccu

SEQ ID NO: 1325939 - RNA, 26 nt, Human
ggcugggggacagggagcccccugua

SEQ ID NO: 1325940 - RNA, 21 nt, Human
ggcuuggaaggccccugggua

SEQ ID NO: 1325941 - RNA, 21 nt, Human
uagaagaccaugguccucccu

SEQ ID NO: 1325942 - RNA, 21 nt, Human
ucaccucggaagagcuggaag

SEQ ID NO: 1325943 - RNA, 20 nt, Human
ucagguccagguccuguagg

SEQ ID NO: 1325944 - RNA, 18 nt, Human
uccuuggcuugggucucu

SEQ ID NO: 1325945 - RNA, 18 nt, Human
ucucuggucugggucaag

SEQ ID NO: 1325946 - RNA, 18 nt, Human
ugaucaugggcuuuccuu

SEQ ID NO: 1325947 - RNA, 20 nt, Human
ugcccaggggugccggcugu

SEQ ID NO: 1325948 - RNA, 20 nt, Human
uggaaggccccuggguaggg

SEQ ID NO: 1325949 - RNA, 19 nt, Human
uggaaguccaggcuggggg

SEQ ID NO: 1325950 - RNA, 18 nt, Human
uggaaguggucugcaggc

SEQ ID NO: 1325951 - RNA, 21 nt, Human
uggaaguggucugcaggcuga

SEQ ID NO: 1325952 - RNA, 20 nt, Human
uggaggcccugcaggucugu

SEQ ID NO: 1325953 - RNA, 20 nt, Human
uggccagaggcuuggaaggc

SEQ ID NO: 1325954 - RNA, 22 nt, Human
ugggaaggcagagcuuggccag

SEQ ID NO: 1325955 - RNA, 19 nt, Human
uggggugccccagcucauu

SEQ ID NO: 1325956 - RNA, 21 nt, Human
ugggucaaggcaucugcucag

SEQ ID NO: 1325957 - RNA, 20 nt, Human
ugguggcucgugcuucaugc

SEQ ID NO: 1325958 - RNA, 19 nt, Human
ugucuggaaguggucugca

SEQ ID NO: 1325959 - RNA, 21 nt, Human
uuccuuggcuugggucucugg

SEQ ID NO: 1325960 - RNA, 21 nt, Human
acuacuugaaaauggauucca

SEQ ID NO: 1325961 - RNA, 20 nt, Human
acugugacagcuuuacagca

SEQ ID NO: 1325962 - RNA, 24 nt, Human
agaagcagugucaagacccacagc

SEQ ID NO: 1325963 - RNA, 18 nt, Human
auggggcucacuggggac

SEQ ID NO: 1325964 - RNA, 25 nt, Human
caaguuuagaagcagugucaagacc

SEQ ID NO: 1325965 - RNA, 25 nt, Human
cagcaggcucccuccccgaggccgu

SEQ ID NO: 1325966 - RNA, 19 nt, Human
ccuccugugcugcccugga

SEQ ID NO: 1325967 - RNA, 22 nt, Human
cgucaugugcuucacugaaccc

SEQ ID NO: 1325968 - RNA, 19 nt, Human
cucucccaugucaaguuua

SEQ ID NO: 1325969 - RNA, 22 nt, Human
cugggcaccugccuccugugcu

SEQ ID NO: 1325970 - RNA, 19 nt, Human
cuucacugaacccggcugc

SEQ ID NO: 1325971 - RNA, 26 nt, Human
gcucucaacgaauuuagagcuuuggc

SEQ ID NO: 1325972 - RNA, 24 nt, Human
gggcaccugccuccugugcugccc

SEQ ID NO: 1325973 - RNA, 22 nt, Human
guccuacacguuuccucuccca

SEQ ID NO: 1325974 - RNA, 19 nt, Human
uaacugugacagcuuuaca

SEQ ID NO: 1325975 - RNA, 19 nt, Human
uaaugaaugggacacuuuc

SEQ ID NO: 1325976 - RNA, 23 nt, Human
uacuacuugaaaauggauuccag

SEQ ID NO: 1325977 - RNA, 18 nt, Human
uagaagcagugucaagac

SEQ ID NO: 1325978 - RNA, 23 nt, Human
ucagcggguccuacacguuuccu

SEQ ID NO: 1325979 - RNA, 23 nt, Human
ugaaaauggauuccagcucucaa

SEQ ID NO: 1325980 - RNA, 18 nt, Human
uggcagaggugaagccug

SEQ ID NO: 1325981 - RNA, 22 nt, Human
uggcagaggugaagccugcguc

SEQ ID NO: 1325982 - RNA, 19 nt, Human
uuagagcuuuggcaaaauu

SEQ ID NO: 1325983 - RNA, 21 nt, Human
uuguggauuuuuaugaaaucc

SEQ ID NO: 1325984 - RNA, 21 nt, Human
uuuaagauuucuuugaugucc

SEQ ID NO: 1325985 - RNA, 22 nt, Human
uuugauguccgaugugcucauu

SEQ ID NO: 1325986 - RNA, 20 nt, Human
cauuggaggaaaaacucugg

SEQ ID NO: 1325987 - RNA, 19 nt, Human
ccccucugggguggggccu

SEQ ID NO: 1325988 - RNA, 21 nt, Human
cccucugggguggggccucca

SEQ ID NO: 1325989 - RNA, 21 nt, Human
ccuuccuuucccgggggcagg

SEQ ID NO: 1325990 - RNA, 24 nt, Human
ggaggaaaaacucuggguggggag

SEQ ID NO: 1325991 - RNA, 22 nt, Human
ggcagcuccuuccuuucccggg

SEQ ID NO: 1325992 - RNA, 22 nt, Human
ggcgcagaggggcguggggccg

SEQ ID NO: 1325993 - RNA, 20 nt, Human
gggagggccuggaacaggga

SEQ ID NO: 1325994 - RNA, 18 nt, Human
ggggagggccuggaacag

SEQ ID NO: 1325995 - RNA, 21 nt, Human
ggggagggccuggaacaggga

SEQ ID NO: 1325996 - RNA, 20 nt, Human
ggguggggagggccuggaac

SEQ ID NO: 1325997 - RNA, 21 nt, Human
uccacggggugcccccaccgu

SEQ ID NO: 1325998 - RNA, 25 nt, Human
uccauuggaggaaaaacucuggguu

SEQ ID NO: 1325999 - RNA, 19 nt, Human
ugcaagaugcccugagucc

SEQ ID NO: 1326000 - RNA, 18 nt, Human
ugcccugagucccaggga

SEQ ID NO: 1326001 - RNA, 18 nt, Human
ugggagguguagggcugg

SEQ ID NO: 1326002 - RNA, 19 nt, Human
ugggagguguagggcuggg

SEQ ID NO: 1326003 - RNA, 20 nt, Human
ugggagguguagggcugggg

SEQ ID NO: 1326004 - RNA, 20 nt, Human
uggggagggccuggaacagg

SEQ ID NO: 1326005 - RNA, 24 nt, Human
uggggccggcgggccuugcgcugc

SEQ ID NO: 1326006 - RNA, 23 nt, Human
ugugccgggcucuggccugcauu

SEQ ID NO: 1326007 - RNA, 19 nt, Human
uuggaaugaaccccugccu

SEQ ID NO: 1326008 - RNA, 24 nt, Human
aaauauugagggcuucaaagagcu

SEQ ID NO: 1326009 - RNA, 18 nt, Human
aggcagaggguggggagc

SEQ ID NO: 1326010 - RNA, 21 nt, Human
aggcagaggguggggagcugg

SEQ ID NO: 1326011 - RNA, 22 nt, Human
aggcagaggguggggagcugga

SEQ ID NO: 1326012 - RNA, 29 nt, Human
aggcagaggguggggagcugggggacccc

SEQ ID NO: 1326013 - RNA, 20 nt, Human
aggguggggagcuggagagg

SEQ ID NO: 1326014 - RNA, 19 nt, Human
agucaggaacccuggagau

SEQ ID NO: 1326015 - RNA, 23 nt, Human
caaagagcucuuccuggacguuu

SEQ ID NO: 1326016 - RNA, 20 nt, Human
caccuccccauccucugccc

SEQ ID NO: 1326017 - RNA, 21 nt, Human
cauccucugcccccacccacu

SEQ ID NO: 1326018 - RNA, 19 nt, Human
ccaaugacccacucccugg

SEQ ID NO: 1326019 - RNA, 18 nt, Human
ccacucccugggaacaag

SEQ ID NO: 1326020 - RNA, 21 nt, Human
cccacagucaaagagagaagc

SEQ ID NO: 1326021 - RNA, 18 nt, Human
cccauccucugcccccac

SEQ ID NO: 1326022 - RNA, 19 nt, Human
ccccaggggagaaggcugc

SEQ ID NO: 1326023 - RNA, 22 nt, Human
cccuccaacaaauauugagggc

SEQ ID NO: 1326024 - RNA, 28 nt, Human
cccuuuggccaaugacccacucccuggg

SEQ ID NO: 1326025 - RNA, 24 nt, Human
ccucccacagucaaagagagaagc

SEQ ID NO: 1326026 - RNA, 21 nt, Human
ccuccccauccucugccccca

SEQ ID NO: 1326027 - RNA, 18 nt, Human
cugagugacaccauuucc

SEQ ID NO: 1326028 - RNA, 18 nt, Human
cugcuccugcugcuucug

SEQ ID NO: 1326029 - RNA, 19 nt, Human
cugcugcuucugccugggc

SEQ ID NO: 1326030 - RNA, 19 nt, Human
gaggguggggagcuggaga

SEQ ID NO: 1326031 - RNA, 25 nt, Human
ggaaggcccuaaccuggcccugucc

SEQ ID NO: 1326032 - RNA, 24 nt, Human
ggagaagcagucccagggccugag

SEQ ID NO: 1326033 - RNA, 22 nt, Human
guggaaggcccuaaccuggccc

SEQ ID NO: 1326034 - RNA, 23 nt, Human
guggaaggcccuaaccuggcccu

SEQ ID NO: 1326035 - RNA, 23 nt, Human
uaacaggaaugggcaacucuaga

SEQ ID NO: 1326036 - RNA, 21 nt, Human
uaaccuggcccuguccucccu

SEQ ID NO: 1326037 - RNA, 19 nt, Human
uaccuuauguucccuuugg

SEQ ID NO: 1326038 - RNA, 23 nt, Human
uagaaguguuuguguguggaagg

SEQ ID NO: 1326039 - RNA, 21 nt, Human
uaggaaggagaaggaguccug

SEQ ID NO: 1326040 - RNA, 21 nt, Human
uccaagaacauaacaggaaug

SEQ ID NO: 1326041 - RNA, 21 nt, Human
ucccuccaacaaauauugagg

SEQ ID NO: 1326042 - RNA, 20 nt, Human
uccucugcccccacccacuc

SEQ ID NO: 1326043 - RNA, 22 nt, Human
uccuggacguuucucuuaaucu

SEQ ID NO: 1326044 - RNA, 23 nt, Human
ucuccagucuucacuuuaacaaa

SEQ ID NO: 1326045 - RNA, 18 nt, Human
ucugccugggccaccucc

SEQ ID NO: 1326046 - RNA, 21 nt, Human
ucugccugggccaccucccca

SEQ ID NO: 1326047 - RNA, 19 nt, Human
ugacaccauuucccuuucc

SEQ ID NO: 1326048 - RNA, 18 nt, Human
ugacccacucccugggaa

SEQ ID NO: 1326049 - RNA, 24 nt, Human
ugacuggaggcagaggguggggag

SEQ ID NO: 1326050 - RNA, 22 nt, Human
ugagcugcuugaguccucuagg

SEQ ID NO: 1326051 - RNA, 21 nt, Human
ugcagaggagacagcuaguca

SEQ ID NO: 1326052 - RNA, 21 nt, Human
ugcuucugccugggccaccuc

SEQ ID NO: 1326053 - RNA, 21 nt, Human
uggaggcagaggguggggagc

SEQ ID NO: 1326054 - RNA, 20 nt, Human
uggccaaugacccacucccu

SEQ ID NO: 1326055 - RNA, 21 nt, Human
uggcuggagaagcagucccag

SEQ ID NO: 1326056 - RNA, 18 nt, Human
ugggacagcgaguccucc

SEQ ID NO: 1326057 - RNA, 21 nt, Human
uguguaaaaauacagcuuuua

SEQ ID NO: 1326058 - RNA, 25 nt, Human
uguguggaaggcccuaaccuggccc

SEQ ID NO: 1326059 - RNA, 24 nt, Human
uuaacaaacucuuuuaaguuuucu

SEQ ID NO: 1326060 - RNA, 18 nt, Human
uuccugaaauaggaacaa

SEQ ID NO: 1326061 - RNA, 25 nt, Human
aaaaaccagugaagaggcaagauaa

SEQ ID NO: 1326062 - RNA, 22 nt, Human
aacccaggccacucagaagucc

SEQ ID NO: 1326063 - RNA, 18 nt, Human
aagagaaguugcgagucu

SEQ ID NO: 1326064 - RNA, 21 nt, Human
accagagucagagaccuccug

SEQ ID NO: 1326065 - RNA, 25 nt, Human
agaagccugacucauucccacaggc

SEQ ID NO: 1326066 - RNA, 28 nt, Human
aggcaagauaaugaaaauuaauucaaga

SEQ ID NO: 1326067 - RNA, 22 nt, Human
aggccaacaccagagucagaga

SEQ ID NO: 1326068 - RNA, 18 nt, Human
caagaaggcagugauggu

SEQ ID NO: 1326069 - RNA, 20 nt, Human
cagaugaaagacaagugaca

SEQ ID NO: 1326070 - RNA, 21 nt, Human
ccaacaccagagucagagacc

SEQ ID NO: 1326071 - RNA, 22 nt, Human
ccaacaccagagucagagaccu

SEQ ID NO: 1326072 - RNA, 20 nt, Human
ccuucccagaugaaagacaa

SEQ ID NO: 1326073 - RNA, 22 nt, Human
cuaggucagugccaaucgccuc

SEQ ID NO: 1326074 - RNA, 22 nt, Human
cucagaagucccgagacccgau

SEQ ID NO: 1326075 - RNA, 22 nt, Human
gcaccggcaaggagggaggcca

SEQ ID NO: 1326076 - RNA, 21 nt, Human
gcgguaacccaggccacucag

SEQ ID NO: 1326077 - RNA, 20 nt, Human
gcgguaacccaggccacucc

SEQ ID NO: 1326078 - RNA, 22 nt, Human
gggaaaauggaagagaaguugc

SEQ ID NO: 1326079 - RNA, 21 nt, Human
ggugaugguuguaaauggguc

SEQ ID NO: 1326080 - RNA, 22 nt, Human
uaaaaaccagugaagaggcaag

SEQ ID NO: 1326081 - RNA, 25 nt, Human
uaauggcaccggcaaggagggaggc

SEQ ID NO: 1326082 - RNA, 21 nt, Human
uacacauuaaaaaccagugaa

SEQ ID NO: 1326083 - RNA, 20 nt, Human
ucaguggugcugaaacaggu

SEQ ID NO: 1326084 - RNA, 23 nt, Human
ucccacaggccguggggacugcc

SEQ ID NO: 1326085 - RNA, 18 nt, Human
ucccgagacccgaugcuu

SEQ ID NO: 1326086 - RNA, 18 nt, Human
ugaauggaggcuggcaga

SEQ ID NO: 1326087 - RNA, 23 nt, Human
ugaauggaggcuggcagagauag

SEQ ID NO: 1326088 - RNA, 24 nt, Human
ugaggcaaggccuaggucagugcc

SEQ ID NO: 1326089 - RNA, 20 nt, Human
uucaagaaggcagugauggu

SEQ ID NO: 1326090 - RNA, 25 nt, Human
caggacacaccaccuuaggacacac

SEQ ID NO: 1326091 - RNA, 18 nt, Human
ccccugcaaaacacaaag

SEQ ID NO: 1326092 - RNA, 20 nt, Human
ccccugcaaaacacaaagag

SEQ ID NO: 1326093 - RNA, 23 nt, Human
uaccccagguucccccugcaaaa

SEQ ID NO: 1326094 - RNA, 21 nt, Human
aacaagaauaccacaauucau

SEQ ID NO: 1326095 - RNA, 24 nt, Human
aagaugacaggcgugagccaccgg

SEQ ID NO: 1326096 - RNA, 24 nt, Human
aagcgauccaccugccucggccuc

SEQ ID NO: 1326097 - RNA, 18 nt, Human
aauuacuuugagacaggg

SEQ ID NO: 1326098 - RNA, 27 nt, Human
acaggcgugagccaccgggccccccau

SEQ ID NO: 1326099 - RNA, 21 nt, Human
acuacaggugcaggccaccau

SEQ ID NO: 1326100 - RNA, 25 nt, Human
acuauccucccaccucagccuccug

SEQ ID NO: 1326101 - RNA, 19 nt, Human
agaugacaggcgugagcca

SEQ ID NO: 1326102 - RNA, 22 nt, Human
agaugacaggcgugagccaccg

SEQ ID NO: 1326103 - RNA, 22 nt, Human
aggacuuugccggagggcagga

SEQ ID NO: 1326104 - RNA, 18 nt, Human
aguagcugggacuacagg

SEQ ID NO: 1326105 - RNA, 22 nt, Human
auaccucucuuggaaacaacuu

SEQ ID NO: 1326106 - RNA, 19 nt, Human
augcugccuugcguuuugg

SEQ ID NO: 1326107 - RNA, 24 nt, Human
caaauugcuaagaugacaggcgug

SEQ ID NO: 1326108 - RNA, 27 nt, Human
caccaugaugcccaggcugaucucgaa

SEQ ID NO: 1326109 - RNA, 24 nt, Human
caccucagccuccugaguagcugg

SEQ ID NO: 1326110 - RNA, 20 nt, Human
cagccuccugaguagcuggg

SEQ ID NO: 1326111 - RNA, 24 nt, Human
caggguuucgcucugucauccagg

SEQ ID NO: 1326112 - RNA, 19 nt, Human
cauccaggcugguguguag

SEQ ID NO: 1326113 - RNA, 24 nt, Human
caucuauucaaaugagggcugcgu

SEQ ID NO: 1326114 - RNA, 24 nt, Human
caugaugcccaggcugaucucgaa

SEQ ID NO: 1326115 - RNA, 23 nt, Human
cccaccucagccuccugaguagc

SEQ ID NO: 1326116 - RNA, 24 nt, Human
cccaccucagccuccugaguagcu

SEQ ID NO: 1326117 - RNA, 22 nt, Human
ccugaguagcugggacuacagg

SEQ ID NO: 1326118 - RNA, 23 nt, Human
ccugaguagcugggacuacaggu

SEQ ID NO: 1326119 - RNA, 21 nt, Human
ccugccucggccucccaaauu

SEQ ID NO: 1326120 - RNA, 21 nt, Human
ccugggcucaagcgauccacc

SEQ ID NO: 1326121 - RNA, 22 nt, Human
ccugggcucaagcgauccaccu

SEQ ID NO: 1326122 - RNA, 23 nt, Human
ccugggcucaagcgauccaccug

SEQ ID NO: 1326123 - RNA, 22 nt, Human
cgcucugucauccaggcuggug

SEQ ID NO: 1326124 - RNA, 22 nt, Human
cgugagccaccgggccccccau

SEQ ID NO: 1326125 - RNA, 21 nt, Human
cucaagcgauccaccugccuc

SEQ ID NO: 1326126 - RNA, 24 nt, Human
cucagccuccugaguagcugggac

SEQ ID NO: 1326127 - RNA, 21 nt, Human
cuccugggcucaagcgaucca

SEQ ID NO: 1326128 - RNA, 21 nt, Human
cugguguguaguggugcauuc

SEQ ID NO: 1326129 - RNA, 23 nt, Human
gacaggguuucgcucugucaucc

SEQ ID NO: 1326130 - RNA, 18 nt, Human
gaugacaggcgugagcca

SEQ ID NO: 1326131 - RNA, 24 nt, Human
gcgauccaccugccucggccuccc

SEQ ID NO: 1326132 - RNA, 20 nt, Human
gcugguguguaguggugcau

SEQ ID NO: 1326133 - RNA, 24 nt, Human
ggacuacaggugcaggccaccaug

SEQ ID NO: 1326134 - RNA, 20 nt, Human
gugcaggccaccaugaugcc

SEQ ID NO: 1326135 - RNA, 24 nt, Human
uaagaugacaggcgugagccaccg

SEQ ID NO: 1326136 - RNA, 19 nt, Human
uagcucagucauugcuuga

SEQ ID NO: 1326137 - RNA, 24 nt, Human
ucacugcagccucaacuuucuggg

SEQ ID NO: 1326138 - RNA, 23 nt, Human
ucagccuccugaguagcugggac

SEQ ID NO: 1326139 - RNA, 22 nt, Human
uccacgguagcaauuguuuuuc

SEQ ID NO: 1326140 - RNA, 20 nt, Human
ucccaaauugcuaagaugac

SEQ ID NO: 1326141 - RNA, 26 nt, Human
uccucccaccucagccuccugaguag

SEQ ID NO: 1326142 - RNA, 24 nt, Human
uccugaguagcugggacuacaggu

SEQ ID NO: 1326143 - RNA, 18 nt, Human
uccugggcucaagcgauc

SEQ ID NO: 1326144 - RNA, 24 nt, Human
uccugggcucaagcgauccaccug

SEQ ID NO: 1326145 - RNA, 30 nt, Human
ucgauagcacuuuccuuucaauaucuuccu

SEQ ID NO: 1326146 - RNA, 21 nt, Human
ucgcucugucauccaggcugg

SEQ ID NO: 1326147 - RNA, 22 nt, Human
ucgcucugucauccaggcuggu

SEQ ID NO: 1326148 - RNA, 23 nt, Human
ucucgaacuccugggcucaagcg

SEQ ID NO: 1326149 - RNA, 24 nt, Human
ucugucauccaggcugguguguag

SEQ ID NO: 1326150 - RNA, 24 nt, Human
ugcccaggcugaucucgaacuccu

SEQ ID NO: 1326151 - RNA, 21 nt, Human
ugccucggccucccaaauugc

SEQ ID NO: 1326152 - RNA, 23 nt, Human
ugccucggccucccaaauugcua

SEQ ID NO: 1326153 - RNA, 24 nt, Human
ugccucggccucccaaauugcuaa

SEQ ID NO: 1326154 - RNA, 20 nt, Human
uggcaucgauagcacuuucc

SEQ ID NO: 1326155 - RNA, 22 nt, Human
uggcaucgauagcacuuuccuu

SEQ ID NO: 1326156 - RNA, 22 nt, Human
ugggacuacaggugcaggccac

SEQ ID NO: 1326157 - RNA, 24 nt, Human
ugggacuacaggugcaggccacca

SEQ ID NO: 1326158 - RNA, 25 nt, Human
ugggacuacaggugcaggccaccau

SEQ ID NO: 1326159 - RNA, 22 nt, Human
uguaguggugcauucacggcuc

SEQ ID NO: 1326160 - RNA, 21 nt, Human
ugugcaugaggugugaccaag

SEQ ID NO: 1326161 - RNA, 22 nt, Human
uucaccuugcaggacuggaugc

SEQ ID NO: 1326162 - RNA, 18 nt, Human
uucaugugcaugaggugu

SEQ ID NO: 1326163 - RNA, 22 nt, Human
uugagacaggguuucgcucugu

SEQ ID NO: 1326164 - RNA, 23 nt, Human
uugcugaauuaaauaguuggugc

SEQ ID NO: 1326165 - RNA, 23 nt, Human
uuggcaucgauagcacuuuccuu

SEQ ID NO: 1326166 - RNA, 19 nt, Human
uuucgcucugucauccagg

SEQ ID NO: 1326167 - RNA, 22 nt, Human
uuucgcucugucauccaggcug

SEQ ID NO: 1326168 - RNA, 23 nt, Human
uuucgcucugucauccaggcugg

SEQ ID NO: 1326169 - RNA, 22 nt, Human
uuuggcaucgauagcacuuucc

SEQ ID NO: 1326170 - RNA, 24 nt, Human
uuuggcaucgauagcacuuuccuu

SEQ ID NO: 1326171 - RNA, 18 nt, Human
aaacagauagggggcagg

SEQ ID NO: 1326172 - RNA, 19 nt, Human
aacauuuuccugugcuucu

SEQ ID NO: 1326173 - RNA, 20 nt, Human
aauacuuucagaaccccaca

SEQ ID NO: 1326174 - RNA, 21 nt, Human
agagcaaaugaagcaucuguu

SEQ ID NO: 1326175 - RNA, 18 nt, Human
agcgucuuaguccucuag

SEQ ID NO: 1326176 - RNA, 19 nt, Human
aggaaagacaaauaauauu

SEQ ID NO: 1326177 - RNA, 26 nt, Human
auaaaaaccaugaauaagaauuucau

SEQ ID NO: 1326178 - RNA, 20 nt, Human
auaauacuuucagaacccca

SEQ ID NO: 1326179 - RNA, 18 nt, Human
aucugaaauggcucaaga

SEQ ID NO: 1326180 - RNA, 23 nt, Human
caaaaaaggucugaaaaaauuaa

SEQ ID NO: 1326181 - RNA, 24 nt, Human
caccaauguuugguaaaccuaaaa

SEQ ID NO: 1326182 - RNA, 25 nt, Human
cacuuuaauuccaauuuccugggga

SEQ ID NO: 1326183 - RNA, 23 nt, Human
cagaaagauggaauuccaccaau

SEQ ID NO: 1326184 - RNA, 23 nt, Human
ccaaaaaaggucugaaaaaauua

SEQ ID NO: 1326185 - RNA, 22 nt, Human
cgucuuaguccucuaggagcca

SEQ ID NO: 1326186 - RNA, 19 nt, Human
ggagagaauaaaaaccaug

SEQ ID NO: 1326187 - RNA, 18 nt, Human
ggagguuucuuccccacu

SEQ ID NO: 1326188 - RNA, 21 nt, Human
guaaaaugauacaugugcccc

SEQ ID NO: 1326189 - RNA, 21 nt, Human
uaaauggucuugaaagcucau

SEQ ID NO: 1326190 - RNA, 18 nt, Human
uaauacuuucagaacccc

SEQ ID NO: 1326191 - RNA, 25 nt, Human
uacauaguauguuauaaaaacaucu

SEQ ID NO: 1326192 - RNA, 23 nt, Human
uacuuucagaaccccacagaaca

SEQ ID NO: 1326193 - RNA, 20 nt, Human
uagcuaugaucuucccuuuu

SEQ ID NO: 1326194 - RNA, 20 nt, Human
uaguauucguucugacucua

SEQ ID NO: 1326195 - RNA, 21 nt, Human
ucacagcaaacagauaggggg

SEQ ID NO: 1326196 - RNA, 23 nt, Human
ugaacacaaaggaaggaacacaa

SEQ ID NO: 1326197 - RNA, 21 nt, Human
ugauuaauacugcuugagugu

SEQ ID NO: 1326198 - RNA, 18 nt, Human
ugauuuuggauuucuugu

SEQ ID NO: 1326199 - RNA, 18 nt, Human
uggcucaagaaacacugg

SEQ ID NO: 1326200 - RNA, 24 nt, Human
uguaaaaugauacaugugccccaa

SEQ ID NO: 1326201 - RNA, 23 nt, Human
ugucuagugucaaaauuauaaua

SEQ ID NO: 1326202 - RNA, 22 nt, Human
uguuuccuuaaauggucuugaa

SEQ ID NO: 1326203 - RNA, 21 nt, Human
uucagacucagacauaaaggu

SEQ ID NO: 1326204 - RNA, 22 nt, Human
uuucaauuacaaaucacagaaa

SEQ ID NO: 1326205 - RNA, 23 nt, Human
uuucucagaaagauggaauucca

SEQ ID NO: 1326206 - RNA, 19 nt, Human
uuugcacuaucacagcaaa

SEQ ID NO: 1326207 - RNA, 22 nt, Human
aacacaguuguucaccccccca

SEQ ID NO: 1326208 - RNA, 24 nt, Human
aacuggcuggcgucccagaacaca

SEQ ID NO: 1326209 - RNA, 24 nt, Human
ccagaacacaguuguucacccccc

SEQ ID NO: 1326210 - RNA, 19 nt, Human
ccccaccagcuggcuggcc

SEQ ID NO: 1326211 - RNA, 19 nt, Human
uggcuggccgucugccuga

SEQ ID NO: 1326212 - RNA, 25 nt, Human
aaaaagaacaucuuuuacuaacaga

SEQ ID NO: 1326213 - RNA, 18 nt, Human
aggagacuucagcaauau

SEQ ID NO: 1326214 - RNA, 18 nt, Human
auccuuuucucuccucaa

SEQ ID NO: 1326215 - RNA, 18 nt, Human
cacaaaauggcagugaag

SEQ ID NO: 1326216 - RNA, 19 nt, Human
caccugggagugaugugca

SEQ ID NO: 1326217 - RNA, 22 nt, Human
cagcagcaccucacaaaauggc

SEQ ID NO: 1326218 - RNA, 26 nt, Human
cagcagcaccucacaaaauggcagug

SEQ ID NO: 1326219 - RNA, 22 nt, Human
ccucuggaaggcuauuugauuc

SEQ ID NO: 1326220 - RNA, 24 nt, Human
cgguaacauaugccaggagacuuc

SEQ ID NO: 1326221 - RNA, 23 nt, Human
cuuucuagaaaccugcccucugg

SEQ ID NO: 1326222 - RNA, 21 nt, Human
gggaaaaagaacaucuuuuac

SEQ ID NO: 1326223 - RNA, 22 nt, Human
ucccguuugguccaaaggggau

SEQ ID NO: 1326224 - RNA, 19 nt, Human
ugaaguuguggcgccuccc

SEQ ID NO: 1326225 - RNA, 18 nt, Human
uggaaggaagggaagcag

SEQ ID NO: 1326226 - RNA, 22 nt, Human
uggcagugaaguuguggcgccu

SEQ ID NO: 1326227 - RNA, 19 nt, Human
ugggaaaaagaacaucuuu

SEQ ID NO: 1326228 - RNA, 19 nt, Human
ugggaauacaaaauaacca

SEQ ID NO: 1326229 - RNA, 19 nt, Human
ugguccaaaggggauggaa

SEQ ID NO: 1326230 - RNA, 20 nt, Human
uucuagaaaccugcccucug

SEQ ID NO: 1326231 - RNA, 20 nt, Human
aacauggcaaaaaccugucu

SEQ ID NO: 1326232 - RNA, 24 nt, Human
aagagaaaucagguucagggugca

SEQ ID NO: 1326233 - RNA, 24 nt, Human
accugaggucaggaguucaagacc

SEQ ID NO: 1326234 - RNA, 18 nt, Human
agccuggccaacauggca

SEQ ID NO: 1326235 - RNA, 24 nt, Human
agccuggccaacauggcaaaaacc

SEQ ID NO: 1326236 - RNA, 23 nt, Human
agcuccucaaguuuucucuccag

SEQ ID NO: 1326237 - RNA, 18 nt, Human
aggcaggcggaucaccug

SEQ ID NO: 1326238 - RNA, 22 nt, Human
aggcaggcggaucaccugaggu

SEQ ID NO: 1326239 - RNA, 26 nt, Human
aggcaggcggaucaccugaggucagg

SEQ ID NO: 1326240 - RNA, 21 nt, Human
aggccgaggcaggcggaucac

SEQ ID NO: 1326241 - RNA, 23 nt, Human
aucaccugaggucaggaguucaa

SEQ ID NO: 1326242 - RNA, 19 nt, Human
caacauggcaaaaaccugu

SEQ ID NO: 1326243 - RNA, 24 nt, Human
cacaccuguaaucccagcccuuug

SEQ ID NO: 1326244 - RNA, 18 nt, Human
caccagcacugcauccuu

SEQ ID NO: 1326245 - RNA, 23 nt, Human
caccugaggucaggaguucaaga

SEQ ID NO: 1326246 - RNA, 23 nt, Human
caccuguaaucccagcccuuugg

SEQ ID NO: 1326247 - RNA, 24 nt, Human
caccuguaaucccagcccuuuggg

SEQ ID NO: 1326248 - RNA, 21 nt, Human
cacugcauccuucucccuggc

SEQ ID NO: 1326249 - RNA, 22 nt, Human
cagaacccuggucugcagcucc

SEQ ID NO: 1326250 - RNA, 24 nt, Human
cagcccuuugggaggccgaggcag

SEQ ID NO: 1326251 - RNA, 25 nt, Human
cagcccuuugggaggccgaggcagg

SEQ ID NO: 1326252 - RNA, 24 nt, Human
caguaaagagaaaucagguucagu

SEQ ID NO: 1326253 - RNA, 23 nt, Human
cccggcuuccuucagagccucca

SEQ ID NO: 1326254 - RNA, 18 nt, Human
cccuggccagacggucga

SEQ ID NO: 1326255 - RNA, 24 nt, Human
cccuuugggaggccgaggcaggcg

SEQ ID NO: 1326256 - RNA, 21 nt, Human
ccucuaaauccuuuacccggg

SEQ ID NO: 1326257 - RNA, 22 nt, Human
ccugcagcuccagaacccuggu

SEQ ID NO: 1326258 - RNA, 24 nt, Human
ccugcagcuccagaacccuggucu

SEQ ID NO: 1326259 - RNA, 19 nt, Human
ccuucagagccuccagcuc

SEQ ID NO: 1326260 - RNA, 26 nt, Human
cgaggcaggcggaucaccugagguca

SEQ ID NO: 1326261 - RNA, 20 nt, Human
cgagggucucgcagugggcc

SEQ ID NO: 1326262 - RNA, 22 nt, Human
cggaauucgugcucccucuucc

SEQ ID NO: 1326263 - RNA, 24 nt, Human
cggaucaccugaggucaggaguuc

SEQ ID NO: 1326264 - RNA, 27 nt, Human
cggaucaccugaggucaggaguucaag

SEQ ID NO: 1326265 - RNA, 19 nt, Human
cggcucggcucuggagcuu

SEQ ID NO: 1326266 - RNA, 19 nt, Human
cggucgagcuccucaugcu

SEQ ID NO: 1326267 - RNA, 22 nt, Human
cuaucaacaguuaccacggccg

SEQ ID NO: 1326268 - RNA, 20 nt, Human
cucacaccuguaaucccagc

SEQ ID NO: 1326269 - RNA, 24 nt, Human
cucacaccuguaaucccagcccuu

SEQ ID NO: 1326270 - RNA, 20 nt, Human
cucaccgucgagcuccucaa

SEQ ID NO: 1326271 - RNA, 18 nt, Human
cuccagguccuggagcuc

SEQ ID NO: 1326272 - RNA, 19 nt, Human
cuccccggcucggcucugg

SEQ ID NO: 1326273 - RNA, 21 nt, Human
cuccucaugcuuccucuuaaa

SEQ ID NO: 1326274 - RNA, 19 nt, Human
cucucugcagccuuugccc

SEQ ID NO: 1326275 - RNA, 24 nt, Human
cucuuccuucuuccugguuagcug

SEQ ID NO: 1326276 - RNA, 19 nt, Human
cugcaguaaagagaaaucc

SEQ ID NO: 1326277 - RNA, 25 nt, Human
cugcauccuucucccuggccagacg

SEQ ID NO: 1326278 - RNA, 19 nt, Human
gaggcaggcggaucaccug

SEQ ID NO: 1326279 - RNA, 23 nt, Human
gaucaccugaggucaggaguuca

SEQ ID NO: 1326280 - RNA, 24 nt, Human
gaucaccugaggucaggaguucaa

SEQ ID NO: 1326281 - RNA, 19 nt, Human
gcagcaguuccugucucug

SEQ ID NO: 1326282 - RNA, 19 nt, Human
gcagcuccugcagcugcuc

SEQ ID NO: 1326283 - RNA, 20 nt, Human
gccaacauggcaaaaaccug

SEQ ID NO: 1326284 - RNA, 21 nt, Human
gcggaucaccugaggucagga

SEQ ID NO: 1326285 - RNA, 22 nt, Human
ggaucaccugaggucaggaguu

SEQ ID NO: 1326286 - RNA, 23 nt, Human
ggaucaccugaggucaggaguuc

SEQ ID NO: 1326287 - RNA, 21 nt, Human
ggccgggcacgguggcucaca

SEQ ID NO: 1326288 - RNA, 24 nt, Human
gggcacgguggcucacaccuguaa

SEQ ID NO: 1326289 - RNA, 24 nt, Human
gggccugcagcuccagaacccugg

SEQ ID NO: 1326290 - RNA, 19 nt, Human
gguccuggagcuccccggc

SEQ ID NO: 1326291 - RNA, 23 nt, Human
gguggcucacaccuguaauccca

SEQ ID NO: 1326292 - RNA, 24 nt, Human
gguggcucacaccuguaaucccag

SEQ ID NO: 1326293 - RNA, 23 nt, Human
guugcucauguugucagccugca

SEQ ID NO: 1326294 - RNA, 23 nt, Human
ucaccugaggucaggaguucaag

SEQ ID NO: 1326295 - RNA, 22 nt, Human
ucggcguugguggccucugccc

SEQ ID NO: 1326296 - RNA, 26 nt, Human
ucucugcagccuuugccccggccgac

SEQ ID NO: 1326297 - RNA, 20 nt, Human
ucugcagccuuugccccggc

SEQ ID NO: 1326298 - RNA, 20 nt, Human
ucugcagcuccugcagcugc

SEQ ID NO: 1326299 - RNA, 21 nt, Human
uggccagacggucgagcuccu

SEQ ID NO: 1326300 - RNA, 24 nt, Human
uggccuccagguccuggagcuccc

SEQ ID NO: 1326301 - RNA, 21 nt, Human
uggcucacaccuguaauccca

SEQ ID NO: 1326302 - RNA, 20 nt, Human
ugggaggccgaggcaggcgg

SEQ ID NO: 1326303 - RNA, 24 nt, Human
ugggaggccgaggcaggcggauca

SEQ ID NO: 1326304 - RNA, 19 nt, Human
ugguggccucugcccucug

SEQ ID NO: 1326305 - RNA, 24 nt, Human
uucagggugcaccgugaggggccc

SEQ ID NO: 1326306 - RNA, 22 nt, Human
uuccugucucugcaggcaagcu

SEQ ID NO: 1326307 - RNA, 25 nt, Human
uugggaggccgaggcaggcggauca

SEQ ID NO: 1326308 - RNA, 18 nt, Human
aaaaaggaaauaaaugca

SEQ ID NO: 1326309 - RNA, 19 nt, Human
aacaaaaacugaaaauugg

SEQ ID NO: 1326310 - RNA, 23 nt, Human
aagaggauugcuugaggccagga

SEQ ID NO: 1326311 - RNA, 24 nt, Human
aaggcaagaggauugcuugaggcc

SEQ ID NO: 1326312 - RNA, 19 nt, Human
aggaaaaaggaaauaaaug

SEQ ID NO: 1326313 - RNA, 18 nt, Human
aggcaagaggauugcuug

SEQ ID NO: 1326314 - RNA, 19 nt, Human
aggcaagaggauugcuuga

SEQ ID NO: 1326315 - RNA, 22 nt, Human
aggcaagaggauugcuugaggc

SEQ ID NO: 1326316 - RNA, 21 nt, Human
auaaaaaacggcucugucuua

SEQ ID NO: 1326317 - RNA, 24 nt, Human
auaaaaaacggcucugucuuaaaa

SEQ ID NO: 1326318 - RNA, 23 nt, Human
aucacacuaucuccacuccugau

SEQ ID NO: 1326319 - RNA, 26 nt, Human
auuccuccacaguuuuccuccauucu

SEQ ID NO: 1326320 - RNA, 18 nt, Human
auuggaggaaaggaaaaa

SEQ ID NO: 1326321 - RNA, 26 nt, Human
caacaaaaacugaaaauuggaggaaa

SEQ ID NO: 1326322 - RNA, 22 nt, Human
caaggcaagaggauugcuugag

SEQ ID NO: 1326323 - RNA, 26 nt, Human
caaggcaagaggauugcuugaggcca

SEQ ID NO: 1326324 - RNA, 18 nt, Human
cacacuaucuccacuccu

SEQ ID NO: 1326325 - RNA, 20 nt, Human
cagcauuuugggaugccaag

SEQ ID NO: 1326326 - RNA, 21 nt, Human
cagcauuuugggaugccaagg

SEQ ID NO: 1326327 - RNA, 21 nt, Human
cccuguaaucccagcauuuug

SEQ ID NO: 1326328 - RNA, 22 nt, Human
ccuguaaucccagcauuuuggg

SEQ ID NO: 1326329 - RNA, 21 nt, Human
ggccaggauucugagaccagc

SEQ ID NO: 1326330 - RNA, 21 nt, Human
uaccugucauacuuuaaaagu

SEQ ID NO: 1326331 - RNA, 22 nt, Human
uagaauuuauaaaaaacggcuc

SEQ ID NO: 1326332 - RNA, 22 nt, Human
ucaacaaaaacugaaaauugga

SEQ ID NO: 1326333 - RNA, 18 nt, Human
uccacaguuuuccuccau

SEQ ID NO: 1326334 - RNA, 22 nt, Human
uccuccacaguuuuccuccauu

SEQ ID NO: 1326335 - RNA, 24 nt, Human
ucucaaaugucaucacacuaucuc

SEQ ID NO: 1326336 - RNA, 24 nt, Human
ugccaaggcaagaggauugcuccg

SEQ ID NO: 1326337 - RNA, 22 nt, Human
uggaggaaaggaaaaaggaaau

SEQ ID NO: 1326338 - RNA, 19 nt, Human
ugggaugccaaggcaagag

SEQ ID NO: 1326339 - RNA, 22 nt, Human
ugucaucacacuaucuccacuc

SEQ ID NO: 1326340 - RNA, 20 nt, Human
uucugagaccagccuggucc

SEQ ID NO: 1326341 - RNA, 24 nt, Human
aaaaucgccacaaauacaaaagca

SEQ ID NO: 1326342 - RNA, 20 nt, Human
aaagcaucacugaacuaaaa

SEQ ID NO: 1326343 - RNA, 23 nt, Human
aaauacaaaagcaucacugaacu

SEQ ID NO: 1326344 - RNA, 25 nt, Human
aauacaaaagcaucacugaacuaaa

SEQ ID NO: 1326345 - RNA, 19 nt, Human
acaaauacaaaagcaucac

SEQ ID NO: 1326346 - RNA, 26 nt, Human
caaaagcaucacugaacuaaaaauac

SEQ ID NO: 1326347 - RNA, 22 nt, Human
caaauacaaaagcaucacugaa

SEQ ID NO: 1326348 - RNA, 23 nt, Human
caaauacaaaagcaucacugaac

SEQ ID NO: 1326349 - RNA, 20 nt, Human
cauauacguauauucucaua

SEQ ID NO: 1326350 - RNA, 25 nt, Human
cauucugugcauuuucaauuugugu

SEQ ID NO: 1326351 - RNA, 25 nt, Human
ccacaaauacaaaagcaucacugaa

SEQ ID NO: 1326352 - RNA, 20 nt, Human
cccaauuuaggcuuucuggc

SEQ ID NO: 1326353 - RNA, 24 nt, Human
cuguuucccaauuuaggcuuucug

SEQ ID NO: 1326354 - RNA, 23 nt, Human
uaaauagaaacaaaagucuccau

SEQ ID NO: 1326355 - RNA, 24 nt, Human
uaaauagaaacaaaagucuccaug

SEQ ID NO: 1326356 - RNA, 18 nt, Human
uauuggcuuuccaucuua

SEQ ID NO: 1326357 - RNA, 24 nt, Human
uccaugcaauuuucagaugaaaaa

SEQ ID NO: 1326358 - RNA, 19 nt, Human
ucuggccaugggagugaca

SEQ ID NO: 1326359 - RNA, 22 nt, Human
uguguguuuucauuuagauggu

SEQ ID NO: 1326360 - RNA, 23 nt, Human
uguuucccaauuuaggcuuucug

SEQ ID NO: 1326361 - RNA, 23 nt, Human
uucugugcauuuucaauuugugu

SEQ ID NO: 1326362 - RNA, 24 nt, Human
uuguguguuuucauuuagaugguu

SEQ ID NO: 1326363 - RNA, 24 nt, Human
acgcucuagcuucucccuacaggc

SEQ ID NO: 1326364 - RNA, 18 nt, Human
cagggguuucggcgucgg

SEQ ID NO: 1326365 - RNA, 19 nt, Human
cccccggccccggcugcuc

SEQ ID NO: 1326366 - RNA, 21 nt, Human
ccccggccccggcugcucgac

SEQ ID NO: 1326367 - RNA, 23 nt, Human
ccggcagcggcggcagggguuuc

SEQ ID NO: 1326368 - RNA, 18 nt, Human
ccggcccccggccccggc

SEQ ID NO: 1326369 - RNA, 20 nt, Human
ccggcccccggccccggcug

SEQ ID NO: 1326370 - RNA, 22 nt, Human
cggcccccggccccggcugcuc

SEQ ID NO: 1326371 - RNA, 21 nt, Human
cuccggcccccggccccggcc

SEQ ID NO: 1326372 - RNA, 18 nt, Human
ucucccuacaggcccggc

SEQ ID NO: 1326373 - RNA, 19 nt, Human
ugaaacgcucuagcuucuc

SEQ ID NO: 1326374 - RNA, 18 nt, Human
aaaccacagccuccaccg

SEQ ID NO: 1326375 - RNA, 19 nt, Human
accacagccuccaccagca

SEQ ID NO: 1326376 - RNA, 20 nt, Human
cuaaaccacagccuccaccu

SEQ ID NO: 1326377 - RNA, 20 nt, Human
cucuggucucuaaaccacag

SEQ ID NO: 1326378 - RNA, 19 nt, Human
ggucucuaaaccacagccu

SEQ ID NO: 1326379 - RNA, 22 nt, Human
uccaccagcaacuccugaauaa

SEQ ID NO: 1326380 - RNA, 24 nt, Human
ucuaaaccacagccuccaccagca

SEQ ID NO: 1326381 - RNA, 20 nt, Human
ucucuaaaccacagccucca

SEQ ID NO: 1326382 - RNA, 20 nt, Human
uggucucuaaaccacagccu

SEQ ID NO: 1326383 - RNA, 22 nt, Human
aaacaaaugcuaguccagccac

SEQ ID NO: 1326384 - RNA, 18 nt, Human
aggggaaucagggagccc

SEQ ID NO: 1326385 - RNA, 23 nt, Human
cccuccgucccuuuaccacuucc

SEQ ID NO: 1326386 - RNA, 21 nt, Human
ccuccuaccacuauacucucc

SEQ ID NO: 1326387 - RNA, 26 nt, Human
ccuccuaccacuauacucuccaaacc

SEQ ID NO: 1326388 - RNA, 21 nt, Human
cuugugguauacaaaccaugc

SEQ ID NO: 1326389 - RNA, 24 nt, Human
ggagccccuccuaccacuauacuc

SEQ ID NO: 1326390 - RNA, 20 nt, Human
ucagggagccccuccuaccc

SEQ ID NO: 1326391 - RNA, 23 nt, Human
uccaaaccauguagaaccaaaga

SEQ ID NO: 1326392 - RNA, 23 nt, Human
ucccugcuucaggcagauccccc

SEQ ID NO: 1326393 - RNA, 20 nt, Human
uccgucccuuuaccacuucc

SEQ ID NO: 1326394 - RNA, 21 nt, Human
uccuucuugccuugugcucug

SEQ ID NO: 1326395 - RNA, 20 nt, Human
ucugcagggaaaggguuguu

SEQ ID NO: 1326396 - RNA, 20 nt, Human
ugcuucaggcagauccccca

SEQ ID NO: 1326397 - RNA, 18 nt, Human
ugggagauaagcuggagg

SEQ ID NO: 1326398 - RNA, 20 nt, Human
uguagaaccaaagaugguua

SEQ ID NO: 1326399 - RNA, 22 nt, Human
uguagaaccaaagaugguuacc

SEQ ID NO: 1326400 - RNA, 21 nt, Human
uguucaggauaaaugguugau

SEQ ID NO: 1326401 - RNA, 24 nt, Human
uuccuucuugccuugugcucugac

SEQ ID NO: 1326402 - RNA, 20 nt, Human
uuucucaaaugguguuguuc

SEQ ID NO: 1326403 - RNA, 22 nt, Human
caccagugacauaaaagacaaa

SEQ ID NO: 1326404 - RNA, 23 nt, Human
caccagugacauaaaagacaaaa

SEQ ID NO: 1326405 - RNA, 19 nt, Human
ugucgugcucuuuuggaca

SEQ ID NO: 1326406 - RNA, 21 nt, Human
ugucgugcucuuuuggacaga

SEQ ID NO: 1326407 - RNA, 21 nt, Human
uuuggacagagacccaccagu

SEQ ID NO: 1326408 - RNA, 24 nt, Human
aaagcaaauuggcuccguuuaagg

SEQ ID NO: 1326409 - RNA, 22 nt, Human
aaaguaugagggggaaggacca

SEQ ID NO: 1326410 - RNA, 23 nt, Human
aaaguaugagggggaaggaccag

SEQ ID NO: 1326411 - RNA, 24 nt, Human
accucggcaccccgagcccguuca

SEQ ID NO: 1326412 - RNA, 18 nt, Human
agagccagcgccaagagc

SEQ ID NO: 1326413 - RNA, 22 nt, Human
agcauccaguuggugaccaggc

SEQ ID NO: 1326414 - RNA, 26 nt, Human
agccggaccucggcaccccgagcccg

SEQ ID NO: 1326415 - RNA, 19 nt, Human
auccuucuaaggugaaccc

SEQ ID NO: 1326416 - RNA, 20 nt, Human
caagauaagggucugauaac

SEQ ID NO: 1326417 - RNA, 20 nt, Human
cagaaaguaugagggggaag

SEQ ID NO: 1326418 - RNA, 22 nt, Human
cagcaaguccucuucugaaccc

SEQ ID NO: 1326419 - RNA, 21 nt, Human
cagcccuuucuugccccaggc

SEQ ID NO: 1326420 - RNA, 18 nt, Human
caggguuccaucuccccu

SEQ ID NO: 1326421 - RNA, 23 nt, Human
caucucuuuucucucuucuccaa

SEQ ID NO: 1326422 - RNA, 24 nt, Human
cauuccuggauagcagcccuuucu

SEQ ID NO: 1326423 - RNA, 21 nt, Human
ccaaacuuagccagggguagg

SEQ ID NO: 1326424 - RNA, 25 nt, Human
cccggccccgcagccggaccucggc

SEQ ID NO: 1326425 - RNA, 23 nt, Human
cggcaagguggagguggcuuccc

SEQ ID NO: 1326426 - RNA, 20 nt, Human
cuaagacagggcuaauagcu

SEQ ID NO: 1326427 - RNA, 28 nt, Human
cucagccuugcgccucgggggucguaac

SEQ ID NO: 1326428 - RNA, 20 nt, Human
cuccccaaaacaaacaaaaa

SEQ ID NO: 1326429 - RNA, 25 nt, Human
cuccugaaauccgcaaggaaguggg

SEQ ID NO: 1326430 - RNA, 27 nt, Human
cucggcaccccgagcccguucaccggg

SEQ ID NO: 1326431 - RNA, 24 nt, Human
cucuuuucucucuucuccacagca

SEQ ID NO: 1326432 - RNA, 18 nt, Human
cugcguagccuugggcaa

SEQ ID NO: 1326433 - RNA, 19 nt, Human
cugcguagccuugggcaag

SEQ ID NO: 1326434 - RNA, 21 nt, Human
cuggcuauacaggaaagcaaa

SEQ ID NO: 1326435 - RNA, 18 nt, Human
cuucccaucucuuuucuc

SEQ ID NO: 1326436 - RNA, 26 nt, Human
gagccagcgccaagagcuucaaaaaa

SEQ ID NO: 1326437 - RNA, 21 nt, Human
gccaagagcuucaaaaaaucc

SEQ ID NO: 1326438 - RNA, 19 nt, Human
gccuguauccucacacccu

SEQ ID NO: 1326439 - RNA, 19 nt, Human
ggacccggauagcgagaug

SEQ ID NO: 1326440 - RNA, 22 nt, Human
ggauucuugacuccugaaaucc

SEQ ID NO: 1326441 - RNA, 18 nt, Human
ggguaggggggcacauuu

SEQ ID NO: 1326442 - RNA, 20 nt, Human
ggguaggggggcacauuuuc

SEQ ID NO: 1326443 - RNA, 20 nt, Human
uaaaugauccucucucccca

SEQ ID NO: 1326444 - RNA, 18 nt, Human
uaacagacggcaaggugg

SEQ ID NO: 1326445 - RNA, 18 nt, Human
uaagacagggcuaauagc

SEQ ID NO: 1326446 - RNA, 22 nt, Human
uaauagcuauaauuucaccugc

SEQ ID NO: 1326447 - RNA, 20 nt, Human
uagcagcccuuucuugcccc

SEQ ID NO: 1326448 - RNA, 26 nt, Human
uagcagcccuuucuugccccaggcuc

SEQ ID NO: 1326449 - RNA, 26 nt, Human
uagccuugggcaaguuccucaaucuc

SEQ ID NO: 1326450 - RNA, 22 nt, Human
uaucuccuuucgaacucaaguc

SEQ ID NO: 1326451 - RNA, 23 nt, Human
uaugacaugggaacccaaacuua

SEQ ID NO: 1326452 - RNA, 20 nt, Human
uccccaaaacaaacaaaaaa

SEQ ID NO: 1326453 - RNA, 21 nt, Human
uccccaaaacaaacaaaaaau

SEQ ID NO: 1326454 - RNA, 21 nt, Human
uccucuucugaacccucauug

SEQ ID NO: 1326455 - RNA, 19 nt, Human
ucucuuuucucucuucucc

SEQ ID NO: 1326456 - RNA, 23 nt, Human
ucuuccauguacaugggcugcuc

SEQ ID NO: 1326457 - RNA, 19 nt, Human
ugaccaggcuccccgaauu

SEQ ID NO: 1326458 - RNA, 20 nt, Human
ugauccucucuccccaaaac

SEQ ID NO: 1326459 - RNA, 22 nt, Human
ugcauguuguuauggagcuguc

SEQ ID NO: 1326460 - RNA, 24 nt, Human
ugccccaggcucuggcacgaugcc

SEQ ID NO: 1326461 - RNA, 21 nt, Human
uggcuucccggccccgcagcc

SEQ ID NO: 1326462 - RNA, 22 nt, Human
uggcuuuacaaagcaaauuggc

SEQ ID NO: 1326463 - RNA, 21 nt, Human
ugggaacccaaacuuagccag

SEQ ID NO: 1326464 - RNA, 20 nt, Human
uguuauggagcugucucagc

SEQ ID NO: 1326465 - RNA, 26 nt, Human
uguuauggagcugucucagcacgggg

SEQ ID NO: 1326466 - RNA, 25 nt, Human
uucaaaaaauccuucuaaggugaac

SEQ ID NO: 1326467 - RNA, 29 nt, Human
uucccaucucuuuucucucuucuccacaa

SEQ ID NO: 1326468 - RNA, 22 nt, Human
uuuagcuuugaugaucucuccu

SEQ ID NO: 1326469 - RNA, 20 nt, Human
uuugaugaucucuccuauuu

SEQ ID NO: 1326470 - RNA, 21 nt, Human
uuuucuguuuuguuguugagu

SEQ ID NO: 1326471 - RNA, 20 nt, Human
aauggcaggcucuggcugug

SEQ ID NO: 1326472 - RNA, 26 nt, Human
agaaagcaaacaccacucucagccca

SEQ ID NO: 1326473 - RNA, 19 nt, Human
caggcucuggcuguggugc

SEQ ID NO: 1326474 - RNA, 23 nt, Human
cagugauaccccaaauuagauga

SEQ ID NO: 1326475 - RNA, 23 nt, Human
ccgcccuucagacgaaauccuug

SEQ ID NO: 1326476 - RNA, 23 nt, Human
ccuucugguggagaaagcaaaca

SEQ ID NO: 1326477 - RNA, 18 nt, Human
cucccccuucucuuuguc

SEQ ID NO: 1326478 - RNA, 24 nt, Human
gacugugcaacuccuccacaagau

SEQ ID NO: 1326479 - RNA, 20 nt, Human
gugagaaacagccucaguca

SEQ ID NO: 1326480 - RNA, 21 nt, Human
ucacugaggggaugagguacu

SEQ ID NO: 1326481 - RNA, 19 nt, Human
ucagcccauuccugcuacc

SEQ ID NO: 1326482 - RNA, 24 nt, Human
ucagcccauuccugcuaccucuua

SEQ ID NO: 1326483 - RNA, 19 nt, Human
uggucugcuagguuuucuu

SEQ ID NO: 1326484 - RNA, 19 nt, Human
ugguggagaaagcaaacac

SEQ ID NO: 1326485 - RNA, 23 nt, Human
ugguggagaaagcaaacaccacu

SEQ ID NO: 1326486 - RNA, 20 nt, Human
uucauugguccuaauggcag

SEQ ID NO: 1326487 - RNA, 21 nt, Human
uuucauugguccuaauggcag

SEQ ID NO: 1326488 - RNA, 21 nt, Human
accacauauguacgcauugcc

SEQ ID NO: 1326489 - RNA, 22 nt, Human
acuagaagcaaaaacauuuuca

SEQ ID NO: 1326490 - RNA, 21 nt, Human
caaucucuggcagcacagcug

SEQ ID NO: 1326491 - RNA, 22 nt, Human
cacagcugcagcaaccugcgcu

SEQ ID NO: 1326492 - RNA, 21 nt, Human
cagcacagcugcagcaaccug

SEQ ID NO: 1326493 - RNA, 24 nt, Human
ccacauauguacgcauugccccuc

SEQ ID NO: 1326494 - RNA, 24 nt, Human
ccgcuggagcuaacgaaaccacau

SEQ ID NO: 1326495 - RNA, 25 nt, Human
cgggaucgccuccauucaguguuuc

SEQ ID NO: 1326496 - RNA, 23 nt, Human
cugaauuacaaucucuggcagca

SEQ ID NO: 1326497 - RNA, 22 nt, Human
cugcgcugcugcugcuccaucc

SEQ ID NO: 1326498 - RNA, 25 nt, Human
gcagcaaccugcgcugcugcugcuc

SEQ ID NO: 1326499 - RNA, 19 nt, Human
gcugcugcuccauccaucu

SEQ ID NO: 1326500 - RNA, 19 nt, Human
gguuccugaauuacaaucu

SEQ ID NO: 1326501 - RNA, 18 nt, Human
uacuguaauuccuaaggu

SEQ ID NO: 1326502 - RNA, 20 nt, Human
uccaaaaaauauacuagaag

SEQ ID NO: 1326503 - RNA, 21 nt, Human
uccuaagguaagaaagggagc

SEQ ID NO: 1326504 - RNA, 28 nt, Human
ugcuccauccaucucgggaucgccucca

SEQ ID NO: 1326505 - RNA, 21 nt, Human
uggcagcacagcugcagcaac

SEQ ID NO: 1326506 - RNA, 20 nt, Human
ugguuccugaauuacaaucu

SEQ ID NO: 1326507 - RNA, 18 nt, Human
uguacgcauugccccaaa

SEQ ID NO: 1326508 - RNA, 19 nt, Human
ugucagaggauuagccccc

SEQ ID NO: 1326509 - RNA, 26 nt, Human
uuaaaaauauuuauuaauauuuagaa

SEQ ID NO: 1326510 - RNA, 18 nt, Human
uuuauuaauauuuagaac

SEQ ID NO: 1326511 - RNA, 21 nt, Human
aaaacagcccugggcagggau

SEQ ID NO: 1326512 - RNA, 21 nt, Human
aacaucaucuucccuacaauc

SEQ ID NO: 1326513 - RNA, 21 nt, Human
aagagaccgagugacuggaug

SEQ ID NO: 1326514 - RNA, 23 nt, Human
aauguacauggcaugaguauaug

SEQ ID NO: 1326515 - RNA, 27 nt, Human
agacacuacaggucggaaauccaagcu

SEQ ID NO: 1326516 - RNA, 21 nt, Human
aggaauugcaagaugaggggg

SEQ ID NO: 1326517 - RNA, 18 nt, Human
aucugguuggacaguggg

SEQ ID NO: 1326518 - RNA, 20 nt, Human
caaaccaaagcagaauggcc

SEQ ID NO: 1326519 - RNA, 22 nt, Human
cacccugccuuaagagaccgag

SEQ ID NO: 1326520 - RNA, 19 nt, Human
cacuguauaaauauagagu

SEQ ID NO: 1326521 - RNA, 21 nt, Human
cagcagguuccuaggugguuu

SEQ ID NO: 1326522 - RNA, 19 nt, Human
cagugggugagcaccaggc

SEQ ID NO: 1326523 - RNA, 23 nt, Human
caucaucuucccuacaaucugca

SEQ ID NO: 1326524 - RNA, 24 nt, Human
caugagccuuaaggaaauggacua

SEQ ID NO: 1326525 - RNA, 20 nt, Human
cauuuuauccauuuggagua

SEQ ID NO: 1326526 - RNA, 25 nt, Human
ccaaagcagaauggccuuagagcaa

SEQ ID NO: 1326527 - RNA, 23 nt, Human
cccuacaaucugcaucccccaaa

SEQ ID NO: 1326528 - RNA, 19 nt, Human
cuagaggcugagccaaacc

SEQ ID NO: 1326529 - RNA, 22 nt, Human
gaaaacagcccugggcagggau

SEQ ID NO: 1326530 - RNA, 19 nt, Human
gaaucagcugucuuaaagu

SEQ ID NO: 1326531 - RNA, 18 nt, Human
gaucaucauccugaucca

SEQ ID NO: 1326532 - RNA, 28 nt, Human
ggaggcuuucgguaagcaaggcaucugg

SEQ ID NO: 1326533 - RNA, 22 nt, Human
ggagguuuguggggauuucucu

SEQ ID NO: 1326534 - RNA, 19 nt, Human
uaaacaucaucuucccuac

SEQ ID NO: 1326535 - RNA, 18 nt, Human
uacagcaauguucugaga

SEQ ID NO: 1326536 - RNA, 20 nt, Human
uaggauggagguuugugggg

SEQ ID NO: 1326537 - RNA, 19 nt, Human
ucagagucucauuuuaucc

SEQ ID NO: 1326538 - RNA, 18 nt, Human
uccucaaucagagucuca

SEQ ID NO: 1326539 - RNA, 23 nt, Human
ucuauacacacauuaccuauaua

SEQ ID NO: 1326540 - RNA, 22 nt, Human
ucucuucagagcaauuccugga

SEQ ID NO: 1326541 - RNA, 23 nt, Human
ucuucagagcaauuccuggaggc

SEQ ID NO: 1326542 - RNA, 21 nt, Human
ucuucuucuuccuccccaguc

SEQ ID NO: 1326543 - RNA, 22 nt, Human
ugaguauaugucacuguauaaa

SEQ ID NO: 1326544 - RNA, 24 nt, Human
uggcacccugccuuaagagaccga

SEQ ID NO: 1326545 - RNA, 22 nt, Human
uggcaugaguauaugucacugu

SEQ ID NO: 1326546 - RNA, 23 nt, Human
uuacuuuuuuuuccucaaucaga

SEQ ID NO: 1326547 - RNA, 22 nt, Human
uuagaaaucuugaacccgcgcu

SEQ ID NO: 1326548 - RNA, 21 nt, Human
uuagagcaacagcagguuccu

SEQ ID NO: 1326549 - RNA, 23 nt, Human
uucacaucaguuucucuucuucu

SEQ ID NO: 1326550 - RNA, 24 nt, Human
uucagggaagagcuaucuugauca

SEQ ID NO: 1326551 - RNA, 23 nt, Human
uucucuucagagcaauuccugga

SEQ ID NO: 1326552 - RNA, 19 nt, Human
uugcuggagacacuacagg

SEQ ID NO: 1326553 - RNA, 24 nt, Human
uacauggguacgccagcgagugcc

SEQ ID NO: 1326554 - RNA, 28 nt, Human
aaacaacaacaauaaaauccccaguagg

SEQ ID NO: 1326555 - RNA, 27 nt, Human
aagaaaaaagaaagugggagaaucuga

SEQ ID NO: 1326556 - RNA, 18 nt, Human
aagaaaauggaaucccua

SEQ ID NO: 1326557 - RNA, 21 nt, Human
aagaaaauggaaucccuaagc

SEQ ID NO: 1326558 - RNA, 27 nt, Human
aagaaagugggagaaucugaucacgac

SEQ ID NO: 1326559 - RNA, 18 nt, Human
agaggugaacaaagaaaa

SEQ ID NO: 1326560 - RNA, 19 nt, Human
agcgugaggggcgaaaaga

SEQ ID NO: 1326561 - RNA, 18 nt, Human
aggaaagaaaaaagaaag

SEQ ID NO: 1326562 - RNA, 21 nt, Human
cagucuauuccuccagaggcu

SEQ ID NO: 1326563 - RNA, 22 nt, Human
cauuccaggaaagaaaaaagaa

SEQ ID NO: 1326564 - RNA, 20 nt, Human
ccaaaggccaacccugcagc

SEQ ID NO: 1326565 - RNA, 18 nt, Human
cccacuccauuccaggaa

SEQ ID NO: 1326566 - RNA, 19 nt, Human
cccugggcugccuaaauag

SEQ ID NO: 1326567 - RNA, 18 nt, Human
cuauauggccagcauuau

SEQ ID NO: 1326568 - RNA, 23 nt, Human
cuccagagagcagaagccccucu

SEQ ID NO: 1326569 - RNA, 19 nt, Human
cugcagcauucuagugcuc

SEQ ID NO: 1326570 - RNA, 24 nt, Human
cuuaggguugcuaaaucaaguggu

SEQ ID NO: 1326571 - RNA, 21 nt, Human
gaaagaaaaaagaaaguggga

SEQ ID NO: 1326572 - RNA, 18 nt, Human
gagagcaaagcagauucc

SEQ ID NO: 1326573 - RNA, 25 nt, Human
gaucacgacgggcugagguccugug

SEQ ID NO: 1326574 - RNA, 20 nt, Human
ggaaagaaaaaagaaagugg

SEQ ID NO: 1326575 - RNA, 24 nt, Human
ggcaaguagaggugaacaaagaaa

SEQ ID NO: 1326576 - RNA, 21 nt, Human
gguagagauggaaaaagacug

SEQ ID NO: 1326577 - RNA, 28 nt, Human
uaaaaaugaacaucaacuucgguagaga

SEQ ID NO: 1326578 - RNA, 23 nt, Human
ucccugggcugccuaaauaguuc

SEQ ID NO: 1326579 - RNA, 19 nt, Human
uccgaauugacuccugaga

SEQ ID NO: 1326580 - RNA, 22 nt, Human
ucgcguuaaacacaaacaacaa

SEQ ID NO: 1326581 - RNA, 18 nt, Human
ucgguagagauggaaaaa

SEQ ID NO: 1326582 - RNA, 18 nt, Human
ugaaacguugcugcccuc

SEQ ID NO: 1326583 - RNA, 22 nt, Human
ugagagcaaagcagauuccaaa

SEQ ID NO: 1326584 - RNA, 20 nt, Human
ugccccaggggaugccuuca

SEQ ID NO: 1326585 - RNA, 21 nt, Human
ugccccaggggaugccuucag

SEQ ID NO: 1326586 - RNA, 22 nt, Human
ugccccaggggaugccuucagu

SEQ ID NO: 1326587 - RNA, 21 nt, Human
ugggagaaucugaucacgacg

SEQ ID NO: 1326588 - RNA, 18 nt, Human
uuaaacacaaacaacaac

SEQ ID NO: 1326589 - RNA, 18 nt, Human
uuuagaggcaaguagagg

SEQ ID NO: 1326590 - RNA, 23 nt, Human
aaguuccagguuuguauuucugg

SEQ ID NO: 1326591 - RNA, 23 nt, Human
accccaaaauuucccuguuucac

SEQ ID NO: 1326592 - RNA, 21 nt, Human
aggcaguagaugaccacgauc

SEQ ID NO: 1326593 - RNA, 18 nt, Human
cacaguucugacuggggg

SEQ ID NO: 1326594 - RNA, 21 nt, Human
cagaaggcaguagaugaccac

SEQ ID NO: 1326595 - RNA, 22 nt, Human
cagaaggcaguagaugaccacg

SEQ ID NO: 1326596 - RNA, 19 nt, Human
caguguguggccacuuggu

SEQ ID NO: 1326597 - RNA, 23 nt, Human
cccuguuucacaguucugacugg

SEQ ID NO: 1326598 - RNA, 19 nt, Human
ccucagcuagauuaggccc

SEQ ID NO: 1326599 - RNA, 23 nt, Human
ccuguuucacaguucugacuggg

SEQ ID NO: 1326600 - RNA, 20 nt, Human
uacguggacuuccagguggg

SEQ ID NO: 1326601 - RNA, 19 nt, Human
uagauuaggcccugcccag

SEQ ID NO: 1326602 - RNA, 19 nt, Human
ugagaaagccuuuucauac

SEQ ID NO: 1326603 - RNA, 23 nt, Human
ugagucgcuauacggguuuuuca

SEQ ID NO: 1326604 - RNA, 22 nt, Human
ugcuuuuacucccaccccaaaa

SEQ ID NO: 1326605 - RNA, 21 nt, Human
uuagugggagaccaguucugc

SEQ ID NO: 1326606 - RNA, 28 nt, Human
uucaacaaaaaaaaguuuauuuuccaaa

SEQ ID NO: 1326607 - RNA, 18 nt, Human
uucacaguucugacuggg

SEQ ID NO: 1326608 - RNA, 22 nt, Human
uuucacaguucugacugggggc

SEQ ID NO: 1326609 - RNA, 18 nt, Human
acaggguuucacuauguu

SEQ ID NO: 1326610 - RNA, 21 nt, Human
acaggguuucacuauguuggc

SEQ ID NO: 1326611 - RNA, 24 nt, Human
acaggguuucacuauguuggccag

SEQ ID NO: 1326612 - RNA, 21 nt, Human
acuauguuggccaggcuagug

SEQ ID NO: 1326613 - RNA, 24 nt, Human
augauccaccugccucggccuccc

SEQ ID NO: 1326614 - RNA, 24 nt, Human
auuuuaguagagacaggguuucac

SEQ ID NO: 1326615 - RNA, 23 nt, Human
caccugccucggccucccaaagu

SEQ ID NO: 1326616 - RNA, 18 nt, Human
cacuauguuggccaggcu

SEQ ID NO: 1326617 - RNA, 21 nt, Human
cacuauguuggccaggcuagu

SEQ ID NO: 1326618 - RNA, 24 nt, Human
caggguuucacuauguuggccagg

SEQ ID NO: 1326619 - RNA, 22 nt, Human
ccacacccggcuaauuuuugua

SEQ ID NO: 1326620 - RNA, 24 nt, Human
ccugccucggccucccaaagugcu

SEQ ID NO: 1326621 - RNA, 24 nt, Human
cuaauuuuuguauuuuaguagaga

SEQ ID NO: 1326622 - RNA, 19 nt, Human
cucaugauccaccugccuc

SEQ ID NO: 1326623 - RNA, 24 nt, Human
cuucugaucucaugauccaccugc

SEQ ID NO: 1326624 - RNA, 19 nt, Human
gagggcggacaccaaagcu

SEQ ID NO: 1326625 - RNA, 25 nt, Human
gaguagcugggacuacagugcacgc

SEQ ID NO: 1326626 - RNA, 22 nt, Human
gaucucaugauccaccugccuc

SEQ ID NO: 1326627 - RNA, 24 nt, Human
gaucucaugauccaccugccucgg

SEQ ID NO: 1326628 - RNA, 22 nt, Human
ggguuucacuauguuggccagg

SEQ ID NO: 1326629 - RNA, 23 nt, Human
uaauuuuuguauuuuaguagaga

SEQ ID NO: 1326630 - RNA, 25 nt, Human
uaauuuuuguauuuuaguagagaca

SEQ ID NO: 1326631 - RNA, 22 nt, Human
uagagacaggguuucacuaugu

SEQ ID NO: 1326632 - RNA, 24 nt, Human
uaguagagacaggguuucacuaug

SEQ ID NO: 1326633 - RNA, 24 nt, Human
uauguuggccaggcuagugucgaa

SEQ ID NO: 1326634 - RNA, 18 nt, Human
ucggccucccaaagugcu

SEQ ID NO: 1326635 - RNA, 23 nt, Human
ugaucucaugauccaccugccuc

SEQ ID NO: 1326636 - RNA, 21 nt, Human
ugccucggccucccaaagugc

SEQ ID NO: 1326637 - RNA, 24 nt, Human
ugccucggccucccaaagugcugg

SEQ ID NO: 1326638 - RNA, 24 nt, Human
uggccaggcuagugucgaacuucu

SEQ ID NO: 1326639 - RNA, 23 nt, Human
ugggacuacagugcacgccucca

SEQ ID NO: 1326640 - RNA, 21 nt, Human
uuaguagagacaggguuucac

SEQ ID NO: 1326641 - RNA, 24 nt, Human
uuaguagagacaggguuucacuau

SEQ ID NO: 1326642 - RNA, 24 nt, Human
uuucacuauguuggccaggcuagu

SEQ ID NO: 1326643 - RNA, 19 nt, Human
uuuuuguauuuuaguagag

SEQ ID NO: 1326644 - RNA, 22 nt, Human
aauuauccagccaugagcccug

SEQ ID NO: 1326645 - RNA, 22 nt, Human
acagagcugcucacagauacca

SEQ ID NO: 1326646 - RNA, 25 nt, Human
accaacuacccgcgaccucuaccac

SEQ ID NO: 1326647 - RNA, 20 nt, Human
agaugcuucuagaagccugg

SEQ ID NO: 1326648 - RNA, 21 nt, Human
agcccuggcccagaugcuucu

SEQ ID NO: 1326649 - RNA, 19 nt, Human
agcuucgaaaaggcuuagg

SEQ ID NO: 1326650 - RNA, 18 nt, Human
aggccccuuguccucugg

SEQ ID NO: 1326651 - RNA, 25 nt, Human
aggcccugaggugggagcacacugc

SEQ ID NO: 1326652 - RNA, 23 nt, Human
aggggcugggcaugguuggcuuu

SEQ ID NO: 1326653 - RNA, 24 nt, Human
cacagagcugcucacagauaccac

SEQ ID NO: 1326654 - RNA, 22 nt, Human
cacccacuugcucuuucggcug

SEQ ID NO: 1326655 - RNA, 19 nt, Human
cccaccaacuacccgcgac

SEQ ID NO: 1326656 - RNA, 22 nt, Human
ccccuuguccucuggcagccca

SEQ ID NO: 1326657 - RNA, 19 nt, Human
ccucucagggagaaaaccu

SEQ ID NO: 1326658 - RNA, 21 nt, Human
ccuuuucguauuucauaauga

SEQ ID NO: 1326659 - RNA, 21 nt, Human
cgucagaauucagaacgaugg

SEQ ID NO: 1326660 - RNA, 25 nt, Human
cgucccuagcucugaagggggugcc

SEQ ID NO: 1326661 - RNA, 18 nt, Human
cucacuuguacaaucccc

SEQ ID NO: 1326662 - RNA, 22 nt, Human
cuccgucucacuuguacaaucc

SEQ ID NO: 1326663 - RNA, 22 nt, Human
gaaaaccuuugaguccacagag

SEQ ID NO: 1326664 - RNA, 24 nt, Human
gagcugcucacagauaccacugcc

SEQ ID NO: 1326665 - RNA, 21 nt, Human
gcccugaggugggagcacacu

SEQ ID NO: 1326666 - RNA, 20 nt, Human
ggagaaaaccuuugagucca

SEQ ID NO: 1326667 - RNA, 24 nt, Human
ggagaaaaccuuugaguccacaga

SEQ ID NO: 1326668 - RNA, 24 nt, Human
ggccgcagaggcaaggcccugagg

SEQ ID NO: 1326669 - RNA, 22 nt, Human
ggcuuggggugcugggaggggc

SEQ ID NO: 1326670 - RNA, 24 nt, Human
gggcuuggggugcugggaggggcu

SEQ ID NO: 1326671 - RNA, 20 nt, Human
gggugcugggaggggcuggg

SEQ ID NO: 1326672 - RNA, 18 nt, Human
gugcugggaggggcuggg

SEQ ID NO: 1326673 - RNA, 22 nt, Human
gugcugggaggggcugggcaug

SEQ ID NO: 1326674 - RNA, 18 nt, Human
guuccaucucugaauguc

SEQ ID NO: 1326675 - RNA, 19 nt, Human
uaaaacgaggacgcgaagc

SEQ ID NO: 1326676 - RNA, 28 nt, Human
uaggccccuuguccucuggcagcccagg

SEQ ID NO: 1326677 - RNA, 24 nt, Human
uauccagccaugagcccuggccca

SEQ ID NO: 1326678 - RNA, 20 nt, Human
ucacagauaccacugccugu

SEQ ID NO: 1326679 - RNA, 21 nt, Human
uccaaguggaggccgcagagg

SEQ ID NO: 1326680 - RNA, 22 nt, Human
uccaaguggaggccgcagaggc

SEQ ID NO: 1326681 - RNA, 19 nt, Human
ucgaaaaggcuuaggcccc

SEQ ID NO: 1326682 - RNA, 22 nt, Human
ucguggggcuuggggugcuggg

SEQ ID NO: 1326683 - RNA, 26 nt, Human
ugaaucagcuggccugggucggaucc

SEQ ID NO: 1326684 - RNA, 18 nt, Human
ugaggugggagcacacug

SEQ ID NO: 1326685 - RNA, 21 nt, Human
ugcuucgccucccgcgcaguc

SEQ ID NO: 1326686 - RNA, 23 nt, Human
uggcuuugugaucuggggucugg

SEQ ID NO: 1326687 - RNA, 18 nt, Human
ugggaggggcugggcaug

SEQ ID NO: 1326688 - RNA, 18 nt, Human
ugggaggggcugggcaug

SEQ ID NO: 1326689 - RNA, 20 nt, Human
ugggaggggcugggcauggu

SEQ ID NO: 1326690 - RNA, 20 nt, Human
ugggaggggcugggcauggu

SEQ ID NO: 1326691 - RNA, 18 nt, Human
uggggcuuggggugcugg

SEQ ID NO: 1326692 - RNA, 21 nt, Human
uggggugcugggaggggcugg

SEQ ID NO: 1326693 - RNA, 24 nt, Human
uguuccaucucugaaugucucuca

SEQ ID NO: 1326694 - RNA, 20 nt, Human
uugugcccaccaacuacccg

SEQ ID NO: 1326695 - RNA, 20 nt, Human
ccccauggccccagaaccuc

SEQ ID NO: 1326696 - RNA, 21 nt, Human
cccuggccggcgccggacccc

SEQ ID NO: 1326697 - RNA, 23 nt, Human
ccgcccuggccggcgccggaccc

SEQ ID NO: 1326698 - RNA, 21 nt, Human
ccggacccccauggccccaga

SEQ ID NO: 1326699 - RNA, 22 nt, Human
ccggacccccauggccccagaa

SEQ ID NO: 1326700 - RNA, 19 nt, Human
cggacccccauggccccag

SEQ ID NO: 1326701 - RNA, 18 nt, Human
uggcaugcuggggagugg

SEQ ID NO: 1326702 - RNA, 21 nt, Human
accagauuggauccagccauc

SEQ ID NO: 1326703 - RNA, 21 nt, Human
cacgcugcuuuuaacaaacug

SEQ ID NO: 1326704 - RNA, 18 nt, Human
cacugcugauuauauccc

SEQ ID NO: 1326705 - RNA, 23 nt, Human
gcacugcugauuauaucccacgc

SEQ ID NO: 1326706 - RNA, 23 nt, Human
ucccacgcugcuuuuaacaaacu

SEQ ID NO: 1326707 - RNA, 21 nt, Human
aaaguccucuccacucagccc

SEQ ID NO: 1326708 - RNA, 19 nt, Human
agaaauagcccaggcucgg

SEQ ID NO: 1326709 - RNA, 19 nt, Human
agaugagggugguggcugg

SEQ ID NO: 1326710 - RNA, 18 nt, Human
aggcgguggugauggugg

SEQ ID NO: 1326711 - RNA, 19 nt, Human
aggcucggagucccacuua

SEQ ID NO: 1326712 - RNA, 20 nt, Human
agggaagggguggggggugg

SEQ ID NO: 1326713 - RNA, 18 nt, Human
agggugguggcuggaggc

SEQ ID NO: 1326714 - RNA, 20 nt, Human
agguggaagaugaggguggu

SEQ ID NO: 1326715 - RNA, 20 nt, Human
aggugggggguugggagcag

SEQ ID NO: 1326716 - RNA, 23 nt, Human
cacagccccggcucaggggagcu

SEQ ID NO: 1326717 - RNA, 19 nt, Human
cagcccauagggaccugca

SEQ ID NO: 1326718 - RNA, 18 nt, Human
caggcucggagucccacu

SEQ ID NO: 1326719 - RNA, 19 nt, Human
cgccagcgccagaaauagc

SEQ ID NO: 1326720 - RNA, 23 nt, Human
cgcgccagcgccagaaauagccc

SEQ ID NO: 1326721 - RNA, 22 nt, Human
cuggaggcgguggugaugguuu

SEQ ID NO: 1326722 - RNA, 19 nt, Human
gaaggugcagguggaagau

SEQ ID NO: 1326723 - RNA, 19 nt, Human
gaggugggggguugggagc

SEQ ID NO: 1326724 - RNA, 20 nt, Human
gaugggaagaggccagggga

SEQ ID NO: 1326725 - RNA, 22 nt, Human
ggaagggguggggggugggagg

SEQ ID NO: 1326726 - RNA, 20 nt, Human
ggaggaggggguagggaugg

SEQ ID NO: 1326727 - RNA, 19 nt, Human
ggaggggguagggauggga

SEQ ID NO: 1326728 - RNA, 21 nt, Human
ggaugggaagaggccagggga

SEQ ID NO: 1326729 - RNA, 18 nt, Human
gggggaggaggggguagg

SEQ ID NO: 1326730 - RNA, 23 nt, Human
gggggaggaggggguagggaugg

SEQ ID NO: 1326731 - RNA, 20 nt, Human
ggggggugggaggugggggg

SEQ ID NO: 1326732 - RNA, 19 nt, Human
gggggugggaggugggggg

SEQ ID NO: 1326733 - RNA, 24 nt, Human
ggguagggaugggaagaggccagg

SEQ ID NO: 1326734 - RNA, 24 nt, Human
ggguggacggggggaggagggggu

SEQ ID NO: 1326735 - RNA, 21 nt, Human
ggguggggggugggagguggg

SEQ ID NO: 1326736 - RNA, 22 nt, Human
gguagggaugggaagaggccag

SEQ ID NO: 1326737 - RNA, 20 nt, Human
ggugaugguggguguaggga

SEQ ID NO: 1326738 - RNA, 21 nt, Human
gguggacggggggaggagggg

SEQ ID NO: 1326739 - RNA, 19 nt, Human
ggugguggcuggaggcggu

SEQ ID NO: 1326740 - RNA, 23 nt, Human
gguguagggaagggguggggggu

SEQ ID NO: 1326741 - RNA, 20 nt, Human
gugugguggugaaggugcag

SEQ ID NO: 1326742 - RNA, 26 nt, Human
uagaagagcacagccccggcgucgac

SEQ ID NO: 1326743 - RNA, 20 nt, Human
uggaaaagugauggcuggaa

SEQ ID NO: 1326744 - RNA, 23 nt, Human
uggcugggauggccuuccuggag

SEQ ID NO: 1326745 - RNA, 21 nt, Human
ugggaggugggggguugggag

SEQ ID NO: 1326746 - RNA, 21 nt, Human
uggggggugggaggugggggg

SEQ ID NO: 1326747 - RNA, 21 nt, Human
uggguggacggggggaggagg

SEQ ID NO: 1326748 - RNA, 29 nt, Human
ugguggguguagggaagggguggggggug

SEQ ID NO: 1326749 - RNA, 21 nt, Human
uguagggaagggguggggggu

SEQ ID NO: 1326750 - RNA, 22 nt, Human
aaaugaugaccgccggaauccc

SEQ ID NO: 1326751 - RNA, 24 nt, Human
aagaacccaccugcucuggagucu

SEQ ID NO: 1326752 - RNA, 22 nt, Human
acucuguggugauaaaaaagag

SEQ ID NO: 1326753 - RNA, 22 nt, Human
agaauggaaggaaacggugggg

SEQ ID NO: 1326754 - RNA, 19 nt, Human
agaguagacaucaagaacc

SEQ ID NO: 1326755 - RNA, 19 nt, Human
aggaaaaguagggagggcc

SEQ ID NO: 1326756 - RNA, 18 nt, Human
aguagacaucaagaaccc

SEQ ID NO: 1326757 - RNA, 24 nt, Human
cagaguagacaucaagaacccacc

SEQ ID NO: 1326758 - RNA, 20 nt, Human
cagccccagcauaaccuggc

SEQ ID NO: 1326759 - RNA, 21 nt, Human
cccagcauaaccuggcgcccc

SEQ ID NO: 1326760 - RNA, 24 nt, Human
cgccaagaauaaaugaugaccgcc

SEQ ID NO: 1326761 - RNA, 24 nt, Human
cggccagcugggcgccagggggcc

SEQ ID NO: 1326762 - RNA, 22 nt, Human
cuccgcgcucaggcguggcuuc

SEQ ID NO: 1326763 - RNA, 21 nt, Human
gagugguuggcucagaaugga

SEQ ID NO: 1326764 - RNA, 19 nt, Human
gggcgccagggggccuggg

SEQ ID NO: 1326765 - RNA, 23 nt, Human
ggguccccgaauauccugggcuc

SEQ ID NO: 1326766 - RNA, 20 nt, Human
gucugcguuacucuguggug

SEQ ID NO: 1326767 - RNA, 20 nt, Human
gugcagccccagcauaaccu

SEQ ID NO: 1326768 - RNA, 23 nt, Human
uagggagggccggaaagcccagg

SEQ ID NO: 1326769 - RNA, 19 nt, Human
uccccgaauauccugggcu

SEQ ID NO: 1326770 - RNA, 18 nt, Human
uccgggaagugccgcugc

SEQ ID NO: 1326771 - RNA, 25 nt, Human
ucuaaaacaauauuuucuuuuggga

SEQ ID NO: 1326772 - RNA, 24 nt, Human
ugcccguuuuggcaggaauacauu

SEQ ID NO: 1326773 - RNA, 23 nt, Human
ugccguuaggcgcaggucuuggc

SEQ ID NO: 1326774 - RNA, 22 nt, Human
ugcucuggagucuuggugggca

SEQ ID NO: 1326775 - RNA, 25 nt, Human
uguggugauaaaaaagagaagcggc

SEQ ID NO: 1326776 - RNA, 19 nt, Human
uuggcucagaauggaagga

SEQ ID NO: 1326777 - RNA, 23 nt, Human
aaaaaaauaauacuuuggcauuc

SEQ ID NO: 1326778 - RNA, 19 nt, Human
aaaaagacauccagaaaac

SEQ ID NO: 1326779 - RNA, 25 nt, Human
aaaaagacauccagaaaacuucgag

SEQ ID NO: 1326780 - RNA, 19 nt, Human
aaaagcucaaaacccagcc

SEQ ID NO: 1326781 - RNA, 20 nt, Human
aaacaaaaacccaacaaaag

SEQ ID NO: 1326782 - RNA, 21 nt, Human
aaacaaaaacccaacaaaaga

SEQ ID NO: 1326783 - RNA, 21 nt, Human
aaagaaacaauacacaaauaa

SEQ ID NO: 1326784 - RNA, 19 nt, Human
aacaaauuucacgaaaagu

SEQ ID NO: 1326785 - RNA, 22 nt, Human
aacccagccaauuuuuauacag

SEQ ID NO: 1326786 - RNA, 26 nt, Human
aagaaacaaacaaaaacccaacaaaa

SEQ ID NO: 1326787 - RNA, 22 nt, Human
aagaauaaauaaaauacacugg

SEQ ID NO: 1326788 - RNA, 24 nt, Human
aauaauagcauaauaaauuuuaaa

SEQ ID NO: 1326789 - RNA, 18 nt, Human
acaaacaaaaacccaaca

SEQ ID NO: 1326790 - RNA, 19 nt, Human
acccaggugucuggcuggc

SEQ ID NO: 1326791 - RNA, 20 nt, Human
acuucgagggugcccagaaa

SEQ ID NO: 1326792 - RNA, 21 nt, Human
agaaacaaacaaaaacccaac

SEQ ID NO: 1326793 - RNA, 22 nt, Human
agaaacccagccuccuugaguu

SEQ ID NO: 1326794 - RNA, 19 nt, Human
agacaaggccaugggagug

SEQ ID NO: 1326795 - RNA, 19 nt, Human
agcaaugcgaccucugccu

SEQ ID NO: 1326796 - RNA, 27 nt, Human
agcgggcuggucucuuuucccccuggg

SEQ ID NO: 1326797 - RNA, 18 nt, Human
aggcgccuggaagcucag

SEQ ID NO: 1326798 - RNA, 21 nt, Human
auacacauccaguuucgaauc

SEQ ID NO: 1326799 - RNA, 19 nt, Human
auggcucaagacccaggug

SEQ ID NO: 1326800 - RNA, 20 nt, Human
auguuuguuuaaaaaaguuc

SEQ ID NO: 1326801 - RNA, 25 nt, Human
caaaagcucaaaacccagccaauuu

SEQ ID NO: 1326802 - RNA, 20 nt, Human
caaacaaaaacccaacaaaa

SEQ ID NO: 1326803 - RNA, 20 nt, Human
caaacaaaaacccaacaaaa

SEQ ID NO: 1326804 - RNA, 25 nt, Human
caaacaaaaacccaacaaaagaaua

SEQ ID NO: 1326805 - RNA, 24 nt, Human
caaacaaaaacccaacaaccccgg

SEQ ID NO: 1326806 - RNA, 23 nt, Human
caagaagaaacaaacaaaaaccc

SEQ ID NO: 1326807 - RNA, 22 nt, Human
caaugaaggaagucagucugga

SEQ ID NO: 1326808 - RNA, 26 nt, Human
caccuaggugcgucuuccccagagac

SEQ ID NO: 1326809 - RNA, 20 nt, Human
cagacgaggcgccuggaagc

SEQ ID NO: 1326810 - RNA, 24 nt, Human
ccccacaccagugcgaaugcugcc

SEQ ID NO: 1326811 - RNA, 25 nt, Human
cgagaaagauaaaaagacauccaga

SEQ ID NO: 1326812 - RNA, 27 nt, Human
cgagaaagauaaaaagacauccagaaa

SEQ ID NO: 1326813 - RNA, 22 nt, Human
cggccagugcuuaaucggcuuc

SEQ ID NO: 1326814 - RNA, 22 nt, Human
cuugggaagcgggcuggucucu

SEQ ID NO: 1326815 - RNA, 23 nt, Human
cuugggaagcgggcuggucucuu

SEQ ID NO: 1326816 - RNA, 24 nt, Human
gaaacaaacaaaaacccaacaaaa

SEQ ID NO: 1326817 - RNA, 25 nt, Human
gaagaaacaaacaaaaacccaacaa

SEQ ID NO: 1326818 - RNA, 20 nt, Human
gaauacacauccaguuucga

SEQ ID NO: 1326819 - RNA, 19 nt, Human
gacauccagaaaacuucga

SEQ ID NO: 1326820 - RNA, 20 nt, Human
gauaaaaagacauccagaaa

SEQ ID NO: 1326821 - RNA, 21 nt, Human
ggugaaagagaaugagaaaga

SEQ ID NO: 1326822 - RNA, 23 nt, Human
gucgaacaucauucugguguuug

SEQ ID NO: 1326823 - RNA, 21 nt, Human
gugauacagcaaugcgaccuc

SEQ ID NO: 1326824 - RNA, 18 nt, Human
uaaaagaaacaauacaca

SEQ ID NO: 1326825 - RNA, 23 nt, Human
uaaaagaaacaauacacaaauaa

SEQ ID NO: 1326826 - RNA, 22 nt, Human
uaaaauacacuggaagcugcaa

SEQ ID NO: 1326827 - RNA, 21 nt, Human
uaaauaaaauacacuggaagc

SEQ ID NO: 1326828 - RNA, 25 nt, Human
uacaagaagaaacaaacaaaaaccc

SEQ ID NO: 1326829 - RNA, 20 nt, Human
uacagaaaguucaacgucaa

SEQ ID NO: 1326830 - RNA, 22 nt, Human
uacagaaaguucaacgucaaaa

SEQ ID NO: 1326831 - RNA, 21 nt, Human
ucaaacucuaggcagaagccu

SEQ ID NO: 1326832 - RNA, 22 nt, Human
ucaagacccaggugucuggcug

SEQ ID NO: 1326833 - RNA, 21 nt, Human
uccuagacaaggccaugggag

SEQ ID NO: 1326834 - RNA, 20 nt, Human
uccuugaguugaaaggacuc

SEQ ID NO: 1326835 - RNA, 21 nt, Human
ucgggcauuggguaccagccg

SEQ ID NO: 1326836 - RNA, 24 nt, Human
ucuaaaaaguaguaaauguccaga

SEQ ID NO: 1326837 - RNA, 22 nt, Human
ucugccguugccggccugcagc

SEQ ID NO: 1326838 - RNA, 21 nt, Human
ucuguguccaagcacugcuga

SEQ ID NO: 1326839 - RNA, 25 nt, Human
ugaaauaauaaaagaaaccgguacc

SEQ ID NO: 1326840 - RNA, 20 nt, Human
ugagaaagaacuucuggaua

SEQ ID NO: 1326841 - RNA, 21 nt, Human
ugagaaagaacuucuggauag

SEQ ID NO: 1326842 - RNA, 21 nt, Human
ugcgaaugcugccacagugac

SEQ ID NO: 1326843 - RNA, 21 nt, Human
uggcuggcuugggaagcgggc

SEQ ID NO: 1326844 - RNA, 23 nt, Human
ugggaagcgggcuggucucuuuu

SEQ ID NO: 1326845 - RNA, 21 nt, Human
uguaaggucucuguacaaaga

SEQ ID NO: 1326846 - RNA, 20 nt, Human
uguccagacugauuuuggga

SEQ ID NO: 1326847 - RNA, 18 nt, Human
uguuugcgccgcucaaug

SEQ ID NO: 1326848 - RNA, 23 nt, Human
uucacacgagaaagauaaaaaga

SEQ ID NO: 1326849 - RNA, 22 nt, Human
uuccuugaauaaaucuugaaaa

SEQ ID NO: 1326850 - RNA, 21 nt, Human
uugaaaacguuaaauuugcaa

SEQ ID NO: 1326851 - RNA, 22 nt, Human
uuuaaaaaguuucuguacaauu

SEQ ID NO: 1326852 - RNA, 19 nt, Human
uuugcaaaauucuauucau

SEQ ID NO: 1326853 - RNA, 18 nt, Human
accacguucacgcucagc

SEQ ID NO: 1326854 - RNA, 23 nt, Human
acguucacgcucagcuuucaguu

SEQ ID NO: 1326855 - RNA, 19 nt, Human
agagauggguuuucaccgu

SEQ ID NO: 1326856 - RNA, 20 nt, Human
aguagagauggguuuucacc

SEQ ID NO: 1326857 - RNA, 18 nt, Human
caaggagauaucaauggu

SEQ ID NO: 1326858 - RNA, 23 nt, Human
cguucacgcucagcuuucaguuu

SEQ ID NO: 1326859 - RNA, 23 nt, Human
cuuucaguuuauccaagacccag

SEQ ID NO: 1326860 - RNA, 21 nt, Human
uaguagagauggguuuucacc

SEQ ID NO: 1326861 - RNA, 24 nt, Human
uaguagagauggguuuucaccgug

SEQ ID NO: 1326862 - RNA, 20 nt, Human
ucaauggugauaccacguuc

SEQ ID NO: 1326863 - RNA, 23 nt, Human
ucaguuuauccaagacccagcca

SEQ ID NO: 1326864 - RNA, 24 nt, Human
uuaguagagauggguuuucaccgu

SEQ ID NO: 1326865 - RNA, 21 nt, Human
uugaugaagucucuguguccu

SEQ ID NO: 1326866 - RNA, 24 nt, Human
uuuuuaguagagauggguuuucac

SEQ ID NO: 1326867 - RNA, 21 nt, Human
uuuuuguauuuuuaguagaga

SEQ ID NO: 1326868 - RNA, 21 nt, Human
uuuuuuguauuuuuaguagag

SEQ ID NO: 1326869 - RNA, 24 nt, Human
uuuuuuguauuuuuaguagagaug

SEQ ID NO: 1326870 - RNA, 20 nt, Human
agacgcccccuucccucaag

SEQ ID NO: 1326871 - RNA, 19 nt, Human
gggcaggaagcuggggagg

SEQ ID NO: 1326872 - RNA, 19 nt, Human
ucccuagcagggaccagcu

SEQ ID NO: 1326873 - RNA, 19 nt, Human
ucuuugggcaggaagcugg

SEQ ID NO: 1326874 - RNA, 18 nt, Human
ugaauguggggcucuuug

SEQ ID NO: 1326875 - RNA, 19 nt, Human
uggggagggaacggggugg

SEQ ID NO: 1326876 - RNA, 23 nt, Human
acagaccaaaagaccaccaugua

SEQ ID NO: 1326877 - RNA, 22 nt, Human
accgcagugaggggucugaccg

SEQ ID NO: 1326878 - RNA, 20 nt, Human
caacagaccaaaagaccacc

SEQ ID NO: 1326879 - RNA, 21 nt, Human
caaggagcugcaaacccaaac

SEQ ID NO: 1326880 - RNA, 24 nt, Human
cccggaggcauucuccagcaagcc

SEQ ID NO: 1326881 - RNA, 18 nt, Human
ccgccgccgcugcugcca

SEQ ID NO: 1326882 - RNA, 27 nt, Human
ccgccgccgcugcugccacugggcaga

SEQ ID NO: 1326883 - RNA, 21 nt, Human
cugcaaacccaaacgagaaau

SEQ ID NO: 1326884 - RNA, 22 nt, Human
gagcagccugcuugaggcuggu

SEQ ID NO: 1326885 - RNA, 20 nt, Human
gccgccgccgcugcugccac

SEQ ID NO: 1326886 - RNA, 20 nt, Human
gcuccagagagcagccugcu

SEQ ID NO: 1326887 - RNA, 26 nt, Human
ucuacucuaucccgcaacagaccaaa

SEQ ID NO: 1326888 - RNA, 23 nt, Human
ucuaucccgcaacagaccaaaag

SEQ ID NO: 1326889 - RNA, 23 nt, Human
ucuccagcaagccacagaggagc

SEQ ID NO: 1326890 - RNA, 20 nt, Human
ucugaccgcgcugagugcuc

SEQ ID NO: 1326891 - RNA, 25 nt, Human
ucuggcaaggagcugcaaacccaaa

SEQ ID NO: 1326892 - RNA, 18 nt, Human
uggcaaggagcugcaaac

SEQ ID NO: 1326893 - RNA, 20 nt, Human
uggcugccgccgccgcugcu

SEQ ID NO: 1326894 - RNA, 22 nt, Human
uggggcuagugaggcugcugua

SEQ ID NO: 1326895 - RNA, 24 nt, Human
uuuggcugccgccgccgcugcugc

SEQ ID NO: 1326896 - RNA, 22 nt, Human
aaaaauagaacuucugauuaga

SEQ ID NO: 1326897 - RNA, 18 nt, Human
aaaaggaaagaauuaagg

SEQ ID NO: 1326898 - RNA, 19 nt, Human
aaacacagaaaaaauaucc

SEQ ID NO: 1326899 - RNA, 24 nt, Human
aaacacagaaaaaauauccugaca

SEQ ID NO: 1326900 - RNA, 24 nt, Human
aaacaguagcaggcuaacuucaau

SEQ ID NO: 1326901 - RNA, 22 nt, Human
aagacuucaaaagaccuuaacc

SEQ ID NO: 1326902 - RNA, 22 nt, Human
aagagcaaaauugaaaaggaaa

SEQ ID NO: 1326903 - RNA, 21 nt, Human
aaugagaaagacuucaaaaga

SEQ ID NO: 1326904 - RNA, 22 nt, Human
acaaagaacaagcuugcuucca

SEQ ID NO: 1326905 - RNA, 18 nt, Human
accugcaaugguuucuuu

SEQ ID NO: 1326906 - RNA, 22 nt, Human
agaauggagcuugcaaagaaga

SEQ ID NO: 1326907 - RNA, 23 nt, Human
auacugaaauccuuugucucuga

SEQ ID NO: 1326908 - RNA, 24 nt, Human
augcaaaccuacaggauguauagu

SEQ ID NO: 1326909 - RNA, 20 nt, Human
caaacuuguuagucugcaag

SEQ ID NO: 1326910 - RNA, 21 nt, Human
caaagaacaagcuugcuucca

SEQ ID NO: 1326911 - RNA, 19 nt, Human
ccuugaggauugagguaag

SEQ ID NO: 1326912 - RNA, 23 nt, Human
ccuuugucucugacccaagaguc

SEQ ID NO: 1326913 - RNA, 27 nt, Human
cucuauauguuacuuuucuaugcugcc

SEQ ID NO: 1326914 - RNA, 22 nt, Human
cugaaauccuuugucucugacc

SEQ ID NO: 1326915 - RNA, 22 nt, Human
cugacuaaacccuccugauaaa

SEQ ID NO: 1326916 - RNA, 23 nt, Human
gacuuuuguuuccucaacgcuuu

SEQ ID NO: 1326917 - RNA, 24 nt, Human
gagaaagacuucaaaagaccuuaa

SEQ ID NO: 1326918 - RNA, 23 nt, Human
gcugaagucuuuugucucugacc

SEQ ID NO: 1326919 - RNA, 24 nt, Human
gcuuugguggcugguguuccuuuu

SEQ ID NO: 1326920 - RNA, 21 nt, Human
guaguaaauaugaaauacuuu

SEQ ID NO: 1326921 - RNA, 22 nt, Human
guuccuuuucuuuucuugccuu

SEQ ID NO: 1326922 - RNA, 24 nt, Human
uaaauaugaaauacuuuuaauuau

SEQ ID NO: 1326923 - RNA, 18 nt, Human
uaaggugucucaccagac

SEQ ID NO: 1326924 - RNA, 23 nt, Human
uaagugcuuugguggcugguguu

SEQ ID NO: 1326925 - RNA, 19 nt, Human
uagaauggagcuugcaaag

SEQ ID NO: 1326926 - RNA, 21 nt, Human
uagugguaaaaauagaacuuc

SEQ ID NO: 1326927 - RNA, 18 nt, Human
uccugacagggugauggc

SEQ ID NO: 1326928 - RNA, 23 nt, Human
uccuucagcugcauauucuugcu

SEQ ID NO: 1326929 - RNA, 24 nt, Human
uccuuugucucugacccaagaguc

SEQ ID NO: 1326930 - RNA, 23 nt, Human
ucucacagcuuccguagguugga

SEQ ID NO: 1326931 - RNA, 19 nt, Human
ucucagacucuguagaccu

SEQ ID NO: 1326932 - RNA, 19 nt, Human
ugaaaucgcuaagugcuuu

SEQ ID NO: 1326933 - RNA, 20 nt, Human
ugacuuggaguauucaguaa

SEQ ID NO: 1326934 - RNA, 21 nt, Human
ugacuuggaguauucaguaac

SEQ ID NO: 1326935 - RNA, 22 nt, Human
ugagaaaaggcuaccccaagua

SEQ ID NO: 1326936 - RNA, 18 nt, Human
ugaugcaaaccuacagga

SEQ ID NO: 1326937 - RNA, 23 nt, Human
ugauggcacucauccagguagaa

SEQ ID NO: 1326938 - RNA, 19 nt, Human
ugcaaaccuacaggaugua

SEQ ID NO: 1326939 - RNA, 21 nt, Human
ugcaaagaagaauugaaacuc

SEQ ID NO: 1326940 - RNA, 18 nt, Human
ugcagugagcaaccuuga

SEQ ID NO: 1326941 - RNA, 21 nt, Human
ugccaagaaugcaaggcccuu

SEQ ID NO: 1326942 - RNA, 22 nt, Human
uggaguauucaguaaccucaau

SEQ ID NO: 1326943 - RNA, 22 nt, Human
uguauaaacacagaaaaaauau

SEQ ID NO: 1326944 - RNA, 23 nt, Human
uguauaaacacagaaaaaauauc

SEQ ID NO: 1326945 - RNA, 24 nt, Human
uguuuaguuacuaacuagcuaucu

SEQ ID NO: 1326946 - RNA, 23 nt, Human
uuagugguaaaaauagaacuucu

SEQ ID NO: 1326947 - RNA, 23 nt, Human
uucagcugcauauucuugccguc

SEQ ID NO: 1326948 - RNA, 20 nt, Human
uuccaugauucuguauaaac

SEQ ID NO: 1326949 - RNA, 22 nt, Human
uucuaugcugccaaaacaaacu

SEQ ID NO: 1326950 - RNA, 20 nt, Human
uugacagugaguugggaaau

SEQ ID NO: 1326951 - RNA, 19 nt, Human
aaacaacauuucccacuaa

SEQ ID NO: 1326952 - RNA, 20 nt, Human
aaacaacauuucccacuaaa

SEQ ID NO: 1326953 - RNA, 18 nt, Human
aaacaguuacauggcccu

SEQ ID NO: 1326954 - RNA, 21 nt, Human
agaaucacagggagcucacca

SEQ ID NO: 1326955 - RNA, 24 nt, Human
cauuccugcugcucugcccagagg

SEQ ID NO: 1326956 - RNA, 20 nt, Human
ccaccucucaaacaacauuu

SEQ ID NO: 1326957 - RNA, 24 nt, Human
cucaaacaacauuucccacuaaac

SEQ ID NO: 1326958 - RNA, 21 nt, Human
cucaccaccucucaaacaaca

SEQ ID NO: 1326959 - RNA, 18 nt, Human
ggcuguagcaccugccag

SEQ ID NO: 1326960 - RNA, 18 nt, Human
uccugcugcucugcccag

SEQ ID NO: 1326961 - RNA, 21 nt, Human
uccugcugcucugcccagagg

SEQ ID NO: 1326962 - RNA, 24 nt, Human
uuccugcugcucugcccagaggcc

SEQ ID NO: 1326963 - RNA, 22 nt, Human
aaucugcaggcucaccacccac

SEQ ID NO: 1326964 - RNA, 23 nt, Human
acggccaugcgccagcuugugcu

SEQ ID NO: 1326965 - RNA, 23 nt, Human
caagaacacggccauauuuaauc

SEQ ID NO: 1326966 - RNA, 23 nt, Human
cccccacauacaugaacaagaac

SEQ ID NO: 1326967 - RNA, 21 nt, Human
ccccuauaauccgagacccuu

SEQ ID NO: 1326968 - RNA, 18 nt, Human
cucacuaggguuccccca

SEQ ID NO: 1326969 - RNA, 23 nt, Human
cucucucucacuaggguuccccc

SEQ ID NO: 1326970 - RNA, 22 nt, Human
gaacacggccauauuuaaucug

SEQ ID NO: 1326971 - RNA, 23 nt, Human
gaacacggccauauuuaaucugc

SEQ ID NO: 1326972 - RNA, 19 nt, Human
ucccccacauacaugaaca

SEQ ID NO: 1326973 - RNA, 24 nt, Human
ucccccacauacaugaacaagaac

SEQ ID NO: 1326974 - RNA, 18 nt, Human
ugaacaagaacacggcca

SEQ ID NO: 1326975 - RNA, 19 nt, Human
uucccccacauacaugaac

SEQ ID NO: 1326976 - RNA, 18 nt, Human
aaaugaagccgcggaccc

SEQ ID NO: 1326977 - RNA, 21 nt, Human
aacaaaauaguaaucagagaa

SEQ ID NO: 1326978 - RNA, 21 nt, Human
aacagagccuccacagcaugg

SEQ ID NO: 1326979 - RNA, 19 nt, Human
aagauuucaucugcgagaa

SEQ ID NO: 1326980 - RNA, 23 nt, Human
aaguugcaaaccuucaggggaga

SEQ ID NO: 1326981 - RNA, 24 nt, Human
acaacagagccuccacagcaugga

SEQ ID NO: 1326982 - RNA, 18 nt, Human
acccgaagaguaagcagu

SEQ ID NO: 1326983 - RNA, 26 nt, Human
aguaagcaguagaaagagcgaaacaa

SEQ ID NO: 1326984 - RNA, 20 nt, Human
caacuuucaggagauuuuga

SEQ ID NO: 1326985 - RNA, 23 nt, Human
cagcaaugaugaagucuucuuua

SEQ ID NO: 1326986 - RNA, 19 nt, Human
caguuuuuguauuuuuaga

SEQ ID NO: 1326987 - RNA, 20 nt, Human
caguuuuuguauuuuuagau

SEQ ID NO: 1326988 - RNA, 24 nt, Human
cccgaagaguaagcaguagaaaga

SEQ ID NO: 1326989 - RNA, 24 nt, Human
gaaacaacagagccuccacagcau

SEQ ID NO: 1326990 - RNA, 21 nt, Human
gaguuguucguuccucccugg

SEQ ID NO: 1326991 - RNA, 22 nt, Human
gcgaaacaacagagccuccaca

SEQ ID NO: 1326992 - RNA, 23 nt, Human
gcgaaacaacagagccuccacag

SEQ ID NO: 1326993 - RNA, 24 nt, Human
gcgaaacaacagagccuccacagc

SEQ ID NO: 1326994 - RNA, 20 nt, Human
gcggacccucgcggugagug

SEQ ID NO: 1326995 - RNA, 26 nt, Human
ggaauucuucuacagcuccccugcuc

SEQ ID NO: 1326996 - RNA, 19 nt, Human
ggacccgaagaguaagcag

SEQ ID NO: 1326997 - RNA, 23 nt, Human
uaagcaguagaaagagcgaaaca

SEQ ID NO: 1326998 - RNA, 23 nt, Human
uaagcaguagaaagagcgaaaca

SEQ ID NO: 1326999 - RNA, 19 nt, Human
uagaaagagcgaaacaaca

SEQ ID NO: 1327000 - RNA, 22 nt, Human
uagaaagagcgaaacaacagag

SEQ ID NO: 1327001 - RNA, 19 nt, Human
uagaguuaaagacuggggu

SEQ ID NO: 1327002 - RNA, 22 nt, Human
ucuccuggcaugaaagaguugg

SEQ ID NO: 1327003 - RNA, 22 nt, Human
ucuggaguuuguuccuucugau

SEQ ID NO: 1327004 - RNA, 19 nt, Human
ugaaaggagcuauagagcu

SEQ ID NO: 1327005 - RNA, 20 nt, Human
ugagguggagaaggaauuua

SEQ ID NO: 1327006 - RNA, 23 nt, Human
ugcuggugguugagguggagaag

SEQ ID NO: 1327007 - RNA, 23 nt, Human
uggaguuguucguuccucccugg

SEQ ID NO: 1327008 - RNA, 20 nt, Human
uggugguugagguggagaag

SEQ ID NO: 1327009 - RNA, 24 nt, Human
ugugaaauucauccucagcaauga

SEQ ID NO: 1327010 - RNA, 24 nt, Human
uguuaacagcucuuaagguggcac

SEQ ID NO: 1327011 - RNA, 23 nt, Human
uucaggagauuuugacccaugug

SEQ ID NO: 1327012 - RNA, 24 nt, Human
uucugguggguucguggccucgcu

SEQ ID NO: 1327013 - RNA, 24 nt, Human
uucuucuacagcuccccugcucaa

SEQ ID NO: 1327014 - RNA, 26 nt, Human
uuguucguuccucccuggggcucgug

SEQ ID NO: 1327015 - RNA, 25 nt, Human
aaacaaacaauacauuuaaaaagca

SEQ ID NO: 1327016 - RNA, 19 nt, Human
aaacaagaaagaaacauaa

SEQ ID NO: 1327017 - RNA, 19 nt, Human
aaacaagaaagaaacauaa

SEQ ID NO: 1327018 - RNA, 21 nt, Human
aaacaagaaagaaacauaagg

SEQ ID NO: 1327019 - RNA, 23 nt, Human
aaacugaaaguaauaagcgacgc

SEQ ID NO: 1327020 - RNA, 20 nt, Human
aaagugaaaacagauacgaa

SEQ ID NO: 1327021 - RNA, 23 nt, Human
aaauacaaauauuuaaaauacaa

SEQ ID NO: 1327022 - RNA, 18 nt, Human
aaccagcaaugaaagcac

SEQ ID NO: 1327023 - RNA, 25 nt, Human
aagaaagaaacauaagggaaaaaga

SEQ ID NO: 1327024 - RNA, 19 nt, Human
aaggaaacugaaaguaaua

SEQ ID NO: 1327025 - RNA, 22 nt, Human
acaaacaauacauuuaaaaagc

SEQ ID NO: 1327026 - RNA, 28 nt, Human
acauuuaaaaagcaauaauuagaaaaag

SEQ ID NO: 1327027 - RNA, 23 nt, Human
agcgacgcgaaacaagaaagaaa

SEQ ID NO: 1327028 - RNA, 28 nt, Human
aguaauaagcgacgcgaaacaagaaaga

SEQ ID NO: 1327029 - RNA, 23 nt, Human
caaaugaaaaacgauaacauuuu

SEQ ID NO: 1327030 - RNA, 23 nt, Human
cagagcccgugggcggaggccag

SEQ ID NO: 1327031 - RNA, 21 nt, Human
cgaaaauuaguagacaaauga

SEQ ID NO: 1327032 - RNA, 23 nt, Human
cucaaagugaaaacagauacgaa

SEQ ID NO: 1327033 - RNA, 23 nt, Human
gaaacaagaaagaaacauaaggg

SEQ ID NO: 1327034 - RNA, 24 nt, Human
ggaaaaagagaauuuaaaaacuga

SEQ ID NO: 1327035 - RNA, 22 nt, Human
gggaaaaagagaauuuaaaaac

SEQ ID NO: 1327036 - RNA, 23 nt, Human
gugaaaacagauacgaaugaaau

SEQ ID NO: 1327037 - RNA, 26 nt, Human
uaaauacaaauauuuaaaauacaagg

SEQ ID NO: 1327038 - RNA, 24 nt, Human
uaagggaaaaagagaauuuaaaaa

SEQ ID NO: 1327039 - RNA, 24 nt, Human
uaguaggaauaagauuuuaaaaua

SEQ ID NO: 1327040 - RNA, 23 nt, Human
uauuaagaaacucaguaguaaca

SEQ ID NO: 1327041 - RNA, 25 nt, Human
uauuuuuauuuucuagguggagacg

SEQ ID NO: 1327042 - RNA, 19 nt, Human
ucaguaguaacaaaugcac

SEQ ID NO: 1327043 - RNA, 21 nt, Human
uucaaggaggagaauccaaaa

SEQ ID NO: 1327044 - RNA, 20 nt, Human
agcuggagacccggggagga

SEQ ID NO: 1327045 - RNA, 18 nt, Human
cgacccaggcgggagcug

SEQ ID NO: 1327046 - RNA, 22 nt, Human
cggggaggagcugacguuccca

SEQ ID NO: 1327047 - RNA, 21 nt, Human
cuggcgacccaggcgggagcu

SEQ ID NO: 1327048 - RNA, 18 nt, Human
gguggugcugcuggcgac

SEQ ID NO: 1327049 - RNA, 24 nt, Human
gugcugcuggcgacccaggcggga

SEQ ID NO: 1327050 - RNA, 23 nt, Human
ugauguuccaguuugaggguggu

SEQ ID NO: 1327051 - RNA, 22 nt, Human
cuggaacccagaaacccaguaa

SEQ ID NO: 1327052 - RNA, 22 nt, Human
cuucuggaacccagaaacccag

SEQ ID NO: 1327053 - RNA, 22 nt, Human
gaacccagaaacccaguaaacc

SEQ ID NO: 1327054 - RNA, 20 nt, Human
aaaaaaagauauaaagaaaa

SEQ ID NO: 1327055 - RNA, 25 nt, Human
aaaccaggcaccaggcaagcaaaaa

SEQ ID NO: 1327056 - RNA, 22 nt, Human
aagcaaaaaucagaaccugcuc

SEQ ID NO: 1327057 - RNA, 21 nt, Human
acagaagaaacagccugauuc

SEQ ID NO: 1327058 - RNA, 26 nt, Human
auaaagaaaauaaacaacaaaugaaa

SEQ ID NO: 1327059 - RNA, 22 nt, Human
caagcaaaaaucagaaccugcu

SEQ ID NO: 1327060 - RNA, 19 nt, Human
cagaagaaacagccugauu

SEQ ID NO: 1327061 - RNA, 25 nt, Human
cagaagaaacagccugauuccuuca

SEQ ID NO: 1327062 - RNA, 19 nt, Human
cagccugauuccuucacau

SEQ ID NO: 1327063 - RNA, 23 nt, Human
ccacagaagaaacagccugauuc

SEQ ID NO: 1327064 - RNA, 21 nt, Human
ccaggcaccaggcaagcaaaa

SEQ ID NO: 1327065 - RNA, 23 nt, Human
guagaagcuucuuuaaaguugag

SEQ ID NO: 1327066 - RNA, 21 nt, Human
uaaaaaaagauauaaagaaaa

SEQ ID NO: 1327067 - RNA, 19 nt, Human
uccaguguguagaagcuuc

SEQ ID NO: 1327068 - RNA, 21 nt, Human
ugcaguauuuucuauuaaaaa

SEQ ID NO: 1327069 - RNA, 18 nt, Human
ugcugggaaaccaggcac

SEQ ID NO: 1327070 - RNA, 18 nt, Human
ugucugaagugcuugaag

SEQ ID NO: 1327071 - RNA, 21 nt, Human
aaaaaccugacaugcacauug

SEQ ID NO: 1327072 - RNA, 18 nt, Human
aaaaggacaaaguagccu

SEQ ID NO: 1327073 - RNA, 19 nt, Human
aaauagugaucaugaaaaa

SEQ ID NO: 1327074 - RNA, 18 nt, Human
aaaugccccuuccagucc

SEQ ID NO: 1327075 - RNA, 23 nt, Human
acaaaaaccugacaugcacauug

SEQ ID NO: 1327076 - RNA, 25 nt, Human
acacacagauagauuugauauacaa

SEQ ID NO: 1327077 - RNA, 21 nt, Human
acuuucuuuuuaauuucagag

SEQ ID NO: 1327078 - RNA, 21 nt, Human
agauauuuaagacauuuagau

SEQ ID NO: 1327079 - RNA, 23 nt, Human
aggaagucauugaauccuuaaaa

SEQ ID NO: 1327080 - RNA, 23 nt, Human
aggacaaaguagccucuucccuu

SEQ ID NO: 1327081 - RNA, 24 nt, Human
agguccacauccuccaagucagga

SEQ ID NO: 1327082 - RNA, 22 nt, Human
auaaacauacacuucauacacu

SEQ ID NO: 1327083 - RNA, 24 nt, Human
augaaaauccaacuuuccagauca

SEQ ID NO: 1327084 - RNA, 18 nt, Human
ccacagaccccaguuccu

SEQ ID NO: 1327085 - RNA, 19 nt, Human
ccagggcgaguugagcguu

SEQ ID NO: 1327086 - RNA, 18 nt, Human
cccacagaccccaguucc

SEQ ID NO: 1327087 - RNA, 20 nt, Human
cccacagaccccaguuccug

SEQ ID NO: 1327088 - RNA, 20 nt, Human
ccccuuccaguccacagaga

SEQ ID NO: 1327089 - RNA, 21 nt, Human
ccuuccaguccacagagaaaa

SEQ ID NO: 1327090 - RNA, 25 nt, Human
cggcgcucaagcugcccacaggucu

SEQ ID NO: 1327091 - RNA, 22 nt, Human
cuggcccacagaccccaguucc

SEQ ID NO: 1327092 - RNA, 24 nt, Human
cuucccagacucuccucaugaaaa

SEQ ID NO: 1327093 - RNA, 24 nt, Human
cuucccagacucuccucaugaaaa

SEQ ID NO: 1327094 - RNA, 18 nt, Human
cuuuaaaaaagccucugg

SEQ ID NO: 1327095 - RNA, 22 nt, Human
gcaauguuuuaauauaaacuuu

SEQ ID NO: 1327096 - RNA, 22 nt, Human
gucuggaaucccaaugugaucc

SEQ ID NO: 1327097 - RNA, 18 nt, Human
uaaauagugaucaugaaa

SEQ ID NO: 1327098 - RNA, 19 nt, Human
uacaaguacaaaaaccuga

SEQ ID NO: 1327099 - RNA, 21 nt, Human
uagccacuagguccacauccu

SEQ ID NO: 1327100 - RNA, 18 nt, Human
uauacaaguacaaaaacc

SEQ ID NO: 1327101 - RNA, 24 nt, Human
uccacagagaaaaagcuuucuccu

SEQ ID NO: 1327102 - RNA, 18 nt, Human
uccaugggcgccgccaug

SEQ ID NO: 1327103 - RNA, 22 nt, Human
uccuggggugacgcagcugggc

SEQ ID NO: 1327104 - RNA, 21 nt, Human
ugacaugcacauugaagagaa

SEQ ID NO: 1327105 - RNA, 18 nt, Human
ugaucaugaaaaaugccc

SEQ ID NO: 1327106 - RNA, 27 nt, Human
ugccagucuucguagagacggccacac

SEQ ID NO: 1327107 - RNA, 22 nt, Human
uggcccacagaccccaguuccu

SEQ ID NO: 1327108 - RNA, 18 nt, Human
ugugauccuccugucuuc

SEQ ID NO: 1327109 - RNA, 21 nt, Human
uuccagggcgaguugagcguu

SEQ ID NO: 1327110 - RNA, 18 nt, Human
uuuaauauaaacuuucuu

SEQ ID NO: 1327111 - RNA, 20 nt, Human
aagcaaucuggcaaaagccc

SEQ ID NO: 1327112 - RNA, 25 nt, Human
aagcaucauucugggccagucaccc

SEQ ID NO: 1327113 - RNA, 19 nt, Human
aagcuuccaggagcuguuu

SEQ ID NO: 1327114 - RNA, 22 nt, Human
aauaaaaagaaaugaaaagucu

SEQ ID NO: 1327115 - RNA, 20 nt, Human
acuucugccucagccacccc

SEQ ID NO: 1327116 - RNA, 22 nt, Human
agaaaguucaggaggguucagg

SEQ ID NO: 1327117 - RNA, 21 nt, Human
agaacagagaagagaugagga

SEQ ID NO: 1327118 - RNA, 21 nt, Human
agagaaugcacccccugcccc

SEQ ID NO: 1327119 - RNA, 23 nt, Human
agagaaugcacccccugccccaa

SEQ ID NO: 1327120 - RNA, 23 nt, Human
agaguguacauucuccaauauua

SEQ ID NO: 1327121 - RNA, 21 nt, Human
agccugugcuaacaaauugca

SEQ ID NO: 1327122 - RNA, 23 nt, Human
aggaacacaggcugcucagccca

SEQ ID NO: 1327123 - RNA, 21 nt, Human
agugcagugaugcgaucucag

SEQ ID NO: 1327124 - RNA, 24 nt, Human
agugcagugaugcgaucucagcuc

SEQ ID NO: 1327125 - RNA, 21 nt, Human
augcagaaaguagacucagga

SEQ ID NO: 1327126 - RNA, 21 nt, Human
augcagccuaggaggacauua

SEQ ID NO: 1327127 - RNA, 22 nt, Human
caagcaauacuucugccucagc

SEQ ID NO: 1327128 - RNA, 20 nt, Human
cacacagagcaaacauguac

SEQ ID NO: 1327129 - RNA, 20 nt, Human
cacccccugccccaagugca

SEQ ID NO: 1327130 - RNA, 20 nt, Human
cacuguguuucuccaggcag

SEQ ID NO: 1327131 - RNA, 25 nt, Human
caggaagacacauagcagccagaga

SEQ ID NO: 1327132 - RNA, 21 nt, Human
cauaaggaaagaugggguaac

SEQ ID NO: 1327133 - RNA, 22 nt, Human
cauggccucucguagccuagcc

SEQ ID NO: 1327134 - RNA, 21 nt, Human
cauugcaaccucugccuccug

SEQ ID NO: 1327135 - RNA, 18 nt, Human
ccaacccuggcuccacac

SEQ ID NO: 1327136 - RNA, 18 nt, Human
ccaggggguccaccgagg

SEQ ID NO: 1327137 - RNA, 21 nt, Human
cccaagugcccuuccaaaugc

SEQ ID NO: 1327138 - RNA, 24 nt, Human
cccaagugcccuuccaaaugccag

SEQ ID NO: 1327139 - RNA, 18 nt, Human
cccacauguguguagaaa

SEQ ID NO: 1327140 - RNA, 18 nt, Human
cccacuggacugguuucc

SEQ ID NO: 1327141 - RNA, 19 nt, Human
ccccuaaagccugaaugag

SEQ ID NO: 1327142 - RNA, 19 nt, Human
ccucugccuccuggguuca

SEQ ID NO: 1327143 - RNA, 21 nt, Human
ccuggguucaagcaauacuuc

SEQ ID NO: 1327144 - RNA, 23 nt, Human
cucaagaugugaaaacaugaaga

SEQ ID NO: 1327145 - RNA, 24 nt, Human
cucagaacagagaagagaugagga

SEQ ID NO: 1327146 - RNA, 20 nt, Human
cucagccaccccucagacag

SEQ ID NO: 1327147 - RNA, 24 nt, Human
cucauugcaaccucugccuccugg

SEQ ID NO: 1327148 - RNA, 19 nt, Human
cucuguugcccaggcuuga

SEQ ID NO: 1327149 - RNA, 21 nt, Human
cugugcuaacaaauugcaucu

SEQ ID NO: 1327150 - RNA, 21 nt, Human
cuucugccucagccaccccuc

SEQ ID NO: 1327151 - RNA, 20 nt, Human
gaauuucccaagugcccuuc

SEQ ID NO: 1327152 - RNA, 19 nt, Human
gagcuuggucucccucaca

SEQ ID NO: 1327153 - RNA, 20 nt, Human
gaucagagagcucagaacag

SEQ ID NO: 1327154 - RNA, 22 nt, Human
gcaaccucugccuccuggguuc

SEQ ID NO: 1327155 - RNA, 28 nt, Human
gcccuugguggugagcuugaccuacugg

SEQ ID NO: 1327156 - RNA, 19 nt, Human
gguaaccccuaaagccuga

SEQ ID NO: 1327157 - RNA, 22 nt, Human
guugugcagccccaacccuggc

SEQ ID NO: 1327158 - RNA, 20 nt, Human
uaaaugaaagcaaucuggca

SEQ ID NO: 1327159 - RNA, 24 nt, Human
uacacacauaaggaaagauggggu

SEQ ID NO: 1327160 - RNA, 22 nt, Human
uauauuugccaagggcaggcac

SEQ ID NO: 1327161 - RNA, 20 nt, Human
ucagaacagagaagagauga

SEQ ID NO: 1327162 - RNA, 23 nt, Human
ucaucaugucauugaauuaccuc

SEQ ID NO: 1327163 - RNA, 24 nt, Human
ucauugcaaccucugccuccuggg

SEQ ID NO: 1327164 - RNA, 25 nt, Human
ucauugcaaccucugccuccugggu

SEQ ID NO: 1327165 - RNA, 23 nt, Human
uccaaccaaggagauuucaagcg

SEQ ID NO: 1327166 - RNA, 18 nt, Human
uccacacagagcaaacau

SEQ ID NO: 1327167 - RNA, 20 nt, Human
uccacacagagcaaacaugu

SEQ ID NO: 1327168 - RNA, 20 nt, Human
uccaggagcuguuuuucaga

SEQ ID NO: 1327169 - RNA, 25 nt, Human
ucccaagugcccuuccaaaugccag

SEQ ID NO: 1327170 - RNA, 21 nt, Human
ucccucacaggcaaugacagu

SEQ ID NO: 1327171 - RNA, 27 nt, Human
ucccucacaggcaaugacagucuuggc

SEQ ID NO: 1327172 - RNA, 21 nt, Human
uccuggguucaagcaauacuu

SEQ ID NO: 1327173 - RNA, 24 nt, Human
uccuggguucaagcaauacuucug

SEQ ID NO: 1327174 - RNA, 23 nt, Human
ucuccaggcaggcgguaaggccu

SEQ ID NO: 1327175 - RNA, 21 nt, Human
ucucguagccuagccuagagc

SEQ ID NO: 1327176 - RNA, 22 nt, Human
ucugccucagccaccccucaga

SEQ ID NO: 1327177 - RNA, 24 nt, Human
ucugccucagccaccccucagaca

SEQ ID NO: 1327178 - RNA, 22 nt, Human
ucugcuucauugauaaaacauc

SEQ ID NO: 1327179 - RNA, 24 nt, Human
ucuguugcccaggcuugagugcag

SEQ ID NO: 1327180 - RNA, 19 nt, Human
ucuugcucuguugcccagg

SEQ ID NO: 1327181 - RNA, 23 nt, Human
ucuugcucuguugcccaggcuug

SEQ ID NO: 1327182 - RNA, 24 nt, Human
ucuugcucuguugcccaggcuuga

SEQ ID NO: 1327183 - RNA, 25 nt, Human
ucuugcucuguugcccaggcuugag

SEQ ID NO: 1327184 - RNA, 21 nt, Human
ucuuggccaugggucuagaca

SEQ ID NO: 1327185 - RNA, 24 nt, Human
ugacaggguuuccaggaagacaca

SEQ ID NO: 1327186 - RNA, 20 nt, Human
ugcaaccucugccuccuggg

SEQ ID NO: 1327187 - RNA, 18 nt, Human
ugcacccccugccccaag

SEQ ID NO: 1327188 - RNA, 19 nt, Human
ugcacccccugccccaagu

SEQ ID NO: 1327189 - RNA, 19 nt, Human
ugccaagggcaggcacugu

SEQ ID NO: 1327190 - RNA, 24 nt, Human
ugcccaggcuugagugcagugaug

SEQ ID NO: 1327191 - RNA, 23 nt, Human
ugccucagccaccccucagacag

SEQ ID NO: 1327192 - RNA, 24 nt, Human
ugccucagccaccccucagacagc

SEQ ID NO: 1327193 - RNA, 24 nt, Human
ugcucuguugcccaggcuugagug

SEQ ID NO: 1327194 - RNA, 18 nt, Human
uggaaugacagccugugc

SEQ ID NO: 1327195 - RNA, 23 nt, Human
uggguucaagcaauacuucugcc

SEQ ID NO: 1327196 - RNA, 20 nt, Human
ugucuuggaaugacagccug

SEQ ID NO: 1327197 - RNA, 23 nt, Human
uguuuuguuuuuuugagacgcag

SEQ ID NO: 1327198 - RNA, 25 nt, Human
uucucugaauuucccaagugcccuu

SEQ ID NO: 1327199 - RNA, 18 nt, Human
uugacccuugaacaacaa

SEQ ID NO: 1327200 - RNA, 19 nt, Human
uugcaaccucugccuccug

SEQ ID NO: 1327201 - RNA, 23 nt, Human
uugcaaccucugccuccuggguu

SEQ ID NO: 1327202 - RNA, 24 nt, Human
uugcaaccucugccuccuggguuc

SEQ ID NO: 1327203 - RNA, 18 nt, Human
uugcccaggcuugagugc

SEQ ID NO: 1327204 - RNA, 21 nt, Human
uuucaaaacuuccagugaaaa

SEQ ID NO: 1327205 - RNA, 24 nt, Human
uuugaacugggcagguccacuugu

SEQ ID NO: 1327206 - RNA, 18 nt, Human
uuuguuuuguuuuguuuu

SEQ ID NO: 1327207 - RNA, 24 nt, Human
uuuucuggaagaaucuaacuaggg

SEQ ID NO: 1327208 - RNA, 20 nt, Human
aaaaauaaaaaugcuaaagg

SEQ ID NO: 1327209 - RNA, 21 nt, Human
aacauuaaaaaagcauggcag

SEQ ID NO: 1327210 - RNA, 23 nt, Human
aagaacaucagggaaagaccaac

SEQ ID NO: 1327211 - RNA, 20 nt, Human
aagaauggcacgcaggguuu

SEQ ID NO: 1327212 - RNA, 23 nt, Human
aagcuagaaaagguuuuccacag

SEQ ID NO: 1327213 - RNA, 24 nt, Human
aaugcuaaaggaugccagaaagaa

SEQ ID NO: 1327214 - RNA, 21 nt, Human
acaaaguaauaaacagugcuc

SEQ ID NO: 1327215 - RNA, 22 nt, Human
acacaccugccagagcaggccc

SEQ ID NO: 1327216 - RNA, 19 nt, Human
acucaugugauuaaaacag

SEQ ID NO: 1327217 - RNA, 20 nt, Human
acucccauccccaauacaca

SEQ ID NO: 1327218 - RNA, 21 nt, Human
acuuuccucuucugugagauu

SEQ ID NO: 1327219 - RNA, 24 nt, Human
aggcuguuuccaguucuuggccuu

SEQ ID NO: 1327220 - RNA, 23 nt, Human
aguucuuggccuuuaaacaacuc

SEQ ID NO: 1327221 - RNA, 20 nt, Human
aucaagaaaggguacaacug

SEQ ID NO: 1327222 - RNA, 22 nt, Human
augagcccagagcacauacaaa

SEQ ID NO: 1327223 - RNA, 19 nt, Human
caacugcugcagcucauga

SEQ ID NO: 1327224 - RNA, 22 nt, Human
caccagaacaaaugaaacacac

SEQ ID NO: 1327225 - RNA, 21 nt, Human
cauagugcagcgcucauucuu

SEQ ID NO: 1327226 - RNA, 18 nt, Human
caucagggaaagaccaac

SEQ ID NO: 1327227 - RNA, 19 nt, Human
cauuuuaucugaauucugg

SEQ ID NO: 1327228 - RNA, 21 nt, Human
ccagaaagaacaucagggaaa

SEQ ID NO: 1327229 - RNA, 19 nt, Human
ccagaacaaaugaaacaca

SEQ ID NO: 1327230 - RNA, 20 nt, Human
ccagaacaaaugaaacacac

SEQ ID NO: 1327231 - RNA, 18 nt, Human
ccagagcacauacaaauc

SEQ ID NO: 1327232 - RNA, 19 nt, Human
ccugcacacaccugccaga

SEQ ID NO: 1327233 - RNA, 24 nt, Human
cgauaugcauacuaaugaccuaca

SEQ ID NO: 1327234 - RNA, 18 nt, Human
cucccuguucucggcugc

SEQ ID NO: 1327235 - RNA, 18 nt, Human
cugcacacaccugccaga

SEQ ID NO: 1327236 - RNA, 19 nt, Human
gagcacauacaaauccuaa

SEQ ID NO: 1327237 - RNA, 19 nt, Human
gagcccagagcacauacaa

SEQ ID NO: 1327238 - RNA, 21 nt, Human
guaauagcagaacauaagcac

SEQ ID NO: 1327239 - RNA, 20 nt, Human
gugcagcgcucauucuuggc

SEQ ID NO: 1327240 - RNA, 24 nt, Human
uaaauuagaaacacaaauaaaagu

SEQ ID NO: 1327241 - RNA, 25 nt, Human
uaaauuagaaacacaaauaaaagug

SEQ ID NO: 1327242 - RNA, 27 nt, Human
uaagcuagaaaagguuuuccacaucca

SEQ ID NO: 1327243 - RNA, 19 nt, Human
uacaaaguaauaaacagug

SEQ ID NO: 1327244 - RNA, 19 nt, Human
uagaagaauggcacgcagg

SEQ ID NO: 1327245 - RNA, 20 nt, Human
ucaucaagaaaggguacaac

SEQ ID NO: 1327246 - RNA, 19 nt, Human
ucccuuaacuuuuuacaaa

SEQ ID NO: 1327247 - RNA, 20 nt, Human
ucugaauucuggaaugaaua

SEQ ID NO: 1327248 - RNA, 21 nt, Human
ugaagagcucacugugguuag

SEQ ID NO: 1327249 - RNA, 24 nt, Human
ugaauauacaugcugcaauaacau

SEQ ID NO: 1327250 - RNA, 20 nt, Human
ugccugguagaagaauggca

SEQ ID NO: 1327251 - RNA, 22 nt, Human
uggaaugaauauacaugcugca

SEQ ID NO: 1327252 - RNA, 18 nt, Human
uggcaccagaacaaauga

SEQ ID NO: 1327253 - RNA, 21 nt, Human
uggcaccagaacaaaugaaac

SEQ ID NO: 1327254 - RNA, 18 nt, Human
uggccuuuaaacaacucu

SEQ ID NO: 1327255 - RNA, 19 nt, Human
ugggagccuuucauuccuc

SEQ ID NO: 1327256 - RNA, 22 nt, Human
uuggccuuuaaacaacucuaaa

SEQ ID NO: 1327257 - RNA, 21 nt, Human
accucccgggaaggcaggagc

SEQ ID NO: 1327258 - RNA, 18 nt, Human
agccuggaaggcugggcu

SEQ ID NO: 1327259 - RNA, 22 nt, Human
aggcaggagccggucuccaugg

SEQ ID NO: 1327260 - RNA, 22 nt, Human
aggcugggcuguuccucgccuc

SEQ ID NO: 1327261 - RNA, 22 nt, Human
cagcagccacccagugucaggc

SEQ ID NO: 1327262 - RNA, 24 nt, Human
caggagccggucuccauggccucu

SEQ ID NO: 1327263 - RNA, 19 nt, Human
cccgggaaggcaggagccg

SEQ ID NO: 1327264 - RNA, 22 nt, Human
cccugcagccgcgcccggcgcc

SEQ ID NO: 1327265 - RNA, 20 nt, Human
ccggcccugccagccccgug

SEQ ID NO: 1327266 - RNA, 20 nt, Human
cucccagcagcaccucagga

SEQ ID NO: 1327267 - RNA, 22 nt, Human
cucucccggcccugccagcccc

SEQ ID NO: 1327268 - RNA, 20 nt, Human
cucuuuagccaaccucccgg

SEQ ID NO: 1327269 - RNA, 20 nt, Human
gccccguggggccuccccgc

SEQ ID NO: 1327270 - RNA, 21 nt, Human
uccauggccucucccggcccu

SEQ ID NO: 1327271 - RNA, 18 nt, Human
uccccgcccugcagccgc

SEQ ID NO: 1327272 - RNA, 24 nt, Human
ucccgggaaggcaggagccggucu

SEQ ID NO: 1327273 - RNA, 18 nt, Human
ugcagccgcgcccggcgc

SEQ ID NO: 1327274 - RNA, 24 nt, Human
ugccagccccguggggccuccccg

SEQ ID NO: 1327275 - RNA, 19 nt, Human
uggaaggcugggcuguucc

SEQ ID NO: 1327276 - RNA, 20 nt, Human
uggaaggcugggcuguuccu

SEQ ID NO: 1327277 - RNA, 21 nt, Human
uggaaggcugggcuguuccuc

SEQ ID NO: 1327278 - RNA, 24 nt, Human
aucacagcuaucuacgcuacagca

SEQ ID NO: 1327279 - RNA, 18 nt, Human
cagaaaguaaaaaugcug

SEQ ID NO: 1327280 - RNA, 19 nt, Human
ggcaggagcuugaagacac

SEQ ID NO: 1327281 - RNA, 20 nt, Human
guaaaaaugcuguuacaguu

SEQ ID NO: 1327282 - RNA, 25 nt, Human
uaaaaaugcuguuacagucccagug

SEQ ID NO: 1327283 - RNA, 22 nt, Human
uacagaaaguaaaaaugcuguu

SEQ ID NO: 1327284 - RNA, 20 nt, Human
uacagucccaguguaacugg

SEQ ID NO: 1327285 - RNA, 25 nt, Human
ucacacaaaaaccuaacaacgucac

SEQ ID NO: 1327286 - RNA, 22 nt, Human
ugaaguccguaagcuggggcag

SEQ ID NO: 1327287 - RNA, 24 nt, Human
uggggcaggagcuugaagacacuc

SEQ ID NO: 1327288 - RNA, 19 nt, Human
ugguugacucaccaaucac

SEQ ID NO: 1327289 - RNA, 19 nt, Human
uuuguuggggugaaguccg

SEQ ID NO: 1327290 - RNA, 20 nt, Human
uggauccuuccaccucaauu

SEQ ID NO: 1327291 - RNA, 22 nt, Human
acagcaagagacaugcccccag

SEQ ID NO: 1327292 - RNA, 24 nt, Human
acagcaagagacaugcccccagaa

SEQ ID NO: 1327293 - RNA, 22 nt, Human
accaaugccccaggacaggccc

SEQ ID NO: 1327294 - RNA, 18 nt, Human
accuugaauccaggacua

SEQ ID NO: 1327295 - RNA, 19 nt, Human
agaaugccaccaaugcccc

SEQ ID NO: 1327296 - RNA, 21 nt, Human
agaaugccaccaaugccccag

SEQ ID NO: 1327297 - RNA, 20 nt, Human
agagacaugcccccagaaug

SEQ ID NO: 1327298 - RNA, 22 nt, Human
agggauacugccauuuguuuuu

SEQ ID NO: 1327299 - RNA, 21 nt, Human
augccaccaaugccccaggac

SEQ ID NO: 1327300 - RNA, 20 nt, Human
cagaaugccaccaaugcccc

SEQ ID NO: 1327301 - RNA, 18 nt, Human
caugcccccagaaugcca

SEQ ID NO: 1327302 - RNA, 23 nt, Human
cauuuguuuuccuguuccuguuc

SEQ ID NO: 1327303 - RNA, 26 nt, Human
ccaccaaugccccaggacaggcccac

SEQ ID NO: 1327304 - RNA, 22 nt, Human
ccagcugauguuccacuuguuc

SEQ ID NO: 1327305 - RNA, 21 nt, Human
ccccagaaugccaccaaugcc

SEQ ID NO: 1327306 - RNA, 23 nt, Human
ccccagaaugccaccaaugcccc

SEQ ID NO: 1327307 - RNA, 20 nt, Human
cccuagguggcuggcaacca

SEQ ID NO: 1327308 - RNA, 19 nt, Human
cccuguggaaaccuguugc

SEQ ID NO: 1327309 - RNA, 22 nt, Human
ccuguggaaaccuguugcugaa

SEQ ID NO: 1327310 - RNA, 21 nt, Human
cuagcacccuuuuggcuuucu

SEQ ID NO: 1327311 - RNA, 22 nt, Human
cugccauuuguuuuccuguucc

SEQ ID NO: 1327312 - RNA, 21 nt, Human
cugcuggaacucuagggcugu

SEQ ID NO: 1327313 - RNA, 19 nt, Human
gacaugcccccagaaugcc

SEQ ID NO: 1327314 - RNA, 20 nt, Human
gaccagguuaucaggggccg

SEQ ID NO: 1327315 - RNA, 25 nt, Human
gaggcagagauggcacagcaagaga

SEQ ID NO: 1327316 - RNA, 18 nt, Human
gcccccagaaugccacca

SEQ ID NO: 1327317 - RNA, 23 nt, Human
ggcacagcaagagacaugccccc

SEQ ID NO: 1327318 - RNA, 22 nt, Human
gggaccagguuaucaggggccg

SEQ ID NO: 1327319 - RNA, 20 nt, Human
ggggaggcagagauggcaca

SEQ ID NO: 1327320 - RNA, 23 nt, Human
uagcagaugauguagggccuucc

SEQ ID NO: 1327321 - RNA, 19 nt, Human
uccuguuccuguucgcucc

SEQ ID NO: 1327322 - RNA, 25 nt, Human
ucuucuguuguuucagagauuugau

SEQ ID NO: 1327323 - RNA, 18 nt, Human
ugauguagggccuucccu

SEQ ID NO: 1327324 - RNA, 23 nt, Human
uggaacucuagggcuguuuuucu

SEQ ID NO: 1327325 - RNA, 23 nt, Human
uguucgcuccugcuggaacucua

SEQ ID NO: 1327326 - RNA, 18 nt, Human
uguuucuucuguuguuuc

SEQ ID NO: 1327327 - RNA, 19 nt, Human
uuguuguuugcuuucuuuu

SEQ ID NO: 1327328 - RNA, 20 nt, Human
uuuccuguuccuguucgcuc

SEQ ID NO: 1327329 - RNA, 22 nt, Human
uuucucagggauacugccauuu

SEQ ID NO: 1327330 - RNA, 19 nt, Human
aagcaagggguggugggga

SEQ ID NO: 1327331 - RNA, 21 nt, Human
aagcaaggggugguggggaga

SEQ ID NO: 1327332 - RNA, 18 nt, Human
aaggucuucccgaggccc

SEQ ID NO: 1327333 - RNA, 21 nt, Human
accggccccuucccuaucucc

SEQ ID NO: 1327334 - RNA, 25 nt, Human
agggaggguguggggugaccuucgg

SEQ ID NO: 1327335 - RNA, 23 nt, Human
aggggugguggggagauccuagg

SEQ ID NO: 1327336 - RNA, 24 nt, Human
aggggugguggggagauccuagga

SEQ ID NO: 1327337 - RNA, 23 nt, Human
caacuguaaucccagcacauugg

SEQ ID NO: 1327338 - RNA, 24 nt, Human
caacuguaaucccagcacauuggg

SEQ ID NO: 1327339 - RNA, 19 nt, Human
cagcagaacagccaagcuc

SEQ ID NO: 1327340 - RNA, 21 nt, Human
caggugcagcagaacagccaa

SEQ ID NO: 1327341 - RNA, 23 nt, Human
ccaccggccccuucccuaucucc

SEQ ID NO: 1327342 - RNA, 19 nt, Human
ccucccacauacuuggagg

SEQ ID NO: 1327343 - RNA, 22 nt, Human
cgcauuaaaaaaaaauccugag

SEQ ID NO: 1327344 - RNA, 24 nt, Human
cggcugcuggggggcagagggagg

SEQ ID NO: 1327345 - RNA, 21 nt, Human
cgucccgcccguccccuccca

SEQ ID NO: 1327346 - RNA, 20 nt, Human
cuauaugcuaagcauuaccc

SEQ ID NO: 1327347 - RNA, 19 nt, Human
cucgucccgcccguccccu

SEQ ID NO: 1327348 - RNA, 22 nt, Human
cuggggggcagagggagggugu

SEQ ID NO: 1327349 - RNA, 19 nt, Human
cugguuggggcaggaagca

SEQ ID NO: 1327350 - RNA, 21 nt, Human
gaaacccuuccccacuccuga

SEQ ID NO: 1327351 - RNA, 19 nt, Human
gaaggucuucccgaggccc

SEQ ID NO: 1327352 - RNA, 19 nt, Human
gaucauggaggagaaaccc

SEQ ID NO: 1327353 - RNA, 20 nt, Human
gccaggacagcuccagguuc

SEQ ID NO: 1327354 - RNA, 23 nt, Human
ggaaaggaaggcacacagggaua

SEQ ID NO: 1327355 - RNA, 18 nt, Human
gggaggguguggggugag

SEQ ID NO: 1327356 - RNA, 22 nt, Human
gggcagagggaggguguggggu

SEQ ID NO: 1327357 - RNA, 24 nt, Human
gguagcugacaacuguaaucccag

SEQ ID NO: 1327358 - RNA, 18 nt, Human
guccagaagcugcauccg

SEQ ID NO: 1327359 - RNA, 22 nt, Human
uagcugacaacuguaaucccag

SEQ ID NO: 1327360 - RNA, 24 nt, Human
uagcugacaacuguaaucccagca

SEQ ID NO: 1327361 - RNA, 18 nt, Human
uaggauaacagaaagcau

SEQ ID NO: 1327362 - RNA, 23 nt, Human
ucaggugcagcagaacagccaag

SEQ ID NO: 1327363 - RNA, 19 nt, Human
uccaaauggucagggagcu

SEQ ID NO: 1327364 - RNA, 18 nt, Human
ucccgcccguccccuccc

SEQ ID NO: 1327365 - RNA, 19 nt, Human
ugccaggacagcuccaggu

SEQ ID NO: 1327366 - RNA, 18 nt, Human
uggggcaggaagcaaggg

SEQ ID NO: 1327367 - RNA, 21 nt, Human
uggggggcagagggagggugu

SEQ ID NO: 1327368 - RNA, 24 nt, Human
ugguugagggucaagaggugggaa

SEQ ID NO: 1327369 - RNA, 24 nt, Human
uuucuguuccugauuuguaggugg

SEQ ID NO: 1327370 - RNA, 22 nt, Human
aaagaaacagacuuuccagguc

SEQ ID NO: 1327371 - RNA, 19 nt, Human
aaaggcaagugugccucag

SEQ ID NO: 1327372 - RNA, 22 nt, Human
aaggaaaaagaaagaaagaaaa

SEQ ID NO: 1327373 - RNA, 20 nt, Human
acagcagagugaguagauac

SEQ ID NO: 1327374 - RNA, 18 nt, Human
agaaagaaaauaaaucuu

SEQ ID NO: 1327375 - RNA, 21 nt, Human
aggaaaaagaaagaaagaaaa

SEQ ID NO: 1327376 - RNA, 21 nt, Human
auauuuuccugauauucuuau

SEQ ID NO: 1327377 - RNA, 19 nt, Human
caaagaaacagacuuucca

SEQ ID NO: 1327378 - RNA, 22 nt, Human
caaagaaacagacuuuccaggu

SEQ ID NO: 1327379 - RNA, 24 nt, Human
caaagaaacagacuuuccagguca

SEQ ID NO: 1327380 - RNA, 22 nt, Human
cuauagcuuuggaauucaguag

SEQ ID NO: 1327381 - RNA, 20 nt, Human
gacuagcaaagaaacagacu

SEQ ID NO: 1327382 - RNA, 18 nt, Human
gaugaaggaaaaagaaag

SEQ ID NO: 1327383 - RNA, 23 nt, Human
gggaagcaagugcuguuggcuca

SEQ ID NO: 1327384 - RNA, 20 nt, Human
guccaaccuggcauugucuu

SEQ ID NO: 1327385 - RNA, 18 nt, Human
uacacaaucccgcaugca

SEQ ID NO: 1327386 - RNA, 19 nt, Human
ucauaggcucucuacaggg

SEQ ID NO: 1327387 - RNA, 26 nt, Human
ucuuuuauuccacagcaauaguuuca

SEQ ID NO: 1327388 - RNA, 20 nt, Human
ugaaggaaaaagaaagaaag

SEQ ID NO: 1327389 - RNA, 24 nt, Human
ugaucuagaugaaggaaaaagaaa

SEQ ID NO: 1327390 - RNA, 18 nt, Human
uucaucuuuuauuccaca

SEQ ID NO: 1327391 - RNA, 20 nt, Human
uucaucuuuuauuccacagc

SEQ ID NO: 1327392 - RNA, 25 nt, Human
uuucagggggucugccuacagcaga

SEQ ID NO: 1327393 - RNA, 21 nt, Human
aaaaaagaaguggacucagaa

SEQ ID NO: 1327394 - RNA, 21 nt, Human
aaacauuuuaaagcaaugguu

SEQ ID NO: 1327395 - RNA, 20 nt, Human
aaaugauuucccagaaaggc

SEQ ID NO: 1327396 - RNA, 23 nt, Human
aacagauccccucccccaacccc

SEQ ID NO: 1327397 - RNA, 25 nt, Human
aaccccuaaaaaaauucuauauccu

SEQ ID NO: 1327398 - RNA, 18 nt, Human
aagaauaauugagauagg

SEQ ID NO: 1327399 - RNA, 19 nt, Human
aagauuacaaaauaaggca

SEQ ID NO: 1327400 - RNA, 19 nt, Human
aagcaaguaaacuacccag

SEQ ID NO: 1327401 - RNA, 19 nt, Human
aagcaucacuuaauucaua

SEQ ID NO: 1327402 - RNA, 22 nt, Human
aagcugcagcauguguauaagg

SEQ ID NO: 1327403 - RNA, 22 nt, Human
aagcuguuucuaucacccauag

SEQ ID NO: 1327404 - RNA, 24 nt, Human
acaagcuucaucccaagauguucc

SEQ ID NO: 1327405 - RNA, 23 nt, Human
acaagguaagaauaugaaucaac

SEQ ID NO: 1327406 - RNA, 21 nt, Human
acagaacuccuaccacaaagg

SEQ ID NO: 1327407 - RNA, 23 nt, Human
acagaaggcaaucuuuaccaaaa

SEQ ID NO: 1327408 - RNA, 21 nt, Human
acagacauuuuuuaguaacuc

SEQ ID NO: 1327409 - RNA, 21 nt, Human
acgucaugaaaguaacaggcu

SEQ ID NO: 1327410 - RNA, 19 nt, Human
agaaauauuuauuaucccc

SEQ ID NO: 1327411 - RNA, 20 nt, Human
agacagaaugcaaaucuaua

SEQ ID NO: 1327412 - RNA, 20 nt, Human
agauccccucccccaacccc

SEQ ID NO: 1327413 - RNA, 22 nt, Human
aggaaaaaagaaguggacucag

SEQ ID NO: 1327414 - RNA, 24 nt, Human
auacuaacauaguucugguuacac

SEQ ID NO: 1327415 - RNA, 23 nt, Human
aucauaaacaaguaaaaugcacc

SEQ ID NO: 1327416 - RNA, 23 nt, Human
caaaaggcaaaaauuaagaauca

SEQ ID NO: 1327417 - RNA, 19 nt, Human
caaccuuucucagcacaag

SEQ ID NO: 1327418 - RNA, 21 nt, Human
caacuaguacccugaaccaaa

SEQ ID NO: 1327419 - RNA, 22 nt, Human
caacuaguacccugaaccaaag

SEQ ID NO: 1327420 - RNA, 22 nt, Human
caagacagaaugcaaaucuaua

SEQ ID NO: 1327421 - RNA, 20 nt, Human
cacacgcacgcacacacaca

SEQ ID NO: 1327422 - RNA, 21 nt, Human
cagauccccucccccaacccc

SEQ ID NO: 1327423 - RNA, 19 nt, Human
cagcaaugcaaccuuucuc

SEQ ID NO: 1327424 - RNA, 22 nt, Human
caguaaaucaagucccaguagc

SEQ ID NO: 1327425 - RNA, 27 nt, Human
cauaaaauccucaacuuuggcuauuuc

SEQ ID NO: 1327426 - RNA, 19 nt, Human
cauagaagaaaacuaugca

SEQ ID NO: 1327427 - RNA, 18 nt, Human
ccagaucaaauagucuug

SEQ ID NO: 1327428 - RNA, 23 nt, Human
ccaguagcaacaaguuaaacaag

SEQ ID NO: 1327429 - RNA, 26 nt, Human
cccaagagguaaauaugcuuuacaga

SEQ ID NO: 1327430 - RNA, 18 nt, Human
cccaagauguucccccuu

SEQ ID NO: 1327431 - RNA, 21 nt, Human
cccccuuuuccccucagcuau

SEQ ID NO: 1327432 - RNA, 20 nt, Human
cuaucacccauagaagaaaa

SEQ ID NO: 1327433 - RNA, 23 nt, Human
cucacacgucaugaaaguaacag

SEQ ID NO: 1327434 - RNA, 23 nt, Human
gaaaugauuucccagaaaggcuu

SEQ ID NO: 1327435 - RNA, 18 nt, Human
gaacuccuaccacaaagg

SEQ ID NO: 1327436 - RNA, 19 nt, Human
gcugaagaguucucaaucc

SEQ ID NO: 1327437 - RNA, 19 nt, Human
gcugcagcauguguauaag

SEQ ID NO: 1327438 - RNA, 23 nt, Human
ggaaaacauacauaaaauccuca

SEQ ID NO: 1327439 - RNA, 18 nt, Human
guaaacaggaaaacauac

SEQ ID NO: 1327440 - RNA, 19 nt, Human
guaaguuuauaaccaauga

SEQ ID NO: 1327441 - RNA, 18 nt, Human
guuuuaaguuuccuguau

SEQ ID NO: 1327442 - RNA, 19 nt, Human
uaaaaagauaaugcuauca

SEQ ID NO: 1327443 - RNA, 22 nt, Human
uaaaauccucaacuuuggcuaa

SEQ ID NO: 1327444 - RNA, 21 nt, Human
uaaauaaacaaaaauagagca

SEQ ID NO: 1327445 - RNA, 23 nt, Human
uaaggacaagcuucaucccaaga

SEQ ID NO: 1327446 - RNA, 21 nt, Human
uaauaugguugguguggacug

SEQ ID NO: 1327447 - RNA, 22 nt, Human
uacacacgcacgcacacacaca

SEQ ID NO: 1327448 - RNA, 25 nt, Human
uaccaaaaaauccaauuaauugcua

SEQ ID NO: 1327449 - RNA, 18 nt, Human
uaccagaucaaauagucu

SEQ ID NO: 1327450 - RNA, 18 nt, Human
uagcugagcugcuacacc

SEQ ID NO: 1327451 - RNA, 22 nt, Human
uagcugagcugcuacaccuugc

SEQ ID NO: 1327452 - RNA, 18 nt, Human
uauacagaaggcaaucuu

SEQ ID NO: 1327453 - RNA, 21 nt, Human
uauaucccauaagaguuauac

SEQ ID NO: 1327454 - RNA, 23 nt, Human
uauccccuccccccacauacaga

SEQ ID NO: 1327455 - RNA, 24 nt, Human
ucaacagaacuccuaccacaaagg

SEQ ID NO: 1327456 - RNA, 19 nt, Human
ucaacagugucccaccaac

SEQ ID NO: 1327457 - RNA, 18 nt, Human
ucaagcugcagcaugugu

SEQ ID NO: 1327458 - RNA, 25 nt, Human
ucagcaaacuuuauauuggaaaaga

SEQ ID NO: 1327459 - RNA, 21 nt, Human
ucaguguaacuucuccaguuu

SEQ ID NO: 1327460 - RNA, 21 nt, Human
uccaaacauuauacagaaggc

SEQ ID NO: 1327461 - RNA, 23 nt, Human
uccacauaugguauacacauaua

SEQ ID NO: 1327462 - RNA, 25 nt, Human
ucccccuuuuccccucagcuauuuc

SEQ ID NO: 1327463 - RNA, 20 nt, Human
uccgcaagcaaguaaacuac

SEQ ID NO: 1327464 - RNA, 19 nt, Human
uccuaaaucccgaagucuc

SEQ ID NO: 1327465 - RNA, 24 nt, Human
ucuaagccuguaggucacacacua

SEQ ID NO: 1327466 - RNA, 21 nt, Human
ucuccaauuaccagaucaaau

SEQ ID NO: 1327467 - RNA, 23 nt, Human
ucuuuguuguacccauaaacuuu

SEQ ID NO: 1327468 - RNA, 18 nt, Human
ugaagauauuauccaugu

SEQ ID NO: 1327469 - RNA, 18 nt, Human
ugagguggggcauugggg

SEQ ID NO: 1327470 - RNA, 20 nt, Human
ugaguguaaaucauccacac

SEQ ID NO: 1327471 - RNA, 20 nt, Human
ugauaaaguucuucacaguu

SEQ ID NO: 1327472 - RNA, 23 nt, Human
ugcacaguaauaaaucuagcuga

SEQ ID NO: 1327473 - RNA, 20 nt, Human
ugccaaagaugaacucuaaa

SEQ ID NO: 1327474 - RNA, 22 nt, Human
ugcugguuuaauuuuagaauca

SEQ ID NO: 1327475 - RNA, 18 nt, Human
uggauaaaaugucuuuga

SEQ ID NO: 1327476 - RNA, 22 nt, Human
ugguauacacauauaaauaugc

SEQ ID NO: 1327477 - RNA, 21 nt, Human
uguaauaacagaaauuuuacc

SEQ ID NO: 1327478 - RNA, 20 nt, Human
uguaauaggcugcugguuua

SEQ ID NO: 1327479 - RNA, 22 nt, Human
uguacccauaaacuuugaauac

SEQ ID NO: 1327480 - RNA, 20 nt, Human
ugugcuuguaauaggcugcu

SEQ ID NO: 1327481 - RNA, 24 nt, Human
ugugguaguaauaagauuuccauc

SEQ ID NO: 1327482 - RNA, 23 nt, Human
uuacauaaaauaaaucaucucuu

SEQ ID NO: 1327483 - RNA, 19 nt, Human
uuacauagugccuaucucc

SEQ ID NO: 1327484 - RNA, 18 nt, Human
uuagaaauaagaaaagaa

SEQ ID NO: 1327485 - RNA, 30 nt, Human
uucaaaaagcuguuucuaucacccauagaa

SEQ ID NO: 1327486 - RNA, 20 nt, Human
uucacaaaaacuauacugua

SEQ ID NO: 1327487 - RNA, 20 nt, Human
uucccagaaaggcuuagaaa

SEQ ID NO: 1327488 - RNA, 21 nt, Human
uuucauuuuuccauguuaguu

SEQ ID NO: 1327489 - RNA, 21 nt, Human
uuugccaaagaugaacucuaa

SEQ ID NO: 1327490 - RNA, 22 nt, Human
ucuuuggacagcaaggacucgg

SEQ ID NO: 1327491 - RNA, 20 nt, Human
uugaaagagaggcuagaagu

SEQ ID NO: 1327492 - RNA, 20 nt, Human
aggcggagguugcagugagc

SEQ ID NO: 1327493 - RNA, 24 nt, Human
aggcggagguugcagugagccaag

SEQ ID NO: 1327494 - RNA, 25 nt, Human
cccgugguuuaaggacuuucaagac

SEQ ID NO: 1327495 - RNA, 18 nt, Human
gagguugcagugagccaa

SEQ ID NO: 1327496 - RNA, 21 nt, Human
gagguugcagugagccaagau

SEQ ID NO: 1327497 - RNA, 18 nt, Human
ggagguugcagugagcca

SEQ ID NO: 1327498 - RNA, 20 nt, Human
ggagguugcagugagccaag

SEQ ID NO: 1327499 - RNA, 24 nt, Human
ggagguugcagugagccaagaugg

SEQ ID NO: 1327500 - RNA, 20 nt, Human
uucaagacucuuaacagguu

SEQ ID NO: 1327501 - RNA, 22 nt, Human
uugcagugagccaagauggugc

SEQ ID NO: 1327502 - RNA, 18 nt, Human
uuuaaggacuuucaagac

SEQ ID NO: 1327503 - RNA, 18 nt, Human
agguucccucauccacuu

SEQ ID NO: 1327504 - RNA, 24 nt, Human
caauggcuaugguuccugaaauuu

SEQ ID NO: 1327505 - RNA, 22 nt, Human
cccucauccacuucaauggcua

SEQ ID NO: 1327506 - RNA, 26 nt, Human
cucccauacgauagugggcagacccc

SEQ ID NO: 1327507 - RNA, 20 nt, Human
cuggaggacuagggcccuca

SEQ ID NO: 1327508 - RNA, 20 nt, Human
guagguguaauccucgcccc

SEQ ID NO: 1327509 - RNA, 27 nt, Human
uagaaagaaaagaaaaaaaaucccacu

SEQ ID NO: 1327510 - RNA, 24 nt, Human
ucaccaaaguuuguuacuguucac

SEQ ID NO: 1327511 - RNA, 21 nt, Human
ucugaagccuucucucagcuc

SEQ ID NO: 1327512 - RNA, 18 nt, Human
ucuggaggacuagggccc

SEQ ID NO: 1327513 - RNA, 20 nt, Human
ucuggaggacuagggcccuc

SEQ ID NO: 1327514 - RNA, 18 nt, Human
ugagugcauguauauagg

SEQ ID NO: 1327515 - RNA, 20 nt, Human
ugccuuugguuugaaugucc

SEQ ID NO: 1327516 - RNA, 24 nt, Human
uguggagcucccaggguaaaaaga

SEQ ID NO: 1327517 - RNA, 23 nt, Human
uuugccuuugguuugaauguccu

SEQ ID NO: 1327518 - RNA, 24 nt, Human
aaccugaccaaucagcacucccaa

SEQ ID NO: 1327519 - RNA, 20 nt, Human
aacuucccaaguccuuaccc

SEQ ID NO: 1327520 - RNA, 20 nt, Human
aauaagcuacuggcuguuaa

SEQ ID NO: 1327521 - RNA, 18 nt, Human
agaaaaccucacugcaac

SEQ ID NO: 1327522 - RNA, 23 nt, Human
agacagggccugagugaaaagga

SEQ ID NO: 1327523 - RNA, 21 nt, Human
aggccccugaguccucuccua

SEQ ID NO: 1327524 - RNA, 18 nt, Human
agucaggccccugagucc

SEQ ID NO: 1327525 - RNA, 20 nt, Human
augaagaaaaccucacugca

SEQ ID NO: 1327526 - RNA, 21 nt, Human
caggccccugaguccucuccu

SEQ ID NO: 1327527 - RNA, 24 nt, Human
caguucugccaucgcagccgggaa

SEQ ID NO: 1327528 - RNA, 19 nt, Human
caguugacaccaccuaggc

SEQ ID NO: 1327529 - RNA, 28 nt, Human
ccaucugugcacuuccuuuuaaaauccc

SEQ ID NO: 1327530 - RNA, 24 nt, Human
cccaucugugcacuuccuuuuaaa

SEQ ID NO: 1327531 - RNA, 20 nt, Human
ccccugaguccucuccuagg

SEQ ID NO: 1327532 - RNA, 22 nt, Human
cccugaguccucuccuaggccc

SEQ ID NO: 1327533 - RNA, 20 nt, Human
cgcagccgggaacagaagac

SEQ ID NO: 1327534 - RNA, 21 nt, Human
gagugggaaagauucugugcu

SEQ ID NO: 1327535 - RNA, 18 nt, Human
gcugguauucuggcucaa

SEQ ID NO: 1327536 - RNA, 19 nt, Human
uaaaaccucagagcacuac

SEQ ID NO: 1327537 - RNA, 19 nt, Human
uaaaaucccauagcugcag

SEQ ID NO: 1327538 - RNA, 21 nt, Human
uaaaaucccauagcugcaguc

SEQ ID NO: 1327539 - RNA, 22 nt, Human
uaaaaucccauagcugcagucc

SEQ ID NO: 1327540 - RNA, 23 nt, Human
uaaaaucccauagcugcaguccc

SEQ ID NO: 1327541 - RNA, 20 nt, Human
uaaugagagacagggccuga

SEQ ID NO: 1327542 - RNA, 24 nt, Human
uacuggcuguuaaugagagacagg

SEQ ID NO: 1327543 - RNA, 21 nt, Human
uaggcugguauucuggcucaa

SEQ ID NO: 1327544 - RNA, 19 nt, Human
uauuguaaaaccucagagc

SEQ ID NO: 1327545 - RNA, 21 nt, Human
ucagcacucccaacuucccaa

SEQ ID NO: 1327546 - RNA, 22 nt, Human
ucccaaguccuuacccgccaaa

SEQ ID NO: 1327547 - RNA, 21 nt, Human
ucuccuaggcccaucugugca

SEQ ID NO: 1327548 - RNA, 22 nt, Human
ugaagaaaaccucacugcaacc

SEQ ID NO: 1327549 - RNA, 21 nt, Human
ugacuguaucuccaaccugac

SEQ ID NO: 1327550 - RNA, 18 nt, Human
ugagagacagggccugag

SEQ ID NO: 1327551 - RNA, 18 nt, Human
ugaguuguacaaaagguu

SEQ ID NO: 1327552 - RNA, 24 nt, Human
ugcaggcugcaucuaggaucacca

SEQ ID NO: 1327553 - RNA, 20 nt, Human
uuuaaaaucccauagcugca

SEQ ID NO: 1327554 - RNA, 22 nt, Human
uuuaaaaucccauagcugcagu

SEQ ID NO: 1327555 - RNA, 25 nt, Human
cccggaguugggacaaaccgggguc

SEQ ID NO: 1327556 - RNA, 19 nt, Human
ccuguccucgaggucggcc

SEQ ID NO: 1327557 - RNA, 20 nt, Human
cuggccccggaguugggaca

SEQ ID NO: 1327558 - RNA, 24 nt, Human
cucaggacuaggggaguccaaaaa

SEQ ID NO: 1327559 - RNA, 21 nt, Human
gagaggccaucauuauuagcc

SEQ ID NO: 1327560 - RNA, 22 nt, Human
ggacuaggggaguccaaaaauc

SEQ ID NO: 1327561 - RNA, 21 nt, Human
guccaaaaaucugagaggcca

SEQ ID NO: 1327562 - RNA, 22 nt, Human
uuagccaagcacacaggauaaa

SEQ ID NO: 1327563 - RNA, 18 nt, Human
aaagacugccagggcagc

SEQ ID NO: 1327564 - RNA, 24 nt, Human
aaaguguugggauuauaggcauga

SEQ ID NO: 1327565 - RNA, 23 nt, Human
aacuuagcagaaacccagggcuc

SEQ ID NO: 1327566 - RNA, 25 nt, Human
aagaagcccaagccaaggcacuucc

SEQ ID NO: 1327567 - RNA, 18 nt, Human
aagacugccagggcagcu

SEQ ID NO: 1327568 - RNA, 18 nt, Human
aagcaaggccaggagaca

SEQ ID NO: 1327569 - RNA, 25 nt, Human
aagcaauccuucugccucagccucc

SEQ ID NO: 1327570 - RNA, 18 nt, Human
aagcagcacccaccuuca

SEQ ID NO: 1327571 - RNA, 20 nt, Human
aagcagcacccaccuucagc

SEQ ID NO: 1327572 - RNA, 19 nt, Human
aagcagcuucuuucuucuu

SEQ ID NO: 1327573 - RNA, 22 nt, Human
aagcagcuucuuucuucuuuuu

SEQ ID NO: 1327574 - RNA, 24 nt, Human
aagcaggccagaucaggcuucaag

SEQ ID NO: 1327575 - RNA, 23 nt, Human
aaggugugguaugguagacaccu

SEQ ID NO: 1327576 - RNA, 21 nt, Human
aaguguugggauuauaggcau

SEQ ID NO: 1327577 - RNA, 22 nt, Human
aauuaaacaguucccuaggaga

SEQ ID NO: 1327578 - RNA, 23 nt, Human
acaaagagcagcgccuguaacuc

SEQ ID NO: 1327579 - RNA, 22 nt, Human
acccagaaaacacaagcagcuu

SEQ ID NO: 1327580 - RNA, 19 nt, Human
acccucuccaaucagggau

SEQ ID NO: 1327581 - RNA, 21 nt, Human
acgcaccaccacgccuggcuc

SEQ ID NO: 1327582 - RNA, 24 nt, Human
acuacaaccuauugagguaggcac

SEQ ID NO: 1327583 - RNA, 24 nt, Human
acuauguugcccaggcuggucuug

SEQ ID NO: 1327584 - RNA, 25 nt, Human
acuauguugcccaggcuggucuuga

SEQ ID NO: 1327585 - RNA, 24 nt, Human
agaaacccagggcucucccacccu

SEQ ID NO: 1327586 - RNA, 20 nt, Human
agaaugaccacugacauuaa

SEQ ID NO: 1327587 - RNA, 23 nt, Human
agacagggucucacuauguugcc

SEQ ID NO: 1327588 - RNA, 18 nt, Human
agacuauaggcacgcacc

SEQ ID NO: 1327589 - RNA, 23 nt, Human
agcaggugguugguuccagagau

SEQ ID NO: 1327590 - RNA, 21 nt, Human
agccaucccuaguacaggacc

SEQ ID NO: 1327591 - RNA, 23 nt, Human
agccugaggcggggcccgaucgc

SEQ ID NO: 1327592 - RNA, 19 nt, Human
aggaaggugggcaaggcuc

SEQ ID NO: 1327593 - RNA, 25 nt, Human
aggcaaaaaagcaacacuaaaagca

SEQ ID NO: 1327594 - RNA, 22 nt, Human
aggcaagaagaaugaccuugau

SEQ ID NO: 1327595 - RNA, 20 nt, Human
aggcaugagccaccacgccc

SEQ ID NO: 1327596 - RNA, 19 nt, Human
aggccccaaggagacccaa

SEQ ID NO: 1327597 - RNA, 18 nt, Human
aggcggggcccgaucgcg

SEQ ID NO: 1327598 - RNA, 22 nt, Human
aggggcgggagcgaaaccugcc

SEQ ID NO: 1327599 - RNA, 24 nt, Human
aguaaugcugcuuguggguugcuu

SEQ ID NO: 1327600 - RNA, 27 nt, Human
auaauucuugacaccuacuuuucucug

SEQ ID NO: 1327601 - RNA, 22 nt, Human
aucagaugccaagguaaacacc

SEQ ID NO: 1327602 - RNA, 23 nt, Human
aucagccggccucagccucccaa

SEQ ID NO: 1327603 - RNA, 21 nt, Human
auccuucugccucagccuccc

SEQ ID NO: 1327604 - RNA, 19 nt, Human
augacacuuucucucuucc

SEQ ID NO: 1327605 - RNA, 20 nt, Human
augauucuuguggccacaaa

SEQ ID NO: 1327606 - RNA, 24 nt, Human
augcacacaugugcacacacaccu

SEQ ID NO: 1327607 - RNA, 18 nt, Human
auggagcgcuuucugugu

SEQ ID NO: 1327608 - RNA, 20 nt, Human
auugcaaguugcucucagca

SEQ ID NO: 1327609 - RNA, 23 nt, Human
auuuuuaaaccauucuaaaggca

SEQ ID NO: 1327610 - RNA, 21 nt, Human
caaaaaagcaacacuaaaagc

SEQ ID NO: 1327611 - RNA, 18 nt, Human
caacacuaaaagcaggcc

SEQ ID NO: 1327612 - RNA, 19 nt, Human
caagaagcccaagccaagg

SEQ ID NO: 1327613 - RNA, 19 nt, Human
caagagcccugacaccacc

SEQ ID NO: 1327614 - RNA, 22 nt, Human
caagcaauccuucugccucagc

SEQ ID NO: 1327615 - RNA, 23 nt, Human
caaggcccaggugcccaaacacc

SEQ ID NO: 1327616 - RNA, 19 nt, Human
caaguuggugaccccugac

SEQ ID NO: 1327617 - RNA, 20 nt, Human
caauccugcugcggcuucug

SEQ ID NO: 1327618 - RNA, 18 nt, Human
cacaugugcacacacacc

SEQ ID NO: 1327619 - RNA, 22 nt, Human
caccaccacgccuggcucauuu

SEQ ID NO: 1327620 - RNA, 19 nt, Human
caccacgccuggcucauuu

SEQ ID NO: 1327621 - RNA, 25 nt, Human
cacgcaggucaugaggauguguaau

SEQ ID NO: 1327622 - RNA, 19 nt, Human
cacuauguugcccaggcug

SEQ ID NO: 1327623 - RNA, 24 nt, Human
cacuauguugcccaggcuggucuu

SEQ ID NO: 1327624 - RNA, 27 nt, Human
cacuauguugcccaggcuggucuugaa

SEQ ID NO: 1327625 - RNA, 22 nt, Human
cacucagaauacacucccucag

SEQ ID NO: 1327626 - RNA, 18 nt, Human
cagaaugaccacugacau

SEQ ID NO: 1327627 - RNA, 19 nt, Human
cagacaccccaacuugggc

SEQ ID NO: 1327628 - RNA, 20 nt, Human
cagagaugagccccaacucu

SEQ ID NO: 1327629 - RNA, 22 nt, Human
cagagcaagagguggacagaga

SEQ ID NO: 1327630 - RNA, 21 nt, Human
cagccauaucugaagcagcac

SEQ ID NO: 1327631 - RNA, 19 nt, Human
caggacccagggaauuugc

SEQ ID NO: 1327632 - RNA, 22 nt, Human
caggagacaaggguaccagcca

SEQ ID NO: 1327633 - RNA, 24 nt, Human
cagggucucacuauguugcccagg

SEQ ID NO: 1327634 - RNA, 24 nt, Human
cagggucuugcuuugucacccagg

SEQ ID NO: 1327635 - RNA, 20 nt, Human
caguccggggccgcgugcag

SEQ ID NO: 1327636 - RNA, 21 nt, Human
cauggucccaggcccugcagu

SEQ ID NO: 1327637 - RNA, 21 nt, Human
ccaaacaccaacaguaaugcu

SEQ ID NO: 1327638 - RNA, 24 nt, Human
ccaaacaccaacaguaaugcugcu

SEQ ID NO: 1327639 - RNA, 24 nt, Human
ccaaaguguugggauuauaggcau

SEQ ID NO: 1327640 - RNA, 21 nt, Human
ccacauccaggggugcagagg

SEQ ID NO: 1327641 - RNA, 21 nt, Human
ccagaucaggcuucaaguugg

SEQ ID NO: 1327642 - RNA, 24 nt, Human
ccagcccacauggucccaggcccu

SEQ ID NO: 1327643 - RNA, 24 nt, Human
ccagggcagacacagcagccucca

SEQ ID NO: 1327644 - RNA, 19 nt, Human
ccauacuucaaccucuggg

SEQ ID NO: 1327645 - RNA, 22 nt, Human
cccaagccaaggcacuuccagc

SEQ ID NO: 1327646 - RNA, 22 nt, Human
ccccaguacuccucgaggcacc

SEQ ID NO: 1327647 - RNA, 25 nt, Human
ccccauucugcuggugcucccaaaa

SEQ ID NO: 1327648 - RNA, 26 nt, Human
ccccauucugcuggugcucccaaaag

SEQ ID NO: 1327649 - RNA, 21 nt, Human
cccuccuggacuggccaguuc

SEQ ID NO: 1327650 - RNA, 21 nt, Human
ccucaggccccaaggagaccc

SEQ ID NO: 1327651 - RNA, 28 nt, Human
ccuccaagcaauccuucugccucagccu

SEQ ID NO: 1327652 - RNA, 26 nt, Human
ccugcaggccacaggcugaacaagcu

SEQ ID NO: 1327653 - RNA, 27 nt, Human
ccugcggccaggacagcuguggaaggc

SEQ ID NO: 1327654 - RNA, 18 nt, Human
ccuggcaacugugauugg

SEQ ID NO: 1327655 - RNA, 20 nt, Human
ccuuggguuugggguugagg

SEQ ID NO: 1327656 - RNA, 18 nt, Human
cgccuugaacacccugcg

SEQ ID NO: 1327657 - RNA, 23 nt, Human
cgggcggcccugaaacacugggc

SEQ ID NO: 1327658 - RNA, 20 nt, Human
cuagugaaaggaaggcuggg

SEQ ID NO: 1327659 - RNA, 19 nt, Human
cucaaacucuccauacuuc

SEQ ID NO: 1327660 - RNA, 23 nt, Human
cucaggccccaaggagacccaag

SEQ ID NO: 1327661 - RNA, 18 nt, Human
cuccaagcaauccuucug

SEQ ID NO: 1327662 - RNA, 24 nt, Human
cuccagcccacauggucccaggcc

SEQ ID NO: 1327663 - RNA, 18 nt, Human
cuccagugggguauacag

SEQ ID NO: 1327664 - RNA, 24 nt, Human
cuccagugggguauacagacagcc

SEQ ID NO: 1327665 - RNA, 21 nt, Human
cucccucauuucaucccacua

SEQ ID NO: 1327666 - RNA, 23 nt, Human
cucccucauuucaucccacuaca

SEQ ID NO: 1327667 - RNA, 22 nt, Human
cugaagcaagcccuccuggacu

SEQ ID NO: 1327668 - RNA, 19 nt, Human
cugccaagggaaauaccac

SEQ ID NO: 1327669 - RNA, 18 nt, Human
cuggagcaccaauggagg

SEQ ID NO: 1327670 - RNA, 24 nt, Human
cuggagcaccaauggaggucacca

SEQ ID NO: 1327671 - RNA, 19 nt, Human
cuggaucacggugauuggu

SEQ ID NO: 1327672 - RNA, 20 nt, Human
cugggaagugggcuggagcc

SEQ ID NO: 1327673 - RNA, 19 nt, Human
cugguuggagcaagugauc

SEQ ID NO: 1327674 - RNA, 21 nt, Human
cuuaagccaguuugggcuggu

SEQ ID NO: 1327675 - RNA, 18 nt, Human
cuuaggccaugcuggccu

SEQ ID NO: 1327676 - RNA, 19 nt, Human
cuucagccaucccuaguac

SEQ ID NO: 1327677 - RNA, 20 nt, Human
cuuggccuuggcuuggucuu

SEQ ID NO: 1327678 - RNA, 21 nt, Human
cuuggccuuggcuuggucuuc

SEQ ID NO: 1327679 - RNA, 18 nt, Human
cuuucucucuuccuuggg

SEQ ID NO: 1327680 - RNA, 22 nt, Human
gaaauucaaaagccaaaagcuu

SEQ ID NO: 1327681 - RNA, 18 nt, Human
gaacaagcuagcucuaaa

SEQ ID NO: 1327682 - RNA, 20 nt, Human
gaaggcugggguuugagucc

SEQ ID NO: 1327683 - RNA, 20 nt, Human
gaauuccagagagugcaggg

SEQ ID NO: 1327684 - RNA, 21 nt, Human
gacacuggaggcgagcgggcg

SEQ ID NO: 1327685 - RNA, 22 nt, Human
gacagggucuugcuuugucacc

SEQ ID NO: 1327686 - RNA, 24 nt, Human
gaccuccaagcaauccuucugccu

SEQ ID NO: 1327687 - RNA, 21 nt, Human
gaccuggcaaucgcucccccu

SEQ ID NO: 1327688 - RNA, 20 nt, Human
gagacagggucuugcuuugu

SEQ ID NO: 1327689 - RNA, 20 nt, Human
gagaucauggcucacuccag

SEQ ID NO: 1327690 - RNA, 23 nt, Human
gagcaagagguggacagagagga

SEQ ID NO: 1327691 - RNA, 24 nt, Human
gagcagcugagacuauaggcacgc

SEQ ID NO: 1327692 - RNA, 19 nt, Human
gaggaaacugaggcacaga

SEQ ID NO: 1327693 - RNA, 20 nt, Human
gaggucaccaggcaggggug

SEQ ID NO: 1327694 - RNA, 21 nt, Human
gauuauaggcaugagccacca

SEQ ID NO: 1327695 - RNA, 22 nt, Human
gauuauaggcaugagccaccac

SEQ ID NO: 1327696 - RNA, 24 nt, Human
gcaacacuaaaagcaggccagauc

SEQ ID NO: 1327697 - RNA, 20 nt, Human
gcagacacagcagccuccac

SEQ ID NO: 1327698 - RNA, 22 nt, Human
gcagagcaagagguggacagag

SEQ ID NO: 1327699 - RNA, 23 nt, Human
gcagagcaagagguggacagaga

SEQ ID NO: 1327700 - RNA, 18 nt, Human
gcaugugacucgagcugg

SEQ ID NO: 1327701 - RNA, 21 nt, Human
gcccacgggaaaccuccagga

SEQ ID NO: 1327702 - RNA, 23 nt, Human
gccccgcccacacaagcaguuuc

SEQ ID NO: 1327703 - RNA, 23 nt, Human
gccucagccucccaaaguguugg

SEQ ID NO: 1327704 - RNA, 20 nt, Human
gcggcccugaaacacugggc

SEQ ID NO: 1327705 - RNA, 24 nt, Human
ggaagugggcuggagccuuuggga

SEQ ID NO: 1327706 - RNA, 22 nt, Human
ggagcaccaauggaggucacca

SEQ ID NO: 1327707 - RNA, 22 nt, Human
ggaucucuagccuggugugucc

SEQ ID NO: 1327708 - RNA, 27 nt, Human
ggaugugcuguuccccacaaagagcag

SEQ ID NO: 1327709 - RNA, 19 nt, Human
ggauuauaggcaugagcca

SEQ ID NO: 1327710 - RNA, 19 nt, Human
ggcagacacagcagccucc

SEQ ID NO: 1327711 - RNA, 24 nt, Human
ggccaaucagagccuuccaugaga

SEQ ID NO: 1327712 - RNA, 22 nt, Human
ggcugggguuugaguccuggcc

SEQ ID NO: 1327713 - RNA, 24 nt, Human
ggcuggucuugaacuccugcacuc

SEQ ID NO: 1327714 - RNA, 18 nt, Human
gggagcugugcugaaagc

SEQ ID NO: 1327715 - RNA, 18 nt, Human
ggucaagguuacacagcu

SEQ ID NO: 1327716 - RNA, 22 nt, Human
ggucaggcuuaggccaugcugg

SEQ ID NO: 1327717 - RNA, 19 nt, Human
ggucuuccuuacacgaagc

SEQ ID NO: 1327718 - RNA, 23 nt, Human
ggugcaguugagaggccugagga

SEQ ID NO: 1327719 - RNA, 24 nt, Human
guagcagaugccaccauggauacc

SEQ ID NO: 1327720 - RNA, 20 nt, Human
guggguugcuucuguccugg

SEQ ID NO: 1327721 - RNA, 23 nt, Human
guguaaugugggcugggcgcaag

SEQ ID NO: 1327722 - RNA, 19 nt, Human
uaaauuuuacagcagggag

SEQ ID NO: 1327723 - RNA, 18 nt, Human
uaacugcucaccaagcac

SEQ ID NO: 1327724 - RNA, 23 nt, Human
uaagagaaaagcuagaaauucac

SEQ ID NO: 1327725 - RNA, 20 nt, Human
uaagcaaggccaggagacaa

SEQ ID NO: 1327726 - RNA, 19 nt, Human
uaagcuccuggauccagcc

SEQ ID NO: 1327727 - RNA, 23 nt, Human
uaaugcuuccacguggguccccg

SEQ ID NO: 1327728 - RNA, 20 nt, Human
uacaggggugagaucauggc

SEQ ID NO: 1327729 - RNA, 21 nt, Human
uacaggggugagaucauggcu

SEQ ID NO: 1327730 - RNA, 19 nt, Human
uacccagaaaacacaagca

SEQ ID NO: 1327731 - RNA, 18 nt, Human
uaccugaagcaagcccuc

SEQ ID NO: 1327732 - RNA, 24 nt, Human
uagacaccuuggccuuggcuuggu

SEQ ID NO: 1327733 - RNA, 22 nt, Human
uagagacagggucucacuaugu

SEQ ID NO: 1327734 - RNA, 19 nt, Human
uagagugugaauccugaaa

SEQ ID NO: 1327735 - RNA, 21 nt, Human
uagcagacuccccucccccca

SEQ ID NO: 1327736 - RNA, 18 nt, Human
uaggagagaaaggcaucu

SEQ ID NO: 1327737 - RNA, 22 nt, Human
uaggauaacaccuagucuuuaa

SEQ ID NO: 1327738 - RNA, 18 nt, Human
uaugguagacaccuuggc

SEQ ID NO: 1327739 - RNA, 24 nt, Human
uaugguagacaccuuggccuuggc

SEQ ID NO: 1327740 - RNA, 19 nt, Human
uauguugcccaggcugguc

SEQ ID NO: 1327741 - RNA, 23 nt, Human
uauguugcccaggcuggucuuga

SEQ ID NO: 1327742 - RNA, 24 nt, Human
uauguugcccaggcuggucuugaa

SEQ ID NO: 1327743 - RNA, 19 nt, Human
ucacugcaccucacugcaa

SEQ ID NO: 1327744 - RNA, 24 nt, Human
uccaagcaauccuucugccucagc

SEQ ID NO: 1327745 - RNA, 24 nt, Human
ucccaaaguguugggauuauaggc

SEQ ID NO: 1327746 - RNA, 23 nt, Human
ucccacuacaaccuauugaggua

SEQ ID NO: 1327747 - RNA, 22 nt, Human
uccguaaaaggcuucugugucc

SEQ ID NO: 1327748 - RNA, 18 nt, Human
uccugcugcggcuucugc

SEQ ID NO: 1327749 - RNA, 19 nt, Human
ucucacuauguugcccagg

SEQ ID NO: 1327750 - RNA, 23 nt, Human
ucucacuauguugcccaggcugg

SEQ ID NO: 1327751 - RNA, 24 nt, Human
ucucacuauguugcccaggcuggu

SEQ ID NO: 1327752 - RNA, 26 nt, Human
ucucacuauguugcccaggcuggucu

SEQ ID NO: 1327753 - RNA, 27 nt, Human
ucucacuauguugcccaggcuggucuu

SEQ ID NO: 1327754 - RNA, 20 nt, Human
ucuccagugugccuggcaac

SEQ ID NO: 1327755 - RNA, 20 nt, Human
ucucuguggcuuacaaccaa

SEQ ID NO: 1327756 - RNA, 24 nt, Human
ucugccucagccucccgagcagcu

SEQ ID NO: 1327757 - RNA, 20 nt, Human
ucuggaacaggcaguuccag

SEQ ID NO: 1327758 - RNA, 21 nt, Human
ucugugguccagcuucucuug

SEQ ID NO: 1327759 - RNA, 24 nt, Human
ucuguguucugggagcugugcuga

SEQ ID NO: 1327760 - RNA, 19 nt, Human
ucuugcuuugucacccagg

SEQ ID NO: 1327761 - RNA, 20 nt, Human
ucuugcuuugucacccagga

SEQ ID NO: 1327762 - RNA, 23 nt, Human
ucuugcuuugucacccaggauga

SEQ ID NO: 1327763 - RNA, 24 nt, Human
ucuugcuuugucacccaggaugaa

SEQ ID NO: 1327764 - RNA, 20 nt, Human
ugaaauuauaggcuuggggc

SEQ ID NO: 1327765 - RNA, 18 nt, Human
ugacacuuucucucuucc

SEQ ID NO: 1327766 - RNA, 21 nt, Human
ugaccccugacuggcugccuu

SEQ ID NO: 1327767 - RNA, 21 nt, Human
ugaccuccaagcaauccuucu

SEQ ID NO: 1327768 - RNA, 21 nt, Human
ugagacuauaggcacgcacca

SEQ ID NO: 1327769 - RNA, 24 nt, Human
ugagacuauaggcacgcaccacca

SEQ ID NO: 1327770 - RNA, 22 nt, Human
ugagacuccugccacgcagguc

SEQ ID NO: 1327771 - RNA, 21 nt, Human
ugagagcaggugguugguucc

SEQ ID NO: 1327772 - RNA, 18 nt, Human
ugaggauguguaaugugg

SEQ ID NO: 1327773 - RNA, 19 nt, Human
ugagguaggcacugcuauc

SEQ ID NO: 1327774 - RNA, 21 nt, Human
ugauaugggagcaauuaguuu

SEQ ID NO: 1327775 - RNA, 23 nt, Human
ugcaaucagaugccaagguaaac

SEQ ID NO: 1327776 - RNA, 19 nt, Human
ugcacagagccugaggcgg

SEQ ID NO: 1327777 - RNA, 21 nt, Human
ugcacagagccugaggcgggg

SEQ ID NO: 1327778 - RNA, 23 nt, Human
ugcagagucaagaggccugggug

SEQ ID NO: 1327779 - RNA, 21 nt, Human
ugcagcagagaugagccccaa

SEQ ID NO: 1327780 - RNA, 21 nt, Human
ugccaccauggauaccugcug

SEQ ID NO: 1327781 - RNA, 24 nt, Human
ugcccaggcuggucuugaacuccu

SEQ ID NO: 1327782 - RNA, 20 nt, Human
ugccccagggcagacacagc

SEQ ID NO: 1327783 - RNA, 22 nt, Human
ugccccagggcagacacagcag

SEQ ID NO: 1327784 - RNA, 23 nt, Human
ugccccagggcagacacagcagc

SEQ ID NO: 1327785 - RNA, 24 nt, Human
ugccucagccucccgagcagcuga

SEQ ID NO: 1327786 - RNA, 21 nt, Human
ugcggccaggacagcugugga

SEQ ID NO: 1327787 - RNA, 26 nt, Human
ugcuuaagccaguuugggcugguuuu

SEQ ID NO: 1327788 - RNA, 19 nt, Human
ugcuuuguugcuuaagcca

SEQ ID NO: 1327789 - RNA, 22 nt, Human
uggaagaaagaaugaggucagc

SEQ ID NO: 1327790 - RNA, 18 nt, Human
uggauaccugcugguucu

SEQ ID NO: 1327791 - RNA, 21 nt, Human
uggcaaucccuuccuuggauu

SEQ ID NO: 1327792 - RNA, 24 nt, Human
uggcucacuccagccuugaccucc

SEQ ID NO: 1327793 - RNA, 20 nt, Human
uggcucaguuacugcagcag

SEQ ID NO: 1327794 - RNA, 22 nt, Human
ugggaagugggcuggagccuuu

SEQ ID NO: 1327795 - RNA, 18 nt, Human
ugggagcugugcugaaag

SEQ ID NO: 1327796 - RNA, 18 nt, Human
ugggauuauaggcaugag

SEQ ID NO: 1327797 - RNA, 19 nt, Human
ugggauuauaggcaugagc

SEQ ID NO: 1327798 - RNA, 22 nt, Human
ugggauuauaggcaugagccac

SEQ ID NO: 1327799 - RNA, 23 nt, Human
ugggauuauaggcaugagccacc

SEQ ID NO: 1327800 - RNA, 24 nt, Human
ugggauuauaggcaugagccacca

SEQ ID NO: 1327801 - RNA, 19 nt, Human
ugggcaaggcucucuccca

SEQ ID NO: 1327802 - RNA, 21 nt, Human
ugggcagcaucuaggccuggg

SEQ ID NO: 1327803 - RNA, 21 nt, Human
ugggguagggacuggcguggc

SEQ ID NO: 1327804 - RNA, 22 nt, Human
ugggguagggacuggcguggcc

SEQ ID NO: 1327805 - RNA, 22 nt, Human
ugguagacaccuuggccuuggc

SEQ ID NO: 1327806 - RNA, 22 nt, Human
ugguccagauugggcaugaccc

SEQ ID NO: 1327807 - RNA, 18 nt, Human
uggucuugaacuccugca

SEQ ID NO: 1327808 - RNA, 20 nt, Human
uggugaccccugacuggcug

SEQ ID NO: 1327809 - RNA, 24 nt, Human
uguagagacagggucucacuaugu

SEQ ID NO: 1327810 - RNA, 18 nt, Human
ugugacucgagcugggcc

SEQ ID NO: 1327811 - RNA, 21 nt, Human
uucaagagcccugacaccacc

SEQ ID NO: 1327812 - RNA, 21 nt, Human
uucaucccacuacaaccuauu

SEQ ID NO: 1327813 - RNA, 19 nt, Human
uucaugcaacaauagugac

SEQ ID NO: 1327814 - RNA, 19 nt, Human
uuccuggcccugcauugcu

SEQ ID NO: 1327815 - RNA, 22 nt, Human
uucuguguccuucucuggggcu

SEQ ID NO: 1327816 - RNA, 19 nt, Human
uucuguguucugggagcug

SEQ ID NO: 1327817 - RNA, 21 nt, Human
uucuguguucugggagcugug

SEQ ID NO: 1327818 - RNA, 18 nt, Human
uucuucuuuuuuugagac

SEQ ID NO: 1327819 - RNA, 24 nt, Human
uucuuuuuuugagacagggucuug

SEQ ID NO: 1327820 - RNA, 18 nt, Human
uugaagcaccugggcaug

SEQ ID NO: 1327821 - RNA, 21 nt, Human
uugggauuauaggcaugagcc

SEQ ID NO: 1327822 - RNA, 18 nt, Human
uuugggcugguuuucccu

SEQ ID NO: 1327823 - RNA, 18 nt, Human
uuuguagagacagggucu

SEQ ID NO: 1327824 - RNA, 24 nt, Human
uuuguagagacagggucucacuau

SEQ ID NO: 1327825 - RNA, 19 nt, Human
aaacaggucuguaaacaug

SEQ ID NO: 1327826 - RNA, 20 nt, Human
aaacaugaucucaucccccc

SEQ ID NO: 1327827 - RNA, 23 nt, Human
aacaugaucucauccccccaucc

SEQ ID NO: 1327828 - RNA, 18 nt, Human
acaagugcuaucaggaac

SEQ ID NO: 1327829 - RNA, 21 nt, Human
acccagaugguccacgccagu

SEQ ID NO: 1327830 - RNA, 20 nt, Human
agccaggggugcuggccagg

SEQ ID NO: 1327831 - RNA, 18 nt, Human
caaaacaggucuguaaac

SEQ ID NO: 1327832 - RNA, 24 nt, Human
caagugauuaaaaaacuucuuggc

SEQ ID NO: 1327833 - RNA, 22 nt, Human
caggaaggcagacucgucccuu

SEQ ID NO: 1327834 - RNA, 21 nt, Human
caggggcugaggacacccaga

SEQ ID NO: 1327835 - RNA, 20 nt, Human
caguggccuugaaauuuccc

SEQ ID NO: 1327836 - RNA, 25 nt, Human
caucccuucuuccaaggagcuuccu

SEQ ID NO: 1327837 - RNA, 23 nt, Human
ccaggugaggggcugaggcacaa

SEQ ID NO: 1327838 - RNA, 19 nt, Human
ccccaggaggagggagacu

SEQ ID NO: 1327839 - RNA, 21 nt, Human
cucauccccccaucccuucuu

SEQ ID NO: 1327840 - RNA, 24 nt, Human
cugguucguuggcagccccuuccc

SEQ ID NO: 1327841 - RNA, 22 nt, Human
gacacaggcaggcgaaaagcag

SEQ ID NO: 1327842 - RNA, 19 nt, Human
gacucgucccuuuaaccca

SEQ ID NO: 1327843 - RNA, 23 nt, Human
ggaggagggagacucuuuggcag

SEQ ID NO: 1327844 - RNA, 23 nt, Human
ggaugacaaaacaggucuguaaa

SEQ ID NO: 1327845 - RNA, 19 nt, Human
ggcagccccuuccccagga

SEQ ID NO: 1327846 - RNA, 22 nt, Human
gucugguucguuggcagccccu

SEQ ID NO: 1327847 - RNA, 23 nt, Human
ucacugagucugguucguuggca

SEQ ID NO: 1327848 - RNA, 24 nt, Human
uccacacaccaccugguggcuccc

SEQ ID NO: 1327849 - RNA, 18 nt, Human
uccccugcagaagccaga

SEQ ID NO: 1327850 - RNA, 19 nt, Human
ucugucaugacguggucac

SEQ ID NO: 1327851 - RNA, 21 nt, Human
ugaggacacccagauggucca

SEQ ID NO: 1327852 - RNA, 20 nt, Human
ugaggggcugaggcacaagu

SEQ ID NO: 1327853 - RNA, 27 nt, Human
ugaggggcugaggcacaagugcuauca

SEQ ID NO: 1327854 - RNA, 23 nt, Human
ugaggucuguagaaaaggggucc

SEQ ID NO: 1327855 - RNA, 19 nt, Human
ugccccacaggggcugagg

SEQ ID NO: 1327856 - RNA, 24 nt, Human
ugcccuggcagguggccaggugag

SEQ ID NO: 1327857 - RNA, 23 nt, Human
ugcggcagcccucccgggggcac

SEQ ID NO: 1327858 - RNA, 24 nt, Human
ugcggcagcccucccgggggcacg

SEQ ID NO: 1327859 - RNA, 22 nt, Human
ugcuaggguugcaggugcccug

SEQ ID NO: 1327860 - RNA, 21 nt, Human
uggcagcaggaugacaaaaga

SEQ ID NO: 1327861 - RNA, 19 nt, Human
uguaaacaugaucucaucc

SEQ ID NO: 1327862 - RNA, 21 nt, Human
uucuuggcagcaggaugacaa

SEQ ID NO: 1327863 - RNA, 25 nt, Human
aggcuucugaccuaacuaugaguuu

SEQ ID NO: 1327864 - RNA, 19 nt, Human
caggcuucugaccuaacua

SEQ ID NO: 1327865 - RNA, 21 nt, Human
cgaccagaaaauucccuuguc

SEQ ID NO: 1327866 - RNA, 18 nt, Human
cgggacuguggggagagg

SEQ ID NO: 1327867 - RNA, 21 nt, Human
cuaugaguuuccuccgcgcau

SEQ ID NO: 1327868 - RNA, 21 nt, Human
cuuaggaagagaagccggaaa

SEQ ID NO: 1327869 - RNA, 22 nt, Human
gacaggaaaacgggacuguggg

SEQ ID NO: 1327870 - RNA, 18 nt, Human
gacuguggggagagggug

SEQ ID NO: 1327871 - RNA, 19 nt, Human
gcagacccuccuuaggaag

SEQ ID NO: 1327872 - RNA, 22 nt, Human
gcagacgggccgcagacccucc

SEQ ID NO: 1327873 - RNA, 21 nt, Human
gcgcguuaacaauucugauuc

SEQ ID NO: 1327874 - RNA, 25 nt, Human
ggacaggaaaacgggacugugggga

SEQ ID NO: 1327875 - RNA, 20 nt, Human
ggacuguggggagagggugg

SEQ ID NO: 1327876 - RNA, 22 nt, Human
uacagcaguaacacucaguggu

SEQ ID NO: 1327877 - RNA, 18 nt, Human
uaggaagagaagccggaa

SEQ ID NO: 1327878 - RNA, 19 nt, Human
uaugaguuuccuccgcgca

SEQ ID NO: 1327879 - RNA, 21 nt, Human
ucaguggugucccugccuucc

SEQ ID NO: 1327880 - RNA, 22 nt, Human
ucaguggugucccugccuuccu

SEQ ID NO: 1327881 - RNA, 19 nt, Human
ucaugugcaguuagaaucc

SEQ ID NO: 1327882 - RNA, 25 nt, Human
ucccuugucuugccaggcuucugac

SEQ ID NO: 1327883 - RNA, 19 nt, Human
ugccaggcuucugaccuaa

SEQ ID NO: 1327884 - RNA, 21 nt, Human
ugcccugcucuggccccuaaa

SEQ ID NO: 1327885 - RNA, 18 nt, Human
ugggucucaguguuccuu

SEQ ID NO: 1327886 - RNA, 23 nt, Human
uguggggagaggguggugcagac

SEQ ID NO: 1327887 - RNA, 18 nt, Human
aaaaaaaaaaagagaaca

SEQ ID NO: 1327888 - RNA, 23 nt, Human
aaaaaaaaaaagagaacagagga

SEQ ID NO: 1327889 - RNA, 19 nt, Human
aaaaaaaagagaacagagg

SEQ ID NO: 1327890 - RNA, 19 nt, Human
aaaaagaaaaaaaaaaaga

SEQ ID NO: 1327891 - RNA, 21 nt, Human
aaaagaaaaaaaaaaagagaa

SEQ ID NO: 1327892 - RNA, 23 nt, Human
aaacagccagauaggaucuaaau

SEQ ID NO: 1327893 - RNA, 23 nt, Human
aaagauguacacucuuuaucuuc

SEQ ID NO: 1327894 - RNA, 19 nt, Human
aaccagaaagauguacacu

SEQ ID NO: 1327895 - RNA, 19 nt, Human
aagacaccaaauuccagcc

SEQ ID NO: 1327896 - RNA, 18 nt, Human
aagagaacagaggaccca

SEQ ID NO: 1327897 - RNA, 20 nt, Human
aagaggggcugcagagaggc

SEQ ID NO: 1327898 - RNA, 19 nt, Human
aagcagaaggcaggagaga

SEQ ID NO: 1327899 - RNA, 24 nt, Human
aagcagaaggcaggagagacagag

SEQ ID NO: 1327900 - RNA, 19 nt, Human
aagcaggcguucagcuuug

SEQ ID NO: 1327901 - RNA, 23 nt, Human
aaggaaccaugcucuucacgagc

SEQ ID NO: 1327902 - RNA, 19 nt, Human
aauaaaccaucuacuaaga

SEQ ID NO: 1327903 - RNA, 23 nt, Human
accaaauuccagccuggcuguag

SEQ ID NO: 1327904 - RNA, 20 nt, Human
accacagcuccuucucagca

SEQ ID NO: 1327905 - RNA, 23 nt, Human
accccauaaaccacacaugacuc

SEQ ID NO: 1327906 - RNA, 18 nt, Human
agacagauaaacugagga

SEQ ID NO: 1327907 - RNA, 21 nt, Human
agauuuaaaaagaaaaaaaaa

SEQ ID NO: 1327908 - RNA, 20 nt, Human
agccauagccaucucucuca

SEQ ID NO: 1327909 - RNA, 21 nt, Human
cacagcuaagccucucuccuc

SEQ ID NO: 1327910 - RNA, 27 nt, Human
cacaugacagagagcaggcccacaugg

SEQ ID NO: 1327911 - RNA, 18 nt, Human
cacaugcaucaagcccca

SEQ ID NO: 1327912 - RNA, 21 nt, Human
caccauagcuugauucauauu

SEQ ID NO: 1327913 - RNA, 19 nt, Human
caccauauaaagcaugggu

SEQ ID NO: 1327914 - RNA, 22 nt, Human
cacccugagacuugguggugga

SEQ ID NO: 1327915 - RNA, 23 nt, Human
caccuaggccaacugaggguuca

SEQ ID NO: 1327916 - RNA, 21 nt, Human
cagacagauaaacugaggaug

SEQ ID NO: 1327917 - RNA, 18 nt, Human
cagcagcaauacgagaag

SEQ ID NO: 1327918 - RNA, 26 nt, Human
cagcuaagccucucuccucauggucc

SEQ ID NO: 1327919 - RNA, 19 nt, Human
cauccucgccccucaagag

SEQ ID NO: 1327920 - RNA, 18 nt, Human
cauuuucccaaccucacc

SEQ ID NO: 1327921 - RNA, 18 nt, Human
ccagagcacauucccagg

SEQ ID NO: 1327922 - RNA, 19 nt, Human
ccagagcacauucccaggg

SEQ ID NO: 1327923 - RNA, 23 nt, Human
ccagagcacauucccagggaucu

SEQ ID NO: 1327924 - RNA, 18 nt, Human
ccaggaacugaaaaacca

SEQ ID NO: 1327925 - RNA, 19 nt, Human
cccacugggaaagugggga

SEQ ID NO: 1327926 - RNA, 19 nt, Human
cccauaaaccacacaugac

SEQ ID NO: 1327927 - RNA, 25 nt, Human
ccgcccagagcacauucccagggau

SEQ ID NO: 1327928 - RNA, 18 nt, Human
ccgccugagcccaacccc

SEQ ID NO: 1327929 - RNA, 23 nt, Human
ccucaagagggcugagaaaagga

SEQ ID NO: 1327930 - RNA, 18 nt, Human
ccucagaaacacacagcu

SEQ ID NO: 1327931 - RNA, 28 nt, Human
ccucagaaacacacagcuaagccucucu

SEQ ID NO: 1327932 - RNA, 20 nt, Human
ccucagcauccucgccccuc

SEQ ID NO: 1327933 - RNA, 18 nt, Human
ccugagauaggugcuggg

SEQ ID NO: 1327934 - RNA, 23 nt, Human
ccugagcccaaccccggcucagc

SEQ ID NO: 1327935 - RNA, 18 nt, Human
cgacuucaguccucagca

SEQ ID NO: 1327936 - RNA, 21 nt, Human
cggaguuucucuucuuccugu

SEQ ID NO: 1327937 - RNA, 20 nt, Human
cucagcaccucuaugagugc

SEQ ID NO: 1327938 - RNA, 19 nt, Human
cuccugaaagucaggcgug

SEQ ID NO: 1327939 - RNA, 23 nt, Human
cucuuuaucuucucggcuggagg

SEQ ID NO: 1327940 - RNA, 23 nt, Human
cugagauaggugcugggacccac

SEQ ID NO: 1327941 - RNA, 18 nt, Human
gaaggaaaagaggggcug

SEQ ID NO: 1327942 - RNA, 21 nt, Human
gacuccacuuugcugaaauag

SEQ ID NO: 1327943 - RNA, 24 nt, Human
gagccauagccaucucucucaugc

SEQ ID NO: 1327944 - RNA, 24 nt, Human
gccuugugccauuuucccaaccuc

SEQ ID NO: 1327945 - RNA, 22 nt, Human
gcggaacugaacuagccuccaa

SEQ ID NO: 1327946 - RNA, 22 nt, Human
ggaacugaaaaaccacagucug

SEQ ID NO: 1327947 - RNA, 22 nt, Human
ggaagagagggagcuuuggagc

SEQ ID NO: 1327948 - RNA, 20 nt, Human
gggaaaguggggaugagggg

SEQ ID NO: 1327949 - RNA, 18 nt, Human
gggagagagagaauaagc

SEQ ID NO: 1327950 - RNA, 18 nt, Human
ggggcugcagagaggcuc

SEQ ID NO: 1327951 - RNA, 19 nt, Human
gucugccucaucuuucucc

SEQ ID NO: 1327952 - RNA, 28 nt, Human
gugcagccagggugggaagagagggagc

SEQ ID NO: 1327953 - RNA, 21 nt, Human
uaaacugaggaugcuaggagc

SEQ ID NO: 1327954 - RNA, 19 nt, Human
uaaauuggcuguguuucug

SEQ ID NO: 1327955 - RNA, 18 nt, Human
uaagacaccaaauuccag

SEQ ID NO: 1327956 - RNA, 27 nt, Human
uaccccauaaaccacacaugacuccaa

SEQ ID NO: 1327957 - RNA, 24 nt, Human
uacccuuggagaaaugcugcauuu

SEQ ID NO: 1327958 - RNA, 19 nt, Human
uaggaaagauggugcagug

SEQ ID NO: 1327959 - RNA, 20 nt, Human
uaguauagcaucacaugaca

SEQ ID NO: 1327960 - RNA, 21 nt, Human
ucagaaccacagcuccuucuc

SEQ ID NO: 1327961 - RNA, 20 nt, Human
uccacaguacugaugaucaa

SEQ ID NO: 1327962 - RNA, 24 nt, Human
ucccucuggucaugaaaauggccc

SEQ ID NO: 1327963 - RNA, 24 nt, Human
ucugcaaagcaaaacuuuuuaacc

SEQ ID NO: 1327964 - RNA, 23 nt, Human
ugaagcuucuguagguuuccaga

SEQ ID NO: 1327965 - RNA, 24 nt, Human
ugaaggaaaagaggggcugcagag

SEQ ID NO: 1327966 - RNA, 18 nt, Human
ugagaaaaggaaccaugc

SEQ ID NO: 1327967 - RNA, 21 nt, Human
ugaucaaagcaguaacagcag

SEQ ID NO: 1327968 - RNA, 21 nt, Human
ugcauggcgaaugcauuugaa

SEQ ID NO: 1327969 - RNA, 18 nt, Human
ugccauagguaaaaaauu

SEQ ID NO: 1327970 - RNA, 24 nt, Human
ugccucaucuuucucccuguccgc

SEQ ID NO: 1327971 - RNA, 20 nt, Human
ugcuaggagcucagcagcaa

SEQ ID NO: 1327972 - RNA, 19 nt, Human
ugggaaaguggggaugagg

SEQ ID NO: 1327973 - RNA, 19 nt, Human
ugggaaggccagaaucaua

SEQ ID NO: 1327974 - RNA, 18 nt, Human
uguccggguccaguacag

SEQ ID NO: 1327975 - RNA, 21 nt, Human
uguccggguccaguacagugu

SEQ ID NO: 1327976 - RNA, 23 nt, Human
uucacagacagauaaacugagga

SEQ ID NO: 1327977 - RNA, 23 nt, Human
uucccaaccucaccauauaaagc

SEQ ID NO: 1327978 - RNA, 20 nt, Human
uugaacagaucccucugguc

SEQ ID NO: 1327979 - RNA, 18 nt, Human
uugagguucaggagaagc

SEQ ID NO: 1327980 - RNA, 21 nt, Human
uugugccaaccugcugucugg

SEQ ID NO: 1327981 - RNA, 24 nt, Human
uuuaaaaagaaaaaaaaaaagaga

SEQ ID NO: 1327982 - RNA, 22 nt, Human
uuuaaccagaaagauguacacu

SEQ ID NO: 1327983 - RNA, 19 nt, Human
uuugagguucaggagaagc

SEQ ID NO: 1327984 - RNA, 23 nt, Human
uuuuaaccagaaagauguacacu

SEQ ID NO: 1327985 - RNA, 20 nt, Human
aaacaggagccggcagggcu

SEQ ID NO: 1327986 - RNA, 18 nt, Human
accuugcuggacuccaca

SEQ ID NO: 1327987 - RNA, 22 nt, Human
auacacgaguuuugauaccaca

SEQ ID NO: 1327988 - RNA, 21 nt, Human
cacaguguggugcagacaaga

SEQ ID NO: 1327989 - RNA, 22 nt, Human
caggagccggcagggcugggcu

SEQ ID NO: 1327990 - RNA, 22 nt, Human
cccugagucaccuugcuggacu

SEQ ID NO: 1327991 - RNA, 23 nt, Human
cccugagucaccuugcuggacuc

SEQ ID NO: 1327992 - RNA, 24 nt, Human
cuuuggaaucuuugaggauaaaca

SEQ ID NO: 1327993 - RNA, 18 nt, Human
ggucauuuuuagcuggcu

SEQ ID NO: 1327994 - RNA, 22 nt, Human
uaaacaggagccggcagggcug

SEQ ID NO: 1327995 - RNA, 21 nt, Human
uccccuggagggcaggaccca

SEQ ID NO: 1327996 - RNA, 19 nt, Human
ucucuagcggaagccgugg

SEQ ID NO: 1327997 - RNA, 18 nt, Human
ugggagccuuugaacagg

SEQ ID NO: 1327998 - RNA, 19 nt, Human
auccauucaucaacccaca

SEQ ID NO: 1327999 - RNA, 23 nt, Human
caaaaugagcacugugugagcug

SEQ ID NO: 1328000 - RNA, 18 nt, Human
cacugugugagcugaggu

SEQ ID NO: 1328001 - RNA, 20 nt, Human
cccacaaaaugagcacugug

SEQ ID NO: 1328002 - RNA, 19 nt, Human
ucaacccacaaaaugagca

SEQ ID NO: 1328003 - RNA, 22 nt, Human
aaaacacugcccaaauguugcc

SEQ ID NO: 1328004 - RNA, 24 nt, Human
aaccugacggggagcaggggccca

SEQ ID NO: 1328005 - RNA, 22 nt, Human
aagcugagggcccaaaagugga

SEQ ID NO: 1328006 - RNA, 20 nt, Human
aaggagcagcauccaggagg

SEQ ID NO: 1328007 - RNA, 19 nt, Human
aagggagagaagagggaga

SEQ ID NO: 1328008 - RNA, 24 nt, Human
acauaggucagagacagcacaacc

SEQ ID NO: 1328009 - RNA, 20 nt, Human
accucagcaccuugaguccg

SEQ ID NO: 1328010 - RNA, 21 nt, Human
agaaaaaagauucaaggagca

SEQ ID NO: 1328011 - RNA, 25 nt, Human
agacagcacaaccugacggggagca

SEQ ID NO: 1328012 - RNA, 19 nt, Human
agacagugccacagagccc

SEQ ID NO: 1328013 - RNA, 24 nt, Human
agcaggcaugucacagcccugggu

SEQ ID NO: 1328014 - RNA, 21 nt, Human
aggacaggccgcuuaucuccc

SEQ ID NO: 1328015 - RNA, 19 nt, Human
aggagaggguccugcccag

SEQ ID NO: 1328016 - RNA, 24 nt, Human
aggaggcagaaaccccucggggau

SEQ ID NO: 1328017 - RNA, 19 nt, Human
aggcagcaguggccaggug

SEQ ID NO: 1328018 - RNA, 20 nt, Human
aggcaugucacagcccuggg

SEQ ID NO: 1328019 - RNA, 22 nt, Human
aggcaugucacagcccugggug

SEQ ID NO: 1328020 - RNA, 20 nt, Human
agggaggucgggaaaguggg

SEQ ID NO: 1328021 - RNA, 20 nt, Human
agggaucuggggcccagggc

SEQ ID NO: 1328022 - RNA, 23 nt, Human
aggucagagacagcacaaccuga

SEQ ID NO: 1328023 - RNA, 23 nt, Human
agugaccaggcccaggggaagga

SEQ ID NO: 1328024 - RNA, 21 nt, Human
cacaaccugacggggagcagg

SEQ ID NO: 1328025 - RNA, 19 nt, Human
cacaggccagaauccccau

SEQ ID NO: 1328026 - RNA, 21 nt, Human
cacccaugacuccuugaaagc

SEQ ID NO: 1328027 - RNA, 20 nt, Human
caccccugcugugccccacu

SEQ ID NO: 1328028 - RNA, 23 nt, Human
cagaaaucccucacuuaaacauc

SEQ ID NO: 1328029 - RNA, 25 nt, Human
cagacagagggcaggugggcaugga

SEQ ID NO: 1328030 - RNA, 24 nt, Human
cagcacaaccugacggggagcaau

SEQ ID NO: 1328031 - RNA, 19 nt, Human
cagcaggccucggugucug

SEQ ID NO: 1328032 - RNA, 20 nt, Human
cagcaguggccaggugagca

SEQ ID NO: 1328033 - RNA, 25 nt, Human
cagcccaggccuuggccucgagggc

SEQ ID NO: 1328034 - RNA, 25 nt, Human
caggccagaauccccauggaaagcg

SEQ ID NO: 1328035 - RNA, 20 nt, Human
cauugugcaacaggaaggau

SEQ ID NO: 1328036 - RNA, 29 nt, Human
ccaggccuuggccucgagggcuccugacc

SEQ ID NO: 1328037 - RNA, 18 nt, Human
cccaaauguugccuacuc

SEQ ID NO: 1328038 - RNA, 19 nt, Human
cccacagcaagcugcugga

SEQ ID NO: 1328039 - RNA, 18 nt, Human
cccacauuccagcgaggc

SEQ ID NO: 1328040 - RNA, 25 nt, Human
cccccaccgcugaccccucccccag

SEQ ID NO: 1328041 - RNA, 19 nt, Human
ccccccgggggcaaggggg

SEQ ID NO: 1328042 - RNA, 21 nt, Human
ccccccgggggcaaggggggc

SEQ ID NO: 1328043 - RNA, 18 nt, Human
ccccgggggcaagggggg

SEQ ID NO: 1328044 - RNA, 24 nt, Human
cccugggugcccagcauccgaccc

SEQ ID NO: 1328045 - RNA, 18 nt, Human
ccugcuucgagugugggg

SEQ ID NO: 1328046 - RNA, 21 nt, Human
ccuggccugaccuucacugac

SEQ ID NO: 1328047 - RNA, 19 nt, Human
cgacccaagggugcagcag

SEQ ID NO: 1328048 - RNA, 29 nt, Human
cgggggcaaggggggcaguggggaagucc

SEQ ID NO: 1328049 - RNA, 23 nt, Human
cucccccauguacugucuggcag

SEQ ID NO: 1328050 - RNA, 25 nt, Human
cucuuagguuucccauugugcaaca

SEQ ID NO: 1328051 - RNA, 24 nt, Human
cuugaaagcuccuucucccaggag

SEQ ID NO: 1328052 - RNA, 18 nt, Human
cuugaguccgaggagggg

SEQ ID NO: 1328053 - RNA, 24 nt, Human
gaagacagugccacagagcccaag

SEQ ID NO: 1328054 - RNA, 20 nt, Human
gaccuggguggggaggaggc

SEQ ID NO: 1328055 - RNA, 25 nt, Human
gagaggguccugcccagaccgggga

SEQ ID NO: 1328056 - RNA, 19 nt, Human
gagagucuucuccaggaag

SEQ ID NO: 1328057 - RNA, 18 nt, Human
gagcagcauccaggagga

SEQ ID NO: 1328058 - RNA, 21 nt, Human
gcagaaaccccucggggaugu

SEQ ID NO: 1328059 - RNA, 24 nt, Human
gcaggggacagggugauguacgga

SEQ ID NO: 1328060 - RNA, 23 nt, Human
gcaggugggcauggaaucccucg

SEQ ID NO: 1328061 - RNA, 19 nt, Human
ggaaggagggggcccaggc

SEQ ID NO: 1328062 - RNA, 23 nt, Human
ggacaggccgcuuaucuccccca

SEQ ID NO: 1328063 - RNA, 19 nt, Human
ggagauggccuguagcccc

SEQ ID NO: 1328064 - RNA, 20 nt, Human
ggcugggcaagcaggccccu

SEQ ID NO: 1328065 - RNA, 18 nt, Human
gggaaggagaggguccug

SEQ ID NO: 1328066 - RNA, 23 nt, Human
gggaaggagaggguccugcccag

SEQ ID NO: 1328067 - RNA, 18 nt, Human
gggaaggagggggcccag

SEQ ID NO: 1328068 - RNA, 20 nt, Human
gggcaagcaggccccugucu

SEQ ID NO: 1328069 - RNA, 25 nt, Human
gggcaagcaggccccugucuuuuuc

SEQ ID NO: 1328070 - RNA, 21 nt, Human
gggcaggugggcauggaaucc

SEQ ID NO: 1328071 - RNA, 20 nt, Human
ggggaaggagggggcccagg

SEQ ID NO: 1328072 - RNA, 21 nt, Human
gguauagaaagaugggaagga

SEQ ID NO: 1328073 - RNA, 23 nt, Human
ggucgggaaagugggguacacug

SEQ ID NO: 1328074 - RNA, 25 nt, Human
ggugcagcaggccucggugucugcu

SEQ ID NO: 1328075 - RNA, 21 nt, Human
guaagggagagaagagggaga

SEQ ID NO: 1328076 - RNA, 22 nt, Human
gucgggaaagugggguacacug

SEQ ID NO: 1328077 - RNA, 22 nt, Human
gugaacucaaauauacagucac

SEQ ID NO: 1328078 - RNA, 18 nt, Human
guggaaugcugugguccc

SEQ ID NO: 1328079 - RNA, 24 nt, Human
guggaggggagucagaggccuaca

SEQ ID NO: 1328080 - RNA, 21 nt, Human
uaggucagagacagcacaacc

SEQ ID NO: 1328081 - RNA, 30 nt, Human
uaucucccccaccgcugaccccucccccaa

SEQ ID NO: 1328082 - RNA, 18 nt, Human
uaugagcuuccagaaauc

SEQ ID NO: 1328083 - RNA, 19 nt, Human
ucaccagggaucuggggcc

SEQ ID NO: 1328084 - RNA, 21 nt, Human
uccagcgaggcagacagaggg

SEQ ID NO: 1328085 - RNA, 22 nt, Human
uccaggaaggugucaccaggga

SEQ ID NO: 1328086 - RNA, 20 nt, Human
uccaggaggagaccaugacc

SEQ ID NO: 1328087 - RNA, 24 nt, Human
uccccugaaaguccuucuccccca

SEQ ID NO: 1328088 - RNA, 18 nt, Human
uccuggguuuggaccugc

SEQ ID NO: 1328089 - RNA, 22 nt, Human
ucucaccccugcugugccccac

SEQ ID NO: 1328090 - RNA, 20 nt, Human
ucugaccccgaccuucacug

SEQ ID NO: 1328091 - RNA, 21 nt, Human
ucugugucugaccccgaccuu

SEQ ID NO: 1328092 - RNA, 20 nt, Human
ucuucaaaacacugcccaaa

SEQ ID NO: 1328093 - RNA, 20 nt, Human
ugacuccuugaaagcuccuu

SEQ ID NO: 1328094 - RNA, 19 nt, Human
ugacucuauucucaccccu

SEQ ID NO: 1328095 - RNA, 20 nt, Human
ugagcaagcaaaauaggcuc

SEQ ID NO: 1328096 - RNA, 18 nt, Human
ugaguccgaggaggggag

SEQ ID NO: 1328097 - RNA, 18 nt, Human
ugcaaugguccccugccc

SEQ ID NO: 1328098 - RNA, 21 nt, Human
ugcaaugguccccugcccgag

SEQ ID NO: 1328099 - RNA, 29 nt, Human
ugcccagaccggggaugcucacaaggggg

SEQ ID NO: 1328100 - RNA, 21 nt, Human
ugcccgagauaagcugagggc

SEQ ID NO: 1328101 - RNA, 18 nt, Human
ugcugaauggauaaggca

SEQ ID NO: 1328102 - RNA, 20 nt, Human
ugcuggaccacacccugacc

SEQ ID NO: 1328103 - RNA, 19 nt, Human
uggaaagcguaccuaacuu

SEQ ID NO: 1328104 - RNA, 20 nt, Human
uggccucgagggcuccugac

SEQ ID NO: 1328105 - RNA, 21 nt, Human
uggguggggaggaggcagaaa

SEQ ID NO: 1328106 - RNA, 21 nt, Human
ugucauucuucaaaacacugc

SEQ ID NO: 1328107 - RNA, 25 nt, Human
uguggggaguuauugcuggugaacu

SEQ ID NO: 1328108 - RNA, 22 nt, Human
uuccagcgaggcagacagaggg

SEQ ID NO: 1328109 - RNA, 22 nt, Human
agcgcagaggagaaccuguguu

SEQ ID NO: 1328110 - RNA, 22 nt, Human
cagaggagaaccuguguuccac

SEQ ID NO: 1328111 - RNA, 24 nt, Human
gcagaggagaaccuguguuccaca

SEQ ID NO: 1328112 - RNA, 22 nt, Human
gguagguagguuaucaugagau

SEQ ID NO: 1328113 - RNA, 21 nt, Human
guagguagguuaucaugagau

SEQ ID NO: 1328114 - RNA, 23 nt, Human
guagguuaucaugagaugcugcu

SEQ ID NO: 1328115 - RNA, 19 nt, Human
uagguuaucaugagaugcu

SEQ ID NO: 1328116 - RNA, 18 nt, Human
uauccacacagcgcagag

SEQ ID NO: 1328117 - RNA, 19 nt, Human
uccacagagguaugguagg

SEQ ID NO: 1328118 - RNA, 23 nt, Human
aagcauuuaacuugggcugcaau

SEQ ID NO: 1328119 - RNA, 20 nt, Human
acuuugcauccugaucuccu

SEQ ID NO: 1328120 - RNA, 19 nt, Human
caaccccugaaauccgacu

SEQ ID NO: 1328121 - RNA, 21 nt, Human
ccccugaaauccgacuguggg

SEQ ID NO: 1328122 - RNA, 23 nt, Human
cgacugugggccugauccucagu

SEQ ID NO: 1328123 - RNA, 22 nt, Human
uaagcauuuaacuugggcugca

SEQ ID NO: 1328124 - RNA, 30 nt, Human
uccuuugucuugcucauucuguuuccaauu

SEQ ID NO: 1328125 - RNA, 20 nt, Human
ucugcaaccccugaaauccg

SEQ ID NO: 1328126 - RNA, 18 nt, Human
ugcaaccccugaaauccg

SEQ ID NO: 1328127 - RNA, 20 nt, Human
ugucuugcucauucuguuuc

SEQ ID NO: 1328128 - RNA, 22 nt, Human
ugucuugcucauucuguuucca

SEQ ID NO: 1328129 - RNA, 22 nt, Human
uugaguuuucucagaggcccau

SEQ ID NO: 1328130 - RNA, 25 nt, Human
uuugcauccugaucuccuuugucuu

SEQ ID NO: 1328131 - RNA, 22 nt, Human
agaaagacagauguugagcugg

SEQ ID NO: 1328132 - RNA, 24 nt, Human
cagaaacagauaagaaagacagau

SEQ ID NO: 1328133 - RNA, 24 nt, Human
cuggacuacccuuagaucaccaug

SEQ ID NO: 1328134 - RNA, 18 nt, Human
gaacauuccuucuuggaa

SEQ ID NO: 1328135 - RNA, 23 nt, Human
uuccuucuuggaaggaggcuggu

SEQ ID NO: 1328136 - RNA, 24 nt, Human
uuggaacauuccuucuuggaagga

SEQ ID NO: 1328137 - RNA, 21 nt, Human
gagagaagccauuugagguga

SEQ ID NO: 1328138 - RNA, 27 nt, Human
ucaggcacacaaaaaaaguuguaccaa

SEQ ID NO: 1328139 - RNA, 21 nt, Human
ucagggaagagagaagccauu

SEQ ID NO: 1328140 - RNA, 25 nt, Human
aaaauuccgcccacaccccgugccc

SEQ ID NO: 1328141 - RNA, 23 nt, Human
aaacaacguaaaggaacuacuga

SEQ ID NO: 1328142 - RNA, 20 nt, Human
aagcccgcgagccggcgccc

SEQ ID NO: 1328143 - RNA, 24 nt, Human
aagcucaagacggcaccgcagcag

SEQ ID NO: 1328144 - RNA, 18 nt, Human
acagcuucuuccaagugc

SEQ ID NO: 1328145 - RNA, 19 nt, Human
acuucccagcucccagaga

SEQ ID NO: 1328146 - RNA, 19 nt, Human
agccggaccgccaaagccc

SEQ ID NO: 1328147 - RNA, 24 nt, Human
aggaacuacugagucuggacagaa

SEQ ID NO: 1328148 - RNA, 19 nt, Human
aggcuuaccagcgcagcgg

SEQ ID NO: 1328149 - RNA, 23 nt, Human
augaaacaaacagaaaaccgaag

SEQ ID NO: 1328150 - RNA, 20 nt, Human
caaaacacaggcuuaccagc

SEQ ID NO: 1328151 - RNA, 23 nt, Human
caaaacacaggcuuaccagcgca

SEQ ID NO: 1328152 - RNA, 22 nt, Human
caaacagaaaaccgaagcccug

SEQ ID NO: 1328153 - RNA, 20 nt, Human
caaagcccgcgagccggcgc

SEQ ID NO: 1328154 - RNA, 18 nt, Human
caaaggccagccgcgcuc

SEQ ID NO: 1328155 - RNA, 18 nt, Human
caaauaaaugaccgagaa

SEQ ID NO: 1328156 - RNA, 22 nt, Human
caccccgugcccccgggaauuu

SEQ ID NO: 1328157 - RNA, 20 nt, Human
caggauauggggguuaccac

SEQ ID NO: 1328158 - RNA, 19 nt, Human
ccagugcggauaggccaau

SEQ ID NO: 1328159 - RNA, 21 nt, Human
ccccccgccacgcagggcccc

SEQ ID NO: 1328160 - RNA, 22 nt, Human
cccccgccacgcagggccccgg

SEQ ID NO: 1328161 - RNA, 21 nt, Human
ccccuagugaccccuggccuc

SEQ ID NO: 1328162 - RNA, 20 nt, Human
cccuucuccccucuuaauuc

SEQ ID NO: 1328163 - RNA, 21 nt, Human
cccuucuccccucuuaauucu

SEQ ID NO: 1328164 - RNA, 19 nt, Human
ccgcccacaccccgugccc

SEQ ID NO: 1328165 - RNA, 26 nt, Human
ccgcccacaccccgugcccccgggaa

SEQ ID NO: 1328166 - RNA, 21 nt, Human
ccggcccccccgccacgcagg

SEQ ID NO: 1328167 - RNA, 20 nt, Human
ccgucucuccugccccggcc

SEQ ID NO: 1328168 - RNA, 22 nt, Human
ccguguguagagugggcucugc

SEQ ID NO: 1328169 - RNA, 19 nt, Human
ccuccugucacgauuuccu

SEQ ID NO: 1328170 - RNA, 18 nt, Human
ccucgugcccgacgcccc

SEQ ID NO: 1328171 - RNA, 20 nt, Human
cgaaaacaacguaaaggaac

SEQ ID NO: 1328172 - RNA, 19 nt, Human
cgagcccugagcguccccc

SEQ ID NO: 1328173 - RNA, 24 nt, Human
cgccacgcagggccccggucacgc

SEQ ID NO: 1328174 - RNA, 22 nt, Human
cggaggcccacguucuuccugu

SEQ ID NO: 1328175 - RNA, 18 nt, Human
cguccgcagcccggccag

SEQ ID NO: 1328176 - RNA, 21 nt, Human
cucaggaccgcgagcccugag

SEQ ID NO: 1328177 - RNA, 21 nt, Human
cuccggccgaaccgccacuuc

SEQ ID NO: 1328178 - RNA, 23 nt, Human
cuucuaagaggaccgagugccuu

SEQ ID NO: 1328179 - RNA, 21 nt, Human
gaaaacaacguaaaggaaccg

SEQ ID NO: 1328180 - RNA, 21 nt, Human
gacccugccucacuuucccac

SEQ ID NO: 1328181 - RNA, 21 nt, Human
gagaagguguuaucuaagacc

SEQ ID NO: 1328182 - RNA, 24 nt, Human
gagcuucauuugcccaacggaggc

SEQ ID NO: 1328183 - RNA, 22 nt, Human
gcaagacccugccucacuuucc

SEQ ID NO: 1328184 - RNA, 18 nt, Human
gccccgucucuccugccc

SEQ ID NO: 1328185 - RNA, 19 nt, Human
gccgggugaggccgguuug

SEQ ID NO: 1328186 - RNA, 18 nt, Human
gcgaaccaaaacacaggc

SEQ ID NO: 1328187 - RNA, 23 nt, Human
gcucaggaccgcgagcccugagc

SEQ ID NO: 1328188 - RNA, 22 nt, Human
gcugcagugaaugcuuuuaacc

SEQ ID NO: 1328189 - RNA, 18 nt, Human
ggaggagcacggagggca

SEQ ID NO: 1328190 - RNA, 23 nt, Human
ggucacgcgcggggggagccgga

SEQ ID NO: 1328191 - RNA, 24 nt, Human
uacgauggaaccuccggccgaacc

SEQ ID NO: 1328192 - RNA, 18 nt, Human
uagugaaucuccuucugu

SEQ ID NO: 1328193 - RNA, 19 nt, Human
uaucuggccguguguagag

SEQ ID NO: 1328194 - RNA, 25 nt, Human
uauuccauuuccccuucuccccucu

SEQ ID NO: 1328195 - RNA, 18 nt, Human
ucacgcgcggggggagcc

SEQ ID NO: 1328196 - RNA, 22 nt, Human
uccagacauaccaugcagcuuc

SEQ ID NO: 1328197 - RNA, 24 nt, Human
ucccagagacuguagagaucaccu

SEQ ID NO: 1328198 - RNA, 21 nt, Human
uccccgcucuaaugccggagg

SEQ ID NO: 1328199 - RNA, 21 nt, Human
uccgcaaaggccagccgcgcu

SEQ ID NO: 1328200 - RNA, 21 nt, Human
uccgcagaaccccggcgaggc

SEQ ID NO: 1328201 - RNA, 24 nt, Human
uccgcagaaccccggcgaggccga

SEQ ID NO: 1328202 - RNA, 24 nt, Human
ucgauaaagcccagauucacaaaa

SEQ ID NO: 1328203 - RNA, 21 nt, Human
ucggcaaagcucaagacggca

SEQ ID NO: 1328204 - RNA, 22 nt, Human
ucuaagaccucuacagccauuu

SEQ ID NO: 1328205 - RNA, 24 nt, Human
ucuacugucuucccaaggaucuga

SEQ ID NO: 1328206 - RNA, 20 nt, Human
ucugcaagacccugccucac

SEQ ID NO: 1328207 - RNA, 26 nt, Human
ucuguggccuccugucacgauuuccu

SEQ ID NO: 1328208 - RNA, 19 nt, Human
ugaaacaaacagaaaaccg

SEQ ID NO: 1328209 - RNA, 25 nt, Human
ugaaacaaacagaaaaccgaagccc

SEQ ID NO: 1328210 - RNA, 20 nt, Human
ugaccccuggccucgugccc

SEQ ID NO: 1328211 - RNA, 22 nt, Human
ugagcgucccccuagugacccc

SEQ ID NO: 1328212 - RNA, 27 nt, Human
ugcccgacgccccgucucuccugcccc

SEQ ID NO: 1328213 - RNA, 18 nt, Human
ugccggaggagcacggag

SEQ ID NO: 1328214 - RNA, 23 nt, Human
ugcuuuuaaccugucaacuguga

SEQ ID NO: 1328215 - RNA, 23 nt, Human
uggacauggacagggaacggcuc

SEQ ID NO: 1328216 - RNA, 21 nt, Human
uggguggcucugaaaagagcc

SEQ ID NO: 1328217 - RNA, 21 nt, Human
uuaccacugugcuaguggagg

SEQ ID NO: 1328218 - RNA, 26 nt, Human
uuugggcgcgaagcacgggcgugugg

SEQ ID NO: 1328219 - RNA, 21 nt, Human
aaagcuuccacagcauggaag

SEQ ID NO: 1328220 - RNA, 18 nt, Human
aaaguucuccaagucccc

SEQ ID NO: 1328221 - RNA, 22 nt, Human
aaaguucuccaaguccccacuc

SEQ ID NO: 1328222 - RNA, 26 nt, Human
aaaucaaguuaagccuaaagcugccu

SEQ ID NO: 1328223 - RNA, 24 nt, Human
aacaaaaccaaaaaaaccuauuac

SEQ ID NO: 1328224 - RNA, 22 nt, Human
aacaaagcuuccacagcaugga

SEQ ID NO: 1328225 - RNA, 19 nt, Human
aaccaaaaaaaccuauuac

SEQ ID NO: 1328226 - RNA, 20 nt, Human
aagguggcauggacccaaaa

SEQ ID NO: 1328227 - RNA, 26 nt, Human
aagugucagaagccuaaaggugagcc

SEQ ID NO: 1328228 - RNA, 20 nt, Human
acacaaugaacucugauucu

SEQ ID NO: 1328229 - RNA, 21 nt, Human
acagaaaaguucuccaagucc

SEQ ID NO: 1328230 - RNA, 20 nt, Human
acccuaagauuuauugugaa

SEQ ID NO: 1328231 - RNA, 24 nt, Human
acccuaagauuuauugugaaaagu

SEQ ID NO: 1328232 - RNA, 20 nt, Human
agaaggacaugcaugguaag

SEQ ID NO: 1328233 - RNA, 18 nt, Human
agucugacuucaagaaug

SEQ ID NO: 1328234 - RNA, 22 nt, Human
auaauccuuuagcuagacagaa
